United States Patent Application Publication US 2010/0120627 A1 - sequence listing, part 3

SEQ ID NO: 3178 - DNA, 3164 bp, Homo sapiens
gccagaaagcagattttcacttgggaagagacgacccgtagtatgggatgtggtatgataccagcaactggtctattatatcatttaaaccacatggctatctaaagaggtatttggctattataaataaaatagtgatgaacacgtgtacaggtgtttgtacggacataagttgtcatttctcttgagtaaatacctaaaagtgggcttgctggagttttactacccttggatgctgctgttgacatggaaaagattgaggaacaatttgctaatctgcacattgttaaatgttccttaggaaccaaagagcccacttaccttcttggtatagacacatcaaagactgtccaagcaggaaaggaaaacttggttgctgttttatgttctaatggatcaatcagaatatatgataaagaaaggttaaatgtactacgagaatttagtggatatcctggacttcttaatggagtcagatttgcaaattcctgtgacagtgtatattcagcatgtactgatggcactgtgaaatgctgggatgctcgagtagccagagaaaaacctgttcagctcttcaagggttacccttccaatatttttatcagttttgatattaattgtaatgatcatattatttgtgctggtacagaaaaagttgatgatgatgcattgttggtgttttgggatgcaaggatgaattctcagaatttatctacaactaaagactcacttggtgcatattcagagacacatagtgatgatgtcactcaagtacgtttccatcccagcaatcccaacatggtagtctcaggttcatctgatggcctggtaaatgtatttgatattaatattgataatgaggaggatgcactggttacaacctgtaactcaatttcatcagtaagctgtattggttggtctgggaaaggttataaacagatttactgcatgacacatgatgaaggattttattggtgggatcttaatcatctggacactgatgaaccagttacacgtttgaacatccaggatgtcagagaagtagttaacatgaaagaagatgctttggactatttgattggtggcctatatcatgaaaagacagacacattgcatgttattggaggaacaaacaaaggaaggattcatttgatgaactgcagcatgtcaggactgacccatgtgactagccttcagggagggcatgctgctacagtccgttctttctgttggaatgtgcaagatgattctttgttgactggaggagaagatgcacagttgttactttggaaacctggagctatagagaagacctttacaaagaaagagagtatgaaaatagcatcctctgtgcaccaacgagtacgagttcatagtaatgattcttataaaagaaggaaaaagcagtgataatgcatttggcactttgtttggtaggttttatagtttcaaatagtccttcttgtttactacccatggtagacatgtttaaagctttatgtaaaaacaagccagttagcaaacagtcctggaaaaatatggtgagaatggtttaattccggtcttcacatattctaaaaaattttaaagcctctaagtataaaatcagtgagttgaaagtaaaatttcttatttaaagaacccatctgttaatgtagtaaatgttggctttaaagaaatagctccgataaggactttttagaaggaaatacttggtaaaacttaataaaacaggtggttggctgcattttttaagcccagttttttacattttaaattgtctttattgtgtataaaaccagattagactatattcttcatctgaggagcatctatatgtttaatacacctaatgtattatgctggagtatttaaatgtaagtattttaatgagtaaatagaattaaccttttttacaaatgaaatgataggcatctatgtaaagtgagaaaaatatgtttcgtaaatatttgcatctttaatattgttagtaagtagtaaacaggtgttttgctgattgaaaggaagttatcttggtaaattgagactcaaagtgaaatacaaaaatgaaaatatttataataggactcgacttggagaaattgctattcttcctgttgtccaaaccataaatctgaggataacctgggcttttctctttcctcttctcctaaccagtttttcaccaagtcctgtgccatttcacctcctaacgtctgtcagctatccttttgcctttacctcaccactattaccctagagaagactttcattatttctcatctggattaccagctcgatctctaatctgcttcagttcatccttcttgctacttctaggctaaacatcaaaaacagatctggtaggggcggggaaatgagggggaagaaacaaaaacgtgatggtgcctcatgctgcttaaaatcttcagtacattgatgttttgatggcggactacataagcgttaaaaattgtgtttttcagaatctttaaaatataagacagtgctatctagtgaataaaaaaattagtttgaaagatatctggagaaatcgcattcataaaacaattggaagtgaaactattaaaacaatagggctttttaaaattaaaaatatttaaaattcaaaagtaattaatagtgttggaagatgtaggtgagaaaatattcctgaaagtagaactgaaagagacaaagagaaaagatgaaagccacagaagataaatacaggggtcaaaaccagactaacagttttagaaagtgaaaaaagttaaaaaagaaatgggggcagtgggttattagaaataacataaatggctggtatggtttgtctgtgtcctcacccaaatttcatctcgaattgtaatccccataatccccatgtgtctagggagagacctggtgggaggtgattggatcatgggggtggtttcccctacgatgttctcctgatagtgggtgagttctcacaagatctgatggttttataaagggctctgcccctttaactcctcactctttctcctgaagccttgtgaagaaggtgctttgcttcccctttgcgttcccccatgattgtaagtttcttgaggcctccctggccatgctgaactcttcagtcaattaaacactttcctttataaattaaaaaaaaaaaaaaa

SEQ ID NO: 3179 - protein, 387 aa, Homo sapiens
MEKIEEQFANLHIVKCSLGTKEPTYLLGIDTSKTVQAGKENLVAVLCSNGSIRIYDKERLNVLREFSGYPGLLNGVRFANSCDSVYSACTDGTVKCWDARVAREKPVQLFKGYPSNIFISFDINCNDHIICAGTEKVDDDALLVFWDARMNSQNLSTTKDSLGAYSETHSDDVTQVRFHPSNPNMVVSGSSDGLVNVFDINIDNEEDALVTTCNSISSVSCIGWSGKGYKQIYCMTHDEGFYWWDLNHLDTDEPVTRLNIQDVREVVNMKEDALDYLIGGLYHEKTDTLHVIGGTNKGRIHLMNCSMSGLTHVTSLQGGHAATVRSFCWNVQDDSLLTGGEDAQLLLWKPGAIEKTFTKKESMKIASSVHQRVRVHSNDSYKRRKKQ

SEQ ID NO: 3180 - DNA, 3125 bp, Homo sapiens
gggttccacttgaccgctctaagccgccgcgcagcctgcgttttctccggtacaggttgaggctactaaggtatttggctattataaataaaatagtgatgaacacgtgtacaggtgtttgtacggacataagttgtcatttctcttgagtaaatacctaaaagtgggcttgctggagttttactacccttggatgctgctgttgacatggaaaagattgaggaacaatttgctaatctgcacattgttaaatgttccttaggaaccaaagagcccacttaccttcttggtatagacacatcaaagactgtccaagcaggaaaggaaaacttggttgctgttttatgttctaatggatcaatcagaatatatgataaagaaaggttaaatgtactacgagaatttagtggatatcctggacttcttaatggagtcagatttgcaaattcctgtgacagtgtatattcagcatgtactgatggcactgtgaaatgctgggatgctcgagtagccagagaaaaacctgttcagctcttcaagggttacccttccaatatttttatcagttttgatattaattgtaatgatcatattatttgtgctggtacagaaaaagttgatgatgatgcattgttggtgttttgggatgcaaggatgaattctcagaatttatctacaactaaagactcacttggtgcatattcagagacacatagtgatgatgtcactcaagtacgtttccatcccagcaatcccaacatggtagtctcaggttcatctgatggcctggtaaatgtatttgatattaatattgataatgaggaggatgcactggttacaacctgtaactcaatttcatcagtaagctgtattggttggtctgggaaaggttataaacagatttactgcatgacacatgatgaaggattttattggtgggatcttaatcatctggacactgatgaaccagttacacgtttgaacatccaggatgtcagagaagtagttaacatgaaagaagatgctttggactatttgattggtggcctatatcatgaaaagacagacacattgcatgttattggaggaacaaacaaaggaaggattcatttgatgaactgcagcatgtcaggactgacccatgtgactagccttcagggagggcatgctgctacagtccgttctttctgttggaatgtgcaagatgattctttgttgactggaggagaagatgcacagttgttactttggaaacctggagctatagagaagacctttacaaagaaagagagtatgaaaatagcatcctctgtgcaccaacgagtacgagttcatagtaatgattcttataaaagaaggaaaaagcagtgataatgcatttggcactttgtttggtaggttttatagtttcaaatagtccttcttgtttactacccatggtagacatgtttaaagctttatgtaaaaacaagccagttagcaaacagtcctggaaaaatatggtgagaatggtttaattccggtcttcacatattctaaaaaattttaaagcctctaagtataaaatcagtgagttgaaagtaaaatttcttatttaaagaacccatctgttaatgtagtaaatgttggctttaaagaaatagctccgataaggactttttagaaggaaatacttggtaaaacttaataaaacaggtggttggctgcattttttaagcccagttttttacattttaaattgtctttattgtgtataaaaccagattagactatattcttcatctgaggagcatctatatgtttaatacacctaatgtattatgctggagtatttaaatgtaagtattttaatgagtaaatagaattaaccttttttacaaatgaaatgataggcatctatgtaaagtgagaaaaatatgtttcgtaaatatttgcatctttaatattgttagtaagtagtaaacaggtgttttgctgattgaaaggaagttatcttggtaaattgagactcaaagtgaaatacaaaaatgaaaatatttataataggactcgacttggagaaattgctattcttcctgttgtccaaaccataaatctgaggataacctgggcttttctctttcctcttctcctaaccagtttttcaccaagtcctgtgccatttcacctcctaacgtctgtcagctatccttttgcctttacctcaccactattaccctagagaagactttcattatttctcatctggattaccagctcgatctctaatctgcttcagttcatccttcttgctacttctaggctaaacatcaaaaacagatctggtaggggcggggaaatgagggggaagaaacaaaaacgtgatggtgcctcatgctgcttaaaatcttcagtacattgatgttttgatggcggactacataagcgttaaaaattgtgtttttcagaatctttaaaatataagacagtgctatctagtgaataaaaaaattagtttgaaagatatctggagaaatcgcattcataaaacaattggaagtgaaactattaaaacaatagggctttttaaaattaaaaatatttaaaattcaaaagtaattaatagtgttggaagatgtaggtgagaaaatattcctgaaagtagaactgaaagagacaaagagaaaagatgaaagccacagaagataaatacaggggtcaaaaccagactaacagttttagaaagtgaaaaaagttaaaaaagaaatgggggcagtgggttattagaaataacataaatggctggtatggtttgtctgtgtcctcacccaaatttcatctcgaattgtaatccccataatccccatgtgtctagggagagacctggtgggaggtgattggatcatgggggtggtttcccctacgatgttctcctgatagtgggtgagttctcacaagatctgatggttttataaagggctctgcccctttaactcctcactctttctcctgaagccttgtgaagaaggtgctttgcttcccctttgcgttcccccatgattgtaagtttcttgaggcctccctggccatgctgaactcttcagtcaattaaacactttcctttataaattaaaaaaaaaaaaaaa

SEQ ID NO: 3181 - protein, 387 aa, Homo sapiens; identical to SEQ ID NO: 3179

SEQ ID NO: 3182 - DNA, 3323 bp, Homo sapiens
gcgctgtgccggttccgctgccgctggccaggagcgcggggacagttcggggctgcgccggaggccggcccgccttcccgggggttccgttatcatgtcgctgaggcagcgcctggcccagctggttggccgtctgcaggacccgcagaaagtggcccgtttccagcggctgtgcggggtggaagcgccgccgcgccgctcagcagaccggagggaggatgagaaagcggaggcgcctctcgccggagaccctcgactgcgagggcggcagccaggggcgcctggaggcccccagcctcccgggagcgaccgcaatcagtgcccggccaagccggacggcggcggcgcccccaacggcgtgcggaacgggctggcggccgagctgggcccggcctcgccgcggcgcgcgggcgctctgcgccgcaactcgctgacgggcgaggagggccagctggcccgcgtgagcaactggccgctctactgcctgttctgcttcggcacggagctgggcaacgaactcttctacatcctgttcttccccttctggatctggaacctggaccctctggtgggccggaggctcgtggtcatctgggtgctggtcatgtacctgggccagtgcaccaaggacatcatccgctggccgaggcccgcctcgccgcccgtggtcaagttggaggtcttctacaactctgagtacagcatgccctccacccatgccatgtccggcaccgccatccccatttctatggtcctcctcacctatggccgctggcagtaccctcttatatatggactgattcttattccctgctggtgttctctagtttgcctaagtagaatttacatgggaatgcactctattctggatattattgctggattcctatataccattttaatcttagctgtcttctatccatttgtggacctgattgacaacttcaaccaaactcacaaatatgctccattcatcatcatcgggcttcatttagctttggggatcttttctttcactcttgacacctggagcacatcccgaggagacacagccgagatactaggaagtggtgctggaattgcatgtggatctcatgttacttataacatgggtctagtattagatccttctctagatacattacctttagctgggccccccattactgtgactctgtttggaaaagccatattgcggatcctcatagggatggtatttgtactaataatcagagatgtaatgaaaaagatcaccattcctttagcctgcaaaatcttcaatataccgtgtgatgatattcgaaaagcaagacagcacatggaagttgaacttccttatcggtatattacctatggaatggttggtttctccatcacattttttgttccttacatatttttctttattggtatctcttgatggagaagtattgtttatgataagaaaggagggtatcagttactgatacccaaaaatatattccaggtaaagccaggtcagaattaggcttttgcaggaatttaacttaaataattatttaagtaaattcataagagtcagtgcattttatcattgcacatccagatactgttttaggtgagctgagctatttcgttactgagaaaatgataagtatccatttagaatgttcatgtaatgtttggagagttttgtattatggattcaacttatatataatatatataaggtacataatatgcaattatgtatctgatatatattatatataaaataatatacctaagtgtttttttaaactatgggagtgtattataaaatcaataataatatgcaaacagttgtgcctgtgtatttgaactacatacaggtatgttgttattaacagatatatttaacatttatttactatgggagccatttcctaattgaattgcgtaattactagaccagaatgcatatgctactatacattgatttactgcctgtttttacactgccattacctttcatgttatccatgatgttgaacatgggaggcatttttaatggaccaaatttttagaaaaattagtttttggatttttttttaagttctgtatactgttttgaatgaactttatttgcagctattctggatgtcagtttaataattcaggtactgaattttattgcttgctaattgtgcctttccgttgctaaattaagaaatgctatgtgtactgtgatgtaaaaataagacattaactttatcttaagttacatataatcaagcaaatattttaaaaaatgtatgtcagggtgacaggcataaaagtaaattacccttaactctttagcctttatttagaaagaaatgtggaatgggctaaactttctcaccaatttattagaaagctaaatggataaatacttccctttttgtagatatttttctgtgcattgtaagttataggagcaggacatattttttgtacattgtcttgattgtttatactgcaggtaggtatttccagtgaatggaaacgttgaaatttatagatgggacaatgcacatacttcatatgtaaacaaagcatttttctaaataatttggaaaggattggatttagcaccgttaacttttaatacccatttattggctatttaaggtaaattataaaacctaaaattagtatcagtattttagatcctattattttttcaactttctattattttcacagtggaaaatttgcgtatagtattaaactattcttttttctgtctacctttatattttgaagtgtggttgtacttacgttaatagtaagtgtatttgtagaaagtttttcataaagaagagattaactttccatataaataaataccaggtatgaaattactgattttagtgcaatatctgtatgattatccagaactatcacttcagatgtttctattttgggcaccataactatttgagctcatatttttataattctgattgagaatttaggggcatggtaatttttaccaaaactgaagctggtaattttaagtaaagcaactaaatttaccctttacttattagttaaaaggaaaccaaggcatgtaggaaaatattggtacgttggaaaatgtgaaaagagctttactttcaaaatgtatgtttaatgaattgaattttagggaccgtttcccataatttgggcctatgctatcctgttgatttttatgtctagcttaaaaggtatttgaaaatgttccatttgtgttttattattttctgtcctatgacagttctatgctaaatgtattttaaaataaaagccaaattgaagattaaaaaaaaaaaaaaaaa

SEQ ID NO: 3183 - protein, 441 aa, Homo sapiens
MSLRQRLAQLVGRLQDPQKVARFQRLCGVEAPPRRSADRREDEKAEAPLAGDPRLRGRQPGAPGGPQPPGSDRNQCPAKPDGGGAPNGVRNGLAAELGPASPRRAGALRRNSLTGEEGQLARVSNWPLYCLFCFGTELGNELFYILFFPFWIWNLDPLVGRRLVVIWVLVMYLGQCTKDIIRWPRPASPPVVKLEVFYNSEYSMPSTHAMSGTAIPISMVLLTYGRWQYPLIYGLILIPCWCSLVCLSRIYMGMHSILDIIAGFLYTILILAVFYPFVDLIDNFNQTHKYAPFIIIGLHLALGIFSFTLDTWSTSRGDTAEILGSGAGIACGSHVTYNMGLVLDPSLDTLPLAGPPITVTLFGKAILRILIGMVFVLIIRDVMKKITIPLACKIFNIPCDDIRKARQHMEVELPYRYITYGMVGFSITFFVPYIFFFIGIS

SEQ ID NO: 3184 - DNA, 2193 bp, Homo sapiens
cgggagcccatggagcactgtcctcagagatgcgcaggttaggctcactgtctaggccaggcccaccttagtcactgtggactggcaatggaagctcttcctggacacacctgccctagccctcaccctggggtggaagagaaatgagcttggcttgcaactcagaccattccacggaggcatcctcccttccctgggctggtgaataaaagtttcctgaggtcaaggacttccttttccctgccaaaatggtgtccagaactttgaggccagaggtgatccagtgatttgggagctgcaggtcacacaggctgctcagagggctgctgaacaggatgtcctcggacgacaggcacctgggctccagctgcggctccttcatcaagactgagccgtccagcccgtcctcgggcattgatgccctcagccaccacagccccagtggctcgtccgacgccagcggcggctttggcctggccctgggcacccacgccaacggtctggactcgccacccatgtttgcaggcgccgggctgggaggcaccccatgccgcaagagctacgaggactgtgccagcggcatcatggaggactcggccatcaagtgcgagtacatgctcaacgccatccccaagcgcctgtgcctcgtgtgcggggacattgcctctggctaccactacggcgtggcctcctgcgaggcttgcaaggccttcttcaagaggactatccaagggaacattgagtacagctgcccggccaccaacgagtgcgagatcaccaaacggaggcgcaagtcctgccaggcctgccgcttcatgaaatgcctcaaagtggggatgctgaaggaaggtgtgcgccttgatcgagtgcgtggaggccgtcagaaatacaagcgacggctggactcagagagcagcccatacctgagcttacaaatttctccacctgctaaaaagccattgaccaagattgtctcatacctactggtggctgagccggacaagctctatgccatgcctccccctggtatgcctgagggggacatcaaggccctgaccactctctgtgacctggcagaccgagagcttgtggtcatcattggctgggccaagcacatcccaggcttctcaagcctctccctgggggaccagatgagcctgctgcagagtgcctggatggaaatcctcatcctgggcatcgtgtaccgctcgctgccctatgacgacaagctggtgtacgctgaggactacatcatggatgaggagcactcccgcctcgcggggctgctggagctctaccgggccatcctgcagctggtacgcaggtacaagaagctcaaggtggagaaggaggagtttgtgacgctcaaggccctggccctcgccaactccgattccatgtacatcgaggatctagaggctgtccagaagctgcaggacctgctgcacgaggcactgcaggactacgagctgagccagcgccatgaggagccctggaggacgggcaagctgctgctgacactgccgctgctgcggcagacggccgccaaggccgtgcagcacttctatagcgtcaaactgcagggcaaagtgcccatgcacaaactcttcctggagatgctggaggccaaggcctgggccagggctgactcccttcaggagtggaggccactggagcaagtgccctctcccctccaccgagccaccaagaggcagcatgtgcatttcctaactcccttgccccctcccccatctgtggcctgggtgggcactgctcaggctggataccacctggaggttttccttccgcagagggcaggttggccaagagcagcttagaggatctcccaaggatgaaagaatgtcaagccatgatggaaaatgccccttccaatcagctgccttcacaagcagggatcagagcaactccccggggatccccaatccacgcccttctagtccaacccccctcaatgagagaggcaggcagatctcacccagcactaggacaccaggaggccagggaaagcatctctggctcaccatgtaacatctggcttggagcaagtgggtgttctgcacaccaggcagctgcacctcactggatctagtgttgctgcgagtgacctcacttcagagcccctctagcagagtggggcggaagtcctgatggttggtgtccatgaggtggaag

SEQ ID NO: 3185 - protein, 500 aa, Homo sapiens
MSSDDRHLGSSCGSFIKTEPSSPSSGIDALSHHSPSGSSDASGGFGLALGTHANGLDSPPMFAGAGLGGTPCRKSYEDCASGIMEDSAIKCEYMLNAIPKRLCLVCGDIASGYHYGVASCEACKAFFKRTIQGNIEYSCPATNECEITKRRRKSCQACRFMKCLKVGMLKEGVRLDRVRGGRQKYKRRLDSESSPYLSLQISPPAKKPLTKIVSYLLVAEPDKLYAMPPPGMPEGDIKALTTLCDLADRELVVIIGWAKHIPGFSSLSLGDQMSLLQSAWMEILILGIVYRSLPYDDKLVYAEDYIMDEEHSRLAGLLELYRAILQLVRRYKKLKVEKEEFVTLKALALANSDSMYIEDLEAVQKLQDLLHEALQDYELSQRHEEPWRTGKLLLTLPLLRQTAAKAVQHFYSVKLQGKVPMHKLFLEMLEAKAWARADSLQEWRPLEQVPSPLHRATKRQHVHFLTPLPPPPSVAWVGTAQAGYHLEVFLPQRAGWPRAA

SEQ ID NO: 3186 - DNA, 1751 bp, Homo sapiens
cgcagccccggttcccgcccgtgcctctccctccacacctccctgcaggctgagggagccggctccggtctcggccatcccaggaaggggctcccacagtgcagcggcgggctgaagggctcctcaagcgtggccagagtgggcgccaaggccgaggaggcgccaagagggagcgagggctgtgaggactgacagcacgctgtcacctcgtctctacttaggtgaatgatgcctttggcctgcttatgtcttccatagccacaatgaatacagttgcagaaactctcactctttatggaaaatagaagggaatatgtacaagaaacaattactgtatgcagataaggcagatggtgtctttgacatttcatcaaggcagcagcatctgaaagtttttcaagaaactgccaaactgttctccagagtatttgtaccattttacgtttccaccagcaatatacaagtggatctcactctgtcacccaagctggagtgcactggcatgatattggctcactgcaacctctgccttctgggttcaggtgattctcctacctcagcctccccagtagctggaactacaggcatgcaccaatttttgtatttttagtagagacggggtttttccatgatgcccaggctgttggcttttactttgcctttccataatcatcttgtatgtgtgagatacatacatatatatgtgtatatatgtatacataattgtatatgtctatatatataaccttattatatataattttataatataatcttcatctaattttgatggaaattacattaaacttgtgtaacaattcaggaagaactgatatatttacacctcttgagaccaaatctggaacatggtgtatctttccatttatttaagccttctttgatttcctcaacatttcttcttcaataaaaacattgtagtttttgttatataaattctgtatctgttttgttacatttgaacctaaacatttaattttttgagtaattctgaaatgatattgcatttctaattgtttctcatatattctttgctaatatgtaaaaaaacaatttttttatgtttatcttgtatcctgtgaccttattgaagtcactttttagttctgagagtccctttgtagatttcttgagattttctacagagacaatcataccatttgcaaatagaaacagttctattcctacctttctaatacataagcattcatctccttcatctatcatacttgccaaaacttccagcagatgtctttactttgtttcttctgtttacccaagacagtctttctgtctttttctttctttctttctttcttttttagcttttcttgttattgtttctatatgctctttatcaagttaagaaagtcctcctctgtctctatgtttcttggaatatatataatgaatggatgttaaattttgtcaaatactttttcttgactgatattatcatgtgatttttctttaacttgttaatatgttagattacattgatctttgaatattgtaccagccttgcattcttgtaataaactttatttggttacagtgtataatcaaatatagtgagttatttgaattgaatttgaattgttatagttgaattgtttttgttaatatttcattaaggattttgtttctatgtataatagggatatttttctgtagattttgtttcgttttggtttttaagtatcagagtaatgccagcttcttaaataaattgt

SEQ ID NO: 3187 - protein, 98 aa, Homo sapiens
MYKKQLLYADKADGVFDISSRQQHLKVFQETAKLFSRVFVPFYVSTSNIQVDLTLSPKLECTGMILAHCNLCLLGSGDSPTSASPVAGTTGMHQFLYF

SEQ ID NO: 3188 - DNA, 4485 bp, Homo sapiens
ctcaaagttcgcaggaggcgagagatgctgccgcagcaagtcggcttcgtgtgcgcggtgctggccctggtgtgctgtgcgtccggcctcttcggcagcttggggcacaaaacagcttctgctagcaaacgtgtcctgccagacacatggagaaatagaaagttgatggccccagtgaatgggacacagacagccaagaactgcacagatcctgcgattcacgagttccccacagatctgttctccaataaggagcgacagcacggagccgtcctgctgcacatccttggtgctctgtatatgttctatgccttggccatagtgtgcgatgacttctttgttccgtctctagagaagatctgtgagagactccatctgagcgaagatgtggctggagccaccttcatggctgcaggaagctcaacgccagagctgtttgcgtctgttattggggtgttcatcacccatggggacgtcggggtgggcaccatcgtgggctctgctgtgttcaacatcctgtgcataattggagtgtgcggactgtttgctggccaggtggtccgtctgacgtggtgggccgtgtgccgagactccgtgtactacaccatctctgtcatcgtgctcatcgtgttcatatatgatgaacaaattgtgtggtgggaaggcctggtgctcatcatcttgtatgtgttttatattctgatcatgaagtacaatgtgaagatgcaagcctttttcacagtcaaacaaaagagcattgcaaacggtaacccggtcaacagtgagctggaggctggtaatgatttctatgacggtagctatgatgacccttccgtgccattgctggggcaagtgaaggagaagccacagtatggcaagaaccccgtggtgatggtggacgagattatgagctccagccctcccaagttcaccttccctgaagcaggcttacgaatcatgatcaccaataagtttggacccaggacccgactacggatggccagcaggatcatcattaatgagcggcagagactgatcaactcggccaatggtgtgagcagtaagccgcttcaaaacgggaggcacgagaacattgagaacgggaatgttcctgtggaaaaccccgaagaccctcagcagaatcaggagcagcagccgccgccacagccaccaccgccagagccagagccggtggaggctgacttcctgtcccccttctccgtgccggaggccagaggggacaaggtcaagtgggtgttcacctggcccctcatcttcctcctgtgcgtcaccattcccaactgcagcaagccccgctgggagaagttcttcatggtcaccttcatcaccgccacgctgtggatcgctgtgttctcctacatcatggtgtggctggtgactattatcggatacacacttgggatcccggatgtcatcatgggcattactttcctggcagcagggacaagtgttccagactgcatggccagcctaattgtggcgagacaaggccttggggacatggcagtctccaacaccataggaagcaacgtgtttgacatcctggtaggacttggtgtaccgtggggcctgcagaccatggttgttaattatggatcaacagtgaagatcaacagccgggggctggtctattccgtggtcctgttgctgggctctgtcgctctcaccgtcctcggcatccacctaaacaagtggcgactggaccggaagctgggtgtctacgtgctggttctctacgccatcttcttgtgcttctccataatgatagagtttaacgtctttaccttcgtcaacttgccgatgtgccgggaagacgattagcgctgagtcgcggcccctgggagctgatctggacaccctgtgacactggcgttctcctctcccctccttcccccaccacaggtctctcctgcataggcagccactgtccgttctttcacacactggaaggaagagccatcgtggtctttgtctggccacaggccaggctgctgggcatcctcctcctccttggagttccgcccctgcaaggctggatttgggggccattatctgagcagcttcaaagacccctgagctgccaaccacggagatgtgccaagcatctcatctctcctgcacactttagtcagaaggacttctgcatgcagtttgtctttctgttctgcaggcagcttcagaattgaggtcatttgtgagcacaagatctcatagggcaggtgcaaaataggaatgttgttctcaagtgtcacctccagcccagaggtggttccttaggcagcatgtgctcctgggagcctctgacttttgctggaagcagccacagtttggaaggggcaagacctcaacctgttggggtttagggcccatgatggcagacattctaccccttttcctggaaaaactggaagaatgaaaataatttttttctgtggaagagagaaaatgagtgaatattcttctcacttttattgatgcattcagagaataagcaatgaaatattaaaaaatgaaacatcatataggtcatcatacttgaaaattatcattccatatgaaaggatcatgatacacaccaaaaaagtaatgatcgtaaagacacaaatcctctgtatgccatcttgcattggcactgaggtgtttggtttggaatagggaaaaaggtaagagactaacgtggaaaggtgctaactcagagactggagattatagtttacagctgtactttccagatcttctatgtgacacaatgcactgtccttgtgggtttgtcatttattggttaatgctctagtttcaaaaccaccctgttgaaagttccagttatttatatgcccaacaaatttcatagcctgctgaactgaactgagtgtgtcagaagtgctggttaatgacgagaagagattgcctgaaaaacaacaaactgctttctggttagctgaaggcaagtgtgaaaatcagaatttagaatatttagagctaagcttctggaaccacgtagtttctacacgtggcaggccaagaatgggaggctgactcaaaactagatagaaaaatataaaataatcttcgaccacttgatagctctcaaatatatatttaaaagatttatgaatacaaaccatttatggtttatgatttctaaaaagaaagcacaattaattttatagagaggttttttatttttttaatatttctattgcaaaagtctatccgatttgatgcactttgaatattgagatattttgcacggatgaatgtatgggaactacccatgatgatgtaagaggaaagaacatttttttgtgattcaccagacatcactttaaacttggtgatgagtttaaatccagtagctaatcccttcctgagactcaaagatcgtgacgctggttggaatttctgactgtgccctttagggcctcctgagtttcaaaaggaggaagtgttcgtgcttgtgtccctgaagttccctgttgcatgagcctgcgacaggacctcacccccaccaccaggcttctatttgggattcacatcagtattagtatcgtagctacaccaagttcaggcttctctttttgtttttttacctagaaattgggctcagtggtcttcaacttgaggacgagggtgattttcctaagaaatcagcaaagagggaaggcagggcccctgtagattcaccagtataaacttcagctgcagggattccagagccctcgggaccactctgtcaccttaatagccaagttctcctggttcctccgatcttacaggctcatccaggttccaaagtgcttctgtctctgttttgattctccaaactgctctgtgatgtatgtagggattattctccccacttaacagaaagtagtgtcttggagaggtcaagggtctctagttcaatggccagtcatagcagaagggaggccaagcaccagtccatcacccctcccaggccagcctctgtaagttggccacacttggggagtgagtgtgggtatgactttaccctcctggttggttcttactgtttgagtcaaaacctcatcaatatatcattgactcctgggttcctcaggtcatttcctaatatctgtccctatccaatgcctctattttatcttgaaaaaaggaccaaaaattatttttagctatggcaaggcacaggccacatggcccctgatggcgtccctgctggttttcaattctctgaagccttgtgtagctttcagagcacacgtatcctaattaccctcctcttcctcagcagaacccatttgagattctaaatgaatactcttagtctctaaagttgcagttagaaactaaaataatgttttttaatatgtaatatgctcctcttggctaattttcttttgactttaatgtgccaatgtaacttcctttaaaggatctatgcatttattaaatctggaaaactaaaaaaaaaaaaaaaaaaaa

SEQ ID NO: 3189 - protein, 605 aa, Homo sapiens
MLPQQVGFVCAVLALVCCASGLFGSLGHKTASASKRVLPDTWRNRKLMAPVNGTQTAKNCTDPAIHEFPTDLFSNKERQHGAVLLHILGALYMFYALAIVCDDFFVPSLEKICERLHLSEDVAGATFMAAGSSTPELFASVIGVFITHGDVGVGTIVGSAVFNILCIIGVCGLFAGQVVRLTWWAVCRDSVYYTISVIVLIVFIYDEQIVWWEGLVLIILYVFYILIMKYNVKMQAFFTVKQKSIANGNPVNSELEAGNDFYDGSYDDPSVPLLGQVKEKPQYGKNPVVMVDEIMSSSPPKFTFPEAGLRIMITNKFGPRTRLRMASRIIINERQRLINSANGVSSKPLQNGRHENIENGNVPVENPEDPQQNQEQQPPPQPPPPEPEPVEADFLSPFSVPEARGDKVKWVFTWPLIFLLCVTIPNCSKPRWEKFFMVTFITATLWIAVFSYIMVWLVTIIGYTLGIPDVIMGITFLAAGTSVPDCMASLIVARQGLGDMAVSNTIGSNVFDILVGLGVPWGLQTMVVNYGSTVKINSRGLVYSVVLLLGSVALTVLGIHLNKWRLDRKLGVYVLVLYAIFLCFSIMIEFNVFTFVNLPMCREDD

SEQ ID NO: 3190 - DNA, 4428 bp, Homo sapiens
ctcaaagttcgcaggaggcgagagatgctgccgcagcaagtcggcttcgtgtgcgcggtgctggccctggtgtgctgtgcgtccggcctcttcggcagcttggggcacaaaacagcttctgctagcaaacgtgtcctgccagacacatggagaaatagaaagttgatggccccagtgaatgggacacagacagccaagaactgcacagatcctgcgattcacgagttccccacagatctgttctccaataaggagcgacagcacggagccgtcctgctgcacatccttggtgctctgtatatgttctatgccttggccatagtgtgcgatgacttctttgttccgtctctagagaagatctgtgagagactccatctgagcgaagatgtggctggagccaccttcatggctgcaggaagctcaacgccagagctgtttgcgtctgttattggggtgttcatcacccatggggacgtcggggtgggcaccatcgtgggctctgctgtgttcaacatcctgtgcataattggagtgtgcggactgtttgctggccaggtggtccgtctgacgtggtgggccgtgtgccgagactccgtgtactacaccatctctgtcatcgtgctcatcgtgttcatatatgatgaacaaattgtgtggtgggaaggcctggtgctcatcatcttgtatgtgttttatattctgatcatgaagtacaatgtgaagatgcaagcctttttcacagtcaaacaaaagagcattgcaaacggtaacccggtcaacagtgagctggaggctgtgaaggagaagccacagtatggcaagaaccccgtggtgatggtggacgagattatgagctccagccctcccaagttcaccttccctgaagcaggcttacgaatcatgatcaccaataagtttggacccaggacccgactacggatggccagcaggatcatcattaatgagcggcagagactgatcaactcggccaatggtgtgagcagtaagccgcttcaaaacgggaggcacgagaacattgagaacgggaatgttcctgtggaaaaccccgaagaccctcagcagaatcaggagcagcagccgccgccacagccaccaccgccagagccagagccggtggaggctgacttcctgtcccccttctccgtgccggaggccagaggggacaaggtcaagtgggtgttcacctggcccctcatcttcctcctgtgcgtcaccattcccaactgcagcaagccccgctgggagaagttcttcatggtcaccttcatcaccgccacgctgtggatcgctgtgttctcctacatcatggtgtggctggtgactattatcggatacacacttgggatcccggatgtcatcatgggcattactttcctggcagcagggacaagtgttccagactgcatggccagcctaattgtggcgagacaaggccttggggacatggcagtctccaacaccataggaagcaacgtgtttgacatcctggtaggacttggtgtaccgtggggcctgcagaccatggttgttaattatggatcaacagtgaagatcaacagccgggggctggtctattccgtggtcctgttgctgggctctgtcgctctcaccgtcctcggcatccacctaaacaagtggcgactggaccggaagctgggtgtctacgtgctggttctctacgccatcttcttgtgcttctccataatgatagagtttaacgtctttaccttcgtcaacttgccgatgtgccgggaagacgattagcgctgagtcgcggcccctgggagctgatctggacaccctgtgacactggcgttctcctctcccctccttcccccaccacaggtctctcctgcataggcagccactgtccgttctttcacacactggaaggaagagccatcgtggtctttgtctggccacaggccaggctgctgggcatcctcctcctccttggagttccgcccctgcaaggctggatttgggggccattatctgagcagcttcaaagacccctgagctgccaaccacggagatgtgccaagcatctcatctctcctgcacactttagtcagaaggacttctgcatgcagtttgtctttctgttctgcaggcagcttcagaattgaggtcatttgtgagcacaagatctcatagggcaggtgcaaaataggaatgttgttctcaagtgtcacctccagcccagaggtggttccttaggcagcatgtgctcctgggagcctctgacttttgctggaagcagccacagtttggaaggggcaagacctcaacctgttggggtttagggcccatgatggcagacattctaccccttttcctggaaaaactggaagaatgaaaataatttttttctgtggaagagagaaaatgagtgaatattcttctcacttttattgatgcattcagagaataagcaatgaaatattaaaaaatgaaacatcatataggtcatcatacttgaaaattatcattccatatgaaaggatcatgatacacaccaaaaaagtaatgatcgtaaagacacaaatcctctgtatgccatcttgcattggcactgaggtgtttggtttggaatagggaaaaaggtaagagactaacgtggaaaggtgctaactcagagactggagattatagtttacagctgtactttccagatcttctatgtgacacaatgcactgtccttgtgggtttgtcatttattggttaatgctctagtttcaaaaccaccctgttgaaagttccagttatttatatgcccaacaaatttcatagcctgctgaactgaactgagtgtgtcagaagtgctggttaatgacgagaagagattgcctgaaaaacaacaaactgctttctggttagctgaaggcaagtgtgaaaatcagaatttagaatatttagagctaagcttctggaaccacgtagtttctacacgtggcaggccaagaatgggaggctgactcaaaactagatagaaaaatataaaataatcttcgaccacttgatagctctcaaatatatatttaaaagatttatgaatacaaaccatttatggtttatgatttctaaaaagaaagcacaattaattttatagagaggttttttatttttttaatatttctattgcaaaagtctatccgatttgatgcactttgaatattgagatattttgcacggatgaatgtatgggaactacccatgatgatgtaagaggaaagaacatttttttgtgattcaccagacatcactttaaacttggtgatgagtttaaatccagtagctaatcccttcctgagactcaaagatcgtgacgctggttggaatttctgactgtgccctttagggcctcctgagtttcaaaaggaggaagtgttcgtgcttgtgtccctgaagttccctgttgcatgagcctgcgacaggacctcacccccaccaccaggcttctatttgggattcacatcagtattagtatcgtagctacaccaagttcaggcttctctttttgtttttttacctagaaattgggctcagtggtcttcaacttgaggacgagggtgattttcctaagaaatcagcaaagagggaaggcagggcccctgtagattcaccagtataaacttcagctgcagggattccagagccctcgggaccactctgtcaccttaatagccaagttctcctggttcctccgatcttacaggctcatccaggttccaaagtgcttctgtctctgttttgattctccaaactgctctgtgatgtatgtagggattattctccccacttaacagaaagtagtgtcttggagaggtcaagggtctctagttcaatggccagtcatagcagaagggaggccaagcaccagtccatcacccctcccaggccagcctctgtaagttggccacacttggggagtgagtgtgggtatgactttaccctcctggttggttcttactgtttgagtcaaaacctcatcaatatatcattgactcctgggttcctcaggtcatttcctaatatctgtccctatccaatgcctctattttatcttgaaaaaaggaccaaaaattatttttagctatggcaaggcacaggccacatggcccctgatggcgtccctgctggttttcaattctctgaagccttgtgtagctttcagagcacacgtatcctaattaccctcctcttcctcagcagaacccatttgagattctaaatgaatactcttagtctctaaagttgcagttagaaactaaaataatgttttttaatatgtaatatgctcctcttggctaattttcttttgactttaatgtgccaatgtaacttcctttaaaggatctatgcatttattaaatctggaaaactaaaaaaaaaaaaaaaaaaaa

SEQ ID NO: 3191 - protein, 586 aa, Homo sapiens
MLPQQVGFVCAVLALVCCASGLFGSLGHKTASASKRVLPDTWRNRKLMAPVNGTQTAKNCTDPAIHEFPTDLFSNKERQHGAVLLHILGALYMFYALAIVCDDFFVPSLEKICERLHLSEDVAGATFMAAGSSTPELFASVIGVFITHGDVGVGTIVGSAVFNILCIIGVCGLFAGQVVRLTWWAVCRDSVYYTISVIVLIVFIYDEQIVWWEGLVLIILYVFYILIMKYNVKMQAFFTVKQKSIANGNPVNSELEAVKEKPQYGKNPVVMVDEIMSSSPPKFTFPEAGLRIMITNKFGPRTRLRMASRIIINERQRLINSANGVSSKPLQNGRHENIENGNVPVENPEDPQQNQEQQPPPQPPPPEPEPVEADFLSPFSVPEARGDKVKWVFTWPLIFLLCVTIPNCSKPRWEKFFMVTFITATLWIAVFSYIMVWLVTIIGYTLGIPDVIMGITFLAAGTSVPDCMASLIVARQGLGDMAVSNTIGSNVFDILVGLGVPWGLQTMVVNYGSTVKINSRGLVYSVVLLLGSVALTVLGIHLNKWRLDRKLGVYVLVLYAIFLCFSIMIEFNVFTFVNLPMCREDD

SEQ ID NO: 3192 - DNA, 4437 bp, Homo sapiens
gggcccgcagatctctctggttcccctctctgccccgtctccagcttttttgcagggcacaaaacagcttctgctagcaaacgtgtcctgccagacacatggagaaatagaaagttgatggccccagtgaatgggacacagacagccaagaactgcacagatcctgcgattcacgagttccccacagatctgttctccaataaggagcgacagcacggagccgtcctgctgcacatccttggtgctctgtatatgttctatgccttggccatagtgtgcgatgacttctttgttccgtctctagagaagatctgtgagagactccatctgagcgaagatgtggctggagccaccttcatggctgcaggaagctcaacgccagagctgtttgcgtctgttattggggtgttcatcacccatggggacgtcggggtgggcaccatcgtgggctctgctgtgttcaacatcctgtgcataattggagtgtgcggactgtttgctggccaggtggtccgtctgacgtggtgggccgtgtgccgagactccgtgtactacaccatctctgtcatcgtgctcatcgtgttcatatatgatgaacaaattgtgtggtgggaaggcctggtgctcatcatcttgtatgtgttttatattctgatcatgaagtacaatgtgaagatgcaagcctttttcacagtcaaacaaaagagcattgcaaacggtaacccggtcaacagtgagctggaggctggtaatgatttctatgacggtagctatgatgacccttccgtgccattgctggggcaagtgaaggagaagccacagtatggcaagaaccccgtggtgatggtggacgagattatgagctccagccctcccaagttcaccttccctgaagcaggcttacgaatcatgatcaccaataagtttggacccaggacccgactacggatggccagcaggatcatcattaatgagcggcagagactgatcaactcggccaatggtgtgagcagtaagccgcttcaaaacgggaggcacgagaacattgagaacgggaatgttcctgtggaaaaccccgaagaccctcagcagaatcaggagcagcagccgccgccacagccaccaccgccagagccagagccggtggaggctgacttcctgtcccccttctccgtgccggaggccagaggggacaaggtcaagtgggtgttcacctggcccctcatcttcctcctgtgcgtcaccattcccaactgcagcaagccccgctgggagaagttcttcatggtcaccttcatcaccgccacgctgtggatcgctgtgttctcctacatcatggtgtggctggtgactattatcggatacacacttgggatcccggatgtcatcatgggcattactttcctggcagcagggacaagtgttccagactgcatggccagcctaattgtggcgagacaaggccttggggacatggcagtctccaacaccataggaagcaacgtgtttgacatcctggtaggacttggtgtaccgtggggcctgcagaccatggttgttaattatggatcaacagtgaagatcaacagccgggggctggtctattccgtggtcctgttgctgggctctgtcgctctcaccgtcctcggcatccacctaaacaagtggcgactggaccggaagctgggtgtctacgtgctggttctctacgccatcttcttgtgcttctccataatgatagagtttaacgtctttaccttcgtcaacttgccgatgtgccgggaagacgattagcgctgagtcgcggcccctgggagctgatctggacaccctgtgacactggcgttctcctctcccctccttcccccaccacaggtctctcctgcataggcagccactgtccgttctttcacacactggaaggaagagccatcgtggtctttgtctggccacaggccaggctgctgggcatcctcctcctccttggagttccgcccctgcaaggctggatttgggggccattatctgagcagcttcaaagacccctgagctgccaaccacggagatgtgccaagcatctcatctctcctgcacactttagtcagaaggacttctgcatgcagtttgtctttctgttctgcaggcagcttcagaattgaggtcatttgtgagcacaagatctcatagggcaggtgcaaaataggaatgttgttctcaagtgtcacctccagcccagaggtggttccttaggcagcatgtgctcctgggagcctctgacttttgctggaagcagccacagtttggaaggggcaagacctcaacctgttggggtttagggcccatgatggcagacattctaccccttttcctggaaaaactggaagaatgaaaataatttttttctgtggaagagagaaaatgagtgaatattcttctcacttttattgatgcattcagagaataagcaatgaaatattaaaaaatgaaacatcatataggtcatcatacttgaaaattatcattccatatgaaaggatcatgatacacaccaaaaaagtaatgatcgtaaagacacaaatcctctgtatgccatcttgcattggcactgaggtgtttggtttggaatagggaaaaaggtaagagactaacgtggaaaggtgctaactcagagactggagattatagtttacagctgtactttccagatcttctatgtgacacaatgcactgtccttgtgggtttgtcatttattggttaatgctctagtttcaaaaccaccctgttgaaagttccagttatttatatgcccaacaaatttcatagcctgctgaactgaactgagtgtgtcagaagtgctggttaatgacgagaagagattgcctgaaaaacaacaaactgctttctggttagctgaaggcaagtgtgaaaatcagaatttagaatatttagagctaagcttctggaaccacgtagtttctacacgtggcaggccaagaatgggaggctgactcaaaactagatagaaaaatataaaataatcttcgaccacttgatagctctcaaatatatatttaaaagatttatgaatacaaaccatttatggtttatgatttctaaaaagaaagcacaattaattttatagagaggttttttatttttttaatatttctattgcaaaagtctatccgatttgatgcactttgaatattgagatattttgcacggatgaatgtatgggaactacccatgatgatgtaagaggaaagaacatttttttgtgattcaccagacatcactttaaacttggtgatgagtttaaatccagtagctaatcccttcctgagactcaaagatcgtgacgctggttggaatttctgactgtgccctttagggcctcctgagtttcaaaaggaggaagtgttcgtgcttgtgtccctgaagttccctgttgcatgagcctgcgacaggacctcacccccaccaccaggcttctatttgggattcacatcagtattagtatcgtagctacaccaagttcaggcttctctttttgtttttttacctagaaattgggctcagtggtcttcaacttgaggacgagggtgattttcctaagaaatcagcaaagagggaaggcagggcccctgtagattcaccagtataaacttcagctgcagggattccagagccctcgggaccactctgtcaccttaatagccaagttctcctggttcctccgatcttacaggctcatccaggttccaaagtgcttctgtctctgttttgattctccaaactgctctgtgatgtatgtagggattattctccccacttaacagaaagtagtgtcttggagaggtcaagggtctctagttcaatggccagtcatagcagaagggaggccaagcaccagtccatcacccctcccaggccagcctctgtaagttggccacacttggggagtgagtgtgggtatgactttaccctcctggttggttcttactgtttgagtcaaaacctcatcaatatatcattgactcctgggttcctcaggtcatttcctaatatctgtccctatccaatgcctctattttatcttgaaaaaaggaccaaaaattatttttagctatggcaaggcacaggccacatggcccctgatggcgtccctgctggttttcaattctctgaagccttgtgtagctttcagagcacacgtatcctaattaccctcctcttcctcagcagaacccatttgagattctaaatgaatactcttagtctctaaagttgcagttagaaactaaaataatgttttttaatatgtaatatgctcctcttggctaattttcttttgactttaatgtgccaatgtaacttcctttaaaggatctatgcatttattaaatctggaaaactaaaaaaaaaaaaaaaaaaaa

SEQ ID NO: 3193 - protein, 558 aa, Homo sapiens
MAPVNGTQTAKNCTDPAIHEFPTDLFSNKERQHGAVLLHILGALYMFYALAIVCDDFFVPSLEKICERLHLSEDVAGATFMAAGSSTPELFASVIGVFITHGDVGVGTIVGSAVFNILCIIGVCGLFAGQVVRLTWWAVCRDSVYYTISVIVLIVFIYDEQIVWWEGLVLIILYVFYILIMKYNVKMQAFFTVKQKSIANGNPVNSELEAGNDFYDGSYDDPSVPLLGQVKEKPQYGKNPVVMVDEIMSSSPPKFTFPEAGLRIMITNKFGPRTRLRMASRIIINERQRLINSANGVSSKPLQNGRHENIENGNVPVENPEDPQQNQEQQPPPQPPPPEPEPVEADFLSPFSVPEARGDKVKWVFTWPLIFLLCVTIPNCSKPRWEKFFMVTFITATLWIAVFSYIMVWLVTIIGYTLGIPDVIMGITFLAAGTSVPDCMASLIVARQGLGDMAVSNTIGSNVFDILVGLGVPWGLQTMVVNYGSTVKINSRGLVYSVVLLLGSVALTVLGIHLNKWRLDRKLGVYVLVLYAIFLCFSIMIEFNVFTFVNLPMCREDD

SEQ ID NO: 3194 - DNA, 3869 bp, Homo sapiens
agaagggagcgagagccccagagcgcggcggcagcggcggcctggcccttccagagggccagagccagggacatgcgggcgcccgggactccgcgttccgcgcggcccggcgcctgagcgcctccgttccccgtcccggagctgccggcggcatgatccgacacgccggggcgcccgcgcgcggggaccccacgggtccggttccagttgttggcaaaggagaggaagaggaagaggaagatggcatgcggctttgtctgccagccaacccgaaaaactgccttcctcaccgccggggcatcagcatcctggagaagctcatcaaaacatgcccggtgtggctgcagctgagtctgggccaggcagaggtggccaggatcctgcaccgggtggtggctgggatgttcctggttcgccgggacagcagctcgaagcagctggtgctctgtgtccactttccttctctgaacgaaagctcggccgaggtgctcgaatacaccattaaggaagaaaagtcgatattgtacctggaaggctcggctcttgtgtttgaggacatcttcagattgattgcgttctactgtgtcagtagagacttactgcccttcacactgcggctaccccaggccatccttgaggccagcagcttcacggaccttgagaccatcgccaacctgggtctgggtttctgggactcctcgctgaatcctccacaagaaagagggaagccagcagagcccccaagagaccgggcccccggattccccctagtctccagcctcaggcccacagcccatgacgcaaactgtgcctgtgaaatcgagctgtcggtaggaaatgaccgcctgtggtttgtgaatcctattttcatcgaggactgcagcagcgccctgcccaccgaccagccacctcttggaaattgccctgcacgccctttgccgcccacctctgatgccacctcacccacctccaggtgggccccacgccgcccaccaccccctcccccagtgctgcccctgcagccctgcagcccagcccagccccctgtgctccctgctcttgcccccgcccctgcctgtcctttgcccacctctcccccagtgcctgccccccacgtcacaccccatgccccaggtcccccagaccatccgaaccagccgcccatgatgacctgcgagagactcccatgccccactgcaggcctgggccccctcagggaggaagcgatgaagccaggggcagcctccagtcccttgcagcaggtccccgccccgccactgcctgcgaagaagaaccttcccactgcccctcccagacgccgcgtttccgagagggtgtccttagaagaccaaagtccggggatggcggcagagggggaccagctcagcctgcctccccaagggacctcagacggccctgaggacacgccccgggagagcacggagcaaggccaggacacagaggtgaaagccagcgatcctcacagcatgccagagctgcccaggacagccaaacaacccccagtcccgccccccaggaaaaaacggatctctcgacaactggcctcgaccctcccagctcccttagagaacgctgagctctgcacacaggcgatggccttggagacacccacgccgggtccacccagagagggccaaagccctgcttctcaggctgggactcagcaccctcctgcccaggccactgcccattcccagagctctccagagttcaagggctccctggcctccctctcagacagcttgggggtgtctgtcatggccaccgaccaggactcctactccaccagcagcacggaggaggagctggagcagttcagcagccccagcgtgaagaagaagccctccatgatcctgggcaaggctcggcaccggctgagctttgccagtttcagcagcatgttccacgctttcctctccaacaaccgcaagctgtacaagaaggtggtggagctggcgcaggacaagggctcgtactttggcagcctggtgcaggactacaaggtgtacagcctggagatgatggcgcgccagacctccagcacggagatgctgcaggagattcgcaccatgatgacccagctcaagagctacctgctgcagagcaccgagctcaaggccctggtggaccccgccctgcactccgaggaggagctcgaagcaattgtagagtctgccttgtacaaatgtgtcctgaagcccctgaaggaagccatcaactcatgcctgcatcagatccacagcaaggatggttcgctgcagcagctcaaggagaaccagttagtgatcctggccaccaccaccactgacctaggtgtgaccaccagcgtgccggaggtgcccatgatggagaagatcctgcagaagttcaccagcatgcacaaggcctactcacctgagaagaagatctccatcctgctcaagacctgcaaactcatctacgactccatggccctcggcaacccagggaagccctatggggcggatgacttcctgcctgtgctcatgtatgtgctggcccgcagcaacctcacggagatgcttctcaatgtggagtacatgatggagctcatggaccccgccctgcagctgggggagggttcctactatctgaccaccacctacggggccctggagcacatcaagagctacgacaagatcacggtgacccggcagctgagtgtggaggtgcaggactccatccaccgctgggagcgccggcgtactctcaacaaggcccgggcctcccgctcctccgtacaggacttcatctgcgtgtcgtacctggagcccgagcagcaggcgcggacgctggcgtcgcgggcggacacccaggcccaggcgctgtgcgcgcagtgcgcggagaagttcgcggtggagcggccgcaggcgcaccggctgttcgtgctggtggacgggcgctgcttccagctggcggacgacgcgctgccgcactgcatcaagggctacctgctgcgcagcgagcccaagcgcgacttccactttgtctaccggcccctggacggtggtggcggcggcggcggcgggagcccgccctgcctggtggtgcgggagcccaacttcctgtgaggccctcccggggcgcctcccctcacccccaggcgcacgtctggccccgcctctggctgcgcactcccgaccgcgacgtccacgcagcagagggacatgggccattccatgacgtgcccaggccaacgtcgcaggacagttgtgaaaataacatgacgctcgtccaaggccacttcctgagggcaagtcctaatagccctgagacaccgagacggcatgttcttcattagacggaaagggaaactgaggctcaggagagaggcgctccaggccgctgcagccaacaaaccggcgccctcttcacacgtagctcctcaggccattccccatgagtcccccacacccaccccatcctcggtctttgcaaagaagggcccgagcttagtttccccaggactggcctaggaaggagcaccggccacagctgctccccgtgccactcagggtggacccagcatctcaggagcacctcagggtgtcggttaagagacaggcctccacccctgcaccagagcctgctcttagctcccggtgcccccagaccccgcagctctgtgcccggcaagaagcagctagacacacgccagggcgccaagcacggccagctccgcggacccatggacaagcccagccccgcctcagggaaaacagggcctttccctacaggacacgccccagagctgtggcagattgcaggagccatcgtgtggggagaatttaataaaagcccttttgaaaaaaaaaaaaaaaaaaaaaaaa

SEQ ID NO: 3195 - protein, 985 aa, Homo sapiens
MIRHAGAPARGDPTGPVPVVGKGEEEEEEDGMRLCLPANPKNCLPHRRGISILEKLIKTCPVWLQLSLGQAEVARILHRVVAGMFLVRRDSSSKQLVLCVHFPSLNESSAEVLEYTIKEEKSILYLEGSALVFEDIFRLIAFYCVSRDLLPFTLRLPQAILEASSFTDLETIANLGLGFWDSSLNPPQERGKPAEPPRDRAPGFPLVSSLRPTAHDANCACEIELSVGNDRLWFVNPIFIEDCSSALPTDQPPLGNCPARPLPPTSDATSPTSRWAPRRPPPPPPVLPLQPCSPAQPPVLPALAPAPACPLPTSPPVPAPHVTPHAPGPPDHPNQPPMMTCERLPCPTAGLGPLREEAMKPGAASSPLQQVPAPPLPAKKNLPTAPPRRRVSERVSLEDQSPGMAAEGDQLSLPPQGTSDGPEDTPRESTEQGQDTEVKASDPHSMPELPRTAKQPPVPPPRKKRISRQLASTLPAPLENAELCTQAMALETPTPGPPREGQSPASQAGTQHPPAQATAHSQSSPEFKGSLASLSDSLGVSVMATDQDSYSTSSTEEELEQFSSPSVKKKPSMILGKARHRLSFASFSSMFHAFLSNNRKLYKKVVELAQDKGSYFGSLVQDYKVYSLEMMARQTSSTEMLQEIRTMMTQLKSYLLQSTELKALVDPALHSEEELEAIVESALYKCVLKPLKEAINSCLHQIHSKDGSLQQLKENQLVILATTTTDLGVTTSVPEVPMMEKILQKFTSMHKAYSPEKKISILLKTCKLIYDSMALGNPGKPYGADDFLPVLMYVLARSNLTEMLLNVEYMMELMDPALQLGEGSYYLTTTYGALEHIKSYDKITVTRQLSVEVQDSIHRWERRRTLNKARASRSSVQDFICVSYLEPEQQARTLASRADTQAQALCAQCAEKFAVERPQAHRLFVLVDGRCFQLADDALPHCIKGYLLRSEPKRDFHFVYRPLDGGGGGGGGSPPCLVVREPNFL

SEQ ID NO: 3196 - DNA, 3175 bp, Homo sapiens
gcccctgcaggtgccatgactcagcagccccaggacgactttgacaggagcgtggaggatgcccaggcatggatgaaggctgtgcaggaccagctgcaggtcaatgacaacacgcagggaccccgcgcggccctggaggccaggctgtgggagaccgagaaaatatgccagctggagcccgaggggcgtgtgagggtggacctcgtgctacggatggctgaagccctcttggcatgctgccctggggaccagaagcccgggatcctggcccggctgaaggacatcaaggcccaatgggaggagacagtcacctacatgactcactgtcacagccgcatcgagtgggtgtggctgcactggagcgagtacctgctggcccgagatgagttctaccgctggttccagaagatgatggtcacactggagccccacatcgagctccagctgggcctgaaggagaagcagtggcagctgagccacgcccaggtgctgctgcacaacgtggacaaccaggcggtgctcctggaccggctgctggaggaggcagcctccctgttcaacaggatcggggaccccagcgtggacgaagatgcccagaagagaatgaaggctgagtacgatgcagtgaaggccaaggcccagaagcgtgtagatctgctggagcaggtggcccgggagcatgaggagtaccaggcaggtgtggacgagttccaactgtggctgaaggcggtggtggagaaggtgaatggctgcctggggcggaactgcaagctgcccatcacgcagcgcctctccacactgcaggacattgccaaagattttcccaggggcgaggagtctctggagacgctggaggagcagtctgcgggtgtcattcggaacacctctcctttgggtgcagagaagatcaccggagaactggaagagatgaggaaagttctggagaagctgcgcgccctctgggaggaggaggaggagcggctgcggggcctgctccggtccaggggagcctgggagcagcagattaagcagctggaggctgagctcagtgagttcaggatggtcctgcagaggctggcccaggagggcctgcagcctgcggcgaaagcggggaccgaggacgagctggtggcacactggagacgctactcggcaacacgggcggcgctggcctcggaggagccccgggtggaccggctgcaagcccagctgaaggagctcatcgtcttccctcacaacctgaagccactctctgatagtgtcatcgctaccatccaggagtatcagagcctgaaggtgaagagcgcgaggctgcgcaatgccgcggcggtggagctgtggcagcatttccagcggcctctgcaggatctgcagctgtggaaggccctggcccagcggctcttggaggtcactgccagcctgccggacctgccttcccttcacaccttcctgccccagatcgaggcagccctgatggaaagctcccgcctgaaagagctgctgacgatgctgcagctgaagaaagacctcctgattggcatctttggccaggagagagccacggcactcctggagcaggtggcaggttccatgagggacagagacctgctgcataacagcctcctgcagaggaaaagcaaactgcagagcctgctcgctcagcacaaagactttggagcagcttttgagcccctgcagaggaagctcttggacctccaggtcagggtccaagccgagaaggggcttcagcgggaccttcctggaaaacaggcccagctctcaaggttgcaggggctgcaggaagaggggctggacttgggggcacagatggaggctgcaaggcctctggtccaggagaaccccaaccaccagcacaaaatggaccagctttcctccgacttccaggccctgcagaggtctctggaggaccttgtggacaggtgtcggcagagtgtgcaggagcactgcaccttcagccaccagctgctggagctgcggcagtggatcgttgtgaccacgcaaaagctggaggcacaccggggagaggcgggcccgggggatgccgagtcccaagaggccgagtttgagaggctggtggcagaattcccggagaaggaggcccagctgtccctggtggaagcgcagggctggctggtgatggagaagtcttctccggagggtgctgccgtggtgcaggaggagctcagggagctggcagagtcgtggcgggccttgaggctgctggaagaaagtctgctgagcctcatcagaaactggcatctgcagaggatggaagtggattcggggaagaaaatggttttcaccaacaacatcccaaagtcaggatttctcatcaatcccatggatcctattcccaggcatcgtcgacgcgcaaatcttctacaggaagaagaagggagccatgaagatttctcccagctcctgaggaactttgggcagtggttgcaggtggaaaactccaagctggttagaatcatcgcaatgagaacttctacagctgaggacttgaggaccagaaaatcgaagctgcaggagctggaggctcgggtgccagaaggtcagcatctctttgagaacctccttcgtctcgggccagcaagggggacctcggatgagctggaagatctgcgctaccagtggatgctgtacaagtccaagctgaaggactctggccacctgctgacacaaagttctccaggggagccgactggattccaaaagactcggcggtggcgaggactgggctccctcttccggagggtgtgctgtgtggcgctcccactgcagctgcttctgctgctgttcctcctcctgctgttcctgctcccaatcagggaagaggaccgcagctgcaccctggccaacaacttcgcccgctccttcacgctcatgctgcgctacaatggcccaccacccacctaacccactggggcacacaggtgactttctcctccaacctccatcagtcccagggcccctcctggggatgctcgccagggaaactggaaacaggggcagggcaaagactgcagagctgcatccatatcagtgctgtgtcagcgttcccagaagacacttactttttatacagtgttgtcttagtctatttatactaaatgtgtactacatgtgactagggaaaaaaaaaaaaaag

SEQ ID NO: 3197 - protein, 975 aa, Homo sapiens
MTQQPQDDFDRSVEDAQAWMKAVQDQLQVNDNTQGPRAALEARLWETEKICQLEPEGRVRVDLVLRMAEALLACCPGDQKPGILARLKDIKAQWEETVTYMTHCHSRIEWVWLHWSEYLLARDEFYRWFQKMMVTLEPHIELQLGLKEKQWQLSHAQVLLHNVDNQAVLLDRLLEEAASLFNRIGDPSVDEDAQKRMKAEYDAVKAKAQKRVDLLEQVAREHEEYQAGVDEFQLWLKAVVEKVNGCLGRNCKLPITQRLSTLQDIAKDFPRGEESLETLEEQSAGVIRNTSPLGAEKITGELEEMRKVLEKLRALWEEEEERLRGLLRSRGAWEQQIKQLEAELSEFRMVLQRLAQEGLQPAAKAGTEDELVAHWRRYSATRAALASEEPRVDRLQAQLKELIVFPHNLKPLSDSVIATIQEYQSLKVKSARLRNAAAVELWQHFQRPLQDLQLWKALAQRLLEVTASLPDLPSLHTFLPQIEAALMESSRLKELLTMLQLKKDLLIGIFGQERATALLEQVAGSMRDRDLLHNSLLQRKSKLQSLLAQHKDFGAAFEPLQRKLLDLQVRVQAEKGLQRDLPGKQAQLSRLQGLQEEGLDLGAQMEAARPLVQENPNHQHKMDQLSSDFQALQRSLEDLVDRCRQSVQEHCTFSHQLLELRQWIVVTTQKLEAHRGEAGPGDAESQEAEFERLVAEFPEKEAQLSLVEAQGWLVMEKSSPEGAAVVQEELRELAESWRALRLLEESLLSLIRNWHLQRMEVDSGKKMVFTNNIPKSGFLINPMDPIPRHRRRANLLQEEEGSHEDFSQLLRNFGQWLQVENSKLVRIIAMRTSTAEDLRTRKSKLQELEARVPEGQHLFENLLRLGPARGTSDELEDLRYQWMLYKSKLKDSGHLLTQSSPGEPTGFQKTRRWRGLGSLFRRVCCVALPLQLLLLLFLLLLFLLPIREEDRSCTLANNFARSFTLMLRYNGPPPT

SEQ ID NO: 3198 - DNA, 1627 bp, Homo sapiens
gtccggagcactccttcccttccctggttcctcaaggcacggctcccccaggcagatgaaagcttaatagagttttgcgacatgaaagtcagtcggaggaaagagccttgaacagttgtgcgtgagagagaggcaagcgcccgaaattattttacgacaaaggcagctctctctgccacagaggcacagaggagaaaggagcccaggaaacgggtcatttctttcgtggaaaaatggaaatgctctgaagcattttgggagacgtgctgtgaagcaggtgacaccagaagacaaggacactgggggctccctgccgggaggcgcaaaaagcaactcccgttcgagggtcagaggagcctggatgctaatgtctctccaaagtgacttggagccaactgccggaaaggccatgcccttaggagcacaggcaggtcccagctcagggatcaagaggtctgctgtgtgaccttcttcaagttcctgaccctctctgggctgcagtcaccttattcagaaaatggagaggctagacaagaaaatgatgctaatctcacccttttctgggctggcattttattgagcacctactaggcgctgggcattttgctaggcccttcgtgcacactgccatgagaaatccacagcaaccccagagatgggttcatcaataactcaccagcaaatacttcctgaggccccactgtgtgccgagcatgggcataggtactgggcacacctcgatgaacaagggaggtaaggatgtgactctcctagaactttctgtcgagaagaggagatggagaataaacatggaaacaagcaagatcattctggagaaaatgcaatcagatgatgtgctagatggtaacagagagaggtcgaatgagagagagggccgtgacagcctctctgagaagctgaaatccaagcagaacctgaaagacgaggagaaactcagatacataaagactgggaaaagcattcaagtagagggaacagtgcgtgcaaaggccctgaggtgggtgcagtagataccacaggccccctcactcgagaccactccaagcacctcctgccctcttgtgccacagagctcagaaagctaaagcaatgttccccagaggtcctgtggccaaggtcctgcatgggcctgggtgacccctgcagaagcttctgagcaagactgagcagggaaagaaaggccatgtcagaaaaccatcctccagcgagcatggaggcagagagtctcatcctggcatcccaggtgctgagcagagcagacagcagcagaggggctccctagagcagctgggggccctgcctgtgccgtcgctctttcccctccctgccctctggtctgacatcccattggcatcacacacgatgcctcccggaggtgctcttgtgcacacagcaggtcaaagtgccagagaattagatcctgtcctcttgggaacagccctcagccagcagtgagcccttaggaggatgctccaagctctatcctccccgggtccagaggccctgggatggagcgccattgtggaagcagtgacaacttgatgaagctccctgggctggccccttcctctctgccttgttccccgttccctgcagtcctgcaatc

SEQ ID NO: 3199 - protein, 105 aa, Homo sapiens
MGIGTGHTSMNKGGKDVTLLELSVEKRRWRINMETSKIILEKMQSDDVLDGNRERSNEREGRDSLSEKLKSKQNLKDEEKLRYIKTGKSIQVEGTVRAKALRWVQ

SEQ ID NO: 3200 - DNA, 1352 bp, Homo sapiens
ggcagctccccggcagcggcggtggagagcgcagcgcgcagcccggtgcagccctggctttcccctcgctgcgcgcccgcgccccctttcgcgtccgcaaccagaagcccagtgcggcgccaggagccggacccgcgcccgcaccgctcccgggaccgcgaccccggccgcccagagatgaccgcgaccgaagccctcctgcgcgtcctcttgctcctgctggctttcggccacagcacctatggggctgaatgcttcccggcctgcaacccccaaaatggattctgcgaggatgacaatgtttgcaggtgccagcctggctggcagggtcccctttgtgaccagtgcgtgacctctcccggctgccttcacggactctgtggagaacccgggcagtgcatttgcaccgacggctgggacggggagctctgtgatagagatgttcgggcctgctcctcggccccctgtgccaacaacgggacctgcgtgagcctggacgatggcctctatgaatgctcctgtgcccccgggtactcgggaaaggactgccagaaaaaggacgggccctgtgtgatcaacggctccccctgccagcacggaggcacctgcgtggatgatgagggccgggcctcccatgcctcctgcctgtgcccccctggcttctcaggcaatttctgcgagatcgtggccaacagctgcacccccaacccatgcgagaacgacggcgtctgcactgacattgggggcgacttccgctgccggtgcccagccggcttcatcgacaagacctgcagcagccggagcaccgcatcctgaaggtgtccatgaaagagctcaacaagaaaacccctctcctcaccgagggccaggccatctgcttcaccatcctgggcgtgctcaccagcctggtggtgctgggcactgtgggtatcgtcttcctcaacaagtgcgagacctgggtgtccaacctgcgctacaaccacatgctgcggaagaagaagaacctgctgcttcagtacaacagcggggaggacctggccgtcaacatcatcttccccgagaagatcgacatgaccaccttcagcaaggaggccggcgacgaggagatctaagcagcgttcccacagccccctctagattcttggagttccgcagagcttactatacgcggtctgtcctaatctttgtggtgttcgctatctcttgtgtcaaatctggtgaacgctacgcttacatatattgtctttgtgctgctgtgtgacaaacgcaatgcaaaaacaatcctctttctctctcttaatgcatgatacagaataataataagaatttcatctttaaatgagtaagagaaa

SEQ ID NO: 3201 - protein, 212 aa, Homo sapiens
MTATEALLRVLLLLLAFGHSTYGAECFPACNPQNGFCEDDNVCRCQPGWQGPLCDQCVTSPGCLHGLCGEPGQCICTDGWDGELCDRDVRACSSAPCANNGTCVSLDDGLYECSCAPGYSGKDCQKKDGPCVINGSPCQHGGTCVDDEGRASHASCLCPPGFSGNFCEIVANSCTPNPCENDGVCTDIGGDFRCRCPAGFIDKTCSSRSTAS

SEQ ID NO: 3202 - DNA, 1532 bp, Homo sapiens
gagagcgcagcgcgcagcccggtgcagccctggctttcccctcgctgcgcgcccgcgccccctttcgcgtccgcaaccagaagcccagtgcggcgccaggagccggacccgcgcccgcaccgctcccgggaccgcgaccccggccgcccagagatgaccgcgaccgaagccctcctgcgcgtcctcttgctcctgctggctttcggccacagcacctatggggctgaatgcttcccggcctgcaacccccaaaatggattctgcgaggatgacaatgtttgcaggtgccagcctggctggcagggtcccctttgtgaccagtgcgtgacctctcccggctgccttcacggactctgtggagaacccgggcagtgcatttgcaccgacggctgggacggggagctctgtgatagagatgttcgggcctgctcctcggccccctgtgccaacaacgggacctgcgtgagcctggacgatggcctctatgaatgctcctgtgcccccgggtactcgggaaaggactgccagaaaaaggacgggccctgtgtgatcaacggctccccctgccagcacggaggcacctgcgtggatgatgagggccgggcctcccatgcctcctgcctgtgcccccctggcttctcaggcaatttctgcgagatcgtggccaacagctgcacccccaacccatgcgagaacgacggcgtctgcactgacattgggggcgacttccgctgccggtgcccagccggcttcatcgacaagacctgcagccgcccggtgaccaactgcgccagcagcccgtgccagaacgggggcacctgcctgcagcacacccaggtgagctacgagtgtctgtgcaagcccgagttcacaggtctcacctgtgtcaagaagcgcgcgctgagcccccagcaggtcacccgtctgcccagcggctatgggctggcctaccgcctgacccctggggtgcacgagctgccggtgcagcagccggagcaccgcatcctgaaggtgtccatgaaagagctcaacaagaaaacccctctcctcaccgagggccaggccatctgcttcaccatcctgggcgtgctcaccagcctggtggtgctgggcactgtgggtatcgtcttcctcaacaagtgcgagacctgggtgtccaacctgcgctacaaccacatgctgcggaagaagaagaacctgctgcttcagtacaacagcggggaggacctggccgtcaacatcatcttccccgagaagatcgacatgaccaccttcagcaaggaggccggcgacgaggagatctaagcagcgttcccacagccccctctagattcttggagttccgcagagcttactatacgcggtctgtcctaatctttgtggtgttcgctatctcttgtgtcaaatctggtgaacgctacgcttacatatattgtctttgtgctgctgtgtgacaaacgcaatgcaaaaacaatcctctttctctctcttaatgcatgatacagaataataataagaatttcatctttaaa

SEQ ID NO: 3203 - protein, 383 aa, Homo sapiens
MTATEALLRVLLLLLAFGHSTYGAECFPACNPQNGFCEDDNVCRCQPGWQGPLCDQCVTSPGCLHGLCGEPGQCICTDGWDGELCDRDVRACSSAPCANNGTCVSLDDGLYECSCAPGYSGKDCQKKDGPCVINGSPCQHGGTCVDDEGRASHASCLCPPGFSGNFCEIVANSCTPNPCENDGVCTDIGGDFRCRCPAGFIDKTCSRPVTNCASSPCQNGGTCLQHTQVSYECLCKPEFTGLTCVKKRALSPQQVTRLPSGYGLAYRLTPGVHELPVQQPEHRILKVSMKELNKKTPLLTEGQAICFTILGVLTSLVVLGTVGIVFLNKCETWVSNLRYNHMLRKKKNLLLQYNSGEDLAVNIIFPEKIDMTTFSKEAGDEEI

SEQ ID NO: 3204 - DNA, 1725 bp, Homo sapiens
ttgagtgagcttggctatcctctttagctcttctttcgaacctttggccgaaggctccaaccctcccaaaggcagaagggagcttaatttgtcctgaaatggatgggacaagtgtgcaggcactaggtgggatgggagctttatctcagtttgggaggagagggaactcagggccagggccagcgattgtacagtcccactcagagggcggagtggctggaggctgacccttctcccagggagcaggcgctggatggaccctgacactggggagaatgaaaggaaaattgtatcatgcctattgtgtgccaggcagagctagcagttcccctttcatctgggcaatgtcccgggcgggtgatgtcagttcctcattgtgcagacaaggaaactgagacctggggcccatcccatccacgatcagggcccaggcagctccgactcaatgttcagtgctctctgcaggcgtccgggcacttgccatgcagagcagtgaccaaggatcacagatgcagtgggccggggggggatggcagaaaacaaagggttagggtacccggatgccaggttctcagtgctggtgtcctcacaactggctatccctatgcccctgctgtcctcagtgggtggacactggacctggactgacccctgggacaggaggattcaaggtgtcttgttctcttttgatttcttttatcttttctctgccaggaaagatactgatctctgttcttggttaagttccaagaaccatctaagtttcgtgcccctcagctgtaaaagggaagtacatttcatttgtttattctgtaaaactctcggtgtgtgccatggccatgcactgatgatgagcacatgtgtgcggcccctgcccccgtggagcgcatgcatggtcctccagccagagaccgcgctgggagaaatcaggggttcactcctggtcggaggtgagcatctgcctctgcatgcaggaaggcatctcatgaaaccccaaaggcctggcagcccctgcacatggaaggagtcactctcctccatgtggggtgagccacgctggccttgtggcattcacgtgttccctccacctgcttctccagcgtgaaggggacctcaatgtcctctgatgaccttcttgaagagagacatttccttccttcattggaggctttagacggagccagtgacagctcagctctggctgtttcccatctgtgaaatgggaagagggaggatggcacgagtcccttgccctcaccaaactggccgctagagagaggaaagatgtttccattctgatccccactcacctccaccccatccttccaggcttctgatcctcattgtaattttggagctatttggtgatattgtctttgtccttggatccgaggcttctcctaccaactcattgttttttcaacgtgacaaaataaaagccctgagctgggcgcggtggctcacgcctgtaatcccagcactttgggaggccgaggcaggtggatgacgaggtcaggagttcaagaccagcctgaccaacatggtgaaaccccgtctctactaaaaatacaaaaaattagctgggcatggtggcatgcacctgtaatcccagctactcaggaggctgaggcaggagaatcgcttgaacccgggagccggaggttgcagtgagtcgagatcatgccactgcactccagcctgggcaacaagagtgagactccatct

SEQ ID NO: 3205 - protein, 191 aa, Homo sapiens [sequence omitted]

SEQ ID NO: 3206 - DNA, 5811 bp, Homo sapiens
ctcctcccctccccctccgccctcctccgctccgggccagcgcggcggcggcggcggcggcggcagcagcaggagcagccccggctgcgggtcgcgacggcggcggggcgccccctcccccgtgccggggcgcggcggagggatgtggggccttgcgggaggaaggcttttcggcatcttctcggccccggtgctggtggctgtggtgtgctgcgcccagagtgtgaacgatcccgggaacatgtcctttgtgaaggagacggtggacaagctgttgaaaggctacgacattcgcctaagacccgacttcgggggtcccccggtctgcgtggggatgaacatcgacatcgccagcatcgacatggtttccgaagtcaacatggattataccttaaccatgtattttcaacaatattggagagataaaaggctcgcctattctgggatccctctcaacctcacgcttgacaatcgagtggctgaccagctatgggtgcccgacacatatttcttaaatgacaaaaagtcatttgtgcatggagtgacagtgaaaaaccgcatgatccgtcttcaccctgatgggacagtgctgtatgggctcagaatcaccacgacagcagcatgcatgatggacctcaggagataccccctggacgagcagaactgcactctggaaattgaaagctatggctacaccacggatgacattgagttttactggcgaggcggggacaaggctgttaccggagtggaaaggattgagctcccgcagttctccatcgtggagcaccgtctggtctcgaggaatgttgtcttcgccacaggtgcctatcctcgactgtcactgagctttcggttgaagaggaacattggatacttcattcttcagacttatatgccctctatactgataacgattctgtcgtgggtgtccttctggatcaattatgatgcatctgctgctagagttgccctcgggatcacaactgtgctgacaatgacaaccatcaacacccaccttcgggagaccttgcccaaaatcccctatgtcaaagccattgacatgtaccttatgggctgcttcgtctttgtgttcctggcccttctggagtatgcctttgtcaactacattttctttggaagaggccctcaaaggcagaagaagcttgcagaaaagacagccaaggcaaagaatgaccgttcaaagagcgaaagcaaccgggtggatgctcatggaaatattctgttgacatcgctggaagttcacaatgaaatgaatgaggtctcaggcggcattggcgataccaggaattcagcaatatcctttgacaactcaggaatccagtacaggaaacagagcatgcctcgagaagggcatgggcgattcctgggggacagaagcctcccgcacaagaagacccatctacggaggaggtcttcacagctcaaaattaaaatacctgatctaaccgatgtgaatgccatagacagatggtccaggatcgtgtttccattcactttttctcttttcaacttagtttactggctgtactatgttaactgagtgactgtacttgatttttcaaagacttcatttaacactgagtgaaatattactctgcctgtcaagtttttatacctgtacacacacagacacacaagcagacacacacatatatacatacgcaattgtatatatatgtgaactttctcagcatatatataaaatacacgtgtatatgaggatgtatgtgtatatgtttatacacacaggagtcagtgcccatgtgtatggaagacaaatacacatacatatatacattttgcagctatggacaatttaccacaggatgcatattaaagaaagtcatagtttttttcttttttaattgaaagggacaagtatcatctaaatattatgccttgagaatgagggcgtgaaacacaatatcatccccaaatgtgtcttgtattatcataagttagatgttttagtttaaaaatcagaaagacattcttagttaatctttgaaaactcatacagtggtattgctagtttaaaatgagtcacttacttcatatcctctcgttcagtttagtaagcaaaggcttcttggcttctctggtgatggggtttgttttcatcgggcatacgttttctgcaatggtttagtggctggggtgagccactggcagtgtgcttacctgttgtctgaaacatagatagatcccacgttgatgtctgaacgaccgtcttttgaaaactcatcgggagtgaatggcatctcgttgtaagtactctaatatacagtgtgtagtttgtttctgttgttcacttggagtggatccagcttcactgtcatgtgcgaacacagtgacacgtttggccagtgacatttcaatcactgaaaatgtgctctacatctcgtatggatttctaggcctgatatccaacagaaagcatagacgtctcaggttattcgttactctaaggtaaaaccatctaggatgattttcccccttgcagttatgttatcattcttataacattgtatgttaatagaaaatatatttgcataatatgcatatatatgtatatttaccaagattttgtttcttacgcttgctatcatggcagcatgcgatgtcatattttcctttatgtgatgtaactactttctgttatctagaaattaagattgaagctaaaacacttctactgttcaatttcagaaactaagaatcatcctcatgcctttatttctgtatctgacatatttcataagcacatccaactactcctagactgactaggattctgcaggaacatgacccgtacacaccacgcgtcacccaacgacccatgaccgttctctgaggcaaaggagggcaacctgacagcaaacacagtcactgttggttccttctgatccacagcctcatcagtatttggactttttaaagctcgtagaaacaagacaaggtgcaccggtttcatagacgcaaccttaacttactatttagatgagatctttctaaagaaaaaaaaaagagatgatatattttttgtaaacaatatttctatcacaggcatccataaactgaaatgactacagttgtgcaaacaggtgtcacagtgaagttgagcatttggagaaaaaaataaaaagcaaaatttgcaggaagaactgctaaattaatactttatcccaaaatgccacgtatgcctcaccctctctgttctatccaaaaccaaggaccagagtgctccaatggtaggccccagttgtctcgatgtaggtagaggcaccaccctccccgaggatgcgtgtggtgtggactatccccatgagctgaccactacttgatttttctttggtggccgtaacaacctttaatttgtgggcatctgcaacagttcaaaacccaccatcagataaaacataatccacaaaatctcacgctagaggcaattacctacttttagacccttttccctctttcattcctatctttttcctcctaatcgctgctctctggttttattttcatctggagactagccagggatttctttggctttggcttttctctgaccattttttccatgggtaacaatgggggatcctaaaagttaaacagattgggaaaaaccttgttaagtggccttatcattattatcatgttaaagaaaaaaaatacatttgcaaagaccttatccctttcaatacttcaggtatctttttctgtatccagtaattaaaggtgtgaggtccacatgcagaagagggaccccaaaatgtaaatggatgtggacaaaaacagtcaatggtctatttaagtgtataatttatactattcagaactgtgacattaattctttctgggagaaaagtgatttaaaacttttttgatgcatagttgaggtacccaaatatcaaaggcagagaccccatggggctccaaagagctgcagtctccttcccaaggttttctggatataaatttgcatggtatagtcataatagcttttgagctttttatatgcatttggcaccaagactgggatccacaactttgtagacactgcgatgaagttaacatattagctatactataaatagtgtttgtaactacacacacacacacacacacacacacaaatacatacatatattctgtaaaaacaaaaaaaaactttttaagatccttgggtatgtgtttgctttactccatttcagaagaaaattacttttcttctaacaaaattattttatagcttctccatttttaaaacttgtgagagcattgagaagagaactctgactgtgttaacagaagagagttgaattggagtctctgttgtgttaaaatgacctctcgttactccacagtagttatttgagccagtgactgagtcgcgttgaggaattctgaacccggacctctgacgttgttgggaggtggctgttacccacacccagacctcttgagtaaggacagaaacgttatcattggggatataatgagatttctttcttaacaattgaaagtaataaagagttaattttctcagtagtcctgtctttccaaaatgcgccacaggggctcaagatctacagaagaatcttgttatgacagtttgttattacccatattcagatatccttgagataatggaagagccctgctacataactccctacagagaaagactgatagacttgagtagtccttaaaacaagtgttattcctgttcaccaaccccgggactgtggaggggtttcactgtctataccatgcgacatccatttcccctgaatctcaaacgaactagaaagtatgtcatgataatatttccattagatttggaagctacctgtacatctgcaatattgtgtttttaacgccagcacccagaactttgacatgttcagtcactccctgaaaggcacttctctcttgtccaaacacagcgttgacatttttactgaggagatcatctcaaaggtgatgccaaacgagtctggggctggttttaaggggacaggcacattgcagttgtaggtgttcattttcagcatctagtagataatccattggtgtttgtcccaccattggtgtattctaacaagaatgtgtccaactttgaatctcctggcttgaaagtataaaccatcacttaattcttattttaactctccacctgaaaaccagttcatatttctggccattttatgtaagcaaaactgaacaattggtgaaacattttgttactcttggaattgactctggctgtcagtgtgagccattagagtaacatcgaatcttggggcaaagaactgcccaggtgaattaaatttttccaggacactagctagtgtgccttggattgattacctcttctactgcattgaaaggcgccatgttttcctgaaatactaaattcccaacacctgggtaaacaatgaccttccagagagtggctcccgtatgcctctccctaggaccaaccccatgaacatgttttgtcacgtttgtctcatgtttctacttcacaagtcagtgagtgtgtttaaggtaagtacaggattattctagtaggaataggcgattgctgtcataatcaattctcatgttgatttcattttattgtaaagataaatttaaacccagttttgcttaagcacattgatgtaattttttggtattatttgacatgaaaaaacagcaaaattgagtgatagatacaatatgaaacttgttgatgaatgaattcaaatttattaaaaaaggagtaactgacctaaa

SEQ ID NO: 3207 - protein, 473 aa, Homo sapiens [sequence omitted]

SEQ ID NO: 3208 - DNA, 5725 bp, Homo sapiens
ctcggagagtaggggggagagcggatcccagcaggttaggccggaggaacagcgccatgtgctccgggctcctggagctcctgctgcccatctggctctcctggaccctggggacccgaggctctgagccccgcagtgtgaacgatcccgggaacatgtcctttgtgaaggagacggtggacaagctgttgaaaggctacgacattcgcctaagacccgacttcgggggtcccccggtctgcgtggggatgaacatcgacatcgccagcatcgacatggtttccgaagtcaacatggattataccttaaccatgtattttcaacaatattggagagataaaaggctcgcctattctgggatccctctcaacctcacgcttgacaatcgagtggctgaccagctatgggtgcccgacacatatttcttaaatgacaaaaagtcatttgtgcatggagtgacagtgaaaaaccgcatgatccgtcttcaccctgatgggacagtgctgtatgggctcagaatcaccacgacagcagcatgcatgatggacctcaggagataccccctggacgagcagaactgcactctggaaattgaaagctatggctacaccacggatgacattgagttttactggcgaggcggggacaaggctgttaccggagtggaaaggattgagctcccgcagttctccatcgtggagcaccgtctggtctcgaggaatgttgtcttcgccacaggtgcctatcctcgactgtcactgagctttcggttgaagaggaacattggatacttcattcttcagacttatatgccctctatactgataacgattctgtcgtgggtgtccttctggatcaattatgatgcatctgctgctagagttgccctcgggatcacaactgtgctgacaatgacaaccatcaacacccaccttcgggagaccttgcccaaaatcccctatgtcaaagccattgacatgtaccttatgggctgcttcgtctttgtgttcctggcccttctggagtatgcctttgtcaactacattttctttggaagaggccctcaaaggcagaagaagcttgcagaaaagacagccaaggcaaagaatgaccgttcaaagagcgaaagcaaccgggtggatgctcatggaaatattctgttgacatcgctggaagttcacaatgaaatgaatgaggtctcaggcggcattggcgataccaggaattcagcaatatcctttgacaactcaggaatccagtacaggaaacagagcatgcctcgagaagggcatgggcgattcctgggggacagaagcctcccgcacaagaagacccatctacggaggaggtcttcacagctcaaaattaaaatacctgatctaaccgatgtgaatgccatagacagatggtccaggatcgtgtttccattcactttttctcttttcaacttagtttactggctgtactatgttaactgagtgactgtacttgatttttcaaagacttcatttaacactgagtgaaatattactctgcctgtcaagtttttatacctgtacacacacagacacacaagcagacacacacatatatacatacgcaattgtatatatatgtgaactttctcagcatatatataaaatacacgtgtatatgaggatgtatgtgtatatgtttatacacacaggagtcagtgcccatgtgtatggaagacaaatacacatacatatatacattttgcagctatggacaatttaccacaggatgcatattaaagaaagtcatagtttttttcttttttaattgaaagggacaagtatcatctaaatattatgccttgagaatgagggcgtgaaacacaatatcatccccaaatgtgtcttgtattatcataagttagatgttttagtttaaaaatcagaaagacattcttagttaatctttgaaaactcatacagtggtattgctagtttaaaatgagtcacttacttcatatcctctcgttcagtttagtaagcaaaggcttcttggcttctctggtgatggggtttgttttcatcgggcatacgttttctgcaatggtttagtggctggggtgagccactggcagtgtgcttacctgttgtctgaaacatagatagatcccacgttgatgtctgaacgaccgtcttttgaaaactcatcgggagtgaatggcatctcgttgtaagtactctaatatacagtgtgtagtttgtttctgttgttcacttggagtggatccagcttcactgtcatgtgcgaacacagtgacacgtttggccagtgacatttcaatcactgaaaatgtgctctacatctcgtatggatttctaggcctgatatccaacagaaagcatagacgtctcaggttattcgttactctaaggtaaaaccatctaggatgattttcccccttgcagttatgttatcattcttataacattgtatgttaatagaaaatatatttgcataatatgcatatatatgtatatttaccaagattttgtttcttacgcttgctatcatggcagcatgcgatgtcatattttcctttatgtgatgtaactactttctgttatctagaaattaagattgaagctaaaacacttctactgttcaatttcagaaactaagaatcatcctcatgcctttatttctgtatctgacatatttcataagcacatccaactactcctagactgactaggattctgcaggaacatgacccgtacacaccacgcgtcacccaacgacccatgaccgttctctgaggcaaaggagggcaacctgacagcaaacacagtcactgttggttccttctgatccacagcctcatcagtatttggactttttaaagctcgtagaaacaagacaaggtgcaccggtttcatagacgcaaccttaacttactatttagatgagatctttctaaagaaaaaaaaaagagatgatatattttttgtaaacaatatttctatcacaggcatccataaactgaaatgactacagttgtgcaaacaggtgtcacagtgaagttgagcatttggagaaaaaaataaaaagcaaaatttgcaggaagaactgctaaattaatactttatcccaaaatgccacgtatgcctcaccctctctgttctatccaaaaccaaggaccagagtgctccaatggtaggccccagttgtctcgatgtaggtagaggcaccaccctccccgaggatgcgtgtggtgtggactatccccatgagctgaccactacttgatttttctttggtggccgtaacaacctttaatttgtgggcatctgcaacagttcaaaacccaccatcagataaaacataatccacaaaatctcacgctagaggcaattacctacttttagacccttttccctctttcattcctatctttttcctcctaatcgctgctctctggttttattttcatctggagactagccagggatttctttggctttggcttttctctgaccattttttccatgggtaacaatgggggatcctaaaagttaaacagattgggaaaaaccttgttaagtggccttatcattattatcatgttaaagaaaaaaaatacatttgcaaagaccttatccctttcaatacttcaggtatctttttctgtatccagtaattaaaggtgtgaggtccacatgcagaagagggaccccaaaatgtaaatggatgtggacaaaaacagtcaatggtctatttaagtgtataatttatactattcagaactgtgacattaattctttctgggagaaaagtgatttaaaacttttttgatgcatagttgaggtacccaaatatcaaaggcagagaccccatggggctccaaagagctgcagtctccttcccaaggttttctggatataaatttgcatggtatagtcataatagcttttgagctttttatatgcatttggcaccaagactgggatccacaactttgtagacactgcgatgaagttaacatattagctatactataaatagtgtttgtaactacacacacacacacacacacacacacaaatacatacatatattctgtaaaaacaaaaaaaaactttttaagatccttgggtatgtgtttgctttactccatttcagaagaaaattacttttcttctaacaaaattattttatagcttctccatttttaaaacttgtgagagcattgagaagagaactctgactgtgttaacagaagagagttgaattggagtctctgttgtgttaaaatgacctctcgttactccacagtagttatttgagccagtgactgagtcgcgttgaggaattctgaacccggacctctgacgttgttgggaggtggctgttacccacacccagacctcttgagtaaggacagaaacgttatcattggggatataatgagatttctttcttaacaattgaaagtaataaagagttaattttctcagtagtcctgtctttccaaaatgcgccacaggggctcaagatctacagaagaatcttgttatgacagtttgttattacccatattcagatatccttgagataatggaagagccctgctacataactccctacagagaaagactgatagacttgagtagtccttaaaacaagtgttattcctgttcaccaaccccgggactgtggaggggtttcactgtctataccatgcgacatccatttcccctgaatctcaaacgaactagaaagtatgtcatgataatatttccattagatttggaagctacctgtacatctgcaatattgtgtttttaacgccagcacccagaactttgacatgttcagtcactccctgaaaggcacttctctcttgtccaaacacagcgttgacatttttactgaggagatcatctcaaaggtgatgccaaacgagtctggggctggttttaaggggacaggcacattgcagttgtaggtgttcattttcagcatctagtagataatccattggtgtttgtcccaccattggtgtattctaacaagaatgtgtccaactttgaatctcctggcttgaaagtataaaccatcacttaattcttattttaactctccacctgaaaaccagttcatatttctggccattttatgtaagcaaaactgaacaattggtgaaacattttgttactcttggaattgactctggctgtcagtgtgagccattagagtaacatcgaatcttggggcaaagaactgcccaggtgaattaaatttttccaggacactagctagtgtgccttggattgattacctcttctactgcattgaaaggcgccatgttttcctgaaatactaaattcccaacacctgggtaaacaatgaccttccagagagtggctcccgtatgcctctccctaggaccaaccccatgaacatgttttgtcacgtttgtctcatgtttctacttcacaagtcagtgagtgtgtttaaggtaagtacaggattattctagtaggaataggcgattgctgtcataatcaattctcatgttgatttcattttattgtaaagataaatttaaacccagttttgcttaagcacattgatgtaattttttggtattatttgacatgaaaaaacagcaaaattgagtgatagatacaatatgaaacttgttgatgaatgaattcaaatttattaaaaaaggagtaactgacctaaa

SEQ ID NO: 3209 - protein, 473 aa, Homo sapiens
MCSGLLELLLPIWLSWTLGTRGSEPRSVNDPGNMSFVKETVDKLLKGYDIRLRPDFGGPPVCVGMNIDIASIDMVSEVNMDYTLTMYFQQYWRDKRLAYSGIPLNLTLDNRVADQLWVPDTYFLNDKKSFVHGVTVKNRMIRLHPDGTVLYGLRITTTAACMMDLRRYPLDEQNCTLEIESYGYTTDDIEFYWRGGDKAVTGVERIELPQFSIVEHRLVSRNVVFATGAYPRLSLSFRLKRNIGYFILQTYMPSILITILSWVSFWINYDASAARVALGITTVLTMTTINTHLRETLPKIPYVKAIDMYLMGCFVFVFLALLEYAFVNYIFFGRGPQRQKKLAEKTAKAKNDRSKSESNRVDAHGNILLTSLEVHNEMNEVSGGIGDTRNSAISFDNSGIQYRKQSMPREGHGRFLGDRSLPHKKTHLRRRSSQLKIKIPDLTDVNAIDRWSRIVFPFTFSLFNLVYWLYYVN

SEQ ID NO: 3210 - DNA, 2352 bp, Homo sapiens
gaagatgctgttgagggccctggagaaacttcagcagaacagggcctctccccttgcaggccgagccggggccctgcgccctccccctccgcccagctcggccaagggcgcatttgctgagcgtctggcggcctctaccggagcacctctgcagagggccgatcctccagcccagagacgacatgtggcgctcgggcgagtgccttgcagagagaggagtagcttgctggctttgaacgcgtggcgtggcagatatttcagaaagcttcaagaacaagctggagaagggaagagttattcctccatattcacctgcttcaactactattcttattgggaatggacaatggaatgttctctggttttatcatgatcaaaaacctccttctcttttgtatttccatgaacttatccagtcactttggcttttcacagatgccaaccagttcagtgaaagatgagaccaatgacaacatcacgatatttaccaggatcttggatgggctcttggatggctacgacaacagacttcggcccgggctgggagagcgcatcactcaggtgaggaccgacatctacgtcaccagcttcggcccggtgtccgacacggaaatggagtacaccatagacgtgtttttccgacaaagctggaaagatgaaaggcttcggtttaaggggcccatgcagcgcctccctctcaacaacctccttgccagcaagatctggaccccagacacgttcttccacaacgggaagaagtccatcgctcacaacatgaccacgcccaacaagctgctgcggctggaggacgacggcaccctgctctacaccatgcgcttgaccatctctgcagagtgccccatgcagcttgaggacttcccgatggatgcgcacgcttgccctctgaaatttggcagctatgcgtaccctaattctgaagtcgtttacgtctggaccaacggctccaccaagtcggtggtggtggcggaagatggctccagactgaaccagtaccacctgatggggcagacggtgggcactgagaacatcagcaccagcacaggcgaatacacaatcatgacagctcacttccacctgaaaaggaagattggctactttgtcatccagacctaccttccctgcataatgaccgtgatcttatcacaggtgtccttttggctgaaccgggaatcagtcccagccaggacagtttttggggtcaccacggtgctgaccatgacgaccctcagcatcagcgccaggaactctctgcccaaagtggcctacgccaccgccatggactggttcatagctgtgtgctatgccttcgtcttctcggcgctgatagagtttgccacggtcaattactttaccaagagaggctgggcctgggatggcaaaaaagccttggaagcagccaagatcaagaaaaagcgtgaagtcatactaaataagtcaacaaacgcttttacaactgggaagatgtctcaccccccaaacattccgaaggaacagaccccagcagggacgtcgaatacaacctcagtctcagtaaaaccctctgaagagaagacttctgaaagcaaaaagacttacaacagtatcagcaaaattgacaaaatgtcccgaatcgtattcccagtcttgttcggcactttcaacttagtttactgggcaacgtatttgaatagggagccggtgataaaaggagccgcctctccaaaataaccggccacactcccaaactccaagacagccatacttccagcgaaatggtaccaaggagaggttttgctcacagggactctccatatgtgagcactatctttcaggaaatttttgcatgtttaataatatgtacaaataatattgccttgatgtttctatatgtaacttcagatgtttccaagatgtcccattgataattcgagcaaacaactttctggaaaaacaggatacgatgactgacactcagatgcccagtatcatacgttgatagtttacaaacaagatacgtatatttttaactgcttcaagtgttacctaacaatgttttttatacttcaaatgtcatttcatacaaattttcccagtgaataaatattttaggaaactctccatgattattagaagaccaactatattgcgagaaacagagatcataaagagcacgttttccattatgaggaaacttggacatttatgtacaaaatgaattgcctttgataattcttactgttctgaaattaggaaagtacttgcatgatcttacacgaagaaatagaataggcaaacttttatgtaggcagattaataacagaaatacatcatatgttagatacacaaaatatt

SEQ ID NO: 3211 - protein, 462 aa, Homo sapiens
MDNGMFSGFIMIKNLLLFCISMNLSSHFGFSQMPTSSVKDETNDNITIFTRILDGLLDGYDNRLRPGLGERITQVRTDIYVTSFGPVSDTEMEYTIDVFFRQSWKDERLRFKGPMQRLPLNNLLASKIWTPDTFFHNGKKSIAHNMTTPNKLLRLEDDGTLLYTMRLTISAECPMQLEDFPMDAHACPLKFGSYAYPNSEVVYVWTNGSTKSVVVAEDGSRLNQYHLMGQTVGTENISTSTGEYTIMTAHFHLKRKIGYFVIQTYLPCIMTVILSQVSFWLNRESVPARTVFGVTTVLTMTTLSISARNSLPKVAYATAMDWFIAVCYAFVFSALIEFATVNYFTKRGWAWDGKKALEAAKIKKKREVILNKSTNAFTTGKMSHPPNIPKEQTPAGTSNTTSVSVKPSEEKTSESKKTYNSISKIDKMSRIVFPVLFGTFNLVYWATYLNREPVIKGAASPK

SEQ ID NO: 3212 - DNA, 1536 bp, Homo sapiens
tgaattcgtgagatggcgagctccacggcaccatggccccgaagctgctgctcctcctctgcctgttctcgggcttgcacgcgcggtccagaaaggtggaagaggatgaatatgaagattcatcatcaaaccaaaagtgggtcttggctccaaaatcccaagacaccgacgtgactcttattctcaacaagttgctaagagagtatgataaaaagctgaggccagatattggaataaaaccgaccgtaattgacgttgacatttatgttaacagcattggtcctgtgtcatcaataaacatggaataccaaattgacatattttttgctcagacctggacagatagtcgccttcgattcaacagcacaatgaaaattcttactctgaacagcaacatggtggggttaatctggatcccagacaccatcttccgcaattctaaaaccgcagaggctcactggatcaccacacccaatcagctcctccggatttggaatgacgggaaaatcctttacactttgaggctcaccatcaatgctgagtgccagctgcagctgcacaacttccccatggacgaacactcctgcccgctgattttctccagctatggctatcccaaagaagaaatgatttatagatggagaaaaaattcagtggaggcagctgaccagaaatcatggcggctttatcagtttgacttcatgggcctcagaaacaccacagaaatcgtgacaacgtctgcaggtgattatgttgtcatgactatatattttgaattgagtagaagaatgggatacttcaccattcagacatacattccctgtatactgactgtggttttatcctgggtgtcattttggatcaaaaaagatgctacgccagcaagaacagcattaggcatcaccacggtgctgaccatgaccaccctgagcaccatcgccaggaagtccttgccacgcgtgtcctacgtgaccgccatggacctttttgtgactgtgtgcttcctgtttgtcttcgccgcgctgatggagtatgccaccctcaactactattccagctgtagaaaaccaaccaccacgaaaaagacaacatcgttactacatccagattcctcaagatggattcctgagcgaataagcctacaagccccttccaactattccctcctggacatgaggccaccaccacctgcgatgatcactttaaacaattccgtttactggcaggaatttgaagatacctgtgtctatgagtgtctggatggcaaagactgtcagagcttcttctgctgctatgaagaatgtaaatcaggatcctggaggaaagggcgtattcacatagacatcttggagctggactcgtactcccgggtctttttccccacgtccttcctgctctttaacctggtctactgggttggatacctgtatctctaagtgttgctcagagtgaagagtgaagagcatttggtacacacttgaccttctgtcgtccccagaccagtagtgaccaatcgggagtagcaaggaaggacac

SEQ ID NO: 3213 - protein, 467 aa, Homo sapiens
MAPKLLLLLCLFSGLHARSRKVEEDEYEDSSSNQKWVLAPKSQDTDVTLILNKLLREYDKKLRPDIGIKPTVIDVDIYVNSIGPVSSINMEYQIDIFFAQTWTDSRLRFNSTMKILTLNSNMVGLIWIPDTIFRNSKTAEAHWITTPNQLLRIWNDGKILYTLRLTINAECQLQLHNFPMDEHSCPLIFSSYGYPKEEMIYRWRKNSVEAADQKSWRLYQFDFMGLRNTTEIVTTSAGDYVVMTIYFELSRRMGYFTIQTYIPCILTVVLSWVSFWIKKDATPARTALGITTVLTMTTLSTIARKSLPRVSYVTAMDLFVTVCFLFVFAALMEYATLNYYSSCRKPTTTKKTTSLLHPDSSRWIPERISLQAPSNYSLLDMRPPPPAMITLNNSVYWQEFEDTCVYECLDGKDCQSFFCCYEECKSGSWRKGRIHIDILELDSYSRVFFPTSFLLFNLVYWVGYLYL

SEQ ID NO: 3214 - DNA, 2171 bp, Homo sapiens
ggccgcaggcgcaggcccgggcgacagccgagacgtggagcgcgccggctcgctgcagctccgggactcaacatgcgctgctcgccgggaggcgtctggctggcgctggccgcgtcgctcctgcacgtgtccctgcaaggcgagttccagaggaagctttacaaggagctggtcaagaactacaatcccttggagaggcccgtggccaatgactcgcaaccactcaccgtctacttctccctgagcctcctgcagatcatggacgtggatgagaagaaccaagttttaaccaccaacatttggctgcaaatgtcttggacagatcactatttacagtggaatgtgtcagaatatccaggggtgaagactgttcgtttcccagatggccagatttggaaaccagacattcttctctataacagtgctgatgagcgctttgacgccacattccacactaacgtgttggtgaattcttctgggcattgccagtacctgcctccaggcatattcaagagttcctgctacatcgatgtacgctggtttccctttgatgtgcagcactgcaaactgaagtttgggtcctggtcttacggaggctggtccttggatctgcagatgcaggaggcagatatcagtggctatatccccaatggagaatgggacctagtgggaatccccggcaagaggagtgaaaggttctatgagtgctgcaaagagccctaccccgatgtcaccttcacagtgaccatgcgccgcaggacgctctactatggcctcaacctgctgatcccctgtgtgctcatctccgccctcgccctgctggtgttcctgcttcctgcagattccggggagaagatttccctggggataacagtcttactctctcttaccgtcttcatgctgctcgtggctgagatcatgcccgcaacatccgattcggtaccattgatagcccagtacttcgccagcaccatgatcatcgtgggcctctcggtggtggtgacagtgatcgtgctgcagtaccaccaccacgaccccgacgggggcaagatgcccaagtggaccagagtcatccttctgaactggtgcgcgtggttcctgcgaatgaagaggcccggggaggacaaggtgcgcccggcctgccagcacaagcagcggcgctgcagcctggccagtgtggagatgagcgccgtggcgccgccgcccgccagcaacgggaacctgctgtacatcggcttccgcggcctggacggcgtgcactgtgtcccgacccccgactctggggtagtgtgtggccgcatggcctgctcccccacgcacgatgagcacctcctgcacggcgggcaaccccccgagggggacccggacttggccaagatcctggaggaggtccgctacattgccaaccgcttccgctgccaggacgaaagcgaggcggtctgcagcgagtggaagttcgccgcctgtgtggtggaccgcctgtgcctcatggccttctcggtcttcaccatcatctgcaccatcggcatcctgatgtcggctcccaacttcgtggaggccgtgtccaaagactttgcgtaaccacgcctggttctgtacatgtggaaaactcacagatgggcaaggcctttggcttggcgagatttgggggtgctaatccaggacagcattacacgccacaactccagtgttcccttctggctgtcagtcgtgttgcttacggtttctttgttactttaggtagtagaatctcagcactttgtttcatattctcagatgggctgatagatatccttggcacatccgtaccatcggtcagcagggccactgagtagtcattttgcccattagcccactgcctggaaagcccttcggagagctccccatggctcctcaccaccgagacagttggttttgcatgtctgcatgaaggtctacctgaaaattcaacatttgctttttgcttgtgtacaaacccagattgaagctaaaataaaccagactcactaaatcctttccaataattgactggtggaaggaaaacaaaaaacaaaaactaaaaacctcttagcttttctgcaattcaactttttatttttatttttatttctatcaaagacggtagagagaaacagcttgatgctgtttctacattaaaaaaaaaaaaaaaa

SEQ ID NO: 3215 - protein, 502 aa, Homo sapiens
MRCSPGGVWLALAASLLHVSLQGEFQRKLYKELVKNYNPLERPVANDSQPLTVYFSLSLLQIMDVDEKNQVLTTNIWLQMSWTDHYLQWNVSEYPGVKTVRFPDGQIWKPDILLYNSADERFDATFHTNVLVNSSGHCQYLPPGIFKSSCYIDVRWFPFDVQHCKLKFGSWSYGGWSLDLQMQEADISGYIPNGEWDLVGIPGKRSERFYECCKEPYPDVTFTVTMRRRTLYYGLNLLIPCVLISALALLVFLLPADSGEKISLGITVLLSLTVFMLLVAEIMPATSDSVPLIAQYFASTMIIVGLSVVVTVIVLQYHHHDPDGGKMPKWTRVILLNWCAWFLRMKRPGEDKVRPACQHKQRRCSLASVEMSAVAPPPASNGNLLYIGFRGLDGVHCVPTPDSGVVCGRMACSPTHDEHLLHGGQPPEGDPDLAKILEEVRYIANRFRCQDESEAVCSEWKFAACVVDRLCLMAFSVFTIICTIGILMSAPNFVEAVSKDFA

SEQ ID NO: 3216 - DNA, 2330 bp, Homo sapiens
gaattcggcacgagcgacgcggcccagaggccaggaacattccgcgcgtggaccagccgggccagggcgatgctgcgggtgcggtgtctgcgcggcgggagccgcggcgccgaggcggtgcactacatcggatctcggcttggacgaaccttgacaggatgggtgcagcgaactttccagagcacccaggcagctacggcttcctcccggaactcctgtgcagctgacgacaaagccactgagcctctgcccaaggactgccctgtctcttcttacaacgaatgggaccccttagaggaagtgatagtgggcagagcagaaaacgcctgtgttccaccgttcaccatcgaggtgaaggccaacacatatgaaaagtactggccattttaccagaagcaaggagggcattattttcccaaagatcatttgaaaaaggctgttgctgaaattgaagaaatgtgcaatattttaaaaacggaaggagtgacagtaaggaggcctgaccccattgactggtcattgaagtataaaactcctgattttgagtctacgggtttatacagtgcaatgcctcgagacatcctgatagttgtgggcaatgagattatcgaggctcccatggcatggcgttcacgcttctttgagtaccgagcgtacaggtcaattatcaaagactacttccaccgtggcgccaagtggacaacagctcctaagcccacaatggctgatgagctttataaccaggattatcccatccactctgtagaagacagacacaaattggctgctcagggaaaatttgtgacaactgagtttgagccatgctttgatgctgctgacttcattcgagctggaagagatatttttgcacagagaagccaggttacaaactacctaggcattgaatggatgcgtaggcatcttgctccagactacagagtgcatatcatctcctttaaagatcccaatcccatgcatattgatgctaccttcaacatcattggacctggtattgtgctttccaaccctgaccgaccatgtcaccagattgatcttttcaagaaagcaggatggactatcattactcctccaacaccaatcatcccagacgatcatccactctggatgtcatccaaatggctttccatgaatgtcttaatgctagatgaaaaacgtgttatggtggatgccaatgaagttccaattcaaaagatgtttgaaaagctgggtatcactaccattaaagttaacattcgtaatgccaattccctgggaggaggcttccattgctggacctgcgatgtccggcgccgaggcaccctacagtcctacttggactgaacaggcctgatggagcttgtggctggcctcagatacacctaagaagcttaggggcaaggttcattctcctgctttaaaaagtgcatgaactgtagtgctttaaacaatcatctccttaacaggggtcgtaagcctggtttgcttctattacttttctttgacataaagaaaataacttctgctaggtattactctctactcctaaagttatttactatttggcttcaagtataaaattttggtgaatgtgtaccaagaaaaaattagtcacctgagtaacttggccactaataattaaccatctacctctgtttttaattttctttccaaaaggcagcttgaaatgttggtcctaatcttaattttttttcctcttctatagacttgagaatgtttttctctaaatgagagaaagacttagaatgtacacagatccaaaatagaatcagattatctctttttttctaaaggagagaaagacttagaacatacacagatcctaagtagaaccaggtaattgtctctttttctaataaggaatttgggtaatttttaattttttgttttttaaaaaataacctagactatgcaaaacatcaaagtgaattttccatgaatgtttttaatattctcatctcaacattgtgatatatgctactaaaaaccttttcatatacatcttacctcatttcaagtgaattattttaatctttttctctctttccaaaaatttacaggaatgtttagtgtaattggatttcgctatcagttcccatccttaagttttgatattcaatatctgatagatacactgcatctttggtcatctaagatttgtttacaaatgtgcaaattatttagagcatagactttataagcattaaaaaaaactaatggaggtaaaacctaaatgcgatgtgaaataattttagtgttgatactgtatgtgtatttttattctaataaacttttgtgttccagattgaaaa

SEQ ID NO: 3217 - protein, 423 aa, Homo sapiens
MLRVRCLRGGSRGAEAVHYIGSRLGRTLTGWVQRTFQSTQAATASSRNSCAADDKATEPLPKDCPVSSYNEWDPLEEVIVGRAENACVPPFTIEVKANTYEKYWPFYQKQGGHYFPKDHLKKAVAEIEEMCNILKTEGVTVRRPDPIDWSLKYKTPDFESTGLYSAMPRDILIVVGNEIIEAPMAWRSRFFEYRAYRSIIKDYFHRGAKWTTAPKPTMADELYNQDYPIHSVEDRHKLAAQGKFVTTEFEPCFDAADFIRAGRDIFAQRSQVTNYLGIEWMRRHLAPDYRVHIISFKDPNPMHIDATFNIIGPGIVLSNPDRPCHQIDLFKKAGWTIITPPTPIIPDDHPLWMSSKWLSMNVLMLDEKRVMVDANEVPIQKMFEKLGITTIKVNIRNANSLGGGFHCWTCDVRRRGTLQSYLD

SEQ ID NO: 3218 - DNA, 2522 bp, Homo sapiens
gtttcctaatctggtttcgtctgcttggttcatctgtgtgcgatggctccggactcggatcccttccctgaagggccgctcttaaagctgctacccttagacgctagagaccggggcacccagcgctgccgcctgggcccggccgccctccacgccctgggcgcgcgcttgggctcggcagtgaagatctcgctacccgacggcggctcctgcctctgcactgcctggcctcggcgggacggagcggacggctttgtgcagctggacccgctgtgcgcgagccccggggcggcggtcggggcgtcgagatcccggaggagtctcagcctgaatcgcctcctcctagtgccctgtccgcccctgcggcgcgtcgccgtgtggccggtgttgcgagagcgggcaggcgcgcccggtgcccggaatacagccgcggtgctggaggcggcacaggagctgctgagaaaccgaccgatctccctgggccacgtggtggtcgctccgccaggcgctcctggcctggtggctgccttgcacatcgtcggcgggacgcccagtcccgatcccgctgggctggtcacccctcgtacccgcgtcagccttggcggggagcctccgtcggaagcccagccgcagcccgaggtgcccctgggaggtctttcggaggcggccgactcgctgcgggagctcctccgcctcccgctccgctacccgcgcgccctgaccgcgctgggcttagcggtgcctcgcggggtgctcctggcggggccccccggagtgggcaagacccagctggtgcaggccgtggcgcgcgaggcgggcgcggagctgctggcagtcagcgccccggcgctgcagggttcccggcctggggagaccgaggagaacgtgcggcgggtcttccagcgcgcccgggaactggccagccgcggacccagcctcctcttcctggacgagatggacgccttgtgtccccagcggggcagtcgagcacccgagagccgcgtagtggcccaggtgttgacgctgctggacggcgccagtggggaccgcgaggtcgtggttgtgggagccactaaccggccggacgctctagacccagcgctgcgtagacccgggagatttgaccgagaggtggtcattgggactcccacacttaaacaaagaaaggaaattctgcaagtgattacctcgaagatgcccatctccagtcatgttgatttgggccttcttgcagaaatgacagttggctatgttggtgccgacctgacagcactctgtagggaggctgccatgcatgccctccttcatagtgagaagaaccaggacaatcctgtgattgatgaaatagacttccttgaagcttttaaaaatattcagccctcatcgtttcgaagcgtcattggattaatggatatcaagcctgttgactgggaggagattggtggccttgaagatgtaaaactgaagttaaaacagagcattgagtggcctctgaaattcccttgggaatttgttagaatgggcctgacacaaccaaagggagttctcctctatgggccccctggatgtgctaaaaccactctggtgagggccctggccacaagctgtcactgctctttcgtttcagtgagtggagctgatctgttttcaccgtttgttggagattcagaaaaagtgttgtctcagatatttcgacaagcaagagcaagcactccagcaattttgtttttggatgaaattgattcaatcttgggagctcgctcagccagcaagacaggatgtgatgttcaagaacgagttctttctgttctcctgaatgaattagatggtgttggacttaagacaatagagagaagaggaagtaaatcaagtcaacaggagtttcaagaagtttttaaccgaagtgtcatgattattgcagcaacaaatagacctgatgtgttagatactgctttgttacgacctggaagattagataagatcatctatatcccacctccagatcacaagggcaggctttctattttaaaagtctgtacaaaaaccatgccaatagggcctgatgtctccttagaaaacctcgcagcagaaacctgttttttttctggagctgatcttagaaacctctgcacagaagctgctttgctggctctgcaagaaaatggactagacgcaactacagtgaaacaagagcactttctaaaatcacttaagactgtaaaaccgtcgttaagttgcaaggacttggctttatatgaaaacttatttaagaaagaaggattttctaacgtggaaggtatttaaaaatcaccttaaactcttgttcagttcacattaattgaaatgtgaacttgcctgtcgtttgcaacttcacacttttagaatttgtgtttatatttcctgtaagtgaataaataaaacaaaacaaaacaaaaaaaacttgtgcctgataagctaaggctcatttatttttaaaaggcatattaaataaaatactgtaatttaggaaaaaaaaaaaaaaa

SEQ ID NO: 3219 - protein, 753 aa, Homo sapiens
MAPDSDPFPEGPLLKLLPLDARDRGTQRCRLGPAALHALGARLGSAVKISLPDGGSCLCTAWPRRDGADGFVQLDPLCASPGAAVGASRSRRSLSLNRLLLVPCPPLRRVAVWPVLRERAGAPGARNTAAVLEAAQELLRNRPISLGHVVVAPPGAPGLVAALHIVGGTPSPDPAGLVTPRTRVSLGGEPPSEAQPQPEVPLGGLSEAADSLRELLRLPLRYPRALTALGLAVPRGVLLAGPPGVGKTQLVQAVAREAGAELLAVSAPALQGSRPGETEENVRRVFQRARELASRGPSLLFLDEMDALCPQRGSRAPESRVVAQVLTLLDGASGDREVVVVGATNRPDALDPALRRPGRFDREVVIGTPTLKQRKEILQVITSKMPISSHVDLGLLAEMTVGYVGADLTALCREAAMHALLHSEKNQDNPVIDEIDFLEAFKNIQPSSFRSVIGLMDIKPVDWEEIGGLEDVKLKLKQSIEWPLKFPWEFVRMGLTQPKGVLLYGPPGCAKTTLVRALATSCHCSFVSVSGADLFSPFVGDSEKVLSQIFRQARASTPAILFLDEIDSILGARSASKTGCDVQERVLSVLLNELDGVGLKTIERRGSKSSQQEFQEVFNRSVMIIAATNRPDVLDTALLRPGRLDKIIYIPPPDHKGRLSILKVCTKTMPIGPDVSLENLAAETCFFSGADLRNLCTEAALLALQENGLDATTVKQEHFLKSLKTVKPSLSCKDLALYENLFKKEGFSNVEGI

SEQ ID NO: 3220 - DNA, 929 bp, Homo sapiens
cggttgtggtcgctatatataaggtggggaggccgccggcccgttcggttccgggcgttaccatcgtccgtgcgcaccgcccggcgtccaggtgagtctcccatctgcagagacgcggacgcgccggcccgcagttggcctgcggagcgcggtggacggtttggcgcccaccaggcgatcaatactttggatttttaatttctagatttggcaattcttcgctgaagtcatcatgagctttttccaactcctgatgaaaaggaaggaactcattcccttggtggtgttcatgactgtggcggcgggtggagcctcatctttcgctgtgtattctctttggaaaaccgatgtgatccttgatcgaaaaaaaaatccagaaccttgggaaactgtggaccctactgtacctcaaaagcttataacaatcaaccaacaatggaaacccattgaagagttgcaaaatgtccaaagggtgaccaaatgacgagccctcgcctctttcttctgaagagtactctataaatctagtggaaacatttctgcacaaactagattctggacaccagtgtgcggaaatgcttctgctacatttttagggtttgtctacattttttgggctctggataaggaattaaaggagtgcagcaataactgcactgtctaaaagtttgtgcttattttcttgtaaatttgaatattgcatattgaaatttttgtttatgatctatgaatgtttttcttaaaatttacaaagctttgtaaattagattttctttaataaaatgccatttgtgcaagatttctcaaagattaggtatatatttaaatggaagagaaaatatttttatgggagaaaaatacatttgaaccatgaaatttcatcttttaaataacatccagtacagatttctgtgtaaaaaaaaaaaaaa

SEQ ID NO: 3221 - protein, 83 aa, Homo sapiens
MSFFQLLMKRKELIPLVVFMTVAAGGASSFAVYSLWKTDVILDRKKNPEPWETVDPTVPQKLITINQQWKPIEELQNVQRVTK

SEQ ID NO: 3222 - DNA, 815 bp, Homo sapiens
cggttgtggtcgctatatataaggtggggaggccgccggcccgttcggttccgggcgttaccatcgtccgtgcgcaccgcccggcgtccagatttggcaattcttcgctgaagtcatcatgagctttttccaactcctgatgaaaaggaaggaactcattcccttggtggtgttcatgactgtggcggcgggtggagcctcatctttcgctgtgtattctctttggaaaaccgatgtgatccttgatcgaaaaaaaaatccagaaccttgggaaactgtggaccctactgtacctcaaaagcttataacaatcaaccaacaatggaaacccattgaagagttgcaaaatgtccaaagggtgaccaaatgacgagccctcgcctctttcttctgaagagtactctataaatctagtggaaacatttctgcacaaactagattctggacaccagtgtgcggaaatgcttctgctacatttttagggtttgtctacattttttgggctctggataaggaattaaaggagtgcagcaataactgcactgtctaaaagtttgtgcttattttcttgtaaatttgaatattgcatattgaaatttttgtttatgatctatgaatgtttttcttaaaatttacaaagctttgtaaattagattttctttaataaaatgccatttgtgcaagatttctcaaagattaggtatatatttaaatggaagagaaaatatttttatgggagaaaaatacatttgaaccatgaaatttcatcttttaaataacatccagtacagatttctgtgtaaaaaaaaaaaaaa

SEQ ID NO: 3223 - protein, 83 aa, Homo sapiens; identical to SEQ ID NO: 3221

SEQ ID NO: 3224 - DNA, 4290 bp, Homo sapiens
gcagggcggggagaggcggtggctgtgggcgtccggccccgaacctgtcagacctggggagccggcctccagcagcgggcgcggcgggcgcgagcacgaccccactctcctgcggccgcgggtggagcagcgcgagcccgcctcgctgagccggccgggggcggggagatgagttgcggccccgcggcagcgccccaggatggggagggacgcgcggcactgccctcgagaactggcgctccggtgaagtaggcgccgccggccgtccgcctcccccaagccgttccgcaccgcggccgctcagcctctgccatggccggctctggcgcgtggaagcgcctcaaatctatgctaaggaaggatgatgcgccgctgtttttaaatgacaccagcgcctttgacttctcggatgaggcgggggacgaggggctttctcggttcaacaaacttcgagttgtggtggccgatgacggttccgaagccccggaaaggcctgttaacggggcgcacccgaccctccaggccgacgatgattccttactggaccaagacttacctttgaccaacagtcagctgagtttgaaggtggactcctgtgacaactgcagcaaacagagagagatactgaagcagagaaaggtgaaagccaggttgaccattgctgccgttctgtacttgcttttcatgattggagaacttgtaggtggatacattgcaaatagcctagcaatcatgacagatgcacttcatatgttaactgacctaagcgccatcatactcaccctgcttgctttgtggctatcatcaaaatcaccaaccaaaagattcacctttggatttcatcgcttagaggttttgtcagctatgattagtgtgctgttggtgtatatacttatgggattcctcttatatgaagctgtgcaaagaactatccatatgaactatgaaataaatggagatataatgctcatcaccgcagctgttggagttgcagttaatgtaataatggggtttctgttgaaccagtctggtcaccgtcactcccattcccactccctgccttcaaattcccctaccagaggttctgggtgtgaacgtaaccatgggcaggatagcctggcagtgagagctgcatttgtacatgctttgggagatttggtacagagtgttggtgtgctaatagctgcatacatcatacgattcaagccagaatacaagattgctgaccccatctgtacatacgtattttcattacttgtggcttttacaacatttcgaatcatatgggatacagtagttataatactagaaggtgtgccaagccatttgaatgtagactatatcaaagaagccttgatgaaaatagaagatgtatattcagtcgaagatttaaatatctggtctctcacttcaggaaaatctactgccatagttcacatacagctaattcctggaagttcatctaaatgggaggaagtacagtccaaagcaaaccatttattattgaacacatttggcatgtatagatgtactattcagcttcagagttacaggcaagaagtggacagaacttgtgcaaattgtcagagttctagtccctaattttatgtattttgggaactcctgccttatttatcctgcagtcacagacttgagagcaataaatgcaaacctaaatgagaaaatggaatccctgacagctgtgtccgtatcaagcatcagtctctcaaacagttgccccagcctgacagtgctagtctctgtttaatggtaaaaggagactttgccataattttcagatgaagatgtttcccaaacactgtttacagaatgagatgtgactctacagatacctcatagaagacaatccaagatcatacttcattaacttgacagagtacgtgtcttaaaggaagcatcaagaattcaatatttgcatttaaaaatactttttaaggccattttatattaagccagtgctggaaaactgaattttttttattatgtataataatctcgacacccagcttctggaattgctgctttctttttacagaaattactacccaacagatttcaggaagtactagtagttatcccaaaagtggaataagcatgtattcctaagtgtttcagaaatgttttatttcacacataagtcttaatgttattgttatgattatactttataaacaaccttttccagatgctacagggttttgaatctcaaagttaacatttttcattatttgtaatcttagaaccaaatctttatttattgtggtcactgttattaaatgatttaggaaatactttcaatattattctgaatggctgaagttagtcttaaactcaaattactatatgatgatttaaaacaaaataaaagagcgaggatgggggttggagtttcaggtttatgtcttcccgacatcacttttatcattcatgaaattgtcttaaaaaagcaagagactgcaaaatgtaaacagtaatcttctgtccctttaagaactgccaacaatttgtacaaaaaatgtggtacgttggttcctgcctccactccaggtcatctgtgtgtttagcctttcagggtaaactctagagggttcagtttataattcccacctttcacatatagttcaacaacattaatccagagagaattttatgttttatgatatgggttatgttttattatatattttatgttttatgatatgggttagggattctccatggactccagaaaccctaaaatacaattttgaggttttccaataataccatagcagaaatgtccaaggggttgggggaagatattactttgagaaaacagaaatgtaaaggatttttgaccttatatatgtgtgtggttttgtttttgtttttgttcttgagagagtctcactctgtcacccaggctggagtgcagtggcgtgacctctgctcactgtaacctctgcctcctgggttcaagtgattcttctgcctcagcctcccaactagctgggactacaggtacaccacacccagctcatttttttgtatttttagtagagacagggttttgccacattggcctgtctggtcttgaactcctgacctcaggtgatccgcctgccttggccttccagagtgctgggattacagcatgagccaccatgcctggcctgtatgtgtgtgttttaaagcactagatagggatggacattaaatctgtgttgcagggaaactaaacagaggtttccaaactgaaggcaacctaattgtaaatgcctgtgttaaagaggcagcttgactgttcatgtttcattttgcaaccattggttttgagattatcttttatgcacatttggagtcccttttcaacagtgacagtttcttacacgaagaatggatatggttattgggctcctctaagaatcagagtagggtaacaatgtaccaggcaaattgtaagttgaaattctagataagcatgcagatgacttacaatataaatgaagaataggaaacattttatcttcttaccaagtaccttactataagtaaacctaagataagaaaacccagatttacctataagattgttgggagttaatggtgtcaataaaaggattgatggtccctctaatgaaacccagtagatgtttgttgaattgaactgaaaatttatgtggccagacacagtggctcatgcctgtaatctcagcatttggggaggcaaaggtggaagtatccctcgaggccaagagttcatgaccagcctggtcttttgtagagaccctgtctctacaaaaatataaaaatcagccaggcgtcgtgcacacctgtagtatcagctacttgtaaggctgtggcagaagtgctttagcccaggaggttgaggctgcagtgagccatgtccacaccattgcactgcagcctgagtaacaaaatgagaccctatctcaaaaacaaaaaggaaaagaaaatatacatgatgggattcctattgtgaagtcatttaaaataatgacttgaatttctcagaaatttcaggagcatataaactatttaaatcaaaatattcttacatatagaaaccaagtaagaataaatgagagatatttcagtggacatctggacatatttatggactttgagtatctagcaagtagaaaggaaaaaaatattcatcatactctaatcatttttttatatctattgagcttgtttcttgtaaacttttctttatcttataaaggcatatctcgcttttgtatcgacctgttccttaaaaaaaaa

SEQ ID NO: 3225 - protein, 429 aa, Homo sapiens
MAGSGAWKRLKSMLRKDDAPLFLNDTSAFDFSDEAGDEGLSRFNKLRVVVADDGSEAPERPVNGAHPTLQADDDSLLDQDLPLTNSQLSLKVDSCDNCSKQREILKQRKVKARLTIAAVLYLLFMIGELVGGYIANSLAIMTDALHMLTDLSAIILTLLALWLSSKSPTKRFTFGFHRLEVLSAMISVLLVYILMGFLLYEAVQRTIHMNYEINGDIMLITAAVGVAVNVIMGFLLNQSGHRHSHSHSLPSNSPTRGSGCERNHGQDSLAVRAAFVHALGDLVQSVGVLIAAYIIRFKPEYKIADPICTYVFSLLVAFTTFRIIWDTVVIILEGVPSHLNVDYIKEALMKIEDVYSVEDLNIWSLTSGKSTAIVHIQLIPGSSSKWEEVQSKANHLLLNTFGMYRCTIQLQSYRQEVDRTCANCQSSSP

SEQ ID NO: 3226 - DNA, 1927 bp, Homo sapiens
acctaagcgatgaaatccaaaggtgaatcttttggttggtgattttgatgatagccacaaagcaagcaggctgtatggtagccttgaaaaccaacaggccacaatcacagtgaaaacctcaggttggcagccactggaggatacaaaatgagtttggatctccttcaatgccccattcccagagaactgtcattatttgacctgctggtagttccctaaaggacgtgcaaggatgtttttatttgactggacacttgaagcttgccctgtatgaacagcccccatcttcccatgcttgtcaaaaatcagaggcaactaacactgcggcttcctgagagtctcactctgtcacccaggctggagagcaattgcacaaacacttggctcactgcagcctcaacttcttgtcctcaagtgatcctcccaccttagcctcctaagtagctgggaccacagggaactccggatgtgactcctgttacatgaaaatggaagaggtcagagttgtccaagagggaggccagccacatccaggcagggcccccatggtcagaaccctgctagagccatcaaggtcccagagctcccaagatggtggcaagccttttgttctctgaccagaggttcctggcctcacggattccaaggaatggaaccttgggccatgcgtgcacttgattttgcagatgagtctggaagtgttagttgcaaagatatgcatttacttctctggctacaaaaaagaatagaaatgcacaaagcagagcagtgtgaagaagaagaggcgatgacccctagaccgaccaaagcccgtgctccactgcccagtgcctatgtcccaccactgtcgctgccaccctgcccgagagaaaggctgaaggggatgctaaaggagataaaaccaaggttaagtaggaactgcagagaagatccacaaggttgtctgctaaacctgctcctccaaagccacagccgaagcccagaaaggcctctgcaaagaagagagagaaggtacctacagagaagaagggaaaagctgatgctggcaaggaggggaataaccctgcagaaaatggagatgccaaaacagactaggcacagaaagctaaaggtgctggagatgccaagtgaagtgtgtgcatttttgataactgtgtacttctggtgactgtacagtttgaaatactattttttaatcaagttttataaaaatgcagattttgtttagcttttttttttttttttaagctatgttagtacacagaatacttcattgttgttttggggagaagggccatatgtcactaatagaaagcccctgaagctggactgatgtggggaaaacaccttttccttctggttttgagagacttcctcttgggtcccaggaagagggattccctgactttgatacacatggccaccttggtataaaagccttgtggtatggaaaaacaaattcgttttttatgtcctcttctctgtttctacctttcagaatggacttaaatcccttaaacccagacatcttctgggacctgacccccaataattggttaccagtgtgtcaggcaatctggactttgccctcaaaagagcagtggttcctgtttctaggttgtggatcttcagataaattctgtcattttcctttcacttcctgaaagccagggtcggttcatgaaaagctatgaaacagcatgctaaatgtgaaatgtcaaccctcactaaactttgccggttcagagcatcagatgaagacttcattgggttttacagtggctttctgatttttggtagtccattgaagaagggagtttgaaagttgttgtatactgttaacgattgtctgcccatgtcctgcccaaaataccatgattctttatggaaattatctttaataaagctggatacagtttggcttggg

SEQ ID NO: 3227 - protein, 172 aa, Homo sapiens
MEPWAMRALDFADESGSVSCKDMHLLLWLQKRIEMHKAEQCEEEEAMTPRPTKARAPLPSAYVPPLSLPPCPRERLKGMLKEIKPRLSRNCREDPQGCLLNLLLQSHSRSPERPLQRRERRYLQRRREKLMLARRGITLQKMEMPKQTRHRKLKVLEMPSEVCAFLITVYFW

SEQ ID NO: 3228 - DNA, 1682 bp, Homo sapiens
acctaagcgatgaaatccaaaggtgaatcttttggttggtgattttgatgatagccacaaagcaagcaggctgtatggtagccttgaaaaccaacaggccacaatcacagtgaaaacctcaggttggcagccactggaggatacaaaatgagtttggatctccttcaatgccccattcccagagaactgtcattatttgacctgctggtagttccctaaaggacgtgcaaggatgtttttatttgactggacacttgaagcttgccctgtatgaacagcccccatcttcccatgcttgtcaaaaatcagaggcaactaacactgcggcttcctgagagctcccaagatggtggcaagccttttgttctctgaccagaggttcctggcctcacggattccaaggaatggaaccttgggccatgcgtgcacttgattttgcagatgagtctggaagtgttagttgcaaagatatgcatttacttctctggctacaaaaaagaatagaaatgcacaaagcagagcagtgtgaagaagaagaggcgatgacccctagaccgaccaaagcccgtgctccactgcccagtgcctatgtcccaccactgtcgctgccaccctgcccgagagaaaggctgaaggggatgctaaaggagataaaaccaaggttaagtaggaactgcagagaagatccacaaggttgtctgctaaacctgctcctccaaagccacagccgaagcccagaaaggcctctgcaaagaagagagagaaggtacctacagagaagaagggaaaagctgatgctggcaaggaggggaataaccctgcagaaaatggagatgccaaaacagactaggcacagaaagctaaaggtgctggagatgccaagtgaagtgtgtgcatttttgataactgtgtacttctggtgactgtacagtttgaaatactattttttaatcaagttttataaaaatgcagattttgtttagcttttttttttttttttaagctatgttagtacacagaatacttcattgttgttttggggagaagggccatatgtcactaatagaaagcccctgaagctggactgatgtggggaaaacaccttttccttctggttttgagagacttcctcttgggtcccaggaagagggattccctgactttgatacacatggccaccttggtataaaagccttgtggtatggaaaaacaaattcgttttttatgtcctcttctctgtttctacctttcagaatggacttaaatcccttaaacccagacatcttctgggacctgacccccaataattggttaccagtgtgtcaggcaatctggactttgccctcaaaagagcagtggttcctgtttctaggttgtggatcttcagataaattctgtcattttcctttcacttcctgaaagccagggtcggttcatgaaaagctatgaaacagcatgctaaatgtgaaatgtcaaccctcactaaactttgccggttcagagcatcagatgaagacttcattgggttttacagtggctttctgatttttggtagtccattgaagaagggagtttgaaagttgttgtatactgttaacgattgtctgcccatgtcctgcccaaaataccatgattctttatggaaattatctttaataaagctggatacagtttggcttggg

SEQ ID NO: 3229 - protein, 172 aa, Homo sapiens; identical to SEQ ID NO: 3227

SEQ ID NO: 3230 - DNA, 1702 bp, Homo sapiens
acctaagcgatgaaatccaaaggtgaatcttttggttggtgattttgatgatagccacaaagcaagcaggctgtatggtagccttgaaaaccaacaggccacaatcacagtgaaaacctcaggttggcagccactggaggatacaaaatgagtttggatctccttcaatgccccattcccagagaactgtcattatttgacctgctggtagttccctaaaggacgtgcaaggatgtttttatttgactggacacttgaagcttgccctgtatgaacagcccccatcttcccatgcttgtcaaaaatcagaggcaactaacactgcggcttcctgagggaactccggatgtgactcctgttacatgaaaatggaagaggtcagagttgtccaagagggaggccagccacatccaggcagggcccccatggtcagaaccctgctagagccatcaaggtcccagatgagtctggaagtgttagttgcaaagatatgcatttacttctctggctacaaaaaagaatagaaatgcacaaagcagagcagtgtgaagaagaagaggcgatgacccctagaccgaccaaagcccgtgctccactgcccagtgcctatgtcccaccactgtcgctgccaccctgcccgagagaaaggctgaaggggatgctaaaggagataaaaccaaggttaagtaggaactgcagagaagatccacaaggttgtctgctaaacctgctcctccaaagccacagccgaagcccagaaaggcctctgcaaagaagagagagaaggtacctacagagaagaagggaaaagctgatgctggcaaggaggggaataaccctgcagaaaatggagatgccaaaacagactaggcacagaaagctaaaggtgctggagatgccaagtgaagtgtgtgcatttttgataactgtgtacttctggtgactgtacagtttgaaatactattttttaatcaagttttataaaaatgcagattttgtttagcttttttttttttttttaagctatgttagtacacagaatacttcattgttgttttggggagaagggccatatgtcactaatagaaagcccctgaagctggactgatgtggggaaaacaccttttccttctggttttgagagacttcctcttgggtcccaggaagagggattccctgactttgatacacatggccaccttggtataaaagccttgtggtatggaaaaacaaattcgttttttatgtcctcttctctgtttctacctttcagaatggacttaaatcccttaaacccagacatcttctgggacctgacccccaataattggttaccagtgtgtcaggcaatctggactttgccctcaaaagagcagtggttcctgtttctaggttgtggatcttcagataaattctgtcattttcctttcacttcctgaaagccagggtcggttcatgaaaagctatgaaacagcatgctaaatgtgaaatgtcaaccctcactaaactttgccggttcagagcatcagatgaagacttcattgggttttacagtggctttctgatttttggtagtccattgaagaagggagtttgaaagttgttgtatactgttaacgattgtctgcccatgtcctgcccaaaataccatgattctttatggaaattatctttaataaagctggatacagtttggcttggg

SEQ ID NO: 3231 - protein, 150 aa, Homo sapiens
MHLLLWLQKRIEMHKAEQCEEEEAMTPRPTKARAPLPSAYVPPLSLPPCPRERLKGMLKEIKPRLSRNCREDPQGCLLNLLLQSHSRSPERPLQRRERRYLQRRREKLMLARRGITLQKMEMPKQTRHRKLKVLEMPSEVCAFLITVYFW

SEQ ID NO: 3232 - DNA, 1697 bp, Homo sapiens
acctaagcgatgaaatccaaaggtgaatcttttggttggtgattttgatgatagccacaaagcaagcaggctgtatggtagccttgaaaaccaacaggccacaatcacagtgaaaacctcaggttggcagccactggaggatacaaaatgagtttggatctccttcaatgccccattcccagagaactgtcattatttgacctgctggtagttccctaaaggacgtgcaaggatgtttttatttgactggacacttgaagcttgccctgtatgaacagcccccatcttcccatgcttgtcaaaaatcagaggcaactaacactgcggcttcctgagagtctcactctgtcacccaggctggagagcaattgcacaaacacttggctcactgcagcctcaacttcttgtcctcaagtgatcctcccaccttagcctcctaagtagctgggaccacagatgagtctggaagtgttagttgcaaagatatgcatttacttctctggctacaaaaaagaatagaaatgcacaaagcagagcagtgtgaagaagaagaggcgatgacccctagaccgaccaaagcccgtgctccactgcccagtgcctatgtcccaccactgtcgctgccaccctgcccgagagaaaggctgaaggggatgctaaaggagataaaaccaaggttaagtaggaactgcagagaagatccacaaggttgtctgctaaacctgctcctccaaagccacagccgaagcccagaaaggcctctgcaaagaagagagagaaggtacctacagagaagaagggaaaagctgatgctggcaaggaggggaataaccctgcagaaaatggagatgccaaaacagactaggcacagaaagctaaaggtgctggagatgccaagtgaagtgtgtgcatttttgataactgtgtacttctggtgactgtacagtttgaaatactattttttaatcaagttttataaaaatgcagattttgtttagcttttttttttttttttaagctatgttagtacacagaatacttcattgttgttttggggagaagggccatatgtcactaatagaaagcccctgaagctggactgatgtggggaaaacaccttttccttctggttttgagagacttcctcttgggtcccaggaagagggattccctgactttgatacacatggccaccttggtataaaagccttgtggtatggaaaaacaaattcgttttttatgtcctcttctctgtttctacctttcagaatggacttaaatcccttaaacccagacatcttctgggacctgacccccaataattggttaccagtgtgtcaggcaatctggactttgccctcaaaagagcagtggttcctgtttctaggttgtggatcttcagataaattctgtcattttcctttcacttcctgaaagccagggtcggttcatgaaaagctatgaaacagcatgctaaatgtgaaatgtcaaccctcactaaactttgccggttcagagcatcagatgaagacttcattgggttttacagtggctttctgatttttggtagtccattgaagaagggagtttgaaagttgttgtatactgttaacgattgtctgcccatgtcctgcccaaaataccatgattctttatggaaattatctttaataaagctggatacagtttggcttggg

SEQ ID NO: 3233 - protein, 150 aa, Homo sapiens; identical to SEQ ID NO: 3231

SEQ ID NO: 3234 - DNA, 1923 bp, Homo sapiens
acctaagcgatgaaatccaaaggtgaatcttttggttggtgattttgatgatagccacaaagcaagcagggtaatgctgatgcttcaagtcttggaaccacacttcgagaatcactgttataatgtacagcagaactgcatgatcagctgtatggtagccttgaaaaccaacaggccacaatcacagtgaaaacctcaggttggcagccactggaggatacaaaatgagtttggatctccttcaatgccccattcccagagaactgtcattatttgacctgctggtagttccctaaaggacgtgcaaggatgtttttatttgactggacacttgaagcttgccctgtatgaacagcccccatcttcccatgcttgtcaaaaatcagaggcaactaacactgcggcttcctgagagtctcactctgtcacccaggctggagagcaattgcacaaacacttggctcactgcagcctcaacttcttgtcctcaagtgatcctcccaccttagcctcctaagtagctgggaccacagtgaggtcaaaaaatgtttgaaagccactgagatagaaggaccagccactttgaacgccttagaggcaaaaagagctttgtgagttgtaagaggaaaaagaagaccagcatggctgaagcgagccctggggaggagtgttatgaaagaagatgagtctggaagtgttagttgcaaagatatgcatttacttctctggctacaaaaaagaatagaaatgcacaaagcagagcagtgtgaagaagaagaggcgatgacccctagaccgaccaaagcccgtgctccactgcccagtgcctatgtcccaccactgtcgctgccaccctgcccgagagaaaggctgaaggggatgctaaaggagataaaaccaaggttaagtaggaactgcagagaagatccacaaggttgtctgctaaacctgctcctccaaagccacagccgaagcccagaaaggcctctgcaaagaagagagagaaggtacctacagagaagaagggaaaagctgatgctggcaaggaggggaataaccctgcagaaaatggagatgccaaaacagactaggcacagaaagctaaaggtgctggagatgccaagtgaagtgtgtgcatttttgataactgtgtacttctggtgactgtacagtttgaaatactattttttaatcaagttttataaaaatgcagattttgtttagcttttttttttttttttaagctatgttagtacacagaatacttcattgttgttttggggagaagggccatatgtcactaatagaaagcccctgaagctggactgatgtggggaaaacaccttttccttctggttttgagagacttcctcttgggtcccaggaagagggattccctgactttgatacacatggccaccttggtataaaagccttgtggtatggaaaaacaaattcgttttttatgtcctcttctctgtttctacctttcagaatggacttaaatcccttaaacccagacatcttctgggacctgacccccaataattggttaccagtgtgtcaggcaatctggactttgccctcaaaagagcagtggttcctgtttctaggttgtggatcttcagataaattctgtcattttcctttcacttcctgaaagccagggtcggttcatgaaaagctatgaaacagcatgctaaatgtgaaatgtcaaccctcactaaactttgccggttcagagcatcagatgaagacttcattgggttttacagtggctttctgatttttggtagtccattgaagaagggagtttgaaagttgttgtatactgttaacgattgtctgcccatgtcctgcccaaaataccatgattctttatggaaattatctttaataaagctggatacagtttggcttggg

SEQ ID NO: 3235 - protein, 163 aa, Homo sapiens
MKEDESGSVSCKDMHLLLWLQKRIEMHKAEQCEEEEAMTPRPTKARAPLPSAYVPPLSLPPCPRERLKGMLKEIKPRLSRNCREDPQGCLLNLLLQSHSRSPERPLQRRERRYLQRRREKLMLARRGITLQKMEMPKQTRHRKLKVLEMPSEVCAFLITVYFW

SEQ ID NO: 3236 - DNA, 3959 bp, Homo sapiens
acactgcgtccggggccagacgacgatatcagcgcggggtccccacaacgccatggggcagagccaactctcgagcgcgtgatcgaagcccgcagttttttcgcccccgtcacttccgggtgcgacaatctcttctgtccggccagccgctggagtcgttaggtgccgccttgcttctgacgagccacacgtttgcttcttccctgtgttcccagctggagggacatgagtgtccctgggccgtcgtctccggacggggccctgacacggccaccctactgcctggaggccggggagccgacgcctggtttaagtgacacttctccagatgaagggttaatagaggacttgactatagaagacaaagcagtggagcaactggcagaaggattgctttctcattatttgccagatctgcagagatcaaaacaagccctccaggaactcacacagaaccaagttgtattgttagacacactggaacaagagatttcaaaatttaaagaatgtcattctatgttggatattaatgctttgtttgctgaggctaaacactatcatgccaagttggtgaatataagaaaagagatgctgatgcttcatgaaaaaacatcaaagttaaaaaaaagagcacttaaactgcagcagaagaggcaaaaagaagagttggaaagggagcagcaacgagagaaggagtttgaaagagaaaagcagttaactgccagaccagccaaaaggatgtgaaaagttgtgtttgtgtgttttcttctcctgtcccatatttgggttatgatgactcaagtgtagactgaagttgaggtagtgccttatgccattatgtcatatgttgaaatccttattccggtattactgtgtctccatgccttttttccaagtagcagacgtcatgttgcatggtttttgatatttatatgtaagtttttcaaattttgcttaattttaaaatttattattttgatcttgaattatttataaactggaaagtggtttgattattgtgagtcaaaactctaagtggttaaaaattagtatgaattttttagcttcttaatgaatatggatttaaaactctccagttcttattttatgaaatgacttgcctttctggtaatacaatgctgattttttagtaattgccttttcattactttgttaagaagaaatgccagctgtttaatcacacctacccctggaaaagaggtaaaccttttgaacagttgaatttcatcagaagctctatagctttttggtgagaggaagtgatactctttattacaagaaacaaggaattaacaaaaataaggaacttgttgctacctttcttttctgttgaacattaaaaataatttggtttgtggactgggcatggtggcttatggaaaagaggtgagcctttgtgaagaacataatggaaaagtgcatgtacgggaaataacagcactttaggtgtagttcaggtgagcaagatgccagatagtttctactaaccatatactctttctgcttcttagcgtcgttgtcactgcttctgtggcttttgggttcaaagtagattatatatattcctaaagcttggtggaggtagtggagctatcacacactcaaatgagcttgtatatttataatacaatatagtattatagtaacagttatcatacactgagatatagtttctgtgcttgtaaaaaattcttgaagtgaggccgggtgcggtggctcatgcctgtaatcccaacgctttgggacgccgaggcgggtggatcatgaggtcaaaagattgagaccatcctggccaacatggtgaaaccccgtctctactagaaatacaaaaattagctgggtgtgggggcgtgcgcctgtagtcccagctacttgggaggctgaggcaggagaattgcttgaacccaggaggcagaggttgcagtaagccaagatcgtgccactgcactccagccttggtgacagagcaagactccgtctccaaaaaaaagaaaaaaaaatttcttgaagtggaatgatgtacaccaaatacccactttatagataattacagggatggtgaaaaattagtaaatagcttcacaaaagaggcagcgtgatacctttagtgttttctagaatttttttctggatattatatgtaagaatttattgtttgagggaaatacgaggtttcattgtttaaaatcaagagtgtattgtttactgttttacagtattatttaatatccaactggtctccaatctccattacatagggactgtacagagcctgtgaagatgtatgaatggtatcttttataatccacaatacatttctggtaagatggaatcactacctctgatcacatatcaggctaacgatagagaaagcattaggtttaagttgagggctaagaactggtttgtttaaaggtttaaattgttggaaaagagcatttgccttctttaatgaatgatggtctcacaattcagttgactttgacctaatatttaagaatataaatatattttatttgaaaggctgagtgttgccctcaaacacttgctaaaactgcctagggcaggattcattagggcttgcagacaatgtcacctaaattgctgaatgtactcattataatatgatatctgacaaaggtagtacagcgtttctgagtcatttgggaccaactgcagtggttgtttaaaatgctggttcctgcacacaattctctatctactgaagcacatctgttttctttgtttgttttgctttgctttttgtttttaaagtttcccccagtgattccagtgcacctgaaaagttgagaaccacaggcttagtggtacgttggggtttcccacgctaggctgcatagcattataacctgggaacgttaaaaaaaatacagacattcttgattcttagtgtagttatgatgtggatcctacgtattttttaaaaaactctccagataattttgatgtcacgagtcactagtatagactatctatctagtgagttgtattataagcgatgaaatactttaaaagctacccagtaactcttgggattaattttatgaaataaattctgagctgctgcttttgatatagtcagacttaagactgaaccccagtagacaggcaatagatatagaattctggttagctaattgaacttttgtgacctgtttaaaaacaaatcaaatttattgaacaaatgacaaggcacaaatactttcagaattgtatttcagttttgaagatttaaaaaaaatgtgaaaataaatatatattagtatcctttattttaaagtcaattgtaaaccagaagtactgttattttggtgattaaaatccaaaactttagctgtatttcagtaacaaaaacataccttactagactgtgatggctcacacctgtaatcccagtgctttgggaggctgaggtgggaagattctttgagcccaggagttcaaggctgcagtgaattctgatcgcaccactgaactccagcccgtatgacagagtgagaccctgtttctaaaaacaaaacaaacaaacaaacaaacaacgtatcttactgactaaactggaatggaaatcttataattagtgttgtatttttctgcaaaatagtgaattggtacttgggagacttctgttctttgttgaaaaaaattgcctttgttttgaaattatatcacctgtgttctgaactaaaatgatgggagttcattttgtatttactttgcagtaagtatcatgtaaatatgcaaatgttgaatgtaatatagattgtgtcctcattgagtttttgggtgatacagtttataaatataacaattatacaccctcatacattcgtctgattttgagcttgtaagatgagaactgctttttacacatttaataaaaaaaggtctctgaattaaaaaaaaaaaaaaaaaaa

SEQ ID NO: 3237 - protein, 172 aa, Homo sapiens
MSVPGPSSPDGALTRPPYCLEAGEPTPGLSDTSPDEGLIEDLTIEDKAVEQLAEGLLSHYLPDLQRSKQALQELTQNQVVLLDTLEQEISKFKECHSMLDINALFAEAKHYHAKLVNIRKEMLMLHEKTSKLKKRALKLQQKRQKEELEREQQREKEFEREKQLTARPAKRM

SEQ ID NO: 3238 - DNA, 1682 bp, Homo sapiens
gaaggtttttgctgcgccaacgcagtgaccgaaggctccgctcacgcccggcctgatcctgcctgaagatggtgccactggtggctgtggtatcagggccccgtgcccagctctttgcctgcctgctcaggctgggcactcagcaggtcggcccccttcagctgcacaccggggccagccatgcggccaggaaccattatgaggtgctggtgctgggtgggggcagtggcggaatcaccatggctgcccgcatgaagaggaaagtgggtgcagagaatgtggccattgttgagcccagtgagagacatttctaccagccaatctggacactggtgggtgctggtgccaaacaattgtcctcatctggtcgtcccacggcaagtgtgattccatctggtgtagaatggatcaaagctagagtgactgagttgaacccagacaagaactgcattcacacagatgacgacgagaagatctcctaccgatatcttattattgctctcggaatccagctggactatgagaagattaaaggcctacctgaaggtttcgctcatcccaaaatagggtcgaattattcagttaagactgtagagaagacatggaaagctctgcaggacttcaaagagggcaatgccatcttcaccttcccaaatactccagtgaagtgtgctggagcccctcagaagatcatgtacttatcagaagcctacttcaggaagacagggaagcgatccaaggccaatatcattttcaacacttctcttggagccattttcggggttaagaagtatgcagatgccctgcaggagatcatccaggagcggaacctcactgttaactacaagaaaaacctcattgaagtccgagccgataaacaagaggctgtatttgagaacctggacaaaccaggagagacccaagtgatttcatatgaaatgcttcatgtcacacctccaatgagcccaccagatgtcctcaagaccagtcctgtggctgatgctgctggttgggtggatgtggataaagaaactctgcaacacaggaggtacccaaatgtgtttgggattggggactgcaccaaccttcctacgtcaaagaccgctgctgcagtagctgcccagtcaggaatacttgataggacaatttctgtaattatgaagaatcaaacaccaacaaagaagtatgatggctacacatcatgtccactggtgaccggctacaaccgtgtgattcttgctgagtttgactacaaagcagagccgctagaaaccttcccctttgatcaaagcaaagagcgcctttccatgtatctcatgaaagctgacctgatgcctttcctgtattggaatatgatgctaaggggttactggggaggaccagcgtttctgcgcaagttgtttcatctaggtatgagttaaggatggctcagcacttgctcatcttggatggcttctgggccaaaactgcagtcactgaatgaccaagagcagcacgaaggacttggaacctatccttgtaaagagttccttgatgggtaatggtgaccaaatgcctcccttttcagtacctttgaacagcaaccatgtgggctactcatgatgggcttgattctttgggaataataaaatgaaataatacttttattttctgaataaaagtttgtcactgaaaaaaaaaaa

SEQ ID NO: 3239 - protein, 450 aa, Homo sapiens
MVPLVAVVSGPRAQLFACLLRLGTQQVGPLQLHTGASHAARNHYEVLVLGGGSGGITMAARMKRKVGAENVAIVEPSERHFYQPIWTLVGAGAKQLSSSGRPTASVIPSGVEWIKARVTELNPDKNCIHTDDDEKISYRYLIIALGIQLDYEKIKGLPEGFAHPKIGSNYSVKTVEKTWKALQDFKEGNAIFTFPNTPVKCAGAPQKIMYLSEAYFRKTGKRSKANIIFNTSLGAIFGVKKYADALQEIIQERNLTVNYKKNLIEVRADKQEAVFENLDKPGETQVISYEMLHVTPPMSPPDVLKTSPVADAAGWVDVDKETLQHRRYPNVFGIGDCTNLPTSKTAAAVAAQSGILDRTISVIMKNQTPTKKYDGYTSCPLVTGYNRVILAEFDYKAEPLETFPFDQSKERLSMYLMKADLMPFLYWNMMLRGYWGGPAFLRKLFHLGMS

SEQ ID NO: 3240 - DNA, 7024 bp, Homo sapiens
gtggactgcattttgcaagaagttgagaagtttacagacctagagaaactctacctctaccttcagctgccttctggtctcagcaatggagagaaaagtgatcagaatgccatgtcatctagtcgggcacaacaaatgcatgccttttcctggattcggaataccctagaggaacatccggagacttcactgcccaaacaggaagtctatgatgagtacaagagctattgtgacaatcttggttaccatccattaagtgctgctgattttggaaagatcatgaaaaacgtctttccaaacatgaaggcacgtcgtttgggcacaagaggcaaatctaaatattgctacagtggactaagaaaaaaagcttttgttcatatgccaacactgcccaaccttgactttcacaaaactggagatgggttggaaggagctgaaccttctgggcagcttcaaaatattgatgaagaagttatctcttctgcttgccgtcttgtgtgtgagtgggcccagaaagtgttaagccaaccatttgacaccgtcttggaattagcccgcttccttgtaaaaagtcactatataggcaccaagtcaatggcagctctaactgtaatggcagcagcaccagcaggaatgaaaggaattacccagccttctgcttttatacctacagctgaaagtaattcctttcagcctcaggtgaagactttgccatctccaattgatgctaaacagcagttgcaacggaaaatccagaagaagcagcaagaacagaaactacaatcccctttgccaggagaatctgcagcaaaaaagtcagaaagtgctacaagcaatggagtgactaatcttcctaatggaaatccttcaatcctttctcctcaacctattggtatcgttgtggcagctgtccctagtcccattccggtccagcggactaggcaattggtaacttcaccgagtccaatgagttcttctgacggcaaagttcttcccctcaatgtacaggtggtcactcagcacatgcagtctgtgaaacaggcaccaaagactccccagaacgttccagccagtcctggtggggatcgttctgcccggcaccgttaccctcagatcttacccaaaccagcgaacaccagtgcactcaccattcgctctccaactactgtcctctttactagtagtcccatcaaaactgctgttgtacccgcttcacacatgagttctctaaatgtggtgaaaatgacaacaatatccctcacacccagcaacagtaacacccctcttaaacattctgcctcagtcagcagtgctacaggaacaacagaagaatcaaggagtgttccacagatcaagaatggttctgtcgtgtcgcttcagtctcctgggtccaggagcagcagtgcggggggaacatctgctgtggaagtcaaagtggaacccgaaacatcatcagatgagcatcctgtacagtgccaagagaactctgatgaggctaaagctccccagacacctagtgcccttttggggcagaaaagtaatacagacggagcactgcagaaaccttcaaatgaaggtgtcattgaaataaaagcaactaaggtctgtgaccagaggaccaaatgtaaaagtcgctgtaatgaaatgctgccaggcacgtcaacaggcaataatcaaagcactatcactctatcagttgcttctcagaacttgactttcaccagcagcagctcaccacctaatggtgactcaatcaataaagaccctaaattatgcactaaaagcccaagaaaacgactgtcttctacattgcaagagacccaggtgcctcctgtaaagaaaccaattgtggaacagctttcagcagctaccatagaagggcagaaacaaggcagtgttaagaaggaccaaaaggttccacattcagggaaaacagaaggttcaacagcaggtgctcagattcctagcaaggtatcagtaaatgtcagttcacacataggagcaaatcaacccttgaattcctctgcccttgttatcagtgattcagctttggaacagcaaacaaccccatcatcatctccagatataaaagtaaaacttgaaggaagtgtctttctcttggacagtgattcaaagtcagttggcagctttaatccaaatggatggcaacaaatcactaaagattctgagtttatatctgccagttgtgaacaacagcaagatatcagtgttatgacaattcctgagcactctgatatcaatgacttagagaaatctgtttgggaattagaaggaatgccacaggacacatatagccagcagctacatagccagatacaggaatcttctttaaatcaaatacaagcacattcttcagatcagttacctctgcaatctgaactgaaggagtttgagccttctgtttcccagacaaatgaaagctactttccttttgatgatgaacttacacaagatagtattgtggaagagctggtgcttatggagcagcaaatgtcaatgaacaattctcattcttacggcaactgtttgggaatgacccttcagagtcagtcagtaactccaggagctccaatgtcatctcacacttccagcacccacttctatcatccaatccacagcaatggcactccaatccacacacccacacccacacccacacccactcctactccaaccccaaccccaaccccgacatctgaaatgattgctggatctcagagtctgtcacgggagagcccttgctccaggctagcccagactacacctgtggatagtgctttaggaagtagccgacatacacccattggtactccacattctaactgcagcagtagtgtcccccccagccctgttgaatgcaggaatccgtttgcattcactccaataagctccagtatggcatatcatgacgccagcattgtctcaagtagtcctgtgaaaccgatgcaaagacccatggccacacaccctgacaaaaccaagcttgaatggatgaataatgggtatagtggggttggtaattcatcagtttctggccatggtattctcccaagctatcaggaactagtggaagaccgtttcaggaaacctcatgcttttgctgtgcctggacagtcttatcagtctcaatccagacatcatgacactcattttggtcgtttgactcctgtctctcctgtgcagcatcaaggtgccactgtaaataacaccaacaaacaggagggttttgcagtccctgcccctcttgataataaaggaactaattcatctgccagcagcaacttcagatgccggagtgtgagccctgctgttcatcgccaacgtaatcttagtggaagcaccctctatccagtatctaatatcccacgatctaatgtgaccccctttggaagtccagttaccccagaagttcatgttttcacaaatgttcacacagacgcatgtgccaacaacatagctcaaagaagccaatcagttccattgacagtcatgatgcagacagccttcccaaacgctcttcagaagcaagcaaacagtaaaaaaataaccaatgttttgttgagtaaacttgattccgacaatgatgatgcagtgagaggtttgggaatgaacaacctgccctctaattatacagcccggatgaatctcactcagattttggaaccttccactgtttttcctagtgccaacccacaaaatatgatcgattccagcacttctgtttatgagttccaaacaccatcttacctcaccaaaagtaatagcaccggtcagatcaatttttctcctggagataatcaagcacaatcagaaattggagagcaacaattagatttcaatagcactgttaaagacctgttgagtggagacagcttgcaaaccaaccagcagctggtaggtcagggagcatctgatctcactaatactgcatctgatttctctagcgatatcaggttgtcttctgagctctcaggcagcatcaatgatttgaacactttagacccaaatctactgtttgatccaggtcgtcagcagggacaagatgatgaagctacactggaagaattaaagaatgacccattatttcaacaaatttgcagtgaatccatgaattctatgacttcatcaggttttgaatggatagaaagcaaggaccatcctactgttgaaatgttgggttaaattgtgttttataacatgtagcacactgtatctaaagacatatgtattgtatttgtcttaatggaagtgcctcccgcagcagaaatactattaattgtgacattttaaaagcgtttgctgcagaagtggtttcttcagtaggaaatggttagacttgcctcagttcttaacaagtgtctaaagacagtaggctgtagaagaacaagtattaggttttaaattttataatgtgccccatttattcacattgattgactatccagctgttacaagagcagtcgatctttattttgtgtaagttagtttcatttcatcagatgatctgcacagaactcagaataaaccatcaattttaggtataggctgttttgttgttggcattatcttttagatataaaatcatagctagggtgaactgtagacaagaaagtcttccttgaaacagggataatattcaggttattataaatatttaggcttgaagcatagagctactgtagggtgaaaaatctctgtaggactttctggggcttcagtaccatttacacccacgatgaagggcttaaatagaaaataatggaaaattaaatattactttaaggaaagcaaagctgcactaaaatttttaagggaaaaaaaacaagtagccatttatatttgtgaccttgcattaatatttaaatgttgattttaatatggagctagcacacatagatgcgcaggcacgcacacacaaaacaagcaaatgtaactccaggcatttgtaatttaatataataaatacaagcatgttagaaaaatgctttatgtcttattatttgttaagttaggggaatgagaaggaaaacaaaagcattctcttagtttcatcacaatggctgcatgtacatattgagattctaattgagatttactttgaaatttttcattaaaatattccacaataatcagtttttttcctcttcaattgagtgactgactccctcactcctcctgaatatagtaatgtagtttgatcataggatccctttgaaaaacaggaaggaggataacataaaaaacaacaaaaaacatttcaccacctaaggtctgaagccacaaatctttatatctctgatgaaacaaaggggatatcaatagtacttgaagaagaagagcattttattacttgcttaatttatttattgtgataaccacaattgcaaaagaagaactcaggatttgttttaaaatgtttctctctatggctcccattttgttttgtgaataattatttatgagttgcatgttgacacaaacctactcactggttgaaagctccatttaagtgagtttcaagatcactttcaaagagatttttaaattgccattgtttttaaagctaacataaaaccatttgctatgctaccttgaacctagctaagctttcctttaccttagtaagccaatcagaagactacaatcaatgaatatttagcaaatgtgctgaagggtttaataaggttttgttgttcaataaatttgcaaggtagggtattaacatattttgataaataaatggtgctagagttggcgcagaggtttatatattgatatgtcttagttattggcatttgtgtgtgtttgctgttatcttgatttcatgatttgttaggtatttttttcttgatgctagttatttcttcactgtacattgagacacagcactactgcacaccaaagtatgcaatacccaaaggaaactctgtgatttctcctgacaaatgatgggagcctttctttatgagatactctgaaaaggagattttgaggccattctaatcccttgtttacattattagcttcctactaatataaaaataatggaaatcttttttgataaaaatattaagactggaggatttttaaccccttgtacagtattgcagcaaactctttaaatttggttgaattcgtccagcaaactttctggggttcatatattgcactaaatttgttgaacctgtggtaggcacatctcttaggataaatgcaaccaatacagtccacagattaaactttttaaatgtgtttcattatgaaaagacaaaatgtcatcaaagtgacagataaaattgtcttatgtagcaatgtgcattgatctcaatgagatatttctattattctcttacatgagaatattacagcaggaagaattaagtttagtttgcttcaccatgttaatacatgatcacaaaatgtgcatgagtgttattgacttatcttgtacagtactaggattcctgtaaccactcttttttttcttcgctgtattgaaactggttcagtgttaaccaggcaagcatagttattcacaggttatttactttatgtttactaattctgcttagttattgttgaatatgttctgttccagattatttttattgttttgatgtttaaaacattttgcatactgtttatcataaaacttcatgaagtaaataattttgcatataattgcaataagcactgacttttgaactgaaaagaaggaaagtgtttttttgtgcagtgcttctgaggttcatataatagtcttgtactataatgtgctttactacacgataaatgacaaaaacaagccctgtttcatgtttcatttagtgcaaaaagtcagatttccccagtgttttgttgtctgttgtacctgctgaaactacagtagttgaatattgcggtagcatttcagttctctttttttattaaagtgctcaaaaattgttttttaaatgttttcaaaaacaattaaaaacattttatattaaaaaaaaaaaaaaaa

SEQ ID NO: 3241 - protein, 1363 aa, Homo sapiens
MSSSRAQQMHAFSWIRNTLEEHPETSLPKQEVYDEYKSYCDNLGYHPLSAADFGKIMKNVFPNMKARRLGTRGKSKYCYSGLRKKAFVHMPTLPNLDFHKTGDGLEGAEPSGQLQNIDEEVISSACRLVCEWAQKVLSQPFDTVLELARFLVKSHYIGTKSMAALTVMAAAPAGMKGITQPSAFIPTAESNSFQPQVKTLPSPIDAKQQLQRKIQKKQQEQKLQSPLPGESAAKKSESATSNGVTNLPNGNPSILSPQPIGIVVAAVPSPIPVQRTRQLVTSPSPMSSSDGKVLPLNVQVVTQHMQSVKQAPKTPQNVPASPGGDRSARHRYPQILPKPANTSALTIRSPTTVLFTSSPIKTAVVPASHMSSLNVVKMTTISLTPSNSNTPLKHSASVSSATGTTEESRSVPQIKNGSVVSLQSPGSRSSSAGGTSAVEVKVEPETSSDEHPVQCQENSDEAKAPQTPSALLGQKSNTDGALQKPSNEGVIEIKATKVCDQRTKCKSRCNEMLPGTSTGNNQSTITLSVASQNLTFTSSSSPPNGDSINKDPKLCTKSPRKRLSSTLQETQVPPVKKPIVEQLSAATIEGQKQGSVKKDQKVPHSGKTEGSTAGAQIPSKVSVNVSSHIGANQPLNSSALVISDSALEQQTTPSSSPDIKVKLEGSVFLLDSDSKSVGSFNPNGWQQITKDSEFISASCEQQQDISVMTIPEHSDINDLEKSVWELEGMPQDTYSQQLHSQIQESSLNQIQAHSSDQLPLQSELKEFEPSVSQTNESYFPFDDELTQDSIVEELVLMEQQMSMNNSHSYGNCLGMTLQSQSVTPGAPMSSHTSSTHFYHPIHSNGTPIHTPTPTPTPTPTPTPTPTPTSEMIAGSQSLSRESPCSRLAQTTPVDSALGSSRHTPIGTPHSNCSSSVPPSPVECRNPFAFTPISSSMAYHDASIVSSSPVKPMQRPMATHPDKTKLEWMNNGYSGVGNSSVSGHGILPSYQELVEDRFRKPHAFAVPGQSYQSQSRHHDTHFGRLTPVSPVQHQGATVNNTNKQEGFAVPAPLDNKGTNSSASSNFRCRSVSPAVHRQRNLSGSTLYPVSNIPRSNVTPFGSPVTPEVHVFTNVHTDACANNIAQRSQSVPLTVMMQTAFPNALQKQANSKKITNVLLSKLDSDNDDAVRGLGMNNLPSNYTARMNLTQILEPSTVFPSANPQNMIDSSTSVYEFQTPSYLTKSNSTGQINFSPGDNQAQSEIGEQQLDFNSTVKDLLSGDSLQTNQQLVGQGASDLTNTASDFSSDIRLSSELSGSINDLNTLDPNLLFDPGRQQGQDDEATLEELKNDPLFQQICSESMNSMTSSGFEWIESKDHPTVEMLG

SEQ ID NO: 3242 - DNA, 1470 bp, Homo sapiens
cgaagatggcggggcgaagtctgtgtctcacgagaagcagcgttccagggactccgttcccgccacccgttcagcaaccctctacacctggacccgacctcctcgccttggaggaagaatataagcgtttaaatgcagaattgcaggcaaaaacagctgacgtggttcaacaagctaaggaaataataagagatcggcaagaagtacgatctaggcctgtttcaacacaaatgaaatcatgtgatgacgaagatgattacagtttaagaggtctgttaccatctgaagggatagttcatcttcattcagaaactaagccaaagaccaaaaacattgatcctgtaaacaaggttcaaaacaaattacactctgcaaataaaggaaggaaaacaaattcaagtgttaaattgaaatactctgatgtccaaactgccgacgatgttgccattccagaggatttctcagacttttcccttgcaaaaacaattagcaaaattgaagggcaactggaggaagaaggcttacctgaatatatagatgatattttttctggtgttagtaatgacattggaacagaagcacagatcagatttctaaaggccaaactccatgttatgcaggaggaattggataatgttgtatgtgaatgcaataaaaaggaggatgaaattcagaatttaaagtctcaagtaaaaaattttgaagaagattttatgagacagcagcgaacaattaatatgcaacagtctcaagtagaaaaatacaaaactcttttcgaagaagcaaacaaaaagtatgatggattacagcaacagttgtcttcagtagaaagggaattagaaaataaaagaagactgcaaaaacaggctgcaagtagtcaaagtgccacagaggttcgcttgaatagagctctagaagaagcagaaaagtataaactggagttaagtaaattaaggcaaaataacaaggacatagcaaatgaagaacacaaaaaaattgaagtgttaaaatcagaaaacaagaagctagaaaaacaaaaaggagaattaatgatagggttcaagaaacagttaaaattaattgatgttttaaaaaggcaaaagatgcatattgaagctgccaagatgctatctttcactgaggaggaatttatgaaagcacttgaatggggaaattcataagtgatctacttcagttagtctctatgacaataagaaaactaaggctcagagaaaaagccaaaactagtacttgcatgacacctagtcaagtcctagtagtattcgactttcattttgtggatcaatttttatttggaaaatagcagcaattctcgtaggagtcagattaaaacgtctacaactaccttgaataacttcaactatcaggataattaaaactgcaaaccactggaaaaaaaaaaaaaaaaaaaaaaaaaaaaaaaaaaaaaaaaaaaaaaaaaaaaaaaaa

SEQ ID NO: 3243 - protein, 391 aa, Homo sapiens
MAGRSLCLTRSSVPGTPFPPPVQQPSTPGPDLLALEEEYKRLNAELQAKTADVVQQAKEIIRDRQEVRSRPVSTQMKSCDDEDDYSLRGLLPSEGIVHLHSETKPKTKNIDPVNKVQNKLHSANKGRKTNSSVKLKYSDVQTADDVAIPEDFSDFSLAKTISKIEGQLEEEGLPEYIDDIFSGVSNDIGTEAQIRFLKAKLHVMQEELDNVVCECNKKEDEIQNLKSQVKNFEEDFMRQQRTINMQQSQVEKYKTLFEEANKKYDGLQQQLSSVERELENKRRLQKQAASSQSATEVRLNRALEEAEKYKLELSKLRQNNKDIANEEHKKIEVLKSENKKLEKQKGELMIGFKKQLKLIDVLKRQKMHIEAAKMLSFTEEEFMKALEWGNS

SEQ ID NO: 3244 - DNA, 1945 bp, Homo sapiens
acttttggtcgagcggagggcgcgcagctccaccgttgccaagacgccgcgtaaacacccgagcgcgcgcagccaggtgcgctccttggggctgctggctgctgcgtttgcggcgggaggtggtggccgcggtcccacgagaaggggtatttttcgtcagccaagatgggttccaaaaggagaaatttgagctgtagtgaaaggcatcagaaattagtagatgaaaactactgcaaaaaattacatgtccaagctctaaaaaacgtcaacagtcaaatcaggaatcaaatggtgcagaatgaaaatgataaccgtgttcagcgcaagcaatttctcagattattacaaaatgaacaatttgagttggatatggaagaggccattcaaaaggcagaagaaaacaagagattgaaagaactccagctcaaacaagaagaaaaactggctatggaattggcaaaactgaaacatgaaagtctaaaggacgaaaagatgaggcaacaagtaagagaaaacagcattgagcttagagaattggagaagaaattaaaagcagcttacatgaataaagaaagggcagctcagattgctgaaaaggatgccattaaatatgaacaaatgaaacgtgatgctgaaatagccaaaaccatgatggaagaacacaagagaataataaaggaagagaatgctgcagaagacaaacgaaacaaagcgaaagcacagtactatcttgacttagagaaacaacttgaagaacaagaaaaaaaaaagcaggaagcttatgagcagctgctaaaagagaaactcatgattgatgaaattgttaggaagatctatgaagaagatcagttggaaaaacaacaaaagttagaaaaaatgaatgcaatgcgaaggtatatagaagagtttcagaaagagcaggctctctggagaaaaaagaaacgtgaggagatggaagaagaaaacagaaaaatcatagagtttgctaacatgcagcagcaaagagaagaagatcggatggcaaaagttcaagaaaatgaggagaaaaggctacagcttcagaatgcgttgacacagaaattagaagaaatgctgcggcaacgtgaagatttggaacaagtgcgacaagaattataccaggaagaacaagctgaaatatataagagcaagctaaaagaagaagcagaaaagaaattgagaaagcaaaaagagatgaagcaagattttgaagaacaaatggccttgaaggaattagtgctacaggctgcaaaagaggaagaggagaactttagaaaaactatgctagctaaatttgctgaggatgatcgaatagaattaatgaatgctcagaaacaaagaatgaagcagctggaacacaggagggctgtggaaaaacttattgaagagcgtcgccaacaattccttgcagacaaacaacgtgaactagaagagtggcagttgcagcaaaggcggcaaggatttattaatgcaattattgaagaagaaaggctaaaacttcttaaagagcatgctacaaacttactaggctatctccctaaaggagtatttaaaaaagaggatgatattgatctgcttggtgaagagttcaggaaagtatatcaacaaaggagtgaaatttgtgaagagaaatgatatcatcaaaattgggtaaagcatagattttttgtatgttaccactagatgtcagcataacttttgttttacagctcagtggcattaggtatccattgtctgtttggattttgtaaatcatcactgaatttcataacttgtaaacaattatcagatacaaattaattttaatcaagctgttatttttgtactgataatttcaaaatccgatttctacaacactacagagcactgtttgcatccccatcctcaagacagtatatttaccttgactaatacagaactctacccc

SEQ ID NO: 3245 - protein, 495 aa, Homo sapiens
MGSKRRNLSCSERHQKLVDENYCKKLHVQALKNVNSQIRNQMVQNENDNRVQRKQFLRLLQNEQFELDMEEAIQKAEENKRLKELQLKQEEKLAMELAKLKHESLKDEKMRQQVRENSIELRELEKKLKAAYMNKERAAQIAEKDAIKYEQMKRDAEIAKTMMEEHKRIIKEENAAEDKRNKAKAQYYLDLEKQLEEQEKKKQEAYEQLLKEKLMIDEIVRKIYEEDQLEKQQKLEKMNAMRRYIEEFQKEQALWRKKKREEMEEENRKIIEFANMQQQREEDRMAKVQENEEKRLQLQNALTQKLEEMLRQREDLEQVRQELYQEEQAEIYKSKLKEEAEKKLRKQKEMKQDFEEQMALKELVLQAAKEEEENFRKTMLAKFAEDDRIELMNAQKQRMKQLEHRRAVEKLIEERRQQFLADKQRELEEWQLQQRRQGFINAIIEEERLKLLKEHATNLLGYLPKGVFKKEDDIDLLGEEFRKVYQQRSEICEEK

SEQ ID NO: 3246 - DNA, 4415 bp, Homo sapiens
acggctcggctgccagctccgcaatgggagccgccgccgtcgccgcagtgtagtttttcgtgctcctccttttcctcctcctctttctcctcctcctcagggctccagtcaggccgatccgctccgctcacggaaggaaaacagaaataacttgctggcttgtctggagtcacatggtaattcaaaaatggcagaactgtttatggaatgtgaagaagaggagctggaaccatggcagaagaaagtaaaagaagttgaggatgacgatgatgatgagccaatctttgttggcgagatatcaagttcaaaaccagcaatttcaaatattttgaacagagttaaccccagctcatattcaaggggactaaagaatggtgcactcagtcgaggtattactgctgcattcaagcctacaagtcaacactacacgaatccaacatcaaatccagtgcctgcctcaccaataaattttcatcctgagtctagatcttcagatagttctgttattgttcagcctttttctaaacctggttatataacaaactcatcacgagttgtgtctaataagtcatcagagttactgtttgacttgacccaggatacaggattatcacattaccaagggggaccaacactttctatggcaggtatgagtgaaagttcatttttatcaaaacgtccttctacttctgaagtaaataatgttaatccaaagaagcctaaacccagcgaaagtgtttctggagcaaattcctcagctgtattaccttcagttaaatctccttcagtgacttcttcccaggctatgctagcaaaaggtacaaatacctcatcaaatcagtctaaaaatggaacaccttttccaagagcttgtccaaagtgcaacattcatttcaatcttttggatcctttgaaaaatcacatgaagtattgttgtccagacatgataaataactttttgggactggctaaaacagaattttcaagtacagtaaataaaaacacaactattgattcagagaaaggaaaattgatcatgttagttaatgacttttattatggaaaacatgaaggagatgtccaggaggaacagaagactcacacaacctttaaatgcttcagttgcttgaaaattctaaaaaataacattaggtttatgaaccacatgaaacaccatttggaacttgagaagcagagcagtgagagctgggaaaaccataccacctgccagcactgctaccgtcagtttcccacaccatttcagttgcagtgtcacatcgaaagtacacatacgccccatgaattttctactatttgtaaaatctgtgaattgtcatttgaaacagaacatgttcttttacaacatatgaaggacaatcataaacctggtgaaatgccatatgtctgccaggtttgtaattatagatcatcatcattttctgatgtagaaactcattttagaacatcccatgaaaacactaagaacttgctatgcccgttttgcctcaaagttattaaaattgcaacaccatatatgcatcattatatgaagcatcagaaaaaaggaatacatcgttgtacaaaatgcaggctgcagtttttgacatgcaaggagaaaatggatcataagactcaacaccatcgaacatttataaaacctaaacaactagaaggattgcctcctggaacaaaagttactattcgagcttcagttggacctctgcaatcaggagcttcacctacaccttccattagtgcaagtgcttctacccttcagctctcacctccaaggactaaaaatataactgctaaaaatcctgcaaaatctaatacaagtaaacctaatacagtcaaatccaacgcaagtaaacctaatacaagtaagcctaatggaagtaaatctaaatacaaaccaaaaatctctaatatgcaaaagaaacaaagcacattggctagtagcaataaaaaaagtaaagtcaatacagcattgaggaatttaaggtatcgtcggggcattcacaaatgcattgagtgttgttccgaaataaaagattttgcaaaccactttcctacgtacgtccactgtagtttttgcagatacaacactagctgtagcaaagcctatgtaaatcatatgatgagctttcatagtaaccgtccaagcaaaaggttttgtatttttaagaagcattcagaaaatctccggggcattactctagtgtgccttaattgtgatttcctaagtgatgtttctggcttagataatatggctacacacttaagtcaacataaaactcatacttgccaagttgtaatgcagaaagtttctgtttgtatcccaacttctgagcacctttctgaattaaaaaaagaagctcccgcaaaggaacaagaacctgtgtctaaggaaattgcaagacctaacatggctgaaagagaaacagaaacatcaaattctgaaagtaaacaagataaagctgcttcttcaaaagaaaaaaatggatgtaatgcaaattcatttgaaggctcatcaacaacaaaaagtgaagaaagcataacagtttcagataaggaaaatgaaacctgtcttgcagaccaggaaactggctcaaaaaacatcgtcagttgtgattcaaatattggtgcagataaagtggaaaagaaaaaacaaatacaacacgtttgtcaggaaatggagttgaagatgtgccaaagttcagaaaacataatcttatctgatcagattaaagatcacaactccagtgaagccagattttcttcaaagaatattaaggatttgcgattagcatcagataatgtaagcattgatcagtttttgagaaaaagacatgaacctgaatctgttagttctgatgttagcgagcaaggcagtattcatttggaacctctgactccatccgaggtacttgagtatgaagccacagagattcttcagaaaggtagtggtgatccttcagccaagactgatgaagtagtgtctgatcaaacagatgacattcctggaggaaataaccctagcacaacagaggcaacagtagacctggaagatgaaaaagaaagaagttgaaattagtcattttaagtttcagtgtaccaacgataagggcatttggaacagtgctatcaggtgagctcagtggtgctgttgtaggttcagaaatggaaatatgtaagggaggtcacacatacactttacctgtatgttcaacctatgttatcaaacaaatcaattcaccaataatagcatgattagtagggattcccaaaaagtttttaaaaacacgaacaggattttaatgataattaaatttgcagtggaaaggtctcatttaatggttttcaaggaaatgggatttggttgctgacatgaattgatgatattagtaatatttataaagcctttcaaacttccatcaatcctaagctaaaaatctttattacctgtatatccttttcagttaactgagaggaagggatttggaaaccatgtacttttggggagtaattgattaaaaacaatggctgattggcattgttaatgaaggctttatttgtgaggatgatgctggtaaatggagcatgcttagagtactaaattgatctaatgagaatttggatgaacataaacttaattttggatttaatataacattccagtcagacgcatgtaaacagaatatttgaatctttgtacctccatacaagtgttagcctgccaggctgtaagcttaccttaattaaactttcagtgaaagtggaattattaagatataaatttatatttgtgctttttgtcagtgtgtaagctgtgtagaaattctttgatgtattagttgtattaatgtaaagtagaaacccattgttgaaactcctgtagctattatgcttttaatattgttttaatgatcttccttagaaataggcccataaaaatggtctggaagccaaaccaaagtatggtataatgtagatattgtaaagcagtaaactgaaaacatgtcctggcatgtattcagccatgtttaagtgacttttctgtaattgtaaaataaaaacttcaaatgggacctaaaacagtgatgtaaaagaactggttttggaaatttagcctaatttatctataagatggctgctaaattgatttttcagttctttttatcatctagaatataatagatatagaaatgaataatatgaagaacagtagtttgctttgaaatactaataaacttttatttaaaatgcttcatttttacttcttaaaatgtgctttggattcttaaattttgtttcactgaatgttcaatgttttaaatggcgattaaaatactctgctgtatatagtagtttttgagtaaatatttgcaataaaaatctgcccccgaataaaaaaa

SEQ ID NO: 3247 - protein, 966 aa, Homo sapiens
MAELFMECEEEELEPWQKKVKEVEDDDDDEPIFVGEISSSKPAISNILNRVNPSSYSRGLKNGALSRGITAAFKPTSQHYTNPTSNPVPASPINFHPESRSSDSSVIVQPFSKPGYITNSSRVVSNKSSELLFDLTQDTGLSHYQGGPTLSMAGMSESSFLSKRPSTSEVNNVNPKKPKPSESVSGANSSAVLPSVKSPSVTSSQAMLAKGTNTSSNQSKNGTPFPRACPKCNIHFNLLDPLKNHMKYCCPDMINNFLGLAKTEFSSTVNKNTTIDSEKGKLIMLVNDFYYGKHEGDVQEEQKTHTTFKCFSCLKILKNNIRFMNHMKHHLELEKQSSESWENHTTCQHCYRQFPTPFQLQCHIESTHTPHEFSTICKICELSFETEHVLLQHMKDNHKPGEMPYVCQVCNYRSSSFSDVETHFRTSHENTKNLLCPFCLKVIKIATPYMHHYMKHQKKGIHRCTKCRLQFLTCKEKMDHKTQHHRTFIKPKQLEGLPPGTKVTIRASVGPLQSGASPTPSISASASTLQLSPPRTKNITAKNPAKSNTSKPNTVKSNASKPNTSKPNGSKSKYKPKISNMQKKQSTLASSNKKSKVNTALRNLRYRRGIHKCIECCSEIKDFANHFPTYVHCSFCRYNTSCSKAYVNHMMSFHSNRPSKRFCIFKKHSENLRGITLVCLNCDFLSDVSGLDNMATHLSQHKTHTCQVVMQKVSVCIPTSEHLSELKKEAPAKEQEPVSKEIARPNMAERETETSNSESKQDKAASSKEKNGCNANSFEGSSTTKSEESITVSDKENETCLADQETGSKNIVSCDSNIGADKVEKKKQIQHVCQEMELKMCQSSENIILSDQIKDHNSSEARFSSKNIKDLRLASDNVSIDQFLRKRHEPESVSSDVSEQGSIHLEPLTPSEVLEYEATEILQKGSGDPSAKTDEVVSDQTDDIPGGNNPSTTEATVDLEDEKERS

SEQ ID NO: 3248 - DNA, 2164 bp, Homo sapiens
acggctcggctgccagctccgcaatgggagccgccgccgtcgccgcagtgtagtttttcgtgctcctccttttcctcctcctctttctcctcctcctcagggctccagtcaggccgatccgctccgctcacggaaggaaaacagaaataacttgctggcttgtctggagtcacatggtgacaatttacagaaagtcatctctgcagcttgatgggcgacaacccttttcaaccaaaaagtaattcaaaaatggcagaactgtttatggaatgtgaagaagaggagctggaaccatggcagaagaaagtaaaagaagttgaggatgacgatgatgatgagccaatctttgttggcgagatatcaagttcaaaaccagcaatttcaaatattttgaacagagttaaccccagctcatattcaaggggactaaagaatggtgcactcagtcgaggtattactgctgcattcaagcctacaagtcaacactacacgaatccaacatcaaatccagtgcctgcctcaccaataaattttcatcctgagtctagatcttcagatagttctgttattgttcagcctttttctaaacctgtaagtgtttctaaaactatacggccagctcagggatccattggatgttgtttatcaatatcaacagtacccagttacaattctggactgtcataagtagtcatccagtagaagcatagttagcatcagaaaatgtcaccatattttcgctagctcaagcagtaccccaagtaataactgaaggagctaactacccaacctgttaataacaggcagtatgcctaaataggtacagtaatgaaaactatactatcaaaatgtgaataaaattatagtcagccataaatattgcataatgacaaatatttaagattgcagacgggaccaggtattcttaattgggaaaacagtcaagtgaccatcatagctttttattctgaaaacattccttcatagttcagttagttaaaaaaaaacaaacattttttcctattacaaaaaactcccactttttttgttacaaaaagtaatagaaaatggtaatagttaacattcattgagctgttaatatgtataagtgtttgtgctaaatgctataggtaaattcatttcatttagttcttaaacatccccatgaagtaaacactattattatcctcattttttagttgaggaaactgaggctcatagaggttgaaagatttattcaagatcccaaagctggcagttgatggatctgggatttcaatccagcctaacccatagtttatatgtatatgcacacatacatacatatatgttgtgtataaatgtacacttttttagacatgaaagaattgccttagttgaacagttctcagattgtagtttgcaatcccctggggttccccaagaccctttcagaggtttgagggtcaacagtgttgtcattataatcaaagactgttttccttttccactgtgttggcatttgcactggtgatgctaaagtaatggtggataagctgctggtgccttagtgtgaatcaaggtagtgccaccaaagtgtacttgtagtttctgtattagtcacctgccgtgcactcacagtaaactacattactcaactgagtattacccagttatacccaatccctgatgaagtattaaaatgttattagttttattaactctctacacttgaatgtgtgttttttaaaatattctgtgtgatgacatgggtagtgtgcataaagtacctctgtgtctgaagtatgatagttgtcttgaggaaaagcacttgtgtgattgaattgtgaggtaaactacctgatttttttttgttgttacatgaaagaatgactgacaaatctttaaagtatttacaatatcactccagaaaagaaaacaaatcaaataaatattgactcaaaactctccaagtacatatcaaaatctcaggaagggaaaaaagagtctaaagaacaaaatataacactattttatttcagtcatgttagttcagtttccacagtttgaactgggtatagattaatatctaaaaccaaaaaatgaacatgtgtatagtgatgctgaaaaatgtgcattattttttatttatattttaggaataataaagttagttattaaagaa

SEQ ID NO: 3249 - protein, 158 aa, Homo sapiens
MGDNPFQPKSNSKMAELFMECEEEELEPWQKKVKEVEDDDDDEPIFVGEISSSKPAISNILNRVNPSSYSRGLKNGALSRGITAAFKPTSQHYTNPTSNPVPASPINFHPESRSSDSSVIVQPFSKPVSVSKTIRPAQGSIGCCLSISTVPSYNSGLS

SEQ ID NO: 3250 - DNA, 4484 bp, Homo sapiens
acggctcggctgccagctccgcaatgggagccgccgccgtcgccgcagtgtagtttttcgtgctcctccttttcctcctcctctttctcctcctcctcagggctccagtcaggccgatccgctccgctcacggaaggaaaacagaaataacttgctggcttgtctggagtcacatgtacttaggtgacaatttacagaaagtcatctctgcagcttgatgggcgacaacccttttcaaccaaaaagtaattcaaaaatggcagaactgtttatggaatgtgaagaagaggagctggaaccatggcagaagaaagtaaaagaagttgaggatgacgatgatgatgagccaatctttgttggcgagatatcaagttcaaaaccagcaatttcaaatattttgaacagagttaaccccagctcatattcaaggggactaaagaatggtgcactcagtcgaggtattactgctgcattcaagcctacaagtcaacactacacgaatccaacatcaaatccagtgcctgcctcaccaataaattttcatcctgagtctagatcttcagatagttctgttattgttcagcctttttctaaacctggttatataacaaactcatcacgagttgtgtctaataagtcatcagagttactgtttgacttgacccaggatacaggattatcacattaccaagggggaccaacactttctatggcaggtatgagtgaaagttcatttttatcaaaacgtccttctacttctgaagtaaataatgttaatccaaagaagcctaaacccagcgaaagtgtttctggagcaaattcctcagctgtattaccttcagttaaatctccttcagtgacttcttcccaggctatgctagcaaaaggtacaaatacctcatcaaatcagtctaaaaatggaacaccttttccaagagcttgtccaaagtgcaacattcatttcaatcttttggatcctttgaaaaatcacatgaagtattgttgtccagacatgataaataactttttgggactggctaaaacagaattttcaagtacagtaaataaaaacacaactattgattcagagaaaggaaaattgatcatgttagttaatgacttttattatggaaaacatgaaggagatgtccaggaggaacagaagactcacacaacctttaaatgcttcagttgcttgaaaattctaaaaaataacattaggtttatgaaccacatgaaacaccatttggaacttgagaagcagagcagtgagagctgggaaaaccataccacctgccagcactgctaccgtcagtttcccacaccatttcagttgcagtgtcacatcgaaagtacacatacgccccatgaattttctactatttgtaaaatctgtgaattgtcatttgaaacagaacatgttcttttacaacatatgaaggacaatcataaacctggtgaaatgccatatgtctgccaggtttgtaattatagatcatcatcattttctgatgtagaaactcattttagaacatcccatgaaaacactaagaacttgctatgcccgttttgcctcaaagttattaaaattgcaacaccatatatgcatcattatatgaagcatcagaaaaaaggaatacatcgttgtacaaaatgcaggctgcagtttttgacatgcaaggagaaaatggatcataagactcaacaccatcgaacatttataaaacctaaacaactagaaggattgcctcctggaacaaaagttactattcgagcttcagttggacctctgcaatcaggagcttcacctacaccttccattagtgcaagtgcttctacccttcagctctcacctccaaggactaaaaatataactgctaaaaatcctgcaaaatctaatacaagtaaacctaatacagtcaaatccaacgcaagtaaacctaatacaagtaagcctaatggaagtaaatctaaatacaaaccaaaaatctctaatatgcaaaagaaacaaagcacattggctagtagcaataaaaaaagtaaagtcaatacagcattgaggaatttaaggtatcgtcggggcattcacaaatgcattgagtgttgttccgaaataaaagattttgcaaaccactttcctacgtacgtccactgtagtttttgcagatacaacactagctgtagcaaagcctatgtaaatcatatgatgagctttcatagtaaccgtccaagcaaaaggttttgtatttttaagaagcattcagaaaatctccggggcattactctagtgtgccttaattgtgatttcctaagtgatgtttctggcttagataatatggctacacacttaagtcaacataaaactcatacttgccaagttgtaatgcagaaagtttctgtttgtatcccaacttctgagcacctttctgaattaaaaaaagaagctcccgcaaaggaacaagaacctgtgtctaaggaaattgcaagacctaacatggctgaaagagaaacagaaacatcaaattctgaaagtaaacaagataaagctgcttcttcaaaagaaaaaaatggatgtaatgcaaattcatttgaaggctcatcaacaacaaaaagtgaagaaagcataacagtttcagataaggaaaatgaaacctgtcttgcagaccaggaaactggctcaaaaaacatcgtcagttgtgattcaaatattggtgcagataaagtggaaaagaaaaaacaaatacaacacgtttgtcaggaaatggagttgaagatgtgccaaagttcagaaaacataatcttatctgatcagattaaagatcacaactccagtgaagccagattttcttcaaagaatattaaggatttgcgattagcatcagataatgtaagcattgatcagtttttgagaaaaagacatgaacctgaatctgttagttctgatgttagcgagcaaggcagtattcatttggaacctctgactccatccgaggtacttgagtatgaagccacagagattcttcagaaaggtagtggtgatccttcagccaagactgatgaagtagtgtctgatcaaacagatgacattcctggaggaaataaccctagcacaacagaggcaacagtagacctggaagatgaaaaagaaagaagttgaaattagtcattttaagtttcagtgtaccaacgataagggcatttggaacagtgctatcaggtgagctcagtggtgctgttgtaggttcagaaatggaaatatgtaagggaggtcacacatacactttacctgtatgttcaacctatgttatcaaacaaatcaattcaccaataatagcatgattagtagggattcccaaaaagtttttaaaaacacgaacaggattttaatgataattaaatttgcagtggaaaggtctcatttaatggttttcaaggaaatgggatttggttgctgacatgaattgatgatattagtaatatttataaagcctttcaaacttccatcaatcctaagctaaaaatctttattacctgtatatccttttcagttaactgagaggaagggatttggaaaccatgtacttttggggagtaattgattaaaaacaatggctgattggcattgttaatgaaggctttatttgtgaggatgatgctggtaaatggagcatgcttagagtactaaattgatctaatgagaatttggatgaacataaacttaattttggatttaatataacattccagtcagacgcatgtaaacagaatatttgaatctttgtacctccatacaagtgttagcctgccaggctgtaagcttaccttaattaaactttcagtgaaagtggaattattaagatataaatttatatttgtgctttttgtcagtgtgtaagctgtgtagaaattctttgatgtattagttgtattaatgtaaagtagaaacccattgttgaaactcctgtagctattatgcttttaatattgttttaatgatcttccttagaaataggcccataaaaatggtctggaagccaaaccaaagtatggtataatgtagatattgtaaagcagtaaactgaaaacatgtcctggcatgtattcagccatgtttaagtgacttttctgtaattgtaaaataaaaacttcaaatgggacctaaaacagtgatgtaaaagaactggttttggaaatttagcctaatttatctataagatggctgctaaattgatttttcagttctttttatcatctagaatataatagatatagaaatgaataatatgaagaacagtagtttgctttgaaatactaataaacttttatttaaaatgcttcatttttacttcttaaaatgtgctttggattcttaaattttgtttcactgaatgttcaatgttttaaatggcgattaaaatactctgctgtatatagtagtttttgagtaaatatttgcaataaaaatctgcccccgaataaaaaaa

SEQ ID NO: 3251 - protein, 979 aa, Homo sapiens
MGDNPFQPKSNSKMAELFMECEEEELEPWQKKVKEVEDDDDDEPIFVGEISSSKPAISNILNRVNPSSYSRGLKNGALSRGITAAFKPTSQHYTNPTSNPVPASPINFHPESRSSDSSVIVQPFSKPGYITNSSRVVSNKSSELLFDLTQDTGLSHYQGGPTLSMAGMSESSFLSKRPSTSEVNNVNPKKPKPSESVSGANSSAVLPSVKSPSVTSSQAMLAKGTNTSSNQSKNGTPFPRACPKCNIHFNLLDPLKNHMKYCCPDMINNFLGLAKTEFSSTVNKNTTIDSEKGKLIMLVNDFYYGKHEGDVQEEQKTHTTFKCFSCLKILKNNIRFMNHMKHHLELEKQSSESWENHTTCQHCYRQFPTPFQLQCHIESTHTPHEFSTICKICELSFETEHVLLQHMKDNHKPGEMPYVCQVCNYRSSSFSDVETHFRTSHENTKNLLCPFCLKVIKIATPYMHHYMKHQKKGIHRCTKCRLQFLTCKEKMDHKTQHHRTFIKPKQLEGLPPGTKVTIRASVGPLQSGASPTPSISASASTLQLSPPRTKNITAKNPAKSNTSKPNTVKSNASKPNTSKPNGSKSKYKPKISNMQKKQSTLASSNKKSKVNTALRNLRYRRGIHKCIECCSEIKDFANHFPTYVHCSFCRYNTSCSKAYVNHMMSFHSNRPSKRFCIFKKHSENLRGITLVCLNCDFLSDVSGLDNMATHLSQHKTHTCQVVMQKVSVCIPTSEHLSELKKEAPAKEQEPVSKEIARPNMAERETETSNSESKQDKAASSKEKNGCNANSFEGSSTTKSEESITVSDKENETCLADQETGSKNIVSCDSNIGADKVEKKKQIQHVCQEMELKMCQSSENIILSDQIKDHNSSEARFSSKNIKDLRLASDNVSIDQFLRKRHEPESVSSDVSEQGSIHLEPLTPSEVLEYEATEILQKGSGDPSAKTDEVVSDQTDDIPGGNNPSTTEATVDLEDEKERS

SEQ ID NO: 3252 - DNA, 1294 bp, Homo sapiens
ggaaggggggcaggagaaaaaagcttttccaaaaaagtattggctgtcttgaggaatgcggtcgcccccttgggaaagtacatatctgggagaagcaggcggctccgcgctcgcactcccgctcctccgcccgaccgcgcgctcgccccgccgctcctgctgcagccccagggcccctcgccgccgccaccatggacgccatcaagaagaagatgcagatgctgaagctcgacaaggagaacgccttggatcgagctgagcaggcggaggccgacaagaaggcggcggaagacaggagcaagcagctggaagatgagctggtgtcactgcaaaagaaactcaagggcaccgaagatgaactggacaaatactctgaggctctcaaagatgcccaggagaagctggagctggcagagaaaaaggccaccgatgctgaagccgacgtagcttctctgaacagacgcatccagctggttgaggaagagttggatcgtgcccaggagcgtctggcaacagctttgcagaagctggaggaagctgagaaggcagcagatgagagtgagagaggcatgaaagtcattgagagtcgagcccaaaaagatgaagaaaaaatggaaattcaggagatccaactgaaagaggccaagcacattgctgaagatgccgaccgcaaatatgaagaggtggcccgtaagctggtcatcattgagagcgacctggaacgtgcagaggagcgggctgagctctcagaaggccaagtccgacagctggaagaacaattaagaataatggatcagaccttgaaagcattaatggctgcagaggataagtactcgcagaaggaagacagatatgaggaagagatcaaggtcctttccgacaagctgaaggaggctgagactcgggctgagtttgcggagaggtcagtaactaaattggagaaaagcattgatgacttagaagacgagctgtacgctcagaaactgaagtacaaagccatcagcgaggagctggaccacgctctcaacgatatgacttccatgtaaacgttcatccactctgcctgcttacaccctgccctcatgctaatataagtttctttgcttcacttctcccaagactccctcgtcgagctggatgtcccacctctctgagctctgcatttgtctattctccagctgaccctggttctctctcttagcatcctgccttagagccaggcacacactgtgctttctattgtacagaagctcttcgtttcagtgtcaaataaacactgtgtaagctaaaaaaa

SEQ ID NO: 3253 - protein, 284 aa, Homo sapiens
MDAIKKKMQMLKLDKENALDRAEQAEADKKAAEDRSKQLEDELVSLQKKLKGTEDELDKYSEALKDAQEKLELAEKKATDAEADVASLNRRIQLVEEELDRAQERLATALQKLEEAEKAADESERGMKVIESRAQKDEEKMEIQEIQLKEAKHIAEDADRKYEEVARKLVIIESDLERAEERAELSEGQVRQLEEQLRIMDQTLKALMAAEDKYSQKEDRYEEEIKVLSDKLKEAETRAEFAERSVTKLEKSIDDLEDELYAQKLKYKAISEELDHALNDMTSM

SEQ ID NO: 3254 - DNA, 1797 bp, Homo sapiens
ggaaggggggcaggagaaaaaagcttttccaaaaaagtattggctgtcttgaggaatgcggtcgcccccttgggaaagtacatatctgggagaagcaggcggctccgcgctcgcactcccgctcctccgcccgaccgcgcgctcgccccgccgctcctgctgcagccccagggcccctcgccgccgccaccatggacgccatcaagaagaagatgcagatgctgaagctcgacaaggagaacgccttggatcgagctgagcaggcggaggccgacaagaaggcggcggaagacaggagcaagcagctggaagatgagctggtgtcactgcaaaagaaactcaagggcaccgaagatgaactggacaaatactctgaggctctcaaagatgcccaggagaagctggagctggcagagaaaaaggccaccgatgctgaagccgacgtagcttctctgaacagacgcatccagctggttgaggaagagttggatcgtgcccaggagcgtctggcaacagctttgcagaagctggaggaagctgagaaggcagcagatgagagtgagagaggcatgaaagtcattgagagtcgagcccaaaaagatgaagaaaaaatggaaattcaggagatccaactgaaagaggccaagcacattgctgaagatgccgaccgcaaatatgaagaggtggcccgtaagctggtcatcattgagagcgacctggaacgtgcagaggagcgggctgagctctcagaaggcaaatgtgccgagcttgaagaagaattgaaaactgtgacgaacaacttgaagtcactggaggctcaggctgagaagtactcgcagaaggaagacagatatgaggaagagatcaaggtcctttccgacaagctgaaggaggctgagactcgggctgagtttgcggagaggtcagtaactaaattggagaaaagcattgatgacttagaagagaaagtggctcatgccaaagaagaaaaccttagtatgcatcagatgctggatcagactttactggagttaaacaacatgtgaaaacctccttagctgcgaccacattctttcgttttgttttgttttgtttttaaacacctgcttaccccttaaatgcaatttatttacttttaccactgtcacagaaacatccacaagataccagctaggtcagggggtggggaaaacacatacaaaaaggcaagcccatgtcagggcgatcctggttcaaatgtgccatttcccgggttgatgctgccacactttgtagagagtttagcaacacagtgtgcttagtcagcgtaggaatcctcactaaagcagaagaagttccattcaaagtgccaatgatagagtcaacaggaaggttaatgttggaaacacaatcaggtgtggattggtgctactttgaacaaaaggtccccctgtggtcttttgttcaacattgtacaatgtagaactctgtccaacactaatttattttgtcttgagttttactacaagatgagactatggatcccgcatgcctgaattcactaaagccaagggtctgtaagccacgctgctcttccgagacttccattcctttctgattggcacacgtgcagctcatgacaatctgtaggataacaatcagtgtggatttccactcttttcagtccttcatgttaaagatttagacaccacatacaactggtaaaggacgttttcttgagagttttaactatatgtaaacattgtataatgatatggaataaaatgcacattgtaggacattttctaaaaaaaaaaa

SEQ ID NO: 3255 - protein, 284 aa, Homo sapiens
MDAIKKKMQMLKLDKENALDRAEQAEADKKAAEDRSKQLEDELVSLQKKLKGTEDELDKYSEALKDAQEKLELAEKKATDAEADVASLNRRIQLVEEELDRAQERLATALQKLEEAEKAADESERGMKVIESRAQKDEEKMEIQEIQLKEAKHIAEDADRKYEEVARKLVIIESDLERAEERAELSEGKCAELEEELKTVTNNLKSLEAQAEKYSQKEDRYEEEIKVLSDKLKEAETRAEFAERSVTKLEKSIDDLEEKVAHAKEENLSMHQMLDQTLLELNNM

SEQ ID NO: 3256 - DNA, 1246 bp, Homo sapiens
ggaaggggggcaggagaaaaaagcttttccaaaaaagtattggctgtcttgaggaatgcggtcgcccccttgggaaagtacatatctgggagaagcaggcggctccgcgctcgcactcccgctcctccgcccgaccgcgcgctcgccccgccgctcctgctgcagccccagggcccctcgccgccgccaccatggacgccatcaagaagaagatgcagatgctgaagctcgacaaggagaacgccttggatcgagctgagcaggcggaggccgacaagaaggcggcggaagacaggagcaagcagctggaagatgagctggtgtcactgcaaaagaaactcaagggcaccgaagatgaactggacaaatactctgaggctctcaaagatgcccaggagaagctggagctggcagagaaaaaggccaccgatgctgaagccgacgtagcttctctgaacagacgcatccagctggttgaggaagagttggatcgtgcccaggagcgtctggcaacagctttgcagaagctggaggaagctgagaaggcagcagatgagagtgagagaggcatgaaagtcattgagagtcgagcccaaaaagatgaagaaaaaatggaaattcaggagatccaactgaaagaggccaagcacattgctgaagatgccgaccgcaaatatgaagaggtggcccgtaagctggtcatcattgagagcgacctggaacgtgcagaggagcgggctgagctctcagaaggcaaatgtgccgagcttgaagaagaattgaaaactgtgacgaacaacttgaagtcactggaggctcaggctgagaagtactcgcagaaggaagacagatatgaggaagagatcaaggtcctttccgacaagctgaaggaggctgagactcgggctgagtttgcggagaggtcagtaactaaattggagaaaagcattgatgacttagaagacgagctgtacgctcagaaactgaagtacaaagccatcagcgaggagctggaccacgctctcaacgatatgacttccatataagtttctttgcttcacttctcccaagactccctcgtcgagctggatgtcccacctctctgagctctgcatttgtctattctccagctgaccctggttctctctcttagcatcctgccttagagccaggcacacactgtgctttctattgtacagaagctcttcgtttcagtgtcaaataaacactgtgtaagctaaaaaaa

SEQ ID NO: 3257 - protein, 284 aa, Homo sapiens
MDAIKKKMQMLKLDKENALDRAEQAEADKKAAEDRSKQLEDELVSLQKKLKGTEDELDKYSEALKDAQEKLELAEKKATDAEADVASLNRRIQLVEEELDRAQERLATALQKLEEAEKAADESERGMKVIESRAQKDEEKMEIQEIQLKEAKHIAEDADRKYEEVARKLVIIESDLERAEERAELSEGKCAELEEELKTVTNNLKSLEAQAEKYSQKEDRYEEEIKVLSDKLKEAETRAEFAERSVTKLEKSIDDLEDELYAQKLKYKAISEELDHALNDMTSI

SEQ ID NO: 3258 - DNA, 1797 bp, Homo sapiens
ggaaggggggcaggagaaaaaagcttttccaaaaaagtattggctgtcttgaggaatgcggtcgcccccttgggaaagtacatatctgggagaagcaggcggctccgcgctcgcactcccgctcctccgcccgaccgcgcgctcgccccgccgctcctgctgcagccccagggcccctcgccgccgccaccatggacgccatcaagaagaagatgcagatgctgaagctcgacaaggagaacgccttggatcgagctgagcaggcggaggccgacaagaaggcggcggaagacaggagcaagcagctggaagatgagctggtgtcactgcaaaagaaactcaagggcaccgaagatgaactggacaaatactctgaggctctcaaagatgcccaggagaagctggagctggcagagaaaaaggccaccgatgctgaagccgacgtagcttctctgaacagacgcatccagctggttgaggaagagttggatcgtgcccaggagcgtctggcaacagctttgcagaagctggaggaagctgagaaggcagcagatgagagtgagagaggcatgaaagtcattgagagtcgagcccaaaaagatgaagaaaaaatggaaattcaggagatccaactgaaagaggccaagcacattgctgaagatgccgaccgcaaatatgaagaggtggcccgtaagctggtcatcattgagagcgacctggaacgtgcagaggagcgggctgagctctcagaaggccaagtccgacagctggaagaacaattaagaataatggatcagaccttgaaagcattaatggctgcagaggataagtactcgcagaaggaagacagatatgaggaagagatcaaggtcctttccgacaagctgaaggaggctgagactcgggctgagtttgcggagaggtcagtaactaaattggagaaaagcattgatgacttagaagagaaagtggctcatgccaaagaagaaaaccttagtatgcatcagatgctggatcagactttactggagttaaacaacatgtgaaaacctccttagctgcgaccacattctttcgttttgttttgttttgtttttaaacacctgcttaccccttaaatgcaatttatttacttttaccactgtcacagaaacatccacaagataccagctaggtcagggggtggggaaaacacatacaaaaaggcaagcccatgtcagggcgatcctggttcaaatgtgccatttcccgggttgatgctgccacactttgtagagagtttagcaacacagtgtgcttagtcagcgtaggaatcctcactaaagcagaagaagttccattcaaagtgccaatgatagagtcaacaggaaggttaatgttggaaacacaatcaggtgtggattggtgctactttgaacaaaaggtccccctgtggtcttttgttcaacattgtacaatgtagaactctgtccaacactaatttattttgtcttgagttttactacaagatgagactatggatcccgcatgcctgaattcactaaagccaagggtctgtaagccacgctgctcttccgagacttccattcctttctgattggcacacgtgcagctcatgacaatctgtaggataacaatcagtgtggatttccactcttttcagtccttcatgttaaagatttagacaccacatacaactggtaaaggacgttttcttgagagttttaactatatgtaaacattgtataatgatatggaataaaatgcacattgtaggacattttctaaaaaaaaaaa

SEQ ID NO: 3259 - protein, 284 aa, Homo sapiens
MDAIKKKMQMLKLDKENALDRAEQAEADKKAAEDRSKQLEDELVSLQKKLKGTEDELDKYSEALKDAQEKLELAEKKATDAEADVASLNRRIQLVEEELDRAQERLATALQKLEEAEKAADESERGMKVIESRAQKDEEKMEIQEIQLKEAKHIAEDADRKYEEVARKLVIIESDLERAEERAELSEGQVRQLEEQLRIMDQTLKALMAAEDKYSQKEDRYEEEIKVLSDKLKEAETRAEFAERSVTKLEKSIDDLEEKVAHAKEENLSMHQMLDQTLLELNNM

SEQ ID NO: 3260 - DNA, 1797 bp, Homo sapiens
ggaaggggggcaggagaaaaaagcttttccaaaaaagtattggctgtcttgaggaatgcggtcgcccccttgggaaagtacatatctgggagaagcaggcggctccgcgctcgcactcccgctcctccgcccgaccgcgcgctcgccccgccgctcctgctgcagccccagggcccctcgccgccgccaccatggacgccatcaagaagaagatgcagatgctgaagctcgacaaggagaacgccttggatcgagctgagcaggcggaggccgacaagaaggcggcggaagacaggagcaagcagctcgaggaggacatcgcggccaaggagaagttgctgcgggtgtcggaggacgagcgggaccgggtgctggaggagctgcacaaggcggaggacagcctcctggccgccgaagaggccgccgccaaggctgaagccgacgtagcttctctgaacagacgcatccagctggttgaggaagagttggatcgtgcccaggagcgtctggcaacagctttgcagaagctggaggaagctgagaaggcagcagatgagagtgagagaggcatgaaagtcattgagagtcgagcccaaaaagatgaagaaaaaatggaaattcaggagatccaactgaaagaggccaagcacattgctgaagatgccgaccgcaaatatgaagaggtggcccgtaagctggtcatcattgagagcgacctggaacgtgcagaggagcgggctgagctctcagaaggcaaatgtgccgagcttgaagaagaattgaaaactgtgacgaacaacttgaagtcactggaggctcaggctgagaagtactcgcagaaggaagacagatatgaggaagagatcaaggtcctttccgacaagctgaaggaggctgagactcgggctgagtttgcggagaggtcagtaactaaattggagaaaagcattgatgacttagaagagaaagtggctcatgccaaagaagaaaaccttagtatgcatcagatgctggatcagactttactggagttaaacaacatgtgaaaacctccttagctgcgaccacattctttcgttttgttttgttttgtttttaaacacctgcttaccccttaaatgcaatttatttacttttaccactgtcacagaaacatccacaagataccagctaggtcagggggtggggaaaacacatacaaaaaggcaagcccatgtcagggcgatcctggttcaaatgtgccatttcccgggttgatgctgccacactttgtagagagtttagcaacacagtgtgcttagtcagcgtaggaatcctcactaaagcagaagaagttccattcaaagtgccaatgatagagtcaacaggaaggttaatgttggaaacacaatcaggtgtggattggtgctactttgaacaaaaggtccccctgtggtcttttgttcaacattgtacaatgtagaactctgtccaacactaatttattttgtcttgagttttactacaagatgagactatggatcccgcatgcctgaattcactaaagccaagggtctgtaagccacgctgctcttccgagacttccattcctttctgattggcacacgtgcagctcatgacaatctgtaggataacaatcagtgtggatttccactcttttcagtccttcatgttaaagatttagacaccacatacaactggtaaaggacgttttcttgagagttttaactatatgtaaacattgtataatgatatggaataaaatgcacattgtaggacattttctaaaaaaaaaaa

SEQ ID NO: 3261 - protein, 284 aa, Homo sapiens
MDAIKKKMQMLKLDKENALDRAEQAEADKKAAEDRSKQLEEDIAAKEKLLRVSEDERDRVLEELHKAEDSLLAAEEAAAKAEADVASLNRRIQLVEEELDRAQERLATALQKLEEAEKAADESERGMKVIESRAQKDEEKMEIQEIQLKEAKHIAEDADRKYEEVARKLVIIESDLERAEERAELSEGKCAELEEELKTVTNNLKSLEAQAEKYSQKEDRYEEEIKVLSDKLKEAETRAEFAERSVTKLEKSIDDLEEKVAHAKEENLSMHQMLDQTLLELNNM

SEQ ID NO: 3262 - DNA, 1566 bp, Homo sapiens
ggggcgccgccatcgcacagagaggcctgggcggggcggaccggcgctgggcagccaggacagccgcggcagccgggtccgcagggcagcagccggcctctcccactgcagccctcccgcccgcctaccgtccggcgcgatggcggggagtagctcgctggaggcggtgcgcaggaagatccggagcctgcaggagcaggcggacgccgctgaggagcgcgcgggcaccctgcagcgcgagctggaccacgagaggaagctgagggagaccgctgaagccgacgtagcttctctgaacagacgcatccagctggttgaggaagagttggatcgtgcccaggagcgtctggcaacagctttgcagaagctggaggaagctgagaaggcagcagatgagagtgagagaggcatgaaagtcattgagagtcgagcccaaaaagatgaagaaaaaatggaaattcaggagatccaactgaaagaggccaagcacattgctgaagatgccgaccgcaaatatgaagaggtggcccgtaagctggtcatcattgagagcgacctggaacgtgcagaggagcgggctgagctctcagaaggcaaatgtgccgagcttgaagaagaattgaaaactgtgacgaacaacttgaagtcactggaggctcaggctgagaagtactcgcagaaggaagacagatatgaggaagagatcaaggtcctttccgacaagctgaaggaggctgagactcgggctgagtttgcggagaggtcagtaactaaattggagaaaagcattgatgacttagaagatcaactctaccagcaacttgagcaaaatcgccgcctcactaatgaactaaagctggccctgaatgaggattaaacttaagagtgaaaaaacttgggctgaattctaggcgtggagcccatgtgcagaaaatctaagactgtcctaccttcaactaatagagttgaaaacagttgctttctgcagaaatgcaaatgcaaggaattggctgaaaggctggccttgcctgcttgtttctctatatggctggaataattacgttctctttaatcacaaaacagcttttatggtagaatacttatatcaattcagcactgctccttgaaatagcaggtcctcttgtttgaactgataaataatgaggagcccccccaaaaaatgttttctatttcctgacagccatgagtcctactttaagtatgtatatatatatatatatgtgtgtgtgtgtgtgtgtgtatatattcctatcagatactcatattcctaacttctaaatatctggtatagtgtttgaaatatgattaaatgtacctatgcttgggcaaaatagcttttgaaaacaggaactcatgccagaagcccctggttgtctgaaaggtatgctttactcagtctaatggtgctgttggagtctggggagaatgtcatgctaataaatagaacactataaaaatattaagagaatgtcctaatgaagtgtgcatgaaacatgttgacaattttttatgagcaacagaaataaatcattttaaaagttctca

SEQ ID NO: 3263 - protein, 245 aa, Homo sapiens
MAGSSSLEAVRRKIRSLQEQADAAEERAGTLQRELDHERKLRETAEADVASLNRRIQLVEEELDRAQERLATALQKLEEAEKAADESERGMKVIESRAQKDEEKMEIQEIQLKEAKHIAEDADRKYEEVARKLVIIESDLERAEERAELSEGKCAELEEELKTVTNNLKSLEAQAEKYSQKEDRYEEEIKVLSDKLKEAETRAEFAERSVTKLEKSIDDLEDQLYQQLEQNRRLTNELKLALNED

SEQ ID NO: 3264 - DNA, 1797 bp, Homo sapiens
ggaaggggggcaggagaaaaaagcttttccaaaaaagtattggctgtcttgaggaatgcggtcgcccccttgggaaagtacatatctgggagaagcaggcggctccgcgctcgcactcccgctcctccgcccgaccgcgcgctcgccccgccgctcctgctgcagccccagggcccctcgccgccgccaccatggacgccatcaagaagaagatgcagatgctgaagctcgacaaggagaacgccttggatcgagctgagcaggcggaggccgacaagaaggcggcggaagacaggagcaagcagctcgaggaggacatcgcggccaaggagaagttgctgcgggtgtcggaggacgagcgggaccgggtgctggaggagctgcacaaggcggaggacagcctcctggccgccgaagaggccgccgccaaggctgaagccgacgtagcttctctgaacagacgcatccagctggttgaggaagagttggatcgtgcccaggagcgtctggcaacagctttgcagaagctggaggaagctgagaaggcagcagatgagagtgagagaggcatgaaagtcattgagagtcgagcccaaaaagatgaagaaaaaatggaaattcaggagatccaactgaaagaggccaagcacattgctgaagatgccgaccgcaaatatgaagaggtggcccgtaagctggtcatcattgagagcgacctggaacgtgcagaggagcgggctgagctctcagaaggccaagtccgacagctggaagaacaattaagaataatggatcagaccttgaaagcattaatggctgcagaggataagtactcgcagaaggaagacagatatgaggaagagatcaaggtcctttccgacaagctgaaggaggctgagactcgggctgagtttgcggagaggtcagtaactaaattggagaaaagcattgatgacttagaagagaaagtggctcatgccaaagaagaaaaccttagtatgcatcagatgctggatcagactttactggagttaaacaacatgtgaaaacctccttagctgcgaccacattctttcgttttgttttgttttgtttttaaacacctgcttaccccttaaatgcaatttatttacttttaccactgtcacagaaacatccacaagataccagctaggtcagggggtggggaaaacacatacaaaaaggcaagcccatgtcagggcgatcctggttcaaatgtgccatttcccgggttgatgctgccacactttgtagagagtttagcaacacagtgtgcttagtcagcgtaggaatcctcactaaagcagaagaagttccattcaaagtgccaatgatagagtcaacaggaaggttaatgttggaaacacaatcaggtgtggattggtgctactttgaacaaaaggtccccctgtggtcttttgttcaacattgtacaatgtagaactctgtccaacactaatttattttgtcttgagttttactacaagatgagactatggatcccgcatgcctgaattcactaaagccaagggtctgtaagccacgctgctcttccgagacttccattcctttctgattggcacacgtgcagctcatgacaatctgtaggataacaatcagtgtggatttccactcttttcagtccttcatgttaaagatttagacaccacatacaactggtaaaggacgttttcttgagagttttaactatatgtaaacattgtataatgatatggaataaaatgcacattgtaggacattttctaaaaaaaaaaa

SEQ ID NO: 3265 - protein, 284 aa, Homo sapiens
MDAIKKKMQMLKLDKENALDRAEQAEADKKAAEDRSKQLEEDIAAKEKLLRVSEDERDRVLEELHKAEDSLLAAEEAAAKAEADVASLNRRIQLVEEELDRAQERLATALQKLEEAEKAADESERGMKVIESRAQKDEEKMEIQEIQLKEAKHIAEDADRKYEEVARKLVIIESDLERAEERAELSEGQVRQLEEQLRIMDQTLKALMAAEDKYSQKEDRYEEEIKVLSDKLKEAETRAEFAERSVTKLEKSIDDLEEKVAHAKEENLSMHQMLDQTLLELNNM

SEQ ID NO: 3266 - DNA, 1956 bp, Homo sapiens
gtgcgtgagtttggtggcggccggctgtgcagagacgccatgtaccggctcatgtcagcagtgactgcccgggctgccgcccccgggggcttggcctcaagctgcggacgacgcggggtccatcagcgcgccgggctgccgcctctcggccacggctgggtcgggggcctcgggctggggctggggctggcgctcggggtgaagctggcaggtgggctgaggggcgcggccccggcgcagtcccccgcggcccccgaccctgaggcgtcgcctctggccgagccgccacaggagcagtccctcgccccgtggtctccgcagaccccggcgccgccctgctccaggtgcttcgccagagccatcgagagcagccgcgacctgctgcacaggatcaaggatgaggtgggcgcaccgggcatagtggttggagtttctgtagatggaaaagaagtctggtcagaaggtttaggttatgctgatgttgagaaccgtgtaccatgtaaaccagagacagttatgcgaattgctagcatcagcaaaagtctcaccatggttgctcttgccaaattgtgggaagcagggaaactggatcttgatattccagtacaacattatgttcccgaattcccagaaaaagaatatgaaggtgaaaaggtttctgtcacaacaagattactgatttcccatttaagtggaattcgtcattatgaaaaggacataaaaaaggtgaaagaagagaaagcttataaagccttgaagatgatgaaagagaatgttgcatttgagcaagaaaaagaaggcaaaagtaatgaaaagaatgattttactaaatttaaaacagagcaggagaatgaagccaaatgccggaattcaaaacctggcaagaaaaagaatgattttgaacaaggcgaattatatttgagagaaaagtttgaaaattcaattgaatccctaagattatttaaaaatgatcctttgttcttcaaacctggtagtcagtttttgtattcaacttttggctataccctactggcagccatagtagagagagcttcaggatgtaaatatttggactatatgcagaaaatattccatgacttggatatgctgacgactgtgcaggaagaaaacgagccagtgatttacaatagagcaagattttatgtttacaataaaaagaaacgtcttgtcaacacaccttacgtggataactcctataaatgggctggtggtggatttctgtctacagtgggtgaccttctgaaatttgggaatgcaatgctttatggttaccaagttgggctgtttaagaactcaaatgaaaatcttttacctggatacctcaaaccagaaacaatggttatgatgtggaccccagtccctaacacagagatgtcttgggataaagagggtaaatatgcaatggcgtggggtgttgtggaaaggaaacaaacgtatggttcgtgtagaaagcaacggcattatgcttcacatactggaggggcagtgggtgccagtagtgtcctgctggtccttcctgaagaactggatacagagactataaataacaaggttcccccaagaggaatcattgtttctatcatatgtaacatgcaatctgttggcctcaatagcaccgctttgaagattgcccttgaatttgataaagacagatcagactgataaccttaacaccataggtgcaaaatgagttgttctgaggtttttttgaaacattaaagttccaaaacatgacatttttaagaataaatttgaaatagagtataactgaatgcagagaattatgtacctctaattgcttaattttgtaatggtcttttattgtagaattggttctttatactcagggaagtaattatattgtttttactttttgaaaaaagtgttaactcttgaaataaaatattctgataaaataaaaaaaaaaaaaaaaaa

SEQ ID NO: 3267 - protein, 547 aa, Homo sapiens
MYRLMSAVTARAAAPGGLASSCGRRGVHQRAGLPPLGHGWVGGLGLGLGLALGVKLAGGLRGAAPAQSPAAPDPEASPLAEPPQEQSLAPWSPQTPAPPCSRCFARAIESSRDLLHRIKDEVGAPGIVVGVSVDGKEVWSEGLGYADVENRVPCKPETVMRIASISKSLTMVALAKLWEAGKLDLDIPVQHYVPEFPEKEYEGEKVSVTTRLLISHLSGIRHYEKDIKKVKEEKAYKALKMMKENVAFEQEKEGKSNEKNDFTKFKTEQENEAKCRNSKPGKKKNDFEQGELYLREKFENSIESLRLFKNDPLFFKPGSQFLYSTFGYTLLAAIVERASGCKYLDYMQKIFHDLDMLTTVQEENEPVIYNRARFYVYNKKKRLVNTPYVDNSYKWAGGGFLSTVGDLLKFGNAMLYGYQVGLFKNSNENLLPGYLKPETMVMMWTPVPNTEMSWDKEGKYAMAWGVVERKQTYGSCRKQRHYASHTGGAVGASSVLLVLPEELDTETINNKVPPRGIIVSIICNMQSVGLNSTALKIALEFDKDRSD

SEQ ID NO: 3268 - DNA, 1388 bp, Homo sapiens
gtgcgtgagtttggtggcggccggctgtgcagagacgccatgtaccggctcatgtcagcagtgactgcccgggctgccgcccccgggggcttggcctcaagctgcggacgacgcggggtccatcagcgcgccgggctgccgcctctcggccacggctgggtcgggggcctcgggctggggctggggctggcgctcggggtgaagctggcaggtgggctgaggggcgcggccccggcgcagtcccccgcggcccccgaccctgaggcgtcgcctctggccgagccgccacaggagcagtccctcgccccgtggtctccgcagaccccggcgccgccctgctccaggtgcttcgccagagccatcgagagcagccgcgacctgctgcacaggatcaaggatgaggtgggcgcaccgggcatagtggttggagtttctgtagatggaaaagaagtctggtcagaaggtttaggttatgctgatgttgagaaccgtgtaccatgtaaaccagagacagttatgcgaattgctagcatcagcaaaagtctcaccatggttgctcttgccaaattgtgggaagcagggaaactggatcttgatattccagtacaacattatgttcccgaattcccagaaaaagaatatgaaggtgaaaaggtttctgtcacaacaagattactgatttcccatttaagtggaattcgtcattatgaaaaggacataaaaaaggtgaaagaagagaaagcttataaagccttgaagatgatgaaagagaatgttgcatttgagcaagaaaaagaaggcaaaagtaatgaaaagaatgattttactaaatttaaaacagagcaggagaatgaagccaaatgccggaattcaaaacctggcaagaaaaagaatgattttgaacaaggcgaattatatttgagagaaaagtttgaaaattcaattgaatccctaagattatttaaaaatgatcctttgttcttcaaacctggtagtcagtttttgtattcaacttttggctataccctactggcagccatagtagagagagcttcaggatgtaaatatttggactatatgcagaaaatattccatgacttggatatgctgacgactgtgcaggaagaaaacgagccagtgatttacaatagagcaaggtaaatgaataccttctgctgtgtctagctatatcgcatcttaacactattttattaattaaaagtcaaattttctttgtttccattccaaaatcaacctgccacattttgggagcttttctacatgtctgttttctcatctgtaaagtgaaggaagtaaaacatgtttataaagtaaaaaaaaaaaaaaaaaaaaaaaaaaaaaaaaaaaaaaaaaaaaaaaaaaaaaaa

SEQ ID NO: 3269 - protein, 373 aa, Homo sapiens
MYRLMSAVTARAAAPGGLASSCGRRGVHQRAGLPPLGHGWVGGLGLGLGLALGVKLAGGLRGAAPAQSPAAPDPEASPLAEPPQEQSLAPWSPQTPAPPCSRCFARAIESSRDLLHRIKDEVGAPGIVVGVSVDGKEVWSEGLGYADVENRVPCKPETVMRIASISKSLTMVALAKLWEAGKLDLDIPVQHYVPEFPEKEYEGEKVSVTTRLLISHLSGIRHYEKDIKKVKEEKAYKALKMMKENVAFEQEKEGKSNEKNDFTKFKTEQENEAKCRNSKPGKKKNDFEQGELYLREKFENSIESLRLFKNDPLFFKPGSQFLYSTFGYTLLAAIVERASGCKYLDYMQKIFHDLDMLTTVQEENEPVIYNRAR

SEQ ID NO: 3270 - DNA, 1084 bp, Homo sapiens
tagagcagacaagcccgccccgccgctcctcccagcagcttctatcccggaagttgatgccgagcgcagatcgcttgcagcttgctagctgtgtgggctgggaggtctggtagggctgagcttgcaagaggatcaacatgcctttggctagagatttactacatccgtccttggaagaggaaaagaaaaaacataaaaagaaacgcctagtacaaagtccaaattcttactttatggatgtaaaatgtccaggttgctacaagatcaccacggttttcagccatgctcagacagtggttctttgtgtaggttgttcaacagtgttgtgccagcctacaggaggaaaggccagactcacagaagggtgttcatttagaagaaagcaacactaatgattcaaacagcttcctgaattttaattttgtgttgtctcacagaaagccttatcataaattccataattctaattaatttaccaagataatgtaattacatttggttttgtaaggtatacagcagtaatctcctattttggtgtcagtttttcaataaagttttgattatgggcaaatcccctctttttctttttttaaaatatatttgagtatgccatacatttatatatatggtgtatatgaatttggtttaaacattttaaaatttattctgattagtttgtgtctttttttttttttttgagagagagagtcctgctctgtcactcaagctggagtgcagtggtgcgatctcggctcactgcaacctccgcctcccaggtccaagcaattctcttgccttgtcctcccaagtagctgggattataggcacacaccaccatgcctggctaatttgtgtctcattttcaagagtagaaaccctaaatattttattttcattccttttccaaattgctatgaatgggattaaaggattacagatgtaaagtctattatttgtgaattctaaatgtagttctgctgttgtacctgtggaaacatcttaaagaagtacatattttgcacgtcctgcacgtgtaccccagaacttaaactataattaaaaagaatagtttcaaaaaaataca

SEQ ID NO: 3271 - protein, 84 aa, Homo sapiens
MPLARDLLHPSLEEEKKKHKKKRLVQSPNSYFMDVKCPGCYKITTVFSHAQTVVLCVGCSTVLCQPTGGKARLTEGCSFRRKQH

SEQ ID NO: 3272 - DNA, 4877 bp, Homo sapiens
ggcggattggcgggcacgccccctcgcccgcggccccctccccgcctctctccaccgcctcctctggctccccggtcagagggccggagcgagaagatggcgaagacgtacgattatctcttcaagctcctgctgatcggcgactcgggggtaggcaagacctgcctcctgttccgcttctcagaggacgccttcaacaccaccttcatctccaccatcggaattgattttaaaattagaacgatagaactagatggaaagaaaattaagcttcagatatgggacacagcgggtcaggaaagattccgaacaatcacgacagcgtactacagaggagccatgggcattatgctggtctatgacatcacaaatgaaaaatcctttgacaatattaaaaattggatcagaaacattgaagagcatgcctcttccgatgtcgaaagaatgatcctgggtaacaaatgtgatatgaatgacaaaagacaagtgtcaaaagaaagaggggagaagctagcaattgactatgggattaaattcttggagacaagcgcaaaatccagtgcaaatgtagaagaggcattttttacacttgcacgagatataatgacaaaactcaacagaaaaatgaatgacagcaattcagcaggagcaggtggaccagtgaaaataacagaaaaccgatcaaagaagaccagtttctttcgttgctcgctactttgatgaactctttctgagagactgcagcacacctagagggccctttcctgcttctctgaaagcacaggtcacccagcctcagaatcacacctcccggctgctgctgagagcaccactgaacttagacctctcaacacagtatgccaagtggattccagcctcatggcctagcaaaagaacagactccctttttcaaacatggaagcaatgaagtggagacacatgcaggacctaactcgttttttccttgttttattacctgttgcagaagcggttatctttcttttttactttgcacatcagtgttagcctttccctatttcagcacaatcttagactcatatttgcacacttttgtgtcgtgaagttctagacaaatttgtacatgtggcaatgttaaaagagcatttacagcagaggttaatatactaaaattaaagggtatttggtctggttcatatggtcaaatattactgccttggtagcatttatttaagggctttttcttaaataagaatcattaaagtcattaaaaaaatttactgaaatgcccatcttgtcatcaaaggccacaatttctttatttcttcagattaagagctttgcctcatccccgacctgttttccagagtctgggtagctgaatgaatcactttaaaatgattacctctgcctaatctatagaaactgcatttggaaatcaccataatctcatttttccctggggtttgtatttgctattctttcccatgtttgacttaagtgtaatcactcttaagtaatatttgaacattattatctgtttctatttgtgaacttcttgagctgaaattttacgtgggctgagagatataccatttagggttttagtgcagcatctaactgtgattctgtcaataaggatatgtaatatattttttcttaggttcactccttagctggctggtttagttgtaataccaaattcctaccataatccctgtctacaaaagttaggtttagattttagtttgcggaaaccttccctatatagagacagattaacttgttgatataaatttaatagagctagctcttggtaatggtgaaaataatgagttttggttggttttatttggcagatgtttttagaaataaaagtacttagacctagtgcagcctctaggaaaagtcttgccttttcattagagaaaacaggaccaaggtttcagttttcaaacagctgttgttgattgtgtagaacccagttccatctgttttggttcattgttacagaacttagtccagtcatttgggctaaagccaaccaaaagcttagttgcctttctcaacaaacactggtactggtatacttttgtagatgaaaccatcacaaggtatttagtgttaacttgtgtgccaaattcagatcactatgtcgttgttgctctagccttcagtgtcataacacaggggggataaaacagaggggatgagggaaatgaattctgttaataattattcttcctggtatgcctgttttgcttcacaaaggctactatcatgctggatagataagaacaggagatggcagtggaaagggattgcttgttaccacagagaattctcttcaaattaagatatgtcattagaatgcttggaccagtcaatcttttgtacttatttgaaaatataggaacaatttagcagctgcaaatatgcccaagctatttttaatagatatactaaacttattgttgacaaatttcagcctccttaatttttttttttttggtaattacctataggcttaaaagtcattcgttgctgttctagtataattagtagttccgtgattgaaagtttattgtaattctactatcttcaaattagatacattttcaaaaggaaaagataattttttagaaacatcttaatattcactatttcctgaaaaaatccaagcagttaacgctttctggatggtaacaaagtaccttctaaaagataagtgctatgacaccatgtatgaatgtaattctcttagtaatttacctctgactatttggtgtcttaacgctttggtttatataatctcaggggttgtctgcaaaccaaaactgacatattctgtggttagcttttattacttttttttttaacagaatgctttgctttggttatatttcttctttcttcttttgtcttatatggattaataactagtctccatgaacttcacttgaaagagcctgtaaaagttagatgagtctaaaagtgctctttgaagtagcagcaaattgggagtatatgctctgttatatagaaataaattgtccttgctattttcttacatttagctttgctagattgtatatacattgagctaagaccttaggaaattcactttctgcatgataaaatgacccaataaatattccactttgcttaataatgtacatacagtgcattattttttctatttgtagatgaatttaatgacagataattgtctgttccccgctgaaactgaagaaatctagtttttttgtgaacatttttgtggtcttatggataaggtacatgaagatttttgcagcagtattagtggttcagtggctgcactttattaatcagtgtgttaatttttgacagtgattggactagaccttttcaaatagagtctgagggtatcagacagtgaaaatgtgctgtaactaagtagcatgtaaatcagttgattgtaaaacgtttcgctgggaacttattttagctatattttacttcagacagattatgatacaataatctacctgtgcatcagttagtaggtgctgcagggtttcttactatttacagaaacattttgtgcagtctttgttataaattttcagaagactatactctttactttgaaggtctattttttaattatacctcatttagctaactagtattctaatacctggtagaaaaacagtgagccagcctttaagcatctaacaaaatttagactctttgttttgttttgaactgaagacatcattgggaaaggtaggaaatattagtttaggatagagcatacatgtcatatccagtagcataaaaaaagtattatctccctgtctccattaataaatttagctgtgcaatataggtgcgtttttgcagaagtttctagtaagagattataactccattttacaggttctgaatgctcagagtctatattaaggcttataaagtttttcctgtgatcagtaagtgacacatttaagcagacattcttttcaagttcatgacttagattcctttacaaatttagttctcaatctttaaaaaccacatttcattatgttggttaattattataaattttaagcactcatttctgcaatcaggtttctcagaattttttttttttaaacagaagagacattcctttttccttgttacatccaaggggggcacaggggtgggtggaaaggaatgtctaaaaatgaaatcccttgatatagagggacctagacggacaggatatgctaaaataatttcaaattctagcacaattttagagtagaataagtcatttttttagactaataaaattaatggctgtcatgttcactctgaaaaaaatctaaatgactgaaatgtacagaaataaaaattagcaaacaattattctagggatattttcagattttacttcatttcttgaaatgcgtgtgccatatgcaattgcatttcttgtgccaagaaactaatagaacttatttcactttacctttttttaaaatgtgaatttagttattatagttcaattttatggccttacagatggcttttattttgtttgcagctgacactgcagttcctttcatgcaaaataccataaactgtttgatgaaaatcatgcccctaatggaaactctctagtttttccatataactatcctactgtacatgtttaaacatattttatttttgctccaatggcttaatgtgaaaagctcctgcagataagtggacctgtcatgtggttaatcttgtttaagccaattcattaactgtgtactgatactgatgctatgttttttttaaatggattttattccaggtgaactttttttttataataatgttcgtctaaaataaaaactacataatgaaaatgaaaa

SEQ ID NO: 3273 - protein, 207 aa, Homo sapiens
MAKTYDYLFKLLLIGDSGVGKTCLLFRFSEDAFNTTFISTIGIDFKIRTIELDGKKIKLQIWDTAGQERFRTITTAYYRGAMGIMLVYDITNEKSFDNIKNWIRNIEEHASSDVERMILGNKCDMNDKRQVSKERGEKLAIDYGIKFLETSAKSSANVEEAFFTLARDIMTKLNRKMNDSNSAGAGGPVKITENRSKKTSFFRCSLL

SEQ ID NO: 3274 - DNA, 939 bp, Homo sapiens
aacgggcccccgggtcggtttccgcggtggccatgactgcggccgtgttcttcggctgcgccttcattgccttcgggcctgcgctcgccctttatgtcttcaccatcgccaccgagccgttgcgtatcatcttcctcatcgccggagctttcttctggttggtgtctctactgatttcgtcccttgtttggttcatggcaagagtcattattgacaacaaagatggaccaacacagaaatatctgctgatctttggagcgtttgtctctgtctatatccaagaaatgttccgatttgcatattataaactcttaaaaaaagccagtgaaggtttgaagagtataaacccaggtgagacagcaccctctatgcgactgctggcctatgtttctggcttgggctttggaatcatgagtggagtattttcctttgtgaataccctatctgactccttggggccaggcacagtgggcattcatggagattctcctcaattcttcctttattcagctttcatgacgctggtcattatcttgctgcatgtattctggggcattgtattttttgatggctgtgagaagaaaaagtggggcatcctccttatcgttctcctgacccacctgctggtgtcagcccagaccttcataagttcttattatggaataaacctggcgtcagcatttataatcctggtgctcatgggcacctgggcattcttagctgcgggaggcagctgccgaagcctgaaactctgcctgctctgccaagacaagaactttcttctttacaaccagcgctccagataacctcagggaaccagcacttcccaaaccgcagactacatctttagaggaagcacaactgtgcctttttctgaaaatccctttttctggtggaattgagaaagaaataaaactatgcagatatgcgttccattca

SEQ ID NO: 3275 - protein, 257 aa, Homo sapiens
MTAAVFFGCAFIAFGPALALYVFTIATEPLRIIFLIAGAFFWLVSLLISSLVWFMARVIIDNKDGPTQKYLLIFGAFVSVYIQEMFRFAYYKLLKKASEGLKSINPGETAPSMRLLAYVSGLGFGIMSGVFSFVNTLSDSLGPGTVGIHGDSPQFFLYSAFMTLVIILLHVFWGIVFFDGCEKKKWGILLIVLLTHLLVSAQTFISSYYGINLASAFIILVLMGTWAFLAAGGSCRSLKLCLLCQDKNFLLYNQRSR

SEQ ID NO: 3276 - DNA, 3992 bp, Homo sapiens
ataaaagctgcccggggaagccaggagagcgaagggcggacgtactcgccacggcacccaggctgcgcgcacgcggtcccggtgtgcagctggagagcgagcggccaccgggagcccccggcacagcccgcgcccgccccgcaggagcccgcgaagatgccccggcgcagcctgcacgcggcggccgtgctcctgctggtgatcttaaaggaacagccttccagcccggccccagtgaacggttccaagtggacttattttggtcctgatggggagaatagctggtccaagaagtacccgtcgtgtgggggcctgctgcagtcccccatagacctgcacagtgacatcctccagtatgacgccagcctcacgcccctcgagttccaaggctacaatctgtctgccaacaagcagtttctcctgaccaacaatggccattcagtgaagctgaacctgccctcggacatgcacatccagggcctccagtctcgctacagtgccacgcagctgcacctgcactgggggaacccgaatgacccgcacggctctgagcacaccgtcagcggacagcacttcgccgccgagctgcacattgtccattataactcagacctttatcctgacgccagcactgccagcaacaagtcagaaggcctcgctgtcctggctgttctcattgagatgggctccttcaatccgtcctatgacaagatcttcagtcaccttcaacatgtaaagtacaaaggccaggaagcattcgtcccgggattcaacattgaagagctgcttccggagaggaccgctgaatattaccgctaccgggggtccctgaccacacccccttgcaaccccactgtgctctggacagttttccgaaaccccgtgcaaatttcccaggagcagctgctggctttggagacagccctgtactgcacacacatggacgacccttcccccagagaaatgatcaacaacttccggcaggtccagaagttcgatgagaggctggtatacacctccttctcccaagtgcaagtctgtactgcggcaggactgagtctgggcatcatcctctcactggccctggctggcattcttggcatctgtattgtggtggtggtgtccatttggcttttcagaaggaagagtatcaaaaaaggtgataacaagggagtcatttacaagccagccaccaagatggagactgaggcccacgcttgaggtccccggagctcccgggcacatccaggaaggaccttgctttggaccctacacacttcggctctctggacacttgcgacacctcaaggtgttctctgtagctcaatctgcaaacatgccaggcctcagggatcctctgctgggtgcctccttgccttgggaccatggccaccccagagccatccgatcgatggatgggatgcactctcagaccaagcagcaggaattcaaagctgcttgctgtaactgtgtgagattgtgaagtggtctgaattctggaatcacaaaccaagccatgctggtgggccattaatggttggaaaacactttcatccggggctttgccagagcgtgctttcaagtgtcctggaaattctgctgcttctccaagctttcagacaagaatgtgcactctctgcttaggttttgcttgggaaactcaacttctttcctctggagacggggcatctccctctgatttccttctgctatgacaaaacctttaatctgcaccttacaactcggggacaaatggggacaggaaggatcaagttgtagagagaaaaagaaaacaagagatatacattgtgatatattagggacactttcacagtcctgtcctctggatcacagacactgcacagaccttagggaatggcaggttcaagttccacttcttggtggggatgagaagggagagagagctagagggacaaagagaatgagaagacatggatgatctgggagagtctcactttggaatcagaattggaatcacattctgtttatcaagccataatgtaaggacagaataatacaatattaagtccaaatccaacctcctgtcagtggagcagttatgttttatactctacagattttacaaataatgaggctgttccttgaaaatgtgttgttgctgtgtcctggaggagacatgagttccgagatgacccaatctgcctttgaatctggaggaaataggcagaaacaaaatgactgtagaacttattctctgtaggccaaatttcatttcagccacttctgcaggatccctactgccaacctggaatggagacttttatctacttctctctctctgaagatgtcaaatcgtggtttagatcaaatatatttcaagctataaaagcaggaggttatctgtgcagggggctggcatcatgtatttaggggcaagtaataatggaatgctactaagatactccatattcttccccgaatcacacagacagtttctgacaggcgcaactcctccattttcctcccgcaggtgagaaccctgtggagatgagtcagtgccatgactgagaaggaaccgacccctagttgagagcaccttgcagttccccgagaactttctgattcacagtctcattttgacagcatgaaatgtcctcttgaagcatagctttttaaatatctttttccttctactcctccctctgactctaagaattctctcttctggaatcgcttgaacccaggaggcggaggttgcagtaagccaaggtcatgccactgcactctagcctgggtgacagagcgagactccatctcaaaaaaaaaaaaaaaaaaattattctgtaccatcacaacttttcacaacgatggcaagccttatgtcttgggagcctgttttgctaggcaaagttacaagtgacctaatgggagctcaaatgtgtgtgtgtctctctgtgtgtttgtgtgtgtgtgtgcactcaagacctctaacagcctcgaagcctggggtggcatcccggccttgccattagcatgcctcatgcatcatcagatgacaaggacaaccctcatgacgaagcaacatgaattagggggcctcttggccttggtccaaaattgtcaatcagaaatgaacataaaggactccagagcagtgggactgtctgtcaaaagactctgtatatcttttgtggatgagttttgtgagagaacagagagaccattgtacctggcacaagggctgttcatgaaaagggagacttactgggaggtgcaagacagtggcatttctcctctcctcttgctgctcagcacagccctggattgcagccccgaggctgagaccagacaaagcccgggaggcagaaagatgctccaagaaccaacactatcaatgtctttgcaaatcctcacaggattcctgtgggtccagctttggaactgggaaacctttcttcggatccgcactcattccactgatgccagctgcccctgaaggatgccagtactgtggtgtgtgagtctcagcagccgcccacacgctcctaactctgctgcatggcagatgcctaggtggaaatagcaaaaacaaggcccaggctggggccagggccagaggggaaggccctggattctcactcatgtgagatcttgaatctctttctttgttctgtttgtttagttagtatcatctggtaaaatagttaaaaaacaacaaaaaactctgtatctgtttctagcatgtgctgcattgactctattaatcacatttcaaattcaccctacattcctctcctcttcactagcctctctgaaggtgtcctggccagccctggagaagcactggtgtctgcagcacccctcagttcctgtgcctcagcccacaggccactgtgataatggtctgtttagcacttctgtatttattgtaagaatgattataatgaagatacacactgtaactacaagaaattataaatgtttttcacatcaaaaaaaaaaaaaaaaaa

SEQ ID NO: 3277 - protein, 354 aa, Homo sapiens
MPRRSLHAAAVLLLVILKEQPSSPAPVNGSKWTYFGPDGENSWSKKYPSCGGLLQSPIDLHSDILQYDASLTPLEFQGYNLSANKQFLLTNNGHSVKLNLPSDMHIQGLQSRYSATQLHLHWGNPNDPHGSEHTVSGQHFAAELHIVHYNSDLYPDASTASNKSEGLAVLAVLIEMGSFNPSYDKIFSHLQHVKYKGQEAFVPGFNIEELLPERTAEYYRYRGSLTTPPCNPTVLWTVFRNPVQISQEQLLALETALYCTHMDDPSPREMINNFRQVQKFDERLVYTSFSQVQVCTAAGLSLGIILSLALAGILGICIVVVVSIWLFRRKSIKKGDNKGVIYKPATKMETEAHA

SEQ ID NO: 3278 - DNA, 3959 bp, Homo sapiens
ataaaagctgcccggggaagccaggagagcgaagggcggacgtactcgccacggcacccaggctgcgcgcacgcggtcccggtgtgcagctggagagcgagcggccaccgggagcccccggcacagcccgcgcccgccccgcaggagcccgcgaagatgccccggcgcagcctgcacgcggcggccgtgctcctgctggtgatcttaaaggaacagccttccagcccggccccagtgaacggttccaagtggacttattttggtcctgatggggagaatagctggtccaagaagtacccgtcgtgtgggggcctgctgcagtcccccatagacctgcacagtgacatcctccagtatgacgccagcctcacgcccctcgagttccaaggctacaatctgtctgccaacaagcagtttctcctgaccaacaatggccattcagtgaagctgaacctgccctcggacatgcacatccagggcctccagtctcgctacagtgccacgcagctgcacctgcactgggggaacccgaatgacccgcacggctctgagcacaccgtcagcggacagcacttcgccgccgagctgcacattgtccattataactcagacctttatcctgacgccagcactgccagcaacaagtcagaaggcctcgctgtcctggctgttctcattgagatgggctccttcaatccgtcctatgacaagatcttcagtcaccttcaacatgtaaagtacaaaggccaggaagcattcgtcccgggattcaacattgaagagctgcttccggagaggaccgctgaatattaccgctaccgggggtccctgaccacacccccttgcaaccccactgtgctctggacagttttccgaaaccccgtgcaaatttcccaggagcagctgctggctttggagacagccctgtactgcacacacatggacgacccttcccccagagaaatgatcaacaacttccggcaggtccagaagttcgatgagaggctggtatacacctccttctcccaaggcatcatcctctcactggccctggctggcattcttggcatctgtattgtggtggtggtgtccatttggcttttcagaaggaagagtatcaaaaaaggtgataacaagggagtcatttacaagccagccaccaagatggagactgaggcccacgcttgaggtccccggagctcccgggcacatccaggaaggaccttgctttggaccctacacacttcggctctctggacacttgcgacacctcaaggtgttctctgtagctcaatctgcaaacatgccaggcctcagggatcctctgctgggtgcctccttgccttgggaccatggccaccccagagccatccgatcgatggatgggatgcactctcagaccaagcagcaggaattcaaagctgcttgctgtaactgtgtgagattgtgaagtggtctgaattctggaatcacaaaccaagccatgctggtgggccattaatggttggaaaacactttcatccggggctttgccagagcgtgctttcaagtgtcctggaaattctgctgcttctccaagctttcagacaagaatgtgcactctctgcttaggttttgcttgggaaactcaacttctttcctctggagacggggcatctccctctgatttccttctgctatgacaaaacctttaatctgcaccttacaactcggggacaaatggggacaggaaggatcaagttgtagagagaaaaagaaaacaagagatatacattgtgatatattagggacactttcacagtcctgtcctctggatcacagacactgcacagaccttagggaatggcaggttcaagttccacttcttggtggggatgagaagggagagagagctagagggacaaagagaatgagaagacatggatgatctgggagagtctcactttggaatcagaattggaatcacattctgtttatcaagccataatgtaaggacagaataatacaatattaagtccaaatccaacctcctgtcagtggagcagttatgttttatactctacagattttacaaataatgaggctgttccttgaaaatgtgttgttgctgtgtcctggaggagacatgagttccgagatgacccaatctgcctttgaatctggaggaaataggcagaaacaaaatgactgtagaacttattctctgtaggccaaatttcatttcagccacttctgcaggatccctactgccaacctggaatggagacttttatctacttctctctctctgaagatgtcaaatcgtggtttagatcaaatatatttcaagctataaaagcaggaggttatctgtgcagggggctggcatcatgtatttaggggcaagtaataatggaatgctactaagatactccatattcttccccgaatcacacagacagtttctgacaggcgcaactcctccattttcctcccgcaggtgagaaccctgtggagatgagtcagtgccatgactgagaaggaaccgacccctagttgagagcaccttgcagttccccgagaactttctgattcacagtctcattttgacagcatgaaatgtcctcttgaagcatagctttttaaatatctttttccttctactcctccctctgactctaagaattctctcttctggaatcgcttgaacccaggaggcggaggttgcagtaagccaaggtcatgccactgcactctagcctgggtgacagagcgagactccatctcaaaaaaaaaaaaaaaaaaattattctgtaccatcacaacttttcacaacgatggcaagccttatgtcttgggagcctgttttgctaggcaaagttacaagtgacctaatgggagctcaaatgtgtgtgtgtctctctgtgtgtttgtgtgtgtgtgtgcactcaagacctctaacagcctcgaagcctggggtggcatcccggccttgccattagcatgcctcatgcatcatcagatgacaaggacaaccctcatgacgaagcaacatgaattagggggcctcttggccttggtccaaaattgtcaatcagaaatgaacataaaggactccagagcagtgggactgtctgtcaaaagactctgtatatcttttgtggatgagttttgtgagagaacagagagaccattgtacctggcacaagggctgttcatgaaaagggagacttactgggaggtgcaagacagtggcatttctcctctcctcttgctgctcagcacagccctggattgcagccccgaggctgagaccagacaaagcccgggaggcagaaagatgctccaagaaccaacactatcaatgtctttgcaaatcctcacaggattcctgtgggtccagctttggaactgggaaacctttcttcggatccgcactcattccactgatgccagctgcccctgaaggatgccagtactgtggtgtgtgagtctcagcagccgcccacacgctcctaactctgctgcatggcagatgcctaggtggaaatagcaaaaacaaggcccaggctggggccagggccagaggggaaggccctggattctcactcatgtgagatcttgaatctctttctttgttctgtttgtttagttagtatcatctggtaaaatagttaaaaaacaacaaaaaactctgtatctgtttctagcatgtgctgcattgactctattaatcacatttcaaattcaccctacattcctctcctcttcactagcctctctgaaggtgtcctggccagccctggagaagcactggtgtctgcagcacccctcagttcctgtgcctcagcccacaggccactgtgataatggtctgtttagcacttctgtatttattgtaagaatgattataatgaagatacacactgtaactacaagaaattataaatgtttttcacatcaaaaaaaaaaaaaaaaaa

SEQ ID NO: 3279 - protein, 343 aa, Homo sapiens
MPRRSLHAAAVLLLVILKEQPSSPAPVNGSKWTYFGPDGENSWSKKYPSCGGLLQSPIDLHSDILQYDASLTPLEFQGYNLSANKQFLLTNNGHSVKLNLPSDMHIQGLQSRYSATQLHLHWGNPNDPHGSEHTVSGQHFAAELHIVHYNSDLYPDASTASNKSEGLAVLAVLIEMGSFNPSYDKIFSHLQHVKYKGQEAFVPGFNIEELLPERTAEYYRYRGSLTTPPCNPTVLWTVFRNPVQISQEQLLALETALYCTHMDDPSPREMINNFRQVQKFDERLVYTSFSQGIILSLALAGILGICIVVVVSIWLFRRKSIKKGDNKGVIYKPATKMETEAHA

SEQ ID NO: 3280 - DNA, 2345 bp, Homo sapiens
ctcgagacgcagccgccgtcggccgagcgcccggctagaagcgacaccagacggagcctccggagttcctccgcccccacctcgccgggtcctggagccgcagtcctcccagctgccctcctcgtggccatggagtgtccacacctgagctccagcgtctgcattgctccggactcagccaagttccccaacggctccccgtcgtcctggtgctgcagcgtgtgccggtccaacaaaagcccttgggtctgtttgacttgttcaagtgtccactgtggaaggtatgtgaatggccatgcaaaaaaacattatgaagatgcacaagtacctttaaccaaccataagaaatcagaaaagcaagataaagttcagcacacagtatgtatggattgcagtagctacagtacatactgttatcgctgtgatgattttgtggttaatgacaccaagctgggactggtacagaaagtcagagaacacttacagaacttggaaaactcagctttcacagctgacaggcataagaaaagaaaacttttggaaaactcaacactaaacagcaagttattaaaagtaaatggaagcaccactgccatttgtgccacaggccttcggaatttggggaacacatgtttcatgaatgccatccttcagtcactcagtaacattgagcagttttgctgttatttcaaagaactgcccgccgtggagttaaggaatgggaaaacagcaggaaggcggacataccacaccaggagccaaggggataacaatgtgtctttggtagaagagtttagaaagacactctgtgctttatggcaaggcagccagactgcatttagcccagagtccttattttatgttgtttggaagattatgccaaactttaggggctatcaacagcaggacgcccatgaattcatgcgctaccttttggaccacctacacttggaacttcagggcggtttcaacggtgtttcccgctcagcaattctgcaggagaattctactctgtctgcaagtaacaagtgttgcataaatggagcatctactgttgtcacggctatattcggaggcattctccaaaatgaggttaactgcctcatatgtgggacagaatctagaaagtttgatccattcctagacctttcattagatattccaagtcagttcagaagtaagcgctctaagaatcaagaaaatggaccagtttgttcgttacgagattgtcttcgcagttttaccgacttagaagaacttgatgagacagagttatatatgtgccataaatgcaaaaagaaacaaaagtccacaaaaaagttttggattcaaaaactacccaaggtgctatgcttacatttgaaaagatttcattggacagcatatttaagaaataaagttgatacatacgtagaatttccactgagaggcctagacatgaaatgctacttactagagcctgagaacagtggcccggagagctgcctgtatgacctcgccgctgtggtggtgcaccatggttccggggttggttctggacattacacagcatacgcaactcacgaaggccgctggttccacttcaatgacagtactgtaacactgactgacgaggagactgtggtgaaggcgaaggcctacatccttttctacgtggaacaccaggccaaagctggatcggataaactttaatacctcctccaaatcatcattcaccaaccataccagagaaacatttccagttttccacaaatacttgatacaagatttaatttcattatgcacttttcaatttcctattttggatttagttttgtcaatggtagtgacttactgaacatgggcaccaactaattttgttgttgttctaccagaaaacctcagcagatgttttgatttgctgctttagttgtaataattcaatttttataggtagttgtaagaacttagtcttatttgacttttttattttatgttaatgttttcagttctcactttgaggcacatttacatcaatgcttttgttcctctcacatgctgaaagcaagatgtgttccttattgtgaagagcgacacaactgcctgctgcctttccacagctataatggacatcaggttgactctaaatcaaggatcatgtgtgcacaatacttgtggcccacaaaatttcacaatgactgctgaggaatcattctttttgcctgtaaaatataacaaagggcatcattaagtagaccaggtaattactgcttgtctctcaaggctgctgtctttatcagcactaactaaataaatttgttggttcagttgtacttgtcctgcaaatacaaaaaaaaaaaaaaaaa

SEQ ID NO: 3281 - protein, 520 aa, Homo sapiens
MECPHLSSSVCIAPDSAKFPNGSPSSWCCSVCRSNKSPWVCLTCSSVHCGRYVNGHAKKHYEDAQVPLTNHKKSEKQDKVQHTVCMDCSSYSTYCYRCDDFVVNDTKLGLVQKVREHLQNLENSAFTADRHKKRKLLENSTLNSKLLKVNGSTTAICATGLRNLGNTCFMNAILQSLSNIEQFCCYFKELPAVELRNGKTAGRRTYHTRSQGDNNVSLVEEFRKTLCALWQGSQTAFSPESLFYVVWKIMPNFRGYQQQDAHEFMRYLLDHLHLELQGGFNGVSRSAILQENSTLSASNKCCINGASTVVTAIFGGILQNEVNCLICGTESRKFDPFLDLSLDIPSQFRSKRSKNQENGPVCSLRDCLRSFTDLEELDETELYMCHKCKKKQKSTKKFWIQKLPKVLCLHLKRFHWTAYLRNKVDTYVEFPLRGLDMKCYLLEPENSGPESCLYDLAAVVVHHGSGVGSGHYTAYATHEGRWFHFNDSTVTLTDEETVVKAKAYILFYVEHQAKAGSDKL

SEQ ID NO: 3282 - DNA, 1526 bp, Homo sapiens
ggccactgctcaccatgcacataacccagctcaaccgggagtgcctgctgcacctcttctccttcctagacaaggacagcaggaagagccttgccaggacctgctcccagctccacgacgtgtttgaggaccccgcactctggtccctgctgcacttccgttccctcactgaactccagaaggacaacttcctcctgggcccggcactccgcagcctctccatctgctggcactccagccgcgtgcaggtgtgcagcattgaggactggctcaagagtgccttccagagaagcatctgcagccggcacgagagcctggtcaatgatttcctcctccgggtgtgcgacaggctttctgctgtgcgctccccacggaggcgggaggcgcctgcaccgtcctcggggactccgatcgccgttggaccgaaatcacctcggtggggaggacctgaccactcggagttcgccgacttgcgctcgggggtgacgggggccagggctgccgcgcgcaggggtctggggagcctccgggcggagcgacccagcgagaccccgccggctcccggagtgtcctggggaccgccacctccaggagccccggtggtgatctcggtgaagcaggaggaggggaagcaggggcgcacgggcagaaggagccaccgagccgctcctccttgcggttttgcccgcacgcgcgtctgcccgcccacctttcctggggcggatgcgttcccgcagtgaccgcactcgcgattgtagaaaattcgctcccaattgttgaatgcttacataaactgcatagttacccatattttctactgttctcataagggaaaaagaaatgatttggaagaaaaaaaaagcctcaaactaaacaaaaacaaaaccagcagccctggctaagcttttgataatggaaccattataagctgacaagctagatttttcacctgttggatttgctggacatgagcacaagcctaggcttccaatttgaatttcagggctgtagtcactgatgtgtcacatttagtgaaggctctcggccccccggcagccgcctggtcctgggtcactggggagaattctgggtgggtggaagaggcgaggagcactgtgatgggcgctgttcacactccggctccacccagcgccagctgcgacaaagccctttacccctcccaggccaggtgtttcttctgtgtgaaagaggagcttgatccctactcacaggttccttaattcattgctcaaagagggaaacagcaaggaaaaagacaaattctgttctcatgaagcttaccttctagtgggggaagagacaacaggtaactggtatataagagggtagaagggccaggtgcggtggctcaatgcctgtaatcccagcactttaggaggccaagatgggcgattcacgaggtcaggagatcgagaccatcctggctaacaaggtgaaacccccgtctgtactaaaaaaaaaaaaaaaaaaaaaaaaaaaaaaaaaaaaaaaaaaaaaaaaaaaaa

SEQ ID NO: 3283 - protein, 241 aa, Homo sapiens
MHITQLNRECLLHLFSFLDKDSRKSLARTCSQLHDVFEDPALWSLLHFRSLTELQKDNFLLGPALRSLSICWHSSRVQVCSIEDWLKSAFQRSICSRHESLVNDFLLRVCDRLSAVRSPRRREAPAPSSGTPIAVGPKSPRWGGPDHSEFADLRSGVTGARAAARRGLGSLRAERPSETPPAPGVSWGPPPPGAPVVISVKQEEGKQGRTGRRSHRAAPPCGFARTRVCPPTFPGADAFPQ

SEQ ID NO: 3284 - DNA, 8192 bp, Homo sapiens
cctctgcggagccgggctcgggtcgccggagccgcgccccaccccgccagctccagagccacgactaatggctgaaggataaatcaacatggcaactatgattccaccagtgaagctgaaatggcttgaacacttgaacagctcctggattacagaggacagtgaatctattgctacaagagagggagttgctgttctgtattctaaactggttagcaataaggaagtagtacctttgccccaacaagttttatgcctcaaaggaccacagttgccagactttgaacgtgagtctctttcaagtgatgagcaggaccactatttggatgcccttcttagcagccagctagcattggcaaagatggtatgttcagattccccatttgccggggcacttagaaaacgactgcttgtactccagcgtgtcttttatgcactttctaataaataccatgacaaaggcaaggtgaagcagcagcagcattctccggagagcagttctggttcagcagatgtccattctgttagtgaacgcccccggtcaagcactgatgcacttatagaaatgggtgttcgaactggtctaagtttattatttgcgcttctaagacaaagttggatgatgcctgtgtcaggacctggtctcagtctttgcaacgatgtcattcatactgcaattgaagttgtgagctctttgccaccattatcattagcaaatgaaagcaagattcctcctatgggcttggactgcttatcgcaagtaacaacatttcttaaaggagtcactattcctaattctggggcagacactttaggtcgtagattagcttctgagttgctgcttggtttggcagctcaacgaggctcattgcgatatcttcttgaatggatagaaatggctttgggggcttcggcagttgtacacaccatggagaaaggcaaactactctcaagccaggaaggaatgatcagctttgactgctttatgaccatattaatgcagatgaggcgttctttgggttcatctgctgatcggagtcagtggagagaaccaaccagaacatcggatggcttgtgctccctttacgaggcagcattatgtctctttgaagaggtttgcagaatggcttctgattattcgagaacatgtgctagcccagatagcattcagactggtgatgctcccattgtctccgaaacctgtgaggtttatgtttgggggagcaatagcagccatcagttggtagaaggtacacaggagaaaatactgcaacccaaactggctcctagtttctctgatgcacagaccattgaagctggacagtactgcacttttgtcatttctacggatggctctgttagagcttgcgggaaaggcagctatgggagactgggccttggagactccaataatcagtcaactttaaaaaagttaacattcgagcctcacagatccattaaaaaggtttcatcttctaaaggatctgatggtcacactttagcctttacgacagaaggagaagtcttcagttggggagatggtgattatgggaaactggggcatggaaatagttcaacacagaaatatcccaagcttattcagggacctctacaaggaaaggtagttgtttgtgtgtcagctggatacagacatagtgctgctgtcacagaggatggggaattatacacatggggtgaaggagactttggaagattaggtcatggtgacagcaatagtcgtaacattccaacattagtaaaagacatcagcaatgtaggagaggtttcttgtggcagttcacatactattgctctgtctaaagatgggagaactgtatggtcttttggaggaggagacaatggtaaacttggtcatggtgataccaacagagtgtataaacctaaagttattgaagctttacaaggaatgttcattcgcaaagtttgtgctgggagccagtcttcacttgctttgacatcaacagggcaggtctatgcttggggctgtggagcttgtctaggttgtggttcttcagaagctactgctttgagacccaagcttattgaagaactggctgccacaagaatagttgatgtttctattggagacagtcattgtttggctctttctcatgataatgaagtttatgcctggggcaataactcaatggggcaatgtggtcagggaaattccacaggtcctattactaaaccaaagaaagtgagtggcttagatggcatagctattcagcagatttcggctggaacatcacatagtctggcatggactgctcttcctagggacagacaagttgttgcatggcaccgaccttattgtgtagatcttgaagagagtaccttctcacacctgcgttcttttcttgagagatactgtgataaaataaacagtgagattcccccactccctttcccttcatcaagagaacaccacagttttctcaagctgtgcctgaagctactttcaaatcaccttgctcttgcacttgcgggaggggtagctaccagcattctcgggaggcaggcaggtccacttcgaaatttgctcttcagactgatggactcaactgtcccagatgaaatccaagaggtggtaattgaaactttatcagtgggagcaaccatgctgttacctccattacgagaacggatggaattacttcattctcttttacctcaaggacctgatagatgggaaagcttatctaaaggacagagaatgcaactggatatcatcctgacaagtttgcaagatcatacccacgtagcctccctacttggctatagttcaccctctgatgctgctgacctatcttctgtgtgtactggctacggaaatctgtcagatcaaccttacggcactcagagctgccatccagatacccacctggctgaaattttgatgaagaccctcttaagaaatttaggattttatacagatcaagcatttggagagctagaaaagaatagtgataaatttctacttggaacatcatcatcagaaaacagtcagcctgctcatcttcatgaactgctatgttcactacagaaacagctgctggcattttgccatatcaataacattagtgagaactcaagcagtgtggcattgcttcataaacatcttcagcttttgttgcctcatgccacagatatttattcacgttctgcaaatttgctcaaagaaagtccttggaatggcagtgttggagaaaaattaagagatgtgatatacgtctcagctgctggcagtatgctctgccagattgttaactccctgctgttactccctgtgtcagtggctcggcctttattgagttacctcctcgacttgttgccacctcttgattgccttaatagactcctgccagctgctgatcttttagaagaccaggagttacagtggcctcttcatggagggccagaactaattgatcctgctggtctgccattacctcagccagctcagtcctgggtatggcttgtggatctagaaagaacaattgctctccttattgggcggtgtcttggtggcatgcttcagggctcccctgtgtctccagaggaacaggacactgcatattggatgaaaacgccactgttcagtgacggtgtagaaatggacactcctcaattggataaatgtatgagttgcctgttagaagtagcactttctggaaatgaagaacagaagccttttgattataaattgcggcctgaaattgctgtctatgtagacttggcattgggttgttctaaagagcctgcccgaagcctttggatcagcatgcaggactatgctgttagtaaagattgggacagtgcaactttaagtaatgagtcactcttggacactgtgtctagatttgttcttgcagctcttctgaaacacacaaatttacttagtcaagcatgtggagaaagccgatatcaacctggtaaacacttatcagaagtgtaccgttgtgtatacaaagttcgaagtcgtttacttgcttgcaagaaccttgaacttattcaaacaaggtcatcatcacgggacagatggatatcagaaaaccaggactctgcagatgttgatcctcaggagcattcatttactcgaactattgatgaagaagctgaaatggaagaacaggctgagagagaccgggaagaggggcatccggagccagaggatgaagaggaggaacgggaacatgaagtgatgacagctggcaaaatctttcagtgtttcctctcagcccgtgaagtagctcgtagccgagaccgagatagaatgaacagtggggcagggtctggggctcgagctgatgatccacctcctcagtctcagcaagagcgaagggtcagcacagaccttcctgagggtcaggatgtgtacactgctgcatgcaactccgtgatccatcggtgtgccctgttaatattaggagtaagtcctgtgatagatgagcttcagaagcgaagagaagaaggacagttgcagcaaccttcaacaagtgcctctgaagggggtggacttatgaccaggagtgaaagtcttactgcagagagccggctagtccacacaagcccaaattatagactgatcaaatcgaggagtgaatctgatttgtctcagcctgaatcagatgaagagggttacgcactgagtggcagacgaaatgttgatttggatttggcagcatctcacagaaagagaggtcctatgcacagtcaattggaatccctgagtgactcttgggctcgcctgaaacatagcagagactggttatgcaactcctcctattcctttgagtcagattttgatcttaccaagtctttgggagttcacactttgattgaaaatgttgtaagctttgtgagtggagatgtggggaatgccccaggttttaaagagccagaggaaagtatgtctacaagtccccaggcctccatcattgcaatggaacagcagcagttaagggcagaacttcgtttagaggcacttcatcagatcctcgttctattgtctgggatggaagaaaaaggtagcatctcactggcaggaagcagattgagttcaggcttccagtcctccacactactcacgtctgtgaggctgcagttcctagcagggtgttttggtttaggcactgttggacacacaggagccaagggagagagtggccgattgcatcactatcaggatgggatcagagcagctaagagaaatattcagattgaaatccaggtagctgtgcataaaatttatcaacagttgtctgctaccctggaaagagccctgcaagcaaacaagcatcacattgaagcccagcaacgtctgcttctggttacagtttttgccctaagtgttcattatcaaccagtagatgtttctttggcaatttccactggtctgctaaacgtattgtcacagttgtgtggtacagacaccatgctaggacagcccctgcagttgttgccaaagacgggtgtttcccagcttagcacagctttgaaagtggccagtacaaggttgctccagattctagccatcactactgggacctatgctgataaactgagtcccaaagtagttcaatccttgttggatctactctgtagtcagttgaagaatttattgtcccaaactggtgtactacatatggcctctttcggagaaggggagcaagaagacggtgaagaagaagaaaaaaaagttgactccagtggagaaactgagaagaaagatttcagagctgctcttaggaaacaacatgcagccgaactccatctaggggattttttagtttttcttcgcagagttgtatcttcaaaagcaattcaatcaaaaatggcttccccaaagtggaccgaagtgcttctaaatatagcatctcagaaatgttcttcaggtatccctctggttggtaacttaagaacaaggctccttgcacttcatgtccttgaagctgtgctgccagcttgtgaatctggtgtagaagatgatcaaatggcccagattgttgagcgcttattttcccttctctctgattgtatgtgggagacacccattgctcaggccaaacatgctattcagataaaggaaaaagaacaagaaataaaactacagaagcagggcgagttggaagaagaagatgagaatcttcctatccaagaagtatcctttgacccggagaaagctcagtgttgcctagtggagaatggacagattttaactcacggcagtggagggaaaggatatggattggcatctacaggagtaacttctgggtgctatcagtggaagttttatattgtgaaggaaaacagaggtaatgaaggcacgtgtgttggagtttctcgctggccagtacatgactttaatcaccgcactacctcggatatgtggctctatagggcctacagtggtaacctctatcacaatggagaacagactctcacattgtccagctttactcaaggagatttcattacctgtgtgttagacatggaagccaggaccatttcttttgggaaaaatggagaggaacccaaattagcttttgaagatgtggatgcagcagagttgtacccatgtgtgatgttctatagtagcaatccaggggaaaaggtgaaaatttgtgatatgcagatgcgtggcacaccccgagacttacttccaggagaccctatttgtagtccagtagcagcagtgctggctgaggccactattcagctcatccgtatccttcaccgaacagaccgttggacttactgcattaacaaaaaaatgatggaaaggcttcacaaaattaagatatgtattaaagagtcaggtcagaagctaaagaaaagccgctcggttcagagccgagaggaaaatgaaatgagagaggagaaggagagcaaagaggaagagaaaggtaaacatactaggcatggcctcgctgacctctcagagctgcagctgaggactctttgcatagaggtgtggcccgtgctggctgtgataggaggagttgatgctggtcttagagttggaggtcggtgtgttcacaagcaaactgggcgccatgccacgctgctgggagtggtcaaagagggcagcacgtctgccaaggtccaatgggatgaagcagaaattactatcagcttcccaactttttggtcgcctagtgatactccattgtataatctggaaccctgtgaaccattgccgtttgatgtggcgcgattccgaggcctgacggcttctgtgctgctggacctaacatatctcactggcgttcatgaagacatgggcaaacagagcaccaaacgacatgaaaagaaacaccgacatgaatccgaggagaaaggggatgttgagcagaaacctgagagtgaatccgctttagatatgcgaacaggcctaacatctgatgacgtcaaaagtcagagtaccacaagctccaaatcagaaaatgaaatcgcttcattttctttagatccaacactgccaagtgtggaatcccaacatcaaataacagaagggaaaagaaaaaatcatgaacacatgtccaaaaaccatgatgtagcccagtcagaaatcagagcagtccagctgtcctatctttacctcggtgctatgaagtcacttagtgcccttcttggctgtagtaaatatgctgagctgttgctgataccaaaagttctggctgaaaatggccacaactcagactgtgcaagttctccagttgttcatgaagacgtggagatgcgagcagccctgcagttcttgatgcgacacatggtgaagcgagcagtcatgcggtcacccataaagagagcattgggattagctgatctggaacgagcgcaagccatgatctataaattagtggttcatgggcttttggaagaccagtttgggggcaaaattaagcaagagattgatcaacaagctgaagaaagtgaccctgcccagcaggcacagacaccagttactactagcccatcagcctcaagcacgacctcctttatgagcagctctctggaggacaccacaactgccaccactccagtcactgacacagaaacagtgcctgcatccgagtccccgggagtgatgcctcttagtcttctcaggcaaatgttctctagttacccaactaccactgtacttcccacacgtcgggcacagactc

SEQ ID NO: 3285 - protein, 4861 aa, Homo sapiens
MATMIPPVKLKWLEHLNSSWITEDSESIATREGVAVLYSKLVSNKEVVPLPQQVLCLKGPQLPDFERESLSSDEQDHYLDALLSSQLALAKMVCSDSPFAGALRKRLLVLQRVFYALSNKYHDKGKVKQQQHSPESSSGSADVHSVSERPRSSTDALIEMGVRTGLSLLFALLRQSWMMPVSGPGLSLCNDVIHTAIEVVSSLPPLSLANESKIPPMGLDCLSQVTTFLKGVTIPNSGADTLGRRLASELLLGLAAQRGSLRYLLEWIEMALGASAVVHTMEKGKLLSSQEGMISFDCFMTILMQMRRSLGSSADRSQWREPTRTSDGLCSLYEAALCLFEEVCRMASDYSRTCASPDSIQTGDAPIVSETCEVYVWGSNSSHQLVEGTQEKILQPKLAPSFSDAQTIEAGQYCTFVISTDGSVRACGKGSYGRLGLGDSNNQSTLKKLTFEPHRSIKKVSSSKGSDGHTLAFTTEGEVFSWGDGDYGKLGHGNSSTQKYPKLIQGPLQGKVVVCVSAGYRHSAAVTEDGELYTWGEGDFGRLGHGDSNSRNIPTLVKDISNVGEVSCGSSHTIALSKDGRTVWSFGGGDNGKLGHGDTNRVYKPKVIEALQGMFIRKVCAGSQSSLALTSTGQVYAWGCGACLGCGSSEATALRPKLIEELAATRIVDVSIGDSHCLALSHDNEVYAWGNNSMGQCGQGNSTGPITKPKKVSGLDGIAIQQISAGTSHSLAWTALPRDRQVVAWHRPYCVDLEESTFSHLRSFLERYCDKINSEIPPLPFPSSREHHSFLKLCLKLLSNHLALALAGGVATSILGRQAGPLRNLLFRLMDSTVPDEIQEVVIETLSVGATMLLPPLRERMELLHSLLPQGPDRWESLSKGQRMQLDIILTSLQDHTHVASLLGYSSPSDAADLSSVCTGYGNLSDQPYGTQSCHPDTHLAEILMKTLLRNLGFYTDQAFGELEKNSDKFLLGTSSSENSQPAHLHELLCSLQKQLLAFCHINNISENSSSVALLHKHLQLLLPHATDIYSRSANLLKESPWNGSVGEKLRDVIYVSAAGSMLCQIVNSLLLLPVSVARPLLSYLLDLLPPLDCLNRLLPAADLLEDQELQWPLHGGPELIDPAGLPLPQPAQSWVWLVDLERTIALLIGRCLGGMLQGSPVSPEEQDTAYWMKTPLFSDGVEMDTPQLDKCMSCLLEVALSGNEEQKPFDYKLRPEIAVYVDLALGCSKEPARSLWISMQDYAVSKDWDSATLSNESLLDTVSRFVLAALLKHTNLLSQACGESRYQPGKHLSEVYRCVYKVRSRLLACKNLELIQTRSSSRDRWISENQDSADVDPQEHSFTRTIDEEAEMEEQAERDREEGHPEPEDEEEEREHEVMTAGKIFQCFLSAREVARSRDRDRMNSGAGSGARADDPPPQSQQERRVSTDLPEGQDVYTAACNSVIHRCALLILGVSPVIDELQKRREEGQLQQPSTSASEGGGLMTRSESLTAESRLVHTSPNYRLIKSRSESDLSQPESDEEGYALSGRRNVDLDLAASHRKRGPMHSQLESLSDSWARLKHSRDWLCNSSYSFESDFDLTKSLGVHTLIENVVSFVSGDVGNAPGFKEPEESMSTSPQASIIAMEQQQLRAELRLEALHQILVLLSGMEEKGSISLAGSRLSSGFQSSTLLTSVRLQFLAGCFGLGTVGHTGAKGESGRLHHYQDGIRAAKRNIQIEIQVAVHKIYQQLSATLERALQANKHHIEAQQRLLLVTVFALSVHYQPVDVSLAISTGLLNVLSQLCGTDTMLGQPLQLLPKTGVSQLSTALKVASTRLLQILAITTGTYADKLSPKVVQSLLDLLCSQLKNLLSQTGVLHMASFGEGEQEDGEEEEKKVDSSGETEKKDFRAALRKQHAAELHLGDFLVFLRRVVSSKAIQSKMASPKWTEVLLNIASQKCSSGIPLVGNLRTRLLALHVLEAVLPACESGVEDDQMAQIVERLFSLLSDCMWETPIAQAKHAIQIKEKEQEIKLQKQGELEEEDENLPIQEVSFDPEKAQCCLVENGQILTHGSGGKGYGLASTGVTSGCYQWKFYIVKENRGNEGTCVGVSRWPVHDFNHRTTSDMWLYRAYSGNLYHNGEQTLTLSSFTQGDFITCVLDMEARTISFGKNGEEPKLAFEDVDAAELYPCVMFYSSNPGEKVKICDMQMRGTPRDLLPGDPICSPVAAVLAEATIQLIRILHRTDRWTYCINKKMMERLHKIKICIKESGQKLKKSRSVQSREENEMREEKESKEEEKGKHTRHGLADLSELQLRTLCIEVWPVLAVIGGVDAGLRVGGRCVHKQTGRHATLLGVVKEGSTSAKVQWDEAEITISFPTFWSPSDTPLYNLEPCEPLPFDVARFRGLTASVLLDLTYLTGVHEDMGKQSTKRHEKKHRHESEEKGDVEQKPESESALDMRTGLTSDDVKSQSTTSSKSENEIASFSLDPTLPSVESQHQITEGKRKNHEHMSKNHDVAQSEIRAVQLSYLYLGAMKSLSALLGCSKYAELLLIPKVLAENGHNSDCASSPVVHEDVEMRAALQFLMRHMVKRAVMRSPIKRALGLADLERAQAMIYKLVVHGLLEDQFGGKIKQEIDQQAEESDPAQQAQTPVTTSPSASSTTSFMSSSLEDTTTATTPVTDTETVPASESPGVMPLSLLRQMFSSYPTTTVLPTRRAQTPPISSLPTSPSDEVGRRQSLTSPDSQSARPANRTALSDPSSRLSTSPPPPAIAVPLLEMGFSLRQIAKAMEATGARGEADAQNITVLAMWMIEHPGHEDEEEPQSGSTADSRPGAAVLGSGGKSNDPCYLQSPGDIPSADAAEMEEGFSESPDNLDHTENAASGSGPSARGRSAVTRRHKFDLAARTLLARAAGLYRSVQAHRNQSRREGISLQQDPGALYDFNLDEELEIDLDDEAMEAMFGQDLTSDNDILGMWIPEVLDWPTWHVCESEDREEVVVCELCECSVVSFNQHMKRNHPGCGRSANRQGYRSNGSYVDGWFGGECGSGNPYYLLCGTCREKYLAMKTKSKSTSSERYKGQAPDLIGKQDSVYEEDWDMLDVDEDEKLTGEEEFELLAGPLGLNDRRIVPEPVQFPDSDPLGASVAMVTATNSMEETLMQIGCHGSVEKSSSGRITLGEQAAALANPHDRVVALRRVTAAAQVLLARTMVMRALSLLSVSGSSCSLAAGLESLGLTDIRTLVRLMCLAAAGRAGLSTSPSAMASTSERSRGGHSKANKPISCLAYLSTAVGCLASNAPSAAKLLVQLCTQNLISAATGVNLTTVDDSIQRKFLPSFLRGIAEENKLVTSPNFVVTQALVALLADKGAKLRPNYDKSEVEKKGPLELANALAACCLSSRLSSQHRQWAAQQLVRTLAAHDRDNQTTLQTLADMGGDLRKCSFIKLEAHQNRVMTCVWCNKKGLLATSGNDGTIRVWNVTKKQYSLQQTCVFNRLEGDAEESLGSPSDPSFSPVSWSISGKYLAGALEKMVNIWQVNGGKGLVDIQPHWVSALAWPEEGPATAWSGESPELLLVGRMDGSLGLIEVVDVSTMHRRELEHCYRKDVSVTCIAWFSEDRPFAVGYFDGKLLLGTKEPLEKGGIVLIDAHKDTLISMKWDPTGHILMTCAKEDSVKLWGSISGCWCCLHSLCHPSIVNGIAWCRLPGKGSKLQLLMATGCQSGLVCVWRIPQDTTQTNVTSAEGWWEQESNCQDGYRKSSGAKCVYQLRGHITPVRTVAFSSDGLALVSGGLGGLMNIWSLRDGSVLQTVVIGSGAIQTTVWIPEVGVAACSNRSKDVLVVNCTAEWAAANHVLATCRTALKQQGVLGLNMAPCMRAFLERLPMMLQEQYAYEKPHVVCGDQLVHSPYMQCLASLAVGLHLDQLLCNPPVPPHHQNCLPDPASWNPNEWAWLECFSTTIKAAEALTNGAQFPESFTVPDLEPVPEDELVFLMDNSKWINGMDEQIMSWATSRPEDWHLGGKCDVYLWGAGRHGQLAEAGRNVMVPAAAPSFSQAQQVICGQNCTFVIQANGTVLACGEGSYGRLGQGNSDDLHVLTVISALQGFVVTQLVTSCGSDGHSMALTESGEVFSWGDGDYGKLGHGNSDRQRRPRQIEALQGEEVVQMSCGFKHSAVVTSDGKLFTFGNGDYGRLGLGNTSNKKLPERVTALEGYQIGQVACGLNHTLAVSADGSMVWAFGDGDYGKLGLGNSTAKSSPQKIDVLCGIGIKKVACGTQFSVALTKDGHVYTFGQDRLIGLPEGRARNHNRPQQIPVLAGVIIEDVAVGAEHTLALASNGDVYAWGSNSEGQLGLGHTNHVREPTLVTGLQGKNVRQISAGRCHSAAWTAPPVPPRAPGVSVPLQLGLPDTVPPQYGALREVSIHTVRARLRLLYHFSDLMYSSWRLLNLSPNNQNSTSHYNAGTWGIVQGQLRPLLAPRVYTLPMVRSIGKTMVQGKNYGPQITVKRISTRGRKCKPIFVQIARQVVKLNASDLRLPSRAWKVKLVGEGADDAGGVFDDTITEMCQELETGIVDLLIPSPNATAEVGYNRDRFLFNPSACLDEHLMQFKFLGILMGVAIRTKKPLDLHLAPLVWKQLCCVPLTLEDLEEVDLLYVQTLNSILHIEDSGITEESFHEMIPLDSFVGQSADGKMVPIIPGGNSIPLTFSNRKEYVERAIEYRLHEMDRQVAAVREGMSWIVPVPLLSLLTAKQLEQMVCGMPEISVEVLKKVVRYREVDEQHQLVQWFWHTLEEFSNEERVLFMRFVSGRSRLPANTADISQRFQIMKVDRPYDSLPTSQTCFFQLRLPPYSSQLVMAERLRYAINNCRSIDMDNYMLSRNVDNAEGSDTDY

SEQ ID NO: 3286 - DNA, 2351 bp, Homo sapiens
tgcgggcaggattcacgccgctgtgacccggaggtcctcagggggcgaagccccggcctaggcctcgcggagatgcccagctgcggtgcttgtacttgcggcgcggcggccgtccggctcatcacctcctcactcgcctccgcgcagagaggtatttctggtggtcgcattcatatgtcagttttaggaaggcttgggacatttgaaactcagattctgcaaagagctcctcttagatcctttacagaaacaccagcatactttgcctcaaaagatgggataagtaaagatggttctggagatggaaataagaaatcagcaagtgagggaagtagtaagaaatcaggctctgggaattctgggaaaggtggaaaccagctgcgctgtcctaaatgtggcgacttgtgcacacatgtagagacctttgtatcatccacccgttttgtcaagtgtgaaaagtgtcatcatttttttgttgtgctatctgaagcagactcaaagaaaagcataattaaagaacctgaatcagcagcagaagctgtaaaattggcattccaacagaaaccaccacctccccctaagaagatttataactacctcgacaagtatgttgttggccagtcatttgctaagaaggtgctttcagttgctgtgtacaatcattataagagaatatataataatatcccagctaatctgagacagcaagcagaggttgagaagcagacatcattaacaccaagagagttagaaataagaagacgggaggatgagtacagatttacaaaattgcttcagattgctggaattagcccacatggtaatgctttaggagcatcaatgcagcaacaggtaaatcaacaaatacctcaggaaaaacgaggaggtgaagtattggattcttctcatgatgacataaaacttgaaaaaagtaatattttgctgcttggaccaactgggtcaggtaaaactctgctggcacaaaccctagctaaatgccttgatgtcccttttgctatctgtgactgtacaactttgactcaggctggatatgtaggcgaagatattgaatctgtgattgcaaaactactccaagatgccaattataatgtggaaaaagcacaacaaggaattgtctttctggatgaagtagataagattggcagtgtgccaggcattcatcaattacgggatgtaggtggagaaggcgttcagcaaggcttattaaaactactagaaggcacaatagtcaatgttccagaaaagaattcccgaaagctccgtggagaaacagttcaagttgatacaacaaacatcctgtttgtggcatctggtgctttcaatggtttagacagaatcatcagcaggaggaaaaatgaaaagtatcttggatttggaacaccatctaatctgggaaaaggcagaagggctgcagctgctgcagaccttgctaatcgaagtggggaatcgaatactcaccaagacattgaagaaaaagatcggttattgcgtcatgtggaagccagagatctgattgagtttggcatgattcctgagtttgtgggacggttgcctgtggtggttccattgcatagcctagatgagaaaacacttgtacaaatattaactgagccacgaaatgctgttattcctcagtaccaggccttattcagcatggataagtgtgaactgaatgttactgaggatgctttgaaagctatagccagattggcactagaacgaaaaacaggtgcacgaggccttcggtccataatggaaaagctgttactagaaccaatgtttgaagtccctaattctgatatcgtatgtgtggaggttgacaaagaagtagtagaaggaaaaaaggaaccaggatacatccgggctccaacaaaagaatcctctgaagaggagtatgactctggagttgaagaagaaggatggccccgccaagcagatgctgcaaacagctaaactgtcatattgctgtcttgtatatacagcttttccttcttttgtttaggatcataattgtctctacagtctgatattaaaggcattggatctatcttggatatcatacatggtcagagaagcctttaggagaagaatcagatcatgtatataattgtaacatcacattgattttacggaagatgttatatggactttaatgacacaatgtttagagataaaatgtacattattttggttcagttttttaaaaaaaatatgctttaacaaaattcttaggaattcttttaagcaatgcaggtattgcgataactgtagattttacaataatgttactctacaaatgggaaaataaattctttaaaattgaatattga

SEQ ID NO: 3287 - protein, 633 aa, Homo sapiens
MPSCGACTCGAAAVRLITSSLASAQRGISGGRIHMSVLGRLGTFETQILQRAPLRSFTETPAYFASKDGISKDGSGDGNKKSASEGSSKKSGSGNSGKGGNQLRCPKCGDLCTHVETFVSSTRFVKCEKCHHFFVVLSEADSKKSIIKEPESAAEAVKLAFQQKPPPPPKKIYNYLDKYVVGQSFAKKVLSVAVYNHYKRIYNNIPANLRQQAEVEKQTSLTPRELEIRRREDEYRFTKLLQIAGISPHGNALGASMQQQVNQQIPQEKRGGEVLDSSHDDIKLEKSNILLLGPTGSGKTLLAQTLAKCLDVPFAICDCTTLTQAGYVGEDIESVIAKLLQDANYNVEKAQQGIVFLDEVDKIGSVPGIHQLRDVGGEGVQQGLLKLLEGTIVNVPEKNSRKLRGETVQVDTTNILFVASGAFNGLDRIISRRKNEKYLGFGTPSNLGKGRRAAAAADLANRSGESNTHQDIEEKDRLLRHVEARDLIEFGMIPEFVGRLPVVVPLHSLDEKTLVQILTEPRNAVIPQYQALFSMDKCELNVTEDALKAIARLALERKTGARGLRSIMEKLLLEPMFEVPNSDIVCVEVDKEVVEGKKEPGYIRAPTKESSEEEYDSGVEEEGWPRQADAANS

SEQ ID NO: 3288 - DNA, 4436 bp, Homo sapiens
aggcgaaggcttggacccccagctgaggagtcctgctcaagacacggtcactggatctgagaaacttcccaggggaccgcattccagagtcagtgactctgtgaagcacccacatctacctcttgccacgttcccacgggcttgggggaaagatggtggggaccaaggcctgggtgttctccttcctggtcctggaagtcacatctgtgttggggagacagacgatgctcacccagtcagtaagaagagtccagcctgggaagaagaaccccagcatctttgccaagcctgccgacaccctggagagccctggtgagtggacaacatggttcaacatcgactacccaggcgggaagggcgactatgagcggctggacgccattcgcttctactatggggaccgtgtatgtgcccgtcccctgcggctagaggctcggaccactgactggacacctgcgggcagcactggccaggtggtccatggtagtccccgtgagggtttctggtgcctcaacagggagcagcggcctggccagaactgctctaattacaccgtacgcttcctctgcccaccaggatccctgcgccgagacacagagcgcatctggagcccatggtctccctggagcaagtgctcagctgcctgtggtcagactggggtccagactcgcacacgcatttgcttggcagagatggtgtcgctgtgcagtgaggccagcgaagagggtcagcactgcatgggccaggactgtacagcctgtgacctgacctgcccaatgggccaggtgaatgctgactgtgatgcctgcatgtgccaggacttcatgcttcatggggctgtctcccttcccggaggtgccccagcctcaggggctgctatctacctcctgaccaagacgccgaagctgctgacccagacagacagtgatgggagattccgaatccctggcttgtgccctgatggcaaaagcatcctgaagatcacaaaggtcaagtttgcccccattgtactcacaatgcccaagactagcctgaaggcagccaccatcaaggcagagtttgtgagggcagagactccatacatggtgatgaaccctgagacaaaagcacggagagctgggcagagcgtgtctctgtgctgtaaggccacagggaagcccaggccagacaagtatttttggtatcataatgacacattgctggatccttccctctacaagcatgagagcaagctggtgctgaggaaactgcagcagcaccaggctggggagtacttttgcaaggcccagagtgatgctggggctgtgaagtccaaggttgcccagctgattgtcatagcatctgatgagactccttgcaacccagttcctgagagctatcttatccggctgccccatgattgctttcagaatgccaccaactccttctactatgacgtgggacgctgccctgttaagacttgtgcagggcagcaggataatgggatcaggtgccgtgatgctgtgcagaactgctgtggcatctccaagacagaggaaagggagatccagtgcagtggctacacgctacccaccaaggtggccaaggagtgcagctgccagcggtgtacggaaactcggagcatcgtgcggggccgtgtcagtgctgctgacaatggggagcccatgcgctttggccatgtgtacatggggaacagccgtgtaagcatgactggctacaagggcactttcaccctccatgtcccccaggacactgagaggctggtgctcacatttgtggacaggctgcagaagtttgtcaacaccaccaaagtgctacctttcaacaagaaggggagtgccgtgttccatgaaatcaagatgcttcgtcggaaagagcccatcactttggaagccatggagaccaacatcatccccctgggggaagtggttggtgaagaccccatggctgaactggagattccatccaggagtttctacaggcagaatggggagccctacataggaaaagtgaaggccagtgtgaccttcctggatccccggaatatttccacagccacagctgcccagactgacctgaacttcatcaatgacgaaggagacactttcccccttcggacgtatggcatgttctctgtggacttcagagatgaggtcacctcagagccacttaatgctggcaaagtgaaggtccaccttgactcgacccaggtcaagatgccagagcacatatccacagtgaaactctggtcactcaatccagacacagggctgtgggaggaggaaggtgatttcaaatttgaaaatcaaaggaggaacaaaagagaagacagaaccttcctggtgggcaacctggagattcgtgagaggaggctctttaacctggatgttcctgaaagcaggcggtgctttgttaaggtgagggcctaccggagtgagaggttcttgcctagtgagcagatccagggggttgtgatctccgtgattaacctggagcctagaactggcttcttgtccaaccctagggcctggggccgctttgacagtgtcatcacaggccccaacggggcctgtgtgcctgccttctgtgatgaccagtcccctgatgcctactctgcctatgtcttggcaagcctggctggggaggaactgcaagcagtggagtcttctcctaaattcaacccaaatgcaattggcgtccctcagccctatctcaacaagctcaactaccgtcggacggaccatgaggatccacgggttaaaaagacagctttccagattagcatggccaagccaaggcccaactcagctgaggagagcaatgggcccatctatgcctttgagaacctccgggcatgtgaagaggcaccacccagtgcagcccacttccggttctaccagattgagggggatcgatatgactacaacacagtccccttcaacgaagatgaccctatgagctggactgaagactatctggcatggtggccaaagccgatggaattcagggcctgctatatcaaggtgaagattgtggggccactggaagtgaatgtgcgatcccgcaacatggggggcactcatcggcggacagtggggaagctgtatggaatccgagatgtgaggagcactcgggacagggaccagcccaatgtctcagctgcctgtctggagttcaagtgcagtgggatgctctatgatcaggaccgtgtggaccgcaccctggtgaaggtcatcccccagggcagctgccgtcgagccagtgtgaaccccatgctgcatgagtacctggtcaaccacttgccacttgcagtcaacaacgacaccagtgagtacaccatgctggcacccttggacccactgggccacaactatggcatctacactgtcactgaccaggaccctcgcacggccaaggagatcgcgctcggccggtgctttgatggcacatccgatggctcctccagaatcatgaagagcaatgtgggagtagccctcaccttcaactgtgtagagaggcaagtaggccgccagagtgccttccagtacctccaaagcaccccagcccagtcccctgctgcaggcactgtccaaggaagagtgccctcgaggaggcagcagcgagcgagcaggggtggccagcgccagggtggagtggtggcctctctgagatttcctagagttgctcaacagcccctgatcaactaagttttgtggtacttcaccctcttctgccctcatttcatgtgacagccattgtgagactgatgcacaaactgtcacttggttaatttaagcacttctgttttcgtgaatttgcttgtttgtttcttcatgcctttacttactttgtcccatgctactgattggcacgtggcccccacaatggcacaataaagcccctttgtgaaactgttctttaaatgaaacacaagaaattggccactggtaaaactctgcagcttcaactgtacttcatttaatgccattaatgcaaatatacttcctcttctttttgcatggttttgcccacctctgcaatagtgataatctgatgctgaagatcaaataaccaatataaagcatatttcttggccttgctccacaggacataggcaagccttgatcatagttcatacatataaatggtggtgaaataaagaaataaaacacaatacttttacttgaatgtaaataacttatttatttctttgctaaatttggaattctagtgcacattcaaagttaagctattaaatatagggtgatcatagttcctctaccaagtctggaaagaacatctcctggtatccacaattacaccaggttgctaactgtatttgtacatttccctttgcattcgcttttgttcttgctagaaacccagtgtagcccagggcagatgtcaataaatgcatactctgtatttcgaaaaaa

SEQ ID NO: 3289 - protein, 1184 aa, Homo sapiens
MVGTKAWVFSFLVLEVTSVLGRQTMLTQSVRRVQPGKKNPSIFAKPADTLESPGEWTTWFNIDYPGGKGDYERLDAIRFYYGDRVCARPLRLEARTTDWTPAGSTGQVVHGSPREGFWCLNREQRPGQNCSNYTVRFLCPPGSLRRDTERIWSPWSPWSKCSAACGQTGVQTRTRICLAEMVSLCSEASEEGQHCMGQDCTACDLTCPMGQVNADCDACMCQDFMLHGAVSLPGGAPASGAAIYLLTKTPKLLTQTDSDGRFRIPGLCPDGKSILKITKVKFAPIVLTMPKTSLKAATIKAEFVRAETPYMVMNPETKARRAGQSVSLCCKATGKPRPDKYFWYHNDTLLDPSLYKHESKLVLRKLQQHQAGEYFCKAQSDAGAVKSKVAQLIVIASDETPCNPVPESYLIRLPHDCFQNATNSFYYDVGRCPVKTCAGQQDNGIRCRDAVQNCCGISKTEEREIQCSGYTLPTKVAKECSCQRCTETRSIVRGRVSAADNGEPMRFGHVYMGNSRVSMTGYKGTFTLHVPQDTERLVLTFVDRLQKFVNTTKVLPFNKKGSAVFHEIKMLRRKEPITLEAMETNIIPLGEVVGEDPMAELEIPSRSFYRQNGEPYIGKVKASVTFLDPRNISTATAAQTDLNFINDEGDTFPLRTYGMFSVDFRDEVTSEPLNAGKVKVHLDSTQVKMPEHISTVKLWSLNPDTGLWEEEGDFKFENQRRNKREDRTFLVGNLEIRERRLFNLDVPESRRCFVKVRAYRSERFLPSEQIQGVVISVINLEPRTGFLSNPRAWGRFDSVITGPNGACVPAFCDDQSPDAYSAYVLASLAGEELQAVESSPKFNPNAIGVPQPYLNKLNYRRTDHEDPRVKKTAFQISMAKPRPNSAEESNGPIYAFENLRACEEAPPSAAHFRFYQIEGDRYDYNTVPFNEDDPMSWTEDYLAWWPKPMEFRACYIKVKIVGPLEVNVRSRNMGGTHRRTVGKLYGIRDVRSTRDRDQPNVSAACLEFKCSGMLYDQDRVDRTLVKVIPQGSCRRASVNPMLHEYLVNHLPLAVNNDTSEYTMLAPLDPLGHNYGIYTVTDQDPRTAKEIALGRCFDGTSDGSSRIMKSNVGVALTFNCVERQVGRQSAFQYLQSTPAQSPAAGTVQGRVPSRRQQRASRGGQRQGGVVASLRFPRVAQQPLIN

SEQ ID NO: 3290 - DNA, 2551 bp, Homo sapiens
caacctccccgccgacccgcggtccaggcctcggtctctctcttcggcggcgagccgcggcccagaccccggcagaggacacttgtcggcacgttctcacccctgtcatctcagccccctgcctagctccaccccaggcttgggaacccggcccctgacggcccattgtccgcgggcccagcccccgcgctgaacgcacgctcgcccttgcccctaaccagcgcgtctaccccggcaacgcgcagtgacctgggatgcagccctcaggctgggcggccgccagggaggcggcgggccgcgacatgctggccgccgacctccggtgcagcctcttcgcctcggccctgcagagctacaagcgcgactcggtgctgcggcccttccccgcgtcctacgcccgcggcgactgtaaggactttgaagccctgcttgcagatgccagcaagttacctaacctgaaagaacttctccagtcctccggagacaaccacaaacgggcctgggacctggtgagctggattttatcctcaaaggtcctgacaatccacagtgcagggaaggcagagtttgaaaagatccaaaagctgactggggctcctcacacgcctgttcctgcaccggacttcctgtttgaaattgagtactttgacccagccaacgccaaattttatgagaccaaaggagaacgagacctaatctatgcatttcatggtagccgcctagaaaacttccattccattatccacaatggcctgcactgccatctgaacaagacatccttgttcggagaggggacctacctcaccagtgacttgagcctggccctcatatacagcccccatggccatgggtggcagcacagcctcctcggccccatccttagctgtgtggccgtgtgtgaggtcattgaccatccggacgtcaagtgccaaaccaagaagaaggattccaaggagatagatcgcagacgagcgagaatcaaacatagtgaagggggagacatccctcccaagtacttcgtggtcaccaataaccagctgctgcgagtgaagtacctcctggtgtattcacagaagccacccaagagcagggcttcgagccagctctcctggttttccagccattggtttaccgtcatgatatccctgtatctgctgctgctgctcatagtgagtgtcatcaactcctctgctttccaacacttttggaatcgtgcgaaaagataatctttctgggcctggtgtgggggctacctcaactatgtgccttatggtaacttgttctgtacctcctatgcctcatgtccagccaggttgagcctaggggccagttgggggaccacaggacaattttcatatggcctaaatgtatccattgcctttgatgatgttcccagccatactccagtcaacggggactactagtccctcactcttaggttttaggggagtccttccatctgctccttcttaaactgtcctagggagttggcttttcagccagggccaaaggaaaaagccctgctgcatttaaaaacaaagtgtccaagctgtcagtggtgtgtttacaatctctcctggcagaggttggccctttctctaatgccttctggaaggcggaaaatgtgggaactataaatcactaggcggttgccttgttttgacttgagacacccaagaggaacagtcatgtttctcataaaaatcagtgggatcatttttgaattccatcagcctttgtatgtgagtgcaaaacattttaacagttttctcaaatcaacaaacagccttctcctatagctgtacttgcccccctccccaaaaaaccatggatgagaaagaaaggagtcaggggcctgataaaaaatacagacttaatgagcaactcaagatgagaaaactgctctttttccaaaaattaccaactgctgattacagctgaaatggaaccaaatgtttgttttctgatttttttttaatagctgtttaacaaattagtctttgctgagtaaaaggggaaatttctaaacctagtgcactgtttggccagtgtccacagcctcttttctggctgtgttttagagaaagggatttgagctataggctcgcctcctgttctcattctcacaaagctgccttgactgtggcctgcaaccacgagtgccatgctttcaggtcttctgtggcctactggccttcaagacagaggcctgccccagtgtgccacagatccatgtggatggagcctccttcagaggggtcacaggtctttgagactcagcctgggctttaatgtgtaggaaaagccttctggccacccagagagccggagccctgcttgctgtattctctgctcccttcttcctgctgggttttagccataatagggcccggtacgatttgggagtgacatttctgtaaagaagaggaaaaatcatttttctataatttgtaaagttgtgaaagagccactaccacagtttttacattgattattggaacatttcagaataaataaagatattttcttaatgaaaaaaaaaaaaaaaaaa

SEQ ID NO: 3291 - protein, 323 aa, Homo sapiens
MQPSGWAAAREAAGRDMLAADLRCSLFASALQSYKRDSVLRPFPASYARGDCKDFEALLADASKLPNLKELLQSSGDNHKRAWDLVSWILSSKVLTIHSAGKAEFEKIQKLTGAPHTPVPAPDFLFEIEYFDPANAKFYETKGERDLIYAFHGSRLENFHSIIHNGLHCHLNKTSLFGEGTYLTSDLSLALIYSPHGHGWQHSLLGPILSCVAVCEVIDHPDVKCQTKKKDSKEIDRRRARIKHSEGGDIPPKYFVVTNNQLLRVKYLLVYSQKPPKSRASSQLSWFSSHWFTVMISLYLLLLLIVSVINSSAFQHFWNRAKR

SEQ ID NO: 3292 - DNA, 3103 bp, Homo sapiens
gtgggtgcaagatggcgcaagcggcgctccccctgcgccccccgcgctgctgagcaggcatgcggccccagtcccccaccgcctgggctcggccccggccggagccccagccccggccccggcgccggccccgcgggacgctgtgagccgcgagaggcccgggagccgcgcgtcgccgagccgagctgaccgagagccccatggctgtgcagcgcgccgcgtctccgcgccgcccgcccgccccgctctggccccggctcctgctgccgctgctgttgctgctgctgcccgcgccgagcgagggtcttggccactctgccgaactggcatttgctgtggagccaagtgatgatgttgccgtccccgggcagcctatagtgctggactgcagggtggaggggacccctccagtgcgaatcacctggaggaagaatggggtagagctgccagagagtacccactccaccttgctggccaatgggtccttgatgatccgtcacttcaggctggagccgggaggcagcccttcggatgaaggtgactatgagtgtgtggcccagaaccgctttgggctggtggtcagccggaaggctcgcatccaagctgcaaccatgtcggacttccacgtgcatccccaggccaccgtgggtgaggagggtggtgtggcccgcttccagtgccaaatccatgggcttcccaaacccctgatcacttgggagaagaacagagtcccaattgacacggacaatgagaggtacacattgctgcccaagggggtcctgcagatcacaggacttcgagctgaggacggtggcatcttccactgtgtggcctcaaacatcgccagtatccggatcagccacggggccaggctcactgtgtcaggctcgggctctggggcctacaaggagccagccatcctcgtggggcctgagaacctcaccctgacagtgcaccagaccgcggtgcttgagtgtgtcgccacgggcaacccgcgccccattgtgtcctggagccgcctggatggtcgccctatcggggtggagggcatccaggtgctgggcacaggaaacctcatcatctcagacgtgacggtccagcactctggcgtctacgtctgtgcagccaacagacctggcacccgggtgaggagaacggcacagggccggctggtggtgcaagccccagctgagtttgtgcagcatccccagtccatctccaggccagctgggaccacagccatgttcacctgccaagcccagggtgagccaccgcctcatgtcacgtggctgaaaaatggacaggtgctggggccaggaggccacgtcaggctcaagaataacaacagcacactgaccatttctggaatcggtcctgaggatgaagccatttatcagtgtgtggccgagaacagtgcgggctcatcacaggccagtgccaggctgaccgtactgtgggctgaggggctccccgggcctccccgcaatgtgcgggcagtctctgtgtcttccactgaggtgcgtgtgtcctggagtgagccgctggccaacaccaaggagatcatcggctacgtcctgcacatcaggaaggctgctgacccaccggagctggagtatcaggaggcagtcagcaagagcacctttcagcacctggtcagcgacctggagccctccacagcctacagtttctacatcaaggcctacacaccaaggggggccagctcagcctctgtgcccaccctagctagcaccctgggtgaagcccctgccccacccccactgtcagtgcgagtcctgggcagctcctccttgcagctgctgtgggagccttggccccggctggcccagcacgagggcggcttcaagctgttttaccgcccagcaagcaagacctccttcaccggccccatcctgctgcctggaaccgtctcctcctacaacctcagccagctcgaccccactgcagtgtatgaggtgaagctgctcgcctacaaccagcatggagatggcaatgccacagtccgctttgtgtctttgaggggagcatctgagaggacagccttgagcccaccatgtgactgccggaaggaggaggccgccaaccagacgtccaccacaggcatcgtcatcggcatccacatcggggtcacttgcatcatcttctgtgtcctcttcctcctgttcggccaaaggggcagggtcctcctgtgtaaagatgtggaaaaccagctgtcccctccacagggtccccggagccagagggaccctggcattctggccctaaatggggcgagacggggacagcggggccagctgggccgagacgagaaacgtgtggatatgaaggagctggagcagctgttccccccggccagcgcagcagggcagccggaccccagacccacacaggatcctgcagcccccgctccgtgtgaggagacccagctctccttgctgccacttcaggggtgcggcctgatggaggggaagacgacggaggcgaagaccacagaggccacggctccctgcgccggcctggcggctgccccaccacccccagatggaggccctggcctcctcagtgaaggccaggcttccaggcctgcagcggcccgggttacccagccagctcactcggaacagtagccagtgtctggcaggctccagagggtggacggagcggggcccattctcaggtcaaaagcaagatttctactgtcatgtgggatttggatggtcctgggggctccccagtatttctatcctgactgcctcttgggttgtcaaaacccaaggcagccttgacagggaccccccggccctaacacccatcaggagttggagcagttcctgcaggagcctgttccttccctgggctgacgcccccttgcctctgcctggtacccacatgacttggaactgaactaacatttttctttaaaaagcaaaacttaaaaaaaaaaaaaaagaggagagagatagaggaaggtgaattagactccaaaagatgaccctgctgtagctgggccctgacactgtcaccctccaccgactttgttttctcaggatggatttttgctgttttggctctcagcacctacctc

SEQ ID NO: 3293 - protein, 814 aa, Homo sapiens
MAVQRAASPRRPPAPLWPRLLLPLLLLLLPAPSEGLGHSAELAFAVEPSDDVAVPGQPIVLDCRVEGTPPVRITWRKNGVELPESTHSTLLANGSLMIRHFRLEPGGSPSDEGDYECVAQNRFGLVVSRKARIQAATMSDFHVHPQATVGEEGGVARFQCQIHGLPKPLITWEKNRVPIDTDNERYTLLPKGVLQITGLRAEDGGIFHCVASNIASIRISHGARLTVSGSGSGAYKEPAILVGPENLTLTVHQTAVLECVATGNPRPIVSWSRLDGRPIGVEGIQVLGTGNLIISDVTVQHSGVYVCAANRPGTRVRRTAQGRLVVQAPAEFVQHPQSISRPAGTTAMFTCQAQGEPPPHVTWLKNGQVLGPGGHVRLKNNNSTLTISGIGPEDEAIYQCVAENSAGSSQASARLTVLWAEGLPGPPRNVRAVSVSSTEVRVSWSEPLANTKEIIGYVLHIRKAADPPELEYQEAVSKSTFQHLVSDLEPSTAYSFYIKAYTPRGASSASVPTLASTLGEAPAPPPLSVRVLGSSSLQLLWEPWPRLAQHEGGFKLFYRPASKTSFTGPILLPGTVSSYNLSQLDPTAVYEVKLLAYNQHGDGNATVRFVSLRGASERTALSPPCDCRKEEAANQTSTTGIVIGIHIGVTCIIFCVLFLLFGQRGRVLLCKDVENQLSPPQGPRSQRDPGILALNGARRGQRGQLGRDEKRVDMKELEQLFPPASAAGQPDPRPTQDPAAPAPCEETQLSLLPLQGCGLMEGKTTEAKTTEATAPCAGLAAAPPPPDGGPGLLSEGQASRPAAARVTQPAHSEQ

SEQ ID NO: 3294 - DNA, 6485 bp, Homo sapiens
ctcgcccaagatggcgatggaggggcgggtgaggcggcagcggccctggcccccgcgccggccccagctcgggcccgggcccccgaggccgcgcccccgcccgcggcgccgcgcctccccgggccactgacgcccggcgcgctctccccccgcggcggcggccgaagcacggggaggcggcggcggcggcggcggcccgagcccagccccatggcgcggggggacgccggccgcggccgtgggctcctcgcgttgaccttctgcctgttggccgcgcgcggggagctgctgttgccccaggagacgactgtggagctgagctgtggagtggggccactgcaagtgatcctgggcccagagcaggctgcagtgctaaactgtagcctgggggctgctgccgctggaccccccaccagggtgacctggagcaaggatggggacaccctgctggagcacgaccacttacacctgctgcccaatggttccctgtggctgtcccagccactagcacccaatggcagtgacgagtcagtccctgaggctgtgggggtcattgaaggcaactattcgtgcctagcccacggccccctcggagtgctggccagccagactgctgtcgtcaagcttgccacactcgcagacttctctctgcacccggagtctcagacggtggaggagaacgggacagctcgctttgagtgccacattgaagggctgccagctcccatcattacttgggagaaggaccaggtgacattgcctgaggagcctcggctcatcgtgcttcccaacggcgtccttcagatcctggatgttcaggagagtgatgcaggcccctaccgctgcgtggccaccaactcagctcgccagcacttcagccaggaggccctactcagtgtggcccacagagggtccctggcgtccaccagggggcaggacgtggtcattgtggcagccccagagaacaccacagtggtgtctggccagagtgtggtgatggaatgtgtggcctcagctgaccccaccccttttgtgtcctgggtccgacaagacgggaagcccatctccacagatgtcatcgtcctgggccgcaccaacctactaattgccaacgcgcagccctggcactccggcgtctatgtctgccgcgccaacaagccccgcacgcgcgacttcgccactgcagccgctgagctccgtgtgctggcggctcccgccatcactcaggcgcccgaggcgctgtcgcggacgcgggcgagcacagcgcgcttcgtgtgccgcgcgtcgggggagccgcggccagcgctgcgctggctgcacaacggggcgccgctgcggcccaacgggcgcgtcaaggtccagggcggcggtggcagcctggtcatcacacagatcggcctgcaggacgccggctactaccagtgcgtggctgagaacagcgcgggaatggcgtgcgctgccgcgtcgctggccgtggtggtgcgcgaggggctgcccagcgcccccacgcgggtcactgctacgccactgagcagctccgctgtgttggtggcctgggagcggcccgagatgcacagcgagcagatcatcggcttctctctccactaccagaaggcacggggcatggacaatgtggaataccagtttgcagtgaacaacgacaccacagaactacaggttcgggacctggaacccaacacagattatgagttctacgtggtggcctactcccagctgggagccagccgcacctccaccccagcactggtgcacacactggatgatgtccccagtgcagcaccccagctctccctgtccagccccaacccttcggacatcagggtggcgtggctgcccctgccccccagcctgagcaatgggcaggtggtgaagtacaagatagaatacggtttgggaaaggaagatcagattttctctactgaggtgcgaggaaatgagacacagcttatgctgaactcgcttcagccaaacaaggtgtatcgagtacggatttcggctggtacagcagccggcttcggggccccctcccagtggatgcatcacaggacgcccagtatgcacaaccagagccatgtcccttttgcccctgcagagttgaaggtgcaggcaaagatggagtccctggtcgtgtcatggcagccaccccctcaccccacccagatctctggctacaaactatattggcgggaggtgggggctgaggaggaggccaatggcgatcgcctgccagggggccgtggagaccaggcttgggatgtggggcctgtccggctcaagaagaaagtgaagcagtatgagctgacccagctagtccctggccggctgtacgaggtgaagctcgtggctttcaacaaacatgaggatggctatgcagcagtgtggaagggcaagacggagaaggcgccggcaccagacatgcctatccagaggggaccacccctgcctccagcccacgtccatgcggaatcaaacagctccacatccatctggcttcggtggaaaaagccagatttcaccacagtcaagattgtcaactacactgtgcgcttcagcccctgggggctcaggaatgcctccctggtcacctattacaccagttctggagaagacatcctcattggcggcttgaagccattcaccaaatacgagtttgcagtgcagtctcacggcgtggacatggatgggcctttcggctctgtggtggagcgctccaccctgcctgaccggccctccacacccccatccgacctgcgactgagccccctgacaccgtccacggttcggctgcactggtgcccccccacagagcccaacggggagatcgtggagtatctgatcctgtacagcagcaaccacacgcagcctgagcaccagtggaccttgctcaccacgcagggaaacatcttcagtgctgaggtccatggcctggagagcgacactcggtacttcttcaagatgggggcgcgcacagaggtgggacctgggcctttctcccgcctgcaggatgtgatcacgctccaggagaagctgtcagactcgctggacatgcactcagtcacgggcatcatcgtgggtgtctgcctgggcctcctctgcctcctggcctgcatgtgtgctggcctgcgccgcagcccccacagggaatccctcccaggcctgtcctccaccgccacccccgggaatcccgcgctgtactccagagctcggcttggcccccccagccccccagctgcccatgaattggagtcccttgtgcacccccatccccaggactggtccccgccaccctcagacgtggaggacagggctgaagtgcacagccttatgggtggcggtgtttctgaaggccggagtcactccaaaagaaagatctcctgggctcaaccaagcgggctgagctgggctggttcctgggcaggctgtgagctgccccaggcaggcccccggccggctctgacccgggccctgctgccccctgctggaactgggcagacgctgttgctgcaggctctggtgtacgacgccataaagggcaatgggaggaagaagtcacccccagcctgcaggaaccaggtggaggctgaagtcattgtccactctgactttagtgcatctaacgggaaccctgacctccatctccaagacctggagcctgaggaccccctgcctccagaggctcctgatctcatctcgggtgttggggatccagggcagggggcagcctggctggacagggagttgggagggtgtgagctggcagcccccgggccagacagacttacctgcttgccagaggcagccagtgcttcctgctcctacccggacctccagccaggcgaggtgctagaggagacccctggagatagctgccagctcaaatccccctgccctctaggagccagcccaggcctgcccagatccccggtctcctcctctgcctagctcttcccagaggatgtggtttggggcaggcaggtatggatcacataggatgcgatacctgtggccgtgtatgtccacatgtgtgcctgtagatacatcatcaagccctttggagcttcctaagttgctttggctgaggggagaggaaaacatggattattcactccccccatactctttgtgatacacatgtgacatgtgaaagacatacgagacatagctacatgtgatgtgcacatgtgtgaagtgcatgtatgcgtactggttgttgagctgggaaaccgtggcccaggcagtggtcactacagcctgattggtcctccaggtcagaacggtgccccacagtggtcagtccccagccctgtgggcccccacctccatcgcccagccttttattacacactctgagagtgtctccaatgcctgtctgacaaagacagtcccagcccattctcctgtctggctgggttgggtgcaagcaggctctgaatgcctggcatttcagctgcatcacctcccagctccttattgcccaaatagagagggtggccctggctcccctccgagcaactctgcatttaattttgtaatctgggaagtgcctggttttgaaaatccgctttctctcactcttcccctccttccttgcccctggctgctctagtgttctgtctcccagtcacctcgctctcccagcaccagtgcccttctcctgctcccagatactctttcctttcctctctcctgttttccttcctctgctatctctcacacctctcccagactatgtcatcttgttctcctgcctgggttcaaactctgcatccttctctaacaacgtgactacctcatgtctgcttcaaggcccccgtgcccttcctgtatccgcggctgccgcgcactcgcctgccatcctcctgcctcctcttcactcagtgcttctgcttgccctgccccaggcagcccacccacgcccagtgcgggtgtggagaagatcttctggcttccctgcatcttgcctttgggattgggatccaagggttctccatggatggatccaagtcatagaggggaatgtttgagacagggaagggggctgtgatccagaggctcagaataaaaagatgccctcccttctatgcaggggggcaagtttactggatggagatgatttgggcctctcttccagaagaagctaaaggaagagaaggggagtgagagttcagggaggcccttcccaccctgtgaggcttgacttgatctggattggggatgacaggaatctcaccctctggggtgctggcaaggaggtctttgcacaggaaaaggggtagctcatttcagtttgttttttctttaaattgaatcctcaagtcattttctgttcacctgccgcacagggacaagcttgacttctattttctgtgtagtgaaaacaatgtcatttatttggtttttcacctcagccctctcataggagcatagaatgttagggtctttactccctaatgatgtctgattggcacatcaagagttaactctgccttctgggccaaattcgaaataaccagtccatttttccttttttttttttttttttttaaatggtggaatgtctctcagcacagttgcggcttcctcaaaccctgaaagcatctgtgtttattatactcgggtgtcactcactgttgatgtctgcacctacgtttccacctcctccccctccttcagccagcctatgataacactaaagattattaatgttggttttgtatctcgttaaagacagaattgtcacttgtagtatttctgtagcattcagcgctgctgtggctaacaccactgtgtatgtttcatcattgctctgaaggtcaaaagcctcattttattttgctggtttgattttttttttttaaagaagaaaaaaaaactgccctgaattaaatggctgttttaacagtaggctcttagcattataccacatagtcatttttcatgttcttgtttaacaggcactgaggttctggtttaaattaaatagctgcaaatgagacaatttataacccattaggttgggtggaaaattgtttctcaaaagcaaataagtaataaatctggtatctgcctataactcacagttgataagaaagtggccatttctcactagcactatatatgatttgggctctgggtaatttggaagtgttaggtttgtgtctttgtagcagtatttttattagaaaagaatctattggccttttacagggtattaatccctttgtcacctaccattgatgccttaagttttctgagtctcaattaaaaatcttccttttcttgatgcatgacaagtgtaatcagtacttgctcatttatttgtctgtatttagtttatgctgtactatttaattatccttccagcgttttttttttctccttacaaatatgatactctttagtgttaagctaaggcattgattcatgtatctgtccttataatgaattaataaactattttccag

SEQ ID NO: 3295 - protein, 1250 aa, Homo sapiens
MARGDAGRGRGLLALTFCLLAARGELLLPQETTVELSCGVGPLQVILGPEQAAVLNCSLGAAAAGPPTRVTWSKDGDTLLEHDHLHLLPNGSLWLSQPLAPNGSDESVPEAVGVIEGNYSCLAHGPLGVLASQTAVVKLATLADFSLHPESQTVEENGTARFECHIEGLPAPIITWEKDQVTLPEEPRLIVLPNGVLQILDVQESDAGPYRCVATNSARQHFSQEALLSVAHRGSLASTRGQDVVIVAAPENTTVVSGQSVVMECVASADPTPFVSWVRQDGKPISTDVIVLGRTNLLIANAQPWHSGVYVCRANKPRTRDFATAAAELRVLAAPAITQAPEALSRTRASTARFVCRASGEPRPALRWLHNGAPLRPNGRVKVQGGGGSLVITQIGLQDAGYYQCVAENSAGMACAAASLAVVVREGLPSAPTRVTATPLSSSAVLVAWERPEMHSEQIIGFSLHYQKARGMDNVEYQFAVNNDTTELQVRDLEPNTDYEFYVVAYSQLGASRTSTPALVHTLDDVPSAAPQLSLSSPNPSDIRVAWLPLPPSLSNGQVVKYKIEYGLGKEDQIFSTEVRGNETQLMLNSLQPNKVYRVRISAGTAAGFGAPSQWMHHRTPSMHNQSHVPFAPAELKVQAKMESLVVSWQPPPHPTQISGYKLYWREVGAEEEANGDRLPGGRGDQAWDVGPVRLKKKVKQYELTQLVPGRLYEVKLVAFNKHEDGYAAVWKGKTEKAPAPDMPIQRGPPLPPAHVHAESNSSTSIWLRWKKPDFTTVKIVNYTVRFSPWGLRNASLVTYYTSSGEDILIGGLKPFTKYEFAVQSHGVDMDGPFGSVVERSTLPDRPSTPPSDLRLSPLTPSTVRLHWCPPTEPNGEIVEYLILYSSNHTQPEHQWTLLTTQGNIFSAEVHGLESDTRYFFKMGARTEVGPGPFSRLQDVITLQEKLSDSLDMHSVTGIIVGVCLGLLCLLACMCAGLRRSPHRESLPGLSSTATPGNPALYSRARLGPPSPPAAHELESLVHPHPQDWSPPPSDVEDRAEVHSLMGGGVSEGRSHSKRKISWAQPSGLSWAGSWAGCELPQAGPRPALTRALLPPAGTGQTLLLQALVYDAIKGNGRKKSPPACRNQVEAEVIVHSDFSASNGNPDLHLQDLEPEDPLPPEAPDLISGVGDPGQGAAWLDRELGGCELAAPGPDRLTCLPEAASASCSYPDLQPGEVLEETPGDSCQLKSPCPLGASPGLPRSPVSSSA

SEQ ID NO: 3296 - DNA, 3796 bp, Homo sapiens
aacgaaccggaagtgctaaagcctccgaggccaaggccgctgctactgccgccgctgcttcttagtgccgcgttcgccgcctgggttgtcaccggcgccgccgccgaggaagccactgcaaccaggaccggagtggaggcggcgcagcatgaagcggcgcaggcccgctccatagcgcacgtcgggacggtccgggcggggccggggggaaggaaaatgcaacatggcagcagcaatggaaacagaacagctgggtgttgagatatttgaaactgcggactgtgaggagaatattgaatcacaggatcggcctaaattggagcctttttatgttgagcggtattcctggagtcagcttaaaaagctgcttgccgataccagaaaatatcatggctacatgatggctaaggcaccacatgatttcatgtttgtgaagaggaatgatccagatggacctcattcagacagaatctattaccttgccatgtctggtgagaacagagaaaatacactgttttattctgaaattcccaaaactatcaatagagcagcagtcttaatgctctcttggaagcctcttttggatctttttcaggcaacactggactatggaatgtattctcgagaagaagaactattaagagaaagaaaacgcattggaacagtcggaattgcttcttacgattatcaccaaggaagtggaacatttctgtttcaagccggtagtggaatttatcacgtaaaagatggagggccacaaggatttacgcaacaacctttaaggcccaatctagtggaaactagttgtcccaacatacggatggatccaaaattatgccctgctgatccagactggattgcttttatacatagcaacgatatttggatatctaacatcgtaaccagagaagaaaggagactcacttatgtgcacaatgagctagccaacatggaagaagatgccagatcagctggagtcgctacctttgttctccaagaagaatttgatagatattctggctattggtggtgtccaaaagctgaaacaactcccagtggtggtaaaattcttagaattctatatgaagaaaatgatgaatctgaggtggaaattattcatgttacatcccctatgttggaaacaaggagggcagattcattccgttatcctaaaacaggtacagcaaatcctaaagtcacttttaagatgtcagaaataatgattgatgctgaaggaaggatcatagatgtcatagataaggaactaattcaaccttttgagattctatttgaaggagttgaatatattgccagagctggatggactcctgagggaaaatatgcttggtccatcctactagatcgctcccagactcgcctacagatagtgttgatctcacctgaattatttatcccagtagaagatgatgttatggaaaggcagagactcattgagtcagtgcctgattctgtgacgccactaattatctatgaagaaacaacagacatctggataaatatccatgacatctttcatgtttttccccaaagtcacgaagaggaaattgagtttatttttgcctctgaatgcaaaacaggtttccgtcatttatacaaaattacatctattttaaaggaaagcaaatataaacgatccagtggtgggctgcctgctccaagtgatttcaagtgtcctatcaaagaggagatagcaattaccagtggtgaatgggaagttcttggccggcatggatctaatatccaagttgatgaagtcagaaggctggtatattttgaaggcaccaaagactcccctttagagcatcacctgtacgtagtcagttacgtaaatcctggagaggtgacaaggctgactgaccgtggctactcacattcttgctgcatcagtcagcactgtgacttctttataagtaagtatagtaaccagaagaatccacactgtgtgtccctttacaagctatcaagtcctgaagatgacccaacttgcaaaacaaaggaattttgggccaccattttggattcagcaggtcctcttcctgactatactcctccagaaattttctcttttgaaagtactactggatttacattgtatgggatgctctacaagcctcatgatctacagcctggaaagaaatatcctactgtgctgttcatatatggtggtcctcaggttgctattgctggggccccagtcactctgtggatcttctatgatacaggatacacggaacgttatatgggtcaccctgaccagaatgaacagggctattacttaggatctgtggccatgcaagcagaaaagttcccctctgaaccaaatcgtttactgctcttacatggtttcctggatgagaatgtccattttgcacataccagtatattactgagttttttagtgagggctggaaagccatatgatttacagatctatcctcaggagagacacagcataagagttcctgaatcgggagaacattatgaactgcatcttttgcactaccttcaagaaaaccttggatcacgtattgctgctctaaaagtgatataattttgacctgtgtagaactctctggtatacactggctatttaaccaaatgaggaggtttaatcaacagaaaacacagaattgatcatcacattttgatacctgccatgtaacatctactcctgaaaataaatgtggtgccatgcaggggtctacggtttgtggtagtaatctaataccttaaccccacatgctcaaaatcaaatgatacatattcctgagagacccagcaataccataagaattactaaaaaaaaaaaaaaaaaaaagacattagcaccatgtattcatactaccctattttcacttttaatagtattataaacttcatgaacttaattagtgtatttttacagtatacttttgagtttgttaaaatatgatgatattagtgattggtttggttcagttccagaatctttgactagttacagatttgatagcacttaaatgtaattgaatagcttatgcttcattgcttgggcatatccagcatgttatgaactaataactattaaacttgacttaaccagtcattcattaataatttttcaaggataacttagtggcctcctaaagacacttgttttggcactgaccagtttttagccaatttaatctgtatctagtataaataattctcatttttctttgatgatattaacagagtgggcttttccttttgcataaaggctagtaactgtatatgtagcatggatttaattagtcatgatattgataattacaggcagaaaatttttaatcaaatgattagagcttaaatatttgcaggcaagtttttttttttcctttaagaaaaggaaaaagtacacattcactagaattcttcagaaaatttagtggtgccagtttccatttggtatttccttattaaaatattctagaattttaaggagattgaagggaatcacagtggggtggggagacctgggtttggggaatgacagagagaagaggtggtgagggcctgattaaaaactaagcagaagtagttttaacaaaaatactcatgaaaatgtttggaaactgaaatttaaacaactgtaatattaaggaaaccagaatcaataaatcactgtcttgccagcacagctacagagtaacatgattcaggggaggaaaagttccttagagttacttttataattctttttttttttcctcttaggtttagaaatcttacaaatttaaactttatcctttta

SEQ ID NO: 3297 - protein, 782 aa, Homo sapiens
MAAAMETEQLGVEIFETADCEENIESQDRPKLEPFYVERYSWSQLKKLLADTRKYHGYMMAKAPHDFMFVKRNDPDGPHSDRIYYLAMSGENRENTLFYSEIPKTINRAAVLMLSWKPLLDLFQATLDYGMYSREEELLRERKRIGTVGIASYDYHQGSGTFLFQAGSGIYHVKDGGPQGFTQQPLRPNLVETSCPNIRMDPKLCPADPDWIAFIHSNDIWISNIVTREERRLTYVHNELANMEEDARSAGVATFVLQEEFDRYSGYWWCPKAETTPSGGKILRILYEENDESEVEIIHVTSPMLETRRADSFRYPKTGTANPKVTFKMSEIMIDAEGRIIDVIDKELIQPFEILFEGVEYIARAGWTPEGKYAWSILLDRSQTRLQIVLISPELFIPVEDDVMERQRLIESVPDSVTPLIIYEETTDIWINIHDIFHVFPQSHEEEIEFIFASECKTGFRHLYKITSILKESKYKRSSGGLPAPSDFKCPIKEEIAITSGEWEVLGRHGSNIQVDEVRRLVYFEGTKDSPLEHHLYVVSYVNPGEVTRLTDRGYSHSCCISQHCDFFISKYSNQKNPHCVSLYKLSSPEDDPTCKTKEFWATILDSAGPLPDYTPPEIFSFESTTGFTLYGMLYKPHDLQPGKKYPTVLFIYGGPQVAIAGAPVTLWIFYDTGYTERYMGHPDQNEQGYYLGSVAMQAEKFPSEPNRLLLLHGFLDENVHFAHTSILLSFLVRAGKPYDLQIYPQERHSIRVPESGEHYELHLLHYLQENLGSRIAALKVI

SEQ ID NO: 3298 - DNA, 4096 bp, Homo sapiens
aacgaaccggaagtgctaaagcctccgaggccaaggccgctgctactgccgccgctgcttcttagtgccgcgttcgccgcctgggttgtcaccggcgccgccgccgaggaagccactgcaaccaggaccggagtggaggcggcgcagcatgaagcggcgcaggcccgctccatagcgcacgtcgggacggtccgggcggggccggggggaaggaaaatgcaacatggcagcagcaatggaaacagaacagctgggtgttgagatatttgaaactgcggactgtgaggagaatattgaatcacaggatcggcctaaattggagcctttttatgttgagcggtattcctggagtcagcttaaaaagctgcttgccgataccagaaaatatcatggctacatgatggctaaggcaccacatgatttcatgtttgtgaagaggaatgatccagatggacctcattcagacagaatctattaccttgccatgtctggtgagaacagagaaaatacactgttttattctgaaattcccaaaactatcaatagagcagcagtcttaatgctctcttggaagcctcttttggatctttttcaggcaacactggactatggaatgtattctcgagaagaagaactattaagagaaagaaaacgcattggaacagtcggaattgcttcttacgattatcaccaaggaagtggaacatttctgtttcaagccggtagtggaatttatcacgtaaaagatggagggccacaaggatttacgcaacaacctttaaggcccaatctagtggaaactagttgtcccaacatacggatggatccaaaattatgccctgctgatccagactggattgcttttatacatagcaacgatatttggatatctaacatcgtaaccagagaagaaaggagactcacttatgtgcacaatgagctagccaacatggaagaagatgccagatcagctggagtcgctacctttgttctccaagaagaatttgatagatattctggctattggtggtgtccaaaagctgaaacaactcccagtggtggtaaaattcttagaattctatatgaagaaaatgatgaatctgaggtggaaattattcatgttacatcccctatgttggaaacaaggagggcagattcattccgttatcctaaaacaggtacagcaaatcctaaagtcacttttaagatgtcagaaataatgattgatgctgaaggaaggatcatagatgtcatagataaggaactaattcaaccttttgagattctatttgaaggagttgaatatattgccagagctggatggactcctgagggaaaatatgcttggtccatcctactagatcgctcccagactcgcctacagatagtgttgatctcacctgaattatttatcccagtagaagatgatgttatggaaaggcagagactcattgagtcagtgcctgattctgtgacgccactaattatctatgaagaaacaacagacatctggataaatatccatgacatctttcatgtttttccccaaagtcacgaagaggaaattgagtttatttttgcctctgaatgcaaaacaggtttccgtcatttatacaaaattacatctattttaaaggaaagcaaatataaacgatccagtggtgggctgcctgctccaagtgatttcaagtgtcctatcaaagaggagatagcaattaccagtggtgaatgggaagttcttggccggcatggatctaatatccaagttgatgaagtcagaaggctggtatattttgaaggcaccaaagactcccctttagagcatcacctgtacgtagtcagttacgtaaatcctggagaggtgacaaggctgactgaccgtggctactcacattcttgctgcatcagtcagcactgtgacttctttataagtaagtatagtaaccagaagaatccacactgtgtgtccctttacaagctatcaagtcctgaagatgacccaacttgcaaaacaaaggaattttgggccaccattttggattcagcaggtcctcttcctgactatactcctccagaaattttctcttttgaaagtactactggatttacattgtatgggatgctctacaagcctcatgatctacagcctggaaagaaatatcctactgtgctgttcatatatggtggtcctcaggtgcagttggtgaataatcggtttaaaggagtcaagtatttccgcttgaataccctagcctctctaggttatgtggttgtagtgatagacaacaggggatcctgtcaccgagggcttaaatttgaaggcgcctttaaatataaaatgggtcaaatagaaattgacgatcaggtggaaggactccaatatctagcttctcgatatgatttcattgacttagatcgtgtgggcatccacggctggtcctatggaggatacctctccctgatggcattaatgcagaggtcagatatcttcagggttgctattgctggggccccagtcactctgtggatcttctatgatacaggatacacggaacgttatatgggtcaccctgaccagaatgaacagggctattacttaggatctgtggccatgcaagcagaaaagttcccctctgaaccaaatcgtttactgctcttacatggtttcctggatgagaatgtccattttgcacataccagtatattactgagttttttagtgagggctggaaagccatatgatttacagatctatcctcaggagagacacagcataagagttcctgaatcgggagaacattatgaactgcatcttttgcactaccttcaagaaaaccttggatcacgtattgctgctctaaaagtgatataattttgacctgtgtagaactctctggtatacactggctatttaaccaaatgaggaggtttaatcaacagaaaacacagaattgatcatcacattttgatacctgccatgtaacatctactcctgaaaataaatgtggtgccatgcaggggtctacggtttgtggtagtaatctaataccttaaccccacatgctcaaaatcaaatgatacatattcctgagagacccagcaataccataagaattactaaaaaaaaaaaaaaaaaaaagacattagcaccatgtattcatactaccctattttcacttttaatagtattataaacttcatgaacttaattagtgtatttttacagtatacttttgagtttgttaaaatatgatgatattagtgattggtttggttcagttccagaatctttgactagttacagatttgatagcacttaaatgtaattgaatagcttatgcttcattgcttgggcatatccagcatgttatgaactaataactattaaacttgacttaaccagtcattcattaataatttttcaaggataacttagtggcctcctaaagacacttgttttggcactgaccagtttttagccaatttaatctgtatctagtataaataattctcatttttctttgatgatattaacagagtgggcttttccttttgcataaaggctagtaactgtatatgtagcatggatttaattagtcatgatattgataattacaggcagaaaatttttaatcaaatgattagagcttaaatatttgcaggcaagtttttttttttcctttaagaaaaggaaaaagtacacattcactagaattcttcagaaaatttagtggtgccagtttccatttggtatttccttattaaaatattctagaattttaaggagattgaagggaatcacagtggggtggggagacctgggtttggggaatgacagagagaagaggtggtgagggcctgattaaaaactaagcagaagtagttttaacaaaaatactcatgaaaatgtttggaaactgaaatttaaacaactgtaatattaaggaaaccagaatcaataaatcactgtcttgccagcacagctacagagtaacatgattcaggggaggaaaagttccttagagttacttttataattctttttttttttcctcttaggtttagaaatcttacaaatttaaactttatcctttta

SEQ ID NO: 3299 - protein, 882 aa, Homo sapiens
MAAAMETEQLGVEIFETADCEENIESQDRPKLEPFYVERYSWSQLKKLLADTRKYHGYMMAKAPHDFMFVKRNDPDGPHSDRIYYLAMSGENRENTLFYSEIPKTINRAAVLMLSWKPLLDLFQATLDYGMYSREEELLRERKRIGTVGIASYDYHQGSGTFLFQAGSGIYHVKDGGPQGFTQQPLRPNLVETSCPNIRMDPKLCPADPDWIAFIHSNDIWISNIVTREERRLTYVHNELANMEEDARSAGVATFVLQEEFDRYSGYWWCPKAETTPSGGKILRILYEENDESEVEIIHVTSPMLETRRADSFRYPKTGTANPKVTFKMSEIMIDAEGRIIDVIDKELIQPFEILFEGVEYIARAGWTPEGKYAWSILLDRSQTRLQIVLISPELFIPVEDDVMERQRLIESVPDSVTPLIIYEETTDIWINIHDIFHVFPQSHEEEIEFIFASECKTGFRHLYKITSILKESKYKRSSGGLPAPSDFKCPIKEEIAITSGEWEVLGRHGSNIQVDEVRRLVYFEGTKDSPLEHHLYVVSYVNPGEVTRLTDRGYSHSCCISQHCDFFISKYSNQKNPHCVSLYKLSSPEDDPTCKTKEFWATILDSAGPLPDYTPPEIFSFESTTGFTLYGMLYKPHDLQPGKKYPTVLFIYGGPQVQLVNNRFKGVKYFRLNTLASLGYVVVVIDNRGSCHRGLKFEGAFKYKMGQIEIDDQVEGLQYLASRYDFIDLDRVGIHGWSYGGYLSLMALMQRSDIFRVAIAGAPVTLWIFYDTGYTERYMGHPDQNEQGYYLGSVAMQAEKFPSEPNRLLLLHGFLDENVHFAHTSILLSFLVRAGKPYDLQIYPQERHSIRVPESGEHYELHLLHYLQENLGSRIAALKVI

SEQ ID NO: 3300 - DNA, 4086 bp, Homo sapiens
attccgagtcaaccaccgttcactgggcgccccttgagctctgggcgctggcctcctggcttccacgctttgatggtgaggaaaggaaagattcctgtgagaagagcaggatgagcagagggattctatgcttgaagtcgagtcacttgaaaaagatctctttgaatgtggaagagatctgagcagatgaaaataaaatcaggaaaatgcaacatggcagcagcaatggaaacagaacagctgggtgttgagatatttgaaactgcggactgtgaggagaatattgaatcacaggatcggcctaaattggagcctttttatgttgagcggtattcctggagtcagcttaaaaagctgcttgccgataccagaaaatatcatggctacatgatggctaaggcaccacatgatttcatgtttgtgaagaggaatgatccagatggacctcattcagacagaatctattaccttgccatgtctggtgagaacagagaaaatacactgttttattctgaaattcccaaaactatcaatagagcagcagtcttaatgctctcttggaagcctcttttggatctttttcaggcaacactggactatggaatgtattctcgagaagaagaactattaagagaaagaaaacgcattggaacagtcggaattgcttcttacgattatcaccaaggaagtggaacatttctgtttcaagccggtagtggaatttatcacgtaaaagatggagggccacaaggatttacgcaacaacctttaaggcccaatctagtggaaactagttgtcccaacatacggatggatccaaaattatgccctgctgatccagactggattgcttttatacatagcaacgatatttggatatctaacatcgtaaccagagaagaaaggagactcacttatgtgcacaatgagctagccaacatggaagaagatgccagatcagctggagtcgctacctttgttctccaagaagaatttgatagatattctggctattggtggtgtccaaaagctgaaacaactcccagtggtggtaaaattcttagaattctatatgaagaaaatgatgaatctgaggtggaaattattcatgttacatcccctatgttggaaacaaggagggcagattcattccgttatcctaaaacaggtacagcaaatcctaaagtcacttttaagatgtcagaaataatgattgatgctgaaggaaggatcatagatgtcatagataaggaactaattcaaccttttgagattctatttgaaggagttgaatatattgccagagctggatggactcctgagggaaaatatgcttggtccatcctactagatcgctcccagactcgcctacagatagtgttgatctcacctgaattatttatcccagtagaagatgatgttatggaaaggcagagactcattgagtcagtgcctgattctgtgacgccactaattatctatgaagaaacaacagacatctggataaatatccatgacatctttcatgtttttccccaaagtcacgaagaggaaattgagtttatttttgcctctgaatgcaaaacaggtttccgtcatttatacaaaattacatctattttaaaggaaagcaaatataaacgatccagtggtgggctgcctgctccaagtgatttcaagtgtcctatcaaagaggagatagcaattaccagtggtgaatgggaagttcttggccggcatggatctaatatccaagttgatgaagtcagaaggctggtatattttgaaggcaccaaagactcccctttagagcatcacctgtacgtagtcagttacgtaaatcctggagaggtgacaaggctgactgaccgtggctactcacattcttgctgcatcagtcagcactgtgacttctttataagtaagtatagtaaccagaagaatccacactgtgtgtccctttacaagctatcaagtcctgaagatgacccaacttgcaaaacaaaggaattttgggccaccattttggattcagcaggtcctcttcctgactatactcctccagaaattttctcttttgaaagtactactggatttacattgtatgggatgctctacaagcctcatgatctacagcctggaaagaaatatcctactgtgctgttcatatatggtggtcctcaggtgcagttggtgaataatcggtttaaaggagtcaagtatttccgcttgaataccctagcctctctaggttatgtggttgtagtgatagacaacaggggatcctgtcaccgagggcttaaatttgaaggcgcctttaaatataaaatgggtcaaatagaaattgacgatcaggtggaaggactccaatatctagcttctcgatatgatttcattgacttagatcgtgtgggcatccacggctggtcctatggaggatacctctccctgatggcattaatgcagaggtcagatatcttcagggttgctattgctggggccccagtcactctgtggatcttctatgatacaggatacacggaacgttatatgggtcaccctgaccagaatgaacagggctattacttaggatctgtggccatgcaagcagaaaagttcccctctgaaccaaatcgtttactgctcttacatggtttcctggatgagaatgtccattttgcacataccagtatattactgagttttttagtgagggctggaaagccatatgatttacagatctatcctcaggagagacacagcataagagttcctgaatcgggagaacattatgaactgcatcttttgcactaccttcaagaaaaccttggatcacgtattgctgctctaaaagtgatataattttgacctgtgtagaactctctggtatacactggctatttaaccaaatgaggaggtttaatcaacagaaaacacagaattgatcatcacattttgatacctgccatgtaacatctactcctgaaaataaatgtggtgccatgcaggggtctacggtttgtggtagtaatctaataccttaaccccacatgctcaaaatcaaatgatacatattcctgagagacccagcaataccataagaattactaaaaaaaaaaaaaaaaaaaagacattagcaccatgtattcatactaccctattttcacttttaatagtattataaacttcatgaacttaattagtgtatttttacagtatacttttgagtttgttaaaatatgatgatattagtgattggtttggttcagttccagaatctttgactagttacagatttgatagcacttaaatgtaattgaatagcttatgcttcattgcttgggcatatccagcatgttatgaactaataactattaaacttgacttaaccagtcattcattaataatttttcaaggataacttagtggcctcctaaagacacttgttttggcactgaccagtttttagccaatttaatctgtatctagtataaataattctcatttttctttgatgatattaacagagtgggcttttccttttgcataaaggctagtaactgtatatgtagcatggatttaattagtcatgatattgataattacaggcagaaaatttttaatcaaatgattagagcttaaatatttgcaggcaagtttttttttttcctttaagaaaaggaaaaagtacacattcactagaattcttcagaaaatttagtggtgccagtttccatttggtatttccttattaaaatattctagaattttaaggagattgaagggaatcacagtggggtggggagacctgggtttggggaatgacagagagaagaggtggtgagggcctgattaaaaactaagcagaagtagttttaacaaaaatactcatgaaaatgtttggaaactgaaatttaaacaactgtaatattaaggaaaccagaatcaataaatcactgtcttgccagcacagctacagagtaacatgattcaggggaggaaaagttccttagagttacttttataattctttttttttttcctcttaggtttagaaatcttacaaatttaaactttatcctttta

SEQ ID NO: 3301 - protein, 898 aa, Homo sapiens
MWKRSEQMKIKSGKCNMAAAMETEQLGVEIFETADCEENIESQDRPKLEPFYVERYSWSQLKKLLADTRKYHGYMMAKAPHDFMFVKRNDPDGPHSDRIYYLAMSGENRENTLFYSEIPKTINRAAVLMLSWKPLLDLFQATLDYGMYSREEELLRERKRIGTVGIASYDYHQGSGTFLFQAGSGIYHVKDGGPQGFTQQPLRPNLVETSCPNIRMDPKLCPADPDWIAFIHSNDIWISNIVTREERRLTYVHNELANMEEDARSAGVATFVLQEEFDRYSGYWWCPKAETTPSGGKILRILYEENDESEVEIIHVTSPMLETRRADSFRYPKTGTANPKVTFKMSEIMIDAEGRIIDVIDKELIQPFEILFEGVEYIARAGWTPEGKYAWSILLDRSQTRLQIVLISPELFIPVEDDVMERQRLIESVPDSVTPLIIYEETTDIWINIHDIFHVFPQSHEEEIEFIFASECKTGFRHLYKITSILKESKYKRSSGGLPAPSDFKCPIKEEIAITSGEWEVLGRHGSNIQVDEVRRLVYFEGTKDSPLEHHLYVVSYVNPGEVTRLTDRGYSHSCCISQHCDFFISKYSNQKNPHCVSLYKLSSPEDDPTCKTKEFWATILDSAGPLPDYTPPEIFSFESTTGFTLYGMLYKPHDLQPGKKYPTVLFIYGGPQVQLVNNRFKGVKYFRLNTLASLGYVVVVIDNRGSCHRGLKFEGAFKYKMGQIEIDDQVEGLQYLASRYDFIDLDRVGIHGWSYGGYLSLMALMQRSDIFRVAIAGAPVTLWIFYDTGYTERYMGHPDQNEQGYYLGSVAMQAEKFPSEPNRLLLLHGFLDENVHFAHTSILLSFLVRAGKPYDLQIYPQERHSIRVPESGEHYELHLLHYLQENLGSRIAALKVI

SEQ ID NO: 3302 - DNA, 4079 bp, Homo sapiens
aacgaaccggaagtgctaaagcctccgaggccaaggccgctgctactgccgccgctgcttcttagtgccgcgttcgccgcctgggttgtcaccggcgccgccgccgaggaagccactgcaaccaggaccggagtggaggcggcgcagcatgaagcggcgcaggcccgctccatagcgcacgtcgggacggtccgggcggggccggggggaaggctttgatggtgaggaaaggaaagattcctgtgagaagagcaggatgagcagagggattctatgcttgaagtcgagtcacttgaaaaagatctctttgaatgtggaagagatctgagcagatgaaaataaaatcaggaaaatgcaacatggcagcagcaatggaaacagaacagctgggtgttgagatatttgaaactgcggactgtgaggagaatattgaatcacaggatcggcctaaattggagcctttttatgttgagcggtattcctggagtcagcttaaaaagctgcttgccgataccagaaaatatcatggctacatgatggctaaggcaccacatgatttcatgtttgtgaagaggaatgatccagatggacctcattcagacagaatctattaccttgccatgtctggtgagaacagagaaaatacactgttttattctgaaattcccaaaactatcaatagagcagcagtcttaatgctctcttggaagcctcttttggatctttttcaggcaacactggactatggaatgtattctcgagaagaagaactattaagagaaagaaaacgcattggaacagtcggaattgcttcttacgattatcaccaaggaagtggaacatttctgtttcaagccggtagtggaatttatcacgtaaaagatggagggccacaaggatttacgcaacaacctttaaggcccaatctagtggaaactagttgtcccaacatacggatggatccaaaattatgccctgctgatccagactggattgcttttatacatagcaacgatatttggatatctaacatcgtaaccagagaagaaaggagactcacttatgtgcacaatgagctagccaacatggaagaagatgccagatcagctggagtcgctacctttgttctccaagaagaatttgatagatattctggctattggtggtgtccaaaagctgaaacaactcccagtggtggtaaaattcttagaattctatatgaagaaaatgatgaatctgaggtggaaattattcatgttacatcccctatgttggaaacaaggagggcagattcattccgttatcctaaaacaggtacagcaaatcctaaagtcacttttaagatgtcagaaataatgattgatgctgaaggaaggatcatagatgtcatagataaggaactaattcaaccttttgagattctatttgaaggagttgaatatattgccagagctggatggactcctgagggaaaatatgcttggtccatcctactagatcgctcccagactcgcctacagatagtgttgatctcacctgaattatttatcccagtagaagatgatgttatggaaaggcagagactcattgagtcagtgcctgattctgtgacgccactaattatctatgaagaaacaacagacatctggataaatatccatgacatctttcatgtttttccccaaagtcacgaagaggaaattgagtttatttttgcctctgaatgcaaaacaggtttccgtcatttatacaaaattacatctattttaaaggaaagcaaatataaacgatccagtggtgggctgcctgctccaagtgatttcaagtgtcctatcaaagaggagatagcaattaccagtggtgaatgggaagttcttggccggcatggatctaatatccaagttgatgaagtcagaaggctggtatattttgaaggcaccaaagactcccctttagagcatcacctgtacgtagtcagttacgtaaatcctggagaggtgacaaggctgactgaccgtggctactcacattcttgctgcatcagtcagcactgtgacttctttataagtaagtatagtaaccagaagaatccacactgtgtgtccctttacaagctatcaagtcctgaagatgacccaacttgcaaaacaaaggaattttgggccaccattttggattcagcaggtcctcttcctgactatactcctccagaaattttctcttttgaaagtactactggatttacattgtatgggatgctctacaagcctcatgatctacagcctggaaagaaatatcctactgtgctgttcatatatggtggtcctcaggtgcagttggtgaataatcggtttaaaggagtcaagtatttccgcttgaataccctagcctctctaggttatgtggttgtagtgatagacaacaggggatcctgtcaccgagggcttaaatttgaaggcgcctttaaatataaaatggttgctattgctggggccccagtcactctgtggatcttctatgatacaggatacacggaacgttatatgggtcaccctgaccagaatgaacagggctattacttaggatctgtggccatgcaagcagaaaagttcccctctgaaccaaatcgtttactgctcttacatggtttcctggatgagaatgtccattttgcacataccagtatattactgagttttttagtgagggctggaaagccatatgatttacagatctatcctcaggagagacacagcataagagttcctgaatcgggagaacattatgaactgcatcttttgcactaccttcaagaaaaccttggatcacgtattgctgctctaaaagtgatataattttgacctgtgtagaactctctggtatacactggctatttaaccaaatgaggaggtttaatcaacagaaaacacagaattgatcatcacattttgatacctgccatgtaacatctactcctgaaaataaatgtggtgccatgcaggggtctacggtttgtggtagtaatctaataccttaaccccacatgctcaaaatcaaatgatacatattcctgagagacccagcaataccataagaattactaaaaaaaaaaaaaaaaaaaagacattagcaccatgtattcatactaccctattttcacttttaatagtattataaacttcatgaacttaattagtgtatttttacagtatacttttgagtttgttaaaatatgatgatattagtgattggtttggttcagttccagaatctttgactagttacagatttgatagcacttaaatgtaattgaatagcttatgcttcattgcttgggcatatccagcatgttatgaactaataactattaaacttgacttaaccagtcattcattaataatttttcaaggataacttagtggcctcctaaagacacttgttttggcactgaccagtttttagccaatttaatctgtatctagtataaataattctcatttttctttgatgatattaacagagtgggcttttccttttgcataaaggctagtaactgtatatgtagcatggatttaattagtcatgatattgataattacaggcagaaaatttttaatcaaatgattagagcttaaatatttgcaggcaagtttttttttttcctttaagaaaaggaaaaagtacacattcactagaattcttcagaaaatttagtggtgccagtttccatttggtatttccttattaaaatattctagaattttaaggagattgaagggaatcacagtggggtggggagacctgggtttggggaatgacagagagaagaggtggtgagggcctgattaaaaactaagcagaagtagttttaacaaaaatactcatgaaaatgtttggaaactgaaatttaaacaactgtaatattaaggaaaccagaatcaataaatcactgtcttgccagcacagctacagagtaacatgattcaggggaggaaaagttccttagagttacttttataattctttttttttttcctcttaggtttagaaatcttacaaatttaaactttatcctttta

SEQ ID NO: 3303 - protein, 847 aa, Homo sapiens
MWKRSEQMKIKSGKCNMAAAMETEQLGVEIFETADCEENIESQDRPKLEPFYVERYSWSQLKKLLADTRKYHGYMMAKAPHDFMFVKRNDPDGPHSDRIYYLAMSGENRENTLFYSEIPKTINRAAVLMLSWKPLLDLFQATLDYGMYSREEELLRERKRIGTVGIASYDYHQGSGTFLFQAGSGIYHVKDGGPQGFTQQPLRPNLVETSCPNIRMDPKLCPADPDWIAFIHSNDIWISNIVTREERRLTYVHNELANMEEDARSAGVATFVLQEEFDRYSGYWWCPKAETTPSGGKILRILYEENDESEVEIIHVTSPMLETRRADSFRYPKTGTANPKVTFKMSEIMIDAEGRIIDVIDKELIQPFEILFEGVEYIARAGWTPEGKYAWSILLDRSQTRLQIVLISPELFIPVEDDVMERQRLIESVPDSVTPLIIYEETTDIWINIHDIFHVFPQSHEEEIEFIFASECKTGFRHLYKITSILKESKYKRSSGGLPAPSDFKCPIKEEIAITSGEWEVLGRHGSNIQVDEVRRLVYFEGTKDSPLEHHLYVVSYVNPGEVTRLTDRGYSHSCCISQHCDFFISKYSNQKNPHCVSLYKLSSPEDDPTCKTKEFWATILDSAGPLPDYTPPEIFSFESTTGFTLYGMLYKPHDLQPGKKYPTVLFIYGGPQVQLVNNRFKGVKYFRLNTLASLGYVVVVIDNRGSCHRGLKFEGAFKYKMVAIAGAPVTLWIFYDTGYTERYMGHPDQNEQGYYLGSVAMQAEKFPSEPNRLLLLHGFLDENVHFAHTSILLSFLVRAGKPYDLQIYPQERHSIRVPESGEHYELHLLHYLQENLGSRIAALKVI

SEQ ID NO: 3304 - DNA, 1689 bp, Homo sapiens
cgggagcgtggggtatctcgaggtgccgggttgcaggcgctcaggggcgctagggtttgaggcctgctttctgctcgcgccagcagagcactacctgaggcagcgaggcgcagcgagcctagcctccccgcgccctgggcagtgtggccatggagaatcaggtgttgacgccgcatgtctactgggctcagcgacaccgcgagctatatctgcgcgtggagctgagtgacgtacagaaccctgccatcagcatcactgaaaacgtgctgcatttcaaagctcaaggacatggtgccaaaggagacaatgtctatgaatttcacctggagttcttagaccttgtgaaaccagagcctgtttacaaactgacccagaggcaggtaaacattacagtacagaagaaagtgagtcagtggtgggagagactcacaaagcaggaaaagcgaccactgtttttggctcctgactttgatcgttggctggatgaatctgatgcggaaatggagctcagagctaaggaagaagagcgcctaaataaactccgactggaaagcgaaggctctcctgaaactcttacaaacttaaggaaaggatacctgtttatgtataatcttgtgcaattcttgggattctcctggatctttgtcaacctgactgtgcgattctgtatcttgggaaaagagtccttttatgacacattccatactgtggctgacatgatgtatttctgccagatgctggcagttgtggaaactatcaatgcagcaattggagtcactacgtcaccggtgctgccttctctgatccagcttcttggaagaaattttattttgtttatcatctttggcaccatggaagaaatgcagaacaaagctgtggttttctttgtgttttatttgtggagtgcaattgaaattttcaggtactctttctacatgctgacgtgcattgacatggattggaaggtgctcacatggcttcgttacactctgtggattcccttatatccactgggatgtttggtggaagctgtctcagtgattcagtccattccaatattcaatgagaccggacgattcagtttcacattgccatatccagtgaaaatcaaagttagattttccttttttcttcagatttatcttataatgatatttttaggtttatacataaattttcgtcacctttataaacagcgcagacggcgctatggaaaaaaaagaaaaagatccactaaaaagaaagatttagatggcttcttgccagtttgagcctaatctgattcttacagttttaccttcttgaaccaatgtaaaagtttttttaatgttaaatgattaaattctcagtgaggctatcttccttttccccagtaacattcctgaatttactgttatcttattgtagtacttgcatgacatggattcctgatatctgatgagaggttcattcttgtgtattcagttaatgacaccaaaaggctcagcccaccccaaccctatctcatgttcagtctgtctaatacatgccagagatttttttttcaaaaagtgctttatccctacaatgtactgacagttcttacagttgaggatttggttcttttcagctaattgcttggtggattaaaaaaagcaagactaatgtcaactctaatggaaggctggttaaaagtggactcaggcaagg

SEQ ID NO: 3305 - protein, 373 aa, Homo sapiens
MENQVLTPHVYWAQRHRELYLRVELSDVQNPAISITENVLHFKAQGHGAKGDNVYEFHLEFLDLVKPEPVYKLTQRQVNITVQKKVSQWWERLTKQEKRPLFLAPDFDRWLDESDAEMELRAKEEERLNKLRLESEGSPETLTNLRKGYLFMYNLVQFLGFSWIFVNLTVRFCILGKESFYDTFHTVADMMYFCQMLAVVETINAAIGVTTSPVLPSLIQLLGRNFILFIIFGTMEEMQNKAVVFFVFYLWSAIEIFRYSFYMLTCIDMDWKVLTWLRYTLWIPLYPLGCLVEAVSVIQSIPIFNETGRFSFTLPYPVKIKVRFSFFLQIYLIMIFLGLYINFRHLYKQRRRRYGKKRKRSTKKKDLDGFLPV

SEQ ID NO: 3306 - DNA, 2538 bp, Homo sapiens
tgcctttcgctgcttgttggggttacaggtgaaggggttatgggtgaagaacaacccagggccagcgcttggccttcccgccaccgtggcggccgccccgcgctgtctgtgaggcgccagttccggggcgctgctcccggcctcccctcgctctgaggctcggggtccccagctccgcgtaaactgcacgatttcgccctctgctcagctcccctctgccccctctttccaagagagacttccagatcccacattttcttgactgatttttaagcatttcttcgtttatagctgtctgtttgcattctgattgggaacactgggatcattttcatcatgccgacagtggtggtaatggatgtatccctttccatgacccgacctgtgtctattgaggggtccgaggaataccagcgtaagcacctagcagcccatggtttaacgatgctgtttgagcacatggccacaaattacaagcttgaatttacagcacttgtggttttttcatcactttgggagttgatggtccccttcacgagagattataataccctacaggaagcactaagtaatatggatgattatgacaaaacctgcttggggtctgcattagttggtgtttgcaatatcgttcagcaagaatggggtggtgcaattccttgccaggttgtcctggtgacagacggctgtcttggcattggtagagggtcactgcgacattccctagccactcaaaatcaacgaagtgagagcaacaggtttccactaccttttcctttcccatctaagttatatatcatgtgcatggcgaatttggaggagctccagagcaccgattccttggaatgccttgaacgtctcatagatttaaacaatggtgaagggcagatttttactattgatggccccctgtgcttgaagaatgtacagtctatgtttggaaaactgataggtttggcatatacgcctttccatgctgttctcaagtgtggccacctaactgctgatgtacaagtcttccccaggccagaaccttttgttgtagatgaagaaattgatcctatccctaaagtcattaacacagatttggaaatagtgggatttattgatatagctgatatctcaagtcccccagttctgtccagacatctggtcttacctatagcacttaacaaagaaggtgatgaggtgggtactggcatcactgatgacaatgaagatgaaaattcagccaatcagattgcaggcaaaatacccaacttttgtgtcctgctccatggtagcctaaaagtggaaggaatggtagcgattgttcaattaggtcctgaatggcatggaatgctctactcccaagctgacagcaagaagaaatcaaacctcatgatgtctctctttgagcctggcccagaacctctcccatggctagggaaaatggcacagttgggtcctatttcagatgctaaagaaaacccttatggcgaggatgacaataagagtccattccccctgcagcccaaaaacaagcgcagttatgcccagaatgtgactgtctggatcaaacccagcggcctgcagacagatgtacagaagattttaagaaatgcaaggaaactacctgaaaaaacacagacattctataaggagctgaaccgtttgcgaaaggccgctctagcctttggtttcctggacctgctgaaaggggtggctgacatgctggaaagggaatgcacactgctgcctgagacagcccaccctgatgctgcattccagctgacccatgctgcccagcagctcaagctggccagtaccggcacctctgagtatgccgcttatgaccagaacatcacacctttgcacacggacttctctgggagcagcactgaaagaatttgaaactgacttttggagctttccttcttttttcatttcaactgaaaatgctttaggtaaaaacctttccagtatgttcacctctagaatagccacccaaagaccttcctgaggctgcctcagaagcaccacttgctgttttgaatgactctactagtatgagaaggatgtgaaggtggttggctggttgggctttaacttcctgggattcataatttttaagcttggaagatagctgctgttcccatgatgggcacatttcctgagaagcttgaatgactgatgagcatagagcacccctgccttcctcaggaaacctgaccggcaggggctctctggcttcctgaaagcttcacctcttccctcgtttatatctcaactgtaagggcattttcaagcttctgttcatggaatgagcaactcagactgtctggagcttgctgagtacaaacacaccaccactaagtttcagaactttccttaggacttgggcaaaatgtggtggtaactcttaagtgcttttggtatctcttgagattctaacttttaaagagcaaccattaatgtgtaaaatgattcctattattcaaggtttttttttaatgaaaataaaatatttgattttctagaaaaaaaaaaaaaaaaaaa

SEQ ID NO: 3307 - protein, 518 aa, Homo sapiens
MPTVVVMDVSLSMTRPVSIEGSEEYQRKHLAAHGLTMLFEHMATNYKLEFTALVVFSSLWELMVPFTRDYNTLQEALSNMDDYDKTCLGSALVGVCNIVQQEWGGAIPCQVVLVTDGCLGIGRGSLRHSLATQNQRSESNRFPLPFPFPSKLYIMCMANLEELQSTDSLECLERLIDLNNGEGQIFTIDGPLCLKNVQSMFGKLIGLAYTPFHAVLKCGHLTADVQVFPRPEPFVVDEEIDPIPKVINTDLEIVGFIDIADISSPPVLSRHLVLPIALNKEGDEVGTGITDDNEDENSANQIAGKIPNFCVLLHGSLKVEGMVAIVQLGPEWHGMLYSQADSKKKSNLMMSLFEPGPEPLPWLGKMAQLGPISDAKENPYGEDDNKSPFPLQPKNKRSYAQNVTVWIKPSGLQTDVQKILRNARKLPEKTQTFYKELNRLRKAALAFGFLDLLKGVADMLERECTLLPETAHPDAAFQLTHAAQQLKLASTGTSEYAAYDQNITPLHTDFSGSSTERI

SEQ ID NO: 3308 - DNA, 5374 bp, Homo sapiens
cccttcacacccgacccagccttgaattaggattccataggagagctgggggcaggagaatggggtgttccctgctgtccagcttcagacccactctttgagatattggattctgacaagtttccagagctgagaagacagccagatgtcaaggtctgaagggttgtggataccccctggctgggcttcatggagaaatcttctctgatcaccaacctgaatcccagagtagcctccatcttaggacagaatgagaggccttctgtaaccagatataactggccagcatggggaaattgatcaggatggggccgcaagagaggtggttactccggacaaagcggcttcattggagtcgcctcctcttcttactgggaatgttgatcatcggttctacttatcagcaccttaggagaccccggggcctttcctcattgtgggcagcagtctcttctcatcagcctataaaactggccagtcgggacctctccagtgaagagatgatgatgatgagcagcagcccttcaaaacctagctccgaaatggggggtaagatgctggtaccccaagcctcagtgggcagtgatgaagcaacactgagcatgacagtggagaatatccccagtatgcctaaaagaacagccaagatgatcccaacaacaaccaagaataattacagcccaacagcagcaggtacagaaagaaggaaggaagacaccccaacatccagtagaacactgacttactacacctcaacttcaagcagacaaatagtaaaaaagtataccccaacacccaggggagaaatgaagagctacagcccaactcaagtgagggaaaaggtgaagtatactccttccccacgtggtagaagagtaggcacttacgtgccgtccacattcatgacaatggaaacaagccatgcgatcacccccaggacaacagtgaaagacagtgacattacagcaacctataaaatactcgaaaccaactctcttaagagaataatggaggaaaccaccccaaccactctcaagggaatgtttgatagcaccccaacttttctgacacatgaggtagaagcaaacgtcttgacttctccaaggagcgtcatggaaaaaaacaacctgtttccccccagaagagtggaaagtaacagctcagcccatccctgggggttagtgggaaagagcaacccgaagactccccagggaacagtcctgttgcataccccagccacctctgaggggcaggtgacaataagcaccatgacaggcagcagcccagcagaaaccaaagccttcactgctgcctggagtcttaggaatccttcacccaggaccagtgtatcagccatcaaaacagccccagccatagtctggaggctggcaaagaaaccttccacagcacccagcacctcaacaacccctacggtcagggcaaagctgaccatgcaggtccatcactgtgtggttgtgaagccaaccccagccatgctcaccactccctccccaagcctcacaacagccctgctcccagaggagctcagtcctagtccctcagtgctgcctcccagcttgccagacctccaccccaagggagagtaccccccagatctgttcagtgtggaggagcggcggcagggctgggtggtcctgcacgtttttggcatgatgtatgtgtttgtggccttggccattgtttgcgacgagtacttcgttccagccctgggtgtcatcacagacaagctgcagatctccgaggatgtggcaggcgccacattcatggctgctggaggctctgctcctgagctcttcacctccctcatcggtgtcttcatttcccacagcaacgtgggcattggtaccattgtgggctctgctgtgttcaacattctctttgtcattggcacttgttccctcttctcccgagagatcctcaacctcacctggtggcccttattccgtgatgtctccttctacatccttgacctgataatgctcatcctcttcttcctggacagcctcattgcctggtgggagagcctgctgctgctgctggcctatgccttctatgtgttcaccatgaagtggaacaagcatatcgaggtctgggtgaaggagcagctcagcaggaggccagtggccaaggtcatggccttagaagacctcagcaagccgggcgatggggccattgcggtggatgagctacaggataacaagaagctgaagctcccgtccttgctgacccgagggagcagctcgacctctctgcacaacagcaccatccgcagcaccatctaccagctcatgctccacagcctggaccccctgagggaagttcgccttgccaaggagaaggaggaggagagcttgaatcaaggggccagagcccaaccccaggccaaagcagaaagcaaaccagaagaggaggagccagccaagctccctgcggtcacggtcacaccagcccctgttccagacatcaagggagatcagaaggagaatccaggcggtcaggaagatgtggctgaggccgagagcacaggtgaaatgccaggcgaagagggcgaaactgctggtgaaggtgaaactgaagagaaaagtggaggtgaaactcaaccagaaggtgaaggtgaaactgaaacacaaggaaaaggagaagaatgtgaagatgaaaatgaagcagaaggaaaaggagacaatgaaggtgaagatgagggtgaaatccacgcagaagatggtgaaatgaaaggtaatgaaggtgaaactgaaagccaggaactcagtgctgaaaatcacggtgaagccaaaaatgatgagaaaggtgtagaagatggagggggaagtgatggaggggatagcgaagaggaggaagaggaggaggaagagcaggaggaagaggaggaggaggaagagcaggaggaagaggaggaggaggaggaggaagaggaggagaagggaaatgaagagcctctgtccctggactggcctgaaaccaggcagaagcaggccatttacctcttccttctgcccatcgtgttcccactgtggctgacagtccccgacgtccgaaggcaggagtctaggaagttttttgttttcaccttcctgggatctatcatgtggatagccatgttctcatacctcatggtgtggtgggctcaccaggttggtgaaacaatagggatttctgaagagatcatgggcctgacaatccttgcagcaggcacatcaattcctgacctcatcaccagtgtgattgtcgctcgaaaaggcctgggagacatggctgtgtcaagctctgtgggcagtaacatatttgatatcactgtgggcttgcctgttccttggttgcttttctctcttatcaatggattacagccagttccagtcagcagcaatggcttgttttgtgcaattgttttgctttttctcatgcttctgtttgtgatctcttcaattgcgtcatgtaaatggagaatgaacaagatcctgggcttcacaatgttcctcctttactttgtattcctgataatcagtgtgatgttagaagatcgaatcatatcctgtcctgtatctgtctgaatcagtcactcttgctcacaatgggcatggatcagaagaccatgcagaagttactgtatctcttgtgaccctaatgaaagaatgtatatgatcctggaaagtgaactgggtgacctaggacctctgatatgaatgtgatctgagactaaagtttgtccttggaaacacctgcagctcattgtggattaagaacctcacccctggaggggtggagtttctacccctgactcatgcagacatctattacatggaggcagtagaaggacccctggagccagagggttttctaaatgagataactgggggcaaaggttgggataggcgcacgagctataagacaagctcctacgctcactgttccctgatcattccaaaggctgctggcccaaaagatgcagatgtggtctacatctcagccttcctgacctctgccccaaacacacgctgcaattttgtctcctccttttctgttcaaattgtgaggttctatcaggtttgtaatcactgtagcttcagttattggtgagtctaaggatccaaggctacagaaaaaaaagaaatataacaggaattaatgatcattccacgttttgtagcccactgcatctggatatataccagtatttttcttttttttttttttgagacagagtttggctcttgttgcccaggctggtgtgcaatggcgtgatctcggcacaccacaaccttcacctccccggttcaagcaattctcctgcctcagcctgaagtcgtgatctgcccgcctcggcctcccaaagtgctgggattacaggcgtcagccaccgcgcctggcctataccagtattttctagtttaaaggaggactacattaactcttattgttgtgtttctgaaaagtgaaatttaaaaagcagcctgaaaaataaaaatttataatttgcccttgaattggaaggaatggagattagggaaggaaaactactctagaggccatttaaaagtatgtatttattagaacatcgaaattcgtgttgtctccatcagtggtcaccttgagggattagacattctaatggaatgtcctggctccaccctccagcatgttctcacccaacaatgacagttgagtggagtgggaagggaagtcattctaaagagtccaaagtcagtagcgccacatctggtttataaagtaagagatccagtggacaatgctatttttgtatgccaacctagataggattataaagcaagactgatttcttctgtggtttatgaatgatcttaaggtaattacaaaagggaaattccaagaatgcataacacaatgacaacatggtgagaaaagtgcagtactacttccaaggtggctagtgtaaaggacacttgagtttttaaaactgtggttaaatgttttatgtggaatttgatgagtttgtatattaaataccactgcttgctgcttttactagaatcaagttaagggacacgttagaaatagaacagcttaatatcactggcttcagagcaaaatgagctcgggtgactgcagattatgatggtaaatatggctttaattacaaacatgaggaatgattcactgaagatgaaaagataggacggatgtgatatgaaaaaaacccaaacattttggcattgaatgatggctaaggtgttccaagtattccatcttttaagatgaattgcttaattaattgcctcgctaccccaggattctcattctttggaaataatttttattaaatttcaataaactgtgaatcccaatggtattttacttt

SEQ ID NO: 3309 - protein, 1099 aa, Homo sapiens
MGKLIRMGPQERWLLRTKRLHWSRLLFLLGMLIIGSTYQHLRRPRGLSSLWAAVSSHQPIKLASRDLSSEEMMMMSSSPSKPSSEMGGKMLVPQASVGSDEATLSMTVENIPSMPKRTAKMIPTTTKNNYSPTAAGTERRKEDTPTSSRTLTYYTSTSSRQIVKKYTPTPRGEMKSYSPTQVREKVKYTPSPRGRRVGTYVPSTFMTMETSHAITPRTTVKDSDITATYKILETNSLKRIMEETTPTTLKGMFDSTPTFLTHEVEANVLTSPRSVMEKNNLFPPRRVESNSSAHPWGLVGKSNPKTPQGTVLLHTPATSEGQVTISTMTGSSPAETKAFTAAWSLRNPSPRTSVSAIKTAPAIVWRLAKKPSTAPSTSTTPTVRAKLTMQVHHCVVVKPTPAMLTTPSPSLTTALLPEELSPSPSVLPPSLPDLHPKGEYPPDLFSVEERRQGWVVLHVFGMMYVFVALAIVCDEYFVPALGVITDKLQISEDVAGATFMAAGGSAPELFTSLIGVFISHSNVGIGTIVGSAVFNILFVIGTCSLFSREILNLTWWPLFRDVSFYILDLIMLILFFLDSLIAWWESLLLLLAYAFYVFTMKWNKHIEVWVKEQLSRRPVAKVMALEDLSKPGDGAIAVDELQDNKKLKLPSLLTRGSSSTSLHNSTIRSTIYQLMLHSLDPLREVRLAKEKEEESLNQGARAQPQAKAESKPEEEEPAKLPAVTVTPAPVPDIKGDQKENPGGQEDVAEAESTGEMPGEEGETAGEGETEEKSGGETQPEGEGETETQGKGEECEDENEAEGKGDNEGEDEGEIHAEDGEMKGNEGETESQELSAENHGEAKNDEKGVEDGGGSDGGDSEEEEEEEEEQEEEEEEEEQEEEEEEEEEEEEKGNEEPLSLDWPETRQKQAIYLFLLPIVFPLWLTVPDVRRQESRKFFVFTFLGSIMWIAMFSYLMVWWAHQVGETIGISEEIMGLTILAAGTSIPDLITSVIVARKGLGDMAVSSSVGSNIFDITVGLPVPWLLFSLINGLQPVPVSSNGLFCAIVLLFLMLLFVISSIASCKWRMNKILGFTMFLLYFVFLIISVMLEDRIISCPVSV

SEQ ID NO: 3310 - DNA, 6585 bp, Homo sapiens
ggagaaagaggcggaggcagtggcggccgcgaggggagggggagtcccgtctgactgagacggcaggcctgggcgggcgggcgggggtgccgcgaagggcggagcgccgggctggggatgagctaagcgggctcagagcgccgcggcattcagcccctcgtgttccgctaccgcgcgtgcgggattccggcgccgctctccgagctcgatccgctgctcgcacgggagccagctgggtgttatttctcaaactctgaggctgcggagttcacacattgaaatctgtcatctttttcagagagaaactttcggtaatgtatgtaaccttctgtaatggaagatgattgaagacaaggggcctcgtgttgctgactactttgttgtagcaggattaactgatgtttcaaagcctctagaagaagaaattcacttcaatgatgcttgtcataaagtagctaaaccaaaagaacctattacagatgtttcagttattatcaaatctcttggggaggaagtcccacaggattatatctgtattgatgttaccccaactggattgtcagctgatcttaataatggaagtcttgtggggccacagatttacctttgctatagaagaggaagagataagcctccacttacagatctgggggttttatatgactggaaagaaagattgaaacagggttgtgaaattattcagagtactccctatgggcgccccgcaaatattagtgggagtacctcatcacaaagaatttatatcacttaccgaagagcctctgaaaacatgactcagaatacgttggctgtcactgacatatgtattattatacccagtaaaggagaaagcccaccacacacgttctgcaaagtcgacaagaatctcaataacagtatgtggggatcagcagtatacttgtgttataaaaaatcggtggcaaagacgaacactgtatcttacaaagctggcctaatttgtagatatcctcaagaagattatgagtcattctcactaccggaatctgttcctctattttgtttaccaatgggtgcaaccattgaatgttggccatcaaatagcaaataccctctgcctgtattttctacttttgttttaactggagcctcagctgaaaaggtttatggtgctgctattcagttttatgaaccatactctgaggagaatctcacagaaaagcagagacttcttttgggtttaacatcagcagatgggaagtctgatagttccaaaacaattcatactaacaaatgcatctgtcttctttctcactggcctttttttgatgcattcaggaagtttctgacttttctgtatcgttattccatctctgggcctcatgtccttccaattgagaagcatatttctcattttatgcataaagttccttttccatctcctcagagaccacggattttagttcagttatcaccacatgataatctgattctcagtcagcctgtgtcttcacctcttccactaagtggtggcaagttttcaacactactgcagaatttaggccctgaaaatgctgtgacactactggtgtttgcagtaacagaacataaaattcttatccattccctacggccatccgtgcttactagtgtgacagaagcattagtgtctatgattttccctttccactggccatgcccgtatgttcctctctgcccactggctttagcagatgtcttgagtgcaccatgtccattcatagtagggattgattcaagatactttgatctctatgatcctccaccagatgtcagttgtgttgatgtagataccaacactatttctcagattggtgacaagaaaaatgtagcctggaagatacttccaaagaagccatgtaaaaatctgatgaacacactgaataatttgcatcagcaattggcaaaattgcagcagagaccgagagatgatggactcatggatttagcaataaatgactatgattttaattctggaaagaggttgcacatgatagatttggaaatccaagaggcatttttgtttttcatggcctctattttaaaaggttacagatcatacttaaggccaataacacaagccccatctgagacagccacagatgcagcctctctctttgccctacaagctttcttaagaagccgggaccggtcacatcaaaaattctataacatgatgaccaaaacacaaatgtttattcgcttcattgaagaatgttcttttgttagtgacaaagatgcaagcctggcattttttgatgattgtgtagataaagtggatatggacaagagcggtgaagtacgacttatagaactggatgaatctttcaaaagtgaacacactgtttttgtaacaccacctgagatcccccacctacccaatggtgaagaaccccctttacagtacagctataatggatttccagttcttaggaacaatttatttgaaagacctgaaggatttctacaagcaaagaagaacaaattgccttcaaaatcaagtagtcctaatagccctttgcccatgttcagaagaacaaaacaggaaattaaatcagcccataaaattgcaaagaggtactcttccatccctcagatgtggtctaggtgtctactgcgccactgttatggactgtggtttatttgtctcccagcttatgtgaaagtctgtcattcaaaagtcagggctctgaaaacagcatatgatgtgcttaaaaaaatgcagtcaaagaagatggatccacctgatgaggtatgctaccgcattcttatgcaactctgtggacaatatgatcagccagtgcttgcagttcgagtgctttttgaaatgcagaaagctggtattgaccccaatgccattacttatggttattataataaggctgttttggaaagtacctggccttcaagaagtcgtagtggctattttctttggacaaaagtaagaaatgttgttttaggagtaacacagttcaaaagagctttaaagaagcatgcacacttatcacaaacaactctctcaggtggccagtctgatcttggatataattcattatctaaagatgaagttagaagaggggatacatctactgaagacattcaagaagaaaaagataaaaaagggagtgattgtagttccttgtcagagagtgagagtacaaaaggaagtgctgattgccttcctaagctcagttatcaaaattcttccagtatcgttcgcctcactggtacaagtaacaacagtgctggtaaaatatcaggagaaagcatgggtaaggaaagcacacctgagctgctcttaatatcatctcttgaagatacaaatgaaacacgaaacattcaaagtagatgcttcaggaaaagacataaaagtgacaatgaaactaatttgcagcagcaagtggtctggggaaatagaaaccgtaatcttagtggaggggtactgatgggatttatgctcaatagaattaaccaggaagcaacccctggagatatagttgaaaaattgggagctgatgcaaaaattctttcaaatgttatctcaaaaagcacgagaccaaatactcttgatattgggaagccacctttaagatcaaaaagagacagtctagaaaaggaatctagtgatgatgatacaccttttgatggttctaactatttggcagataaagtggattctcctgttatttttgacttagaagacttagacagtgaaacagatgtatcaaaagcaggatgtgttgctacacaaaatcccaagaggattcaacgtatgaacagcagcttttcagtaaaaccttttgaaaaaactgatgtcgcaacaggatttgatcccctctctcttttggttgctgagactgaacagcagcaaaaagaagaagaggaggaggatgaagatgatagcaaaagcatttcaacaccatctgctaggcgtgatttagctgaagaaattgtgatgtatatgaataacatgagcagtcctttgacaagtcgtacaccaagcattgatttacaacgggcatgtgatgataaattaaataagaaaagtccaccattggtcaaggcatgcagaagatctagtctgcctcctaattctcctaagccagtgagacttaccaaatctaaaagttacacaaaaagtgaggagaaaccaagggatagactttggtcttctccagccttctcacctacttgcccatttagggaagaatctcaggatacattaacccactcatcaccttcatttaacttagatacactactagtacctaaactagatgttctaagaaacagtatgttcactgctggaaaaggagttgcagagaaagcaagcaaatggtattcaagattcaccatgtacaccacatcatctaaggatcaaagttctgatcgtaccagtctttcttcagtgggagcccaggattctgaatctacctctttaacagatgaagatgtctgccatgagttggaaggacctatctcctctcaagagaccagtgctacttcagggactaagagaattgatctcagccgaataagcctggaaagttctgcatccttggaaggatctctgtcgaagtttgccttacctgggaaatcagaagtgacatcttccttcaacgcgagtaatacaaatatcttccagaactatgcaatggaggttctcatctcaagttgctctcggtgtagaacttgtgattgtcttgtccatgatgaggaaatcatggctggctggacagcagatgattcaaatctcaatactacatgcccattctgtggcaatatcttcttaccctttctgaatatagaaataagagatttaagacgacctggaagatactttctaaagtcaagcccatcaacagaaaatatgcactttccatcctccatttcaagtcagacgaggcagtcttgcatttcaacatcagcctctggtcttgacacatctgctctctctgttcaagggaattttgatctaaatagcaaatctaaactgcaggaaaatttttgcacccgaagtattcagatccctgctaatagatcaaaaacagctatgtctaaatgtccaatatttccaatggccaggagtattagtacttctggccccttggataaggaagatactggaagacagaagctcatttctacaggcagcctgccagctactttacaaggagctacagattctttaggtttagaatggcaccttccaagtcccgatcctgtcactgttccgtatcttagtcctttagtggtatggaaagaacttgaaagcttattggaaaatgaaggtgatcatgcaataacagtagcagactttgtggaccatcatccaattgttttttggaacctggtatggtatttcagacgtcttgacttgcccagtaacttacctggattgattctttcttctgagcactgtaacaagtattcaaagattccccgccactgtatgtctgaagatagcaaatatgttttaatacaaatgttatgggacaatatgaagttacatcaggatccgggacagcccttgtacattctctggaatgcacacacccaaaaatatccaatggtccatttattgcaaaaaagtgataactcatttaaccaggaactgttgaaaagtatggtaaaaagcattaaaatgaatgatgtctatggaccaatgagtcagattttagagacactgaataagtgtccacattttaaaagacagaggagtttatacagagaaatactatttctctcacttgtggcactgggaagagaaaacattgatatagatgcttttgataaagagtacaagatggcatacgatcgtctcacacctagtcaagtcaagagtacacacaactgtgatagaccaccaagtacaggggtgatggaatgtcgaaaaacctttggagaaccttatctttaagatgtatttgtatgtgtaaacattcaatgtatattgtatagtcagtgtataaaataacacttttagactctaaatattttttcttcaatttttgaaaatacaatttgtaaatggttcaaaagactcagacagcttatgtacagaatgtttgaagaagagaatagtgacaagtggggagaaagccactttgtttctcatttcttttttcttcttctttaactcccctgtaataggaaataaagtatttttgtgatgaggaaatccctaaacaaaattagttgccataaaatatgacaactgctttatggtttcttttggaagagacagattgaaaaatcatgaatggaatctaaacagaaatgtcagatgaacgtatttcctgttttcatagactattcaaatgttttgaccatgaagttgtattatacatattttaaattgtttatagtaagttgatatttttttaatttttaaatttaatatagcaaacttaaaatgaatttaaacttaagcaagcaagcgtgtattttccttgtctgctgctatttgaagtaattagtacagctgcagatctctctgtgtatatctatctatatatatattttttattacttgggagaatgaattttaaaatgtcagtgctagtg

SEQ ID NO: 3311 - protein, 1865 aa, Homo sapiens
MIEDKGPRVADYFVVAGLTDVSKPLEEEIHFNDACHKVAKPKEPITDVSVIIKSLGEEVPQDYICIDVTPTGLSADLNNGSLVGPQIYLCYRRGRDKPPLTDLGVLYDWKERLKQGCEIIQSTPYGRPANISGSTSSQRIYITYRRASENMTQNTLAVTDICIIIPSKGESPPHTFCKVDKNLNNSMWGSAVYLCYKKSVAKTNTVSYKAGLICRYPQEDYESFSLPESVPLFCLPMGATIECWPSNSKYPLPVFSTFVLTGASAEKVYGAAIQFYEPYSEENLTEKQRLLLGLTSADGKSDSSKTIHTNKCICLLSHWPFFDAFRKFLTFLYRYSISGPHVLPIEKHISHFMHKVPFPSPQRPRILVQLSPHDNLILSQPVSSPLPLSGGKFSTLLQNLGPENAVTLLVFAVTEHKILIHSLRPSVLTSVTEALVSMIFPFHWPCPYVPLCPLALADVLSAPCPFIVGIDSRYFDLYDPPPDVSCVDVDTNTISQIGDKKNVAWKILPKKPCKNLMNTLNNLHQQLAKLQQRPRDDGLMDLAINDYDFNSGKRLHMIDLEIQEAFLFFMASILKGYRSYLRPITQAPSETATDAASLFALQAFLRSRDRSHQKFYNMMTKTQMFIRFIEECSFVSDKDASLAFFDDCVDKVDMDKSGEVRLIELDESFKSEHTVFVTPPEIPHLPNGEEPPLQYSYNGFPVLRNNLFERPEGFLQAKKNKLPSKSSSPNSPLPMFRRTKQEIKSAHKIAKRYSSIPQMWSRCLLRHCYGLWFICLPAYVKVCHSKVRALKTAYDVLKKMQSKKMDPPDEVCYRILMQLCGQYDQPVLAVRVLFEMQKAGIDPNAITYGYYNKAVLESTWPSRSRSGYFLWTKVRNVVLGVTQFKRALKKHAHLSQTTLSGGQSDLGYNSLSKDEVRRGDTSTEDIQEEKDKKGSDCSSLSESESTKGSADCLPKLSYQNSSSIVRLTGTSNNSAGKISGESMGKESTPELLLISSLEDTNETRNIQSRCFRKRHKSDNETNLQQQVVWGNRNRNLSGGVLMGFMLNRINQEATPGDIVEKLGADAKILSNVISKSTRPNTLDIGKPPLRSKRDSLEKESSDDDTPFDGSNYLADKVDSPVIFDLEDLDSETDVSKAGCVATQNPKRIQRMNSSFSVKPFEKTDVATGFDPLSLLVAETEQQQKEEEEEDEDDSKSISTPSARRDLAEEIVMYMNNMSSPLTSRTPSIDLQRACDDKLNKKSPPLVKACRRSSLPPNSPKPVRLTKSKSYTKSEEKPRDRLWSSPAFSPTCPFREESQDTLTHSSPSFNLDTLLVPKLDVLRNSMFTAGKGVAEKASKWYSRFTMYTTSSKDQSSDRTSLSSVGAQDSESTSLTDEDVCHELEGPISSQETSATSGTKRIDLSRISLESSASLEGSLSKFALPGKSEVTSSFNASNTNIFQNYAMEVLISSCSRCRTCDCLVHDEEIMAGWTADDSNLNTTCPFCGNIFLPFLNIEIRDLRRPGRYFLKSSPSTENMHFPSSISSQTRQSCISTSASGLDTSALSVQGNFDLNSKSKLQENFCTRSIQIPANRSKTAMSKCPIFPMARSISTSGPLDKEDTGRQKLISTGSLPATLQGATDSLGLEWHLPSPDPVTVPYLSPLVVWKELESLLENEGDHAITVADFVDHHPIVFWNLVWYFRRLDLPSNLPGLILSSEHCNKYSKIPRHCMSEDSKYVLIQMLWDNMKLHQDPGQPLYILWNAHTQKYPMVHLLQKSDNSFNQELLKSMVKSIKMNDVYGPMSQILETLNKCPHFKRQRSLYREILFLSLVALGRENIDIDAFDKEYKMAYDRLTPSQVKSTHNCDRPPSTGVMECRKTFGEPYL

SEQ ID NO: 3312 - DNA, 2393 bp, Homo sapiens
agcggcagggaggggctcttcacccagtccggcagttgaagctcggcgctcgggttacccctgcagcgacgccccctggtcccacagataccactgctgctcccgccctttcgctcctcggccgcgcaatgggcacccgcgacgacgagtacgactacctctttaaagttgtccttattggagattctggtgttggaaagagtaatctcctgtctcgatttactcgaaatgagtttaatctggaaagcaagagcaccattggagtagagtttgcaacaagaagcatccaggttgatggaaaaacaataaaggcacagatatgggacacagcagggcaagagcgatatcgagctataacatcagcatattatcgtggagctgtaggtgccttattggtttatgacattgctaaacatctcacatatgaaaatgtagagcgatggctgaaagaactgagagatcatgctgatagtaacattgttatcatgcttgtgggcaataagagtgatctacgtcatctcagggcagttcctacagatgaagcaagagcttttgcagaaaagaatggtttgtcattcattgaaacttcggccctagactctacaaatgtagaagctgcttttcagacaattttaacagagatttaccgcattgtttctcagaagcaaatgtcagacagacgcgaaaatgacatgtctccaagcaacaatgtggttcctattcatgttccaccaaccactgaaaacaagccaaaggtgcagtgctgtcagaacatctaaggcatttctcttctcccctagaaggctgtgtatagtccatttcccaggtctgagatttaaatatatttgtaattcttgtgtcacttttgtgttttattacttcatacttatgaatttttccatgtcctaagtcttttgattttagctttataaaatcatccacttgtcccgaatgactgcagctttttttcatgctatggcttcactagccttagtttaataaactgaatgtttggattcctcagttattgtttacttttcatcatggaagcctgtcactgtatgtaggacataatagaacttgatcacttgaagctcagacctattggtcttgatcaaatcaaactaagaagaccttagaaataagctaccattttgccacagagcagcttataggtaatacactcttctctcagtgcagtgtacatttccacaaatctaagaattgccctataaacatagcaggattttgagagcttgaaaattttccattattctggacatgaatttctaaaatgccttaataggtttatgtagttgagtaaattttgttttttaatttttgtaagcatcaaagttgattagagaggggggcactttttctggagaattctcttagtaaacacaaaagattgttacggtttcattagtagtatggttgtggggccataagttaaacagtgctgcctggtaggctgggaactgaagagacttgtggtattccatctcgggtgcctctgttggcaatgatcaggcagcccaaaagatttaaatgatctataataatttccaagcggtagattatgtggcattttattgctcaggcaataattggtttaatgctggtagtgtcaaattttgaagtgttaattttgtcttagaaccttccagtaagtgaaatacaacctagttttatcaccatatccaccagcaggcatggataattattttaacaatgctaatatttgagttttgcagtatattatagaatatagtccagttaaatctttggtttcagtatgtctgaagagtacagtgagaggttaatttctgctcaagtggtaccacttaaaggcatgtattcttttagtatgtaaaatgaaatagtaccttgagtttaaatagaatgcatttaggcattgtagagatctgaaatagttttcttccactacattgttgaaatcaatgaagcaattagtttctcattcagaaatgtgcacactaatatttagttttgctttctcgtggataatattaagcacttactctgcagtttcctggaagttgtgtcaactgcagtgatactattcaggatggtgggaaatccccaaaaatatgtatgtgtgggcttgcttagattactatatttcatagttaatcttttgtctcttgcggtgctcatgatgtgtggggcacacggaaggcattgctgtagtcagtcattttggttttcttctatagccattttattattttagtgtattagttatgaagataatattatctatttgtaaattgctactttgtattttatgcatgctctgtaatttgatttttttttagttattgatttggattatattcacattctaataaacagttatagggggatta

SEQ ID NO: 3313 - protein, 216 aa, Homo sapiens
MGTRDDEYDYLFKVVLIGDSGVGKSNLLSRFTRNEFNLESKSTIGVEFATRSIQVDGKTIKAQIWDTAGQERYRAITSAYYRGAVGALLVYDIAKHLTYENVERWLKELRDHADSNIVIMLVGNKSDLRHLRAVPTDEARAFAEKNGLSFIETSALDSTNVEAAFQTILTEIYRIVSQKQMSDRRENDMSPSNNVVPIHVPPTTENKPKVQCCQNI

SEQ ID NO: 3314 - DNA, 5702 bp, Homo sapiens
gcccgctgcccgccgcccggctcccggctgctcgcggccccctgctcctgcctggcgctctggccaggctcgggctccggaggacaggaccgcgcgactggccggccgatccctgggccggccgcgggagcagctatgctgtgactgtccaggaatcgtatgcacaccccttcgatcagatctattacacacgatgcacagacatcctcaactggttcaagtgcaccaggcaccgccctgtgtacggaggagtgtgtgcacggccgctgcgtttccccggacacctgccactgcgagcctggctggggagggcccgactgctccagcggctgcgacagcgaccactgggggccccactgcagcaaccggtgccagtgccagaacggcgccctgtgtaaccccatcacaggcgcctgcgtgtgcgccgccggcttccgtggatggcgctgcgaggagctctgcgcgcctggcacccacggcaagggatgccagctgccgtgccagtgccgacacggtgccagctgcgacccccgcgccggcgagtgcctctgcgcacctggctacaccggcgtctactgcgaggagctgtgccctcctgggagccatggagctcactgtgagctgcgctgcccctgtcagaatgggggcacctgccaccacatcactggcgagtgtgcctgccccccaggctggacgggagcagtgtgtgcccagccctgcccaccagggacatttggccagaactgcagccaggattgtccttgccaccatggagggcagtgtgaccacgtgactggacagtgccactgtacagctggatacatgggggacaggtgccaagaggagtgccccttcgggtccttcggcttccagtgctcacagcgctgtgactgccacaatggggggcagtgttcacccaccacgggtgcctgcgagtgtgagcctggctacaagggcccacgctgccaggagcgactgtgcccggagggcctgcatggcccaggctgcaccctgccctgcccctgtgacgctgacaacaccatcagctgccacccagtaactggagcttgtacctgccagccaggctggtctggtcaccactgcaatgaatcctgccctgttggctactatggcgatggctgccagctgccttgcacctgtcagaatggcgccgactgccacagcatcactgggggctgcacttgtgctccgggcttcatgggagaggtctgtgccgtttcctgtgcagcagggacctatggccccaactgctcgtccatctgtagctgtaacaatggtggcacctgctccccagtagatggctcctgtacctgcaaggaagggtggcagggcctggactgcaccctgccatgtcccagtgggacgtggggcctgaactgcaacgagagctgcacctgtgccaatggggcagcctgcagccccatagacggctcctgctcctgcactcctggctggctgggagacacctgtgagctgccttgcccggatggcacatttgggctgaactgcagtgaacactgtgactgcagccatgctgatggatgtgaccccgtcacaggccactgctgctgcctggccggatggacaggcatccgctgtgacagcacgtgtccacctggccgctggggccccaactgctctgtctcctgcagctgtgagaatggaggctcctgctccccagaggatgggagctgcgagtgtgcccctggcttccgaggacccttatgccagagaatctgcccccctgggttctatggccacggctgcgcccagccatgccccctctgcgtgcacagcagcaggccctgccaccacatcagcggcatctgtgagtgcctcccaggattctctggagctctctgcaaccaagtgtgtgctggaggatactttgggcaggactgtgcccagctctgctcctgtgccaacaacgggacctgcagccctatcgatggctcctgccagtgctttcctggatggattggcaaggactgctcacaggcttgcccacccgggttctggggccccgcctgcttccacgcatgcagctgccacaacggggcgagctgcagcgccgaggacggggcctgccactgcacccctggctggactggactcttctgcacacagcgctgcccagcagcattttttgggaaggactgtgggcgcgtatgccagtgtcagaatggcgccagctgtgaccacatcagtggcaagtgcacctgccgcacaggcttcaccgggcaacactgtgagcagagatgtgccccaggaacctttggctatgggtgtcagcagctatgtgagtgcatgaacaactccacctgtgaccatgtcaccggcacctgttactgcagccctggcttcaaaggaatcaggtgtgaccaagctgccctcatgatggaggagctgaatccctacaccaagatcagcccagcactgggtgcagagcggcactcggtgggtgctgtcacaggcatcatgctcctgttattcttcattgtggtgctgctgggcctatttgcctggcatcggcggcggcagaaagagaagggccgagacctggctccccgtgtctcctacacacctgccatgaggatgaccagcaccgactactccctctcaggtgcttgtggaatggatagacgtcagaacacatacattatggacaaaggcttcaaagattacatgaaagaatccgtgtgcagttctagtacttgttccttgaatagcagtgaaaacccttacgccacaattaaggacccacccatcctcacctgcaagcttccagaaagcagctatgtagaaatgaagtcgcctgtgcacatggggtctccgtacacagatgtgccatccttgtcgacatctaataaaaatatatatgaagttgagcccacagtcagtgtggtccaagaaggttgcggtcataactccagctatatccagaatgcatacgacctacctaggaacagccatattcctggtcattatgacctcctcccagtaagacagagccctgccaatgggccgtcccaggacaagcaatcttaagagggataagcttctctcttgcagtgtgctctactgaatattctgactctgaaagaagacagtcccttgacttgaagtaatggtacagactggctccagctgcatgttagttattacgttcacctggaactaaagaagagcgtccaggtgggactgggataattgttcaaggaattgtgttctcaaaggcaaatcctatcacccactcagccccaaatgccctggattatatgatttttaaaacattttaagatacagctactcatcaacatcagctaaatatagctgatatatatatatatatttatctgaaacgtgatattttaaaaacatgtaggtttaacaaaccttcctaggacaaaaaggagactggggagggaagaggattactttaaagcacctgaaacgtatatgtacttttggttgctgttaccatcaacatctgttttattaccgaagacaattagtacacagacatgaactgttcttaaacagaacagtcttaaaatgtctgtacatatctgtctggtccatcaaattacaacagccaagattacagaatctatatagtctaatgctgacaacttctattttaaaaaacaagactttactttcttctgccccctaagtgataggtttaaacacacagagacacacacacacgtttccaaagtgcagcagtgtctctttcagtctacaataagattcctagggcagctttatcaaattttgccaattcaaagttcaaggacattacaagttagtcctggctttgtcatatctacttagtccatccgacacctgaatcattccatgtaaaacagagctctaagatgatcctttaagcaagcagtcatagactggtcgggattaagtaaaagacggctagttggcctcctcattttatttggtcagcatcccttgactcaagagtacttgctttcaagttcttcataaatcttgagattgacgtagtatgaaacctaaaagtatacaggaaattggacaaatgtggatacagcaagtttacactgcttaaagtacattatgctttttaatggaactaaatgatcaaaaaaagaatggactgtaaccagttgctgtaacatgatgtaaaaacgttactgtaaacagcatgaggatatgaagtccttccaccttctatcttaaaactactacttactgagctagcccaatatgcattacaatgagctaatgctccagatcccagtattcagatgtgtctataccttccactatgaacacagataaactgaggctcagataagtccaaatgaaatgaaatcaactcccaagccctaaagagaaccttctcacaagaattaaaaacaaaaagggcaaacctaggaagctaacggctactcctgtaccactctattcactggtacagtccagccagtaaaaaacacttccaaaaagatacacagaagaggaactaaatgactgcgaagctggaatactgctacaggaagtatgagagttctgaaacccttgatagaaactggaagcctgccatggaacacaatactttgggcaataatcagaaaaagcaaaaaaataaataaatgagtacatctccccttcccacatcactcaaggcataagcagattttactgttagaggaaaatatgtaatacttacatgaatgttgcatgtgtgcatgggagcaactgagtagcaatagtaaatttactttccaaaaaagccttattaaaatataaatattagaaaattactttggagacccaagtaaatatttctcatacatatgtagaaagaaatataggtaagcagcttacctcagtatttcagggcagcaagtgtttgtgaagcaaggatgagcagcatgaagatgtcagatcagcaaggagaaacttcaactcaatcccaggttttctcttcttcccttatcctgcatgtacaataactgctgcctggcaaactgcaaacaagcagcatcactcaagtttgaagtttcgccgcttttgtcaactatcctctgggcaaaggtattcagcaagaggtggaatggctagacactgaatcaagagatttcagtgttactctggtcaagttagtcgccctctctgggctccctttttttctatgcataaaaaggggagaagcagagagtgggaagacagctctactaacccttcagctctagcagtccatgactttttaaggaaatgtaatacaagtcaaaccaggcaatacagaggagaagggaaaggcagagggtgtgattatggtgacaatagctgccttcccctatcgaacagttatcagtaaaagacatttcaatcttacaaagcaactgttagaaacttctgtctaacaccatcacaaataggttcatggtcagcctaaacatgtatactgtgcattttatgggtgactttgaaagatctgttcaattatttttcagaaactaaattttcaaaaaattaatatgtgtacaattaaaatgaatgaaagaaaaaccattattgtacagaggtattaatgagactatgaaacggcaatacttttttaaatcacagatttgtaatatatgttcactgtgcagagggattgtaccttgtacaaaataaaacaaatttctcaaact

SEQ ID NO: 3315 - protein, 969 aa, Homo sapiens
MHTPSIRSITHDAQTSSTGSSAPGTALCTEECVHGRCVSPDTCHCEPGWGGPDCSSGCDSDHWGPHCSNRCQCQNGALCNPITGACVCAAGFRGWRCEELCAPGTHGKGCQLPCQCRHGASCDPRAGECLCAPGYTGVYCEELCPPGSHGAHCELRCPCQNGGTCHHITGECACPPGWTGAVCAQPCPPGTFGQNCSQDCPCHHGGQCDHVTGQCHCTAGYMGDRCQEECPFGSFGFQCSQRCDCHNGGQCSPTTGACECEPGYKGPRCQERLCPEGLHGPGCTLPCPCDADNTISCHPVTGACTCQPGWSGHHCNESCPVGYYGDGCQLPCTCQNGADCHSITGGCTCAPGFMGEVCAVSCAAGTYGPNCSSICSCNNGGTCSPVDGSCTCKEGWQGLDCTLPCPSGTWGLNCNESCTCANGAACSPIDGSCSCTPGWLGDTCELPCPDGTFGLNCSEHCDCSHADGCDPVTGHCCCLAGWTGIRCDSTCPPGRWGPNCSVSCSCENGGSCSPEDGSCECAPGFRGPLCQRICPPGFYGHGCAQPCPLCVHSSRPCHHISGICECLPGFSGALCNQVCAGGYFGQDCAQLCSCANNGTCSPIDGSCQCFPGWIGKDCSQACPPGFWGPACFHACSCHNGASCSAEDGACHCTPGWTGLFCTQRCPAAFFGKDCGRVCQCQNGASCDHISGKCTCRTGFTGQHCEQRCAPGTFGYGCQQLCECMNNSTCDHVTGTCYCSPGFKGIRCDQAALMMEELNPYTKISPALGAERHSVGAVTGIMLLLFFIVVLLGLFAWHRRRQKEKGRDLAPRVSYTPAMRMTSTDYSLSGACGMDRRQNTYIMDKGFKDYMKESVCSSSTCSLNSSENPYATIKDPPILTCKLPESSYVEMKSPVHMGSPYTDVPSLSTSNKNIYEVEPTVSVVQEGCGHNSSYIQNAYDLPRNSHIPGHYDLLPVRQSPANGPSQDKQS

SEQ ID NO: 3316 - DNA, 3302 bp, Homo sapiens
gcccccgctccgccgcggagtttctgcatgactgtcacaaagatgtcctggcgtccgcaataccgtagctccaagttccggaatgtctacgggaaggtggccaaccgggagcactgcttcgatgggatccccatcaccaagaatgtgcacgacaaccacttctgtgccgtcaacacccgcttcctggccatcgtcaccgagagcgcagggggcggctccttcctcgtcatccccctggagcagacaggcaggattgaacccaactaccccaaggtctgcggccaccagggcaatgtgctggatatcaaatggaaccccttcatcgacaacatcattgcctcgtgctcggaggacacgtcggtgcggatctgggagatccccgagggcgggctgaagcggaacatgacggaggcgctcctggagctgcacgggcacagccggcgtgtggggctggtcgagtggcaccccaccaccaacaacatcctgttcagcgctggctacgactacaaggtcctcatctggaacctggatgtgggtgagccggtgaagatgattgactgccacacggatgtgatcctctgcatgtccttcaacacggacggcagcctgctcaccaccacgtgcaaggacaagaagctgcgtgtgattgagccccgctctggccgtgttctgcaggaggccaactgcaaaaaccacagagtgaaccgggtggtgttcctggggaacatgaagcggctcctcacgacaggggtctccaggtggaacacaagacagattgccctctgggaccaggaggacctctccatgcccctgatcgaagaggaaattgatgggctctctggcctcctgttccccttctatgatgctgacacccacatgctctacctggctggaaagggtgatggaaacatccggtactacgagatcagcactgagaagccctacctgagttacctcatggagttccgctccccagccccgcagaaaggcctaggggtcatgcccaagcacgggctggatgtgtcagcctgcgaggtgttccgcttctacaagctggtgactctcaagggcctgatcgagcccatctccatgatcgtgccccggaggtcagattcctaccaggaagacatttacccaatgacaccaggcacggagccagcactgaccccggatgaatggctgggaggcatcaaccgagatcccgtgctgatgtctttgaaagaaggctataagaagtcctcaaaaatggtatttaaggctcccatcaaagaaaagaagagtgttgtggtcaacggaatagatttattagaaaatgtcccacccaggacagagaatgagctccttcgaatgttcttccggcagcaggatgagattcgacggttgaaagaggagctggcccagaaggacatccgcattcggcagctccagctggaactgaaaaacttgcgcaacagccccaagaactgttagctccccagctgggctgttttctaagccgatctctccgtcgtttctactcatcccttaacttctcccttaccagtgaccccagagacagagccaggacaggagtgggggccagcctgaggacccccgcctaccacctcgagaactggaagccaacctctaacctcctgacctcatgctaataaaagtccccagcttctggagaccccctgccggcagcccctttccctgccaccccaggagccaggcttcccctcagctgggtgaagactacagactccctggggttggcaggggctccatctcagtggaccaggaagcaagaggggaagcgggatcccagctagacttagaacttggacttttcccctgtgaagggggctgccaggacatctcagcactcccgcctggagctctcagcatcactgaaggtaccacagtgtaagtgctggactgcaggctgcagtgatccctctttcgtcccaccccctcttccctcagcagccccggaagcctgcctcacccgacgaggacagcgagcggcccggctcctttctgtctcttcccttcccaccctcttgtcttcagggaattcagaggattgctctccaaggccataatgaccccttgccttccccatgattctctacaaagctcttgcacacccttttcccattcaatttgtgagccaggcagggtagggattagtgtccccctttgacaaatgacagaactgagggttgcaatggggaaatgacttataaagtcacccagcaggtcaacaatgggcccacgaccaagaccctgggtgttcagaccccaaggccagggcctttcccgctgcatcaagatgccaatccctttgtgggcttcaccagtgcccaagtctctatggagaatgagaactggaagccactgctaccgtctacccagcaccagtagtgccgatgtgccacactgcccagttgaggcccctcacgctctgtgcccctagatccttcaggtccccaccctcagctgtcaccaccaccctccccaggggactccatctgagatgaggcctcgtcctcctggaagctgaggctgagaagggtggagcttggccctggggaaggcagaccagggtctgatggcttctagggatgctctgcgtgtgtctcagcaccgctatctcagccactttcagccttatgcacgtagaatgaccacagccactcgcatccgtatagcactttaaagtttctgcagtcctttgacacataggatctcatggagcctcacgtctactcccttctgcagatgaggaaaccgagagaagtggcccaaggtcacgcaactctgagatgccacatttcatttgatcttgtacacattttcttttattccttcttttttcctcctttcatttcccactacgcacaaagagtttataaacactgttctcagaagagtcacagtttggggtgagatctggaaatcaagaaatgggtgtccactcttttctttcattagctaggatctactagatgcattatactccatacctgcttttcccatggccgccctacggaaaatcccatccacagaggccagggctacccaagcccctccaggtgagctgggcctttcctttatgaacctccatcctcccagccagctacagtagggcctcctcaccccgtaccccacagctagacagtgtcagcactcatctcctcctcccacatttctggagcttttttttttccttccccattgacctttgtggtcttctgtgattatttatgctgcctcccaaggatagaattgaaataaaatgttttcaacttatcaaa

SEQ ID NO: 3317 - protein, 475 aa, Homo sapiens
MSWRPQYRSSKFRNVYGKVANREHCFDGIPITKNVHDNHFCAVNTRFLAIVTESAGGGSFLVIPLEQTGRIEPNYPKVCGHQGNVLDIKWNPFIDNIIASCSEDTSVRIWEIPEGGLKRNMTEALLELHGHSRRVGLVEWHPTTNNILFSAGYDYKVLIWNLDVGEPVKMIDCHTDVILCMSFNTDGSLLTTTCKDKKLRVIEPRSGRVLQEANCKNHRVNRVVFLGNMKRLLTTGVSRWNTRQIALWDQEDLSMPLIEEEIDGLSGLLFPFYDADTHMLYLAGKGDGNIRYYEISTEKPYLSYLMEFRSPAPQKGLGVMPKHGLDVSACEVFRFYKLVTLKGLIEPISMIVPRRSDSYQEDIYPMTPGTEPALTPDEWLGGINRDPVLMSLKEGYKKSSKMVFKAPIKEKKSVVVNGIDLLENVPPRTENELLRMFFRQQDEIRRLKEELAQKDIRIRQLQLELKNLRNSPKNC

SEQ ID NO: 3318 - DNA, 1136 bp, Homo sapiens
cgggtgctgggggctcgagaaccgagcggagctggttgagccttcaaagtcctaaaacgcgcggccgtgggttcggggtttattgattgaattccgccggcgcgggagcctctgcagagagagagcgcgagagatggagatgggcagacggattcatttagagctgcggaacaggacgccctctgatgtgaaagaacttgtcctggacaacagtcggtcgaatgaaggcaaactcgaaggcctcacagatgaatttgaagaactggaattcttaagtacaatcaacgtaggcctcacctcaatcgcaaacttaccaaagttaaacaaacttaagaagcttgaactaagcgataacagagtctcagggggcctggaagtattggcagaaaagtgtccgaacctcacgcatctaaatttaagtggcaacaaaattaaagacctcagcacaatagagccactgaaaaagttagaaaacctcaagagcttagaccttttcaattgcgaggtaaccaacctgaacgactaccgagaaaatgtgttcaagctcctcccgcaactcacatatctcgacggctatgaccgggacgacaaggaggcccctgactcggatgctgagggctacgtggagggcctggatgatgaggaggaggatgaggatgaggaggagtatgatgaagatgctcaggtagtggaagacgaggaggacgaggatgaggaggaggaaggtgaagaggaggacgtgagtggagaggaggaggaggatgaagaaggttataacgatggagaggtagatgacgaggaagatgaagaagagcttggtgaagaagaaaggggtcagaagcgaaaacgagaacctgaagatgagggagaagatgatgactaagtggaataacctattttgaaaaattcctattgtgatttgactgtttttacccatatcccctctcccccccccctccaatcctgccccctgaaacttatttttttctgattgtaacgttgctgtgggaacgagaggggaagagtgtactgggggttgcggggggagggatggcgggtgggggtggaataaaatactatttttactgccactctttaaaaaaaaaaaaaaaaaaaaaaaaaaaaaaaaaaaaaaa

SEQ ID NO: 3319 - protein, 249 aa, Homo sapiens
MEMGRRIHLELRNRTPSDVKELVLDNSRSNEGKLEGLTDEFEELEFLSTINVGLTSIANLPKLNKLKKLELSDNRVSGGLEVLAEKCPNLTHLNLSGNKIKDLSTIEPLKKLENLKSLDLFNCEVTNLNDYRENVFKLLPQLTYLDGYDRDDKEAPDSDAEGYVEGLDDEEEDEDEEEYDEDAQVVEDEEDEDEEEEGEEEDVSGEEEEDEEGYNDGEVDDEEDEEELGEEERGQKRKREPEDEGEDDD

SEQ ID NO: 3320 - DNA, 2357 bp, Homo sapiens
gaatcacgacccctccctgccatgtatccgcagggcagacatccggctccccatcaacccgggcagccgggatttaaattcacggtggctgagtcttgtgacaggatcaaagacgaattccagttcctgcaagctcagtatcacagcctcaaagtggagtacgacaagctggcaaacgagaagacggagatgcagcgccattatgtgatgtactatgagatgtcctatggcttgaacattgaaatgcacaagcagacagagattgcgaagagactgaacacaattttagcacagatcatgcctttcctgtcacaagagcaccagcagcaggtggcgcaggcagtggagcgcgccaagcaggtcaccatgacggagctgaacgccatcatcgggcagcagcagctccaggcgcagcacctctcccatgccacacacggccccccggtccagttgccaccccacccgtcaggtctccagcctccaggaatccccccagtgacagggagcagctccgggctgctggcactgggcgccctgggcagccaggcccatctgacggtgaaggatgagaagaaccaccatgaactcgatcacagagagagagaatccagtgcgaataactctgtgtcaccctcggaaagcctccgggccagtgagaagcaccggggctctgcggactacagcatggaagccaagaagcggaaggtggaggagaaggacagcttgagccgatacgacagtgatggagacaagagtgatgatctggtggtggatgtttccaatgaggaccccgcaacgccccgggtcagcccggcacactcccctcctgaaaatgggctggacaaggcccgtagcctgaaaaaagatgcccccaccagccctgcctcggtggcctcttccagtagcacaccttcctccaagaccaaagaccttggtcataacgacaaatcctccacccctgggctcaagtccaacacaccaaccccaaggaacgacgccccaactccaggcaccagcacgaccccagggctcaggtcgatgccgggtaaacctccgggcatggacccgataggtataatggcctcggctctgcgcacgcccatctccatcaccagctcctatgcggcgcccttcgccatgatgagccaccatgagatgaacggctccctcaccagtcctggcgcctacgccggcctccacaacatcccaccccagatgagcgccgccgccgctgctgcagccgctgcctatggccgatcgccaatggtgagctttggagctgttggttttgaccctcaccccccgatgcgggccacaggcctcccctcaagcctggcctccattcctggaggaaaaccagcgtactcattccatgtgagtgctgatgggcagatgcagcccgtgcccttcccccacgacgccctggcaggccccggcatcccgaggcacgcccggcagatcaacacactcagccacgggggggtggtgtgtgccgtgaccatcagcaaccccagcaggcacgtctacacaggtggcaagggctgcgtgaagatctgggacatcagccagccaggcagcaagagccccatctcccagctggactgcctgaacagggacaattacatgcgctcctgcaagctgcaccctgatgggcgcacgctcatcgtgggcggcgagggcagcacgctcaccatctgggacctggcctcgcccacgccccgcatcaaggccgagctgacgtcctcggctcccgcctgttatgccctggccattagccctgacgccaaagtctgcttctcctgctgcagcgatgggaacattgctgtctgggacctgcacaaccagaccctggtcaggcagttccagggccacacagatggggccagctgcatagacatctcccatgatggcaccaaactgtggacagggggcctggacaacacggtgcgctcctgggacctgcgggagggccgacagctacagcagcatgacttcacttcccagatcttctcgctgggctactgccccactggggagtggctggctgtgggcatggagagcagcaacgtggaggtgctgcaccacaccaagcctcacaagtaccagctgcacctgcacgagagctgcgtgctctccctcaagttcgcctactgcggcaagtggttcgtgagcactgggaaagataaccttctcaacgcctggaggacgccttatggagccagcatatcccagtctaaagaatcctcgtctgtcttgagttgtgacatttcagcggatgacaaatacattgtaacaggctctggtgacaagaaggccacagtttatgaggtcatctactaaacaagaactccagcagg

SEQ ID NO: 3321 - protein, 772 aa, Homo sapiens
MYPQGRHPAPHQPGQPGFKFTVAESCDRIKDEFQFLQAQYHSLKVEYDKLANEKTEMQRHYVMYYEMSYGLNIEMHKQTEIAKRLNTILAQIMPFLSQEHQQQVAQAVERAKQVTMTELNAIIGQQQLQAQHLSHATHGPPVQLPPHPSGLQPPGIPPVTGSSSGLLALGALGSQAHLTVKDEKNHHELDHRERESSANNSVSPSESLRASEKHRGSADYSMEAKKRKVEEKDSLSRYDSDGDKSDDLVVDVSNEDPATPRVSPAHSPPENGLDKARSLKKDAPTSPASVASSSSTPSSKTKDLGHNDKSSTPGLKSNTPTPRNDAPTPGTSTTPGLRSMPGKPPGMDPIGIMASALRTPISITSSYAAPFAMMSHHEMNGSLTSPGAYAGLHNIPPQMSAAAAAAAAAYGRSPMVSFGAVGFDPHPPMRATGLPSSLASIPGGKPAYSFHVSADGQMQPVPFPHDALAGPGIPRHARQINTLSHGGVVCAVTISNPSRHVYTGGKGCVKIWDISQPGSKSPISQLDCLNRDNYMRSCKLHPDGRTLIVGGEGSTLTIWDLASPTPRIKAELTSSAPACYALAISPDAKVCFSCCSDGNIAVWDLHNQTLVRQFQGHTDGASCIDISHDGTKLWTGGLDNTVRSWDLREGRQLQQHDFTSQIFSLGYCPTGEWLAVGMESSNVEVLHHTKPHKYQLHLHESCVLSLKFAYCGKWFVSTGKDNLLNAWRTPYGASISQSKESSSVLSCDISADDKYIVTGSGDKKATVYEVIY

SEQ ID NO: 3322 - DNA, 1614 bp, Homo sapiens
atggcccagtcgcctcctccgcagagcctcctcggccacgaccactggatcttcgcccagggctggggctgggccggccactgggactccacgtccccggcctcctcctccgattcgtcgggttcgtgcccctgcgacggcgcccgcggactcccgcagccacagcctccgagctgcagctcccgagccgcagaggcagccgcgacgacgcccagacgagcgcgcaccggaccagcgggcggacagcggcagagcgccagcgagcgggagaaactgcgcatgcgcacgctggcccgcgccctgcacgagttgcgccgctttctgcctccctccttggcgccggccggccagagcctgaccaagatcgagacgctgcgcctggccatccgctacatcggccacctatcggccgtgctgggtctcagcgaggagagtctgcagtgccggcgcaggcagcgcggggacgcggggtccccttggggctgcccgctgtgccccgaccgtggccccgcagaggcgcagacgcaggcggaggggcaggggcaagggcaggggcaggggcaggggcaagggcaggggcaaggacaggggcaaggacaggggcaagggcaggggcgcaggccgggcctggtctccgccgtcctcgccgaggcgtcctggggatccccgtccgcctgccccggagcccaagccgcacccgagcgcctggggaggggggtccacgacacggatccctgggcaacacccccttactgccccaagatacagtcgcccccgtattcgtcccaagggacaacctccgacgcgtctctttggacgccaccccaaggctgtccctggacgcagtcgtccccagagccccggaacccaccagtgccctggacggcggccccagcaactttggagctggccgcagtgtaccagggtctctctgtgtctccagagccctgtctgtcgctgggagctccatctctcctgccccacccatcatgccagagactgcagcctcagacccccgggaggtgctggagccacagtgcagaggtggtgcccaactcagaggaccagggaccgggcgccgccttccagctcagtgaagcaagccctccccagagctcaggcctgcggttcagtggctgccctgaactttggcaagaagatctggagggggcccgcctgggcatcttctactaaatggcctcggcttccctctttccatccaggaatcagtcctgtagcttgggtgcctccttatttgttaattagtggcttttcatgttctcctttagccaaggctccctttttccaagtgatgtctttcagggaagcagtgtttgaaatagatagcgggtaccttccctggatggagtcagggcgggggcactgtcctccactgctagacacccccagaatgcctggcgctctgcagagcacagtctgagctgctctaagaaggggtctcctttaccctaaaggcagctgggcagggacaggtgggagaatgggtgtaggaggcaggccccaggctctgcttcttggtgacagttggccagagccctgtatgctttgatttttttgtacttaaaaagaaaaaacacacacacacaacaaaaa

SEQ ID NO: 3323 - protein, 397 aa, Homo sapiens
MAQSPPPQSLLGHDHWIFAQGWGWAGHWDSTSPASSSDSSGSCPCDGARGLPQPQPPSCSSRAAEAAATTPRRARTGPAGGQRQSASEREKLRMRTLARALHELRRFLPPSLAPAGQSLTKIETLRLAIRYIGHLSAVLGLSEESLQCRRRQRGDAGSPWGCPLCPDRGPAEAQTQAEGQGQGQGQGQGQGQGQGQGQGQGQGQGRRPGLVSAVLAEASWGSPSACPGAQAAPERLGRGVHDTDPWATPPYCPKIQSPPYSSQGTTSDASLWTPPQGCPWTQSSPEPRNPPVPWTAAPATLELAAVYQGLSVSPEPCLSLGAPSLLPHPSCQRLQPQTPGRCWSHSAEVVPNSEDQGPGAAFQLSEASPPQSSGLRFSGCPELWQEDLEGARLGIFY

SEQ ID NO: 3324 - DNA, 3494 bp, Homo sapiens
taatttttgcccagtctgcctgttgtggggctcctcccctttggggatataagcccggcctggggctgctccgttctctgcctggcctgaggctccctgagccgcctccccaccatcaccatggccaagggcttctatatttccaagtccctgggcatcctggggatcctcctgggcgtggcagccgtgtgcacaatcatcgcactgtcagtggtgtactcccaggagaagaacaagaacgccaacagctcccccgtggcctccaccaccccgtccgcctcagccaccaccaaccccgcctcggccaccaccttggaccaaagtaaagcgtggaatcgttaccgcctccccaacacgctgaaacccgattcctaccaggtgacgctgagaccgtacctcacccccaatgacaggggcctgtacgtttttaagggctccagcaccgtccgtttcacctgcaaggaggccactgacgtcatcatcatccacagcaagaagctcaactacaccctcagccaggggcacagggtggtcctgcgtggtgtgggaggctcccagccccccgacattgacaagactgagctggtggagcccaccgagtacctggtggtgcacctcaagggctccctggtgaaggacagccagtatgagatggacagcgagttcgagggggagttggcagatgacctggcgggcttctaccgcagcgagtacatggagggcaatgtcagaaaggtggtggccactacacagatgcaggctgcagatgcccggaagtccttcccatgcttcgatgagccggccatgaaggccgagttcaacatcacgcttatccaccccaaggacctgacagccctgtccaacatgcttcccaaaggtcccagcaccccacttccagaagaccccaactggaatgtcactgagttccacaccacgcccaagatgtccacgtacttgctggccttcattgtcagtgagttcgactacgtggagaagcaggcatccaatggtgtcttgatccggatctgggcccggcccagtgccattgcggcgggccacggcgattatgccctgaacgtgacgggccccatccttaacttctttgctggtcattatgacacaccctacccactcccaaaatcagaccagattggcctgccagacttcaacgccggcgccatggagaactggggactggtgacctaccgggagaactccctgctgttcgaccccctgtcctcctccagcagcaacaaggagcgggtggtcactgtgattgctcatgagctggcccaccagtggttcgggaacctggtgaccatagagtggtggaatgacctgtggctgaacgagggcttcgcctcctacgtggagtacctgggtgctgactatgcggagcccacctggaacttgaaagacctcatggtgctgaatgatgtgtaccgcgtgatggcagtggatgcactggcctcctcccacccgctgtccacacccgcctcggagatcaacacgccggcccagatcagtgagctgtttgacgccatctcctacagcaagggcgcctcagtcctcaggatgctctccagcttcctgtccgaggacgtattcaagcagggcctggcgtcctacctccacacctttgcctaccagaacaccatctacctgaacctgtgggaccacctgcaggaggctgtgaacaaccggtccatccaactccccaccaccgtgcgggacatcatgaaccgctggaccctgcagatgggcttcccggtcatcacggtggataccagcacggggaccctttcccaggagcacttcctccttgaccccgattccaatgttacccgcccctcagaattcaactacgtgtggattgtgcccatcacatccatcagagatggcagacagcagcaggactactggctgatagatgtaagagcccagaacgatctcttcagcacatcaggcaatgagtgggtcctgctgaacctcaatgtgacgggctattaccgggtgaactacgacgaagagaactggaggaagattcagactcagctgcagagagaccactcggccatccctgtcatcaatcgggcacagatcattaatgacgccttcaacctggccagtgcccataaggtccctgtcactctggcgctgaacaacaccctcttcctgattgaagagagacagtacatgccctgggaggccgccctgagcagcctgagctacttcaagctcatgtttgaccgctccgaggtctatggccccatgaagaactacctgaagaagcaggtcacacccctcttcattcacttcagaaataataccaacaactggagggagatcccagaaaacctgatggaccagtacagcgaggttaatgccatcagcaccgcctgctccaacggagttccagagtgtgaggagatggtctctggccttttcaagcagtggatggagaaccccaataataacccgatccaccccaacctgcggtccaccgtctactgcaacgctatcgcccagggcggggaggaggagtgggacttcgcctgggagcagttccgaaatgccacactggtcaatgaggctgacaagctccgggcagccctggcctgcagcaaagagttgtggatcctgaacaggtacctgagctacaccctgaacccggacttaatccggaagcaggacgccacctctaccatcatcagcattaccaacaacgtcattgggcaaggtctggtctgggactttgtccagagcaactggaagaagctttttaacgattatggtggtggctcgttctccttctccaacctcatccaggcagtgacacgacgattctccaccgagtatgagctgcagcagctggagcagttcaagaaggacaacgaggaaacaggcttcggctcaggcacccgggccctggagcaagccctggagaagacgaaagccaacatcaagtgggtgaaggagaacaaggaggtggtgctccagtggttcacagaaaacagcaaatagtccccagcccttgaagtcacccggccccgatgcaaggtgcccacatgtgtccatcccagcggctggtgcagggcctccattcctggagcccgaggcaccagtgtcctcccctcaaggacaaagtctccagcccacgttctctctgcctgtgagccagtctagttcctgatgacccaggctgcctgagcacctcccagcccctgcccctcatgccaaccccgccctaggcctggcatggcacctgtcgcccagtgccctggggctgatctcagggaagcccagctccagggccagatgagcagaagctctcgatggacaatgaacggccttgctgggggccgccctgtaccctctttcacctttccctaaagaccctaaatctgaggaatcaacagggcagcagatctgtatatttttttctaagagaaaatgtaaataaaggatttctagatgaaaaaaaaaaaaaaaaa

SEQ ID NO: 3325 - protein, 967 aa, Homo sapiens
MAKGFYISKSLGILGILLGVAAVCTIIALSVVYSQEKNKNANSSPVASTTPSASATTNPASATTLDQSKAWNRYRLPNTLKPDSYQVTLRPYLTPNDRGLYVFKGSSTVRFTCKEATDVIIIHSKKLNYTLSQGHRVVLRGVGGSQPPDIDKTELVEPTEYLVVHLKGSLVKDSQYEMDSEFEGELADDLAGFYRSEYMEGNVRKVVATTQMQAADARKSFPCFDEPAMKAEFNITLIHPKDLTALSNMLPKGPSTPLPEDPNWNVTEFHTTPKMSTYLLAFIVSEFDYVEKQASNGVLIRIWARPSAIAAGHGDYALNVTGPILNFFAGHYDTPYPLPKSDQIGLPDFNAGAMENWGLVTYRENSLLFDPLSSSSSNKERVVTVIAHELAHQWFGNLVTIEWWNDLWLNEGFASYVEYLGADYAEPTWNLKDLMVLNDVYRVMAVDALASSHPLSTPASEINTPAQISELFDAISYSKGASVLRMLSSFLSEDVFKQGLASYLHTFAYQNTIYLNLWDHLQEAVNNRSIQLPTTVRDIMNRWTLQMGFPVITVDTSTGTLSQEHFLLDPDSNVTRPSEFNYVWIVPITSIRDGRQQQDYWLIDVRAQNDLFSTSGNEWVLLNLNVTGYYRVNYDEENWRKIQTQLQRDHSAIPVINRAQIINDAFNLASAHKVPVTLALNNTLFLIEERQYMPWEAALSSLSYFKLMFDRSEVYGPMKNYLKKQVTPLFIHFRNNTNNWREIPENLMDQYSEVNAISTACSNGVPECEEMVSGLFKQWMENPNNNPIHPNLRSTVYCNAIAQGGEEEWDFAWEQFRNATLVNEADKLRAALACSKELWILNRYLSYTLNPDLIRKQDATSTIISITNNVIGQGLVWDFVQSNWKKLFNDYGGGSFSFSNLIQAVTRRFSTEYELQQLEQFKKDNEETGFGSGTRALEQALEKTKANIKWVKENKEVVLQWFTENSK

SEQ ID NO: 3326 - DNA, 2578 bp, Homo sapiens
agagaaccgtggctggcaaagatgattcaggcgattctggttttcaacaaccatgggaagccacggctagtccgcttctaccagcgtttcccagaagaaattcaacagcagattgttcgagagactttccatctagtcctcaagcgggatgacaacatctgtaacttcttggagggtggaagtttgattggtggctctgactacaaactgatctaccggcactatgctaccctctactttgtattttgtgtggattcctcagagagtgaacttggaatcttggacctcatccaggtttttgtggaaactctggataagtgtttcgaaaatgtgtgtgaattggatttgatcttccatatggataaggtgcactacatcctccaggaggtggtgatgggtgggatggtgttggaaacaaacatgaatgaaatcgtggctcagattgaggctcaaaacaggctggagaaatccgagggtggcctttcagcagcccctgcgcgggctgtgtctgctgtgaaaaacatcaacctgccagagattcctcggaacatcaacattggcgatctcaacatcaaagttcccaacctgtcccagtttgtctgaggatcaagtattggcctgaaatagagtccttaagacaagcaaagacaagcaaggcaagcacgtctggaaacagaacccattttgagccttagaagagtcaagcctcaggacctggaaactttgtgtctggggaagactgtttggcatggaatagggaagggattcctattgacactgctcgggtgcacccagttctcacatgtgcagtcatgccgttctctgatgcatacggccactgcagatgtgaggggccctgccttcctcagtagggagtcaacatgcccaagtcatttgcacctttacctctcacatggatgctcccaagggttagggactgcattgagcaggcccacctgcttcccagaacctcctcactagggctgagcaccttctctgagtagagtcttcatccttagcaccacagacttctgaggtcctgtgccctttacttgctggtgaggtgtcataggtagaaaagggctggcccttcagatctgggggtgtggtgagtggcaagtaagggcagaattttaggagaaccagagtcacccgctggctctactgagattgttacacccagaatccttttgtgtttttttgtggtttttttttttgaggtggagtcttgctctgtcacccaggctggagtgctgtggtgcaatctcggctcactgcaacctctgcttcccgggttcaagcatttctcctgtctcagcctccccagtagctgggattacaggcacccaccaccatgcccagctaattgttgtatgtttagtagagacagggtttcaccatgttggccaggctgggcccgaactcctggacctcaagtgatctacccgccttggcctcccaaagtgctggcattacaggtgtgagccaccgtgcccggccaccagaatcctttggtatagccaagccttttggttaccgcctcatgaagaatatgcttcccgcattgtcctagtcccagttgtattctcacaggtgttatgtgcaggacacaatccaaatcataaacctggctcatgcccaacacatttctgctaatagggagagggacccaccacacacccacacatgccagaggtccctcctcacagaggagagggcctgtgtctgtagaaggttaaagctgacaacatgtgaaacatcccagaattatgactcttcccaagtttaaaatacattctcctcatgagagcagaaggtttgttgctgtgttgtgaatgatgagctgcctccatagggaacccactgccacctgggccagcttctggagcatgagaacctgagccagggtcacccttgtggggcctggacatgacgcacgctggctgcgactaggagcagggctgcctcttctccctccccaaggtctgcttgtgggcacgctctgttccctcaggtgccattctcccagggcttaggcgcccataaatgttctttctgtggtggagtagggcctcctgcttccatactgtcgcatgggctagatctcaggtgtggtgttgagccaccttaagatgagggctgcttcgcagtaaagtttccagcctgggcccctcttgggccttctggctggggaccctcagcctcctgatgctgttgcagggcaggtctgagagggtgcccagcagcacccggtgtcagggccaccttgttttccatttttgaacagcgctccctgtggtttgtgcccactgctcaatacagcctccgatcctcactcttgaaagctccatgataagcacagagatgggcagtgtgggtcagaaggtgggccgcttcctgtggaagagggaagtgtaggtgaatagatatcaaaacccctgatgtcattcttttgaggggttggattttcttttttctggcagacatttcagtacattcacatttctctcacatttgctgaatgtgagatcagaataaaggagatcggcgtttatttcgtaaaaaaaaaaaaaaaaaa

SEQ ID NO: 3327 - protein, 193 aa, Homo sapiens
MIQAILVFNNHGKPRLVRFYQRFPEEIQQQIVRETFHLVLKRDDNICNFLEGGSLIGGSDYKLIYRHYATLYFVFCVDSSESELGILDLIQVFVETLDKCFENVCELDLIFHMDKVHYILQEVVMGGMVLETNMNEIVAQIEAQNRLEKSEGGLSAAPARAVSAVKNINLPEIPRNINIGDLNIKVPNLSQFV

SEQ ID NO: 3328 - DNA, 2065 bp, Homo sapiens
cgcgggtccccgcgcgtcctgcagcacttcccgcgccgcgcccccagcccagtgcgccggctctgtgccggggtgcccgggcggtcgggagaatgagccgcatctaccacgacggcgcgctccggaacaaggcggtgcagagcgtccggctgccaggggcctgggaccccgccgcccaccaggggggaaatggtgtcctgctggagggagaactgatcgatgtatctcggcacagcatcttggacactcatggcaggaaggagcgctactacgtgctgtatatccggcccagtcacatccatcgccgtaaattcgacgccaagggaaatgaaatcgagcccaacttcagcgccaccaggaaggtgaacacgggcttcctcatgtcgtcctacaaggtggaagccaagggggacactgacaggctcacgcccgaggcgctgaaggggctggtcaacaagccagagctgctcgcgctgacagagagcctcacccccgaccacacagtggcgttctggatgcccgagtcagagatggaggtgatggaactcgagctgggggccggggtacggctgaagactcggggcgatggtcccttcctggattcattggccaaacttgaggctggaacagtgaccaagtgtaatttcactggtgatggaaagacaggggcatcctggacagacaacatcatggcccaaaagtgttcgaagggggctgcagcggagatccgagagcagggggatggggcagaggacgaggagtgggatgactgagggacgtggctgcctctgggggcaccagcaccttctgtagcattgtggaacatttcttccatgaacttctactctggagctggagagaacagtctgccaagtcttacctggttcttccccatagccaccttggaatactctttgaacaagctctgctaaaaccaaacccatgaccactgtgttggtggtggggcctcatgctgtggctcagggagggcccctccctgcatgtgagtctagccttcctagacattacatgatgaccctttaaaaaaaaattagagatggaggtctcactgtgttgcccaggctgatctcgaactcctggactcaagcgatccacccacctccacctcccaaggtgttgggattacaggcgtgagccaccgcacccagcctcatgttgaccctggccctggatagcagctttgtttgtagaggcaggtggtgggagagaccctaggacagcctgagagtaactggacctggtattggtgcggagtggggaatatcccttgtctaaatgcagagcagctgagagaagttagcggggctcttcctccgttctcattgtttcctgctttccttccccacccaccccttcctcagcactctgtgttgtagcctgtactatcctgcttcaagcctccgtgtcccttgtaccttccccctaccttgagttgccagttctttactccctcaaatgttcccatgccacctctggggtttctgttatctgacatccctggctgctttcctggtagatgccattcccagagaggccaacagcgttcccaggcgtggctggctggtccgcatctctcagactcactctgccaggctacagttttgagaataccttttttgttgttgttttgtacctggagaactttttatgaatgagtaaatcttcagaaaggaattcctccacccttactgggttattgtcaggtgtaaacggcctttcagctgagcaatgttcctatgagaaggaagccatttctcttggctcatgaacactgccttttgggtagtatacccacacccagatctgtgaagagacctggaattgaagtctccatgtcgtcaggacttggtggcatgtggatcttgcttgacttgggaaaagagagggtggtggtgaactaataattatggagtccccctaatgtgtcgaacacaatgctagatgattaaaaaaaaaaaaaaaaaaaaaaaaaaaaaaaaaaaaaaaaaaaaaaaaaaaaaaaaaaaaaaaaaaaaaaaaaaaaaaaaaaaaaaaaaaaaaaaaa

SEQ ID NO: 3329 - protein, 226 aa, Homo sapiens
MSRIYHDGALRNKAVQSVRLPGAWDPAAHQGGNGVLLEGELIDVSRHSILDTHGRKERYYVLYIRPSHIHRRKFDAKGNEIEPNFSATRKVNTGFLMSSYKVEAKGDTDRLTPEALKGLVNKPELLALTESLTPDHTVAFWMPESEMEVMELELGAGVRLKTRGDGPFLDSLAKLEAGTVTKCNFTGDGKTGASWTDNIMAQKCSKGAAAEIREQGDGAEDEEWDD

SEQ ID NO: 3330 - DNA, 3082 bp, Homo sapiens
agcagcagcccgggcggtgggcagccaggagcccccggcccggcccggcccggcccgccgagggccccagcgcaggagccgcgcccggacccaggcgatgccctcctagctagccgtcacgggatggagggcttcatggactcagggacacagacggacgccgtggtggtgctgtccttggctcaggccgccgtgcttggcctggtctccgaaaatgagctctttggagctaccataagcgccgaggccttctacccggacctggggcccgagctttcaggggcagccatgggagagcccgagccaccaggccccgacgtctaccagctggcctgcaacgggagggccttggaggagccggcggaggaggaggtgctggaggtggaggcagcctgtgagaagcacacccggcggaagacgcggccacctgtgcggttggtgcccaaggtcaagttcgagaaggtggaggaggaggaacaggaggtctatgaggtttctgtgccaggtgacgacaaggacgcagggccagcagaagcccccgccgaggcggccagtggcggctgcgacgccctggtgcagagcagcgccgtcaagatgatcgacctcagcgccttcagccgcaagccccggacgctccggcatctgccccgaaccccgaggccggagctgaacgtggccccatatgaccctcacttcccggccccggcccgggatggcttccccgagcccagcatggcgctgcctgggccagaggccttgcccacagagtgtgggttcgagccaccccacctggcccccctgagtgaccccgaggcccccagcatggagtccccggagcctgtcaagccggaacagggcttcgtgtggcaggaggccagtgagttcgaggctgacacggcgggttcgaccgtggaacgccacaagaaggcccagctggatcggctggacatcaacgtgcagattgacgactcctatctggtggaggcgggcgaccgccagaagcgctggcagtgccgcatgtgcgagaagtcctacacgtccaagtacaacctggtgacgcacatcctgggccacaacggcatcaagccacactcgtgcccacactgcagcaagctcttcaagcagcccagccacctgcagacgcacctgctgacgcaccagggcacccggccccacaagtgccaggtatgccacaaggccttcacgcagaccagccacctcaagcgccacatgctgctgcactcggaggtcaagccctacagctgccacttctgcggccgcggcttcgcctaccccagcgagctcaaggcccacgaagtgaagcatgagagtggccgctgccatgtctgcgtcgagtgcggcctggacttctccaccctgacccagctcaagcgccacctggcctcccaccagggccccaccctctaccagtgcctcgagtgtgacaagtccttccactaccgcagccagttgcagaaccacatgctcaagcaccagaacgtgcgacccttcgtgtgcactgaatgcggcatggagttcagccagattcaccacctcaagcagcactccctcacccacaagggcgtgaaggagttcaagtgcgaggtgtgtggccgggagttcaccctacaggcgaacatgaagcggcacatgctgatccacaccagcgtccggccctaccagtgccacatctgcttcaagacctttgtacagaagcagactctcaagacccacatgattgtacactcgcccgtgaagccattcaaatgcaaggtgtgcgggaagtccttcaaccgcatgtacaacctgctgggccacatgcacctgcacgccggcagcaagcccttcaagtgcccctactgctccagcaagtttaatctcaagggcaacctgagccggcacatgaaggtcaagcatggcgtcatagacatcggcctggacagccaagaccccatgatggagctgacaggcactgacccttcagagctcgacggccagcaggagatggaggacttcgaggagaacgcctacagctatgcgagcgtggacagcagcgccgaggccagtgtcctcactgaacaggccatgaaagagatggcctactacaatgtgctatagcgcaagctgggccacccctaacgggggccgggggcgagggcatgggggtgagacccatgggctgcaggctgcacctcctgcagccgagaaacaagctactgccccactgttctgagccctccctccccgagtcatttgcaccactagggacctttagaccaaatggagactgtactactggccccggctgtgagccagcacaggcccaggcatcccagcaagggaaggagagcacgcgaggcccagatctgggtctccctggcctgcttccgtggggagtgggagaagtggggccactggggacaggtcacaagggcaccggccctcggggtctctccaggcccagcagagctcttcaggggtcctgacactggaagaagagaccacttgagccatgtctttttcacggccaactcctgcctctaaggatgtctgagctcccctctggccagtactgcccacctctaccttgtccaggcccccttccccgccctgtcgacggaccgccaggcagggcactctgccttctacctcccggggtctcccatgcgctcctcaagccaggtgtgcacgtggccctggccctggcctgcaggacagctggggggcacccagcccccagaagacccctgtcctacatccctttctggaagtgagtgtccctacagtggattgcaacacatgtcgtccacttcgaccctagctggagtgcctcaccagggggccccactaggaacaaagccaggacaggccccgcgtcaggcacacactaacaaaaccagaagcatggggcagggcagggcggagtgagggcatcacaggggaccaagaagggctgtccttgggggaggcccaggaccacctgtcggggagggggaccgcagtcatttctcattcctcagtgtccaccttgcgacggggatagccacgagtcagcagcttcccggaaagagcaacgtatttt

SEQ ID NO: 3331 - protein, 664 aa, Homo sapiens
MEGFMDSGTQTDAVVVLSLAQAAVLGLVSENELFGATISAEAFYPDLGPELSGAAMGEPEPPGPDVYQLACNGRALEEPAEEEVLEVEAACEKHTRRKTRPPVRLVPKVKFEKVEEEEQEVYEVSVPGDDKDAGPAEAPAEAASGGCDALVQSSAVKMIDLSAFSRKPRTLRHLPRTPRPELNVAPYDPHFPAPARDGFPEPSMALPGPEALPTECGFEPPHLAPLSDPEAPSMESPEPVKPEQGFVWQEASEFEADTAGSTVERHKKAQLDRLDINVQIDDSYLVEAGDRQKRWQCRMCEKSYTSKYNLVTHILGHNGIKPHSCPHCSKLFKQPSHLQTHLLTHQGTRPHKCQVCHKAFTQTSHLKRHMLLHSEVKPYSCHFCGRGFAYPSELKAHEVKHESGRCHVCVECGLDFSTLTQLKRHLASHQGPTLYQCLECDKSFHYRSQLQNHMLKHQNVRPFVCTECGMEFSQIHHLKQHSLTHKGVKEFKCEVCGREFTLQANMKRHMLIHTSVRPYQCHICFKTFVQKQTLKTHMIVHSPVKPFKCKVCGKSFNRMYNLLGHMHLHAGSKPFKCPYCSSKFNLKGNLSRHMKVKHGVIDIGLDSQDPMMELTGTDPSELDGQQEMEDFEENAYSYASVDSSAEASVLTEQAMKEMAYYNVL

SEQ ID NO: 3332 - DNA, 1740 bp, Homo sapiens
ccagcgttagcccgcggccaggcagccgggaggagcggcgcgcgctcggacctctcccgccctgctcgttcgctctccagcttgggatggccggctacctgcgggtcgtgcgctcgctctgcagagcctcaggctcgcggccggcctgggcgccggcggccctgacagcccccacctcgcaagagcagccgcggcgccactatgccgacaaaaggatcaaggtggcgaagcccgtggtggagatggatggtgatgagatgacccgtattatctggcagttcatcaaggagaagctcatcctgccccacgtggacatccagctaaagtattttgacctcgggctcccaaaccgtgaccagactgatgaccaggtcaccattgactctgcactggccacccagaagtacagtgtggctgtcaagtgtgccaccatcacccctgatgaggcccgtgtggaagagttcaagctgaagaagatgtggaaaagtcccaatggaactatccggaacatcctgggggggactgtcttccgggagcccatcatctgcaaaaacatcccacgcctagtccctggctggaccaagcccatcaccattggcaggcacgcccatggcgaccagtacaaggccacagactttgtggcagaccgggccggcactttcaaaatggtcttcaccccaaaagatggcagtggtgtcaaggagtgggaagtgtacaacttccccgcaggcggcgtgggcatgggcatgtacaacaccgacgagtccatctcaggttttgcgcacagctgcttccagtatgccatccagaagaaatggccgctgtacatgagcaccaagaacaccatactgaaagcctacgatgggcgtttcaaggacatcttccaggagatctttgacaagcactataagaccgacttcgacaagaataagatctggtatgagcaccggctcattgatgacatggtggctcaggtcctcaagtcttcgggtggctttgtgtgggcctgcaagaactatgacggagatgtgcagtcagacatcctggcccagggctttggctcccttggcctgatgacgtccgtcctggtctgccctgatgggaagacgattgaggctgaggccgctcatgggaccgtcacccgccactatcgggagcaccagaagggccggcccaccagcaccaaccccatcgccagcatctttgcctggacacgtggcctggagcaccgggggaagctggatgggaaccaagacctcatcaggtttgcccagatgctggagaaggtgtgcgtggagacggtggagagtggagccatgaccaaggacctggcgggctgcattcacggcctcagcaatgtgaagctgaacgagcacttcctgaacaccacggacttcctcgacaccatcaagagcaacctggacagagccctgggcaggcagtagggggaggcgccacccatggctgcagtggaggggccagggctgagccggcgggtcctcctgagcgcggcagagggtgagcctcacagcccctctctggaggcctttctaggggatgtttttttataagccagatgtttttaaaagcatatgtgtgtttcccctcatggtgacgtgaggcaggagcagtgcgttttacctcagccagtcagtatgttttgcatactgtaatttatattgcccttggaacacatggtgccatatttagctactaaaaagctcttcacaaaaaaaaaaa

SEQ ID NO: 3333 - protein, 452 aa, Homo sapiens
MAGYLRVVRSLCRASGSRPAWAPAALTAPTSQEQPRRHYADKRIKVAKPVVEMDGDEMTRIIWQFIKEKLILPHVDIQLKYFDLGLPNRDQTDDQVTIDSALATQKYSVAVKCATITPDEARVEEFKLKKMWKSPNGTIRNILGGTVFREPIICKNIPRLVPGWTKPITIGRHAHGDQYKATDFVADRAGTFKMVFTPKDGSGVKEWEVYNFPAGGVGMGMYNTDESISGFAHSCFQYAIQKKWPLYMSTKNTILKAYDGRFKDIFQEIFDKHYKTDFDKNKIWYEHRLIDDMVAQVLKSSGGFVWACKNYDGDVQSDILAQGFGSLGLMTSVLVCPDGKTIEAEAAHGTVTRHYREHQKGRPTSTNPIASIFAWTRGLEHRGKLDGNQDLIRFAQMLEKVCVETVESGAMTKDLAGCIHGLSNVKLNEHFLNTTDFLDTIKSNLDRALGRQ

SEQ ID NO: 3334 - DNA, 1790 bp, Homo sapiens
ccggtcgggttctgggaggcaccgcctcggggttgcgggccgggtgcggctcggcggtggaggactcacttcctgctccatccccggctgggccctggggcggaactgatgacgcttgataatgtggctggggacttcagggaagagtgggttacctggacactgcttagagaatcctctccaggaatgccacccagcacagttagaagaatgggctctcaaaggaatttccaggcctagtgtaatctcccagccggagcagaaagaagagccatgggtcctaccactccaaaactttgaggcgaggaagatcccgagggaaagccacacagactgtgagcatcaggtggcaaagctcaatcaggacagttctgaaacagcagaacaatgtggaacatcctcagaaaggaccaataaagatctttctcatactcttagttggggaggaaactgggagcaaggcctagaattagaagggcaacatggaacccttccaggagagggccagctggagtccttttcacaggagagggatttaaacaagctcctggatggatatgtaggagagaagcctatgtgtgcagaatgcgggaaaagctttaaccagagttcctatctcataagacacctaagaacccacactggcgagaggccctatacgtgcattgagtgtgggaaaggcttcaaacagagctcagaccttgtcacccatcgcagaacacacacaggagagaagccctaccaatgcaaggggtgtgagaagaaattcagcgacagctcaacactcatcaaacatcagagaacccacacaggggagagaccctatgagtgcccagagtgtggaaagacttttgggcggaagccacacctcataatgcaccaaagaacccacacaggcgagaagccctacgcgtgcctggaatgtcacaaaagcttcagtcgaagctcaaatttcatcactcaccagaggacccacacaggggtgaagccttacaggtgtaatgactgtggggagagttttagccagagctcggatttgattaagcaccaacgaacccacacgggagaacggcccttcaaatgcccggagtgcgggaagggcttcagagatagttctcattttgtagctcacatgagcactcattcaggagagaggcctttcagttgtcctgactgccacaaaagcttcagtcagagctcacatttggtcacgcaccaaagaacacacacaggtgagagaccttttaagtgcgaaaactgtgggaaaggattcgccgacagctccgccctcattaagcaccaacgaatccacaccggagaaagaccctacaaatgtggagagtgtgggaagagcttcaatcagagctcccactttattacccatcagcgaatccacttaggagacaggccctatcgatgtcctgagtgtggcaagaccttcaatcagcgttcccatttcctcacacaccagagaacgcatacaggagaaaaacctttccactgtagtaaatgtaacaagagcttccgtcagaaagcgcatcttttatgccatcaaaacacccatttgatttaggaagtagtctttggtgttcagctgctcccttgcacattttcattgctactgtcttcaagcaccccaaatagagaaaacctgggcgtcagtggctcaatttgggccctgatctattctccctctttcttgtctatgttataacagagaggataaacttaaagggtccaaataacggtccgaatacaaaaggcattccttcaaaaaaaaaaaaaaaaaa

SEQ ID NO: 3335 - protein, 483 aa, Homo sapiens
MWLGTSGKSGLPGHCLENPLQECHPAQLEEWALKGISRPSVISQPEQKEEPWVLPLQNFEARKIPRESHTDCEHQVAKLNQDSSETAEQCGTSSERTNKDLSHTLSWGGNWEQGLELEGQHGTLPGEGQLESFSQERDLNKLLDGYVGEKPMCAECGKSFNQSSYLIRHLRTHTGERPYTCIECGKGFKQSSDLVTHRRTHTGEKPYQCKGCEKKFSDSSTLIKHQRTHTGERPYECPECGKTFGRKPHLIMHQRTHTGEKPYACLECHKSFSRSSNFITHQRTHTGVKPYRCNDCGESFSQSSDLIKHQRTHTGERPFKCPECGKGFRDSSHFVAHMSTHSGERPFSCPDCHKSFSQSSHLVTHQRTHTGERPFKCENCGKGFADSSALIKHQRIHTGERPYKCGECGKSFNQSSHFITHQRIHLGDRPYRCPECGKTFNQRSHFLTHQRTHTGEKPFHCSKCNKSFRQKAHLLCHQNTHLI

SEQ ID NO: 3336 - DNA, 7219 bp, Homo sapiens
ggaccccggcaagcccgcgcacttggcaggagctgtagctaccgccgtccgcgcctccaaggtttcacggcttcctcagcagagactcgggctcgtccgccatgtccgccgcagacgaggttgacgggctgggcgtggcccggccgcactatggctctgtcctggataatgaaagacttactgcagaggagatggatgaaaggagacgtcagaacgtggcttatgagtacctttgtcatttggaagaagcgaagaggtggatggaagcatgcctaggggaagatctgcctcccaccacagaactggaggaggggcttaggaatggggtctaccttgccaaactggggaacttcttctctcccaaagtagtgtccctgaaaaaaatctatgatcgagaacagaccagatacaaggcgactggcctccactttagacacactgataatgtgattcagtggttgaatgccatggatgagattggattgcctaagattttttacccagaaactacagatatctatgatcgaaagaacatgccaagatgtatctactgtatccatgcactcagtttgtacctgttcaagctaggcctggcccctcagattcaagacctatatggaaaggttgacttcacagaagaagaaatcaacaacatgaagactgagttggagaagtatggcatccagatgcctgcctttagcaagattgggggcatcttggctaatgaactgtcagtggatgaagccgcattacatgctgctgttattgctattaatgaagctattgaccgtagaattccagccgacacatttgcagctttgaaaaatccgaatgccatgcttgtaaatcttgaagagcccttggcatccacttaccaggatatactttaccaggctaagcaggacaaaatgacaaatgctaaaaacaggacagaaaactcagagagagaaagagatgtttatgaggagctgctcacgcaagctgaaattcaaggcaatataaacaaagtcaatacattttctgcattagcaaatatcgacctggctttagaacaaggagatgcactggccttgttcagggctctgcagtcaccagccctggggcttcgaggactgcagcaacagaatagcgactggtacttgaagcagctcctgagtgataaacagcagaagagacagagtggtcagactgaccccctgcagaaggaggagctgcagtctggagtggatgctgcaaacagtgctgcccagcaatatcagagaagattggcagcagtagcactgattaatgctgcaatccagaagggtgttgctgagaagactgttttggaactgatgaatcccgaagcccagctgccccaggtgtatccatttgccgccgatctctatcagaaggagctggctaccctgcagcgacaaagtcctgaacataatctcacccacccagagctctctgtcgcagtggagatgttgtcatcggtggccctgatcaacagggcattggaatcaggagatgtgaatacagtgtggaagcaattgagcagttcagttactggtcttaccaatattgaggaagaaaactgtcagaggtatctcgatgagttgatgaaactgaaggctcaggcacatgcagagaataatgaattcattacatggaatgatatccaagcttgcgtggaccatgtgaacctggtggtgcaagaggaacatgagaggattttagccattggtttaattaatgaagccctggatgaaggtgatgcccaaaagactctgcaggccctacagattcctgcagctaaacttgagggagtccttgcagaagtggcccagcattaccaagacacgctgattagagcgaagagagagaaagcccaggaaatccaggatgagtcagctgtgttatggttggatgaaattcaaggtggaatctggcagtccaacaaagacacccaagaagcacagaagtttgccttaggaatctttgccattaatgaggcagtagaaagtggtgatgttggcaaaacactgagtgcccttcgctcccctgatgttggcttgtatggagtcatccctgagtgtggtgaaacttaccacagtgatcttgctgaagccaagaagaaaaaactggcagtaggagataataacagcaagtgggtgaagcactgggtaaaaggtggatattattattaccacaatctggagacccaggaaggaggatgggatgaacctccaaattttgtgcaaaattctatgcagctttctcgggaggagatccagagttctatctctggggtgactgccgcatataaccgagaacagctgtggctggccaatgaaggcctgatcaccaggctgcaggctcgctgccgtggatacttagttcgacaggaattccgatccaggatgaatttcctgaagaaacaaatccctgccatcacctgcattcagtcacagtggagaggatacaagcagaagaaggcatatcaagatcggttagcttacctgcgctcccacaaagatgaagttgtaaagattcagtccctggcaaggatgcaccaagctcgaaagcgctatcgagatcgcctgcagtacttccgggaccatataaatgacattatcaaaatccaggcttttattcgggcaaacaaagctcgggatgactacaagactctcatcaatgctgaggatcctcctatggttgtggtccgaaaatttgtccacctgctggaccaaagtgaccaggattttcaggaggagcttgaccttatgaagatgcgggaagaggttatcaccctcattcgttctaaccagcagctggagaatgacctcaatctcatggatatcaaaattggactgctagtgaaaaataagattacgttgcaggatgtggtttcccacagtaaaaaacttaccaaaaaaaataaggaacagttgtctgatatgatgatgataaataaacagaagggaggtctcaaggctttgagcaaggagaagagagagaagttggaagcttaccagcacctgttttatttattgcaaaccaatcccacctatctggccaagctcatttttcagatgccccagaacaagtccaccaagttcatggactctgtaatcttcacactctacaactacgcgtccaaccagcgagaggagtacctgctcctgcggctctttaagacagcactccaagaggaaatcaagtcgaaggtagatcagattcaagagattgtgacaggaaatcctacggttattaaaatggttgtaagtttcaaccgtggtgcccgtggccagaatgccctgagacagatcttggccccagtcgtgaaggaaattatggatgacaaatctctcaacatcaaaactgaccctgtggatatttacaaatcttgggttaatcagatggagtctcagacaggagaggcaagcaaactgccctatgatgtgacccctgagcaggcgctagctcatgaagaagtgaagacacggctagacagctccatcaggaacatgcgggctgtgacagacaagtttctctcagccattgtcagctctgtggacaaaatcccttatgggatgcgcttcattgccaaagtgctgaaggactcgttgcatgagaagttccctgatgctggtgaggatgagctgctgaagattattggtaacttgctttattatcgatacatgaatccagccattgttgctcctgatgcctttgacatcattgacctgtcagcaggaggccagcttaccacagaccaacgccgaaatctgggctccattgcaaaaatgcttcagcatgctgcttccaataagatgtttctgggagataatgcccacttaagcatcattaatgaatatctttcccagtcctaccagaaattcagacggtttttccaaactgcttgtgatgtcccagagcttcaggataaatttaatgtggatgagtactctgatttagtaaccctcaccaaaccagtaatctacatttccattggtgaaatcatcaacacccacactctcctgttggatcaccaggatgccattgctccggagcacaatgatccaatccacgaactgctggacgacctcggcgaggtgcccaccatcgagtccctgataggggaaagctctggcaatttaaatgacccaaataaggaggcactggctaagacggaagtgtctctcaccctgaccaacaagttcgacgtgcctggagatgagaatgcagaaatggatgctcgaaccatcttactgaatacaaaacgtttaattgtggatgtcatccggttccagccaggagagaccttgactgaaatcctagaaacaccagccaccagtgaacaggaagcagaacatcagagagccatgcagagacgtgctatccgtgatgccaaaacacctgacaagatgaaaaagtcaaaatctgtaaaggaagacagcaacctcactcttcaagagaagaaagagaagatccagacaggtttaaagaagctaacagagcttggaaccgtggacccaaagaacaaataccaggaactgatcaacgacattgccagggatattcggaatcagcggaggtaccgacagaggagaaaggccgaactagtgaaactgcaacagacatacgctgctctgaactctaaggccaccttttatggggagcaggtggattactataaaagctatatcaaaacctgcttggataacttagccagcaagggcaaagtctccaaaaagcctagggaaatgaaaggaaagaaaagcaaaaagatttctctgaaatatacagcagcaagactacatgaaaaaggagttcttctggaaattgaggacctgcaagtgaatcagtttaaaaatgttatatttgaaatcagtccaacagaagaagttggagacttcgaagtgaaagccaaattcatgggagttcaaatggagacttttatgttacattatcaggacctgctgcagctacagtatgaaggagttgcagtcatgaaattatttgatagagctaaagtaaatgtcaacctcctgatcttccttctcaacaaaaagttctacgggaagtaattgatcgtttgctgccagcccagaaggatgaaggaaagaagcacctcacagctcctttctaggtccttctttcctcattggaagcaaagacctagccaacaacagcacctcaatctgatacactcccgatgccacatttttaactcctctcgctctgatgggacatttgttacccttttttcatagtgaaattgtgtttcaggcttagtctgacctttctggtttcttcattttcttccattacttaggaaagagtggaaactccactaaaatttctctgtgttgttacagtcttagaggttgcagtactatattgtaagctttggtgtttgtttaattagcaatagggatggtaggattcaaatgtgtgtcatttagaagtggaagctattagcaccaatgacataaatacatacaagacacacaactaaaatgtcatgttattaacagttattaggttgtcatttaaaaataaagttcctttatatttctgtcccatcaggaaaactgaaggatatggggaatcattggttatcttccattgtgtttttctttatggacaggagctaatggaagtgacagtcatgttcaaaggaagcatttctagaaaaaaggagataatgtttttaaatttcattatcaaacttgggcaattctgtttgtgtaactccccgactagtggatgggagagtcccattgctaaaattcagctactcagataaattcagaatgggtcaaggcacctgcctgtttttgttggtgcacagagattgacttgattcagagagacaattcactccatccctatggcagaggaatgggttagccctaatgtagaatgtcattgtttttaaaactgttttatatcttaagagtgccttattaaagtatagatgtatgtcttaaaatgtgggtgataggaattttaaagatttatataatgcatcaaaagccttagaataagaaaagctttttttaaattgctttatctgtatatctgaactcttgaaacttatagctaaaacactaggatttatctgcagtgttcagggagataattctgcctttaattgtctaaaacaaaaacaaaaccagccaacctatgttacacgtgagattaaaaccaattttttccccattttttctccttttttctcttgctgcccacattgtgcctttattttatgagccccagttttctgggcttagtttaaaaaaaaaatcaagtctaaacattgcatttagaaagcttttgttcttggataaaaagtcatacactttaaaaaaaaaaaaaactttttccaggaaaatatattgaaatcatgctgctgagcctctattttctttctttgatgttttgattcagtattcttttatcataaatttttagcatttaaaaattcactgatgtacattaagccaataaactgctttaatgaataacaaactatgtagtgtgtccctattataaatgcattggagaagtatttttatgagactctttactcaggtgcatggttacagcccacagggaggcatggagtgccatggaaggattcgccactacccagaccttgttttttgttgtattttggaagacaggttttttaaagaaacattttcctcagattaaaagatgatgctattacaactagcattgcctcaaaaactgggaccaaccaaagtgtgtcaaccctgtttccttaaaagaggctatgaatcccaaaggccacatccaagacaggcaataatgagcagagtttacagctcctttaataaaatgtgtcagtaattttaaggtttatagttccctcaacacaattgctaatgcagaatagtgtaaaatgcgcttcaagaatgttgatgatgatgatatagaattgtggctttagtagcacagaggatgccccaacaaactcatggcgttgaaaccacacagttctcattactgttatttattagctgtagcattctctgtctcctctctctcctcctttgaccttctcctcgaccagccatcatgacatttaccatgaatttacttcctcccaagagtttggactgcccgtcagattgttgctgcacatagttgcctttgtatctctgtatgaaataaaaggtcatttgttcatgttaaaaaaaaa

SEQ ID NO: 3337 - protein, 1657 aa, Homo sapiens
MSAADEVDGLGVARPHYGSVLDNERLTAEEMDERRRQNVAYEYLCHLEEAKRWMEACLGEDLPPTTELEEGLRNGVYLAKLGNFFSPKVVSLKKIYDREQTRYKATGLHFRHTDNVIQWLNAMDEIGLPKIFYPETTDIYDRKNMPRCIYCIHALSLYLFKLGLAPQIQDLYGKVDFTEEEINNMKTELEKYGIQMPAFSKIGGILANELSVDEAALHAAVIAINEAIDRRIPADTFAALKNPNAMLVNLEEPLASTYQDILYQAKQDKMTNAKNRTENSERERDVYEELLTQAEIQGNINKVNTFSALANIDLALEQGDALALFRALQSPALGLRGLQQQNSDWYLKQLLSDKQQKRQSGQTDPLQKEELQSGVDAANSAAQQYQRRLAAVALINAAIQKGVAEKTVLELMNPEAQLPQVYPFAADLYQKELATLQRQSPEHNLTHPELSVAVEMLSSVALINRALESGDVNTVWKQLSSSVTGLTNIEEENCQRYLDELMKLKAQAHAENNEFITWNDIQACVDHVNLVVQEEHERILAIGLINEALDEGDAQKTLQALQIPAAKLEGVLAEVAQHYQDTLIRAKREKAQEIQDESAVLWLDEIQGGIWQSNKDTQEAQKFALGIFAINEAVESGDVGKTLSALRSPDVGLYGVIPECGETYHSDLAEAKKKKLAVGDNNSKWVKHWVKGGYYYYHNLETQEGGWDEPPNFVQNSMQLSREEIQSSISGVTAAYNREQLWLANEGLITRLQARCRGYLVRQEFRSRMNFLKKQIPAITCIQSQWRGYKQKKAYQDRLAYLRSHKDEVVKIQSLARMHQARKRYRDRLQYFRDHINDIIKIQAFIRANKARDDYKTLINAEDPPMVVVRKFVHLLDQSDQDFQEELDLMKMREEVITLIRSNQQLENDLNLMDIKIGLLVKNKITLQDVVSHSKKLTKKNKEQLSDMMMINKQKGGLKALSKEKREKLEAYQHLFYLLQTNPTYLAKLIFQMPQNKSTKFMDSVIFTLYNYASNQREEYLLLRLFKTALQEEIKSKVDQIQEIVTGNPTVIKMVVSFNRGARGQNALRQILAPVVKEIMDDKSLNIKTDPVDIYKSWVNQMESQTGEASKLPYDVTPEQALAHEEVKTRLDSSIRNMRAVTDKFLSAIVSSVDKIPYGMRFIAKVLKDSLHEKFPDAGEDELLKIIGNLLYYRYMNPAIVAPDAFDIIDLSAGGQLTTDQRRNLGSIAKMLQHAASNKMFLGDNAHLSIINEYLSQSYQKFRRFFQTACDVPELQDKFNVDEYSDLVTLTKPVIYISIGEIINTHTLLLDHQDAIAPEHNDPIHELLDDLGEVPTIESLIGESSGNLNDPNKEALAKTEVSLTLTNKFDVPGDENAEMDARTILLNTKRLIVDVIRFQPGETLTEILETPATSEQEAEHQRAMQRRAIRDAKTPDKMKKSKSVKEDSNLTLQEKKEKIQTGLKKLTELGTVDPKNKYQELINDIARDIRNQRRYRQRRKAELVKLQQTYAALNSKATFYGEQVDYYKSYIKTCLDNLASKGKVSKKPREMKGKKSKKISLKYTAARLHEKGVLLEIEDLQVNQFKNVIFEISPTEEVGDFEVKAKFMGVQMETFMLHYQDLLQLQYEGVAVMKLFDRAKVNVNLLIFLLNKKFYGK

SEQ ID NO: 3338 - DNA, 4528 bp, Homo sapiens
ggcgggaagtgagccagggcttggcgcggcggccgtggttgcggcgcgggaagtttggatcctggttccgtccgctaggagtctgcgtgcgaggattatggctgctgttcctcaaaataatctacaggagcaactagaacgtcactcagccagaacacttaataataaattaagtctttcaaaaccaaaattttcaggtttcacttttaaaaagaaaacatcttcagataacaatgtatctgtaactaatgtgtcagtagcaaaaacacctgtattaagaaataaagatgttaatgttaccgaagacttttccttcagtgaacctctacccaacaccacaaatcagcaaagggtcaaggacttctttaaaaatgctccagcaggacaggaaacacagagaggtggatcaaaatcattattgccagatttcttgcagactccgaaggaagttgtatgcactacccaaaacacaccaactgtaaagaaatcccgggatactgctctcaagaaattagaatttagttcttcaccagattctttaagtaccatcaatgattgggatgatatggatgactttgatacttctgagacttcaaaatcatttgttacaccaccccaaagtcactttgtaagagtaagcactgctcagaaatcaaaaaagggtaagagaaacttttttaaagcacagctttatacaacaaacacagtaaagactgatttgcctccaccctcctctgaaagcgagcaaatagatttgactgaggaacagaaggatgactcagaatggttaagcagcgatgtgatttgcatcgatgatggccccattgctgaagtgcatataaatgaagatgctcaggaaagtgactctctgaaaactcatttggaagatgaaagagataatagcgaaaagaagaagaatttggaagaagctgaattacattcaactgagaaagttccatgtattgaatttgatgatgatgattatgatacggattttgttccaccttctccagaagaaattatttctgcttcttcttcctcttcaaaatgccttagtacgttaaaggaccttgacacctctgacagaaaagaggatgttcttagcacatcaaaagatcttttgtcaaaacctgagaaaatgagtatgcaggagctgaatccagaaaccagcacagactgtgacgctagacagataagtttacagcagcagcttattcatgtgatggagcacatctgtaaattaattgatactattcctgatgataaactgaaacttttggattgtgggaacgaactgcttcagcagcggaacataagaaggaaacttctaacggaagtagattttaataaaagtgatgccagtcttcttggctcattgtggagatacaggcctgattcacttgatggccctatggagggtgattcctgccctacagggaattctatgaaggagttaaatttttcacaccttccctcaaattctgtttctcctggggactgtttactgactaccaccctaggaaagacaggattctctgccaccaggaagaatctttttgaaaggcctttattcaatacccatttacagaagtcctttgtaagtagcaactgggctgaaacaccaagactaggaaaaaaaaatgaaagctcttatttcccaggaaatgttctcacaagcactgctgtgaaagatcagaataaacatactgcttcaataaatgacttagaaagagaaacccaaccttcctatgatattgataattttgacatagatgactttgatgatgatgatgactgggaagacataatgcataatttagcagccagcaaatcttccacagctgcctatcaacccatcaaggaaggtcggccaattaaatcagtatcagaaagactttcctcagccaagacagactgtcttccagtgtcatctactgctcaaaatataaacttctcagagtcaattcagaattatactgacaagtcagcacaaaatttagcatccagaaatctgaaacatgagcgtttccaaagtcttagttttcctcatacaaaggaaatgatgaagatttttcataaaaaatttggcctgcataattttagaactaatcagctagaggcgatcaatgctgcactgcttggtgaagactgttttatcctgatgccgactggaggtggtaagagtttgtgttaccagctccctgcctgtgtttctcctggggtcactgttgtcatttctcccttgagatcacttatcgtagatcaagtccaaaagctgacttccttggatattccagctacatatctgacaggtgataagactgactcagaagctacaaatatttacctccagttatcaaaaaaagacccaatcataaaacttctatatgtcactccagaaaagatctgtgcaagtaacagactcatttctactctggagaatctctatgagaggaagctcttggcacgttttgttattgatgaagcacattgtgtcagtcagtggggacatgattttcgtcaagattacaaaagaatgaatatgcttcgccagaagtttccttctgttccggtgatggctcttacggccacagctaatcccagggtacagaaggacatcctgactcagctgaagattctcagacctcaggtgtttagcatgagctttaacagacataatctgaaatactatgtattaccgaaaaagcctaaaaaggtggcatttgattgcctagaatggatcagaaagcaccacccatatgattcagggataatttactgcctctccaggcgagaatgtgacaccatggctgacacgttacagagagatgggctcgctgctcttgcttaccatgctggcctcagtgattctgccagagatgaagtgcagcagaagtggattaatcaggatggctgtcaggttatctgtgctacaattgcatttggaatggggattgacaaaccggacgtgcgatttgtgattcatgcatctctccctaaatctgtggagggttactaccaagaatctggcagagctggaagagatggggaaatatctcactgcctgcttttctatacctatcatgatgtgaccagactgaaaagacttataatgatggaaaaagatggaaaccatcatacaagagaaactcacttcaataatttgtatagcatggtacattactgtgaaaatataacggaatgcaggagaatacagcttttggcctactttggtgaaaatggatttaatcctgatttttgtaagaaacacccagatgtttcttgtgataattgctgtaaaacaaaggattataaaacaagagatgtgactgacgatgtgaaaagtattgtaagatttgttcaagaacatagttcatcacaaggaatgagaaatataaaacatgtaggtccttctggaagatttactatgaatatgctggtcgacattttcttggggagtaagagtgcaaaaatccagtcaggtatatttggaaaaggatctgcttattcacgacacaatgccgaaagactttttaaaaagctgatacttgacaagattttggatgaagacttatatatcaatgccaatgaccaggcgatcgcttatgtgatgctcggaaataaagcccaaactgtactaaatggcaatttaaaggtagactttatggaaacagaaaattccagcagtgtgaaaaaacaaaaagcgttagtagcaaaagtgtctcagagggaagagatggttaaaaaatgtcttggagaacttacagaagtctgcaaatctctggggaaagtttttggtgtccattacttcaatatttttaataccgtcactctcaagaagcttgcagaatctttatcttctgatcctgaggttttgcttcaaattgatggtgttactgaagacaaactggaaaaatatggtgcggaagtgatttcagtattacagaaatactctgaatggacatcgccagctgaagacagttccccagggataagcctgtccagcagcagaggccccggaagaagtgccgctgaggagctcgacgaggaaatacccgtatcttcccactactttgcaagtaaaaccagaaatgaaaggaagaggaaaaagatgccagcctcccaaaggtctaagaggagaaaaactgcttccagtggttccaaggcaaagggggggtctgccacatgtagaaagatatcttccaaaacgaaatcctccagcatcattggatccagttcagcctcacatacttctcaagcgacatcaggagccaatagcaaattggggattatggctccaccgaagcctataaatagaccgtttcttaagccttcatatgcattctcataacaaccgaatctcaatgtacatagaccctctttcttgtttgtcagcatctgaccatctgtgactataaagctgttattcttgttataccatttgaagtttttactcgtctctattaatatttaaataaatgctggggggtgatagttcttctttttaaaataaacattttcttttgaa

SEQ ID NO: 3339 - protein, 1417 aa, Homo sapiens
MAAVPQNNLQEQLERHSARTLNNKLSLSKPKFSGFTFKKKTSSDNNVSVTNVSVAKTPVLRNKDVNVTEDFSFSEPLPNTTNQQRVKDFFKNAPAGQETQRGGSKSLLPDFLQTPKEVVCTTQNTPTVKKSRDTALKKLEFSSSPDSLSTINDWDDMDDFDTSETSKSFVTPPQSHFVRVSTAQKSKKGKRNFFKAQLYTTNTVKTDLPPPSSESEQIDLTEEQKDDSEWLSSDVICIDDGPIAEVHINEDAQESDSLKTHLEDERDNSEKKKNLEEAELHSTEKVPCIEFDDDDYDTDFVPPSPEEIISASSSSSKCLSTLKDLDTSDRKEDVLSTSKDLLSKPEKMSMQELNPETSTDCDARQISLQQQLIHVMEHICKLIDTIPDDKLKLLDCGNELLQQRNIRRKLLTEVDFNKSDASLLGSLWRYRPDSLDGPMEGDSCPTGNSMKELNFSHLPSNSVSPGDCLLTTTLGKTGFSATRKNLFERPLFNTHLQKSFVSSNWAETPRLGKKNESSYFPGNVLTSTAVKDQNKHTASINDLERETQPSYDIDNFDIDDFDDDDDWEDIMHNLAASKSSTAAYQPIKEGRPIKSVSERLSSAKTDCLPVSSTAQNINFSESIQNYTDKSAQNLASRNLKHERFQSLSFPHTKEMMKIFHKKFGLHNFRTNQLEAINAALLGEDCFILMPTGGGKSLCYQLPACVSPGVTVVISPLRSLIVDQVQKLTSLDIPATYLTGDKTDSEATNIYLQLSKKDPIIKLLYVTPEKICASNRLISTLENLYERKLLARFVIDEAHCVSQWGHDFRQDYKRMNMLRQKFPSVPVMALTATANPRVQKDILTQLKILRPQVFSMSFNRHNLKYYVLPKKPKKVAFDCLEWIRKHHPYDSGIIYCLSRRECDTMADTLQRDGLAALAYHAGLSDSARDEVQQKWINQDGCQVICATIAFGMGIDKPDVRFVIHASLPKSVEGYYQESGRAGRDGEISHCLLFYTYHDVTRLKRLIMMEKDGNHHTRETHFNNLYSMVHYCENITECRRIQLLAYFGENGFNPDFCKKHPDVSCDNCCKTKDYKTRDVTDDVKSIVRFVQEHSSSQGMRNIKHVGPSGRFTMNMLVDIFLGSKSAKIQSGIFGKGSAYSRHNAERLFKKLILDKILDEDLYINANDQAIAYVMLGNKAQTVLNGNLKVDFMETENSSSVKKQKALVAKVSQREEMVKKCLGELTEVCKSLGKVFGVHYFNIFNTVTLKKLAESLSSDPEVLLQIDGVTEDKLEKYGAEVISVLQKYSEWTSPAEDSSPGISLSSSRGPGRSAAEELDEEIPVSSHYFASKTRNERKRKKMPASQRSKRRKTASSGSKAKGGSATCRKISSKTKSSSIIGSSSASHTSQATSGANSKLGIMAPPKPINRPFLKPSYAFS

SEQ ID NO: 3340 - DNA, 4180 bp, Homo sapiens
gcggggaagcagcagcggccaggatgaatcccaggtgctctggagctggatggtgaaggtcggcactcttcaccctcccgagccctgcccgtctcggccccatgcccccaccagtcagccccgggccacaggcagtgagcaggcacctgggagccgaggccctgtgaccaggccaaggagacgggcgctccagggtcccagccacctgtcccccccatggagctgaggccctggttgctatgggtggtagcagcaacaggaaccttggtcctgctagcagctgatgctcagggccagaaggtcttcaccaacacgtgggctgtgcgcatccctggaggcccagcggtggccaacagtgtggcacggaagcatgggttcctcaacctgggccagatcttcggggactattaccacttctggcatcgaggagtgacgaagcggtccctgtcgcctcaccgcccgcggcacagccggctgcagagggagcctcaagtacagtggctggaacagcaggtggcaaagcgacggactaaacgggacgtgtaccaggagcccacagaccccaagtttcctcagcagtggtacctgtctggtgtcactcagcgggacctgaatgtgaaggcggcctgggcgcagggctacacagggcacggcattgtggtctccattctggacgatggcatcgagaagaaccacccggacttggcaggcaattatgatcctggggccagttttgatgtcaatgaccaggaccctgacccccagcctcggtacacacagatgaatgacaacaggcacggcacacggtgtgcgggggaagtggctgcggtggccaacaacggtgtctgtggtgtaggtgtggcctacaacgcccgcattggaggggtgcgcatgctggatggcgaggtgacagatgcagtggaggcacgctcgctgggcctgaaccccaaccacatccacatctacagtgccagctggggccccgaggatgacggcaagacagtggatgggccagcccgcctcgccgaggaggccttcttccgtggggttagccagggccgaggggggctgggctccatctttgtctgggcctcggggaacgggggccgggaacatgacagctgcaactgcgacggctacaccaacagtatctacacgctgtccatcagcagcgccacgcagtttggcaacgtgccgtggtacagcgaggcctgctcgtccacactggccacgacctacagcagtggcaaccagaatgagaagcagatcgtgacgactgacttgcggcagaagtgcacggagtctcacacgggcacctcagcctctgcccccttagcagccggcatcattgctctcaccctggaggccaataagaacctcacatggcgggacatgcaacacctggtggtacagacctcgaagccagcccacctcaatgccaacgactgggccaccaatggtgtgggccggaaagtgagccactcatatggctacgggcttttggacgcaggcgccatggtggccctggcccagaattggaccacagtggccccccagcggaagtgcatcatcgacatcctcaccgagcccaaagacatcgggaaacggctcgaggtgcggaagaccgtgaccgcgtgcctgggcgagcccaaccacatcactcggctggagcacgctcaggcgcggctcaccctgtcctataatcgccgtggcgacctggccatccacctggtcagccccatgggcacccgctccaccctgctggcagccaggccacatgactactccgcagatgggtttaatgactgggccttcatgacaactcattcctgggatgaggatccctctggcgagtgggtcctagagattgaaaacaccagcgaagccaacaactatgggacgctgaccaagttcaccctcgtactctatggcaccgcccctgaggggctgcccgtacctccagaaagcagtggctgcaagaccctcacgtccagtcaggcctgtgtggtgtgcgaggaaggcttctccctgcaccagaagagctgtgtccagcactgccctccagggttcgccccccaagtcctcgatacgcactatagcaccgagaatgacgtggagaccatccgggccagcgtctgcgccccctgccacgcctcatgtgccacatgccaggggccggccctgacagactgcctcagctgccccagccacgcctccttggaccctgtggagcagacttgctcccggcaaagccagagcagccgagagtccccgccacagcagcagccacctcggctgcccccggaggtggaggcggggcaacggctgcgggcagggctgctgccctcacacctgcctgaggtggtggccggcctcagctgcgccttcatcgtgctggtcttcgtcactgtcttcctggtcctgcagctgcgctctggctttagttttcggggggtgaaggtgtacaccatggaccgtggcctcatctcctacaaggggctgccccctgaagcctggcaggaggagtgcccgtctgactcagaagaggacgagggccggggcgagaggaccgcctttatcaaagaccagagcgccctctgatgagcccactgcccaccccctcaagccaatcccctccttgggcactttttaattcaccaaagtatttttttatcttgggactgggtttggaccccagctgggaggcaagaggggtggagactgcttcccatcctaccctcgggcccacctggccacctgaggtgggcccaggaccagctggggcgtggggagggccgtaccccaccctcagcaccccttccatgtggagaaaggagtgaaacctttagggcagcttgccccggccccggccccagccagagttcctgcggagtgaagaggggcagcccttgcttgttgggattcctgacccaggccgcagctcttgcccttccctgtccctctaaagcaataatggtcccatccaggcagtcgggggctggcctaggagatatctgagggaggaggccacctctccaagggcttctgcaccctccaccctgtcccccagctctggtgagtcttggcggcagcagccatcataggaagggaccaaggcaaggcaggtgcctccaggtgtgcacgtggcatgtggcctgtggcctgtgtcccatgacccacccctgtgctccgtgcctccaccaccactggccaccaggctggcgcagccaaggccgaagctctggctgaaccctgtgctggtgtcctgaccaccctcccctctcttgcacccgcctctcccgtcagggcccaagtccctgttttctgagcccgggctgcctgggctgttggcactcacagacctggagcccctgggtgggtggtggggaggggcgctggcccagccggcctctctggcctcccacccgatgctgctttcccctgtggggatctcaggggctgtttgaggatatattttcactttgtgattatttcactttagatgctgatgatttgtttttgtatttttaatgggggtagcagctggactacccacgttctcacacccaccgtccgccctgctcctccctggctgccctggccctgaggtgtgggggctgcagcatgttgctgaggagtgaggaatagttgagccccaagtcctgaagaggcgggccagccaggcgggctcaaggaaagggggtcccagtgggaggggcaggctgacatctgtgtttcaagtggggctcgccatgccgggggttcataggtcactggctctccaagtgccagaggtgggcaggtggtggcactgagcccccccaacactgtgccctggtggagaaagcactgacctgtcatgcccccctcaaacctcctcttctgacgtgccttttgcacccctcccattaggacaatcagtcccctcccatctgggagtccccttttcttttctaccctagccattcctggtacccagccatctgcccaggggtgccccctcctctcccatccccctgccctcgtggccagcccggctggttttgtaagatgctgggttggtgcacagtgatttttttcttgtaatttaaacaggcccagcattgctggttctatttaatggacatgagataatgttagaggttttaaagtgattaaacgtgcagactatgcaaaccag

SEQ ID NO: 3341 - protein, 794 aa, Homo sapiens
MELRPWLLWVVAATGTLVLLAADAQGQKVFTNTWAVRIPGGPAVANSVARKHGFLNLGQIFGDYYHFWHRGVTKRSLSPHRPRHSRLQREPQVQWLEQQVAKRRTKRDVYQEPTDPKFPQQWYLSGVTQRDLNVKAAWAQGYTGHGIVVSILDDGIEKNHPDLAGNYDPGASFDVNDQDPDPQPRYTQMNDNRHGTRCAGEVAAVANNGVCGVGVAYNARIGGVRMLDGEVTDAVEARSLGLNPNHIHIYSASWGPEDDGKTVDGPARLAEEAFFRGVSQGRGGLGSIFVWASGNGGREHDSCNCDGYTNSIYTLSISSATQFGNVPWYSEACSSTLATTYSSGNQNEKQIVTTDLRQKCTESHTGTSASAPLAAGIIALTLEANKNLTWRDMQHLVVQTSKPAHLNANDWATNGVGRKVSHSYGYGLLDAGAMVALAQNWTTVAPQRKCIIDILTEPKDIGKRLEVRKTVTACLGEPNHITRLEHAQARLTLSYNRRGDLAIHLVSPMGTRSTLLAARPHDYSADGFNDWAFMTTHSWDEDPSGEWVLEIENTSEANNYGTLTKFTLVLYGTAPEGLPVPPESSGCKTLTSSQACVVCEEGFSLHQKSCVQHCPPGFAPQVLDTHYSTENDVETIRASVCAPCHASCATCQGPALTDCLSCPSHASLDPVEQTCSRQSQSSRESPPQQQPPRLPPEVEAGQRLRAGLLPSHLPEVVAGLSCAFIVLVFVTVFLVLQLRSGFSFRGVKVYTMDRGLISYKGLPPEAWQEECPSDSEEDEGRGERTAFIKDQSAL

SEQ ID NO: 3342 - DNA, 2762 bp, Homo sapiens
actggccggggtccgcaccgggcctgagtcggtccgaggccgtcccaggagcagctgcccgtgcggaacagcactatgggcttctcttccgagctgtgcagcccccagggccacggggtcctgcagcaaatgcaggaggccgagcttcgtctactggagggcatgagaaagtggatggcccagcgggtcaagagtgacagggagtatgcaggactgcttcaccacatgtccctgcaggacagtgggggccagagccgggccatcagccctgacagccccatcagtcagtcctgggctgagatcaccagccaaactgagggcctgagccgcttgctgcggcagcacgcagaggatctgaactcagggcccctgagcaagctgagcctgctcatccgggaacggcagcagcttcgcaagacctacagcgagcagtggcagcagctgcagcaggagctcaccaagacccacagccaggacattgagaagctgaagagccagtaccgagctctggcacgggacagtgcccaagccaagcgcaagtaccaggaggccagcaaagacaaggaccgtgacaaggccaaggacaagtatgtgcgcagcctgtggaagctctttgctcaccacaaccgctatgtgctgggcgtgcgggctgcgcagctacaccaccagcaccaccaccagctcctgctgcccggcctgctgcggtcactgcaggacctgcacgaggagatggcttgcatcctgaaggagatcctgcaggaatacctggagattagcagcctggtgcaggatgaggtggtggccattcaccgggagatggctgcagctgctgcccgcatccagcctgaggctgagtaccaaggcttcctgcgacagtatgggtccgcacctgacgtcccaccctgtgtcacgttcgatgagtcactgcttgaggagggtgaaccgctggagcctggggagctccagctgaacgagctgactgtggagagcgtgcagcacacgctgacctcagtgacagatgagctggctgtggccaccgagatggtgttcaggcggcaggagatggttacgcagctgcaacaggagctccggaatgaagaggagaacacccacccccgggagcgggtgcagctgctgggcaagaggcaagtgctgcaagaagcactgcaggggctgcaggtagcgctgtgcagccaggccaagctgcaggcccagcaggagttgctgcagaccaagctggagcacctgggccccggcgagcccccgcctgtgctgctcctgcaggatgaccgccactccacgtcgtcctcggagcaggagcgagaggggggaaggacacccacgctggagatccttaagagccacatctcaggaatcttccgccccaagttctcgctccctccaccgctgcagctcattccggaggtgcagaagcccctgcatgagcagctgtggtaccacggggccatcccgagggcagaggtggctgagctgctggtgcactctggggacttcctggtgcgggagagccagggcaagcaggagtacgtgctgtcggtgctgtgggatggtctgccccggcacttcatcatccagtccttggataacctgtaccgactggaaggggaaggctttcctagcattcctttgctcatcgaccacctactgagcacccagcagcccctcaccaagaagagtggtgttgtcctgcacagggctgtgcccaaggacaagtgggtgctgaaccatgaggacctggtgttgggtgagcagattggacgggggaactttggcgaagtgttcagcggacgcctgcgagccgacaacaccctggtggcggtgaagtcttgtcgagagacgctcccacctgacctcaaggccaagtttctacaggaagcgaggatcctgaagcagtacagccaccccaacatcgtgcgtctcattggtgtctgcacccagaagcagcccatctacatcgtcatggagcttgtgcaggggggcgacttcctgaccttcctccgcacggagggggcccgcctgcgggtgaagactctgctgcagatggtgggggatgcagctgctggcatggagtacctggagagcaagtgctgcatccaccgggacctggctgctcggaactgcctggtgacagagaagaatgtcctgaagatcagtgactttgggatgtcccgagaggaagccgatggggtctatgcagcctcagggggcctcagacaagtccccgtgaagtggaccgcacctgaggcccttaactacggccgctactcctccgaaagcgacgtgtggagctttggcatcttgctctgggagaccttcagcctgggggcctccccctatcccaacctcagcaatcagcagacacgggagtttgtggagaaggggggccgtctgccctgcccagagctgtgtcctgatgccgtgttcaggctcatggagcagtgctgggcctatgagcctgggcagcggcccagcttcagcaccatctaccaggagctgcagagcatccgaaagcggcatcggtgaggctgggacccccttctcaagctggtggcctctgcaggcctaggtgcagctcctcagcggctccagctcatatgctgacagctcttcacagtcctggactcctgccaccagcatccacactgccggcaggatgcagcgccgtgtcctctctgtgtccctgctgctgccagggcttcctcttccgggcagaaacaataaaaccacttgtgcccactgaa

SEQ ID NO: 3343 - protein, 822 aa, Homo sapiens
MGFSSELCSPQGHGVLQQMQEAELRLLEGMRKWMAQRVKSDREYAGLLHHMSLQDSGGQSRAISPDSPISQSWAEITSQTEGLSRLLRQHAEDLNSGPLSKLSLLIRERQQLRKTYSEQWQQLQQELTKTHSQDIEKLKSQYRALARDSAQAKRKYQEASKDKDRDKAKDKYVRSLWKLFAHHNRYVLGVRAAQLHHQHHHQLLLPGLLRSLQDLHEEMACILKEILQEYLEISSLVQDEVVAIHREMAAAAARIQPEAEYQGFLRQYGSAPDVPPCVTFDESLLEEGEPLEPGELQLNELTVESVQHTLTSVTDELAVATEMVFRRQEMVTQLQQELRNEEENTHPRERVQLLGKRQVLQEALQGLQVALCSQAKLQAQQELLQTKLEHLGPGEPPPVLLLQDDRHSTSSSEQEREGGRTPTLEILKSHISGIFRPKFSLPPPLQLIPEVQKPLHEQLWYHGAIPRAEVAELLVHSGDFLVRESQGKQEYVLSVLWDGLPRHFIIQSLDNLYRLEGEGFPSIPLLIDHLLSTQQPLTKKSGVVLHRAVPKDKWVLNHEDLVLGEQIGRGNFGEVFSGRLRADNTLVAVKSCRETLPPDLKAKFLQEARILKQYSHPNIVRLIGVCTQKQPIYIVMELVQGGDFLTFLRTEGARLRVKTLLQMVGDAAAGMEYLESKCCIHRDLAARNCLVTEKNVLKISDFGMSREEADGVYAASGGLRQVPVKWTAPEALNYGRYSSESDVWSFGILLWETFSLGASPYPNLSNQQTREFVEKGGRLPCPELCPDAVFRLMEQCWAYEPGQRPSFSTIYQELQSIRKRHR

SEQ ID NO: 3344 - DNA, 6279 bp, Homo sapiens
gtgtgtgtggaggccagtatgaagctgaaaaagcaggtgacagtgtgtggggctgccatcttctgtgtggcagtcttctcgctctacctcatgctggaccgagtgcaacacgatcccacccgacaccagaatggtgggaacttcccccggagccaaatttctgtgctgcagaaccgcattgagcagctggagcagcttttggaggagaaccatgagattatcagccatatcaaggactccgtgctggagctgacagccaacgcagagggcccgcccgccatgctgccctactacacggtcaatggctcctgggtggtgccaccggagccccggcccagcttcttctccatctccccgcaggactgccagtttgctttggggggccggggtcagaagccagagctgcagatgctcactgtgtcggaggagctgccgtttgacaacgtggatggtggtgtgtggaggcaaggcttcgacatctcctacgacccgcacgactgggatgctgaagacctgcaggtgtttgtggtgccccactctcacaatgacccaggctggatcaagacctttgacaagtactacacagagcagacccaacacatcctcaatagcatggtgtctaagctgcaggaggacccccggcggcgcttcctctgggcagaggtctccttcttcgccaagtggtgggacaacatcaatgtccaaaagagagcggcagtccgaaggctggtgggaaacgggcagctggagattgcgacaggaggctgggtgatgccagatgaggccaattcccactactttgcattgattgaccagctcatcgaaggacaccagtggctggagagaaatcttggtgcaaccccccgctctggctgggcagtggacccctttggatacagctccaccatgccttacctgctgcgccgtgccaacctcaccagcatgctgattcagagagtgcactatgccatcaagaagcactttgctgccacccacagcctagagttcatgtggaggcagacatgggactcggactccagcacagacatcttctgtcacatgatgcccttctacagctatgacgtcccccatacctgtggcccagatcccaagatctgctgccaatttgatttcaaacgcctgcctggtgggcgcatcaactgcccttggaaggtgccaccccgggccatcacagaggccaacgtggcagagagggcagccctgcttctggaccaataccggaagaagtcccagctgttccgaagcaacgtcctcctggtgcctcttggagatgacttccgatatgacaagccccaggagtgggatgcccagttcttcaactaccaacggctctttgacttcttcaacagcaggcctaacctccatgtgcaggcccagtttggcactctttctgactattttgatgccctgtacaagaggacaggggtggagccaggggcccggcctccagggtttcctgtgctgagcggggatttcttctcctatgcggaccgggaggatcattactggacaggctattacacttcccggcccttctacaagagcttagaccgagtcctggaagcccacctgcggggggcagaggttctgtacagcctggctgcagctcacgctcgccgctctggtctggctggccggtacccactgtctgatttcaccctcctgacggaagctcggcgcacattggggctcttccagcatcacgatgccatcactggcacggccaaggaggctgtggtggtggactatggggtcaggcttctgcgctcccttgtcaacctgaagcaggtcatcattcatgcagcccactatctggtgctgggggacaaggagacctaccactttgaccctgaggcgcccttcctccaagtggatgacactcgcttaagtcacgacgccctcccagagcgcacggtgatccagctggattcctcgcccaggtttgtggtcctattcaacccactggaacaggagcgattcagcatggtgtccctgctggtcaactctccccgcgtgcgtgtcctttcggaggagggtcagcccctggccgtgcagatcagcgcacactggagctctgccaccgaggcggtccctgacgtctaccaggtgtctgtgcctgtccgcctgccagccctgggcctgggcgtgctgcagctacagctgggcctggatgggcaccgcacgctgccctcctctgtgcgcatctacctgcacggccggcagctgtccgtcagcaggcacgaagcgtttcctctccgtgtcattgactctggcaccagcgacttcgccctcagcaaccgctacatgcaggtctggttctcaggccttactgggctcctcaagagcatccgaagggtggatgaggagcacgagcagcaggtggacatgcaggtccttgtctatggcacccgtacgtccaaagacaagagtggagcctacctcttcctgcccgatggcgaggccaagccctacgtccccaaggagccccccgtgctgcgtgtcactgaaggccctttcttctcagaggtggttgcgtactatgagcacattcaccaggcggtccggctttacaatctgccaggggtggaggggctgtctctggacatatcatccctggtggacatccgggactacgtcaacaaggagctggccctgcacatccatacagacatcgacagccagggtatcttcttcacagacctcaatggctttcaggtgcagccccgacggtatctgaagaagctccccctccaggccaacttctaccccatgccagtcatggcctatatccaggacgcacagaagcgcctcacgctgcacactgcccaggccctgggtgtctctagcctcaaagatggccagctggaggtgatcttggaccggcggctgatgcaggatgacaaccggggcctaggccaagggctcaaggacaacaagagaacctgcaaccgtttccgcctcctgctagagcggcgaaccgtgggcagtgaggtccaagatagccactctaccagctacccatccctcctcagccacctgacctccatgtacctgaacgccccggcgctcgctctgcctgtagccaggatgcagctcccaggccctggtctgcgctcatttcatcctctggcttcctcactgccctgtgacttccacctgctcaacctacgtacgctccaggctgaggaggacaccctaccctcggcggagaccgcactcatcttacaccgcaagggttttgactgcggcctggaggccaagaacttgggcttcaactgcaccacaagccaaggcaaggtagccctgggcagccttttccatggcctggatgtggtattccttcagccaacctccttgacgttactgtaccctctggcctccccgtccaacagcactgacgtctatttggagcccatggagattgctacctttcgcctccgcttgggttagggcttcttgtggcctgaagagaaagttcattcacagagactgcctcttaacatgaagatcattggacaagccacacgggtatcccatcccgatctgcctcccagaactgtgacacactgggctctgccctcattttctgtttattgctgctgctgtgttttcggcgcaacccacaaacccagtgatgggtaaatagggcagacgccagtgagatcagggagagaaggcccttggtcagagtgggcagtgccaggctctgctttgggttgtgagtggacacccaactgggcacaggctcaggcacccatcctttttccaaacagggatatagaagtggtggaagcagacagaagaggtaagggaggctaagtgggtaacagcccagcatcagggtcactgtggcaacagcaggctctaggggaatcctgtggttatgtagagactccatgtcctggtgtgatgagcaggatcagagtgactctgggaggacaggggtggggacccagagttagcagtggggatggagcagtagaaggaatcactgtttctcctaggagtctgaaggcctcgctgctttctgtgatggctttgcagtaagtgccgcctggcctgcatgcattggctaacaggctgcagaatggcaggaaggactcgctagagattgtcatggccagagatcataggtcacttcaggtagcaagacccctggcaaactgggcacttggcctatgtactgatttgtgggatggtggcaggggtgtggggtccttcaccctgcctgaattctctttggcttctgtgctctgtatgctgctgtccccaagggctctttcttattatggcagggagtggggattggtcctactttctttctctggaaaggaaagcctccaagactccatgtgcttgggcagcttgagaaggcgttcagcaccacgcctagcaggcagaccttgaagcctcacctttagtctatctgcagaggtattcagttcctggcacaggggactaggggcatgtagagtatatgaggaggcagtatggctgtgcaggagccttcatttcagcttcaattaatagggaagaatttatgatagctctatagatgctgaaaaggtatttcgtaagatttaaaatccatcccttattaaaactcttagtaaattaagtctggaaagaaacaccctaatctagataaaggtctgtttcagaaaccaacagtgatggcattctaaagagtcagacgccacaggcattcccattaaagtcagaaactagccaagggcaagctattattcagcagtgtcccggcactactaacccctgcaacaagccagatgaggaacataaggaagaattataattgtcattatttgtagacaataaaactgcctacctgtaaaacctaagaatcaactgaagacctgttaagagtattctgtaagtcaacccaatgatacacatcatgttcctgtccacatactggttttccccaaatcagctgataaattcagtgtaattccaatgagattgaaactttggaattgacagttctaaagtgcatttgggagagtgaatgtgtgagaacactaagaccactctgaacgatgataatgagttggggggtggactgctcgggggtgatcctgccagattcccagaggattctcacgccaccattacctcactcagtgtgacctggagggggtcagacagacgggagagtccagaaacagacccagggctacaggaatttagtatatggtaagagggatgttttaagtggggaaaaaggtggattatttaataaacagcacttttagacaactagctatcaaagctagatctcagctgggtgcgatggctcacgcctgtaatcccggcactttgggaggccaaggtgggtggatcacttgaggtcaggagttcgagaccagcctggccaagatggcgaaaccctgtgtctactaaaaatacaaaaactagccaggaatggtggcgcgcgcctgtaatcccagttacttaggaggctgaggcaggagaatcacatcaacctgggaggcggaggttgcagtgagcttagatcatgccaccatgccactgcactccagcctgggtgacacagccaaaaaaaaaaccactaagttagatctctacctcacagtgtccatacaaattagttccagagggaagatataccacaaaattactcaaaaatttttatacctctggtgtgggacggtcttttctaaactttaacatgagacttaaaagatataataagggaaaagataagcagatttcgcaaccaaaaaatatcgaaagtctctgtgtgatggaaaacatcaaggttaaaacacaaatgacagatatggaagaaaatatttgcagcacataaaaaaatcaacgagtacaattactttaggagaaaagcttgcttcagggtccttagagaaagtcactggggcctgccaagctgccacctaaagacaagagtgagagggctgagttcttccaggtcatcagagttgttgctgcccgtattaggccacacagtggaaccccatttatatcatagcagaagaaataggattatcaatgtgaactgcttagcatggtgcctggtatatacgagagctccacaaatgtgagctataatcctactagtaaaggatgctaagcagttccactgtggcaggtgtcatttgctagtagaatttgtaatcaaacaataggaggggaatctgtgaacgcctagaaaatgagcagaataaaggatattatctttggaagtcttaaaaaaaaaaa

SEQ ID NO: 3345 - protein, 1150 aa, Homo sapiens
MKLKKQVTVCGAAIFCVAVFSLYLMLDRVQHDPTRHQNGGNFPRSQISVLQNRIEQLEQLLEENHEIISHIKDSVLELTANAEGPPAMLPYYTVNGSWVVPPEPRPSFFSISPQDCQFALGGRGQKPELQMLTVSEELPFDNVDGGVWRQGFDISYDPHDWDAEDLQVFVVPHSHNDPGWIKTFDKYYTEQTQHILNSMVSKLQEDPRRRFLWAEVSFFAKWWDNINVQKRAAVRRLVGNGQLEIATGGWVMPDEANSHYFALIDQLIEGHQWLERNLGATPRSGWAVDPFGYSSTMPYLLRRANLTSMLIQRVHYAIKKHFAATHSLEFMWRQTWDSDSSTDIFCHMMPFYSYDVPHTCGPDPKICCQFDFKRLPGGRINCPWKVPPRAITEANVAERAALLLDQYRKKSQLFRSNVLLVPLGDDFRYDKPQEWDAQFFNYQRLFDFFNSRPNLHVQAQFGTLSDYFDALYKRTGVEPGARPPGFPVLSGDFFSYADREDHYWTGYYTSRPFYKSLDRVLEAHLRGAEVLYSLAAAHARRSGLAGRYPLSDFTLLTEARRTLGLFQHHDAITGTAKEAVVVDYGVRLLRSLVNLKQVIIHAAHYLVLGDKETYHFDPEAPFLQVDDTRLSHDALPERTVIQLDSSPRFVVLFNPLEQERFSMVSLLVNSPRVRVLSEEGQPLAVQISAHWSSATEAVPDVYQVSVPVRLPALGLGVLQLQLGLDGHRTLPSSVRIYLHGRQLSVSRHEAFPLRVIDSGTSDFALSNRYMQVWFSGLTGLLKSIRRVDEEHEQQVDMQVLVYGTRTSKDKSGAYLFLPDGEAKPYVPKEPPVLRVTEGPFFSEVVAYYEHIHQAVRLYNLPGVEGLSLDISSLVDIRDYVNKELALHIHTDIDSQGIFFTDLNGFQVQPRRYLKKLPLQANFYPMPVMAYIQDAQKRLTLHTAQALGVSSLKDGQLEVILDRRLMQDDNRGLGQGLKDNKRTCNRFRLLLERRTVGSEVQDSHSTSYPSLLSHLTSMYLNAPALALPVARMQLPGPGLRSFHPLASSLPCDFHLLNLRTLQAEEDTLPSAETALILHRKGFDCGLEAKNLGFNCTTSQGKVALGSLFHGLDVVFLQPTSLTLLYPLASPSNSTDVYLEPMEIATFRLRLG

SEQ ID NO: 3346 - DNA, 1089 bp, Homo sapiens
ccacgcgtccgcccacgcgtccgcgcgcgatgggctctgaggcggcgcagctgctggaggctgccgacttcgcggctcgcaagcaccggcagcagcggcggaaggaccccgaggggaccccctacatcaaccaccccatcggtgtggcacggatcctgacccacgaggcgggaatcactgacattgtggtgttacaggcggccctgctccatgacacggtggaggacacagacaccaccctggatgaggtggagctacactttggggcacaagtgcggcgcctggtggaggaggtaacagatgacaagactctgcccaagctggagagaaagaggctgcaggtggagcaagcgccccacagtagccccggggccaaactggtgaagctggcagacaagctgtacaatctgagggacctgaatcgctgcaccccagaggtaaaaatacaatagctgggccaaggggaagttttcaggacagctcattgcatcaggaactcatggccttgaaccaagcttgccaggaagtggggaaaaggcagtgctttccttgacatcacgctagcaagtttctgtcgactcttatgcaggatggtcagaacatcgagtccaggaatacttcgagtgggcagcgcaggtggtgaaggggcttcagggaacaaaccggcaactggaagaggctctaaagcatctgttcaagcagcgggggctgacaatctgatcagtgcttgaagctatccagaggcacaactccagcctcgttcaggccggacaggattcatacgccatcttttctgtgtctcctgagctccctccatccttcccagatattagaggccaaaaaaagacttgcattttttctcagtctgaaggtctcctgctaactaagctgagccccgcgtggtgggaatcagatgtacccatccatttctgatgcactcaccgcctctccccaagtcttgggtctgtttgctattttgcatggtggggtctctggcccctcagggacttgagattatttaagtactagttcctaacacgttctggaaaataaaaataactctgggttaaaaaaaaaaaaaaaaaaaaa

SEQ ID NO: 3347 - protein, 140 aa, Homo sapiens
MGSEAAQLLEAADFAARKHRQQRRKDPEGTPYINHPIGVARILTHEAGITDIVVLQAALLHDTVEDTDTTLDEVELHFGAQVRRLVEEVTDDKTLPKLERKRLQVEQAPHSSPGAKLVKLADKLYNLRDLNRCTPEVKIQ

SEQ ID NO: 3348 - DNA, 4035 bp, Homo sapiens
acttaacaaccgaagtaacccgcaatgcggaagggcgaggggattgcgagtcaccgagtttcccgcgcggcttgagtcacggcctagaaagagagatgttggggttcccaggaccaggacagaggtggtagtgaactctcatgggcatccagagaaggtcaggccccttgctgacaggcctatctgtggggctactgctgctcttcagctgggtgacccttgtccagccaacctctctctcagctctggtccaccaccctcacttgtgccagaccacccgggatgtccatggccgtcactaccctggtttcttttgccctcgtctgtctgattctccagaggaagcctactgctgccacctgcaggctgcagggggctcctgctgcacccgggctgaatttgaggccctgtaccaagtcaatctgtccgctcttccgcccccgcccatcctcaggggcccaggcccgctcctagtgctgggcctctacaacctactggttgtgaccctgatgaccgtagacctcgtgcacttctgctgcggtcggggccggagtctgggctggagccaccgcaggcctccctctgggtcctccgccgcgagctccctgcaggtctctgcggggacagcttaggtgcgcccggagcttgcctgcacctgcgatccagagccaagcgccccgcccctgcccgggcgcgctccctccttagccctgcccctctctgaccccacctccgacgcaagagtggggcggggcagctgccggtggcgtcccgaacccagactcgccccgccccagagactgcgcctgcgcgggcacgagacaacctctccgcgatgactgccagctcagtggagcagctgcggaaggagggcaatgagctgttcaaatgtggagactacgggggcgccctggcggcctacactcaggccctgggtctggacgcgacgccccaggaccaggccgttctgcaccggaaccgggccgcctgccacctcaagctggaagattacgacaaagcagaaacagaggcatccaaagccattgaaaaggatggtggggatgtcaaagcactctaccggcggagccaagccctagagaagctgggccgcctggaccaggctgtccttgacctgcagagatgtgtgagcttggagcccaagaacaaagttttccaggaggccttgcggaacatcgggggccagattcaggagaaggtgcgatacatgtcctcgacggatgccaaagtggaacagatgtttcagatactgttggacccagaagagaagggcactgagaaaaagcaaaaggcttctcagaacctggtggtgctggccagggaggatgctggagcggagaagatcttccggagtaatggggttcagctcttgcaacgtttactggacatgggagagactgacctcatgctggcggctctgcgtacgctggttggcatttgctctgagcatcagtcacggacagtggcaaccctgagcatactgggaactcggcgagtagtctccatcctgggcgtggaaagccaggctgtgtccctggctgcctgccacctgctgcaggttatgtttgatgccctcaaggaaggtgtcaaaaaaggcttccgaggcaaagaaggtgccatcattgtggatcctgcccgggagctgaaggtcctcatcagtaacctcttagatctgctgacagaggtgggggtctctggccaaggccgagacaatgccctgaccctcctgattaaagcggtgccccggaagtctctcaaggaccccaacaacagcctcaccctctgggtcatcgaccaaggtctgaaaaagattttggaagtggggggctctctacaggaccctcctggggagctcgcagtgaccgcaaacagccgcatgagcgcctctattctcctcagcaagctctttgatgacctcaagtgtgatgcggagagggagaatttccacagactttgtgaaaactacatcaagagctggtttgagggccaagggctggccgggaagctacgggccatccagacggtgtcctgcctcctgcagggcccatgtgacgctggcaaccgggccttggagctgagcggtgtcatggagagtgtgattgctctgtgtgcctctgagcaggaggaggagcagctggtggccgtggaggctctgatccatgcagccggcaaggctaagcgggcctcattcatcactgccaatggtgtctcgctgctgaaggacctatataagtgcagcgagaaggacagcatccgcatccgggcgctagtgggactctgtaagctcggttcggctggagggactgacttcagcatgaagcagtttgctgaaggctccactctcaaactggctaagcagtgtcgaaagtggctgtgcaatgaccagatcgacgcaggcactcggcgctgggcagtggagggcctggcttacctgacctttgatgccgacgtgaaggaagagtttgtggaggatgcggctgctctgaaagctctgttccagctcagcaggttggaggagaggtcagtgctctttgcggtggcctcagcgctggtgaactgcaccaacagctatgactacgaggagcccgaccccaagatggtggagctggccaagtatgccaagcagcatgtgcccgagcagcaccccaaggacaagccaagcttcgtgcgggctcgggtgaagaagctgctggcagcgggtgtggtgtcggccatggtgtgcatggtgaagacggagagccctgtgctgaccagttcctgcagagagctgctctccagggtcttcttggctttagtggaagaggtagaggaccgaggcactgtggttgcccagggaggcggcagggcgctgatcccgctggccctggaaggcacggacgtggggcagacaaaggcagcccaggcccttgccaagctcaccatcacctccaacccggagatgaccttccctggcgagcggatctatgaggtggtccggcccctcgtctccctgttgcacctcaactgctcaggcctgcagaacttcgaggcgctcatggccctaacaaacctggctgggatcagcgagaggctccggcagaagatcctgaaggagaaggctgtgcccatgatagaaggctacatgtttgaggagcatgagatgatccgccgggcagccacggagtgcatgtgtaacttggccatgagcaaggaggtgcaggacctcttcgaagcccagggcaatgaccgactgaagctgctggtgctgtacagtggagaggatgatgagctgctacagcgggcagctgccgggggcttggccatgcttacctccatgcggcccacgctctgcagccgcattccccaagtgaccacacactggctggagatcctgcaggccctgcttctgagctccaaccaggagctgcagcaccggggtgctgtggtggtgctgaacatggtggaggcctcgagggagattgccagcaccctgatggagagtgagatgatggagatcttgtcagtgctagctaagggtgaccacagccctgtcacaagggctgctgcagcctgcctggacaaagcagtggaatatgggcttatccaacccaaccaagatggagagtgagggggttgtccctgggcccaaggctcatgcacacgctacctattgtggcacggagagtaaggacggaagcagctttggctggtggtggctggcatgcccaatactcttgcccatcctcgcttgctgccctaggatgtcctctgttctgagtcagcggccacgttcagtcacacagccctgcttggccagcactgcctgcagcctcactcagaggggccctttttctgtactactgtagtcagctgggaatggggaaggtgcatcccaacacagcctgtggatcctggggcatctggaagggcgcacacatcagcagcctcaccagctgtgagcctgctatcaggcctgcccctccaataaaagtgtgtagaactccaaaaaaaaaaaaaaaaaaaaaaaaaaaaaaaaaa

SEQ ID NO: 3349 - protein, 929 aa, Homo sapiens
MTASSVEQLRKEGNELFKCGDYGGALAAYTQALGLDATPQDQAVLHRNRAACHLKLEDYDKAETEASKAIEKDGGDVKALYRRSQALEKLGRLDQAVLDLQRCVSLEPKNKVFQEALRNIGGQIQEKVRYMSSTDAKVEQMFQILLDPEEKGTEKKQKASQNLVVLAREDAGAEKIFRSNGVQLLQRLLDMGETDLMLAALRTLVGICSEHQSRTVATLSILGTRRVVSILGVESQAVSLAACHLLQVMFDALKEGVKKGFRGKEGAIIVDPARELKVLISNLLDLLTEVGVSGQGRDNALTLLIKAVPRKSLKDPNNSLTLWVIDQGLKKILEVGGSLQDPPGELAVTANSRMSASILLSKLFDDLKCDAERENFHRLCENYIKSWFEGQGLAGKLRAIQTVSCLLQGPCDAGNRALELSGVMESVIALCASEQEEEQLVAVEALIHAAGKAKRASFITANGVSLLKDLYKCSEKDSIRIRALVGLCKLGSAGGTDFSMKQFAEGSTLKLAKQCRKWLCNDQIDAGTRRWAVEGLAYLTFDADVKEEFVEDAAALKALFQLSRLEERSVLFAVASALVNCTNSYDYEEPDPKMVELAKYAKQHVPEQHPKDKPSFVRARVKKLLAAGVVSAMVCMVKTESPVLTSSCRELLSRVFLALVEEVEDRGTVVAQGGGRALIPLALEGTDVGQTKAAQALAKLTITSNPEMTFPGERIYEVVRPLVSLLHLNCSGLQNFEALMALTNLAGISERLRQKILKEKAVPMIEGYMFEEHEMIRRAATECMCNLAMSKEVQDLFEAQGNDRLKLLVLYSGEDDELLQRAAAGGLAMLTSMRPTLCSRIPQVTTHWLEILQALLLSSNQELQHRGAVVVLNMVEASREIASTLMESEMMEILSVLAKGDHSPVTRAAAACLDKAVEYGLIQPNQDGE

SEQ ID NO: 3350 - DNA, 3585 bp, Homo sapiens
tggttgtgaccctgatgaccgtagacctcgtgcacttctgctgcggtcggggccggagtctgggctggagccaccgcaggcctccctctgggtcctccgccgcgagctccctgcaggtctctgcggggacagcttaggtgcgcccggagcttgcctgcacctgcgatccagagccaagcgccccgcccctgcccgggcgcgctccctccttagccctgcccctctctgaccccacctccgacgcaagagtggggcggggcagctgccggtggcgtcccgaacccagactcgccccgccccagagactgcgcctgcgcgggcacgagacaacctctccgcgatgactgtgagtggtccagggacccccgagccccggccggccacccccggggccagctcagtggagcagctgcggaaggagggcaatgagctgttcaaatgtggagactacgggggcgccctggcggcctacactcaggccctgggtctggacgcgacgccccaggaccaggccgttctgcaccggaaccgggccgcctgccacctcaagctggaagattacgacaaagcagaaacagaggcatccaaagccattgaaaaggatggtggggatgtcaaagcactctaccggcggagccaagccctagagaagctgggccgcctggaccaggctgtccttgacctgcagagatgtgtgagcttggagcccaagaacaaagttttccaggaggccttgcggaacatcgggggccagattcaggagaaggtgcgatacatgtcctcgacggatgccaaagtggaacagatgtttcagatactgttggacccagaagagaagggcactgagaaaaagcaaaaggcttctcagaacctggtggtgctggccagggaggatgctggagcggagaagatcttccggagtaatggggttcagctcttgcaacgtttactggacatgggagagactgacctcatgctggcggctctgcgtacgctggttggcatttgctctgagcatcagtcacggacagtggcaaccctgagcatactgggaactcggcgagtagtctccatcctgggcgtggaaagccaggctgtgtccctggctgcctgccacctgctgcaggttatgtttgatgccctcaaggaaggtgtcaaaaaaggcttccgaggcaaagaaggtgccatcattgtggatcctgcccgggagctgaaggtcctcatcagtaacctcttagatctgctgacagaggtgggggtctctggccaaggccgagacaatgccctgaccctcctgattaaagcggtgccccggaagtctctcaaggaccccaacaacagcctcaccctctgggtcatcgaccaaggtctgaaaaagattttggaagtggggggctctctacaggaccctcctggggagctcgcagtgaccgcaaacagccgcatgagcgcctctattctcctcagcaagctctttgatgacctcaagtgtgatgcggagagggagaatttccacagactttgtgaaaactacatcaagagctggtttgagggccaagggctggccgggaagctacgggccatccagacggtgtcctgcctcctgcagggcccatgtgacgctggcaaccgggccttggagctgagcggtgtcatggagagtgtgattgctctgtgtgcctctgagcaggaggaggagcagctggtggccgtggaggctctgatccatgcagccggcaaggctaagcgggcctcattcatcactgccaatggtgtctcgctgctgaaggacctatataagtgcagcgagaaggacagcatccgcatccgggcgctagtgggactctgtaagctcggttcggctggagggactgacttcagcatgaagcagtttgctgaaggctccactctcaaactggctaagcagtgtcgaaagtggctgtgcaatgaccagatcgacgcaggcactcggcgctgggcagtggagggcctggcttacctgacctttgatgccgacgtgaaggaagagtttgtggaggatgcggctgctctgaaagctctgttccagctcagcaggttggaggagaggtcagtgctctttgcggtggcctcagcgctggtgaactgcaccaacagctatgactacgaggagcccgaccccaagatggtggagctggccaagtatgccaagcagcatgtgcccgagcagcaccccaaggacaagccaagcttcgtgcgggctcgggtgaagaagctgctggcagcgggtgtggtgtcggccatggtgtgcatggtgaagacggagagccctgtgctgaccagttcctgcagagagctgctctccagggtcttcttggctttagtggaagaggtagaggaccgaggcactgtggttgcccagggaggcggcagggcgctgatcccgctggccctggaaggcacggacgtggggcagacaaaggcagcccaggcccttgccaagctcaccatcacctccaacccggagatgaccttccctggcgagcggatctatgaggtggtccggcccctcgtctccctgttgcacctcaactgctcaggcctgcagaacttcgaggcgctcatggccctaacaaacctggctgggatcagcgagaggctccggcagaagatcctgaaggagaaggctgtgcccatgatagaaggctacatgtttgaggagcatgagatgatccgccgggcagccacggagtgcatgtgtaacttggccatgagcaaggaggtgcaggacctcttcgaagcccagggcaatgaccgactgaagctgctggtgctgtacagtggagaggatgatgagctgctacagcgggcagctgccgggggcttggccatgcttacctccatgcggcccacgctctgcagccgcattccccaagtgaccacacactggctggagatcctgcaggccctgcttctgagctccaaccaggagctgcagcaccggggtgctgtggtggtgctgaacatggtggaggcctcgagggagattgccagcaccctgatggagagtgagatgatggagatcttgtcagtgctagctaagggtgaccacagccctgtcacaagggctgctgcagcctgcctggacaaagcagtggaatatgggcttatccaacccaaccaagatggagagtgagggggttgtccctgggcccaaggctcatgcacacgctacctattgtggcacggagagtaaggacggaagcagctttggctggtggtggctggcatgcccaatactcttgcccatcctcgcttgctgccctaggatgtcctctgttctgagtcagcggccacgttcagtcacacagccctgcttggccagcactgcctgcagcctcactcagaggggccctttttctgtactactgtagtcagctgggaatggggaaggtgcatcccaacacagcctgtggatcctggggcatctggaagggcgcacacatcagcagcctcaccagctgtgagcctgctatcaggcctgcccctccaataaaagtgtgtagaactccaaaaaaaaaaaaaaaaaaaaaaaaaaaaaaaaaa

SEQ ID NO: 3351 - protein, 944 aa, Homo sapiens
MTVSGPGTPEPRPATPGASSVEQLRKEGNELFKCGDYGGALAAYTQALGLDATPQDQAVLHRNRAACHLKLEDYDKAETEASKAIEKDGGDVKALYRRSQALEKLGRLDQAVLDLQRCVSLEPKNKVFQEALRNIGGQIQEKVRYMSSTDAKVEQMFQILLDPEEKGTEKKQKASQNLVVLAREDAGAEKIFRSNGVQLLQRLLDMGETDLMLAALRTLVGICSEHQSRTVATLSILGTRRVVSILGVESQAVSLAACHLLQVMFDALKEGVKKGFRGKEGAIIVDPARELKVLISNLLDLLTEVGVSGQGRDNALTLLIKAVPRKSLKDPNNSLTLWVIDQGLKKILEVGGSLQDPPGELAVTANSRMSASILLSKLFDDLKCDAERENFHRLCENYIKSWFEGQGLAGKLRAIQTVSCLLQGPCDAGNRALELSGVMESVIALCASEQEEEQLVAVEALIHAAGKAKRASFITANGVSLLKDLYKCSEKDSIRIRALVGLCKLGSAGGTDFSMKQFAEGSTLKLAKQCRKWLCNDQIDAGTRRWAVEGLAYLTFDADVKEEFVEDAAALKALFQLSRLEERSVLFAVASALVNCTNSYDYEEPDPKMVELAKYAKQHVPEQHPKDKPSFVRARVKKLLAAGVVSAMVCMVKTESPVLTSSCRELLSRVFLALVEEVEDRGTVVAQGGGRALIPLALEGTDVGQTKAAQALAKLTITSNPEMTFPGERIYEVVRPLVSLLHLNCSGLQNFEALMALTNLAGISERLRQKILKEKAVPMIEGYMFEEHEMIRRAATECMCNLAMSKEVQDLFEAQGNDRLKLLVLYSGEDDELLQRAAAGGLAMLTSMRPTLCSRIPQVTTHWLEILQALLLSSNQELQHRGAVVVLNMVEASREIASTLMESEMMEILSVLAKGDHSPVTRAAAACLDKAVEYGLIQPNQDGE

SEQ ID NO: 3352 - DNA, 2690 bp, Homo sapiens
taaaagctgcttcctgttggggcatgagtccggcgcgtgtcgggttttgagctgccgcggtcccgggactgagataaggcagctccagcccctggaaggccagagacttgccagtgtcccactagcgggctcttcgcaagaatccccccgggcccgccgcagccaggcggcggccggcagagggcgctgctcgggcatggcggaggagcggccgggggcctggttcggcttcggtttctgcggcttcgggcaggagctgggctccggacgcgggcgccaggtgcacagccccagtccgctgcgggcgggcgtcgacatctgccgcgtgagcgcgagctggagctacaccgctttcgtgacccgtggaggccgcttggagctgtcgggctcagccagcggcgcggcgggccgctgcaaggacgcgtgggcctcggaggggctcctcgcggtgctgcgcgccgggccggggccggaggcgttactgcaggtctgggcggccgaatcggcgctgcgtggggagccattgtgggcccagaatgtggtgcccgaggccgaaggggaagacgatccggccggtgaggcccaggctgggaggctacccctgctgccctgcgcccgtgcctacgtgagcccgcgggcgcccttctaccggcctctggctccggagctgcgggcacgccagctggagctgggcgccgagcacgcgttgctgctggacgctgctggccaggtgttctcctggggcgggggcaggcatggacagctgggccatgggaccctggaggcagagctggagccacggctgttggaggcgttgcagggcctagtcatggctgaggtggccgcggggggctggcattctgtgtgtgtgagtgagactggggatatttatatctggggctggaatgaatcagggcagctggccctgcccaccaggaacctggcagaggatggagagactgtcgcaagggaagccacagaactgaatgaagatggttctcaggtgaagagaacgggtggggctgaggatggagcccctgcccccttcatagctgtccagcccttcccggcattactggatctccccatgggctcagatgcagtcaaggccagctgtggatcccggcacacagctgtggtgacacgaacaggggagctctacacctggggctggggtaaatatggacagctgggccacgaggacaccaccagcttggatcggcctcgccgtgtggaatactttgtagataagcaactccaagtaaaggctgtcacctgtgggccgtggaacacctacgtgtatgctgtggagaaagggaagagctgacatgtgtacgtatatgtatatgcaacacctgtgagacccccattcaggtcaaggaaaaccattgcctgcaccccaagggccccatatttgcccctccccatcacagtcctgcccttcaccctcaagcacggtcctaaacttgtctgcactttagaaacacctggagagcattgaaaactctgctgcctaaggtcagcatcaatcaaaacaatgaaatcaatgaaacaatgaaaccagagcttctaggtgtgtggcctggatagtggtagattcaaagctccacccacctcatcccaggtacatttgatgtgcagctgagattggggcacattccaggtcatcgtcttctgtcagtcatttccctgctttcgtttgaattttaccattcttgtatgcagccttatacgacatagttgtgtttgcttttgagtgttagataaatggaatcctgtgtatgtgcttttgtgtcgtttttgtcactcagcattgtataatccatccttgttgggtcctggagttcatttttaatgctatatggtgttctgttgtatgaataatacctcaagtgatacagccttgttgatggtcatttttattgtttctgattttggtcattccacataattctttgtgcagtcttctgcacatgtgcacaagttcctttgcagaacattgagttgaattgctaagtcaggagatacctttaattttactagataactgttgcccccagcagggtggggtctactgtggctaaaatgtcaggtagatgcacactggttttaattggcatttccctggatactgatgaggttgagtagcttttcatttgttttggatggctgggcatggtggctcacacctgtagtcccagcactttgggaggctaagcagggagattgcttgaggcgaagagttcatatgtttattggccacttggagtttttctgttgtcaagtgcctgttcaagttttctggccttttaaaatgttctgtattttccttagtgatttttcttttggatatttcagatacaagtcttttgagagttagtattcagagtatcttctgctacaatgtagtttgtttcagtctctcttggtattaccaattttaatacttaggtgatgcttactccatgccaggtaaggctcaaagtgctttacaagtatcaacttattttgataaaataagcttatcagtagttttctttatagttaaattctatttgtgcatgtgtgtgtctgtggtttagcaaatgtttcccacccatggggtcttttttattgtggtaaaatatactgaacataaaatttatgttcaataaaaaacaaaaattgtttttaaccattttaaaaaaaaa

SEQ ID NO: 3353 - protein, 376 aa, Homo sapiens
MAEERPGAWFGFGFCGFGQELGSGRGRQVHSPSPLRAGVDICRVSASWSYTAFVTRGGRLELSGSASGAAGRCKDAWASEGLLAVLRAGPGPEALLQVWAAESALRGEPLWAQNVVPEAEGEDDPAGEAQAGRLPLLPCARAYVSPRAPFYRPLAPELRARQLELGAEHALLLDAAGQVFSWGGGRHGQLGHGTLEAELEPRLLEALQGLVMAEVAAGGWHSVCVSETGDIYIWGWNESGQLALPTRNLAEDGETVAREATELNEDGSQVKRTGGAEDGAPAPFIAVQPFPALLDLPMGSDAVKASCGSRHTAVVTRTGELYTWGWGKYGQLGHEDTTSLDRPRRVEYFVDKQLQVKAVTCGPWNTYVYAVEKGKS

SEQ ID NO: 3354 - DNA, 2774 bp, Homo sapiens
taaaagctgcttcctgttggggcatgagtccggcgcgtgtcgggttttgagctgccgcggtcccgggactgagctccttgggagcagacagctgtcctcactggcagaggaggagcgctcagtaaatgctcgctggacgaataaatggctagataagataaggcagctccagcccctggaaggccagagacttgccagtgtcccactagcgggctcttcgcaagaatccccccgggcccgccgcagccaggcggcggccggcagagggcgctgctcgggcatggcggaggagcggccgggggcctggttcggcttcggtttctgcggcttcgggcaggagctgggctccggacgcgggcgccaggtgcacagccccagtccgctgcgggcgggcgtcgacatctgccgcgtgagcgcgagctggagctacaccgctttcgtgacccgtggaggccgcttggagctgtcgggctcagccagcggcgcggcgggccgctgcaaggacgcgtgggcctcggaggggctcctcgcggtgctgcgcgccgggccggggccggaggcgttactgcaggtctgggcggccgaatcggcgctgcgtggggagccattgtgggcccagaatgtggtgcccgaggccgaaggggaagacgatccggccggtgaggcccaggctgggaggctacccctgctgccctgcgcccgtgcctacgtgagcccgcgggcgcccttctaccggcctctggctccggagctgcgggcacgccagctggagctgggcgccgagcacgcgttgctgctggacgctgctggccaggtgttctcctggggcgggggcaggcatggacagctgggccatgggaccctggaggcagagctggagccacggctgttggaggcgttgcagggcctagtcatggctgaggtggccgcggggggctggcattctgtgtgtgtgagtgagactggggatatttatatctggggctggaatgaatcagggcagctggccctgcccaccaggaacctggcagaggatggagagactgtcgcaagggaagccacagaactgaatgaagatggttctcaggtgaagagaacgggtggggctgaggatggagcccctgcccccttcatagctgtccagcccttcccggcattactggatctccccatgggctcagatgcagtcaaggccagctgtggatcccggcacacagctgtggtgacacgaacaggggagctctacacctggggctggggtaaatatggacagctgggccacgaggacaccaccagcttggatcggcctcgccgtgtggaatactttgtagataagcaactccaagtaaaggctgtcacctgtgggccgtggaacacctacgtgtatgctgtggagaaagggaagagctgacatgtgtacgtatatgtatatgcaacacctgtgagacccccattcaggtcaaggaaaaccattgcctgcaccccaagggccccatatttgcccctccccatcacagtcctgcccttcaccctcaagcacggtcctaaacttgtctgcactttagaaacacctggagagcattgaaaactctgctgcctaaggtcagcatcaatcaaaacaatgaaatcaatgaaacaatgaaaccagagcttctaggtgtgtggcctggatagtggtagattcaaagctccacccacctcatcccaggtacatttgatgtgcagctgagattggggcacattccaggtcatcgtcttctgtcagtcatttccctgctttcgtttgaattttaccattcttgtatgcagccttatacgacatagttgtgtttgcttttgagtgttagataaatggaatcctgtgtatgtgcttttgtgtcgtttttgtcactcagcattgtataatccatccttgttgggtcctggagttcatttttaatgctatatggtgttctgttgtatgaataatacctcaagtgatacagccttgttgatggtcatttttattgtttctgattttggtcattccacataattctttgtgcagtcttctgcacatgtgcacaagttcctttgcagaacattgagttgaattgctaagtcaggagatacctttaattttactagataactgttgcccccagcagggtggggtctactgtggctaaaatgtcaggtagatgcacactggttttaattggcatttccctggatactgatgaggttgagtagcttttcatttgttttggatggctgggcatggtggctcacacctgtagtcccagcactttgggaggctaagcagggagattgcttgaggcgaagagttcatatgtttattggccacttggagtttttctgttgtcaagtgcctgttcaagttttctggccttttaaaatgttctgtattttccttagtgatttttcttttggatatttcagatacaagtcttttgagagttagtattcagagtatcttctgctacaatgtagtttgtttcagtctctcttggtattaccaattttaatacttaggtgatgcttactccatgccaggtaaggctcaaagtgctttacaagtatcaacttattttgataaaataagcttatcagtagttttctttatagttaaattctatttgtgcatgtgtgtgtctgtggtttagcaaatgtttcccacccatggggtcttttttattgtggtaaaatatactgaacataaaatttatgttcaataaaaaacaaaaattgtttttaaccattttaaaaaaaaa

SEQ ID NO: 3355 - protein, 376 aa, Homo sapiens; identical to SEQ ID NO: 3353

SEQ ID NO: 3356 - DNA, 3128 bp, Homo sapiens
gcttcgccccgtggcgcggtttgaaattttgcggggctcaacggctcgcggagcggctacgcggagtgacatcgccggtgtttgcgggtggttgttgctctcggggccgtgtggagtaggtctggacctggactcacggctgcttggagcgtccgccatgaggagaagtgaggtgctggcggaggagtccatagtatgtctgcagaaagccctaaatcaccttcgggaaatatgggagctaattgggattccagaggaccagcggttacaaagaactgaggtggtaaagaagcatatcaaggaactcctggatatgatgattgctgaagaggaaagcctgaaggaaagactcatcaaaagcatatccgtctgtcagaaagagctgaacactctgtgcagcgagttacatgttgagccatttcaggaagaaggagagacgaccatcttgcaactagaaaaagatttgcgcacccaagtggaattgatgcgaaaacagaaaaaggagagaaaacaggaactgaagctacttcaagagcaagatcaagaactgtgcgaaattctttgtatgccccactatgatattgacagtgcctcagtgcccagcttagaagagctgaaccagttcaggcaacatgtgacaactttgagggaaacaaaggcttctaggcgtgaggagtttgtcagtataaagagacagatcatactgtgtatggaagaattagaccacaccccagacacaagctttgaaagagatgtggtgtgtgaagacgaagatgccttttgtttgtctttggagaatattgcaacactacaaaagttgctacggcagctggaaatgcagaaatcacaaaatgaagcagtgtgtgaggggctgcgtactcaaatccgagagctctgggacaggttgcaaatacctgaagaagaaagagaagctgtggccaccattatgtctgggtcaaaggccaaggtccggaaagcgctgcaattagaagtggatcggttggaagaactgaaaatgcaaaacatgaagaaagtgattgaggcaattcgagtggagctggttcagtactgggaccagtgcttttatagccaggagcagagacaagcttttgcccctttctgtgctgaggactacacagaaagtctgctccagctccacgatgctgagattgtgcggttaaaaaactactatgaagttcacaaggaactctttgaaggtgtccagaagtgggaagaaacctggaggcttttcttagagtttgagagaaaagcttcagatccaaatcgatttacaaaccgaggaggaaatcttctaaaagaagaaaaacaacgagccaagctccagaaaatgctgcccaagctggaagaagagttgaaggcacgaattgaattgtgggaacaggaacattcaaaggcatttatggtgaatgggcagaaattcatggagtatgtggcagaacaatgggagatgcatcgattggagaaagagagagccaagcaggaaagacaactgaagaacaaaaaacagacagagacagagatgctgtatggcagcgctcctcgaacacctagcaagcggcgaggactggctcccaatacaccgggcaaagcacgtaagctgaacactaccaccatgtccaatgctacggccaatagtagcattcggcctatctttggagggacagtctaccactcccccgtgtctcgacttcctccttctggcagcaagccagtcgctgcttccacctgttcagggaagaaaacaccccgtactggcaggcatggagccaacaaggagaacctggagctcaacggcagcatcctgagtggtgggtaccctggctcggcccccctccagcgcaacttcagcattaattctgttgccagcacctattctgagtttgcgaaggatccgtccctctctgacagttccactgttgggcttcagcgagaactttcaaaggcttccaaatctgatgctacttctggaatcctcaattcaaccaacatccagtcctgagaagccctgatcagtcaaccagctgtggcttcctgtgcctagactggacctaattatatgggggtgactttagtttttcttcagcttaggcgtgcttgaaaccttggccaggttccatgaccatgggcctaacttaaagatgtgaatgagtgttacagttgaaagcccatcataggtttagtggtcctaggagacttggttttgacttatatacatgaaaagtttatggcaagaagtgcaaattttagcatatggggcctgacttctctaccacataattctacttgctgaagcatgatcaaagcttgttttatttcaccactgtaggaaaatgattgactatgcccatccctgggggtaattttggcatgtatacctgtaactagtaattaacatcttttttgtttaggcatgttcaattaatgctgtagctatcatagctttgctcttacctgaagccttgtccccaccacacaggacagccttcctcctgaagagaatgtctttgtgtgtccgaagttgagatggcctgccctactgccaaagaggtgacaggaaggctgggagcagctttgttaaattgtgttcagttctgttacacagtgcattgccctttgttgggggtatgcatgtatgaacacacatgcttgtcggaacgctttctcggcgtttgtcccttggctctcatctcccccattcctgtgcctactttgcctgagttcttctacccccgcagttgccagccacattgggagtctgtttgttccaatgggttgagctgtctttgtcgtggagatctggaactttgcacatgtcactactggggaggtgttcctgctctagcttccacgatgaggcgccctctttacctatcctctcaatcactactcttcttgaagcactattatttattcttccgctgtctgcctgcagcagtactactgtcaacatagtgtaaatggttctcaaaagcttaccagtgtggacttggtgttagccacgctgtttactcatacagtacgtgtcctgtttttaaaatatacaattattcttaaaaataaattaaaatctgtatacttacatttcaaaaagaaaaaaaaaaaaaaaa

SEQ ID NO: 3357 - protein, 620 aa, Homo sapiens
MRRSEVLAEESIVCLQKALNHLREIWELIGIPEDQRLQRTEVVKKHIKELLDMMIAEEESLKERLIKSISVCQKELNTLCSELHVEPFQEEGETTILQLEKDLRTQVELMRKQKKERKQELKLLQEQDQELCEILCMPHYDIDSASVPSLEELNQFRQHVTTLRETKASRREEFVSIKRQIILCMEELDHTPDTSFERDVVCEDEDAFCLSLENIATLQKLLRQLEMQKSQNEAVCEGLRTQIRELWDRLQIPEEEREAVATIMSGSKAKVRKALQLEVDRLEELKMQNMKKVIEAIRVELVQYWDQCFYSQEQRQAFAPFCAEDYTESLLQLHDAEIVRLKNYYEVHKELFEGVQKWEETWRLFLEFERKASDPNRFTNRGGNLLKEEKQRAKLQKMLPKLEEELKARIELWEQEHSKAFMVNGQKFMEYVAEQWEMHRLEKERAKQERQLKNKKQTETEMLYGSAPRTPSKRRGLAPNTPGKARKLNTTTMSNATANSSIRPIFGGTVYHSPVSRLPPSGSKPVAASTCSGKKTPRTGRHGANKENLELNGSILSGGYPGSAPLQRNFSINSVASTYSEFAKDPSLSDSSTVGLQRELSKASKSDATSGILNSTNIQS

SEQ ID NO: 3358 - DNA, 3091 bp, Homo sapiens
gcttcgccccgtggcgcggtttgaaattttgcggggctcaacggctcgcggagcggctacgcggagtgacatcgccggtgtttgcgggtggttgttgctctcggggccgtgtggagtaggtctggacctggactcacggctgcttggagcgtccgccatgaggagaagtgaggtgctggcggaggagtccatagtatgtctgcagaaagccctaaatcaccttcgggaaatatgggagctaattgggattccagaggaccagcggttacaaagaactgaggtggtaaagaagcatatcaaggaactcctggatatgatgattgctgaagaggaaagcctgaaggaaagactcatcaaaagcatatccgtctgtcagaaagagctgaacactctgtgcagcgagttacatgttgagccatttcaggaagaaggagagacgaccatcttgcaactagaaaaagatttgcgcacccaagtggaattgatgcgaaaacagaaaaaggagagaaaacaggaactgaagctacttcaagagcaagatcaagaactgtgcgaaattctttgtatgccccactatgatattgacagtgcctcagtgcccagcttagaagagctgaaccagttcaggcaacatgtgacaactttgagggaaacaaaggcttctaggcgtgaggagtttgtcagtataaagagacagatcatactgtgtatggaagaattagaccacaccccagacacaagctttgaaagagatgtggtgtgtgaagacgaagatgccttttgtttgtctttggagaatattgcaacactacaaaagttgctacggcagctggaaatgcagaaatcacaaaatgaagcagtgtgtgaggggctgcgtactcaaatccgagagctctgggacaggttgcaaatacctgaagaagaaagagaagctgtggccaccattatgtctgggtcaaaggccaaggtccggaaagcgctgcaattagaagtggatcggttggaagaactgaaaatgcaaaacatgaagaaagtgattgaggcaattcgagtggagctggttcagtactgggaccagtgcttttatagccaggagcagagacaagcttttgcccctttctgtgctgaggactacacagaaagtctgctccagctccacgatgctgagattgtgcggttaaaaaactactatgaagttcacaaggaactctttgaaggtgtccagaagtgggaagaaacctggaggcttttcttagagtttgagagaaaagcttcagatccaaatcgatttacaaaccgaggaggaaatcttctaaaagaagaaaaacaacgagccaagctccagaaaatgctgcccaagctggaagaagagttgaaggcacgaattgaattgtgggaacaggaacattcaaaggcatttatggtgaatgggcagaaattcatggagtatgtggcagaacaatgggagatgcatcgattggagaaagagagagccaagcaggaaagacaactgaagaacaaaaaacagacagagacagagatgctgtatggcagcgctcctcgaacacctagcaagcggcgaggactggctcccaatacaccgggcaaagcacgtaagctgaacactaccaccatgtccaatgctacggccaatagtagcattcggcctatctttggagggacagtctaccactcccccgtgtctcgacttcctccttctggcagcaagccagtcgctgcttccacctgttcagggaagaaaacaccccgtactggcaggcatggagccaacaaggagaacctggagctcaacggcagcatcctgagtggtgggtaccctggctcggcccccctccagcgcaacttcagcattaattctgttgccagcacctattctgagtttgcgcgagaactttcaaaggcttccaaatctgatgctacttctggaatcctcaattcaaccaacatccagtcctgagaagccctgatcagtcaaccagctgtggcttcctgtgcctagactggacctaattatatgggggtgactttagtttttcttcagcttaggcgtgcttgaaaccttggccaggttccatgaccatgggcctaacttaaagatgtgaatgagtgttacagttgaaagcccatcataggtttagtggtcctaggagacttggttttgacttatatacatgaaaagtttatggcaagaagtgcaaattttagcatatggggcctgacttctctaccacataattctacttgctgaagcatgatcaaagcttgttttatttcaccactgtaggaaaatgattgactatgcccatccctgggggtaattttggcatgtatacctgtaactagtaattaacatcttttttgtttaggcatgttcaattaatgctgtagctatcatagctttgctcttacctgaagccttgtccccaccacacaggacagccttcctcctgaagagaatgtctttgtgtgtccgaagttgagatggcctgccctactgccaaagaggtgacaggaaggctgggagcagctttgttaaattgtgttcagttctgttacacagtgcattgccctttgttgggggtatgcatgtatgaacacacatgcttgtcggaacgctttctcggcgtttgtcccttggctctcatctcccccattcctgtgcctactttgcctgagttcttctacccccgcagttgccagccacattgggagtctgtttgttccaatgggttgagctgtctttgtcgtggagatctggaactttgcacatgtcactactggggaggtgttcctgctctagcttccacgatgaggcgccctctttacctatcctctcaatcactactcttcttgaagcactattatttattcttccgctgtctgcctgcagcagtactactgtcaacatagtgtaaatggttctcaaaagcttaccagtgtggacttggtgttagccacgctgtttactcatacagtacgtgtcctgtttttaaaatatacaattattcttaaaaataaattaaaatctgtatacttacatttcaaaaagaaaaaaaaaaaaaaaaaaaaa

SEQ ID NO: 3359 - protein, 606 aa, Homo sapiens
MRRSEVLAEESIVCLQKALNHLREIWELIGIPEDQRLQRTEVVKKHIKELLDMMIAEEESLKERLIKSISVCQKELNTLCSELHVEPFQEEGETTILQLEKDLRTQVELMRKQKKERKQELKLLQEQDQELCEILCMPHYDIDSASVPSLEELNQFRQHVTTLRETKASRREEFVSIKRQIILCMEELDHTPDTSFERDVVCEDEDAFCLSLENIATLQKLLRQLEMQKSQNEAVCEGLRTQIRELWDRLQIPEEEREAVATIMSGSKAKVRKALQLEVDRLEELKMQNMKKVIEAIRVELVQYWDQCFYSQEQRQAFAPFCAEDYTESLLQLHDAEIVRLKNYYEVHKELFEGVQKWEETWRLFLEFERKASDPNRFTNRGGNLLKEEKQRAKLQKMLPKLEEELKARIELWEQEHSKAFMVNGQKFMEYVAEQWEMHRLEKERAKQERQLKNKKQTETEMLYGSAPRTPSKRRGLAPNTPGKARKLNTTTMSNATANSSIRPIFGGTVYHSPVSRLPPSGSKPVAASTCSGKKTPRTGRHGANKENLELNGSILSGGYPGSAPLQRNFSINSVASTYSEFARELSKASKSDATSGILNSTNIQS

SEQ ID NO: 3360 - DNA, 3011 bp, Homo sapiens
gcttcgccccgtggcgcggtttgaaattttgcggggctcaacggctcgcggagcggctacgcggagtgacatcgccggtgtttgcgggtggttgttgctctcggggccgtgtggagtaggtctggacctggactcacggctgcttggagcgtccgccatgaggagaagtgaggtgctggcggaggagtccatagtatgtctgcagaaagccctaaatcaccttcgggaaatatgggagctaattgggattccagaggaccagcggttacaaagaactgaggtggtaaagaagcatatcaaggaactcctggatatgatgattgctgaagaggaaagcctgaaggaaagactcatcaaaagcatatccgtctgtcagaaagagctgaacactctgtgcagcgagttacatgttgagccatttcaggaagaaggagagacgaccatcttgcaactagaaaaagatttgcgcacccaagtggaattgatgcgaaaacagaaaaaggagagaaaacaggaactgaagctacttcaagagcaagatcaagaactgtgcgaaattctttgtatgccccactatgatattgacagtgcctcagtgcccagcttagaagagctgaaccagttcaggcaacatgtgacaactttgagggaaacaaaggcttctaggcgtgaggagtttgtcagtataaagagacagatcatactgtgtatggaagaattagaccacaccccagacacaagctttgaaagagatgtggtgtgtgaagacgaagatgccttttgtttgtctttggagaatattgcaacactacaaaagttgctacggcagctggaaatgcagaaatcacaaaatgaagcagtgtgtgaggggctgcgtactcaaatccgagagctctgggacaggttgcaaatacctgaagaagaaagagaagctgtggccaccattatgtctgggtcaaaggccaaggtccggaaagcgctgcaattagaagtggatcggttggaagaactgaaaatgcaaaacatgaagaaagtgattgaggcaattcgagtggagctggttcagtactgggaccagtgcttttatagccaggagcagagacaagcttttgcccctttctgtgctgaggactacacagaaagtctgctccagctccacgatgctgagattgtgcggttaaaaaactactatgaagttcacaaggaactctttgaaggtgtccagaagtgggaagaaacctggaggcttttcttagagtttgagagaaaagcttcagatccaaatcgatttacaaaccgaggaggaaatcttctaaaagaagaaaaacaacgagccaagctccagaaaatgctgcccaagctggaagaagagttgaaggcacgaattgaattgtgggaacaggaacattcaaaggcatttatggtgaatgggcagaaattcatggagtatgtggcagaacaatgggagatgcatcgattggagaaagagagagccaagcaggaaagacaactgaagaacaaaaaacagacagagacagagatgctgtatggcagcgctcctcgaacacctagcaagcggcgaggactggctcccaatacaccgggcaaagcacgtaagctgaacactaccaccatgtccaatgctacggccaatagtagcattcggcctatctttggagggacagtctaccactcccccgtgtctcgacttcctccttctggcagcaagccagtcgctgcttccacctgttcagggaagaaaacaccccgtactggcaggcatggagccaacaaggagaacctggagctcaacggcagcatcctgagtgcgagaactttcaaaggcttccaaatctgatgctacttctggaatcctcaattcaaccaacatccagtcctgagaagccctgatcagtcaaccagctgtggcttcctgtgcctagactggacctaattatatgggggtgactttagtttttcttcagcttaggcgtgcttgaaaccttggccaggttccatgaccatgggcctaacttaaagatgtgaatgagtgttacagttgaaagcccatcataggtttagtggtcctaggagacttggttttgacttatatacatgaaaagtttatggcaagaagtgcaaattttagcatatggggcctgacttctctaccacataattctacttgctgaagcatgatcaaagcttgttttatttcaccactgtaggaaaatgattgactatgcccatccctgggggtaattttggcatgtatacctgtaactagtaattaacatcttttttgtttaggcatgttcaattaatgctgtagctatcatagctttgctcttacctgaagccttgtccccaccacacaggacagccttcctcctgaagagaatgtctttgtgtgtccgaagttgagatggcctgccctactgccaaagaggtgacaggaaggctgggagcagctttgttaaattgtgttcagttctgttacacagtgcattgccctttgttgggggtatgcatgtatgaacacacatgcttgtcggaacgctttctcggcgtttgtcccttggctctcatctcccccattcctgtgcctactttgcctgagttcttctacccccgcagttgccagccacattgggagtctgtttgttccaatgggttgagctgtctttgtcgtggagatctggaactttgcacatgtcactactggggaggtgttcctgctctagcttccacgatgaggcgccctctttacctatcctctcaatcactactcttcttgaagcactattatttattcttccgctgtctgcctgcagcagtactactgtcaacatagtgtaaatggttctcaaaagcttaccagtgtggacttggtgttagccacgctgtttactcatacagtacgtgtcctgtttttaaaatatacaattattcttaaaaataaattaaaatctgtatacttacatttcaaaaagaaaaaaaaaaaaaaaaaa

SEQ ID NO: 3361 - protein, 566 aa, Homo sapiens
MRRSEVLAEESIVCLQKALNHLREIWELIGIPEDQRLQRTEVVKKHIKELLDMMIAEEESLKERLIKSISVCQKELNTLCSELHVEPFQEEGETTILQLEKDLRTQVELMRKQKKERKQELKLLQEQDQELCEILCMPHYDIDSASVPSLEELNQFRQHVTTLRETKASRREEFVSIKRQIILCMEELDHTPDTSFERDVVCEDEDAFCLSLENIATLQKLLRQLEMQKSQNEAVCEGLRTQIRELWDRLQIPEEEREAVATIMSGSKAKVRKALQLEVDRLEELKMQNMKKVIEAIRVELVQYWDQCFYSQEQRQAFAPFCAEDYTESLLQLHDAEIVRLKNYYEVHKELFEGVQKWEETWRLFLEFERKASDPNRFTNRGGNLLKEEKQRAKLQKMLPKLEEELKARIELWEQEHSKAFMVNGQKFMEYVAEQWEMHRLEKERAKQERQLKNKKQTETEMLYGSAPRTPSKRRGLAPNTPGKARKLNTTTMSNATANSSIRPIFGGTVYHSPVSRLPPSGSKPVAASTCSGKKTPRTGRHGANKENLELNGSILSARTFKGFQI

SEQ ID NO: 3362 - DNA, 2509 bp, Homo sapiens
tttttctggtagaaggcggggttctcctcgtacgctgcggagtctctgcggggtgtagaccggaatcctgctgacgggcagagtggatcagggagggagggtcgagacacggtggctgcaggtctgagacaaggctgctccgaggtagtagctctcttgcctggaggtggccattcattcctggagtgctgctgaggagcgagggcccatctggggtctctggaagtcggtgcccaggcctgaaggatagccccccttgcgcttccctgggctgcggccggccttctcagaacgaagggcgtccttccaccccgcggcgcaggtgaccgctgccatggcttttccccatcggccggacgcccctgagctgcctgacttctccatgctgaagaggctggctcgagaccagctcatctatctgctggagcagcttcctggaaaaaaggatttattcattgaggcagatctcatgagccctttggatcgaattgccaatgtctccatcctgaagcaacacgaagtagacaagctatacaaggtggagaacaagccagccctcagctccaatgaacaattgtgcttcttggtcagaccccgcatcaagaatatgcgatacattgccagtcttgtcaatgctgacaaattggctggccgaactcgcaaatacaaagtgatcttcagccctcaaaagttctatgcgtgtgagatggtgcttgaggaagagggaatctatggagatgtgagctgtgatgaatgggccttctctttgctgcctcttgatgtggatctgctgagcatggaactaccagaatttttcagggattactttctggaaggagatcagcgttggatcaacactgtagctcaggccttacaccttctcagcactctctatggaccctttccaaactgctatggaattggcaggtgcgccaagatggcatatgaattgtggaggaacctggaggaggaggaggatggcgaaaccaagggccgaaggccagagattggacatatctttctcttggacagagatgtggactttgtgacagcactttgctcccaagtggtttatgagggcctagtagatgacaccttccgcatcaagtgtgggagtgtcgactttggcccagaagtcacatcctctgacaagagcctgaaggtgctactcaatgccgaggacaaggtgtttaatgagattcggaacgagcacttctccaatgtctttggcttcttgagccagaaggcccggaacttgcaggcccagtatgatcgccggagaggcatggacattaagcagatgaagaatttcgtgtcccaggagctcaagggcctgaaacaggagcaccgcctgctgagtctccatattggggcctgtgaatccatcatgaagaagaaaaccaagcaggatttccaggagctaatcaagactgagcatgcactgctagaggggttcaacatccgggagagcaccagctacattgaggaacacatagaccggcaggtgtcgcctatagaaagcctgcgcctcatgtgccttttgtccatcactgagaatggtttgatccccaaggattaccgatctctgaaaacacagtatctgcagagctatggccctgagcacctgctaaccttctccaatctgcgaagagctgggctcctaacggagcaggcccccggggacaccctcacagccgtggagagtaaagtgagcaagctggtgaccgacaaggctgcaggaaagattactgatgccttcagttctctggccaagaggagcaattttcgtgccatcagcaaaaagctgaatttgatcccacgtgtggacggcgagtatgatctgaaagtgccccgagacatggcttacgtcttcagtggtgcttatgtgcccctgagctgccgaatcattgagcaggtgctagagcggcgaagctggcagggccttgatgaggtggtacggctgctcaactgcagtgactttgcattcacagatatgactaaggaagacaaggcttccagtgagtccctgcgcctcatcttggtggtgttcttgggtggttgtacattctctgagatctcagccctccggttcctgggcagagagaaaggctacaggttcattttcctgacgacagcagtcacaaacagcgctcgccttatggaggccatgagtgaggtgaaagcctgatgtttttcccggccagtgttgacatcttccctgaacacattcctcagtgagatgcaggcatctggcacccagctgctataaccaagtgtccaccaactacctgctaagagccgggagcatggaacgtgttgggatttagagaacattatctgagaaaagagttcacttcctgctcccaggatatttctcttttctgtttatgaagtacaacccatgctgctaagatgcgagcaggaagaggcatcctttgctaaatcctgtttgaatgtcattgtaaataaagcctctgctctcagatgtaaaaaaaaaaaaaaaaaaaaa

SEQ ID NO: 3363 - protein, 617 aa, Homo sapiens
MAFPHRPDAPELPDFSMLKRLARDQLIYLLEQLPGKKDLFIEADLMSPLDRIANVSILKQHEVDKLYKVENKPALSSNEQLCFLVRPRIKNMRYIASLVNADKLAGRTRKYKVIFSPQKFYACEMVLEEEGIYGDVSCDEWAFSLLPLDVDLLSMELPEFFRDYFLEGDQRWINTVAQALHLLSTLYGPFPNCYGIGRCAKMAYELWRNLEEEEDGETKGRRPEIGHIFLLDRDVDFVTALCSQVVYEGLVDDTFRIKCGSVDFGPEVTSSDKSLKVLLNAEDKVFNEIRNEHFSNVFGFLSQKARNLQAQYDRRRGMDIKQMKNFVSQELKGLKQEHRLLSLHIGACESIMKKKTKQDFQELIKTEHALLEGFNIRESTSYIEEHIDRQVSPIESLRLMCLLSITENGLIPKDYRSLKTQYLQSYGPEHLLTFSNLRRAGLLTEQAPGDTLTAVESKVSKLVTDKAAGKITDAFSSLAKRSNFRAISKKLNLIPRVDGEYDLKVPRDMAYVFSGAYVPLSCRIIEQVLERRSWQGLDEVVRLLNCSDFAFTDMTKEDKASSESLRLILVVFLGGCTFSEISALRFLGREKGYRFIFLTTAVTNSARLMEAMSEVKA

SEQ ID NO: 3364 - DNA, 2740 bp, Homo sapiens
ggcggcggcggcggcggcgaagaactgttccttccacctcttcagccccggcaggacgggggcggccgccgcgaacccggggcggggacagcacgcagcctcgaggcgcgcacccccgcccggcagcggccccgacacccggggcgagcgggaaaacggcaacggcggcggcggcggcggcggcgggggaaggatgcaggggaagaagccgggcggttcgtcgggcggcggccggagcggcgagctgcagggggacgaggcgcagaggaacaagaaaaagaaaaagaaggtgtcctgcttttccaacatcaagatcttcctggtgtccgagtgcgccctgatgctggcgcagggcacggtgggcgcctacctggtgagcgtcctgaccaccctggagcgtaggttcaacctgcagagcgctgacgtgggtgtgatcgctagcagcttcgagatcgggaacctggcgctcatcctcttcgtgagctacttcggggcacgcgggcaccggccgcgcctgatcggctgcggcggcatcgtcatggcgctgggcgcgctgctgtcggcgctgcccgagttcctgacccaccagtacaagtacgaggcgggcgagatccgctggggcgccgagggccgcgacgtctgcgcagccaacggctcgggcggcgacgaggggcccgaccccgacctcatctgccgcaaccggacggctaccaacatgatgtacttgctgctcattggggcccaggtgctcctgggcatcggtgctacccctgtgcagcccctgggcgtctcctactacgacgaccacgtgcggaggaaggactcctcgctctatataggaatcctgttcacgatgctggtatttggaccagcctgcgggtttatcctgggctctttctgtaccaaaatctacgtggatgcggtcttcattgacacaagtaacctggacatcactccggacgacccccgctggatcggagcctggtggggtggctttctgctctgcggtgccttactcttcttctcttccctcttgatgtttgggtttccacagtccctgcccccgcactcagaccccgccatggaaagcgagcaggccatgctctccgaaagagaatacgagagacccaagcccagcaacggggtcctgaggcaccccctggagccagacagcagtgcctcctgtttccagcagctgagagtgatcccgaaggtcaccaagcacctgctctcaaaccctgtgttcacctgcatcatcctggccgcctgcatggagattgcagtggtggctggcttcgctgcctttttggggaagtacctggagcagcagtttaacctcaccacctcttctgccaaccagctgcttgggatgactgcgatcccgtgtgcttgtctgggtatcttcctgggaggtcttttggtgaagaagctcagcctgtctgccctgggggccattcggatggccatgctcgtcaacctggtgtccactgcttgctacgtctccttcctcttcctgggctgcgacactggccctgtggctggggttactgttccctatggaaacagcacagcacctggctcagccctggacccctactcgccctgcaataataactgtgaatgccaaaccgattccttcactccagtgtgtggggcagatggcatcacctacctgtctgcctgctttgctggctgcaacagcacgaatctcacgggctgtgcgtgcctcaccaccgtccctgctgagaacgcaaccgtggttcctggaaaatgccccagtcctgggtgccaagaggccttcctcactttcctctgtgtgatgtgtatctgcagcctgatcggtgccatggcacagacaccctcagtcatcatcctcatcaggacagtcagccctgaactcaagtcttacgctttgggagttctttttctcctccttcgtttgttgggcttcatccctccacccctcatcttcggggctggcatcgactccacctgcctgttctggagcacgttctgtggggagcaaggcgcctgcgtcctctacgacaatgtggtctaccgatacctgtatgtcagcatcgccatcgcgctcaaatccttcgccttcatcctgtacaccaccacgtggcagtgcctgaggaaaaactataaacgctacatcaaaaaccacgagggcgggctgagcaccagtgagttctttgcctctactctgaccctagacaacctggggagggaccctgtgcccgcaaaccagacacataggacaaagtttatctataacctggaagaccatgagtggtgtgaaaacatggagtccgttttatagtgactaaaggagggctgaactctgtattagtaatccaagggtcatttttttcttaaaaaaagaaaaaaaggttccaaaaaaaaccaaaactcagtacacacacacaggcacagatgcacacacacgcagacagacacaccgactttgtcctttttctcagcatcagagccagacaggattcagaataaggagagaatgacatcgtgcggcagggtcctggaggccactcgcgcggctgggccacagagtctactttgaaggcacctcatggttttcaggatgctgacagctgcaagcaacaggcactgccaaattcagggaacagtggtggccagcttggaggatggacatttctggatacacatacacatacaaaacagaaaacattttttaaaagaagtttcctaaaataaa

SEQ ID NO: 3365 - protein, 710 aa, Homo sapiens
MQGKKPGGSSGGGRSGELQGDEAQRNKKKKKKVSCFSNIKIFLVSECALMLAQGTVGAYLVSVLTTLERRFNLQSADVGVIASSFEIGNLALILFVSYFGARGHRPRLIGCGGIVMALGALLSALPEFLTHQYKYEAGEIRWGAEGRDVCAANGSGGDEGPDPDLICRNRTATNMMYLLLIGAQVLLGIGATPVQPLGVSYYDDHVRRKDSSLYIGILFTMLVFGPACGFILGSFCTKIYVDAVFIDTSNLDITPDDPRWIGAWWGGFLLCGALLFFSSLLMFGFPQSLPPHSDPAMESEQAMLSEREYERPKPSNGVLRHPLEPDSSASCFQQLRVIPKVTKHLLSNPVFTCIILAACMEIAVVAGFAAFLGKYLEQQFNLTTSSANQLLGMTAIPCACLGIFLGGLLVKKLSLSALGAIRMAMLVNLVSTACYVSFLFLGCDTGPVAGVTVPYGNSTAPGSALDPYSPCNNNCECQTDSFTPVCGADGITYLSACFAGCNSTNLTGCACLTTVPAENATVVPGKCPSPGCQEAFLTFLCVMCICSLIGAMAQTPSVIILIRTVSPELKSYALGVLFLLLRLLGFIPPPLIFGAGIDSTCLFWSTFCGEQGACVLYDNVVYRYLYVSIAIALKSFAFILYTTTWQCLRKNYKRYIKNHEGGLSTSEFFASTLTLDNLGRDPVPANQTHRTKFIYNLEDHEWCENMESVL

SEQ ID NO: 3366 - DNA, 2600 bp, Homo sapiens
acatgcgccctgacagcccaacaatggcggcgcccgcggagtcgctgaggaggcggaagactgggtactcggatccggagcctgagtcgccgcccgcgccggggcgtggccccgcaggctctccggcccatcttcacacgggcaccttctggctgacccggatcgtgctcctgaaggccctagccttcgtgtacttcgtggcattcctggtggctttccatcagaacaagcagctcatcggtgacagggggctgcttccctgcagagtgttcctgaaggacttccagcagtacttccaggacaggacaagctgggaagtcttcagctacatgcccaccatcctctggctgatggactggtcagacatgaactccaacctggacttgctggctcttctcggactgggcatctcgtctttcgtactgatcacgggttgcgccaacatgcttctcatggctgccctgtggggcctctacatgtccctggttaatgtgggccatgtctggtactctttcggatgggagtcccagcttctggagacgggattcctggggatcttcctgtgccctctgtggacgctgtcaaggctgccccagcatacccccacatcccggattgtcctgtggggcttccggtggctgatcttcaggatcatgcttggagcaggcctgatcaagatccggggggaccggtgctggcgagacctcacctgcatggacttccactatgagacccagccgatgcccaatcctgtggcatactacctgcaccactcaccctggtggttccatcgcttcgagacgctcagcaaccacttcatcgagctcctggtgcccttcttcctcttcctcggccggcgggcgtgcatcatccacggggtgctgcagatcctgttccaggccgtcctcatcgtcagcgggaacctcagcttcctgaactggctgactatggtgcccagcctggcctgctttgatgacgccaccctgggattcttgttcccctctgggccaggcagcctgaaggaccgagttctgcagatgcagagggacatccgaggggcccggcccgagcccagattcggctccgtggtgcggcgtgcagccaacgtctcgctgggcgtcctgctggcctggctcagcgtgcccgtggtcctcaacttgctgagctccaggcaggtcatgaacacccacttcaactctcttcacatcgtcaacacttacggggccttcggaagcatcaccaaggagcgggcggaggtgatcctgcagggcacagccagctccaacgccagcgcccccgatgccatgtgggaggactacgagttcaagtgcaagccaggtgaccccagcagacggccctgcctcatctccccgtaccactaccgcctggactggctgatgtggttcgcggccttccagacctacgagcacaacgactggatcatccacctggctggcaagctcctggccagcgacgccgaggccttgtccctgctggcacacaaccccttcgcgggcaggcccccgcccaggtgggtccgaggagagcactacaggtacaagttcagccgtcctgggggcaggcacgccgccgagggcaagtggtgggtgcggaagaggatcggagcctacttccctccgctcagcctggaggagctgaggccctacttcagggaccgtgggtggcctctgcccgggcccctctagacgtgcaccagaaataaaggcgaagacccagcccctcggcggctcagcaacgtttgcccttccctgcgcccagcccaagctgggcatcgccaagagagacgtggagaggagagcggtgggacccagcccccagcacgggggtccagggtggggtctgttgtcacatactgtggcggctcccaggccctgcccacctggggccccacatccaggccaacccttgtcccaggcgccaggggctctgatctcccatccatcccaccctcctcccagaggcccagcctggggctgtgccgcccacaggagttgagacaatggcaatcctgacaccttcctccactacagccctgaccatagacccagccaggtagctcttggggtctctagcgtcccagggcctggtttctgttccctcttcaatggtgtgttcccagccaggtcctgaccctcagagccaagtccctgtcacgtctggggcagccaaaccctcgccccacagggacctggacacgcccggccaggatgtggggttggatgggccattttctgtcctatccctcatctccacccccgccacagcctacacgcatcccacacatgcaggcacacacagcctgtgcacacatgtgttcttggcccggtttcatccccccatgactggtgtctgtgaggtgcagatggacacagcgcacacccagaccctccaccaggctgtgacctcgctgcctctgaggccttgacaaggcccctcaatcggaggacagccggccgtgcacactttcatcatcgtcggacaaacagcgtctactgcacatttttcttattcctattcttgagccatagctatggcatattcttctactattcctattataccacttaccagcttactcg

SEQ ID NO: 3367 - protein, 567 aa, Homo sapiens
MRPDSPTMAAPAESLRRRKTGYSDPEPESPPAPGRGPAGSPAHLHTGTFWLTRIVLLKALAFVYFVAFLVAFHQNKQLIGDRGLLPCRVFLKDFQQYFQDRTSWEVFSYMPTILWLMDWSDMNSNLDLLALLGLGISSFVLITGCANMLLMAALWGLYMSLVNVGHVWYSFGWESQLLETGFLGIFLCPLWTLSRLPQHTPTSRIVLWGFRWLIFRIMLGAGLIKIRGDRCWRDLTCMDFHYETQPMPNPVAYYLHHSPWWFHRFETLSNHFIELLVPFFLFLGRRACIIHGVLQILFQAVLIVSGNLSFLNWLTMVPSLACFDDATLGFLFPSGPGSLKDRVLQMQRDIRGARPEPRFGSVVRRAANVSLGVLLAWLSVPVVLNLLSSRQVMNTHFNSLHIVNTYGAFGSITKERAEVILQGTASSNASAPDAMWEDYEFKCKPGDPSRRPCLISPYHYRLDWLMWFAAFQTYEHNDWIIHLAGKLLASDAEALSLLAHNPFAGRPPPRWVRGEHYRYKFSRPGGRHAAEGKWWVRKRIGAYFPPLSLEELRPYFRDRGWPLPGPL

SEQ ID NO: 3368 - DNA, 3069 bp, Homo sapiens
ggcgagggtcggggccaccgcgcggcgacctcgggtcccggagcgaccgcagggcagccccgggcgccggccccggtgcgcgtctcctgtgcgcgcccctccgcgcgcggccccgatgctggacatgagcgaggcccgctcccagccgccctgcagcccgtccggcaccgccagctccatgtcgcacgtggaggactcggactcggacgcgccgccgtctcccgccggctccgagggcctgggccgcgcgggggtcgcggtggggggcgcccggggcgacccggcggaggcggcggacgagcgcttcccggcctgcatccgcgacgccgtgtcgcaggtgctcaagggctacgactggagtctggtgcccatgccggtgcgcggcggcggcggcggcgcgctcaaagccaagccgcatgtgaagcggcccatgaacgcattcatggtgtgggcgcaggcggcgcgccgcaagctggccgaccagtacccgcacctgcacaacgccgagctcagcaagacgctgggcaagctgtggcgcttgctgagcgagagcgagaagcggcccttcgtggaggaggcagagcgccttcgcgtgcagcacaagaaggaccaccccgactacaagtaccagccacggcgcaggaagagcgccaaagccggccacagcgactccgactcgggcgcggagctgggaccccaccctggcggcggtgccgtgtacaaggctgaagcagggcttggagatgggcaccaccatggcgaccacacagggcagacccacgggccgcccaccccgcccaccacccccaagacggagctgcagcaggcgggcgccaagccggagctgaagctggagggacgccggccggtggacagcgggcgccagaacatcgacttcagcaacgtggacatctcggagctcagcagcgaggtcatgggcaccatggacgccttcgacgtccacgagttcgaccagtacctgcccctgggcggccccgccccacccgagccgggccaggcctatgggggcgcctacttccacgccggggcgtcccccgtgtgggcccacaagagtgccccgtcggcctccgcgtcgcccaccgagacgggtcccccacggccgcacatcaagacggagcagccgagccccggccactacggcgaccagccccgaggctcgcccgactacggttcctgcagcggccagtccagcgccaccccggccgcccccgccggccccttcgccggctcacagggcgactatggcgacctgcaggcctccagctactatggtgcctaccctggctacgcacccggcctctaccagtacccctgcttccactcgccgcgccggccctacgcctcacccctgctcaacggcctggccctgccgcccgcccacagccccaccagtcactgggaccagccggtgtacaccaccctgaccaggccctgagggcccagccgcggggagggactcgcaggcgtcagggggcagccttgtcccggcccagtgtgtgtgaccagggcgggaggggccccagtggctgagctccaagtgcctgctgaagtctgcagggaaacacgcttgctgcccgtggccctcggcctccagatggccacacctctgccgacgacggaccagctccctctcccttctatctttctttttgaggtggtgggattattccacaaagaagggctgccgtttggtccctcttccgtgaggactggcggcaccagcaccttcgctttgcatctcggtagaggagaaacggcagcacagcccaaggaccaaaggagggggtggcaggggccttgcagggcgctgtgaggtccaggccggtcttggcgccgagagcccctgcactcaaggccacattccctcgacaacggctgcacgggctgtccgggatccggggtgtctgtccgcagactgggatgagtctactcgagcatctccgggacctgcctgtcagatctgaggtgtctccttgctggcagagtgcgctcacgcgagggctggctgtgatgaacacatctctcttttatttttatgtttttgataatttttatttttgaagcttaaatgtgtttcttctgaaagctgttaaagatgtatttatgttctgtgttattttatctttaattaatgaggtaattcgggcaaagagtagaatttaagacaaaacggaagctgggaagcttcccttgagggcaggcaggaggtggagttgcagctgttggccggcatcacgttgctcgttgctcggcttatgggaggccgccctggagggcccggaggtcccaaggtccctgggaggactgggcccctcatgcctcgagcttggcaaccgaaaacccgagggaggagaagggacctgccttgtgacatctctgatcaggttggggtgccccagcacccagtaccagtttggggtttgggaagcaggactccgtccctgtccccgactgtgccacgtggtaggacacataggacacaggaattcctgggtccttgcccatgactgtgccatgtggtaggacacaggacacaggaattcctggaaagtggtggcttcagaagtgatcttggctcgcaggcaccagtgccacctaccaagctgtgaaactaaaccttctccactaaacgtcgttagggcctcagttctagacgagtcatacctgattcacctgcactgcttcccctgtgtgctgagcatagagcatacaatagcgcctacttcacggaaacttgtgcctttaaactttgtaaacttaaacacagccgagaagttgcttctttgtactttttctacttttcctacttttttgtagaaaaaaaagataatgcctctgcttctatttctctgggggtgggggtgggggccgggagccgtcgcagacccgtttcatgcagcgtctcccttggcaccgcgttcggaggacgcaccctcactcccctgctgccttcactcctttctgaccaagcaacgctaacttttgtacagatcgatttgataaaattaaacaaagtgctttttatggaaaaaaaaaaaaaaaaaaaaa

SEQ ID NO: 3369 - protein, 446 aa, Homo sapiens [sequence omitted]

SEQ ID NO: 3370 - DNA, 2866 bp, Homo sapiens
ggaaaataagccaggagaggaaggagcggcgggcaggtggccccgggagcccagacggacggctgctgtcgatatggcgacagctgccctgtggccgcccctgcacccagatggcgcctggcctggccgcagcatcctggagtctgaggccagcacctgcgtctccctgaagcccctcagagcctgccctgcagtgctgctgccctcgtctaccagtggctcaagcctgtcatcccagcactgtgggaggccgaggcgggtggatcacctgaggacaggagttcaagaccagcctgggcaacatggctatatggaaagcacaggtgtttctgcttctggagaggccccaggaagcttccaaccgtggtggaaggcgaagcgggagcaggtgtctcacatggcgtgagcgggaacgagaaagacagagcagggaaacgtgcagaggaaatggttggagagcgaagtccaggcacaggggccatgagagccggaccccacgcagctgcagaccccgacccgaactgcatgcggctgaggacccccaagccaggcagaccccgacccagaccccacgcggccgcggacccccgacctcgacccaaactgcatgcggctgaggacccccaagccaggcagacgccaatccagaccccacgcggccgcggaccccaacccagacagaccccgacccacccgtgcagcccccagccccaaaagtcaaaccccagcgtccccccagggcggcccgggctccctcagatacagcagcttcctgaggtggcctcacccgcaactccagaccaatcagagaaggccaaatgggctccccaagcccagcaggtgggacccccgatctagagagccccttccccgccccaggccaacagccaccctcgggctccgcatcaggtctgccaaatgcaggggcgaggggccgaccccgccacgggaaccaaactcaggaaacagcccatccagcgtccatctccatccggacccgccgccgcggccgcaggttcacgcgccgttccgcggagatctctcaggcgcctctggcccggcagaaacccgcggttccgatgacagaggtcctggtgggaatcgcaccgcctgccgttcctgcctccgcggaggatgcgctgccctaaactgcccccggctcttcatcccccaacccccggcagcctccgaccctcccccggccggcgcagctcagcctttcgcagacgcgggggagctggaatccgaccacgcgcagccttctcaccgtggtgcacgcttcgggccccccacgcctttcccaggcttcatcacccatttctctccagcgctgaaggaaacctcccagatgcttctccactcacccaccgaagcaggtctcggttgcccccagccccgggccctcccgagaacactgcaagcccccactggtcccctcccggcaaccccacggcccatccccaaacctgcactcaccctgtggggcctccaccctttggaggaaggacgtgtcaaagcttggaggtgcgcggcctgtctaacctccgcccaaggcgcgcggcaggcgacaggtctcagcccggatcagcgtggtccaaaaggacttatcgttaaaagtgctggtcccagaacccaaggggaagacatgctggttctctgatgagctgggccgcctcctccaggaagcctcctccttggagctctgtagccatcgtgggcttgcaagagtcaaagggcctggcccacagcggcgcccggcactgagctggacagtgtcctgcccccaaaattcatgtccgcccagaacctcagaatgcaaccttccctggtagtagggctttgcagatgtaattaaggatctggggacgaggtcaccctggattgaggctgagtcccaagtcagtcactggtgttcctccatgaagagcagagcagaatagagacagatgcacagagcaggccctgtgaggacagaggcagggactggagcgtcggccgcagcaggggcgtggagcccccagagctggaagagggagggatcctccccagggcctccggaaggagtgtgctgcgtgctgcccacaccgtgattttggactcgtggcatccagaactgggagagaataaatttctgatgttgtaagcctgcactacagcagccccaggacgctgaaatagttcagccggtgcaggctcctccctccctccctctctcttgttgtgagatattttttagacggggtctcacctgtcgctggagtgcagtggtgtgatcatagctcactggagcctctaatgcctgggctcaagcgatcctcccacctcagcctcccgagtagctgggactacaggtgccatcagacctggctaatttttaaaaatctttttagagatgggggaggtctccctatgtggcccaggctggccttgaactcttgggctcaagtgatcctcttgccttggcctcccaaagtgttaggatggcaggcttgagccaccatgcctggcagctccatctgtgttgactcctgaagcccctcatcttggctaatccggacaggcttgctggggaccccatctccccttggagactttgggatgtggctggatgtccaagtggccggggtcctccacagcccccagcttcccagggcgggaggcaggctgtgtcctcggtgggcactgacagtgaggctgaaatgtttgcacttcacatttccacatttaggggcattttgttgttgactcattcaaagctcttttaagtcgcttaatttgctgctcagagggaaatgaaaagggagccattttccctgatttgtttgcctcatcaacttttcaatcaataaaaaagtgcattttgctc

SEQ ID NO: 3371 - protein, 350 aa, Homo sapiens
MRLRTPKPGRRQSRPHAAADPNPDRPRPTRAAPSPKSQTPASPQGGPGSLRYSSFLRWPHPQLQTNQRRPNGLPKPSRWDPRSREPLPRPRPTATLGLRIRSAKCRGEGPTPPREPNSGNSPSSVHLHPDPPPRPQVHAPFRGDLSGASGPAETRGSDDRGPGGNRTACRSCLRGGCAALNCPRLFIPQPPAASDPPPAGAAQPFADAGELESDHAQPSHRGARFGPPTPFPGFITHFSPALKETSQMLLHSPTEAGLGCPQPRALPRTLQAPTGPLPATPRPIPKPALTLWGLHPLEEGRVKAWRCAACLTSAQGARQATGLSPDQRGPKGLIVKSAGPRTQGEDMLVL

SEQ ID NO: 3372 - DNA, 3986 bp, Homo sapiens
gagcctgcggcgtgcagtgtgaggggcgggacccggctgccggcggtgggtctagctgggggaggtcgggccatgctggtgggccagggcgcggggctgctggggcccgcggtggtcaccgccgcggtggtgctgctgctgagcggcgtggggccggcgcacggctcggaggacatcgtggtgggctgcggtggcttcgtcaagtcggacgtggagatcaactactcgctcatcgagataaagctgtacaccaagcatgggactttgaaataccagacagactgtgcccctaataatggttactttatgatccctttgtatgataagggggatttcattctgaagattgagcctcccctagggtggagttttgagccgacgaccgtggagctccatgtggatggagtcagtgacatctgcacaaagggtggggacatcaactttgtcttcactgggttctctgtgaatggcaaggtcctcagcaaagggcagcccctgggtcctgcgggagttcaggtgtctctgagaaacactgggaccgaagcaaagatccagtccacagttacacagcctggcggaaagtttgcattttttaaagttctgcctggagattatgaaatcctcgcaactcatccaacctgggcgttgaaagaggcaagcaccacagtgcgtgtaaccaactccaatgccaatgcggccagtcccctcatagttgctggctacaatgtgtctggctctgtccgaagtgatggggagcccatgaaaggggtgaagtttcttctcttttcttctttagtaactaaagaggatgtcctgggctgcaatgtctcaccagtgcctgggttccagccccaagacgagagtctggtgtatttgtgctacacggtctccagagaagatggctcgttctctttctattccttgccaagtgggggctacactgtgattccgttctatcgaggggagaggattacctttgatgtggcgccttccagacttgacttcacagtggagcatgacagcttgaaaatcgagcccgtgttccacgtcatgggattctccgtcaccgggagggtcttgaacggacccgaaggagatggtgttccagaagcagtagtcaccctgaataaccaaatcaaagttaaaacaaaagctgatggctcattccgccttgagaacataaccacagggacatacaccatccatgctcagaaagagcacctctactttgaaacggtcaccatcaaaattgcaccgaacacacctcagctggctgacattgttgcaacagggttcagtgtctgtggtcggatatcaatcattcgcttcccggacaccgtcaagcagatgaataaatacaaagttgtcctgtcatctcaagacaaggacaagtctttggtcaccgtggagacagatgctcatggatcattttgttttaaagcaaaaccagggacttacaaagtgcaggtgatggttcctgaggcagaaaccagagcagggctgacgttgaaaccccagacatttcctcttactgtgaccgacaggcccgtgatggatgtggcctttgtacagttcttggcatcagtttctgggaaagtctcttgtttggacacctgtggtgacttgctggtgactctacagtccctgagccgccagggtgagaagcggagcctccagctctccggcaaggtcaacgccatgactttcacctttgacaacgtgctccctggaaaatacaaaataagcatcatgcatgaggattggtgctggaagaacaagagcctggaggtggaagtgctggaggatgacgtgtctgcagttgagttcaggcagacgggctacatgctgagatgttccctgtctcacgccatcactctggaattttatcaggatggaaatgggcgtgagaatgtggggatttataacctctccaaaggagtcaaccgattctgcctgtccaagcctggtgtgtacaaagtgacccctcgctcctgccaccggtttgagcaagcgttctacacctatgacacgtcttcacctagtatcttgacattgacagccattcgccaccatgtccttggaactatcaccaccgacaaaatgatggatgtcactgtgactatcaagtcttccatcgacagtgaacccgccttggtcttaggccctctgaagtctgtgcaggagctgcggagggagcagcagctggctgagatcgaggcccgcaggcaggagagggagaaaaacggcaatgaggaaggtgaagaaagaatgaccaagcctcccgtgcaggagatggtagatgagttacaaggccccttctcgtatgatttctcttactgggcgcggtctggagagaaaatcactgttacaccgtcatctaaagagctgctcttttatcccccttcaatggaagccgttgtcagtggagaaagctgcccagggaagctgatcgagatccacgggaaggcaggcctgtttttagaaggccagatccaccccgagttggaaggagtcgagattgtcatcagtgaaaagggggcaagttcaccgctgatcacagtctttactgatgacaaaggtgcctacagtgttggccccctgcacagtgacctggagtacacggtgacctcacagaaggagggctatgttctgactgcagtggaaggaaccatcggagacttcaaggcctatgccctggcaggcgtaagctttgagataaaagctgaggatgaccagcccctcccgggagtcctcttatccctgagtggtggcctgtttcgttccaacctcttgacccaggacaacggcattctgacattctcaaacctgagccctggccagtattacttcaaacccatgatgaaggagttccggtttgagccatcctcacagatgatcgaggtgcaggaaggccagaacctgaagatcaccatcacggggtaccgaaccgcttacagttgctatggcacagtgtcttccttaaacggagagcccgaacaaggggttgccatggaagcggtgggccagaacgactgcagcatttacggagaagacaccgtgacagacgaagagggcaagttcagattacgtggattgctgccgggatgtgtgtaccacgttcagctcaaggcagaaggcaacgaccacattgagcgggcgctcccccaccatagggtgattgaggttgggaataatgacatcgatgatgtaaacatcatagttttccggcagattaatcaatttgatttaagtggaaatgtgatcacttcctctgaataccttcctacgttatgggtcaagctttacaaaagcgaaaacctcgacaatccaatccagacagtttcccttggccagtccctgttcttccatttccccccactgctcagagatggcgagaactatgttgtgcttctggactccacactccccagatcccagtatgactacatcttgcctcaagtttctttcaccgcagtgggctaccataaacacatcaccttgatttttaatcccacgaggaagctgcctgaacaggacatcgcacaaggatcctacattgccctgccattgacgctgctggttctgctggccggttacaaccatgacaagctcattcctttgctgctgcagttgacaagccggctacagggagtcggcgcgctcggccaggcagcctctgacaatagcggcccagaagatgcaaagagacaagccaagaaacagaagacaaggcggacccttcgtttgcaagaagagttccagttgatgtggtgtttggttccatggcggggtaccctagggattcatctgttttcttcacttccctttgcatctgagatcctgctggaaaccacggcaacctgtatccactattaggaggtaaaaatcaataaaatggcccattcatttgtgttgtagctcaaaaaaaaaaaaaaaaaaaaaaaaaaaaaaaaaaaaaaaaaaaaaaaaaaaaaaaaaaaaaaaaa

SEQ ID NO: 3373 - protein, 1267 aa, Homo sapiens
MLVGQGAGLLGPAVVTAAVVLLLSGVGPAHGSEDIVVGCGGFVKSDVEINYSLIEIKLYTKHGTLKYQTDCAPNNGYFMIPLYDKGDFILKIEPPLGWSFEPTTVELHVDGVSDICTKGGDINFVFTGFSVNGKVLSKGQPLGPAGVQVSLRNTGTEAKIQSTVTQPGGKFAFFKVLPGDYEILATHPTWALKEASTTVRVTNSNANAASPLIVAGYNVSGSVRSDGEPMKGVKFLLFSSLVTKEDVLGCNVSPVPGFQPQDESLVYLCYTVSREDGSFSFYSLPSGGYTVIPFYRGERITFDVAPSRLDFTVEHDSLKIEPVFHVMGFSVTGRVLNGPEGDGVPEAVVTLNNQIKVKTKADGSFRLENITTGTYTIHAQKEHLYFETVTIKIAPNTPQLADIVATGFSVCGRISIIRFPDTVKQMNKYKVVLSSQDKDKSLVTVETDAHGSFCFKAKPGTYKVQVMVPEAETRAGLTLKPQTFPLTVTDRPVMDVAFVQFLASVSGKVSCLDTCGDLLVTLQSLSRQGEKRSLQLSGKVNAMTFTFDNVLPGKYKISIMHEDWCWKNKSLEVEVLEDDVSAVEFRQTGYMLRCSLSHAITLEFYQDGNGRENVGIYNLSKGVNRFCLSKPGVYKVTPRSCHRFEQAFYTYDTSSPSILTLTAIRHHVLGTITTDKMMDVTVTIKSSIDSEPALVLGPLKSVQELRREQQLAEIEARRQEREKNGNEEGEERMTKPPVQEMVDELQGPFSYDFSYWARSGEKITVTPSSKELLFYPPSMEAVVSGESCPGKLIEIHGKAGLFLEGQIHPELEGVEIVISEKGASSPLITVFTDDKGAYSVGPLHSDLEYTVTSQKEGYVLTAVEGTIGDFKAYALAGVSFEIKAEDDQPLPGVLLSLSGGLFRSNLLTQDNGILTFSNLSPGQYYFKPMMKEFRFEPSSQMIEVQEGQNLKITITGYRTAYSCYGTVSSLNGEPEQGVAMEAVGQNDCSIYGEDTVTDEEGKFRLRGLLPGCVYHVQLKAEGNDHIERALPHHRVIEVGNNDIDDVNIIVFRQINQFDLSGNVITSSEYLPTLWVKLYKSENLDNPIQTVSLGQSLFFHFPPLLRDGENYVVLLDSTLPRSQYDYILPQVSFTAVGYHKHITLIFNPTRKLPEQDIAQGSYIALPLTLLVLLAGYNHDKLIPLLLQLTSRLQGVGALGQAASDNSGPEDAKRQAKKQKTRRTLRLQEEFQLMWCLVPWRGTLGIHLFSSLPFASEILLETTATCIHY

SEQ ID NO: 3374 - DNA, 4317 bp, Homo sapiens
gagcctgcggcgtgcagtgtgaggggcgggacccggctgccggcggtgggtctagctgggggaggtcgggccatgctggtgggccagggcgcggggctgctggggcccgcggtggtcaccgccgcggtggtgctgctgctgagcggcgtggggccggcgcacggctcggaggacatcgtggtgggctgcggtggcttcgtcaagtcggacgtggagatcaactactcgctcatcgagataaagctgtacaccaagcatgggactttgaaataccagacagactgtgcccctaataatggttactttatgatccctttgtatgataagggggatttcattctgaagattgagcctcccctagggtggagttttgagccgacgaccgtggagctccatgtggatggagtcagtgacatctgcacaaagggtggggacatcaactttgtcttcactgggttctctgtgaatggcaaggtcctcagcaaagggcagcccctgggtcctgcgggagttcaggtgtctctgagaaacactgggaccgaagcaaagatccagtccacagttacacagcctggcggaaagtttgcattttttaaagttctgcctggagattatgaaatcctcgcaactcatccaacctgggcgttgaaagaggcaagcaccacagtgcgtgtaaccaactccaatgccaatgcggccagtcccctcatagttgctggctacaatgtgtctggctctgtccgaagtgatggggagcccatgaaaggggtgaagtttcttctcttttcttctttagtaactaaagaggatgtcctgggctgcaatgtctcaccagtgcctgggttccagccccaagacgagagtctggtgtatttgtgctacacggtctccagagaagatggctcgttctctttctattccttgccaagtgggggctacactgtgattccgttctatcgaggggagaggattacctttgatgtggcgccttccagacttgacttcacagtggagcatgacagcttgaaaatcgagcccgtgttccacgtcatgggattctccgtcaccgggagggtcttgaacggacccgaaggagatggtgttccagaagcagtagtcaccctgaataaccaaatcaaagttaaaacaaaagctgatggctcattccgccttgagaacataaccacagggacatacaccatccatgctcagaaagagcacctctactttgaaacggtcaccatcaaaattgcaccgaacacacctcagctggctgacattgttgcaacagggttcagtgtctgtggtcggatatcaatcattcgcttcccggacaccgtcaagcagatgaataaatacaaagttgtcctgtcatctcaagacaaggacaagtctttggtcaccgtggagacagatgctcatggatcattttgttttaaagcaaaaccagggacttacaaagtgcaggtgatggttcctgaggcagaaaccagagcagggctgacgttgaaaccccagacatttcctcttactgtgaccgacaggcccgtgatggatgtggcctttgtacagttcttggcatcagtttctgggaaagtctcttgtttggacacctgtggtgacttgctggtgactctacagtccctgagccgccagggtgagaagcggagcctccagctctccggcaaggtcaacgccatgactttcacctttgacaacgtgctccctggaaaatacaaaataagcatcatgcatgaggattggtgctggaagaacaagagcctggaggtggaagtgctggaggatgacgtgtctgcagttgagttcaggcagacgggctacatgctgagatgttccctgtctcacgccatcactctggaattttatcaggatggaaatgggcgtgagaatgtggggatttataacctctccaaaggagtcaaccgattctgcctgtccaagcctggtgtgtacaaagtgacccctcgctcctgccaccggtttgagcaagcgttctacacctatgacacgtcttcacctagtatcttgacattgacagccattcgccaccatgtccttggaactatcaccaccgacaaaatgatggatgtcactgtgactatcaagtcttccatcgacagtgaacccgccttggtcttaggccctctgaagtctgtgcaggagctgcggagggagcagcagctggctgagatcgaggcccgcaggcaggagagggagaaaaacggcaatgaggaaggtgaagaaagaatgaccaagcctcccgtgcaggagatggtagatgagttacaaggccccttctcgtatgatttctcttactgggcgcggtctggagagaaaatcactgttacaccgtcatctaaagagctgctcttttatcccccttcaatggaagccgttgtcagtggagaaagctgcccagggaagctgatcgagatccacgggaaggcaggcctgtttttagaaggccagatccaccccgagttggaaggagtcgagattgtcatcagtgaaaagggggcaagttcaccgctgatcacagtctttactgatgacaaaggtgcctacagtgttggccccctgcacagtgacctggagtacacggtgacctcacagaaggagggctatgttctgactgcagtggaaggaaccatcggagacttcaaggcctatgccctggcaggcgtaagctttgagataaaagctgaggatgaccagcccctcccgggagtcctcttatccctgagtggtggcctgtttcgttccaacctcttgacccaggacaacggcattctgacattctcaaacctgagccctggccagtattacttcaaacccatgatgaaggagttccggtttgagccatcctcacagatgatcgaggtgcaggaaggccagaacctgaagatcaccatcacggggtaccgaaccgcttacagttgctatggcacagtgtcttccttaaacggagagcccgaacaaggggttgccatggaagcggtgggccagaacgactgcagcatttacggagaagacaccgtgacagacgaagagggcaagttcagattacgtggattgctgccgggatgtgtgtaccacgttcagctcaaggcagaaggcaacgaccacattgagcgggcgctcccccaccatagggtgattgaggttgggaataatgacatcgatgatgtaaacatcatagttttccggcagattaatcaatttgatttaagtggaaatgtgatcacttcctctgaataccttcctacgttatgggtcaagctttacaaaagcgaaaacctcgacaatccaatccagacagtttcccttggccagtccctgttcttccatttccccccactgctcagagatggcgagaactatgttgtgcttctggactccacactccccagatcccagtatgactacatcttgcctcaagtttctttcaccgcagtgggctaccataaacacatcaccttgatttttaatcccacgaggaagctgcctgaacaggacatcgcacaaggatcctacattgccctgccattgacgctgctggttctgctggccggttacaaccatgacaagctcattcctttgctgctgcagttgacaagccggctacagggagtcggcgcgctcggccaggcagcctctgacaatagcggcccagaagatgcaaagagacaagccaagaaacagaagacaaggcggacgtgaggaggaaggggacagttgcagtctcacttgggacaggccacagccaggggtccggccactacccgcccgtgggataaaagccaaaagcatgcgtcagctaacttcagcctgtgctgctgggcccgcaccccatgtcccttgtcactgtggcatcctgcacccatcctcacccctccgtagagcccctcgtgcaatgcaatgaatggaccctcctgtcactctgctgaacagaatttattttctgagtcaaatataatttattattatttttgtcaaagaagtatttaagctgtgctgtggtgtgagaatgtcattcttgatcttcagccttcgtttgcaagaagagttccagttgatgtggtgtttggttccatggcggggtaccctagggattcatctgttttcttcacttccctttgcatctgagatcctgctggaaaccacggcaacctgtatccactattaggaggtaaaaatcaataaaatggcccattcatttgtgttgtagctcaaaaaaaaaaaaaaaaaaaaaaaaaaaaaaaaaaaaaaaaaaaaaaaaaaaaaaaaaaaaaaaaa

SEQ ID NO: 3375 - protein, 1222 aa, Homo sapiens
MLVGQGAGLLGPAVVTAAVVLLLSGVGPAHGSEDIVVGCGGFVKSDVEINYSLIEIKLYTKHGTLKYQTDCAPNNGYFMIPLYDKGDFILKIEPPLGWSFEPTTVELHVDGVSDICTKGGDINFVFTGFSVNGKVLSKGQPLGPAGVQVSLRNTGTEAKIQSTVTQPGGKFAFFKVLPGDYEILATHPTWALKEASTTVRVTNSNANAASPLIVAGYNVSGSVRSDGEPMKGVKFLLFSSLVTKEDVLGCNVSPVPGFQPQDESLVYLCYTVSREDGSFSFYSLPSGGYTVIPFYRGERITFDVAPSRLDFTVEHDSLKIEPVFHVMGFSVTGRVLNGPEGDGVPEAVVTLNNQIKVKTKADGSFRLENITTGTYTIHAQKEHLYFETVTIKIAPNTPQLADIVATGFSVCGRISIIRFPDTVKQMNKYKVVLSSQDKDKSLVTVETDAHGSFCFKAKPGTYKVQVMVPEAETRAGLTLKPQTFPLTVTDRPVMDVAFVQFLASVSGKVSCLDTCGDLLVTLQSLSRQGEKRSLQLSGKVNAMTFTFDNVLPGKYKISIMHEDWCWKNKSLEVEVLEDDVSAVEFRQTGYMLRCSLSHAITLEFYQDGNGRENVGIYNLSKGVNRFCLSKPGVYKVTPRSCHRFEQAFYTYDTSSPSILTLTAIRHHVLGTITTDKMMDVTVTIKSSIDSEPALVLGPLKSVQELRREQQLAEIEARRQEREKNGNEEGEERMTKPPVQEMVDELQGPFSYDFSYWARSGEKITVTPSSKELLFYPPSMEAVVSGESCPGKLIEIHGKAGLFLEGQIHPELEGVEIVISEKGASSPLITVFTDDKGAYSVGPLHSDLEYTVTSQKEGYVLTAVEGTIGDFKAYALAGVSFEIKAEDDQPLPGVLLSLSGGLFRSNLLTQDNGILTFSNLSPGQYYFKPMMKEFRFEPSSQMIEVQEGQNLKITITGYRTAYSCYGTVSSLNGEPEQGVAMEAVGQNDCSIYGEDTVTDEEGKFRLRGLLPGCVYHVQLKAEGNDHIERALPHHRVIEVGNNDIDDVNIIVFRQINQFDLSGNVITSSEYLPTLWVKLYKSENLDNPIQTVSLGQSLFFHFPPLLRDGENYVVLLDSTLPRSQYDYILPQVSFTAVGYHKHITLIFNPTRKLPEQDIAQGSYIALPLTLLVLLAGYNHDKLIPLLLQLTSRLQGVGALGQAASDNSGPEDAKRQAKKQKTRRT

SEQ ID NO: 3376 - DNA, 554 bp, Homo sapiens
ctctttccgccatctttccgcgccggtgagtagcactctctgagagctccaatttcatccgtctgccatcggcgccatcctgcaatctaagccacaatggtgcgcatgaatgtcctggcagatgctctcaagagtatcaacaatgccgaaaagagaggcaaacgccaggtgcttattaggccgtgctccaaagtcatcgtccggtttctcactgtgatgatgaagcatggttacattggcgaatttgaaatcattgatgaccacagagctgggaaaattgttgtgaacctcacaggcaggctaaacaagtgtggggtgatcagccccagatttgacgtgcaactcaaagacctggaaaaatggcagaataatctgcttccatcccgccagtttggtttcattgtactgacaacctcagctggcatcatggaccatgaagaagcaagacgaaaacacacaggagggaaaatcctgggattctttttctagggatgtaatacatatatttacaaataaaatgcctcatggactctggtgcttccaaaaaaaaaaaa

SEQ ID NO: 3377 - protein, 130 aa, Homo sapiens [sequence omitted]

SEQ ID NO: 3378 - DNA, 488 bp, Homo sapiens
ctctttccgccatctttccgcgccgccacaatggtgcgcatgaatgtcctggcagatgctctcaagagtatcaacaatgccgaaaagagaggcaaacgccaggtgcttattaggccgtgctccaaagtcatcgtccggtttctcactgtgatgatgaagcatggttacattggcgaatttgaaatcattgatgaccacagagctgggaaaattgttgtgaacctcacaggcaggctaaacaagtgtggggtgatcagccccagatttgacgtgcaactcaaagacctggaaaaatggcagaataatctgcttccatcccgccagtttggtttcattgtactgacaacctcagctggcatcatggaccatgaagaagcaagacgaaaacacacaggagggaaaatcctgggattctttttctagggatgtaatacatatatttacaaataaaatgcctcatggactctggtgcttccaaaaaaaaaaaa

SEQ ID NO: 3379 - protein, 130 aa, Homo sapiens [sequence omitted]

SEQ ID NO: 3380 - DNA, 2280 bp, Homo sapiens
gtgcgggtttcggttggaggactcgttggggaggtggcctgcgcttgtagagactgcatccccgagacgatggcggagggagataatcgcagcaccaacctgctggctgcagagactgcaagtctggaagaacagctgcaaggatggggagaagtgatgctgatggctgataaagtcctccgatgggaaagagcctggtttccacctgccatcatgggtgtggtttctttggtgtttctgattatctactatctagatccatctgttctgtccggcgtttcctgttttgttatgtttttgtgcttggctgactaccttgttcccattctagcgcctagaatttttggctccaataaatggaccactgaacaacagcaaagattccatgaaatttgcagcaatctagtaaaaactcgacgcagagctgtgggttggtggaaacgcctcttcacactaaaggaagaaaaacctaagatgtacttcatgaccatgatcgtttcccttgctgcggttgcttgggtgggacaacaagtccacaacctgcttctcacctacctgatagtgacttccttactattgcttcctggactaaaccaacatggaatcattttgaagtacattggaatggccaagagggagataaacaaacttctcaaacaaaaagaaaagaaaaacgaatgattcatctgctttaatcagtgtgattaatgcagcacccattgccccgggaaccgtttctgctgtactatctggatactaaaatgttacggaagtagctctttgttctccctcactctgcccttagttaatagaaattcagactcgccaagtaaggcttcgtgcatagtgtcttcatgtcgcgtatagttgagcgcgttcttagcagttggcttcatggacaactcattagtgttttgacttttcttacccagcgttaattgaattcttgcttttagacaacttcctttttgtagtggtgaaccttgccctttagtacagttcaagtgaatctggataattgttcatctttgctttagcttagataccatgtagtggtctgtggctacaggaagctggttctgtctgcttccacagtctgcttaaaaaactgtctgacttcgtgaatatagagaccaagtttaccacttctgatgaagagaccaattaagattcattcctcattctgtttctttccagtgggagaagagtccccatgaaataagatgaaactgattccatgcactagtacatgtaggcttctcccttgtgcaaagcttagcaatttgtaggaaactttgatctttttgtccaagaaaaggaatgtctgacaggcttaagctttcgtccccttgcacttagactcgaagttagtaaatccttaaaggctttttaatagcagacttccaaaagattgcatttaggatttctagcatgcttttaatttcagattttcagctgacattagctatagtatacagtaggttaagactcatgtctatgactttcactctaagactggcaaaaggacagcagtcttctatgtttagtcaatattcatttcagtagaagataatcttatctaatttttgagaccagaataagccttttaaggtaaacctcaaaattatcattttatggtaatactgaccattttagtcccctaggtttgacatgggagatagtgactacactggtgtctgacttttttcctagagatttctccctgaaaaatacaagggctgttggtgagagcagacttgaggtgatgatagttggcctctggtctacaaagatttcataactccttggaaagcttcttataatcattcttaacttcttggtagctagaaatttagagtagttgaaatctttaggaatgaacttctgagggccaaaaaatgtgactgacgggaacaattcttaaactgattaactagctgtaatatagttttgtgaatttattgcactgatgttgtaccttgtggtatatctgtccctattaaataagtgttgttttctcctctttaatattgctgtgaacagtggtgcccattgtagcatatgtttgatttttttttattatttcataagaaaactacgttaattttaccttactttcattgtaaataagcctgtcttcctatctggattttttgtgtgcatacatattctactgattaactacttttgcagttttaatcctgtattatttcttctactttgttttgtgtaaaaggggaaaaaataaaaaaagctggaatcttaaaaaaaaaaaaaaaa

SEQ ID NO: 3381 - protein, 203 aa, Homo sapiens
MAEGDNRSTNLLAAETASLEEQLQGWGEVMLMADKVLRWERAWFPPAIMGVVSLVFLIIYYLDPSVLSGVSCFVMFLCLADYLVPILAPRIFGSNKWTTEQQQRFHEICSNLVKTRRRAVGWWKRLFTLKEEKPKMYFMTMIVSLAAVAWVGQQVHNLLLTYLIVTSLLLLPGLNQHGIILKYIGMAKREINKLLKQKEKKNE

SEQ ID NO: 3382 - DNA, 8192 bp, Homo sapiens
gccatgtcgtgtcggggaaggtaatgagccgcagagccccggggtctcggctgagcagcggcggcggcggcggcggcaccaagtatccgcggagctggaatgactggcaacccagaactgatagtgcatcagccgacccagataatttaaaatattcttcatccagagatagaggtggttcttcctcttatggactgcaaccttcaaattcagctgtggtgtctcggcaaaggcacgatgataccagagtccacgctgacatacagaatgacgaaaagggtggctacagtgtcaatggaggatctggggaaaatacttatggtcggaagtcgttggggcaagagctgagggttaacaatgtgaccagccctgagttcaccagtgttcagcatggcagtcgtgctttagccaccaaagacatgaggaaatcacaggagagatcgatgtcttattctgatgagtctcgactgtcgaatcttcttcggaggatcacccgggaagacgacagagaccgaagattggctactgtaaagcagttgaaagaatttattcagcaaccagaaaataagctggtactagttaaacaattggataatatcttggctgctgtacatgacgtgcttaatgaaagtagcaaattgcttcaggagttgagacaggagggagcttgctgtcttggccttctttgtgcttctctgagctatgaggctgagaagatcttcaagtggatttttagcaaatttagctcatctgcaaaagatgaagttaaactcctctacttatgtgccacctacaaagcactagagactgtaggagaaaagaaagccttttcatctgtaatgcagcttgtaatgaccagcctgcagtctattcttgaaaatgtggatacaccagaattgctttgtaaatgtgttaagtgcattcttttggtggctcgatgttaccctcatattttcagcactaattttagggatacagttgatatattagttggatggcatatagatcatactcagaaaccttcgctcacgcagcaggtatctgggtggttgcagagtttggagccattttgggtagctgatcttgcattttctactactcttcttggtcagtttctggaagacatggaagcatatgctgaggacctcagccatgtggcctctggggaatcagtggatgaagatgtccctcctccatcagtgtcattaccaaagctggctgcacttctccgggtatttagtactgtggtgaggagcattggggaacgcttcagcccaattcggggtcctccaattactgaggcatatgtaacagatgttctgtacagagtaatgagatgtgtgacggctgcaaaccaggtgtttttttctgaggctgtgttgacagctgctaatgagtgtgttggtgttttgctcggcagcttggatcctagcatgactatacattgtgacatggtcattacatatggattagaccaactggagaattgccagacttgtggtaccgattatatcatctcagtcttgaatttactcacgctgattgttgaacagataaatacgaaactgccatcatcatttgtagaaaaactgtttataccatcatctaaactactattcttgcgttatcataaagaaaaagaggttgttgctgtagcccatgctgtttatcaagcagtgctcagcttgaagaatattcctgttttggagactgcctataagttaatattgggagaaatgacttgtgccctaaacaacctcctacacagtctacaacttcctgaggcctgttctgaaataaaacatgaggcttttaagaatcatgtgttcaatgtagacaatgcaaaatttgtagttatatttgacctcagtgccctgactacaattggaaatgccaaaaactcactaatagggatgtgggcgctatctccaactgtctttgcacttctgagtaagaatctgatgattgtgcacagtgacctggctgttcacttccctgccattcagtatgctgtgctctacacattgtattctcattgtaccaggcatgatcactttatctctagtagcctcagttcttcctctccttctttgtttgatggagctgtgattagcactgtaactacggctacaaagaaacatttctcaattatattaaatcttctgggaatattacttaagaaagataaccttaaccaggacacgaggaaactgttaatgacttgggctttggaagcagctgttttaatgaagaagtctgaaacatacgcacctttattctctcttccgtctttccataaattttgcaaaggccttttagccaacactctcgttgaagatgtgaatatctgtctgcaggcatgcagcagtctacatgctctgtcctcttccttgccagatgatcttttacagagatgtgtcgatgtttgccgtgttcaactagtgcacagtggaactcgtattcgacaagcatttggaaaactgttgaaatcaattcctttagatgttgtcctaagcaataacaatcacacagaaattcaagaaatttctttagcattaagaagtcacatgagtaaagcaccaagtaatacattccacccccaagatttctctgatgttattagttttattttgtatgggaactctcatagaacagggaaggacaattggttggaaagactgttctatagctgccagagactggataagcgtgaccagtcaacaattccacgcaatctcctgaagacagatgctgtcctttggcagtgggccatatgggaagctgcacaattcactgttctttctaagctgagaaccccactgggcagagctcaagacaccttccagacaattgaaggtatcattcgaagtctcgcagctcacacattaaaccctgatcaggatgttagtcagtggacaactgcagacaatgatgaaggccatggtaacaaccaacttagacttgttcttcttctgcagtatctggaaaatctggagaaattaatgtataatgcatacgagggatgtgctaatgcattaacttcacctcccaaggtcattagaacttttttctataccaatcgccaaacttgtcaggactggctaacgcggattcgactctccatcatgagggtaggattgttggcaggccagcctgcagtgacagtgagacatggctttgacttgcttacagagatgaaaacaaccagcctatctcaggggaatgaattggaagtaaccattatgatggtggtagaagcattatgtgaacttcattgtcctgaagctatacagggaattgctgtctggtcatcatctattgttggaaaaaatcttctgtggattaactcagtggctcaacaggctgaagggaggtttgaaaaggcctctgtggagtaccaggaacacctgtgtgccatgacaggtgttgattgctgcatctccagctttgacaaatcggtgctcaccttagccaatgctgggcgtaacagtgccagcccgaaacattctctgaatggtgaatccagaaaaactgtgctgtccaaaccgactgactcttcccctgaggttataaattatttaggaaataaagcatgtgagtgctacatctcaattgccgattgggctgctgtgcaggaatggcagaacgctatccatgacttgaaaaagagtaccagtagcacttccctcaacctgaaagctgacttcaactatataaaatcattaagcagctttgagtctggaaaatttgttgaatgtaccgagcagttagaattgttaccaggagaaaatatcaatctacttgctggaggatcaaaagaaaaaatagacatgaaaaaactgcttcctaacatgttaagtccggatccgagggaacttcagaaatccattgaagttcaattgttaagaagttctgtttgtttggcaactgctttaaacccgatagaacaagatcagaagtggcagtctataactgaaaatgtggtaaagtacttgaagcaaacatcccgcatcgctattggacctctgagactttctactttaacagtttcacagtctttgccagttctaagtaccttgcagctgtattgctcatctgctttggagaacacagtttctaacagactttcaacagaggactgtcttattccactcttcagtgaagctttacgttcatgtaaacagcatgacgtgaggccatggatgcaggcattaaggtatactatgtaccagaatcagttgttggagaaaattaaagaacaaacagtcccaattagaagccatctcatggaattaggtctaacagcagcaaaatttgctagaaaacgagggaatgtgtcccttgcaacaagactgctggcacagtgcagtgaagttcagctgggaaagaccaccactgcacaggatttagtccaacattttaaaaaactatcaacccaaggtcaagtggatgaaaaatgggggcccgaacttgatattgaaaaaaccaaattgctttatacagcaggccagtcaacacatgcaatggaaatgttgagttcttgtgccatatctttctgcaagtctgtgaaagctgaatatgcagttgctaaatcaattctgacactggctaaatggatccaggcagaatggaaagagatttcaggacagctgaaacaggtttacagagctcagcaccaacagaacttcacaggtctttctactttgtctaaaaacatactcactctaatagaactgccatctgttaatacgatggaagaagagtatcctcggatcgagagtgaatctacagtgcatattggagttggagaacctgacttcattttgggacagttgtatcacctgtcttcagtacaggcacctgaagtagccaaatcttgggcagcgttggccagctgggcttataggtggggcagaaaggtggttgacaatgccagtcagggagaaggtgttcgtctgctgcctagagaaaaatctgaagttcagaatctacttccagacactataactgaggaagagaaagagagaatatatggtattcttggacaggctgtgtgtcggccggcggggattcaggatgaagatataacacttcagataactgagagtgaagacaacgaagaagatgacatggttgatgttatctggcgtcagttgatatcaagctgcccatggctttcagaacttgatgaaagtgcaactgaaggagttattaaagtgtggaggaaagttgtagatagaatattcagcctgtacaaactctcttgcagtgcatactttactttccttaaactcaacgctggtcaaattcctttagatgaggatgaccctaggctgcatttaagtcacagagtggaacagagcactgatgacatgattgtgatggccacattgcgcctgctgcggttgctcgtgaagcatgctggtgagcttcggcagtatctggagcacggcttggagacaacacccactgcaccatggagaggaattattccgcaacttttctcacgcttaaaccaccctgaagtgtatgtgcgccaaagtatttgtaaccttctctgccgtgtggctcaagattccccacatctcatattgtatcctgcaatagtgggtaccatatcgcttagtagtgaatcccaggcttcaggaaataaattttccactgcaattccaactttacttggcaatattcaaggagaagaattgctggtttctgaatgtgagggaggaagtcctcctgcatctcaggatagcaataaggatgaacctaaaagtggattaaatgaagaccaagccatgatgcaggattgttacagcaaaattgtagataagctgtcctctgcaaaccccaccatggtattacaggttcagatgctcgtggctgaactgcgcagggtcactgtgctctgggatgagctctggctgggagttttgctgcaacaacacatgtatgtcctgagacgaattcagcagcttgaagatgaggtgaagagagtccagaacaacaacaccttacgcaaagaagagaaaattgcaatcatgagggagaagcacacagctttgatgaagcccatcgtatttgctttggagcatgtgaggagtatcacagcggctcctgcagaaacacctcatgaaaaatggtttcaggataactatggtgatgccattgaaaatgccctagaaaaactgaagactccattgaaccctgcaaagcctgggagcagctggattccatttaaagagataatgctaagtttgcaacagagagcacagaaacgtgcaagttacatcttgcgtcttgaagaaatcagtccatggttggctgccatgactaacactgaaattgctcttcctggggaagtctcagccagagacactgtcacaatccatagtgtgggcggaaccatcacaatcttaccgactaaaaccaagccaaagaaacttctctttcttggatcagatgggaagagctatccttatcttttcaaaggactggaggatttacatctggatgagagaataatgcagttcctatctattgtgaataccatgtttgctacaattaatcgccaagaaacaccccggttccatgctcgacactattctgtaacaccactaggaacaagatcaggactaatccagtgggtagatggagccacacccttatttggtctttacaaacgatggcaacaacgggaagctgccttacaagcacaaaaggcccaagattcctaccaaactcctcagaatcctggaattgtaccccgtcctagtgaactttattacagtaaaattggccctgctttgaaaacagttgggcttagcctggatgtgtcccgtcgggattggcctcttcatgtaatgaaggcagtattggaagagttaatggaggccacacccccgaatctccttgccaaagagctctggtcatcttgcacaacacctgatgaatggtggagagttacgcagtcttatgcaagatctactgcagtcatgtctatggttggatacataattggccttggagacagacatctggataatgttcttatagatatgacgactggagaagttgttcacatagattacaatgtttgctttgaaaaaggtaaaagccttagagttcctgagaaagtaccttttcgaatgacacaaaacattgaaacagcactgggtgtaactggagtagaaggtgtatttaggctttcatgtgagcaggttttacacattatgcggcgtggcagagagaccctgctgacgctgctggaggcctttgtgtacgaccctctggtggactggacagcaggaggcgaggctgggtttgctggtgctgtctatggtggaggtggccagcaggccgagagcaagcagagcaagagagagatggagcgagagatcacccgcagcctgttttcttctagagtagctgagattaaggtgaactggtttaagaatagagatgagatgctggttgtgcttcccaagttggacggtagcttagatgaatacctaagcttgcaagagcaactgacagatgtggaaaaactgcagggcaaactactggaggaaatagagtttctagaaggagctgaaggggtggatcatccttctcatactctgcaacacaggtattctgagcacacccaactacagactcagcaaagagctgttcaggaagcaatccaggtgaagctgaatgaatttgaacaatggataacacattatcaggctgcattcaataatttagaagcaacacagcttgcaagcttgcttcaagagataagcacacaaatggaccttggtcctccaagttacgtgccagcaacagcctttctgcagaatgctggtcaggcccacttgattagccagtgcgagcagctggagggggaggttggtgctctcctgcagcagaggcgctccgtgctccgtggctgtctggagcaactgcatcactatgcaaccgtggccctgcagtatccgaaggccatatttcagaaacatcgaattgaacagtggaagacctggatggaagagctcatctgtaacaccacagtagagcgttgtcaagagctctataggaaatatgaaatgcaatatgctccccagccacccccaacagtgtgtcagttcatcactgccactgaaatgaccctgcagcgatacgcagcagacatcaacagcagacttattaga

SEQ ID NO: 3383 - protein, 3661 aa, Homo sapiens
MSRRAPGSRLSSGGGGGGTKYPRSWNDWQPRTDSASADPDNLKYSSSRDRGGSSSYGLQPSNSAVVSRQRHDDTRVHADIQNDEKGGYSVNGGSGENTYGRKSLGQELRVNNVTSPEFTSVQHGSRALATKDMRKSQERSMSYSDESRLSNLLRRITREDDRDRRLATVKQLKEFIQQPENKLVLVKQLDNILAAVHDVLNESSKLLQELRQEGACCLGLLCASLSYEAEKIFKWIFSKFSSSAKDEVKLLYLCATYKALETVGEKKAFSSVMQLVMTSLQSILENVDTPELLCKCVKCILLVARCYPHIFSTNFRDTVDILVGWHIDHTQKPSLTQQVSGWLQSLEPFWVADLAFSTTLLGQFLEDMEAYAEDLSHVASGESVDEDVPPPSVSLPKLAALLRVFSTVVRSIGERFSPIRGPPITEAYVTDVLYRVMRCVTAANQVFFSEAVLTAANECVGVLLGSLDPSMTIHCDMVITYGLDQLENCQTCGTDYIISVLNLLTLIVEQINTKLPSSFVEKLFIPSSKLLFLRYHKEKEVVAVAHAVYQAVLSLKNIPVLETAYKLILGEMTCALNNLLHSLQLPEACSEIKHEAFKNHVFNVDNAKFVVIFDLSALTTIGNAKNSLIGMWALSPTVFALLSKNLMIVHSDLAVHFPAIQYAVLYTLYSHCTRHDHFISSSLSSSSPSLFDGAVISTVTTATKKHFSIILNLLGILLKKDNLNQDTRKLLMTWALEAAVLMKKSETYAPLFSLPSFHKFCKGLLANTLVEDVNICLQACSSLHALSSSLPDDLLQRCVDVCRVQLVHSGTRIRQAFGKLLKSIPLDVVLSNNNHTEIQEISLALRSHMSKAPSNTFHPQDFSDVISFILYGNSHRTGKDNWLERLFYSCQRLDKRDQSTIPRNLLKTDAVLWQWAIWEAAQFTVLSKLRTPLGRAQDTFQTIEGIIRSLAAHTLNPDQDVSQWTTADNDEGHGNNQLRLVLLLQYLENLEKLMYNAYEGCANALTSPPKVIRTFFYTNRQTCQDWLTRIRLSIMRVGLLAGQPAVTVRHGFDLLTEMKTTSLSQGNELEVTIMMVVEALCELHCPEAIQGIAVWSSSIVGKNLLWINSVAQQAEGRFEKASVEYQEHLCAMTGVDCCISSFDKSVLTLANAGRNSASPKHSLNGESRKTVLSKPTDSSPEVINYLGNKACECYISIADWAAVQEWQNAIHDLKKSTSSTSLNLKADFNYIKSLSSFESGKFVECTEQLELLPGENINLLAGGSKEKIDMKKLLPNMLSPDPRELQKSIEVQLLRSSVCLATALNPIEQDQKWQSITENVVKYLKQTSRIAIGPLRLSTLTVSQSLPVLSTLQLYCSSALENTVSNRLSTEDCLIPLFSEALRSCKQHDVRPWMQALRYTMYQNQLLEKIKEQTVPIRSHLMELGLTAAKFARKRGNVSLATRLLAQCSEVQLGKTTTAQDLVQHFKKLSTQGQVDEKWGPELDIEKTKLLYTAGQSTHAMEMLSSCAISFCKSVKAEYAVAKSILTLAKWIQAEWKEISGQLKQVYRAQHQQNFTGLSTLSKNILTLIELPSVNTMEEEYPRIESESTVHIGVGEPDFILGQLYHLSSVQAPEVAKSWAALASWAYRWGRKVVDNASQGEGVRLLPREKSEVQNLLPDTITEEEKERIYGILGQAVCRPAGIQDEDITLQITESEDNEEDDMVDVIWRQLISSCPWLSELDESATEGVIKVWRKVVDRIFSLYKLSCSAYFTFLKLNAGQIPLDEDDPRLHLSHRVEQSTDDMIVMATLRLLRLLVKHAGELRQYLEHGLETTPTAPWRGIIPQLFSRLNHPEVYVRQSICNLLCRVAQDSPHLILYPAIVGTISLSSESQASGNKFSTAIPTLLGNIQGEELLVSECEGGSPPASQDSNKDEPKSGLNEDQAMMQDCYSKIVDKLSSANPTMVLQVQMLVAELRRVTVLWDELWLGVLLQQHMYVLRRIQQLEDEVKRVQNNNTLRKEEKIAIMREKHTALMKPIVFALEHVRSITAAPAETPHEKWFQDNYGDAIENALEKLKTPLNPAKPGSSWIPFKEIMLSLQQRAQKRASYILRLEEISPWLAAMTNTEIALPGEVSARDTVTIHSVGGTITILPTKTKPKKLLFLGSDGKSYPYLFKGLEDLHLDERIMQFLSIVNTMFATINRQETPRFHARHYSVTPLGTRSGLIQWVDGATPLFGLYKRWQQREAALQAQKAQDSYQTPQNPGIVPRPSELYYSKIGPALKTVGLSLDVSRRDWPLHVMKAVLEELMEATPPNLLAKELWSSCTTPDEWWRVTQSYARSTAVMSMVGYIIGLGDRHLDNVLIDMTTGEVVHIDYNVCFEKGKSLRVPEKVPFRMTQNIETALGVTGVEGVFRLSCEQVLHIMRRGRETLLTLLEAFVYDPLVDWTAGGEAGFAGAVYGGGGQQAESKQSKREMEREITRSLFSSRVAEIKVNWFKNRDEMLVVLPKLDGSLDEYLSLQEQLTDVEKLQGKLLEEIEFLEGAEGVDHPSHTLQHRYSEHTQLQTQQRAVQEAIQVKLNEFEQWITHYQAAFNNLEATQLASLLQEISTQMDLGPPSYVPATAFLQNAGQAHLISQCEQLEGEVGALLQQRRSVLRGCLEQLHHYATVALQYPKAIFQKHRIEQWKTWMEELICNTTVERCQELYRKYEMQYAPQPPPTVCQFITATEMTLQRYAADINSRLIRQVERLKQEAVTVPVCEDQLKEIERCIKVFLHENGEEGSLSLASVIISALCTLTRRNLMMEGAASSAGEQLVDLTSRDGAWFLEELCSMSGNVTCLVQLLKQCHLVPQDLDIPNPMEASETVHLANGVYTSLQELNSNFRQIIFPEALRCLMKGEYTLESMLHELDGLIEQTTDGVPLQTLVESLQAYLRNAAMGLEEETHAHYIDVARLLHAQYGELIQPRNGSVDETPKMSAGQMLLVAFDGMFAQVETAFSLLVEKLNKMEIPIAWRKIDIIREARSTQVNFFDDDNHRQVLEEIFFLKRLQTIKEFFRLCGTFSKTLSGSSSLEDQNTVNGPVQIVNVKTLFRNSCFSEDQMAKPIKAFTADFVRQLLIGLPNQALGLTLCSFISALGVDIIAQVEAKDFGAESKVSVDDLCKKAVEHNIQIGKFSQLVMNRATVLASSYDTAWKKHDLVRRLETSISSCKTSLQRVQLHIAMFQWQHEDLLINRPQAMSVTPPPRSAILTSMKKKLHTLSQIETSIATVQEKLAALESSIEQRLKWAGGANPALAPVLQDFEATIAERRNLVLKESQRASQVTFLCSNIIHFESLRTRTAEALNLDAALFELIKRCQQMCSFASQFNSSVSELELRLLQRVDTGLEHPIGSSEWLLSAHKQLTQDMSTQRAIQTEKEQQIETVCETIQNLVDNIKTVLTGHNRQLGDVKHLLKAMAKDEEAALADGEDVPYENSVRQFLGEYKSWQDNIQTVLFTLVQAMGQVRSQEHVEMLQEITPTLKELKTQSQSIYNNLVSFASPLVTDATNECSSPTSSATYQPSFAAAVRSNTGQKTQPDVMSQNARKLIQKNLATSADTPPSTVPGTGKSVACSPKKAVRDPKTGKAVQERNSYAVSVWKRVKAKLEGRDVDPNRRMSVAEQVDYVIKEATNLDNLAQLYEGWTAWV

SEQ ID NO: 3384 - DNA, 3581 bp, Homo sapiens
gggggcggcggcggctggagagggtcctcggcagcctctgaggagcgcggggcgcggccatgagcgagtccagcggcagtgcgctccagcccggcaggcccagccggcagcaggcggtccatccagagaacctctctctagactccagttgcttctcttctccacctgtgaacttcctccaagaattgccaagctaccggtccattgcacgtaggagaacgactgtccattcccgggacaagcaaagcggaactttgctaaagccaaccgactcttacagctcccagctggaggacagaatcgctgaaaacctcagcagccattctcttcgaaattatgcactgaacatctctgagaagcggagactaagggacattcaagagacacaaatgaagtatctctccgaatgggaccagtggaagcggtatagcagcaagtcttggaagaggttcctagagaaggctcgagagatgacgacccacctggagctgtggcgggaggacatccgcagcatagaagggaaatttggcactgggattcagtcctatttctccttcttgagattcctggtgttgctgaatttggtgatatttctgatcatctttatgctggttttgctcccagtcttactcacgaaatacaagatcaccaacagcagcttcgtgctcattcctttcaaagacatggataaacaatgtacagtctatccagtaagcagttctggactcatttacttttacagttatatcatagacttgctttctggcactggtttcctggaggaaactagcctcttttacggacattacaccattgatgaggtgaaatttcagaacttcacctatgatctgcccctggcgtatttgttaagcacaatcgcctccctggccctgagccttctttggatagtgaaaaggtcggtggaaggattcaaaatcaacctgattcggagtgaggagcactttcagagttactgcaacaagatatttgccggctgggacttctgcatcactaaccgcagcatggcggatctgaagcacagcagcttgcggtacgagctccgagcagatctggaggaagaaagaatgcggcagaaaatagcagaaaggacctcagaagaaacaatacgcatttactctttgagactgtttttgaactgtattgttctggctgttttaggggcatgcttttatgcaatatacgtagcaactgtcttctcgcaagagcacatgaaaaaggaaatcgacaagatggtttttggagagaacctcttcatattgtatctaccgtctattgtgatcacgctggccaattttatcaccccaatgatctttgccaagatcatccgctatgaggattattctccaggctttgagatccgtctgacaatccttaggtgtgtctttatgcggctggccaccatatgtgtcctggtgttcacgctgggctccaagatcacatcctgtgatgatgacacatgtgacctttgcggctacaaccagaaactctacccgtgctgggagacccaagttgggcaggaaatgtacaagctgatgatcttcgacttcatcatcatcttggctgtgacactcttcgtggattttcctagaaagctcctggtgacctactgttcctcttgcaagctgattcagtgctgggggcagcaggagtttgccattcctgataacgtcctggggatagtttacgggcaaaccatctgctggatcggagcctttttctcaccccttctccctgcaattgcaaccctgaaattcattatcatcttctatgtgaaagagtggagtctgctttacacctgcagaccctcccccaggccgttcagagcatccaattctaatttcttcttcctgttggtgttgttgatcgggctgtgtttggcaataatacctctgacaatcagcatatcacgcatcccttcctcgaaagcctgtgggccgttcaccaacttcaacaccacctgggaggtcatccccaagacagtgagcaccttccccagctcgctgcagtccttcatccatggtgtcacatccgaagcctttgcagttcctttcttcatgattatttgcctcatcatgttttacttcattgccttagctggagcacacaaacgggtggtcatccagctccgagagcagctatccctggaaagtcgtgacaagtgctacctaatccagaaactaacagaagcccaaagggacatgaggaactaactagactgagcgtgaagatggtgctgcctgttgcttctaagctgacctagtgattctgctgagcctacagagtctacctgggttttgagtggacatttaaaaatatatttttcttgagtttaggcttttccatatgtgcagctgtgtttacctaacccagcccttaattagggcttcagtgacttagaaaagcaggggaaacccaaggctttgcctgcagaccggccacactgtgacaactctaccaaaaaccaacaagccattcaagcttttacaagaatgaaagagcggagacggtagtttagtatttgagccacgagtttatgtgcacaagtgttttgggttgtggactgaagctcagcctgttaatcagaccagcccatgagtgtataacaaacagaattggaggctggtttcttaaacacacacgtccacattttttagggttgttttcctgtgcttacaatttttaatgcatgtgcctttatttcacaaaacatgtggctgggcgcagcggctcacgcctgttatcccaacactttgggaggccgaggcaggcggagcacctaagttggggagttcaagacctgcctgaccaacgtggagaaactccgtctccactaaaatacaaaattagctgggtgtggtggcacatgcctgtaatatcagctactcaggaggctgaggcaggagaattgcttgaacccaggaggtggagtttgcagtgagctgagatcacaccattgcactccagcctgggcaaaaagagcaaaactctccctaaaaaaaaaatgtagaatatctcttaagatttccgttatggtaaaaaccatatgcaataaatacctcattgtaagcttacccaaaattgatagatgtcaaccttttaacagaagaacagaagtttaagttattgtttaatgtaatcagttttcattttaatatctttgaaatctttttcaaaggactgtagttttgtaatggacttttcaagccttccttccattgtttttcttccgttcactggctccacacgtttcctggggagtagcctggaatttaaagttgggtgcaggttttagaaagctgttgctgttaacaataattctcccggccatctccactccactactcaaaaatgcctgaatccttgctcagaggagcaaaggtatcttctcgtccctttcttacagccattttcttgcttttccacaaagatattatttaaagtggaatatttttgtaactgggataccaatgagcttttcggtcttttcctgacttggtaaggtttatgggtttctaaatctaataactacagtcataccaccccgaaaaaaaaaaaaaaaa

SEQ ID NO: 3385 - protein, 723 aa, Homo sapiens
MSESSGSALQPGRPSRQQAVHPENLSLDSSCFSSPPVNFLQELPSYRSIARRRTTVHSRDKQSGTLLKPTDSYSSQLEDRIAENLSSHSLRNYALNISEKRRLRDIQETQMKYLSEWDQWKRYSSKSWKRFLEKAREMTTHLELWREDIRSIEGKFGTGIQSYFSFLRFLVLLNLVIFLIIFMLVLLPVLLTKYKITNSSFVLIPFKDMDKQCTVYPVSSSGLIYFYSYIIDLLSGTGFLEETSLFYGHYTIDEVKFQNFTYDLPLAYLLSTIASLALSLLWIVKRSVEGFKINLIRSEEHFQSYCNKIFAGWDFCITNRSMADLKHSSLRYELRADLEEERMRQKIAERTSEETIRIYSLRLFLNCIVLAVLGACFYAIYVATVFSQEHMKKEIDKMVFGENLFILYLPSIVITLANFITPMIFAKIIRYEDYSPGFEIRLTILRCVFMRLATICVLVFTLGSKITSCDDDTCDLCGYNQKLYPCWETQVGQEMYKLMIFDFIIILAVTLFVDFPRKLLVTYCSSCKLIQCWGQQEFAIPDNVLGIVYGQTICWIGAFFSPLLPAIATLKFIIIFYVKEWSLLYTCRPSPRPFRASNSNFFFLLVLLIGLCLAIIPLTISISRIPSSKACGPFTNFNTTWEVIPKTVSTFPSSLQSFIHGVTSEAFAVPFFMIICLIMFYFIALAGAHKRVVIQLREQLSLESRDKCYLIQKLTEAQRDMRN

SEQ ID NO: 3386 - DNA, 2591 bp, Homo sapiens
gccaagggcactattggccagttccgttcaacgaagtggttgctttttttagttccggcaatgagttgcgccggggcggcggcggctccccgcctttggcggctgcgcccgggggcccggcggtccctctcagcttatggaagaagaaccagtgtcagatttcgcagttcaggaatgactttagacaatatcagtcgggcagctgtggatcgaataatccgggtggatcatgcaggcgaatatggagcaaaccgcatctatgccgggcagatggctgtcctgggtcggaccagcgtcgggccagtcattcagaaaatgtgggatcaagaaaaggaccatttgaaaaagttcaatgagttgatggttacgttcagggtccggccaacagttctgatgcccttgtggaacgtgctggggtttgcactgggggcggggaccgccttgctcgggaaggaaggtgccatggcctgcaccgtggcggtggaagagagcatagcacatcactacaacaaccagatcaggacgctgatggaggaggaccctgaaaaatacgaggaacttcttcagctgataaagaaatttcgggatgaagagcttgagcaccatgacataggcctcgaccatgatgcagaattggctccagcctatgccgtcctgaagagcattatccaggccggatgcagagtggcgatatatttatcagaaagattataaagtgtgtccagttttgcctgtctataaaagatgatagtaatttaccaagtgacatttgcagagaaacaggtgtacagttatcgttgtacttttgtacaatgtgaattttgttaataaattataaggtttgtttttttttttttaaactctgcagtgttgatttttctctgggttgttttttctgccatgagaccaacaggtcaccagccttgttcaagttacagcaaacgaagctgggccttgtttggtctcatacttaattttcttttatatacatgtttttcttttacatgcatatatatatattttattttattttatgttttttggagacagggcctcgctcttttgtccaggccgggtcacaactcactgcagcctggacctcctagcctcaagcaatccacccacctcagccttccaagtagctgggactacaggtgtgcaccaccacagctggctaattctatttttttatagaggcgaagtctcactatgtcgccaggctggtctctaactcctgggctcagtgatcctcccgtttcgacttcccaaagtgctgggattacaggtgtgagccacttcaccaggcccattttctcctaaaacttcaaggacaaatcattaataatgtaacaggaatctttaggagaaaaaacaatttggtttactgataacaaaagataattggaaacatgagagtatttgagattggccaagcagaactatgaagtccatcaagtaagtcaaagatcatcgtttctgttttgaattgtgggtgataatgggtgggagagtgctacagtctgtatgtctgtgtctccctagaattcatacgatgaaatcttcactctcaagttgatagaaggtggggcccttgggaagtgtgaggtcatgagagtggagccctcatgaatgggatcagtgccttatgaaaggccctagagagatacctcatcctctccacagtgtgagacttcaaggggaagtatgagacttctctgaggaagcagacccttcacaagcaaaatcagccagcactttgatcacggacttcccagcctctaggactgtgagcaataaatgtttgatgtttataagccacccagactgtggtattttgttatagcagcctgaacagactaagacgggggtgttgcttccatcaaaggatgtactaagttgtggattatttgtgaaattgaattacaaccttttccttaaggtcttttaccacctcccccccaaaaaaatcccccaaaactgattcagattttcatactttaatgaaatattttataatttgcaaatttttaagtaatttatgaaaaacctagatcagtggatctcctctctggctgcccattagaatgtcctgtggagattaaacttttttttttcagtttatggaccaagagttttgatttatttagggtggagttcaggatcagaatggtttcagaagctcccaggtgattccggagtgagttggagctgcaagcccctgagctagattataagatgcttctgggaaagaaccacattttaggaatttgcttcccacccagtgccctgcatttaatcagcacctgatgacttggcaggacttgccccaccagggtctggctttgaagggtagtggacaccaggatcctttggattaatcctctgccacctctctcttttcctcaaccgagagtgaatttatgtaattgagtgaaagtctacgaatcataattgtaataaattaaggctgggcatttgtttgaaattagataggataaagccaaaggtttgaacaagttgtggatggtttgtaaaaattaatcttacaaaataaatgctgtgtgtgaacacgttgattaaattcaaaaaaa

SEQ ID NO: 3387 - protein, 217 aa, Homo sapiens
MSCAGAAAAPRLWRLRPGARRSLSAYGRRTSVRFRSSGMTLDNISRAAVDRIIRVDHAGEYGANRIYAGQMAVLGRTSVGPVIQKMWDQEKDHLKKFNELMVTFRVRPTVLMPLWNVLGFALGAGTALLGKEGAMACTVAVEESIAHHYNNQIRTLMEEDPEKYEELLQLIKKFRDEELEHHDIGLDHDAELAPAYAVLKSIIQAGCRVAIYLSERL

SEQ ID NO: 3388 - DNA, 1738 bp, Homo sapiens
ctgtgcgcatgctgggcttgggtcgccgccggggcttgccccctgggctgctcggccaccgccgccccgggcgcccggcatgtcggtgcactacaccctcaatctacgcgtcttctggcccctggtgaccggcctgtgcaccgccctggtgtgcctctaccatgtcctgcggggaagcgggggcgcccgggccgagcccgccgacggcgtggatggcggcttcccgttgcttaaggtggccgtcctgctcctcctcagctatgtcctcctgcgctgtcgccacgctgtccggcagcgcttcctgcccgggtctccccgtctggagggtcacgccgccttctcctcgagacacttccgagagccgggcctcagcatcctgctggagagttactacgagcatgaggtgcgcctgtctccgcacgtgttgggccacagcaaggcgcacgtgagccggatcgtgggcgagctggtgcgggctggccgcgcccgggggtcccccggtctcattcctgggggagcgctggccttggccttccgcggagacttcatccaggtgggcagcgcctacgagcaacataaaatccgccggcccgacagcttcgacgtgctggtgccactgcgcctcccgccgcttgtggcgctggagccacggagcctgggcgaggagccagcgctggccccggccttccgcggctgcttcttgtgcgccctcaaggcaccaccctcaccatcgggggcctcggggggccactggcttcgggactgcaaaccctttgctgatgccttctgcgtggatgtgcgcgggcggcgtcacctctctgctactctggtgctgcgctggttccagtcgcatctgcagcgctccttggccactgtgcgttacagcctggaggggcgctgtcgggtcaccttgaccccaggtggcctggaacagccccccaccttacacatcttgccctgccgcactgactacggctgctgccgcctttctatggctgtgcgtctcatccccgctgtccatctgggagatggggtcttccttgtggcgccaccaccgccacccttgcccagcgcgcccctgttggagctccctgagggcctgcgtgcggaggcactgtggggtgtgaacacagcacgccaggagcagaagctgctgagttggctgcaggaacgggcagctccaggtgcctgctacctcaagtgcctgcagttgcttaaggctctgcgcgatctgggggcccgtgggctggactcagcggccgccacccagtggggacgcatcctatcctcatatgtgctcaagacagtgctgctggcagtgctgctgcgcaagggggcccctgggcaaggctgggacgaggagcacctgggaaggtgtttggaggagttggtgcagttccttagggactgcctgctgcgacgccatacgctcttccactgcgtcctgggccctggtggggcggctgccgaggtgggtcccctgcccaaggcactgagggaagccgccccagttgacctcctggccgctttcgacgggcacgcccgggaacttgcagcagcgcggttgctgtccacgtggcaaaggctgccccagcttctccgggcctacgggggtccccgctaccttgccaggtgccccccaccccggagtcagcgcacccagggcttccttgaaggtgaaccgtaaaccctgacagcacccccacctgaccaaatgctcctaaagcctttcccactg

SEQ ID NO: 3389 - protein, 535 aa, Homo sapiens
MSVHYTLNLRVFWPLVTGLCTALVCLYHVLRGSGGARAEPADGVDGGFPLLKVAVLLLLSYVLLRCRHAVRQRFLPGSPRLEGHAAFSSRHFREPGLSILLESYYEHEVRLSPHVLGHSKAHVSRIVGELVRAGRARGSPGLIPGGALALAFRGDFIQVGSAYEQHKIRRPDSFDVLVPLRLPPLVALEPRSLGEEPALAPAFRGCFLCALKAPPSPSGASGGHWLRDCKPFADAFCVDVRGRRHLSATLVLRWFQSHLQRSLATVRYSLEGRCRVTLTPGGLEQPPTLHILPCRTDYGCCRLSMAVRLIPAVHLGDGVFLVAPPPPPLPSAPLLELPEGLRAEALWGVNTARQEQKLLSWLQERAAPGACYLKCLQLLKALRDLGARGLDSAAATQWGRILSSYVLKTVLLAVLLRKGAPGQGWDEEHLGRCLEELVQFLRDCLLRRHTLFHCVLGPGGAAAEVGPLPKALREAAPVDLLAAFDGHARELAAARLLSTWQRLPQLLRAYGGPRYLARCPPPRSQRTQGFLEGEP

SEQ ID NO: 3390 - DNA, 7121 bp, Homo sapiens
ggcccggcccgcggcggcggcaaaggggcggaggggttcgctgccagcaattgccaagctgctgcggtcgtggcgggatggtatagccgggcctgagggcgggcggcggggcgcgggcgggggcgaggcggccgggaagggccgacgccgcctgactggcttgggagcagcggcagcaagctgagggggcgtcgccgccgccggcccccggcgccgccgcgggaggccgcgcccgccatggcggcccgggcggtgctggacgagttcactgcgccagctgagaaggcggagctgctggagcagagccgcggccgtatcgagggcctgtttggcgtgagcctagccgtgctcggcgcgctaggggctgaggagccgctgcccgcgcgcatctggctgcagctctgcggggcgcaggaggcggtgcacagcgccaaggaatatattaaaggaatctgtgaacctgaactagaagaaagagaatgttaccccaaggacatgcactgcatttttgttggggcagagagcctgtttctgaaaagcttgattcaggatacttgtgctgacctctgcattctggacattggccttcttggcatcagaggaagtgctgaggctgtggtcatggctaggagtcacattcaacaatttgtaaagctctttgaaaataaagagaacctacccagtagtcagaaagaatcagaggtgaaaagggaattcaaacaatttgttgaagcccatgcagacaattacacaatggatttgttgattttgcccacttccttgaaaaaagaacttttgacactcacacaaggtgaggagaatctctttgaaacaggagatgatgaggttattgaaatgagagattctcaacaaacagagtttacacagaatgctgccacagggctgaatatttctagagatgaaactgttttgcaggaagaggcaagaaataaagctgggactcctgtttctgagcttacaaaacaaatggacacagtcctttctagctcaccagatgtgctttttgatccaataaatggtctaaccccagatgaagaggcactttccaatgagagaatttgtcagaaaaggagattttctgattctgaagaaaggcatacgaagaagcagttttctttggaaaatgttcaggagggggagattttacacgatgctaagacattggctggaaatgtaatagctgacctatctgattcttctgctgattctgaaaatttaagtccagatataaaagaaactactgaggaaatggaatacaacatcctcgtaaacttttttaaaaccatgggctactcccaagaaattgttgaaaaggtcattaaggtgtatggaccatctactgaaccattattgctcttagaggaaattgaaaaagaaaataaaagattccaagaagacagagaattttcagctggtacagtgtatccagagaccaacaaaaccaaaaataaaggtgtttatagcagcacaaatgagcttacaactgattccactccaaagaaaacacaggctcacacacagcaaaatatggtagaaaaattttctcagttaccattcaaagtggaagctaaaccatgtacctcaaattgtagaattaatactttcagaacagtgccaatagaacagaaacatgaagtctggggttcaaaccagaactacatttgtaacacagaccctgaaactgatggcctttcaccttctgttgcctctccaagtcccaaagaagtcaattttgtttcaaggggagcttcaagtcaccagcccagagttccactttttcctgaaaatggtttacaccagcagccagaacccttgcttccaaataatatgaaatctgcctgtgaaaaacgtttaggatgttgtagttctcctcattctaagccaaattgctcaaccctttctccaccaatgccactgccccagctgttaccttcggttactgatgcaaggtcggcaggaccttctgatcatattgattcctcagttactggggttcaaaggtttcgagatactctaaaaataccctacaagctggaattaaaaaatgaaccagggagaacggatttgaaacacattgttatagatgggagcaatgttgcaattacccatggtctgaaaaagttcttttcttgtcgtggaattgcaattgcagttgaatatttttggaagcttggcaacagaaacatcactgtatttgtccctcagtggagaacaaggcgtgatcctaatgtcacagaacagcacttcttaacccagctccaggagctcggaatattatctttaactcctgcccggatggtctttggagaaagaattgcttctcatgatgacaggtttctactacacttagcggacaaaactggtggcataattgtgacaaatgataatttcagagaatttgtgaatgagtcagtctcttggagagaaattattacaaaaaggctgctgcagtacacgttcgtgggggacatatttatggttcccgatgatcctctgggaagaagtggacctcgattagaggagtttcttcagaaggaagtctgtcttagagatatgcagcccctactcagtgccctgccaaatgtgggcatgtttgaccccagcttcagagtccctggcacccaggcagccagcaccagccaccagcctccgacccggattcagggagccccttcaagccactggctccctcagcagccccacttcccactgctgccagccctccccagtctccagcagaacctgcccatgccagctcagagatcttctgcagaaaccaacgagctgagggaagcccttctgaagatcttccctgactcagagcaaagactgaaaatagaccagatcttggtggcccacccatacatgaaagatctaaatgcgctttctgccatggtgttggattgaagattgtgctgagcgctgagcttgcgctcagggctggctgatcaaactcaagctcacacctgtacctgatgggaatgaacataatgtgaagaaacttatttcccagtgtaaacgcagttgtacagaaaaaaaatgttttgggtataaatctgggttttcaaaaccagcttttttctatatataaattatgctgctattacagatttaacattttctgttaaaggaaagtctacattttctgcctgttcagaactgtttaatagcagttactcttgagtgtatttacctttttatgttttttaaactattttccttaaagccgaaaatattgacaaatggatatggttagcctttataaataaataaaaaaaaaagtgttgctttcttaaggaaagcaagacgtcttaaagtatattttcttgagatgagtatgtcccatcactaccatgaagtgtgctcacccttccagcctcctctgccctcacccccggagttaaagtgggtaagagttggtttgttctgcagtctttggttggagtgttgtgaaagtggacccgcggtgccactagatggcacttggtgcctagccatggtgaatgaccagggcgaagttagtctcacagaataccagggctagaagacatcgtggagcccatggagtcccaccctccttcccccttccaccctgcgcaaaaggggacggcccagtgtgcacgccgtccggccatgcccacagccacagccacagctgaggagtggccgggcaggcagcaggctccccagccagggcttgacacgcccacagtcaggggcctccacatgcctggcctggctctggaagtcacgtcttagcttctgaacaccgtagcgggttatgaggaagtttaatgaagagcccggtcactgtggccatcttgtgtccccaactgcaggagacgccctgatgtggagtttgtacagctttgccaaaaaatggttttctattctcaaaagtgacccaagccaataaatagcattagtagcttctgtggggggatcccagagcccctgtatttattttccctgtgtttgtctctagtgtcctcctaaacagcctttcctgtgagtctttctcagaattgatatcttaatattgtctgttctaggtgttgcccaaattcagtgtcagtgaagttcttttcctgggcaatcttaacatctttactcttattgtctggaccttcaaagggctttgtattttacacctgcgcccccaggctgctcacagtcggcttgctgcctgtcctgcctgtccggatcttgtctcctagtcctgaggagcggaggctgagaactcagtgctggtttgtaaatggtgaggggacttgggggcatcccagagtgctccctccaggcctgcttcttggttttgtttgatcactgcgttcttcaagggatgaatccagagccctccatgaggccaagcttgtccttcaatcatgtttcctctcagatgcgtccgtgatgcctcctaatgtggaactggttgtccattgtttgggcctatggccaagtcacccagctgtggaagcagaggtagaagacgaggccagccaggagggcgacttcagtcacagctcccatgcctcagctttgtacctgttttcaaaagcacaactgaggtgtgcgggctggagctgtcttgcagtgattctggccttctggctcatggttcagtccagcagcctggctgacccactatttctcctctgcttcagaggaaacccaggaaatgcccttactgccaggctgagtctccacccatgctggttggtgctggctaggctgagggggccaccacttttcctggctagaagctacttgacctttgatgtttgagttctgtaagtcttcgtgttctgacttactgcttcagagggattggcctgtcccctttccctttctcggctatgggaaggaaggattgctcattggttgccttcatcagttacagcatgagacggaattcatcattccttccgaaacccctgatatttaatatttaatatttaaaaacccaaattatcaaaccattaagaactcattactggttctcagcctcctccagtactagcctcagtgtggctgctgcataagtatctgtagcctgtctacctcctgcagtggggccgctcgcctcttccctgtctactgctcaggctctcccacttcgtggcatccatgtaaagtaggtggcagggcagagatgtcactctcattcaacagggaggatgtctgttgctcagagaggttgtcctgaggggctgggtgattcctgggcctacattcttcccgaggctccaggccgctgtctctggaagtaaaagagccttgtctgaccttaatgcaagcagtctgtttgaacccctgtaggctgcattcaggagacagaaggtgtctgggccatcctgggcggccggtcagcgttgctaggcaggctcggctgtctggccgggacttgggcctgggtggcttttgagaccagtgaagaagggagagccggcctcatgccgatgcggcttgtggcacggctgggatgtgagggaggactcagatctacacacagaaacccctcttctccccgccctcccccagctcctacctgcctcccacgcctcaggtgtggctgcctgtgggaccatcccccaacccctttcctcgcacctccttgtcctcacccagttcctgcagtgtctctgacccacgcctcccgcctcctggccgacttgcccaggaggtgtctctggctcacctccgtctgttcatcaccttcctccccagtgtttccacttatcttggatgttttagattgaaacagcctgattcccggaagaatcctcttcattcattgctagtgcttcccctcacctcccactctccacttcccagtttgcaaatgtggctttcgcccaccaagtgaaagcggactgagagcagcccttggggacggcccggtgcctggctgcaaggccgcgctggggctctgtcttggtgcacatggcttgaccggactttccctgcttcccaccacttccctcactcccagacctccctcattctttttgtctcttctttttgcctaaagccagtccttaacaccctattcttcctctgcaggtggcttgcagacttttccccacctttggggctcgtggtggtggagagggcagctggtgttaagaatgtaggttaccgggcatgacccggcagatgcttgcccagtagttctggaggaaggcccgggaatctgcaaatgagcgcattccccaggcagttcccatgcaggtgatccacggaccacatgttgagaaactgcagtcacccttagggccacaccgtccctctcctcgctgtcccctctctgtagtgactggccctgaccttcaggagtgcactttccactctaccaggaagccctatgacatcctcaggctccccagacctgcagcttgcatggggcccctcccttcttccacacccaccctccgtatggtcccctgctctgccctcgtgctttgctggcccctgcccgctactcccactctcagacacccaggggtggtgggccctaactggctggcccctcccagcgctgccctctgccgtccagatgctgcagtgtggccagatttaccttccagtaacatacttctagtcacccctcctcctgcgaagtgatctgcagtggctgtttgaccagaccacaaagttcacatctcctgagcttagtgtccgtggctgtccacctcccagccatacttgactgtccccaaactctccctgcagccacatgtttcccatgacctgtgggctctgcagatggacctctctccgctagagatgcccttctcccaaatggcttccctcctggaaggcccagcctgagtcctcgtctcctttccagtgcttctgccagaagcatccccatgatgttgtgaccgcacagcactttgtgtctcgctttgagcacttgccactctggctggtgctgctgccactgattgtgtactgtcttgctgccctttctagactgtgagctcctcgtgggcagggaccgcctgtgttctctgtatttcccacggcgcctagcacagtgccttgcacttgataggtgcttaataaatgtctgctcaactgaaaaaaaaaaaaaaaaa

SEQ ID NO: 3391 - protein, 896 aa, Homo sapiens
MAARAVLDEFTAPAEKAELLEQSRGRIEGLFGVSLAVLGALGAEEPLPARIWLQLCGAQEAVHSAKEYIKGICEPELEERECYPKDMHCIFVGAESLFLKSLIQDTCADLCILDIGLLGIRGSAEAVVMARSHIQQFVKLFENKENLPSSQKESEVKREFKQFVEAHADNYTMDLLILPTSLKKELLTLTQGEENLFETGDDEVIEMRDSQQTEFTQNAATGLNISRDETVLQEEARNKAGTPVSELTKQMDTVLSSSPDVLFDPINGLTPDEEALSNERICQKRRFSDSEERHTKKQFSLENVQEGEILHDAKTLAGNVIADLSDSSADSENLSPDIKETTEEMEYNILVNFFKTMGYSQEIVEKVIKVYGPSTEPLLLLEEIEKENKRFQEDREFSAGTVYPETNKTKNKGVYSSTNELTTDSTPKKTQAHTQQNMVEKFSQLPFKVEAKPCTSNCRINTFRTVPIEQKHEVWGSNQNYICNTDPETDGLSPSVASPSPKEVNFVSRGASSHQPRVPLFPENGLHQQPEPLLPNNMKSACEKRLGCCSSPHSKPNCSTLSPPMPLPQLLPSVTDARSAGPSDHIDSSVTGVQRFRDTLKIPYKLELKNEPGRTDLKHIVIDGSNVAITHGLKKFFSCRGIAIAVEYFWKLGNRNITVFVPQWRTRRDPNVTEQHFLTQLQELGILSLTPARMVFGERIASHDDRFLLHLADKTGGIIVTNDNFREFVNESVSWREIITKRLLQYTFVGDIFMVPDDPLGRSGPRLEEFLQKEVCLRDMQPLLSALPNVGMFDPSFRVPGTQAASTSHQPPTRIQGAPSSHWLPQQPHFPLLPALPSLQQNLPMPAQRSSAETNELREALLKIFPDSEQRLKIDQILVAHPYMKDLNALSAMVLD

SEQ ID NO: 3392 - DNA, 2130 bp, Homo sapiens
aggacagggcagcggcggtgacccgagctgccgcccgacatgaactcgctggagcaggcggaagccccgcgagttgtatccctgattcctgcggtggtttccggtaactgccaagatctcaaggcttttgagaggagacttactgaatatattcattgtttgcaacctgctactggacgctggagaatgcttcttatagtggtatctgtctgtacagctactggtgcctggaactggttaatagaccctgagacacaaaaggtgtccttcttcacatcattatggaatcacccatttttcaccattagctgtatcactctaataggcttgttctttgctggaatacacaagagagtagttgcaccatcaattatagctgctcgatgtcgaacggtattagcagaatacaatatgtcttgtgatgatacaggaaaactaattttgaaacctaggcctcatgttcaatgacaatcttcactcattgttatgggacttaaaatagcctttcttcgaataagtgatacagcaaaaagccataaaggattccttttgcggttggatatgtaaaggtcatagcagcaactgacaagaagtgtgcaatatttacctggattatcttgatgatggtgactcattatcagtgctttggtacttttgattacctgtgtttcagtattagtgtcactttagtacttcagatcctgcaaatatttttgcagatgaagtatgtatgtatgttactaagttaaacttagaaacagaacctcattcagtttttataatgtatttttgcaaactactgtaaatagcaaatcaatgccaatgttaaacaaagaggaaaacgttgtgtggactttgttctcttgcaccggtatttcaggaacatctgcttgccatccccacagctctttaaaactggctattatgtgtgcctttcattcttacatttctaatcatactgcaggaaaaacattggattcagcttagactgaggaaaactctccattatgttgtaagaaattatagatgttttgagagacactttttgttaaaccagatattgaactccagcaactattgtggttatatttttagttcattgttctcatttaatgctaaatatcctttatattgctttaataattttcttttttttttttttttttttagacggagtctcgctctgttgccaggctggagggcagtggcacgatcttggctttctgcaacctctgcctcccaggttcaagcgattctcctgcttcagccttccgagtagctgggactacaggcgcatgccaccatgcccagctaatttttttgtatttttagtagagacggggtttcaccacgttggccaggatggtttcgatctcctgacctcgtgatcctcctgcctcatcctcccaaaatgctgggattacaggcataagccaccgtgcctggcctctttaataatttttaaaataccctaaaggcttgtgaatatacaagtctactgataaattatgtattgtctgggaatttgatagtcattgttttagataactggattttacgctgtggtagacaggctgtgacactagtgttgcacaggtgtaattggtcatcctatgccttcaccagaataacttgggagtggtgccagaaactagagtctacaattctcactgtttagagagtgttaatgacatactgtgtatgcataatagccgcatgtactataatagcccttaaaattaaactattgggattgctgtaaatattttaaagtactggaggtgccttttacctgtttattagattttgaaaaggtttaaattatttcatgagcaatcttttaaatttcatttaacataaagctgaaaattcaataacaggataaaaaagctttttaacaaggctgccatttaacttaaatgtgttcatcttagctttcacttgtataaaatttgattctttgaactgcagcaataaaaccctcagctcctaagaagtcttaagagggtattctatatattctgctttgttttattttctgtaaattttgtaggtaaatatgtgcattaaaaataaatactttatatataactcgtgaaaaaaaaaaaaaaaaaaaaaaaaaaaaaaaaa

SEQ ID NO: 3393 - protein, 142 aa, Homo sapiens
MNSLEQAEAPRVVSLIPAVVSGNCQDLKAFERRLTEYIHCLQPATGRWRMLLIVVSVCTATGAWNWLIDPETQKVSFFTSLWNHPFFTISCITLIGLFFAGIHKRVVAPSIIAARCRTVLAEYNMSCDDTGKLILKPRPHVQ

SEQ ID NO: 3394 - DNA, 2625 bp, Homo sapiens
agacgacgcgccgtgcgcctgcgcacggcttgcccatgtgtgctgcagccgtcagccggcccagctgagcagcagcaacggaccttgttaacggcgcggcagcctccaccgcctgctgttgccctcctctctcggtggtctgtccgcccagcgcacgtcaccatgggcaagagccggacgaagcgcttcaagcgacctcagttctcccctacgggcgactgtcaggccgaggcggctgcggcggcgaatgggaccggaggcgaggaggacgacgggccggcggcggagctgctggaaaagctccagcacccgagcgccgaggtccgcgagtgcgcctgcgcagggctggcccggctggtgcagcagcggccggcactcccgggcctggcgcgacgagacgccgtgcgccgcctcgggccgctgctgctagaccccagcctggccgtcagggagactgcagccggcgcgctgagaaatctcagtgcttgtggaggttttgaagtttgtgatgacatggtgactaaggatatcatgacccctctggttgcgctgctaaaagagtgtagtgctggactggattcaaatgagatgtctctgcaggagaaaaaagatcagaacagaaattctattgagaacatagccaatgagactgtgaacgtgctgtggaatatatgtgaatgcagtagtagagcagtgtctatattcaacaaagaagggtgtttggagattgtgttaaagtatttaagtaggtttcctaccaatgttgacctggctatttcagtagcatattgtttgcagacagtgactgaggataacccagagctgctgaagtctttcagtgctacagcattgaacatgctggaatcagcactgctttctcctgtcagttccatggaatctcttctattgaagacattggtagcaggcacaatttggaatctaaaggacattattccatgcaagagtcaagcagaaatcataaatgccttactaaagatcttatctgaagttttgggaatggatgctggtgaaatggttattcaaatgaaagaggctgaaacgcaaaggttaaaaactgctgcagaggctgaggaaatattagagaacactaatggggatgatttgattgaagatgatgaaatggaaggaatttctcataaaagaagagtcagaaggaaaactttcgtttcagatttacttccgcccactgacaaggaactgagagagactatagcattgctgacagcccaacagactgctctggaaattattgtcaacatgtgctgcaatgaagatccctctgatgacgaatgggaagagctttctagcagtgatgaaagtgacgcatttatggagaattccttcagtgagtgcgggggacagctgttttctcccctctgcctctcccatgaagttcacacggctctcaccaactacctcatcccaaagaagatttttgagaaaactgcctttccaaacagcattgcagttgacctatgttctaggaaccctacttggaaacctttgattagaaaaatgaacactattcagtgcagagccctcttctgtctccagagtcttgtgtccctcctggatgtggagcacctgggaggagccgcagcccttcagacgcttgcacagcatctgtcacagctgcttttttctcaaccagattttgctaaacatgttgactttctagaagccataagtagtgctttgagggcccttttgcaaacaatggcctccaagaacatttcccagtgcatgactcctgatcagctgatgacattatgcaaagcaggcattcatagtagtaatgtcggggttagagtgaatgtcgttagcattttaggaatcactggcagcgtccttgccaaagaagatggtacacttgaaactcttaagaacattgggtgctttctgcttgaagttaccaccaaagatccttcccttgtggtagcaggagaagctttggatgccctctttgatgtttttgcagatggtaaagaagccgaaagagcctcgattcaaattaaattattatctgctctgaaagaattccagccggtctttaaaatgaagatacgtaaagaagggagaggtaactatagcacagatcagctgtgtgttcttgacaatgtgaaaatgaatttgcgaagatttattgcttatcaagaaactgttgagaaaagactgacttcttaaacaatccaaaaaagaaaccagttcttcccccaaagtattcaatgcttagaatactaaaaggttttctttgaatgtatatgtttctgaaagtcattttttaatgattacattctgtacattctgtaaaaacttcaaaacctggccaggcatggtggctcacgcctataatcccagcaccttgggagaccgaggcgggtggatcacttgaggtcaggagtttgaggccagcctggccaacatggtgaaaccgcatgcataagcatggtggcacatgcctgtgatcccagctactcgggaggctgagggaggagagtcggttgaacctgggagacagaggttgcagtgagctgagatcacgctactgcactccagcctgggtgacagagggagaccctgtctccaaaaaaaaaaaaaaaaaaa

SEQ ID NO: 3395 - protein, 680 aa, Homo sapiens
MGKSRTKRFKRPQFSPTGDCQAEAAAAANGTGGEEDDGPAAELLEKLQHPSAEVRECACAGLARLVQQRPALPGLARRDAVRRLGPLLLDPSLAVRETAAGALRNLSACGGFEVCDDMVTKDIMTPLVALLKECSAGLDSNEMSLQEKKDQNRNSIENIANETVNVLWNICECSSRAVSIFNKEGCLEIVLKYLSRFPTNVDLAISVAYCLQTVTEDNPELLKSFSATALNMLESALLSPVSSMESLLLKTLVAGTIWNLKDIIPCKSQAEIINALLKILSEVLGMDAGEMVIQMKEAETQRLKTAAEAEEILENTNGDDLIEDDEMEGISHKRRVRRKTFVSDLLPPTDKELRETIALLTAQQTALEIIVNMCCNEDPSDDEWEELSSSDESDAFMENSFSECGGQLFSPLCLSHEVHTALTNYLIPKKIFEKTAFPNSIAVDLCSRNPTWKPLIRKMNTIQCRALFCLQSLVSLLDVEHLGGAAALQTLAQHLSQLLFSQPDFAKHVDFLEAISSALRALLQTMASKNISQCMTPDQLMTLCKAGIHSSNVGVRVNVVSILGITGSVLAKEDGTLETLKNIGCFLLEVTTKDPSLVVAGEALDALFDVFADGKEAERASIQIKLLSALKEFQPVFKMKIRKEGRGNYSTDQLCVLDNVKMNLRRFIAYQETVEKRLTS

SEQ ID NO: 3396 - DNA, 7589 bp, Homo sapiens
ccagcggagggcgggccgcggggggcggccgagcagacggcggcggggtcgtgtacagcgggaccccgtggaaacggaggaactacaaccagggagtcgtgggtctgcatgaagaaatcagtgatttttatgaatacatgtctccaagacctgaggaggagaagatgcggatggaggtggtgaacaggatcgagagtgtaattaaggagctctggcccagcgctgacgtccagatatttggaagttttaaaactggactttatttacctactagtgacatcgacctagtggtgtttgggaagtgggagaacctacccctctggactctggaagaagctcttcggaaacacaaagtcgcagatgaggattcggtgaaagttttagacaaagcaactgtacctattattaaattaacagattcttttactgaagtgaaagttgatatcagctttaatgtacagaatggcgtgagagcagctgacctcatcaaagattttaccaagaaatatcctgtattgccatacttggttttagtattgaaacaattcctattgcagagggaccttaatgaagtatttacaggtggaattggttcttatagtctctttttaatggcagtcagtttccttcagttacatcccagggaagatgcttgcatccccaatacaaactatggtgttctcttaatagaattttttgaattatatggacgacacttcaattatttaaagactggcatccggataaaggatggtggttcatatgtggccaaagatgaagtacagaaaaatatgctagatggctacaggccatcaatgctttatatcgaagatcctttacaaccaggtaacgatgttggaaggagttcatatggggccatgcaagtgaagcaggcctttgattatgcctacgttgttttgagtcatgctgtatcaccaatagcaaagtactatcccaacaatgaaacagaaagcatactaggtagaataattagagtaacagatgaagttgccacatatagagattggatatcaaagcagtggggcttgaagaatagacctgagccttcatgcaatggaaatggtgttaccttgatagtagatactcagcagttagataaatgtaataataatctatctgaagaaaatgaagcccttggaaaatgtagaagtaaaacctcggaatctcttagtaaacactcttcaaactcttcatcaggtccagtgtcgtcctcttctgccacacagtccagctctagtgatgtagattccgatgcaacaccatgcaaaaccccgaaacagctgctttgccgtccgtccactgggaaccgagtagggtcgcaagatgtatccttggagtcctctcaggcagttgggaaaatgcaaagcacccaaaccactaacacatccaacagcaccaacaaatctcagcatggatcagcaaggctctttcgttcttccagcaaaggcttccaaggtacaactcaaacaagccatggttccttgatgacaaacaaacaacatcaaggcaaatccaataatcagtattaccatggcaaaaagaggaaacacaagagggacgcgcccctctcagacctctgtagatagtcagcgctgcgcggtggactgtcttctctgtgcaatgatctcatgctcaggacagttgcgcagggactcctgggagatattcaggagcctcacactgttcagacgttgacttagcaactgcgttttttcccagctcgccacagaatggatcatgaagactgacaactgcaaaaaaaacaaaacaaaacaaaaaaaaaagcaagcaaaaaagagggaaaaaaaaggctgcttatttgataagtcatatgctacaacagggtcattttaagatttaaagcttgaatgtaaaataaatatatttctcattggctttatgcagagttatagggaatagtattcagtgttggtagggtgatagaaacaaaaaacagtatcagaggatgaggtggggaaggaaaacaaaggtatctgataggaagtccagattccaaaggggaaagtgatctgtgcatgttttttttttaaatatttttgcatatatttaccattttattgtgtgtatatatagaagaccatataggagattgatatttgtaatagtggatttgttaataatactttttacataacattactgtttaaattgtaaacagattttttctcaggattagtttgaaaaataatctaaattgtcatcttaacatccatatatagggaagtgattagttctattactcaatttgtttttctcagcattgaaatgacttaatagaacccttgtgtcctgctgcaaaaatttttcctctctaaagaaaaggtttatggtggcaaatgatgtttattttattttgtaaaaaaaaaaaaatgtactatgtacttttgtgtaaacactgaaaaatctctggtcatctccgagaattaacttgcaactgttttctatagtgctgtcgtcttgggcaatgggcaattacatgactttgtgtttgcttcctttgcagtcttttttttttccccccatttcttcctaataggaaaaaaaaaaaaaaaaaggtcacccatgtctggtctcattcctgttgcagtgaaacttcgagttccacagactttgcatgctggcttctctaaccctgtgtgctgcgtgtgcctgtttctcatctcttattctttttaaaattcatgcttaactactgtgggagaataactgtaaacagctttaattaaatcatacttataaaaaactattttcttatattccactctatgcttttggtattgttgatctttacaaattaaatggtctttgataatggatctattttgtattgccttattaagaccaaatacttcttgtcatcccattctttatcctcttctttcatggaattgttatcgttaattaaaacttttttaaacattggcttgtttcaatcatactgtaaattttggttgtagtcagctttgagtgcaatgagatgtataattctgttatcattacctgttgagtttgaaactcagttgggaatatttaatataatagaatgtaagtgacatttctgaaaatgctttctttcagggtgaaagctcttatgtttagcatcaatgtgtatggctctgttaaatgcagccatttctgagacgagattcttttatatatatatacatataaagtactattggcttttaggagtttcttttatatacatttatgaaatactgaagaccaatcagaccattaatggacacttagtgtaactttttataaagaaaataatgctaaagtaagaccaaaactgatgtcatcactgaaattaacaattttcaatatgttcatattttaattcacaatggaaaaatgtgttccaaaactggaaactcatagtactcgtgtaaactgtggaagatttcaaatgtgatgttattttgacaatgttttaaattttagagtcacattttattctgatcagaatttttattgagatgttgagcttttgtttttgaaactagtttgtcataacattgtgcataatcacagtatttattttctaggacaattgtgaatgtgtagacttatgtttactgctaagggaacaattatttataaaataatattaaatccagtattagctgcctatttcagacacttaatacttgcagagatctatgttacatttaccacactgaagttttttttgttgttttttgtttgtttttaaagaatcaccctcattgttgaaagtaaatgtactcttagggtgcgaatattagtgttccaataagcatgtgattatattaaggtggtggtagcgggaagataattctgattccattgggaatcttaggttttcgtaaatttattgggaaaatagtttttcctgtactgctgaagtttctttttggtaaacagtatctttctaaaagaaaaaagcatgaaggagaaattgaggtgtgtatacatttcctcaaatgaccagcattgtattcgtgaatactgtgtatcttgcagtgaacagtgtggaagctgttcatttttcaatctgaagtaaaatactttcaagaacttttagtttgcctgctcatttgttttatacatttcatctatttgactcctatcttatttcttttttgagttttaatacttcctatattttgtgaatatatcagaaatgtgtcatttatatattagagtccattcatatccatgaatcataaccttcctttgctaatacttgttgaatgggattttacaaattctccctcactctggtgacatttctcaggcagtcatgtatgtgtacctggccattagaaatattaatatttaaagactgttttttagaggagctgatgggttggtgaggtgtcagcacaaaatcttactggttatgttttgatgataaaagtatatccattttttccctccagctttaaggtgactgtgaaggtgcctggttttgaatgtctttgtttggtttggagatgtcgcactcagttttcaaatctagcttggatctgtaggacctatgttttttacaagtaattgccctccagtcttcaacagttgattctgttttatttttatcctgttttgagtgtactttacctttacttgcattttgagcctcattaatatttaggttatttgatttggctccagatattcctagatctgcacagggcaaaacatgggctatagggtgagcatttttaattgtctttttctgctggaaccttatatctctccatgtgttttctgctccttccctcccccatgaaatggtaagtgtgacttgtgtttgcctgaacctgtggactagtgtttggggtttctggaaacactagagggtcagaaaagagtaatgaccaccgtgacgtgcaggattctcttgctgtgacatgttcattgcaaagccctctccagtgactaggaggtgtagttattaaggttgatctgttagaaatcaccattattaggtattagtggtagatgttgctgatacttttattggtcatgactacatctcagttttactttaatattgatctatagtttgatcagttccttgaattctaatatgttgatttctcagtgtttctgtcactaaccaagaatgtttctaggcagttggttgcttcacagtcaaaactaaatggtaaactatcaaaaatacattcccaattttgctgtgataaatattgaaatgttaaaattaatgaacagaagaatttattcttacccatctattcttgttctcctagttcattaaactttcagttattggaaaggcacattctcaaagtattttatgagcaaaatattctataaatgcgtctaacaaacctaattgaatataaaagttatatttagtagttactgttgatagtaattttcatcagggtcatagttcatctagtaaaatatttagagaatgatgttaacattccagcattaaagtgggaacaaagatttatatatgaaattccttaaaagagttcatcttgccttggtttctgaccctcaagactctagctacctgccatcttgtcaaaacatttgtgggtagaataagtgttaaagatcaaattttaatatgcttctcgatatttaacatagctaagaagccagattttactgtagaagttatttacatgatttgaaaacttgacctaactggaagcctttttctcagtcatcttgttctaagccatcttgacttcacacccttagcgacttttcttttttttttggtcaaagataatgagctaaatatatatagacgttgaatgttgacaaaattattaaccagaaaaattgcttataaaggctgctgatctatttgatacctagaattaaatatttgaggacagtttttagttaataaactgctaatgtttattttactgtctctcaggtttttggtttttttaaaaaaaatgtgtttggcctttacattttctacttaagtgtgtactttattgagtttaaccttgtctgtagcctagtagcctgaaagaaaaggagacagaaccagagagatggatgtagtgcattccctttggttattacacatttgtggtagctcctggatttactgagagatattttagctatgtcaataagaacagctaatgatgtggaaatcaggtgttctcttgtgtatttcagtgaacatttttattagtagttgcatatcatctctagttccacattttaacttaacgtctttgtggcttcaccactgagctacctttcactacaccagcttctgtgtggcctggtaacatggaaggtctctcctaaggacagtctggacgtattttgggggaatgttatttatcttaaagatgcctagaaacaaaacgcatatagtaccagtgagaaactatgaagtaaacaagttgctcaggccgggcatggtggctcacgcctgtaatcccagcactttgggaggccgaagcgggaggatggcttgaggctgggagtttgagaccttcatctcttaaaaaaacaaacaaaaacctgaatggtgaggtgtggtggaattgggtaggggagggaaaggaggacttggaaaagcattctccaaagccagcaacttggtgaagttcagtacttgcctcttagaggttaggccatgcctttcaaagagagtgaaatgatgggttatcagccacattcttggagttaatatttttcttcatctttcagtttgggttctgtgctattcatagttcttccctaagaccatttcattattaccttttatatttagttgcaatttattataatatgttgttttgtccctgaacttaatctcctaattttaagatcctctctgatttttgcatattgaaacttacagaagtcactttaaaaaagtcttttgaaagtcctacaatcctaaaataaatcacaagcttgtttgttagacgtgtcaagagtctccagtctttactactaaaaagcagcactgccttaacacacattgttatgggtgaaaagtgagggacgaccagtgtagtttctggatataaagtgtgaaggactgttgagttaaacatttttagtggaatatacatagataacgtgtatttagaaactttggtgaagccagtatttgtttttagtaacctttttatgtatttccttctttgattagcattgtcttcagtgttaagaaatgtggactcctgtgaggtgctggaggtttgaatcatcttgaaaactttccaatcttgtctagttaccactgcagagacactaaggaatttaccagaaaaagatatttgatacaagtgatttaagaaatctcaacatttcctgaggccgtatcactgggcaaccagtgatgaaaactatgaatgaattgcacacctggaagattttttaagctaatgacagtttcttcaaagatgtcaattatttgccttggaaattttataaattgcatttctatgcacatcggcctctagtgcttaccactcggtttattattcataatctgcaattcaataaaggctttgtgttttcatttatcttcaaaa

SEQ ID NO: 3397 - protein, 489 aa, Homo sapiens
MSPRPEEEKMRMEVVNRIESVIKELWPSADVQIFGSFKTGLYLPTSDIDLVVFGKWENLPLWTLEEALRKHKVADEDSVKVLDKATVPIIKLTDSFTEVKVDISFNVQNGVRAADLIKDFTKKYPVLPYLVLVLKQFLLQRDLNEVFTGGIGSYSLFLMAVSFLQLHPREDACIPNTNYGVLLIEFFELYGRHFNYLKTGIRIKDGGSYVAKDEVQKNMLDGYRPSMLYIEDPLQPGNDVGRSSYGAMQVKQAFDYAYVVLSHAVSPIAKYYPNNETESILGRIIRVTDEVATYRDWISKQWGLKNRPEPSCNGNGVTLIVDTQQLDKCNNNLSEENEALGKCRSKTSESLSKHSSNSSSGPVSSSSATQSSSSDVDSDATPCKTPKQLLCRPSTGNRVGSQDVSLESSQAVGKMQSTQTTNTSNSTNKSQHGSARLFRSSSKGFQGTTQTSHGSLMTNKQHQGKSNNQYYHGKKRKHKRDAPLSDLCR

SEQ ID NO: 3398 - DNA, 7448 bp, Homo sapiens
ccagcggagggcgggccgcggggggcggccgagcagacggcggcggggtcgtgtacagcgggaccccgtggaaacggaggaactacaaccagggagtcgtgggtctgcatgaagaaatcagtgatttttatgaatacatgtctccaagacctgaggaggagaagatgcggatggaggtggtgaacaggatcgagagtgtaattaaggagctctggcccagcgctgacgtccagatatttggaagttttaaaactggactttatttacctactagtgacatcgacctagtggtgtttgggaagtgggagaacctacccctctggactctggaagaagctcttcggaaacacaaagtcgcagatgaggattcggtgaaagttttagacaaagcaactgtacctattattaaattaacagattcttttactgaagtgaaagttgatatcagctttaatgtacagaatggcgtgagagcagctgacctcatcaaagattttaccaagaaatatcctgtattgccatacttggttttagtattgaaacaattcctattgcagagggaccttaatgaagtatttacaggtggaattggttcttatagtctctttttaatggcagtcagtttccttcagttacatcccagggaagatgcttgcatccccaatacaaactatggtgttctcttaatagaattttttgaattatatggacgacacttcaattatttaaagactggcatccggataaaggatggtggttcatatgtggccaaagatgaagtacagaaaaatatgctagatggctacaggccatcaatgctttatatcgaagatcctttacaaccaggtaacgatgttggaaggagttcatatggggccatgcaagtgaagcaggcctttgattatgcctacgttgttttgagtcatgctgtatcaccaatagcaaagtactatcccaacaatgaaacagaaagcatactaggtagaataattagagtaacagatgaagttgccacatatagagattggatatcaaagcagtggggcttgaagaatagacctgagccttcatgcaatggtccagtgtcgtcctcttctgccacacagtccagctctagtgatgtagattccgatgcaacaccatgcaaaaccccgaaacagctgctttgccgtccgtccactgggaaccgagtagggtcgcaagatgtatccttggagtcctctcaggcagttgggaaaatgcaaagcacccaaaccactaacacatccaacagcaccaacaaatctcagcatggatcagcaaggctctttcgttcttccagcaaaggcttccaaggtacaactcaaacaagccatggttccttgatgacaaacaaacaacatcaaggcaaatccaataatcagtattaccatggcaaaaagaggaaacacaagagggacgcgcccctctcagacctctgtagatagtcagcgctgcgcggtggactgtcttctctgtgcaatgatctcatgctcaggacagttgcgcagggactcctgggagatattcaggagcctcacactgttcagacgttgacttagcaactgcgttttttcccagctcgccacagaatggatcatgaagactgacaactgcaaaaaaaacaaaacaaaacaaaaaaaaaagcaagcaaaaaagagggaaaaaaaaggctgcttatttgataagtcatatgctacaacagggtcattttaagatttaaagcttgaatgtaaaataaatatatttctcattggctttatgcagagttatagggaatagtattcagtgttggtagggtgatagaaacaaaaaacagtatcagaggatgaggtggggaaggaaaacaaaggtatctgataggaagtccagattccaaaggggaaagtgatctgtgcatgttttttttttaaatatttttgcatatatttaccattttattgtgtgtatatatagaagaccatataggagattgatatttgtaatagtggatttgttaataatactttttacataacattactgtttaaattgtaaacagattttttctcaggattagtttgaaaaataatctaaattgtcatcttaacatccatatatagggaagtgattagttctattactcaatttgtttttctcagcattgaaatgacttaatagaacccttgtgtcctgctgcaaaaatttttcctctctaaagaaaaggtttatggtggcaaatgatgtttattttattttgtaaaaaaaaaaaaatgtactatgtacttttgtgtaaacactgaaaaatctctggtcatctccgagaattaacttgcaactgttttctatagtgctgtcgtcttgggcaatgggcaattacatgactttgtgtttgcttcctttgcagtcttttttttttccccccatttcttcctaataggaaaaaaaaaaaaaaaaaggtcacccatgtctggtctcattcctgttgcagtgaaacttcgagttccacagactttgcatgctggcttctctaaccctgtgtgctgcgtgtgcctgtttctcatctcttattctttttaaaattcatgcttaactactgtgggagaataactgtaaacagctttaattaaatcatacttataaaaaactattttcttatattccactctatgcttttggtattgttgatctttacaaattaaatggtctttgataatggatctattttgtattgccttattaagaccaaatacttcttgtcatcccattctttatcctcttctttcatggaattgttatcgttaattaaaacttttttaaacattggcttgtttcaatcatactgtaaattttggttgtagtcagctttgagtgcaatgagatgtataattctgttatcattacctgttgagtttgaaactcagttgggaatatttaatataatagaatgtaagtgacatttctgaaaatgctttctttcagggtgaaagctcttatgtttagcatcaatgtgtatggctctgttaaatgcagccatttctgagacgagattcttttatatatatatacatataaagtactattggcttttaggagtttcttttatatacatttatgaaatactgaagaccaatcagaccattaatggacacttagtgtaactttttataaagaaaataatgctaaagtaagaccaaaactgatgtcatcactgaaattaacaattttcaatatgttcatattttaattcacaatggaaaaatgtgttccaaaactggaaactcatagtactcgtgtaaactgtggaagatttcaaatgtgatgttattttgacaatgttttaaattttagagtcacattttattctgatcagaatttttattgagatgttgagcttttgtttttgaaactagtttgtcataacattgtgcataatcacagtatttattttctaggacaattgtgaatgtgtagacttatgtttactgctaagggaacaattatttataaaataatattaaatccagtattagctgcctatttcagacacttaatacttgcagagatctatgttacatttaccacactgaagttttttttgttgttttttgtttgtttttaaagaatcaccctcattgttgaaagtaaatgtactcttagggtgcgaatattagtgttccaataagcatgtgattatattaaggtggtggtagcgggaagataattctgattccattgggaatcttaggttttcgtaaatttattgggaaaatagtttttcctgtactgctgaagtttctttttggtaaacagtatctttctaaaagaaaaaagcatgaaggagaaattgaggtgtgtatacatttcctcaaatgaccagcattgtattcgtgaatactgtgtatcttgcagtgaacagtgtggaagctgttcatttttcaatctgaagtaaaatactttcaagaacttttagtttgcctgctcatttgttttatacatttcatctatttgactcctatcttatttcttttttgagttttaatacttcctatattttgtgaatatatcagaaatgtgtcatttatatattagagtccattcatatccatgaatcataaccttcctttgctaatacttgttgaatgggattttacaaattctccctcactctggtgacatttctcaggcagtcatgtatgtgtacctggccattagaaatattaatatttaaagactgttttttagaggagctgatgggttggtgaggtgtcagcacaaaatcttactggttatgttttgatgataaaagtatatccattttttccctccagctttaaggtgactgtgaaggtgcctggttttgaatgtctttgtttggtttggagatgtcgcactcagttttcaaatctagcttggatctgtaggacctatgttttttacaagtaattgccctccagtcttcaacagttgattctgttttatttttatcctgttttgagtgtactttacctttacttgcattttgagcctcattaatatttaggttatttgatttggctccagatattcctagatctgcacagggcaaaacatgggctatagggtgagcatttttaattgtctttttctgctggaaccttatatctctccatgtgttttctgctccttccctcccccatgaaatggtaagtgtgacttgtgtttgcctgaacctgtggactagtgtttggggtttctggaaacactagagggtcagaaaagagtaatgaccaccgtgacgtgcaggattctcttgctgtgacatgttcattgcaaagccctctccagtgactaggaggtgtagttattaaggttgatctgttagaaatcaccattattaggtattagtggtagatgttgctgatacttttattggtcatgactacatctcagttttactttaatattgatctatagtttgatcagttccttgaattctaatatgttgatttctcagtgtttctgtcactaaccaagaatgtttctaggcagttggttgcttcacagtcaaaactaaatggtaaactatcaaaaatacattcccaattttgctgtgataaatattgaaatgttaaaattaatgaacagaagaatttattcttacccatctattcttgttctcctagttcattaaactttcagttattggaaaggcacattctcaaagtattttatgagcaaaatattctataaatgcgtctaacaaacctaattgaatataaaagttatatttagtagttactgttgatagtaattttcatcagggtcatagttcatctagtaaaatatttagagaatgatgttaacattccagcattaaagtgggaacaaagatttatatatgaaattccttaaaagagttcatcttgccttggtttctgaccctcaagactctagctacctgccatcttgtcaaaacatttgtgggtagaataagtgttaaagatcaaattttaatatgcttctcgatatttaacatagctaagaagccagattttactgtagaagttatttacatgatttgaaaacttgacctaactggaagcctttttctcagtcatcttgttctaagccatcttgacttcacacccttagcgacttttcttttttttttggtcaaagataatgagctaaatatatatagacgttgaatgttgacaaaattattaaccagaaaaattgcttataaaggctgctgatctatttgatacctagaattaaatatttgaggacagtttttagttaataaactgctaatgtttattttactgtctctcaggtttttggtttttttaaaaaaaatgtgtttggcctttacattttctacttaagtgtgtactttattgagtttaaccttgtctgtagcctagtagcctgaaagaaaaggagacagaaccagagagatggatgtagtgcattccctttggttattacacatttgtggtagctcctggatttactgagagatattttagctatgtcaataagaacagctaatgatgtggaaatcaggtgttctcttgtgtatttcagtgaacatttttattagtagttgcatatcatctctagttccacattttaacttaacgtctttgtggcttcaccactgagctacctttcactacaccagcttctgtgtggcctggtaacatggaaggtctctcctaaggacagtctggacgtattttgggggaatgttatttatcttaaagatgcctagaaacaaaacgcatatagtaccagtgagaaactatgaagtaaacaagttgctcaggccgggcatggtggctcacgcctgtaatcccagcactttgggaggccgaagcgggaggatggcttgaggctgggagtttgagaccttcatctcttaaaaaaacaaacaaaaacctgaatggtgaggtgtggtggaattgggtaggggagggaaaggaggacttggaaaagcattctccaaagccagcaacttggtgaagttcagtacttgcctcttagaggttaggccatgcctttcaaagagagtgaaatgatgggttatcagccacattcttggagttaatatttttcttcatctttcagtttgggttctgtgctattcatagttcttccctaagaccatttcattattaccttttatatttagttgcaatttattataatatgttgttttgtccctgaacttaatctcctaattttaagatcctctctgatttttgcatattgaaacttacagaagtcactttaaaaaagtcttttgaaagtcctacaatcctaaaataaatcacaagcttgtttgttagacgtgtcaagagtctccagtctttactactaaaaagcagcactgccttaacacacattgttatgggtgaaaagtgagggacgaccagtgtagtttctggatataaagtgtgaaggactgttgagttaaacatttttagtggaatatacatagataacgtgtatttagaaactttggtgaagccagtatttgtttttagtaacctttttatgtatttccttctttgattagcattgtcttcagtgttaagaaatgtggactcctgtgaggtgctggaggtttgaatcatcttgaaaactttccaatcttgtctagttaccactgcagagacactaaggaatttaccagaaaaagatatttgatacaagtgatttaagaaatctcaacatttcctgaggccgtatcactgggcaaccagtgatgaaaactatgaatgaattgcacacctggaagattttttaagctaatgacagtttcttcaaagatgtcaattatttgccttggaaattttataaattgcatttctatgcacatcggcctctagtgcttaccactcggtttattattcataatctgcaattcaataaaggctttgtgttttcatttatcttcaaaa

SEQ ID NO: 3399 - protein, 442 aa, Homo sapiens
MSPRPEEEKMRMEVVNRIESVIKELWPSADVQIFGSFKTGLYLPTSDIDLVVFGKWENLPLWTLEEALRKHKVADEDSVKVLDKATVPIIKLTDSFTEVKVDISFNVQNGVRAADLIKDFTKKYPVLPYLVLVLKQFLLQRDLNEVFTGGIGSYSLFLMAVSFLQLHPREDACIPNTNYGVLLIEFFELYGRHFNYLKTGIRIKDGGSYVAKDEVQKNMLDGYRPSMLYIEDPLQPGNDVGRSSYGAMQVKQAFDYAYVVLSHAVSPIAKYYPNNETESILGRIIRVTDEVATYRDWISKQWGLKNRPEPSCNGPVSSSSATQSSSSDVDSDATPCKTPKQLLCRPSTGNRVGSQDVSLESSQAVGKMQSTQTTNTSNSTNKSQHGSARLFRSSSKGFQGTTQTSHGSLMTNKQHQGKSNNQYYHGKKRKHKRDAPLSDLCR

SEQ ID NO: 3400 - DNA, 433 bp, Homo sapiens
tcaacatacaagttgaccatggcatgctctgggctccagtcctctacaaagatgtagggcaggaactaccagttgtcagcacagcaccatcccacattgctcttctaatggagactttcaccccagatgttctttctcgtctgatgggaaggatccaaatgaaaaaattgaggctcaaagaagtccaccaaattgagagtgaagtaggggaaacagcatttaacgcttacattctaatgatttgtgtaagagcagcaggacaagctatacaaagaaaaaggtggaattatcaggatggaattaaagatgcttccaaacagaggggatatctcaagccatgactcagagagatccaatcgagtaccaggtccagcggtaatctattcgcagatgtagtggaacatctcagaagaataaaaaagaaaataaccta

SEQ ID NO: 3401 - protein, 105 aa, Homo sapiens
MLWAPVLYKDVGQELPVVSTAPSHIALLMETFTPDVLSRLMGRIQMKKLRLKEVHQIESEVGETAFNAYILMICVRAAGQAIQRKRWNYQDGIKDASKQRGYLKP

SEQ ID NO: 3402 - DNA, 3678 bp, Homo sapiens
cggggctgattctctggctgtgtggggcgcacggtcccgggatactggggacggcggggtgggagggcgccgtcctggggccgcggcggccgggcgggggagatggcggcgcgatggagcagcgaaaacgtggttgtagagttccgtgactcccaggcaactgcgatgtctgtggactgtcttgggcagcatgcagtgctttctggccgcagattcttatacatcgtcaatctagatgcccctttcgaaggtcaccgaaagatctctcgccagagcaaatgggacattggagctgtgcagtggaatcctcatgacagctttgcacactattttgcggcttcgagtaaccaacgagtagacctttacaagtggaaagacggcagtggggaagttggcacaaccttacaaggccacactcgtgtcatcagcgacttggactgggcggtgtttgagcctgacctcctggttaccagctctgtggacacctacatctacatttgggatatcaaagacacaaggaaacctactgttgcactgtctgctgttgcgggtgcctcccaggtcaaatggaataaaaaaaatgctaactgccttgccaccagccatgacggcgatgtgcggatatgggataagaggaaacccagtacagcagtggaatatctagccgcccacctctccaaaatccatggcctggactggcacccagacagcgagcacattcttgctacctccagtcaagacaattctgtgaagttctgggattaccgccagcctcggaaatacctcaatattcttccttgccaggtgcctgtctggaaggccagatacacacctttcagcaatggattggtgactgtgatggttccccagctgcggagggaaaacagccttctcctgtggaatgtctttgacttgaacaccccagtccacaccttcgtggggcatgatgatgtggtcctggagttccagtggaggaagcagaaggaagggtccaaggactatcaactggtgacgtggtcccgggatcagaccttgagaatgtggcgggtggattcccagatgcagaggctttgtgcaaatgacatattagatggtgttgatgagttcattgagagtatttcccttctgccggaacctgagaagaccctgcacactgaagatacagatcaccagcacactgcaagccatggggaggaagaagccctaaaagaagatccccctagaaatctcctggaagagaggaaatcagatcaactggggctgcctcagaccttgcagcaggaattctccctgatcaatgtgcaaatccggaatgtcaatgtggagatggatgcggcagacaggagctgcacagtgtctgtgcactgcagcaaccatcgtgtcaagatgctggtgaagttccctgcacagtacccaaacaacgccgccccttccttccagtttattaaccccacaaccatcacatccaccatgaaagctaagctgctgaagatcctgaaggacacagccctgcagaaagtgaagcgtggccagagctgcctggagccctgcctgcgccagctcgtctcctgccttgagtcctttgtgaaccaggaagacagcgcttccagcaacccgtttgcactccccaactctgtcactccccccttaccgacgtttgcgcgggtgaccacggcttacgggtcgtaccaggacgccaacattccctttcctaggacttctggggccaggttctgcggagcaggttacctggtatatttcacaaggcccatgacaatgcatcgggcggtgtctcccacagagcctactccgagatctctctcagccttgtctgcttatcacactggcttgatcgcgcccatgaagatccgcacagaggcccctgggaaccttcgtttatacagtgggagccccactcgcagcgagaaagagcaggtctccatcagctccttctactacaaggagcggaaatcaagacgatggaaaagtaagcgtgagggatcagactctggcaatcgacagatcaaggctgctgggaaagtcatcatccaggatattgcttgcctcctgcctgttcacaaatcgctgggagagctgtacatattgaatgtgaatgatattcaggaaacatgtcagaagaatgccgcctctgccttgctcgttggaagaaaggatcttgtccaggtttggtcgctggctacggtagctacagatctttgccttggtccgaaatctgacccagatttggaaacaccctgggctcgacatccatttgggcggcagctgctggagtccctgttggctcactattgccggctccgggatgttcagacactggcgatgctctgtagcgtgtttgaagcccagtctcggcctcaggggctaccaaacccctttgggccttttcctaaccgttcttctaatcttgtggtgtcccatagtcgatatcctagctttacctcttctggttcctgctccagtatgtcagacccagggctcaacactggcggctggaacatagcgggaagagaggcagagcacttgtcctccccttggggagaatcctcaccagaagagctccgctttgggagtctgacctacagtgatccccgtgagcgagaacgcgaccagcatgataaaaataaaaggctcctggaccccgccaatacccagcaatttgatgactttaagaaatgctatggggaaatcctctaccgttggggtctgagagagaagcgagctgaagtgttgaagtttgtctcctgtcctcctgaccctcacaaagggatcgagttcggcgtgtactgcagccactgccggagtgaggtccgtggcacgcagtgtgccatctgcaaaggcttcacgttccagtgtgccatctgtcacgtggctgtgcggggatcgtccaatttctgcctgacctgtgggcacggtggccacaccagccacatgatggagtggtttcggacccaggaggtgtgtcccaccgggtgtgggtgccactgcctgcttgaaagcactttctgaacctacagaagttgggtattgtctgaaatcccagaggacccataagtgccggtgacaagctgtctgtcaggggagaggctccagaacctgggttcgtccccagtgagaccggaggatgatcccccaaggactgcgcagcatcagctcttggtgggcctctgccttctcttctgtttggccacctggtgtggatgtcactgtgtgaagataaggacagaagtgcagagctgcgctttgtgtgttgtctatgtcggctgagctaccaaggtggaagttttcatggagaaaagcacctggctccagggccagtgttacagtgttaccctgtaaggtgttagccttaaaccaccgagcagcgttctcttgatgccagtgcagagaccagagtcagatgcccgaggacagtgggtaggaatttcatcaacaaatggacctatggcatcatggctttagaagctggtacatttactgagctgatggacagtggccttctaaaatatgacacttaaattgtaaatatgcactgtacttaaggattcttaagatgtatttttttgttatttctcctccagctgctatcccttggctaataaaattctagtaatttgaaaaaaaaaaaaaagagagaaagttaaaaaaaaaaaaaaaaaa

SEQ ID NO: 3403 - protein, 974 aa, Homo sapiens
MAARWSSENVVVEFRDSQATAMSVDCLGQHAVLSGRRFLYIVNLDAPFEGHRKISRQSKWDIGAVQWNPHDSFAHYFAASSNQRVDLYKWKDGSGEVGTTLQGHTRVISDLDWAVFEPDLLVTSSVDTYIYIWDIKDTRKPTVALSAVAGASQVKWNKKNANCLATSHDGDVRIWDKRKPSTAVEYLAAHLSKIHGLDWHPDSEHILATSSQDNSVKFWDYRQPRKYLNILPCQVPVWKARYTPFSNGLVTVMVPQLRRENSLLLWNVFDLNTPVHTFVGHDDVVLEFQWRKQKEGSKDYQLVTWSRDQTLRMWRVDSQMQRLCANDILDGVDEFIESISLLPEPEKTLHTEDTDHQHTASHGEEEALKEDPPRNLLEERKSDQLGLPQTLQQEFSLINVQIRNVNVEMDAADRSCTVSVHCSNHRVKMLVKFPAQYPNNAAPSFQFINPTTITSTMKAKLLKILKDTALQKVKRGQSCLEPCLRQLVSCLESFVNQEDSASSNPFALPNSVTPPLPTFARVTTAYGSYQDANIPFPRTSGARFCGAGYLVYFTRPMTMHRAVSPTEPTPRSLSALSAYHTGLIAPMKIRTEAPGNLRLYSGSPTRSEKEQVSISSFYYKERKSRRWKSKREGSDSGNRQIKAAGKVIIQDIACLLPVHKSLGELYILNVNDIQETCQKNAASALLVGRKDLVQVWSLATVATDLCLGPKSDPDLETPWARHPFGRQLLESLLAHYCRLRDVQTLAMLCSVFEAQSRPQGLPNPFGPFPNRSSNLVVSHSRYPSFTSSGSCSSMSDPGLNTGGWNIAGREAEHLSSPWGESSPEELRFGSLTYSDPRERERDQHDKNKRLLDPANTQQFDDFKKCYGEILYRWGLREKRAEVLKFVSCPPDPHKGIEFGVYCSHCRSEVRGTQCAICKGFTFQCAICHVAVRGSSNFCLTCGHGGHTSHMMEWFRTQEVCPTGCGCHCLLESTF

SEQ ID NO: 3404 - DNA, 4633 bp, Homo sapiens
gccctccattgtctccacggcggcgaggagcgccggcgagcgcagcccgggaccgagcggggcggcgcggctggcggggccggcggcggctgaagcgagagcgcgacgcgacgcgaccgcggcttcccgagctgcgcctggccgcccagcgccgcggcccgcccgaggcctggaggggtccgggccgccgtccatggtcgcggcgtcctgaggcgggggacgcgcccggcgcccccggccctcctccgcctcctcccgcggggcgggcggcctcctccggcgcctccccgcgcccgcccgccgctcgccgccgcctccctccctccttccctgcggctcccccggctttcggagcccgggggcggcctgtggcgcgcggagcccgcgccggactgcgcctctttggaccttgaggggaaacatgcgtttgccttggatcgtttgaaattctgagtttgggatccccgcccgcccgcctgcctcttccgccccgcgggttttttccttttttccttttgctttttttccttttctccctccgggtctcctttttgactccctccccctttatgctcgcccagccctccccctgctgctgagaagtgggggagggtctcggcctccaggttcccgccccaccggggcccgggcgagcatggggggcaagcagagcacggcggcccgctcccggggccccttcccgggggtctccaccgatgacagcgccgtgccgccgccgggaggggcgccccatttcgggcactaccggacgggcggcggggccatggggctgcgcagccgctcggtcagctcggtggcaggcatgggcatggaccccagcacggccgggggggtgccctttggcctctacacccccgcctcccggggcaccggcgactccgagagggcgcccggcggcggagggtctgcgtccgactccacctatgcccatggcaatggttaccaggagacgggcggcggtcaccatagagacgggatgctgtacctgggctcccgagcctcgctggcggatgctctacctctgcacatcgcacccaggtggttcagctcgcatagtggtttcaagtgccccatttgctccaagtctgtggcttctgacgagatggaaatgcactttataatgtgtttgagcaaacctcgcctctcctacaacgatgatgtgctgactaaagacgcgggtgagtgtgtgatctgcctggaggagctgctgcagggggacacgatagccaggctgccctgcctgtgcatctatcacaaaagctgcatagactcgtggtttgaagtgaacagatcttgtccggaacaccctgcggactgacctgcgggcttgcttgctgactcctctcaaagggacagagcgcccctgctccagggaggaggctcaccggaccctggggcagagctgagcttgggacaccagcgggaacagggcaccccttctgcactgacttccagatcatggttctcccttcctccctgaggacaccaaattggatgagagcaagtttgagagaagaatgaatcaactgctatccttcccctcacccctcagcccaggagggaaagggcattttctttttcatctttgaaaggcattgtgggtctgtctttaaagtgtttacaaaaaaaaattatataaaaaaaaagtctagtgtcgactggtgttttccctcgtgatgtttacagcttgctgtttgctgcccagccataacccactcagtgacagacgaacacagctaaggcctcgctgccagccttctgacggcgggcgagcacacggtctcttcccctgccccaactggccctctccaccaccaacttctctactttgggtttgtttggttttttccctctatttttctggctggttttttgctcttttctccccttgagaccctaatatcttgacttcattgccaaaaaacaacccattgagaactttcttcctactgatcccatctcttttcccttctttcctcctggttccggtcagttcagaggatttaacaatcacaagtgtcctgcaaaaatgcctgaacattattcttaggccctcgtggattttttttttcagaaaacttaaacaaaaaaagacttactaagaaatatgtacagctacccctgttttcaggcactatgtttgagaacattttagccattgatgttcacacgtggcatcagcccatgcaagataggtttctgtatttatatattaaaatacaaaaaaaaacttataaaatgtttaaaaaaatgttcaaagcttgggagaaaagctttcttcattagtcaaggtgttttgatatggtattaaaatgtctaataaaagatggcactgcgtgattttattttaatgaagtgttatacaatcaagaaatgggggcaagggcctgccccccactccctcacctacctccttagcattccttcaggctgctactcggggctccaggtgtgtgaattggtcctcagatagtcaggcctgggtggagggagtggcaagtcaggcgtgcctcctacaagcttcctaacctcttaagcatcatggaaccagtcagccctctgtggagtcattgtgccggacctctgaaaagatctgcaggggccaagatgttgcagccaccggaggctgcaaggatgtgggttcttccaggtgtgggcccagcccccctccttccagcctttgctccccatcccacgttccactcgccctgcctgttgttcagtttgcgtctcagtgctgactcacgggcatgcttcattgaggcccaggaagaggccctggtttggggctgtgccagctcagagcccttgaaccagaaccaactgctcaggctcacaaaagttggcaaaatgcgggctgggcaggcagctcggggcagggagcagcagtgcaggcctggcctgtgtccccgtgcccagcgggctcccggagcagcattccagagcctcctgcagagccagcgaaggaaagctctagagggagacgactccaccgcctctctgctctgacccttctcaggcccgcctgatgtgctggaccatccccctgctgccacggcccctggctccgcagtcaccctccatcagatgcttccagaagcacctactctgtgcaagggcattcacaacaggccagtgggcaaacgtgagccagggccagcggagaaacactaaagaagactcggtggttcagagcctgggtctcagcgcgggacccgtctggggtgaagaccttggggctgttgtgagtcggtggcaggaacgtgggctctagactgtgcattcaggctctcctacttggcagaatgatcttggggaaacgacttcatctgaacttcagatatttcacatgtgaagcggggacaaaaccatgcagctcagaggtccctgtgggggctgggggagctgccctgcaggtcttggcacatgcacagcaggctccccatagctttgtcaccacaaagggcactgttctattcacagcacctcctgcttctgcctggcaactgtgtctccctgtgctatatttaattccaccagcaaagctggcgaggcagggcccagccctgaaggagatctccttgcctgacccctggacctggaaatggaggcttcatgtgcccgccttggcggcttaagcctgctgctttggcagtgccatgggtgagccgagcagctgtgaggtgggtggggcagggctgtagcccacgccgggtgctattccaggctctaggggctggtgctcatccccacccccagcgacttccgtcctacctggcatgctgcagccctctgccggctgtggtgtcctctgaatttggacccaggttgcctgctcttgttgtgggggtgggattggggctgtctgtgtttcccaggtggagctcatgtttgtgatcctctatctggacagctctccagaatcctgtgttgcccctgttctgcctttctgggatgggagagaaggtgagggagccggcgagcaggttctaccctctctgctaagggcctagcacactttgatgaggttcctggacgtgagaccctcacaaagaccaaccattcctctaatagccatttaacggtactgcagttcatgggaaaatgtcctcattcttaggagatagatgctggattatataggtgaatgccttcaagaaatgtgtaatttaattccaaatagttccccccaaaatacacaaagcaaataaggccaaaatgttcattgttgaatctgcagtggctggtatttcagtgaacagtgtacttgttctttcaacttttctgtatgtttggaatttttcttaataaaagattgtgggaaatggtcatttgctgagcgcctcctagttgccaggcactggagggcgcatcaaagaagagtcctacccaggagggagagcgcagctgctgcaggattctcgcctggaagagtgggtggctggctggctggctggaaggggaggggcgagagggctgtctcggtgatgagcacacgcgtgctggggtggtttggggagagggctgagatttgtcaccagtgagcccttggcacggtctctgctccccaccagggcagcacgggacagaaacgtcacggaggagtagcctc

SEQ ID NO: 3405 - protein, 227 aa, Homo sapiens
MGGKQSTAARSRGPFPGVSTDDSAVPPPGGAPHFGHYRTGGGAMGLRSRSVSSVAGMGMDPSTAGGVPFGLYTPASRGTGDSERAPGGGGSASDSTYAHGNGYQETGGGHHRDGMLYLGSRASLADALPLHIAPRWFSSHSGFKCPICSKSVASDEMEMHFIMCLSKPRLSYNDDVLTKDAGECVICLEELLQGDTIARLPCLCIYHKSCIDSWFEVNRSCPEHPAD

SEQ ID NO: 3406 - DNA, 2091 bp, Homo sapiens
ggtcaccctgccacccagtgctcacaccctctggccagtgcctggctatggcccgactgctcaggtctgcaacctgggagctgttcccctggaggggctactgctcccagaaggcaaagggagagctctgcagggacttcgtagaggctctgaaggccgtggtgggcggctcccacgtgtccactgccgcggtggtccgagagcagcacgggcgcgatgagtcggtgcacaggtgcgaacctcctgatgctgtggtgtggccccagaacgtggagcaggtcagccggctggcagccctgtgctatcgccaaggtgtgcccatcatcccattcggcaccggcaccgggcttgagggtggcgtctgtgctgtgcagggcggcgtctgcgttaacctgacgcatatggaccgaatcctggagctgaaccaggaggacttctctgtggtggtggagccaggtgtcacccgcaaagccctcaacgcccacctgcgggacagcggcctctggtttcccgtggacccaggcgcggacgcctctctctgtggcatggcggccaccggggcgtcggggaccaacgcggtccgctacggcaccatgcgggacaacgtgctcaacctggaggtggtgctgcccgacgggcggctgctgcacacggcgggccgaggccggcatttccgcttcggcttctggccagaaatccctcatcacacagcctggtactcaccttgtgtgtccctgggacgtaggaagagtgcagccggctacaacctcacggggctcttcgtgggctccgaggggacgctgggcctcatcacagccaccaccctgcgcctgcaccctgcccctgaggccacagtggccgccacgtgtgcgttccccagtgtccaggctgctgtggacagcactgtacacatcctccaggctgcagtgcccgtagcccgcattgagttcctggatgaagtcatgatggatgcctgcaacaggtacagcaagctgaattgcttagtggcgcccacactcttcctggagttccatggctcccagcaggcactggaggagcagctgcagcgcacagaggagatagtccagcagaacggagcctctgacttctcctgggccaaggaggccgaggagcgcagccggctttggacagcacggcacaatgcctggtacgcagccctggccacgcggccaggctgcaagggctactccacggatgtgtgtgtgcccatctcccggctgccggagatcgtggtgcagaccaaggaggatctgaatgcctcaggactcacaggaagcattgtcgggcatgtgggtgacggcaacttccactgcatcctgctggtcaaccctgatgacgccgaggaactgggcagggtcaaggcttttgcagaacagctgggcaggcgggcactggctctccacggaacgtgcacgggggagcatggcatcggaatgggcaagcggcagctgctgcaggaggaggtgggcgccgtgggcgtggagaccatgcggcagctcaaggccgtgctagacccccaaggcctcatgaatccaggcaaagtgctgtgaagggggtctgagcacttagcccacaagttccctgactacggagccggttctggaacttttcttcatgccacggcccctgcaaggaaatagatgctgaggcagtcttcctgccagcgagcccactgtatctgggcccaaggccagagggcccagagagaagcctgagcaccgtgttacctccctggccctctggctggccccaggagcctttggttcagtaaacgacccagggtggttcccagcaaagctgcttcctctctgctcctacgcatcctgtcctggcgggaagagagcgtctgggtccattcaagactctgatgacacccctccccgaggcctcccactgccggggtcccaggacccttcccccttcacctggtgacaggaacactcctttcctggtatggaacgtgagctcccgtgacatgatgataggtcttctccttggggcctcccccaataaatctgtaataaacctgaaacccacctacagctaaaaaaaaaaaaaaaaaaaaaaaaa

SEQ ID NO: 3407 - protein, 507 aa, Homo sapiens
MARLLRSATWELFPWRGYCSQKAKGELCRDFVEALKAVVGGSHVSTAAVVREQHGRDESVHRCEPPDAVVWPQNVEQVSRLAALCYRQGVPIIPFGTGTGLEGGVCAVQGGVCVNLTHMDRILELNQEDFSVVVEPGVTRKALNAHLRDSGLWFPVDPGADASLCGMAATGASGTNAVRYGTMRDNVLNLEVVLPDGRLLHTAGRGRHFRFGFWPEIPHHTAWYSPCVSLGRRKSAAGYNLTGLFVGSEGTLGLITATTLRLHPAPEATVAATCAFPSVQAAVDSTVHILQAAVPVARIEFLDEVMMDACNRYSKLNCLVAPTLFLEFHGSQQALEEQLQRTEEIVQQNGASDFSWAKEAEERSRLWTARHNAWYAALATRPGCKGYSTDVCVPISRLPEIVVQTKEDLNASGLTGSIVGHVGDGNFHCILLVNPDDAEELGRVKAFAEQLGRRALALHGTCTGEHGIGMGKRQLLQEEVGAVGVETMRQLKAVLDPQGLMNPGKVL

SEQ ID NO: 3408 - DNA, 2022 bp, Homo sapiens
ggtcaccctgccacccagtgctcacaccctctggccagtgcctggctatggcccgactgctcaggtctgcaacctgggagctgttcccctggaggggctactgctcccagaaggcaaagggagagctctgcagggacttcgtagaggctctgaaggccgtggtgggcggctcccacgtgtccactgccgcggtggtccgagagcagcacgggcgcgatgagtcggtgcacaggtgcgaacctcctgatgctgtggtgtggccccagaacgtggagcaggtcagccggctggcagccctgtgctatcgccaaggtgtgcccatcatcccattcggcaccggcaccgggcttgagggtggcgtctgtgctgtgcagggcggcgtctgcgttaacctgacgcatatggaccgaatcctggagctgaaccaggaggacttctctgtggtggtggagccaggtgtcacccgcaaagccctcaacgcccacctgcgggacagcggcctctggtttcccgtggacccaggcgcggacgcctctctctgtggcatggcggccaccggggcgtcggggaccaacgcggtccgctacggcaccatgcgggacaacgtgctcaacctggaggtggtgctgcccgacgggcggctgctgcacacggcgggccgaggccggcatttccggaagagtgcagccggctacaacctcacggggctcttcgtgggctccgaggggacgctgggcctcatcacagccaccaccctgcgcctgcaccctgcccctgaggccacagtggccgccacgtgtgcgttccccagtgtccaggctgctgtggacagcactgtacacatcctccaggctgcagtgcccgtagcccgcattgagttcctggatgaagtcatgatggatgcctgcaacaggtacagcaagctgaattgcttagtggcgcccacactcttcctggagttccatggctcccagcaggcactggaggagcagctgcagcgcacagaggagatagtccagcagaacggagcctctgacttctcctgggccaaggaggccgaggagcgcagccggctttggacagcacggcacaatgcctggtacgcagccctggccacgcggccaggctgcaagggctactccacggatgtgtgtgtgcccatctcccggctgccggagatcgtggtgcagaccaaggaggatctgaatgcctcaggactcacaggaagcattgtcgggcatgtgggtgacggcaacttccactgcatcctgctggtcaaccctgatgacgccgaggaactgggcagggtcaaggcttttgcagaacagctgggcaggcgggcactggctctccacggaacgtgcacgggggagcatggcatcggaatgggcaagcggcagctgctgcaggaggaggtgggcgccgtgggcgtggagaccatgcggcagctcaaggccgtgctagacccccaaggcctcatgaatccaggcaaagtgctgtgaagggggtctgagcacttagcccacaagttccctgactacggagccggttctggaacttttcttcatgccacggcccctgcaaggaaatagatgctgaggcagtcttcctgccagcgagcccactgtatctgggcccaaggccagagggcccagagagaagcctgagcaccgtgttacctccctggccctctggctggccccaggagcctttggttcagtaaacgacccagggtggttcccagcaaagctgcttcctctctgctcctacgcatcctgtcctggcgggaagagagcgtctgggtccattcaagactctgatgacacccctccccgaggcctcccactgccggggtcccaggacccttcccccttcacctggtgacaggaacactcctttcctggtatggaacgtgagctcccgtgacatgatgataggtcttctccttggggcctcccccaataaatctgtaataaacctgaaacccacctacagctaaaaaaaaaaaaaaaaaaaaaaaaa

SEQ ID NO: 3409 - protein, 484 aa, Homo sapiens
MARLLRSATWELFPWRGYCSQKAKGELCRDFVEALKAVVGGSHVSTAAVVREQHGRDESVHRCEPPDAVVWPQNVEQVSRLAALCYRQGVPIIPFGTGTGLEGGVCAVQGGVCVNLTHMDRILELNQEDFSVVVEPGVTRKALNAHLRDSGLWFPVDPGADASLCGMAATGASGTNAVRYGTMRDNVLNLEVVLPDGRLLHTAGRGRHFRKSAAGYNLTGLFVGSEGTLGLITATTLRLHPAPEATVAATCAFPSVQAAVDSTVHILQAAVPVARIEFLDEVMMDACNRYSKLNCLVAPTLFLEFHGSQQALEEQLQRTEEIVQQNGASDFSWAKEAEERSRLWTARHNAWYAALATRPGCKGYSTDVCVPISRLPEIVVQTKEDLNASGLTGSIVGHVGDGNFHCILLVNPDDAEELGRVKAFAEQLGRRALALHGTCTGEHGIGMGKRQLLQEEVGAVGVETMRQLKAVLDPQGLMNPGKVL

SEQ ID NO: 3410 - DNA, 3190 bp, Homo sapiens
aaaaaacttcccccaccaccagcggcgagtgggtgacagagcccccgtctccgcgcgtcttcgccgccctgcgccgtgacccgctgtggcactgggccacgagtggaggctgcgcccctccagttctgccttcatagttctctgcctttgcccaaaactgcagaaaatgaacaaatcccagggatcagtttcattcacggatgtgactgtggactttacccaggaggaatgggaacaactggacccctctcagaggatcctatacatggatgtgatgctggagaattatagcaacttgctttcagtgggtaaggacggttttcagaagtgtggaaggctgatgaccagatggagagagaccacagaaacccagacgagcaggcgaggcaatttttaattcttaagaaccaaaccccaattgaggaaagaggcgatctctttggaaaagcacttaatctgaacacagactttgtttctttaagacaagtaccttataaatatgacttatatgaaaaaactttgaaatataattcagacttgcttaatagtaatagaagctatgcaggaaagcagactgatgagtgtaatgaatttggaaaagcacttctctacctgaagcaagagaaaacccacagtggagtagaatattctgaatacaataaaagtggaaaagccctcagccataaagcagccatttttaaacatcagaaaataaaaaacttggttcaacctttcatttgtacttactgtgacaaggctttctcctttaagtcactcctcattagtcataagagaatacatactggagaaaagccatatgaatgcaatgtatgtaagaaaaccttctcccataaggccaacctcatcaaacatcagagaattcacactggggagaaacctttcgagtgtccggaatgtggaaaagctttcacccaccagtcaaacctcattgtacaccagagagcacatatggagaagaagccctatgagtgcagtgaatgtggaaagacatttgcccaaaagtttgaactcaccacacaccagagaattcatacaggagagcgaccctatgagtgtaacgaatgtgcaaaaaccttctttaagaagtcaaaccttatcatacatcagaagattcacacgggggagaaacgctatgagtgcagtgaatgtggaaaatcctttatccagaactcacagctcatcatacacatgagaactcatacaggagagaaaccctatgaatgtactgagtgcggcaaaactttcagccagaggtcaactcttagattacacttgcgaatccacacaggagagaaaccatatgagtgttccgaatgtgggaaggcctttagcaggaagtcccgactcagtgtccatcagagagttcacatcggggagaaaccctgaaactccagccaggtcttactgtggaaaactcctgccagaactcttcaagcgggtgaaaaacctcatgacagtattgagggaacatgggaatttatactgagatgcaatctctcaactcaaaaatgtattaaaaataggatcccatgagaacattatactggaagttacatgtgatacccagctaaagaatacatatcagaatatatccagttgtaaatagccatacccagttgtactacaatgagctttttaaaatcttgaatgaattgagtattctagacagcagcataagaaatatacaaacagtatcctatgaatttagtggttttatgtggatatgccacaaaacacaagtggtatgctttagatctgcacatgtgaatttagcataatcactgggaatttgaaattcttgtcctctgtgataattaggacataacaagattttccatactaaacatcacatgtgtttttcagtatctctgcaatccagtatgcattccaaatgaaatgtgtaacatttaaagtagcatggaacctacgtctttccctactgcttgctggcatatatcagttggtatgaacattgttcttgagctgcctcttaggaaacagaagacagtgttgaagttttccctgcttctggtttgctgaagattttctagactgcttctggtttgctgaagattttctagaagcactatttacacaaatatgcaaatgtgaaataaccgatctataacgtgaaggaggcagacatgagctgtactactcagtatgcaccacagaataagagtttgccgtgtaaagacaatatccccattcgtcatgctcttattttcccgtgggatatttgcatacaaatgcatgtctgttaccaaaatattgtgtaacacagacagaaaccacctgtttttgtctttccttgtttcccttaatatttcatgaattgtctagcaaaaatggtaggatgcttctgtagttcacaaatgttacatttcagagactttggaggaaaaattattttaaataactgtcaactgtttcattgctttttaaatttttcacgtgcataaccccctttagaagtaaatttttacactattttgttgtttaaaggaggcatttctacttccttgagttttgctgttgccaacctaaaacatttccctttggaacatgagttataagttattacttttcctttacatgtttacacttttataaaaatcagatttttcagtggtctctccagatattaacaagaattgttgtgtaactcaaagatttgcttttatagacttgatttcaaattcttaagttcagcctttccctatcaatcacaaatcatgtattggaaattataaatggcaaccaaaaaccggcttttaaaaaatatttttggatatcattgatgtgctgtcacactatatattgagtgactttctgaacaaatttatccagaacatccatagcccaataagcttttgtctaagttgtcatcttacttactcacaaaggaggggaaaacgttattttcatagctgcttttagaaatgtagattgtaacagcctccttggacaacattgtgagtctgttttaacattaatatactcttacaacctaggaatctcctgggaatctatccctaaggagtaaaaagcgccagcacttaagattatatgtttactaatgtatattgtattttttggtaaggaccaaaaaaacaaacaaaaaaaagaccatcagtaagggaatggatgaataaattgtggtaaaaac

SEQ ID NO: 3411 - protein, 352 aa, Homo sapiens
MERDHRNPDEQARQFLILKNQTPIEERGDLFGKALNLNTDFVSLRQVPYKYDLYEKTLKYNSDLLNSNRSYAGKQTDECNEFGKALLYLKQEKTHSGVEYSEYNKSGKALSHKAAIFKHQKIKNLVQPFICTYCDKAFSFKSLLISHKRIHTGEKPYECNVCKKTFSHKANLIKHQRIHTGEKPFECPECGKAFTHQSNLIVHQRAHMEKKPYECSECGKTFAQKFELTTHQRIHTGERPYECNECAKTFFKKSNLIIHQKIHTGEKRYECSECGKSFIQNSQLIIHMRTHTGEKPYECTECGKTFSQRSTLRLHLRIHTGEKPYECSECGKAFSRKSRLSVHQRVHIGEKP

SEQ ID NO: 3412 - DNA, 960 bp, Homo sapiens
ggcagcggcatggcttccctctggctcctctcctgcttctcccttgtgggggccgcctttggctgcggggtccccgccatccaccctgtgctcagcggcctgtccaggatcgtgaatggggaggacgccgtccccggctcctggccctggcaggtgtccctgcaggacaaaaccggcttccacttctgcgggggctccctcatcagcgaggactgggtggtcaccgctgcccactgcggggtcaggacctccgacgtggtcgtggctggggagtttgaccagggctctgacgaggagaacatccaggtcctgaagatcgccaaggtcttcaagaaccccaagttcagcattctgaccgtgaacaatgacatcaccctgctgaagctggccacacctgcccgcttctcccagacagtgtccgccgtgtgcctgcccagcgccgacgacgacttccccgcggggacactgtgtgccaccacaggctggggcaagaccaagtacaacgccaacaagacccctgacaagctgcagcaggcagccctgcccctcctgtccaatgccgaatgcaagaagtcctggggcaggaggatcaccgacgtgatgatctgtgccggggccagtggcgtctcctcctgcatgggtgactctggaggccccctggtctgccagaaggacggagcctggaccctggtgggcattgtgtcctggggcagccgcacctgctctaccaccacgcccgctgtgtacgcccgtgtcaccaagctcataccctgggtgcagaagatcctggccgccaactgagcccgcagctcctgccacccctgccttaagatttcccattaaatgcatctgtttagaaaaaaaaaaaaaaaaaaaaaaaaaaaaaaaaaaaaaaaaaaaaaaaaaaaaaaaaaaaaaaaaaaaaaaaaaaaaaaaaaaaaaaaaaaaaaaaaaaaaaaa

SEQ ID NO: 3413 - protein, 263 aa, Homo sapiens
MASLWLLSCFSLVGAAFGCGVPAIHPVLSGLSRIVNGEDAVPGSWPWQVSLQDKTGFHFCGGSLISEDWVVTAAHCGVRTSDVVVAGEFDQGSDEENIQVLKIAKVFKNPKFSILTVNNDITLLKLATPARFSQTVSAVCLPSADDDFPAGTLCATTGWGKTKYNANKTPDKLQQAALPLLSNAECKKSWGRRITDVMICAGASGVSSCMGDSGGPLVCQKDGAWTLVGIVSWGSRTCSTTTPAVYARVTKLIPWVQKILAAN

SEQ ID NO: 3414 - DNA, 915 bp, Homo sapiens
gggaccggcagacaggcgtcctacacccctgccagcggcaccatggctttcctctggctcctctcctgctgggccctcctgggtaccaccttcggctgcggggtccccgccatccaccctgtgctcagcggcctgtccaggatcgtgaatggggaggacgccgtccccggctcctggccctggcaggtgtccctgcaggacaaaaccggcttccacttctgcgggggctccctcatcagcgaggactgggtggtcaccgctgcccactgcggggtcaggacctccgacgtggtcgtggctggggagtttgaccagggctctgacgaggagaacatccaggtcctgaagatcgccaaggtcttcaagaaccccaagttcagcattctgaccgtgaacaatgacatcaccctgctgaagctggccacacctgcccgcttctcccagacagtgtccgccgtgtgcctgcccagcgccgacgacgacttccccgcggggacactgtgtgccaccacaggctggggcaagaccaagtacaacgccaacaagacccctgacaagctgcagcaggcagccctgcccctcctgtccaatgccgaatgcaagaagtcctggggcaggaggatcaccgacgtgatgatctgtgccggggccagtggcgtctcctcctgcatgggcgactctggcggtcccctggtctgccaaaaggatggagcctggaccctggtgggcattgtgtcctggggcagcgacacctgctccacctccagccctggcgtgtacgcccgtgtcaccaagctcataccttgggtgcagaagatcctggctgccaactgagcccgcggctccctccgaccctgctccccacagagcctcagtaaacccatgaaaaaaaaaaaaaaaaaaaaaaaaaaaaaa

SEQ ID NO: 3415 - protein, 263 aa, Homo sapiens
MAFLWLLSCWALLGTTFGCGVPAIHPVLSGLSRIVNGEDAVPGSWPWQVSLQDKTGFHFCGGSLISEDWVVTAAHCGVRTSDVVVAGEFDQGSDEENIQVLKIAKVFKNPKFSILTVNNDITLLKLATPARFSQTVSAVCLPSADDDFPAGTLCATTGWGKTKYNANKTPDKLQQAALPLLSNAECKKSWGRRITDVMICAGASGVSSCMGDSGGPLVCQKDGAWTLVGIVSWGSDTCSTSSPGVYARVTKLIPWVQKILAAN

SEQ ID NO: 3416 - DNA, 4455 bp, Homo sapiens
tatataattttatgatttttaaagtattttcatattctcctgtctttaagttttttcttttctcattgaacttactagacttctagtaagccctggaagtagtaggcatatttttagagatcttagatcctagtttttgatgttgttgttttacttgttggttgttttgtctattgattccacgaaagcctcagcactaactaaccctaacgtggcattgttcctcctggcagatgactgtgatgatcctcttgtgtctgccttgcctcaggcatccttcagcagttcttccgagctctccagcagtcatggtcctggatttgcaaggctgaatagaagagatggagctggtggctggtctccacttgtgtctaacaaataccagtggttgcagattgaccttggagagagaatggaggtcaccgctgtggccactcaagggggatatggtagctccaactgggtgaccagctacctcctgatgttcagtgatagtggctggaactggaaacaatatcgccaagaggacagcatctggggtttttcaggaaatgcaaatgcagacagtgttgtgtactatagactccagccttctatcaaagccagatttctgcgcttcatccctttggaatggaaccccaagggcagaattggaatgcgaatcgaagtgttcggatgtgcatacagatcagaagtggttgatcttgatggaaaaagttcccttctctacagatttgatcaaaaatccctgagcccaataaaagacattatttctttgaaattcaaaaccatgcagagtgatgggattctactccacagggaagggccaaatggagatcacatcacactgcaattaagaagagcaagactctttttacttattaattcaggtgaagctaaactgccttccacttccaccctggtcaatctcaccctgggcagcctgctagatgatcagcattggcattcagtgctcatccagcgtttgggcaaacaagtcaacttcacagtggacgaacacaggcatcatttccatgcacggggagaattcaatctcatgaatcttgattatgagatcagctttggagggattccagcacctggaaaatcagtgtcattcccacatagaaattttcatggatgtttagaaaatctctattataatggagtggatatcattgatttggccaagcagcaaaaaccacagatcattgctatgggaaatgtgtcattttcttgttcacaaccacaatctatgcccgtgacttttctgagctccaggagttatttagcactgccagacttctctggagaggaggaggtttctgccacttttcaatttcgaacttggaataaggcagggcttctgctgttcagtgaacttcagctgatttcagggggtatcctcctctttctgagtgatggaaaacttaagtcgaatctctaccagccaggaaaattacccagtgacatcacagcaggtgtcgaattaaatgatgggcagtggcattctgtctctttatctgctaaaaagaatcacttgagtgtggcggtggacggccagatggcttctgctgctcctctgctggggcctgagcagatttattcgggtggcacctattattttggaggttgtcctgacaaaagctttggatccaaatgtaaaagtccacttggtggatttcagggatgtatgaggctcatttctatcagcggcaaagtggtagatctgatttcagttcagcaggggtcccttgggaacttcagtgaccttcagatagactcatgtggcatctcagacaggtgtttgcccaactattgtgaacacggtggggagtgttcccagtcctggagcacctttcattgtaactgtaccaacactggttacagaggagctacttgccataactctatctatgagcagtcatgtgaagcctataagcacagaggaaatacttcagggttttactatatagattcagatggaagtggtcccctggaaccatttcttctatattgcaatatgaccgaaactgcatggaccatcatacagcacaacggctctgacttaacaagagtcagaaatactaatccagagaacccatatgctgggtttttcgagtatgtggccagcatggagcaacttcaggccactattaaccgtgcagagcactgtgaacaggagtttacttattactgcaagaagtcacggctggtcaataagcaagatggaacccctctgagttggtgggtaggaagaaccaatgaaacgcaaacctactggggaggttcttcgcctgatcttcaaaaatgtacttgtggattagagggaaactgcattgattctcagtattactgcaattgtgatgctgaccggaatgaatggaccaatgacactggattgcttgcttataaagaacatcttccagtaactaagatcgtgattacagacacaggccgactgcattcagaagcagcttataaactggggcctctgctctgccggggagacagatcattttggaattcagcttcctttgataccgaggcttcatatcttcattttcctaccttccacggagaacttagcgcggatgtatctttcttttttaagacaacagcttcatctggggtatttttagagaacttggggattgctgattttatacggatagagcttcgctctccgacagtagtgactttttcatttgatgtggggaatgggccttttgaaatctcagtgcagtcacccacccacttcaacgacaaccagtggcaccatgtgagggttgaaaggaacatgaaggaggcctcccttcaagtggatcagctgacaccaaagacacagcccgcccccgctgatgggcatgtcctgttacagctcaacagtcagctcttcgtgggtggaacggccaccagacagagaggctttctgggctgcattcggtctctgcagttgaatgggatgaccctggatttggaagaaagagcccaggtgactccagaagtgcagccaggttgtaggggacattgcagcagctatgggaagttatgccgcaatggagggaaatgcagagaaagacccattgggttcttttgtgactgcactttctctgcatacacagggccattctgctcaaatgagatttctgcatattttggatctggctcatccgtgatatacaattttcaagaaaattatcttttaagtaaaaactccagctcccacgctgcttcatttcatggtgatatgaagctgagcagagaaatgatcaaatttagtttccgaacaacacgaacaccaagcttgctgctttttgtgagctccttttacaaagaatacctttctgtgatcattgccaaaaatggaagtttgcagatcaggtacaagttaaataaatatcaagagcctgatgttgttaactttgattttaaaaacatggctgatggacaacttcaccacataatgattaacagagaagaaggagtggtctttatagagattgacgataatagaaggagacaagttcacctgtcatcaggcacagaattcagtgcagtcaaatctctggtattgggcaggattttagaacacagtgatgtggaccaggagactgcactggcaggtgcgcagggcttcacaggctgcctctctgcagtgcagctcagccacgtggcccctctgaaggcagctctgcaccccagccacccagaccctgtcactgttacaggacacgtgaccgagtccagctgtatggcccagcctggcactgatgccacatcaagggaaaggacacactcgtttgcagatcattctggaacaatagatgacagagagccccttgctaatgcaatcaaaagtgactctgcagtaattggaggtctgatagctgttgtgatttttatcttgctttgcatcactgccatagctgttcgcatttatcagcagaaaaggttatataaaagaagtgaggcaaaaaggtcagagaatgtagacagtgctgaggctgttctgaaaagtgagcttaatatacaaaatgcagtcaatgaaaatcagaaagagtacttcttctgattggcagctatgatttaacataaaattatgatagtttgttttaatagccaggggttctcaatggaaaaacgaatgctcttacactgaatgtacaggcagtgggcttgcagcactgccatcttgccatgtacaggcttggggtggctccaggaagcctcgtccagtgatatatttctcatagcattcattctatggaacaagaaattagatattgctgttaattttcaactgttctggtatgatctaaaacaagtttaacctgcttaatggctacagtttttacatgtgaaaactgtagccttggtctcttaaccatgtaatacataagttttgttagaggtaaaaattaaatttggactataatgtccttgctttatttg

SEQ ID NO: 3417 - protein, 1311 aa, Homo sapiens
MLLFYLLVVLSIDSTKASALTNPNVALFLLADDCDDPLVSALPQASFSSSSELSSSHGPGFARLNRRDGAGGWSPLVSNKYQWLQIDLGERMEVTAVATQGGYGSSNWVTSYLLMFSDSGWNWKQYRQEDSIWGFSGNANADSVVYYRLQPSIKARFLRFIPLEWNPKGRIGMRIEVFGCAYRSEVVDLDGKSSLLYRFDQKSLSPIKDIISLKFKTMQSDGILLHREGPNGDHITLQLRRARLFLLINSGEAKLPSTSTLVNLTLGSLLDDQHWHSVLIQRLGKQVNFTVDEHRHHFHARGEFNLMNLDYEISFGGIPAPGKSVSFPHRNFHGCLENLYYNGVDIIDLAKQQKPQIIAMGNVSFSCSQPQSMPVTFLSSRSYLALPDFSGEEEVSATFQFRTWNKAGLLLFSELQLISGGILLFLSDGKLKSNLYQPGKLPSDITAGVELNDGQWHSVSLSAKKNHLSVAVDGQMASAAPLLGPEQIYSGGTYYFGGCPDKSFGSKCKSPLGGFQGCMRLISISGKVVDLISVQQGSLGNFSDLQIDSCGISDRCLPNYCEHGGECSQSWSTFHCNCTNTGYRGATCHNSIYEQSCEAYKHRGNTSGFYYIDSDGSGPLEPFLLYCNMTETAWTIIQHNGSDLTRVRNTNPENPYAGFFEYVASMEQLQATINRAEHCEQEFTYYCKKSRLVNKQDGTPLSWWVGRTNETQTYWGGSSPDLQKCTCGLEGNCIDSQYYCNCDADRNEWTNDTGLLAYKEHLPVTKIVITDTGRLHSEAAYKLGPLLCRGDRSFWNSASFDTEASYLHFPTFHGELSADVSFFFKTTASSGVFLENLGIADFIRIELRSPTVVTFSFDVGNGPFEISVQSPTHFNDNQWHHVRVERNMKEASLQVDQLTPKTQPAPADGHVLLQLNSQLFVGGTATRQRGFLGCIRSLQLNGMTLDLEERAQVTPEVQPGCRGHCSSYGKLCRNGGKCRERPIGFFCDCTFSAYTGPFCSNEISAYFGSGSSVIYNFQENYLLSKNSSSHAASFHGDMKLSREMIKFSFRTTRTPSLLLFVSSFYKEYLSVIIAKNGSLQIRYKLNKYQEPDVVNFDFKNMADGQLHHIMINREEGVVFIEIDDNRRRQVHLSSGTEFSAVKSLVLGRILEHSDVDQETALAGAQGFTGCLSAVQLSHVAPLKAALHPSHPDPVTVTGHVTESSCMAQPGTDATSRERTHSFADHSGTIDDREPLANAIKSDSAVIGGLIAVVIFILLCITAIAVRIYQQKRLYKRSEAKRSENVDSAEAVLKSELNIQNAVNENQKEYFF

SEQ ID NO: 3418 - DNA, 2339 bp, Homo sapiens
ctcattttctcttgcagccgccatgattctgaggccttcccagctatgtggaactatgactgtgatgatcctcttgtgtctgccttgcctcaggcatccttcagcagttcttccgagctctccagcagtcatggtcctggatttgcaaggctgaatagaagagatggagctggtggctggtctccacttgtgtctaacaaataccagtggttgcagattgaccttggagagagaatggaggtcaccgctgtggccactcaagggggatatggtagctccaactgggtgaccagctacctcctgatgttcagtgatagtggctggaactggaaacaatatcgccaagaggacagcatctggggtttttcaggaaatgcaaatgcagacagtgttgtgtactatagactccagccttctatcaaagccagatttctgcgcttcatccctttggaatggaaccccaagggcagaattggaatgcgaatcgaagtgttcggatgtgcatacagatcagaagtggttgatcttgatggaaaaagttcccttctctacagatttgatcaaaaatccctgagcccaataaaagacattatttctttgaaattcaaaaccatgcagagtgatgggattctactccacagggaagggccaaatggagatcacatcacactgcaattaagaagagcaagactctttttacttattaattcaggtgaagctaaactgccttccacttccaccctggtcaatctcaccctgggcagcctgctagatgatcagcattggcattcagtgctcatccagcgtttgggcaaacaagtcaacttcacagtggacgaacacaggcatcatttccatgcacggggagaattcaatctcatgaatcttgattatgagatcagctttggagggattccagcacctggaaaatcagtgtcattcccacatagaaattttcatggatgtttagaaaatctctattataatggagtggatatcattgatttggccaagcagcaaaaaccacagatcattgctatgggaaatgtgtcattttcttgttcacaaccacaatctatgcccgtgacttttctgagctccaggagttatttagcactgccagacttctctggagaggaggaggtttctgccacttttcaatttcgaacttggaataaggcagggcttctgctgttcagtgaacttcagctgatttcagggggtatcctcctctttctgagtgatggaaaacttaagtcgaatctctaccagccaggaaaattacccagtgacatcacagcaggtgtcgaattaaatgatgggcagtggcattctgtctctttatctgctaaaaagaatcacttgagtgtggcggtggacggccagatggcttctgctgctcctctgctggggcctgagcagatttattcgggtggcacctattattttggaggttgtcctgacaaaagctttggatccaaatgtaaaagtccacttggtggatttcagggatgtatgaggctcatttctatcagcggcaaagtggtagatctgatttcagttcagcaggggtcccttgggaacttcagtgaccttcagatagactcatgtggcatctcagacaggtgtttgcccaactattgtgaacacggtggggagtgttcccagtcctggagcacctttcattgtaactgtaccaacactggttacagaggagctacttgccataactctatctatgagcagtcatgtgaagcctataagcacagaggaaatacttcagggttttactatatagattcagatggaagtggtcccctggaaccatttcttctatattgcaatatgaccgaaactgcatggaccatcatacagcacaacggctctgacttaacaagagtcagaaatactaatccagagaacccatatgctgggtttttcgagtatgtggccagcatggagcaacttcaggccactattaaccgtgcagagcactgtgaacaggagtttacttattactgcaagaagtcacggctggtcaataagcaagatggaacccctctgagttggtgggtaggaagaaccaatgaaacgcaaacctactggggaggttcttcgcctgatcttcaaaaatgtacttgtggattagagggaaactgcattgattctcagtattactgcaattgtgatgctgaccggaatgaatggtgatttccatacgatttctttatgcaagaaaaagttcatttaaaaaaattaatcactcaaagtatgtatagctagccagatactgaacaagttagtgcaatgaagtaattaaataaaggtttgttttaatg

SEQ ID NO: 3419 - protein, 721 aa, Homo sapiens
MWNYDCDDPLVSALPQASFSSSSELSSSHGPGFARLNRRDGAGGWSPLVSNKYQWLQIDLGERMEVTAVATQGGYGSSNWVTSYLLMFSDSGWNWKQYRQEDSIWGFSGNANADSVVYYRLQPSIKARFLRFIPLEWNPKGRIGMRIEVFGCAYRSEVVDLDGKSSLLYRFDQKSLSPIKDIISLKFKTMQSDGILLHREGPNGDHITLQLRRARLFLLINSGEAKLPSTSTLVNLTLGSLLDDQHWHSVLIQRLGKQVNFTVDEHRHHFHARGEFNLMNLDYEISFGGIPAPGKSVSFPHRNFHGCLENLYYNGVDIIDLAKQQKPQIIAMGNVSFSCSQPQSMPVTFLSSRSYLALPDFSGEEEVSATFQFRTWNKAGLLLFSELQLISGGILLFLSDGKLKSNLYQPGKLPSDITAGVELNDGQWHSVSLSAKKNHLSVAVDGQMASAAPLLGPEQIYSGGTYYFGGCPDKSFGSKCKSPLGGFQGCMRLISISGKVVDLISVQQGSLGNFSDLQIDSCGISDRCLPNYCEHGGECSQSWSTFHCNCTNTGYRGATCHNSIYEQSCEAYKHRGNTSGFYYIDSDGSGPLEPFLLYCNMTETAWTIIQHNGSDLTRVRNTNPENPYAGFFEYVASMEQLQATINRAEHCEQEFTYYCKKSRLVNKQDGTPLSWWVGRTNETQTYWGGSSPDLQKCTCGLEGNCIDSQYYCNCDADRNEW

SEQ ID NO: 3420 - DNA, 3784 bp, Homo sapiens
attcaacaggaggaacccgcgggagaggagccccactcccccagcgccgcagccaccgcagccaccgcagcccgtgcgccccgcgccctcgagcgccatggccaaggaaggcgtggagaaggcggaggagacggagcaaatgatcgagaaggaggcaggcaaggagccggcggagggcggcggcggcgacggctcgcaccgcctcggggacgcccaggagatgcgcgcggtggtgctggctggcttcggggggctcaacaagctgcggctcttcaggaaggccatgcccgagcctcaggacggcgagctcaagatccgcgtcaaagcctgtggattaaacttcattgacttgatggtgcgacaagggaatattgacaaccctcccaagactcccctggtgccaggatttgagtgttctgggattgttgaagctctgggggacagcgtgaaaggatatgagattggagaccgtgtcatggcatttgtcaattacaatgcctgggcagaggtggtctgcacaccagtggagtttgtctacaagatcccggatgacatgagcttctcggaggctgctgcattccccatgaacttcgtcacagcctatgtgatgctgtttgaagttgccaacctccgggaagggatgtctgtgctcgtgcactcagctggtgggggcgtgggtcaagctgtggctcagctgtgttccactgtccccaacgtgactgtctttggaacagcctctactttcaagcatgaagcaatcaaagactctgtgacccacctctttgacagaaatgcagactacgtgcaagaagttaaaagaatctctgctgaaggtgtggacatcgttttggattgcctctgtggggacaacactggaaaaggtctcagtcttctcaaacccctgggaacctacattttatatggctcatccaacatggtaactggagagaccaagagcttcttcagctttgcaaaatcatggtggcaggtggagaaggtgaaccccatcaagctgtatgaggagaacaaagtcatcgcggggttttcccttttaaatctgctcttcaaacaaggccgggcgggcctcattcggggagtggtggaaaaactcatagggctctacaaccagaagaagatcaagcctgtggtggactccttgtgggctctggaggaggtgaaggaggccatgcagcggattcacgaccgagggaacattggcaagttaattctggatgtagaaaagaccccaactccactgatggccaatgacagcacagagaccagtgaagcaggggaagaggaggaggaccacgagggagacagcgagaacaaggagcggatgccctttatccagtaactgaggacccaggtgggagaatgtgaaggatggtttggaagatgaggacccggctgagaaaactcttctgtgccccagtgaacaaatgctgtagtccagtgcgtgtcgtgtttgtctgcagtcagctgagctaaaaagctgttgatcactgttgttttttgaagtgccaatcccatgccatgcagtattatgtccctctcctatctgtgtattacacattcccctctcccctgtatcaaaaccatccatctgtgggttcttcttgacagttctagaacagccttgcaaattaatacaagtcccaggcccaatgcctaagagaccagacgtgggcaaagacaagtttggatggaaaggtgttatcacagagccctgtccagctcctagaattcctcaggccagtgacacttttttgctgctggccacccatgcctctgatgagaacacttgccaatttggccagcagaaagagagtaggccggatgttttcatgagcccacaaatttagaaactctcctagtagtactttttctctctccatttaagagacaactacggtcaaaagtttgagccattctcttctaccccttcagtgtctgaccctttcactggctcttatctgtaaacacagggaggcaggtatggatttttcacagtagacaatgggtcaacagcatgagtttgaggacctgctgtgaagatttctcctccaaaatacatctcatgggcaggattcttcctgctccatatctgtttcaattttaagaaagcaccacatacaagacacattcagaagtcattcctgagcattgctggtgtttgcacacttgccacctgcattaccaattctgtaaatttcaattcctggtggaaagtgaccactttgaccatggatttcccaaagaagagttcctttgcagaccataggtggaaaagtcaatgagcatctccttccttgccaaagcatgtcccaacatgtaacaaactctagggatacaaaaggtttatattcagcatctgatgtcagatgtacagttcctcccctcccatatataaaccccggtgtagaatctgcagcgccctgctcttcggaaaccaaggaacaagccacctgctcacacaccttgttcaacttttcagctcctaaggaaccccacccccatgcaatttgactgtgcttgagaggtgaatacagttaccttcgagaaacagagggagctcctcaccccgtccttccagtccttttggctaaaatgcttaactatcactcacaaacaaatgtggagataccaggagctcatttgattcataccccaactttgtgttctgaaaaacatcagagggattttacattgcccagtttctccaccaacaagccttagggtggacccaaccctttccgcaagtggtaggaacgaatgcatcttagcaattacctgatttccaaagtccttttgtagcaaatgtcacctcattcgtggtctttttacctatcctaagcttatgatgatgagttatgtatgccaaatatttatctgaagagtttctcctcattgtgaatgtgtatgtaaaatatgaagacaagaaagggtgctttcatctgaggaaccaaggggtgagagtatcccaaaggaggacaccagcatcatcttttcttcgtactccaggacccaccaatattccagttctgggtcatttagagagataatggggcgtttattcccctattacctttgctaagtgctatattattggctgtttctcccgtaaccatgctgaaaagggggtcttagggagaactgtcatccaagtggcattcctagtaagttgggtagaaatgacattttccagagctgaaggagtgaagagcccttggccatactagggctctccttcccccggggagtgggaattcagccacattcagaattcacatcgcctttgttatgtccagaggagaggcataaaaaggcactctcccccaccacccctaccgaatctgggtttggtttggttttatttaactagcaaagttaatccagtaatcgcaaattactccagatggttaaagaaaaccctttcagaatacagaacgagaaaactagagtttgaccaataagaccaatttctgccatgaagaaccgggggacgcaagttaattgtttaacgtactctcattttaagcaccttctttcctgtctcttgattgttttttctgaaggaagtgtaaagaatgtctcagtctgccttaaaggaactgtgaaggcttctctgtaatttaagcttgattgaagtgaactgaaacattgtctaatgtctttgtggctttagagcttttgttatattgtgcctataaagcaaattatgtttacataaaaatataaataaagtattcagcatagcaaaaccccaaaaaaaaaaaaaaaa

SEQ ID NO: 3421 - protein, 419 aa, Homo sapiens
MAKEGVEKAEETEQMIEKEAGKEPAEGGGGDGSHRLGDAQEMRAVVLAGFGGLNKLRLFRKAMPEPQDGELKIRVKACGLNFIDLMVRQGNIDNPPKTPLVPGFECSGIVEALGDSVKGYEIGDRVMAFVNYNAWAEVVCTPVEFVYKIPDDMSFSEAAAFPMNFVTAYVMLFEVANLREGMSVLVHSAGGGVGQAVAQLCSTVPNVTVFGTASTFKHEAIKDSVTHLFDRNADYVQEVKRISAEGVDIVLDCLCGDNTGKGLSLLKPLGTYILYGSSNMVTGETKSFFSFAKSWWQVEKVNPIKLYEENKVIAGFSLLNLLFKQGRAGLIRGVVEKLIGLYNQKKIKPVVDSLWALEEVKEAMQRIHDRGNIGKLILDVEKTPTPLMANDSTETSEAGEEEEDHEGDSENKERMPFIQ

SEQ ID NO: 3422 - DNA, 1303 bp, Homo sapiens
gaagagacagcgccgccggccgtggggagcggacgcagtgatttgctccccctcgtgcagcaacccccacacccagcaccaggagcctgttcctctcacgccctcacctggctgagccgcagtagttcttcagtggcaagctttatgtcctgacccagctaaagctgccagttgaagaactgttgccctctgcccctggcttcgaggaggaggaggagctgctttccccatcatctggaaggtgacagaaatgggctgggaaggtccgaacagcagggtggatgatacgttttgggcaagttggagagcctttgcccagattggcccagcaaggagcggttttagattagagacactggctggattgaggagtagaaggctcaaacaacccaaggctttctgcctccgagatgtggcaccatagtgcggtgccctgtggcttcaccgccctacttccacctccgcccagcctgtaatgtttatataagcagcctcaaggaccaagaaccatctgcgaaaggacacacacaggaaattcataaaagaaatctgaatggataaaaccatgaaaaaaagtatgcttcattagtaattaaagaaaggcaaatagagctggaagcatttttcccttagcaaaccataacagaaaaaaataagacccaatattggcaaagagactactgaaaaaacattcccatacattgcgtgtgggagtatacatcggtgcaggcttcctggatgacagttgggtgatatgtgtcatgtggcctaaaagcctccatgtcatttgacctacgaattctatctttgggaatttatcctaagaaaatacttaaggatttagttagtgataagatgttcatcccagcattgcaatggagaaaaatgggaagcaatggtttggttgggaatttattccttttctgctgtaacgaaagtttgcaataggggattgcttaagtaaattattgtatctccatccagatggtggagtaccgcgcagacattaaaagtcatgtaaaagaacatctgactgaaagaaaaatgctccttgaatattaaaaggttgtaaaaatagtgcatgttatgtgatttcaattttgttttttaaaatatgggtgtatgcttgtatacgtagagcagataaaaaagacggaaggcatactaaaaaatgttgagtggttatctttgtatggtggaacaaagtcactgtaattttcatctttggtttttctgtaatttccaaattttccacattttgtatttcatataatataatttaagaaaaaaaaaaaaaaaaaaa

SEQ ID NO: 3423 - protein, 57 aa, Homo sapiens
MGWEGPNSRVDDTFWASWRAFAQIGPARSGFRLETLAGLRSRRLKQPKAFCLRDVAP

SEQ ID NO: 3424 - DNA, 1385 bp, Homo sapiens
aagagacagcgccgccggccgtggggagcggacgcagtgatttgctccccctcgtgcagcaacccccacacccagcaccaggcccccagaactctccttccagctgaactccctgggaacaagtcagttgggctgatcactgaactcacatttctggacctgaggagcctgttcctctcacgccctcacctggctgagccgcagtagttcttcagtggcaagctttatgtcctgacccagctaaagctgccagttgaagaactgttgccctctgcccctggcttcgaggaggaggaggagctgctttccccatcatctggaaggtgacagaaatgggctgggaaggtccgaacagcagggtggatgatacgttttgggcaagttggagagcctttgcccagattggcccagcaaggagcggttttagattagagacactggctggattgaggagtagaaggctcaaacaacccaaggctttctgcctccgagatgtggcaccatagtgcggtgccctgtggcttcaccgccctacttccacctccgcccagcctgtaatgtttatataagcagcctcaaggaccaagaaccatctgcgaaaggacacacacaggaaattcataaaagaaatctgaatggataaaaccatgaaaaaaagtatgcttcattagtaattaaagaaaggcaaatagagctggaagcatttttcccttagcaaaccataacagaaaaaaataagacccaatattggcaaagagactactgaaaaaacattcccatacattgcgtgtgggagtatacatcggtgcaggcttcctggatgacagttgggtgatatgtgtcatgtggcctaaaagcctccatgtcatttgacctacgaattctatctttgggaatttatcctaagaaaatacttaaggatttagttagtgataagatgttcatcccagcattgcaatggagaaaaatgggaagcaatggtttggttgggaatttattccttttctgctgtaacgaaagtttgcaataggggattgcttaagtaaattattgtatctccatccagatggtggagtaccgcgcagacattaaaagtcatgtaaaagaacatctgactgaaagaaaaatgctccttgaatattaaaaggttgtaaaaatagtgcatgttatgtgatttcaattttgttttttaaaatatgggtgtatgcttgtatacgtagagcagataaaaaagacggaaggcatactaaaaaatgttgagtggttatctttgtatggtggaacaaagtcactgtaattttcatctttggtttttctgtaatttccaaattttccacattttgtatttcatataatataatttaagaaaaaaaaaaaaaaaaaaa

SEQ ID NO: 3425 - protein, 57 aa, Homo sapiens; identical to SEQ ID NO: 3423

SEQ ID NO: 3426 - DNA, 3789 bp, Homo sapiens
aaagagcaggcgaaagccacggcgtctgcgtttgcaatgcatgctggtccgtgtagttctcagcctgacaccgtcgttcccagaacccagcgcgctctgtgctggcgggcgcagaggcctcccaggaggagagcaaggacctggcaggggctgctgaggaggagagcgggctgcccggggccgggcctggctcctgtgcttttggggaggagattcccatggatggggagcctcctgcctcctcgggcctggggctcccagactacacgtctggcgtcagcttccacgaccaggctgacctccctgagacagaggacttccaagccgggctctatgtgactgagtctccccagccccaggaggctgaggctgtgagcctgggccggctgagtgacaagagcagcaccagcgagacctccctgggtgaggagcgggctccagacgaggggggtgcccccgtggacaagagcagccttcgatcaggtgacagcagccaggacttgaagcaaagcgagggctccgaggaggaagaggaggaggaggacagctgcgtggtgctagaggaggaggagggggagcaggaggaggtcaccggggcatctgagctcactctgtctgacacggtgctgtccatggagacggttgtggccggcggcagtgggggagatggagaagaagaggaggaggcactgcctgagcagtcagaaggcaaagaacagaagatcctccttgatacagcctgcaagatggtccgctggctgtctgccaagctcggccccacagtggcctctcgccacgtggcccggaacctgctccgcctgctgacgtcttgttatgttggacccactcggcagcagttcacagtgagcagtggcgagagcccaccgctgagcgccggcaacatctaccagaagaggccggtcctgggcgacatcgtgtcagggcctgtgctcagctacctcctccacatcgcccgcctgtatggggagcctgtcctcacctaccagtacctgccctacatcagctacctggtggccccagggagtgcctcaggccccagccgactgaacagccgtaaggaggcggggctgctggccgcggtgacgctgactcagaagatcatcgtgtacctctcagacaccacactcatggacatcctgccccggatcagccatgaggtcctgctgcccgtgctcagcttcctcacctccctcgtcacggggttcccaagtggggcccaggctcggaccatcctgtgtgtgaaaaccatcagcctcatcgccctcatctgcctgcgcattggacaggagatggtccagcagcacctgagcgagcccgtggccacctttttccaggtcttctctcagctgcatgagcttcggcaacaggatctgaagctggaccctgcgggccgtggtgagggccagctgccacaggtggtcttctctgatgggcagcagcggcccgtggaccccgccctgctggacgagctgcagaaggtgttcaccctggagatggcatacacaatctacgtgcccttctcctgcctgttgggtgacatcatccggaaaatcatccccaaccacgagctggttggggagctggcggcgctgtacttggagagcatcagccccagcagtcgcaaccctgccagcgtggagcccaccatgcccggcaccgggcccgagtgggacccccatggtgggggctgccctcaggatgacggccactcagggacctttgggagcgtcctggtggggaaccgcattcagatccccaatgactctcggcctgagaaccccggaccactgggccccatctcgggggtgggtggcgggggcctgggcagcgggagcgacgacaacgccctgaagcaggagctgccgcggagcgtgcacgggctgagcggaaactggctggcgtactggcagtacgagatcggcgtgagccagcaggatgcccactttcacttccaccagatccgcctgcagagcttcccgggccactcgggggccgtcaagtgcgtggcacccctgagcagcgaggacttcttcctgagcggcagcaaggatcgtaccgtgcgcctctggccgctgtacaactacggcgacgggaccagcgagacggccccacgcctcgtctacacccagcaccgcaagagcgtcttcttcgtgggccagcttgaggccccacagcacgtggtgagctgtgacggggctgtgcacgtctgggaccccttcacagggaagacccttcgcacagtggagccgctggacagccgggtgcccctgactgcggtggctgtcatgcccgccccccacaccagcatcaccatggccagcactgactctaccctgcgctttgtggactgcaggaagcctggtctgcagtacgagttccgactgggcggtgggctgaaccctgggcttgtccgtgccctggccatcagccccagtggccgtagtgtcgtggccggcttctcctcaggcttcatggtgctcctggacacccgcacgggcctggttctgcgaggctggccagcccacgagggggacattctgcagatcaaggcggtggagggcagcgtcctggtcagctcctcctctgaccattccttgaccgtctggaaggagctggagcagaagcccacccatcactacaagtcagcatccgaccccatccacacctttgacctgtacggcagtgaggtggtcactggcaccgtgtccaacaagattggcgtctgctccctgcttgagccaccctcgcaggccaccacgaagctcagctctgagaacttccgcggcacgctcaccagcctggccttgctgcccactaaacgccacctcctgctgggctcagacaacggggttatccgcctcctggcatagactgaggcaggagctggccgggcaagggtgggaagacatctgcgggcgcgtgtccgctcaccctgttccctgagcagcagctccctccagggaggccctgggtcccacgccctgggtgcccacatggcctgccaactagggcctgcaaatggagtgggggagtcctggcccctgaatcaccagagccaccaagcctgccagaggggtcccattcatggcttggggacacagggctcctagcaagcaggaagttaagagcaggaggaagcgttgctaccttcacttctccccagctctgccctctgggtccacatgaggacagggaagctcgggaaggggaagggagactggccctgcccagccggtctctagcccctcagcccccgctgggcactctctgtcccatccctctaggacagggaagctggcctggtccagggcactgatggtgcttggattccagcctaaggaaggctggccgtggtccaggagttaagggcttgggtctggggtttaagtggccacccatccaggccctggccagtgtgggaccgggacgggaaggaagaaggaggctaggagcagggggaaaaggtgcacttggccagtggcgcctgccaggagtgagtccatgcgttgtctgcccacccctaccacagtgtttgtgccttcagctgagggggcagcctctgggccctgaacccctgctggggctccacgaccctgagagaagggttgagaagaatcatctctgcacctcgggtctctgccagaggaagacttaagcatccctgcgacctcacattctagacagagatgaggtccaagggttggcccctgctgccttctcacaatttgcaatagatgtaaataggaccaataaatcctttggaagagc

SEQ ID NO: 3427 - protein, 890 aa, Homo sapiens
MDGEPPASSGLGLPDYTSGVSFHDQADLPETEDFQAGLYVTESPQPQEAEAVSLGRLSDKSSTSETSLGEERAPDEGGAPVDKSSLRSGDSSQDLKQSEGSEEEEEEEDSCVVLEEEEGEQEEVTGASELTLSDTVLSMETVVAGGSGGDGEEEEEALPEQSEGKEQKILLDTACKMVRWLSAKLGPTVASRHVARNLLRLLTSCYVGPTRQQFTVSSGESPPLSAGNIYQKRPVLGDIVSGPVLSYLLHIARLYGEPVLTYQYLPYISYLVAPGSASGPSRLNSRKEAGLLAAVTLTQKIIVYLSDTTLMDILPRISHEVLLPVLSFLTSLVTGFPSGAQARTILCVKTISLIALICLRIGQEMVQQHLSEPVATFFQVFSQLHELRQQDLKLDPAGRGEGQLPQVVFSDGQQRPVDPALLDELQKVFTLEMAYTIYVPFSCLLGDIIRKIIPNHELVGELAALYLESISPSSRNPASVEPTMPGTGPEWDPHGGGCPQDDGHSGTFGSVLVGNRIQIPNDSRPENPGPLGPISGVGGGGLGSGSDDNALKQELPRSVHGLSGNWLAYWQYEIGVSQQDAHFHFHQIRLQSFPGHSGAVKCVAPLSSEDFFLSGSKDRTVRLWPLYNYGDGTSETAPRLVYTQHRKSVFFVGQLEAPQHVVSCDGAVHVWDPFTGKTLRTVEPLDSRVPLTAVAVMPAPHTSITMASTDSTLRFVDCRKPGLQYEFRLGGGLNPGLVRALAISPSGRSVVAGFSSGFMVLLDTRTGLVLRGWPAHEGDILQIKAVEGSVLVSSSSDHSLTVWKELEQKPTHHYKSASDPIHTFDLYGSEVVTGTVSNKIGVCSLLEPPSQATTKLSSENFRGTLTSLALLPTKRHLLLGSDNGVIRLLA

SEQ ID NO: 3428 - DNA, 2287 bp, Homo sapiens
gaattccggctggcaggggagaacatggcgctgctctgggggctcctggtgctcagctggtcctgcctgcaaggcccctgctccgtgttctcccctgtgagcgccatggagcccttgggctggcagctaactagcgggccgaaccaggagcaggtgtccccacttaccctcctcaagttgggcaaccaggagcctggtggccagactgccctgaagagtcccccaggagtctgcagcagagaccccaccccagagcagacccacaggctggcccgggccatgatggccttcactgccgacctgttctccctggtggctcaaacgtccacctgccccaacctcatcctgtcacccctgagtgtggccctggcgctgtctcacctggcactaggtgctcagaaccacacgttgcagaggctgcaacaggtgctgcacgcaggctcagggccctgcctcccccatctgctgagccgcctctgccaggacctgggccccggcgcgttccgactggctgccaggatgtacctgcagaaaggatttcccatcaaagaagatttcctggaacaatccgaacagctatttggggcaaagcccgtgagcctgacgggaaagcaggaagatgacctggcaaacatcaaccaatgggtgaaggaggccacggaggggaagattcaggaattcctctctgggctgccggaagacaccgtgttgcttctcctcaacgccatccacttccagggtttctggaggaacaagtttgacccgagccttacccagagagactccttccacctggacgagcagttcacggtgcccgtggaaatgatgcaggcccgcacgtacccgctgcgctggttcttgctggagcagcctgagatccaggtggctcatttcccctttaagaacaacatgagctttgtggtccttgtacccacccactttgaatggaacgtgtcccaggtactggccaacctgagttgggacaccctgcacccacctctggtgtgggagaggcccaccaaggtccggctgcctaagctgtatctgaaacaccaaatggacctggtggccaccctcagccagctgggcctgcaggagttgttccaggccccagacctgcgtgggatctccgagcagagcctggtggtgtccggcgtgcagcatcagtccaccctggagctcagcgaggtcggcgtggaggcggcggcggccaccagcattgccatgtcccgcatgtccctgtcctccttcagcgtgaaccgccccttcctcttcttcatcttcgaggacaccacaggccttcccctcttcgtgggcagcgtgaggaaccccaaccccagtgcaccgcgggagctcaaggaacagcaggattccccgggcaacaaggacttcctccagagcctgaaaggcttcccccgcggagacaagcttttcggccctgacttaaaacttgtgccccccatggaggaggattacccccagtttggcagccccaagtgaggggccgtggctgtggcatccagactccctgcctggaccagcctctccactcatgtgactctttccaacctgctttgtggcactggggcaggggccgggggcagtctgagagaggccattctttcccaacacctcttggggagtttagggtgggggggggcgcggctgggaggagggcaggcatcggggagccgggagcctgaccctcatctttcttccaaacaggctcagagggtgtcctgcaccggggcctgggcaggagggaggtgcttctagttctgccaggagacaggttagctgctccccacgtcagctgggacaccccgacttttgtttaccagagaaaaagggagggggagagggctgcctttggacttgtcccgggacacctaggctagggtggggagagacgggccctggtggtggctcgggaggcgaagcgttgtcctcagccccgcgtggaactcgtgtctggcacagcctggctgtggcctaacctgccgagagtccatcagcctccatcctaccccctgtgccttgtcacgccagacttcccacggctcctcgagatcccaacactgccagcatttcccttccttcctctcctgtctccctcctctgcccgggagctcaggaaccgaggcagggaaggatcccatgagctccttaaggctcttttgtaaggtttttgtagtgatttttatgccacctgaataaagaatgaatgggcaaaaaaaaaaaaaaaaaaaaaaaaaaaaaaaaaaaaaaaaaaaaaaaaaaggaattc

SEQ ID NO: 3429 - protein, 491 aa, Homo sapiens
MALLWGLLVLSWSCLQGPCSVFSPVSAMEPLGWQLTSGPNQEQVSPLTLLKLGNQEPGGQTALKSPPGVCSRDPTPEQTHRLARAMMAFTADLFSLVAQTSTCPNLILSPLSVALALSHLALGAQNHTLQRLQQVLHAGSGPCLPHLLSRLCQDLGPGAFRLAARMYLQKGFPIKEDFLEQSEQLFGAKPVSLTGKQEDDLANINQWVKEATEGKIQEFLSGLPEDTVLLLLNAIHFQGFWRNKFDPSLTQRDSFHLDEQFTVPVEMMQARTYPLRWFLLEQPEIQVAHFPFKNNMSFVVLVPTHFEWNVSQVLANLSWDTLHPPLVWERPTKVRLPKLYLKHQMDLVATLSQLGLQELFQAPDLRGISEQSLVVSGVQHQSTLELSEVGVEAAAATSIAMSRMSLSSFSVNRPFLFFIFEDTTGLPLFVGSVRNPNPSAPRELKEQQDSPGNKDFLQSLKGFPRGDKLFGPDLKLVPPMEEDYPQFGSPK

SEQ ID NO: 3430 - DNA, 1542 bp, Homo sapiens
ggtcgctttaagaaaggagtagctgtaatctgaagcctgctggacgctggattagaaggcagcaaaaaaagctctgtgctggctggagccccctcagtgtgcaggcttagagggactaggctgggtgtggagctgcagcgtatccacaggccccaggatgcaggccctggtgctactcctctgcattggagccctcctcgggcacagcagctgccagaaccctgccagccccccggaggagggctccccagaccccgacagcacaggggcgctggtggaggaggaggatcctttcttcaaagtccccgtgaacaagctggcagcggctgtctccaacttcggctatgacctgtaccgggtgcgatccagcacgagccccacgaccaacgtgctcctgtctcctctcagtgtggccacggccctctcggccctctcgctgggagcggagcagcgaacagaatccatcattcaccgggctctctactatgacttgatcagcagcccagacatccatggtacctataaggagctccttgacacggtcactgccccccagaagaacctcaagagtgcctcccggatcgtctttgagaagaagctgcgcataaaatccagctttgtggcacctctggaaaagtcatatgggaccaggcccagagtcctgacgggcaaccctcgcttggacctgcaagagatcaacaactgggtgcaggcgcagatgaaagggaagctcgccaggtccacaaaggaaattcccgatgagatcagcattctccttctcggtgtggcgcacttcaaggggcagtgggtaacaaagtttgactccagaaagacttccctcgaggatttctacttggatgaagagaggaccgtgagggtccccatgatgtcggaccctaaggctgttttacgctatggcttggattcagatctcagctgcaagattgcccagctgcccttgaccggaagcatgagtatcatcttcttcctgcccctgaaagtgacccagaatttgaccttgatagaggagagcctcacctccgagttcattcatgacatagaccgagaactgaagaccgtgcaggcggtcctcactgtccccaagctgaagctgagttatgaaggcgaagtcaccaagtccctgcaggagatgaagctgcaatccttgtttgattcaccagactttagcaagatcacaggcaaacccatcaagctgactcaggtggaacaccgggctggctttgagtggaacgaggatggggcgggaaccacccccagcccagggctgcagcctgcccacctcaccttcccgctggactatcaccttaaccagcctttcatcttcgtactgagggacacagacacaggggcccttctcttcattggcaagattctggaccccaggggcccctaatatcccagtttaatattccaataccctagaagaaaacccgagggacagcagattccacaggacacgaaggctgcccctgtaaggtttcaatgcatacaataaaagagctttatccctaacttctgtta

SEQ ID NO: 3431 - protein, 418 aa, Homo sapiens
MQALVLLLCIGALLGHSSCQNPASPPEEGSPDPDSTGALVEEEDPFFKVPVNKLAAAVSNFGYDLYRVRSSTSPTTNVLLSPLSVATALSALSLGAEQRTESIIHRALYYDLISSPDIHGTYKELLDTVTAPQKNLKSASRIVFEKKLRIKSSFVAPLEKSYGTRPRVLTGNPRLDLQEINNWVQAQMKGKLARSTKEIPDEISILLLGVAHFKGQWVTKFDSRKTSLEDFYLDEERTVRVPMMSDPKAVLRYGLDSDLSCKIAQLPLTGSMSIIFFLPLKVTQNLTLIEESLTSEFIHDIDRELKTVQAVLTVPKLKLSYEGEVTKSLQEMKLQSLFDSPDFSKITGKPIKLTQVEHRAGFEWNEDGAGTTPSPGLQPAHLTFPLDYHLNQPFIFVLRDTDTGALLFIGKILDPRGP

SEQ ID NO: 3432 - DNA, 4269 bp, Homo sapiens
agtcgagggcgcagttcagggcgcgtctgagcggttctcgaggcgttctcgcctcggtctctggcgagtgcacggatcaaaagcagcatggatctgcctgtggatgagtggaaatcatatctgcttcaaaagtgggcttcactcccgacgtctgttcaggtcacaatttctacagcagagaccttgagggatatctttcttcactcctcttcacttcttcaacctgaggatgagctgtttctaaaaagactttctaaaggttacttggtgggaaaggactcggacgctcctcttttctacagagaagaaggaaacaaaaaatttcaggagaaagattacacaggagctgcagtgctgtactctaagggagtgtcacattcaaggcctaacactgaggacatgtcactgtgtcatgctaaccgctcggcagccctcttccacctgggtcagtatgagacgtgtcttaaagacattaacatagcacagacacatgggtatccagaaaggttgcaacccaagattatgttacgtaaagcagaatgtctggtggccctggggagactgcaggaggcaagccagaccatcagtgatcttgaaaggaacttcacagccacaccagccctagcagatgtcctccctcagactctgcagagaaacctccatcgtctgaaaatgaagatgcaagaaaaggacagtctcacagaaagcttcccagcagctctggccaaaacccttgaggatgcagcgctgagggaggagaatgaacaactttccaatgcctcatcatccatcggcttatgcgtagatcctttaaaaggtcgctgtctcgttgccacaaaagatattctcccaggagagctcctggtgcaggaggatgcttttgtgagtgttctcaacccaggagaactgccaccaccgcatcacggcctagacagcaaatgggacaccagagtcaccaatggggacctctattgtcaccgatgtttgaagcacactttggccacagttccgtgtgacggatgcagttatgccaagtattgcagccaggagtgtttgcagcaggtctgggagctctaccacaggacagaatgtcctctgggagggctgcttctcacactgggtgtcttttgccacattgccctgaggttgactcttttggtgggatttgaggatgttcgcaaaatcataacgaagctttgtgataagattagtaacaaggacatctgtttacctgaaagcaacaatcaggtcaagacacttaattatggcctaggggagagtgagaaaaatggcaacatcgttgagaccccaattcctggatgcgatattaatgggaagtatgaaaataattataatgctgtcttcaaccttttgccccacactgaaaaccatagcccagagcacaaattcctctgtgctctctgtgtttctgcactgtgcagacagctagaagcagccagtttacaggccatcccaactgagaggattgtgaactcctctcagcttaaagcagcagtgacacctgaattgtgtcctgacgtgactatttggggagtggcgatgctgagacacatgttacagcttcagtgtaacgctcaggcgatgaccaccatacaacacacaggacctaaagggagcatcgttaccgacagcaggcaggtgcgccttgccacaggcatcttccctgttatcagcctcctgaaccactcctgtagccccaacaccagcgtgtccttcattagcactgtcgccaccatccgggcgtcacagcggattagaaaggggcaagagattctccactgctatgggcctcacaagagccggatgggggttgccgaaaggcagcagaagctgaggtctcagtatttctttgactgcgcctgtccagcttgtcaaactgaggcacacaggatggctgcagggcccaggtgggaagcattctgttgcaacagttgcggagcgcccatgcagggagatgacgtgctgcgctgtggcagcagatcttgtgcagaatccgccgtcagcagggaccacctggtctctcggttacaggacctacagcagcaggtcagagtggcccagaagcttctcagagatggtgaactagagcgagctgttcagcggctgtcggggtgccagcgtgacgccgagagcttcctgtgggcagagcacgccgtggtgggagagatcgcggatggcctggcccgggcctgtgctgccttaggagactggcaaaagtcagccacccatctacagaggagtctctgcgtggtggaggttcgccacgggccgtccagtgttgaaatgggccatgagctcttcaaattggcccagatctttttcaacgggtttgcagtacccgaagccctgagcacaatacagaaagctgaggaggttctgtcgctgcactgtggcccatgggacgatgaaatccaggagctccagaagatgaaatcctgtttgttggacttaccacccacccctgtagggcctgcattgtagggttccaggaggattttgacccacagaaaaggagcccatggaacacaagttaaagaggttttgctggccaggtatggtggctcacgcctgtaatcccagcactttgggaggctaaggtgggcggatcacctgatgtcgggagttcaagaccagcctggccaacatggtgaaaccccatctttactaaaaatacaaaaaactagccaggcgtggtggtgggcacctgtaatcccagctacttgggaggctgaggcaggagaatctcttgaacccgggaggcggaggttgcagtgagccgagatcgctccactgcactccagcccaggtgacagtgtgagactccatctcaaaaaaaaaaataagaggccgggtgcggtggctcaagcctgtaatcccagcactttgggaggccgaggcaggcagatcacgaggtcaggagatccagaccatcctggctaacacggtgaaaccccgtctctactaaaaatacaaaaaaattagtcgggcgtggtggcggacgcctgtattcacagctactcgggaggttgaggcaggagaatggggtgaacccgggaggaagagcttgcagtgagccgagatcgcgccactgcactccagcctgggtgacagagccagactccatctcaaagaaaaaaaaaaaatattaagaggttctgctgccagatgtgggttctgtgggtcgggtgtgggttctgtgggtcgggtgtgggttctgcagaccaggtgcggattctgtgtaggttctgcaggcccagtgtagaggctcacacctgtaatcccagtactttgagacgctgaggtggggggatcacttgagcccaggagttcaaaaccagcctgggcaatatagtgagaccgtatcactacaaaaaagtttttttagttcaccgagcatggtggcacatgcctgtagtcccacctactcgagaagctgagatagggtcacctgagcctggtaggctgaggctgcagtgagccaagatcgcactactgcactccagcctgggtgacagagtaagaccctgtctcaacaaaaaaataacaggttctgttgctgctgagctttcgtcaggaagataagactttcccaacagtccgaagcctaggatatgagggctgaggaggactcaaaccgttgcagtcagagagacacctattttggtgaatattttttgaaatagttaagtggcctccagtacaaactcccagttcccagaaaagacttaaaactagtatctggagattccaagtcctttaaaaggattttagctgatctgcaggcatctggatgttagcctggggttttggctggattccacctcgctcagtgatgatagtctgtttccctggaacattcctgtggttttagtagtaatgagatgtgtgcaccactccagtgggaactgaagctcttagtagttacattgtaattaaaaaagaattataaaacaagaaatcagcaagcctgcttacctccagagacacaccgttccacttacagtatctagcttcctcgactcctttgttaaaatcgtggagtatgaaccgtgaccagagaagtaaatatggagcagttttattgagcagtttcctccagggatgacggctgtcagtgtgtttcctgccagttttccagtccttactctctgcccttcattctgtactcttggcagagtcagtaaccaaccactaataaaatcaaagttgtagtaaaaaaaaaaaaaaaaaagaaaaaaaaaaaaaaaa

SEQ ID NO: 3433 - protein, 804 aa, Homo sapiens
MDLPVDEWKSYLLQKWASLPTSVQVTISTAETLRDIFLHSSSLLQPEDELFLKRLSKGYLVGKDSDAPLFYREEGNKKFQEKDYTGAAVLYSKGVSHSRPNTEDMSLCHANRSAALFHLGQYETCLKDINIAQTHGYPERLQPKIMLRKAECLVALGRLQEASQTISDLERNFTATPALADVLPQTLQRNLHRLKMKMQEKDSLTESFPAALAKTLEDAALREENEQLSNASSSIGLCVDPLKGRCLVATKDILPGELLVQEDAFVSVLNPGELPPPHHGLDSKWDTRVTNGDLYCHRCLKHTLATVPCDGCSYAKYCSQECLQQVWELYHRTECPLGGLLLTLGVFCHIALRLTLLVGFEDVRKIITKLCDKISNKDICLPESNNQVKTLNYGLGESEKNGNIVETPIPGCDINGKYENNYNAVFNLLPHTENHSPEHKFLCALCVSALCRQLEAASLQAIPTERIVNSSQLKAAVTPELCPDVTIWGVAMLRHMLQLQCNAQAMTTIQHTGPKGSIVTDSRQVRLATGIFPVISLLNHSCSPNTSVSFISTVATIRASQRIRKGQEILHCYGPHKSRMGVAERQQKLRSQYFFDCACPACQTEAHRMAAGPRWEAFCCNSCGAPMQGDDVLRCGSRSCAESAVSRDHLVSRLQDLQQQVRVAQKLLRDGELERAVQRLSGCQRDAESFLWAEHAVVGEIADGLARACAALGDWQKSATHLQRSLCVVEVRHGPSSVEMGHELFKLAQIFFNGFAVPEALSTIQKAEEVLSLHCGPWDDEIQELQKMKSCLLDLPPTPVGPAL

SEQ ID NO: 3434 - DNA, 8192 bp, Homo sapiens
atggctttggtcacggtccagcggtcacctacccccagcaccacctccagcccctgcgcctcggaggcagacagtggggaggaagaatgccggtcacagcccaggagcatcagcgagagctttctaactgtcaaaggtgctgccctttttctaccacggggaaatggctcatccacaccaagaatcagccacagacggaacaagcatgcaggcgatctccaacagcatctccaagcaatgttcattttactccgcccagaagacaacatcagactggctgtaagactggaaagtacttaccagaatcgaacacgctatatggtagtggtttcaactaatggtagacaagacactgaagaaagcatcgtcctaggaatggatttctcctctaatgacagtagcacttgtaccatgggcttagttttgcctctctggagcgacacgctaattcatttggatggtgatggtgggttcagtgtatcgacggataacagagttcacatattcaaacctgtatctgtgcaggcaatgtggtctgcactacagagcttacacaaggcttgtgaagtcgccagagcgcataactactacccaggcagcctatttctcacttgggtgagttattatgagagccatatcaactcagatcaatcctcagtcaatgaatggaatgcaatgcaagatgtacagtcccaccggcccgactctccagctctcttcaccgacatacctactgaacgtgaacgaacagaaaggctaattaaaaccaaattaagggagatcatgatgcagaaggatttggagaatattacatccaaagagataagaacagagttggaaatgcaaatggtgtgcaacttgcgggaattcaaggaatttatagacaatgaaatgatagtgatccttggtcaaatggatagccctacacagatatttgagcatgtgttcctgggctcagaatggaatgcctccaacttagaggacttacagaaccgaggggtacggtatatcttgaatgtcactcgagagatagataacttcttcccaggagtctttgagtatcataacattcgggtatatgatgaagaggcaacggatctcctggcgtactggaatgacacttacaaattcatctctaaagcaaagaaacatggatctaaatgccttgtgcactgcaaaatgggggtgagtcgctcagcctccaccgtgattgcctatgcaatgaaggaatatggctggaatctggaccgagcctatgactatgtgaaagaaagacgaacggtaaccaagcccaacccaagcttcatgagacaactggaagagtatcaggggatcttgctggcaagcaaacagcggcataacaaactatggagatctcattcagatagtgacctctcagaccaccacgaacccatctgcaaacctgggctagaactcaacaagaaggatatcaccacctcagcagaccagattgctgaggtgaagaccatggagagtcacccacccatacctcctgtctttgtggaacatatggtcccacaagatgcaaatcagaaaggcctgtgtaccaaagaaagaatgatctgcttggagtttacttctagggaatttcatgctggacagattgaggatgaattaaacttaaatgacatcaatggatgctcatcagggtgttgtctgaatgaatcaaaatttcctcttgacaattgccatgcatccaaagccttaattcagcctggacatgtcccagaaatggccaacaagtttccagacttaacagtggaagatttggagacagatgcactgaaagcagacatgaatgtccacctactgcctatggaagaattgacatctccactgaaagacccccccatgtcccctgatcctgagtcaccaagcccccaacccagttgccagactgaaatctcagatttcagtacagatcgcattgacttttttagtgccctagagaagtttgtggagctctcccaagaaacccggtcacgatctttttcccattcaaggatggaggaactgggtggaggaaggaatgagagctgtcgactgtcagtggtagaagtagccccttccaaagtgacagctgatgaccagagaagcagctctttgagtaatactccccatgcatcagaagaatcttcaatggatgaggaacagtcaaaggcaatttcagaactggtcagcccagacatcttcatgcagtctcactcggaaaatgcaatttcagtcaaagaaattgtcactgaaattgagtccatcagtcaaggagttgggcagattcaactgaaaggagacatcttacccaacccatgccatacaccaaagaagaacagcatccatgagctgctccttgagagggcccagactccagagaacaaacctggacatatggagcaagatgaggactcctgcacagcccagcctgaactagccaaagactcagggatgtgcaacccagaaggctgcctaaccacacactcatctatagcagacttggaagaaggggaaccagctgagggggaacaagagctccagggctcagggatgcacccaggtgccaagtggtaccctgggtctgtgaggcgagccaccttggagttcgaagagcgcttacggcaggagcaagagcatcatggtgctgccccaacatgtacctcattgtccactcgtaagaattcaaagaatgattcttctgtggcagacctagcaccaaaagggaaaagtgatgaagcccccccagaacattcatttgtcctcaaggaaccagaaatgagcaaaggcaaagggaaatacagtgggtctgaggctggctcactgtcccattctgagcagaatgccactgttccagctcccagggtgctggagtttgaccacttgccagatcctcaggagggcccagggtcagatactggaacacagcaggaaggagtcctgaaggatctgaggactgtgattccataccaggagtctgaaacacaagcagtccctcttccccttcccaagagggtagaaatcattgaatatacccacatagttacatcacccaatcacactgggccagggagtgaaatagccaccagtgagaagagcggagagcaagggctgaggaaagtgaacatggaaaaatctgtcactgtgctctgcacactggatgaaaatctaaacaggactctggaccccaaccaggtttctctgcacccccaagtgctacctctgcctcattcttcctcccctgagcacaacagacccactgaccatccaacctccatcctgagtagccctgaagacagaggcagcagcctgtccacagccctggagacagcagcaccttttgtcagtcatacaacccatttactgtctgccagtttggattacctgcatccccagactatggttcacctggagggcttcacagagcagagcagcactacagatgagccctctgcagaacaggttagctgggaagaaagtcaggagagccctctctccagtggcagtgaggtgccatataaggactcccagctaagtagcgcagacctaagtttaattagcaaacttggtgacaacactggggagttacaggagaaaatggacccattgcctgtagcctgtcgactcccacatagctctagtagtgaaaacataaagagtctcagccacagccccggtgtggtgaaggagcgtgctaaagaaatcgagtctcgagtggttttccaggcagggctcaccaaaccatcccaaatgaggcgctcagcttctctcgccaaattaggttacttggacctctgtaaagactgcttaccagagagggagcctgcctcctgtgaatcccctcatctcaaactgcttcagcctttcctcagaacagactcaggcatgcacgcgatggaggaccaagagtccctagaaaacccaggtgccccccacaacccagagcccaccaagtcttttgtagaacaactcacaacaacagagtgtattgtgcagagcaagccagtggagaggccccttgtgcagtatgccaaagaatttggttctagtcagcagtatttgctccccagggcaggacttgaattgactagttctgaaggaggccttcccgtgctacagacccagggactgcagtgtgcatgcccagctccagggctggccgtggcaccccgtcagcaacacggcagaactcacccccttaggagactgaaaaaggcaaatgacaaaaaacggacaaccaaccccttctataataccatgtgattctgagcctacacatgtgactttctagaagaaatgtttgtaaaaggggcaggtgtaatatgtaaggaacatgcactttattggttaattttataatattttggtcattttactgtttctggtgcatgcagggtttgggtgtttttcagtgtgtatgtgtgtgtatatgtaaggggaaagagagattgatctggatggcaagaccgtttatcattttttatttaaaaaaatcaaacctcaaaaaagtcattttcagagaacacctttatcaaaggcaaattgctgtttttcagtcagctgccacctgcttctcattttgccctctgagaaaaggcatggtttcttaattgagggaaggaagcagattcggaggggtggagataaagctggggattggagatgttcccctgcctttgtgatgatggtttggtttccagacctgaggcatcgaatgggctaaaggtcagccagaagtcagagggctctcagccttcatccagccgcagccctttagagttcctgaaggaggcaggttccgctttgctttaaaagagggtcttccggtgttccagagtgtatcgttacagtaagacatgataatggccggctctgcaaatttatcatatagtttttttcccaagaaaattatttttgaaattaaaacaggaccccaaatgaaatccaagtggtcttctgtagaggaaagcatgataagaggaggaagacataaagttgggggtggagaggctgctgcccagaaactgctgggttggtgggatccacacagatgggcatcttggctctccctgccagaaaaatgtgctctgcagtgtcctcccaactgaaaacaacagtgacatgtttgaaaagcagcaatcgaaagtcagtgtgttcttgtaaaatgaatatgtatgtagggttttaacccttccattacttgaataattctttgggccttctgagtttaatggccatattttcttccagtttattttccttccccatgctgttgtccccatgctgcctatttttttaaatttcatagattatatttgaattgttacatatgtttaacatccattgaatgcaacgttttatttttggtattatcactgttaacacttttttttccttttcctggaaggtttgtcatttctctaaagtttgtacacagtatttatgtacataatattgtcactgtcttagtgtcttgttcatgttgtagggtaattttgatttattctttttaagaaggagtagagttgcaactggaaaacacagacaccagaaatgaaagtgttgggtgttgataggaatctgtacaatatgttgatggtggctgtagttgtttaaatggagacttccaatcaccagctcctgccaaattatgcattagtaactttttcctcagagacacccctaaaggctcccattaggtcacagcgtgactgaaagctgatttctctgtgagactgaaatcccagaacattgtttgccagtatctcaaccacagccaggaagtatatgtgagttgcccagagtggaagctcctagtagaggctgaaggccacaggggaggcctcagccaggggcaagtgcccacagtgactccatttaggatgctgtcgttttgctactgttgtggagatccttaacgcagcagcgcctgtcataaacaagcctcttgtagcttcttacagaaaacagatttagtctagcatgaaacacctctgcatctcattgaaactgaagaggcttgcagatttgctttcgttgatgtccacgttactgaggattgactgagtatagactggagacaggtttttggcttatcacagcactgaggaaaatacaaatgcacagactgtcagcatgatgtcagaggccagagtttggtgggggcagatggcagggcgacccaaaagatgcagaaaaggtagactggggccactgggtcttaagaggagctgtgaagttgtgtggaagccaaggctgggtctgacatccctgccaggaagcaggttggacagaaaccacttgctaaaagcgtctctatggtgcagtgattatgtgtaccctgtgctgttgctcagtagtctccttgaatgttcaagtatctcatccactcagttttgtgattcctggatatttgtgtgttgtaaagtgttttgttaggtggtatgaaccaatgtgaggaggcttgagacagggttatggatttccagagctcttccatgtagaataccctgccttcttgaagcagttccaccaccaatatgatggggaagggcaggaacttatggcagggtggggagagggtttgcctggaagttaagagagtggcatccacttgtggtaaccccttacgatgatgacatcccacacactaagaggtacaagcaggaccaaagttttggactgttccctcttctcccctccactgtgtttaatgttcactcactgcattaaataacaacaaagatgggacaaaacccactaatactgtggggaaaaaaaattttcaagagcagaggaaagtctttctgcctttttataattactttttttatcatttaatttacctgcctaaataaacatcttctacagaatatctgtcattcaaccatgccaaggagtttgtgccagccttttcagactcccagaattgggtgttcctgggttatttacatagctgagcagtgtccaggggaggtgcgcagtgaactgtcaaggactttccagactgtcttctcttcagacttttataatctccagtggcatctttcccttttcttttgttcatgacctgacctgaagcagcagatttgatagactggcaaagatgaataggaaaaactttgactcttgcccagtgcctgcctgcctctctctctctcctctctctctctctctttttaaaccaccatagactctcacttattttggaggagtgtatgtgcatgtgtacacatatgtacatatataaaaacagttgatgttttggtgtatggggtaaaagccccaggagcatacagaacttgagctgaacctggtcagtagaaagggaaaccccaaccctttcttgatttttggagacacccaggactaatggatactgtagtagacatgtagtactatagtaccgtaatattcatctctcctcattttagttgcctttcagattctaaatgtttgggatcattcctatcatcttagtctcttcaggatctttagtattttcctggttctgaggaggcttgagacagggttatggatttccttgttctgtgtctttatccctactgatagttcctctttctcattttgcaaactacccagagctccaaggacagcctgaagatctcagtgcctcaggctctgaggtactctgctcacaggccccagacagatgctgttgggtaaactcaaagcttcctatgagaagcttctgagatgtagcaggtcacagaagtgttcacctgtttcatctgaggatttcagttctgaagtgatctaggcatgtttggtaaaaatgtttttgtgagagttctttttttaagaaagcattatgcaaaaagtcacttttaagggcatttaaaaatttttaagtaaagccattctttggcttttttggactatttgtggatactttgtttacattttgaatattaaaatgtgcatcatcttgtcggccatgcagtcctgcaggcatcagtgccctggctgtcctgtgagtcctcatgcagagcagggccatcatggtcagcccttgtgagtaagtgggtatacgctgaagctgacttccgtctgtgtcctgccctcccatccagcactctctatggaaatagttgtcatttcctcagtgatggtgtgtcttatagtgatggttgtaatggtgaatggctagtgtcattttgttt

SEQ ID NO: 3435 - protein, 1423 aa, Homo sapiens
MALVTVQRSPTPSTTSSPCASEADSGEEECRSQPRSISESFLTVKGAALFLPRGNGSSTPRISHRRNKHAGDLQQHLQAMFILLRPEDNIRLAVRLESTYQNRTRYMVVVSTNGRQDTEESIVLGMDFSSNDSSTCTMGLVLPLWSDTLIHLDGDGGFSVSTDNRVHIFKPVSVQAMWSALQSLHKACEVARAHNYYPGSLFLTWVSYYESHINSDQSSVNEWNAMQDVQSHRPDSPALFTDIPTERERTERLIKTKLREIMMQKDLENITSKEIRTELEMQMVCNLREFKEFIDNEMIVILGQMDSPTQIFEHVFLGSEWNASNLEDLQNRGVRYILNVTREIDNFFPGVFEYHNIRVYDEEATDLLAYWNDTYKFISKAKKHGSKCLVHCKMGVSRSASTVIAYAMKEYGWNLDRAYDYVKERRTVTKPNPSFMRQLEEYQGILLASKQRHNKLWRSHSDSDLSDHHEPICKPGLELNKKDITTSADQIAEVKTMESHPPIPPVFVEHMVPQDANQKGLCTKERMICLEFTSREFHAGQIEDELNLNDINGCSSGCCLNESKFPLDNCHASKALIQPGHVPEMANKFPDLTVEDLETDALKADMNVHLLPMEELTSPLKDPPMSPDPESPSPQPSCQTEISDFSTDRIDFFSALEKFVELSQETRSRSFSHSRMEELGGGRNESCRLSVVEVAPSKVTADDQRSSSLSNTPHASEESSMDEEQSKAISELVSPDIFMQSHSENAISVKEIVTEIESISQGVGQIQLKGDILPNPCHTPKKNSIHELLLERAQTPENKPGHMEQDEDSCTAQPELAKDSGMCNPEGCLTTHSSIADLEEGEPAEGEQELQGSGMHPGAKWYPGSVRRATLEFEERLRQEQEHHGAAPTCTSLSTRKNSKNDSSVADLAPKGKSDEAPPEHSFVLKEPEMSKGKGKYSGSEAGSLSHSEQNATVPAPRVLEFDHLPDPQEGPGSDTGTQQEGVLKDLRTVIPYQESETQAVPLPLPKRVEIIEYTHIVTSPNHTGPGSEIATSEKSGEQGLRKVNMEKSVTVLCTLDENLNRTLDPNQVSLHPQVLPLPHSSSPEHNRPTDHPTSILSSPEDRGSSLSTALETAAPFVSHTTHLLSASLDYLHPQTMVHLEGFTEQSSTTDEPSAEQVSWEESQESPLSSGSEVPYKDSQLSSADLSLISKLGDNTGELQEKMDPLPVACRLPHSSSSENIKSLSHSPGVVKERAKEIESRVVFQAGLTKPSQMRRSASLAKLGYLDLCKDCLPEREPASCESPHLKLLQPFLRTDSGMHAMEDQESLENPGAPHNPEPTKSFVEQLTTTECIVQSKPVERPLVQYAKEFGSSQQYLLPRAGLELTSSEGGLPVLQTQGLQCACPAPGLAVAPRQQHGRTHPLRRLKKANDKKRTTNPFYNTM

SEQ ID NO: 3436 - DNA, 3960 bp, Homo sapiens
aggagtgagggagcttttttaacttctggagtactttgtgatgtttattaatattttctttctttttgttattaatactggtctagtaatattcttctataccatttggtgataacttttggagtccaaatgaatgagtcagcatctcaagaggaactcagacctgctcaggaaaacagaaaagaagacaaagagaggaaatggaacttaactgaagtgaaagagcttcatgagaccttacagagtgtgccagacgttcctgtaaaagaggacaccaacagtgtggtggagaaagcaatggatgaaatcaaatcccaagaattaaacctggaggggcagcgaaaaatttcacctggttcaataaaggactctaaaactgaagcctcaggtaatattgcaattagaaaatctgcaaaagtgatttttgctttagatgaaactgaactgaaatcaaagccagagcacacatggaagaaaaacctttttgaaagaatggaggcaagagcccaagcaatgcagcagaaaataatagataaggaaaatctgaagaaggaactagaaaaaaaggctgaaaaaaaactccctagggataatttggccaaagagtggtttaatactgacagcatgacactgaataatactgcatatttgcttgacaaacttctacccaccttagttcctggagtagaaaacatgttaactcaagtagaaaagaagaaggttttgacagaagctgatactccaagcaagtttgacccaattaattatttgggggaatatttaataagaaacaatcctaattatatcaaagacccaggaatgtctggttaccagaggttgatgaaagaagtcacagaagacctgaagatatatgttcctgacactatctgcaacagagtatccaagatgaaggagaatgttaaacagaatagaaaacaaagagaaagcatagacaaaatcaaagtcaaggtggccaacacacggaaacaggctctgcaggagcaattcgatgaatggattctagaccctaaaggaatgattcctaagtcagtgattcagaatgttcttcaagaattctttcaaaatccagatttcaagcttggatcacactgcaaacaactggatattactgactcaacagaaccaagattgaacaaaatggaatttacagaatacatctcttcacatattaaagacttgaagagtgaaatgtttgaggaacttcttaagcacctttgccactctgcagatgaatttcgggaggtcataaaagctgacatgcggaggcagatgttcgctgaactcttcctacattgtgaccacgggaaggtagggtttttggatcggcagaggacattggccctgctggaattgttctatgaccatagttcacaaatgcttaggagtttacttcgaaacccacgacaatggccattcattgaatttgaagagataaacttgactgagttgtggggagacatggataatcagaaacacatttatgaaggttttgacaaagtgctcttggagatgaatacattactttctgcaaatcatgctagcaaaacccaaagtaaattattagaaagtccagatcaacctaaacttaacgaacagagaacatcaacaccatcaccaaacccgccagaacagcagagaggagtaactgcagaacaaggaccacaaagaatttcaattgaagaacaacaacaaggcaaaaagccaactgcagagcaagaactgtacatagaatcagtaatagaaccaggaacacacacagagtcaactctagaacaagggtcaagtagaaggttactgacagaacaagaaacacacagagagtcaactacagaacaaggacagcacaaagggtcaatagaaggacaaggaccacgcagagtgtcagtttcagaacaaggatcaagcagagagtcagttgcagaacaagggtcacgcagagagtctattgcagaacaagatcgacacaaagggtcagtagcagaacaaggatcacgcagaatgtcagctgcagaacagggatcactcagagagtcagtaatagaagaaccataccaaaaatcagaacaaggaccttatggagagataatttcagaagagcaagaagacataggctcaacttcacaatcaagaaaagatagtatcttaaaaagtacaaaatatggggaacctataacctctgagtacattgaagtccctctacaggaaaagaggtcttgggaacaaacatatgaagaggaaatattcctgagttctgaactgcaagaggaagttccaacgttaagcagaaaagatcactttccagaaactacaaaaaaggaagttcagaaagacaagccctgtgaacccaagtcccaaaaaatagaaggaaagtcatggtcaggtgaattttttacttgtaactggaaaatgaagtatgtcacatttgaagatgaggaacaggcaaacttaatctatggtaactccaggttcacagatttacactcaattatcagaaatattcagtcttgcaaggaggtaaaaggcagaactgccttcaatggagtttcattcaatctgctccagtttgtgcaactcctggagacatttgttggtgaagacgctcccttgagtgtcagcgagactctcacctccttttttaaggagggctatgttgaaacagaacaagagaaaatgaatgccttagaacagtttagccaaaatgctttccaagtccgacagaggcttctcctagaagccatctttcagaagtgggacagtgatggctcaggcttcctggatctgaaggaagttgatgaactcttgtacacatacaaggagggaatggaaaaagaatctatgaagaaaggtctcactctgtcgccaggctggagtgcagtggcgcaactgtagctcactgcagcctccaactcccggactcaagcgatcatcccatcacagactcctgagcaactgggactacagggaaagaaggaagttttttcctcttgagaccaaatttccataaaatgagatgcaaaaattttaagtgtatatttgctgagttttgacaaatacatgccctatgcatcccatactcctatcaagatacagaacaaagagcactgtgacactcacctgtaatcccagctactcaagaggcagaggcaggaagattgcttgagcccaggagttcaagatcagcctgggtaacattgcaaaaaccatctcttaaaaaaaataaataaaagatatagaacaaaaaaagtccccacacctctttcccattcagtcgtccaccctccaatccccaaagcaaccacctttctattttctaccataaattagttttatctcttctggaatttcataaaaatgaaattatacagtatgcatctttttttacagagtttaaactctatgtactctttttgtaaggcttctttcactcagcataatttttacttttttaaaaattttttgggggagacagagtctcactctgttgcccaagctggagtgtagtggcatgtgatcataactcactgcagccttgaactcttgggctcaagcaatcctcccgcctcagcatcccgagtagctgggagactacaggtgcacaccaccatgcctggctagtttataaactttttgtagagacaaggtctcaccatgttgcccaggctggccactaactcctggcctcaagtgatcctccctccttagcctcccaaagctctgaattatattcataagccactgggcctggttgactcagcataatttttcttgagagtcttaatatgttgctacatgtatcagcaatttgcttctttttattgctgagtagtattccattgtatgaatacaccatggtttgtttatccgttttcctatgtatggacacctgggctgtttccagttcttagctattataaataaagctactctgcacaatcttaa

SEQ ID NO: 3437 - protein, 926 aa, Homo sapiens
MNESASQEELRPAQENRKEDKERKWNLTEVKELHETLQSVPDVPVKEDTNSVVEKAMDEIKSQELNLEGQRKISPGSIKDSKTEASGNIAIRKSAKVIFALDETELKSKPEHTWKKNLFERMEARAQAMQQKIIDKENLKKELEKKAEKKLPRDNLAKEWFNTDSMTLNNTAYLLDKLLPTLVPGVENMLTQVEKKKVLTEADTPSKFDPINYLGEYLIRNNPNYIKDPGMSGYQRLMKEVTEDLKIYVPDTICNRVSKMKENVKQNRKQRESIDKIKVKVANTRKQALQEQFDEWILDPKGMIPKSVIQNVLQEFFQNPDFKLGSHCKQLDITDSTEPRLNKMEFTEYISSHIKDLKSEMFEELLKHLCHSADEFREVIKADMRRQMFAELFLHCDHGKVGFLDRQRTLALLELFYDHSSQMLRSLLRNPRQWPFIEFEEINLTELWGDMDNQKHIYEGFDKVLLEMNTLLSANHASKTQSKLLESPDQPKLNEQRTSTPSPNPPEQQRGVTAEQGPQRISIEEQQQGKKPTAEQELYIESVIEPGTHTESTLEQGSSRRLLTEQETHRESTTEQGQHKGSIEGQGPRRVSVSEQGSSRESVAEQGSRRESIAEQDRHKGSVAEQGSRRMSAAEQGSLRESVIEEPYQKSEQGPYGEIISEEQEDIGSTSQSRKDSILKSTKYGEPITSEYIEVPLQEKRSWEQTYEEEIFLSSELQEEVPTLSRKDHFPETTKKEVQKDKPCEPKSQKIEGKSWSGEFFTCNWKMKYVTFEDEEQANLIYGNSRFTDLHSIIRNIQSCKEVKGRTAFNGVSFNLLQFVQLLETFVGEDAPLSVSETLTSFFKEGYVETEQEKMNALEQFSQNAFQVRQRLLLEAIFQKWDSDGSGFLDLKEVDELLYTYKEGMEKESMKKGLTLSPGWSAVAQL

SEQ ID NO: 3438 - DNA, 5084 bp, Homo sapiens
aggagtgagggagcttttttaacttctggagtactttgtgatgtttattaatattttctttctttttgttattaatactggtctagtaatattcttctataccatttggtgataacttttggagtccaaatgaatgagtcagcatctcaagaggaactcagacctgctcaggaaaacagaaaagaagacaaagagaggaaatggaacttaactgaagtgaaagagcttcatgagaccttacagagtgtgccagacgttcctgtaaaagaggacaccaacagtgtggtggagaaagcaatggatgaaatcaaatcccaagaattaaacctggaggggcagcgaaaaatttcacctggttcaataaaggactctaaaactgaagcctcaggtaatattgcaattagaaaatctgcaaaagtgatttttgctttagatgaaactgaactgaaatcaaagccagagcacacatggaagaaaaacctttttgaaagaatggaggcaagagcccaagcaatgcagcagaaaataatagataaggaaaatctgaagaaggaactagaaaaaaaggctgaaaaaaaactccctagggataatttggccaaagagtggtttaatactgacagcatgacactgaataatactgcatatttgcttgacaaacttctacccaccttagttcctggagtagaaaacatgttaactcaagtagaaaagaagaaggttttgacagaagctgatactccaagcaagtttgacccaattaattatttgggggaatatttaataagaaacaatcctaattatatcaaagacccaggaatgtctggttaccagaggttgatgaaagaagtcacagaagacctgaagatatatgttcctgacactatctgcaacagagtatccaagatgaaggagaatgttaaacagaatagaaaacaaagagaaagcatagacaaaatcaaagtcaaggtggccaacacacggaaacaggctctgcaggagcaattcgatgaatggattctagaccctaaaggaatgattcctaagtcagtgattcagaatgttcttcaagaattctttcaaaatccagatttcaagcttggatcacactgcaaacaactggatattactgactcaacagaaccaagattgaacaaaatggaatttacagaatacatctcttcacatattaaagacttgaagagtgaaatgtttgaggaacttcttaagcacctttgccactctgcagatgaatttcgggaggtcataaaagctgacatgcggaggcagatgttcgctgaactcttcctacattgtgaccacgggaaggtagggtttttggatcggcagaggacattggccctgctggaattgttctatgaccatagttcacaaatgcttaggagtttacttcgaaacccacgacaatggccattcattgaatttgaagagataaacttgactgagttgtggggagacatggataatcagaaacacatttatgaaggttttgacaaagtgctcttggagatgaatacattactttctgcaaatcatgctagcaaaacccaaagtaaattattagaaagtccagatcaacctaaacttaacgaacagagaacatcaacaccatcaccaaacccgccagaacagcagagaggagtaactgcagaacaaggaccacaaagaatttcaattgaagaacaacaacaaggcaaaaagccaactgcagagcaagaactgtacatagaatcagtaatagaaccaggaacacacacagagtcaactctagaacaagggtcaagtagaaggttactgacagaacaagaaacacacagagagtcaactacagaacaaggacagcacaaagggtcaatagaaggacaaggaccacgcagagtgtcagtttcagaacaaggatcaagcagagagtcagttgcagaacaagggtcacgcagagagtctattgcagaacaagatcgacacaaagggtcagtagcagaacaaggatcacgcagaatgtcagctgcagaacagggatcactcagagagtcagtaatagaagaaccataccaaaaatcagaacaaggaccttatggagagataatttcagaagagcaagaagacataggctcaacttcacaatcaagaaaagatagtatcttaaaaagtacaaaatatggggaacctataacctctgagtacattgaagtccctctacaggaaaagaggtcttgggaacaaacatatgaagaggaaatattcctgagttctgaactgcaagaggaagttccaaccttaagcagaaaagatcactttccagaaactacaaaaaaggaagttcagaaagacaagccctgtgaacccaagtcccaaaaaatagaaggaaagtcatggtcaggtgaattttttacttgtaactggaaaatgaagtatgtcacatttgaagatgaggaacaggcaaacttaatctatggtaactccaggttcacagatttacactcaattatcagaaatattcagtcttgcaaggaggtaaaaggcagaactgccttcaatggagtttcattcaatctgctccagtttgtgcaactcctggagacatttgttggtgaagacgctcccttgagtgtcagcgagactctcacctccttttttaaggagggctatgttgaaacagaacaagagaaaatgaatgccttagaacagtttagccaaaatgctttccaagtccgacagaggcttctcctagaagccatctttcagaagtgggacagtgatggctcaggcttcctggatctgaaggaagttgatgaactcttgtacacatacaaggagggaatggaaaaagaatctatgaagaaagctaaactacacatccaatttccaaagccacaccctggtcacgaagtgagattgtcttcaaaacaatttcagaattacatagaattggttgtgtctgaactcaggggcaatgaagaccaagttctggaaagtgttgtggaatttctgatgaatgctttagagaggagccacattgagagtctgaggaattctgccaggcggaaatggctgcaccaaatccaatgtgctgcagagacaagtggggtgtccctagagccggtgtatagtgagacctttaaggccctcatgcaggatgctgaagcccatggaaataaaaagatcagtgctcacatttccctcttagaagaaaacctactactgcctgagaaagggaatgttctattgaggaatgtggcttgtaccttagatgatgctcaatttgtactgaacagagtgctctacagggacatgaaaggaatcagctttacagtagtggatgaagggaagccaatccatgttccccaagttcagtaccatgggaacatcttcttctggaaccagtcccgtaataagcatgattataatggttcattcctggctctgcctcttcaagatgcatatatgaggatctttggggtcttggctgttgatacccttagagatccccacgaaataaacatctttctacctcatgagatcagattctatcagggtgttgctaatgtctttagcactgcctatcactacgtccacagccgggagcacattctgcatattgtgatcactggcataggctggctttatgacgtcacatccagcatcacctccatcactacgtactttgtagagcctagcccagcccaggattcagactatgttttacgcaacatgatggttacagggcagctgggtctaacagaaatccacaaaaatcctcctaccatccacaggaagtcatgcatcttcagagatttcctctttaaatgtactgacagttcagaagttgttctggcttctgcctgtggagaaacgcatatagtagttccacttcgtgagagaacaggagaggctctgggagtcctcgattttaacatcggccaaaataggatgttgttgtgtcaagaatataaagatctacagaaaatgatgaaagtggtccaagtggcctgctatgaaatacttggcgagttctctggagagataaagaaaaaatatatcttagagattgaaaatgtcagggaagtccagcgggcaggaattctcttcttccgaatcatgctgctcgagctacaggaaagcatccaactactcaattccatggaatttgtgtcactgttgctctatgaccatactcttgtaacagagccaaattctcctcaagacagcaaatctatggagttggaagccaacgtgaaactagtgcgtgacatcctgaaggcggttatcttgttctttcatccagagttggaattttcaagtgactttggaagttgggataagtgtaaattttatgttaacaaatatttagtcaacaatatttgtgcctttgatccaactgccaagcatgtggaagttaatgtacagcttattgatgaatatatcagagatcattcccgaactgaagtatggaaatttggtaatgttgtcattgaacatctataccactggatacacatctgttcagctctcatgaagataaccaaacaactaaatagtggtattacacctccgttgccctccaagactgacaattatatgtatgcaaaaatgccaggggaaggtttgcaagagaagtgataatggatgataatggaattgatactgtatttaggatcctttgtttgttatcagttttgtttgttaactataaaatattttccattggaaaggggtacctataaatgtcttctgctgctaatatttatctcagcactttctaaacccaaaagtgctacctaagaagaaatttagccaaaaaatacccagctaaggtagccatagccaagtgtatttaagtatgttatagaatatatttgaaagcttcctttcagtttgagctttgtatctgctgtggaactgttatggttgattgggtagttatttttcattcttataaggttcaaagtaacagctgaggatttagaaaacaagaataccaaatagaatacgaaataataaagataaaccaaaagaataccaaataataaagatttttaagaaatggaaaaaaaaaaaaaaaa

SEQ ID NO: 3439 - protein, 1503 aa, Homo sapiens
MNESASQEELRPAQENRKEDKERKWNLTEVKELHETLQSVPDVPVKEDTNSVVEKAMDEIKSQELNLEGQRKISPGSIKDSKTEASGNIAIRKSAKVIFALDETELKSKPEHTWKKNLFERMEARAQAMQQKIIDKENLKKELEKKAEKKLPRDNLAKEWFNTDSMTLNNTAYLLDKLLPTLVPGVENMLTQVEKKKVLTEADTPSKFDPINYLGEYLIRNNPNYIKDPGMSGYQRLMKEVTEDLKIYVPDTICNRVSKMKENVKQNRKQRESIDKIKVKVANTRKQALQEQFDEWILDPKGMIPKSVIQNVLQEFFQNPDFKLGSHCKQLDITDSTEPRLNKMEFTEYISSHIKDLKSEMFEELLKHLCHSADEFREVIKADMRRQMFAELFLHCDHGKVGFLDRQRTLALLELFYDHSSQMLRSLLRNPRQWPFIEFEEINLTELWGDMDNQKHIYEGFDKVLLEMNTLLSANHASKTQSKLLESPDQPKLNEQRTSTPSPNPPEQQRGVTAEQGPQRISIEEQQQGKKPTAEQELYIESVIEPGTHTESTLEQGSSRRLLTEQETHRESTTEQGQHKGSIEGQGPRRVSVSEQGSSRESVAEQGSRRESIAEQDRHKGSVAEQGSRRMSAAEQGSLRESVIEEPYQKSEQGPYGEIISEEQEDIGSTSQSRKDSILKSTKYGEPITSEYIEVPLQEKRSWEQTYEEEIFLSSELQEEVPTLSRKDHFPETTKKEVQKDKPCEPKSQKIEGKSWSGEFFTCNWKMKYVTFEDEEQANLIYGNSRFTDLHSIIRNIQSCKEVKGRTAFNGVSFNLLQFVQLLETFVGEDAPLSVSETLTSFFKEGYVETEQEKMNALEQFSQNAFQVRQRLLLEAIFQKWDSDGSGFLDLKEVDELLYTYKEGMEKESMKKAKLHIQFPKPHPGHEVRLSSKQFQNYIELVVSELRGNEDQVLESVVEFLMNALERSHIESLRNSARRKWLHQIQCAAETSGVSLEPVYSETFKALMQDAEAHGNKKISAHISLLEENLLLPEKGNVLLRNVACTLDDAQFVLNRVLYRDMKGISFTVVDEGKPIHVPQVQYHGNIFFWNQSRNKHDYNGSFLALPLQDAYMRIFGVLAVDTLRDPHEINIFLPHEIRFYQGVANVFSTAYHYVHSREHILHIVITGIGWLYDVTSSITSITTYFVEPSPAQDSDYVLRNMMVTGQLGLTEIHKNPPTIHRKSCIFRDFLFKCTDSSEVVLASACGETHIVVPLRERTGEALGVLDFNIGQNRMLLCQEYKDLQKMMKVVQVACYEILGEFSGEIKKKYILEIENVREVQRAGILFFRIMLLELQESIQLLNSMEFVSLLLYDHTLVTEPNSPQDSKSMELEANVKLVRDILKAVILFFHPELEFSSDFGSWDKCKFYVNKYLVNNICAFDPTAKHVEVNVQLIDEYIRDHSRTEVWKFGNVVIEHLYHWIHICSALMKITKQLNSGITPPLPSKTDNYMYAKMPGEGLQEK

SEQ ID NO: 3440 - DNA, 4450 bp, Homo sapiens
agccgatgggggcggggaaaagtccggctgggccgggacaaaagccggatcccgggaagctaccggctgctggggtgctccggattttgcggggttcgtcgggcctgtggaagaagcgccgcgcacggacttcggcagaggtagagcaggtctctctgcagccatgtcggccaaggcaatttcagagcagacgggcaaagaactcctttacaagttcatctgtaccacctcagccatccagaatcggttcaagtatgctcgggtcactcctgacacagactgggcccgcttgctgcaggaccacccctggctgctcagccagaacttggtagtcaagccagaccagctgatcaaacgtcgtggaaaacttggtctcgttggggtcaacctcactctggatggggtcaagtcctggctgaagccacggctgggacaggaagccacagttggcaaggccacaggcttcctcaagaactttctgatcgagcccttcgtcccccacagtcaggctgaggagttctatgtctgcatctatgccacccgagaaggggactacgtcctgttccaccacgaggggggtgtggacgtgggtgatgtggacgccaaggcccagaagctgcttgttggcgtggatgagaaactgaatcctgaggacatcaaaaaacacctgttggtccacgcccctgaagacaagaaagaaattctggccagttttatctccggcctcttcaatttctacgaggacttgtacttcacctacctcgagatcaatccccttgtagtgaccaaagatggagtctatgtccttgacttggcggccaaggtggacgccactgccgactacatctgcaaagtgaagtggggtgacatcgagttccctccccccttcgggcgggaggcatatccagaggaagcctacattgcagacctcgatgccaaaagtggggcaagcctgaagctgaccttgctgaaccccaaagggaggatctggaccatggtggccgggggtggcgcctctgtcgtgtacagcgataccatctgtgatctagggggtgtcaacgagctggcaaactatggggagtactcaggcgcccccagcgagcagcagacctatgactatgccaagactatcctctccctcatgacccgagagaagcacccagatggcaagatcctcatcattggaggcagcatcgcaaacttcaccaacgtggctgccacgttcaagggcatcgtgagagcaattcgagattaccagggccccctgaaggagcacgaagtcacaatctttgtccgaagaggtggccccaactatcaggagggcttacgggtgatgggagaagtcgggaagaccactgggatccccatccatgtctttggcacagagactcacatgacggccattgtgggcatggccctgggccaccggcccatccccaaccagccacccacagcggcccacactgcaaacttcctcctcaacgccagcgggagcacatcgacgccagcccccagcaggacagcatctttttctgagtccagggccgatgaggtggcgcctgcaaagaaggccaagcctgccatgccacaagattcagtcccaagtccaagatccctgcaaggaaagagcaccaccctcttcagccgccacaccaaggccattgtgtggggcatgcagacccgggccgtgcaaggcatgctggactttgactatgtctgctcccgagacgagccctcagtggctgccatggtctaccctttcactggggaccacaagcagaagttttactgggggcacaaagagatcctgatccctgtcttcaagaacatggctgatgccatgaggaagcatccggaggtagatgtgctcatcaactttgcctctctccgctctgcctatgacagcaccatggagaccatgaactatgcccagatccggaccatcgccatcatagctgaaggcatccctgaggccctcacgagaaagctgatcaagaaggcggaccagaagggagtgaccatcatcggacctgccactgttggaggcatcaagcctgggtgctttaagattggcaacacaggtgggatgctggacaacatcctggcctccaaactgtaccgcccaggcagcgtggcctatgtctcacgttccggaggcatgtccaacgagctcaacaatatcatctctcggaccacggatggcgtctatgagggcgtggccattggtggggacaggtacccgggctccacattcatggatcatgtgttacgctatcaggacactccaggagtcaaaatgattgtggttcttggagagattgggggcactgaggaatataagatttgccggggcatcaaggagggccgcctcactaagcccatcgtctgctggtgcatcgggacgtgtgccaccatgttctcctctgaggtccagtttggccatgctggagcttgtgccaaccaggcttctgaaactgcagtagccaagaaccaggctttgaaggaagcaggagtgtttgtgccccggagctttgatgagcttggagagatcatccagtctgtatacgaagatctcgtggccaatggagtcattgtacctgcccaggaggtgccgcccccaaccgtgcccatggactactcctgggccagggagcttggtttgatccgcaaacctgcctcgttcatgaccagcatctgcgatgagcgaggacaggagctcatctacgcgggcatgcccatcactgaggtcttcaaggaagagatgggcattggcggggtcctcggcctcctctggttccagaaaaggttgcctaagtactcttgccagttcattgagatgtgtctgatggtgacagctgatcacgggccagccgtctctggagcccacaacaccatcatttgtgcgcgagctgggaaagacctggtctccagcctcacctcggggctgctcaccatcggggatcggtttgggggtgccttggatgcagcagccaagatgttcagtaaagcctttgacagtggcattatccccatggagtttgtgaacaagatgaagaaggaagggaagctgatcatgggcattggtcaccgagtgaagtcgataaacaacccagacatgcgagtgcagatcctcaaagattacgtcaggcagcacttccctgccactcctctgctcgattatgcactggaagtagagaagattaccacctcgaagaagccaaatcttatcctgaatgtagatggtctcatcggagtcgcatttgtagacatgcttagaaactgtgggtcctttactcgggaggaagctgatgaatatattgacattggagccctcaatggcatctttgtgctgggaaggagtatggggttcattggacactatcttgatcagaagaggctgaagcaggggctgtatcgtcatccgtgggatgatatttcatatgttcttccggaacacatgagcatgtaacagagccaggaaccctactgcagtaaactgaagacaagatctcttcccccaagaaaaagtgtacagacagctggcagtggagcctgctttatttagcaggggcctggaatgtaaacagccactggggtacaggcaccgaagaccaacatccacaggctaacaccccttcagtccacacaaagaagcttcatattttttttataagcatagaaataaaaaccaagccaatatttgtgactttgctctgctacctgctgtatttattatatggaagcatctaagtactgtcaggatggggtcttcctcattgtagggcgttaggatgttgctttctttttccattagttaaacatttttttctcctttggaggaagggaatgaaacatttatggcctcaagatactatacatttaaagcaccccaatgtctctctttttttttttttacttccctttcttcttccttatataacatgaagaacattgtattaatctgatttttaaagatctttttgtatgttacgtgttaagggcttgtttggtatcccactgaaatgttctgtgttgcagaccagagtctgtttatgtcagggggatggggccattgcatccttagccattgtcacaaaatatgtggagtagtaacttaatatgtaaagttgtaacatacatacatttaaaatggaaatgcagaaagctgtgaaatgtcttgtgtcttatgttctctgtatttatgcagctgatttgtctgtctgtaactgaagtgtgggtccaaggactcctaactactttgcatctgtaatccacaaagattctgggcagctgccacctcagtctcttctctgtattatcatagtctggtttaaataaactatatagtaacaaaaaaaaaaaaaaaaaaaaaaaaaaaaaaaaaaaaaaaaaaaaaaaaaaaaaaaaaaaaaaaaaaaaaaaaaaaaaaaaaaaaaaaaaaaaaaaaaaa

SEQ ID NO: 3441 - protein, 1101 aa, Homo sapiens
MSAKAISEQTGKELLYKFICTTSAIQNRFKYARVTPDTDWARLLQDHPWLLSQNLVVKPDQLIKRRGKLGLVGVNLTLDGVKSWLKPRLGQEATVGKATGFLKNFLIEPFVPHSQAEEFYVCIYATREGDYVLFHHEGGVDVGDVDAKAQKLLVGVDEKLNPEDIKKHLLVHAPEDKKEILASFISGLFNFYEDLYFTYLEINPLVVTKDGVYVLDLAAKVDATADYICKVKWGDIEFPPPFGREAYPEEAYIADLDAKSGASLKLTLLNPKGRIWTMVAGGGASVVYSDTICDLGGVNELANYGEYSGAPSEQQTYDYAKTILSLMTREKHPDGKILIIGGSIANFTNVAATFKGIVRAIRDYQGPLKEHEVTIFVRRGGPNYQEGLRVMGEVGKTTGIPIHVFGTETHMTAIVGMALGHRPIPNQPPTAAHTANFLLNASGSTSTPAPSRTASFSESRADEVAPAKKAKPAMPQDSVPSPRSLQGKSTTLFSRHTKAIVWGMQTRAVQGMLDFDYVCSRDEPSVAAMVYPFTGDHKQKFYWGHKEILIPVFKNMADAMRKHPEVDVLINFASLRSAYDSTMETMNYAQIRTIAIIAEGIPEALTRKLIKKADQKGVTIIGPATVGGIKPGCFKIGNTGGMLDNILASKLYRPGSVAYVSRSGGMSNELNNIISRTTDGVYEGVAIGGDRYPGSTFMDHVLRYQDTPGVKMIVVLGEIGGTEEYKICRGIKEGRLTKPIVCWCIGTCATMFSSEVQFGHAGACANQASETAVAKNQALKEAGVFVPRSFDELGEIIQSVYEDLVANGVIVPAQEVPPPTVPMDYSWARELGLIRKPASFMTSICDERGQELIYAGMPITEVFKEEMGIGGVLGLLWFQKRLPKYSCQFIEMCLMVTADHGPAVSGAHNTIICARAGKDLVSSLTSGLLTIGDRFGGALDAAAKMFSKAFDSGIIPMEFVNKMKKEGKLIMGIGHRVKSINNPDMRVQILKDYVRQHFPATPLLDYALEVEKITTSKKPNLILNVDGLIGVAFVDMLRNCGSFTREEADEYIDIGALNGIFVLGRSMGFIGHYLDQKRLKQGLYRHPWDDISYVLPEHMSM

SEQ ID NO: 3442 - DNA, 4420 bp, Homo sapiens
agccgatgggggcggggaaaagtccggctgggccgggacaaaagccggatcccgggaagctaccggctgctggggtgctccggattttgcggggttcgtcgggcctgtggaagaagcgccgcgcacggacttcggcagaggtagagcaggtctctctgcagccatgtcggccaaggcaatttcagagcagacgggcaaagaactcctttacaagttcatctgtaccacctcagccatccagaatcggttcaagtatgctcgggtcactcctgacacagactgggcccgcttgctgcaggaccacccctggctgctcagccagaacttggtagtcaagccagaccagctgatcaaacgtcgtggaaaacttggtctcgttggggtcaacctcactctggatggggtcaagtcctggctgaagccacggctgggacaggaagccacagttggcaaggccacaggcttcctcaagaactttctgatcgagcccttcgtcccccacagtcaggctgaggagttctatgtctgcatctatgccacccgagaaggggactacgtcctgttccaccacgaggggggtgtggacgtgggtgatgtggacgccaaggcccagaagctgcttgttggcgtggatgagaaactgaatcctgaggacatcaaaaaacacctgttggtccacgcccctgaagacaagaaagaaattctggccagttttatctccggcctcttcaatttctacgaggacttgtacttcacctacctcgagatcaatccccttgtagtgaccaaagatggagtctatgtccttgacttggcggccaaggtggacgccactgccgactacatctgcaaagtgaagtggggtgacatcgagttccctccccccttcgggcgggaggcatatccagaggaagcctacattgcagacctcgatgccaaaagtggggcaagcctgaagctgaccttgctgaaccccaaagggaggatctggaccatggtggccgggggtggcgcctctgtcgtgtacagcgataccatctgtgatctagggggtgtcaacgagctggcaaactatggggagtactcaggcgcccccagcgagcagcagacctatgactatgccaagactatcctctccctcatgacccgagagaagcacccagatggcaagatcctcatcattggaggcagcatcgcaaacttcaccaacgtggctgccacgttcaagggcatcgtgagagcaattcgagattaccagggccccctgaaggagcacgaagtcacaatctttgtccgaagaggtggccccaactatcaggagggcttacgggtgatgggagaagtcgggaagaccactgggatccccatccatgtctttggcacagagactcacatgacggccattgtgggcatggccctgggccaccggcccatccccaaccagccacccacagcggcccacactgcaaacttcctcctcaacgccagcgggagcacatcgacgccagcccccagcaggacagcatctttttctgagtccagggccgatgaggtggcgcctgcaaagaaggccaagcctgccatgccacaaggaaagagcaccaccctcttcagccgccacaccaaggccattgtgtggggcatgcagacccgggccgtgcaaggcatgctggactttgactatgtctgctcccgagacgagccctcagtggctgccatggtctaccctttcactggggaccacaagcagaagttttactgggggcacaaagagatcctgatccctgtcttcaagaacatggctgatgccatgaggaagcatccggaggtagatgtgctcatcaactttgcctctctccgctctgcctatgacagcaccatggagaccatgaactatgcccagatccggaccatcgccatcatagctgaaggcatccctgaggccctcacgagaaagctgatcaagaaggcggaccagaagggagtgaccatcatcggacctgccactgttggaggcatcaagcctgggtgctttaagattggcaacacaggtgggatgctggacaacatcctggcctccaaactgtaccgcccaggcagcgtggcctatgtctcacgttccggaggcatgtccaacgagctcaacaatatcatctctcggaccacggatggcgtctatgagggcgtggccattggtggggacaggtacccgggctccacattcatggatcatgtgttacgctatcaggacactccaggagtcaaaatgattgtggttcttggagagattgggggcactgaggaatataagatttgccggggcatcaaggagggccgcctcactaagcccatcgtctgctggtgcatcgggacgtgtgccaccatgttctcctctgaggtccagtttggccatgctggagcttgtgccaaccaggcttctgaaactgcagtagccaagaaccaggctttgaaggaagcaggagtgtttgtgccccggagctttgatgagcttggagagatcatccagtctgtatacgaagatctcgtggccaatggagtcattgtacctgcccaggaggtgccgcccccaaccgtgcccatggactactcctgggccagggagcttggtttgatccgcaaacctgcctcgttcatgaccagcatctgcgatgagcgaggacaggagctcatctacgcgggcatgcccatcactgaggtcttcaaggaagagatgggcattggcggggtcctcggcctcctctggttccagaaaaggttgcctaagtactcttgccagttcattgagatgtgtctgatggtgacagctgatcacgggccagccgtctctggagcccacaacaccatcatttgtgcgcgagctgggaaagacctggtctccagcctcacctcggggctgctcaccatcggggatcggtttgggggtgccttggatgcagcagccaagatgttcagtaaagcctttgacagtggcattatccccatggagtttgtgaacaagatgaagaaggaagggaagctgatcatgggcattggtcaccgagtgaagtcgataaacaacccagacatgcgagtgcagatcctcaaagattacgtcaggcagcacttccctgccactcctctgctcgattatgcactggaagtagagaagattaccacctcgaagaagccaaatcttatcctgaatgtagatggtctcatcggagtcgcatttgtagacatgcttagaaactgtgggtcctttactcgggaggaagctgatgaatatattgacattggagccctcaatggcatctttgtgctgggaaggagtatggggttcattggacactatcttgatcagaagaggctgaagcaggggctgtatcgtcatccgtgggatgatatttcatatgttcttccggaacacatgagcatgtaacagagccaggaaccctactgcagtaaactgaagacaagatctcttcccccaagaaaaagtgtacagacagctggcagtggagcctgctttatttagcaggggcctggaatgtaaacagccactggggtacaggcaccgaagaccaacatccacaggctaacaccccttcagtccacacaaagaagcttcatattttttttataagcatagaaataaaaaccaagccaatatttgtgactttgctctgctacctgctgtatttattatatggaagcatctaagtactgtcaggatggggtcttcctcattgtagggcgttaggatgttgctttctttttccattagttaaacatttttttctcctttggaggaagggaatgaaacatttatggcctcaagatactatacatttaaagcaccccaatgtctctctttttttttttttacttccctttcttcttccttatataacatgaagaacattgtattaatctgatttttaaagatctttttgtatgttacgtgttaagggcttgtttggtatcccactgaaatgttctgtgttgcagaccagagtctgtttatgtcagggggatggggccattgcatccttagccattgtcacaaaatatgtggagtagtaacttaatatgtaaagttgtaacatacatacatttaaaatggaaatgcagaaagctgtgaaatgtcttgtgtcttatgttctctgtatttatgcagctgatttgtctgtctgtaactgaagtgtgggtccaaggactcctaactactttgcatctgtaatccacaaagattctgggcagctgccacctcagtctcttctctgtattatcatagtctggtttaaataaactatatagtaacaaaaaaaaaaaaaaaaaaaaaaaaaaaaaaaaaaaaaaaaaaaaaaaaaaaaaaaaaaaaaaaaaaaaaaaaaaaaaaaaaaaaaaaaaaaaaaaaaaa

SEQ ID NO: 3443 - protein, 1091 aa, Homo sapiens
MSAKAISEQTGKELLYKFICTTSAIQNRFKYARVTPDTDWARLLQDHPWLLSQNLVVKPDQLIKRRGKLGLVGVNLTLDGVKSWLKPRLGQEATVGKATGFLKNFLIEPFVPHSQAEEFYVCIYATREGDYVLFHHEGGVDVGDVDAKAQKLLVGVDEKLNPEDIKKHLLVHAPEDKKEILASFISGLFNFYEDLYFTYLEINPLVVTKDGVYVLDLAAKVDATADYICKVKWGDIEFPPPFGREAYPEEAYIADLDAKSGASLKLTLLNPKGRIWTMVAGGGASVVYSDTICDLGGVNELANYGEYSGAPSEQQTYDYAKTILSLMTREKHPDGKILIIGGSIANFTNVAATFKGIVRAIRDYQGPLKEHEVTIFVRRGGPNYQEGLRVMGEVGKTTGIPIHVFGTETHMTAIVGMALGHRPIPNQPPTAAHTANFLLNASGSTSTPAPSRTASFSESRADEVAPAKKAKPAMPQGKSTTLFSRHTKAIVWGMQTRAVQGMLDFDYVCSRDEPSVAAMVYPFTGDHKQKFYWGHKEILIPVFKNMADAMRKHPEVDVLINFASLRSAYDSTMETMNYAQIRTIAIIAEGIPEALTRKLIKKADQKGVTIIGPATVGGIKPGCFKIGNTGGMLDNILASKLYRPGSVAYVSRSGGMSNELNNIISRTTDGVYEGVAIGGDRYPGSTFMDHVLRYQDTPGVKMIVVLGEIGGTEEYKICRGIKEGRLTKPIVCWCIGTCATMFSSEVQFGHAGACANQASETAVAKNQALKEAGVFVPRSFDELGEIIQSVYEDLVANGVIVPAQEVPPPTVPMDYSWARELGLIRKPASFMTSICDERGQELIYAGMPITEVFKEEMGIGGVLGLLWFQKRLPKYSCQFIEMCLMVTADHGPAVSGAHNTIICARAGKDLVSSLTSGLLTIGDRFGGALDAAAKMFSKAFDSGIIPMEFVNKMKKEGKLIMGIGHRVKSINNPDMRVQILKDYVRQHFPATPLLDYALEVEKITTSKKPNLILNVDGLIGVAFVDMLRNCGSFTREEADEYIDIGALNGIFVLGRSMGFIGHYLDQKRLKQGLYRHPWDDISYVLPEHMSM

SEQ ID NO: 3444 - DNA, 2277 bp, Homo sapiens
aaaccagatagaggttctccagcttttctttgattgtctctgctttagcgtctctaaatccggtcaccatgtcggaccccgaaggcgagaccttgcgaagcacctttccctcttatatggccgaaggcgagcggctctacctgtgcggggaattttctaaagccgcgcagagcttcagcaacgctctttaccttcaggatggagacaagaactgcctggttgctcgctcaaagtgcttcctgaagatgggagacttggagagatccctgaaggatgctgaggcttcgctccagagtgacccagctttctgtaaggggattttgcaaaaggctgagacactgtacaccatgggagactttgagtttgccttggtattctatcatcgaggctacaagctgaggcctgatcgggaattcagagttggcattcagaaagcccaggaagccatcaacaactcagtgggaagtccttcttccattaagctggagaacaaaggggacctctccttcttaagcaagcaggctgagaatataaaagcccagcagaagcctcagcccatgaaacacctcttacaccccaccaagggagagcccaagtggaaggcctcgctcaagagtgagaagactgtccgccagcttctgggggagctctacgtggacaaagagtatttggagaagctcctattggatgaagacctgatcaaaggcaccatgaagggcggcctgactgtggaggacctcatcatgacgggcatcaactacctggatactcacagcaacttctggaggcagcagaagccgatctacgccagggagcgggaccggaagctgatgcaagagaaatggctgcgggaccacaaacgccgtccctcacagacagcccattacatcctcaagagcctggaggacattgatatgttgctcacaagtggcagtgctgaagggagtcttcagaaagctgagaaagtgctgaagaaggtactggaatggaacaaggaagaggtacccaacaaggatgaactggttggaaacttgtatagctgcatagggaatgcccagattgagctggggcagatggaggcagccctgcagagccacagaaaggacctggagatcgccaaggaatatgaccttcctgatgcaaaatcgagagcccttgacaacattggcagagtttttgccagagttgggaaattccagcaagccattgacacgtgggaagaaaagatccctctggcaaaaaccaccctggagaagacctggctgttccacgagatcggccgctgctacttggagctggaccaggcctggcaggcccagaattatggcgagaagtcccagcagtgtgccgaggaggaaggggacattgagtggcaactgaatgccagtgttctggtggcccaggcacaagtgaagctgagagacttcgagtcagccgtgaacaattttgagaaggccctggagagagcaaagcttgtgcataacaacgaggcgcagcaggccatcatcagtgccttggacgatgccaacaagggtatcatcagagaactgaggaaaaccaactacgtggagaatctcaaagaaaaaagcgagggagaagcttcactgtatgaagatagaataataacaagagagaaggacatgaggagagtgagagatgagcccgagaaggtggtgaagcagtgggaccatagtgaggatgagaaagagacagatgaggacgatgaggcttttggggaagctctgcagagcccagcaagcggaaagcagagtgtggaagcaggaaaagccagaagcgatttgggagcagttgccaagggcctgtcaggagaattaggcacaagatcaggagaaacaggcaggaagctactagaagctggcagaagagagtcaagagaaatttataggaggccttcgggagaattagagcaaagactctcaggagaattcagcagacaggaaccagaagaactaaagaaactttcagaagtgggcagaagagagccagaagaactgggaaaaacacaatttggagaaataggagaaacgaaaaaaacaggaaatgagatggaaaaggaatatgaatgaagccatcggtagagatgaggatcaggaagctggtgttcagagggatcatgggattttattaaactggattttcaagcgatttgtctgttataggaaaaatgagggttttacttctgctgctttccatcactattttgccattaaataggtgtctttcactcttgcaaaaaaaaaaaaaaaaaaaaaaaaa

SEQ ID NO: 3445 - protein, 672 aa, Homo sapiens
MSDPEGETLRSTFPSYMAEGERLYLCGEFSKAAQSFSNALYLQDGDKNCLVARSKCFLKMGDLERSLKDAEASLQSDPAFCKGILQKAETLYTMGDFEFALVFYHRGYKLRPDREFRVGIQKAQEAINNSVGSPSSIKLENKGDLSFLSKQAENIKAQQKPQPMKHLLHPTKGEPKWKASLKSEKTVRQLLGELYVDKEYLEKLLLDEDLIKGTMKGGLTVEDLIMTGINYLDTHSNFWRQQKPIYARERDRKLMQEKWLRDHKRRPSQTAHYILKSLEDIDMLLTSGSAEGSLQKAEKVLKKVLEWNKEEVPNKDELVGNLYSCIGNAQIELGQMEAALQSHRKDLEIAKEYDLPDAKSRALDNIGRVFARVGKFQQAIDTWEEKIPLAKTTLEKTWLFHEIGRCYLELDQAWQAQNYGEKSQQCAEEEGDIEWQLNASVLVAQAQVKLRDFESAVNNFEKALERAKLVHNNEAQQAIISALDDANKGIIRELRKTNYVENLKEKSEGEASLYEDRIITREKDMRRVRDEPEKVVKQWDHSEDEKETDEDDEAFGEALQSPASGKQSVEAGKARSDLGAVAKGLSGELGTRSGETGRKLLEAGRRESREIYRRPSGELEQRLSGEFSRQEPEELKKLSEVGRREPEELGKTQFGEIGETKKTGNEMEKEYE

SEQ ID NO: 3446 - DNA, 5222 bp, Homo sapiens
gggtgcccgctccgccccccgggctatgtaaagcggccgggctcgggtcgtgccaccgctggactcccgtgtccctccgcgcaggcgggcggccccggagcgctggtgccggcagaggcggcgacggtggcgcccctcctcatcatgaacagaggcttctcccgaaaaagccacacattcctgcccaagatcttcttccgcaagatgtcatcctcaggggccaaggacaagcctgagctgcagtttcccttccttcaggatgaggacacagtggccacgctgctagagtgcaagacgctcttcatcttgcgcggcctgccaggaagcggcaagtccacgctggcacgggtcatcgtggacaagtaccgtgatggcaccaagatggtgtcggctgacgcttacaagatcacccccggcgctcgaggagccttctccgaggagtacaagcggctcgatgaggacctggctgcctactgccgccgccgggacatcagaattcttgtgcttgatgacaccaaccacgaacgggaacggctggagcagctctttgaaatggccgaccagtaccagtaccaggtggtgctggtggagcccaagacggcgtggcggctggactgtgcccagctcaaggagaagaaccagtggcagctgtcggctgatgacctgaagaagctgaagcctgggctggagaaggacttcctgccgctctacttcggctggttcctgaccaagaagagctctgagaccctccgcaaagccggccaggtcttcctggaagagctggggaaccacaaggccttcaagaaggagctgcgacaattcgtccctggggatgagcccagggagaagatggacttggtcacctactttggaaagagacccccaggcgtgctgcattgcacaaccaagttttgtgactacgggaaggctcccggggcagaggagtacgctcaacaagatgtgttaaagaaatcttactccaaggccttcacgctgaccatctctgccctctttgtgacacccaagacgactggggcccgggtggagttaagcgagcagcaactgcagttgtggccgagtgatgtggacaagctgtcacccactgacaacctgccgcgggggagccgcgcccacatcaccctcggctgtgcagctgacgtagaggccgtgcagacgggccttgacctcttagagattctgcggcaggagaaggggggcagccgaggcgaggaggtgggcgagctaagccggggcaagctctattccttgggcaatgggcgctggatgctgaccctggccaagaacatggaggtcagggccatcttcacggggtactacgggaaaggcaaacctgtgcccacgcaaggtagccggaaggggggcgccttgcagtcctgcaccatcatatgagtgttctcaccaccacttatgcccctagaagggaaggggagagggaaacgtgccctctgtttgatccttgttttgtgacattttttttttttttttttttactcaaagttaacctacctgtaactttttaaaaacttgtaaaataactgaccctcccttcctgtccgccctcttcccctctaatgctcacgctcccaacacaaggtgggcagggaggcaccattcaggaacctggaccaaagctgacgaggctgggccaagccagggatggggccacagccagaaccccgagccctacttccaggttctggttagctcagccccagcccagcccagctgctctgcccagagctgggtgagtggggagacacctcagagccccgcaaaacccactgaccggaggcaaaaggcagtggggctgggggtagttttccatggtcacagagaactagtggtggctctgagaaggggaggacctctgggctttgattccatctccttgtcttttttctttgtttttagagacagggtcctgctatttcccaagctggagtgcagtggtgcgatcatggctcactgcagcctcgaactcctgggctcaagcaatcctcctgagtgatcccatttcttaatcagtgtagccccaagaaggctggggctatttaccagggtagaaaaaggagcttacctcccacctttggtcctaagtccctgccccctccccttcacaccataactaggtaacagtttgataactagggaagaaagcagaacagttaagcagccgccacatccccgctggctgggggcctcactccaggaaggggctggactggctgtcctttccagtggcctggctccgctgtgtggatggggagatcggggccagaggcagaaccctggtgaggaagctccagtcctgctctctacccagcccatcttgcctccatggtgcctctggaggcctctgggcctcctctaacaggggctggtgggcaccaagagccaatggagtagacccctggctggtaagggccaagtcccaccggttgcttctgggaaggggtttctaacactagtctgtgtgctgtggttcctggggtgccctccactgccctctgttcagtaacagggccttgctaatcgggttgtcactcaacaaaagtgctttggatttaagttactatcctggctttgcccaacctcagcaacctgtaagactgataatgaaataaatcatgttaatcctagctgtgtgcagtctctcttacccttctgtgcccagctcagtcttccctagggctgggtgtattaggactggctttgtcccacagcttggggccatcggtcctgtctcccctctgctggccgggcacagctgtggtgaggttgggcagctgaacagtgttggctttcatgaggaggcagaaagcagaggctggcctcagactcatacagaaggtgggggttggctgggtacgagggatgtggagcacaaaagcctctcatcccccattaaccagggcaccaagcccacaggtgtccccagcccactggatcagaaagagttcagtaagaccggaagctcctggtatgggtttctcccagttctctagggaaggccacctgcaggtcactgaaacttcaagcaccagggaagatctaacatttgagtcccttccaggccatcagaggcctagtcagccacatgggaaacttccaagacctgactcaggcatcattccaccatggctaaggcaccagccggggaagacttgaaagaaaggggcaggagctcagatgaagagaaatcctaagttacctttctaggtcaaggcctgtccctggccatctctgaacttcagctagagcttcaagtctgtgcctggagctcctgggaaggctactcaccttgaacaccacgcttgacaggacagcatggtgcatgccgctgcatccgtgagcagtgtgtctcctgcatgcagaaagggagcagagaaggccaggggcttttgctaaaaatagtggccagaccagagctctggagccacctgtcccacctcaaatgggtctgggggtcaggaggcagggttttatctctgtctaccatctccctcgaacccacactgcaacaggaactgtgagagtctttgtaagtaaactgccctgtctaggtcagtacccacctgagctttggacgcacacagcttttagtacccacctgagctttggacacacacagcttctagtgatttctggggccccaccgtaaagtgagcatgctttctgaactcgcttctctgtgactgatgttaggctgggcccagaggcacagccggggcctgcctagcactcacatgctggacaggtctgggagaggcagagtgccccacctgccactaggctgggtgcccacagcccgcatgcagcagcttgctgcaccccaagtccaggtcgggctcagctctggctcacagactggagacaatgcagatgccagagcaaagggccaggaagggtcaaaacattttattctcttttttttttcttttttaataaagttaaacagtaaaacaaaaattcacaagctgcctccctgtccacccccgcctccctcccctgccctcggtcttcggcattggttccctttgctccaccccactcacagagacacagggcatccaactgagaaaacgaaactgctctaagcacacggagacgtgatgaagggaggaggtgaactgtttccacattcaagattaaactgagtgaatctgcattttctgggttctgggtggttgcccttcattagccaaattgaaaaaagaaattccctggaccagatgctgaaagagaaaagaggggttggtagttggctatggattttctaaggaagatcactttgctctgattatggaaaagtcttcaagggctgcttcaaactcaaacacagagagaaactctatgggtatcaaacagctcaggctgtttttgggtgcaagagggagcacgtgactgtattatacatgggtagcttctgacctcagcattatctatatagtacctttgctcttgcagagaagccttggtactaggcagttagagatgcctccctgaccctgcagagatgcggtggctaaaggtcccaaggcaaggggtgcctgggaaccttcctgtcttcatccttagcaacagccgagtggatagatgccctgctagatgagaattcagctgcccccgctcatgggcccctctgactcccaaagagctgcctaagaggcaatgagtgtgttggcttgtgatctgggaactcccaagaacagcaggcccacctaccttcaaagctgaagccgccaggaccgccaaagaatgccttgaagatattgtttggatcaaaatctgtagagcagggcaagtaacatggaagggaagaaaaggtgaaaaattagaaatgttcgaagagaactgatgacactgagaacagatctccaaagctttcctggagagtctcactcccctcctttcccaacacttcagactgcaagtgagcaaacctgccccatcccgtgcaaaacatgctacctgatcccactcctaggacatgttcccttctccttccaactgctgccccaaaggaagctttctctgcttcagcttgcttcattgggctgttttctcaacaaatggaatgccatttgcacttacacaagactttccccatactctgtctccctataatgctggagcggctactaaaaaggataaaatgtatcacttaaatgttaccaaaaataaatataagagcaagatct

SEQ ID NO: 3447 - protein, 421 aa, Homo sapiens
MNRGFSRKSHTFLPKIFFRKMSSSGAKDKPELQFPFLQDEDTVATLLECKTLFILRGLPGSGKSTLARVIVDKYRDGTKMVSADAYKITPGARGAFSEEYKRLDEDLAAYCRRRDIRILVLDDTNHERERLEQLFEMADQYQYQVVLVEPKTAWRLDCAQLKEKNQWQLSADDLKKLKPGLEKDFLPLYFGWFLTKKSSETLRKAGQVFLEELGNHKAFKKELRQFVPGDEPREKMDLVTYFGKRPPGVLHCTTKFCDYGKAPGAEEYAQQDVLKKSYSKAFTLTISALFVTPKTTGARVELSEQQLQLWPSDVDKLSPTDNLPRGSRAHITLGCAADVEAVQTGLDLLEILRQEKGGSRGEEVGELSRGKLYSLGNGRWMLTLAKNMEVRAIFTGYYGKGKPVPTQGSRKGGALQSCTII

SEQ ID NO: 3448 - DNA, 1756 bp, Homo sapiens
cggctgccgcggagtgcgatgtggtaatggcggcgaccgagccggagctgctcgacgaccaagaggcgaagagggaagcagagactttcaaggaacaaggaaatgcatactatgccaagaaagattacaatgaagcttataattattatacaaaagccatagatatgtgtcctaaaaatgctagctattatggtaatcgagcagccaccttgatgatgcttggaaggttccgggaagctcttggagatgcacaacagtcagtgaggttggatgacagttttgtccggggacatctacgagagggcaagtgccacctctctctggggaatgccatggcagcatgtcgcagcttccagagagccctagaactggatcataaaaatgctcaggcacaacaagagttcaagaatgctaatgcagtcatggaatatgagaaaatagcagaaacagattttgagaagcgagattttcggaaggttgttttctgcatggaccgtgccctagaatttgcccctgcctgccatcgcttcaaaatcctcaaggcagaatgtttagcaatgctgggtcgttatccggaagcacagtctgtggctagtgacattctacgaatggattccaccaatgcagatgctctgtatgtacgaggtctttgcctttattacgaagattgtattgagaaggcagttcagtttttcgtacaggctctcaggatggctcctgaccacgagaaggcctgcattgcctgcagaaatgccaaagcactcaaagcaaagaaagaagatgggaataaagcatttaaggaaggaaattacaaactagcatatgaactgtacacagaagccctggggatagaccccaacaatataaaaacaaatgctaaactctactgtaatcggggtacggttaattccaagcttaggaaactagatgatgcaatagaagactgcacaaatgcagtgaagcttgatgacacttacataaaagcctacttgagaagagctcagtgttacatggacacagaacagtatgaagaagcagtacgagactatgaaaaagtataccagacagagaaaacaaaagaacacaaacagctcctaaaaaatgcgcagctggaactgaagaagagtaagaggaaagattactacaagattctaggagtggacaagaatgcctctgaggacgagatcaagaaagcttatcggaaacgggccttgatgcaccatccagatcggcatagtggagccagtgctgaggttcagaaggaggaggagaagaagttcaaggaagttggagaggcctttactatcctctctgatcccaagaaaaagactcgctatgacagtggacaggacctagatgaggagggcatgaatatgggtgattttgatccaaacaatatcttcaaggcattctttggcggtcctggcggcttcagctttgaagcatctggtccagggaatttcttttttcaatttggctaatgaagggcaaccacccagaacccagaaaatgcagattcactcagtttaatcttgaatgtggaaacagttcacctcctcccttcatcacgtctccgtgtgcttagagcagtttcgttttctcagttggatgccctgtgtctctgtgagtggggtggagcaaagggaaccaatgccgaagaccgagggcaggggagggaggcgggggtggacagggaggcagcttgtgaatttttgttttactgtttaactttattaaaaaagaaaaaaaaaaaaaa

SEQ ID NO: 3449 - protein, 484 aa, Homo sapiens
MAATEPELLDDQEAKREAETFKEQGNAYYAKKDYNEAYNYYTKAIDMCPKNASYYGNRAATLMMLGRFREALGDAQQSVRLDDSFVRGHLREGKCHLSLGNAMAACRSFQRALELDHKNAQAQQEFKNANAVMEYEKIAETDFEKRDFRKVVFCMDRALEFAPACHRFKILKAECLAMLGRYPEAQSVASDILRMDSTNADALYVRGLCLYYEDCIEKAVQFFVQALRMAPDHEKACIACRNAKALKAKKEDGNKAFKEGNYKLAYELYTEALGIDPNNIKTNAKLYCNRGTVNSKLRKLDDAIEDCTNAVKLDDTYIKAYLRRAQCYMDTEQYEEAVRDYEKVYQTEKTKEHKQLLKNAQLELKKSKRKDYYKILGVDKNASEDEIKKAYRKRALMHHPDRHSGASAEVQKEEEKKFKEVGEAFTILSDPKKKTRYDSGQDLDEEGMNMGDFDPNNIFKAFFGGPGGFSFEASGPGNFFFQFG

SEQ ID NO: 3450 - DNA, 2968 bp, Homo sapiens
cgccgcgccgcttcccccacctcgcaccagacctctgaaattgccctcggagactcggcctctcctataaggacgatcgtcctctcagctggagaacaaggccatgcctcagctcctacgccaggcggaagcgggagaggaaggccgacccccaagagcgccccttcagggggtccatccggccttgatctcagatgggggggtgtttgcggagggcggggcatcgcctcaacagctgggggctgcatcatggcaggaacgagtttccctgagccacggagctgcaggtcgcctcctctactaccctgctacccggttacctcttcgcctcttggtcgtcgagcagctccggctcggtcgccgccattaccacatcgcactccgcggcagccgccatcttaccgccgggaccagagagctgggtgggaggccggcggtgaagagcacttccggttggagcatagagcagctccgcggcgcctcgcccagaagggctccctcgggctcgtctaccagagagaggctccgcttggggccagagcggcctcccgcccccggatgtccacggtggtctccgcgccggggcgggagcccaggggctgtgccggttgaaaactaagcatggggaagagctgcaaggtggtcgtgtgtggccaggcgtctgtgggcaaaacttcaatcctggagcagcttctgtatgggaaccatgtagtgggttcggagatgatcgagacgcaggaggacatctacgtgggctccattgagacagaccggggggtgcgagagcaggtgcgtttctatgacacccgggggctccgagatggggccgaactgccccgacactgcttctcttgcactgatggctacgtcctggtctatagcacagatagcagagagtcttttcagcgtgtggagctgctcaagaaggagattgacaaatccaaggacaagaaggaggtcaccatcgtggtccttggcaacaagtgtgacttacaggagcagcggcgtgtagacccagatgtggctcagcactgggccaagtcagagaaggtgaagctgtgggaggtgtcagtggcggaccggcgctccctcctggagccctttgtctacttggccagcaagatgacgcaaccccagagcaagtctgccttccccctcagccggaagaacaagggcagcggctccttggatggctgaagagctgccgttcctctttcacgatcccagccccatttcagtgtctggggctctggtagatgtgttgagggcaaagtagaggacaagctgtctttcccagtcagccagggagctccccgccaggccacgccccagccactttgctccctctcacctctgggaagtgcaaatactcttggttgacatccccttcctcagccctcccagcctactccccatcccagcttttagaggatctgctccactgtctcctggggcagttgtgggtcactgtcccttccagctgccccagacaggaagcagagtcaccacgcagcagtgtcccttcttgggtctgagttcctattataggtaggggccccaccctctgggcttcccatcagcgacacacacacacttatggcaccagcctggactccagaaaaagggtgtccaggtattgtgtgtatgcatttagttgtgcacacacaaatatgctcctatactggcattaggcgtctcctcatccctcaccctgacctttctcctgtccttttcttggctggaagaagttggcctcctgggagtgtagttttctgttttaaatcccccacccctggctgggctcagtggctcacccctgtaatcccagcactttgggaggccaaggcgggtcgattacttgaggtcaggagttcacgaccagcctggccaacattgtgaaaccccatctctgccaaaaatacaaaagttagccgggcgtagtggcacatgcctgtaatcccagctacccggggaggctgaggcaggagaattgcttgaactcagaaggcggaggctgcagtgagccgagatcgtgccactgcactccagcctggtcaacagagcaagactccatctcgaaaaaaaaaaaaaaaattccccacccctaccaattgttttacttcctcttcctgctcagggagcagatgggcctcactggttgagatggaatagaataactgggctatgagtcaccagcccactttgtgacccagcaagacctttcccctctctgggcatcagtttctcatctgtaagatgaccagagttgcttagatgatctcctagatcctttccagttctcttgatttcgtaaagccaatggcttctccctctttaaggtgctatgccaaccagccctggaggctgggatctgccgctccctccagccaccagggggcaggagtgcactacctgctgtcagtcaccagagtggccgctcagtgcccagcccgccagcctcgctcttggaggctgctctttatcctgcctgtggttttcagctcagagctggacttctatttataagttacctgtatttatatttatatgcccgctctcatggtgaaggctggacaaggtgctcctctggcccctccttcttacctcagatgcctgaacagaacaaggcaaacccgtagcagcctctcaggagctgacaggtcctctttcggggctcaggagggtgggcacacacccagcggcctgcagagtaagcttattacccacaactgtgcccgctttgtgcttctaaggtgcacacctagcctaggtgagacactgcagccaggcaaccaccgacacacgccccttctcaaagccagaggtgagtggggcaggtgcccggggctgggtgagtggaattaggacacacacaggcttgggcttcaagttcatttattgatgcattggttggacacaataaaaccacaattgttatcaaaaaaaaaaaaaaaaaaaaaaaaaaaaa

SEQ ID NO: 3451 - protein, 191 aa, Homo sapiens
MGKSCKVVVCGQASVGKTSILEQLLYGNHVVGSEMIETQEDIYVGSIETDRGVREQVRFYDTRGLRDGAELPRHCFSCTDGYVLVYSTDSRESFQRVELLKKEIDKSKDKKEVTIVVLGNKCDLQEQRRVDPDVAQHWAKSEKVKLWEVSVADRRSLLEPFVYLASKMTQPQSKSAFPLSRKNKGSGSLDG

SEQ ID NO: 3452 - DNA, 2492 bp, Homo sapiens
gcggcgggggcggggcctggaggagcctacaccgactctggaggaagactggagcctttgcggcggcgctgcccctcccctggtccccgcgagctcggagggcccggctggtgctgcgggggccccgggaggttgaaaactaagcatggggaagagctgcaaggtggtcgtgtgtggccaggcgtctgtgggcaaaacttcaatcctggagcagcttctgtatgggaaccatgtagtgggttcggagatgatcgagacgcaggaggacatctacgtgggctccattgagacagaccggggggtgcgagagcaggtgcgtttctatgacacccgggggctccgagatggggccgaactgccccgacactgcttctcttgcactgatggctacgtcctggtctatagcacagatagcagagagtcttttcagcgtgtggagctgctcaagaaggagattgacaaatccaaggacaagaaggaggtcaccatcgtggtccttggcaacaagtgtgacttacaggagcagcggcgtgtagacccagatgtggctcagcactgggccaagtcagagaaggtgaagctgtgggaggtgtcagtggcggaccggcgctccctcctggagccctttgtctacttggccagcaagatgacgcaaccccagagcaagtctgccttccccctcagccggaagaacaagggcagcggctccttggatggctgaagagctgccgttcctctttcacgatcccagccccatttcagtgtctggggctctggtagatgtgttgagggcaaagtagaggacaagctgtctttcccagtcagccagggagctccccgccaggccacgccccagccactttgctccctctcacctctgggaagtgcaaatactcttggttgacatccccttcctcagccctcccagcctactccccatcccagcttttagaggatctgctccactgtctcctggggcagttgtgggtcactgtcccttccagctgccccagacaggaagcagagtcaccacgcagcagtgtcccttcttgggtctgagttcctattataggtaggggccccaccctctgggcttcccatcagcgacacacacacacttatggcaccagcctggactccagaaaaagggtgtccaggtattgtgtgtatgcatttagttgtgcacacacaaatatgctcctatactggcattaggcgtctcctcatccctcaccctgacctttctcctgtccttttcttggctggaagaagttggcctcctgggagtgtagttttctgttttaaatcccccacccctggctgggctcagtggctcacccctgtaatcccagcactttgggaggccaaggcgggtcgattacttgaggtcaggagttcacgaccagcctggccaacattgtgaaaccccatctctgccaaaaatacaaaagttagccgggcgtagtggcacatgcctgtaatcccagctacccggggaggctgaggcaggagaattgcttgaactcagaaggcggaggctgcagtgagccgagatcgtgccactgcactccagcctggtcaacagagcaagactccatctcgaaaaaaaaaaaaaaaattccccacccctaccaattgttttacttcctcttcctgctcagggagcagatgggcctcactggttgagatggaatagaataactgggctatgagtcaccagcccactttgtgacccagcaagacctttcccctctctgggcatcagtttctcatctgtaagatgaccagagttgcttagatgatctcctagatcctttccagttctcttgatttcgtaaagccaatggcttctccctctttaaggtgctatgccaaccagccctggaggctgggatctgccgctccctccagccaccagggggcaggagtgcactacctgctgtcagtcaccagagtggccgctcagtgcccagcccgccagcctcgctcttggaggctgctctttatcctgcctgtggttttcagctcagagctggacttctatttataagttacctgtatttatatttatatgcccgctctcatggtgaaggctggacaaggtgctcctctggcccctccttcttacctcagatgcctgaacagaacaaggcaaacccgtagcagcctctcaggagctgacaggtcctctttcggggctcaggagggtgggcacacacccagcggcctgcagagtaagcttattacccacaactgtgcccgctttgtgcttctaaggtgcacacctagcctaggtgagacactgcagccaggcaaccaccgacacacgccccttctcaaagccagaggtgagtggggcaggtgcccggggctgggtgagtggaattaggacacacacaggcttgggcttcaagttcatttattgatgcattggttggacacaataaaaccacaattgttatcaaaaaaaaaaaaaaaaaaaaaaaaaaaaa

SEQ ID NO: 3453 - protein, 191 aa, Homo sapiens; identical to SEQ ID NO: 3451

SEQ ID NO: 3454 - DNA, 2023 bp, Homo sapiens
ctcaagggttggatggcggaggctttgtgcttgtgtgttactgaacggacgtttctgggtcctcccattactccttggggaaggagaattgggaagagaagtctgaggcagcaagaactgaaggagccaagcaccggtggatgatggaaggtcagcgaggggctccccggaggagccggggccgcccggtgtccaggggaggtgccggacacaaagccaagagagtcacagggggccggggcggccggcaggggcccagccctgccttccactgtgctctctgtcagctccaggtcaattcagagacccaactgaagcagcacatgagcagcaggaggcacaaagaccgcctggccgggaagacccccaagccctccagccagcacagcaagctgcagaagcacgcagcgctggctgtgagtatcctcaagtctaaactggccttgcagaagcaactcaccaagacgttggcagcccgcttcctgcccagcccgctccccaccgcagccactgccatctgtgctctgccagggcccctggccctccgccctgcccctacagcagccactaccctcttcccggctcccatcctgggcccagctctgtttcgcaccccagcaggagctgtccgccctgctacaggacctatcgtccttgccccttattagccctcatggggaggccagagctgatttcccaatagccactccttgtctcctcctgtcctgagacaccttggtttcctacatgccacagggactgtgaacagcttcaggggtcctgcccgatccagaaagagctgggctagttttaagggcagctgccttccaaggactgtccccaccctcctttcgcaggccttccagggttaatcctaggcttgcctgcatttcccaccctgacagaccccaaagatctatgcaaaatctcagccccagccatgtggtgctctcactttcctccacccaagacccacatggccagactctaggaatcttagcttctacaagccatcctctcctagccaggggacgactctctgacctctattcctaggctttggggcttcactggagatagggatggggtctctagctgcagcaggctcaaggctgtcaggacaaggtgaccatgggagtgtgacagaggaccatggaggagaaagggggacccaaaagtccttcgatcagcagtgctaaggtggggcagagccaaggaggtagtggggctggttctgaaagcttttgggggcttcatctgctctgaaggggtgggactaagagaggaggtgatgttctggttgggcccagggttttgttttaatcttaagtcttctgggcattcatgggcccagtctttttttctgtttgagagtatcattctgttgcccaggttagagtgcagtggtgcaatcttggctcactgcatgcagcctctgcctccctggttcaagtgatacttgctgataagcccagtcttaatattgagggagtaactcatccctcagaagctcttcttcttagcctttctctgacttcctgaaccccaactcttggagggcgggtgtgggtctccctcagactatggactcagctaacaccgaaccccccgcagagctcccaaaggaagagctttcccctacagcttcccactccaaactggtcctagcactaaattcagctttcccttctcccaaccagcccctgccactgtgaagctgagtgttgggaggcagtctcacatgcactggcaagacccattttcatgctgtcaatgtcaatgtcacaaactcctttccactgcagcactgccccctccccaccccacaatatgggaccctgccagtatccccctgtatcttttttttgttttttaaagacatttccaatgggagaaccagaaaaagggggaggggagggaaactttttgataacaattgtggttttattgtgtccaaccaatgcatcaataaatgaacttgaagcccaaaaaaaaaaaaaaaaaaaaaaaaaaaaaaaaaaaa

SEQ ID NO: 3455 - protein, 174 aa, Homo sapiens
MEGQRGAPRRSRGRPVSRGGAGHKAKRVTGGRGGRQGPSPAFHCALCQLQVNSETQLKQHMSSRRHKDRLAGKTPKPSSQHSKLQKHAALAVSILKSKLALQKQLTKTLAARFLPSPLPTAATAICALPGPLALRPAPTAATTLFPAPILGPALFRTPAGAVRPATGPIVLAPY

SEQ ID NO: 3456 - DNA, 2613 bp, Homo sapiens
agtttcagtttccatttctgatttctgctctctgcgctgagcacagcggcaccaggctgagctaagcagggccgccttgggcaggcctacgtggtggtgcaggcgagacccaggctgggcaaggcgcagtttcagtttccatcttgggtctctgagctgagcagagtggcaccaggctgagttaagtgggactgccctgggcagacctacctactagagcagaatggagcttcggtcctaccaatgggaggtgatcatgcctgccctggagggcaagaatatcatcatctggctgcccacgggtgccgggaagacccgggcggctgcttatgtggccaagcggcacctagagactgtggatggagccaaggtggttgtattggtcaacagggtgcacctggtgacccagcatggtgaagagttcaggcgcatgctggatggacgctggaccgtgacaaccctgagtggggacatgggaccacgtgctggctttggccacctggcccggtgccatgacctgctcatctgcacagcagagcttctgcagatggcactgaccagccccgaggaggaggagcacgtggagctcactgtcttctccctgatcgtggtggatgagtgccaccacacgcacaaggacaccgtctacaacgtcatcatgagccagtacctagaacttaaactccagagggcacagccgctaccccaggtgctgggtctcacagcctccccaggcactggcggggcctccaaactcgatggggccatcaaccacgtcctgcagctctgtgccaacttggacacgtggtgcatcatgtcaccccagaactgctgcccccagctgcaggagcacagccaacagccttgcaaacagtacaacctctgccacaggcgcagccaggatccgtttggggacttgctgaagaagctcatggaccaaatccatgaccacctggagatgcctgagttgagccggaaatttgggacgcaaatgtatgagcagcaggtggtgaagctgagtgaggctgcggctttggctgggcttcaggagcaacgggtgtatgcgcttcacctgaggcgctacaatgacgcgctgctcatccatgacaccgtccgcgccgtggatgccttggctgcgctgcaggatttctatcacagggagcacgtcactaaaacccagatcctgtgtgccgagcgccggctgctggccctgttcgatgaccgcaagaatgagctggcccacttggcaactcatggcccagagaatccaaaactggagatgctggaaaagatcctgcaaaggcagttcagtagctctaacagccctcggggtatcatcttcacccgcacccgccaaagcgcacactccctcctgctctggctccagcagcaacagggcctgcagactgtggacatccgggcccagctactgattggggctgggaacagcagccagagcacccacatgacccagagggaccagcaagaagtgatccagaagttccaagatggaaccctgaaccttctggtggccacgagtgtggcggaggaggggctggacatcccacattgcaatgtggtggtgcgttatgggctcttgaccaatgaaatctccatggtccaggccaggggccgtgcctgggccgatcagagtgtatacgcgtttgtagcaactgaaggtagccgggagctgaagcgggagctgatcaacgaggcgctggagacgctaatggagcaggcagtggctgctgtgcagaaaatggaccaggccgagtaccaggccaagatccgggatctgcagcaggcagccttgaccaagcgggcggcccaggcagcccagcgggagaaccagcggcagcagttcccagtggagcacgtgcagctactctgcatcaactgcatggtggctgtgggccatggcagcgacctgcggaaggtggagggcacccaccatgtcaatgtgaaccccaacttctcgaactactataatgtctccagggatcctgtggtcatcaacaaagtcttcaaggactggaagcctgggggtgtcatcagctgcaggaactgtggggaggtctggggtctgcagatgatctacaagtcagtgaagctgccagtgctcaaagtccgcagcatgctgctggagacccctcaggggcggatccaggccaaaaagtggtcccgcgtgcccttctccgtgcctgactttgacttcctgcagcattgtgccgagaacttgtcggacctctccctggactgaccacctcattgctgcagtgcccggtttgggctgtagggggcgggagagtctgcagcagactccaggcccctccttcctgaatcatcagctgtgggcatcaggcccaccagccacacaggagtcctgggcaccctggcttaggctcccgcaatgggaaaacaaccggagggccagagcttagtccagacctaccttgtacgcacatagacattttcatatgcactggatggagttagggaaactgaggcaaaagaatttgccatactgtactcagaatcacgacattccttccctaccaaggccacttctattttttgaggctcctcataaaaataaatgaaaaaatgggatag

SEQ ID NO: 3457 - protein, 678 aa, Homo sapiens
MELRSYQWEVIMPALEGKNIIIWLPTGAGKTRAAAYVAKRHLETVDGAKVVVLVNRVHLVTQHGEEFRRMLDGRWTVTTLSGDMGPRAGFGHLARCHDLLICTAELLQMALTSPEEEEHVELTVFSLIVVDECHHTHKDTVYNVIMSQYLELKLQRAQPLPQVLGLTASPGTGGASKLDGAINHVLQLCANLDTWCIMSPQNCCPQLQEHSQQPCKQYNLCHRRSQDPFGDLLKKLMDQIHDHLEMPELSRKFGTQMYEQQVVKLSEAAALAGLQEQRVYALHLRRYNDALLIHDTVRAVDALAALQDFYHREHVTKTQILCAERRLLALFDDRKNELAHLATHGPENPKLEMLEKILQRQFSSSNSPRGIIFTRTRQSAHSLLLWLQQQQGLQTVDIRAQLLIGAGNSSQSTHMTQRDQQEVIQKFQDGTLNLLVATSVAEEGLDIPHCNVVVRYGLLTNEISMVQARGRAWADQSVYAFVATEGSRELKRELINEALETLMEQAVAAVQKMDQAEYQAKIRDLQQAALTKRAAQAAQRENQRQQFPVEHVQLLCINCMVAVGHGSDLRKVEGTHHVNVNPNFSNYYNVSRDPVVINKVFKDWKPGGVISCRNCGEVWGLQMIYKSVKLPVLKVRSMLLETPQGRIQAKKWSRVPFSVPDFDFLQHCAENLSDLSLD

SEQ ID NO: 3458 - DNA, 3074 bp, Homo sapiens
ccgctctccgctgcgggggaggccatggcggaaccttcccaggccccgaccccggccccggctgcgcagccccggccccttcagtccccagcccctgccccaactccgactcctgcacccagcccggcttcagccccgattccgactcccaccccggcaccagcccctgccccagctgcagccccagccggcagcacagggactggggggcccggggtaggaagtgggggggccgggagcgggggggatccggctcggcctggcctgagccagcagcagcgcgccagtcagaggaaggcgcaagtccgggggctgccccgcgccaagaagcttgagaagctaggggtcttctcggcttgcaaggccaatggaacctgtaagtgtaatggctggaaaaaccccaagccccccactgcaccccgcatagatctgcagcagccagctgccaacctgagtgagctgtgccgcagttgtgagcaccccttggctgaccacgtatcccacttggagaatgtgtcagaggatgagataaaccgactgctggggatggtggtggatgtggagaatctcttcatgtctgttcacaaggaagaggacacagacaccaagcaggtctatttctacctcttcaagctactgcggaaatgcatcctgcagatgacccggcctgtggtggaggggtccctgggcagccctccatttgagaaacctaatattgagcagggtgtgctgaactttgtgcagtacaagtttagtcacctggctccccgggagcggcagacgatgttcgagctctcaaagatgttcttgctctgccttaactactgggagcttgagacacctgcccagtttcggcagaggtctcaggctgaggacgtggctacctacaaggtcaattacaccagatggctctgttactgccacgtgccccagagctgtgatagcctcccccgctacgaaaccactcatgtctttgggcgaagccttctccggtccattttcaccgttacccgccggcagctgctggaaaagttccgagtggagaaggacaaattggtgcccgagaagaggaccctcatcctcactcacttccccaaattcctgtccatgctggaggaggagatctatggggcaaactctccaatctgggagtcaggcttcaccatgccaccctcagaggggacacagctggttccccggccagcttcagtcagtgcagcggttgttcccagcacccccatcttcagccccagcatgggtgggggcagcaacagctccctgagtctggattctgcaggggccgagcctatgccaggcgagaagaggacgctcccagagaacctgaccctggaggatgccaagcggctccgtgtgatgggtgacatccccatggagctggtcaatgaggtcatgctgaccatcactgaccctgctgccatgctggggcctgagacgagcctgctttcggccaatgcggcccgggatgagacagcccgcctggaggagcgccgcggcatcatcgagttccatgtcatcggcaactcactgacgcccaaggccaaccggcgggtgttgctgtggctcgtggggctgcagaatgtcttttcccaccagctgccgcgcatgcctaaggagtatatcgcccgcctcgtctttgacccgaagcacaagactctggccttgatcaaggatgggcgggtcatcggtggcatctgcttccgcatgtttcccacccagggcttcacggagattgtcttctgtgctgtcacctcgaatgagcaggtcaagggttatgggacccacctgatgaaccacctgaaggagtatcacatcaagcacaacattctctacttcctcacctacgccgacgagtacgccatcggctacttcaaaaagcagggtttctccaaggacatcaaggtgcccaagagccgctacctgggctacatcaaggactacgagggagcgacgctgatggagtgtgagctgaatccccgcatcccctacacggagctgtcccacatcatcaagaagcagaaagagatcatcaagaagctgattgagcgcaaacaggcccagatccgcaaggtctacccggggctcagctgcttcaaggagggcgtgaggcagatccctgtggagagcgttcctggcattcgagagacaggctggaagccattggggaaggagaaggggaaggagctgaaggaccccgaccagctctacacaaccctcaaaaacctgctggcccaaatcaagtctcaccccagtgcctggcccttcatggagcctgtgaagaagtcggaggcccctgactactacgaggtcatccgcttccccattgacctgaagaccatgactgagcggctgcgaagccgctactacgtgacccggaagctctttgtggccgacctgcagcgggtcatcgccaactgtcgcgagtacaaccccccggacagcgagtactgccgctgtgccagcgccctggagaagttcttctacttcaagctcaaggagggaggcctcattgacaagtaggcccatctttgggccgcagccctgacctggaatgtctccacctcggattctgatctgatccttagggggtgccctggccccacggacccgactcagcttgagacactccagccaagggtcctccggacccgatcctgcagctctttctggaccttcaggcacccccaagcgtgcagctctgtcccagccttcactgtgtgtgagaggtctcctgggttggggcccagcccctctagagtagctggtggccagggatgaaccttgcccagccgtggtggcccccaggcctggtccccaagagctttggaggcttggattcctgggcctggcccaggtggctgtttccctgaggaccagaactgctcattttagcttgagtgatggcttcaggggttggaagttcagcccaaactgaagggggccatgccttgtccagcactgttctgtcagtctcccccaggggtggggggtatggggaccattcattccctggcattaatcccttagagggaataataaagctttttatttctctg

SEQ ID NO: 3459 - protein, 837 aa, Homo sapiens
MAEPSQAPTPAPAAQPRPLQSPAPAPTPTPAPSPASAPIPTPTPAPAPAPAAAPAGSTGTGGPGVGSGGAGSGGDPARPGLSQQQRASQRKAQVRGLPRAKKLEKLGVFSACKANGTCKCNGWKNPKPPTAPRIDLQQPAANLSELCRSCEHPLADHVSHLENVSEDEINRLLGMVVDVENLFMSVHKEEDTDTKQVYFYLFKLLRKCILQMTRPVVEGSLGSPPFEKPNIEQGVLNFVQYKFSHLAPRERQTMFELSKMFLLCLNYWELETPAQFRQRSQAEDVATYKVNYTRWLCYCHVPQSCDSLPRYETTHVFGRSLLRSIFTVTRRQLLEKFRVEKDKLVPEKRTLILTHFPKFLSMLEEEIYGANSPIWESGFTMPPSEGTQLVPRPASVSAAVVPSTPIFSPSMGGGSNSSLSLDSAGAEPMPGEKRTLPENLTLEDAKRLRVMGDIPMELVNEVMLTITDPAAMLGPETSLLSANAARDETARLEERRGIIEFHVIGNSLTPKANRRVLLWLVGLQNVFSHQLPRMPKEYIARLVFDPKHKTLALIKDGRVIGGICFRMFPTQGFTEIVFCAVTSNEQVKGYGTHLMNHLKEYHIKHNILYFLTYADEYAIGYFKKQGFSKDIKVPKSRYLGYIKDYEGATLMECELNPRIPYTELSHIIKKQKEIIKKLIERKQAQIRKVYPGLSCFKEGVRQIPVESVPGIRETGWKPLGKEKGKELKDPDQLYTTLKNLLAQIKSHPSAWPFMEPVKKSEAPDYYEVIRFPIDLKTMTERLRSRYYVTRKLFVADLQRVIANCREYNPPDSEYCRCASALEKFFYFKLKEGGLIDK

SEQ ID NO: 3460 - DNA, 480 bp, Homo sapiens
atgcagagagtcggtaacaccttctccaacgagagccgggtggcatcccggtgtcccagcgtgggccttgctgaacggaaccgggtggccacaatgccggtgcggctgctcagggacagtccagcggctcaggaggacaatgaccatgccagagacggtttccaaatgaagctggatgcccacggcttcgccccggaggaactggtggtgcaggtggatggccaatggctgatggtgaccggacagcagcaactggacgtcagggacccggaaagggtcagttaccgcatgtcacagaaggtgcaccggaaaatgctcccgtccaacctgagtcctaccgccatgacctgctgcctgaccccctccgggcagctgtgggtcagaggccagtgtgtggcgctggccctccctgaagcccaaacaggaccgtccccgagactcgggagcctcggctctaaggcttccaacctgacccggtaa

SEQ ID NO: 3461 - protein, 159 aa, Homo sapiens
MQRVGNTFSNESRVASRCPSVGLAERNRVATMPVRLLRDSPAAQEDNDHARDGFQMKLDAHGFAPEELVVQVDGQWLMVTGQQQLDVRDPERVSYRMSQKVHRKMLPSNLSPTAMTCCLTPSGQLWVRGQCVALALPEAQTGPSPRLGSLGSKASNLTR

SEQ ID NO: 3462 - DNA, 1674 bp, Homo sapiens
gagcggctgaaaggcggaagtggaggccggagcctgggacaccgccggcggggagagaagcggatcccgtccgagccccggccccaagtaacgccgccgccccggagccgccttggaggtccccctccccactaagtgcctctttgcatagcaccagtccccacccgcacgctctctggaccactacagctggacgggcaatggcgggtcggggaggcgcagcacgacccaatggaccagctgctgggaacaagatctgtcaatttaagctggttctgctgggggagtctgcggtaggcaaatccagcctcgtcctccgctttgtcaagggacagtttcacgagtaccaggagagcacaattggagcggccttcctcacacagactgtctgcctggatgacacaacagtcaagtttgagatctgggacacagctggacaggagcggtatcacagcctggcccccatgtactatcggggggcccaggctgccatcgtggtctatgacatcaccaacacagatacatttgcacgggccaagaactgggtgaaggagctacagaggcaggccagccccaacatcgtcattgcactcgcgggtaacaaggcagacctggccagcaagagagccgtggaattccaggaagcacaagcctatgcagacgacaacagtttgctgttcatggagacatcagcaaagactgcaatgaacgtgaacgaaatcttcatggcaatagctaagaagcttcccaagaacgagccccagaatgcaactggtgctccaggccgaaaccgaggtgtggacctccaggagaacaacccagccagccggagccagtgctgcagcaactgagccccccttgcctgcccgctgcccccgcctcctccgcctgaatgacccgactggaatccactctaaccaatcgcacttaacgactcgggccaccactgggggggcagggggaggggtccaccatgatttctccatataattttgatcataggccggagtgagtcattccacctgcacctttctgtacaaatactaattcaattttaagtcttaagtcacttttttaatatatatgatcttctgctcttcccacttcctcccctttctactgctctcccattttcccttgctgggagtagccacatgctcttgccccccaacccttgtatatggggacagtggggtcagtgcagctaccctttctttccctcctgcggaacagcggacccagcaagagcatccacatcctcactttgttcggagtggtctttggtttgggcggtggggcagaccttgggaaggggcttaggaagggagaggcagctcttccttcagctggctctcatcaggctgcagccccctccccgctcccacctccctgctgggaaaccacagcattatcacagcattattgtgacagccacgaacccattgcccacaacccctccaccctcggtcaccccaacctctggctctgagccctgttctgaccaaatcatgatgatgagtatttgggggtgggtgggtaagggggggagtgggaggggacggaaccaactttttctgtattttgtattgtatgttttcttcaacatgtaaccaatcagtatcttgtcaatatagtcagccgatcgatcgacctcaaaaaaaaaaaaaaaaaaaa

SEQ ID NO: 3463 - protein, 216 aa, Homo sapiens
MAGRGGAARPNGPAAGNKICQFKLVLLGESAVGKSSLVLRFVKGQFHEYQESTIGAAFLTQTVCLDDTTVKFEIWDTAGQERYHSLAPMYYRGAQAAIVVYDITNTDTFARAKNWVKELQRQASPNIVIALAGNKADLASKRAVEFQEAQAYADDNSLLFMETSAKTAMNVNEIFMAIAKKLPKNEPQNATGAPGRNRGVDLQENNPASRSQCCSN

SEQ ID NO: 3464 - DNA, 1791 bp, Homo sapiens
gagcggctgaaaggcggaagtggaggccggagcctgggacaccgccggcggggagagaagcggatcccgtccgagccccggccccaagtaacgccgccgccccggagccgccagtctcgctctctcgccaggccggagtgcagtggcactatctcagctcagtgcaacctctgcctcccgggttcaagcgattctcctgcctcagcctcccgagtagctgggactacagttggaggtccccctccccactaagtgcctctttgcatagcaccagtccccacccgcacgctctctggaccactacagctggacgggcaatggcgggtcggggaggcgcagcacgacccaatggaccagctgctgggaacaagatctgtcaatttaagctggttctgctgggggagtctgcggtaggcaaatccagcctcgtcctccgctttgtcaagggacagtttcacgagtaccaggagagcacaattggagcggccttcctcacacagactgtctgcctggatgacacaacagtcaagtttgagatctgggacacagctggacaggagcggtatcacagcctggcccccatgtactatcggggggcccaggctgccatcgtggtctatgacatcaccaacacagatacatttgcacgggccaagaactgggtgaaggagctacagaggcaggccagccccaacatcgtcattgcactcgcgggtaacaaggcagacctggccagcaagagagccgtggaattccaggaagcacaagcctatgcagacgacaacagtttgctgttcatggagacatcagcaaagactgcaatgaacgtgaacgaaatcttcatggcaatagctaagaagcttcccaagaacgagccccagaatgcaactggtgctccaggccgaaaccgaggtgtggacctccaggagaacaacccagccagccggagccagtgctgcagcaactgagccccccttgcctgcccgctgcccccgcctcctccgcctgaatgacccgactggaatccactctaaccaatcgcacttaacgactcgggccaccactgggggggcagggggaggggtccaccatgatttctccatataattttgatcataggccggagtgagtcattccacctgcacctttctgtacaaatactaattcaattttaagtcttaagtcacttttttaatatatatgatcttctgctcttcccacttcctcccctttctactgctctcccattttcccttgctgggagtagccacatgctcttgccccccaacccttgtatatggggacagtggggtcagtgcagctaccctttctttccctcctgcggaacagcggacccagcaagagcatccacatcctcactttgttcggagtggtctttggtttgggcggtggggcagaccttgggaaggggcttaggaagggagaggcagctcttccttcagctggctctcatcaggctgcagccccctccccgctcccacctccctgctgggaaaccacagcattatcacagcattattgtgacagccacgaacccattgcccacaacccctccaccctcggtcaccccaacctctggctctgagccctgttctgaccaaatcatgatgatgagtatttgggggtgggtgggtaagggggggagtgggaggggacggaaccaactttttctgtattttgtattgtatgttttcttcaacatgtaaccaatcagtatcttgtcaatatagtcagccgatcgatcgacctcaaaaaaaaaaaaaaaaaaaa

SEQ ID NO: 3465 - protein, 216 aa, Homo sapiens; identical to SEQ ID NO: 3463

SEQ ID NO: 3466 - DNA, 3920 bp, Homo sapiens
gtgggccgctcccctctgggaggagggctgcccagaggggtgcgggtgtcgctagcggcccctccccgtgtggggccacgtggcgggtgcgggccgagcccgaggggaagaacctggcccgtggggaggtgggggggaccgaaacggcgctgagccgagccgagagctacggggttcggagcagaggcagcggcagcggcagcggcagtaagagggaggggaggaggcaggagggcgcatggggcgccccggcccctccgacagcgcgccccctccggcccggccgcgctgaaagctccccagcgccgcgccttgaacccacgccccggggccatgccggtcatgaaggggttgctggccccgcaaaacaccttcctggacaccatcgccacccgttttgacggaacgcacagcaacttcctgctggccaacgcacagggcacacggggctttcccatcgtctactgctccgacggcttctgcgagctcacaggctacggtcgcaccgaggtcatgcagaagacctgcagctgccgtttcctctacggcccagagaccagtgagccagccctgcagcgtctgcacaaagccctggagggccaccaggagcaccgggctgaaatctgcttctaccgcaaggatggctcagccttttggtgcctcctggacatgatgcccatcaagaatgagatgggggaggtcgtgctgttcctcttttccttcaaggatatcactcagagtggaagcccaggacttggcccccaaggaggccgcggggacagtaatcacgaaaactcccttggtagaaggggagccacctggaaatttcggtctgccagaagacggagccgtactgtcctacaccgactgaccggccactttggccgccggggccagggaggcatgaaggccaataataacgtgtttgagccaaagccatcagtgcccgagtacaaggtggcctccgtgggggggtctcgctgcctcctcctccactacagcgtctccaaggccatctgggacggccttatcctccttgccaccttctacgttgcggtcaccgtcccctacaatgtctgtttctcgggtgacgatgacacccccatcacttcgcgacacacccttgtcagcgacatcgccgtggaaatgctcttcatcctagatatcatcctgaacttccgcaccacctatgtgtcccagtccggccaggtaatctctgctcctcgttccattggcctccactacctggccacctggttcttcatcgaccttattgctgctctgccctttgacctgctttacatcttcaacatcaccgtgacctcgctggtgcacctactgaagacagtgcggctgttgcggctgctgcggctgctgcagaagctggagcggtactctcagtgcagtgctgtggtgctcacgctgctcatgtcggtctttgcgctccttgcccactggatggcctgcatctggtatgtcatcgggcgccgggagatggaggccaatgacccgctgctctgggacattggctggttgcatgagttgggcaagcgtctggaggtgccctatgtcaatggctcggtgggcggcccatcacggcgcagcgcctacatcgcggcactgtacttcactctaagcagcctcaccagtgtgggctttggcaacgtgtgtgccaacaccgacgcggagaagatcttctccatctgcacgatgctcataggcgccctgatgcacgctgtggtgttcgggaacgtgacagccatcatccagcgcatgtactcgcgccgctcgctctaccacagccgcatgaaggacctcaaggacttcatccgtgtgcaccgcctgccgcggccgctcaagcagcgcatgctcgaatacttccagaccacgtgggccgtcaacagcggcatcgacgccaacgagttactgcgtgacttcccagacgagctgagagctgacattgctatgcacctgaatcgggagatcctgcagctgccgttgttcggggcagcgagcaggggctgcctgcgggccctatcgctgcacatcaagacctcgttctgcgctccgggcgagtacctgttgcgccgtggggatgccctgcaggcacattactatgtctgctccggctcgcttgaggtgctccgagacaacatggtgctggccatcctggggaagggggacctgattggagcagatatccctgagccggggcaggagcctgggttgggagcagacccaaacttcgtgctaaagaccagtgctgatgtgaaagctctgacctactgtggcctgcagcagctgagcagccgagggctggctgaggtcctgaggctctatcctgagtatggggctgccttccgggctggcctgccccgggacctcaccttcaacctgcgccagggctctgacaccagtggcctcagccgcttttcccgatcccctcgcctctcccagccccgctcagaaagcctcggctcctcctcagacaagacgctgccatccatcacagaggccgagagtggcgcggagcctgggggtggtcccaggccccgacggcccctcctgctgcccaacctcagcccagcacggcctcggggctccctggtcagccttttgggcgaggagctgcccccattctcagcccttgtctcctctccttccttatccccatccctgtcccctgccctggctggccagggccacagtgcctcccctcacggcccccccaggtgctctgctgcctggaagccccctcagcttctcattcccccactgggaacctttggacctccggacctcagtccccggatagtggatggcattgaggactctggcagcacagctgaggccccttcattccgattcagcaggaggcctgaactgccaaggccccgctcccaggcgccccctacagggaccaggcccagcccagaattggccagtgaggctgaggaggtgaaggaaaaggtttgccggctgaaccaggagatctctcgtctcaatcaggaggtgtctcagcttagccgggagctgcggcacatcatgggcctgctgcaggccaggctgggtcccccaggccacccagcaggctccgcttggaccccagaccctccttgtccacagctgaggccaccatgcctctctccttgtgcgtccagaccaccacccagcctccaggatactacgcttgctgaagttcactgcccagccagtgtggggaccatggagacagggactgcgctcctggacttgagaccttccatattgcccccctacccctcagagcctgaccctctgggaccctctccagtgccagaggcctcacccccaaccccaagcctcttgaggcacagtttccagtccaggtcagacacgttccactgaccctggcccagggcccaggcctgtctggggtgggcgctgccgctcaccactcagggaggacctgggccccttggcttcctgccttggggtcagcagccaccagctggcctggttggctctggatttctggactttttaatgaagcgtggttacctctgacgctattcccttttccaagccttccccaacctccccctctgtgaggggagccacctgagggctgtggaacccagcaggcatgagatgaaccgcagtgcccattgggctgggcagatgagatcctactttctccccaggacctggaggcaggctgtctctcaaggtggtcttttctgctgctagcaactcaaaaatcccaacagcactccctatcctttccctgaccccagaccgctgccaagcctgttctcccccattacaacatggtctcactcagggcctggactgctccaaaactcgcccaggtctccagctctcctctaccccccaacaccctgggctcacttttggataggaaataaactctttatttt

SEQ ID NO: 3467 - protein, 1017 aa, Homo sapiens
MPVMKGLLAPQNTFLDTIATRFDGTHSNFLLANAQGTRGFPIVYCSDGFCELTGYGRTEVMQKTCSCRFLYGPETSEPALQRLHKALEGHQEHRAEICFYRKDGSAFWCLLDMMPIKNEMGEVVLFLFSFKDITQSGSPGLGPQGGRGDSNHENSLGRRGATWKFRSARRRSRTVLHRLTGHFGRRGQGGMKANNNVFEPKPSVPEYKVASVGGSRCLLLHYSVSKAIWDGLILLATFYVAVTVPYNVCFSGDDDTPITSRHTLVSDIAVEMLFILDIILNFRTTYVSQSGQVISAPRSIGLHYLATWFFIDLIAALPFDLLYIFNITVTSLVHLLKTVRLLRLLRLLQKLERYSQCSAVVLTLLMSVFALLAHWMACIWYVIGRREMEANDPLLWDIGWLHELGKRLEVPYVNGSVGGPSRRSAYIAALYFTLSSLTSVGFGNVCANTDAEKIFSICTMLIGALMHAVVFGNVTAIIQRMYSRRSLYHSRMKDLKDFIRVHRLPRPLKQRMLEYFQTTWAVNSGIDANELLRDFPDELRADIAMHLNREILQLPLFGAASRGCLRALSLHIKTSFCAPGEYLLRRGDALQAHYYVCSGSLEVLRDNMVLAILGKGDLIGADIPEPGQEPGLGADPNFVLKTSADVKALTYCGLQQLSSRGLAEVLRLYPEYGAAFRAGLPRDLTFNLRQGSDTSGLSRFSRSPRLSQPRSESLGSSSDKTLPSITEAESGAEPGGGPRPRRPLLLPNLSPARPRGSLVSLLGEELPPFSALVSSPSLSPSLSPALAGQGHSASPHGPPRCSAAWKPPQLLIPPLGTFGPPDLSPRIVDGIEDSGSTAEAPSFRFSRRPELPRPRSQAPPTGTRPSPELASEAEEVKEKVCRLNQEISRLNQEVSQLSRELRHIMGLLQARLGPPGHPAGSAWTPDPPCPQLRPPCLSPCASRPPPSLQDTTLAEVHCPASVGTMETGTALLDLRPSILPPYPSEPDPLGPSPVPEASPPTPSLLRHSFQSRSDTFH

SEQ ID NO: 3468 - DNA, 577 bp, Homo sapiens
cacaattgacagcctcaaggttcctggctttttgaaccaccacagacatctcctttcccggctaccccaccctgagcgccagacaccatgaaccttccttccacaaaggtctcctgggccgccgtgacgctactgctgctgctgctgctgctgccgcccgcgctgttgtcgtccggggcggctgcacagcccctgcccgactgctgtcgtcaaaagacttgctcttgccgcctctacgagctgctgcacggcgcgggcaatcacgcggccggcatcctcacgctgggcaagcggaggtccgggcccccgggcctccagggtcggctgcagcgcctcctgcaggccagcggcaaccacgccgcgggcatcctgaccatgggccgccgcgcaggcgcagagccagcgccgcgcccctgcctcgggcgccgctgttccgccccggccgccgcctccgtcgcgcccggaggacagtccgggatctgagtcgttcttcgggccctgtcctggcccaggcctctgccctctgcccacccagcgtcagcccccagaaaaaaggcaataaagacgagtctccatt

SEQ ID NO: 3469 - protein, 131 aa, Homo sapiens
MNLPSTKVSWAAVTLLLLLLLLPPALLSSGAAAQPLPDCCRQKTCSCRLYELLHGAGNHAAGILTLGKRRSGPPGLQGRLQRLLQASGNHAAGILTMGRRAGAEPAPRPCLGRRCSAPAAASVAPGGQSGI

SEQ ID NO: 3470 - DNA, 2649 bp, Homo sapiens
cttttcttttttttttgacagggtctcactctgttgcccaagctggggtgcagtggcacgatcttggctcactgtagccttgacatcctgggctcaagggatcctcccatctcagcctcccaagtagctgcgactatgggtgtgacaccacgctgggctagtttttcaattttttgtagagatggagtctccctatgttgctcaggccggttgcgaactcctgggctcaagtgattctcctgcctcagcctcccaaagtgctgggattacagatgatagccacctcacccggcccacccctaccttctgaaagaggcattcttattcttattcccattttgcagatcaggaaacagagctcagtgcagcccactaaattgctcagggccctacagctaacaagcggcagaggcaggatctgcactcaggagctgcttggagatgctgctgtggccactgctgctgctgctgctgctgctgccaacattggccctgctcaggcagcagcggtcccaggatgccaggctgtcctggcttgctggcctccagcaccgagtggcatggggggccctggtctgggcagccacctggcagcgccggaggctggagcagagcacgctccatgtgcaccagagccagcagcaggccctgaggtggtgtctacagggagcccagcgcccccactgttccctcagaaggagcacagacataagcaccttccggaatcatctccctctgaccaaggccagccagacccagcaggaagacagtggagagcagccactgcccccgacctcaaaccaggaccttggggaggcctctctgcaggccaccttgctgggtctggcagccctaaacaaggcctacccagaagtgctggctcagggacgcactgcccgtgtgacgctcacatccccttggccccgacccctgccttggcctgggaataccctgggccaggtgggcacccctggaaccaaggaccctagggccctgctgctggacgcactgaggtccccagggctgagggcactggaggctgggacggctgtcgaacttctggatgttttcttgggcctggagactgatggtgaagagctagctggggcgatagctgccgggaaccctggagcgcctctccgtgaacgggcagctgagctccgggaggccctagagcaggggccacggggactggcccttcggctctggccaaagctgcaggtggtggtgactctggatgcaggaggccaggccgaggctgtggctgccctcggggccttgtggtgccaaggactagccttcttctctcctgcttatgctgcctcgggaggggtgctgggcctaaacctacagccagagcagccccatgggctctaccttctgccccctggggccccctttatcgagctgctcccagtcaaggaaggcacccaggaggaagctgcctccaccctccttttggccgaggcccagcagggcaaggagtatgagctggtgctgacggaccgcgccagcctcaccaggtgccgcctgggtgatgtggtgcgagtggttggtgcctacaatcagtgtccagtcgtcaggttcatctgcaggctggaccagaccctgagtgtgcgaggggaagatattggtgaagacctgttctctgaggccctgggccgggcagtggggcagtgggcgggggccaagctgctggaccatggctgtgtggagagcagcattctggattcctctgcgggctctgctccccactacgaggtgtttgtggcgctgagggggctgaggaatctgtcagaggaaaatcgagacaagctggaccactgccttcaggaagcctctccccgctacaagtccctgcggttctggggcagcgtgggccctgccagagtccacctggtggggcagggagccttccgagcactccgggcagccctcgctgcctgcccctcctcccccttcccccctgcgatgccccgggtccttcggcacaggcacctggcccagtgtctgcaggagagggtggtgtcctgagtcaagtcctgccccaccgcccagctccccccagaggccacctcgcccctccctctgggacctctccggatggggagtccttggccagggtctctgactctgtgtcacctgacatttgcccatgagagccgctgggccttagagaggccttggcccagctgaccggttctgaagtatgggcctccggggttagcagatgccagcagtgcctgcccgtgtccccatgtcccggcatgaaggacactgctagagagttaccatgcacaccgatggtttcctgtatcacagcccaaagaggttctctggtggccacagctgtgtgctcagtcagtgcactgggcaagctagaagtgttggggggttaatgtccccaggagcagcaaccctgagtcaataaggagcaggacctcagcttcattgtccttgagcaggacaattctgaagtgtattctacataaactctcagaggatgcccagcaggatggagtcccagttgcccgcagcagtaacccactcattcatgtacttcctgcgggggctctcccttccctctcttccccactcccccgccttgggcttcctgggatggctcccaaataaacctcttgcacccag

SEQ ID NO: 3471 - protein, 530 aa, Homo sapiens
MLLWPLLLLLLLLPTLALLRQQRSQDARLSWLAGLQHRVAWGALVWAATWQRRRLEQSTLHVHQSQQQALRWCLQGAQRPHCSLRRSTDISTFRNHLPLTKASQTQQEDSGEQPLPPTSNQDLGEASLQATLLGLAALNKAYPEVLAQGRTARVTLTSPWPRPLPWPGNTLGQVGTPGTKDPRALLLDALRSPGLRALEAGTAVELLDVFLGLETDGEELAGAIAAGNPGAPLRERAAELREALEQGPRGLALRLWPKLQVVVTLDAGGQAEAVAALGALWCQGLAFFSPAYAASGGVLGLNLQPEQPHGLYLLPPGAPFIELLPVKEGTQEEAASTLLLAEAQQGKEYELVLTDRASLTRCRLGDVVRVVGAYNQCPVVRFICRLDQTLSVRGEDIGEDLFSEALGRAVGQWAGAKLLDHGCVESSILDSSAGSAPHYEVFVALRGLRNLSEENRDKLDHCLQEASPRYKSLRFWGSVGPARVHLVGQGAFRALRAALAACPSSPFPPAMPRVLRHRHLAQCLQERVVS

SEQ ID NO: 3472 - DNA, 5171 bp, Homo sapiens
ggcgggaggagagtcggcggccggagccgtcaccccgggcggggacccagcgcaggcaactccgcgcggcggcccggccgagggagggagcgagcgggcgggcgggcaagccagacagctgggccggagcagccgcgggcgcccgaggggccgagcgagattgtaaaccatggctgtgtggatacaagctcagcagctccaaggagaagcccttcatcagatgcaagcgttatatggccagcattttcccattgaggtgcggcattatttatcccagtggattgaaagccaagcatgggactcagtagatcttgataatccacaggagaacattaaggccacccagctcctggagggcctggtgcaggagctgcagaagaaggcagagcaccaggtgggggaagatgggtttttactgaagatcaagctggggcactatgccacacagctccagaacacgtatgaccgctgccccatggagctggtccgctgcatccgccatatattgtacaatgaacagaggttggtccgagaagccaacaatggtagctctccagctggaagccttgctgatgccatgtcccagaaacacctccagatcaaccagacgtttgaggagctgcgactggtcacgcaggacacagagaatgagttaaaaaagctgcagcagactcaggagtacttcatcatccagtaccaggagagcctgaggatccaagctcagtttggcccgctggcccagctgagcccccaggagcgtctgagccgggagacggccctccagcagaagcaggtgtctctggaggcctggttgcagcgtgaggcacagacactgcagcagtaccgcgtggagctggccgagaagcaccagaagaccctgcagctgctgcggaagcagcagaccatcatcctggatgacgagctgatccagtggaagcggcggcagcagctggccgggaacggcgggccccccgagggcagcctggacgtgctacagtcctggtgtgagaagttggccgagatcatctggcagaaccggcagcagatccgcagggctgagcacctctgccagcagctgcccatccccggcccagtggaggagatgctggccgaggtcaacgccaccatcacggacattatctcagccctggtgaccagcacgttcatcattgagaagcagcctcctcaggtcctgaagacccagaccaagtttgcagccactgtgcgcctgctggtgggcgggaagctgaacgtgcacatgaaccccccccaggtgaaggccaccatcatcagtgagcagcaggccaagtctctgctcaagaacgagaacacccgcaatgattacagtggcgagatcttgaacaactgctgcgtcatggagtaccaccaagccacaggcacccttagtgcccacttcaggaatatgtccctgaaacgaattaagaggtcagaccgtcgtggggcagagtcggtgacagaagaaaaatttacaatcctgtttgaatcccagttcagtgttggtggaaatgagctggtttttcaagtcaagaccctgtccctgccagtggtggtgatcgttcatggcagccaggacaacaatgcgacggccactgttctctgggacaatgcttttgcagagcctggcagggtgccatttgccgtgcctgacaaagtgctgtggccacagctgtgtgaggcgctcaacatgaaattcaaggccgaagtgcagagcaaccggggcctgaccaaggagaacctcgtgttcctggcgcagaaactgttcaacaacagcagcagccacctggaggactacagtggcctgtctgtgtcctggtcccagttcaacagggagaatttaccaggacggaattacactttctggcaatggtttgacggtgtgatggaagtgttaaaaaaacatctcaagcctcattggaatgatggggccattttggggtttgtaaacaagcaacaggcccatgacctactcattaacaagccagatgggaccttcctcctgagattcagtgactcagaaattggcggcatcaccattgcttggaagtttgattctcaggaaagaatgttttggaatctgatgccttttaccaccagagacttctccattcggtccctagccgaccgcttgggagacttgaattaccttatctacgtgtttcctgatcggccaaaagatgaagtatactccaaatactacacaccagttccctgcgagtctgctactgctaaagctgttgatggatacgtgaagccacagatcaagcaagtggtccctgagtttgtgaacgcatctgcagatgccgggggcggcagcgccacgtacatggaccaggccccctccccagctgtgtgtccccaggctcactataacatgtacccacagaaccctgactcagtccttgacaccgatggggacttcgatctggaggacacaatggacgtagcgcggcgtgtggaggagctcctgggccggccaatggacagtcagtggatcccgcacgcacaatcgtgaccccgcgacctctccatcttcagcttcttcatcttcaccagaggaatcactcttgtggatgttttaattccatgaatcgcttctcttttgaaacaatactcataatgtgaagtgttaatactagttgtgaccttagtgtttctgtgcatggtggcaccagcgaagggagtgcgagtatgtgtttgtgtgtgtgtgtgtgtgtgtgtgtgtgtgcgtgtttgcacgttatggtgtttctccctctcactgtctgagagtttagttgtagcagaggggccacagacagaagctgtggtggtttttactttgtgcaaaaaggcagtgagtttcgtgaagcctggaagttggccatgtgtcttaagagtggctggactttgacatgtggctgtttgaataagagaaggacaaagggaggagaaagcacatgtgctccagtgagtcttcgtcactctgtctgccaagcaattgatatataaccgtgattgtctctgcttttcttctgaaatgtagataactgctttttgacaaagagagccttccctctcccccacccctgtgttcttgggtaggaatgggaaaaggggcaacctacaaagattgttggggcaagggaagtcacaagctttcggatgggcggtggcttttcacaaaacatttagctcatcttattctctctttgtcctctctcccctcctgcccgcccgcaccctggaattgccactcagttcctctgggtgtgcacatatgtttggagaaatagaggagagaaaagagggccacgtaactgagagcttacagtgccaatgccgtttgtgttctggccagagtggagtgcgcagccctgactcccaggcgctgagattgttgcctggttacccaggaagctgctgttccggctgcccagcctttctctgagccagcggatgcacagtccgtggccttcttcaggcttattgatgatgctttttgcaaatgttgaatcatggttctgtttctaagttggatcttttttgttttctccttgccaccctaatttgacatcaaaattctctcttgtgcattgggccctgggtcattcaaacccaggtcacctcattccccttctctgttcacacctaatgtcttgaagagtaggtagcagcagtgtgggctgaacctaggccagcttgcttagcgggtcaccctgctgtgaagtcctggcaggtgttggtaatgtgtggaaatgcagtcagcaagtttgctggggagtttgataaaagtataaaacaaaacaaaaaaagcctcggtataattttgttccacgacttcttctgtagctttacaccagaaggaaggaatgggctacagcaggtagtggaggaagaggggggtgagcaggtgtattaaaatagcttacgggtaaggcctaaaaggtcacccctcggccccctctccaaaagaagggcatgggcacccccaggagaggatggccccaaaaaccttatttttatacatgagagtaaataaacatattttttttacaaaaataacttctgaatttatcagtgttttgccgttaaaaatattcctctatagtaaattatttattggaagatgacttttttaaagctgccgtttgccttggcttggtttcatacactgatttatttttctatgccaggcagtagagtctctctgcctctgaggagcaggctacccgcatcccactcagcccctccctacccctcaagatttgatgaaaattccaaccatgaggatgggtgcatcggggaagggtgagaaggagagcctgcctgctcagggatccaggctcgtagagtcactccctgcccgtctcccagagatgcttcaccagcacctgcctctgagacctcgctctctgttccagcaaccctggttggggggtcagacttgatacactttcaggttgggagtggacccaccccagggcctgctgaggacagagcagccaggccgtcctggctcactttgcagttggcactgggttggggaggaagagagctgatgagtgtggcttccctgagctggggtttccctgcttgtccagttgtgagctgtcctcggtgttaccgaggctgtgcctagagagtggagatttttgatgaaaggtgtgctcgctctctgcgttctatcttctctctcctccttgttcctgcaaaccacaagataaaggtagtggtgtgtctcgaccccatcagcctctcacccactcccagacacacacaagtcctcaaaagtttcagctccgtgtgtgagatgtgcaggttttttctagggggtagggggagactaaaatcgaatataacttaaaatgaaagtatactttttataatttttctttttaaaacttggtgaaattatttcagatacatattttagtgtcaaggcagattagttatttagccaccaaaaaaaagtattgtgtacaatttggggcctcaaatttgactctgcctcaaaaaaaagaaatatatcctatgcagagttacagtcacaaagttgtgtattttatgttacaataaagccttcctctgaagggaaaaaaaaaaaaaaaaaaaaaaaaaaaaaaaaaaaaaaaaaaaaaaaaaaaaaaaaaaaaaaaaaaaaaaaaaaaaaa

SEQ ID NO: 3473 - protein, 787 aa, Homo sapiens
MAVWIQAQQLQGEALHQMQALYGQHFPIEVRHYLSQWIESQAWDSVDLDNPQENIKATQLLEGLVQELQKKAEHQVGEDGFLLKIKLGHYATQLQNTYDRCPMELVRCIRHILYNEQRLVREANNGSSPAGSLADAMSQKHLQINQTFEELRLVTQDTENELKKLQQTQEYFIIQYQESLRIQAQFGPLAQLSPQERLSRETALQQKQVSLEAWLQREAQTLQQYRVELAEKHQKTLQLLRKQQTIILDDELIQWKRRQQLAGNGGPPEGSLDVLQSWCEKLAEIIWQNRQQIRRAEHLCQQLPIPGPVEEMLAEVNATITDIISALVTSTFIIEKQPPQVLKTQTKFAATVRLLVGGKLNVHMNPPQVKATIISEQQAKSLLKNENTRNDYSGEILNNCCVMEYHQATGTLSAHFRNMSLKRIKRSDRRGAESVTEEKFTILFESQFSVGGNELVFQVKTLSLPVVVIVHGSQDNNATATVLWDNAFAEPGRVPFAVPDKVLWPQLCEALNMKFKAEVQSNRGLTKENLVFLAQKLFNNSSSHLEDYSGLSVSWSQFNRENLPGRNYTFWQWFDGVMEVLKKHLKPHWNDGAILGFVNKQQAHDLLINKPDGTFLLRFSDSEIGGITIAWKFDSQERMFWNLMPFTTRDFSIRSLADRLGDLNYLIYVFPDRPKDEVYSKYYTPVPCESATAKAVDGYVKPQIKQVVPEFVNASADAGGGSATYMDQAPSPAVCPQAHYNMYPQNPDSVLDTDGDFDLEDTMDVARRVEELLGRPMDSQWIPHAQS

SEQ ID NO: 3474 - DNA, 4298 bp, Homo sapiens
cagacaggatattcactgctgtggcaaggcctgtagagagtttcgaagttaggaggactcaagacggtccctccctggacttttctgaaggggctcaaaagatgacacgcgccagagctggaaggcgtcgccaattggtccaacttttccctcctccctttttgcggatgagaaaaactgaggcccaggtttgggatttccagagcccgggatttcccggcaacgccgacaaccacattcccccggctattctgacccgccccggttccgggacgctccctgggagccgccgccgagggcctgctgggactcccggggaccccgccgtcggggcagcccccacgcccggcgccgcccgccggaacggcgccgctgttgcgcacttgcaggggagccggcgactgagggcgaggcagggagggagcaagcggggctgggagggctgctggcgcgggctcgccggctgtgtatggtctatcgcaggcagctgacctttgaggaggaaatcgctgctctccgctccttcctgtagtaacagccgccgctgccgccgccgccaggaaccccggccgggagcgagagccgcggggcgcagagccggcccggctgccggacggtgcggccccaccaggtgaacggccatggcgggctggatccaggcccagcagctgcagggagacgcgctgcgccagatgcaggtgctgtacggccagcacttccccatcgaggtccggcactacttggcccagtggattgagagccagccatgggatgccattgacttggacaatccccaggacagagcccaagccacccagctcctggagggcctggtgcaggagctgcagaagaaggcggagcaccaggtgggggaagatgggtttttactgaagatcaagctggggcactacgccacgcagctccagaaaacatatgaccgctgccccctggagctggtccgctgcatccggcacattctgtacaatgaacagaggctggtccgagaagccaacaattgcagctctccggctgggatcctggttgacgccatgtcccagaagcaccttcagatcaaccagacatttgaggagctgcgactggtcacgcaggacacagagaatgagctgaagaaactgcagcagactcaggagtacttcatcatccagtaccaggagagcctgaggatccaagctcagtttgcccagctggcccagctgagcccccaggagcgtctgagccgggagacggccctccagcagaagcaggtgtctctggaggcctggttgcagcgtgaggcacagacactgcagcagtaccgcgtggagctggccgagaagcaccagaagaccctgcagctgctgcggaagcagcagaccatcatcctggatgacgagctgatccagtggaagcggcggcagcagctggccgggaacggcgggccccccgagggcagcctggacgtgctacagtcctggtgtgagaagttggccgagatcatctggcagaaccggcagcagatccgcagggctgagcacctctgccagcagctgcccatccccggcccagtggaggagatgctggccgaggtcaacgccaccatcacggacattatctcagccctggtgaccagcacattcatcattgagaagcagcctcctcaggtcctgaagacccagaccaagtttgcagccaccgtacgcctgctggtgggcgggaagctgaacgtgcacatgaatcccccccaggtgaaggccaccatcatcagtgagcagcaggccaagtctctgcttaaaaatgagaacacccgcaacgagtgcagtggtgagatcctgaacaactgctgcgtgatggagtaccaccaagccacgggcaccctcagtgcccacttcaggaacatgtcactgaagaggatcaagcgtgctgaccggcggggtgcagagtccgtgacagaggagaagttcacagtcctgtttgagtctcagttcagtgttggcagcaatgagcttgtgttccaggtgaagactctgtccctacctgtggttgtcatcgtccacggcagccaggaccacaatgccacggctactgtgctgtgggacaatgcctttgctgagccgggcagggtgccatttgccgtgcctgacaaagtgctgtggccgcagctgtgtgaggcgctcaacatgaaattcaaggccgaagtgcagagcaaccggggcctgaccaaggagaacctcgtgttcctggcgcagaaactgttcaacaacagcagcagccacctggaggactacagtggcctgtccgtgtcctggtcccagttcaacagggagaacttgccgggctggaactacaccttctggcagtggtttgacggggtgatggaggtgttgaagaagcaccacaagccccactggaatgatggggccatcctaggttttgtgaataagcaacaggcccacgacctgctcatcaacaagcccgacgggaccttcttgttgcgctttagtgactcagaaatcgggggcatcaccatcgcctggaagtttgactccccggaacgcaacctgtggaacctgaaaccattcaccacgcgggatttctccatcaggtccctggctgaccggctgggggacctgagctatctcatctatgtgtttcctgaccgccccaaggatgaggtcttctccaagtactacactcctgtgctggctaaagctgttgatggatatgtgaaaccacagatcaagcaagtggtccctgagtttgtgaatgcatctgcagatgctgggggcagcagcgccacgtacatggaccaggccccctccccagctgtgtgcccccaggctccctataacatgtacccacagaaccctgaccatgtactcgatcaggatggagaattcgacctggatgagaccatggatgtggccaggcacgtggaggaactcttacgccgaccaatggacagtcttgactcccgcctctcgccccctgccggtcttttcacctctgccagaggctccctctcatgaatgtttgaatcccacgcttctctttggaaacaatatgcaatgtgaagcggtcgtgttgtgagtttagtaaggttgtgtacactgacacctttgcaggcatgcatgtgcttgtgtgtgtgtgtgtgtgtgtgtccttgtgcatgagctacgcctgcctcccctgtgcagtcctgggatgtggctgcagcagcggtggcctcttttcagatcatggcatccaagagtgcgccgagtctgtctctgtcatggtagagaccgagcctctgtcactgcaggcactcaatgcagccagacctattcctcctgggcccctcatctgctcagcagctatttgaatgagatgattcagaaggggaggggagacaggtaacgtctgtaagctgaagtttcactccggagtgagaagctttgccctcctaagagagagagacagagagacagagagagagaaagagagagtgtgtgggtctatgtaaatgcatctgtcctcatgtgttgatgtaaccgattcatctctcagaagggaggctgggggttcattttcgagtagtattttatactttagtgaacgtggactccagactctctgtgaaccctatgagagcgcgtctgggcccggccatgtccttagcacaggggggccgccggtttgagtgagggtttctgagctgctctgaattagtccttgcttggctgcttggccttgggcttcattcaagtctatgatgctgttgcccacgtttcccgggatatatattctctcccctccgttgggccccagccttctttgcttgcctctctgtttgtaaccttgtcgacaaagaggtagaaaagattgggtctaggatatggtgggtggacaggggccccgggacttggagggttggtcctcttgcctcctggaaaaaacaaaaacaaaaaactgcagtgaaagacaagctgcaaatcagccatgtgctgcgtgcctgtggaatctggagtgaggggtaaaagctgatctggtttgactccgctggaggtggggcctggagcaggccttgcgctgttgcgtaactggctgtgttctggtgaggccttgctcccaaccccacacgctcctccctctgaggctgtaggactcgcagtcaggggcagctgaccatggaagattgagagcccaaggtttaaacttctctgaagggaggtggggatgagaagaggggtttttttgtactttgtacaaagaccacacatttgtgtaaacagtgttttggaataaaatatttttttcat

SEQ ID NO: 3475 - protein, 794 aa, Homo sapiens
MAGWIQAQQLQGDALRQMQVLYGQHFPIEVRHYLAQWIESQPWDAIDLDNPQDRAQATQLLEGLVQELQKKAEHQVGEDGFLLKIKLGHYATQLQKTYDRCPLELVRCIRHILYNEQRLVREANNCSSPAGILVDAMSQKHLQINQTFEELRLVTQDTENELKKLQQTQEYFIIQYQESLRIQAQFAQLAQLSPQERLSRETALQQKQVSLEAWLQREAQTLQQYRVELAEKHQKTLQLLRKQQTIILDDELIQWKRRQQLAGNGGPPEGSLDVLQSWCEKLAEIIWQNRQQIRRAEHLCQQLPIPGPVEEMLAEVNATITDIISALVTSTFIIEKQPPQVLKTQTKFAATVRLLVGGKLNVHMNPPQVKATIISEQQAKSLLKNENTRNECSGEILNNCCVMEYHQATGTLSAHFRNMSLKRIKRADRRGAESVTEEKFTVLFESQFSVGSNELVFQVKTLSLPVVVIVHGSQDHNATATVLWDNAFAEPGRVPFAVPDKVLWPQLCEALNMKFKAEVQSNRGLTKENLVFLAQKLFNNSSSHLEDYSGLSVSWSQFNRENLPGWNYTFWQWFDGVMEVLKKHHKPHWNDGAILGFVNKQQAHDLLINKPDGTFLLRFSDSEIGGITIAWKFDSPERNLWNLKPFTTRDFSIRSLADRLGDLSYLIYVFPDRPKDEVFSKYYTPVLAKAVDGYVKPQIKQVVPEFVNASADAGGSSATYMDQAPSPAVCPQAPYNMYPQNPDHVLDQDGEFDLDETMDVARHVEELLRRPMDSLDSRLSPPAGLFTSARGSLS

SEQ ID NO: 3476 - DNA, 4953 bp, Homo sapiens
ggtttccggagctgcggcggcgcagactgggagggggagccgggggttccgacgtcgcagccgagggaacaagccccaaccggatcctggacaggcaccccggcttggcgctgtctctccccctcggctcggagaggcccttcggcctgagggagcctcgccgcccgtccccggcacacgcgcagccccggcctctcggcctctgccggagaaacaggatggcccaatggaatcagctacagcagcttgacacacggtacctggagcagctccatcagctctacagtgacagcttcccaatggagctgcggcagtttctggccccttggattgagagtcaagattgggcatatgcggccagcaaagaatcacatgccactttggtgtttcataatctcctgggagagattgaccagcagtatagccgcttcctgcaagagtcgaatgttctctatcagcacaatctacgaagaatcaagcagtttcttcagagcaggtatcttgagaagccaatggagattgcccggattgtggcccggtgcctgtgggaagaatcacgccttctacagactgcagccactgcggcccagcaagggggccaggccaaccaccccacagcagccgtggtgacggagaagcagcagatgctggagcagcaccttcaggatgtccggaagagagtgcaggatctagaacagaaaatgaaagtggtagagaatctccaggatgactttgatttcaactataaaaccctcaagagtcaaggagacatgcaagatctgaatggaaacaaccagtcagtgaccaggcagaagatgcagcagctggaacagatgctcactgcgctggaccagatgcggagaagcatcgtgagtgagctggcggggcttttgtcagcgatggagtacgtgcagaaaactctcacggacgaggagctggctgactggaagaggcggcaacagattgcctgcattggaggcccgcccaacatctgcctagatcggctagaaaactggataacgtcattagcagaatctcaacttcagacccgtcaacaaattaagaaactggaggagttgcagcaaaaagtttcctacaaaggggaccccattgtacagcaccggccgatgctggaggagagaatcgtggagctgtttagaaacttaatgaaaagtgcctttgtggtggagcggcagccctgcatgcccatgcatcctgaccggcccctcgtcatcaagaccggcgtccagttcactactaaagtcaggttgctggtcaaattccctgagttgaattatcagcttaaaattaaagtgtgcattgacaaagactctggggacgttgcagctctcagaggatcccggaaatttaacattctgggcacaaacacaaaagtgatgaacatggaagaatccaacaacggcagcctctctgcagaattcaaacacttgaccctgagggagcagagatgtgggaatgggggccgagccaattgtgatgcttccctgattgtgactgaggagctgcacctgatcacctttgagaccgaggtgtatcaccaaggcctcaagattgacctagagacccactccttgccagttgtggtgatctccaacatctgtcagatgccaaatgcctgggcgtccatcctgtggtacaacatgctgaccaacaatcccaagaatgtaaacttttttaccaagcccccaattggaacctgggatcaagtggccgaggtcctgagctggcagttctcctccaccaccaagcgaggactgagcatcgagcagctgactacactggcagagaaactcttgggacctggtgtgaattattcagggtgtcagatcacatgggctaaattttgcaaagaaaacatggctggcaagggcttctccttctgggtctggctggacaatatcattgaccttgtgaaaaagtacatcctggccctttggaacgaagggtacatcatgggctttatcagtaaggagcgggagcgggccatcttgagcactaagcctccaggcaccttcctgctaagattcagtgaaagcagcaaagaaggaggcgtcactttcacttgggtggagaaggacatcagcggtaagacccagatccagtccgtggaaccatacacaaagcagcagctgaacaacatgtcatttgctgaaatcatcatgggctataagatcatggatgctaccaatatcctggtgtctccactggtctatctctatcctgacattcccaaggaggaggcattcggaaagtattgtcggccagagagccaggagcatcctgaagctgacccaggcgctgccccatacctgaagaccaagtttatctgtgtgacaccaacgacctgcagcaataccattgacctgccgatgtccccccgcactttagattcattgatgcagtttggaaataatggtgaaggtgctgaaccctcagcaggagggcagtttgagtccctcacctttgacatggagttgacctcggagtgcgctacctcccccatgtgaggagctgagaacggaagctgcagaaagatacgactgaggcgcctacctgcattctgccacccctcacacagccaaaccccagatcatctgaaactactaactttgtggttccagattttttttaatctcctacttctgctatctttgagcaatctgggcacttttaaaaatagagaaatgagtgaatgtgggtgatctgcttttatctaaatgcaaataaggatgtgttctctgagacccatgatcaggggatgtggcggggggtggctagagggagaaaaaggaaatgtcttgtgttgttttgttcccctgccctcctttctcagcagctttttgttattgttgttgttgttcttagacaagtgcctcctggtgcctgcggcatccttctgcctgtttctgtaagcaaatgccacaggccacctatagctacatactcctggcattgcactttttaaccttgctgacatccaaatagaagataggactatctaagccctaggtttctttttaaattaagaaataataacaattaaagggcaaaaaacactgtatcagcatagcctttctgtatttaagaaacttaagcagccgggcatggtggctcacgcctgtaatcccagcactttgggaggccgaggcggatcataaggtcaggagatcaagaccatcctggctaacacggtgaaaccccgtctctactaaaagtacaaaaaattagctgggtgtggtggtgggcgcctgtagtcccagctactcgggaggctgaggcaggagaatcgcttgaacctgagaggcggaggttgcagtgagccaaaattgcaccactgcacactgcactccatcctgggcgacagtctgagactctgtctcaaaaaaaaaaaaaaaaaaaagaaacttcagttaacagcctccttggtgctttaagcattcagcttccttcaggctggtaatttatataatccctgaaacgggcttcaggtcaaacccttaagacatctgaagctgcaacctggcctttggtgttgaaataggaaggtttaaggagaatctaagcattttagacttttttttataaatagacttattttcctttgtaatgtattggccttttagtgagtaaggctgggcagagggtgcttacaaccttgactccctttctccctggacttgatctgctgtttcagaggctaggttgtttctgtgggtgccttatcagggctgggatacttctgattctggcttccttcctgccccaccctcccgaccccagtccccctgatcctgctagaggcatgtctccttgcgtgtctaaaggtccctcatcctgtttgttttaggaatcctggtctcaggacctcatggaagaagagggggagagagttacaggttggacatgatgcacactatggggccccagcgacgtgtctggttgagctcagggaatatggttcttagccagtttcttggtgatatccagtggcacttgtaatggcgtcttcattcagttcatgcagggcaaaggcttactgataaacttgagtctgccctcgtatgagggtgtatacctggcctccctctgaggctggtgactcctccctgctggggccccacaggtgaggcagaacagctagagggcctccccgcctgcccgccttggctggctagctcgcctctcctgtgcgtatgggaacacctagcacgtgctggatgggctgcctctgactcagaggcatggccggatttggcaactcaaaaccaccttgcctcagctgatcagagtttctgtggaattctgtttgttaaatcaaattagctggtctctgaattaagggggagacgaccttctctaagatgaacagggttcgccccagtcctcctgcctggagacagttgatgtgtcatgcagagctcttacttctccagcaacactcttcagtacataataagcttaactgataaacagaatatttagaaaggtgagacttgggcttaccattgggtttaaatcatagggacctagggcgagggttcagggcttctctggagcagatattgtcaagttcatggccttaggtagcatgtatctggtcttaactctgattgtagcaaaagttctgagaggagctgagccctgttgtggcccattaaagaacagggtcctcaggccctgcccgcttcctgtccactgccccctccccatccccagcccagccgagggaatcccgtgggttgcttacctacctataaggtggtttataagctgctgtcctggccactgcattcaaattccaatgtgtacttcatagtgtaaaaatttatattattgtgaggttttttgtcttttttttttttttttttttttggtatattgctgtatctactttaacttccagaaataaacgttatataggaaccgtaaaaa

SEQ ID NO: 3477 - protein, 769 aa, Homo sapiens
MAQWNQLQQLDTRYLEQLHQLYSDSFPMELRQFLAPWIESQDWAYAASKESHATLVFHNLLGEIDQQYSRFLQESNVLYQHNLRRIKQFLQSRYLEKPMEIARIVARCLWEESRLLQTAATAAQQGGQANHPTAAVVTEKQQMLEQHLQDVRKRVQDLEQKMKVVENLQDDFDFNYKTLKSQGDMQDLNGNNQSVTRQKMQQLEQMLTALDQMRRSIVSELAGLLSAMEYVQKTLTDEELADWKRRQQIACIGGPPNICLDRLENWITSLAESQLQTRQQIKKLEELQQKVSYKGDPIVQHRPMLEERIVELFRNLMKSAFVVERQPCMPMHPDRPLVIKTGVQFTTKVRLLVKFPELNYQLKIKVCIDKDSGDVAALRGSRKFNILGTNTKVMNMEESNNGSLSAEFKHLTLREQRCGNGGRANCDASLIVTEELHLITFETEVYHQGLKIDLETHSLPVVVISNICQMPNAWASILWYNMLTNNPKNVNFFTKPPIGTWDQVAEVLSWQFSSTTKRGLSIEQLTTLAEKLLGPGVNYSGCQITWAKFCKENMAGKGFSFWVWLDNIIDLVKKYILALWNEGYIMGFISKERERAILSTKPPGTFLLRFSESSKEGGVTFTWVEKDISGKTQIQSVEPYTKQQLNNMSFAEIIMGYKIMDATNILVSPLVYLYPDIPKEEAFGKYCRPESQEHPEADPGAAPYLKTKFICVTPTTCSNTIDLPMSPRTLDSLMQFGNNGEGAEPSAGGQFESLTFDMELTSECATSPM

SEQ ID NO: 3478 - DNA, 4978 bp, Homo sapiens
ggtttccggagctgcggcggcgcagactgggagggggagccgggggttccgacgtcgcagccgagggaacaagccccaaccggatcctggacaggcaccccggcttggcgctgtctctccccctcggctcggagaggcccttcggcctgagggagcctcgccgcccgtccccggcacacgcgcagccccggcctctcggcctctgccggagaaacagttgggacccctgattttagcaggatggcccaatggaatcagctacagcagcttgacacacggtacctggagcagctccatcagctctacagtgacagcttcccaatggagctgcggcagtttctggccccttggattgagagtcaagattgggcatatgcggccagcaaagaatcacatgccactttggtgtttcataatctcctgggagagattgaccagcagtatagccgcttcctgcaagagtcgaatgttctctatcagcacaatctacgaagaatcaagcagtttcttcagagcaggtatcttgagaagccaatggagattgcccggattgtggcccggtgcctgtgggaagaatcacgccttctacagactgcagccactgcggcccagcaagggggccaggccaaccaccccacagcagccgtggtgacggagaagcagcagatgctggagcagcaccttcaggatgtccggaagagagtgcaggatctagaacagaaaatgaaagtggtagagaatctccaggatgactttgatttcaactataaaaccctcaagagtcaaggagacatgcaagatctgaatggaaacaaccagtcagtgaccaggcagaagatgcagcagctggaacagatgctcactgcgctggaccagatgcggagaagcatcgtgagtgagctggcggggcttttgtcagcgatggagtacgtgcagaaaactctcacggacgaggagctggctgactggaagaggcggcaacagattgcctgcattggaggcccgcccaacatctgcctagatcggctagaaaactggataacgtcattagcagaatctcaacttcagacccgtcaacaaattaagaaactggaggagttgcagcaaaaagtttcctacaaaggggaccccattgtacagcaccggccgatgctggaggagagaatcgtggagctgtttagaaacttaatgaaaagtgcctttgtggtggagcggcagccctgcatgcccatgcatcctgaccggcccctcgtcatcaagaccggcgtccagttcactactaaagtcaggttgctggtcaaattccctgagttgaattatcagcttaaaattaaagtgtgcattgacaaagactctggggacgttgcagctctcagaggatcccggaaatttaacattctgggcacaaacacaaaagtgatgaacatggaagaatccaacaacggcagcctctctgcagaattcaaacacttgaccctgagggagcagagatgtgggaatgggggccgagccaattgtgatgcttccctgattgtgactgaggagctgcacctgatcacctttgagaccgaggtgtatcaccaaggcctcaagattgacctagagacccactccttgccagttgtggtgatctccaacatctgtcagatgccaaatgcctgggcgtccatcctgtggtacaacatgctgaccaacaatcccaagaatgtaaacttttttaccaagcccccaattggaacctgggatcaagtggccgaggtcctgagctggcagttctcctccaccaccaagcgaggactgagcatcgagcagctgactacactggcagagaaactcttgggacctggtgtgaattattcagggtgtcagatcacatgggctaaattttgcaaagaaaacatggctggcaagggcttctccttctgggtctggctggacaatatcattgaccttgtgaaaaagtacatcctggccctttggaacgaagggtacatcatgggctttatcagtaaggagcgggagcgggccatcttgagcactaagcctccaggcaccttcctgctaagattcagtgaaagcagcaaagaaggaggcgtcactttcacttgggtggagaaggacatcagcggtaagacccagatccagtccgtggaaccatacacaaagcagcagctgaacaacatgtcatttgctgaaatcatcatgggctataagatcatggatgctaccaatatcctggtgtctccactggtctatctctatcctgacattcccaaggaggaggcattcggaaagtattgtcggccagagagccaggagcatcctgaagctgacccaggtagcgctgccccatacctgaagaccaagtttatctgtgtgacaccaacgacctgcagcaataccattgacctgccgatgtccccccgcactttagattcattgatgcagtttggaaataatggtgaaggtgctgaaccctcagcaggagggcagtttgagtccctcacctttgacatggagttgacctcggagtgcgctacctcccccatgtgaggagctgagaacggaagctgcagaaagatacgactgaggcgcctacctgcattctgccacccctcacacagccaaaccccagatcatctgaaactactaactttgtggttccagattttttttaatctcctacttctgctatctttgagcaatctgggcacttttaaaaatagagaaatgagtgaatgtgggtgatctgcttttatctaaatgcaaataaggatgtgttctctgagacccatgatcaggggatgtggcggggggtggctagagggagaaaaaggaaatgtcttgtgttgttttgttcccctgccctcctttctcagcagctttttgttattgttgttgttgttcttagacaagtgcctcctggtgcctgcggcatccttctgcctgtttctgtaagcaaatgccacaggccacctatagctacatactcctggcattgcactttttaaccttgctgacatccaaatagaagataggactatctaagccctaggtttctttttaaattaagaaataataacaattaaagggcaaaaaacactgtatcagcatagcctttctgtatttaagaaacttaagcagccgggcatggtggctcacgcctgtaatcccagcactttgggaggccgaggcggatcataaggtcaggagatcaagaccatcctggctaacacggtgaaaccccgtctctactaaaagtacaaaaaattagctgggtgtggtggtgggcgcctgtagtcccagctactcgggaggctgaggcaggagaatcgcttgaacctgagaggcggaggttgcagtgagccaaaattgcaccactgcacactgcactccatcctgggcgacagtctgagactctgtctcaaaaaaaaaaaaaaaaaaaagaaacttcagttaacagcctccttggtgctttaagcattcagcttccttcaggctggtaatttatataatccctgaaacgggcttcaggtcaaacccttaagacatctgaagctgcaacctggcctttggtgttgaaataggaaggtttaaggagaatctaagcattttagacttttttttataaatagacttattttcctttgtaatgtattggccttttagtgagtaaggctgggcagagggtgcttacaaccttgactccctttctccctggacttgatctgctgtttcagaggctaggttgtttctgtgggtgccttatcagggctgggatacttctgattctggcttccttcctgccccaccctcccgaccccagtccccctgatcctgctagaggcatgtctccttgcgtgtctaaaggtccctcatcctgtttgttttaggaatcctggtctcaggacctcatggaagaagagggggagagagttacaggttggacatgatgcacactatggggccccagcgacgtgtctggttgagctcagggaatatggttcttagccagtttcttggtgatatccagtggcacttgtaatggcgtcttcattcagttcatgcagggcaaaggcttactgataaacttgagtctgccctcgtatgagggtgtatacctggcctccctctgaggctggtgactcctccctgctggggccccacaggtgaggcagaacagctagagggcctccccgcctgcccgccttggctggctagctcgcctctcctgtgcgtatgggaacacctagcacgtgctggatgggctgcctctgactcagaggcatggccggatttggcaactcaaaaccaccttgcctcagctgatcagagtttctgtggaattctgtttgttaaatcaaattagctggtctctgaattaagggggagacgaccttctctaagatgaacagggttcgccccagtcctcctgcctggagacagttgatgtgtcatgcagagctcttacttctccagcaacactcttcagtacataataagcttaactgataaacagaatatttagaaaggtgagacttgggcttaccattgggtttaaatcatagggacctagggcgagggttcagggcttctctggagcagatattgtcaagttcatggccttaggtagcatgtatctggtcttaactctgattgtagcaaaagttctgagaggagctgagccctgttgtggcccattaaagaacagggtcctcaggccctgcccgcttcctgtccactgccccctccccatccccagcccagccgagggaatcccgtgggttgcttacctacctataaggtggtttataagctgctgtcctggccactgcattcaaattccaatgtgtacttcatagtgtaaaaatttatattattgtgaggttttttgtcttttttttttttttttttttttggtatattgctgtatctactttaacttccagaaataaacgttatataggaaccgtaaaaa

SEQ ID NO: 3479 - protein, 770 aa, Homo sapiens
MAQWNQLQQLDTRYLEQLHQLYSDSFPMELRQFLAPWIESQDWAYAASKESHATLVFHNLLGEIDQQYSRFLQESNVLYQHNLRRIKQFLQSRYLEKPMEIARIVARCLWEESRLLQTAATAAQQGGQANHPTAAVVTEKQQMLEQHLQDVRKRVQDLEQKMKVVENLQDDFDFNYKTLKSQGDMQDLNGNNQSVTRQKMQQLEQMLTALDQMRRSIVSELAGLLSAMEYVQKTLTDEELADWKRRQQIACIGGPPNICLDRLENWITSLAESQLQTRQQIKKLEELQQKVSYKGDPIVQHRPMLEERIVELFRNLMKSAFVVERQPCMPMHPDRPLVIKTGVQFTTKVRLLVKFPELNYQLKIKVCIDKDSGDVAALRGSRKFNILGTNTKVMNMEESNNGSLSAEFKHLTLREQRCGNGGRANCDASLIVTEELHLITFETEVYHQGLKIDLETHSLPVVVISNICQMPNAWASILWYNMLTNNPKNVNFFTKPPIGTWDQVAEVLSWQFSSTTKRGLSIEQLTTLAEKLLGPGVNYSGCQITWAKFCKENMAGKGFSFWVWLDNIIDLVKKYILALWNEGYIMGFISKERERAILSTKPPGTFLLRFSESSKEGGVTFTWVEKDISGKTQIQSVEPYTKQQLNNMSFAEIIMGYKIMDATNILVSPLVYLYPDIPKEEAFGKYCRPESQEHPEADPGSAAPYLKTKFICVTPTTCSNTIDLPMSPRTLDSLMQFGNNGEGAEPSAGGQFESLTFDMELTSECATSPM

SEQ ID NO: 3480 - DNA, 4819 bp, Homo sapiens
cgctgtctctccccctcggctcggagaggcccttcggcctgagggagcctcgccgcccgtccccggcacacgcgcagccccggcctctcggcctctgccggagaaacagttgggacccctgattttagcaggatggcccaatggaatcagctacagcagcttgacacacggtacctggagcagctccatcagctctacagtgacagcttcccaatggagctgcggcagtttctggccccttggattgagagtcaagattgggcatatgcggccagcaaagaatcacatgccactttggtgtttcataatctcctgggagagattgaccagcagtatagccgcttcctgcaagagtcgaatgttctctatcagcacaatctacgaagaatcaagcagtttcttcagagcaggtatcttgagaagccaatggagattgcccggattgtggcccggtgcctgtgggaagaatcacgccttctacagactgcagccactgcggcccagcaagggggccaggccaaccaccccacagcagccgtggtgacggagaagcagcagatgctggagcagcaccttcaggatgtccggaagagagtgcaggatctagaacagaaaatgaaagtggtagagaatctccaggatgactttgatttcaactataaaaccctcaagagtcaaggagacatgcaagatctgaatggaaacaaccagtcagtgaccaggcagaagatgcagcagctggaacagatgctcactgcgctggaccagatgcggagaagcatcgtgagtgagctggcggggcttttgtcagcgatggagtacgtgcagaaaactctcacggacgaggagctggctgactggaagaggcggcaacagattgcctgcattggaggcccgcccaacatctgcctagatcggctagaaaactggataacgtcattagcagaatctcaacttcagacccgtcaacaaattaagaaactggaggagttgcagcaaaaagtttcctacaaaggggaccccattgtacagcaccggccgatgctggaggagagaatcgtggagctgtttagaaacttaatgaaaagtgcctttgtggtggagcggcagccctgcatgcccatgcatcctgaccggcccctcgtcatcaagaccggcgtccagttcactactaaagtcaggttgctggtcaaattccctgagttgaattatcagcttaaaattaaagtgtgcattgacaaagactctggggacgttgcagctctcagaggatcccggaaatttaacattctgggcacaaacacaaaagtgatgaacatggaagaatccaacaacggcagcctctctgcagaattcaaacacttgaccctgagggagcagagatgtgggaatgggggccgagccaattgtgatgcttccctgattgtgactgaggagctgcacctgatcacctttgagaccgaggtgtatcaccaaggcctcaagattgacctagagacccactccttgccagttgtggtgatctccaacatctgtcagatgccaaatgcctgggcgtccatcctgtggtacaacatgctgaccaacaatcccaagaatgtaaacttttttaccaagcccccaattggaacctgggatcaagtggccgaggtcctgagctggcagttctcctccaccaccaagcgaggactgagcatcgagcagctgactacactggcagagaaactcttgggacctggtgtgaattattcagggtgtcagatcacatgggctaaattttgcaaagaaaacatggctggcaagggcttctccttctgggtctggctggacaatatcattgaccttgtgaaaaagtacatcctggccctttggaacgaagggtacatcatgggctttatcagtaaggagcgggagcgggccatcttgagcactaagcctccaggcaccttcctgctaagattcagtgaaagcagcaaagaaggaggcgtcactttcacttgggtggagaaggacatcagcggtaagacccagatccagtccgtggaaccatacacaaagcagcagctgaacaacatgtcatttgctgaaatcatcatgggctataagatcatggatgctaccaatatcctggtgtctccactggtctatctctatcctgacattcccaaggaggaggcattcggaaagtattgtcggccagagagccaggagcatcctgaagctgacccaggtagcgctgccccatacctgaagaccaagtttatctgtgtgacaccattcattgatgcagtttggaaataatggtgaaggtgctgaaccctcagcaggagggcagtttgagtccctcacctttgacatggagttgacctcggagtgcgctacctcccccatgtgaggagctgagaacggaagctgcagaaagatacgactgaggcgcctacctgcattctgccacccctcacacagccaaaccccagatcatctgaaactactaactttgtggttccagattttttttaatctcctacttctgctatctttgagcaatctgggcacttttaaaaatagagaaatgagtgaatgtgggtgatctgcttttatctaaatgcaaataaggatgtgttctctgagacccatgatcaggggatgtggcggggggtggctagagggagaaaaaggaaatgtcttgtgttgttttgttcccctgccctcctttctcagcagctttttgttattgttgttgttgttcttagacaagtgcctcctggtgcctgcggcatccttctgcctgtttctgtaagcaaatgccacaggccacctatagctacatactcctggcattgcactttttaaccttgctgacatccaaatagaagataggactatctaagccctaggtttctttttaaattaagaaataataacaattaaagggcaaaaaacactgtatcagcatagcctttctgtatttaagaaacttaagcagccgggcatggtggctcacgcctgtaatcccagcactttgggaggccgaggcggatcataaggtcaggagatcaagaccatcctggctaacacggtgaaaccccgtctctactaaaagtacaaaaaattagctgggtgtggtggtgggcgcctgtagtcccagctactcgggaggctgaggcaggagaatcgcttgaacctgagaggcggaggttgcagtgagccaaaattgcaccactgcacactgcactccatcctgggcgacagtctgagactctgtctcaaaaaaaaaaaaaaaaaaaagaaacttcagttaacagcctccttggtgctttaagcattcagcttccttcaggctggtaatttatataatccctgaaacgggcttcaggtcaaacccttaagacatctgaagctgcaacctggcctttggtgttgaaataggaaggtttaaggagaatctaagcattttagacttttttttataaatagacttattttcctttgtaatgtattggccttttagtgagtaaggctgggcagagggtgcttacaaccttgactccctttctccctggacttgatctgctgtttcagaggctaggttgtttctgtgggtgccttatcagggctgggatacttctgattctggcttccttcctgccccaccctcccgaccccagtccccctgatcctgctagaggcatgtctccttgcgtgtctaaaggtccctcatcctgtttgttttaggaatcctggtctcaggacctcatggaagaagagggggagagagttacaggttggacatgatgcacactatggggccccagcgacgtgtctggttgagctcagggaatatggttcttagccagtttcttggtgatatccagtggcacttgtaatggcgtcttcattcagttcatgcagggcaaaggcttactgataaacttgagtctgccctcgtatgagggtgtatacctggcctccctctgaggctggtgactcctccctgctggggccccacaggtgaggcagaacagctagagggcctccccgcctgcccgccttggctggctagctcgcctctcctgtgcgtatgggaacacctagcacgtgctggatgggctgcctctgactcagaggcatggccggatttggcaactcaaaaccaccttgcctcagctgatcagagtttctgtggaattctgtttgttaaatcaaattagctggtctctgaattaagggggagacgaccttctctaagatgaacagggttcgccccagtcctcctgcctggagacagttgatgtgtcatgcagagctcttacttctccagcaacactcttcagtacataataagcttaactgataaacagaatatttagaaaggtgagacttgggcttaccattgggtttaaatcatagggacctagggcgagggttcagggcttctctggagcagatattgtcaagttcatggccttaggtagcatgtatctggtcttaactctgattgtagcaaaagttctgagaggagctgagccctgttgtggcccattaaagaacagggtcctcaggccctgcccgcttcctgtccactgccccctccccatccccagcccagccgagggaatcccgtgggttgcttacctacctataaggtggtttataagctgctgtcctggccactgcattcaaattccaatgtgtacttcatagtgtaaaaatttatattattgtgaggttttttgtcttttttttttttttttttttttggtatattgctgtatctactttaacttccagaaataaacgttatataggaaccgtaaaa

SEQ ID NO: 3481 - protein, 722 aa, Homo sapiens
MAQWNQLQQLDTRYLEQLHQLYSDSFPMELRQFLAPWIESQDWAYAASKESHATLVFHNLLGEIDQQYSRFLQESNVLYQHNLRRIKQFLQSRYLEKPMEIARIVARCLWEESRLLQTAATAAQQGGQANHPTAAVVTEKQQMLEQHLQDVRKRVQDLEQKMKVVENLQDDFDFNYKTLKSQGDMQDLNGNNQSVTRQKMQQLEQMLTALDQMRRSIVSELAGLLSAMEYVQKTLTDEELADWKRRQQIACIGGPPNICLDRLENWITSLAESQLQTRQQIKKLEELQQKVSYKGDPIVQHRPMLEERIVELFRNLMKSAFVVERQPCMPMHPDRPLVIKTGVQFTTKVRLLVKFPELNYQLKIKVCIDKDSGDVAALRGSRKFNILGTNTKVMNMEESNNGSLSAEFKHLTLREQRCGNGGRANCDASLIVTEELHLITFETEVYHQGLKIDLETHSLPVVVISNICQMPNAWASILWYNMLTNNPKNVNFFTKPPIGTWDQVAEVLSWQFSSTTKRGLSIEQLTTLAEKLLGPGVNYSGCQITWAKFCKENMAGKGFSFWVWLDNIIDLVKKYILALWNEGYIMGFISKERERAILSTKPPGTFLLRFSESSKEGGVTFTWVEKDISGKTQIQSVEPYTKQQLNNMSFAEIIMGYKIMDATNILVSPLVYLYPDIPKEEAFGKYCRPESQEHPEADPGSAAPYLKTKFICVTPFIDAVWK

SEQ ID NO: 3482 - DNA, 3580 bp, Homo sapiens
agttctggccgctgtcccggtgcgcacggacgtggctcgagtttcctctgctctccgctctcgcccgctagctctcctcccttccgctcctgcttctctccgggtctcccgctccagctccagccccacccggccggtcccgcacggctccgggtagccatggaggaccccacgctctatattgtcgagcggccgcttcccgggtaccccgacgccgaggccccggagccttcctccgctggggctcaggcagcggaggagccgtcgggggccggctcagaagagctgatcaagtcggaccaggtgaacggcgtgctggtgctgagcctcctggacaaaatcatcggggccgtagaccagatccagctgactcaagcacagctggaggagcggcaggcggagatggagggcgcagtgcagagcatccagggcgagctgagcaagctgggcaaggcgcacgccaccacgagcaatacggtgagcaagctgctggagaaggtgcgcaaggtcagcgtcaacgtgaagaccgtgcgcggcagcctggagcgccaggcggggcagatcaagaagctggaggtcaacgaggccgagctgctgcggcgccgcaactttaaagtcatgatctaccaggatgaagtgaagctgccggccaaactgagcatcagcaaatcgctgaaagagtcggaggcgctgccagagaaggagggcgaggagctgggcgagggcgagcggcccgaggaggacgcagcggcgctggagctttcgtcggacgaggcggtggaggttgaggaggttattgaggagtcccgcgcagagcgtatcaagcgcagcggcctgcggcgcgtggacgacttcaagaaggccttctccaaggagaagatggagaagaccaaggtgcgtacccgcgagaacctggagaagacgcgcctcaagaccaaggaaaacctggagaagacgcggcacaccctggagaagcgcatgaacaagctgggcacgcgcctggtgcccgccgagcggcgcgagaaactgaagacgtcgcgagacaagttgcgcaaatccttcacgcccgaccacgtggtgtacgcgcgctccaagaccgcggtctacaaggtgccacccttcaccttccacgtcaagaagatccgcgagggccaggtggaagtgctcaaggccaccgagatggtggaggtgggcgccgacgacgacgagggcggcgcggagcgcggggaggccggcgacctgcggcgcgggagcagccccgacgtgcacgcgctgctggagatcaccgaggagtcggacgccgtgctggtggacaagagcgacagcgactgagccgcccccgctgccacccaccccattcctcgctccttccgaacttcctctttcgcattctctctcggctcgagctggctgagatttttctaaattgaaaacacgcccccctccccacacctccaggaactccactcccagtcttagagctgttaggacccgatggggaggcagcccccgcagtggacagcccccgcttggacacagtccgagtggaatgggaagggaatggtcaatccctgtcctggttgtccaagtcgggatctcagaggaaattgcagtgattccacggttaggcccccctgggggggctgccttcccctcagcctctccccacaccacccacccagctgctgtcattccgctcactgagctcttcttcattctcaccctgatccctgggggactcaaagccaaaactgcccaaagaggaaagattgaatcctaaaggggatccttgcccccatgggaggccccctactagaaggacgtgaaagcagcttttgggggaaactgaggcagtggggaagacagagcagaatgagccctcaccctggctgggggtccagcacaggctgtatctgcagagggtcccagaggaacgctggagccaagagaagccctgggaaggaggggtggggaacgacatgcatgtgagggatggcacactgatgtgtttatgcacctgtacacaggagcgcatggccatggctttggaaaggagaatggaaaaatagaagaaggtcggccgggcttggtggcttaagcctgtaaccccagcactttgggaggccgaggtgggcggatcacctgaggtcaggagttcgggaccagcctggcaaacaccccatctctactaagcgaaaacccatctctactaaaattacaaaaattagctgggcatggttgcgcatgcctgtaatcccagctactttggaggctgaggtggggagaattgcttgaacctgggaggtggaggttgcagtgagccaaggtcgcgacactgcactccagcctgggtgacagagtgagactccatctcaacagaaggaaaaaaaaggaaaataggagaaggtggaaatgggtgaagagagaagtcccctcactagctgcatgagaaatctatcttactgtggttctccatgggcagcaggaccatttttcagaatcaagagggaggacagtgtgagaaggcgatgatccaaagaagacagagaggtcagccccacccgatccctcaaatgggctcttggaggcacccccaggggcagcccatttctcaaagtccagaaaattagggtcccagaagggggcagcagcaggctgggagttaggagggagagcagggtgccggccctgccaccaagttgagagctggaggggaggtggggagagaacatcacagagcagccagccctggttcactcctggcagtttcttctcaagctccttccctaggagcatggtggcacgtgcctgtggtctcagctacttgggaggctgaggcgggaggatcgccagagcccaggagtttgaggctgcagtgagctatgagggtgcctctgtgctccatcctaggcaacagagtgagacgctgtttaaaaaggaaaaaatccttccctagagctagtatcctaaagctgcagagctagcccagacctcattggtttccttgtccttggggtgcttttcctgaatctttgggggtgaagggagtgttgctcccagtccagaggcctgattctgttcggactgggttctcaagacacgaccaggttctcaagacacgagtccccttgttcctccccattaaagggggtttgtcagaagcaagaacagcccctctccccagtcacagcctgaagggaggccccgagagcttcctccttccccccacctgctccttaccttctctgccctgctttttagaactgcagttcattgttttaagggattgggggagggagcctggggacacaaaccttttatacaatacaaagctttgcttttttttttttttttcttccttttccctttctcggttctcttctctcctctgaatggctgaagacccctctgccgagggaggttggggattgtgggacaaggtcccttggtgctgatggcctgaaggggcctgagctgtgggcagatgcagttttctgtgggcttggggaacctctcacgttgctgtgtcctggtgagcagcccgaccaataaacctgcttttccaaaaaaaaaaaaaaaa

SEQ ID NO: 3483 - protein, 390 aa, Homo sapiens
MEDPTLYIVERPLPGYPDAEAPEPSSAGAQAAEEPSGAGSEELIKSDQVNGVLVLSLLDKIIGAVDQIQLTQAQLEERQAEMEGAVQSIQGELSKLGKAHATTSNTVSKLLEKVRKVSVNVKTVRGSLERQAGQIKKLEVNEAELLRRRNFKVMIYQDEVKLPAKLSISKSLKESEALPEKEGEELGEGERPEEDAAALELSSDEAVEVEEVIEESRAERIKRSGLRRVDDFKKAFSKEKMEKTKVRTRENLEKTRLKTKENLEKTRHTLEKRMNKLGTRLVPAERREKLKTSRDKLRKSFTPDHVVYARSKTAVYKVPPFTFHVKKIREGQVEVLKATEMVEVGADDDEGGAERGEAGDLRRGSSPDVHALLEITEESDAVLVDKSDSD

SEQ ID NO: 3484 - DNA, 4187 bp, Homo sapiens
ggcggcgcaggggcggggctttacggacgcaagcacgtcgaagcgctgctcctggagccgcggagggtgcgggtttggctgcggtggtttctgtggcggttgctgtggcggagtttggaggttggagagaaatccaggtactcactagactggtaccttctgccaccatgggggagcttttccggagtgaagaaatgacactggcccagctttttctacagtcagaggctgcttattgttgtgtcagtgaattaggagaacttggaaaggttcagtttcgtgacttaaatccagatgtgaatgttttccaacggaaatttgtgaatgaagttagaagatgtgaagaaatggatcgaaagcttcgatttgttgagaaagagataagaaaagctaacattccgattatggacaccggtgaaaacccagaggttcccttcccccgggacatgattgacttagaggccaattttgagaagattgaaaatgaactgaaggaaatcaacacaaaccaggaagctctgaagagaaacttcctggaactgaccgaattaaaatttatacttcgcaaaactcagcaattttttgatgagatggcggatccagacttgttggaagagtcctcatccctcttggagccaagtgagatgggaagaggcactcctttaagacttggcttcgtggctggtgtcattaaccgggagcgcatccctacttttgagcgcatgctttggcgggtatgccggggaaatgtgttcctgcgacaggctgaaatcgagaaccccctggaggatcctgtgactggcgactacgtgcacaagtctgtgtttatcattttcttccaaggcgatcagctgaaaaacagagtcaagaaaatctgtgaagggttccgagcctcactctatccctgtcctgagacaccacaggagaggaaggaaatggcttctggagtgaataccaggattgatgatctccaaatggttctgaatcaaacggaggatcaccgccagagggttctgcaggcagctgctaagaacatccgtgtctggttcatcaaagtgcggaagatgaaggccatctatcacaccctgaacctgtgcaacatagatgtgactcagaaatgcttgattgcagaggtctggtgccctgtcaccgaccttgactccatccagtttgcactcagaaggggcacggaacacagtggttccactgtaccttccattttgaacaggatgcagacaaaccagactcccccaacctataacaaaaccaacaagtttacctatggctttcagaacatagtagatgcttatggaattggaacttaccgagagataaatccagctccgtatactattatcacgttcccttttctatttgctgtgatgtttggagacttcggtcatggcattttaatgaccctttttgctgtgtggatggtactgagggagagccggatcctttcccagaagaatgagaatgagatgtttagcactgtgttcagtggtcgatacattattttattgatgggtgtgttctccatgtacactggcctcatctacaatgattgcttttccaagtctcttaatatctttgggtcatcctggagtgtacggccgatgtttacttataattggactgaagagacgcttcgggggaaccctgttctacagctgaacccagccctccctggagtgtttggtggaccatacccttttggcattgatccaatttggaacattgctaccaataaactgacgttcttgaactcctttaagatgaagatgtctgttatccttggtatcatccatatgctgtttggagtcagcctgagtctgttcaaccatatctatttcaagaagcccctgaatatctactttggatttattcctgaaataatcttcatgacctctttgtttggctatttggttatccttattttttacaagtggacggcctatgatgctcatacctctgagaatgcaccaagccttctgatccatttcataaacatgttcctcttttcctacccagagtctggttattcaatgttgtattctggacagaaaggaattcagtgtttcctggtagtggttgcactactgtgtgtaccttggatgctgctgtttaaaccattggtccttcgccgtcagtatttgaggagaaagcatttgggaactctcaactttggtgggatcagggtgggcaacggaccgacagaggaggatgctgagattattcagcatgaccagctctccacccactcagaggacgcagacgagtttgactttggggacaccatggtccaccaggccatccacaccatcgagtactgcctgggctgcatctccaacactgcctcctacttgcggctctgggccctcagcctcgctcatgcgcagctgtctgaggtgctttggaccatggtgatccacatcggcctgagcgtgaagagcttggcgggaggtttggtgctgttcttcttcttcactgcctttgccaccctgaccgtggccatcctcctgatcatggagggcctctcggcctttctccacgcactgcgcttacactgggttgagttccagaataaattctacagcgggaccggtttcaagttcttacccttctccttcgagcatattcgggaagggaagtttgaagagtgagtccctgtgagggccgtgtgccccatgctaccctccccgcctccctccacagtgatcagctgtgcctctctgcctgttggttgtgatctgtgggcaccagctcattcgtgtcaccctgtctgtgagtcatttagatagaatagtcctccttgggtctcccaccacccctagctttgtgtgtagtgtagtgattttctggctgtcactcatactcactgggcaccagccttgccctcttagcctccatccatccagacagcccttcccacctcctggtggtgagccagtctgcattcccacgccatcccaaagccctttcatcttccccgtgcattgtagatggaaggagcacccatgccattcacatctagactttgagttccctgcatctgccaccgtagtttctagcaggagtagtggggggagtaatacagattcttccctagaaggggacactggtaacatgtcccactcttggattagcaggggtgggtccaggaagatgatatttgcgtcttttgcccacccccctggcattcagctggacccaactaggccatcatgagtggcttctccctgtcatccccaggggtcataggatatctacaccgcctttctgaccccaccctgcactcccatcctttcctctctccccgttcatgccctgcactacatagcacagccgggatgcttggaacagaggccttggctgctccgcagtgcacagggcttccctctctcggggttggcttcttcccaggccttgcatgggccctgcccacaagcacaccctcaggccgagggtgcagactgatgctcttccctgatggagaccctgagatcttccccacccccaatcatgatgtcttcagtgtgggactggggtcctcttggttctgcctgcagcctgcctggctccgcccctagtgccccctcctcaccacactggccccaggtctcaggaggggtgtcctgggcagggaaggtcagtgtcactgatggtttgctgtttggaagccattggcagggctgccgtgcatgtggctgtgagggctgcacagtcctgccaaggggcttcctccttgtcaccccgaaccttgtaatcgtgtgctggcgtggcagccctggctaagttaatccccaccgctttcagtggtagaaagaattccctgagtgggccaggctggtgccctcctcctaccctggcttttctgagtgagctgcctggagccctcatcccctctcccaggctgggctggccctgggcggggccactgtgtgctggcccactgtgacctgacccgaccttgtgcagcccccctgccctggtgtcctgggttttcgtgatgatctttgctctgtttccagtggggtttgaagcagagttcagggaaccctgcccaaggtcctcctgttcagacattcctatgttgaataaagtatgtttgacttccccggaaaaaaaaaaaaaaaaaaaaaaaaaaaaaaaaaaaaaaaaaaaaaaaaaaaaaaaaaaaaaaaaaa

SEQ ID NO: 3485 - protein, 831 aa, Homo sapiens
MGELFRSEEMTLAQLFLQSEAAYCCVSELGELGKVQFRDLNPDVNVFQRKFVNEVRRCEEMDRKLRFVEKEIRKANIPIMDTGENPEVPFPRDMIDLEANFEKIENELKEINTNQEALKRNFLELTELKFILRKTQQFFDEMADPDLLEESSSLLEPSEMGRGTPLRLGFVAGVINRERIPTFERMLWRVCRGNVFLRQAEIENPLEDPVTGDYVHKSVFIIFFQGDQLKNRVKKICEGFRASLYPCPETPQERKEMASGVNTRIDDLQMVLNQTEDHRQRVLQAAAKNIRVWFIKVRKMKAIYHTLNLCNIDVTQKCLIAEVWCPVTDLDSIQFALRRGTEHSGSTVPSILNRMQTNQTPPTYNKTNKFTYGFQNIVDAYGIGTYREINPAPYTIITFPFLFAVMFGDFGHGILMTLFAVWMVLRESRILSQKNENEMFSTVFSGRYIILLMGVFSMYTGLIYNDCFSKSLNIFGSSWSVRPMFTYNWTEETLRGNPVLQLNPALPGVFGGPYPFGIDPIWNIATNKLTFLNSFKMKMSVILGIIHMLFGVSLSLFNHIYFKKPLNIYFGFIPEIIFMTSLFGYLVILIFYKWTAYDAHTSENAPSLLIHFINMFLFSYPESGYSMLYSGQKGIQCFLVVVALLCVPWMLLFKPLVLRRQYLRRKHLGTLNFGGIRVGNGPTEEDAEIIQHDQLSTHSEDADEFDFGDTMVHQAIHTIEYCLGCISNTASYLRLWALSLAHAQLSEVLWTMVIHIGLSVKSLAGGLVLFFFFTAFATLTVAILLIMEGLSAFLHALRLHWVEFQNKFYSGTGFKFLPFSFEHIREGKFEE

SEQ ID NO: 3486 - DNA, 2798 bp, Homo sapiens
agtagggaagtagctatggcagtgcctgatacaaaataaactccaaatgtgtatttattagatggttggatggaagttatttgcgtgtgaaagcgcgttttacccgaaggcgctctgtgagggccagcgggtccccttcggccctggagccggggtcacacgctccccaccgcgtgcggtcacgagacgcccccaagggagtatcctggtacccggaagccgcgactcctggccctgagcccgggcttagccttcgggtccacgtggccggaggccggcagctgattggacgcgggccgccccaccccctggccgtcgcgggacccgcaggactgagaccatggaggcggtggcggtggccgcggcggtgggggtccttctcctggccggggccgggggcgcggcaggcgacgaggcccgggaggcggcggccgtgcgggcgctcgtggcccggctgctggggccaggccccgcggccgacttctccgtgtcggtggagcgcgctctggctgccaagccgggcttggacacctacagcctgggcggcggcggcgcggcgcgcgtgcgggtgcgcggctccacgggcgtggcggccgccgcggggctgcaccgctacctgcgcgacttctgtggctgccacgtggcctggtccggctctcagctgcgcctgccgcggccactgccagccgtgccgggggagctgaccgaggccacgcccaacaggtaccgctattaccagaatgtgtgcacgcaaagctactctttcgtgtggtgggactgggcccgctgggagcgagagatagactggatggcgctgaatggcatcaacctggcactggcctggagcggccaggaggccatctggcagcgggtgtacctggccttgggcctgacccaggcagagatcaatgagttctttactggtcctgccttcctggcctgggggcgaatgggcaacctgcacacctgggatggccccctgcccccctcctggcacatcaagcagctttacctgcagcaccgggtcctggaccagatgcgctccttcggcatgaccccagtgctgcctgcattcgcggggcatgttcccgaggctgtcaccagggtgttccctcaggtcaatgtcacgaagatgggcagttggggccactttaactgttcctactcctgctccttccttctggctccggaagaccccatattccccatcatcgggagcctcttcctgcgagagctgatcaaagagtttggcacagaccacatctatggggccgacactttcaatgagatgcagccaccttcctcagagccctcctaccttgccgcagccaccactgccgtctatgaggccatgactgcagtggatactgaggctgtgtggctgctccaaggctggctcttccagcaccagccgcagttctgggggcccgcccagatcagggctgtgctgggagctgtgccccgtggccgcctcctggttctggacctgtttgctgagagccagcctgtgtatacccgcactgcctccttccagggccagcccttcatctggtgcatgctgcacaactttgggggaaaccatggtctttttggagccctagaggctgtgaacggaggcccagaagctgcccgcctcttccccaactccaccatggtaggcacgggcatggcccccgagggcatcagccagaacgaagtggtctattccctcatggctgagctgggctggcgaaaggacccagtgccagatttggcagcctgggtgaccagctttgccgcccggcggtatggggtctcccacccggacgcaggggcagcgtggaggctactgctccggagtgtgtacaactgctccggggaggcctgcaggggccacaatcgtagcccgctggtcaggcggccgtccctacagatgaataccagcatctggtacaaccgatctgatgtgtttgaggcctggcggctgctgctcacatctgctccctccctggccaccagccccgccttccgctacgacctgctggacctcactcggcaggcagtgcaggagctggtcagcttgtactatgaggaggcaagaagcgcctacctgagcaaggagctggcctccctgttgagggctggaggcgtcctggcctatgagctgctgccggcactggacgaggtgctggctagtgacagccgcttcttgctgggcagctggctagagcaggcccgagcagcggcagtcagtgaggccgaggccgatttctacgagcagaacagccgctaccagctgaccttgtgggggccagaaggcaacatcctggactatgccaacaagcagctggcggggttggtggccaactactacacccctcgctggcggcttttcctggaggcgctggttgacagtgtggcccagggcatccctttccaacagcaccagtttgacaaaaatgtcttccaactggagcaggccttcgttctcagcaagcagaggtaccccagccagccgcgaggagacactgtggacctggccaagaagatcttcctcaaatattacccccgctgggtggccggctcttggtgatagattcgccaccactgggccttgttttccgctaattccagggcagattccagggcccagagctggacagacatcacaggataacccaggcctgggaggaggccccacggcctgctggtggggtctgacctggggggattggagggaaatgacctgccctccaccaccacccaaagtgtgggattaaagtactgttttctttccacttaaaaaaaaaaaaaaaaaa

SEQ ID NO: 3487 - protein, 743 aa, Homo sapiens
MEAVAVAAAVGVLLLAGAGGAAGDEAREAAAVRALVARLLGPGPAADFSVSVERALAAKPGLDTYSLGGGGAARVRVRGSTGVAAAAGLHRYLRDFCGCHVAWSGSQLRLPRPLPAVPGELTEATPNRYRYYQNVCTQSYSFVWWDWARWEREIDWMALNGINLALAWSGQEAIWQRVYLALGLTQAEINEFFTGPAFLAWGRMGNLHTWDGPLPPSWHIKQLYLQHRVLDQMRSFGMTPVLPAFAGHVPEAVTRVFPQVNVTKMGSWGHFNCSYSCSFLLAPEDPIFPIIGSLFLRELIKEFGTDHIYGADTFNEMQPPSSEPSYLAAATTAVYEAMTAVDTEAVWLLQGWLFQHQPQFWGPAQIRAVLGAVPRGRLLVLDLFAESQPVYTRTASFQGQPFIWCMLHNFGGNHGLFGALEAVNGGPEAARLFPNSTMVGTGMAPEGISQNEVVYSLMAELGWRKDPVPDLAAWVTSFAARRYGVSHPDAGAAWRLLLRSVYNCSGEACRGHNRSPLVRRPSLQMNTSIWYNRSDVFEAWRLLLTSAPSLATSPAFRYDLLDLTRQAVQELVSLYYEEARSAYLSKELASLLRAGGVLAYELLPALDEVLASDSRFLLGSWLEQARAAAVSEAEADFYEQNSRYQLTLWGPEGNILDYANKQLAGLVANYYTPRWRLFLEALVDSVAQGIPFQQHQFDKNVFQLEQAFVLSKQRYPSQPRGDTVDLAKKIFLKYYPRWVAGSW

SEQ ID NO: 3488 - DNA, 2230 bp, Homo sapiens
gggcctcccaaagtgctgggattagaggcatgagccaccgtgcccagcctcaaagcatattttaaaggatagaaataaacagccatatgaagagatacagacagggcggtctggaagggtccagagcaggagcttctatctccatagagttggggttacgtcaccctctgggcacattctgtcagcctccacacgttcagctctcagaagctcccgaaccctgtcctttgggccttttatggagaactccattggctgtccatgactgaagcatggacaactgtgataatgtgattgggcaaaaagggtctgatctaagcccagcaaggccagtccagattctttgggcctttgtgcagcattcctttctccagggtatggggcaaggacccactctggaatgaggatcctacaacccacaatcagattagagtcctgccttgggcagctgaaaagaggacaggagaaggtcagagagacgaaaggctgttttttgaggcctgaggcaccccaacatgacaacgtaagactgtaaccatggtcatgtgagttatgagctaggaaccctggacgaaaccaacacatatacaatcatctcccacctcccaacgcctttactttcacagcctctgcagcaaactgcggtcactataatcgctcctgtggcacagaggcatacccaggggaatctgcccagggggccactctgtgcccacgtgggaacccacacctgcttgtaaagcctcccctccctctgaccagcaaccaggacagtttgttgttccaagcagtgggctcatgtctgttttggctcagaacagggtggggagagcgggccagggacccgcaggaaggcttatccttgagattgcgtgggagacacaacaaggggtgggggcccgcaggcggggcggggcgaagcaggtgatatcaagcccagagccccagcctctccccacagtctcaccatggcccgcaccgtggtgctcatcaccggctgttcctcgggcatcggcctgcacttggccgtacgtctggcttcagatccatcccagagcttcaaagtgtatgccacgttgagggacctgaaaacacagggccggctgtgggaggcggcccgggccctggcatgccctccgggatccctggagacgttgcagctggacgtaagggactcaaaatccgtggccgctgcccgggaacgcgtgactgagggccgcgtggacgtgctggtgtgtaacgcaggcctgggcctgctggggccgctggaggcgctgggggaggacgccgtggcctctgtgctggacgtgaatgtagtagggactgtgcggatgctgcaggccttcctgccagacatgaagaggcgcggttcgggacgcgtgttggtgaccgggagcgtgggaggattgatggggctgcctttcaatgacgtttattgcgccagcaagttcgcgctcgaaggcttatgcgagagtctggcggttctgctgctgccctttggggtccacttgagcctgatcgagtgcggcccagtgcacaccgccttcatggagaaggtgttgggcagcccagaggaggtgctggaccgcacggacatccacaccttccaccgcttctaccaatacctcgcccacagcaagcaagtctttcgcgaggcggcgcagaaccctgaggaggtggcggaggtcttcctcaccgctttgcgcgccccgaagccgaccctgcgctacttcaccaccgagcgcttcctgcccctgctgcggatgcgcctggacgaccccagcggctccaactacgtcaccgccatgcaccgggaagtgttcggcgacgttccggcaaaggccgaggctggggccgaggctgggggcggggccgggcctggggcagaggacgaggccgggcgcagtgcggtgggggaccctgagctcggcgatcctccggccgccccgcagtaaaggcttcctcagccgctgtctcccgcgcccttctttgtcccctgggtctgtgtggtccctggggatggggcggcggtagcagctgtgggtggctaattaagatagatcgcgttagccagttttaccagcgcagctaggcgcgatggctgtcgcctgtaatgccagcgctttgggaggcggaggcaggaggatcgctcaagccccggagttggagaccagccagagcaacacagtgagacccccatctctacaaaaataaagaaaatttaaaaatc

SEQ ID NO: 3489 - protein, 328 aa, Homo sapiens
MARTVVLITGCSSGIGLHLAVRLASDPSQSFKVYATLRDLKTQGRLWEAARALACPPGSLETLQLDVRDSKSVAAARERVTEGRVDVLVCNAGLGLLGPLEALGEDAVASVLDVNVVGTVRMLQAFLPDMKRRGSGRVLVTGSVGGLMGLPFNDVYCASKFALEGLCESLAVLLLPFGVHLSLIECGPVHTAFMEKVLGSPEEVLDRTDIHTFHRFYQYLAHSKQVFREAAQNPEEVAEVFLTALRAPKPTLRYFTTERFLPLLRMRLDDPSGSNYVTAMHREVFGDVPAKAEAGAEAGGGAGPGAEDEAGRSAVGDPELGDPPAAPQ

SEQ ID NO: 3490 - DNA, 2568 bp, Homo sapiens
cgccacccgcttcctcgccgcagggggcccgcccgctggcccgtttccggtccggtgggtacaagatgacggagccgggcgcctctcccgaggacccttgggtcaaggcaagccccgtgggcgcgcacgccggcgaggggagggcgggtcgggctcgtgcacgtaggggggccggaagacgaggggcttccctcctgtccccaaagtcccccacgctctccgtgccccggggctgcagagaagacagctctcaccccgcgtgtgccaaggtggagtatgcctacagcgacaacagcctggaccccgggctttttgtagaaagcacccgcaaggggagtgtagtgtccagagctaatagcatcggttccaccagtgcctcttctgtccccaacacagatgatgaggacagtgattaccaccaggaggcctacaaggagtcctacaaagaccggcggcggcgcgcacacactcaggctgagcagaagaggagggacgccatcaagagaggctatgatgaccttcagaccatcgtccccacttgccagcagcaggacttctccattggctcccaaaagctcagcaaagccatcgttctacaaaagaccattgactacattcagtttttgcacaaggagaagaaaaagcaggaggaggaggtgtccacgttacgcaaggatgtcaccgccctaaagatcatgaaagtgaactatgagcagattgtgaaggcacaccaggacaacccccatgaaggggaggaccaggtctctgaccaggtcaagttcaacgtgtttcaaggcatcatggattccctgttccagtccttcaatgcctccatctcagtggccagcttccaggagctgtcagcgtgtgtcttcagctggatcgaggagcactgtaagcctcagaccctgcgggagattgtgattggcgtcctgcaccaattgaaaaaccagctttactgaccggttcttggaaacctggagaacagccaacaagaggcccttgaatctctacgtggccactgaactgctgggcccgggagactggactacaacacctcacactggtcagctggtttctacttggtgtttggtttttcccagccccattttatcttcagcggagccgcggtgtttgttttgtgaaagcttctgattaatttattatattgacgataaaactcaaacctacccagccttccccccactccatggaagtccttgggatgggcgtctgctctggacaccccaaagagctcctgccctctcagccctttattcaagcctcagatttctgctcatgatctacatagatttggaaactgttttcctctgttttggtctcttgggcaacatttttggcccaagtttgggcaacatttggcccaagtttgggcattttggcagtagctgtatgggagaaaaagagtaagaggaaatattcccacagccatgaagggtgaaagggcaccttgtgcctagactagggctgcctggtcagtcccaggtgaggccaagggctttctggccatctcagggaggggccaccaggttcctcccctcaccccatattccatcaccttcctcctctgctctgggtggtaagggaagccctcccggttcccacaggctatgatgctgcatggcagaggcaggtataacacagcactacatattggaaattttttatttttctaaataccaatgcagttttgctacggttacaattttgaaatattaactgagcctcaaaatcaccctttctgtcaagcatatcttggcctctcccatgtctcagtgttgcctgcatttctcccaggacttgggggtggggtgaaaagcgtacaaaagatacttaaaagggctcctggggtacacaagcccagcaggtcctgagtgaagccgtgggccctccaaatgctcgttttatagcaacctctctctaccctagttctccaaattcacttctgccttcctcaggtttgatatctggcaggtttgactatccagaggaaattaaatatttttatataaaattaaattataataaatattgccaaatgctttcctttagcattgttccaagtctaaatgttaacctcaagctactgcaatttagacaatgaaatgggctgggtctacccccagccaccagccctcatcctctctacccagtgctctggtttatgcttgtctcctgactgctctgcttaaaggtgaaagtagcaggaacaacaacaaaagccaaccaaaaacaaggtagccagtgcaagacatctcactcttctgacatcctgcagtccccaccagtcctgaccgtgggcccctcaggggtctgggagtgtgacgttgtaatcttcatccgtctctatcccaacttcctcctgtgagacagggagacaagtgaatgagatgtcaccaggataagaccacagggaagcaaagaaggaagagagctccacttacaaagaactgcttcttgctcttggggtatccttcaagtattgcatcagacagctctgtagcctgacaagaaataaaaccacccgttttcagatgggcaaaaaaa

SEQ ID NO: 3491 - protein, 298 aa, Homo sapiens
MTEPGASPEDPWVKASPVGAHAGEGRAGRARARRGAGRRGASLLSPKSPTLSVPRGCREDSSHPACAKVEYAYSDNSLDPGLFVESTRKGSVVSRANSIGSTSASSVPNTDDEDSDYHQEAYKESYKDRRRRAHTQAEQKRRDAIKRGYDDLQTIVPTCQQQDFSIGSQKLSKAIVLQKTIDYIQFLHKEKKKQEEEVSTLRKDVTALKIMKVNYEQIVKAHQDNPHEGEDQVSDQVKFNVFQGIMDSLFQSFNASISVASFQELSACVFSWIEEHCKPQTLREIVIGVLHQLKNQLY

SEQ ID NO: 3492 - DNA, 2406 bp, Homo sapiens
cgccacccgcttcctcgccgcagggggcccgcccgctggcccgtttccggtccggtgggtacaagatgacggagccgggcgcctctcccgaggacccttgggtcaaggtggagtatgcctacagcgacaacagcctggaccccgggctttttgtagaaagcacccgcaaggggagtgtagtgtccagagctaatagcatcggttccaccagtgcctcttctgtccccaacacagatgatgaggacagtgattaccaccaggaggcctacaaggagtcctacaaagaccggcggcggcgcgcacacactcaggctgagcagaagaggagggacgccatcaagagaggctatgatgaccttcagaccatcgtccccacttgccagcagcaggacttctccattggctcccaaaagctcagcaaagccatcgttctacaaaagaccattgactacattcagtttttgcacaaggagaagaaaaagcaggaggaggaggtgtccacgttacgcaaggatgtcaccgccctaaagatcatgaaagtgaactatgagcagattgtgaaggcacaccaggacaacccccatgaaggggaggaccaggtctctgaccaggtcaagttcaacgtgtttcaaggcatcatggattccctgttccagtccttcaatgcctccatctcagtggccagcttccaggagctgtcagcgtgtgtcttcagctggatcgaggagcactgtaagcctcagaccctgcgggagattgtgattggcgtcctgcaccaattgaaaaaccagctttactgaccggttcttggaaacctggagaacagccaacaagaggcccttgaatctctacgtggccactgaactgctgggcccgggagactggactacaacacctcacactggtcagctggtttctacttggtgtttggtttttcccagccccattttatcttcagcggagccgcggtgtttgttttgtgaaagcttctgattaatttattatattgacgataaaactcaaacctacccagccttccccccactccatggaagtccttgggatgggcgtctgctctggacaccccaaagagctcctgccctctcagccctttattcaagcctcagatttctgctcatgatctacatagatttggaaactgttttcctctgttttggtctcttgggcaacatttttggcccaagtttgggcaacatttggcccaagtttgggcattttggcagtagctgtatgggagaaaaagagtaagaggaaatattcccacagccatgaagggtgaaagggcaccttgtgcctagactagggctgcctggtcagtcccaggtgaggccaagggctttctggccatctcagggaggggccaccaggttcctcccctcaccccatattccatcaccttcctcctctgctctgggtggtaagggaagccctcccggttcccacaggctatgatgctgcatggcagaggcaggtataacacagcactacatattggaaattttttatttttctaaataccaatgcagttttgctacggttacaattttgaaatattaactgagcctcaaaatcaccctttctgtcaagcatatcttggcctctcccatgtctcagtgttgcctgcatttctcccaggacttgggggtggggtgaaaagcgtacaaaagatacttaaaagggctcctggggtacacaagcccagcaggtcctgagtgaagccgtgggccctccaaatgctcgttttatagcaacctctctctaccctagttctccaaattcacttctgccttcctcaggtttgatatctggcaggtttgactatccagaggaaattaaatatttttatataaaattaaattataataaatattgccaaatgctttcctttagcattgttccaagtctaaatgttaacctcaagctactgcaatttagacaatgaaatgggctgggtctacccccagccaccagccctcatcctctctacccagtgctctggtttatgcttgtctcctgactgctctgcttaaaggtgaaagtagcaggaacaacaacaaaagccaaccaaaaacaaggtagccagtgcaagacatctcactcttctgacatcctgcagtccccaccagtcctgaccgtgggcccctcaggggtctgggagtgtgacgttgtaatcttcatccgtctctatcccaacttcctcctgtgagacagggagacaagtgaatgagatgtcaccaggataagaccacagggaagcaaagaaggaagagagctccacttacaaagaactgcttcttgctcttggggtatccttcaagtattgcatcagacagctctgtagcctgacaagaaataaaaccacccgttttcagatgggcaaaaaaa

SEQ ID NO: 3493 - protein, 244 aa, Homo sapiens
MTEPGASPEDPWVKVEYAYSDNSLDPGLFVESTRKGSVVSRANSIGSTSASSVPNTDDEDSDYHQEAYKESYKDRRRRAHTQAEQKRRDAIKRGYDDLQTIVPTCQQQDFSIGSQKLSKAIVLQKTIDYIQFLHKEKKKQEEEVSTLRKDVTALKIMKVNYEQIVKAHQDNPHEGEDQVSDQVKFNVFQGIMDSLFQSFNASISVASFQELSACVFSWIEEHCKPQTLREIVIGVLHQLKNQLY

SEQ ID NO: 3494 - DNA, 2316 bp, Homo sapiens
cgccacccgcttcctcgccgcagggggcccgcccgctggcccgtttccggtccggtgggtacaagatgacggagccgggcgcctctcccgaggacccttgggtcaaggtggagtatgcctacagcgacaacagcctggaccccgatgatgaggacagtgattaccaccaggaggcctacaaggagtcctacaaagaccggcggcggcgcgcacacactcaggctgagcagaagaggagggacgccatcaagagaggctatgatgaccttcagaccatcgtccccacttgccagcagcaggacttctccattggctcccaaaagctcagcaaagccatcgttctacaaaagaccattgactacattcagtttttgcacaaggagaagaaaaagcaggaggaggaggtgtccacgttacgcaaggatgtcaccgccctaaagatcatgaaagtgaactatgagcagattgtgaaggcacaccaggacaacccccatgaaggggaggaccaggtctctgaccaggtcaagttcaacgtgtttcaaggcatcatggattccctgttccagtccttcaatgcctccatctcagtggccagcttccaggagctgtcagcgtgtgtcttcagctggatcgaggagcactgtaagcctcagaccctgcgggagattgtgattggcgtcctgcaccaattgaaaaaccagctttactgaccggttcttggaaacctggagaacagccaacaagaggcccttgaatctctacgtggccactgaactgctgggcccgggagactggactacaacacctcacactggtcagctggtttctacttggtgtttggtttttcccagccccattttatcttcagcggagccgcggtgtttgttttgtgaaagcttctgattaatttattatattgacgataaaactcaaacctacccagccttccccccactccatggaagtccttgggatgggcgtctgctctggacaccccaaagagctcctgccctctcagccctttattcaagcctcagatttctgctcatgatctacatagatttggaaactgttttcctctgttttggtctcttgggcaacatttttggcccaagtttgggcaacatttggcccaagtttgggcattttggcagtagctgtatgggagaaaaagagtaagaggaaatattcccacagccatgaagggtgaaagggcaccttgtgcctagactagggctgcctggtcagtcccaggtgaggccaagggctttctggccatctcagggaggggccaccaggttcctcccctcaccccatattccatcaccttcctcctctgctctgggtggtaagggaagccctcccggttcccacaggctatgatgctgcatggcagaggcaggtataacacagcactacatattggaaattttttatttttctaaataccaatgcagttttgctacggttacaattttgaaatattaactgagcctcaaaatcaccctttctgtcaagcatatcttggcctctcccatgtctcagtgttgcctgcatttctcccaggacttgggggtggggtgaaaagcgtacaaaagatacttaaaagggctcctggggtacacaagcccagcaggtcctgagtgaagccgtgggccctccaaatgctcgttttatagcaacctctctctaccctagttctccaaattcacttctgccttcctcaggtttgatatctggcaggtttgactatccagaggaaattaaatatttttatataaaattaaattataataaatattgccaaatgctttcctttagcattgttccaagtctaaatgttaacctcaagctactgcaatttagacaatgaaatgggctgggtctacccccagccaccagccctcatcctctctacccagtgctctggtttatgcttgtctcctgactgctctgcttaaaggtgaaagtagcaggaacaacaacaaaagccaaccaaaaacaaggtagccagtgcaagacatctcactcttctgacatcctgcagtccccaccagtcctgaccgtgggcccctcaggggtctgggagtgtgacgttgtaatcttcatccgtctctatcccaacttcctcctgtgagacagggagacaagtgaatgagatgtcaccaggataagaccacagggaagcaaagaaggaagagagctccacttacaaagaactgcttcttgctcttggggtatccttcaagtattgcatcagacagctctgtagcctgacaagaaataaaaccacccgttttcagatgggcaaaaaaa

SEQ ID NO: 3495 - protein, 214 aa, Homo sapiens
MTEPGASPEDPWVKVEYAYSDNSLDPDDEDSDYHQEAYKESYKDRRRRAHTQAEQKRRDAIKRGYDDLQTIVPTCQQQDFSIGSQKLSKAIVLQKTIDYIQFLHKEKKKQEEEVSTLRKDVTALKIMKVNYEQIVKAHQDNPHEGEDQVSDQVKFNVFQGIMDSLFQSFNASISVASFQELSACVFSWIEEHCKPQTLREIVIGVLHQLKNQLY

SEQ ID NO: 3496 - DNA, 1418 bp, Homo sapiens
cacgaggggagtccgggaggggtcgctttgctcctccggaaggcttccccttcagccaatcaccgttcgaggcccgcccccgtcgccggaaggagccgtcgccccgagcaactacaacgtccggctttctgagttgggtggcgggaaaggcgatgagtaaaggccgggcagaagctgcggcgggagccgccgggatcctcctgaggtacctgcaggagcagaaccggccctacagctcccaggatgtgttcgggaacctacagcgggaacacggactgggcaaggcggtggtggtgaagacgctggagcagctggcgcaacaaggcaagatcaaagagaagatgtacggcaagcagaagatctattttgcggatcaggaccagtttgacatggtgagtgatgctgaccttcaagtcctagatggcaaaatcgtggccctcactgctaaggtgcagagcttgcagcagagctgccgctacatggaggctgagatgcagaaagaaatccaggagttaaagaaggaatgcgctggctacagagagagattgaagaacattaaagcagctaccaatcatgtgactccagaagagaaagagcaggtgtacagagagaggcagaagtactgtaaggagtggaggaagaggaagaggatggctacagagctgtctgatgcaatacttgaaggataccccaagagcaagaagcagttctttgaggaagttgggatagagacggatgaagattacaacgtcacactcccagacccctgaggggcccacggtcaggactggtggggactgcaggatgtcagaagagtgagatgtcttgcactggctaccttgtttttggttggcttttgttgttgttcctgctactttcacctttaagcagagcagtcaggagacaagcataaaccagagcactgggtagagaggatgagggctggtggctgggggtagacccagcccatttcattgtctaaattgcagtagcttgaggttaacatttagacttggaacaatgctaaaggaaagcatttggcaatatttattataatttaattttatataaaaatatttaatttcctctggatagtcaaacctgccagatatcaaacctgaggaaggcagaagtgaatttggagaactagggtagagagaggttgctataaaacgagcatttggagggcccacggcttcactcaggacctgctgggcttgtgtaccccaggagcccttttaagtatcttttgtacgcttttcaccccacccccaagtcctgggagaaatgcaggcaacactgagacatgggagaggccaagatatgcttgacagaaagggtgattttgaggctcagttaatatttcaaaattgtaaccgtagcaaaactgcattggtatttagaaaaaaaaaaaaaaa

SEQ ID NO: 3497 - protein, 205 aa, Homo sapiens
MSKGRAEAAAGAAGILLRYLQEQNRPYSSQDVFGNLQREHGLGKAVVVKTLEQLAQQGKIKEKMYGKQKIYFADQDQFDMVSDADLQVLDGKIVALTAKVQSLQQSCRYMEAEMQKEIQELKKECAGYRERLKNIKAATNHVTPEEKEQVYRERQKYCKEWRKRKRMATELSDAILEGYPKSKKQFFEEVGIETDEDYNVTLPDP

SEQ ID NO: 3498 - DNA, 1349 bp, Homo sapiens
aactacaacgtccggctttctgagttgggtggcgggaaaggcgatgagtaaaggccgggcagaagctgcggcgggagccgccgggatcctcctgaggtacctgcaggaacagaaccggccctacagctcccaggatgtgttcgggaacctacagcgggaacacggactgggcaaggcggtggtggtgaagacgctggagcagctggcgcaacaaggcaagatcaaagagaagatgtacggcaagcagaagatctattttgcggatcaggaccagtttgacatggtgagtgatgctgaccttcaagtcctagatggcaaaatcgtggccctcactgctaaggtgcagagcttgcagcagagctgccgctacatggaggctgagctcaaggaattatctagtgccctgaccacaccagagatgcagaaagaaatccaggagttaaagaaggaatgcgctggctacagagagagattgaagaacattaaagcagctaccaatcatgtgactccagaagagaaagagcaggtgtacagagagaggcagaagtactgtaaggagtggaggaagaggaagaggatggctacagagctgtctgatgcaatacttgaaggataccccaagagcaagaagcagttctttgaggaagttgggatagagacggatgaagattacaacgtcacactcccagacccctgaggggcccacggtcaggactggtggggactgcaggatgtcagaagagtgagatgtcttgcactggctaccttgtttttggttggcttttgttgttgttcctcttacttttcactttagcagagcagtcaggagacaagcataaaccagagcactgggtagagaggatgagggctggtggctgggggtagaccccacgcatttcattgtctaaattgcagtagcttgaggttaacatttagacttggaacaatgctaaaggaaagcatttggcaatatttattataatttaattttatataaaaatatttaatttcctctggatagtcaaacctgccagatatcaaacctgaggaaggcagaagtgaatttggagaactagggtagagagaggttgctataaaacgagcatttggagggcccacggcttcactcaggacctgctgggcttgtgtaccccaggagcccttttaagtatcttttgtacgcttttcaccccacccccaagtcctgggagaaatgcaggcaacactgagacatgggagaggccaagatatgcttgacagaaagggtgattttgaggctcagttaatatttcaaaattgtaaccgtagcaaaactgcattggtatttagaaaaataaaaaatttccaat

SEQ ID NO: 3499 - protein, 217 aa, Homo sapiens
MSKGRAEAAAGAAGILLRYLQEQNRPYSSQDVFGNLQREHGLGKAVVVKTLEQLAQQGKIKEKMYGKQKIYFADQDQFDMVSDADLQVLDGKIVALTAKVQSLQQSCRYMEAELKELSSALTTPEMQKEIQELKKECAGYRERLKNIKAATNHVTPEEKEQVYRERQKYCKEWRKRKRMATELSDAILEGYPKSKKQFFEEVGIETDEDYNVTLPDP

SEQ ID NO: 3500 - DNA, 3779 bp, Homo sapiens
agttgctgttattgtgacttgtcgggccacggccccggatgttgtggctgccgcggggagatggctgaggccgaaggggttcccacgaccccaggcccggcttcggggtcgactttcaggggccgccgagatgtgtcaggctcctgggagcgggaccagcaggttgaggcggcgcagcgggccctggtggaggtgctggggccttacgagcctctgctgagtcgggtgcaggcagccctggtgtgggagcggccagctaggagcgctctgtggtgcctggggctgaacgcggctttctggttttttgccctgacatctcttcgtcttgtgtttttacttgcatttggcttgatgatcattgtgtgtattgatcaatggaagaacaaaatctggcctgaaataaaagtgccaagacccgacgcattagacaatgagagctggggctttgtgcaccctcggttgctcagcgtgcccgagctctgccaccatgtagctgaagtctgggttagtgggaccattttcataaggaatgttttgcttttcaaaaagcaaaacccaggcaagttctgcttgctgagctgtgggatactgacctttttggctgtcttgggccgctacgtccctgggcttctgctgtcctacttgatgcttgtcactgtcatgatgtggccccttgctgtgtaccaccgactgtgggatcgagcatatgtgcggctgaagccagctctgcagcggctagacttcagtgtccgtggctacatgatgtccaagcagagagagagacaattacgccgcagagctctccacccagaacgagccatggacaaccacagtgacagcgaagaggagcttgctgccttctgtcctcagctggacgattctactgttgccagggaattggccatcacagactctgagcactcagacgctgaagtctcctgtacagacaatggcacattcaatctttcaaggggccaaacacctctaacggaaggctctgaagacctagatggtcacagtgatccagaggaatcctttgccagagaccttccagacttcccttccattaatatggatcctgctggcctggatgatgaggacgacactagcattggcatgcccagcttgatgtaccgttctccgccaggggctgaggagccccaggccccacctgccagccgggacgaggctgcgctgccggagctcctgcttggtgctcttcctgtaggatccaacctcaccagcaaccttgccagcctggtctcccagggtatgattcagctggccttgtcaggggcctcccaaccaggcccttctggagcacctgcccagagagcaacgagaggcttcctccggtcccccagttcagacctggacactgatgctgagggggatgactttgaacttctggaccagtcggagctgagtcagctggaccctgccagttctaggagccactgaggcagagactcctttttggagtcactgtggtttaggtttttttctccccatcccacttaaggtgatggggcaagggaagaactcagctcccctcccctgaattatatttgtatgctgggtggcctggctgatgctcagaggcctccttagagaggacactcactcccctcccaccagctggatgcccatttctgagctcagtcactgaagtgagagtgtgctcccccaagggaggcttctctccatcaggatggtactttgggggaacaaaatagtcagggatattggttcccctttgaggaggtgctgctgtttgcttttaggtatgagtgctcaggggccctcactgaaagagcccatgcctgccttcctcctttcatcgcctctctagagcccccaaagtcaggcagcagctggagtagttacattgtcatcatctttttttttgagacagtttcgctctgttgcccaggctggagtgcagtggtgtgatcttggctttctgcaacgtctgccttccaggttgaagaggttctcctgcctcagcctccttagtagtgggattacaggtgcccgctactatgcccggctaatttttcttttggtatttttagtagaaatggggtttcaccatgttggccaggctggtctcaaactcctgacctcaagtgagctgactgccttggcctcccagagtgctgggattagtcgtcatcttttgttaaaccaggatttgatttttttcttttcttttcttttcttttctttttttttttttttgagacagagtctctctctgttgcccaggctggagtgcagtggcacaatctcggctcactgcagcctccgcctgccgggtcaagcgattctcctacctcagcctcctcagtagctgagattacaggcatgcaccaccatgcccggctaatttttttgtgtttttagtagagatggggtttcaccgtgctggccaggctggtctagaactcctgactgcaaatgatcagcccgcctcagccacccaaagtgttgggattacaggtgtgagccactgtgcccagcgtgatttttttttttttttaaagcaaacttgtcctttggttttgcagaacaggcctgctccctctcatctagcccaccatttcttggggcctgaaccccagtggtccaaagtattgcttgtgaaatttaaaaaatgtgaatatgatgtggggatgggcctcttctacattaccttggcccagggggatcagctggctgggaggattagtgagcacctctgtattttgaggtctgagtcttctggagctgtgtagttaatcttcggtttctgataacccctgggtccatctggccatcagcctcagcagtgagcaaagcaataccatactcatttctatgttcctgttccttcctctgctcctcctttggagaagcaataattcatgggggatgatacagtagcactttacaaatggctccatgtcattcatcccaggggccataatctcttgcaccacctattcttacttcctgttcagctcctttacagcttttattttcaactgcttcccaacttggtggggcctcctttaaggatgagccaatagtaagaatgtggctgtaatcagcagagacccctctgaggggtatctgttctgcagcccctagtgaaatcatgtgatgtgagacagaaacctaaacatggtacttgattctaaacctgtgccagtctatagcctctgcctccccaagcagagctcaagccaaacgcttctgtcctctttccttctgcattaaccctttgctgatcctcaggggccactcccccaacacccctgtacttgggtgagggatgttggacagagcctgttttcatgtactgcaggtgggggtgtgctgacatgtttgctcttggttgatggagaaggtacagaggccagggagtgaaaatggttgacagaagagggaagagttaggtgtctcatagtcactcatagtggggtggtcaggggtaatggcatctccccactttaggcttctcaaacagacttttgacacctctcaagttcagagctctgatgtggaaagacaggaggtgtggggaaggagggggatttcgtgtgtttgcatgagtgtgcgcttcaggccttgggagttggcaagagggagggaaggaaggagagcaaaatcttcggaatgtgtttcttgtacctgagggatcctgccctgaatctccatagtctccactgtgaactgaggaggggaggggtgtgctggggaataaatcttgtatgagaacaaaaaaaaaaaaaaaa

SEQ ID NO: 3501 - protein, 466 aa, Homo sapiens
MAEAEGVPTTPGPASGSTFRGRRDVSGSWERDQQVEAAQRALVEVLGPYEPLLSRVQAALVWERPARSALWCLGLNAAFWFFALTSLRLVFLLAFGLMIIVCIDQWKNKIWPEIKVPRPDALDNESWGFVHPRLLSVPELCHHVAEVWVSGTIFIRNVLLFKKQNPGKFCLLSCGILTFLAVLGRYVPGLLLSYLMLVTVMMWPLAVYHRLWDRAYVRLKPALQRLDFSVRGYMMSKQRERQLRRRALHPERAMDNHSDSEEELAAFCPQLDDSTVARELAITDSEHSDAEVSCTDNGTFNLSRGQTPLTEGSEDLDGHSDPEESFARDLPDFPSINMDPAGLDDEDDTSIGMPSLMYRSPPGAEEPQAPPASRDEAALPELLLGALPVGSNLTSNLASLVSQGMIQLALSGASQPGPSGAPAQRATRGFLRSPSSDLDTDAEGDDFELLDQSELSQLDPASSRSH

SEQ ID NO: 3502 - DNA, 1645 bp, Homo sapiens
gcgggctggcgtgcggcgccgttgcgggcgggagcggctgcaacgccggtgcctgaggagcgatgccgagggaaatcatcaccctacagttgggccagtgcggcaatcagattgggttcgagttctggaaacagctgtgcgccgagcatggtatcagccccgagggcatcgtggaggagttcgccaccgagggcactgaccgcaaggacgtctttttctaccaggcagacgatgagcactacatcccccgggccgtgctgctggacttggaaccccgggtgatccactccatcctcaactccccctatgccaagctctacaacccagagaacatctacctgtcggaacatggaggaggagctggcaacaactgggccagcggattctcccagggagaaaagatccatgaggacatttttgacatcatagaccgggaggcagatggtagtgacagtctagagggctttgtgctgtgtcactccattgctggggggacaggctctggactgggttcctacctcttagaacggctgaatgacaggtatcctaagaagctggtgcagacatactcagtgtttcccaaccaggacgagatgagcgatgtggtggtccagccttacaattcactcctcacactcaagaggctgacgcagaatgcagactgtgtggtggtgctggacaacacagccctgaaccggattgccacagaccgcctgcacatccagaacccatccttctcccagatcaaccagctggtgtctaccatcatgtcagccagcaccaccaccctgcgctaccctggctacatgaacaatgacctcatcggcctcatcgcctcgctcattcccaccccacggctccacttcctcatgaccggctacacccctctcactacggaccagtcagtggccagcgtgaggaagaccacggtcctggatgtcatgaggcggctgctgcagcccaagaacgtgatggtgtccacaggccgagaccgccagaccaaccactgctacatcgccatcctcaacatcatccagggagaggtggaccccacccaggtccacaagagcttgcagaggatccgggaacgcaagttggccaacttcatcccgtggggccccgccagcatccaggtggccctgtcgaggaagtctccctacctgccctcggcccaccgggtcagcgggctcatgatggccaaccacaccagcatctcctcgctcttcgagagaacctgtcgccagtatgacaagctgcgtaagcgggaggccttcctggagcagttccgcaaggaggacatgttcaaggacaactttgatgagatggacacatccagggagattgtgcagcagctcatcgatgagtaccatgcggccacacggccagactacatctcctggggcacccaggagcagtgagtcccccaggacagggaccctcatctgccttactggttggcccaagccctgcctgactgaccaccccctcagagcacagatcagggacctcacgcatctctttctcatatacatggactctctgttggcctgcaaacacatttacttctcctcttatgagactatttatctttaataaagcactggatataaaaaaaaaaaaaaaaaaaaaaaaaaaaaaaaaaaaa

SEQ ID NO: 3503 - protein, 451 aa, Homo sapiens
MPREIITLQLGQCGNQIGFEFWKQLCAEHGISPEGIVEEFATEGTDRKDVFFYQADDEHYIPRAVLLDLEPRVIHSILNSPYAKLYNPENIYLSEHGGGAGNNWASGFSQGEKIHEDIFDIIDREADGSDSLEGFVLCHSIAGGTGSGLGSYLLERLNDRYPKKLVQTYSVFPNQDEMSDVVVQPYNSLLTLKRLTQNADCVVVLDNTALNRIATDRLHIQNPSFSQINQLVSTIMSASTTTLRYPGYMNNDLIGLIASLIPTPRLHFLMTGYTPLTTDQSVASVRKTTVLDVMRRLLQPKNVMVSTGRDRQTNHCYIAILNIIQGEVDPTQVHKSLQRIRERKLANFIPWGPASIQVALSRKSPYLPSAHRVSGLMMANHTSISSLFERTCRQYDKLRKREAFLEQFRKEDMFKDNFDEMDTSREIVQQLIDEYHAATRPDYISWGTQEQ

SEQ ID NO: 3504 - DNA, 624 bp, Homo sapiens
atggctaaaggtgaccccaagaaaccaaagggcaagatgtctgcttatgccttctttgtgcagacgtgcagagaagaacataagaagaaaaacccaaaagtccccatcaattttgcagaattttccaaaaagtgctctgagaggtggaagacaatgtccaagaaagagaaatctaaattcaatgaactggcaaaggcggataaagtgcactatgatcaggaaattaaggattatggaccagctaaaggaggcaagaagaaggatcctaatgcccccaaaaggccaccgtctggattcttcctgttctgttcagaattctgccccaagagcaaatccacaaaccccggcatccctattggagacgtggcaaaaaagctgggtgagatgtggaagaacttaaatgacagtgaaaagcagccttacatcactcaggcggcaaagctgaaggaaaagtatgagaaggatgttgctgtctataagtcgaaaggaaagtctgatggcgcaaagggtcctgctaaagttgcccagaaaaaggtggaagaggaagatgaagacgaggagttctgtattctacactcggtgctaactttttggtatgtctattgccttcacaaaaccatatga

SEQ ID NO: 3505 - protein, 207 aa, Homo sapiens [sequence omitted]

SEQ ID NO: 3506 - DNA, 1830 bp, Homo sapiens
aagcttacgaggaattcttggatgacatccctcagcatgtctgagcgactgctgagggagaaaatgatgcccaggttggtccccggcccaccgcagagaggcctgcgctgcacacgcgcagaccgagcatccgcgtcaagaggcgaagagagcgcgcgctccccacgtcctgcgctcctggctgccgggcattcgtctcagccgtgactctcgccaggccggggctggcgcgcccacgtctgaagagcgatgccccgggagatcatcaccctgcagctgggccagtgcggcaaccagattgggttcgagttctggaaacagctgtgcgccgagcatggtatcagccccgagggcatcgtggaggagttcgccaccgagggcactgaccgcaaggacgtctttttctaccaggcagacgatgagcactacatcccccgggccgtgctgctggacttggaaccccgggtgatccactccatcctcaactccccctatgccaagctctacaacccagagaacatctacctgtcggaacatggaggaggagctggcaacaactgggccagcggattctcccagggtgagaaaattcatgaagacatctttgacatcatagaccgagaagcagatggaagtgacagtttggagggcttcgtgctgtgtcactccatcgctgggggtacgggttctggcctgggctcctacctcctggagcgactgaatgacaggtaccccaagaagctagtgcagacttattcagtgtttccctaccaggacgagatgagcgacgtagtggttcagccctacaattcactcctgacactcaagaggctgacgcagaacgcagattgtgtggtggtgctggacaacacagccctgaaccggattgccacagaccgcctgcacatccagaacccgtccttctcccagatcaaccagctggtgtccaccatcatgtcggccagcaccaccaccctgcgctaccccggctacatgaacaatgacctcatcggcctcatcgcctcgctcattcccaccccacggctccactttctcatgaccggctacaccccgctcactacagaccagtcagtggccagcgtgaggaagaccacggtcctggatgtcatgaggcggctgctgcagcccaagaacgtgatggtgtccacaggccgagaccgccagaccaaccactgctacatcgccatcctcaacatcatccagggagaggtggaccccacccaggtccacaagagcctgcagaggatccgggaacggaagttggccaacttcatcccgtggggccccgccagcatccaggtggccctgtcgaggaagtctccctacctgccctcggcccaccgggtcagcgggctcatgatggccaaccacaccagcatctcctcgctctttgaaagttcctgccagcagtttgacaagctgcggaagcgggatgccttcctcgagcagttccgtaaggaggacatgttcaaggacaactttgatgagatggacaggtctagggaggttgttcaggagctcattgatgagtaccatgcggccacccagccagactacatttcctggggcacccaggagcagtgatttccctccccactactccttctccttctagatggtaaccacagcctcgaccatgcctgctccctctgacccagcttcacctcatggacaacccttcttggttcatctccagcccgtgagctggtcctgcttcctcccttccatgccctaacttttaatatgcttgttcagctctaataaagtaataaagcttggttgtcagtataaaaaaaaaaaaaaaaaaaa

SEQ ID NO: 3507 - protein, 451 aa, Homo sapiens
MPREIITLQLGQCGNQIGFEFWKQLCAEHGISPEGIVEEFATEGTDRKDVFFYQADDEHYIPRAVLLDLEPRVIHSILNSPYAKLYNPENIYLSEHGGGAGNNWASGFSQGEKIHEDIFDIIDREADGSDSLEGFVLCHSIAGGTGSGLGSYLLERLNDRYPKKLVQTYSVFPYQDEMSDVVVQPYNSLLTLKRLTQNADCVVVLDNTALNRIATDRLHIQNPSFSQINQLVSTIMSASTTTLRYPGYMNNDLIGLIASLIPTPRLHFLMTGYTPLTTDQSVASVRKTTVLDVMRRLLQPKNVMVSTGRDRQTNHCYIAILNIIQGEVDPTQVHKSLQRIRERKLANFIPWGPASIQVALSRKSPYLPSAHRVSGLMMANHTSISSLFESSCQQFDKLRKRDAFLEQFRKEDMFKDNFDEMDRSREVVQELIDEYHAATQPDYISWGTQEQ

SEQ ID NO: 3508 - DNA, 2994 bp, Homo sapiens
cggccaccggacgccctaccggacacgaccctccctggagcttggacaactgcccacctcggacgctgcaccggacactgccccccacagggctggacactccaacggacactacttcccagctccggacattgctccctcctctcccggggccctggacgcttttccccctcccccctccgggggcccagacactgagcccccctcagcgtctggctagcgtccccttgcaccccagcccaggacactgcctcctccctgtcctcttctcccttctgctcctcccacctcatctttcccctgctcgggtcggagccccgccagttcctccgaccccctactgctcggccgcggctgcccgcgcccccatccgcagctcctcgcccggatgcctctccccgggggactatggtggcttctctgctgccgtcgaggcttcactcttctgcaccgggactacggggacggcgagcttagcggggacggggacgaggacgaggacgaggaaacctttgagctgcggaccccgagtccagcgggcggcgggaggggtcccctggaagtgacgctgactcagccagtgaggagcgggcctgtctccaacaggctgcagagctgggaggagacttggagcctcatcccggagaaagggctgccggaggacgacccggacatcgttgtgaaaggttggctgtaccgggagccccgcggaggaggggcgcggccctggctgcccccgcgccgagcctggtttgtgctcacgcgggactccctggatcagttcagcagcagcgggaaaggggcgcggcgtctcgggagcctcgtgctcaccagcctgtgctcggtgaccggcccagagcgcaggcgtaaggagacaggtctgtggtcagtgactgtgtctggtcggaaacacagtgtccgcctctgctccccacgccaggcagaggctgagcgctggggggtggcattgcgggaagtgatcgcctccaaggcacccctggagacccccacccagctactgctcagggacatacaggaaagttgcggggacccagaggccgttgccctcatttacctgaggaacccgattctgagacacactagtggagccttgtatgccccactcctgcccctgccctatggagtcagcgccccaggtccgggctatgcacccctgcgcgaggaggcggtgcggctgttcttggcgctgcaggcgctggagggggcgcggcgccccgggcccttgatgcagggtgtgctccaaacctgccgggacttgcccgcgctccgggatgaactcttcctgcagctggctaagcagacctcgggccctgcaggtccccccgggctcccggctacccaagaccctgcggccctgcggtactggcaactcctcacctgcatgagctgcaccttccgacctgggggagctgtgcgggggcacctcctggggcacttggagaggaccgagcaggcactcccggactcggaactggcggaatatgcgcgcttcatccggaaagcgctgggccggacgcgcggcagagagctggtgccctcgctggcggagatttccgcgttgagccaacggcaggagctgctgtgtaccgtgcactgtccgggggctggtgcctgtgctgtggccatcgactcccacaccacggcgggggaggtggctcgagagctggtggggcggctgggcttggcccggagccgcaacgcattcgcgctgtacgagcagcgaggggcccaggagcgagccctggctggggggaccctcgtggccgacgtgctcaccaggtttgagaacttggccgcggaggaagctgggttggaggactcgcccgactccgggtggagactatgtctgcgtcttcacggacctctgcaccctgaggggctgtccccagacggtcacgaactgcctttcctctttgagcaggctcacgctctgctgctgcggggccggccgcccccacccgacgacacgctgcgcgccctggcggcgctgcgcctgcagagcctgcatcgggacttctctccgcgggtgcccctgccccgcctggaccgcctgctcccgcccccggccccgccgcgcgaagacccgccccgcccgacccccaggccgcccccttccgctgccctgctggccggggcgctctggagcccgggcctggccaagaggcgggcggagcgggcccggcgcggcggggccggccgcactgcgggaagcattgcccgcgagggaggaggcggcgccggcacggcagctgccgtgctgggcggctggaagcggctacggggcatgggccgagctgaggccatggccgcctacctggccctggcggcgcagtgtccggggttcggcgctgctcggtatgacgttctggagctgagcacggagcctggtcggggtgctccacagaagctgtgcctgggcttgggagccaaggccatgtccctctcccggccaggggagacggagcccatccacagtgtcagctatggccatgtggccgcctgccagctaatgggcccccacaccctggccttgagggtgggagagagccagctcctcctgcagagcccccaggtggaagagatcatgcagctggtgaatgcctacttggccaacccctcccccgagaggccctgcagcagctcttctcctccatgccaagacctgccagacacctcccctcccagccagcgcccgggcctggacgagccccagggacagtctggctgcttggggcagctgcaggactgagcctgccaagaggtcacgacttccctcctgcctgcagcctgggccaggactgctctgagatttgagggaaacatggacccttttggccctgcagggacagggcacatcccacacccaagggctacaatgggtgtgggtaattttctagtttgtttcttaatttatttgtagaagagaagcaaaaaaaaaaaaaagtttcttatttacacaaaaaaaaaaaaaaa

SEQ ID NO: 3509 - protein, 793 aa, Homo sapiens
MPLPGGLWWLLCCRRGFTLLHRDYGDGELSGDGDEDEDEETFELRTPSPAGGGRGPLEVTLTQPVRSGPVSNRLQSWEETWSLIPEKGLPEDDPDIVVKGWLYREPRGGGARPWLPPRRAWFVLTRDSLDQFSSSGKGARRLGSLVLTSLCSVTGPERRRKETGLWSVTVSGRKHSVRLCSPRQAEAERWGVALREVIASKAPLETPTQLLLRDIQESCGDPEAVALIYLRNPILRHTSGALYAPLLPLPYGVSAPGPGYAPLREEAVRLFLALQALEGARRPGPLMQGVLQTCRDLPALRDELFLQLAKQTSGPAGPPGLPATQDPAALRYWQLLTCMSCTFRPGGAVRGHLLGHLERTEQALPDSELAEYARFIRKALGRTRGRELVPSLAEISALSQRQELLCTVHCPGAGACAVAIDSHTTAGEVARELVGRLGLARSRNAFALYEQRGAQERALAGGTLVADVLTRFENLAAEEAGLEDSPDSGWRLCLRLHGPLHPEGLSPDGHELPFLFEQAHALLLRGRPPPPDDTLRALAALRLQSLHRDFSPRVPLPRLDRLLPPPAPPREDPPRPTPRPPPSAALLAGALWSPGLAKRRAERARRGGAGRTAGSIAREGGGGAGTAAAVLGGWKRLRGMGRAEAMAAYLALAAQCPGFGAARYDVLELSTEPGRGAPQKLCLGLGAKAMSLSRPGETEPIHSVSYGHVAACQLMGPHTLALRVGESQLLLQSPQVEEIMQLVNAYLANPSPERPCSSSSPPCQDLPDTSPPSQRPGLDEPQGQSGCLGQLQD

SEQ ID NO: 3510 - DNA, 1244 bp, Homo sapiens
agagatggggacggaggccacagagcaggtttcctggggccattactctggggatgaagaggacgcatactcggctgagccactgccggagctttgctacaaggccgatgtccaggccttcagccgggccttccaacccagtgtctccctgaccgtggctgcgctgggtctggccggcaatggcctggtcctggccacccacctggcagcccgacgcgcagcgcgctcgcccacctctgcccacctgctccagctggccctggccgacctcttgctggccctgactctgcccttcgcggcagcaggggctcttcagggctggagtctgggaagtgccacctgccgcaccatctctggcctctactcggcctccttccacgccggcttcctcttcctggcctgtatcagcgccgaccgctacgtggccatcgcgcgagcgctcccagccgggccgcggccctccactcccggccgcgcacacttggtctccgtcatcgtgtggctgctgtcactgctcctggcgctgcctgcgctgctcttcagccaggatgggcagcgggaaggccaacgacgctgtcgcctcatcttccccgagggcctcacgcagacggtgaagggggcgagcgccgtggcgcaggtggccctgggcttcgcgctgccgctgggcgtcatggtagcctgctacgcgcttctgggccgcacgctgctggccgccagggggcccgagcgccggcgtgcgctgcgcgtcgtggtggctctggtggcggccttcgtggtgctgcagctgccctacagcctcgccctgctgctggatactgccgatctactggctgcgcgcgagcggagctgccctgccagcaaacgcaaggatgtcgcactgctggtgaccagcggcttggccctcgcccgctgtggcctcaatcccgttctctacgccttcctgggcctgcgcttccgccaggacctgcggaggctgctacggggtgggagctcgccctcagggcctcaaccccgccgcggctgcccccgccggccccgcctttcttcctgctcagctcccacggagacccacagtctctcctgggacaactagggctgcgaatctagaggagggggcaggctgagggtcgtgggaaaggggagtaggtgggggaacactgagaaagaggcagggacctaaagggactacctctgtgccttgccacattaaattgataacatggaaatgaaaaaaaaaaaaaaaa

SEQ ID NO: 3511 - protein, 362 aa, Homo sapiens
MGTEATEQVSWGHYSGDEEDAYSAEPLPELCYKADVQAFSRAFQPSVSLTVAALGLAGNGLVLATHLAARRAARSPTSAHLLQLALADLLLALTLPFAAAGALQGWSLGSATCRTISGLYSASFHAGFLFLACISADRYVAIARALPAGPRPSTPGRAHLVSVIVWLLSLLLALPALLFSQDGQREGQRRCRLIFPEGLTQTVKGASAVAQVALGFALPLGVMVACYALLGRTLLAARGPERRRALRVVVALVAAFVVLQLPYSLALLLDTADLLAARERSCPASKRKDVALLVTSGLALARCGLNPVLYAFLGLRFRQDLRRLLRGGSSPSGPQPRRGCPRRPRLSSCSAPTETHSLSWDN

SEQ ID NO: 3512 - DNA, 5293 bp, Homo sapiens
caagagcggaggaccaggaaccagagagagagagagagaaaagagagaggagagacagagcgcttgggggcgaaaggagagagggagggaagggtgggtaaggaggagagagcggtctgctgcaaaccccaggaggagagcttggagcccaagccagaactcgagccctagccggagccgttcacagggaggcggctgccgggaccgtcagccctgcatgatgcatctccggctcttctgcatcctgctcgccgcggtctcaggagccgagggctggggctactacggctgcgacgaggagctggtgggtcccctgtatgcacgctccctgggcgcctcctcctactacagtctccttactgcgccgcgattcgccaggctgcacggcataagcgggtggtcaccacggattggggatccgaatccctggctccagatagacttaatgaagaagcaccggatccgggccgtggccacacagggctcctttaattcttgggactgggtcacacgttacatgctactctacggcgaccgagtggacagctggacaccgttctaccagcgagggcacaactcgaccttctttggtaacgtgaacgagtcggcggtggtgcgccatgacctgcacttccacttcactgcgcgctacatccgcatcgtgcccctggcctggaacccacgcggcaagatcggcctgaggctcggcctctatggctgcccatacaaggccgacatactctatttcgacggcgacgatgccatctcctaccgcttcccgcgaggggtcagccgaagcctgtgggacgtgttcgccttcagcttcaagaccgaggagaaggacggtcttctgctgcacgccgagggcgcccagggcgactacgtgacgctcgagctggagggggcacacctgctgctgcacatgagcctgggcagcagccctatccagccaagaccaggtcacaccaccgtgagcgcaggcggagtcctcaatgaccagcactggcactatgtgcgggtggaccgatttggccgcgatgtaaatttcaccctggacggctatgtgcagcgctttattctcaatggagacttcgagaggctgaacctggacactgagatgttcatcggaggtctggtgggcgccgcgcggaagaacctggcctatcggcataacttccgcggctgcatagaaaacgtaatcttcaaccgcgtcaacatcgcagacctggccgtgcggcgccattcccggatcaccttcgagggtaaggtggcttttcgttgcctggacccggtaccgcaccctatcaacttcggaggccctcacaacttcgttcaagtgcccggtttcccacgccgtggccgcctggcagtctcatttcgcttccgcacctgggacctcaccgggcttctccttttctcccgtctgggggacgggctgggccacgtggagctgacgctcagcgaagggcaggtcaacgtgtccatcgcgcagagcggccgaaagaagcttcagttcgctgctgggtaccgactgaatgacggcttttggcacgaggtgaattttgtggcacaggaaaaccatgcagttatcagcattgatgatgtggaaggggcagaggtcagggtctcatacccgttgctgatccggacagggacctcatatttctttgggggttgtcccaagccagccagtcgatgggactgccactccaaccagacggcattccatggctgcatggagctgctcaaggtggatggtcaactggtcaacctgactctggtggagggccggcggcttggattctatgctgaggtcctctttgatacatgtggcatcactgataggtgcagccctaacatgtgtgagcatgatggacgctgctaccagtcttgggatgacttcatttgctactgcgaactgacgggctacaagggagagacctgccacacacctttgtataaggaatcctgtgaggcttatcggctcagtgggaaaacttctggaaacttcaccattgatcctgatggcagtggccccctgaagccatttgtagtgtactgtgatatccgagagaaccgagcgtggacagttgtgcggcatgacaggctgtggacaactcgagtgacaggttccagcatggagcggccattcctgggggctatccagtactggaatgcatcctgggaggaagtcagtgcccttgccaatgcttcccagcattgtgaacagtggatcgagttctcctgctacaattcccggctgctcaacactgcaggaggctacccctacagcttttggattggccgaaatgaggagcagcacttctactggggaggctcccagcctgggatccagcgctgtgcctgtggtctggaccggagctgtgtggaccctgccttgtactgcaactgtgacgctgaccagccccagtggagaactgacaagggactgctgacctttgtggaccatctgcctgtcactcaggtagtgataggggatacgaaccgctccacttctgaggcccagttcttcctgaggcctctgcgctgctatggcgatcgaaattcctggaacaccatttccttccacaccggggctgcactacgcttccccccaatccgtgccaaccacagcctggatgtctccttctacttcaggacctctgctccctcgggggtcttcctagagaatatggggggcccttactgccagtggcgccgaccttatgtgcgggtggaactcaacacatcccgggatgtggtcttcgcctttgatgtggggaatggggatgagaacctcacagtacactcagacgactttgagttcaatgatgacgagtggcacctggtccgggctgaaatcaacgtgaagcaggcccggctccgagtggatcaccggccctgggttctgcggcctatgccactgcagacctacatctggatggagtatgaccagcccctctatgtgggatctgcagagcttaagagacgcccctttgtgggttgcttgagggccatgcgtctgaacggagtgactctgaacctggagggccgtgccaatgcctctgagggtacctcacccaactgcacaggccactgtgcccaccctcggctcccctgtttccatggaggccgctgcgtggagcgctatagctactacacgtgtgactgtgacctcacggcttttgatgggccatactgcaaccacgatattggtggtttctttgagccgggcacctggatgcgctataacctacagtcagcgctgcgctctgcagccagggagttctcccacatgctgagccggccagtgccaggctatgagcctggctacatcccgggctatgatactccgggctatgtgcctggctaccatggccccgggtaccgcctgcccgactacccccggcctggtcggcctgtgcccggttaccgtgggcctgtctacaacgttacgggagaggaggtctccttcagcttcagcaccagctccgcccctgctgtcctgctctacgtcagttcctttgttcgtgactacatggctgtgctcatcaaggatgatgggacccttcagctgcgatatcagctgggcaccagtccctacgtgtaccagctaaccactcgaccagtgaccgatggccagccccatagcatcaatatcacccgtgtttaccggaacctcttcatccaggtggactacttcccactgacagagcagaagttctcgctgttggtggacagccagttggactcacccaaggccttgtatttagggcgtgtgatggagacaggagtcattgacccggagatccagcgctacaacaccccaggtttctcaggctgcctgtctggtgttcgattcaacaacgtggctcccctcaagacccacttccgaacccctcgacccatgactgctgagctagctgaggcccttcgagttcagggagaactgtccgaatctaattgcggagctatgccacgtcttgtttcagaggtgccacctgagcttgatccctggtatctgcccccagacttcccctactaccatgatgaaggatgggttgccatacttttaggctttttggtggcctttctgctgctggggctggtgggaatgttggtgctcttctatctgcaaaatcatcgctataagggctcctaccataccaatgagcccaaggctgcccacgagtaccatcctggcagcaaacctcccctacccacttcaggccctgcccaggtccccacccctacagcagctcccaaccaagctccagcctcagccccagccccagccccaactccagccccagcccctggcccccgggatcagaacctaccccagatcctggaggagtccaggtctgaatgagtcagaagggcttctgggaccaattccagctcctgacattcccccagtcctgcctctcccccatcctatcagggacatttggctcctcttagctggctctgctcatccagaggatattcccccatcccccccccatcaagtttggtgggcagagctacagatgggacccaagggagtggccgagcctcactgcctaaaccaatgcccttctcatccctgtttccccaggctcctggctgtttatctgccccaaaggagaagcctcatggggttgacataggtcctttctgccatctctgttccagctgctgtcagggattaacaacagagtgtaggggagattaactgcctcccttccaatagacactatcagcagggacagatgtgtgggagtgcagggctgcagagggtatggggggaggaggctgctaaaccctatcccccagcctcccccctgccctgaagatcttccatttgcttccactcagctggaggctcaagagggcttgatggctgtcccctgcccccctccttttgttttgtacacagagaccaagaggcctcagtttagcaccttagtacctccgctgcttcacttgctttagccaaagccataaaaaacctgcaacgtagagaaaataatgcagataccctgactagccagccctctactcctccaaccttttccaagatatgcaatggcctttgtgcctgcccaaaggcttcgcccctccagtgcatgaggaaccctctttcctccgctcagagatgctgcttcatttacccaggaggtcatattctttatatatattttttgttgcaaagtgtctctctagagaaactctatatattattcgaatttttaaattatttgtttatatataaaagaaaagctcaattggcaaaaaaaaaaaaaaaaaa

SEQ ID NO: 3513 - protein, 1384 aa, Homo sapiens
MMHLRLFCILLAAVSGAEGWGYYGCDEELVGPLYARSLGASSYYSLLTAPRFARLHGISGWSPRIGDPNPWLQIDLMKKHRIRAVATQGSFNSWDWVTRYMLLYGDRVDSWTPFYQRGHNSTFFGNVNESAVVRHDLHFHFTARYIRIVPLAWNPRGKIGLRLGLYGCPYKADILYFDGDDAISYRFPRGVSRSLWDVFAFSFKTEEKDGLLLHAEGAQGDYVTLELEGAHLLLHMSLGSSPIQPRPGHTTVSAGGVLNDQHWHYVRVDRFGRDVNFTLDGYVQRFILNGDFERLNLDTEMFIGGLVGAARKNLAYRHNFRGCIENVIFNRVNIADLAVRRHSRITFEGKVAFRCLDPVPHPINFGGPHNFVQVPGFPRRGRLAVSFRFRTWDLTGLLLFSRLGDGLGHVELTLSEGQVNVSIAQSGRKKLQFAAGYRLNDGFWHEVNFVAQENHAVISIDDVEGAEVRVSYPLLIRTGTSYFFGGCPKPASRWDCHSNQTAFHGCMELLKVDGQLVNLTLVEGRRLGFYAEVLFDTCGITDRCSPNMCEHDGRCYQSWDDFICYCELTGYKGETCHTPLYKESCEAYRLSGKTSGNFTIDPDGSGPLKPFVVYCDIRENRAWTVVRHDRLWTTRVTGSSMERPFLGAIQYWNASWEEVSALANASQHCEQWIEFSCYNSRLLNTAGGYPYSFWIGRNEEQHFYWGGSQPGIQRCACGLDRSCVDPALYCNCDADQPQWRTDKGLLTFVDHLPVTQVVIGDTNRSTSEAQFFLRPLRCYGDRNSWNTISFHTGAALRFPPIRANHSLDVSFYFRTSAPSGVFLENMGGPYCQWRRPYVRVELNTSRDVVFAFDVGNGDENLTVHSDDFEFNDDEWHLVRAEINVKQARLRVDHRPWVLRPMPLQTYIWMEYDQPLYVGSAELKRRPFVGCLRAMRLNGVTLNLEGRANASEGTSPNCTGHCAHPRLPCFHGGRCVERYSYYTCDCDLTAFDGPYCNHDIGGFFEPGTWMRYNLQSALRSAAREFSHMLSRPVPGYEPGYIPGYDTPGYVPGYHGPGYRLPDYPRPGRPVPGYRGPVYNVTGEEVSFSFSTSSAPAVLLYVSSFVRDYMAVLIKDDGTLQLRYQLGTSPYVYQLTTRPVTDGQPHSINITRVYRNLFIQVDYFPLTEQKFSLLVDSQLDSPKALYLGRVMETGVIDPEIQRYNTPGFSGCLSGVRFNNVAPLKTHFRTPRPMTAELAEALRVQGELSESNCGAMPRLVSEVPPELDPWYLPPDFPYYHDEGWVAILLGFLVAFLLLGLVGMLVLFYLQNHRYKGSYHTNEPKAAHEYHPGSKPPLPTSGPAQVPTPTAAPNQAPASAPAPAPTPAPAPGPRDQNLPQILEESRSE

SEQ ID NO: 3514 - DNA, 4640 bp, Homo sapiens
cccgcggctcgggatggaggctggacacctgttctgctgttgtgtcctgccattctcctgaagaacagaggcacactgtaaaacccaacacttccccttgcattctataagattacagcaagatggaaataccaaatccccctacctccaaatgtatcacttactggaaaagaaaagtgaaatctgaatacatgcgacttcgacaacttaaacggcttcaggcaaatatgggtgcaaaggctttgtatgtggcaaattttgcaaaggttcaagaaaaaacccagatcctcaatgaagaatggaagaagcttcgtgtccaacctgttcagtcaatgaagcctgtgagtggacacccttttctcaaaaagtgtaccatagagagcattttcccgggatttgcaagccaacatatgttaatgaggtcactgaacacagttgcattggttcccatcatgtattcctggtcccctctccaacagaactttatggtagaagatgagacggttttgtgcaatattccctacatgggagatgaagtgaaagaagaagatgagacttttattgaggagctgatcaataactatgatgggaaagtccatggtgaagaagagatgatccctggatccgttctgattagtgatgctgtttttctggagttggtcgatgccctgaatcagtactcagatgaggaggaggaagggcacaatgacacctcagatggaaagcaggatgacagcaaagaagatctgccagtaacaagaaagagaaagcgacatgctattgaaggcaacaaaaagagttccaagaaacagttcccaaatgacatgatcttcagtgcaattgcctcaatgttccctgagaatggtgtcccagatgacatgaaggagaggtatcgagaactaacagagatgtcagaccccaatgcacttccccctcagtgcacacccaacatcgatggccccaatgccaagtctgtgcagcgggagcaatctctgcactccttccacacacttttttgccggcgctgctttaaatacgactgcttccttcacccttttcatgccacccctaatgtatataaacgcaagaataaagaaatcaagattgaaccagaaccatgtggcacagactgcttccttttgctggaaggagcaaaggagtatgccatgctccacaacccccgctccaagtgctctggtcgtcgccggagaaggcaccacatagtcagtgcttcctgctccaatgcctcagcctctgctgtggctgagactaaagaaggagacagtgacagggacacaggcaatgactgggcctccagttcttcagaggctaactctcgctgtcagactcccacaaaacagaaggctagtccagccccacctcaactctgcgtagtggaagcaccctcggagcctgtggaatggactggggctgaagaatctctttttcgagtcttccatggcacctacttcaacaacttctgttcaatagccaggcttctggggaccaagacgtgcaagcaggtctttcagtttgcagtcaaagaatcacttatcctgaagctgccaacagatgagctcatgaacccctcacagaagaagaaaagaaagcacagattgtgggctgcacactgcaggaagattcagctgaagaaagataactcttccacacaagtgtacaactaccaaccctgcgaccacccagaccgcccctgtgacagcacctgcccctgcatcatgactcagaatttctgtgagaagttctgccagtgcaacccagactgtcagaatcgtttccctggctgtcgctgtaagacccagtgcaataccaagcaatgtccttgctatctggcagtgcgagaatgtgaccctgacctgtgtctcacctgtggggcctcagagcactgggactgcaaggtggtttcctgtaaaaactgcagcatccagcgtggacttaagaagcacctgctgctggccccctctgatgtggccggatggggcaccttcataaaggagtctgtgcagaagaacgaattcatttctgaatactgtggtgagctcatctctcaggatgaggctgatcgacgcggaaaggtctatgacaaatacatgtccagcttcctcttcaacctcaataatgattttgtagtggatgctactcggaaaggaaacaaaattcgatttgcaaatcattcagtgaatcccaactgttatgccaaagtggtcatggtgaatggagaccatcggattgggatctttgccaagagggcaattcaagctggcgaagagctcttctttgattacaggtacagccaagctgatgctctcaagtacgtggggatcgagagggagaccgacgtcctttagccctcccaggccccaacggcagcacttatggtagcggcactgtcttggctttcgtgctcacaccactgctgctcgagtctcctgcactgtgtctcccacactgagaaaccccccaacccactccctctgtagtgaggcctctgccatgtccagagggcacaaaactgtctcaatgagaggggagacagaggcagctagggcttggtctcccaggacagagagttacagaaatgggagactgtttctctggcctcagaagaagcgagcacaggctggggtggatgacttatgcgtgatttcgtgtcggctccccaggctgtggcctcaggaatcaacttaggcagttcccaacaagcgctagcctgtaattgtagctttccacatcaagagtccttatgttattgggatgcaggcaaacctctgtggtcctaagacctggagaggacaggctaagtgaagtgtggtccctggagcctacaagtggtctgggttagaggcgagcctggcaggcagcacagactgaactcagaggtagacaggtcaccttactacctcctccctcgtggcagggctcaaactgaaagagtgtgggttctaagtacaggcattcaaggctgggggaaggaaagctacgccatccttccttagccagagagggagaaccagccagatgatagtagttaaactgctaagcttgggcccaggaggctttgagaaagccttctctgtgtactctggagatagatggagaagtgttttcagattcctgggaacagacaccagtgctccagctcctccaaagttctggcttagcagctgcaggcaagcattatgctgctattgaagaagcattaggggtatgcctggcaggtgtgagcatcctggctcgctggatttgtgggtgttttcaggccttccattccccatagaggcaaggcccaatggccagtgttgcttatcgcttcagggtaggtgggcacaggcttggactagagaggagaaagattggtgtaatctgctttcctgtctgtagtgcctgctgtttggaaagggtgagttagaatatgttccaaggttggtgaggggctaaattgcacgcgtttaggctggcaccccgtgtgcagggcacactggcagagggtatctgaagtgggagaagaagcaggtagaccacctgtcccaggctgtggtgccaccctctctggcattcatgcagagcaaagcactttaaccatttcttttaaaaggtctatagattggggtagagtttggcctaaggtctctagggtccctgcctaaatcccactcctgagggagggggaagaagagagggtgggagattctcctccagtcctgtctcatctcctgggagaggcagacgagtgagtttcacacagaagaatttcatgtgaatggggccagcaagagctgccctgtgtccatggtgggtgtgccgggctggctgggaacaaggagcagtatgttgagtagaaagggtgtgggcgggtatagattggcctgggagtgttacagtagggagcaggcttctcccttctttctgggactcagagccccgcttcttcccactccacttgttgtcccatgaaggaagaagtggggttcctcctgacccagctgcctcttacggtttggtatgggacatgcacacacactcacatgctctcactcaccacactggagggcacacatgtaccccgcacccagcaactcctgacagaaagctcctcccacccaaatgggccaggccccagcatgatcctgaaatctgcatccgccgtggtttgtattcattgtgcatatcagggataccctcaagctggactgtgggttccaaattactcatagaggagaaaaccagagaaagatgaagaggaggagttaggtctatttgaaatgccaggggctcgctgtgaggaataggtgaaaaaaaaacttttcaccagcctttgagagactagactgaccccacccttccttcagtgagcagaatcactgtggtcagtctcctgtcccagcttcagttcatgaatactcctgttcctccagtttcccatcctttgtccctgctgtcccccacttttaaagatgggtctcaacccctccccaccacgtcatgatggatggggcaaggtggtggggactaggggagcctggtatacatgcggcttcattgccaataaatttcatgcactttaaagtcctgtggcttgtgacctcttaataaagtgttagaatccaaaaaaaaaaaaaaaa

SEQ ID NO: 3515 - protein, 747 aa, Homo sapiens
MEIPNPPTSKCITYWKRKVKSEYMRLRQLKRLQANMGAKALYVANFAKVQEKTQILNEEWKKLRVQPVQSMKPVSGHPFLKKCTIESIFPGFASQHMLMRSLNTVALVPIMYSWSPLQQNFMVEDETVLCNIPYMGDEVKEEDETFIEELINNYDGKVHGEEEMIPGSVLISDAVFLELVDALNQYSDEEEEGHNDTSDGKQDDSKEDLPVTRKRKRHAIEGNKKSSKKQFPNDMIFSAIASMFPENGVPDDMKERYRELTEMSDPNALPPQCTPNIDGPNAKSVQREQSLHSFHTLFCRRCFKYDCFLHPFHATPNVYKRKNKEIKIEPEPCGTDCFLLLEGAKEYAMLHNPRSKCSGRRRRRHHIVSASCSNASASAVAETKEGDSDRDTGNDWASSSSEANSRCQTPTKQKASPAPPQLCVVEAPSEPVEWTGAEESLFRVFHGTYFNNFCSIARLLGTKTCKQVFQFAVKESLILKLPTDELMNPSQKKKRKHRLWAAHCRKIQLKKDNSSTQVYNYQPCDHPDRPCDSTCPCIMTQNFCEKFCQCNPDCQNRFPGCRCKTQCNTKQCPCYLAVRECDPDLCLTCGASEHWDCKVVSCKNCSIQRGLKKHLLLAPSDVAGWGTFIKESVQKNEFISEYCGELISQDEADRRGKVYDKYMSSFLFNLNNDFVVDATRKGNKIRFANHSVNPNCYAKVVMVNGDHRIGIFAKRAIQAGEELFFDYRYSQADALKYVGIERETDVL

SEQ ID NO: 3516 - DNA, 780 bp, Homo sapiens
ggatataggcgcccccacacccgggcccggctaagcgccgccgccgctcctcgcctccttgctgcacgatggcctcgctccgggtggagcgcgccggcggcccgcgtctccctaggacccgagtcgggcggccggcagccgtccgcctcctccttctgctgggcgctgtcctgaatccccacgaggccctggctcagcctcttcccaccacaggcacaccagggtcagaaggggggacggtgaagaactatgagacagctgtccaattttgctggaatcattataaggatcaaatggatcctatcgaaaaggattggtgcgactgggccatgattagcaggccttatagcaccctgcgagattgcctggagcactttgcagagttgtttgacctgggcttccccaatcccttggcagagaggatcatctttgagactcaccagatccactttgccaactgctccctggtgcagcccaccttctctgaccccccagaggatgtactcctggccatgatcatagcccccatctgcctcatccccttcctcatcactcttgtagtatggaggagtaaagacagtgaggcccaggcctagggggcacgagcttctcaacaaccatgttactccacttccccacccccaccaggcctccctcctcccctcctactcccttttctcactctcatccccaccacagatccctggattgctgggaatggaagccagggttgggcatggcacaagttctgtaatcttcaaaataaaactttttttttga

SEQ ID NO: 3517 - protein, 175 aa, Homo sapiens
MASLRVERAGGPRLPRTRVGRPAAVRLLLLLGAVLNPHEALAQPLPTTGTPGSEGGTVKNYETAVQFCWNHYKDQMDPIEKDWCDWAMISRPYSTLRDCLEHFAELFDLGFPNPLAERIIFETHQIHFANCSLVQPTFSDPPEDVLLAMIIAPICLIPFLITLVVWRSKDSEAQA

SEQ ID NO: 3518 - DNA, 1122 bp, Homo sapiens
gtccttagccggtagcttccgggtttcctgggctactacgatggcgatgagtttcgagtggccgtggcagtatcgcttcccacccttctttacgttacaaccgaatgtggacactcggcagaagcagctggccgcctggtgctcgctggtcctgtccttctgccgcctgcacaaacagtccagcatgacggtgatggaagctcaggagagcccgctcttcaacaacgtcaagctacagcgaaagcttcctgtggagtcgatccagattgtattagaggaactgaggaagaaagggaacctcgagtggttggataagagcaagtccagcttcctgatcatgtggcggaggccagaagaatgggggaaactcatctatcagtgggtttccaggagtggccagaacaactccgtctttaccctgtatgaactgactaatggggaagacacagaggatgaggagttccacgggctggatgaagccactctactgcgggctctgcaggccctacagcaggagcacaaggccgagatcatcactgtcagcgatggccgaggcgtcaagttcttctagcagggacctgtctccctttacttcttacctcccacctttccagggctttcaaaaggagacagacccagtgtcccccaaagactggatctgtgactccaccagactcaaaaggactccagtcctgaaggctgggacctggggatgggtttctcacaccccatatgtctgtcccttggatagggtgaggctgaagcaccagggagaaaatatgtgcttcttctcgccctacctcctttcccatcctagactgtccttgagccagggtctgtaaacctgacactttatatgtgttcacacatgtaagtacatacacacatgcgcctgcagcacatgcttctgtctcctcctcctcccacccctttagctgctgttgcctcccttctcaggctggtgctggatccttcctaggggatgggggaagccctggctgcaggcagccttccaggcaatatgaagataggaggcccacgggcctggcagtgagaggtgtggccccacaccgatttatgatattaaaatctcaactcccaaaaaaaaaaaaaaaaaaaaaa

SEQ ID NO: 3519 - protein, 176 aa, Homo sapiens
MAMSFEWPWQYRFPPFFTLQPNVDTRQKQLAAWCSLVLSFCRLHKQSSMTVMEAQESPLFNNVKLQRKLPVESIQIVLEELRKKGNLEWLDKSKSSFLIMWRRPEEWGKLIYQWVSRSGQNNSVFTLYELTNGEDTEDEEFHGLDEATLLRALQALQQEHKAEIITVSDGRGVKFF

SEQ ID NO: 3520 - DNA, 4147 bp, Homo sapiens
ttcggcgccctgctcttcctcatgttggcatccccggccacggagaccaccgtcctcatgtcccagactgaggccgacctggccctgcggcccccgcctcctcttggcaccgcggggcagccccgcctcgggccccctcctcgccgagcgcgccgcttctccgggaaggctgagccccggccgcgctcttctcgtctcagccgccgtagctcagtcgacttggggctgctgagctcttggtccctgccagcctcacccgctccggacccccccgatcctccggactccgctggtcctggccccgcgaggagcccaccgcctagctccaaagaaccccccgagggcacgtggaccgagggagcccctgtgaaggctgcggaagactccgcgcgtcccgagctcccggactctgcagtgggcccggggtccagggagccgctaagggtccctgaagctgtggccctagagcggcggcgggagcaggaagaaaaggaggacatggagacccaggctgtggcaacgtcccccgatggccgatacctcaagtttgacatcgagattggacgtggctccttcaagacggtgtatcgagggctagacaccgacaccacagtggaggtggcctggtgtgagctgcagactcggaaactgtctagagctgagcggcagcgcttctcagaggaggtggagatgctcaaggggctgcagcaccccaacatcgtccgcttctatgattcgtggaagtcggtgctgaggggccaggtttgcatcgtgctggtcaccgaactcatgacctcgggcacgctcaagacgtacctgaggcggttccgggagatgaagccgcgggtccttcagcgctggagccgccaaatcctgcggggacttcatttcctacactcccgggttcctcccatcctgcaccgggatctcaagtgcgacaatgtctttatcacgggacctactggctctgtcaaaatcggggacctgggcctggccacgctcaagcgcgcctcctttgccaagagtgtcatcgggaccccggaattcatggcccccgagatgtacgaggaaaagtacgatgaggccgtggacgtgtacgcgttcggcatgtgcatgctggagatggccacctctgagtacccgtactccgagtgccagaatgccgcgcaaatctaccgcaaggtcacttcgggcagaaagccgaacagcttccacaaggtgaagatacccgaggtgaaggagatcattgaaggctgcatccgcacggataagaacgagaggttcaccatccaggacctcctggcccacgccttcttccgcgaggagcgcggtgtgcacgtggaactagcggaggaggacgacggcgagaagccgggcctcaagctctggctgcgcatggaggacgcgcggcgcggggggcgcccacgggacaaccaggccatcgagttcctgttccagctgggccgggacgcggccgaggaggtggcacaggagatggtggctctgggcttggtctgtgaagccgattaccagccagtggcccgtgcagtacgtgaacgggttgctgccatccagcgaaagcgtgagaagctgcgtaaagcaagggaattggaggcactcccaccagagccaggacctccaccagcaactgtgcccatggcccccggtccccccagtgtcttcccccctgagcctgaggagccagaggcagaccagcaccagcccttccttttccgccacgccagctactcatctaccacttcggattgcgagactgatggctacctcagctcctccggcttcctggatgcctcagaccctgcccttcagccccctgggggggtgccatccagcctggctgagtcccatctctgcctgccctcggcttttgccctatccattccacgttctggccctggaagtgacttttcccccggggacagctatgcctcagatgcagcttcaggccttagcgatgtgggagaagggatgggacaaatgaggagacccccagggaggaatctccggcgcagaccccgatcccggctgcgggtcactagtgtctcagaccagaatgacagagtggttgagtgccagctacagacccataacagcaagatggtgaccttccgatttgatctggatggggacagcccggaagagattgcagctgccatggtatataacgagttcattctgccttcggagcgagatggatttctcagacggattcgggagattatccagcgagtggagaccctgttgaagagagacactggccccatggaggctgctgaagacaccctaagcccccaggaggagccagcaccattacctgccctgcccgtccccctcccagacccatccaatgaagagctccagagcagcacctccctggagcacaggagctggacagccttctccacctcctcatcttctcctggaactcctttgtctcctggaaacccattttcccctggaacccccatttccccaggtcccatcttccccatcacttctcccccatgtcatcccagcccctccccattctcccccatttcttcccaggtctcctcaaatccctctccacaccccaccagctctccacttccattctcctccagcacacccgagtttccggtcccactctctcagtgtccctggagttctctccccacgacttctccacctacgttctctcccacttgttctcaggtcactcttagttcccctttctttcctccgtgcccctccacttcttccttcccctccaccacagcagcccctctcctttctctggctagtgccttctcactggctgtgatgactgtggcccagtccctgctgtccccctcacctgggctcctttcccagtctcctccagcccctcctagtcccctccctagcctgccccttccccctcccgttgctcctggtggccaggaaagcccttcaccccacacagctgaggtggagagtgaggcctcaccacctcctgctcggcccctcccaggggaagccaggctggcgcccatctctgaagagggaaagccgcagcttgttgggcgtttccaagtgacttcatccaaggaaccggctgagcctcttcccttgcagccaacatcccccactctctctggttctccaaaaccttcaacccctcagctcacttcagagagctcagatacagaggacagtgctggaggcgggccagagaccagggaagctctggctgagagcgaccgtgcagctgagggtctgggggctggagttgaggaggaaggagatgatgggaaggaaccccaagttgggggcagcccccaacccctgagccatcccagcccagtgtggatgaactactcctacagcagcctgtgtttgagcagcgaggagtcagaaagcagtggggaagatgaggagttctgggctgagctgcagagtcttcggcagaagcacttgtcagaggtggaaacactacagacactacagaaaaaagaaattgaagatttgtacagccggctggggaagcagcccccaccgggtattgtggccccagctgctatgctgtccagccgccagcgccgcctctccaagggcagcttccccacctcccgccgcaacagcctacagcgctctgagcccccaggccctggcatcatgcgaaggaactctctgagtggcagcagcaccggctcccaggagcagcgggcaagcaagggggtgacattcgccggggatgttggcaggatgtgaattcagaacagaagccatgtatctcccccacaccagggcccaccatggagcttgtgttctcagaatctgatgctttctgatcaacaaaactgagcaaggaagatcccaacactgaaggggtagaaggccaggggggcatggagagtgcagctccattatagtgaagagccaaacatatgtgaactgtttgctgtgtggaggtgttagttctgctgcctaccatcttcatctctagcacctcccctgccaagagtcaaccactaagcaatcccacccaagcctggatgcttctagaggggcccactcccagctgggagagtgtaggggatatgctcacaccacattagcagcaaccaataaaaatgctggaaacaagaaaaaaaaaaaaaaaaaa

SEQ ID NO: 3521 - protein, 1243 aa, Homo sapiens
MLASPATETTVLMSQTEADLALRPPPPLGTAGQPRLGPPPRRARRFSGKAEPRPRSSRLSRRSSVDLGLLSSWSLPASPAPDPPDPPDSAGPGPARSPPPSSKEPPEGTWTEGAPVKAAEDSARPELPDSAVGPGSREPLRVPEAVALERRREQEEKEDMETQAVATSPDGRYLKFDIEIGRGSFKTVYRGLDTDTTVEVAWCELQTRKLSRAERQRFSEEVEMLKGLQHPNIVRFYDSWKSVLRGQVCIVLVTELMTSGTLKTYLRRFREMKPRVLQRWSRQILRGLHFLHSRVPPILHRDLKCDNVFITGPTGSVKIGDLGLATLKRASFAKSVIGTPEFMAPEMYEEKYDEAVDVYAFGMCMLEMATSEYPYSECQNAAQIYRKVTSGRKPNSFHKVKIPEVKEIIEGCIRTDKNERFTIQDLLAHAFFREERGVHVELAEEDDGEKPGLKLWLRMEDARRGGRPRDNQAIEFLFQLGRDAAEEVAQEMVALGLVCEADYQPVARAVRERVAAIQRKREKLRKARELEALPPEPGPPPATVPMAPGPPSVFPPEPEEPEADQHQPFLFRHASYSSTTSDCETDGYLSSSGFLDASDPALQPPGGVPSSLAESHLCLPSAFALSIPRSGPGSDFSPGDSYASDAASGLSDVGEGMGQMRRPPGRNLRRRPRSRLRVTSVSDQNDRVVECQLQTHNSKMVTFRFDLDGDSPEEIAAAMVYNEFILPSERDGFLRRIREIIQRVETLLKRDTGPMEAAEDTLSPQEEPAPLPALPVPLPDPSNEELQSSTSLEHRSWTAFSTSSSSPGTPLSPGNPFSPGTPISPGPIFPITSPPCHPSPSPFSPISSQVSSNPSPHPTSSPLPFSSSTPEFPVPLSQCPWSSLPTTSPPTFSPTCSQVTLSSPFFPPCPSTSSFPSTTAAPLLSLASAFSLAVMTVAQSLLSPSPGLLSQSPPAPPSPLPSLPLPPPVAPGGQESPSPHTAEVESEASPPPARPLPGEARLAPISEEGKPQLVGRFQVTSSKEPAEPLPLQPTSPTLSGSPKPSTPQLTSESSDTEDSAGGGPETREALAESDRAAEGLGAGVEEEGDDGKEPQVGGSPQPLSHPSPVWMNYSYSSLCLSSEESESSGEDEEFWAELQSLRQKHLSEVETLQTLQKKEIEDLYSRLGKQPPPGIVAPAAMLSSRQRRLSKGSFPTSRRNSLQRSEPPGPGIMRRNSLSGSSTGSQEQRASKGVTFAGDVGRM

SEQ ID NO: 3522 - DNA, 772 bp, Homo sapiens
gcaacatggcgtcttcgggagctggtgaccctctggattctaagcgtggagaggccccgttcgctcagcgtatcgacccgactcgggagaagctgacacccgagcaactgcattccatgcggcaggcggagcttgcccagtggcagaaggtcctaccacggcggcgaacccggaacatcgtgaccggcctaggcatcggggccctggtgttggctatttatggttacaccttctactcgatttcccaggagcgtttcctagatgagctagaagacgaggccaaagctgcccgagcccgagctctggcaagggcgtcagggtcctaatctggatgggtattgatcatgtccaacctgctggagccccttcacatggtggatgatgccccatgaccctgtagaaattgaatcctgctcacaacattgttggccttcttactaaccttggaccgtgattgagcccaagaaaccagggacttacgcatttggccaatgtcaaaagaacagaactttgcccactgcacacttgctgtgtacaatgactgagccctttcttgtagtttgtttccttgtttgagaggtgtgcatgcgaccgtggcttttcccaaagtttctgactttgtggtttacccccttcaccttccagggacgcagttgttacgaggttagacgtggcagctctgtgcagtgtttgagcctacagtgggatacatagggtcaaattgagaataataaactgagtcattctcctggaaaaaaaaaaaaaaaaaaaa

SEQ ID NO: 3523 - protein, 106 aa, Homo sapiens
MASSGAGDPLDSKRGEAPFAQRIDPTREKLTPEQLHSMRQAELAQWQKVLPRRRTRNIVTGLGIGALVLAIYGYTFYSISQERFLDELEDEAKAARARALARASGS

SEQ ID NO: 3524 - DNA, 2241 bp, Homo sapiens
aattgggttttcctcagacttgaggcgacgacacactcattggaaggggacgaggaatccagggtgtggcagaagactggagaggagctaagggggtcggtatgtggatccagtgaacccgtccaggtgccccaagaggctcgtgaatatggacggatccatgaggccacgatcggcctccctcgttgactttcagtttggagttgtcgccacagagacgattgaagacgccctgcttcacttggcccagcagaatgagcaagcagtgagggaggcttcggggcggctgggccgcttcagggagccccagatcgtggagtttgtttttctcctgtctgaacaatggtgtctggagaaatctgtgagctaccaggctgtagaaatcctagaaaggtttatggtaaaacaggcagagaacatctgcaggcaagccacaatccagccaagagataataagagagagtctcagaattggagggctctgaaacagcagcttgtcaacaagtttactctccgtcttgtgtcatgtgttcagctggccagcaaactttccttccgaaacaaaataatcagcaacattacagtcttgaatttcctccaggctctaggctatctacacactaaagaagaactgctggaatcagagcttgatgttttgaagtccttgaacttccgaattaatctgcccactcccctggcatatgtggagacgctcctagaggttttaggatacaatggctgtttggttccagccatgaggctgcatgcaacctgcctgacactgctcgacctggtctatcttctgcatgaacccatatatgagagcctgttgagggcttcaattgagaactccactcccagtcagctgcaaggggaaaagtttacttcagtgaaggaagacttcatgctgttggcagtaggaatcattgcagcaagtgctttcatccaaaaccatgagtgttggagccaggttgtggggcatttgcagagcatcactggtattgccttggcaagcattgctgagttctcttatgcaatcctgactcacggagtgggagccaacactccggggagacagcagtctattcctccccacctggcagccagagctctgaagactgttgcttcctctaacacatgagggaggctgaatccaccaaatataaacagccatccgtcactgcactcatgcctccctctgtttactttcatactaagggtacaaaaattccaagtctcttttgaactgtattttgtatgccaatttcatgcttatttttcctttatcagagagagttaaggtggacgagcatgccctttttgtcatatcagcctgaaaatgttaaaaagctaggtggagacagattagttgtttcatttttgtttaacaaggtatttatacttttagcttaatttcattaagaggaacatcaggcattgcaatcagtattaatcaggggctcaaatacagactatctgggtgaccttgactaagcatcaaggaggtagcctttatttccccttaaaattagtttaacatctctgttccattattcagatctacacaaacaaggcttcctcaacagctatctatttttactagagtctttttttaaaactaaaactaactctaaagaagtttcaacagaatttccacatacctgcattcattagaacttgattctcccagaatacaaagtactctattttaaagaaaaacccaacagtgcacccctgggcagttttcagactgcagcaaatcttttattacaaataattaaatctctccataatgtctcaaacagtatcaaacaccatttcatatctctaacacagagcagagtcggcattcagtataagaaccaagtgaaaagtgttaaatttcaagcatctgatcacatcacatggtgaccaggtaaagcttagatgtcattttcccacattatccaactgtgcatctcaaacatatcctcatctcagtaaagacaaaagtttctatttcatattgttaagtgcaggaagttgagagagataaaaatccagtgaaaacacatcaatctcaattcaactcagttaaaaaaaagaaaagcaaatttaaattagtttttttcagagaagaaagggaaaggagtccatggggttaagaatcaaaactgaccagggctggcaactatagatggcatgttgtagctctggaaagtatctgtcacatgatattttaaaataaagtggcttttgtgg

SEQ ID NO: 3525 - protein, 330 aa, Homo sapiens
MDGSMRPRSASLVDFQFGVVATETIEDALLHLAQQNEQAVREASGRLGRFREPQIVEFVFLLSEQWCLEKSVSYQAVEILERFMVKQAENICRQATIQPRDNKRESQNWRALKQQLVNKFTLRLVSCVQLASKLSFRNKIISNITVLNFLQALGYLHTKEELLESELDVLKSLNFRINLPTPLAYVETLLEVLGYNGCLVPAMRLHATCLTLLDLVYLLHEPIYESLLRASIENSTPSQLQGEKFTSVKEDFMLLAVGIIAASAFIQNHECWSQVVGHLQSITGIALASIAEFSYAILTHGVGANTPGRQQSIPPHLAARALKTVASSNT

SEQ ID NO: 3526 - DNA, 2144 bp, Homo sapiens
gctgaagacagagcgatggtagttctggaggcctcgctccggggccgacccgaggccacagtgcctccgcggtagaccggacttgggtgacgggctccgggctcccgaggtgaagagcatcgggggctgagggatggaagggtctaagacgtccaacaacagcaccatgcaggtgagcttcgtgtgccagcgctgcagccagcccctgaaactggacacgagtttcaagatcctggaccgtgtcaccatccaggaactcacagctccattacttaccacagcccaggcgaaaccaggagagacccaggaggaagagactaactcaggagaggagccatttattgaaactcctcgccaggatggtgtctctcgcagattcatccccccagccaggatgatgtccacagaaagtgccaacagcttcactctgattggggaggcatctgatggcggcaccatggagaacctcagccgaagactgaaggtcactggggacctttttgacatcatgtcgggccagacagatgtggatcacccactctgtgaggaatgcacagatactcttttagaccagctggacactcagctcaacgtcactgaaaatgagtgtcagaactacaaacgctgtttggagatcttagagcaaatgaatgaggatgacagtgaacagttacagatggagctaaaggagctggcactagaggaggagaggctgatccaggagctggaagacgtggaaaagaaccgcaagatagtggcagaaaatctcgagaaggtccaggctgaggctgagagactggatcaggaggaagctcagtatcagagagaatacagtgaatttaaacgacagcagctggagctggatgatgagctgaagagtgttgaaaaccagatgcgttatgcccagacgcagctggataagctgaagaaaaccaacgtctttaatgcaaccttccacatctggcacagtggacagtttggcacaatcaataacttcaggctgggtcgcctgcccagtgttcccgtggaatggaatgagattaatgctgcttggggccagactgtgttgctgctccatgctctggccaataagatgggtctgaaatttcagagataccgacttgttccttacggaaaccattcatatctggagtctctgacagacaaatctaaggagctgccgttatactgttctggggggttgcggtttttctgggacaacaagtttgaccatgcaatggtggctttcctggactgtgtgcagcagttcaaagaagaggttgagaaaggcgagacacgtttttgtcttccctacaggatggatgtggagaaaggcaagattgaagacacaggaggcagtggcggctcctattccatcaaaacccagtttaactctgaggagcagtggacaaaagctctcaagttcatgctgacgaatcttaagtggggtcttgcttgggtgtcctcacaattttataacaaatgacttttttccttagggggaggtttgccttaaaggcttttaattttgttttgtttgcaaacatgttttaaattaaattcgggtaatattaaacagtacatgtttacaataccaaaaaagaaaaaatccacaaaagccactttattttaaaatatcatgtgacagatactttccagagctacaacatgccatctatagttgccagccctggtcagttttgattcttaaccccatggactcctttccctttcttctctgaaaaaaactaatttaaatttgcttttcttttttttaactgagttgaattgagattgatgtgttttcactggatttttatctctctcaacttcctgcacttaacaatatgaaatagaaacttttgtctttactgagatgaggatatgtttgagatgcacagttggataatgtgggaaaatgacatctaagctttacctggtcaccatgtgatgtgatcagatgcttgaaatttaacacttttcacttggttcttatactgaatgccgactctgctctgtgttagagatatgaaatggtgtttgatactgtttgagacattatggagagatttaattatttgtaataaaagatttgctgcagtctgaaaactgaaaaaaaaaaaaaaaaaaaaaaaaaaaaaaaa

SEQ ID NO: 3527 - protein, 450 aa, Homo sapiens
MEGSKTSNNSTMQVSFVCQRCSQPLKLDTSFKILDRVTIQELTAPLLTTAQAKPGETQEEETNSGEEPFIETPRQDGVSRRFIPPARMMSTESANSFTLIGEASDGGTMENLSRRLKVTGDLFDIMSGQTDVDHPLCEECTDTLLDQLDTQLNVTENECQNYKRCLEILEQMNEDDSEQLQMELKELALEEERLIQELEDVEKNRKIVAENLEKVQAEAERLDQEEAQYQREYSEFKRQQLELDDELKSVENQMRYAQTQLDKLKKTNVFNATFHIWHSGQFGTINNFRLGRLPSVPVEWNEINAAWGQTVLLLHALANKMGLKFQRYRLVPYGNHSYLESLTDKSKELPLYCSGGLRFFWDNKFDHAMVAFLDCVQQFKEEVEKGETRFCLPYRMDVEKGKIEDTGGSGGSYSIKTQFNSEEQWTKALKFMLTNLKWGLAWVSSQFYNK

SEQ ID NO: 3528 - DNA, 3299 bp, Homo sapiens
gggtgcttagccccgcccccgtcccactctgccctgttgctgtcgcgccgctgctggttgctgtccctggacccctaccatggaggagaccatcaaagatccccccacatcagctgtcttgctggatcactgtcatttctctcaggtcatctttaacagtgtggagaagttctacatccctggaggggacgtcacatgtcattataccttcacccagcatttcatccctcgtcgaaaggattggattggcatctttagagtggggtggaagacaacccgtgagtattacaccttcatgtgggttactttgcccattgacctaaacaacaaatcagctaaacagcaggaagtccaattcaaagcttactacctgcccaaggatgatgagtattaccagttctgctatgtggatgaggatggtgtggtccggggagcaagtattcctttccaattccgtccagaaaatgaggaagacatcctggttgttaccactcagggagaggtggaagagattgagcagcacaacaaggagctttgcaaagaaaaccaggagctgaaggacagctgtatcagcctccagaagcagaactcagacatgcaggctgagctccaaaagaagcaggaggagctagaaaccctacagagcatcaataagaagttggaactgaaagtgaaagaacagaaggactattgggagacagagctgcttcaactgaaagaacaaaaccagaagatgtcctcagaaaatgagaagatgggaatcagagtggatcagcttcaggcccagctgtcaactcaagagaaagaaatggagaagcttgttcagggagatcaagataagacagagcagttagagcagctgaaaaaggaaaatgaccacctctttctcagtttaactgaacagaggaaggaccagaagaagctcgagcagacagtggagcaaatgaagcagaatgaaactactgcaatgaagaaacaacaggaattaatggatgaaaactttgacctgtcaaaaagactgagtgagaacgaaattatatgtaatgctctgcagagacagaaagagagattggaaggagaaaatgatcttttgaagagggagaacagcagattgctcagttacatgggtctggattttaattctttgccgtatcaagtacctacttcagatgaaggaggcgcaagacaaaatccaggacttgcctatggaaacccatattctggtatccaagaaagttcttcccccagcccgctctccatcaagaaatgccctatctgcaaagcagatgatatttgtgatcacaccttggagcaacagcagatgcagcccctttgtttcaattgtccaatttgtgacaagatcttcccagctacagagaagcagatctttgaagaccacgtgttctgccactctctctgagtatcccaacctcttggatgtatacagagattttatagaatagaacctatagcttctaccatgagttatatgagtcaagatcctgcctaacctgaaattattagggatttactcagccctgctgccgctaacagtggagttatgtcactgatctgaaggtcactgttaagggcttctgctgccatccttgtgggttgctacctttaagtcgcataactctagctgtatcatcctctcacctgtcattcttctgagggtctcagtacaagggccctgggatggagccaacctgggtattcacaacaggcctgacttgatactaagtgattagttttccaagttgtcccactgccattcaaagtcagcccttgagtgtatttgttctcagtcctaaccctggggccagagattggtccgaggttgagaattccttcctcctcatccttggtgttgctttctccaaatgattgttttagactagccaaaaatgccgtggcaaagagctcagaaatccaatttggataccaaaggtttctcatgttaatttctcagcccccaaagaagcatcttactcctgaaccttagacaggaagtattgtttcagtcacagaaagcttttctgggtacctctggttagcactttctactctctgatatttcctatgtacatagcttttattgttgtaaatcctttcttaatggttaaataggattgttagcaactatgggtttgcagttttctgagtaggtgagttttgaatatgggtaaatcagaataatgagacaacttgttaatctctttaatactaaaaataaattactcttctatttcagggacttaggtaatttaaaataaaccttcaatttatggtcttctgttttgaagctcatgggaaaattgtgatcaaaagggctatgggaagggcagaccccgccaatgatttctcttcacctgtcttaagattaaataaaaaagagtgtcctggcagttatcttgaggtggggaaggaggtgatgaaacattagtttgtgaaatccaaggccctggcttgctttctttctttttttttttttttttttgaaacagtctctctctgtcacccaggctggcgtgcaatggcgcagttgactcactacagcctctgcctcccaggttcaagcgattctcatgccttagcctcccaagtagctgggattacaggtgtgtgccgcaatgcccagctaatttttgtgtttttagtagagacagggtttcactatgttggccaggctggtctcgaactcctggcctcacgtgatctgtccacttcagccgtccaaagtgctgggattacaagcgtgagccactgtgctgggcccgaggccctgacttcttgctgtaactttccatgcattttttttaaaaggagcagtgtggattttcgcaccctttgtgaactaagttcaatgcgctctatccaaatttgcctaattgaactataagaaagtaataattccattttctatcccctcagggactgaacaaatggaaataactcccaggcagtatcaggtggtcactacagagacttccacaaaaacttttgaatgatgtgaaacacgatgtcatgaataagggttgagccaactatagctctgtgttcctactgggctttccctaatgtggttgggagttatgccctagactaactgtattgtcctagtcacagctccttgctttgatttcatccttgataaaatgaagatgaaacttacactacttctccaagccttttgctgtcttaagaataagacctgagattaacactaaccctagaatagaaatgtaatagggagatggtaataaaggagtttttctggcaaaaaaaaaaaaaaaaaa

SEQ ID NO: 3529 - protein, 446 aa, Homo sapiens
MEETIKDPPTSAVLLDHCHFSQVIFNSVEKFYIPGGDVTCHYTFTQHFIPRRKDWIGIFRVGWKTTREYYTFMWVTLPIDLNNKSAKQQEVQFKAYYLPKDDEYYQFCYVDEDGVVRGASIPFQFRPENEEDILVVTTQGEVEEIEQHNKELCKENQELKDSCISLQKQNSDMQAELQKKQEELETLQSINKKLELKVKEQKDYWETELLQLKEQNQKMSSENEKMGIRVDQLQAQLSTQEKEMEKLVQGDQDKTEQLEQLKKENDHLFLSLTEQRKDQKKLEQTVEQMKQNETTAMKKQQELMDENFDLSKRLSENEIICNALQRQKERLEGENDLLKRENSRLLSYMGLDFNSLPYQVPTSDEGGARQNPGLAYGNPYSGIQESSSPSPLSIKKCPICKADDICDHTLEQQQMQPLCFNCPICDKIFPATEKQIFEDHVFCHSL

SEQ ID NO: 3530 - DNA, 593 bp, Homo sapiens
caggacacgtgggtgggggaagctgagcgctgagaccaagggctaaagctgggagactgaaaaaatgcagaccgccggggcattattcatttctccagctctgatccgctgttgtaccaggggtctaatcaggcctgtgtctgcctccttcttgaatagcccagtgaattcatctaaacagccttcctacagcaacttcccactccaggtggccagacgggagttccagaccagtgttgtctcccgggacattgacacagcagccaagtttattggtgctggggcagccacagttggtgtggctggttcaggggctggcattggaaccgtgtttggcagcttgatcattggctatgccaggaacccgtctctcaagcagcagctcttctcctatgccattcttggctttgccctgtctgaggccatggggcttttctgtttgatggtcgccttcctcatcctcttcgccatgtgaggctccatggggggtcaccggcctgttgctactgcaactccacaccattcttggtgctggggtgtgttaagctttaccattaaacacaacgtttctctaaaaaaaaaaaaaaaaaaaa

SEQ ID NO: 3531 - protein, 136 aa, Homo sapiens
MQTAGALFISPALIRCCTRGLIRPVSASFLNSPVNSSKQPSYSNFPLQVARREFQTSVVSRDIDTAAKFIGAGAATVGVAGSGAGIGTVFGSLIIGYARNPSLKQQLFSYAILGFALSEAMGLFCLMVAFLILFAM

SEQ ID NO: 3532 - DNA, 663 bp, Homo sapiens
caggacacgtgggtgggggaagctgagcgctgagaccaagggctaaagctgggaggtgagtctgtcaccttgagccgggcgagcgctgtgggccaagcaggggttgcagggtagtaggagtgcagactgaaaaaatgcagaccgccggggcattattcatttctccagctctgatccgctgttgtaccaggggtctaatcaggcctgtgtctgcctccttcttgaatagcccagtgaattcatctaaacagccttcctacagcaacttcccactccaggtggccagacgggagttccagaccagtgttgtctcccgggacattgacacagcagccaagtttattggtgctggggcagccacagttggtgtggctggttcaggggctggcattggaaccgtgtttggcagcttgatcattggctatgccaggaacccgtctctcaagcagcagctcttctcctatgccattcttggctttgccctgtctgaggccatggggcttttctgtttgatggtcgccttcctcatcctcttcgccatgtgaggctccatggggggtcaccggcctgttgctactgcaactccacaccattcttggtgctggggtgtgttaagctttaccattaaacacaacgtttctctaaaaaaaaaaaaaaaaaaaa

SEQ ID NO: 3533 - protein, 136 aa, Homo sapiens; identical to SEQ ID NO: 3531

SEQ ID NO: 3534 - DNA, 3053 bp, Homo sapiens
gcgatggcggagagtccgactgaggaggcggcaacggcgggcgccggggcggcgggccccggggcgagcagcgttgctggtgttgttggcgttagcggcagcggcggcgggttcgggccgcctttcctgccggatgtgtgggcggcggcggcggcagcgggcggggccgggggcccggggagcggcctggctccgctgcccgggctcccgccctcagccgctgcccacggggccgcgctgcttagccactgggaccccacgctcagctccgactgggacggcgagcgcaccgcgccgcagtgtctactccggatcaagcgggatatcatgtccatttataaggagcctcctccaggaatgttcgttgtacctgatactgttgacatgactaagattcatgcattgatcacaggcccatttgacactccttatgaagggggtttcttcctgttcgtgtttcggtgtccgcccgactatcccatccacccacctcgggtcaaactgatgacaacgggcaataacacagtgaggtttaaccccaacttctaccgcaatgggaaagtctgcttgagtattctaggtacatggactggacctgcctggagcccagcccagagcatctcctcagtgctcatctctatccagtccctgatgactgagaacccctatcacaatgagcccggctttgaacaggagagacatccaggagacagcaaaaactataatgaatgtatccggcacgagaccatcagagttgcagtctgtgacatgatggaaggaaagtgtccctgtcctgaacccctacgaggggtgatggagaagtcctttctggagtattacgacttctatgaggtggcctgcaaagatcgcctgcaccttcaaggccaaactatgcaggacccttttggagagaagcggggccactttgactaccagtccctcttgatgcgcctgggactgatacgtcagaaagtgctggagaggctccataatgagaatgcagaaatggactctgatagcagttcatctgggacagagacagaccttcatgggagcctgagggtttagaccctgctcccatctccccttcccccactcaagagtcccagcagaatcccttccccccaccccagggatggagaggcactgtgtatctccctccagactcgaagtcatcctgcaagatggcaagaaccaagcaagctccgatcccagggtgtgggagtgggggcctgttcccggtctgacctccttggcactggagcatctggggcttcgttcatccattcatcccgtatcaggggccaaggtacctttacaggagcacctagagcgagggcctttggcaaaaacaaaacaaccaacacacctctccacagggccagctccttagggataagtggaagatggaaattgcaattccaagagggagtgtgcccaaatgatttatggggatacctggaagggagcttggggtgggggctgtctgtgacacttaagcagtctgggtggttgtctatttgtctgtcttcagtcttgaagcagggcttcccaatgcccttttcctccctgccttccttcccccattatttcccacaggccagcataattttgtttttcctaatttatagtcactgttctagacagaccaaagagaaggaacagtggtggagtctaggctgctgatcagtaagctttacctagcacctgagcacctttctcccctcccctctttcctcacccttttctagatgtaagacagaaggtaaatgtgactgggacttaaccaaggtcttggtaaagcctgcatggcaccgtaagaagctgaaaatactgtttgttcccgcaatcactgatttgaaaagttcccaacacaggcagctgctgtgtatatgggattagagccactacatagaatagtctcttacagattttcataaatactagtcacaataagggtatttttcttgggggtggagtaagggggagactgatgctagtccttgttgtattttgttgggctgtccttgtgtattttcaccccagcctgtagtcctcctcacttcaaccccagggatttgtggggagcaagggtagccaatggcagagggggttggggctgggactctggaggctcctccccttctttctcttccttctgcctcccccgtgcccccagctgctcttgtcactgtctctgatgggtatttgcctggctttgttgcttctctatctgtatttagctgcagtgatcctttagctggttggctcagaaaaaaaaaaatgtgctttaggtgccctgtaatcctgggcatcaagggaatccatccttcccctttttgatatgttctccccgtacttccagatttattgttatggctcccagtgggtattggcgattcttgtgatgcagggcctcagtcagtgtccagccatgcataagggagaggatagtgtgtacctgccctgccctctgctatgaaggtctctgccttgtggatcatgggactccccttggaggatctgtgcaaaggggggctgggcacaaaggagaatgtcctatttgggagggcaggaagcaaaggaactggacagggattggtgggcttggggaacggaagtttatcttggatacccttgaagaggctgggtctcttcacatgaagatcgaaaagggaccctgcttccaatttccctcttccattcctcgagctactccagggcttagaagaatgctcttggtctgtgggtccagtgttgtctgtcatccatttaagtgttcccactttcaagtgacaatcctctccttggccctgccatagggcagagcatgtctggcatagcagcctgacttttatgccctaatcttgagttgaggaaatatatgcacaggagtcaaagagatgtctttatatctgactgtatataaatgaagtttttttgttttttttgttttcctttttggtgcaataaagtttgttttggcagaaaaaaaaaaaaaaaaaaaaaaaaaaaaaaaaaaaaaaaaaaaaaaaaaaaaaaaaaaaaaaaaa

SEQ ID NO: 3535 - protein, 246 aa, Homo sapiens
MSIYKEPPPGMFVVPDTVDMTKIHALITGPFDTPYEGGFFLFVFRCPPDYPIHPPRVKLMTTGNNTVRFNPNFYRNGKVCLSILGTWTGPAWSPAQSISSVLISIQSLMTENPYHNEPGFEQERHPGDSKNYNECIRHETIRVAVCDMMEGKCPCPEPLRGVMEKSFLEYYDFYEVACKDRLHLQGQTMQDPFGEKRGHFDYQSLLMRLGLIRQKVLERLHNENAEMDSDSSSSGTETDLHGSLRV

SEQ ID NO: 3536 - DNA, 1226 bp, Homo sapiens
ccgggacgtggagacccggggtcccggcagccgggcggcccgcgggcccagggtggggatgcaccgccgcggggtgggagctggcgccatcgccaagaagaaacttgcagaggccaagtataaggagcgagggacggtcttggctgaggaccagctagcccagatgtcaaagcagttggacatgttcaagaccaacctggaggaatttgccagcaaacacaagcaggagatccggaagaatcctgagttccgtgtgcagttccaggacatgtgtgcaaccattggcgtggatccgctggcctctggaaaaggattttggtctgagatgctgggcgtgggggacttctattacgaactaggtgtccaaattatcgaagtgtgcctggcgctgaagcatcggaatggaggtctgataactttggaggaactacatcaacaggtgttgaagggaaggggcaagttcgcccaggatgtcagtcaagatgacctgatcagagccatcaagaaactaaaggcacttggcactggcttcggcatcatccctgtgggcggcacttacctcattcagtctgttccagctgagctcaatatggatcacaccgtggtgctgcagctggcagagaagaatggctacgtgactgtcagtgagatcaaagccagtcttaaatgggagaccgagcgagcgcggcaagtgctggaacacctgctgaaggaagggttggcgtggctggacttacaggccccaggggaggcccactactggctgccagctctcttcactgacctctactcccaggagattacagctgaggaggccagagaagccctcccctgactgcatgtggaagggcacacagcagcaggcagggaggaggcggaggtggcaaataaacctgggcaattttgtttatacaaaaaatagaaaaaaagttccaagtttttctttcttccctcattcttttatttttgaaaagtgccttcacgttgcatttttattggaggaaaacctcgctcgttcagtaagcataatctgattaacacagagaacggcaagcacatataaaatgatttttgtaggtcatctgcaagttcatggaagagctgggcctagaatgtgggttgtttcctggcctgtctagtctttgtagctgtgagacatagattacagcctatgctaattcaaaccttttaaataaaatgttccttatctcaaaaaaaaaaaaaaa

SEQ ID NO: 3537 - protein, 258 aa, Homo sapiens
MHRRGVGAGAIAKKKLAEAKYKERGTVLAEDQLAQMSKQLDMFKTNLEEFASKHKQEIRKNPEFRVQFQDMCATIGVDPLASGKGFWSEMLGVGDFYYELGVQIIEVCLALKHRNGGLITLEELHQQVLKGRGKFAQDVSQDDLIRAIKKLKALGTGFGIIPVGGTYLIQSVPAELNMDHTVVLQLAEKNGYVTVSEIKASLKWETERARQVLEHLLKEGLAWLDLQAPGEAHYWLPALFTDLYSQEITAEEAREALP

SEQ ID NO: 3538 - DNA, 711 bp, Homo sapiens
aggctcagaaggtccagaaatcaggggaaggagacccctatctgtccttcttctggaagagctggaaaggaagtctgctcaggaaataaccttggaagatggtggccacgaagacctttgctctgctgctgctgtccctgttcctggcagtgggactaggagagaagaaagagggtcacttcagcgctctcccctccctgcctgttggatctcatgctaaggtgagcagccctcaacctcgaggccccaggtacgcggaagggactttcatcagtgactacagtattgccatggacaagattcaccaacaagactttgtgaactggctgctggcccaaaaggggaagaagaatgactggaaacacaacatcacccagagggaggctcgggcgctggagctggccagtcaagctaataggaaggaggaggaggcagtggagccacagagctccccagccaagaaccccagcgatgaagatttgctgcgggacttgctgattcaagagctgttggcctgcttgctggatcagacaaacctctgcaggctcaggtctcggtgactctgaccacacccagctcaggactggattctgcccttcacttagcacctgcctcagccccactccagaatagccaagagaacccaaaccaataaagtttatgctaagtcgagcccattgtgaaaatttattaaaatgactactgagcact

SEQ ID NO: 3539 - protein, 153 aa, Homo sapiens
MVATKTFALLLLSLFLAVGLGEKKEGHFSALPSLPVGSHAKVSSPQPRGPRYAEGTFISDYSIAMDKIHQQDFVNWLLAQKGKKNDWKHNITQREARALELASQANRKEEEAVEPQSSPAKNPSDEDLLRDLLIQELLACLLDQTNLCRLRSR

SEQ ID NO: 3540 - DNA, 8192 bp, Homo sapiens
atttagaggcggcgccagggcggccgcggagaaacgtgacacaccagccctctcggaggggtttcggaccgaagggaagaagctgcgccgtgtcgtccgtctccctgcgcgccgcgggcacttctcctgggctctccccgaactctcccgcgacctctgcgcgccctcaggccgccttccccgccctgggctcgggacaacttctggggtggggtgcaaagaaagtttgcggctcctgccgccggcctctccgcctcttggcctaggaggctcgccgcccgcgcccgctcgttcggccttgcccgggaccgcgtcctgccccgagaccgccaccatgaacaagctttacatcggcaacctcaacgagagcgtgacccccgcggacttggagaaagtgtttgcggagcacaagatctcctacagcggccagttcttggtcaaatccggctacgccttcgtggactgcccggacgagcactgggcgatgaaggccatcgaaactttctccgggaaagtagaattacaaggaaaacgcttagagattgaacattcggtgcccaaaaaacaaaggagccggaaaattcaaatccgaaatattccaccccagctccgatgggaagtactggacagcctgctggctcagtatggtacagtagagaactgtgagcaagtgaacaccgagagtgagacggcagtggtgaatgtcacctattccaaccgggagcagaccaggcaagccatcatgaagctgaatggccaccagttggagaaccatgccctgaaggtctcctacatccccgatgagcagatagcacagggacctgagaatgggcgccgagggggctttggctctcggggtcagccccgccagggctcacctgtggcagcgggggccccagccaagcagcagcaagtggacatcccccttcggctcctggtgcccacccagtatgtgggtgccattattggcaaggagggggccaccatccgcaacatcacaaaacagacccagtccaagatagacgtgcataggaaggagaacgcaggtgcagctgaaaaagccatcagtgtgcactccacccctgagggctgctcctccgcttgtaagatgatcttggagattatgcataaagaggctaaggacaccaaaacggctgacgaggttcccctgaagatcctggcccataataactttgtagggcgtctcattggcaaggaaggacggaacctgaagaaggtagagcaagataccgagacaaaaatcaccatctcctcgttgcaagaccttaccctttacaaccctgagaggaccatcactgtgaagggggccatcgagaattgttgcagggccgagcaggaaataatgaagaaagttcgggaggcctatgagaatgatgtggctgccatgagcctgcagtctcacctgatccctggcctgaacctggctgctgtaggtcttttcccagcttcatccagcgcagtcccgccgcctcccagcagcgttactggggctgctccctatagctcctttatgcaggctcccgagcaggagatggtgcaggtgtttatccccgcccaggcagtgggcgccatcatcggcaagaaggggcagcacatcaaacagctctcccggtttgccagcgcctccatcaagattgcaccacccgaaacacctgactccaaagttcgtatggttatcatcactggaccgccagaggcccaattcaaggctcagggaagaatctatggcaaactcaaggaggagaacttctttggtcccaaggaggaagtgaagctggagacccacatacgtgtgccagcatcagcagctggccgggtcattggcaaaggtggaaaaacggtgaacgagttgcagaatttgacggcagctgaggtggtagtaccaagagaccagacccctgatgagaacgaccaggtcatcgtgaaaatcatcggacatttctatgccagtcagatggctcaacggaagatccgagacatcctggcccaggttaagcagcagcatcagaagggacagagtaaccaggcccaggcacggaggaagtgaccagcccctccctgtcccttcgagtccaggacaacaacgggcagaaatcgagagtgtgctctccccggcaggcctgagaatgagtgggaatccgggacacctgggccgggctgtagatcaggtttgcccacttgattgagaaagatgttccagtgaggaaccctgatctctcagccccaaacacccacccaattggcccaacactgtctgcccctcggggtgtcagaaattctagcgcaaggcacttttaaacgtggattgtttaaagaagctctccaggccccaccaagagggtggatcacacctcagtgggaagaaaaataaaatttccttcaggttttaaaaacatgcagagaggtgttttaatcagccttaaaggatggttcatttcttgaccttaatgtttttccaatcttcttccccctacttgggtaattgattaaaatacctccatttacggcctctttctatatttacactaatttttttatctttattgctaccagaaaaaaatgcgaacgaatgcattgctttgcttacagtattgactcaagggaaaagaactgtcagtatctgtagattaattccaatcactccctaaccaataggtacaatacggaatgaagaagaggggaaaatggggagaaagatggttaaaatacataataatccacgtttaaaaggagcgcacttgtggctgatctatgccagatcaccatcttcaaattggcacaactgaaatttccccactctgttggggcttccccaccacattcatgtccctctcccgtgtaggtttcacattatgtccaggtgcacataggtggtattgaatgctcagcagggtaggggctgaccactgtccctgattcccatcgttctcaggcggattttatatttttttaaagtctattttaatgattggatatgagcactgggaaggggacgctaactccccttgataaagtctcggttccatggaggacttgagtggccccaaaggctgccacggtgccctcaccccagcccatgtgctcccataagggctggttcctagaggcaggggttgtggggcactcccagccacggcactgttaccttggtggtgggacttggaacccaaccctgagctcccgataaagctaaagtccatcatctggcaaattcagtaaattggagagtacttgcttctgtttgtatctgagaggaatttttaactgacggcttctgtctccatgaatcattatcagcatgatgaaaggtgtgtctaaaaaacaattcagaataccagcagcattgtacagcaaggggtaaataagcttaatttattaatttaccaggcttaattaagatcccatggagtgtttagcccttgtgggagacagaagccatcagttaaatgaggttaggcctctcctcctaatatactgattgacaatgcatattagccaggtaatgcactttagctaccctggacaatgctatcaagtgtgctgggaagggaggaaggcctctctacatatggaaaagcccatgcgtggagttcccctcctttcaacattgcaacaacagtaacaacaagacaaccgcaacatgtgggcgtagtcaggcaatgctgtgtgcgaagtaaactacctcaaggtatgaagttacctcagcaattattttcctttttgttccccccaaccccattaaaaaaatttttttttgatttttgtttttttgcagcttgctgatattttatataaaaaagaaaagcaaagcaaaagagaagctgatagtcttgaatattttatttttttaatgaaaagaaaaaacaagaaagttatgtttcataatttcttacaacatgagccagtaaccctttaggaactctctatggagaacaggcctggtgggaaaggctttgggggctgcccccttaggaggaggctagtgctaagagggaaggcccaggtttgagagagcccagaggggcagagcccagagccttgtttggccctgatctctgacttctagagccccagctgctggcggctgctggaatatcctacctgataggattaaaaggcctagtggagctgggggctctcagtggttaaacaatgcccaacaaccaaccagctggcccttggtctcctctctttcctcctttggttaaagagcatctcagccagcttttcccaccagtggtgctgttgagatattttaaaatattgcctccgttttatcgaggagagaaataataactaaaaaatataccctttaaaaaaacctatatttctctgtctaaaaatatgggagctgagattccgttcgtggaaaaaagacaaggccaccctctcgccctcagagaggtccacctggtttgtcattgcaatgcttttcattttttttttttgttattgtttcatttcagttccgtcttgctattcttcctaatctatatccatagatctaaggggcaaacagatactagttaactgcccccacctctgtctccctgtcttctttagatcggtctgattgattttaaaagtggacccaaacttagggaattcttgatttagggtggctggtggcaaggaggggcaggggatatggggacgtgactgggacaggttcctgccttatcattttctccctaggacattcccttgtagcccccagaattgtctggcccaaattgaatagaagcagaaaaacatttagggataacatcaggccagtagaattaagcctctccacctgtcccaaccataaaaagggtctcccagctttccatctctggctctatatgctttatcccaaaacaaagcagataacgttcagacgtcggccatttagtaatttaaagcgaatttccagcagcaagcatgctttgatatctggttcagactatcatcaggaagaaaaaaaaatcccacagtacctgaaatgtgattgttgcagtgttcagtttccttgggggcctgctcccttcacaccttgagcccaagtccttttccgttggctgattcagctcccagaagagacgaggaagtgtgtggcaagggactggaaaacttcacttgcttggattaggcaaggctccactcattgttgatatttgcccagcaggaaaatcatgtaagttataccaccagaaagcaaaaggagcatggtttggtggttaaggtttagtgggatgaaggacctgtcttggtgggccgggccctcttgtgccccgtaggctaggtcttagggcaactccttgccctcctgctcagcacctccatttccccatccttggtgagataacaagctatcgcgaaaagcacttgggagatttggatgatttgagaagagtgacttaaaaaaaatgcttctgtgctctaagatatatatgtgtgtgtgtgtgctacatatatatttttaagaaaggaccatctctttaggatatatttttaaattctttgaaacacataaccaaaatggtttgattcactgactgactttgaagctgcatctgccagttacaccccaaatggctttaatcccctctcgggtctggttgccttttgcagtttgggttgtggactcagctcctgtgaggggtctggttaggagagagccatttttaaggacagggagttttatagcccttttctactttcctcccctcctcccagtccttatcaatcttttttcctttttcctgaccccctccttctggaggcagttgggagctatccttgtttatgcctcactattggcagaaaagaccccatttaaaacccagagaacactggagggggatgctctagttggttctgtgtccattttcctctgtgccaaagacagacagacagaggctgagagaggctgttcctgaatcaaagcaatagccagctttcgacacatacctggctgtctgaggaggaaggcctcctggaaactgggagctaagggcgaggcccttcccttcagaggctcctgggggattagggtgtggtgtttgccaagccaaggggtagggagccgagaaattggtctgtcggctcctggttgcactttggggaaggagaggaagtttggggctccaggtagctccctgttgtgggactgctctgtcccctgcccctactgcagagatagcactgccgagttcccttcaggcctggcagacgggcagtgaggaggggcctcagttagctctcaagggtgccttcccctcctcccaacccagacataccctctgccaaactgggaaccagcagtgctagtaactacctcacagagccccagagggcctgcttgagccttcttgctccacaggagaagctggtgcctctaggcaaccccttcctcccacctctcatcaggggtgggggttctcctttctttcccctgaagtgtttatggggagatcctagtggctttgccattcaaaccactcgactgtttgcctgtttcttgaaaaccagtagaagggaaacagcacagcctgtcacagtaattgcaggaagattgaagaaaaatcctcatcaatgccaggggacataaaagccatttcccttccaaatactcgacaatttagatgcagaacatttctctgtattcagacttagagtaacaccagctgaaaactgcagtttctttcctttggatacataaggcttctctatcggggtacgggacagggaggaggcctcatgtctgaagggggatttaggggcgagagccccagccctgaccctcggtcctgtgcaccgctttggggcacagtctgatggcgcctttgctggcgccttagtatggttgactccggatggacaaaagaaaaaaaattttttttcttgaatgaaatagcaggaagctcctcgggagcatgtgttttgattaaccgcaggtgatggatgctacgagtataaatggattaactacctcaatccttacagtaagattggaactaagggcagggactcatgcataagggtatgaatcccagccaggacaagtgagttgaggcttgtgccacaaaaggtttgtccttggggaacaggcaggcctgccaggatcccccccatatcgattgggctgggagggctggccatgaggtccccactttctgctttccttgcccatgtgtcacccctttggcctccagcttgtccctctctcactttctatagctttgttggaccagatggtgaggaaaggaatggcctcttcccttctagagggggctggctggagtgagacctggggcttggcctggaacccaccacacagccccaaagtcaggaagcctggggaaaccagagctgagacctcttcaacagggtttctttgagatcctacacctccattgggccctttttcagtcttcaatgggggcccagttggctctagaaggagaagaggtgaagcaggatcctttgccctgggggagtctgagggcgcggtccttggactcattcaggccgtctttgtagttgggggagttccactgggcgatcccagcccctccccacccaccctctaatggacctcctcatagaagccccatttcacttttgttttatctacctcttagcaaaacaatagataaattaggtagtggcagctccacttgcttaggttagggggggaaaaagatttctttttccaaaggaaaaaaatattaccttgagaatactttccaaaaaataaaattaaaaaaaaaaaaaccaaaaaaaaaaatttttttttaaaagggagacattttccagtgaccactggattgttttaatttcccaagcttttttttcccccataaataagtttcactctttggcgattttcttcacttgtttaagataacgtgctagctattccaacaggtaacagctttcacagtctgcccctggcctgtctcaccccatcccccaccctattcctgccagtgagtccttcctgtgcttctctcccttctcccctcccagccagctgacttcagtcacccctgtcccccctcccctgccaataagctcccccaggaataaaggctttgttttggggatgcttaaatcttgactggcacttcccggctgtgggggctggggagccacttgtaacatttctgtgcagattttatgttagc

SEQ ID NO: 3541 - protein, 577 aa, Homo sapiens
MNKLYIGNLNESVTPADLEKVFAEHKISYSGQFLVKSGYAFVDCPDEHWAMKAIETFSGKVELQGKRLEIEHSVPKKQRSRKIQIRNIPPQLRWEVLDSLLAQYGTVENCEQVNTESETAVVNVTYSNREQTRQAIMKLNGHQLENHALKVSYIPDEQIAQGPENGRRGGFGSRGQPRQGSPVAAGAPAKQQQVDIPLRLLVPTQYVGAIIGKEGATIRNITKQTQSKIDVHRKENAGAAEKAISVHSTPEGCSSACKMILEIMHKEAKDTKTADEVPLKILAHNNFVGRLIGKEGRNLKKVEQDTETKITISSLQDLTLYNPERTITVKGAIENCCRAEQEIMKKVREAYENDVAAMSLQSHLIPGLNLAAVGLFPASSSAVPPPPSSVTGAAPYSSFMQAPEQEMVQVFIPAQAVGAIIGKKGQHIKQLSRFASASIKIAPPETPDSKVRMVIITGPPEAQFKAQGRIYGKLKEENFFGPKEEVKLETHIRVPASAAGRVIGKGGKTVNELQNLTAAEVVVPRDQTPDENDQVIVKIIGHFYASQMAQRKIRDILAQVKQQHQKGQSNQAQARRK

SEQ ID NO: 3542 - DNA, 1792 bp, Homo sapiens
ataggtggctgcagaggcgaggtgacggcgcgtgcggaacgaactctgcacccccaggaatggggagcgctggcttttccgtgggaaaattccacgtggaggtggcctctcgcggccgggaatgtgtctcggggacgcccgagtgtgggaatcggctcgggagtgcgggcttcggggatctctgcttggaactcagaggcgctgacccagcctggggcccgtttgctgcccacgggaggagccgccgtcagggctcgagatttctgtggctcctcaagatattggtcataatcctggtacttggcattgttggatttatgttcggaagcatgttccttcaagcagtgttcagcagccccaagccagaactcccaagtcctgccccgggtgtccagaagctgaagcttctgcctgaggaacgtctcaggaacctcttttcctacgatggaatctggctgttcccgaaaaatcagtgcaaatgtgaagccaacaaagagcagggaggttacaactttcaggatgcctatggccagagcgacctcccagcggtgaaagcgaggagacaggctgaatttgaacactttcagaggagagaagggctgccccgcccactgcccctgctggtccagcccaacctcccctttgggtacccagtccacggagtggaggtgatgcccctgcacacggttcccatcccaggcctccagtttgaaggacccgatgcccccgtctatgaggtcaccctgacagcttctctggggacactgaacacccttgctgatgtcccagacagtgtggtgcagggcagaggccagaagcagctgatcatttctaccagtgaccggaagctgttgaagttcattcttcagcacgtgacatacaccagcacggggtaccagcaccagaaggtagacatagtgagtctggagtccaggtcctcagtggccaagtttccagtgaccatccgccatcctgtcatacccaagctatacgaccctggaccagagaggaagctcagaaacctggttaccattgctaccaagactttcctccgcccccacaagctcatgatcatgctccggagtattcgagagtattacccagacttgaccgtaatagtggctgatgacagccagaagcccctggaaattaaagacaaccacgtggagtattacactatgccctttgggaagggttggtttgctggtaggaacctggccatatctcaggtcaccaccaaatacgttctctgggtggacgatgattttctcttcaacgaggagaccaagattgaggtgctggtggatgtcctggagaaaacagaactggacgtggtaggcggcagtgtgctgggaaatgtgttccagtttaagttgttgctggaacagagtgagaatggggcctgccttcacaagaggatgggatttttccaacccctggatggcttccccagctgcgtggtgaccagtggcgtggtcaacttcttcctggcccacacggagcgactccaaagagttggctttgatccccgcctgcaacgagtggctcactcagaattcttcattgatgggctagggaccctactcgtggggtcatgcccagaagtgattataggtcaccagtctcggtctccagtggtggactcagaactggctgccctagagaagacctacaatacataccggtccaacaccctcacccgggtccagttcaagctggccctccactacttcaagaaccatctccaatgtgccgcataaaggtgtgagggcataggagaaacactaggctg

SEQ ID NO: 3543 - protein, 566 aa, Homo sapiens
MGSAGFSVGKFHVEVASRGRECVSGTPECGNRLGSAGFGDLCLELRGADPAWGPFAAHGRSRRQGSRFLWLLKILVIILVLGIVGFMFGSMFLQAVFSSPKPELPSPAPGVQKLKLLPEERLRNLFSYDGIWLFPKNQCKCEANKEQGGYNFQDAYGQSDLPAVKARRQAEFEHFQRREGLPRPLPLLVQPNLPFGYPVHGVEVMPLHTVPIPGLQFEGPDAPVYEVTLTASLGTLNTLADVPDSVVQGRGQKQLIISTSDRKLLKFILQHVTYTSTGYQHQKVDIVSLESRSSVAKFPVTIRHPVIPKLYDPGPERKLRNLVTIATKTFLRPHKLMIMLRSIREYYPDLTVIVADDSQKPLEIKDNHVEYYTMPFGKGWFAGRNLAISQVTTKYVLWVDDDFLFNEETKIEVLVDVLEKTELDVVGGSVLGNVFQFKLLLEQSENGACLHKRMGFFQPLDGFPSCVVTSGVVNFFLAHTERLQRVGFDPRLQRVAHSEFFIDGLGTLLVGSCPEVIIGHQSRSPVVDSELAALEKTYNTYRSNTLTRVQFKLALHYFKNHLQCAA

SEQ ID NO: 3544 - DNA, 1039 bp, Homo sapiens
tgaagagtgagctaggagaacttcgtaaggtgaaactgtggggatccaatgggcaacacaaagcatcttggttaaggaggttaggggccggtctaggacttgcctcaggaggaaggacagcctcagagcatgctcagaggtgggaagggaaggaggagaaagcaggcgaagcggggccatctgctttatctgaagattttcagctgatgaagaactaggaggctcaaacactacttacctgagtccaggacaagtgacttggagagtgtgctcttctgtggcaggatcaggtctgtctagggcaggatggcccaggatctcagcgagaaggacctgttgaagatggaggtggagcagctgaagaaagaagtgaaaaacacaagaattccgatttccaaagcgggaaaggaaatcaaggagtacgtggaggcccaagcaggaaacgatccttttctcaaaggcatccctgaggacaagaatcccttcaaggagaaaggtggctgtctgataagctgatggcatggagccctgccctgagtgtctgtccctcttcagccaagcccaagtctcctagacccccagggagccagtgaactgtcaccttctcttcatcacagaatgagtaaagatccctgaacaaatgcattgtgaacccattccccactcccaccttcaactcttttctcccattatttcctccacctgctgggtctctgctgaccttgctgggaacactctgaggacagtgtggctggccgagcggttggccccatgggtggtggggtgtgagaagcctgcaataccccaagaccccagagggcagtccttaggaagcacttacaccacctgggaacccctccgtcttttccctctactctcatcctaggaataaagcatttccacgccagagtagtttgggctgggggccagggttgggtgggtcctgtccctccatatcatgtcctaccctatggtcctgttcctagtcatttagatcaccccagatggcctgatgacaacaagagtttgtgaagttatg

SEQ ID NO: 3545 - protein, 69 aa, Homo sapiens
MAQDLSEKDLLKMEVEQLKKEVKNTRIPISKAGKEIKEYVEAQAGNDPFLKGIPEDKNPFKEKGGCLIS

SEQ ID NO: 3546 - DNA, 2129 bp, Homo sapiens
tcctatccaccctccactcccctgtcccttggtgactcatccctgagcttcccaaggaagcccccaccctctgccctttcctcccgccttccatgagtggaaaatccacctccgccccctatagcaggccagcccccttcctccccagtctccgaccccatcccccagccgaccagtttcctctccaggaccagggagcaatcacagctgccccgaccttggcttcctctgctgggtgggattgggggctgggcccccaaatgggcccctggcttcccccttcctctgggcaggggacagagagacacaggctcggggagcaggactgacttcctcttgtcccggaatgagcatgcctgccctttgcaagcaggtttgggtctcacgcagaggaaaccaaaagcaataagagggagggaaggcagagcaaccaatcaagggcagggtgagactcaaaacgagcgggctccctggggagccagacagaggctgggggtgatggcggagctacagcagctgcaggagtttgagatccccactggccgggaggctctgaggggcaaccacagtgccctgctgcgggtcgctgactactgcgaggacaactatgtgcaggccacagacaagcggaaggcgctggaggagaccatggccttcactacccaggcactggccagcgtggcctaccaggtgggcaacctggccgggcacactctgcgcatgttggacctgcagggggccgccctgcggcaggtggaagcccgtgtaagcacgctgggccagatggtgaacatgcatatggagaaggtggcccgaagggagatcggcaccttagccactgtccagcggctgccccccggccagaaggtcatcgccccagagaacctaccccctctcacgccctactgcaggagacccctcaactttggctgcctggacgacattggccatgggatcaaggacctcagcacgcagctgtcaagaacaggcaccctgtctcgaaagagcatcaaggcccctgccacacccgcctccgccaccttggggagaccaccccggattcccgagccagtgcacctgccggtggtgcccgacggcagactctccgccgcctcctctgcgtcttccctggcctcggccggcagcgccgaaggtgtcggtggggcccccacgcccaaggggcaggcagcacctccagccccacctctccccagctccttggacccacctcctccaccagcagccgtcgaggtgttccagcggcctcccacgctggaggagttgtccccacccccaccggacgaagagctgcccctgccactggacctgcctcctcctccacccctggatggagatgaattggggctgcctccacccccaccaggatttgggcctgatgagcccagctgggtgcctgcctcatacttggagaaagtggtgacactgtacccatacaccagccagaaggacaatgagctctccttctctgagggcactgtcatctgtgtcactcgccgctactccgatggctggtgcgagggcgtcagctcagaggggactggattcttccctgggaactatgtggagcccagctgctgacagcccagggctctctgggcagctgatgtctgcactgagtgggtttcatgagccccaagccaaaaccagctccagtcacagctggactgggtctgcccacctcttgggctgtgagctgtgttctgtccttcctcccatcggagggagaaggggtcctggggagagagaatttatccagaggcctgctgcagatggggaagagctggaaaccaagaagtttgtcaacagaggacccctactccatgcaggacagggtctcctgctgcaagtcccaactttgaataaaacagatgatgtcctgtgactgccccacagagataaggggccaggagggattgaaaggcatcccagttctaaggctgctgctaattacagcccccaacctccaacccaccagctgacctagaagcagcatcttcccatttcctcagtacccacaaagtgcagcccacattggaccccagacacccctctgcagccattgactgcaacttgttcttttgcccattgaaaaaaaaaaaaaaaaaaaa

SEQ ID NO: 3547 - protein, 366 aa, Homo sapiens
MAELQQLQEFEIPTGREALRGNHSALLRVADYCEDNYVQATDKRKALEETMAFTTQALASVAYQVGNLAGHTLRMLDLQGAALRQVEARVSTLGQMVNMHMEKVARREIGTLATVQRLPPGQKVIAPENLPPLTPYCRRPLNFGCLDDIGHGIKDLSTQLSRTGTLSRKSIKAPATPASATLGRPPRIPEPVHLPVVPDGRLSAASSASSLASAGSAEGVGGAPTPKGQAAPPAPPLPSSLDPPPPPAAVEVFQRPPTLEELSPPPPDEELPLPLDLPPPPPLDGDELGLPPPPPGFGPDEPSWVPASYLEKVVTLYPYTSQKDNELSFSEGTVICVTRRYSDGWCEGVSSEGTGFFPGNYVEPSC

SEQ ID NO: 3548 - DNA, 2070 bp, Homo sapiens
gcggctccggctccggctccggctcccgggcatttaaaggggacgcggcggctgcccgggggggatgaggggcaagtggaggggacggctcagacgcacatcatcctcagtccctcgggactggagggactcgtgagccggagcccagaaatccgggggtggataagacaccgcgtcccctccaattcccgtaagcaccccttgctccatcctgcgccccaatacctcagctagcccccttccccacttcttacactccaaactcagccgggacagcaagtggaggggacggctcagacgacctctgctgccgccgcccccacgaacgtgtgacgacggctggaggccaacagagtccctacaggtggtgctcacggtaatgcaccgacaatgagtggctgttttccagtttctggcctccgctgcctatctagggacggcaggatggccgcgcagggcgcgccgcgcttcctcctgaccttcgacttcgacgagactatcgtggacgaaaacagcgacgattcgatcgtgcgcgccgcgccgggccagcggctcccggagagcctgcgagccacctaccgcgagggcttctacaacgagtacatgcagcgcgtcttcaagtacctgggcgagcagggcgtgcggccgcgggacctgagcgccatctacgaagccatccctttgtcgccaggcatgagcgacctgctgcagtttgtggcaaaacagggcgcctgcttcgaggtgattctcatctccgatgccaacacctttggcgtggagagctcgctgcgcgccgccggccaccacagcctgttccgccgcatcctcagcaacccgtcggggccggatgcgcggggactgctggctctgcggccgttccacacacacagctgcgcgcgctgccccgccaacatgtgcaagcacaaggtgctcagcgactacctgcgcgagcgggcccacgacggcgtgcacttcgagcgcctcttctacgtgggcgacggcgccaacgacttctgccccatggggctgctggcgggcggcgacgtggccttcccgcgccgcggctaccccatgcaccgcctcattcaggaggcccagaaggccgagcccagctcgttccgcgccagcgtggtgccctgggaaacggctgcagatgtgcgcctccacctgcaacaggtgctgaagtcgtgctgagtctggccgcctgcaggggggtacccgggccaacggcggagggggcggggaagggagattcggcaaagacagctttactactcccttttccctttggctttgttatgtccctctgggaatttctggaatctcgtatttgggggcttggggaagggggctcagagccgtccctatctattcagttaacccacctcggctgcctcccccactccactgtgcacggttgagttctggagtctgacccatcgcggggtggcgcgcaaaccttggaaggcagcagtatttcctggtcctcccaactgggaggaaggggcccccccggcaggtgagagaaggaacatctcccgccgctgtaacttgttgcctcgggctgcgtgaccgcccctcctccagtctactgtggagggaacccaggatcctgaaattctcctggccgcaagaactccccacagaggcagaagagggtctccacctatggccccaggcctttgcgatcttgcttcacccaccgcgaccccacactatttctgtgctgtccacactctcttgcctcccgacccccgcactcccttctagcacccccaaaggaaaagccagaggaacaatcgcctcctggtggtggtacgaggtagcgcaccgtccggctcgggtccggacagccagtaacctcgcagagagtgacggtgtctccttgcatcccagcctcgtctatgcagcaagagaccagggacttcaccaaagtcaccctcgcgggctgggccttccacgcatcccccccaccccccatggaacagaaagccatgtttttaagcagaaccagcgaaacccaagcccctccttcctctggtgttttacaactataaaggaggtgaaggg

SEQ ID NO: 3549 - protein, 267 aa, Homo sapiens
MSGCFPVSGLRCLSRDGRMAAQGAPRFLLTFDFDETIVDENSDDSIVRAAPGQRLPESLRATYREGFYNEYMQRVFKYLGEQGVRPRDLSAIYEAIPLSPGMSDLLQFVAKQGACFEVILISDANTFGVESSLRAAGHHSLFRRILSNPSGPDARGLLALRPFHTHSCARCPANMCKHKVLSDYLRERAHDGVHFERLFYVGDGANDFCPMGLLAGGDVAFPRRGYPMHRLIQEAQKAEPSSFRASVVPWETAADVRLHLQQVLKSC

SEQ ID NO: 3550 - DNA, 2317 bp, Homo sapiens
agttaggtgaagaggagaacgatgtccaggcaggggccggggaagcccgtgccaaggcactgaggggaagtgctgcaatgaacctcagaggctggatcttgctgactcatctggggtaccaagggcagacaaaggacatggagtccaggcccaggaggcgataccaggccagcagtttcactgatgctcctgtcatgacgatgactgcctccctcctccccttggtccctgactcagtgtctgcagtgaccaggcaccaggcagggagcaaggaaccaagcctttcacctgctcccaccaactcctatggtgctccctttccaaggctaggtctcctctccacccagttccttatcacgtaccatgagaagctgtcaccttggcaactgtcaccttctggtgagatttacaattgcactgctacaactgcttgtggcatggtaaagttgcaccaggacctctgctgtccatgagatcaaagttccaggccaaggcaccaggggcacgaacagtgttgcccgcatggaactcacacttaatgggagcggcagccaacagagtcttgctgtgtcacccaggccggagtgcactagcacaatctcagctcattgcaacctccatctcccaggttcaagtgattctcctgcctcagcctcccgagtagctgggattacaggcctgtgccactatgctaattttttttttttgtattattagtagagacagggtttcaccatgttagccaggccggtcttgaacttctgacctcaagtgatctgcccacctcggcctcccaaagtgctgggattacaggtgtgagccaccgctcctggctgaggccacctcttttcttggggacacttgggctccagctttctccattcatcagcttagcatgagcttgaggaacgcagaggggggctgactgagaggagcaggcactggggacaatggggacatccacggttcctagcaatggatttgaggtgggatttccaattcctcttctcccaccttggatttgaccatctgaataccaaattcctgtcacttctaggatgtcacctaagatgagactgtggtctttccactcttgggtcccaaggaggtgccacagggcctacaataaggcaaggaaggctcagtgaggtccgtgttcaccccacccccacttcaacacgaggagttctgcttttattttgcctctgtgtgtgtgtgtgtgtgtgtgtgtttctaggtattattttatttggagaaaggatttgctcctaaggacacacacacgcacacacacatgcacactcacgcacacgtactcacaggttctgcaaaacactagtgtggcagaaagtgttgaaaactagttctagacctggcatgaatttgaccaggttcagccttagtctcctctcttagaaataaggtcatctgggccaggtgcggtggctcaagcctgtaatcccagcactttgggaggccgaggtgggcggatcacgagatcaggacctcaagaccagcctgaccaacatggtgaaaccccgtctctactaaaaatacaaaaattagccaggcatggtggcacgtgcctataatcccagctagtctggagggtgaggcaggagaatcgctggaacctgggaggcagaggttgcggcgagccgagatcatgtggggaaataaggccatctggaaatatccttcccatcacaggatgatacccggcaaattcttcaaagcagtgttctccaacttgaatgtttgtgatgtgggcgattctgactgagggggtctgtagaccacatcttgataaacaatgctttttaaaaaattcctagaagagaatatttgatttctggaaggatagagaagaaactaataagagtgtttacctccgaggaggaggagaattgggaagctgagagcagaggagggaggaagacttacttttcaccgtgttcttttttgtaccttttgagttttgtacgacatactgaatctttgacccatttgcaattataaataaaggcacatttatttggccgggcgcggtggctcatgcctgtaatcccagcactttgggaggacgaggtgggtggatcacctaaggtcaggagttagtgaccagcctggccaacatggtgaaacctcgctctactaaaacacaaaaattagccagatgtggtggcaggcacctgtaatcccagctactcagaaggctgaggcaggagaatcgcttgaacctgggaggcagaggttgcagtgagctgagatcgcacgactgcactccagcctgggcaacagagtgagactctgtctc

SEQ ID NO: 3551 - protein, 131 aa, Homo sapiens
MNLRGWILLTHLGYQGQTKDMESRPRRRYQASSFTDAPVMTMTASLLPLVPDSVSAVTRHQAGSKEPSLSPAPTNSYGAPFPRLGLLSTQFLITYHEKLSPWQLSPSGEIYNCTATTACGMVKLHQDLCCP

SEQ ID NO: 3552 - DNA, 1879 bp, Homo sapiens
agttccaagtttggagcttttagctgccagccctggcccatcatgtagctgcagcacagccttccctaacgttgcaactgggggaaaaatcactttccagtctgttttgcaaggtgtgcatttccatcttgattccctgaaagtccatctgctgcatcggtcaagagaaactccacttgcatgaagattgcacgcctgcagcttgcatctttgttgcaaaactagctacagaagagaagcaaggcaaagtcttttgtgctcccctcccccatcaaaggaaaggggaaaatgtctcagtcgaaaggcaagaagcgaaaccctggccttaaaattccaaaagaagcatttgaacaacctcagaccagttccacaccacctcgagatttagactccaaggcttgcatttctattggaaatcagaactttgaggtgaaggcagatgacctggagcctataatggaactgggacgaggtgcgtacggggtggtggagaagatgcggcacgtgcccagcgggcagatcatggcagtgaagcggatccgagccacagtaaatagccaggaacagaaacggctactgatggatttggatatttccatgaggacggtggactgtccattcactgtcaccttttatggcgcactgtttcgggagggtgatgtgtggatctgcatggagctcatggatacatcactagataaattctacaaacaagttattgataaaggccagacaattccagaggacatcttagggaaaatagcagtttctattgtaaaagcattagaacatttacatagtaagctgtctgtcattcacagagacgtcaagccttctaatgtactcatcaatgctctcggtcaagtgaagatgtgcgattttggaatcagtggctacttggtggactctgttgctaaaacaattgatgcaggttgcaaaccatacatggcccctgaaagaataaacccagagctcaaccagaagggatacagtgtgaagtctgacatttggagtctgggcatcacgatgattgagttggccatccttcgatttccctatgattcatggggaactccatttcagcagctcaaacaggtggtagaggagccatcgccacaactcccagcagacaagttctctgcagagtttgttgactttacctcacagtgcttaaagaagaattccaaagaacggcctacatacccagagctaatgcaacatccatttttcaccctacatgaatccaaaggaacagatgtggcatcttttgtaaaactgattcttggagactaaaaagcagtggacttaatcggttgaccctactgtggattggtgggtttcggggtgaagcaagttcactacagcatcaatagaaagtcatctttgagataatttaaccctgcctctcagagggttttctctcccaattttctttttactccccctcttaagggggccttggaatctatagtatagaatgaactgtctagatggatgaattatgataaaggcttaggacttcaaaaggtgattaaatatttaatgatgtgtcatatgagtcctcaagcttctcagacttctcttattctttacaaaatgaatgcattggccctgacaaaaaggtgctacggtagtgatgaaattataagtagatttgtagtttgtcccatttattattttaatatttatgtttaagtgcttggttgaaaagattccattttatacaagaagggagattcaaaaaaaaaatataaggttgggttagcaatatttatagggcttttattttttaagttcaattgtgtctgtggtccagaagaaattatttaatatgcatctttgagaatattataaaaatatcaaaaaggaaaaaaaaaaa

SEQ ID NO: 3553 - protein, 334 aa, Homo sapiens
MSQSKGKKRNPGLKIPKEAFEQPQTSSTPPRDLDSKACISIGNQNFEVKADDLEPIMELGRGAYGVVEKMRHVPSGQIMAVKRIRATVNSQEQKRLLMDLDISMRTVDCPFTVTFYGALFREGDVWICMELMDTSLDKFYKQVIDKGQTIPEDILGKIAVSIVKALEHLHSKLSVIHRDVKPSNVLINALGQVKMCDFGISGYLVDSVAKTIDAGCKPYMAPERINPELNQKGYSVKSDIWSLGITMIELAILRFPYDSWGTPFQQLKQVVEEPSPQLPADKFSAEFVDFTSQCLKKNSKERPTYPELMQHPFFTLHESKGTDVASFVKLILGD

SEQ ID NO: 3554 - DNA, 201 bp, Homo sapiens
atgatgctgctgttctaccctggctgcagggatgggctgatcgtggaggagggacagcgctgccgctgccactccctcgcctgcaacacgtgcctctgtgtgcacttcacccacaagcttcagacccactctgcagatgagccgaagaccaccttctaccagtgctgcaggactcagtgtggacaccactggagggattag

SEQ ID NO: 3555 - protein, 66 aa, Homo sapiens
MMLLFYPGCRDGLIVEEGQRCRCHSLACNTCLCVHFTHKLQTHSADEPKTTFYQCCRTQCGHHWRD

SEQ ID NO: 3556 - DNA, 2996 bp, Homo sapiens
cgcagccacccatgcgcgcgcgctcgcaagaccaccagcgcccagagccccagtctgaggcttggcgccgggggtctgcgggcgaggggagctctctacgtgcgaggggctagcgggagccggcacaagagggtcgaggagccaggaaccccaaacgtccggcgccaggcgctagccaagctgctgcgcgccccggcgcccagctggctcggggacagccgctgggtgtcggagaccggagctagcggattgcagcggaaaagcaaagatgtcacactggatccttggcctccagggtccattaaggtgagaataagatctctgggctggctggaactagcctaagactgaaaagcagccatggacatggcggatgagccactcaatggaagccacacatggctatccattccatttgacctcaatggctctgtggtgtcaaccaacacctcaaaccagacagagccgtactatgacctgacaagcaatgcagtcctcacattcatctattttgtggtctgcatcattgggttgtgtggcaacacacttgtcatttatgtcatcctccgctatgccaagatgaagaccatcaccaacatttacatcctcaacctggccatcgcagatgagctcttcatgctgggtctgcctttcttggctatgcaggtggctctggtccactggccctttggcaaggccatttgccgggtggtcatgactgtggatggcatcaatcagttcaccagcatcttctgcctgacagtcatgagcatcgaccgatacctggctgtggtccaccccatcaagtcggccaagtggaggagaccccggacggccaagatgatcaccatggctgtgtggggagtctctctgctggtcatcttgcccatcatgatatatgctgggctccggagcaaccagtgggggagaagcagctgcaccatcaactggccaggtgaatctggggcttggtacacagggttcatcatctacactttcattctggggttcctggtacccctcaccatcatctgtctttgctacctgttcattatcatcaaggtgaagtcctctggaatccgagtgggctcctctaagaggaagaagtctgagaagaaggtcacccgaatggtgtccatcgtggtggctgtcttcatcttctgctggcttcccttctacatattcaacgtttcttccgtctccatggccatcagccccaccccagcccttaaaggcatgtttgactttgtggtggtcctcacctatgctaacagctgtgccaaccctatcctatatgccttcttgtctgacaacttcaagaagagcttccagaatgtcctctgcttggtcaaggtgagcggcacagatgatggggagcggagtgacagtaagcaggacaaatcccggctgaatgagaccacggagacccagaggaccctcctcaatggagacctccaaaccagtatctgaactgcttggggggtgggaaagaaccaagccatgctctgtctactggcaatgggctccctacccacactggcttcctgcctcccacccctcacacctggcttctagaatagaggattgctcagcatgagtccaattcagagaacggtgtttgagtcagcttgtctgattgaatgataatgtgctaaattgattacctcccccttaaagcgaacactgaaatgcaggtagacaattcaaagtctggagaagagggatcatgcctggatatgatctttagaaacaacaaaaatagaaaaaaataagtatctgtgtgtttgtgtattgaaaactcaatatgtaatcttgtgtttttatatgtatacttgtatattcctatttattctctgtataggcattacctacgttcctgtgtttacatacacaagtagcaaattcgagtatgcatagtgtagatggacatttgccacaacacactgcccgcagaaatggacttaccgtgaagccaataaagttcaagcttcagggatctctcttgcacgggccttgccaaggcccaggagggacttgggcagtatgttcatgtggtcatatgtttttgtaaaaaattgtgaaagtaagatatgtttgtattgtttttcttaaagaggaacctcgtataagcttcaagcctcacaaaccttctagcctctgcccttggggatttgcttcattaatttcaggcaagtgaggtcaatgtaagaagggaaagggagaagatatttgaagaaccagaatgtaaattcatgtgtttccacttctcagatatagtcagagaattattcatttgcccaaaaggacttaagtggttgtggtcatccatcattgtatttatcaagacaaagccaactttgttataagattgcatttttttcttttcaaattgctttagtttttcttagggagctatgagggggaaaaatcactaacatgaaaggcaaaaaatggactatgattcctgtggggaaacaatttcattctctccatcgtgaaaataagtgaataagagtgaagcaaaattacacctttatgagaaaccataaaattgtttttatttttcaggccagacatagcttcctaatgaaagaaaatggaaatgtaattcgacgactcctcaaaggggactttagaggacttcatacaaagctgggcattaagaaaaccacaatgcatggccgggcgtggtggcttacacctgtaatcccagcactttgggaggccgaggtgggtggatcacccgaggtcaggagttcgagaccagcctggccaacatggtgaaaccccatcactactaaaaatatgtaaattagtcgggcgtggtgtcacgtgcctgtaatcctagctgctcgggaggctgaggcaggagaatcacttgaacttgggaggtggaggttgcagtaagctgagattgtgccactgcactctagcctgagcaacaagagcaaaactcagtctcaaaaaaaaaaaaaaaaaaaaaaaaaaaaaaaaaa

SEQ ID NO: 3557 - protein, 369 aa, Homo sapiens
MDMADEPLNGSHTWLSIPFDLNGSVVSTNTSNQTEPYYDLTSNAVLTFIYFVVCIIGLCGNTLVIYVILRYAKMKTITNIYILNLAIADELFMLGLPFLAMQVALVHWPFGKAICRVVMTVDGINQFTSIFCLTVMSIDRYLAVVHPIKSAKWRRPRTAKMITMAVWGVSLLVILPIMIYAGLRSNQWGRSSCTINWPGESGAWYTGFIIYTFILGFLVPLTIICLCYLFIIIKVKSSGIRVGSSKRKKSEKKVTRMVSIVVAVFIFCWLPFYIFNVSSVSMAISPTPALKGMFDFVVVLTYANSCANPILYAFLSDNFKKSFQNVLCLVKVSGTDDGERSDSKQDKSRLNETTETQRTLLNGDLQTSI

SEQ ID NO: 3558 - DNA, 3035 bp, Homo sapiens
ggcgtaggtagatcgccgggggctgacgagtgcaccatggccaccgcggcaacctcacccgcgctgaagcggctggatctgcgcgaccctgcggctcttttcgagacgcatggagcggaggagatccgcgggctggagcgccaggttcgggccgagatcgagcacaagaaggaggagctgcggcagatggtgggcgaacggtaccgcgacctgatcgaggcggccgacaccatcggccagatgcgccgctgcgccgtggggctagtggacgccgtgaaggccaccgaccagtactgcgcccgcctccgccaggccggctcggccgcgccccggccaccgcgggcccagcagccacagcagccatcccaggagaagttctacagcatggctgcccagatcaagctactcttagaaattccggagaagatctggagctcgatggaagcctctcagtgtctccacgccacacagctctacctgctctgctgccacctccacagcctgctccagctggattcttctagttcccgatacagtcccgtcctctcccggtttcctatactcatccggcaggtggcagccgccagccacttccggtcaactattctgcatgaaagcaagatgttgctcaaatgccaaggtgtgtctgaccaagctgtggccgaggccctgtgctctataatgctcttagaagagagttctcctcgccaagccctcacagacttcctgctggccagaaaggcaactattcagaaacttctcaaccagccacaccatggtgctggtatcaaggctcagatttgctcattagtggagttgctggccaccactctgaagcaagctcatgcccttttctacactttgccagaaggactgctgccagatccagccctgccatgtggcttgctcttctctactctggagaccatcacaggccagcatcctgccggaaagggcactggtgtcctgcaggaagagatgaaactctgcagctggtttaaacacctgccagcatccatcgtcgagttccagccaacactccgaacccttgcacatcccatcagtcaggaatacctgaaagacacgctgcagaaatggatccacatgtgtaatgaagacattaaaaatgggatcaccaacctgctcatgtacgtgaagagcatgaagggtctcgcgggaatccgggacgccatgtgggagttacttaccaatgagtccaccaatcacagctgggatgtgctatgtcggcggcttctggagaagccgctcttgttctgggaagatatgatgcagcaactgttccttgaccgattacagactctgacaaaagaaggctttgactccatctccagtagctccaaggagctcttggtttcagctttgcaggaacttgaaagcagcaccagcaactccccttcaaataagcacatccactttgagtacaacatgtcgctcttcctctggtctgagagtcctaatgacctgccttccgatgcggcctgggtcagcgtggcaaaccggggtcagtttgccagtagcggcctctccatgaaagcacaagccatcagcccttgtgtacagaacttctgttctgccctggattctaagctgaaggttaaactagatgacctcctggcttacctcccctctgatgactcatcactgcccaaggacgtttctcccacacaggccaagagttctgcctttgacagatacgcagatgcggggaccgtgcaggagatgctgcggactcagtccgtggcatgcatcaagcacatcgtggactgcatccgggcagagctacagagcattgaagagggtgtgcaagggcaacaggatgccctcaacagtgccaagctgcactcagttcttttcatggccagactctgccagtccctgggagagctgtgcccccatctgaagcagtgcatcctgggaaaatcagagagctcagagaaaccagcaagggagtttagggctctgagaaaacagggaaaggtgaaaactcaggaaatcattcctacacaggccaagtggcaagaggttaaagaagtactcctccagcagagcgtgatgggctaccaggtctggagcagtgcagttgtgaaagttttgattcatggattcacccagtcattacttctagatgatgctggctcagttctggccacagccaccagctgggatgagctagaaattcaggaggaggcagagtctggcagcagtgtcacatccaagatccgactccctgcacagccgtcctggtatgtacagtccttcctgtttagtttatgccaggaaattaatcgggttggaggccatgccttgccaaaggtgacattacaggagatgctgaaaagctgtatggttcaagtagtagctgcctatgagaaactctccgaagaaaaacagattaagaaagaaggtgcatttccagtcacccagaaccgggcgctgcagctgctttatgatctgcgttacctcaacattgttctgacagccaagggtgacgaggtgaagagtggccggagcaagccagactccagaattgagaaagtgactgaccacctggaagccctcattgatccatttgacctggacgttttcacgccacacctcaacagcaaccttcatcgcctggtgcagcgaacttctgttctgtttggattggtgactggtacagagaatcagctcgccccccggagcagtacgttcaactcccaagaaccccataacatcctgccactggcatccagtcagatcaggtttggacttctcccactgagcatgacaagcactcgaaaggctaaatcaaccagaaacatcgaaacaaaagctcaggttgtccccccggcacgctccacagctggtgacccgacagttcctggctccttgttcagacagcttgtcagtgaagaagacaacacgtctgcaccttcattattcaaacttggctggctctctagtatgactaagtaacatggcaacacatctgtctctccctaaataaatactaccacattatttcttctaaa

SEQ ID NO: 3559 - protein, 980 aa, Homo sapiens
MATAATSPALKRLDLRDPAALFETHGAEEIRGLERQVRAEIEHKKEELRQMVGERYRDLIEAADTIGQMRRCAVGLVDAVKATDQYCARLRQAGSAAPRPPRAQQPQQPSQEKFYSMAAQIKLLLEIPEKIWSSMEASQCLHATQLYLLCCHLHSLLQLDSSSSRYSPVLSRFPILIRQVAAASHFRSTILHESKMLLKCQGVSDQAVAEALCSIMLLEESSPRQALTDFLLARKATIQKLLNQPHHGAGIKAQICSLVELLATTLKQAHALFYTLPEGLLPDPALPCGLLFSTLETITGQHPAGKGTGVLQEEMKLCSWFKHLPASIVEFQPTLRTLAHPISQEYLKDTLQKWIHMCNEDIKNGITNLLMYVKSMKGLAGIRDAMWELLTNESTNHSWDVLCRRLLEKPLLFWEDMMQQLFLDRLQTLTKEGFDSISSSSKELLVSALQELESSTSNSPSNKHIHFEYNMSLFLWSESPNDLPSDAAWVSVANRGQFASSGLSMKAQAISPCVQNFCSALDSKLKVKLDDLLAYLPSDDSSLPKDVSPTQAKSSAFDRYADAGTVQEMLRTQSVACIKHIVDCIRAELQSIEEGVQGQQDALNSAKLHSVLFMARLCQSLGELCPHLKQCILGKSESSEKPAREFRALRKQGKVKTQEIIPTQAKWQEVKEVLLQQSVMGYQVWSSAVVKVLIHGFTQSLLLDDAGSVLATATSWDELEIQEEAESGSSVTSKIRLPAQPSWYVQSFLFSLCQEINRVGGHALPKVTLQEMLKSCMVQVVAAYEKLSEEKQIKKEGAFPVTQNRALQLLYDLRYLNIVLTAKGDEVKSGRSKPDSRIEKVTDHLEALIDPFDLDVFTPHLNSNLHRLVQRTSVLFGLVTGTENQLAPRSSTFNSQEPHNILPLASSQIRFGLLPLSMTSTRKAKSTRNIETKAQVVPPARSTAGDPTVPGSLFRQLVSEEDNTSAPSLFKLGWLSSMTK

SEQ ID NO: 3560 - DNA, 2697 bp, Homo sapiens
agtagtggtggtacgggtccgactgaggggtactcgccaccggctgcgtccacccgagcggctgcgagagccaaggcccgagggggtgggcgtggcggccgccgaaacacaaccccctctgttccctctcttcgcggagcggcgccgcgtagcttccatccgccagctgccatgagcgagcgcctccgtcccaggaaaaggagaaggaatggcaacgaagaagacaaccatcttcccccccagaccaaaagaagtagcagaaaccctgtctttcaggattcctgggacacagagtcttcaggcagtgacagtggtgggagcagcagcagcagcagcagcagcatcaatagcccggacagggccagcgggccggaaggcagcttgagccagaccatggccggatccagccctaacacgcctcagcccgtgcccgagcagtccgcgctgtgccaaggcctctacttccacatcaaccagaccctgagggaggcccacttccacagcctacagcaccgagggcggcctctgacatgatgtgccggcagtttcttgccttctgtgaagggacagcgctgtgcagatttgatatttcaacttacaacttgttttaaaagaaaaattgcacacgaaaaatgcctgttggcttttcagtctatatttgaaataacaggttaacaggcagttgtttacttgtggttttgctgcactattgcaatttcaaaggggctttgaagcaattttttataggattcttttgagggagggtatcaaatctatgtcaaggtagtggtttgaggaaaactcattctgtgtgttgaatccatagtatgtcccattcagactgatttccaaatctgtcaactagaaactctactttatgtaaagggccttttaaaaatgcgggatcttcaattttttttattcaataaactagtaaagagtatctagtttccatgaaaaaacataagtttttttccaaaatataggaagcttgattcagtcttgcactgaaattaactgccatactacctctcagtatgtagatgttctattgaaagtactctctcctgtgtaacaggagaacaatcagatccaattcagactgtcagtgaagcacactccctaataatagtctctactctttgttatatatttgtatttccagagagaatgtcttttagattcttgtatacccagataacttctgtgtcactattccaccagagtctgcacctcagactttagtaggaaacatggcacagttctgcaagtaaagtaatatgtaatgactttttgtcctacaaacttggtcagtcagcagcttacatgatctcattgacaattccaccttgtagtgtcaacaattaaggtgttgttgaacgctgataaaatgtaagctacctgaactgatgtctaaagcaacaagtattgtgaaattttgggacaaggattaacttgatgcttaaagtaacccccaacagtaactagggggccacattccatcagtgaaactggaaagattggtgtggctgagaatcagatgagcagaggcacctttagaagaaataatgtggtagtatttatttagggagagacagatgtgttgccatgttacttagtcatactagagagccagccaagtttgaataatgaaggtgcagacgtgttgtcttcttcactgacaagctgtctgaacaaggagccaggaactgtcgggtcaccagctgtggagcgtgccggggggacaacctgccattggatgtagagaaaagtgccttagagttggcctgagccctcctgcccactcgccctccgcgcgacgccactcggagtccacacggcacacacaagcggagctgagaagcacgatggctctagtcagaggactttgctgtcggtccagatttgaagaggacacggaacagcatgagcctttgtgacaaaactagaatttggaaatgaggactgtcttgggaaaagggtagacacaggcacttctctccacagcctgctaacctaatgtgggcagaactgaaagatcactgcagtggaaactgttctggaagaggctgcaacatagcccatgcttagggactggatggtttttgcaagagctttttttttttttaaactaccatctcccaacttttaaagccagattcttgacaaggattttagatcttaatgggttcgatggtagggaatacggaaaggatacactgctaatattgtgtctaacaataaagcaaacaactcgatgctgtaagaagacaagctgtttgagctttcaaacacacatgcacacagcacaattcagaaatacccaggaggattcctgcaggcttaacagttggcatcgtactgaaatgaaacgtgtattaacaagaaaatgtcaaacttttggggaaacaaattttctgttacttcccacccaactaaaagggaagataaaaccatcatcaccagaacaaaacagattttctccaaacaagtacaatgatagtgccgggttggcagttaactctttcaccctactaaattcaagagctcatctccaccctgtcctgtatattttctacatttctattaagaggctacttggtagtgtcagcgggcaccttttacaccttctagtagctcaagctagtaaaaccttgtacttctctattgcgccgccattaaaagcagcattagtgc

SEQ ID NO: 3561 - protein, 120 aa, Homo sapiens
MSERLRPRKRRRNGNEEDNHLPPQTKRSSRNPVFQDSWDTESSGSDSGGSSSSSSSSINSPDRASGPEGSLSQTMAGSSPNTPQPVPEQSALCQGLYFHINQTLREAHFHSLQHRGRPLT

SEQ ID NO: 3562 - DNA, 2144 bp, Homo sapiens
ggctgacattcacgtttcattctgccacactcgggaacggtgatcggggaagcatggggatccgggagaagcacccacaaaactagcatcctcctggaggagctcgggaataggatgagtgataatccacccagaatggaagtgtgtccttactgtaagaagccatttaaacgattaaaatcccacttgccatactgtaagatgataggaccaaccatacctactgatcaaaaagtttatcagtccaagccagctacactcccacgtgctaaaaagatgaaaggaccaatcaaagatttaattaaagctaaagggaaagagttagagacagagaatgaagaaagaaattctaagttggtggtggacaaaccagaacagacagtgaagacctttccactgccagctgttggtttggaaagagcagctactacaaaggcagataaagacatcaagaatccaatccaaccatccttcaaaatgttaaaaaatactaaaccaatgactactttccaagaagaaaccaaggctcagttttacgcatcagagaaaacctctcctaaaagagaacttgccaaagatttgcctaaatcaggagaaagtcgatgtaatccttcagaagctggagcgtctttactggttggctcaatagaaccttctttgtcaaatcaagatagaaaatattcctcaactctacctaatgatgtacaaactacctctggtgatctcaaattggacaaaattgatccccaaagacaggaacttctagtaaaattactagatgtgcctactggtgattgtcatatttctccaaagaatgtcagtgatggggttaaaagggtaagaacattattaagcaatgagagagattccaaaggcagggatcacctctcaggagtccctactgatgttacagttactgagactccagaaaagaacacagaatccctcattttaagccttaaaatgagctcattaggtaaaatccaagtcatggagaaacaagagaaaggacttaccctgggagtagagacgtgtgggagcaaaggaaatgcagagaaaagtatgtctgcaacagaaaagcaggaacggactgtcatgagccatggctgtgagaacttcaacaccagggattcagtcacaggaaaggagtctcaaggggaaagaccacatttaagtttgttcattccgagggagacgacttaccagtttcattctgtatcgcagtcaagtagtcaaagtcttgcctctctagctacaacatttcttcaagaaaagaaagcagaagcccagaatcataattgtgtccctgatgtaaaggcattaatggagagtcccgagggacagttatctctggagcccaaatctgatagtcagttccaagcatcacacactgggtgccagagccctttatgttcagcccagcgtcacactcctcagagccccttcaccaatcatgctgcagctgctggcaggaagactcttcgcagctgcatggggctggagtggtttccagagctctatcctggttaccttggactaggggtgttgccagggaagcctcagtgttggaatgcaatgacccagaagccacaacttatcagtccccagggggaaagactctcacaagtttctttgttggaacgaagctcaactcatataaggagtttggaaccccctgccggacttacaacctccaacttctctctaatgaggctcttgggagctgtacaaaaaggctggatcaggtgcaacaccaccataaggaagagtggattcggtggcatcactatgctcttcacaggatacttcgtcctgtgttgtagctggagtttcagacgtctgaaaaaattgtgccgacccctgccctggaagagcacagtacctccatgcattggtgtggcgaagacgactggggattgccgctctaaaacatgtttggattaggaagcacgtttaagtaggagaagccttcgtgacttctctctagtgccttcgtgccctgtgttgcccactgaattgccctgtaacacctaagtgtagtggtagcattaagggatagcttttcagccctcaaggttatcaggagcatttgtatcactgctataaataaagtagtatcacttgtcaaaaaaaaaaaaaaaaaa

SEQ ID NO: 3563 - protein, 609 aa, Homo sapiens
MSDNPPRMEVCPYCKKPFKRLKSHLPYCKMIGPTIPTDQKVYQSKPATLPRAKKMKGPIKDLIKAKGKELETENEERNSKLVVDKPEQTVKTFPLPAVGLERAATTKADKDIKNPIQPSFKMLKNTKPMTTFQEETKAQFYASEKTSPKRELAKDLPKSGESRCNPSEAGASLLVGSIEPSLSNQDRKYSSTLPNDVQTTSGDLKLDKIDPQRQELLVKLLDVPTGDCHISPKNVSDGVKRVRTLLSNERDSKGRDHLSGVPTDVTVTETPEKNTESLILSLKMSSLGKIQVMEKQEKGLTLGVETCGSKGNAEKSMSATEKQERTVMSHGCENFNTRDSVTGKESQGERPHLSLFIPRETTYQFHSVSQSSSQSLASLATTFLQEKKAEAQNHNCVPDVKALMESPEGQLSLEPKSDSQFQASHTGCQSPLCSAQRHTPQSPFTNHAAAAGRKTLRSCMGLEWFPELYPGYLGLGVLPGKPQCWNAMTQKPQLISPQGERLSQVSLLERSSTHIRSLEPPAGLTTSNFSLMRLLGAVQKGWIRCNTTIRKSGFGGITMLFTGYFVLCCSWSFRRLKKLCRPLPWKSTVPPCIGVAKTTGDCRSKTCLD

SEQ ID NO: 3564 - DNA, 3121 bp, Homo sapiens
gccagagggaaacaaacgccggcgctgacaggggccgccagcccctccgccgcgcggagcccacgaaggggacagcgcagccggcccagagctcgggtctccggggaccgagccttatgatctcctcattgcgtccccctctgcccactggacttggacttcagatctgaccccagacctgccggctacctcgggagggcccacctccccgcccatccagcaagatgccaatcctcaagcaactggtgtccagctcggtgcactccaagcgccgttcccgagcggacctcacggccgagatgatcagcgccccgctgggcgacttccgccacaccatgcacgttggccgggccggagacgcctttggggacacctccttcctcaatagcaaggctggcgagcccgacggcgagtccttggacgaacagccctcttcttcatcttccaaacgcagtctcctgtccaggaagttccggggcagcaagcggtcacagtcggtgaccaggggggagcgggagcagcgtgacatgctgggctccctgcgggactcggccctgtttgtcaagaatgccatgtccctgccccagctcaatgagaaggaggccgcggagaagggcaccagtaagctgcccaagagcctgtcatccagccccgtgaagaaggccaatgacggggagggcggcgatgaggaggcgggcacggaggaggcagtgccccgtcggaatggggccgcgggtccacattcccctgaccccctcctcgatgagcaggcctttggggatctgacagatctgcctgtcgtgcccaaggccacgtacgggctgaagcatgcggagtccatcatgtccttccacatcgacctggggccctccatgctgggtgacgtcctcagcatcatggacaaggaggagtgggaccccgaggagggggagggtggttaccatggcgatgagggcgccgctggcaccatcacccaggctcccccgtacgccgtggcggcccctcccctggcaaggcaggaaggcaaggctggcccagacttgccctccctcccctcccatgctctggaggatgaggggtgggcagcagcggcccccagccccggctcagcccgcagcatgggcagccacaccacacgggacagcagctccctctccagctgcacctcaggcatcctggaggagcgcagccctgccttccgggggccggacagggcccgggctgctgtctcaagacagccagacaaggagttctccttcatggatgaggaggaggaggatgaaatccgtgtgtgaggcggacagtgggtggccaccgggagctcttggctgcatcttctccctgcccccaccccactatgacctttgaccctacggcgcaggggcagccaggacccttgattcagaccatggaccctggaccttgtagatgagggacactggcctggccctcgggtcttcggaggacgtagggggctggcatgggtgccgactggctgcctgacttcatcatgctccctgcacttaggctgcgtgggacaagggctgtgttgtcacagcaggaataggttttcctctgttggcctccctttcctccaccctggcctcaaatggatgccagatgccaaccccagttctggccacgtacagccagcgggtcagcccagaggcagcctcagctccagggctaaggactctcggctcccattttctctgctggcgtttctgctgtgcccagcagtggctgctggggaagcagctgcagcaggagggagacggtcttgcctctcagcccctccctgccccaccccagctcctgccctggaaatctggagccccttggagctgagctggacggggggccagctgcgagcatgtgcactaaacgcagccctttccaggggaagagaacaggatggagaatggaaggaaagccccccaggcttcgtgaattgcaagaagggacccttccaggatgacactaggaacagggctagggcactcgctcagtccctaggggcttgtttgttctttattattgtgtttaaatccttatagagcaatatcaggatggtgttaataggtctgcctcagaatgagaatcaatccttttagaaaacctttatactaagcctcctcttcaaaattcacagtggcgattagcggactggagtctggtggcgattagcggactggagtctggggacatccgtggcaaagacaccagctcaactttagtgcttcccaactttatttagaatgacatggggtgggtgtctggtgtgtgtgttttccctacgcacctcccatagctattaacaactgaggaaggccagtgcagaatatttttggagaacgattttttttttaaataatatatcattcctatggggggaaagccttttttttctttttggctgagttattccctccctcccctcaataccctcagtactgactacttccctttcttttctcaggcctccccccaccgacttttgaggccagggttggccagatttagcaaaaccaaaacagagtgctgagttaaacgcaaatttcaggtaaacaaaagataattttctagcattaatatgccccacgcaatatttggaacacttatgtgaaaaatgatttgtttttctgaaattcacgtttctctctgagtcctgtaactgtccccgaggggattgagcagaagctcgggtatgagccctgaggttgactgccggttatttttctgtcctgggaacagcctgacccacctccctgtctccatgtagccagtgaggggagggggagacacagaaccaaccacagccaggggcgtccccatggcgactgtggcccggcccctcctctcttgcctgactctcctctcttgcctgactctagacactaacttagttccaggttcggtgccctgttggtgctcctgtttccaatagcttaggtcccatggtgggggaggaacctcaggggctatgcagcccccgccagctgccctcgaatcccgtccaggccaattccagattctaaactgatttttttcatgatattgtcaaaacagtgaggaaacattaaaaaaaaagccctaaagcaaaaaaaaaaaaaaaaaaaaa

SEQ ID NO: 3565 - protein, 356 aa, Homo sapiens
MPILKQLVSSSVHSKRRSRADLTAEMISAPLGDFRHTMHVGRAGDAFGDTSFLNSKAGEPDGESLDEQPSSSSSKRSLLSRKFRGSKRSQSVTRGEREQRDMLGSLRDSALFVKNAMSLPQLNEKEAAEKGTSKLPKSLSSSPVKKANDGEGGDEEAGTEEAVPRRNGAAGPHSPDPLLDEQAFGDLTDLPVVPKATYGLKHAESIMSFHIDLGPSMLGDVLSIMDKEEWDPEEGEGGYHGDEGAAGTITQAPPYAVAAPPLARQEGKAGPDLPSLPSHALEDEGWAAAAPSPGSARSMGSHTTRDSSSLSSCTSGILEERSPAFRGPDRARAAVSRQPDKEFSFMDEEEEDEIRV

SEQ ID NO: 3566 - DNA, 6628 bp, Homo sapiens
tcaccatccccaaccccaccggcagcgacgccggctactacgagtgcgaggctgtcctgcgcagcagcagcgtcccctctgttgtccggggcgcctacctctcagtgctggaaccgcctcagtttgtcaaggagccagaaagacacatcactgcggagatggagaaggtggtggacatcccctgtcaggccaaaggtgtgccgccgccctccatcacctggtacaaggacgcagccgtggtggaggtggagaagttgacccgcttccggcagcgcaacgacgggggcctgcagatcagcggcctggtgcccgatgataccggcatgttccagtgcttcgcccgcaatgcagccggcgaggtgcaaacttccacctacctggctgtcaccagcatcgcccctaacatcaccagaggccccctggacagcacggtgatcgatggcatgtcagtggtgctagcatgtgagacctcgggggcgccccgaccagctatcacttggcagaaaggggagcgcatcttggccagtggctctgtgcagctgcctcgcttcacacccctggagtcgggcagcctcctcatcagccccacacacatctccgatgcggggacctacacctgcctggccaccaactctcggggggtcgatgaggcctcagcagacctagtcgtttgggctcggacccgcatcaccaagcccccccaggatcagagtgtcatcaagggcacccaggcctccatggtgtgcggagtgacccacgacccccgagtaaccatcaggtacatctgggagaaggacggggccaccctgggcacggagagccatcctcgtatccgcctggacagaaacggctccctgcacatctcacagacgtggtcgggagacatcggcacgtacacctgccgggtgatctcagcaggaggcaacgactctcgcagtgcccacctgcgagtcaggcaactgccccacgcgcccgagcacccagtggccactctcagcaccgtggaaaggcgagccatcaacctgacgtggaccaagccctttgatggcaacagccccctgatccgctacattctggagatgtcggagaacaatgccccctggactgtactcctggccagtgtggaccccaaagctacctcagtgacagtcaagggcctggttcctgcacgctcctaccagttccgtctttgtgccgtcaacgacgtggggaaaggacagttcagcaaagacaccgagagggtctccctccccgaggagccccccacggcccctccacagaacgtcatcgccagcggtcgaaccaaccagtccatcatgatccagtggcagccgcctcctgagagccaccagaatggaattctcaagggttacatcatcaggtactgcctggccgggctgcccgtggggtaccagtttaagaacatcacggatgctgatgtgaacaacctgctgctggaggatctcatcatttggaccaactacgagatcgaggtggctgcttacaacagcgctgggctgggggtctacagcagtaaagtcaccgagtggacgctgcagggagttcccacagtccctccgggcaatgtgcacgcggaagccaccaattccacgaccatccgcttcacctggaacgcccccagcccccagttcatcaacggcatcaaccagggctacaagctgatcgcctgggagccggaacaggaagaggaggttaccatggtgaccgcccggcctaactttcaagacagcatccacgtgggcttcgtgtctggcctgaagaagttcaccgagtacttcacctcagtgctgtgtttcaccacccccggggacgggccacgcagcaccccgcagctggtgcgcacccatgaggatgtgcctgggcccgtgggacacctgagcttcagtgagatcctggacacatcgctgaaggtcagctggcaagagccgggagagaaaaatggcatcctcacagggtaccggatctcctgggaggagtacaatcgaaccaacacccgtgtgacccactacctgcccaacgtgaccctggagtaccgtgtcacgggcctcaccgcgctcaccacctacaccatcgaggtggccgccatgacctcaaagggccagggccaagtgtccgcctccaccatctcctctggggtgcccccagaactcccagggccccccaccaacctgggcatttccaacatcggcccccgctctgtgaccttgcagttcaggccaggctacgatgggaaaacctccatctcccgctggctggtggaagcccaggtaggcgtggttggggagggagaggagtggttgctgatccaccagctctccaatgagcccgatgcccgctccatggaggtgcccgacctcaaccccttcacctgctacagcttccgcatgcgccaggtgaacatcgtgggcaccagcccccccagtcagccttctagaaagatccagaccctgcaggcaccccctgacatggccccagccaatgtgtctctgcgcacagccagtgagaccagcctgtggctgcgctggatgcctctcccggagatggaatacaatgggaaccctgagtccgtgggctataagatcaagtacagccggtcagacgggcatggcaagacgctgagccacgtggtgcaggaccgtgtggagcgggactacaccatcgaggacctggaggagtggacagagtaccgcgtccaggtccaggccttcaacgccatcgggagcgggccctggagccagacggtggtgggcaggacccgggagtcagttccctcttccggccccaccaatgtgtctgcactggccaccacctccagcagcatgctggtgcgctggagcgaggtccccgaggctgatcgcaacgggctcgtgctgggctataaggtgatgtataaggagaaggactcggacacccagccccgattctggctggtggaaggcaactcgtctcgcagtgcccagctcaccggcttgggcaaatacgtgctctatgaagtccaggtgctggccttcacacgcatcggggacggcagccccagccaccctcccatcctggagcggacgctggatgatgtcccaggaccacccatgggcatcctgttcccagaggtgcggaccacgtctgtgcggctgatctggcagccccctgccgcccccaatggcatcattcttgcttaccagatcacacaccggctcaacaccaccacggccaacaccgccactgtggaggtgctggcacccagcgcccggcagtacacagccacgggcctcaagccagagtctgtctacctgttccgcatcacggcccagacccgcaagggctggggagaagctgccgaggccttggtggtgaccaccgagaagagagaccgtccgcagccccccagcaggccgatggtgcagcaggaggatgtgagagcacgcagcgtgctgctgtcctgggagccagggagcgacgggctctcccctgtgcgctactacaccatccagacccgcgagctgcccagcggcaggtgggcactgcactcggcctccgtgagccacaatgcctccagcttcattgtggacaggctgaagcccttcacgtcctacaagttccgagtgaaggcgaccaatgacattggcgacagcgagttcagcgaggagtcggagtcactgaccaccctgcaggctgcccccgatgaagcacccaccatcctctccgtgacgccccacaccaccacctccgtgctaatccgatggcagccgccagcagaggacaagatcaatggcatcctcctgggcttccggatccgataccgggagctgctctatgaaggactgaggggcttcacgcttcgaggcatcaacaacccaggggccacatgggctgagcttacctccatgtactccatgcggaacctgagccggcccagcctcacgcagtacgagctggacaacctgaacaagcacaggcggtacgagatacggatgagcgtgtacaacgctgtgggtgaggggccctccagccccccgcaggaggtctttgttggggaggcagtgcccacagcagcacctcgtaacgtggtcgtccacggcgccacggccacacagctggacgtgacttgggagccacctccgctggacagccagaatggagacatccaggggtacaagatttatttctgggaagcccagcgggggaacctcacagagcgagtgaagacgcttttcctggctgagaacagcgtgaagctcaagaacttgactggctacacggcctacatggtcagcgtggccgccttcaacgccgctggggatgggcctcggagcacccccacccaaggccagacccagcaagcagcccccagcgctcccagctcggtcaagttcagtgagctgaccacaacctcagtgaatgtgtcctgggaagccccgcagttccccaatggcatcctggagggctacaggctggtgtacgagccctgcagccccgtggatggagtcagcaagatcgtgaccgtggacgtgaaggggaacagccccctgtggctgaaggtgaaggacctggcggagggggtgacctacaggttccgcatcagagccaagaccttcacctacgggccggagatcgaagccaacgtcaccacgggccccggagaaggtgccccaggaccgcctggcgtgcccatcatcgtgcggtacagctctgccatcgccattcactggtccagcggagacccgggcaaagggcccatcacccgctacgtcatcgaggccagaccttcagacgagggactatgggacatcctcatcaaagacatccccaaggaggtgagctcctacacgttcagcatggacatcctgaagccgggcgtgagctatgacttccgggtcatcgcggtcaacgactatggtttcggcacccccagcagcccctcccagtctgtgccagcccagaaagccaaccccttctatgaggagtggtggttcttggtggtcattgccctggtcggcctcatcttcatcctgcttctggtcttcgtgctcatcatccggggccagagcaagaagtacgccaagaagacagactcggggaacagtgccaagtctggagccctaggccacagcgagatgatgagcttggatgaaagcagcttccctgccctggaactcaacaacaggcggctctccgtcaagaactctttctgccgaaagaacggcctgtacaccaggtctccccccaggcccagcccaggcagcctgcactactcggatgaggatgtcaccaaatacaacgacctcatccctgcagagagcagcagcctgacggagaagccctcagaaatctccgactctcagggaagtgacagcgagtacgaggtcgactcaaaccaccagaaggcccactcctttgtcaaccactacatcagtgaccccacatactacaactcgtggcggcgacagcagaagggcatctcgagggcacaggcctacagctacacggagagcgactcgggtgagccagaccacaccaccgtcaccaacagcaccagcacccagcagggcagcctctttcggcccaaggccagtcggactccaacgccccagaacccccctaaccccccaagtcagcagagcaccctctaccgtccccccagcagcctggccccaggctcccgggctcccatagcaggattttcatcatttgtttgacatcagaagaggaaaaagcagaaagagaaatggcaccaaactcctccttcacccctcctctcactgcctgccagaaaacaaaaacaccaagaaaccaagtcaacttttcacctcctgagtttatttttccagagattccagggccagcaaagccggcgttcagaaggagggagaaaaccgtgagaggatgtgtgtggccagcagctcttcagctttgagatggtggggttcactgctcccttgggaattacacggagctggggaagtggctgtgtcactgctatggacacggagtggggcgggcatctggagagagagagggagcggaggctaaggactggaggccgccaggcaggcgtggccgagggaagaaaaagcttctggatgtccagccagctgcccccttccagcccctccaggacccctggacccactgccgctgctctctgcaaaaagaatgggcatcccggaggccacgcctatcttctctctctgctcctccttccctccatgcaccatcactgtggctggcaggcatcggacagcctcatccagaccccctgccctgtcttggcaacctctactgcccatctcccctgctcaacttctccaccaagcatttggtttatttagaaaaaggaagaaaaacaaaaaacaaaaaactaaagggtgagaatttgcttagcgccttccttgttcctgcatattttttaaaatattgaatccaaggaagagagcccaagggtaggggagaaaccccccacaactgacccctgcctccctgtgctggaattgactttcctgagcatggacaaggaaaggtgaagtctggggagcagaggtgtaaataaggcgactggccttggcactgtgggatgattaggtttaacgcattgtgggcaagataagaatga

SEQ ID NO: 3567 - protein, 1851 aa, Homo sapiens
MEKVVDIPCQAKGVPPPSITWYKDAAVVEVEKLTRFRQRNDGGLQISGLVPDDTGMFQCFARNAAGEVQTSTYLAVTSIAPNITRGPLDSTVIDGMSVVLACETSGAPRPAITWQKGERILASGSVQLPRFTPLESGSLLISPTHISDAGTYTCLATNSRGVDEASADLVVWARTRITKPPQDQSVIKGTQASMVCGVTHDPRVTIRYIWEKDGATLGTESHPRIRLDRNGSLHISQTWSGDIGTYTCRVISAGGNDSRSAHLRVRQLPHAPEHPVATLSTVERRAINLTWTKPFDGNSPLIRYILEMSENNAPWTVLLASVDPKATSVTVKGLVPARSYQFRLCAVNDVGKGQFSKDTERVSLPEEPPTAPPQNVIASGRTNQSIMIQWQPPPESHQNGILKGYIIRYCLAGLPVGYQFKNITDADVNNLLLEDLIIWTNYEIEVAAYNSAGLGVYSSKVTEWTLQGVPTVPPGNVHAEATNSTTIRFTWNAPSPQFINGINQGYKLIAWEPEQEEEVTMVTARPNFQDSIHVGFVSGLKKFTEYFTSVLCFTTPGDGPRSTPQLVRTHEDVPGPVGHLSFSEILDTSLKVSWQEPGEKNGILTGYRISWEEYNRTNTRVTHYLPNVTLEYRVTGLTALTTYTIEVAAMTSKGQGQVSASTISSGVPPELPGPPTNLGISNIGPRSVTLQFRPGYDGKTSISRWLVEAQVGVVGEGEEWLLIHQLSNEPDARSMEVPDLNPFTCYSFRMRQVNIVGTSPPSQPSRKIQTLQAPPDMAPANVSLRTASETSLWLRWMPLPEMEYNGNPESVGYKIKYSRSDGHGKTLSHVVQDRVERDYTIEDLEEWTEYRVQVQAFNAIGSGPWSQTVVGRTRESVPSSGPTNVSALATTSSSMLVRWSEVPEADRNGLVLGYKVMYKEKDSDTQPRFWLVEGNSSRSAQLTGLGKYVLYEVQVLAFTRIGDGSPSHPPILERTLDDVPGPPMGILFPEVRTTSVRLIWQPPAAPNGIILAYQITHRLNTTTANTATVEVLAPSARQYTATGLKPESVYLFRITAQTRKGWGEAAEALVVTTEKRDRPQPPSRPMVQQEDVRARSVLLSWEPGSDGLSPVRYYTIQTRELPSGRWALHSASVSHNASSFIVDRLKPFTSYKFRVKATNDIGDSEFSEESESLTTLQAAPDEAPTILSVTPHTTTSVLIRWQPPAEDKINGILLGFRIRYRELLYEGLRGFTLRGINNPGATWAELTSMYSMRNLSRPSLTQYELDNLNKHRRYEIRMSVYNAVGEGPSSPPQEVFVGEAVPTAAPRNVVVHGATATQLDVTWEPPPLDSQNGDIQGYKIYFWEAQRGNLTERVKTLFLAENSVKLKNLTGYTAYMVSVAAFNAAGDGPRSTPTQGQTQQAAPSAPSSVKFSELTTTSVNVSWEAPQFPNGILEGYRLVYEPCSPVDGVSKIVTVDVKGNSPLWLKVKDLAEGVTYRFRIRAKTFTYGPEIEANVTTGPGEGAPGPPGVPIIVRYSSAIAIHWSSGDPGKGPITRYVIEARPSDEGLWDILIKDIPKEVSSYTFSMDILKPGVSYDFRVIAVNDYGFGTPSSPSQSVPAQKANPFYEEWWFLVVIALVGLIFILLLVFVLIIRGQSKKYAKKTDSGNSAKSGALGHSEMMSLDESSFPALELNNRRLSVKNSFCRKNGLYTRSPPRPSPGSLHYSDEDVTKYNDLIPAESSSLTEKPSEISDSQGSDSEYEVDSNHQKAHSFVNHYISDPTYYNSWRRQQKGISRAQAYSYTESDSGEPDHTTVTNSTSTQQGSLFRPKASRTPTPQNPPNPPSQQSTLYRPPSSLAPGSRAPIAGFSSFV

SEQ ID NO: 3568 - DNA, 2318 bp, Homo sapiens
tctagatgtgcagaaggtgcaagccagagctcgggcagaacttccagagtgcatctgggatctgcatttgccactggttgcagatcaggcggacgaggagccgggaaggcagagccatgtggctgccccctgctctgctccttctcagcctctcaggctgtttctccatccaaggcccagagtctgtgagagccccagagcaggggtccctgacggttcaatgccactataagcaaggatgggagacctacattaagtggtggtgccgaggggtgcgctgggatacatgcaagatcctcattgaaaccagagggtcggagcaaggagagaagagtgaccgtgtgtccatcaaggacaatcagaaagaccgcacgttcactgtgaccatggaggggctcaggcgagatgacgcagatgtttactggtgtgggattgaaagaagaggacctgaccttgggactcaagtgaaagtgatcgttgacccagagggagcggcttccacaacagcaagctcacctaccaacagcaatatggcagtgttcatcggctcccacaagaggaaccactacatgctcctggtatttgtgaaggtgcccatcttgctcatcttggtcactgccatcctctggttgaaggggtctcagagggtccctgaggagccaggggaacagcctatctacatgaacttctccgaacctctgactaaagacatggccacttagagagatggatctgcagagccttcctgccctggccacgtttccagaagagactcgggctgtggaaggaacatctacgagtcctcgggatgcagtgactgagataggggccctgggcctccgccctggccttggagctggtgggcacctccctgttctgcacagctcagggacttagccaggtcctctcctgagccaccatcacctcctggggtgccagcacctgttctcttggtcaggagctgtagagatggagctcaagcactggacgactctgtccccactgctggaataactcgggcacagagcatgggaccaaagtacagaaagaggttgggggagacccccccagccctagacttccatcattccggagaccaactcaacaccgtctttgcctgagaacctgatatatccgtgtttttaaatttttttttttctagcaaagttgggttttaatgacttatgttcataggaaacctctctgatcccacacacaaggagggtgattctgggatgagttcctggttctagggcatgaggggctggatggaccctgtccccagggaggacatggctctgagtccacagggctgaggaggcaatgggaacctccctggcccggcccggtgcttgtcctccccctcccacctcttcctcctcctagctccccaagctccctgcctattcccccacctccgaggggctgcagcttgggagcctcctcagcatgacagcttgggtctcctccccaaaagagcctgtcaggcctcaagaaccacctccaggtggggagggcagtaacgaaaaccatcgcaggaaatggcaccctcccttttcggtgatgttgaaatcatgttactaatgaaaactgtcctagggaagtggttctgtctcctcacaggcttcacccacggcgatgaggcccttgaatgtggtcactttgtgctgtatggttgagggaccctcacaccaaagggaccttcccatgtgagatgtgctcccgcccccacctgcccacaagcaaacacaccacacatgttcggcatgttgccctttgaacacccatgaggacgcctccaacctgctcttggttctaatagggagtactgactgtcagcagtggataaaggagaggggaccctctggtccctagcatggcacccagagcctcccctcttcttgtccttcagccaaagagaaactttctctgactttgaactgaatttaggtctctggccaatgatgggcctgaaaattccataatggccagagaggagagttcgagcccggctaagatcccctgagtcattctgtgagggaccaagacccacagtccaccagccccagggccctacctcctggaatgctttcctggatccagcttcccgaagatccgaccagacccagggaggacggcaccgctccgcgggagggaaagccaaagcatggtgcttcaccagctggactcaggggcgaggggacatgggcgcttgtcaacgtgatgtcattcttttcccaccgtttcttcctgttgatattcaatgaatccgtcaatctctctggaaaaaaaaaaaaaaaaaaaaaaaaaaaaaaaaa

SEQ ID NO: 3569 - protein, 238 aa, Homo sapiens
MCRRCKPELGQNFQSASGICICHWLQIRRTRSREGRAMWLPPALLLLSLSGCFSIQGPESVRAPEQGSLTVQCHYKQGWETYIKWWCRGVRWDTCKILIETRGSEQGEKSDRVSIKDNQKDRTFTVTMEGLRRDDADVYWCGIERRGPDLGTQVKVIVDPEGAASTTASSPTNSNMAVFIGSHKRNHYMLLVFVKVPILLILVTAILWLKGSQRVPEEPGEQPIYMNFSEPLTKDMAT

SEQ ID NO: 3570 - DNA, 1550 bp, Homo sapiens
gaaatggcccagcttggctctgccttctgcagtgtgagtaacacactgaagccagaagctgtgggctgtggggaagtggctgcatcgccacccaagggaccctggactttgccagacgtcagggttgagaggagccactagcaccatcccagagctgtcagcaccggcctcagcccaggcggctctctccctgagcttcctgtaccctgaccctctccagcctcagacctgagacagggctggacaaggaagcagagagcagaagaaaagcagaagcgaagctcagatctgctgggaggagactacattttgtcccctcctggggtcttgcacagtggcaggtgacattcgtgttacaggaatgactgccagggcctgggcctcgtggcggtcttcagctctgctcctcctgcttgtcccaggctattttcctctgagccaccccatgaccgtggcgggccccgtggggggatccctgagtgtgcagtgtcgctatgagaaggaacacaggaccctcaacaaattctggtgcagaccaccacagattctccgatgtgacaagattgtggagaccaaagggtcagcagggaaaaggaatggccgagtgtccatcagggacagtcctgcaaacctcagcttcacagtgaccctggagaatctcacagaggaggacgcaggcacctactggtgtggggtggatacaccgtggctccgagactttcatgatcccattgtcgaggttgaggtgtccgtgttcccggccgggacgaccacagcctccagcccccagagctccatgggcacctcaggtcctcccacgaagctgcccgtgcacacctggcccagcgtgaccagaaaggacagccccgaacccagcccacaccctggctccctgttcagcaatgtccgcttcctgctcctggtcctcttggagctgcccctgctcctgagcatgctgggtgccgtcctctgggtgaacagacctcagagaagctctagaagcaggcagaattggcccaagggtgagaaccagtagcatctgctgtccatcaaggccctgtgctgcaacagagcccctctgggggactggaatgacctcctgaccactccctcccgggctgctctctccacatctcctggaatcctttgtgagcctccttcagccttttccctgtgcccgatcctcatgtgtcacatgtgaacctgacggacatggacgccctgagctgtgagtccacgtctcatgtgcacgccccggccagctaagcctcgggccgtcagcaatacctctgagtgcccggatgccctccctgcacccttccatttctccaggagcctggcactgcttcctccaccgttttcacagggagaagcaggtctaggactcccctgcacctttgccaccataatggcccacactccctgggtccaggagtgtagaatatgcggctgcttccatttgctgagtgtgtcgattcaatgatgctttcaaactttaataaatgacaatgtgtaggccaaaaaaaaaaaaaaaaaaaaaaaaaaaaaaa

SEQ ID NO: 3571 - protein, 224 aa, Homo sapiens
MTARAWASWRSSALLLLLVPGYFPLSHPMTVAGPVGGSLSVQCRYEKEHRTLNKFWCRPPQILRCDKIVETKGSAGKRNGRVSIRDSPANLSFTVTLENLTEEDAGTYWCGVDTPWLRDFHDPIVEVEVSVFPAGTTTASSPQSSMGTSGPPTKLPVHTWPSVTRKDSPEPSPHPGSLFSNVRFLLLVLLELPLLLSMLGAVLWVNRPQRSSRSRQNWPKGENQ

SEQ ID NO: 3572 - DNA, 2525 bp, Homo sapiens
agtgccctaaagaggtactgggagcggcagcagatacaagatcagtgccctaaagaggtactgggatatcagggtcaccatggtgggagcggaagacaatttcaccataaacaggcagagctccacaacccaaggaattcctggaacagaaattggactccatgcccaaatctgctttctatggcatctgaagggaactaagaaactacacacgacctcctggggaaagatgggtataggggcttcatttgttcactctgaaaaaagttctacatcagaatggaaagacaacaattaagcatctaacacagaacctgtcagataacaaaaacttgattgctatttaatgaatatgggcatggatggatgaattggcgctgtcattttccctgacatgtctccttcctgagaacagagcgtctctgtctccaagccagccgctgtcattccagtgccttaaagctccagccacactcacctgggaggatgagaagcagcagagatggggacagccacatggtcctgtctcctctcctctccttggtgatcacaggtgtctggtgcccttcagggacttgaatccaagctcggaagtcaacaccgcaaacctactcgaatctccttcaagtctcttgctcacttcctgttacatctgtagctacttctctttttacatattaggagaaaagaggtgtcattctttgaaaagactaaggtacagtgtatgttgcaaggtgtgcccaaacttttgtgcatgtggaaaagaaaatgtgtccgggactggtcaggtttgcacgggagtgcacgtaggagccaaggagcaggaggagccaggaggaacccaagcattgaggagctgcgggatctactgcctggaggagaggacggacaaggccagccatgaggagtgcagggagaggagcactttgggaagaccacagtgcacaggactcacacccagccttgctggagaaagcccatgccccaggcttcttccaggcagccccactgtaagacatctcattgcctcttcctgccctgggctgtctgacccactgccccttcccccaggaacacttccactgggatcatgagtcactctgaagccactctgaaatcactctgaagccaaagctgggctcagtggggaaggtcaggaatggagaaattgccttttctcgttagcctcctcttgccctgatttcatcctccctatccctgcacactttcccctggctgctgttgtaatctacttgttctgctgacgcccgaactgacttctttcccggtctctccccactttctttagatggtcccttccctctttctctccctttccctcctgaatcgattcattttttctctcctgttttatattttccatatctgtgggctttgttctacatttggggagctttttatattgtttatttcatgcttgtactttcccttccaatccttggatcaaatattgattttagagactgtatttttatttcgaaaagtttttttggttctttgattactgatgttttcaaactctcttctgttccttgaactatatccctccactcagtggtcacatctttgttttgttgtctgcttcttctatattatgagccttcctcaagtgtctgctgattcttggttatccaatcatagttgagaacaagataaagtgtagctaactgagacctcagagtatgtaggagtaaatagtatataaaatagctctggtggctcatgcctgtaatccagcactttgggaggccaaggcggacagaccacctgaggtcaggagttcgaaaccagcctggccaacatggagaaaccccatctctactaaaaatacaaaaattagccaggtggtggcacacgcctgtaatcccagctactcaggaggctgaggcaggagaatcgcctgaacctgggaggtggagattgcagtgagcccagattgcaccactgctctctagcctgggcaaaaaaactagttccaaaaaagacacttgtacacgcatgtttatagcagcacaatttgcgattgaaaacatagggaaccagcctaaatgcccatcaagcaatgagtggataaagacaatgcggtgtacatatacaccatggaatactattcagccacaaaaaggaacaaaataatggcattcacagcaacctggatggagttggagatcattattctaagtgaaataactcaggaatggagaaccaaatattgtacatcctcacttataagtgggagctgcgctatgaagatacaaaggcacaagaatgatacaatggattttggggacttaggggaaaggatgcaggggatgagggataaaaaaccatacattgggtacagtgtacactgctccagtgaagggtgcaccaaaatctcagaagtcactgctaaagaccttatccttgtaaccaaaagccatctgctccccaaaaactattgaaataaaataaaatataaaaagaaagagaaagaaaagaaaatagttccaatttatcatgcc

SEQ ID NO: 3573 - protein, 243 aa, Homo sapiens
MDELALSFSLTCLLPENRASLSPSQPLSFQCLKAPATLTWEDEKQQRWGQPHGPVSSPLLGDHRCLVPFRDLNPSSEVNTANLLESPSSLLLTSCYICSYFSFYILGEKRCHSLKRLRYSVCCKVCPNFCACGKENVSGTGQVCTGVHVGAKEQEEPGGTQALRSCGIYCLEERTDKASHEECRERSTLGRPQCTGLTPSLAGESPCPRLLPGSPTVRHLIASSCPGLSDPLPLPPGTLPLGS

SEQ ID NO: 3574 - DNA, 739 bp, Homo sapiens
gacctagatttgctgaggacggaagccaaggagacaggaacatgtggctgctcccagctctactccttctctgcctctcaggctgtttgtctctgacgggccccggctctgtgactggcactgcgggggactctctgacagtgtggtgtcagtatgagagcatgtacaagggatataacaagtactggtgccgaggacagtacgacacgtcatgtgagagcattgtggagaccaagggagaagagaaggtggagaggaatggccgcgtgtccatcagagaccacccggaggctctcgccttcactgtgaccatgcagaacctcaatgaagatgatgctggatcttactggtgcaaaattcagacagtgtgggtcctggattcatggtcacgcgatccctcggacctggttagggtgtatgtttccccagcaattacaaccccaaggaggaccacacatccagccacacctcccatcttcctggtggtgaaccctgggcgaaacctcagcaccggggaggtgttgacccaaaattcagggttccggctcagcagccctcacttcctgctcgtggtccttctgaagctgcccctgctcctgagcatgctgggtgctgtcttctgggtgaacaggcctcagtgggctcctcctggaagatagagccaggctgacccgaagccctgcagagccccatccccaggagtgccccgtgcagggagtcaacctttcagactggatgc

SEQ ID NO: 3575 - protein, 205 aa, Homo sapiens
MWLLPALLLLCLSGCLSLTGPGSVTGTAGDSLTVWCQYESMYKGYNKYWCRGQYDTSCESIVETKGEEKVERNGRVSIRDHPEALAFTVTMQNLNEDDAGSYWCKIQTVWVLDSWSRDPSDLVRVYVSPAITTPRRTTHPATPPIFLVVNPGRNLSTGEVLTQNSGFRLSSPHFLLVVLLKLPLLLSMLGAVFWVNRPQWAPPGR

SEQ ID NO: 3576 - DNA, 1749 bp, Homo sapiens
tgcgctctccttcgcctgcgggccggcactgctcacctctcgtccagggacatgacgggcacgccaggcgccgttgccacccgggatggcgaggcccccgagcgctccccgccctgcagtccgagctacgacctcacgggcaaggtgatgcttctgggagacacaggcgtcggcaaaacatgtttcctgatccaattcaaagacggggccttcctgtccggaaccttcatagccaccgtcggcatagacttcaggaacaaggtggtgactgtggatggcgtgagagtgaagctgcagatctgggacaccgctgggcaggaacggttccgaagcgtcacccatgcttattacagagatgctcaggccttgcttctgctgtatgacatcaccaacaaatcttctttcgacaacatcagggcctggctcactgagattcatgagtatgcccagagggacgtggtgatcatgctgctaggcaacaaggcggatatgagcagcgaaagagtgatccgttccgaagacggagagaccttggccagggagtacggtgttcccttcctggagaccagcgccaagactggcatgaatgtggagttagcctttctggccatcgccaaggaactgaaataccgggccgggcatcaggcggatgagcccagcttccagatccgagactatgtagagtcccagaagaagcgctccagctgctgctccttcatgtgaatcccagggggcagagaggaggctctggaggcacacaggatgcagccttccccctcccaggcctggcttattccaagaggctggtcttgaattcctgagctcaagcaacctgccggcctcggcctcccaaagtactgggattacacgcagaaggcaccatgcccaggctagatgtgtcttatcccaatcctttggcaggcatgcagctccacaggcgatttcttcaagcagctgaagtgtttagccctcctgggttaagagccagataaggagaaatccctttcctaggtttggaatgtgttgtgaaaaaaaagagaaatccctggctcctggagctggtgggagacaagattaagcaaacctcccctgacatgtatccctttgaccccaagctctgcctcctccctgaccacccatgccctttcctttaacttctcaaacagataccagggcctaaactgctttacctcccctcctactgagtcaggttaggtggtgggaggtcacccatttccgagttaaaccaatgcaatatgagtaaaacaaagtcatgtgggtatgtctggggtagagagaggggtagcaagttcatgtgtcctccttggtcacatatctcccaaagctccgatccctgccatgggaagtggacaggaaacatgaggtcatgacctgcaggcatctttactgcagctctgccggcctggagggggagagggggaggaagaagtatgcgctgcacatttctgaggctactgcatttgctttcaaggcagaaatcttgctctgagcagtcagcggctccagtttgggcccgataaggaagttctccgtggcctccctcaggcagagcagggaggaggctgacattgccagtctcttctggggcccaaggcaggttgcaggagatccaatcccatagacagctctgggcctcttgcatttgagtttttcagaattaaactgcagtattttggaaagcaaaaaaaaaaaaaaaaaaaaaaaaaaaaaaaaaaaaaaaaaaaaaaa

SEQ ID NO: 3577 - protein, 223 aa, Homo sapiens
MTGTPGAVATRDGEAPERSPPCSPSYDLTGKVMLLGDTGVGKTCFLIQFKDGAFLSGTFIATVGIDFRNKVVTVDGVRVKLQIWDTAGQERFRSVTHAYYRDAQALLLLYDITNKSSFDNIRAWLTEIHEYAQRDVVIMLLGNKADMSSERVIRSEDGETLAREYGVPFLETSAKTGMNVELAFLAIAKELKYRAGHQADEPSFQIRDYVESQKKRSSCCSFM

SEQ ID NO: 3578 - DNA, 1972 bp, Homo sapiens
tgcgctctccttcgcctgcgggccggcactgctcacctctcgtccagggacatgacgggcacgccaggcgccgttgccacccgggatggcgaggcccccgagcgctccccgccctgcagtccgagctacgacctcacgggcaaggtgatgcttctgggagacacaggcgtcggcaaaacatgtttcctgatccaattcaaagacggggccttcctgtccggaaccttcatagccaccgtcggcatagacttcaggaacaaggtggtgactgtggatggcgtgagagtgaagctgcagatctgggacaccgctgggcaggaacggttccgaagcgtcacccatgcttattacagagatgctcaggccttgcttctgctgtatgacatcaccaacaaatcttctttcgacaacatcagggcctggctcactgagattcatgagtatgcccagagggacgtggtgatcatgctgctaggcaacaaggcggatatgagcagcgaaagagtgatccgttccgaagacggagagaccttggccagggagtacggtgttcccttcctggagaccagcgccaagactggcatgaatgtggagttagcctttctggccatcgccaaggaactgaaataccgggccgggcatcaggcggatgagcccagcttccagatccgagactatgtagagtcccagaagaagcgctccagctgctgctccttcatgtgaatcccagggggcagagaggaggctctggaggcacacaggatgcagccttccccctcccaggcctggcttattccaagaggctgagccaatggggagaaagatggaggactcactgcacagccgcttcctagcagggagctatactccaactcctacttgagttcctgcggtctccccgcatccacagggagggtaaaacacttagcttttattttaatagtacataatttaataccaaaaaaggcgcctggatccccaaaaaaccgaggctgggagctagtggcccttttgctttctaggacttggggggccggccctccctcctaagcataacaaaggtggtgttgctccagctcagccccaggggacacagatgcactttgggggtgagggcaggtaatgactccatcgcaccctcagttcagctggacagaggctcaggtgaccccagccttcactgtctcccgctctccaggagcttatcttcgccccatctcccaaataagtgggcccttgtgctgtgaggaagaccaaagcctcagggaagataagagatatggagatgggagggggaggacaaggggcagagagtagggtctagctggctatctctggccttactaacacccccctggaggcatgccccttttctccagcacacaagcacattggggcacctggaaatattggttccaggctcctgttctctggacttcagatcctgggggagcccctcccccccctgaatccctggcttagctaccttcctgcctgtgcacctaaaaacctcaggtcagaactaggaaaagagttttgtttttatttttttgaaatggagtctcgttctgtcgcccaggctgaggtgcagtagtgcaatctccgctcactacaacctccactccctggggctcaagcgatcctcccacctcagccgccgaagtagctgggactataggtgtgtaccatcacacctggctaatttttgtattttttgtagacacagggtttcgccatgttgcccaggctggtcttgaattcctgagctcaagcaacctgccggcctcggcctcccaaagtactgggattacacgcagaaggcaccatgcccaggctagatgtgtcttatcccaatcctttggcaggcatgcagctccacaggcgatttcttcaagcagctgaagtgtttagccctcctgggttaagagccagataaggagaaatccctttcctaggtttggaatgtgttgtg

SEQ ID NO: 3579 - protein, 223 aa, Homo sapiens; identical to SEQ ID NO: 3577

SEQ ID NO: 3580 - DNA, 1776 bp, Homo sapiens
ggagatgcccgttcgctcgggatcaggaacggtgagctcctgggaccgcaatgccctgagaacgcagccgggtgctgagcctccggagtccggtagctgaatgaaatacgcagggatcaccagccggacccaaatcttgcgtccctgccagcatcctggagtcctaagaggcagggattggagcggacaggatctcagaactctggtcccgggcgcacaacggcggagtcgctgttcctggtgctgaaacgctcagtcctggaagaacgtggccgcctgcccgcctggtaccgcgccgcggccgctgcggggaactgtccagtgctgaaaacggatgcggcccggcccgcagagctcagacccaagcctgccgcacccagcggagctcgaaccgagctcctggaagcgctgacgcagagcgcagggagagccggagcggcgagctccaagcctggcatggacctgcagagacccgattcctaccagggaggagctggccctgacttcaacgaccacgtcctgcataagaccatcctggtgggtgacagtggtgtgggaaagacgtctctgctggttcagttcgatcagggcaagttcatccccggctccttctcggccactgtgggcatcggattcacgaacaaggtggtgactgtggatggcgtgagagtgaagctgcagatctgggacaccgctgggcaggaacggttccgaagcgtcacccatgcttattacagagatgctcaggccttgcttctgctgtatgacatcaccaacaaatcttctttcgacaacatcagggcctggctcactgagattcatgagtatgcccagagggacgtggtgatcatgctgctaggcaacaaggcggatatgagcagcgaaagagtgatccgttccgaagacggagagaccttggccagggagtacggtgttcccttcctggagaccagcgccaagactggcatgaatgtggagttagcctttctggccatcgccaaggaactgaaataccgggccgggcatcaggcggatgagcccagcttccagatccgagactatgtagagtcccagaagaagcgctccagctgctgctccttcatgtgaatcccagggggcagagaggaggctctggaggcacacaggatgcagccttcccccacccatgccctttcctttaacttctcaaacagataccagggcctaaactgctttacctcccctcctactgagtcaggttaggtggtgggaggtcacccatttccgagttaaaccaatgcaatatgagtaaaacaaagtcatgtgggtatgtctggggtagagagaggggtagcaagttcatgtgtcctccttggtcacatatctcccaaagctccgatccctgccatgggaagtggacaggaaacatgaggtcatgacctgcaggcatctttactgcagctctgccggcctggagggggagagggggaggaagaagtatgcgctgcacatttctgaggctactgcatttgctttcaaggcagaaatcttgctctgagcagtcagcggctccagtttgggcccgataaggaagttctccgtggcctccctcaggcagagcagggaggaggctgacattgccagtctcttctggggcccaaggcaggttgcaggagatccaatcccatagacagctctgggcctcttgcatttgagtttttcagaattaaactgcagtattttggaaagcaaaaaaaaaaaaaaaaaaaaaaaaaaaaaaaaaaaaaaaaaaaaaaa

SEQ ID NO: 3581 - protein, 216 aa, Homo sapiens
MDLQRPDSYQGGAGPDFNDHVLHKTILVGDSGVGKTSLLVQFDQGKFIPGSFSATVGIGFTNKVVTVDGVRVKLQIWDTAGQERFRSVTHAYYRDAQALLLLYDITNKSSFDNIRAWLTEIHEYAQRDVVIMLLGNKADMSSERVIRSEDGETLAREYGVPFLETSAKTGMNVELAFLAIAKELKYRAGHQADEPSFQIRDYVESQKKRSSCCSFM

SEQ ID NO: 3582 - DNA, 1794 bp, Homo sapiens
aagttcaagggcgagagtgagtaccagcagaaggctgggagtctgtagtttgttcctgctgccaggctccactgaggggaacggggacctgtctgaagagaagatgcccctgctgacactctacctgctcctcttctggctctcaggctactccattgtcactcaaatcaccggtccaacaacagtgaatggcttggagcggggctccttgaccgtgcagtgtgtttacagatcaggctgggagacctacttgaagtggtggtgtcgaggagctatttggcgtgactgcaagatccttgttaaaaccagtgggtcagagcaggaggtgaagagggaccgggtgtccatcaaggacaatcagaaaaaccgcacgttcactgtgaccatggaggatctcatgaaaactgatgctgacacttactggtgtggaattgagaaaactggaaatgaccttggggtcacagttcaagtgaccattgacccagcaccagtcacccaagaagaaactagcagctccccaactctgaccggccaccacttggacaacaggcacaagctcctgaagctcagtgtcctcctgcccctcatcttcaccatattgctgctgcttttggtggccgcctcactcttggcttggaggatgatgaagtaccagcagaaagcagccgggatgtccccagagcaggtactgcagcccctggagggcgacctctgctatgcagacctgaccctgcagctggccggaacctccccgcaaaaggctaccacgaagctttcctctgcccaggttgaccaggtggaagtggaatatgtcaccatggcttccttgccgaaggaggacatttcctatgcatctctgaccttgggtgctgaggatcaggaaccgacctactgcaacatgggccacctcagtagccacctccccggcaggggccctgaggagcccacggaatacagcaccatcagcaggccttagcctgcactccaggctccttcttggaccccaggctgtgagcacactcctgcctcatcgaccgtctgccccctgctcccctcatcaggaccaacccggggactggtgcctctgcctgatcagccagcattgcccctagctctgggttgggcttggggccaagtctcagggggcttctaggagttggggttttctaaacgtcccctcctctcctacatagttgaggagggggctagggatatgctctggggctttcatgggaatgatgaagatgataatgagaaaaatgttatcattattatcatgaagtaccattatcgtaatacaatgaacctttatttattgcctaccacatgttatgggctgaataatggcccccaaagatatctgtgtcctaatcctcagaacctgtgactgttaccttctgtggcagaaagggacagtgcagatgtatgtaagttaaggactttgagatagagaggttattcttgctgattcaggtgggcccaaaatatcaccacaagggtcctcataagaaagaggccagaaggtcaaagaggtagagacaaagtgatgatggaagtggacgtgggtgtgacgtgagcaggggccatgaatgccgcagccttcagatgccagaaagggaaaggaatggattcccctgcctggagcctccaaaagaaaccagccctgcccacgccttgacttgagcccattgaaactgatcttgagctcctggcctccagaattgcaggagaataaatttgtgttgtttttaatgagccaaaaaaaaaaaaaaaaaaaaaaaaaaaaaaaaaaaa

SEQ ID NO: 3583 - protein, 290 aa, Homo sapiens
MPLLTLYLLLFWLSGYSIVTQITGPTTVNGLERGSLTVQCVYRSGWETYLKWWCRGAIWRDCKILVKTSGSEQEVKRDRVSIKDNQKNRTFTVTMEDLMKTDADTYWCGIEKTGNDLGVTVQVTIDPAPVTQEETSSSPTLTGHHLDNRHKLLKLSVLLPLIFTILLLLLVAASLLAWRMMKYQQKAAGMSPEQVLQPLEGDLCYADLTLQLAGTSPQKATTKLSSAQVDQVEVEYVTMASLPKEDISYASLTLGAEDQEPTYCNMGHLSSHLPGRGPEEPTEYSTISRP

SEQ ID NO: 3584 - DNA, 2000 bp, Homo sapiens
cttggcacgagggattggtctgtgctcctctctcggctcctcgcggctcgcggcggccgacggttcctgggacacctgcttgcttggcccgtccggcggctcagggcttctctgctgcgctcccggttcgctggacgggaagaagggctgggccgtcccgtcccgtccccatcggaaccccaagtcgcgccgctgacccgtcgcagggcgagatgagcgcggacgcagcggccggggcgcccctgccccggctctgctgcctggagaagggtccgaacggctacggcttccacctgcacggggagaagggcaagttgggccagtacatccggctggtggagcccggctcgccggccgagaaggcggggctgctggcgggggaccggctggtggaggtgaacggcgaaaacgtggagaaggagacccaccagcaggtggtgagccgcatccgcgccgcactcaacgccgtgcgcctgctggtggtcgaccccgagacggacgagcagctgcagaagctcggcgtccaggtccgagaggagctgctgcgcgcccaggaagcgccggggcaggccgagccgccggccgccgccgaggtgcagggggctggcaacgaaaatgagcctcgcgaggccgacaagagccacccggagcagcgcgagcttcggcctcggctctgtaccatgaagaagggccccagtggctatggcttcaacctgcacagcgacaagtccaagccaggccagttcatccggtcagtggacccagactccccggctgaggcttcagggctccgggcccaggatcgcattgtggaggtgaacggggtctgcatggaggggaagcagcatggggacgtggtgtccgccatcagggctggcggggacgagaccaagctgctggtggtggacagggaaactgacgagttcttcaagaaatgcagagtgatcccatctcaggagcacctgaatggtcccctgcctgtgcccttcaccaatggggagatacagaaggagaacagtcgtgaagccctggcagaggcagccttggagagccccaggccagccctggtgagatccgcctccagtgacaccagcgaggagctgaattcccaagacagccccccaaaacaggactccacagcgccctcgtctacctcctcctccgaccccatcctagacttcaacatctccctggccatggccaaagagagggcccaccagaaacgcagcagcaaacgggccccgcagatggactggagcaagaaaaacgaactcttcagcaacctctgagcgccctgctgccacccagtgactggcagggccgagccagcattccaccccacctttttccttctccccaattactcccctgaatcaatgtacaaatcagcacccacatcccctttcttgacaaatgatttttctagagaactatgttcttccctgactttagggaaggtgaatgtgttcccgtcctcccgcagtcagaaaggagactctgcctccctcctcctcactgagtgcctcatcctaccgggtgtccctttgccaccctgcctgggacatcgctggaacctgcaccatgccaggatcatgggaccaggcgagagggcaccctcccttcctcccccatgtgataaatgggtccagggctgatcaaagaactctgactgcagaactgccgctctcagtggacagggcatctgttatcctgaaccttggcagacacgtcttgttttcatttgattttgttaagagtgcagtattgcagagtctagaggaatttttgtttccttgattaacatgattttcctggttgttaatccagggcatggcagtggcctcagccttaaacttttgttcctactcccaccctcagcgaactgggcagcacggggagggtttggctacccctgcccatccctgagccaggtaccaccattgtaaggaaacactttcagaaattcagctggttcctccaaaccaaaaaaaaaaaaaaaa

SEQ ID NO: 3585 - protein, 358 aa, Homo sapiens
MSADAAAGAPLPRLCCLEKGPNGYGFHLHGEKGKLGQYIRLVEPGSPAEKAGLLAGDRLVEVNGENVEKETHQQVVSRIRAALNAVRLLVVDPETDEQLQKLGVQVREELLRAQEAPGQAEPPAAAEVQGAGNENEPREADKSHPEQRELRPRLCTMKKGPSGYGFNLHSDKSKPGQFIRSVDPDSPAEASGLRAQDRIVEVNGVCMEGKQHGDVVSAIRAGGDETKLLVVDRETDEFFKKCRVIPSQEHLNGPLPVPFTNGEIQKENSREALAEAALESPRPALVRSASSDTSEELNSQDSPPKQDSTAPSSTSSSDPILDFNISLAMAKERAHQKRSSKRAPQMDWSKKNELFSNL

SEQ ID NO: 3586 - DNA, 1943 bp, Homo sapiens
gggaacgtggctggttggaggaggtagatcaccctttctgcgggggacgatttcgtcggtggtaggctgctaccatgaggttgaatcagaacaccttgctgctggggaagaaggtggtccttgtaccctacacctcggagcatgtgcccagcaggtaccacgagtggatgaaatcagaggagctgcagcgtttgacagcctcggagccgctgaccctggagcaggagtatgccatgcagtgcagctggcaggaagatgcagacaagtgtaccttcattgtgctggatgccgagaagtggcaggcccagccaggcgccaccgaagagagctgcatggtgggagatgtgaacctcttcctcacagatctagaagacctcaccttgggggagatcgaggtcatgattgcagagcccagctgcaggggtaagggccttggcactgaggccgttctcgcgatgctgtcttacggagtgaccacgctaggtctgaccaagtttgaggctaaaattgggcaaggaaatgaaccaagcatccggatgttccagaaacttcactttgagcaggtggctacgagcagtgtttttcaggaggtgaccctcagactgacagtgagtgagtccgagcatcagtggcttctggagcagaccagccacgtggaagagaagccttacagagatgggtcggcagagccctgctgatggctgggccttgtgggcagccactctgtgtgagcagggtgttgggcccatacacttcaaagaccagagccctgcactgggagagtgctcctggcccaggctgggaatcacctttcgaggcccttcagactctggcggggcttgctgtggcctccctccagctagtggtgtggctgagcagactccagggccagggccagttcccttctcccctcccggccaaacccagacccagactctaggaagctggaatggagggcagggatccatgggagatgtcgggatgaaggtgggagctggaggtgcagggggacctggaacatggatgggagtggacaggcctttctccttagaggccagaggtgctgccctggctgggagtgaagctccaggcactaccagctttcctgattttcccgtttggtccatgtgaagagctaccacgagccccagcctcacagtgtccactcaagggcagcttggtcctcttgtcctgcagaggcaggctggtgtgaccctgggaacttgacccgggaacaacaggtggtccagagtgagtgtggcctggcccctcaacctagtgtccgtcctcctctctcctggagccagtcttgagtttaaaggcattagtgttagatacagctccttgtggctggaaaacacccctctgctgataaagctcagggggcactgaggaagcagaggccccttgggggtgccctcctgaagagagcgtcaggccatcagctctgtccctctggtgctcccacgtctgttcctcaccctccatctctgggagcagctgcacctgactggccacgcgggggcagtggaggcacaggctcagggtggccgggctacctggcaccctatggcttacaaagtagagttggcccagtttccttccacctgaggggagcactctgactcctaacagtcttccttgccctgccatcatctggggtggctggctgtcaagaaaggccgggcatgctttctaaacacagccacaggaggcttgtagggcatcttccaggtggggaaacagtcttagataagtaaggtgacttgcctaaggcctcccagcacccttgatcttggagtctcacagcagactgcatgtgaacaactggaaccgaaaacatgcctcagtataaaacaaacattataaaacgaaaaaaaaaaaaaaaaaaaaaaaaaaaaaaaaaaaaaaaaaaaaaaaaaaaaaaaaaaaaaaaaaaaaaa

SEQ ID NO: 3587 - protein, 207 aa, Homo sapiens
MRLNQNTLLLGKKVVLVPYTSEHVPSRYHEWMKSEELQRLTASEPLTLEQEYAMQCSWQEDADKCTFIVLDAEKWQAQPGATEESCMVGDVNLFLTDLEDLTLGEIEVMIAEPSCRGKGLGTEAVLAMLSYGVTTLGLTKFEAKIGQGNEPSIRMFQKLHFEQVATSSVFQEVTLRLTVSESEHQWLLEQTSHVEEKPYRDGSAEPC

SEQ ID NO: 3588 - DNA, 3413 bp, Homo sapiens
agcgggactggcgggagacggcggcttgcgagctggctgtgctgcaggagctgcggcagccgccgtccttgcacctaaggaacctctgctgccagcccttcctcacttttggaaatggcgggtgaaattacagagaccggggaactctactcttcctacgttgggctggtgtacatgtttaacctcatcgtgggcacgggcgcactcaccatgcccaaggcattcgccactgccgggtggcttgtcagcctcgtcctgctggtgttcctgggcttcatgagcttcatgaccaccacctttgtgatagaggccatggctgcagccaacgcgcagctccactggaagaggatggagaacctcaaggaggaggaagatgacgactcctccacagcctcagacagcgatgttctcatccgggacaactacgagcgggcagagaagcggcccatcctgtctgtgcagagacgtggatctcccaacccgtttgaaatcacagaccgggtggaaatgggacaaatggcctccatgttcttcaataaagtgggggtcaacttgttctatttctgcatcatcgtttatctgtatggagacctcgccatctatgctgctgccgtgcccttctccctcatgcaggtgacctgcagcgccactggcaatgactcctgcggtgtggaagcagacaccaaatacaatgacactgaccggtgttgggggcccctgcgccgagtggacgcctaccgcatctacttggcgatcttcactctcctcctcggaccgttcaccttctttgacgtccagaagaccaagtacctgcagatcctgacctctctgatgagatggatcgctttcgccgtcatgattgtgctggccctgatccgcatcgggcacggacaaggggaggggcacccgcccctggctgacttctcgggggtccggaacctgtttggggtgtgcgtctactccttcatgtgccagcactctctgccatccctcattacccccgtctcctccaagcgccacctcacaaggctggtgttcctggactacgtgctgatcctggccttctacggcctcctctccttcaccgccatcttctgcttccgcggcgacagcctcatggacatgtacaccctcaacttcgcgcgctgtgacgtcgtgggcctggccgctgtgcgctttttcctgggcctcttccccgtcttcaccatcagcaccaacttccccatcattgccgtgaccctgcgcaacaactggaagacactcttccaccgcgagggcggcacgtacccgtgggtggtggaccgcgtcgtgtttcccaccatcaccctggtgccgcctgtgctggtggccttctgcacccacgacctggagtccctggtgggcatcacaggggcctacgcgggcaccggcatccagtacgtcatccccgccttcctggtgtaccactgccgcagggacacccagctggcctttggctgtggggtcagcaacaagcacaggtcccctttccgccacaccttctgggtgggcttcgtgctgctctgggctttctcctgcttcattttcgtcacggccaatatcatcctcagcgagaccaagctctgatggcaggacaggcaggtctagtgacaggaggcataggggccccagccccacccctcgcccgcagagcccagatttagttgctcccaggtcttcatggggcaggtgggactgtggctctaggggaaaccccctgtccagctggggttgttctccccacccaccttccacccagtctgcacctgtcctcactcccccgggcagctctcccaccaggtccttctgcctgggtgacgcgtggctgctcccaagttctaagactcattactggaatcacacctctcccacatcttccaacacgcttcacccccaaccctacttccagggcgggctactccctgcacaatgggagatgcagtgctggcactgccatcatttgtcccagacccatgcccctcccctctcctgccccatcctgcgtccttgtctaagaaacctccactagcagctgctgcctcttcagaggcgaatcccaggctggaagtatcctagccaggtctgcctgtgacggcagggcccaccctcccaccaggcctgggaggcggtaggtgccacctcagagagggcctggctggccccatgacaagaacaagaagtgctaactggtaccagagtccccagatagagctgcgagggccctcgctgtgggcgcgagctccggagtagcaggctggatggagcatcccttctacagggacacggccgcctgccagctgggcctaaagtctggagcttgtctctgaaagggaccgtctgctgccctcgctgccccactggagccctcagggcctcctacagtgcaggtggtcctactagagggaagccatccccacctggcacctcagcggcttggcagtgacatggcagtgggagggctctgaggttcccaccctgacaatggtcaggctgcccgtgctcccactccaacactaaaagcggctcccttaggggctgagcgtgggtgctcagtgttcacgctatatcccttgggcaatgtggggttggatggggcccccacttccattcccatggaaggaggccaggtccccagccacctcccactcagccatgcacgcacttgctgggctggcctcctgggaaacacaggtgactcgaatgaactctgcattttcaacgtgccttctactgcttcaggacctgggggtccccctgaccctcactggcttgcccccagccctgggcctggccccacctgtcctggagcccagagcccctggcctggagctgcctctctggggtgggtctcaggccccacccctccctcttttgagttcagtgccttgctcagcccctcccctgtatctcagcgtcttgagacctctgacagagcgacgatgtagggtctcccggggcccaaggtggtctcagggtcaggggtgggatttgcagggaactcggggagcccacgggctgcgccacctctgccctggcagctgaagcctgggagagtccctgcgtggtgtaattggcctcagcccgctttctctgtgccgtcgcacctcagtgtttctcatagcttgtccccacgtgtcactttccatccacgggaaaaacaaatgccccttctccatctatcattgcgacttcctcccaggaggcctctcaggttgggtagagcaggggcctgcagtggtcaggccaagagcaaggaagacctggctgccccactgtggctgaaaactcaaaacatctggaactacccttctccaattacgttccctcttgcttaaagacaaagctaattaaatcatcctgccacccgaggctccaaaccaaaaaaaaaaaaaaaa

SEQ ID NO: 3589 - protein, 496 aa, Homo sapiens
MAGEITETGELYSSYVGLVYMFNLIVGTGALTMPKAFATAGWLVSLVLLVFLGFMSFMTTTFVIEAMAAANAQLHWKRMENLKEEEDDDSSTASDSDVLIRDNYERAEKRPILSVQRRGSPNPFEITDRVEMGQMASMFFNKVGVNLFYFCIIVYLYGDLAIYAAAVPFSLMQVTCSATGNDSCGVEADTKYNDTDRCWGPLRRVDAYRIYLAIFTLLLGPFTFFDVQKTKYLQILTSLMRWIAFAVMIVLALIRIGHGQGEGHPPLADFSGVRNLFGVCVYSFMCQHSLPSLITPVSSKRHLTRLVFLDYVLILAFYGLLSFTAIFCFRGDSLMDMYTLNFARCDVVGLAAVRFFLGLFPVFTISTNFPIIAVTLRNNWKTLFHREGGTYPWVVDRVVFPTITLVPPVLVAFCTHDLESLVGITGAYAGTGIQYVIPAFLVYHCRRDTQLAFGCGVSNKHRSPFRHTFWVGFVLLWAFSCFIFVTANIILSETKL

SEQ ID NO: 3590 - DNA, 4298 bp, Homo sapiens
catcgcgagtgtccttgagccgcgggtgacggtggctctcgctgctcgcgccccctcctcccgcggggggagcctgatgccacgttccctatgaattatttatcgccggcctaaaaataccccgaacttcacagcccgagtgaccctccggtggacatgggtggggccctggggccggccctgttgctcacctcgctcttcggtgcctgggcagggctgggtccggggcagggcgagcagggcatgacggtggccgtggtgtttagcagctcagggccgccccaggcccagttccgtgcccgcctcaccccccagagcttcctggacctacccctggagatccagccgctcacagttggggtcaacaccaccaaccccagcagcctcctcacccagatctgcggcctcctgggtgctgcccacgtccacggcattgtctttgaggacaacgtggacaccgaggcggtggcccagatccttgacttcatctcctcccagacccatgtgcccatcctcagcatcagcggaggctctgctgtggtcctcacccccaaggagccgggctccgccttcctgcagctgggcgtgtccctggagcagcagctgcaggtgctgttcaaggtgctggaagagtacgactggagcgccttcgccgtcatcaccagcctgcacccgggccacgcgctcttcctggagggcgtgcgcgccgtcgccgacgccagccacgtgagttggcggctgctggacgtggtcacgctggagctgggcccgggagggccgcgcgcgcgcacgcagcgcctgctgcgccagctcgacgcgcccgtgtttgtggcctactgctcgcgcgaggaggccgaggtgctcttcgccgaggcggcgcaggccggtctggtggggcccggccacgtgtggctggtgcccaacctggcgctgggcagcaccgatgcgccccccgccaccttccccgtgggcctcatcagcgtcgtcaccgagagctggcgcctcagcctgcgccagaaggtgcgcgacggcgtggccattctggccctgggcgcccacagctactggcgccagcatggaaccctgccagccccggccggggactgccgtgttcaccctgggcccgtcagccctgcccgggaggccttctacaggcacctactgaatgtcacctgggagggccgagacttctccttcagccctggtgggtacctggtccagcccaccatggtggtgatcgccctcaaccggcaccgcctctgggagatggtggggcgctgggagcatggcgtcctatacatgaagtaccccgtgtggcctcgctacagtgcctctctgcagcctgtggtggacagtcggcacctgacggtggccacgctggaagagcggccctttgtcatcgtggagagccctgaccctggcacaggaggctgtgtccccaacaccgtgccctgccgcaggcagagcaaccacaccttcagcagcggggacgtggccccctacaccaagctctgctgtaagggattctgcatcgacatcctcaagaagctggccagagtggtcaaattctcctacgacctgtacctggtgaccaacggcaagcatggcaagcgggtgcgcggcgtatggaacggcatgattggggaggtgtactacaagcgggcagacatggccatcggctccctcaccatcaatgaggaacgctccgagatcgtagacttctctgtaccctttgtggagacgggcatcagtgtgatggtggctcgcagcaatggcaccgtctccccctcggccttcttggagccatatagccctgcagtgtgggtgatgatgtttgtcatgtgcctcactgtggtggccatcaccgtcttcatgttcgagtacttcagccctgtcagctacaaccagaacctcaccagaggcaagaagtccgggggcccagctttcactatcggcaagtccgtgtggctgctgtgggcgctggtcttcaacaactcagtgcccatcgagaacccgcggggcaccaccagcaagatcatggttctggtctgggccttctttgctgtcatcttcctcgccagctacacggccaacctggccgccttcatgatccaagagcaatacatcgacactgtgtcgggcctcagtgacaagaagtttcagcggcctcaagatcagtacccacctttccgcttcggcacggtgcccaacggcagcacggagcggaacatccgcagtaactaccgtgacatgcacacccacatggtcaagttcaaccagcgctcggtggaggacgcgctcaccagcctcaagatggggaagctggatgccttcatctatgatgctgctgtcctcaactacatggcaggcaaggacgagggctgcaagctggtcaccattgggtctggcaaggtctttgctaccactggctacggcatcgccatgcagaaggactcccactggaagcgggccatagacctggcgctcttgcagttcctgggggacggagagacacagaaactggagacagtgtggctctcagggatctgccagaatgagaagaacgaggtgatgagcagcaagctggacatcgacaacatggcaggcgtcttctacatgctgctggtggccatggggctggccctgctggtcttcgcctgggagcacctggtctactggaagctgcgccactcggtgcccaactcatcccagctggacttcctgctggctttcagcaggggcatctacagctgcttcagcggggtgcagagcctcgccagcccaccgcggcaggccagcccggacctcacggccagctcggcccaggccagcgtgctcaagatgctgcaggcagcccgcgacatggtgaccacggcgggcgtaagcagctccctggaccgcgccactcgcaccatcgagaattggggtggcggccgccgtgcgcccccaccgtccccctgcccgaccccgcggtctggccccagcccatgcctgcccacccccgacccgcccccagagccgagccccacgggctggggaccgccagacgggggtcgcgcggcgcttgtgcgcagggctccgcagcccccgggccgccccccgacgccggggccgcccctgtccgacgtctcccgagtgtcgcgccgcccagcctgggaggcgcggtggccggtgcggaccgggcactgcgggaggcacctctcggcctccgagcggcccctgtcgcccgcgcgctgtcactacagctcctttcctcgagccgaccgatccggccgccccttcctcccgctcttcccggagctggaggacctgccgctgctcggtccggagcagctggcccggcgggaggccctgctgcacgcggcctgggcccggggctcgcgcccgcgtcacgcttccctgcccagctccgtggccgaggccttcgctcggcccagctcgctgcccgctgggtgcaccggccccgcctgcgcccgccccgacggccactcggcctgcaggcgcttggcgcaggcgcagtcgatgtgcttgccgatctaccgggaggcctgccaggagggcgagcaggcaggggcccccgcctggcagcacagacagcacgtctgcctgcacgcccacgcccacctgccattttgctggggggctgtctgtcctcaccttccaccctgtgccagccacggctcctggctctccggggcctgggggcctctggggcacaggggcaggactctggggctgggcacaggctacagagacagtgggggactggacgagatcagcagggtagcccgtgggacgcaaggcttcccgggaccctgcacctggagacggatctccagtctggagtcagaagtgtgagttatcagccactcaggctccgagccagctggattctctgcctgccactgtcagggttaagcggcaggcaggattgggcttttctggcttctaccatgaaatcctggccatgggaccccagtgacagatgatgtcttccatggtcatcagtgacctcagtagcctcaaatcatggtgagggctgggcttttgctgtcctcttctcacgcagagttctgccaggagggtgtgctgtgggggtcagactcctgaggctctcccttccctggggctagccagttactggtcatggctgctgtgggcatggaggctggaacttgtggttgaggcagggccatcccgatccttgctctacctggctagagtttcttctcatcagagcactgggacattaaacccaccttttcccagaaaaaaaaaaaaaaaaaaaaaaaaaaaaa

SEQ ID NO: 3591 - protein, 1233 aa, Homo sapiens
MGGALGPALLLTSLFGAWAGLGPGQGEQGMTVAVVFSSSGPPQAQFRARLTPQSFLDLPLEIQPLTVGVNTTNPSSLLTQICGLLGAAHVHGIVFEDNVDTEAVAQILDFISSQTHVPILSISGGSAVVLTPKEPGSAFLQLGVSLEQQLQVLFKVLEEYDWSAFAVITSLHPGHALFLEGVRAVADASHVSWRLLDVVTLELGPGGPRARTQRLLRQLDAPVFVAYCSREEAEVLFAEAAQAGLVGPGHVWLVPNLALGSTDAPPATFPVGLISVVTESWRLSLRQKVRDGVAILALGAHSYWRQHGTLPAPAGDCRVHPGPVSPAREAFYRHLLNVTWEGRDFSFSPGGYLVQPTMVVIALNRHRLWEMVGRWEHGVLYMKYPVWPRYSASLQPVVDSRHLTVATLEERPFVIVESPDPGTGGCVPNTVPCRRQSNHTFSSGDVAPYTKLCCKGFCIDILKKLARVVKFSYDLYLVTNGKHGKRVRGVWNGMIGEVYYKRADMAIGSLTINEERSEIVDFSVPFVETGISVMVARSNGTVSPSAFLEPYSPAVWVMMFVMCLTVVAITVFMFEYFSPVSYNQNLTRGKKSGGPAFTIGKSVWLLWALVFNNSVPIENPRGTTSKIMVLVWAFFAVIFLASYTANLAAFMIQEQYIDTVSGLSDKKFQRPQDQYPPFRFGTVPNGSTERNIRSNYRDMHTHMVKFNQRSVEDALTSLKMGKLDAFIYDAAVLNYMAGKDEGCKLVTIGSGKVFATTGYGIAMQKDSHWKRAIDLALLQFLGDGETQKLETVWLSGICQNEKNEVMSSKLDIDNMAGVFYMLLVAMGLALLVFAWEHLVYWKLRHSVPNSSQLDFLLAFSRGIYSCFSGVQSLASPPRQASPDLTASSAQASVLKMLQAARDMVTTAGVSSSLDRATRTIENWGGGRRAPPPSPCPTPRSGPSPCLPTPDPPPEPSPTGWGPPDGGRAALVRRAPQPPGRPPTPGPPLSDVSRVSRRPAWEARWPVRTGHCGRHLSASERPLSPARCHYSSFPRADRSGRPFLPLFPELEDLPLLGPEQLARREALLHAAWARGSRPRHASLPSSVAEAFARPSSLPAGCTGPACARPDGHSACRRLAQAQSMCLPIYREACQEGEQAGAPAWQHRQHVCLHAHAHLPFCWGAVCPHLPPCASHGSWLSGAWGPLGHRGRTLGLGTGYRDSGGLDEISRVARGTQGFPGPCTWRRISSLESEV

SEQ ID NO: 3592 - DNA, 1838 bp, Homo sapiens
atccacttgcaggttgctgctcccagccatggcttcgcgctgctggcgctggtggggctggtcggcgtggcctcggacccggctgcctcccgccgggagcaccccgagcttctgccaccatttctccacacaggagaagaccccccagatctgtgtggtgggcagtggcccagctggcttctacacggcccaacacctgctaaagcacccccaggcccacgtggacatctacgagaaacagcctgtgccctttggcctggtgcgctttggtgtggcgcctgatcaccccgaggtgaagaatgtcatcaacacatttacccagacggcccattctggccgctgtgccttctggggcaacgtggaggtgggcagggacgtgacggtgccggagctgcaggaggcctaccacgctgtggtgctgagctacggggcagaggaccatcgggccctggaaattcctggtgaggagctgccaggtgtgtgctccgcccgggccttcgtgggctggtacaacgggcttcctgagaaccaggagctggagccagacctgagctgtgacacagccgtgattctggggcaggggaacgtggctctggacgtggcccgcatcctactgaccccacctgagcacctggaggccctccttttgtgccagagaacggacatcacgaaggcagccctgggtgtactgaggcagagtcgagtgaagacagtgtggctagtgggccggcgtggacccctgcaagtggccttcaccattaaggagcttcgggagatgattcagttaccgggagcccggcccattttggatcctgtggatttcttgggtctccaggacaagatcaaggaggtcccccgcccgaggaagcggctgacggaactgctgcttcgaacggccacagagaagccagggccggcggaagctgcccgccaggcatcggcctcccgtgcctggggcctccgctttttccgaagcccccagcaggtgctgccctcaccagatgggcggcgggcagcaggtgtccgcctagcagtcactagactggagggtgtcgatgaggccacccgtgcagtgcccacgggagacatggaagacctcccttgtgggctggtgctcagcagcattgggtataagagccgccctgtcgacccaagcgtgccctttgactccaagcttggggtcatccccaatgtggagggccgggttatggatgtgccaggcctctactgcagcggctgggtgaagagaggacctacaggtgtcatagccacaaccatgactgacagcttcctcaccggccagatgctgctgcaggacctgaaggctgggttgctcccctctggccccaggcctggctacgcagccatccaggccctgctcagcagccgaggggtccggccagtctctttctcagactgggagaagctggatgccgaggaggtggcccggggccagggcacggggaagcccagggagaagctggtggatcctcaggagatgctgcgcctcctgggccactgagcccagccccagccccggcccccagcagggaagggatgagtgttgggaggggaagggctgggtccgtctgagtgggactttgcacctctgctgatcccggccggccctggcttggaggcttggctgctcttccagcgtctctcctccctcctggggaaggtcgcccttgcgcgcaaggttttagctttcagcaactgaggtaaccttagggacaggtggaggtgtgggccgatctaaccccttacccatctctctactgctggactgtggagggtcaccaggttgggaacatgctggaaataaaacagctgcaccc

SEQ ID NO: 3593 - protein, 497 aa, Homo sapiens
MASRCWRWWGWSAWPRTRLPPAGSTPSFCHHFSTQEKTPQICVVGSGPAGFYTAQHLLKHPQAHVDIYEKQPVPFGLVRFGVAPDHPEVKNVINTFTQTAHSGRCAFWGNVEVGRDVTVPELQEAYHAVVLSYGAEDHRALEIPGEELPGVCSARAFVGWYNGLPENQELEPDLSCDTAVILGQGNVALDVARILLTPPEHLEALLLCQRTDITKAALGVLRQSRVKTVWLVGRRGPLQVAFTIKELREMIQLPGARPILDPVDFLGLQDKIKEVPRPRKRLTELLLRTATEKPGPAEAARQASASRAWGLRFFRSPQQVLPSPDGRRAAGVRLAVTRLEGVDEATRAVPTGDMEDLPCGLVLSSIGYKSRPVDPSVPFDSKLGVIPNVEGRVMDVPGLYCSGWVKRGPTGVIATTMTDSFLTGQMLLQDLKAGLLPSGPRPGYAAIQALLSSRGVRPVSFSDWEKLDAEEVARGQGTGKPREKLVDPQEMLRLLGH

SEQ ID NO: 3594 - DNA, 1817 bp, Homo sapiens
atccacttgcaggttgctgctcccagccatggcttcgcgctgctggcgctggtggggctggtcggcgtggcctcggacccggctgcctcccgccgggagcaccccgagcttctgccaccatttctccacacaggagaagaccccccagatctgtgtggtgggcagtggcccagctggcttctacacggcccaacacctgctaaagcacccccaggcccacgtggacatctacgagaaacagcctgtgccctttggcctggtgcgctttggtgtggcgcctgatcaccccgaggtgaagaatgtcatcaacacatttacccagacggcccattctggccgctgtgccttctggggcaacgtggaggtgggcagggacgtgacggtgccggagctgcaggaggcctaccacgctgtggtgctgagctacggggcagaggaccatcgggccctggaaattcctggtgaggagctgccaggtgtgtgctccgcccgggccttcgtgggctggtacaacgggcttcctgagaaccaggagctggagccagacctgagctgtgacacagccgtgattctggggcaggggaacgtggctctggacgtggcccgcatcctactgaccccacctgagcacctggagagaacggacatcacgaaggcagccctgggtgtactgaggcagagtcgagtgaagacagtgtggctagtgggccggcgtggacccctgcaagtggccttcaccattaaggagcttcgggagatgattcagttaccgggagcccggcccattttggatcctgtggatttcttgggtctccaggacaagatcaaggaggtcccccgcccgaggaagcggctgacggaactgctgcttcgaacggccacagagaagccagggccggcggaagctgcccgccaggcatcggcctcccgtgcctggggcctccgctttttccgaagcccccagcaggtgctgccctcaccagatgggcggcgggcagcaggtgtccgcctagcagtcactagactggagggtgtcgatgaggccacccgtgcagtgcccacgggagacatggaagacctcccttgtgggctggtgctcagcagcattgggtataagagccgccctgtcgacccaagcgtgccctttgactccaagcttggggtcatccccaatgtggagggccgggttatggatgtgccaggcctctactgcagcggctgggtgaagagaggacctacaggtgtcatagccacaaccatgactgacagcttcctcaccggccagatgctgctgcaggacctgaaggctgggttgctcccctctggccccaggcctggctacgcagccatccaggccctgctcagcagccgaggggtccggccagtctctttctcagactgggagaagctggatgccgaggaggtggcccggggccagggcacggggaagcccagggagaagctggtggatcctcaggagatgctgcgcctcctgggccactgagcccagccccagccccggcccccagcagggaagggatgagtgttgggaggggaagggctgggtccgtctgagtgggactttgcacctctgctgatcccggccggccctggcttggaggcttggctgctcttccagcgtctctcctccctcctggggaaggtcgcccttgcgcgcaaggttttagctttcagcaactgaggtaaccttagggacaggtggaggtgtgggccgatctaaccccttacccatctctctactgctggactgtggagggtcaccaggttgggaacatgctggaaataaaacagctgca

SEQ ID NO: 3595 - protein, 491 aa, Homo sapiens
MASRCWRWWGWSAWPRTRLPPAGSTPSFCHHFSTQEKTPQICVVGSGPAGFYTAQHLLKHPQAHVDIYEKQPVPFGLVRFGVAPDHPEVKNVINTFTQTAHSGRCAFWGNVEVGRDVTVPELQEAYHAVVLSYGAEDHRALEIPGEELPGVCSARAFVGWYNGLPENQELEPDLSCDTAVILGQGNVALDVARILLTPPEHLERTDITKAALGVLRQSRVKTVWLVGRRGPLQVAFTIKELREMIQLPGARPILDPVDFLGLQDKIKEVPRPRKRLTELLLRTATEKPGPAEAARQASASRAWGLRFFRSPQQVLPSPDGRRAAGVRLAVTRLEGVDEATRAVPTGDMEDLPCGLVLSSIGYKSRPVDPSVPFDSKLGVIPNVEGRVMDVPGLYCSGWVKRGPTGVIATTMTDSFLTGQMLLQDLKAGLLPSGPRPGYAAIQALLSSRGVRPVSFSDWEKLDAEEVARGQGTGKPREKLVDPQEMLRLLGH

SEQ ID NO: 3596 - DNA, 4685 bp, Homo sapiens
gggagcgcggggagcgcgggccggcggcggcgagggaggacgggggcgcagacggccggcgcgcggcgcggctaccatgggcgtgcggtgagcagccgctcgggacgacttcctcggctgcgcggcgctcgcgcggagctccccggccggcggtgcgtccccacggtcaccatgaaagacgacttcgcagaggaggaggaggtgcaatccttcggttacaagcggtttggtattcaggaaggaacacaatgtaccaaatgtaaaaataactgggcactgaagttttctatcatattattatacattttgtgtgccttgctaacaatcacagtagccattttgggatataaagttgtagagaaaatggacaatgtcacaggtggcatggaaacatctcgccaaacctatgatgacaagctcacagcagtggaaagtgacctgaaaaaattaggtgaccaaactgggaagaaagctatcagcaccaactcagaactctccaccttcagatcagacattctagatctccgtcagcaacttcgtgagattacagaaaaaaccagcaagaacaaggatacgctggagaagttacaggcgagcggggatgctctggtggacaggcagagtcaattgaaagaaactttggagaataactctttcctcatcaccactgtaaacaaaaccctccaggcgtataatggctatgtcacgaatctgcagcaagataccagcgtgctccagggcaatctgcagaaccaaatgtattctcataatgtggtcatcatgaacctcaacaacctgaacctgacccaggtgcagcagaggaacctcatcacgaatctgcagcggtctgtggatgacacaagccaggctatccagcgaatcaagaacgactttcaaaatctgcagcaggtttttcttcaagccaagaaggacacggattggctgaaggagaaagtgcagagcttgcagacactggctgccaacaactctgcgttggccaaagccaacaacgacaccctggaggatatgaacagccagctcaactcattcacaggtcagatggagaacatcaccactatctctcaagccaacgagcagaacctgaaagacctgcaggacttacacaaagatgcagagaatagaacagccatcaagttcaaccaactggaggaacgcttccagctctttgagacggatattgtgaacatcattagcaatatcagttacacagcccaccacctgcggacgctgaccagcaatctaaatgaagtcaggaccacttgcacagatacccttaccaaacacacagatgatctgacctccttgaataataccctggccaacatccgtttggattctgtttctctcaggatgcaacaagatttgatgaggtcgaggttagacactgaagtagccaacttatcagtgattatggaagaaatgaagctagtagactccaagcatggtcagctcatcaagaattttacaatactacaaggtccaccgggccccaggggtccaagaggtgacagaggatcccagggaccccctggcccaactggcaacaagggacagaaaggagagaagggggagcctggaccacctggccctgcgggtgagagaggcccaattggaccagctggtccccccggagagcgtggcggcaaaggatctaaaggctcccagggccccaaaggctcccgtggttcccctgggaagcccggccctcagggccccagtggggacccaggccccccgggcccaccaggcaaagagggactccccggccctcagggccctcctggcttccagggacttcagggcaccgttggggagcctggggtgcctggacctcggggactgccaggcttgcctggggtaccaggcatgccaggccccaagggcccccccggccctcctggcccatcaggagcggtggtgcccctggccctgcagaatgagccaaccccggcaccggaggacaatagtaagtccaagccctccctccagccagggggacagggcagtgcatgtgcttgagactgagccaacccccagtgtgtggccccacccatgttatttttgtttttgtttttgttttgagacagggtctcactctgttgcccaggctggagtgcagtggcgtgatctcggctcactgcaacccccacatcccgggttcaagtgattctcctgccttagcctcccaggtagctgggaatacaagcgtgtgcccccacagccagctaatttttgtatttttagtagagaggggtttcacagtgttgggcagggtggtttcaaacttctggcctcaagtgatccacctacctagtttcccaaagtgctgggaatacaggtgtgaaccaccacgttttgtcccccggctgcatattatttaacagcaaaggcatcataggggttggcacaggagccctgctgccagaacaggcctccataccaggcatgtgtctctctctaaacgccattgggttttttagtgctcatttgttttatgtattatgtgtgtatgtatgggacagggtctcactctgtcacccaggctggaatgacgaagtgaagtagtgcaaacatagctcattgcagctttgacctcctgggcttaggtgatcttcccactcagactcctgcgtagctgggaccacaggggtatgccaccacacctggctaattttttattttcctttttgtagaaacagggtcttgctatgttgcccaggctggtcttgaactcctggcctcaagcaaccctcctgcctcagtcttgcaaagtgctgggattccaggtgggagccactgcacctggctcttgcacttgtttatttataggagccagccctcagaagacaaacacaatgcaaaacatttccttcagggaagcctgctggccgccctgagcgctcttccctcgttttacatcctcactctggagatagatgggctccctcggttagctccatcaacatgtggatggaaccctctgctattgatgactacatttaatttctttttgagaaaggtgttagatgttacggtgccttctagtcttttgataattaaacctttggcaaaactcgaatgtttggttagcaaccaagcctatttttctctcctttgacccaaccgctattctacttgattttggtcggtgaggcccgggttatttttgttgatccgtgagcccatttttggtgctgggttctcacatccaagtgttcctgggttccgtatgattccagactgacgctgaacatctgtgcctgccctgcttcttgttgttgcttctgtcatttctgtcattgtgaagacggatccaaacacagaagaacaaagacccagtccaagatccatccagattatgtggtttcggcttgtgctctgcagtccactttgggtcatgcttgctgcgagcacgtccgtgaacgtcagctgtgggcctcgtgcagggacgctcaggctgctcccagcgggaccacagttttggcctctgaaacacagctgaagaaaggcagagtgctttctgtgatcttttaatcaatgttttccacttttgcattcctaggctgcccgcctcactggaagaacttcacagacaaatgctactatttttcagttgagaaagaaatttttgaggatgcaaagcttttctgtgaagacaagtcttcacatcttgttttcataaacactagagaggaacagcaatggataaaaaaacagatggtagggagagagagccactggatcggcctcacagactcagagcgtgaaaatgaatggaagtggctggatgggacatctccagactacaaaaattggaaagctggacagccggataactggggtcatggccatgggccaggagaagactgtgctgggttgatttatgctgggcagtggaacgatttccaatgtgaagacgtcaataacttcatttgcgaaaaagacagggagacagtactgtcatctgcattataacggactgtgatgggatcacatgagcaaattttcagctctcaaaggcaaaggacactcctttctaattgcatcaccttctcatcagattgaaaaaaaaaaagcactgaaaaccaattactgaaaaaaaattgacagctagtgttttttaccatccgtcattacccaaagacttgggaactaaaatgttccccagggtgatatgctgattttcattgtgcacatggactgaatcacatagattctcctccgtcagtaaccgtgcgattatacaaattatgtcttccaaagtatggaacactccaatcagaaaaaggttatcattggtcgttgagttatgggaagaacttaagcatatactgtgtaaacagtgccatacatttctaaaatcccaagtgtaggaaaaatatgcagacatacagatatataggccaactattagtaataatatgaaatatacttaaagagcttttaaaactttgtatttttgtacaaaatatttgtcttttacaatttttttcctttttttttttttgtcattttaccgacataatacatggagccaaagaaaacaataatggtactaataaaaactcctagggtttcctgtcagatttaattctacccagtggcaaagaattttttcaattgtggctttaaaaaaataattaaatatacatgtatatatatat

SEQ ID NO: 3597 - protein, 622 aa, Homo sapiens
MKDDFAEEEEVQSFGYKRFGIQEGTQCTKCKNNWALKFSIILLYILCALLTITVAILGYKVVEKMDNVTGGMETSRQTYDDKLTAVESDLKKLGDQTGKKAISTNSELSTFRSDILDLRQQLREITEKTSKNKDTLEKLQASGDALVDRQSQLKETLENNSFLITTVNKTLQAYNGYVTNLQQDTSVLQGNLQNQMYSHNVVIMNLNNLNLTQVQQRNLITNLQRSVDDTSQAIQRIKNDFQNLQQVFLQAKKDTDWLKEKVQSLQTLAANNSALAKANNDTLEDMNSQLNSFTGQMENITTISQANEQNLKDLQDLHKDAENRTAIKFNQLEERFQLFETDIVNIISNISYTAHHLRTLTSNLNEVRTTCTDTLTKHTDDLTSLNNTLANIRLDSVSLRMQQDLMRSRLDTEVANLSVIMEEMKLVDSKHGQLIKNFTILQGPPGPRGPRGDRGSQGPPGPTGNKGQKGEKGEPGPPGPAGERGPIGPAGPPGERGGKGSKGSQGPKGSRGSPGKPGPQGPSGDPGPPGPPGKEGLPGPQGPPGFQGLQGTVGEPGVPGPRGLPGLPGVPGMPGPKGPPGPPGPSGAVVPLALQNEPTPAPEDNSKSKPSLQPGGQGSACA

SEQ ID NO: 3598 - DNA, 3089 bp, Homo sapiens
gggagcgcggggagcgcgggccggcggcggcgagggaggacgggggcgcagacggccggcgcgcggcgcggctaccatgggcgtgcggtgagcagccgctcgggacgacttcctcggctgcgcggcgctcgcgcggagctccccggccggcggtgcgtccccacggtcaccatgaaagacgacttcgcagaggaggaggaggtgcaatccttcggttacaagcggtttggtattcaggaaggaacacaatgtaccaaatgtaaaaataactgggcactgaagttttctatcatattattatacattttgtgtgccttgctaacaatcacagtagccattttgggatataaagttgtagagaaaatggacaatgtcacaggtggcatggaaacatctcgccaaacctatgatgacaagctcacagcagtggaaagtgacctgaaaaaattaggtgaccaaactgggaagaaagctatcagcaccaactcagaactctccaccttcagatcagacattctagatctccgtcagcaacttcgtgagattacagaaaaaaccagcaagaacaaggatacgctggagaagttacaggcgagcggggatgctctggtggacaggcagagtcaattgaaagaaactttggagaataactctttcctcatcaccactgtaaacaaaaccctccaggcgtataatggctatgtcacgaatctgcagcaagataccagcgtgctccagggcaatctgcagaaccaaatgtattctcataatgtggtcatcatgaacctcaacaacctgaacctgacccaggtgcagcagaggaacctcatcacgaatctgcagcggtctgtggatgacacaagccaggctatccagcgaatcaagaacgactttcaaaatctgcagcaggtttttcttcaagccaagaaggacacggattggctgaaggagaaagtgcagagcttgcagacactggctgccaacaactctgcgttggccaaagccaacaacgacaccctggaggatatgaacagccagctcaactcattcacaggtcagatggagaacatcaccactatctctcaagccaacgagcagaacctgaaagacctgcaggacttacacaaagatgcagagaatagaacagccatcaagttcaaccaactggaggaacgcttccagctctttgagacggatattgtgaacatcattagcaatatcagttacacagcccaccacctgcggacgctgaccagcaatctaaatgaagtcaggaccacttgcacagatacccttaccaaacacacagatgatctgacctccttgaataataccctggccaacatccgtttggattctgtttctctcaggatgcaacaagatttgatgaggtcgaggttagacactgaagtagccaacttatcagtgattatggaagaaatgaagctagtagactccaagcatggtcagctcatcaagaattttacaatactacaaggtccaccgggccccaggggtccaagaggtgacagaggatcccagggaccccctggcccaactggcaacaagggacagaaaggagagaagggggagcctggaccacctggccctgcgggtgagagaggcccaattggaccagctggtccccccggagagcgtggcggcaaaggatctaaaggctcccagggccccaaaggctcccgtggttcccctgggaagcccggccctcagggccccagtggggacccaggccccccgggcccaccaggcaaagagggactccccggccctcagggccctcctggcttccagggacttcagggcaccgttggggagcctggggtgcctggacctcggggactgccaggcttgcctggggtaccaggcatgccaggccccaagggcccccccggccctcctggcccatcaggagcggtggtgcccctggccctgcagaatgagccaaccccggcaccggaggacaatggctgcccgcctcactggaagaacttcacagacaaatgctactatttttcagttgagaaagaaatttttgaggatgcaaagcttttctgtgaagacaagtcttcacatcttgttttcataaacactagagaggaacagcaatggataaaaaaacagatggtagggagagagagccactggatcggcctcacagactcagagcgtgaaaatgaatggaagtggctggatgggacatctccagactacaaaaattggaaagctggacagccggataactggggtcatggccatgggccaggagaagactgtgctgggttgatttatgctgggcagtggaacgatttccaatgtgaagacgtcaataacttcatttgcgaaaaagacagggagacagtactgtcatctgcattataacggactgtgatgggatcacatgagcaaattttcagctctcaaaggcaaaggacactcctttctaattgcatcaccttctcatcagattgaaaaaaaaaaagcactgaaaaccaattactgaaaaaaaattgacagctagtgttttttaccatccgtcattacccaaagacttgggaactaaaatgttccccagggtgatatgctgattttcattgtgcacatggactgaatcacatagattctcctccgtcagtaaccgtgcgattatacaaattatgtcttccaaagtatggaacactccaatcagaaaaaggttatcattggtcgttgagttatgggaagaacttaagcatatactgtgtaaacagtgccatacatttctaaaatcccaagtgtaggaaaaatatgcagacatacagatatataggccaactattagtaataatatgaaatatacttaaagagcttttaaaactttgtatttttgtacaaaatatttgtcttttacaatttttttcctttttttttttttgtcattttaccgacataatacatggagccaaagaaaacaataatggtactaataaaaactcctagggtttcctgtcagatttaattctacccagtggcaaagaattttttcaattgtggctttaaaaaaataattaaatatacatgtatatatatat

SEQ ID NO: 3599 - protein, 742 aa, Homo sapiens
MKDDFAEEEEVQSFGYKRFGIQEGTQCTKCKNNWALKFSIILLYILCALLTITVAILGYKVVEKMDNVTGGMETSRQTYDDKLTAVESDLKKLGDQTGKKAISTNSELSTFRSDILDLRQQLREITEKTSKNKDTLEKLQASGDALVDRQSQLKETLENNSFLITTVNKTLQAYNGYVTNLQQDTSVLQGNLQNQMYSHNVVIMNLNNLNLTQVQQRNLITNLQRSVDDTSQAIQRIKNDFQNLQQVFLQAKKDTDWLKEKVQSLQTLAANNSALAKANNDTLEDMNSQLNSFTGQMENITTISQANEQNLKDLQDLHKDAENRTAIKFNQLEERFQLFETDIVNIISNISYTAHHLRTLTSNLNEVRTTCTDTLTKHTDDLTSLNNTLANIRLDSVSLRMQQDLMRSRLDTEVANLSVIMEEMKLVDSKHGQLIKNFTILQGPPGPRGPRGDRGSQGPPGPTGNKGQKGEKGEPGPPGPAGERGPIGPAGPPGERGGKGSKGSQGPKGSRGSPGKPGPQGPSGDPGPPGPPGKEGLPGPQGPPGFQGLQGTVGEPGVPGPRGLPGLPGVPGMPGPKGPPGPPGPSGAVVPLALQNEPTPAPEDNGCPPHWKNFTDKCYYFSVEKEIFEDAKLFCEDKSSHLVFINTREEQQWIKKQMVGRESHWIGLTDSERENEWKWLDGTSPDYKNWKAGQPDNWGHGHGPGEDCAGLIYAGQWNDFQCEDVNNFICEKDRETVLSSAL

SEQ ID NO: 3600 - DNA, 3494 bp, Homo sapiens
ggcacccttcggcgagcgctgtttgtttagggctcggtgagtccaatcaggagcccaggctgcagttttccggcagagcagtaagaggcgcctcctctctcctttttattcaccagcagcgcggcgcagaccccggactcgcgctcgcccgctggcgccctcggcttctctccgcgcctgggagcaccctccgccgcggccgttctccatgcgcagcgcccgcccgaggagctagacgtcagcttggagcggcgccggaccgtggatggccttgactgacggcggctggtgcttgccgaagcgcttcggggccgcgggtgcggacgccagcgactccagagcctttccagcgcgggagccctccacgccgccttcccccatctcttcctcgtcctcctcctgctcccggggcggagagcggggccccggcggcgccagcaactgcgggacgcctcagctcgacacggaggcggcggccggacccccggcccgctcgctgctgctcagttcctacgcttcgcatcccttcggggctccccacggaccttcggcgcctggggtcgcgggccccgggggcaacctgtcgagctgggaggacttgctgctgttcactgacctcgaccaagccgcgaccgccagcaagctgctgtggtccagccgcggcgccaagctgagccccttcgcacccgagcagccggaggagatgtaccagaccctcgccgctctctccagccagggtccggccgcctacgacggcgcgcccggcggcttcgtgcactctgcggccgcggcggcagcagccgcggcggcggccagctccccggtctacgtgcccaccacccgcgtgggttccatgctgcccggcctaccgtaccacctgcaggggtcgggcagtgggccagccaaccacgcgggcggcgcgggcgcgcaccccggctggcctcaggcctcggccgacagccctccatacggcagcggaggcggcgcggctggcggcggggccgcggggcctggcggcgctggctcagccgcggcgcacgtctcggcgcgcttcccctactctcccagcccgcccatggccaacggcgccgcgcgggagccgggaggctacgcggcggcgggcagtgggggcgcgggaggcgtgagcggcggcggcagtagcctggcggccatgggcggccgcgagccccagtacagctcgctgtcggccgcgcggccgctgaacgggacgtaccaccaccaccaccaccaccaccaccaccatccgagcccctactcgccctacgtgggggcgccactgacgcctgcctggcccgccggacccttcgagaccccggtgctgcacagcctgcagagccgcgccggagccccgctcccggtgccccggggtcccagtgcagacctgctggaggacctgtccgagagccgcgagtgcgtgaactgcggctccatccagacgccgctgtggcggcgggacggcaccggccactacctgtgcaacgcctgcgggctctacagcaagatgaacggcctcagccggcccctcatcaagccgcagaagcgcgtgccttcatcacggcggcttggattgtcctgtgccaactgtcacaccacaactaccaccttatggcgcagaaacgccgagggtgaacccgtgtgcaatgcttgtggactctacatgaaactccatggggtgcccagaccacttgctatgaaaaaagagggaattcaaaccaggaaacgaaaacctaagaacataaataaatcaaagacttgctctggtaatagcaataattccattcccatgactccaacttccacctcttctaactcagatgattgcagcaaaaatacttcccccacaacacaacctacagcctcaggggcgggtgccccggtgatgactggtgcgggagagagcaccaatcccgagaacagcgagctcaagtattcgggtcaagatgggctctacataggcgtcagtctcgcctcgccggccgaagtcacgtcctccgtgcgaccggattcctggtgcgccctggccctggcctgagcccacgccgccaggaggcagggagggctccgccgcgggcctcactccactcgtgtctgcttttgtgcagcggtccagacagtggcgactgcgctgacagaacgtgattctcgtgcctttattttgaaagagatgtttttcccaagaggcttgctgaaagagtgagagaagatggaagggaagggccagtgcaactgggcgcttgggccactccagccagcccgcctccggggcggaccctgctccacttccagaagccaggactaggacctgggccttgcctgctatggaatattgagagagattttttaaaaaagattttgcattttgtccaaaatcatgtgcttcttctgatcaattttggttgttccagaatttcttcataccttttccacatccagatttcatgtgcgttcatggagaagatcacttgaggccatttggtacacatctctggaggctgagtcggttcatgaggtctcttatcaaaaatattactcagtttgcaagactgcattgtaactttaacatacactgtgactgacgtttctcaaagttcatattgtgtggctgatctgaagtcagtcggaatttgtaaacagggtagcaaacaagatatttttcttccatgtatacaataatttttttaaaaagtgcaatttgcgttgcagcaatcagtgttaaatcatttgcataagatttaacagcattttttataatgaatgtaaacattttaacttaatggtacttaaaataatttaaaagaaaaatgttaacttagacattcttatgcttcttttacaactacatcccattttatatttccaattgttaaagaaaaatatttcaagaacaaatcttctctcaggaaaattgcctttctctatttgttaagaatttttatacaagaacaccaatataccccctttattttactgtggaatatgtgctggaaaaattgcaacaacactttactacctaacggatagcatttgtaaatactctaggtatctgtaaacactctgatgaagtctgtatagtgtgactaacccacaggcaggttggtttacattaatttttttttttgaatgggatgtcctatggaaacctatttcaccagagttttaaaaataaaaagggtattgttttgtcttctgtacagtgagttccttcccttttcaaagctttctttttatgctgtatgtgactatagatattcatataaaacaagtgcacgtgaagtttgcaaaatgctttaaggccttcctttcaaagcatagtccttttggagccgttttgtaccttttataccttggcttatttgaagttgacacatggggttagttactactctccatgtgcattggggacagtttttataagtgggaaggactcagtattattatatttgagatgataagcattttgtttgggaacaatg

SEQ ID NO: 3601 - protein, 595 aa, Homo sapiens
MALTDGGWCLPKRFGAAGADASDSRAFPAREPSTPPSPISSSSSSCSRGGERGPGGASNCGTPQLDTEAAAGPPARSLLLSSYASHPFGAPHGPSAPGVAGPGGNLSSWEDLLLFTDLDQAATASKLLWSSRGAKLSPFAPEQPEEMYQTLAALSSQGPAAYDGAPGGFVHSAAAAAAAAAAASSPVYVPTTRVGSMLPGLPYHLQGSGSGPANHAGGAGAHPGWPQASADSPPYGSGGGAAGGGAAGPGGAGSAAAHVSARFPYSPSPPMANGAAREPGGYAAAGSGGAGGVSGGGSSLAAMGGREPQYSSLSAARPLNGTYHHHHHHHHHHPSPYSPYVGAPLTPAWPAGPFETPVLHSLQSRAGAPLPVPRGPSADLLEDLSESRECVNCGSIQTPLWRRDGTGHYLCNACGLYSKMNGLSRPLIKPQKRVPSSRRLGLSCANCHTTTTTLWRRNAEGEPVCNACGLYMKLHGVPRPLAMKKEGIQTRKRKPKNINKSKTCSGNSNNSIPMTPTSTSSNSDDCSKNTSPTTQPTASGAGAPVMTGAGESTNPENSELKYSGQDGLYIGVSLASPAEVTSSVRPDSWCALALA

SEQ ID NO: 3602 - DNA, 1584 bp, Homo sapiens
gcgtcccccacaccacagacccgcgccgccgacgacccagcagccgccatgcgtctgctccgaggtgtgtttgtagttgctgctaagcgaacgccctttggagcttacggaggccttctgaaagacttcactgctactgacttgtctgaatttgctgccaaggctgccttgtctgctggcaaagtctcacctgaaacagttgacagtgtgattatgggcaatgtcctgcagagttcttcagatgctatatatttggcaaggcatgttggtttgcgtgtgggaatcccaaaggagaccccagctctcacgattaataggctctgtggttctggttttcagtccattgtgaatggatgtcaggaaatttgtgttaaagaagctgaagttgttttatgtggaggaaccgaaagcatgagccaagctccctactgtgtcagaaatgtgcgttttggaaccaagcttggatcagatatcaagctggaagattctttatgggtatcattaacagatcagcatgtccagctccccatggcaatgactgcagagaatcttactgtaaaacacaaaataagcagagaagaatgtgacaaatatgccctgcagtcacagcagagatggaaagctgctaatgatgctggctactttaatgatgaaatggcaccaattgaagtgaagacaaagaaaggaaaacagacaatgcaggtagacgagcatgctcggccccaaaccaccctggaacagttacagaaacttcctccagtattcaagaaagatggaactgttactgcagggaatgcatcgggtgtagctgatggtgctggagctgttatcatagctagtgaagatgctgttaagaaacataacttcacaccactggcaagaattgtgggctactttgtatctggatgtgatccctctatcatgggtattggtcctgtccctgctatcagtggggcactgaagaaagcaggactgagtcttaaggacatggatttggtagaggtgaatgaagcttttgctccccagtacttggctgttgagaggagtttggatcttgacataagtaaaaccaatgtgaatggaggagccattgctttgggtcacccactgggaggatctggatcaagaattactgcacacctggttcacgaattaaggcgtcgaggtggaaaatatgccgttggatcagcttgcattggaggtggccaaggtattgctgtcatcattcagagcacagcctgaagagaccagtgagctcactgtgacccatccttactctacttggccaggccacagtaaaacaagtgaccttcagagcagctgccacaactggccatgccctgccattgaaacagtgattaagtttgatcaagccatggtgacacaaaaatgcattgatcatgaataggagcccatgctagaagtacattctctcagatttgaaccagtgaaatatgatgtatttctgagctaaaactcaactatagaagacattaaaagaaatcgtattcttgccaagtaaccaccacttctgccttagataatatgattataaggaaatcaaataaatgttgccttaacttc

SEQ ID NO: 3603 - protein, 397 aa, Homo sapiens
MRLLRGVFVVAAKRTPFGAYGGLLKDFTATDLSEFAAKAALSAGKVSPETVDSVIMGNVLQSSSDAIYLARHVGLRVGIPKETPALTINRLCGSGFQSIVNGCQEICVKEAEVVLCGGTESMSQAPYCVRNVRFGTKLGSDIKLEDSLWVSLTDQHVQLPMAMTAENLTVKHKISREECDKYALQSQQRWKAANDAGYFNDEMAPIEVKTKKGKQTMQVDEHARPQTTLEQLQKLPPVFKKDGTVTAGNASGVADGAGAVIIASEDAVKKHNFTPLARIVGYFVSGCDPSIMGIGPVPAISGALKKAGLSLKDMDLVEVNEAFAPQYLAVERSLDLDISKTNVNGGAIALGHPLGGSGSRITAHLVHELRRRGGKYAVGSACIGGGQGIAVIIQSTA

SEQ ID NO: 3604 - DNA, 8192 bp, Homo sapiens
ccgtagctgcgccgccgcggcgggagtaaaggtcgcgccgccgggagcgagccggccgcggcgcctgcgggaagccggcggggcaggtcggagaagagcgagaagatcgagaaactccaggccagcccgggaacatggcgccaggcgggccagccgcggactgagagccgcggggcagccaggagccggggcccgagccccgcccggcccgggccatgtcggtgggcgagctctacagccagtgcacaagggtctggatccctgaccctgatgaggtatggcgctcagctgagttaaccaaggactacaaagaaggagacaagagcctacagctcagactggaggatgaaacgattctggaatacccaattgatgtacaacgcaaccagctgcccttcttacggaatccagatatcttggtgggagaaaatgacctgactgcccttagctatcttcatgagcctgcagttttgcataatttgaaggtccgtttcctggagtccaaccatatctacacttactgtggtatcgtacttgttgccattaatccttatgaacagttgccaatctatggacaagatgtcatctatacctacagtggccaaaacatgggagacatggacccccacatctttgctgtggcagaagaagcctacaagcagatggccagagatgagaagaatcagtccatcatagtcagtggggagtctggagccgggaagacggtatcagccaagtatgccatgcgctatttcgccaccgttggtggctcggccagtgaaaccaacatcgaagagaaggtgctggcatccagtcccatcatggaggccattggaaatgccaagaccacccgcaatgacaacagcagccgttttggcaagtacatccagattggctttgacaaaaggtaccacatcatcggggccaacatgaggacttacctcttggagaagtccagagtggtcttccaggcagatgatgagaggaattaccacatcttttaccagctctgtgctgctgccggtcttccagaatttaaagagcttgcactaacaagtgcagaggactttttctatacatcacagggaggagacacttccatcgagggtgtggacgatgctgaggactttgagaagactcgacaagccttcacactcctcggagtgaaagagtcccatcagatgagcatttttaagataattgcttctatcttgcaccttggaagtgtggcgattcaggctgagcgtgatggtgattcctgtagtatatcaccccaggatgtatacctaagcaacttctgccgactgctaggggtggagcacagtcagatggagcactggctgtgtcatcgcaagctggtcaccacctcggagacctacgtcaagaccatgtccctgcagcaggtgatcaatgcgcgcaacgccctggcgaagcacatctatgcccagttgttcggctggattgtggagcacatcaacaaggccctgcacacctccctcaagcagcactccttcatcggggtcctggacatctatgggtttgagacatttgaggtaaacagctttgagcagttctgtatcaactatgcaaatgaaaagctccagcagcagttcaactcgcatgttttcaaactggagcaagaagaatacatgaaggaacagatcccttggaccctgattgatttttatgataaccaaccttgtatcgacctcattgaagccaagctgggtatcttggacctgttggatgaagaatgtaaggtccccaaaggaactgaccagaactgggctcagaagctctatgaccggcactccagcagccagcacttccagaagccccgcatgtccaacacggccttcatcatcgtccactttgcagacaaggtggagtacctctctgatggttttctggagaaaaacagagacacggtgtatgaagagcagatcaatatcctgaaggccagcaagttcccactagtggctgacttgtttcatgatgacaaggaccctgttcctgccaccacccctgggaaggggtcatcttcgaagatcagcgtccgttctgccagaccccccatgaaagtctccaacaaggagcacaagaaaaccgttggccaccagttccgtacctccctgcatctgctcatggagaccctgaatgccacgacacctcactatgtccgctgcatcaagcccaacgatgagaagctcccctttcactttgacccaaagagagcagtgcagcaactcagagcctgcggggtgttggagacgattcgaatcagtgcagctggctacccatccaggtgggcctaccatgactttttcaaccggtatcgggtgctggtcaagaagagagagctcgccaacacagacaaaaaggccatctgcaggtctgtcctggagaacctcatcaaggaccccgacaagttccagtttggccgcaccaagatcttctttcgagcaggccaggtggcctacctggagaagctgcgggctgacaagttccggacagccaccatcatgatccagaaaactgtccggggatggctgcagaaggtgaaatatcacaggctgaagggggctaccttaaccctgcagaggtactgccggggacacctggcccgcaggctggctgagcacctgcggaggatcagagcggctgtggtgctccagaaacattaccgcatgcagagggcccgccaggcctaccagagggtccgcagagctgccgttgttatccaggccttcacccgggccatgtttgtgcggagaacctaccgccaggtcctcatggagcacaaggccaccaccatccagaagcacgtgcggggctggatggcacgcaggcacttccagcggctgcgggatgcagccattgtcatccagtgtgccttccggatgctcaaggccaggcgggagctgaaggccctcaggattgaggcccgctcagcagagcatctgaaacgtctcaacgtgggcatggagaacaaggtggtccagctgcagcggaagatcgatgagcagaacaaagagttcaagacactttcagagcagttgtccgtgaccacctcaacatacaccatggaggtagagcggctgaagaaggagctggtgcactaccagcagagcccaggtgaggacaccagcctcaggctgcaggaggaggtggagagcctgcgcacagagctgcagagggcccactcggagcgcaagatcttggaggacgcccacagcagggagaaagatgagctgaggaagcgagttgcagacctggagcaagaaaatgctctcttgaaagatgagaaagaacagctcaacaaccaaatcctgtgccagtctaaagatgaatttgcccagaactctgtgaaggaaaatctcatgaagaaagaactggaggaggagcgatcccggtaccagaaccttgtgaaggaatattcacagttggagcagagatacgacaaccttcgggatgaaatgaccatcataaagcaaactccaggtcataggcggaacccatcaaaccaaagtagcttagaatctgactccaattacccctccatctccacatctgagatcggagacactgaggatgccctccagcaggtggaggaaattggcctggagaaggcagccatggacatgacggtcttcctgaagctgcagaagagagtacgggagctggagcaggagaggaaaaagctgcaagtgcagctggagaagagagaacagcaggacagcaagaaagtccaggcggaaccaccacagactgacatagatttggacccgaatgcagatctggcctacaatagtctgaagaggcaagagctggagtcagagaacaaaaagctgaagaatgacctgaatgagctgaggaaagccgtggccgaccaagccacgcagaataactccagccacggctccccagatagctacagcctcctgctgaaccagctcaagctggcccacgaggagctcgaggtgcgcaaggaggaggtgctcatcctcaggacccagatcgtgagcgccgaccagcggcgactcgccggcaggaacgcggagccgaacattaatgccagatcaagttggcctaacagtgaaaagcatgttgaccaggaggatgccattgaggcctatcacggggtctgccagacaaacagcaagactgaggattggggatatttaaatgaagatggagaactcggcttggcctaccaaggcctaaagcaagttgccaggctgctggaggctcagctgcaggcccagagcctggagcatgaggaggaggtggagcatctcaaggctcagctcgaggccctgaaggaggagatggacaaacagcagcagaccttctgccagacgctactgctctccccagaggcccaggtggaattcggcgttcagcaggaaatatcccggctgaccaacgagaatctggaccttaaagaactggtagaaaagctggaaaagaatgagaggaagctcaaaaagcaactgaagatttacatgaagaaagcccaggacctagaagctgcccaggcattggcccagagtgagaggaagcgccatgagctcaacaggcaggtcacggtccagcggaaagagaaggatttccagggcatgctggagtaccacaaagaggacgaggccctcctcatccggaacctggtgacagacttgaagccccagatgctgtcgggcacagtgccctgtctccccgcctacatcctctacatgtgcatccggcacgcggactacaccaacgacgatctcaaggtgcactccctgctgacctccaccatcaacggcattaagaaagtcctgaaaaagcacaatgatgactttgagatgacgtcattctggttatccaacacctgccgccttcttcactgtctgaagcagtacagcggggatgagggcttcatgactcagaacactgcaaagcagaatgaacactgtcttaagaattttgacctcaccgaataccgtcaggtgctgagtgacctttccattcagatctaccagcagctcattaaaattgccgagggcgtgttacagccgatgatagtttctgccatgttggaaaatgagagcattcagggtctatctggtgtgaagcccaccggctaccggaagcgctcctccagcatggcagatggggataactcatactgcctggaagctatcatccgccagatgaatgcctttcatacagtcatgtgtgaccagggcttggaccctgagatcatcctgcaggtattcaaacagctcttctacatgatcaacgcagtgactcttaacaacctgctcttgcggaaggacgtctgctcttggagcacaggcatgcaactcaggtacaatataagtcagcttgaggagtggcttcggggaagaaaccttcaccagagtggagcagttcagaccatggaacctctgatccaagcagcccagctcctgcaattaaagaagaaaacccaggaggacgcagaggctatctgctccctgtgtacctccctcagcacccagcagattgtcaaaattttaaacctttatactcccctgaatgaatttgaagaacgggtaacagtggcctttatacgaacaatccaggcacaactacaagagcggaatgaccctcagcaactgctattagatgccaagcacatgtttcctgttttgtttccatttaatccatcttctctaaccatggactcaatccacatcccagcgtgtctcaatctggaattcctcaatgaagtctgaagatgcatgtttccagcattagtttgattcccaatgtgagcaagaaggaagtatatacagtaaagtaaattcaaggatctgttaaatctggtaaaagtagatcaaatcagagattgacagcctgtggagggtgctgaactatacagaattagacacaactatgtcattattttttgtacctactgctcagaataaaaacacttgaaatatggaagattttaagtttgatttcagtccaacacatatacataatttatagacaccaagcagtccccatagacatataaaaggtgtcaattctataaaacgaagctgcctagttttgatctttgcatagaactagagaatgtccaaattaaaataccaaatatatataagtcacataaattgccttcaaagggctttaacaaataatggtactaataaccatgataatggcatatactgacatttcccaaagtttgcaaaccataggtgtggttgagtttgtggtgagatgttttaagaacaaaaatatggggatgagacttctgagaaatattcccaaaatattttttaatggctgattatacacagacagtggtgtaactgacctccagaccagacattttgagtactggtttctgaagcaaaattagaagtgccagtcctcagtgtgctcaaacgcttttgtgttatcttgatttaatggaagagattattaaaatgctgctatcccaaactccaagtgagaaagatggaaaaatattttgtttctgatgctagtccatacactttccaagtcccacaaaactttcacaaaaatgtatataagctaaatattagaaacggataacaaacttgttttatttatagatgtaaaaaccaaacaagtcaatatgaaagcttttaatctcttaataccattaagcttccagtaagagcatcacataatgctctactgttccagaaaccaaatagtaaaacaaactaaagttcgcacatcagatcatctgaaaaaccttcaaaaataatcagttcagggatattatacaaaagtttgggttttttttttttaagagaataaaatggcttaggtcaactttcccttttcaggttattttcaacgtttttcaaatttagcacacaaaaaattgtaaatatctctcccacaaaataaggattttaaaaaagtaattcagtaatataacaggcttagatgtttgctgctcttagaattttttttaacttgtttttggtttcttcaaaagcaagcattcaattggaaacccatattctttccacacttttttttactgtcttttctgtatttcttgatagcagtatgctgttcccataagaaaaaaatggtatttgcaaatcatggaagaacagcctctgtattacattgagaaaataagatttatccatgaattggaagtagaacagcctgccttcaccctcttttactcaaccacccaacttaaaaggctcttggaaacacagcacactccacgctaccttctgcactgtgcccttagagcacagcttcctcagttgttctctgcatctcctggggcttaggccagtcttagcctgggttaaggctgctgacattgtgttccaatcagttgtcatgggcattatcccctctacatccacattaaacatgccggcttctcttgggcatcggcagagctgtgcctttttctttcagttacagttacataatcactgacgtccatgacacttacccatggatccatgtgctgacttcatttagaaggccaatctaaaacaactgggtttgtggctacctctttaaagttgtttgtgaaggataatttgttttttaatgcactttagtttgaaagtgagtctcttatgtaaggaccatccttaaaagaccaaaaatgccttgttagagtgttaaggagttttgacatgcagtggttccacaaacacagtggcttactatccttatacactgtcttataccatcattctctccatctctcttggtcactactctctgctgtcactggttaatcactaggtgccaagagcttactgaataaaagcttggcaattagaataaatggggagggaaggaccttatgaatagtccatttagcctaagaaatggcagatttagttcttctcttccaaaagataaaggtatatcctggaattgtacttaaaacttacagatgactaacaaatatatactttatatgtagttaatatttagatctgtcttatttaatacttggaggctagaagaagcatctttaggggaactatataatcttttgttagcattttctctgcattttaaaaaatcatttcaattcaaacatttatcagtgtcatgaaatcagtaatgactctttaacaattcaggtttgaactctgcattagatgtctctttaattttttaatatttaaaat

SEQ ID NO: 3605 - protein, 1848 aa, Homo sapiens
MSVGELYSQCTRVWIPDPDEVWRSAELTKDYKEGDKSLQLRLEDETILEYPIDVQRNQLPFLRNPDILVGENDLTALSYLHEPAVLHNLKVRFLESNHIYTYCGIVLVAINPYEQLPIYGQDVIYTYSGQNMGDMDPHIFAVAEEAYKQMARDEKNQSIIVSGESGAGKTVSAKYAMRYFATVGGSASETNIEEKVLASSPIMEAIGNAKTTRNDNSSRFGKYIQIGFDKRYHIIGANMRTYLLEKSRVVFQADDERNYHIFYQLCAAAGLPEFKELALTSAEDFFYTSQGGDTSIEGVDDAEDFEKTRQAFTLLGVKESHQMSIFKIIASILHLGSVAIQAERDGDSCSISPQDVYLSNFCRLLGVEHSQMEHWLCHRKLVTTSETYVKTMSLQQVINARNALAKHIYAQLFGWIVEHINKALHTSLKQHSFIGVLDIYGFETFEVNSFEQFCINYANEKLQQQFNSHVFKLEQEEYMKEQIPWTLIDFYDNQPCIDLIEAKLGILDLLDEECKVPKGTDQNWAQKLYDRHSSSQHFQKPRMSNTAFIIVHFADKVEYLSDGFLEKNRDTVYEEQINILKASKFPLVADLFHDDKDPVPATTPGKGSSSKISVRSARPPMKVSNKEHKKTVGHQFRTSLHLLMETLNATTPHYVRCIKPNDEKLPFHFDPKRAVQQLRACGVLETIRISAAGYPSRWAYHDFFNRYRVLVKKRELANTDKKAICRSVLENLIKDPDKFQFGRTKIFFRAGQVAYLEKLRADKFRTATIMIQKTVRGWLQKVKYHRLKGATLTLQRYCRGHLARRLAEHLRRIRAAVVLQKHYRMQRARQAYQRVRRAAVVIQAFTRAMFVRRTYRQVLMEHKATTIQKHVRGWMARRHFQRLRDAAIVIQCAFRMLKARRELKALRIEARSAEHLKRLNVGMENKVVQLQRKIDEQNKEFKTLSEQLSVTTSTYTMEVERLKKELVHYQQSPGEDTSLRLQEEVESLRTELQRAHSERKILEDAHSREKDELRKRVADLEQENALLKDEKEQLNNQILCQSKDEFAQNSVKENLMKKELEEERSRYQNLVKEYSQLEQRYDNLRDEMTIIKQTPGHRRNPSNQSSLESDSNYPSISTSEIGDTEDALQQVEEIGLEKAAMDMTVFLKLQKRVRELEQERKKLQVQLEKREQQDSKKVQAEPPQTDIDLDPNADLAYNSLKRQELESENKKLKNDLNELRKAVADQATQNNSSHGSPDSYSLLLNQLKLAHEELEVRKEEVLILRTQIVSADQRRLAGRNAEPNINARSSWPNSEKHVDQEDAIEAYHGVCQTNSKTEDWGYLNEDGELGLAYQGLKQVARLLEAQLQAQSLEHEEEVEHLKAQLEALKEEMDKQQQTFCQTLLLSPEAQVEFGVQQEISRLTNENLDLKELVEKLEKNERKLKKQLKIYMKKAQDLEAAQALAQSERKRHELNRQVTVQRKEKDFQGMLEYHKEDEALLIRNLVTDLKPQMLSGTVPCLPAYILYMCIRHADYTNDDLKVHSLLTSTINGIKKVLKKHNDDFEMTSFWLSNTCRLLHCLKQYSGDEGFMTQNTAKQNEHCLKNFDLTEYRQVLSDLSIQIYQQLIKIAEGVLQPMIVSAMLENESIQGLSGVKPTGYRKRSSSMADGDNSYCLEAIIRQMNAFHTVMCDQGLDPEIILQVFKQLFYMINAVTLNNLLLRKDVCSWSTGMQLRYNISQLEEWLRGRNLHQSGAVQTMEPLIQAAQLLQLKKKTQEDAEAICSLCTSLSTQQIVKILNLYTPLNEFEERVTVAFIRTIQAQLQERNDPQQLLLDAKHMFPVLFPFNPSSLTMDSIHIPACLNLEFLNEV

SEQ ID NO: 3606 - DNA, 4082 bp, Homo sapiens
acattctgctgctgctgcagagtgatgatttttaacagaccagaacttacacatctaaatgagtgttgttgttcagtgaagtcaccttaggacaatgatttaaataacaccgcgatttctcaagaagtttggaacttctcttatggttgagttcaaagccattttatgttatatgtggcccaaacaagttttattagtacaattaaatctttattgaggacttttgatggaccacatagtgaacttggactgggaatcaaaagaatggtaaggcagggtgtctgccttcactgtgcctgcagtctggctgagatgcacatgtgagccacactagcacaagccagcatgcactggcctgtcacaagagagtgcacaagggtctggatccctgaccctgatgaggtatggcgctcagctgagttaaccaaggactacaaagaaggagacaagagcctacagctcagactggaggatgaaacgattctggaatacccaattgatgtacaacgcaaccagctgcccttcttacggaatccagatatcttggtgggagaaaatgacctgactgcccttagctatcttcatgagcctgcagttttgcataatttgaaggtccgtttcctggagtccaaccatatctacacttactgtggtatcgtacttgttgccattaatccttatgaacagttgccaatctatggacaagatgtcatctatacctacagtggccaaaacatgggagacatggacccccacatctttgctgtggcagaagaagcctacaagcagatggccagagatgagaagaatcagtccatcatagtcagtggggagtctggagccgggaagacggtatcagccaagtatgccatgcgctatttcgccaccgttggtggctcggccagtgaaaccaacatcgaagagaaggtgctggcatccagtcccatcatggaggccattggaaatgccaagaccacccgcaatgacaacagcagccgttttggcaagtacatccagattggctttgacaaaaggtaccacatcatcggggccaacatgaggacttacctcttggagaagtccagagtggtcttccaggcagatgatgagaggaattaccacatcttttaccagctctgtgctgctgccggtcttccagaatttaaagagcttgcactaacaagtgcagaggactttttctatacatcacagggaggagacacttccatcgagggtgtggacgatgctgaggactttgagaagactcgacaagccttcacactcctcggagtgaaagagtcccatcagatgagcatttttaagataattgcttctatcttgcaccttggaagtgtggcgattcaggctgagcgtgatggtgattcctgtagtatatcaccccaggatgtatacctaagcaacttctgccgactgctaggggtggagcacagtcagatggagcactggctgtgtcatcgcaagctggtcaccacctcggagacctacgtcaagaccatgtccctgcagcaggtgatcaatgcgcgcaacgccctggcgaagcacatctatgcccagttgttcggctggattgtggagcacatcaacaaggccctgcacacctccctcaagcagcactccttcatcggggtcctggacatctatgggtttgagacatttgaggtaaacagctttgagcagttctgtatcaactatgcaaatgaaaagctccagcagcagttcaactcgcatgttttcaaactggagcaagaagaatacatgaaggaacagatcccttggaccctgattgatttttatgataaccaaccttgtatcgacctcattgaagccaagctgggtatcttggacctgttggatgaagaatgtaaggtccccaaaggaactgaccagaactgggctcagaagctctatgaccggcactccagcagccagcacttccagaagccccgcatgtccaacacggccttcatcatcgtccactttgcagacaaggtggagtacctctctgatggttttctggagaaaaacagagacacggtgtatgaagagcagatcaatatcctgaaggccagcaagttcccactagtggctgacttgtttcatgatgacaaggaccctgttcctgccaccacccctgggaaggggtcatcttcgaagatcagcgtccgttctgccagaccccccatgaaagtctccaacaaggagcacaagaaaaccgttggccaccaggtctgtacctccctcagcacccagcagattgtcaaaattttaaacctttatactcccctgaatgaatttgaagaacgggtaacagtggcctttatacgaacaatccaggcacaactacaagagcggaatgaccctcagcaactgctattagatgccaagcacatgtttcctgttttgtttccatttaatccatcttctctaaccatggactcaatccacatcccagcgtgtctcaatctggaattcctcaatgaagtctgaagatgcatgtttccagcattagtttgattcccaatgtgagcaagaaggaagtatatacagtaaagtaaattcaaggatctgttaaatctggtaaaagtagatcaaatcagagattgacagcctgtggagggtgctgaactatacagaattagacacaactatgtcattattttttgtacctactgctcagaataaaaacacttgaaatatggaagattttaagtttgatttcagtccaacacatatacataatttatagacaccaagcagtccccatagacatataaaaggtgtcaattctataaaacgaagctgcctagttttgatctttgcatagaactagagaatgtccaaattaaaataccaaatatatataagtcacataaattgccttcaaagggctttaacaaataatggtactaataaccatgataatggcatatactgacatttcccaaagtttgcaaaccataggtgtggttgagtttgtggtgagatgttttaagaacaaaaatatggggatgagacttctgagaaatattcccaaaatattttttaatggctgattatacacagacagtggtgtaactgacctccagaccagacattttgagtactggtttctgaagcaaaattagaagtgccagtcctcagtgtgctcaaacgcttttgtgttatcttgatttaatggaagagattattaaaatgctgctatcccaaactccaagtgagaaagatggaaaaatattttgtttctgatgctagtccatacactttccaagtcccacaaaactttcacaaaaatgtatataagctaaatattagaaacggataacaaacttgttttatttatagatgtaaaaaccaaacaagtcaatatgaaagcttttaatctcttaataccattaagcttccagtaagagcatcacataatgctctactgttccagaaaccaaatagtaaaacaaactaaagttcgcacatcagatcatctgaaaaaccttcaaaaataatcagttcagggatattatacaaaagtttgggttttttttttttaagagaataaaatggcttaggtcaactttcccttttcaggttattttcaacgtttttcaaatttagcacacaaaaaattgtaaatatctctcccacaaaataaggattttaaaaaagtaattcagtaatataacaggcttagatgtttgctgctcttagaattttttttaacttgtttttggtttcttcaaaagcaagcattcaattggaaacccatattctttccacacttttttttactgtcttttctgtatttcttgatagcagtatgctgttcccataagaaaaaaatggtatttgcaaatcatggaagaacagcctctgtattacattgagaaaataagatttatccatgaattggaagtagaacagcctgccttcaccctcttttactcaaccacccaacttaaaaggctcttggaaacacagcacactccacgctaccttctgcactgtgcccttagagcacagcttcctcagttgttctctgcatctcctggggcttaggccagtcttag

SEQ ID NO: 3607 - protein, 720 aa, Homo sapiens
MHWPVTRECTRVWIPDPDEVWRSAELTKDYKEGDKSLQLRLEDETILEYPIDVQRNQLPFLRNPDILVGENDLTALSYLHEPAVLHNLKVRFLESNHIYTYCGIVLVAINPYEQLPIYGQDVIYTYSGQNMGDMDPHIFAVAEEAYKQMARDEKNQSIIVSGESGAGKTVSAKYAMRYFATVGGSASETNIEEKVLASSPIMEAIGNAKTTRNDNSSRFGKYIQIGFDKRYHIIGANMRTYLLEKSRVVFQADDERNYHIFYQLCAAAGLPEFKELALTSAEDFFYTSQGGDTSIEGVDDAEDFEKTRQAFTLLGVKESHQMSIFKIIASILHLGSVAIQAERDGDSCSISPQDVYLSNFCRLLGVEHSQMEHWLCHRKLVTTSETYVKTMSLQQVINARNALAKHIYAQLFGWIVEHINKALHTSLKQHSFIGVLDIYGFETFEVNSFEQFCINYANEKLQQQFNSHVFKLEQEEYMKEQIPWTLIDFYDNQPCIDLIEAKLGILDLLDEECKVPKGTDQNWAQKLYDRHSSSQHFQKPRMSNTAFIIVHFADKVEYLSDGFLEKNRDTVYEEQINILKASKFPLVADLFHDDKDPVPATTPGKGSSSKISVRSARPPMKVSNKEHKKTVGHQVCTSLSTQQIVKILNLYTPLNEFEERVTVAFIRTIQAQLQERNDPQQLLLDAKHMFPVLFPFNPSSLTMDSIHIPACLNLEFLNEV

SEQ ID NO: 3608 - DNA, 3955 bp, Homo sapiens
ccgtagctgcgccgccgcggcgggagtaaaggtcgcgccgccgggagcgagccggccgcggcgcctgcgggaagccggcggggcaggtcggagaagagcgagaagatcgagaaactccaggccagcccgggaacatggcgccaggcgggccagccgcggactgagagccgcggggcagccaggagccggggcccgagccccgcccggcccgggccatgtcggtgggcgagctctacagccagtgcacaagggtctggatccctgaccctgatgaggtatggcgctcagctgagttaaccaaggactacaaagaaggagacaagagcctacagctcagactggaggatgaaacgattctggaatacccaattgatgtacaacgcaaccagctgcccttcttacggaatccagatatcttggtgggagaaaatgacctgactgcccttagctatcttcatgagcctgcagttttgcataatttgaaggtccgtttcctggagtccaaccatatctacacttactgtggtatcgtacttgttgccattaatccttatgaacagttgccaatctatggacaagatgtcatctatacctacagtggccaaaacatgggagacatggacccccacatctttgctgtggcagaagaagcctacaagcagatggccagagatgagaagaatcagtccatcatagtcagtggggagtctggagccgggaagacggtatcagccaagtatgccatgcgctatttcgccaccgttggtggctcggccagtgaaaccaacatcgaagagaaggtgctggcatccagtcccatcatggaggccattggaaatgccaagaccacccgcaatgacaacagcagccgttttggcaagtacatccagattggctttgacaaaaggtaccacatcatcggggccaacatgaggacttacctcttggagaagtccagagtggtcttccaggcagatgatgagaggaattaccacatcttttaccagctctgtgctgctgccggtcttccagaatttaaagagcttgcactaacaagtgcagaggactttttctatacatcacagggaggagacacttccatcgagggtgtggacgatgctgaggactttgagaagactcgacaagccttcacactcctcggagtgaaagagtcccatcagatgagcatttttaagataattgcttctatcttgcaccttggaagtgtggcgattcaggctgagcgtgatggtgattcctgtagtatatcaccccaggatgtatacctaagcaacttctgccgactgctaggggtggagcacagtcagatggagcactggctgtgtcatcgcaagctggtcaccacctcggagacctacgtcaagaccatgtccctgcagcaggtgatcaatgcgcgcaacgccctggcgaagcacatctatgcccagttgttcggctggattgtggagcacatcaacaaggccctgcacacctccctcaagcagcactccttcatcggggtcctggacatctatgggtttgagacatttgaggtaaacagctttgagcagttctgtatcaactatgcaaatgaaaagctccagcagcagttcaactcgcatgttttcaaactggagcaagaagaatacatgaaggaacagatcccttggaccctgattgatttttatgataaccaaccttgtatcgacctcattgaagccaagctgggtatcttggacctgttggatgaagaatgtaaggtccccaaaggaactgaccagaactgggctcagaagctctatgaccggcactccagcagccagcacttccagaagccccgcatgtccaacacggccttcatcatcgtccactttgcagacaaggtggagtacctctctgatggttttctggagaaaaacagagacacggtgtatgaagagcagatcaatatcctgaaggccagcaagttcccactagtggctgacttgtttcatgatgacaaggaccctgttcctgccaccacccctgggaaggggtcatcttcgaagatcagcgtccgttctgccagaccccccatgaaagtctccaacaaggagcacaagaaaaccgttggccaccagttccagactagcttggccacccaacagattgtcaaaattttaaacctttatactcccctgaatgaatttgaagaacgggtaacagtggcctttatacgaacaatccaggcacaactacaagagcggaatgaccctcagcaactgctattagatgccaagcacatgtttcctgttttgtttccatttaatccatcttctctaaccatggactcaatccacatcccagcgtgtctcaatctggaattcctcaatgaagtctgaagatgcatgtttccagcattagtttgattcccaatgtgagcaagaaggaagtatatacagtaaagtaaattcaaggatctgttaaatctggtaaaagtagatcaaatcagagattgacagcctgtggagggtgctgaactatacagaattagacacaactatgtcattattttttgtacctactgctcagaataaaaacacttgaaatatggaagattttaagtttgatttcagtccaacacatatacataatttatagacaccaagcagtccccatagacatataaaaggtgtcaattctataaaacgaagctgcctagttttgatctttgcatagaactagagaatgtccaaattaaaataccaaatatatataagtcacataaattgccttcaaagggctttaacaaataatggtactaataaccatgataatggcatatactgacatttcccaaagtttgcaaaccataggtgtggttgagtttgtggtgagatgttttaagaacaaaaatatggggatgagacttctgagaaatattcccaaaatattttttaatggctgattatacacagacagtggtgtaactgacctccagaccagacattttgagtactggtttctgaagcaaaattagaagtgccagtcctcagtgtgctcaaacgcttttgtgttatcttgatttaatggaagagattattaaaatgctgctatcccaaactccaagtgagaaagatggaaaaatattttgtttctgatgctagtccatacactttccaagtcccacaaaactttcacaaaaatgtatataagctaaatattagaaacggataacaaacttgttttatttatagatgtaaaaaccaaacaagtcaatatgaaagcttttaatctcttaataccattaagcttccagtaagagcatcacataatgctctactgttccagaaaccaaatagtaaaacaaactaaagttcgcacatcagatcatctgaaaaaccttcaaaaataatcagttcagggatattatacaaaagtttgggttttttttttttaagagaataaaatggcttaggtcaactttcccttttcaggttattttcaacgtttttcaaatttagcacacaaaaaattgtaaatatctctcccacaaaataaggattttaaaaaagtaattcagtaatataacaggcttagatgtttgctgctcttagaattttttttaacttgtttttggtttcttcaaaagcaagcattcaattggaaacccatattctttccacacttttttttactgtcttttctgtatttcttgatagcagtatgctgttcccataagaaaaaaatggtatttgcaaatcatggaagaacagcctctgtattacattgagaaaataagatttatccatgaattggaagtagaacagcctgccttcaccctcttttactcaaccacccaacttaaaaggctcttggaaacacagcacactccacgctaccttctgcactgtgcccttagagcacagcttcctcagttgttctctgcatctcctggggcttaggccagtcttag

SEQ ID NO: 3609 - protein, 721 aa, Homo sapiens
MSVGELYSQCTRVWIPDPDEVWRSAELTKDYKEGDKSLQLRLEDETILEYPIDVQRNQLPFLRNPDILVGENDLTALSYLHEPAVLHNLKVRFLESNHIYTYCGIVLVAINPYEQLPIYGQDVIYTYSGQNMGDMDPHIFAVAEEAYKQMARDEKNQSIIVSGESGAGKTVSAKYAMRYFATVGGSASETNIEEKVLASSPIMEAIGNAKTTRNDNSSRFGKYIQIGFDKRYHIIGANMRTYLLEKSRVVFQADDERNYHIFYQLCAAAGLPEFKELALTSAEDFFYTSQGGDTSIEGVDDAEDFEKTRQAFTLLGVKESHQMSIFKIIASILHLGSVAIQAERDGDSCSISPQDVYLSNFCRLLGVEHSQMEHWLCHRKLVTTSETYVKTMSLQQVINARNALAKHIYAQLFGWIVEHINKALHTSLKQHSFIGVLDIYGFETFEVNSFEQFCINYANEKLQQQFNSHVFKLEQEEYMKEQIPWTLIDFYDNQPCIDLIEAKLGILDLLDEECKVPKGTDQNWAQKLYDRHSSSQHFQKPRMSNTAFIIVHFADKVEYLSDGFLEKNRDTVYEEQINILKASKFPLVADLFHDDKDPVPATTPGKGSSSKISVRSARPPMKVSNKEHKKTVGHQFQTSLATQQIVKILNLYTPLNEFEERVTVAFIRTIQAQLQERNDPQQLLLDAKHMFPVLFPFNPSSLTMDSIHIPACLNLEFLNEV

SEQ ID NO: 3610 - DNA, 3080 bp, Homo sapiens
gttccagagcaggtggcaacagcctgtgaagagcagctctcctggcagcgtccctgactggcgcatttctgacggctgcccatgggccgcactggtcacctccaactgcaagcaggattttacccccaccatcccaggccgggctgatgtctgttctcacactgcttcctctgcttccaggaccttaaagaactggtagaaaagctggaaaagaatgagaggaagctcaaaaagcaactgaagatttacatgaagaaagcccaggacctagaagctgcccaggcattggcccagagtgagaggaagcgccatgagctcaacaggcaggtcacggtccagcggaaagagaaggatttccagggcatgctggagtaccacaaagaggacgaggccctcctcatccggaacctggtgacagacttgaagccccagatgctgtcgggcacagtgccctgtctccccgcctacatcctctacatgtgcatccggcacgcggactacaccaacgacgatctcaaggtgcactccctgctgacctccaccatcaacggcattaagaaagtcctgaaaaagcacaatgatgactttgagatgacgtcattctggttatccaacacctgccgccttcttcactgtctgaagcagtacagcggggatgagggcttcatgactcagaacactgcaaagcagaatgaacactgtcttaagaattttgacctcaccgaataccgtcaggtgctgagtgacctttccattcagatctaccagcagctcattaaaattgccgagggcgtgttacagccgatgatagtttctgccatgttggaaaatgagagcattcagggtctatctggtgtgaagcccaccggctaccggaagcgctcctccagcatggcagatggggataactcatactgcctggaagctatcatccgccagatgaatgcctttcatacagtcatgtgtgaccagggcttggaccctgagatcatcctgcaggtattcaaacagctcttctacatgatcaacgcagtgactcttaacaacctgctcttgcggaaggacgtctgctcttggagcacaggcatgcaactcaggtacaatataagtcagcttgaggagtggcttcggggaagaaaccttcaccagagtggagcagttcagaccatggaacctctgatccaagcagcccagctcctgcaattaaagaagaaaacccaggaggacgcagaggctatctgctccctgtgtacctccctcagcacccagcagattgtcaaaattttaaacctttatactcccctgaatgaatttgaagaacgggtaacagtggcctttatacgaacaatccaggcacaactacaagagcggaatgaccctcagcaactgctattagatgccaagcacatgtttcctgttttgtttccatttaatccatcttctctaaccatggactcaatccacatcccagcgtgtctcaatctggaattcctcaatgaagtctgaagatgcatgtttccagcattagtttgattcccaatgtgagcaagaaggaagtatatacagtaaagtaaattcaaggatctgttaaatctggtaaaagtagatcaaatcagagattgacagcctgtggagggtgctgaactatacagaattagacacaactatgtcattattttttgtacctactgctcagaataaaaacacttgaaatatggaagattttaagtttgatttcagtccaacacatatacataatttatagacaccaagcagtccccatagacatataaaaggtgtcaattctataaaacgaagctgcctagttttgatctttgcatagaactagagaatgtccaaattaaaataccaaatatatataagtcacataaattgccttcaaagggctttaacaaataatggtactaataaccatgataatggcatatactgacatttcccaaagtttgcaaaccataggtgtggttgagtttgtggtgagatgttttaagaacaaaaatatggggatgagacttctgagaaatattcccaaaatattttttaatggctgattatacacagacagtggtgtaactgacctccagaccagacattttgagtactggtttctgaagcaaaattagaagtgccagtcctcagtgtgctcaaacgcttttgtgttatcttgatttaatggaagagattattaaaatgctgctatcccaaactccaagtgagaaagatggaaaaatattttgtttctgatgctagtccatacactttccaagtcccacaaaactttcacaaaaatgtatataagctaaatattagaaacggataacaaacttgttttatttatagatgtaaaaaccaaacaagtcaatatgaaagcttttaatctcttaataccattaagcttccagtaagagcatcacataatgctctactgttccagaaaccaaatagtaaaacaaactaaagttcgcacatcagatcatctgaaaaaccttcaaaaataatcagttcagggatattatacaaaagtttgggttttttttttttaagagaataaaatggcttaggtcaactttcccttttcaggttattttcaacgtttttcaaatttagcacacaaaaaattgtaaatatctctcccacaaaataaggattttaaaaaagtaattcagtaatataacaggcttagatgtttgctgctcttagaattttttttaacttgtttttggtttcttcaaaagcaagcattcaattggaaacccatattctttccacacttttttttactgtcttttctgtatttcttgatagcagtatgctgttcccataagaaaaaaatggtatttgcaaatcatggaagaacagcctctgtattacattgagaaaataagatttatccatgaattggaagtagaacagcctgccttcaccctcttttactcaaccacccaacttaaaaggctcttggaaacacagcacactccacgctaccttctgcactgtgcccttagagcacagcttcctcagttgttctctgcatctcctggggcttaggccagtcttag

SEQ ID NO: 3611 - protein, 418 aa, Homo sapiens
MKKAQDLEAAQALAQSERKRHELNRQVTVQRKEKDFQGMLEYHKEDEALLIRNLVTDLKPQMLSGTVPCLPAYILYMCIRHADYTNDDLKVHSLLTSTINGIKKVLKKHNDDFEMTSFWLSNTCRLLHCLKQYSGDEGFMTQNTAKQNEHCLKNFDLTEYRQVLSDLSIQIYQQLIKIAEGVLQPMIVSAMLENESIQGLSGVKPTGYRKRSSSMADGDNSYCLEAIIRQMNAFHTVMCDQGLDPEIILQVFKQLFYMINAVTLNNLLLRKDVCSWSTGMQLRYNISQLEEWLRGRNLHQSGAVQTMEPLIQAAQLLQLKKKTQEDAEAICSLCTSLSTQQIVKILNLYTPLNEFEERVTVAFIRTIQAQLQERNDPQQLLLDAKHMFPVLFPFNPSSLTMDSIHIPACLNLEFLNEV

SEQ ID NO: 3612 - DNA, 1965 bp, Homo sapiens
agcgggttccccgtccgcggcggccctgcaggcgaccccgcgtccccaccggcgggagctcggggaagagcgggcggcggcgctgctgctggcggcggccggctggatgcgagacccgcgcagacccggcggcggacggcggctctcgactccggagagcggatcgcggggcgcaggagcccgatcgcgctggccatggcctccaactttaacgacatagtcaagcagggctacgtgaaaatccgcagcaggaagcttgggattttcagacgatgctggttggttttcaagaaggcttctagcaaaggacccagaaggttagaaaaatttccagatgaaaaggcagcttatttcagaaactttcataaggtaactgaactgcacaatatcaaaaatataaccagactgccccgagagacaaagaagcatgcggtggcaatcatctttcacgatgaaacatcgaagacatttgcctgtgagtcagagctggaggccgaggagtggtgcaagcacctctgcatggagtgtctggggacaaggctcaatgacatcagccttggggagcccgaccttctggccgcaggagtgcagcgggaacagaatgagagattcaacgtgtatcttatgcctacgccaaacctggatatttatggtgaatgcacaatgcagatcactcatgaaaatatctatctctgggatatccacaatgccaaggtcaaactggtgatgtggcctctcagctcactgaggagatacggtcgggactcaacgtggtttacgtttgagtcaggaagaatgtgtgacacaggagaaggactattcacttttcaaacaagggaaggagaaatgatctatcagaaggttcattctgcgacactggccatagctgagcaacatgaaagattaatgctagaaatggaacagaaggcccggcttcagacaagcttgactgaaccaatgacattatccaaatcaatatctcttcctcgcagcgcgtactggcatcacatcactcgtcagaacagcgttggtgaaatctacagtttgcaaggtcatgggtttggttcgtcaaagatgtctcgtgcacagacatttcccagctacgccccagaacagagtgaagaggcccagcagccgttgtcgcggtccagcagctatggattcagctacagctccagcctcatccaatgacacacagagagccgctgttgactagagagacagtctgtcctggacccgtctgtggggtcattaccctctgcctcctggaagaccaattgcagtacaaattgaaatgggtcggctctagccccagtcccattggaaggttaaaaactggagttctgcttccttgattcagtggctaagtcctttatttattgaatttctttgggggaatctatgttttacataaatagaatccaaatcgtatgaacagttatttaaataaacaaaattctttgggtctgacagtaacagaaacctcagcactgggaaaagctgcccacactggggtatgcctgggtgatgggcacctctcactgacctcacagcgcagtccgcccatctgagcacagggtctgtccttagacataatggtgaccctccacaagctctgtggcttttaaagttctgacagggataaatacagtaagctctgcaaatgacatcgtagctgcatataaataaacccagtgacaattaaaggaacatgaaattcagaacacactattaagcagggccctgtagctctactcgtgtgtgtgtgtgcgtgtgtgtgtgtgtgtgtagacaaatggatattgctatatccatctatatataacaagtatatatcaaacatgtgctgggggtgacaggatatgctcacttaaattgttgaaaaccataatttggtgcattaaagttaagattgttatgttgaatagctatttttaaaatagtgctgtaaaaaaaaaaaaaaaa

SEQ ID NO: 3613 - protein, 331 aa, Homo sapiens
MASNFNDIVKQGYVKIRSRKLGIFRRCWLVFKKASSKGPRRLEKFPDEKAAYFRNFHKVTELHNIKNITRLPRETKKHAVAIIFHDETSKTFACESELEAEEWCKHLCMECLGTRLNDISLGEPDLLAAGVQREQNERFNVYLMPTPNLDIYGECTMQITHENIYLWDIHNAKVKLVMWPLSSLRRYGRDSTWFTFESGRMCDTGEGLFTFQTREGEMIYQKVHSATLAIAEQHERLMLEMEQKARLQTSLTEPMTLSKSISLPRSAYWHHITRQNSVGEIYSLQGHGFGSSKMSRAQTFPSYAPEQSEEAQQPLSRSSSYGFSYSSSLIQ

SEQ ID NO: 3614 - DNA, 2750 bp, Homo sapiens
ggagcagacacacagacccgggccggaggcccctcttctagccctgcgggaaccggacagttccccaactggggactctggaaccacagctcctaaatcatcaaattctcaagctttttttttccctctcttcgtcccagccatcccagtcttcttcttcttttttttttttttaacttattgtttttttcgctcctgtcattatgaaagtggtcacgccattcaatattaagacttggagggaattggggaaagaaaagaaagaatctaaaagaagagaagcgaccggtgcttttaagggtgtctaattttcaaaagagacgtctgggagtattttgctctgggcgtttggagcaacttcgcggacagcggagctcgcccagcatggatgttccaggttcacaggcgcctttcttctgagaacgaccctggccttgaacgtcagagccggggacgaaggcccccggaggctgctgcgagctccgcgcgttccttcgcgcccttccgcgccgctcgcgccggcgccggcctccacccccgcgcgccgcctcccaccagtcccgatgcaggcgcccggccgggggccactcgggctgcggctgatgatgcccgggcgccggggggcgctgcgcgagcctggcggctgcggatcctgcctgggggtggcgctggccctgctgttgctgctactgcccgcctgctgccccgtgcgggcgcagaacgacacggagcccatcgtgctggagggcaagtgcctggtggtgtgcgactccagcccgtcggcggacggcgccgtcacctcctccctaggcatctccgtgcgctccggcagcgccaaggtggccttctccgccacgcggagcaccaaccacgagccgtccgagatgagcaaccgcaccatgaccatctatttcgaccaggtattagtaaatattggcaaccactttgatcttgcttccagtatatttgtagcaccgagaaaagggatttatagcttcagcttccacgtggtcaaagtgtataacagacaaaccatccaggtcagtttaatgcagaatggctacccagtgatctcggcctttgcaggagaccaggatgtcaccagagaagctgctagcaatggcgtgctgctgctcatggaaagggaagacaaagtgcatctcaaacttgagagaggcaacctcatggggggctggaaatactccacattctcgggcttcttggtgtttcctctataaacacagagccccctagatggtgggggaatggcaaactggacccaggactccgccctttaaaacaccctgaacttactggaattggacaccttgtttccaacctccgtcagactgttgcagtagaagaatgatttcctttgaaacctccagtacttttgtttttgttttttggaatactgacaattcctcgggaacctggcctctaattagttttagatgacaaggtcttaaggagaaatgaaattatcgatttgagcaatttgtacctgtgattgtaaagtcaatatcggattttattgttgggaccatggacctcttttgtttgtatgttgtattgtcgtcccaacggaaggagagctcctgactccaggatgggctgcaggttgcagtcagggcttgaagtaggagcccagcaaagaaccacctgctggacagtccttgacatgtgttctgtgtgtgtctgtatagccttaagaaaaagaatggcttcactttcattctgtattcttccccccaccatgtggctgggaggacttgggagggggatggggacattgggaacctgtcaagaagtgctttatccagagaagcaaattttgcacgattggactgcaatttttgttttgtattgtttgtgttttttcttgaaaagctttacttttctttccacactcagctctccctcctcaaccccacttttatttttcttgctggggttgaggagagaaaatatagaattcctggataagaccaaacaaaacaaaacattaaaatacctgtatgttttgttttagacgagaccaaactaaacaaaaagtatctgtttatcaaagtaaaagtaacacaatggacaattctgcttattctctcaaagagattctaagatgcacctttagaactattaatagcaacctgcatttttttttaatttatacttcagaatcctttaagaacctggtgttcctgagtggtcctgaatcatataagttggtaatggaagctgtaatgaccaagtcccctaaacatactatgtctttgccacgtgtgctgtgacttctctgtgggtgatttaatttatttggatccacctctgagtgagcgcacagtgatcaggtgcttcaaagccaacagaccagctcctcttcctccggatcctcttttgatctgcccaggaaagggatgcattgacactctcctgcatgcacctggcgagaagccacctgaaagtcactgtggttaaagatattggtggaggtaccccaggagcactgttacaaatccttcttgttttggcatctcgtacaacattattaagacacagctgagagttgatgggtgtgtaatgcatatgccaaggaaatgtcactaatcccaaagcaatcaaaaaggagacctcaaaccagatgttaatttgttctttgtgtaacaatgtaaccaaaatattgatgataaaagtcataatttaagattcagaataaatgggtttgatgtctggcaaaaaaaaaaaaaaaa

SEQ ID NO: 3615 - protein, 224 aa, Homo sapiens
MQAPGRGPLGLRLMMPGRRGALREPGGCGSCLGVALALLLLLLPACCPVRAQNDTEPIVLEGKCLVVCDSSPSADGAVTSSLGISVRSGSAKVAFSATRSTNHEPSEMSNRTMTIYFDQVLVNIGNHFDLASSIFVAPRKGIYSFSFHVVKVYNRQTIQVSLMQNGYPVISAFAGDQDVTREAASNGVLLLMEREDKVHLKLERGNLMGGWKYSTFSGFLVFPL

SEQ ID NO: 3616 - DNA, 3327 bp, Homo sapiens
atgagccgccgggcggcagagaggatgcttcgagctgacggggacttccttgtgcgagacagcgtcaccaaccccgggcagtatgtcctcaccggcatgcacgccgggcagcccaagcacctgctgctcgtggaccccgagggcgtggtacggacgaaggacgtgctgtttgagagcatcagccacctgatcgaccaccacctgcagaacgggcagcccatcgtggccgccgagatccgactgcgctgccgccgccgccgccgcccgcatcgaagctccggccgcgtcccccgcgccagccccgggagcctgcgcgccgagacccctgcgtgtctgcgaacagacctccggcctcgggccatcaccccgggcagacgctgcagcccctgtccgggcctcttgcctgccgcccccatgagaaaaaccaacatgtggttcttggagcggcttcgggggtctggggaaaacggtgctgcccggggcgtggggagtgaggcgggggacaaggcctccaaggggcccctgtacagcaatgtgttgacgcccgacaagatccccgactttttcatcccccccaagctgccctcgggccccgcggagggcgagggacaggccgcgctgggcccctccacgtcggaacagaacctggcctctgcggccccccgccagaccccacggagcccccggctgcctgccaagctggcagccgagagcaagagcctgctgaaggcagccacccggcacgtgatccagatcgagagtgccgaggactggctgtccgaggaggccactgacgccgacccccaggcccagggtgccatgtccctgccctcggtgcccaaggcccagacgtcctacggcttcgccatgctggctgagagcccccacacgaggcgcaaggagtctctgttccacagtgagcacggggctctggcccaggtgggctccccaggggccgggcgccgccgggcagctgccaaggccaacgggggtgatgggggccccagggaggctggcggggccctcatgagccccggccgctacttcagtggcggggagagcgacacagggtcctcggccgagtcctcccccttcgggtcccctctgctgtcccgctccgtgtctctgctcaaaggtttcgcccaggacagccaggccaaggtgagccagctccggcactccgtgggccgccacggctccctgtctgcggacgacagcaccccggacgccagccccgggagccggcgccgcctgacccgccgggcacccccggaacctggccccgagtcgggccaggcgcgtggggagcacacggtccacgtgggccctcggggcagcgtgcggctgctggccgagtacgaggccggccaggcccgcctgcgggtgcacctgctggccgccgagggcctctacgaccgcctgtgcgacgcccgcagcatcaactgctgcgtgggcctgtgcctggtgccgggcaagctgcagaagcagcgcagcaccatcgtgaagaacagccgccgccccgtcttcaacgaggatttcttcttcgacggcctggggcccgccagcgtccggaaactggccctcaggatcaaggtggtgaacaagggcagcagcctcaagcgggacacgctgctcggggagaaggagctgcccctgacctccctgctccccttcctgtagagcggggacctgctcgctgtccgctcgggtgcagagggcagaccccggtctctcctccacaccgggtgctggcgggcgggtccgctggcttgggctggggctggccggggaggggctcacactcaggctgggctgggcgctgatgctgtagctgacgcagggtttcctgggtcacccgatgctgactggagtattatttttcatgaattaatttctcctttggaggaggaggaggaggaggagaggggcctcgggggaagagaaggggccacttcgcggggcagagggtccccctttgcccctccacactgcctcgcgcctttcacgcagagttctagaaggaggttctcaggggttcaggaatccgtgcatgtggccagggcggggccgtggacagggaggtgacaagtcttggagcccacagtctccttcactgcacgtgtgtcttcctcccccacagcctgccgccatccagttcccaccccgcggagagcagggcctcgcggccacaccaggcccaggctctgcccgggacgccccctcccaggggtcaggcttggctctgggagaccccagcttcccaggctccggtggggagtggggccaggcgagggtgccctgacgagggtgggcgcggagggagcagccgctgccacagtcggagcagaggaggtcttggcagaggtccgcggggaggagacggctctcctggcctgttttcctccaacactgtcgccgctggctttttgggtacaggcccgtctggccatttctgctgtggcgccggagggtcttgctcagagatgcccagagagcagccctatggcccatccgtcctcgctgggggctgccaccccgtcgcccttttgtccagcgtctgcagctgggagcgacacgcagtgattgacggccgtggctttgacgccacgtgtgtaaataggctgtggctacggtgggtgggtcggagcccaggaggcagctggggggacctggctatggcctttcctgctgttaggtggctgcaaggcttccattgtgtggttatgtgggtccttgaatgattttggggaggtttccagctcagaatgatgcagaaatgataagactcaaagcaggggccaggccaggccagtgccttcgcctctcccggctgctggtgggcacggaggaaccagggcacatctgtggtacccagggacgtcccttgtcagcccgtttgccacacattgttcctcttgtccaggggagggtggaggagctgcttcccaggactggaggagcagctgggcccctgctgcacgtccggtgggacacacctgtgagccctccagagggagagtgcaggccccttctgagcctggtgttgcagggctccgctctctcccggaagccagggcacccagggcggaggctcctcaggccggggaggcggggagggtgccctgcatggagagagacgccggcgctccccgccttctctgatgctcacccctcccaggccctgttctccctggggtcccccgtttagtagcccccctgcactctttgatatcttagtgtctgaggttgactgtgggtaaatctttaagacactccccagctgtgtttgtttataaatgctgtttatagtgcaataaaggtgtttcg

SEQ ID NO: 3617 - protein, 559 aa, Homo sapiens
MSRRAAERMLRADGDFLVRDSVTNPGQYVLTGMHAGQPKHLLLVDPEGVVRTKDVLFESISHLIDHHLQNGQPIVAAEIRLRCRRRRRPHRSSGRVPRASPGSLRAETPACLRTDLRPRAITPGRRCSPCPGLLPAAPMRKTNMWFLERLRGSGENGAARGVGSEAGDKASKGPLYSNVLTPDKIPDFFIPPKLPSGPAEGEGQAALGPSTSEQNLASAAPRQTPRSPRLPAKLAAESKSLLKAATRHVIQIESAEDWLSEEATDADPQAQGAMSLPSVPKAQTSYGFAMLAESPHTRRKESLFHSEHGALAQVGSPGAGRRRAAAKANGGDGGPREAGGALMSPGRYFSGGESDTGSSAESSPFGSPLLSRSVSLLKGFAQDSQAKVSQLRHSVGRHGSLSADDSTPDASPGSRRRLTRRAPPEPGPESGQARGEHTVHVGPRGSVRLLAEYEAGQARLRVHLLAAEGLYDRLCDARSINCCVGLCLVPGKLQKQRSTIVKNSRRPVFNEDFFFDGLGPASVRKLALRIKVVNKGSSLKRDTLLGEKELPLTSLLPFL

SEQ ID NO: 3618 - DNA, 1083 bp, Homo sapiens
atgatcagccactcccgcacgccactaccgacccgcttctgcctccccgggacccacttccgcctccccaagacccgcttccgcctccccaagacccgcttccgcctccccggaacctacttccgcctccccaagaccctcttctgcctccccgggaccggcttccgcctccccaggacccgcttccgcctccccgggacccacttccgcctcccccggtacatgggctgcatcgaggttctccgctctatgcgctccctggactttaacacgcgcacgcaggtgaccagggaagccatcaaccggctccatgaggccgtgcctggcgtccggggatcctggaagaaaaaggcccccaacaaggccctggcgtccgtcctgggcaagagcaaccttcgctttgccggcatgagcatctccatccacatctccactgatggcctcagcctctccgtgcctgccacgcgccaggtcatcgccaaccaccacatgccgtccatctccttcgcgtcaggcggagacacggacatgacggattacgtggcctacgtcgccaaggaccccatcaaccagagagcctgccacatcctggagtgctgtgagggcctggcacagagcatcatcagcaccgtgggccaagctttcgagctgcgcttcaagcagtacctgcacagcccgcccaaggtggcgctgcccccagaaaggctggcagggccggaggagtcggcctggggggacgaggaggactctttggagcacaattactacaacagcatcccggggaaggagccgccgctgggcgggctagtggactccaggctggccctgacacagccctgcgccctcacggccctcgaccagacgggcgggttaccacagggagaccagagcagcatccgccctgcagccagcagcacagctccaccgggggacggctacgtgcaggcggacgcccggggccccccggaccacgaggagcacctgtatgtcaacacccagggtctggacgcccccgagccggaggacagccccaaaaaggatctgtttgacatgccgaatgcggccgagcagtgtaatgggtga

SEQ ID NO: 3619 - protein, 360 aa, Homo sapiens
MISHSRTPLPTRFCLPGTHFRLPKTRFRLPKTRFRLPGTYFRLPKTLFCLPGTGFRLPRTRFRLPGTHFRLPRYMGCIEVLRSMRSLDFNTRTQVTREAINRLHEAVPGVRGSWKKKAPNKALASVLGKSNLRFAGMSISIHISTDGLSLSVPATRQVIANHHMPSISFASGGDTDMTDYVAYVAKDPINQRACHILECCEGLAQSIISTVGQAFELRFKQYLHSPPKVALPPERLAGPEESAWGDEEDSLEHNYYNSIPGKEPPLGGLVDSRLALTQPCALTALDQTGGLPQGDQSSIRPAASSTAPPGDGYVQADARGPPDHEEHLYVNTQGLDAPEPEDSPKKDLFDMPNAAEQCNG

SEQ ID NO: 3620 - DNA, 1589 bp, Homo sapiens
actcgatcccggccccacttccaggccagtgtccggccgaccagcctgccttgggccagggccccacgactccctgctgcgggacaagaggccgtctgtgcggctgtggtcgtgggagggtgtggtgaggccgtgaaggtggggacggtgcctgggcctgtggccgccagagctgctgcggctcagaaggtagcaccaggccccgtgggtgctgtgggggccatcgcctgcccaccatggggaccctcagctgcgactccaccccacggctggccacagccccccttggccggcgagtgacggagggccagattccggagaccggcctgaggaagtcctgtgggacggccaccctggagaacggctcggggccaggcttgtatgtcctgccgtccaccgtgggcttcatcaaccacgactgcaccagggtggccagtcccgcctactcgctcgtccggaggcccagtgaggcaccacctcaggacaccagcccgggccccatctacttcttggaccccaaagtcacacgctttggccgcagctgcacccctgcctactccatgcagggccgggccaagtctcggggtccggaggtgacgccaggccctggggcctacagcccagagaaggtgccccctgtgcgccatcggacaccgccggctttcaccctgggctgccgcctccccctgaagcccctggacacctcagcccctgcccctaatgcctacaccatgccccctctgtggggctcacagatcttcaccaagcccagcagccccagctacacggtggtgggccgcaccccccccgcccgccccccgcaggatcctgctgagataccaggcccgggccagtacgacagcccggacgcaaacacctaccgccagcgcctgcctgccttcaccatgctggggcggccccgggccccgcgacccctggaggagacccccggccctggcgcccactgcccagagcaggtcaccgtgaacaaagccagggctccagcgttctctatgggcatccgccactcgaaacgggccagcaccatggccgccaccacgccctcccggcctgcggggcacaggctgcccggccgctgctgctaggccaggcctgtttcccacacagtgaacgggggctggcgggcctctcctggggcctggctttggctggaggggctagaaggcgagaggggctgggaaaggagtcttccctcccctttcctgaactgtccaggtccttctaggacacctgatccttccagtccctgggggctgtgacccatggccctgtgcagggtacagggtgagtctccttccagtgccccagtttcttccaggtcacgccaggccaggccaggccaggtggggaaagggacaccttccggccctccccagtagctggctggagatggagcttctggtgtcccagaactcggcgtccagctccactagggcctagatccccatcacagcttgggttagccccggtcccagcccaagctcaggctggaggcagccccgaggcctgtgcctttcccactccaccttctacagttgcttagccaataaacctttcctgggctggag

SEQ ID NO: 3621 - protein, 289 aa, Homo sapiens
MGTLSCDSTPRLATAPLGRRVTEGQIPETGLRKSCGTATLENGSGPGLYVLPSTVGFINHDCTRVASPAYSLVRRPSEAPPQDTSPGPIYFLDPKVTRFGRSCTPAYSMQGRAKSRGPEVTPGPGAYSPEKVPPVRHRTPPAFTLGCRLPLKPLDTSAPAPNAYTMPPLWGSQIFTKPSSPSYTVVGRTPPARPPQDPAEIPGPGQYDSPDANTYRQRLPAFTMLGRPRAPRPLEETPGPGAHCPEQVTVNKARAPAFSMGIRHSKRASTMAATTPSRPAGHRLPGRCC

SEQ ID NO: 3622 - DNA, 1546 bp, Homo sapiens
gggactgagcatggatttcggactggccctcctgctggcggggcttctggggctcctcctcggccagtccctccaggtgaagcccctgcaggtggagcccccggagccggtggtggccgtggccttgggcgcctcgcgccagctcacctgccgcctggcctgcgcggaccgcggggcctcggtgcagtggcggggcctggacaccagcctgggcgcggtgcagtcggacacgggccgcagcgtcctcaccgtgcgcaacgcctcgctgtcggcggccgggacccgcgtgtgcgtgggctcctgcgggggccgcaccttccagcacaccgtgcagctccttgtgtacgccttcccggaccagctgaccgtctccccagcagccctggtgcctggtgacccggaggtggcctgtacggcccacaaagtcacgcccgtggaccccaacgcgctctccttctccctgctcgtcgggggccaggaactggagggggcgcaagccctgggcccggaggtgcaggaggaggaggaggagccccagggggacgaggacgtgctgttcagggtgacagagcgctggcggctgccgcccctggggacccctgtcccgcccgccctctactgccaggccacgatgaggctgcctggcttggagctcagccaccgccaggccatccccgtcctgcacagcccgacctccccggagcctcccgacaccacctccccggagtctcccgacaccacctccccggagtctcccgacaccacctcccaggagcctcccgacaccacctccccggagcctcccgacaagacctccccggagcccgccccccagcagggctccacacacacccccaggagcccaggctccaccaggactcgccgccctgagatctcccaggctgggcccacgcagggagaagtgatcccaacaggctcgtccaaacctgcgggtgaccagctgcccgcggctctgtggaccagcagtgcggtgctgggactgctgctcctggccttgcccacctatcacctctggaaacgctgccggcacctggctgaggacgacacccacccaccagcttctctgaggcttctgccccaggtgtcggcctgggctgggttaagggggaccggccaggtcgggatcagcccctcctgagtggccagcctttccccctgtgaaagcaaaatagcttggaccccttcaagttgagaactggtcagggcaaacctgcctcccattctactcaaagtcatccctctgttcacagagatggatgcatgttctgattgcctctttggagaagctcatcagaaactcaaaagaaggccactgtttgtctcacctacccatgacctgaagcccctccctgagtggtccccacctttctggacggaaccacgtactttttacatacattgattcatgtctcacgtctccctaaaaatgcgtaagaccaagctgtgccctgaccaccctgggcccctgtcgtcaggacctcctgaggctttggcaaataaacctcctaaaatgataaaaaaaaaa

SEQ ID NO: 3623 - protein, 382 aa, Homo sapiens
MDFGLALLLAGLLGLLLGQSLQVKPLQVEPPEPVVAVALGASRQLTCRLACADRGASVQWRGLDTSLGAVQSDTGRSVLTVRNASLSAAGTRVCVGSCGGRTFQHTVQLLVYAFPDQLTVSPAALVPGDPEVACTAHKVTPVDPNALSFSLLVGGQELEGAQALGPEVQEEEEEPQGDEDVLFRVTERWRLPPLGTPVPPALYCQATMRLPGLELSHRQAIPVLHSPTSPEPPDTTSPESPDTTSPESPDTTSQEPPDTTSPEPPDKTSPEPAPQQGSTHTPRSPGSTRTRRPEISQAGPTQGEVIPTGSSKPAGDQLPAALWTSSAVLGLLLLALPTYHLWKRCRHLAEDDTHPPASLRLLPQVSAWAGLRGTGQVGISPS

SEQ ID NO: 3624 - DNA, 1285 bp, Homo sapiens
gggactgagcatggatttcggactggccctcctgctggcggggcttctggggctcctcctcggccagtccctccaggtgaagcccctgcaggtggagcccccggagccggtggtggccgtggccttgggcgcctcgcgccagctcacctgccgcctggcctgcgcggaccgcggggcctcggtgcagtggcggggcctggacaccagcctgggcgcggtgcagtcggacacgggccgcagcgtcctcaccgtgcgcaacgcctcgctgtcggcggccgggacccgcgtgtgcgtgggctcctgcgggggccgcaccttccagcacaccgtgcagctccttgtgtacgccttcccggaccagctgaccgtctccccagcagccctggtgcctggtgacccggaggtggcctgtacggcccacaaagtcacgcccgtggaccccaacgcgctctccttctccctgctcgtcgggggccaggaactggagggggcgcaagccctgggcccggaggtgcaggaggaggaggaggagccccagggggacgaggacgtgctgttcagggtgacagagcgctggcggctgccgcccctggggacccctgtcccgcccgccctctactgccaggccacgatgaggctgcctggcttggagctcagccaccgccaggccatccccgcgtccaaacctgcgggtgaccagctgcccgcggctctgtggaccagcagtgcggtgctgggactgctgctcctggccttgcccacctatcacctctggaaacgctgccggcacctggctgaggacgacacccacccaccagcttctctgaggcttctgccccaggtgtcggcctgggctgggttaagggggaccggccaggtcgggatcagcccctcctgagtggccagcctttccccctgtgaaagcaaaatagcttggaccccttcaagttgagaactggtcagggcaaacctgcctcccattctactcaaagtcatccctctgttcacagagatggatgcatgttctgattgcctctttggagaagctcatcagaaactcaaaagaaggccactgtttgtctcacctacccatgacctgaagcccctccctgagtggtccccacctttctggacggaaccacgtactttttacatacattgattcatgtctcacgtctccctaaaaatgcgtaagaccaagctgtgccctgaccaccctgggcccctgtcgtcaggacctcctgaggctttggcaaataaacctcctaaaatgataaaaaaaaaa

SEQ ID NO: 3625 - protein, 295 aa, Homo sapiens
MDFGLALLLAGLLGLLLGQSLQVKPLQVEPPEPVVAVALGASRQLTCRLACADRGASVQWRGLDTSLGAVQSDTGRSVLTVRNASLSAAGTRVCVGSCGGRTFQHTVQLLVYAFPDQLTVSPAALVPGDPEVACTAHKVTPVDPNALSFSLLVGGQELEGAQALGPEVQEEEEEPQGDEDVLFRVTERWRLPPLGTPVPPALYCQATMRLPGLELSHRQAIPASKPAGDQLPAALWTSSAVLGLLLLALPTYHLWKRCRHLAEDDTHPPASLRLLPQVSAWAGLRGTGQVGISPS

SEQ ID NO: 3626 - DNA, 1926 bp, Homo sapiens
ctcagcgaagatggcggcagtggagaagcggcggcaagcggtaccaccgccggccggtttcacggacagcggccgccagtcggtatcccgggcggcgggggcggccgagagcgaggaggacttcctgcggcaggtcggcgtgacggaaatgctacgtgcggccctgctgaaggtgctggaggcgcggcccgaggagccgatcgccttcctggctcactacttcgagaacatgggcctgcgctcgcctgtaaacggcggcgccggggagcccccgggccagctcctgctgcagcagcagcgcctgggccgcgcgctatggcaccttcgcctggcccaccactcccagagggccgccttcaacaacaacgtgagcgtggcctacgagtgcctgagcgccggcgggcgcaggaagaggccggggctggacgggcgcacctacagcgagctgctcaggcgcatctgccgggacggccaagcccccgaggaggtggtggcgccgctgctgcgcaaggtgcagtgccgtgaccacgaggcggtgccgctgagcgtcttccgcgcgggcacactcacctgcttcgtgctgctggagttcgtggcgcgcgccggcgcgctcttccagctgctggaggactcggccgccgccgtggccgaccgccgcgtgggccaggccgtgctggacaccctggagggcgcgctgcaggccagcgacgccgccgcgcccgcgcgcttcctggaggccggctcgcgcttggcgcccatgacccgcgaggagtttctggagagggccgccgcgctcttcatcgcgaaggtcaagccggtgggctgaggcccgtgggccgcgcggatccgggatctgcgctggggggtccccgcgtgcggggcgcgcggagccttcccttcgccctggtgaggccctgccataaccaggcgcccagccctgcggaggaggccggggctcccaggaagcggacgcccggtccccacacagcgccgcggccgcccctccacccccgcgggagcccctgccccacgctaataaaatgtgttgcgaggctgacgctggtgtgtatgcgagcgcccgcctcccagccccggtgcccgcagaagacgcttttccccagcaggtcacccacggccccggaaccgcggcggctggaggctggattcgaggccggaaacgccgggacccctggacccggcctggtgggagcagcggagggggacgccccacggggccctgcggagcctgaagccggagagcaggcggctcttctggaacgcagggcccgggccctccagccccgcccggcccaggtatcctccctgagcctcagtctccccagatgtcaaatgaagaggccagctgggcagatggtagtgacattggtgagacaacagccctaacacttcccaggaactgaagtgcctcatgtgattgattcccaggcccaggcagcggaggttacaccctcagcaagggctcagctgggatctgcgcccggcctgctccagaacgcacagggcctcccactcgccaccggtggggagggtcgtccggtatcccccagtgcccaccaccaccaaccagaatcacttctcagactgcaagagcgaatccagccgggcgtggtggctcacgcctgtgaccccagcactttgggaggctggggcggcggatcacttgaggtcaggagttcaggatcagcctggccaacgtggtgaaaccctgtctctactaaaaatacgaaaaaaaaaaaaagctgggctgtggtggcaggcgcctgtgatcccagctactcgggaggctggggcaggagaataacttgaacccgggaggcagaggtggcagtgagccgagattgagccactgcactccaatctgtgcgacagagtgagaccctgtctcaaaaacaaaacaacaacaac

SEQ ID NO: 3627 - protein, 271 aa, Homo sapiens
MAAVEKRRQAVPPPAGFTDSGRQSVSRAAGAAESEEDFLRQVGVTEMLRAALLKVLEARPEEPIAFLAHYFENMGLRSPVNGGAGEPPGQLLLQQQRLGRALWHLRLAHHSQRAAFNNNVSVAYECLSAGGRRKRPGLDGRTYSELLRRICRDGQAPEEVVAPLLRKVQCRDHEAVPLSVFRAGTLTCFVLLEFVARAGALFQLLEDSAAAVADRRVGQAVLDTLEGALQASDAAAPARFLEAGSRLAPMTREEFLERAAALFIAKVKPVG

SEQ ID NO: 3628 - DNA, 1462 bp, Homo sapiens
ggcaagcgccggtggggcggcggcgccagagctgctggagcgctcggggtccccgggcggcggcggcggcgcagaggaggaggcaggcggcggccccggtggctcccccccggacggtgcgcggcccggcccgtctcgcgaactcgcggtggtcgcgcggccccgcgctgctccgaccccgggcccctccgccgccgccatggctcggccgctagtgcccagctcgcagaaggcgctgctgctggagctcaaggggctgcaggaagagccggtcgagggattccgcgtgacactggtggacgagggcgatctatacaactgggaggtggccatcttcgggccccccaacacctactacgagggcggctacttcaaggcgcgcctcaagttccccatcgactacccatactctccaccagcctttcggttcctgaccaagatgtggcaccctaacatctacgagacgggggacgtgtgtatctccatcctccacccgccggtggacgacccccagagcggggagctgccctcagagaggtggaaccccacgcagaacgtcaggaccattctcctgagtgtgatctccctcctgaacgagcccaacaccttctcgcccgcaaacgtggacgcctccgtgatgtacaggaagtggaaagagagcaaggggaaggatcgggagtacacagacatcatccggaagcaggtcctggggaccaaggtggacgcggagcgtgacggcgtgaaggtgcccaccacgctggccgagtactgcgtgaagaccaaggcgccggcgcccgacgagggctcagacctcttctacgacgactactacgaggacggcgaggtggaggaggaggccgacagctgcttcggggacgatgaggatgactctggcacggaggagtcctgacaccaccagaataaacttgccgagtttacctcactagggccggacccgtggctccttagacgacagactacctcacggaggttttgtgctggtccccgtctcctctggttgtttcgttttggctttttctccctccccatgtctgttctgggttttcacgtgcttcagagaagaggggctgccccaccgccactcacgtcactcggggctcggtggacgggcccagggtgggagcggccggcccacctgtcccctcgggaggggagctgagcccgacttctaccggggtcccccagcttccggactggccgcaccccggaggagccacgggggcgctgctgggaacgtgggcggggggccgtttcctgacactaccagcctgggaggcccaggtgtagcggtccgaggggcccggtcctgcctgtcagctccaggtcctggagccacgtccagcacagagtggacggattcaccgtggccgactcttttccctgctttggtttgtttgaaatctaaataaaactactttatgagaaaaaaaaaaaaaaaaaa

SEQ ID NO: 3629 - protein, 236 aa, Homo sapiens
MARPLVPSSQKALLLELKGLQEEPVEGFRVTLVDEGDLYNWEVAIFGPPNTYYEGGYFKARLKFPIDYPYSPPAFRFLTKMWHPNIYETGDVCISILHPPVDDPQSGELPSERWNPTQNVRTILLSVISLLNEPNTFSPANVDASVMYRKWKESKGKDREYTDIIRKQVLGTKVDAERDGVKVPTTLAEYCVKTKAPAPDEGSDLFYDDYYEDGEVEEEADSCFGDDEDDSGTEES

SEQ ID NO: 3630 - DNA, 947 bp, Homo sapiens
ggctcggggccggggccagcacccacactgggtctccacagcggcatggaggcctgcgtgtcttcactgctggtgctggccctgggggccctgtcagtaggcagctcctttgggacccagatcatcgggggccgggaggtgatcccccactcgcgcccgtacatggcctcactgcagagaaatggctcccacctgtgcgggggtgtcctggtgcacccaaagtgggtgctgacggctgcccactgcctggcccagcggatggcccagctgaggctggtgctggggctccacaccctggacagccccggtctcaccttccacatcaaggcagccatccagcaccctcgctacaagcccgtccctgccctggagaacgacctcgcgctgcttcagctggacgggaaagtgaagcccagccggaccatccggccgttggccctgcccagtaagcgccaggtggtggcagcagggactcggtgcagcatggccggctgggggctgacccaccagggcgggcgcctgtcccgggtgctgcgggagctggacctccaagtgctggacacccgcatgtgtaacaacagccgcttctggaacggcagcctctcccccagcatggtctgcctggcggccgactccaaggaccaggctccctgcaagggtgactcgggcgggcccctggtgtgtggcaaaggccgggtgttggccggagtcctgtccttcagctccagggtctgcactgacatcttcaagcctcccgtggccaccgctgtggcgccttacgtgtcctggatcaggaaggtcaccggccgatcggcctgatgccctggggtgatggggaccccctcgctgtctccacaggacccttcccctccaggggtgcagtggggtgggtgaggacgggtgggagggacagggagggaccaataaatcataatgaagaaacgctc

SEQ ID NO: 3631 - protein, 257 aa, Homo sapiens
MEACVSSLLVLALGALSVGSSFGTQIIGGREVIPHSRPYMASLQRNGSHLCGGVLVHPKWVLTAAHCLAQRMAQLRLVLGLHTLDSPGLTFHIKAAIQHPRYKPVPALENDLALLQLDGKVKPSRTIRPLALPSKRQVVAAGTRCSMAGWGLTHQGGRLSRVLRELDLQVLDTRMCNNSRFWNGSLSPSMVCLAADSKDQAPCKGDSGGPLVCGKGRVLAGVLSFSSRVCTDIFKPPVATAVAPYVSWIRKVTGRSA

SEQ ID NO: 3632 - DNA, 2024 bp, Homo sapiens
gtgcgcgcgcccggtccgcgcctccgccgctttttatagcggccgcgggcggcggcggcagcggttggaggttgtaggaccggcgaggaataggaatcatggcggctgcgctgttcgtgctgctgggattcgcgctgctgggcacccacggagcctccggggctgccggcttcgtccaggcgccgctgtcccagcagaggtgggtggggggcagtgtggagctgcactgcgaggccgtgggcagcccggtgcccgagatccagtggtggtttgaagggcagggtcccaacgacacctgctcccagctctgggacggcgcccggctggaccgcgtccacatccacgccacctaccaccagcacgcggccagcaccatctccatcgacacgctcgtggaggaggacacgggcacttacgagtgccgggccagcaacgacccggatcgcaaccacctgacccgggcgcccagggtcaagtgggtccgcgcccaggcagtcgtgctagtcctggaacccggcacagtcttcactaccgtagaagaccttggctccaagatactcctcacctgctccttgaatgacagcgccacagaggtcacagggcaccgctggctgaaggggggcgtggtgctgaaggaggacgcgctgcccggccagaaaacggagttcaaggtggactccgacgaccagtggggagagtactcctgcgtcttcctccccgagcccatgggcacggccaacatccagctccacgggcctcccagagtgaaggctgtgaagtcgtcagaacacatcaacgagggggagacggccatgctggtctgcaagtcagagtccgtgccacctgtcactgactgggcctggtacaagatcactgactctgaggacaaggccctcatgaacggctccgagagcaggttcttcgtgagttcctcgcagggccggtcagagctacacattgagaacctgaacatggaggccgaccccggccagtaccggtgcaacggcaccagctccaagggctccgaccaggccatcatcacgctccgcgtgcgcagccacctggccgccctctggcccttcctgggcatcgtggctgaggtgctggtgctggtcaccatcatcttcatctacgagaagcgccggaagcccgaggacgtcctggatgatgacgacgccggctctgcacccctgaagagcagcgggcagcaccagaatgacaaaggcaagaacgtccgccagaggaactcttcctgaggcaggtggcccgaggacgctccctgctccacgtctgcgccgccgccggagtccactcccagtgcttgcaagattccaagttctcacctcttaaagaaaacccaccccgtagattcccatcatacacttccttcttttttaaaaaagttgggttttctccattcaggattctgttccttaggtttttttccttctgaagtgtttcacgagagcccgggagctgctgccctgcggccccgtctgtggctttcagcctctgggtctgagtcatggccgggtgggcggcacagccttctccactggccggagtcagtgccaggtccttgccctttgtggaaagtcacaggtcacacgaggggccccgtgtcctgcctgtctgaagccaatgctgtctggttgcgccatttttgtgcttttatgtttaattttatgagggccacgggtctgtgttcgactcagcctcagggacgactctgacctcttggccacagaggactcacttgcccacaccgagggcgaccccgtcacagcctcaagtcactcccaagccccctccttgtctgtgcatccgggggcagctctggagggggtttgctggggaactggcgccatcgccgggactccagaaccgcagaagcctccccagctcacccctggaggacggccggctctctatagcaccagggctcacgtgggaacccccctcccacccaccgccacaataaagatcgcccccacctccaccctcaaaaaaaaaaaaaaaaaaaa

SEQ ID NO: 3633 - protein, 385 aa, Homo sapiens
MAAALFVLLGFALLGTHGASGAAGFVQAPLSQQRWVGGSVELHCEAVGSPVPEIQWWFEGQGPNDTCSQLWDGARLDRVHIHATYHQHAASTISIDTLVEEDTGTYECRASNDPDRNHLTRAPRVKWVRAQAVVLVLEPGTVFTTVEDLGSKILLTCSLNDSATEVTGHRWLKGGVVLKEDALPGQKTEFKVDSDDQWGEYSCVFLPEPMGTANIQLHGPPRVKAVKSSEHINEGETAMLVCKSESVPPVTDWAWYKITDSEDKALMNGSESRFFVSSSQGRSELHIENLNMEADPGQYRCNGTSSKGSDQAIITLRVRSHLAALWPFLGIVAEVLVLVTIIFIYEKRRKPEDVLDDDDAGSAPLKSSGQHQNDKGKNVRQRNSS

SEQ ID NO: 3634 - DNA, 1676 bp, Homo sapiens
gtgcgcgcgcccggtccgcgcctccgccgctttttatagcggccgcgggcggcggcggcagcggttggaggttgtaggaccggcgaggaataggaatcatggcggctgcgctgttcgtgctgctgggattcgcgctgctgggcacccacggagcctccggggctgccggcacagtcttcactaccgtagaagaccttggctccaagatactcctcacctgctccttgaatgacagcgccacagaggtcacagggcaccgctggctgaaggggggcgtggtgctgaaggaggacgcgctgcccggccagaaaacggagttcaaggtggactccgacgaccagtggggagagtactcctgcgtcttcctccccgagcccatgggcacggccaacatccagctccacgggcctcccagagtgaaggctgtgaagtcgtcagaacacatcaacgagggggagacggccatgctggtctgcaagtcagagtccgtgccacctgtcactgactgggcctggtacaagatcactgactctgaggacaaggccctcatgaacggctccgagagcaggttcttcgtgagttcctcgcagggccggtcagagctacacattgagaacctgaacatggaggccgaccccggccagtaccggtgcaacggcaccagctccaagggctccgaccaggccatcatcacgctccgcgtgcgcagccacctggccgccctctggcccttcctgggcatcgtggctgaggtgctggtgctggtcaccatcatcttcatctacgagaagcgccggaagcccgaggacgtcctggatgatgacgacgccggctctgcacccctgaagagcagcgggcagcaccagaatgacaaaggcaagaacgtccgccagaggaactcttcctgaggcaggtggcccgaggacgctccctgctccacgtctgcgccgccgccggagtccactcccagtgcttgcaagattccaagttctcacctcttaaagaaaacccaccccgtagattcccatcatacacttccttcttttttaaaaaagttgggttttctccattcaggattctgttccttaggtttttttccttctgaagtgtttcacgagagcccgggagctgctgccctgcggccccgtctgtggctttcagcctctgggtctgagtcatggccgggtgggcggcacagccttctccactggccggagtcagtgccaggtccttgccctttgtggaaagtcacaggtcacacgaggggccccgtgtcctgcctgtctgaagccaatgctgtctggttgcgccatttttgtgcttttatgtttaattttatgagggccacgggtctgtgttcgactcagcctcagggacgactctgacctcttggccacagaggactcacttgcccacaccgagggcgaccccgtcacagcctcaagtcactcccaagccccctccttgtctgtgcatccgggggcagctctggagggggtttgctggggaactggcgccatcgccgggactccagaaccgcagaagcctccccagctcacccctggaggacggccggctctctatagcaccagggctcacgtgggaacccccctcccacccaccgccacaataaagatcgcccccacctccaccctcaaaaaaaaaaaaaaaaaaaa

SEQ ID NO: 3635 - protein, 269 aa, Homo sapiens
MAAALFVLLGFALLGTHGASGAAGTVFTTVEDLGSKILLTCSLNDSATEVTGHRWLKGGVVLKEDALPGQKTEFKVDSDDQWGEYSCVFLPEPMGTANIQLHGPPRVKAVKSSEHINEGETAMLVCKSESVPPVTDWAWYKITDSEDKALMNGSESRFFVSSSQGRSELHIENLNMEADPGQYRCNGTSSKGSDQAIITLRVRSHLAALWPFLGIVAEVLVLVTIIFIYEKRRKPEDVLDDDDAGSAPLKSSGQHQNDKGKNVRQRNSS

SEQ ID NO: 3636 - DNA, 1766 bp, Homo sapiens
ttcggcttagtctgcggtcctcttgcattgcgactccgagtttaacttccaacacacactttcaacctccaagagacgcccccacctgtgtcgccccaatagcgacttttctcaccgtggtcgccgcggaacttcaagggtccttcctacccgcgttgctgagagtctgggtttacgcgtcacctcgggcgggacccgatcctccgctcctgaggcccccacaatgaagcagtcggacgcgtctccccaagaaagccggcacagtcttcactaccgtagaagaccttggctccaagatactcctcacctgctccttgaatgacagcgccacagaggtcacagggcaccgctggctgaaggggggcgtggtgctgaaggaggacgcgctgcccggccagaaaacggagttcaaggtggactccgacgaccagtggggagagtactcctgcgtcttcctccccgagcccatgggcacggccaacatccagctccacgggcctcccagagtgaaggctgtgaagtcgtcagaacacatcaacgagggggagacggccatgctggtctgcaagtcagagtccgtgccacctgtcactgactgggcctggtacaagatcactgactctgaggacaaggccctcatgaacggctccgagagcaggttcttcgtgagttcctcgcagggccggtcagagctacacattgagaacctgaacatggaggccgaccccggccagtaccggtgcaacggcaccagctccaagggctccgaccaggccatcatcacgctccgcgtgcgcagccacctggccgccctctggcccttcctgggcatcgtggctgaggtgctggtgctggtcaccatcatcttcatctacgagaagcgccggaagcccgaggacgtcctggatgatgacgacgccggctctgcacccctgaagagcagcgggcagcaccagaatgacaaaggcaagaacgtccgccagaggaactcttcctgaggcaggtggcccgaggacgctccctgctccacgtctgcgccgccgccggagtccactcccagtgcttgcaagattccaagttctcacctcttaaagaaaacccaccccgtagattcccatcatacacttccttcttttttaaaaaagttgggttttctccattcaggattctgttccttaggtttttttccttctgaagtgtttcacgagagcccgggagctgctgccctgcggccccgtctgtggctttcagcctctgggtctgagtcatggccgggtgggcggcacagccttctccactggccggagtcagtgccaggtccttgccctttgtggaaagtcacaggtcacacgaggggccccgtgtcctgcctgtctgaagccaatgctgtctggttgcgccatttttgtgcttttatgtttaattttatgagggccacgggtctgtgttcgactcagcctcagggacgactctgacctcttggccacagaggactcacttgcccacaccgagggcgaccccgtcacagcctcaagtcactcccaagccccctccttgtctgtgcatccgggggcagctctggagggggtttgctggggaactggcgccatcgccgggactccagaaccgcagaagcctccccagctcacccctggaggacggccggctctctatagcaccagggctcacgtgggaacccccctcccacccaccgccacaataaagatcgcccccacctccaccctcaaaaaaaaaaaaaaaaaaaa

SEQ ID NO: 3637 - protein, 176 aa, Homo sapiens
MGTANIQLHGPPRVKAVKSSEHINEGETAMLVCKSESVPPVTDWAWYKITDSEDKALMNGSESRFFVSSSQGRSELHIENLNMEADPGQYRCNGTSSKGSDQAIITLRVRSHLAALWPFLGIVAEVLVLVTIIFIYEKRRKPEDVLDDDDAGSAPLKSSGQHQNDKGKNVRQRNSS

SEQ ID NO: 3638 - DNA, 1609 bp, Homo sapiens
ttcggcttagtctgcggtcctcttgcattgcgactccgagtttaacttccaacacacactttcaacctccaagagacgcccccacctgtgtcgccccaatagcgacttttctcaccgtggtcgccgcggaacttcaagggtccttcctacccgcgttgctgagagtctgggtttacgcgtcacctcgggcgggacccgatcctccgctcctgaggcccccacaatgaagcagtcggacgcgtctccccaagaaagggtggactccgacgaccagtggggagagtactcctgcgtcttcctccccgagcccatgggcacggccaacatccagctccacgggcctcccagagtgaaggctgtgaagtcgtcagaacacatcaacgagggggagacggccatgctggtctgcaagtcagagtccgtgccacctgtcactgactgggcctggtacaagatcactgactctgaggacaaggccctcatgaacggctccgagagcaggttcttcgtgagttcctcgcagggccggtcagagctacacattgagaacctgaacatggaggccgaccccggccagtaccggtgcaacggcaccagctccaagggctccgaccaggccatcatcacgctccgcgtgcgcagccacctggccgccctctggcccttcctgggcatcgtggctgaggtgctggtgctggtcaccatcatcttcatctacgagaagcgccggaagcccgaggacgtcctggatgatgacgacgccggctctgcacccctgaagagcagcgggcagcaccagaatgacaaaggcaagaacgtccgccagaggaactcttcctgaggcaggtggcccgaggacgctccctgctccacgtctgcgccgccgccggagtccactcccagtgcttgcaagattccaagttctcacctcttaaagaaaacccaccccgtagattcccatcatacacttccttcttttttaaaaaagttgggttttctccattcaggattctgttccttaggtttttttccttctgaagtgtttcacgagagcccgggagctgctgccctgcggccccgtctgtggctttcagcctctgggtctgagtcatggccgggtgggcggcacagccttctccactggccggagtcagtgccaggtccttgccctttgtggaaagtcacaggtcacacgaggggccccgtgtcctgcctgtctgaagccaatgctgtctggttgcgccatttttgtgcttttatgtttaattttatgagggccacgggtctgtgttcgactcagcctcagggacgactctgacctcttggccacagaggactcacttgcccacaccgagggcgaccccgtcacagcctcaagtcactcccaagccccctccttgtctgtgcatccgggggcagctctggagggggtttgctggggaactggcgccatcgccgggactccagaaccgcagaagcctccccagctcacccctggaggacggccggctctctatagcaccagggctcacgtgggaacccccctcccacccaccgccacaataaagatcgcccccacctccaccctcaaaaaaaaaaaaaaaaaaaa

SEQ ID NO: 3639 - protein, 205 aa, Homo sapiens
MKQSDASPQERVDSDDQWGEYSCVFLPEPMGTANIQLHGPPRVKAVKSSEHINEGETAMLVCKSESVPPVTDWAWYKITDSEDKALMNGSESRFFVSSSQGRSELHIENLNMEADPGQYRCNGTSSKGSDQAIITLRVRSHLAALWPFLGIVAEVLVLVTIIFIYEKRRKPEDVLDDDDAGSAPLKSSGQHQNDKGKNVRQRNSS

SEQ ID NO: 3640 - DNA, 3459 bp, Homo sapiens
ggccggcggcggcggcggcggctccgctccgcactgcccggcgccgcctcgccatggacgcgcgcgggggcggcgggcggcccggggagagcccgggcgcgacccccgcgccggggccgccgccgccgccgccgcccgcgcccccccaacagcagccgccgccgccgccgccgcccgcgccccccccgggccccgggcccgcgcccccccagcacccgccccgggccgaggcgttgcccccggaggcggcggatgagggcggcccgcggggccggctccgcagccgcgacagctcgtgcggccgccccggcaccccgggcgcggcgagcacggccaagggcagcccgaacggcgagtgcgggcgcggcgagccgcagtgcagccccgcggggcccgagggcccggcgcgggggcccaaggtgtcgttctcgtgccgcggggcggcctcggggcccgcgccggggccggggccggcggaggaggcgggcagcgaggaggcgggcccggcgggggagccgcgcggcagccaggccagcttcatgcagcgccagttcggcgcgctcctgcagccgggcgtcaacaagttctcgctgcggatgttcggcagccagaaggccgtggagcgcgagcaggagcgcgtcaagtcggcgggggcctggatcatccacccgtacagcgacttcaggttctactgggacttcaccatgctgctgttcatggtgggaaacctcatcatcatcccagtgggcatcaccttcttcaaggatgagaccactgccccgtggatcgtgttcaacgtggtctcggacaccttcttcctcatggacctggtgttgaacttccgcaccggcattgtgatcgaggacaacacggagatcatcctggaccccgagaagatcaagaagaagtatctgcgcacgtggttcgtggtggacttcgtgtcctccatccccgtggactacatcttccttattgtggagaagggcattgactccgaggtctacaagacggcacgcgccctgcgcatcgtgcgcttcaccaagatcctcagcctcctgcggctgctgcgcctctcacgcctgatccgctacatccatcagtgggaggagatcttccacatgacctatgacctggccagcgcggtgatgaggatctgcaatctcatcagcatgatgctgctgctctgccactgggacggctgcctgcagttcctggtgcctatgctgcaggacttcccgcgcaactgctgggtgtccatcaatggcatggtgaaccactcgtggagtgaactgtactccttcgcactcttcaaggccatgagccacatgctgtgcatcgggtacggccggcaggcgcccgagagcatgacggacatctggctgaccatgctcagcatgattgtgggtgccacctgctacgccatgttcatcggccacgccactgccctcatccagtcgctggactcctcgcggcgccagtaccaggagaagtacaagcaggtggagcagtacatgtccttccacaagctgccagctgacttccgccagaagatccacgactactatgagcaccgttaccagggcaagatgtttgacgaggacagcatcctgggcgagctcaacgggcccctgcgggaggagatcgtcaacttcaactgccggaagctggtggcctccatgccgctgttcgccaacgccgaccccaacttcgtcacggccatgctgaccaagctcaagttcgaggtcttccagccgggtgactacatcatccgcgaaggcaccatcgggaagaagatgtacttcatccagcacggcgtggtcagcgtgctcactaagggcaacaaggagatgaagctgtccgatggctcctacttcggggagatctgcctgctcacccggggccgccgcacggcgagcgtgcgggccgacacctactgccgcctctattcgctgagcgtggacaacttcaacgaggtgctggaggagtaccccatgatgcggcgcgccttcgagacggtggccatcgaccgcctggaccgcatcggcaagaagaattccatcctcctgcacaaggtgcagcatgacctcaactcgggcgtattcaacaaccaggagaacgccatcatccaggagatcgtcaagtacgaccgcgagatggtgcagcaggccgagctgggtcagcgcgtgggcctcttcccgccgccgccgccgccgccgcaggtcacctcggccatcgccacgctgcagcaggcggcggccatgagcttctgcccgcaggtggcgcggccgctcgtggggccgctggcgctcggctcgccgcgcctcgtgcgccgcccgcccccggggcccgcacctgccgccgcctcacccgggcccccgccccccgccagccccccgggcgcgcccgccagcccccgggcaccgcggacctcgccctacggcggcctgcccgccgccccccttgctgggcccgccctgcccgcgcgccgcctgagccgcgcgtcgcgcccactgtccgcctcgcagccctcgctgcctcacggcgcccccggccccgcggcctccacacgcccggccagcagctccacaccgcgcttgaggcccacgcccgctgcccgggccgccgcgcccagcccggaccgcagggactcggcctcacccggcgccgccggcggcctggacccccaggactccgcgcgctcgcgcctctcgtccaacttgtgaccctcgccgaccgccccgcgggcccaggcgggccaggggcggggccgtcatccagaccaaagccatgccattgcgctgccccggccgccagtccgcccagaagccatagacgagacgtaggtagccgtagttggacggacgggcagggccggcggggcagccccctccgcgcccccggccgtcccccctcatcgccccgcgcccacccccatcgcccctgcccccggcggcggcctcgcgtgcgagggggctcccttcacctcggtgcctcagttcccccagctgtaagacagggacggggcggcccagtggctgagaggagccggctgtggagccccgcccgccccccaccctctaggtggcccccgtccgaggaggatcgttttctaagtgcaatacttggcccgccggcttcccgctgcccccatcgcgctcacgcaataaccggcccggcccccgtccgcgcgcgtcccccggtgacctcggggagcagcaccccgcctccctccagcactggcaccgaggggcaggcctggctgcgcagggcgcgggggggaggctggggtcccgccgccgtgatgaatgtactgacgagccgaggcagcagtgcccccaccgtggccccccacgccccattaacccccacacccccattccgcgcaataaacgacagcattggcgccaaaaaaaaaaaaaaaaaaaaaaaaaaaaaaaaaaaaaaaaaaaaaaaaaaaaa

SEQ ID NO: 3641 - protein, 889 aa, Homo sapiens
MDARGGGGRPGESPGATPAPGPPPPPPPAPPQQQPPPPPPPAPPPGPGPAPPQHPPRAEALPPEAADEGGPRGRLRSRDSSCGRPGTPGAASTAKGSPNGECGRGEPQCSPAGPEGPARGPKVSFSCRGAASGPAPGPGPAEEAGSEEAGPAGEPRGSQASFMQRQFGALLQPGVNKFSLRMFGSQKAVEREQERVKSAGAWIIHPYSDFRFYWDFTMLLFMVGNLIIIPVGITFFKDETTAPWIVFNVVSDTFFLMDLVLNFRTGIVIEDNTEIILDPEKIKKKYLRTWFVVDFVSSIPVDYIFLIVEKGIDSEVYKTARALRIVRFTKILSLLRLLRLSRLIRYIHQWEEIFHMTYDLASAVMRICNLISMMLLLCHWDGCLQFLVPMLQDFPRNCWVSINGMVNHSWSELYSFALFKAMSHMLCIGYGRQAPESMTDIWLTMLSMIVGATCYAMFIGHATALIQSLDSSRRQYQEKYKQVEQYMSFHKLPADFRQKIHDYYEHRYQGKMFDEDSILGELNGPLREEIVNFNCRKLVASMPLFANADPNFVTAMLTKLKFEVFQPGDYIIREGTIGKKMYFIQHGVVSVLTKGNKEMKLSDGSYFGEICLLTRGRRTASVRADTYCRLYSLSVDNFNEVLEEYPMMRRAFETVAIDRLDRIGKKNSILLHKVQHDLNSGVFNNQENAIIQEIVKYDREMVQQAELGQRVGLFPPPPPPPQVTSAIATLQQAAAMSFCPQVARPLVGPLALGSPRLVRRPPPGPAPAAASPGPPPPASPPGAPASPRAPRTSPYGGLPAAPLAGPALPARRLSRASRPLSASQPSLPHGAPGPAASTRPASSSTPRLRPTPAARAAAPSPDRRDSASPGAAGGLDPQDSARSRLSSNL

SEQ ID NO: 3642 - DNA, 3832 bp, Homo sapiens
cggcggcggcggcgcctggagcggcgtgcgtaatgtcggcactttgctggggccgcggagcggcggggctcaaacgagccctacggccttgcggccgcccgggactccccggcaaagaagggaccgccggtggcgtctgcggccccaggaggagctcgtccgccagcccccaggagcaagaccaagaccgcaggaaggactggggccacgtggagctgctggaggtgctccaggcgcgggtgcggcagctgcaggctgagagcgtgtcggaggtggtggtgaacagggtggatgtggcgcggctcccagaatgtggcagtggagatggtagcctccagccacccaggaaggtccagatgggggccaaggatgccaccccggtgccctgtggccgctgggcaaagatactggagaaggataagcggacccagcagatgcgtatgcagcggttgaaggcgaagctgcagatgccattccagagcggggagttcaaggcgctgaccaggcgcctgcaggtggagccccggctcctgagcaagcagatggccgggtgcctggaggactgcacgcgccaggcccccgagagcccctgggaggagcagctggcccggctgctgcaggaggcccctgggaagctgagcctcgatgtggagcaggccccgtcggggcagcactcgcaggcccagctctcaggtcagcagcagaggctcctggccttcttcaagtgctgcctgctcactgaccagctgcccctcgcccaccacctgctggtcgtccaccacggccagcggcagaagcggaagctgctcacgctggacatgtacaacgccgtgatgcttggctgggcgcggcagggtgccttcaaggagctggtatatgtgttattcatggtgaaggatgccggcttgaccccggacctgctgtcctatgcggctgccctccagtgcatggggaggcaggaccaggacgccgggaccatcgaaaggtgtctggaacagatgagccaggaggggctgaagctgcaggcactcttcaccgccgttctgctgtctgaggaggatcgggccactgttctgaaggccgtgcacaaggtgaagcccaccttcagcctcccgccgcagctgccgcccccggtcaacacctccaagctgctcagggacgtgtatgccaaggatgggcgtgtgtcctacccgaagctgcacctgcccttgaagaccctgcagtgcttctttgagaagcagctccacatggagctggccagcagggtgtgcgtggtgtccgtggagaagcccacgttgccaagcaaggaggtcaagcacgcgcggaagaccctgaagaccctgcgggaccaatgggagaaagcactgtgccgggcgctgcgggagaccaagaaccgcctagagcgcgaggtgtacgagggccggttctcactttaccccttcctgtgcctgctggacgagcgcgaggtggtgcggatgctcctgcaggtcctgcaggcgctgcccgcccaaggtgagtccttcaccaccctggcccgggagctgagtgcgcgcactttcagccggcacgtggtgcagaggcagcgggtcagtggccaggtgcaggcgctgcagaaccactacaggaagtacctctgcttgctggcctccgacgccgaggtgcccgagccctgcctgccgcggcagtactgggaggagctgggggcgcccgaggccctgcgggagcagccctggcccctgccagtgcagatggagctgggcaagctgctggcggagatgctggtgcaggctacgcagatgccatgcagcctggacaagccgcatcgttcctctcggcttgtccccgtgctctaccacgtgtattccttccgcaacgtccagcaaatcggcatcctgaagccgcacccggcctacgtgcagctgctggagaaggccgcggaacccacgctgaccttcgaggcggtggatgtacccatgctttgccccccgctgccctggacatcgccgcactctggtgctttcctgctcagccccaccaagctgatgcgcacggtggaaggcgccacgcagcaccaggagctgctggaaacctgcccgcccaccgcgctgcatggcgcactggacgccctcacccaactgggcaactgcgcctggcgcgtcaacgggcgcgtgctggacctggtgctgcagctcttccaggccaagggctgcccccagctaggcgtgccggccccgccctccgaggcgccccagccgcccgaggcccacctgccgcacagcgccgcgcccgcccgcaaggccgagctgcgccgtgagctggcgcactgccagaaggtggcccgggagatgcacagcctgcgggcggaggcgctgtaccgcctctcgctggcgcagcacctgcgggaccgcgtcttctggctgccgcacaacatggacttccgcggccgcacctacccctgcccgccgcacttcaaccacctgggcagcgacgtggcgcgggccctgctggagttcgcccagggccgcccgctcggcccgcacggcctggattggctcaagatccacctggtcaatctcacggggttgaagaagcgggagccgctgcggaagcgcctggcctttgcggaggaggtgatggatgacatcctggactccgcggaccaacccttgacgggccgaaagtggtggatgggcgcggaggaaccctggcagacgctggcctgctgtatggaggtggcgaacgctgtgcgcgcctccgaccctgccgcctatgtctcccacctccccgtccatcaggacggctcttgcaacggcctgcagcattatgctgctctgggccgcgacagcgtgggcgccgcctccgtcaacctggagccctcggatgtgccgcaggacgtgtacagcggcgtggccgcgcaggtggaggtgttccgtaggcaggacgcccagcggggcatgcgggtggcacaggtgctggaaggtttcatcacccgcaaggtggtgaagcagacggtgatgacggtggtgtacggggtcacgcgctatggcgggcgcctgcagattgagaagcgcctccgggagctgagcgactttccccaggagttcgtgtgggaggcctctcactatctcgtacgccaggtcttcaagagtctacaggagatgttctcggggacccgggccatccagcactggctgaccgagagtgcccgcctcatctcccacatgggctctgtggtggagtgggtcacacccctgggcgtccccgtcatccagccgtatcgcctggactccaaggtcaagcaaataggaggtggaattcagagcatcacctacacccacaacggagacatcagccgaaagcccaacacacgtaagcagaagaacggcttcccgcccaacttcatccactcgctggactcctcccacatgatgctcaccgccctgcactgctacaggaagggcctgaccttcgtctctgtgcacgactgttactggactcacgcagctgatgtctccgtcatgaaccaggtgtgccgggagcagtttgtccgcttgcacagcgagcccatcctgcaggacctgtccagattcctggtcaagcggttctgctctgagccccagaagatcttggaggccagccagctgaaggagacactgcaggcggtgcccaagccaggggccttcgacctggagcaggtgaagcgttccacctacttcttcagctgacaccccgtgagccttgtcagtgtgtaaataaagctcttttgccaccccccaaaaaaaaaaaaaaaaaaaaaaaaaaaaaaaaaaaaaaaaaaaaaaaaaaaaaaaaa

SEQ ID NO: 3643 - protein, 1230 aa, Homo sapiens
MSALCWGRGAAGLKRALRPCGRPGLPGKEGTAGGVCGPRRSSSASPQEQDQDRRKDWGHVELLEVLQARVRQLQAESVSEVVVNRVDVARLPECGSGDGSLQPPRKVQMGAKDATPVPCGRWAKILEKDKRTQQMRMQRLKAKLQMPFQSGEFKALTRRLQVEPRLLSKQMAGCLEDCTRQAPESPWEEQLARLLQEAPGKLSLDVEQAPSGQHSQAQLSGQQQRLLAFFKCCLLTDQLPLAHHLLVVHHGQRQKRKLLTLDMYNAVMLGWARQGAFKELVYVLFMVKDAGLTPDLLSYAAALQCMGRQDQDAGTIERCLEQMSQEGLKLQALFTAVLLSEEDRATVLKAVHKVKPTFSLPPQLPPPVNTSKLLRDVYAKDGRVSYPKLHLPLKTLQCFFEKQLHMELASRVCVVSVEKPTLPSKEVKHARKTLKTLRDQWEKALCRALRETKNRLEREVYEGRFSLYPFLCLLDEREVVRMLLQVLQALPAQGESFTTLARELSARTFSRHVVQRQRVSGQVQALQNHYRKYLCLLASDAEVPEPCLPRQYWEELGAPEALREQPWPLPVQMELGKLLAEMLVQATQMPCSLDKPHRSSRLVPVLYHVYSFRNVQQIGILKPHPAYVQLLEKAAEPTLTFEAVDVPMLCPPLPWTSPHSGAFLLSPTKLMRTVEGATQHQELLETCPPTALHGALDALTQLGNCAWRVNGRVLDLVLQLFQAKGCPQLGVPAPPSEAPQPPEAHLPHSAAPARKAELRRELAHCQKVAREMHSLRAEALYRLSLAQHLRDRVFWLPHNMDFRGRTYPCPPHFNHLGSDVARALLEFAQGRPLGPHGLDWLKIHLVNLTGLKKREPLRKRLAFAEEVMDDILDSADQPLTGRKWWMGAEEPWQTLACCMEVANAVRASDPAAYVSHLPVHQDGSCNGLQHYAALGRDSVGAASVNLEPSDVPQDVYSGVAAQVEVFRRQDAQRGMRVAQVLEGFITRKVVKQTVMTVVYGVTRYGGRLQIEKRLRELSDFPQEFVWEASHYLVRQVFKSLQEMFSGTRAIQHWLTESARLISHMGSVVEWVTPLGVPVIQPYRLDSKVKQIGGGIQSITYTHNGDISRKPNTRKQKNGFPPNFIHSLDSSHMMLTALHCYRKGLTFVSVHDCYWTHAADVSVMNQVCREQFVRLHSEPILQDLSRFLVKRFCSEPQKILEASQLKETLQAVPKPGAFDLEQVKRSTYFFS

SEQ ID NO: 3644 - DNA, 513 bp, Homo sapiens
atgcgccgccgcctgtggctgggcctggcctggctgctgctggcgcgggcgccggacgccgcgggaaccccgagcgcgtcgcggggaccgcgcagctacccgcacctggagggcgacgtgcgctggcggcgcctcttctcctccactcacttcttcctgcgcgtggatcccggcggccgcgtgcagggcacccgctggcgccacggccaggacagcatcctggagatccgctctgtacacgtgggcgtcgtggtcatcaaagcagtgtcctcaggcttctacgtggccatgaaccgccggggccgcctctacgggtcgcgactctacaccgtggactgcaggttccgggagcgcatcgaagagaacggccacaacacctacgcctcacagcgctggcgccgccgcggccagcccatgttcctggcgctggacaggaggggggggccccggccaggcggccggacgcggcggtaccacctgtccgcccacttcctgcccgtcctggtctcctga

SEQ ID NO: 3645 - protein, 170 aa, Homo sapiens
MRRRLWLGLAWLLLARAPDAAGTPSASRGPRSYPHLEGDVRWRRLFSSTHFFLRVDPGGRVQGTRWRHGQDSILEIRSVHVGVVVIKAVSSGFYVAMNRRGRLYGSRLYTVDCRFRERIEENGHNTYASQRWRRRGQPMFLALDRRGGPRPGGRTRRYHLSAHFLPVLVS

SEQ ID NO: 3646 - DNA, 2895 bp, Homo sapiens
ttaaaaccagaaacaccagcgttaaagcgccagggcccagcgcctctgccccacgcttcggtcacacctcagccacgcgggttcctggccccttctgaaaagccggaccccactgctcaaggttgctggatgcctggcccggggtgcagccagctcgggcacagctggcaaggcgtggggacctgcgggctcagggggccggggcagtgggttcatctcagttgctgatgatcccaccatcctgggatccaagaatcagacgatggagacggctaacggagaggagcctccagcaggaccacccgtgtccctccacggtagacggctcctgcgcgtgggaggcgcgtgccccacgcccctacctgttctccaaagactcccgccctccgctctgcaccacactcttcaccgtgtcccgcgacgtgtctgcgtcagcccccttggccaggtaactcggatcccacctgtccggaccgtgcgcagggcaccttctgggctgctgccgcaacgccgtggcgggccctcctggtggccgccctctggggtcgcgcgtggcgggccctcctggtggccgccctctggggtcgtgcgtggcgggccctcctcgtggccgccctctggggttgcggagccgagagaagcgttgggacttccatgactgtggccgccagggcagagtgccagccctgagggcgtccacatctcaaccccaggacccgcggactcggctcctcacgaggtaacgtacccggtgccctaagacgaggttgcatggaggacaccgaggtagggaggttacctcggatcgtccttgatctccggactgagagaacaagtgttttaggccccgagtctgcgcgacaggctgggccgcctgctccgggtcacagtcccccggccgagccgttttcctgttggaagatggagttttgagtcaggaggcgttgagggagacaaggctcgggttctgtgtgtccgtggtggttcttgggagttggagttggagctggagaggagggctgggcaggtgaggcttgcagcggcgggacctggagactcggaactggagggcctttgtcagagatgctgccggggtgtgcgcctgcctgtgaggctgggacttccctcgcgtggagtggccagaggagcaggaccgattggttcgccccacccaggcatgagcctcgggggcgctgggcccagaggacaccggcaccctggtgggggctgtgaggccgcattgctcgaggtcagacagcagtaagaagtggccgcccctggtgtcttccctgccccaggagcctgctgcacgacaggacagggccctggtaaggcccgcacccctgcgtccccgggcccctcgcgcctgcagccgtcctctccccatccgccctgccgctcaggagggcttcgtaagcggaagcacagtttgcaacagtttggggttgtcttattttcactgctggcgatttcctggggagccgctggttctgtgcccccaggccgctcctctctgttggggggcccccacctcactgcctgaggacaacgggggtccccaggtttgggcttgcgaataagctgctgagggctctgtgtgaaccgggatttcactgccctgggatgtgcggagctgtacgcccattccacgctctgttttagaaacaaagaaacaactgctgacctgtttcttttttttttttttttgagacggagtctcgctgtgtcgcccaggctggagtgcagtggcgcgatctcagctcactgcaacctccgcctcccggattcaagcgattccccgcctcagcctctcaagtagctggaattacaggcgcccgccaccacgcccggctaattttttgtatttttagtagacacggggtttcaccatgttgaccaagatggccttgatctcctgacctcgtgatccacccgcctcggcctcccaaagtgctgggatgacaggcgtgagcccccgcgcccggcctgctgacccgtttctacgaggcacatgttacgttcctgcgtggggtgccagcaagttttatttcagctgtggtgacctgtgcagctcccagtgacaactcaagtggcgacgccctccgactggccaacgtgggccgatctcccctcacactgccaacctggggacatcctgggtgcagccctgtcctccacccactccatgccagccaaagatgtccccagaggccgcctggtgtcccctggggtggggctcgcttctgtctgcagggtgagcagaagctctcgggccgggcacgaccctcccttcccagaagggttttcggtgtcaggctgctcagcacctcccagcaagtgcctcggcccagtcttcctgtatttatgtggaaggcggcggctggggacggagccctggccgtccccggggacttcaccagggcgatgctgctgtcgccccacgcacagaaggggagacgggcccagggtgtcactgcctggctccaggctgtggggctcttggctctgaccttttctctgagaggctggagtttgactcccagggctgtaggcagaagtcccagcggagtcaggatgtcaggagggcgctgggcacaggtgggggcgcccccacaccgacggccagccctctctgcgtcccgcaggacagcggcatgaagcccccaggcctgccctgcacccagcacggctcctgccctcagcctctgcccttcccggggggatttgaggagcaccgaggcgtcggcctccgcccttcccgggggatccgaggagcaccgaggcgtcggcctccgcccttcccggggggatctgaggcttattttgtcatgagaacagtttcagacaccgtgtgcatatttccgacgtctgctgtaacaaaagaccacaaagttg

SEQ ID NO: 3647 - protein, 131 aa, Homo sapiens
METANGEEPPAGPPVSLHGRRLLRVGGACPTPLPVLQRLPPSALHHTLHRVPRRVCVSPLGQVTRIPPVRTVRRAPSGLLPQRRGGPSWWPPSGVARGGPSWWPPSGVVRGGPSSWPPSGVAEPREALGLP

SEQ ID NO: 3648 - DNA, 1457 bp, Homo sapiens
gccgtgcgtgagcgtgcgcgggcgcgtcggccggcgagggagcagcaaacggccggcggcgggtgccgcgcggggggcgggcggcgcggagtaggtggcggcggccatggccgaggcgtcgccgcatcccggacggtacttctgccactgctgctccgtggagatcgtcccgcgcctgccggattatatctgtccaagatgcgagtctggttttatcgaggagcttccggaagagaccaggagcacagaaaatggttctgccccctccacagctcccacagaccagagccggccaccgttggagcacgtggaccagcacctgttcacgctgccgcagggctacggacagtttgctttcggcatcttcgatgacagcttcgagatccccacgttccctcctggggcgcaggctgacgacggcagggaccctgagagccggcgggagagagaccatccgtcccggcaccggtacggcgcccgacagccccgcgcccgcctcaccacgcggcgggccaccggccggcacgaaggcgtccccacgctggaagggatcatccagcagctcgtcaacggcatcatcacgcccgccaccatccccagcctgggcccctggggagtcctgcactcaaaccctatggactacgcctggggggccaacggcctggatgccatcatcacacagctcctcaatcagtttgaaaacacaggccccccaccggcagataaagagaaaatccaggccctccccaccgtccccgtcactgaggagcacgtaggctccgggctcgagtgccctgtgtgcaaggacgactacgcgctgggtgagcgtgtgcggcagctgccctgcaaccacctgttccacgacggctgcatcgtgccctggctggagcagcacgacagctgccccgtctgccgaaaaagcctcacgggacagaacacggccacgaacccccctggcctcactggggtgagcttctcctcctcgtcgtcatcgtcctcctccagctcgcccagcaacgagaacgccacatggtcccctctggggcgtccccagcctccccgtcctctgtctaacctcaccctctaaacgttcagcggtggaaagatttttataattttaaattattactgctttgaaataaacggacgtttgagctcacgtggcggccatgcatggtttgtggcggaagacggggcccagcggctcccccagcgctgaagcacggggttcagcggctcccccagtgctgcaggtgccgccaggacgggccacgtgggcccccagcctccccctcggccgcctccacgacccggagtaggggggctcgggaccatgaggatgaccagcaaaattcaagaacaaaactgctccaacagacttttttaaaggaaaaaatatgtgtatcttgaaagctatttaaaatacactacttacaaagagaaaaaaaaaaaaaaaa

SEQ ID NO: 3649 - protein, 326 aa, Homo sapiens
MAEASPHPGRYFCHCCSVEIVPRLPDYICPRCESGFIEELPEETRSTENGSAPSTAPTDQSRPPLEHVDQHLFTLPQGYGQFAFGIFDDSFEIPTFPPGAQADDGRDPESRRERDHPSRHRYGARQPRARLTTRRATGRHEGVPTLEGIIQQLVNGIITPATIPSLGPWGVLHSNPMDYAWGANGLDAIITQLLNQFENTGPPPADKEKIQALPTVPVTEEHVGSGLECPVCKDDYALGERVRQLPCNHLFHDGCIVPWLEQHDSCPVCRKSLTGQNTATNPPGLTGVSFSSSSSSSSSSSPSNENATWSPLGRPQPPRPLSNLTL

SEQ ID NO: 3650 - DNA, 1658 bp, Homo sapiens
gccgtgcgtgagcgtgcgcgggcgcgtcggccggcgagggagcagcaaacggccggcggcgggtgccgcgcggggggcgggcggcgcggagtaggtggcggcggccatggccgaggcgtcgccgcatcccggacggtacttctgccactgctgctccgtggagatcgtcccgcgcctgccggattatatctgtccaagatgcgagtctggttttatcgaggagcttccggaagagaccaggagcacagaaaatggttctgccccctccacagctcccacagaccagagccggccaccgttggagcacgtggaccagcacctgttcacgctgccgcagggctacggacagtttgctttcggcatcttcgatgacagcttcgagatccccacgttccctcctggggcgcaggctgacgacggcagggaccctgagagccggcgggagagagaccatccgtcccggcaccggtacggcgcccgacagccccgcgcccgcctcaccacgcggcgggccaccggccggcacgaaggcgtccccacgctggaagggatcatccagcagctcgtcaacggcatcatcacgcccgccaccatccccagcctgggcccctggggagtcctgcactcaaaccctatggactacgcctggggggccaacggcctggatgccatcatcacacagctcctcaatcagtttgaaaacacaggccccccaccggcagataaagagaaaatccaggccctccccaccgtccccgtcactgaggagcacgtaggctccgggctcgagtgccctgtgtgcaaggacgactacgcgctgggtgagcgtgtgcggcagctgccctgcaaccacctgttccacgacggctgcatcgtgccctggctggagcagcacgacagctgccccgtctgccgaaaaagcctcacgggacagaacacggccacgaacccccctggcctcactggggtgagcttctcctcctcgtcgtcatcgtcctcctccagctcgcccagcaacgagaacgccacaagcaactcgtgagcccacgtcggccgtcgggaaagcacggggcctttcccacccaccctcagccagcgccacacggcacccacagactgggtgccccggcggcgccacgcttggctggtcagcgctgcaggtcccgcctgttccagggcaggacccgggcccggcccaccggccccctggcttgggaaggcgtgggccacatggtcccctctggggcgtccccagcctccccgtcctctgtctaacctcaccctctaaacgttcagcggtggaaagatttttataattttaaattattactgctttgaaataaacggacgtttgagctcacgtggcggccatgcatggtttgtggcggaagacggggcccagcggctcccccagcgctgaagcacggggttcagcggctcccccagtgctgcaggtgccgccaggacgggccacgtgggcccccagcctccccctcggccgcctccacgacccggagtaggggggctcgggaccatgaggatgaccagcaaaattcaagaacaaaactgctccaacagacttttttaaaggaaaaaatatgtgtatcttgaaagctatttaaaatacactacttacaaagagaaaaaaaaaaaaaaaa

SEQ ID NO: 3651 - protein, 311 aa, Homo sapiens
MAEASPHPGRYFCHCCSVEIVPRLPDYICPRCESGFIEELPEETRSTENGSAPSTAPTDQSRPPLEHVDQHLFTLPQGYGQFAFGIFDDSFEIPTFPPGAQADDGRDPESRRERDHPSRHRYGARQPRARLTTRRATGRHEGVPTLEGIIQQLVNGIITPATIPSLGPWGVLHSNPMDYAWGANGLDAIITQLLNQFENTGPPPADKEKIQALPTVPVTEEHVGSGLECPVCKDDYALGERVRQLPCNHLFHDGCIVPWLEQHDSCPVCRKSLTGQNTATNPPGLTGVSFSSSSSSSSSSSPSNENATSNS

SEQ ID NO: 3652 - DNA, 2525 bp, Homo sapiens
gggaagtcggtgccgctgccgtctctgcgttcgccatgcgtcccggggcgccagggccactctggcctctgccctggggggccctggcttgggccgtgggcttcgtgagctccatgggctcggggaaccccgcgcccggtggtgtttgctggctccagcagggccaggaggccacctgcagcctggtgctccagactgatgtcacccgggccgagtgctgtgcctccggcaacattgacaccgcctggtccaacctcacccacccggggaacaagatcaacctcctcggcttcttgggccttgtccactgccttccctgcaaagattcgtgcgacggcgtggagtgcggcccgggcaaggcgtgccgcatgctggggggccgcccgcgctgcgagtgcgcgcccgactgctcggggctcccggcgcggctgcaggtctgcggctcagacggcgccacctaccgcgacgagtgcgagctgcgcgccgcgcgctgccgcggccacccggacctgagcgtcatgtaccggggccgctgccgcaagtcctgtgagcacgtggtgtgcccgcggccacagtcgtgcgtcgtggaccagacgggcagcgcccactgcgtggtgtgtcgagcggcgccctgccctgtgccctccagccccggccaggagctttgcggcaacaacaacgtcacctacatctcctcgtgccacatgcgccaggccacctgcttcctgggccgctccatcggcgtgcgccacgcgggcagctgcgcaggcacccctgaggagccgccaggtggtgagtctgcagaagaggaagagaacttcgtgtgagcctgcaggacaggcctgggcctggtgcccgaggccccccatcatcccctgttatttattgccacagcagagtctaatttatatgccacggacactccttagagcccggattcggaccacttggggatcccagaacctccctgacgatatcctggaaggactgaggaagggaggcctgggggccggctggtgggtgggatagacctgcgttccggacactgagcgcctgatttagggcccttctctaggatgccccagcccctaccctaagacctattgccggggaggattccacacttccgctcctttggggataaacctattaattattgctactatcaagagggctgggcattctctgctggtaattcctgaagaggcatgactgcttttctcagccccaagcctctagtctgggtgtgtacggagggtctagcctgggtgtgtacggagggtctagcctgggtgagtacggagggtctagcctgggtgagtacggagggtctagcctgggtgagtacggagggtctagcctgggtgtgtatggaggatctagcctgggtgagtatggagggtctagcctgggtgagtatggagggtctagcctgggtgtgtatggagggtctagcctgggtgagtatggagggtctagcctgggtgtgtatggagggtctagcctgggtgagtatggagggtctagcctgggtgtgtacggagggtctagtctgagtgcgtgtggggacctcagaacactgtgaccttagcccagcaagccaggcccttcatgaaggccaagaaggctgccaccattccctgccagcccaagaactccagcttccccactgcctctgtgtgcccctttgcgtcctgtgaaggccattgagaaatgcccagtgtgccccctgggaaagggcacggcctgtgctcctgacacgggctgtgcttggccacagaaccacccagcgtctcccctgctgctgtccacgtcagttcatgaggcaacgtcgcgtggtctcagacgtggagcagccagcggcagctcagagcagggcactgtgtccggcggagccaagtccactctgggggagctctggcggggaccacgggccactgctcacccactggccccgaggggggtgtagacgccaagactcacgcatgtgtgacatccggagtcctggagccgggtgtcccagtggcaccactaggtgcctgctgcctccacagtggggttcacacccagggctccttggtcccccacaacctgccccggccaggcctgcagacccagactccagccagacctgcctcacccaccaatgcagccggggctggcgacaccagccaggtgctggtcttgggccagttctcccacgacggctcaccctcccctccatctgcgttgatgctcagaatcgcctacctgtgcctgcgtgtaaaccacagcctcagaccagctatggggagaggacaacacggaggatatccagcttccccggtctggggtgaggaatgtggggagcttgggcatcctcctccagcctcctccagcccccaggcagtgccttacctgtggtgcccagaaaagtgcccctaggttggtgggtctacaggagcctcagccaggcagcccaccccaccctggggccctgcctcaccaaggaaataaagactcaagccatttaaaaaaaaaaaaaa

SEQ ID NO: 3653 - protein, 263 aa, Homo sapiens
MRPGAPGPLWPLPWGALAWAVGFVSSMGSGNPAPGGVCWLQQGQEATCSLVLQTDVTRAECCASGNIDTAWSNLTHPGNKINLLGFLGLVHCLPCKDSCDGVECGPGKACRMLGGRPRCECAPDCSGLPARLQVCGSDGATYRDECELRAARCRGHPDLSVMYRGRCRKSCEHVVCPRPQSCVVDQTGSAHCVVCRAAPCPVPSSPGQELCGNNNVTYISSCHMRQATCFLGRSIGVRHAGSCAGTPEEPPGGESAEEEENFV

SEQ ID NO: 3654 - DNA, 1114 bp, Homo sapiens
cggacgcgtgggcggacgcgtgggcggacgcgtgggtctctgcggggagacgccagcctgcgtctgccatggggctcgggttgaggggctggggacgtcctctgctgactgtggccaccgccctgatgctgcccgtgaagccccccgcaggctcctggggggcccagatcatcgggggccacgaggtgaccccccactccaggccctacatggcatccgtgcgcttcgggggccaacatcactgcggaggcttcctgctgcgagcccgctgggtggtctcggccgcccactgcttcagccacagagacctccgcactggcctggtggtgctgggcgcccacgtcctgagtactgcggagcccacccagcaggtgtttggcatcgatgctctcaccacgcaccccgactaccaccccatgacccacgccaacgacatctgcctgctgcggctgaacggctctgctgtcctgggccctgcagtggggctgctgaggctgccagggagaagggccaggccccccacagcggggacacggtgccgggtggctggctggggcttcgtgtctgactttgaggagctgccgcctggactgatggaggccaaggtccgagtgctggacccggacgtctgcaacagctcctggaagggccacctgacacttaccatgctctgcacccgcagtggggacagccacagacggggcttctgctcggccgactccggagggcccctggtgtgcaggaaccgggctcacggcctcgtttccttctcgggcctctggtgcggcgaccccaagacccccgacgtgtacacgcaggtgtccgcctttgtggcctggatctgggacgtggttcggcggagcagtccccagcccggccccctgcctgggaccaccaggcccccaggagaagccgcctgagccacaaccttgcggcatgcaaatgagatggccgctccaggcctggaatgttccgtggctgggccccacgggaagcctgatgttcagggttggggtgggacgggcagcggtggggcacacccattccacatgcaaagggcagaagcaaacccagtaaaatgttaactgacaaaaaaaaaaaaaaaaaaaagaaa

SEQ ID NO: 3655 - protein, 283 aa, Homo sapiens
MGLGLRGWGRPLLTVATALMLPVKPPAGSWGAQIIGGHEVTPHSRPYMASVRFGGQHHCGGFLLRARWVVSAAHCFSHRDLRTGLVVLGAHVLSTAEPTQQVFGIDALTTHPDYHPMTHANDICLLRLNGSAVLGPAVGLLRLPGRRARPPTAGTRCRVAGWGFVSDFEELPPGLMEAKVRVLDPDVCNSSWKGHLTLTMLCTRSGDSHRRGFCSADSGGPLVCRNRAHGLVSFSGLWCGDPKTPDVYTQVSAFVAWIWDVVRRSSPQPGPLPGTTRPPGEAA

SEQ ID NO: 3656 - DNA, 2758 bp, Homo sapiens
acaataaacagcagctttgcgcggggcgatgcccgagccggtgccgccgcccccgcgccgcgcagccccggccgccaggccttagcccgccccggcccccgccaggccgcgtccccctcccctcccctcccccgcgcgccacccgcgcccgcccccgcccggcaccgcggacccacccggacctcggcggggagatggaggtcctggcggcagagaccacgtcccagcaggagcggctgcaggccatcgcagagaagcggaagcggcaggcggagatcgagaacaagcgccggcagctggaggacgagcggaggcagctgcagcacctgaagtccaaggcactgcgggagcgctggctgctggaggggacgccgtcctcggcctcagagggggatgaggacctgaggaggcagatgcaggacgacgagcagaagacacggctgctggaggactcggtgtccaggttggagaaggaaattgaggtgctggagcgtggagactccgccccagccactgccaaggagaacgcggcggccccgagcccagtccgggccccagccccgagtccagccaaggaggagcgcaagacagaggtggtgatgaattcacagcagacgccggtgggcacgcccaaagacaagcgagtctccaacacgcccctgaggacggttgacggctcccccatgatgaaggcagtggtccatgctgtggacggcaccgccgagaacgggatccaccccctgagctcctccgaggtggacgaactcatccacaaagcggacgaggtcacgctgagcgaggcagggtccacggccggggcggcagagacccggggggctgtggagggggcagcccggaccacgccctcccggcgggagatcaccggtgtgcaggcacagccaggcgaggccacgtccggcccgccggggatccagcccggccaggagcccccggtcacaatgatcttcatgggttaccagaacgtggaggatgaggccgagaccaagaaggtgctgggccttcaagataccatcacggcggagctggtggtcatcgaagacgcggctgagcccaaggagcctgcaccacccaacggcagtgctgccgagcctcccacggaggccgcctccagggaagagaatcaggcggggcccgaggccaccaccagcgacccccaggacctcgacatgaagaagcaccgttgtaaatgctgctccatcatgtgagccggcccccgagaccccggcccccaccccacaccacagacacccaccagcccggcccctcccggcgcctgcccaccctccacccacagcctcacgggtccaggacttggcgtgttgttacatgttccttccgagttttctttcgctggaaagagggacaggggcccccacccgtcaccacgccccaacactccccccgaaccagagccgtgcacttgtgcctggtaggagagagacaggacagacccgcttttcccgagacaaggaccccccatgtcacggcagcttcacagacgcggctcgcgcccaccggggtcctggcgggtgggacccgcagcctccacgcggcccaggccagcctgccaccctctgggcctcctacctgtgcctttctctgaggggacaccccgccagagagggccccgggagccgggggtgggtactgaggcctgctcaggccctggaagtgaggctctatggggttccctggccaaggcgctggccccccaatctcaggcagttggggtgaggccgtgcctctttgggggctaaaggtcttgggtggaggacaggcccctctgctgtgcccctatgccctgtgtgggcccaaccagtggacaatggagtctgggggagggggaaccccggggacatgcccccacccgggaggggccggtaacccctgggctatcttctagacggggcgaaccaggggtcattgacctgccccctgcacagggcagggaccgagtgagccactccttgtcccgagctcccgcccccactgggccctccttcctcctggtgctaatttggggaccccaggggccgcccccggcctcttctccatcctgcttggaccagggtcctgggtcttcccaaccataccccgagatcaggccccacctgccagctctactgggcttggagcacgtccgggcagtggagggagggacacagcctgggacaggaagcctcttgggttggagcaggagaccctcatttgccacccagaccaatgtgagcctgcccccagccccctctcattggaagtggcaaggggcttccctcctgggggcagctacactcgtccccagaggcacattcgtgcacattctcacagacaccgtctcacacgttggctttggacaaccaggccccaacttggtccctgccctagggacctccagcctggtgcccagtgctcaggccacctcctggtccagtcaccacctgcagcctcggcagggcaggtacaggggccacctcggatgggagcctgggtccctgcctccgctctgcccctgggtggctgggaggagaggccctctcgggggtgacctgggcgtcagccgtggaaccccctcctcctccctggagtctgcctgagtccctcgagccgcgagccttcgctgaagtgcccttgctataaccccctctgcttctggtgtgtgacgaggcccccgatgttcttgattttcccagagaagcaaataaacagcgtgaacagccccagaaaaaaaaaaaaaaaa

SEQ ID NO: 3657 - protein, 343 aa, Homo sapiens
MEVLAAETTSQQERLQAIAEKRKRQAEIENKRRQLEDERRQLQHLKSKALRERWLLEGTPSSASEGDEDLRRQMQDDEQKTRLLEDSVSRLEKEIEVLERGDSAPATAKENAAAPSPVRAPAPSPAKEERKTEVVMNSQQTPVGTPKDKRVSNTPLRTVDGSPMMKAVVHAVDGTAENGIHPLSSSEVDELIHKADEVTLSEAGSTAGAAETRGAVEGAARTTPSRREITGVQAQPGEATSGPPGIQPGQEPPVTMIFMGYQNVEDEAETKKVLGLQDTITAELVVIEDAAEPKEPAPPNGSAAEPPTEAASREENQAGPEATTSDPQDLDMKKHRCKCCSIM

SEQ ID NO: 3658 - DNA, 2890 bp, Homo sapiens
acaataaacagcagctttgcgcggggcgatgcccgagccggtgccgccgcccccgcgccgcgcagccccggccgccaggccttagcccgccccggcccccgccaggccgcgtccccctcccctcccctcccccgcgcgccacccgcgcccgcccccgcccggcaccgcggacccacccggacctcggcggggagatggaggtcctggcggcagagaccacgtcccagcaggagcggctgcaggccatcgcagagaagcggaagcggcaggcggagatcgagaacaagcgccggcagctggaggacgagcggaggcagctgcagcacctgaagtccaaggcactgcgggagcgctggctgctggaggggacgccgtcctcggcctcagagggggatgaggacctgaggaggcagatgcaggacgacgagcagaagacacggctgctggaggactcggtgtccaggttggagaaggaaattgaggtgctggagcgtggagactccgccccagccactgccaaggagaacgcggcggccccgagcccagtccgggccccagccccgagtccagccaaggaggagcgcaagacagaggtggtgatgaattcacagcagacgccggtgggcacgcccaaagacaagcgagtctccaacacgcccctgaggacggttgacggctcccccatgatgaaggcagccatgtactcggttgagatcactgtggagaaggacaaggtgacaggggagaccagggtgctgtccagcaccacgctgctccctcggcagccgctccctctgggcatcaaagtctacgaggacgagaccaaagtggtccatgctgtggacggcaccgccgagaacgggatccaccccctgagctcctccgaggtggacgaactcatccacaaagcggacgaggtcacgctgagcgaggcagggtccacggccggggcggcagagacccggggggctgtggagggggcagcccggaccacgccctcccggcgggagatcaccggtgtgcaggcacagccaggcgaggccacgtccggcccgccggggatccagcccggccaggagcccccggtcacaatgatcttcatgggttaccagaacgtggaggatgaggccgagaccaagaaggtgctgggccttcaagataccatcacggcggagctggtggtcatcgaagacgcggctgagcccaaggagcctgcaccacccaacggcagtgctgccgagcctcccacggaggccgcctccagggaagagaatcaggcggggcccgaggccaccaccagcgacccccaggacctcgacatgaagaagcaccgttgtaaatgctgctccatcatgtgagccggcccccgagaccccggcccccaccccacaccacagacacccaccagcccggcccctcccggcgcctgcccaccctccacccacagcctcacgggtccaggacttggcgtgttgttacatgttccttccgagttttctttcgctggaaagagggacaggggcccccacccgtcaccacgccccaacactccccccgaaccagagccgtgcacttgtgcctggtaggagagagacaggacagacccgcttttcccgagacaaggaccccccatgtcacggcagcttcacagacgcggctcgcgcccaccggggtcctggcgggtgggacccgcagcctccacgcggcccaggccagcctgccaccctctgggcctcctacctgtgcctttctctgaggggacaccccgccagagagggccccgggagccgggggtgggtactgaggcctgctcaggccctggaagtgaggctctatggggttccctggccaaggcgctggccccccaatctcaggcagttggggtgaggccgtgcctctttgggggctaaaggtcttgggtggaggacaggcccctctgctgtgcccctatgccctgtgtgggcccaaccagtggacaatggagtctgggggagggggaaccccggggacatgcccccacccgggaggggccggtaacccctgggctatcttctagacggggcgaaccaggggtcattgacctgccccctgcacagggcagggaccgagtgagccactccttgtcccgagctcccgcccccactgggccctccttcctcctggtgctaatttggggaccccaggggccgcccccggcctcttctccatcctgcttggaccagggtcctgggtcttcccaaccataccccgagatcaggccccacctgccagctctactgggcttggagcacgtccgggcagtggagggagggacacagcctgggacaggaagcctcttgggttggagcaggagaccctcatttgccacccagaccaatgtgagcctgcccccagccccctctcattggaagtggcaaggggcttccctcctgggggcagctacactcgtccccagaggcacattcgtgcacattctcacagacaccgtctcacacgttggctttggacaaccaggccccaacttggtccctgccctagggacctccagcctggtgcccagtgctcaggccacctcctggtccagtcaccacctgcagcctcggcagggcaggtacaggggccacctcggatgggagcctgggtccctgcctccgctctgcccctgggtggctgggaggagaggccctctcgggggtgacctgggcgtcagccgtggaaccccctcctcctccctggagtctgcctgagtccctcgagccgcgagccttcgctgaagtgcccttgctataaccccctctgcttctggtgtgtgacgaggcccccgatgttcttgattttcccagagaagcaaataaacagcgtgaacagccccagaaaaaaaaaaaaaaaa

SEQ ID NO: 3659 - protein, 387 aa, Homo sapiens
MEVLAAETTSQQERLQAIAEKRKRQAEIENKRRQLEDERRQLQHLKSKALRERWLLEGTPSSASEGDEDLRRQMQDDEQKTRLLEDSVSRLEKEIEVLERGDSAPATAKENAAAPSPVRAPAPSPAKEERKTEVVMNSQQTPVGTPKDKRVSNTPLRTVDGSPMMKAAMYSVEITVEKDKVTGETRVLSSTTLLPRQPLPLGIKVYEDETKVVHAVDGTAENGIHPLSSSEVDELIHKADEVTLSEAGSTAGAAETRGAVEGAARTTPSRREITGVQAQPGEATSGPPGIQPGQEPPVTMIFMGYQNVEDEAETKKVLGLQDTITAELVVIEDAAEPKEPAPPNGSAAEPPTEAASREENQAGPEATTSDPQDLDMKKHRCKCCSIM

SEQ ID NO: 3660 - DNA, 1491 bp, Homo sapiens
cgagactccatctcaaaaacaaaacaaataaacgaacaaaaaaacccacaacgtattattttcttgtttacgaggtttcttgtctctctggctccaccagaagaggagcagggacccttcttgctgttgttcattgctgcatcccccacaccgagagcagagcctggcatgggcagaaagtcctcagtcgatatttggtggccccaagcgaatgaagcatccaagaagggaaagctgggggctccccactgcacttgccacctgagtcacattttcagaagcctctggaaagtcgtgcacagcccaggagtgttgagcaatttcggtttcctctgaggttgaaggacccaggcgtgtcagccctgctccagacaccttgggcatggaggagagtgtcgtacggccctcagtgtttgtggtggatggacagaccgacatcccattcacgaggctgggacgaagccaccggagacagtcgtgcagtgtggcccgggtgggtctgggtctcttgctgttgctgatgggggccgggctggccgtccaaggctggttcctcctgcagctgcactggcgtctaggagagatggtcacccgcctgcctgacggacctgcaggctcctgggagcagctgatacaagagcgaaggtctcacgaggtcaacccagcagcgcatctcacaggggccaactccagcttgaccggcagcggggggccgctgttatgggagactcagctgggcctggccttcctgaggggcctcagctaccacgatggggcccttgtggtcaccaaagctggctactactacatctactccaaggtgcagctgggcggtgtgggctgcccgctgggcctggccagcaccatcacccacggcctctacaagcgcacaccccgctaccccgaggagctggagctgttggtcagccagcagtcaccctgcggacgggccaccagcagctcccgggtctggtgggacagcagcttcctgggtggtgtggtacacctggaggctggggagaaggtggtcgtccgtgtgctggatgaacgcctggttcgactgcgtgatggtacccggtcttacttcggggctttcatggtgtgaaggaaggagcgtggtgcattggacatgggtctgacacgtggagaactcagagggtgcctcaggggaaagaaaactcacgaagcagaggctgggcgtggtggctctcgcctgtaatcccagcactttgggaggccaaggcaggcggatcacctgaggtcaggagttcgagaccagcctggctaacatggcaaaaccccatctctactaaaaatacaaaaattagccggacgtggtggtgcctgcctgtaatccagctactcaggaggctgaggcaggataattttgcttaaacccgggaggcggaggttgcagtgagccgagatcacaccactgcactccaacctgggaaacgcagtgagactgtgcctcaaaaaaaaaaaaaaaaa

SEQ ID NO: 3661 - protein, 240 aa, Homo sapiens
MEESVVRPSVFVVDGQTDIPFTRLGRSHRRQSCSVARVGLGLLLLLMGAGLAVQGWFLLQLHWRLGEMVTRLPDGPAGSWEQLIQERRSHEVNPAAHLTGANSSLTGSGGPLLWETQLGLAFLRGLSYHDGALVVTKAGYYYIYSKVQLGGVGCPLGLASTITHGLYKRTPRYPEELELLVSQQSPCGRATSSSRVWWDSSFLGGVVHLEAGEKVVVRVLDERLVRLRDGTRSYFGAFMV

SEQ ID NO: 3662 - DNA, 1395 bp, Homo sapiens
cgagactccatctcaaaaacaaaacaaataaacgaacaaaaaaacccacaacgtattattttcttgtttacgaggtttcttgtctctctggctccaccagaagaggagcagggacccttcttgctgttgttcattgctgcatcccccacaccgagagcagagcctggcatgggcagaaagtcctcagtcgatatttggtggccccaagcgaatgaagcatccaagaagggaaagctgggggctccccactgcacttgccacctgagtcacattttcagaagcctctggaaagtcgtgcacagcccaggagtgttgagcaatttcggtttcctctgaggttgaaggacccaggcgtgtcagccctgctccagacaccttgggcatggaggagagtgtcgtacggccctcagtgtttgtggtggatggacagaccgacatcccattcacgaggctgggacgaagccaccggagacagtcgtgcagtgtggcccgggacggacctgcaggctcctgggagcagctgatacaagagcgaaggtctcacgaggtcaacccagcagcgcatctcacaggggccaactccagcttgaccggcagcggggggccgctgttatgggagactcagctgggcctggccttcctgaggggcctcagctaccacgatggggcccttgtggtcaccaaagctggctactactacatctactccaaggtgcagctgggcggtgtgggctgcccgctgggcctggccagcaccatcacccacggcctctacaagcgcacaccccgctaccccgaggagctggagctgttggtcagccagcagtcaccctgcggacgggccaccagcagctcccgggtctggtgggacagcagcttcctgggtggtgtggtacacctggaggctggggaggaggtggtcgtccgtgtgctggatgaacgcctggttcgactgcgtgatggtacccggtcttacttcggggctttcatggtgtgaaggaaggagcgtggtgcattggacatgggtctgacacgtggagaactcagagggtgcctcaggggaaagaaaactcacgaagcagaggctgggcgtggtggctctcgcctgtaatcccagcactttgggaggccaaggcaggcggatcacctgaggtcaggagttcgagaccagcctggctaacatggcaaaaccccatctctactaaaaatacaaaaattagccggacgtggtggtgcctgcctgtaatccagctactcaggaggctgaggcaggataattttgcttaaacccgggaggcggaggttgcagtgagccgagatcacaccactgcactccaacctgggaaacgcagtgagactgtgcctcaaaaaaaaaaaaaaaaaaaaaaaaaaaaa

SEQ ID NO: 3663 - protein, 204 aa, Homo sapiens
MEESVVRPSVFVVDGQTDIPFTRLGRSHRRQSCSVARDGPAGSWEQLIQERRSHEVNPAAHLTGANSSLTGSGGPLLWETQLGLAFLRGLSYHDGALVVTKAGYYYIYSKVQLGGVGCPLGLASTITHGLYKRTPRYPEELELLVSQQSPCGRATSSSRVWWDSSFLGGVVHLEAGEEVVVRVLDERLVRLRDGTRSYFGAFMV

SEQ ID NO: 3664 - DNA, 5067 bp, Homo sapiens
ctcctccccatcctctccctctgtccctctgtccctctgaccctgcactgtcccagcaccatgggacccacctcaggtcccagcctgctgctcctgctactaacccacctccccctggctctggggagtcccatgtactctatcatcacccccaacatcttgcggctggagagcgaggagaccatggtgctggaggcccacgacgcgcaaggggatgttccagtcactgttactgtccacgacttcccaggcaaaaaactagtgctgtccagtgagaagactgtgctgacccctgccaccaaccacatgggcaacgtcaccttcacgatcccagccaacagggagttcaagtcagaaaaggggcgcaacaagttcgtgaccgtgcaggccaccttcgggacccaagtggtggagaaggtggtgctggtcagcctgcagagcgggtacctcttcatccagacagacaagaccatctacacccctggctccacagttctctatcggatcttcaccgtcaaccacaagctgctacccgtgggccggacggtcatggtcaacattgagaacccggaaggcatcccggtcaagcaggactccttgtcttctcagaaccagcttggcgtcttgcccttgtcttgggacattccggaactcgtcaacatgggccagtggaagatccgagcctactatgaaaactcaccacagcaggtcttctccactgagtttgaggtgaaggagtacgtgctgcccagtttcgaggtcatagtggagcctacagagaaattctactacatctataacgagaagggcctggaggtcaccatcaccgccaggttcctctacgggaagaaagtggagggaactgcctttgtcatcttcgggatccaggatggcgaacagaggatttccctgcctgaatccctcaagcgcattccgattgaggatggctcgggggaggttgtgctgagccggaaggtactgctggacggggtgcagaacctccgagcagaagacctggtggggaagtctttgtacgtgtctgccaccgtcatcttgcactcaggcagtgacatggtgcaggcagagcgcagcgggatccccatcgtgacctctccctaccagatccacttcaccaagacacccaagtacttcaaaccaggaatgccctttgacctcatggtgttcgtgacgaaccctgatggctctccagcctaccgagtccccgtggcagtccagggcgaggacactgtgcagtctctaacccagggagatggcgtggccaaactcagcatcaacacacaccccagccagaagcccttgagcatcacggtgcgcacgaagaagcaggagctctcggaggcagagcaggctaccaggaccatgcaggctctgccctacagcaccgtgggcaactccaacaattacctgcatctctcagtgctacgtacagagctcagacccggggagaccctcaacgtcaacttcctcctgcgaatggaccgcgcccacgaggccaagatccgctactacacctacctgatcatgaacaagggcaggctgttgaaggcgggacgccaggtgcgagagcccggccaggacctggtggtgctgcccctgtccatcaccaccgacttcatcccttccttccgcctggtggcgtactacacgctgatcggtgccagcggccagagggaggtggtggccgactccgtgtgggtggacgtcaaggactcctgcgtgggctcgctggtggtaaaaagcggccagtcagaagaccggcagcctgtacctgggcagcagatgaccctgaagatagagggtgaccacggggcccgggtggtactggtggccgtggacaagggcgtgttcgtgctgaataagaagaacaaactgacgcagagtaagatctgggacgtggtggagaaggcagacatcggctgcaccccgggcagtgggaaggattacgccggtgtcttctccgacgcagggctgaccttcacgagcagcagtggccagcagaccgcccagagggcagaacttcagtgcccgcagccagccgcccgccgacgccgttccgtgcagctcacggagaagcgaatggacaaagtcggcaagtaccccaaggagctgcgcaagtgctgcgaggacggcatgcgggagaaccccatgaggttctcgtgccagcgccggacccgtttcatctccctgggcgaggcgtgcaagaaggtcttcctggactgctgcaactacatcacagagctgcggcggcagcacgcgcgggccagccacctgggcctggccaggagtaacctggatgaggacatcattgcagaagagaacatcgtttcccgaagtgagttcccagagagctggctgtggaacgttgaggacttgaaagagccaccgaaaaatggaatctctacgaagctcatgaatatatttttgaaagactccatcaccacgtgggagattctggctgtcagcatgtcggacaagaaagggatctgtgtggcagaccccttcgaggtcacagtaatgcaggacttcttcatcgacctgcggctaccctactctgttgttcgaaacgagcaggtggaaatccgagccgttctctacaattaccggcagaaccaagagctcaaggtgagggtggaactactccacaatccagccttctgcagcctggccaccaccaagaggcgtcaccagcagaccgtaaccatcccccccaagtcctcgttgtccgttccatatgtcatcgtgccgctaaagaccggcctgcaggaagtggaagtcaaggctgccgtctaccatcatttcatcagtgacggtgtcaggaagtccctgaaggtcgtgccggaaggaatcagaatgaacaaaactgtggctgttcgcaccctggatccagaacgcctgggccgtgaaggagtgcagaaagaggacatcccacctgcagacctcagtgaccaagtcccggacaccgagtctgagaccagaattctcctgcaagggaccccagtggcccagatgacagaggatgccgtcgacgcggaacggctgaagcacctcattgtgaccccctcgggctgcggggaacagaacatgatcggcatgacgcccacggtcatcgctgtgcattacctggatgaaacggagcagtgggagaagttcggcctagagaagcggcagggggccttggagctcatcaagaaggggtacacccagcagctggccttcagacaacccagctctgcctttgcggccttcgtgaaacgggcacccagcacctggctgaccgcctacgtggtcaaggtcttctctctggctgtcaacctcatcgccatcgactcccaagtcctctgcggggctgttaaatggctgatcctggagaagcagaagcccgacggggtcttccaggaggatgcgcccgtgatacaccaagaaatgattggtggattacggaacaacaacgagaaagacatggccctcacggcctttgttctcatctcgctgcaggaggctaaagatatttgcgaggagcaggtcaacagcctgccaggcagcatcactaaagcaggagacttccttgaagccaactacatgaacctacagagatcctacactgtggccattgctggctatgctctggcccagatgggcaggctgaaggggcctcttcttaacaaatttctgaccacagccaaagataagaaccgctgggaggaccctggtaagcagctctacaacgtggaggccacatcctatgccctcttggccctactgcagctaaaagactttgactttgtgcctcccgtcgtgcgttggctcaatgaacagagatactacggtggtggctatggctctacccaggccaccttcatggtgttccaagccttggctcaataccaaaaggacgcccctgaccaccaggaactgaaccttgatgtgtccctccaactgcccagccgcagctccaagatcacccaccgtatccactgggaatctgccagcctcctgcgatcagaagagaccaaggaaaatgagggtttcacagtcacagctgaaggaaaaggccaaggcaccttgtcggtggtgacaatgtaccatgctaaggccaaagatcaactcacctgtaataaattcgacctcaaggtcaccataaaaccagcaccggaaacagaaaagaggcctcaggatgccaagaacactatgatccttgagatctgtaccaggtaccggggagaccaggatgccactatgtctatattggacatatccatgatgactggctttgctccagacacagatgacctgaagcagctggccaatggtgttgacagatacatctccaagtatgagctggacaaagccttctccgataggaacaccctcatcatctacctggacaaggtctcacactctgaggatgactgtctagctttcaaagttcaccaatactttaatgtagagcttatccagcctggagcagtcaaggtctacgcctattacaacctggaggaaagctgtacccggttctaccatccggaaaaggaggatggaaagctgaacaagctctgccgtgatgaactgtgccgctgtgctgaggagaattgcttcatacaaaagtcggatgacaaggtcaccctggaagaacggctggacaaggcctgtgagccaggagtggactatgtgtacaagacccgactggtcaaggttcagctgtccaatgactttgacgagtacatcatggccattgagcagaccatcaagtcaggctcggatgaggtgcaggttggacagcagcgcacgttcatcagccccatcaagtgcagagaagccctgaagctggaggagaagaaacactacctcatgtggggtctctcctccgatttctggggagagaagcccaacctcagctacatcatcgggaaggacacttgggtggagcactggcctgaggaggacgaatgccaagacgaagagaaccagaaacaatgccaggacctcggcgccttcaccgagagcatggttgtctttgggtgccccaactgaccacacccccattcc

SEQ ID NO: 3665 - protein, 1663 aa, Homo sapiens
MGPTSGPSLLLLLLTHLPLALGSPMYSIITPNILRLESEETMVLEAHDAQGDVPVTVTVHDFPGKKLVLSSEKTVLTPATNHMGNVTFTIPANREFKSEKGRNKFVTVQATFGTQVVEKVVLVSLQSGYLFIQTDKTIYTPGSTVLYRIFTVNHKLLPVGRTVMVNIENPEGIPVKQDSLSSQNQLGVLPLSWDIPELVNMGQWKIRAYYENSPQQVFSTEFEVKEYVLPSFEVIVEPTEKFYYIYNEKGLEVTITARFLYGKKVEGTAFVIFGIQDGEQRISLPESLKRIPIEDGSGEVVLSRKVLLDGVQNLRAEDLVGKSLYVSATVILHSGSDMVQAERSGIPIVTSPYQIHFTKTPKYFKPGMPFDLMVFVTNPDGSPAYRVPVAVQGEDTVQSLTQGDGVAKLSINTHPSQKPLSITVRTKKQELSEAEQATRTMQALPYSTVGNSNNYLHLSVLRTELRPGETLNVNFLLRMDRAHEAKIRYYTYLIMNKGRLLKAGRQVREPGQDLVVLPLSITTDFIPSFRLVAYYTLIGASGQREVVADSVWVDVKDSCVGSLVVKSGQSEDRQPVPGQQMTLKIEGDHGARVVLVAVDKGVFVLNKKNKLTQSKIWDVVEKADIGCTPGSGKDYAGVFSDAGLTFTSSSGQQTAQRAELQCPQPAARRRRSVQLTEKRMDKVGKYPKELRKCCEDGMRENPMRFSCQRRTRFISLGEACKKVFLDCCNYITELRRQHARASHLGLARSNLDEDIIAEENIVSRSEFPESWLWNVEDLKEPPKNGISTKLMNIFLKDSITTWEILAVSMSDKKGICVADPFEVTVMQDFFIDLRLPYSVVRNEQVEIRAVLYNYRQNQELKVRVELLHNPAFCSLATTKRRHQQTVTIPPKSSLSVPYVIVPLKTGLQEVEVKAAVYHHFISDGVRKSLKVVPEGIRMNKTVAVRTLDPERLGREGVQKEDIPPADLSDQVPDTESETRILLQGTPVAQMTEDAVDAERLKHLIVTPSGCGEQNMIGMTPTVIAVHYLDETEQWEKFGLEKRQGALELIKKGYTQQLAFRQPSSAFAAFVKRAPSTWLTAYVVKVFSLAVNLIAIDSQVLCGAVKWLILEKQKPDGVFQEDAPVIHQEMIGGLRNNNEKDMALTAFVLISLQEAKDICEEQVNSLPGSITKAGDFLEANYMNLQRSYTVAIAGYALAQMGRLKGPLLNKFLTTAKDKNRWEDPGKQLYNVEATSYALLALLQLKDFDFVPPVVRWLNEQRYYGGGYGSTQATFMVFQALAQYQKDAPDHQELNLDVSLQLPSRSSKITHRIHWESASLLRSEETKENEGFTVTAEGKGQGTLSVVTMYHAKAKDQLTCNKFDLKVTIKPAPETEKRPQDAKNTMILEICTRYRGDQDATMSILDISMMTGFAPDTDDLKQLANGVDRYISKYELDKAFSDRNTLIIYLDKVSHSEDDCLAFKVHQYFNVELIQPGAVKVYAYYNLEESCTRFYHPEKEDGKLNKLCRDELCRCAEENCFIQKSDDKVTLEERLDKACEPGVDYVYKTRLVKVQLSNDFDEYIMAIEQTIKSGSDEVQVGQQRTFISPIKCREALKLEEKKHYLMWGLSSDFWGEKPNLSYIIGKDTWVEHWPEEDECQDEENQKQCQDLGAFTESMVVFGCPN

SEQ ID NO: 3666 - DNA, 2064 bp, Homo sapiens
gggcgccagaggcggagtcggggaggaggtggctccagagatggcagtgagcgagaggagggggctcggccgcgggagccccgcggagtgggggcagcggctacttctggtgctgctgctgggtggctgctccgggcgcatccaccagctggcgctgacgggggagaagcgagcggacatccagctgaacagcttcggtttctacaccaatggctctctggaggtggagttgagcgtcctgcggctgggcctccgggaggcagaagagaagtccctgctggtggggttcagtctcagccgggttcggtctggcagagttcgctcctattcaacccgggatttccaggactgccctctccagaaaaacagtagcagtttcctggtcctgttcctcatcaacaccaaggatctgcaggtccaggtgcggaagtatggagagcagaagacgttgtttatctttcccgggctcctcccggaagcaccctccaaaccagggctcccgaagccacaggccacagtcccccgcaaggtggatggcggagggacctctgcagccagcaagcccaagtcaacacccgcagtgattcagggtcctagtgggaaggacaaggacctggtgttgggcctgagccacctcaacaactcctacaacttcagtttccacgtggtgatcggctctcaggcggaagaaggccagtacagcctgaacttccacaactgcaacaattcagtgccaggaaaggagcatccattcgacatcacggtgatgatccgggagaagaaccccgatggcttcctgtcggcagcggagatgccccttttcaagctctacatggtcatgtccgcctgcttcctggccgctggcatcttctgggtgtccatcctctgcaggaacacgtacagcgtcttcaagatccactggctcatggcggccttggccttcaccaagagcatctctctcctcttccacagcatcaactactacttcatcaacagccagggccaccccatcgaaggccttgccgtcatgtactacatcgcacacctgctgaagggcgccctcctcttcatcaccatcgccctgattggctcaggctgggccttcatcaagtacgtcctgtcggataaggagaagaaggtctttgggatcgtgatccccatgcaggtcctggccaacgtggcctacatcatcatcgagtcccgcgaggaaggcgccagcgactacgtgctgtggaaggagattttgttcctggtggacctcatctgctgtggtgccatcctgttccccgtagtctggtccatccggcatctccaggatgcgtctggcacagacgggaaggtggcagtgaacctggccaagctgaagctgttccggcattactatgtcatggtcatctgctacgtctacttcacccgcatcatcgccatcctgctgcaggtggctgtgccctttcagtggcagtggctgtaccagctcttggtggagggctccaccctggccttcttcgtgctcacgggctacaagttccagcccacaggaaacaacccgtacctgcagctgccccaggaggacgaggaggatgttcagatggagcaagtaatgacggactctgggttccgggaaggcctctccaaagtcaacaaaacagccagcgggcgggaactgttatgatcacctccacatctcagaccaaagggtcgtcctcccccagcatttctcactcctgcccttcttccacagcgtatgtggggaggtggagggggtccatgtggaccaggcgcccagctccccgggaccccggttcccggacaagcccatttggaagaagagtcccttcctccccccaaatattgggcagccctgtccttaccccgggaccacccctcccttccagctatgtgtacaataatgaccaatctgtttggctacgccgttgtcttgcctttttgggggttggggtctacacggaggttgtgtttacaatgtagaaacctgttttcgctgtgtgtggcgggggcgcgggcacagggtccgtgtctttgtatattcaataaatattcatt

SEQ ID NO: 3667 - protein, 543 aa, Homo sapiens
MAVSERRGLGRGSPAEWGQRLLLVLLLGGCSGRIHQLALTGEKRADIQLNSFGFYTNGSLEVELSVLRLGLREAEEKSLLVGFSLSRVRSGRVRSYSTRDFQDCPLQKNSSSFLVLFLINTKDLQVQVRKYGEQKTLFIFPGLLPEAPSKPGLPKPQATVPRKVDGGGTSAASKPKSTPAVIQGPSGKDKDLVLGLSHLNNSYNFSFHVVIGSQAEEGQYSLNFHNCNNSVPGKEHPFDITVMIREKNPDGFLSAAEMPLFKLYMVMSACFLAAGIFWVSILCRNTYSVFKIHWLMAALAFTKSISLLFHSINYYFINSQGHPIEGLAVMYYIAHLLKGALLFITIALIGSGWAFIKYVLSDKEKKVFGIVIPMQVLANVAYIIIESREEGASDYVLWKEILFLVDLICCGAILFPVVWSIRHLQDASGTDGKVAVNLAKLKLFRHYYVMVICYVYFTRIIAILLQVAVPFQWQWLYQLLVEGSTLAFFVLTGYKFQPTGNNPYLQLPQEDEEDVQMEQVMTDSGFREGLSKVNKTASGRELL

SEQ ID NO: 3668 - DNA, 2215 bp, Homo sapiens
gatccccttcggtcctccggatggagttgccgggtccgcctcgctggggtcggccccctcccttcgggggcgaggctccatctcttggggactacaccccccttccccccaactgggtcttagtcctttaaattcttggaatcacttttggggcgctagagaccctggagccgcacagcggggtcctggggggctatagagtggggtcctctgggcacttaatgggatttggggggttctgttgaaatattgctgggagctcaactggaatgtaaaagttcttcgggaaggtgaaggtcaggcacgccgagggggagaagcgagcggacatccagctgaacagcttcggtttctacaccaatggctctctggaggtggagttgagcgtcctgcggctgggcctccgggaggcagaagagaagtccctgctggtggggttcagtctcagccgggttcggtctggcagagttcgctcctattcaacccgggatttccaggactgccctctccagaaaaacagtagcagtttcctggtcctgttcctcatcaacaccaaggatctgcaggtccaggtgcggaagtatggagagcagaagacgttgtttatctttcccgggctcctcccggaagcaccctccaaaccagggctcccgaagccacaggccacagtcccccgcaaggtggatggcggagggacctctgcagccagcaagcccaagtcaacacccgcagtgattcagggtcctagtgggaaggacaaggacctggtgttgggcctgagccacctcaacaactcctacaacttcagtttccacgtggtgatcggctctcaggcggaagaaggccagtacagcctgaacttccacaactgcaacaattcagtgccaggaaaggagcatccattcgacatcacggtgatgatccgggagaagaaccccgatggcttcctgtcggcagcggagatgccccttttcaagctctacatggtcatgtccgcctgcttcctggccgctggcatcttctgggtgtccatcctctgcaggaacacgtacagcgtcttcaagatccactggctcatggcggccttggccttcaccaagagcatctctctcctcttccacagcatcaactactacttcatcaacagccagggccaccccatcgaaggccttgccgtcatgtactacatcgcacacctgctgaagggcgccctcctcttcatcaccatcgccctgattggctcaggctgggccttcatcaagtacgtcctgtcggataaggagaagaaggtctttgggatcgtgatccccatgcaggtcctggccaacgtggcctacatcatcatcgagtcccgcgaggaaggcgccagcgactacgtgctgtggaaggagattttgttcctggtggacctcatctgctgtggtgccatcctgttccccgtagtctggtccatccggcatctccaggatgcgtctggcacagacgggaaggtggcagtgaacctggccaagctgaagctgttccggcattactatgtcatggtcatctgctacgtctacttcacccgcatcatcgccatcctgctgcaggtggctgtgccctttcagtggcagtggctgtaccagctcttggtggagggctccaccctggccttcttcgtgctcacgggctacaagttccagcccacaggaaacaacccgtacctgcagctgccccaggaggacgaggaggatgttcagatggagcaagtaatgacggactctgggttccgggaaggcctctccaaagtcaacaaaacagccagcgggcgggaactgttatgatcacctccacatctcagaccaaagggtcgtcctcccccagcatttctcactcctgcccttcttccacagcgtatgtggggaggtggagggggtccatgtggaccaggcgcccagctccccgggaccccggttcccggacaagcccatttggaagaagagtcccttcctccccccaaatattgggcagccctgtccttaccccgggaccacccctcccttccagctatgtgtacaataatgaccaatctgtttggctacgccgttgtcttgcctttttgggggttggggtctacacggaggttgtgtttacaatgtagaaacctgttttcgctgtgtgtggcgggggcgcgggcacagggtccgtgtctttgtatattcaataaatattcatt

SEQ ID NO: 3669 - protein, 301 aa, Homo sapiens
MIREKNPDGFLSAAEMPLFKLYMVMSACFLAAGIFWVSILCRNTYSVFKIHWLMAALAFTKSISLLFHSINYYFINSQGHPIEGLAVMYYIAHLLKGALLFITIALIGSGWAFIKYVLSDKEKKVFGIVIPMQVLANVAYIIIESREEGASDYVLWKEILFLVDLICCGAILFPVVWSIRHLQDASGTDGKVAVNLAKLKLFRHYYVMVICYVYFTRIIAILLQVAVPFQWQWLYQLLVEGSTLAFFVLTGYKFQPTGNNPYLQLPQEDEEDVQMEQVMTDSGFREGLSKVNKTASGRELL

SEQ ID NO: 3670 - DNA, 1812 bp, Homo sapiens
tggctctctggaggtggagttgagcgtcctgcggctgggcctccgggaggcagaagagaagtccctgctggtggggttcagtctcagccgggttcggtctggcagagttcgctcctattcaacccgggatttccaggactgccctctccagaaaaacagtagcagtttcctggtcctgttcctcatcaacaccaaggatctgcagtgagttggggaccgggggctcgctcagatccttcgtctgcgtttccctggtgtgatgcccacacgcacctgggctgatcagggtccaggtgcggaagtatggagagcagaagacgttgtttatctttcccgggctcctcccggaagcaccctccaaaccagggctcccgaagccacaggccacagtcccccgcaaggtggatggcggagggacctctgcagccagcaagcccaagtcaacacccgcagtgattcagggtcctagtgggaaggacaaggacctggtgttgggcctgagccacctcaacaactcctacaacttcagtttccacgtggtgatcggctctcaggcggaagaaggccagtacagcctgaacttccacaactgcaacaattcagtgccaggaaaggagcatccattcgacatcacggtgatgatccgggagaagaaccccgatggcttcctgtcggcagcggagatgccccttttcaagctctacatggtcatgtccgcctgcttcctggccgctggcatcttctgggtgtccatcctctgcaggaacacatcaactactacttcatcaacagccagggccaccccatcgaaggccttgccgtcatgtactacatcgcacacctgctgaagggcgccctcctcttcatcaccatcgccctgattggctcaggctgggccttcatcaagtacgtcctgtcggataaggagaagaaggtctttgggatcgtgatccccatgcaggtcctggccaacgtggcctacatcatcatcgagtcccgcgaggaaggcgccagcgactacgtgctgtggaaggagattttgttcctggtggacctcatctgctgtggtgccatcctgttccccgtagtctggtccatccggcatctccaggatgcgtctggcacagacgggaaggtggcagtgaacctggccaagctgaagctgttccggcattactatgtcatggtggctgtgccctttcagtggcagtggctgtaccagctcttggtggagggctccaccctggccttcttcgtgctcacgggctacaagttccagcccacaggaaacaacccgtacctgcagctgccccaggaggacgaggaggatgttcagatggagcaagtaatgacggactctgggttccgggaaggcctctccaaagtcaacaaaacagccagcgggcgggaactgttatgatcacctccacatctcagaccaaagggtcgtcctcccccagcatttctcactcctgcccttcttccacagcgtatgtggggaggtggagggggtccatgtggaccaggcgcccagctccccgggaccccggttcccggacaagcccatttggaagaagagtcccttcctccccccaaatattgggcagccctgtccttaccccgggaccacccctcccttccagctatgtgtacaataatgaccaatctgtttggctacgccgttgtcttgcctttttgggggttggggtctacacggaggttgtgtttacaatgtagaaacctgttttcgctgtgtgtggcgggggcgcgggcacagggtccgtgtctttgtatattcaataaatattcatt

SEQ ID NO: 3671 - protein, 198 aa, Homo sapiens
MYYIAHLLKGALLFITIALIGSGWAFIKYVLSDKEKKVFGIVIPMQVLANVAYIIIESREEGASDYVLWKEILFLVDLICCGAILFPVVWSIRHLQDASGTDGKVAVNLAKLKLFRHYYVMVAVPFQWQWLYQLLVEGSTLAFFVLTGYKFQPTGNNPYLQLPQEDEEDVQMEQVMTDSGFREGLSKVNKTASGRELL

SEQ ID NO: 3672 - DNA, 748 bp, Homo sapiens
tgccatcctgttccccgtagtctgtggcagtgaacctggccaagctgaagctgttccggcattactatgtcatggtcatctgctacgtctacttcacccgcatcatcgccatcctgctgcaggtggctgtgccctttcagtggcagtggctgtaccagctcttggtggagggctccaccctggccttcttcgtgctcacgggctacaagttccagcccacaggaaacaacccgtacctgcagctgccccaggaggacgaggaggatgttcagatggagcaagtaatgacggactctgggttccgggaaggcctctccaaagtcaacaaaacagccagcgggcgggaactgttatgatcacctccacatctcagaccaaagggtcgtcctcccccagcatttctcactcctgcccttcttccacagcgtatgtggggaggtggagggggtccatgtggaccaggcgcccagctccccgggaccccggttcccggacaagcccatttggaagaagagtcccttcctccccccaaatattgggcagccctgtccttaccccgggaccacccctcccttccagctatgtgtacaataatgaccaatctgtttggctacgccgttgtcttgcctttttgggggttggggtctacacggaggttgtgtttacaatgtagaaacctgttttcgctgtgtgtggcgggggcgcgggcacagggtccgtgtctttgtatattcaataaatattcatt

SEQ ID NO: 3673 - protein, 94 aa, Homo sapiens
MVICYVYFTRIIAILLQVAVPFQWQWLYQLLVEGSTLAFFVLTGYKFQPTGNNPYLQLPQEDEEDVQMEQVMTDSGFREGLSKVNKTASGRELL

SEQ ID NO: 3674 - DNA, 1309 bp, Homo sapiens
cgtctctgattgtccaactattcaccccttcagctgtgactgttccctccattttttcagccccgattaccagttttgagtcccacccaccgtcctcattattcaactttctgaccacccatctgatggtgacggtccgtgttcctaatcccccaccaccaccatcagcctcccacccctctgtgcgcctcactgtccgtctgtccatccacccccagatcaactactacttcatcaacagccagggccaccccatcgaaggccttgccgtcatgtactacatcgcacacctgctgaagggcgccctcctcttcatcaccatcgccctgattggctcaggctgggccttcatcaagtacgtcctgtcggataaggagaagaaggtctttgggatcgtgatccccatgcaggtcctggccaacgtggcctacatcatcatcgagtcccgcgaggaaggcgccagcgactacgtgctgtggaaggagattttgttcctggtggacctcatctgctgtggtgccatcctgttccccgtagtctggtccatccggcatctccaggatgcgtctggcacagacgggaaggtggcagtgaacctggccaagctgaagctgttccggcattactatgtcatggtcatctgctacgtctacttcacccgcatcatcgccatcctgctgcaggtggctgtgccctttcagtggcagtggctgtaccagctcttggtggagggctccaccctggccttcttcgtgctcacgggctacaagttccagcccacaggaaacaacccgtacctgcagctgccccaggaggacgaggaggatgttcagatggagcaagtaatgacggactctgggttccgggaaggcctctccaaagtcaacaaaacagccagcgggcgggaactgttatgatcacctccacatctcagaccaaagggtcgtcctcccccagcatttctcactcctgcccttcttccacagcgtatgtggggaggtggagggggtccatgtggaccaggcgcccagctccccgggaccccggttcccggacaagcccatttggaagaagagtcccttcctccccccaaatattgggcagccctgtccttaccccgggaccacccctcccttccagctatgtgtacaataatgaccaatctgtttggctacgccgttgtcttgcctttttgggggttggggtctacacggaggttgtgtttacaatgtagaaacctgttttcgctgtgtgtggcgggggcgcgggcacagggtccgtgtctttgtatattcaataaatattcatt

SEQ ID NO: 3675 - protein, 263 aa, Homo sapiens [sequence omitted]

SEQ ID NO: 3676 - DNA, 1158 bp, Homo sapiens
tattgctgggagctcaactggaatgtaaaagttcttcgggaagagcatctctctcctcttccacagcatcaactactacttcatcaacagccagggccaccccatcgaaggccttgccgtcatgtactacatcgcacacctgctgaagggcgccctcctcttcatcaccatcgccctgattggctcaggctgggccttcatcaagtacgtcctgtcggataaggagaagaaggtctttgggatcgtgatccccatgcaggtcctggccaacgtggcctacatcatcatcgagtcccgcgaggaaggcgccagcgactacgtgctgtggaaggagattttgttcctggtggacctcatctgctgtggtgccatcctgttccccgtagtctggtccatccggcatctccaggatgcgtctggcacagacgggaaggtggcagtgaacctggccaagctgaagctgttccggcattactatgtcatggtcatctgctacgtctacttcacccgcatcatcgccatcctgctgcaggtggctgtgccctttcagtggcagtggctgtaccagctcttggtggagggctccaccctggccttcttcgtgctcacgggctacaagttccagcccacaggaaacaacccgtacctgcagctgccccaggaggacgaggaggatgttcagatggagcaagtaatgacggactctgggttccgggaaggcctctccaaagtcaacaaaacagccagcgggcgggaactgttatgatcacctccacatctcagaccaaagggtcgtcctcccccagcatttctcactcctgcccttcttccacagcgtatgtggggaggtggagggggtccatgtggaccaggcgcccagctccccgggaccccggttcccggacaagcccatttggaagaagagtcccttcctccccccaaatattgggcagccctgtccttaccccgggaccacccctcccttccagctatgtgtacaataatgaccaatctgtttggctacgccgttgtcttgcctttttgggggttggggtctacacggaggttgtgtttacaatgtagaaacctgttttcgctgtgtgtggcgggggcgcgggcacagggtccgtgtctttgtatattcaataaatattcatt

SEQ ID NO: 3677 - protein, 214 aa, Homo sapiens [sequence omitted]

SEQ ID NO: 3678 - DNA, 1922 bp, Homo sapiens
gggcgccagaggcggagtcggggaggaggtggctccagagatggcagtgagcgagaggagggggctcggccgcgggagccccgcggagtgggggcagcggctacttctggtgctgctgctgggtggctgctccgggcgcatccaccagctggcgctgacgggggagaagcgagcggacatccagctgaacagcttcggtttctacaccaatggctctctggaggtggagttgagcgtcctgcggctgggcctccgggaggcagaagagaagtccctgctggtggggttcagtctcagccgggttcggtctggcagagttcgctcctattcaacccgggatttccaggactgccctctccagaaaaacagtagcagtttcctggtcctgttcctcatcaacaccaaggatctgcaggtccaggtgcggaagtatggagagcagaagacgttgtttatctttcccgggctcctcccggaagcaccctccaaaccagggctcccgaagccacaggccacagtcccccgcaaggtggatggcggagggacctctgcagccagcaagcccaagtcaacacccgcagtgattcagggtcctagtgggaaggacaaggacctggtgttgggcctgagccacctcaacaactcctacaacttcagtttccacgtggtgatcggctctcaggcggaagaaggccagtacagcctgaacttccacaactgcaacaattcagtgccaggaaaggagcatccattcgacatcacggtgatgatccgggagaagaaccccgatggcttcctgtcggcagcggagatgccccttttcaagctctacatggtcatgtccgcctgcttcctggccgctggcatcttctgggtgtccatcctctgcaggaacacgtacagcgtcttcaagatccactggctcatggcggccttggccttcaccaagagcatctctctcctcttccacagcatcaactactacttcatcaacagccagggccaccccatcgaaggccttgccgtcatgtactacatcgcacacctgctgaagggcgccctcctcttcatcaccatcgccctgattggctcaggctgggccttcatcaagtacgtcctgtcggataaggagaagaaggtctttgggatcgtgatccccatgcaggtcctggccaacgtggcctacatcatcatcgagtcccgcgaggaaggcgccagcgactacgtgctgtggaaggagattttgttcctggtggacctcatctgctgtggtgccatcctgttccccgtagtctggtccatccggcatctccaggatgcgtctggcacagacgggaaggtggcagtgaacctggccaagctgaagctgttccggcattactatgtcatggtcatctgctacgtctacttcacccgcatcatcgccatcctgctgcaggtggctgtgccctttcagtggcagtggctgtaccagctcttggtggagggctccaccctggccttcttcgtgctcacgggctacaagttccagcccacaggaaacaacccgtacctgcagctgccccaggaggacgaggaggatgttcagatggagcaagtcgtatgtggggaggtggagggggtccatgtggaccaggcgcccagctccccgggaccccggttcccggacaagcccatttggaagaagagtcccttcctccccccaaatattgggcagccctgtccttaccccgggaccacccctcccttccagctatgtgtacaataatgaccaatctgtttggctacgccgttgtcttgcctttttgggggttggggtctacacggaggttgtgtttacaatgtagaaacctgttttcgctgtgtgtggcgggggcgcgggcacagggtccgtgtctttgtatattcaataaatattcatt

SEQ ID NO: 3679 - protein, 575 aa, Homo sapiens
MAVSERRGLGRGSPAEWGQRLLLVLLLGGCSGRIHQLALTGEKRADIQLNSFGFYTNGSLEVELSVLRLGLREAEEKSLLVGFSLSRVRSGRVRSYSTRDFQDCPLQKNSSSFLVLFLINTKDLQVQVRKYGEQKTLFIFPGLLPEAPSKPGLPKPQATVPRKVDGGGTSAASKPKSTPAVIQGPSGKDKDLVLGLSHLNNSYNFSFHVVIGSQAEEGQYSLNFHNCNNSVPGKEHPFDITVMIREKNPDGFLSAAEMPLFKLYMVMSACFLAAGIFWVSILCRNTYSVFKIHWLMAALAFTKSISLLFHSINYYFINSQGHPIEGLAVMYYIAHLLKGALLFITIALIGSGWAFIKYVLSDKEKKVFGIVIPMQVLANVAYIIIESREEGASDYVLWKEILFLVDLICCGAILFPVVWSIRHLQDASGTDGKVAVNLAKLKLFRHYYVMVICYVYFTRIIAILLQVAVPFQWQWLYQLLVEGSTLAFFVLTGYKFQPTGNNPYLQLPQEDEEDVQMEQVVCGEVEGVHVDQAPSSPGPRFPDKPIWKKSPFLPPNIGQPCPYPGTTPPFQLCVQ

SEQ ID NO: 3680 - DNA, 1907 bp, Homo sapiens
tgcggctgggcctccgggaggcagaagagaagtccctgctggtggggttcagtctcagccgggttcggtctggcagagttcgctcctattcaacccgggatttccaggactgccctctccagaaaaacagtagcagtttcctggtcctgttcctcatcaacaccaaggatctgcagtgagttggggaccgggggctcgctcagatccttcgtctgcgtttccctggtgtgatgcccacacgcacctgggctgatcagggtccaggtgcggaagtatggagagcagaagacgttgtttatctttcccgggctcctcccggaagcaccctccaaaccagggctcccgaagccacaggccacagtcccccgcaaggtggatggcggagggacctctgcagccagcaagcccaagtcaacacccgcagtgattcagggtcctagtgggaaggacaaggacctggtgttgggcctgagccacctcaacaactcctacaacttcagtttccacgtggtgatcggctctcaggcggaagaaggccagtacagcctgaacttccacaactgcaacaattcagtgccaggaaaggagcatccattcgacatcacggtgatgatccgggagaagaaccccgatggcttcctgtcggcagcggagatgccccttttcaagctctacatggtcatgtccgcctgcttcctggccgctggcatcttctgggtgtccatcctctgcaggaacacgtacagcgtcttcaagatccactggctcatggcggccttggccttcaccaagagcatctctctcctcttccacagcatcaactactacttcatcaacagccagggccaccccatcgaaggccttgccgtcatgtactacatcgcacacctgctgaagggcgccctcctcttcatcaccatcgccctgattggctcaggctgggccttcatcaagtacgtcctgtcggataaggagaagaaggtctttgggatcgtgatccccatgcaggtcctggccaacgtggcctacatcatcatcgagtcccgcgaggaaggcgccagcgactacgtgctgtggaaggagattttgttcctggtggacctcatctgctgtggtgccatcctgttccccgtagtctggtccatccggcatctccaggatgcgtctggcacagacgggaaggtggcagtgaacctggccaagctgaagctgttccggcattactatgtcatggtcatctgctacgtctacttcacccgcatcatcgccatcctgctgcaggtggctgtgccctttcagtggcagtggctgtaccagctcttggtggagggctccaccctggccttcttcgtgctcacgggctacaagttccagcccacaggaaacaacccgtacctgcagctgccccaggaggacgaggaggatgttcagatggagcaagtaatgacggactctgggttccgggaaggcctctccaaagtcaacaaaacagccagcgggcgggaactgttatgatcacctccacatctcagaccaaagggtcgtcctcccccagcatttctcactcctgcccttcttccacagcgtatgtggggaggtggagggggtccatgtggaccaggcgcccagctccccgggaccccggttcccggacaagcccatttggaagaagagtcccttcctccccccaaatattgggcagccctgtccttaccccgggaccacccctcccttccagctatgtgtacaataatgaccaatctgtttggctacgccgttgtcttgcctttttgggggttggggtctacacggaggttgtgtttacaatgtagaaacctgttttcgctgtgtgtggcgggggcgcgggcacagggtccgtgtctttgtatattcaataaatattcatt

SEQ ID NO: 3681 - protein, 301 aa, Homo sapiens; identical to SEQ ID NO: 3669

SEQ ID NO: 3682 - DNA, 2007 bp, Homo sapiens
gggcgccagaggcggagtcggggaggaggtggctccagagatggcagtgagcgagaggagggggctcggccgcgggagccccgcggagtgggggcagcggctacttctggtgctgctgctgggtggctgctccgggcgcatccaccagctggcgctgacgggggagaagcgagcggacatccagctgaacagcttcggtttctacaccaatggctctctggaggtggagttgagcgtcctgcggctgggcctccgggaggcagaagagaagtccctgctggtggggttcagtctcagccgggttcggtctggcagagttcgctcctattcaacccgggatttccaggactgccctctccagaaaaacagtagcagtttcctggtcctgttcctcatcaacaccaaggatctgcaggtccaggtgcggaagtatggagagcagaagacgttgtttatctttcccgggctcctcccggaagcaccctccaaaccagggctcccgaagccacaggccacagtcccccgcaaggtggatggcggagggacctctgcagccagcaagcccaagtcaacacccgcagtgattcagggtcctagtgggaaggacaaggacctggtgttgggcctgagccacctcaacaactcctacaacttcagtttccacgtggtgatcggctctcaggcggaagaaggccagtacagcctgaacttccacaactgcaacaattcagtgccaggaaaggagcatccattcgacatcacggtgatgatccgggagaagaaccccgatggcttcctgtcggcagcggagatgccccttttcaagctctacatggtcatgtccgcctgcttcctggccgctggcatcttctgggtgtccatcctctgcaggaacacgtacagcgtcttcaagatccactggctcatggcggccttggccttcaccaagagcatctctctcctcttccacagcatcaactactacttcatcaacagccagggccaccccatcgaaggccttgccgtcatgtactacatcgcacacctgctgaagggcgccctcctcttcatcaccatcgccctgattggctcaggctgggccttcatcaagtacgtcctgtcggataaggagaagaaggtctttgggatcgtgatccccatgcaggtcctggccaacgtggcctacatcatcatcgagtcccgcgaggaaggcgccagcgactacgtgctgtggaaggagattttgttcctggtggacctcatctgctgtggtgccatcctgttccccgtagtctggtccatccggcatctccaggatgcgtctggcacagacgggaaggtggcagtgaacctggccaagctgaagctgttccggcattactatgtcatggtcatctgctacgtctacttcacccgcatcatcgccatcctgctgcaggtggctgtgccctttcagtggcagtggctgtaccagcccacaggaaacaacccgtacctgcagctgccccaggaggacgaggaggatgttcagatggagcaagtaatgacggactctgggttccgggaaggcctctccaaagtcaacaaaacagccagcgggcgggaactgttatgatcacctccacatctcagaccaaagggtcgtcctcccccagcatttctcactcctgcccttcttccacagcgtatgtggggaggtggagggggtccatgtggaccaggcgcccagctccccgggaccccggttcccggacaagcccatttggaagaagagtcccttcctccccccaaatattgggcagccctgtccttaccccgggaccacccctcccttccagctatgtgtacaataatgaccaatctgtttggctacgccgttgtcttgcctttttgggggttggggtctacacggaggttgtgtttacaatgtagaaacctgttttcgctgtgtgtggcgggggcgcgggcacagggtccgtgtctttgtatattcaataaatattcatt

SEQ ID NO: 3683 - protein, 524 aa, Homo sapiens
MAVSERRGLGRGSPAEWGQRLLLVLLLGGCSGRIHQLALTGEKRADIQLNSFGFYTNGSLEVELSVLRLGLREAEEKSLLVGFSLSRVRSGRVRSYSTRDFQDCPLQKNSSSFLVLFLINTKDLQVQVRKYGEQKTLFIFPGLLPEAPSKPGLPKPQATVPRKVDGGGTSAASKPKSTPAVIQGPSGKDKDLVLGLSHLNNSYNFSFHVVIGSQAEEGQYSLNFHNCNNSVPGKEHPFDITVMIREKNPDGFLSAAEMPLFKLYMVMSACFLAAGIFWVSILCRNTYSVFKIHWLMAALAFTKSISLLFHSINYYFINSQGHPIEGLAVMYYIAHLLKGALLFITIALIGSGWAFIKYVLSDKEKKVFGIVIPMQVLANVAYIIIESREEGASDYVLWKEILFLVDLICCGAILFPVVWSIRHLQDASGTDGKVAVNLAKLKLFRHYYVMVICYVYFTRIIAILLQVAVPFQWQWLYQPTGNNPYLQLPQEDEEDVQMEQVMTDSGFREGLSKVNKTASGRELL

SEQ ID NO: 3684 - DNA, 2029 bp, Homo sapiens
ggcggcgggcggcgggcggcggggaccgggtgcggtggtggctgcggcggcggcggcgggagcagcatggattggggcactgagctgtgggatcagttcgaggtgctcgagcgccacacgcagtgggggctggacctgttggacagatatgtaaagttcgtgaaagaacgcaccgaagtggaacaggcttacgccaaacaactgcggagcctggtgaaaaaatatctgcccaagagacctgccaaggatgatcctgagtccaaattcagccagcaacagtccttcgtacagattctccaggaggtgaatgactttgcaggccagcgggagctggtggctgagaacctcagtgtccgtgtatgtcttgagctgaccaagtactcacaagagatgaaacaggagaggaagatgcacttccaagaagggcggcgggcccagcagcagctggaaaatggctttaaacagctggagaatagtaagcgtaaatttgagcgggactgccgggaggcagagaaggcagcccagactgctgaacggctagaccaggatatcaacgccaccaaggctgatgtggagaaggccaagcagcaagcccaccttcggagtcacatggccgaagaaagcaaaaacgaatatgcggctcaactgcagcgcttcaaccgagaccaagcccacttctatttttcacagatgccccagatattcgataagctccaagacatggatgaacgcagggccacccgcctgggtgccgggtatgggctcctgtcggaggccgagctggaggtggtgcccataatagccaagtgcttggagggcatgaaggtggctgcaaatgctgtggatcccaagaacgactcccacgtccttatagagctgcacaagtcaggttttgcccgcccgggcgacgtggaattcgaggacttcagccagcccatgaaccgtgcaccctccgacagcagtctgggcaccccctcggatggacggcctgaactccgaggcccgggtcgcagccgcaccaagcgctggccttttggcaagaagaacaagacagtggtgaccgaggattttagccacttgcccccagagcagcagcgaaaacggcttcaacagcagttggaagaacgcagtcgtgaacttcagaaggaggttgaccagagggaagccctaaagaaaatgaaggatgtctatgagaagacacctcagatgggggaccccgccagcttggagccccagatcgctgaaaccctgagcaacattgaacggctgaaattggaagtgcagaagtatgaggcgtggctggcagaagctgaaagtcgagtccttagcaaccggggagacagcctgagccggcacgcccggcctcccgacccccccgctagcgccccgccagacagcagcagcaacagcgcatcacaggacaccaaggagagctctgaagagcctccctcagaagagagccaggacacccccatttacacggagtttgatgaggatttcgaggaggaacccacatcccccataggtcactgtgtggccatctaccactttgaagggtccagcgagggcactatctctatggccgagggtgaagacctcagtcttatggaagaagacaaaggggacggctggacccgggtcaggcggaaagagggaggcgagggctacgtgcccacctcctacctccgagtcacgctcaattgaaccctgccagagacgggaagaggggggctgtcggctgctgcttctgggccacggggagccccaggacctatgcactttatttctgaccccgtggcttcggctgagacctgtgtaacctgctgccccctccacccccaacccagtcctacctgtcacaccggacggacccgctgtgccttctaccatcgttccaccattgatgtacatactcatgttttacatcttttctttctgccgctcggctccggccattttgttttatacaaaaatgggaaaaaaaaaaaagaaattatataaagttcctagaaaaaaaaaaaaaaaaaaa

SEQ ID NO: 3685 - protein, 545 aa, Homo sapiens
MDWGTELWDQFEVLERHTQWGLDLLDRYVKFVKERTEVEQAYAKQLRSLVKKYLPKRPAKDDPESKFSQQQSFVQILQEVNDFAGQRELVAENLSVRVCLELTKYSQEMKQERKMHFQEGRRAQQQLENGFKQLENSKRKFERDCREAEKAAQTAERLDQDINATKADVEKAKQQAHLRSHMAEESKNEYAAQLQRFNRDQAHFYFSQMPQIFDKLQDMDERRATRLGAGYGLLSEAELEVVPIIAKCLEGMKVAANAVDPKNDSHVLIELHKSGFARPGDVEFEDFSQPMNRAPSDSSLGTPSDGRPELRGPGRSRTKRWPFGKKNKTVVTEDFSHLPPEQQRKRLQQQLEERSRELQKEVDQREALKKMKDVYEKTPQMGDPASLEPQIAETLSNIERLKLEVQKYEAWLAEAESRVLSNRGDSLSRHARPPDPPASAPPDSSSNSASQDTKESSEEPPSEESQDTPIYTEFDEDFEEEPTSPIGHCVAIYHFEGSSEGTISMAEGEDLSLMEEDKGDGWTRVRRKEGGEGYVPTSYLRVTLN

SEQ ID NO: 3686 - DNA, 2327 bp, Homo sapiens
cgggggtgacagcagcccggagccgcggagcctcagcttccgcctggacccagcctcgtgggagccccgcgggtcctgcccagatgtggaagactgaggcctgttgaaagtgcagagctcagccctggcaccctctgttcccaagagctccatgcaggtgccacaggatggagaagaccttgctggccaaccctggtaccacggcctcctgtcccgccagaaggctgaagctcttcttcagcaagatggcgacttcctggttcgcgcctctgggtcccgtgggggcaaccccgtgatctcctgccgctggcggggctcagccctccattttgaggtgttccgtgtggccctgcgtccccggccaggccgacccacagccctctttcaactggaggatgagcaattccccagcataccggctctggttcacagttatatgacaggcaggcgcccactgtcccaggccacaggggctgtggtctccaggcctgtgacttggcaggggcctctgcgacgcagctttagcgaggacaccctgatggatggcccagctcggatagagcctctcagggcaaggaagtggagcaacagtcagcctgcagatttggcacatatggggcggtcaagagaagaccccgctgggatggaagcctccaccatgcccatatctgccttgccccgaacgagcagtgacccggtgttgctgaaggcccctgctcccctgggaactgttgccgacagtctcagggcctccgatgggcagcttcaagccaaggcaccaacgaagcccccccggacaccctccttcgaactgcctgatgcctctgaacgtcccccgacgtactgcgagctggtgccccgagtgcccagtgtccagggaacatccccgagccaaagctgcccagagccagaggccccatggtgggaggccgaggaggatgaggaggaagagaatagatgttttacaagaccacaggctgagatctctttctgcccccatgatgccccctcctgcctgctgggcccccagaatcggcccctggaaccccaagtcctgcataccctccgtggcctgttcctggagcaccatcctgggagcaccgcccttcacctgctattggtagactgccaggccacaggcctcctgggagtgaccagagatcagcggggcaacatgggagtctcatctggcctggagctgctcactcttccccatggacaccacttgaggttggaactgctggagaggcatcagacactggcgctggccggggcgctggcggtgctgggctgctcggggccgctggaggagcgcgcagccgcactgaggggactggtagagctggcgctggcgctgcggccaggggcggcgggggacctgcccgggctggctgcagtcatgggcgccctgctcatgccccaggtgtcccggttggagcacacgtggcgccagctccgaaggagccacacggaggctgcgctggcctttgagcaggagctgaagccgctgatgcgggctctggatgagggcgctggaccctgcgaccccggcgaggtggcgctgccgcacgtggcacccatggttcgcctactggagggcgaggaagtcgcggggccgctggacgagagctgtgagcggctgttgcgcaccctgcacggggcgcgtcacatggtccgggacgcacccaaattccgcaaggtggcagcccagcgcctgcgaggattccggcctaacccggagctgagggaggccctgaccaccggcttcgtgcggaggctgctctggggtagccggggcgcgggagctccgcgcgctgaacgctttgagaagttccagcgcgtcctcggcgtcctgtcgcagcgcctggagcctgaccgctgagagcgcagacacccttcttcacacccgggacccccaggtttttgcgaaccccagaagagaccaaaggagtcgtcccaggctcctcgcgcctcaggtggaatcctgccctgtgcctcacagaagaggtggggaccgcagtcagggtcacctggaccatggtgaacatgtgacctgcagatctggcatcagaggccagagttcaaatgtgactccacctcttaaaagccgtgatttctagcagttgacttcacctctgtgtcggcctttaacaaaatcatagccatacagcagctcaggcctgtaatctcagcactttgggaggccgaggcggaaggaaggcttgaggccaggagttcaagaccagccagggcaacatggtgagacctcatctctacaaaaactgaaaaataaaaaacttttaaaaaatgtaaaaaaaaaaaaaaaa

SEQ ID NO: 3687 - protein, 576 aa, Homo sapiens
MQVPQDGEDLAGQPWYHGLLSRQKAEALLQQDGDFLVRASGSRGGNPVISCRWRGSALHFEVFRVALRPRPGRPTALFQLEDEQFPSIPALVHSYMTGRRPLSQATGAVVSRPVTWQGPLRRSFSEDTLMDGPARIEPLRARKWSNSQPADLAHMGRSREDPAGMEASTMPISALPRTSSDPVLLKAPAPLGTVADSLRASDGQLQAKAPTKPPRTPSFELPDASERPPTYCELVPRVPSVQGTSPSQSCPEPEAPWWEAEEDEEEENRCFTRPQAEISFCPHDAPSCLLGPQNRPLEPQVLHTLRGLFLEHHPGSTALHLLLVDCQATGLLGVTRDQRGNMGVSSGLELLTLPHGHHLRLELLERHQTLALAGALAVLGCSGPLEERAAALRGLVELALALRPGAAGDLPGLAAVMGALLMPQVSRLEHTWRQLRRSHTEAALAFEQELKPLMRALDEGAGPCDPGEVALPHVAPMVRLLEGEEVAGPLDESCERLLRTLHGARHMVRDAPKFRKVAAQRLRGFRPNPELREALTTGFVRRLLWGSRGAGAPRAERFEKFQRVLGVLSQRLEPDR

SEQ ID NO: 3688 - DNA, 2888 bp, Homo sapiens
actagctgtcgctccacaggcgagcagggcaggcgtgcgggcgggtgggtggtggaggctgcgagggtgcacggccggccctgggcaggcggtagccatggagctgtggcgccaatgcacccactggctcatccagtgccgggtgctgccgcccagccaccgcgtgacctgggatggggctcaggtgtgtgaactggcccaggccctccgggatggtgtccttctgtgtcagctgcttaacaacctgctaccccatgccatcaacctgcgtgaggtcaacctgcgcccccagatgtcccagttcctgtgccttaagaacattagaaccttcctgtccacctgctgtgagaagttcggcctcaagcggagcgagctcttcgaagcctttgacctcttcgatgtgcaggattttggcaaggtcatctacaccctgtctgctctgtcctggaccccgatcgcccagaacagggggatcatgcccttccccaccgaggaggagagtgtaggtgatgaagacatctacagtggcctgtccgaccagatcgacgacacggtggaggaggatgaggacctgtatgactgcgtggagaatgaggaggcggaaggcgacgagatctatgaggacctcatgcgctcggagcccgtgtccatgccgcccaagatgacagagtatgacaagcgctgctgctgcctgcgggagatccagcagacggaggagaagtacactgacacgctgggctccatccagcagcatttcttgaagcccctgcaacggttcctgaaacctcaagacattgagatcatctttatcaacattgaggacctgcttcgtgttcatactcacttcctaaaggagatgaaggaagccctgggcacccctggcgcagccaatctctaccaggtcttcatcaaatacaaggagaggttcctcgtctatggccgctactgcagccaggtggagtcagccagcaaacacctggaccgtgtggccgcagcccgggaggacgtgcagatgaagctggaggaatgttctcagagagccaacaacgggaggttcaccctgcgggacctgctgatggtgcctatgcagcgagttctcaaatatcacctccttctccaggagctggtgaaacacacgcaggaggcgatggagaaggagaacctgcggctggccctggatgccatgagggacctggctcagtgcgtgaacgaggtcaagcgagacaacgagacactgcgacagatcaccaatttccagctgtccattgagaacctggaccagtctctggctcactatggccggcccaagatcgacggggaactcaagatcacctcggtggaacggcgctccaagatggacaggtatgccttcctgctcgacaaagctctactcatctgtaagcgcaggggagactcctatgacctcaaggactttgtaaacctgcacagcttccaggttcgggatgactcttcaggagaccgagacaacaagaagtggagccacatgttcctcctgatcgaggaccaaggtgcccagggctatgagctgttcttcaagacaagagaattgaagaagaagtggatggagcagtttgagatggccatctccaacatctatccggagaatgccaccgccaacgggcatgacttccagatgttctcctttgaggagaccacatcctgcaaggcctgtcagatgctgcttagaggtaccttctatcagggctaccgctgccatcggtgccgggcatctgcacacaaggagtgtctggggagggtccctccatgtggccgacatgggcaagatttcccaggaactatgaagaaggacaaactacatcgcagggctcaggacaaaaagaggaatgagctgggtctgcccaagatggaggtgtttcaggaatactacgggcttcctccaccccctggagccattggaccctttctacggctcaaccctggagacattgtggagctcacgaaggctgaggctgaacagaactggtgggagggcagaaatacatctactaatgaaattggctggtttccttgtaacagggtgaagccctatgtccatggccctcctcaggacctgtctgttcatctctggtacgcaggccccatggagcgggcaggggcagagagcatcctggccaaccgctcggacgggactttcttggtgcggcagagggtgaaggatgcagcagaatttgccatcagcattaaatataacgtcgaggtcaagcacattaaaatcatgacagcagaaggactgtaccggatcacagagaaaaaggctttccgggggcttacggagctggtggagttttaccagcagaactctctaaaggattgcttcaagtctctggacaccaccttgcagttccccttcaaggagcctgaaaagagaaccatcagcaggccagcagtgggaagcacaaagtattttggcacagccaaagcccgctatgacttctgcgcccgagaccgatcagagctgtcgctcaaggagggtgacatcatcaagatccttaacaagaagggacagcaaggctggtggcgaggggagatctatggccgggttggctggttccctgccaactacgtggaggaagattattctgaatactgctgagccctggtgccttggcagagagacgagaaactccaggctctgagcccggcgtgggcaggcagcggagccaggggctgtgacagctcccggcgggtggagactttgggatggactggaggagcgcagcgtccagctggcggtgctcccgggatgtgccctgacatggttaatttataacaccccgatttcctcttgggtcccctcaagcagacggggctcaagggggttacatttaataaaaggatgaagatgg

SEQ ID NO: 3689 - protein, 845 aa, Homo sapiens
MELWRQCTHWLIQCRVLPPSHRVTWDGAQVCELAQALRDGVLLCQLLNNLLPHAINLREVNLRPQMSQFLCLKNIRTFLSTCCEKFGLKRSELFEAFDLFDVQDFGKVIYTLSALSWTPIAQNRGIMPFPTEEESVGDEDIYSGLSDQIDDTVEEDEDLYDCVENEEAEGDEIYEDLMRSEPVSMPPKMTEYDKRCCCLREIQQTEEKYTDTLGSIQQHFLKPLQRFLKPQDIEIIFINIEDLLRVHTHFLKEMKEALGTPGAANLYQVFIKYKERFLVYGRYCSQVESASKHLDRVAAAREDVQMKLEECSQRANNGRFTLRDLLMVPMQRVLKYHLLLQELVKHTQEAMEKENLRLALDAMRDLAQCVNEVKRDNETLRQITNFQLSIENLDQSLAHYGRPKIDGELKITSVERRSKMDRYAFLLDKALLICKRRGDSYDLKDFVNLHSFQVRDDSSGDRDNKKWSHMFLLIEDQGAQGYELFFKTRELKKKWMEQFEMAISNIYPENATANGHDFQMFSFEETTSCKACQMLLRGTFYQGYRCHRCRASAHKECLGRVPPCGRHGQDFPGTMKKDKLHRRAQDKKRNELGLPKMEVFQEYYGLPPPPGAIGPFLRLNPGDIVELTKAEAEQNWWEGRNTSTNEIGWFPCNRVKPYVHGPPQDLSVHLWYAGPMERAGAESILANRSDGTFLVRQRVKDAAEFAISIKYNVEVKHIKIMTAEGLYRITEKKAFRGLTELVEFYQQNSLKDCFKSLDTTLQFPFKEPEKRTISRPAVGSTKYFGTAKARYDFCARDRSELSLKEGDIIKILNKKGQQGWWRGEIYGRVGWFPANYVEEDYSEYC

SEQ ID NO: 3690 - DNA, 4691 bp, Homo sapiens
gagaaggacgcgcggcccccagcgctcttgggggccgcctcggagcatgacccccgcgggccagcgccgcgcgcctgatccgaggagaccccgcgctcccgcagccatgggcaccgggggccggcggggggcggcggccgcgccgctgctggtggcggtggccgcgctgctactgggcgccgcgggccacctgtaccccggagaggtgtgtcccggcatggatatccggaacaacctcactaggttgcatgagctggagaattgctctgtcatcgaaggacacttgcagatactcttgatgttcaaaacgaggcccgaagatttccgagacctcagtttccccaaactcatcatgatcactgattacttgctgctcttccgggtctatgggctcgagagcctgaaggacctgttccccaacctcacggtcatccggggatcacgactgttctttaactacgcgctggtcatcttcgagatggttcacctcaaggaactcggcctctacaacctgatgaacatcacccggggttctgtccgcatcgagaagaacaatgagctctgttacttggccactatcgactggtcccgtatcctggattccgtggaggataatcacatcgtgttgaacaaagatgacaacgaggagtgtggagacatctgtccgggtaccgcgaagggcaagaccaactgccccgccaccgtcatcaacgggcagtttgtcgaacgatgttggactcatagtcactgccagaaagtttgcccgaccatctgtaagtcacacggctgcaccgccgaaggcctctgttgccacagcgagtgcctgggcaactgttctcagcccgacgaccccaccaagtgcgtggcctgccgcaacttctacctggacggcaggtgtgtggagacctgcccgcccccgtactaccacttccaggactggcgctgtgtgaacttcagcttctgccaggacctgcaccacaaatgcaagaactcgcggaggcagggctgccaccaatacgtcattcacaacaacaagtgcatccctgagtgtccctccgggtacacgatgaattccagcaacttgctgtgcaccccatgcctgggtccctgtcccaaggtgtgccacctcctagaaggcgagaagaccatcgactcggtgacgtctgcccaggagctccgaggatgcaccgtcatcaacgggagtctgatcatcaacattcgaggaggcaacaatctggcagctgagctagaagccaacctcggcctcattgaagaaatttcagggtatctaaaaatccgccgatcctacgctctggtgtcactttccttcttccggaagttacgtctgattcgaggagagaccttggaaattgggaactactccttctatgccttggacaaccagaacctaaggcagctctgggactggagcaaacacaacctcaccaccactcaggggaaactcttcttccactataaccccaaactctgcttgtcagaaatccacaagatggaagaagtttcaggaaccaaggggcgccaggagagaaacgacattgccctgaagaccaatggggacaaggcatcctgtgaaaatgagttacttaaattttcttacattcggacatcttttgacaagatcttgctgagatgggagccgtactggccccccgacttccgagacctcttggggttcatgctgttctacaaagaggccccttatcagaatgtgacggagttcgatgggcaggatgcgtgtggttccaacagttggacggtggtagacattgacccacccctgaggtccaacgaccccaaatcacagaaccacccagggtggctgatgcggggtctcaagccctggacccagtatgccatctttgtgaagaccctggtcaccttttcggatgaacgccggacctatggggccaagagtgacatcatttatgtccagacagatgccaccaacccctctgtgcccctggatccaatctcagtgtctaactcatcatcccagattattctgaagtggaaaccaccctccgaccccaatggcaacatcacccactacctggttttctgggagaggcaggcggaagacagtgagctgttcgagctggattattgcctcaaagggctgaagctgccctcgaggacctggtctccaccattcgagtctgaagattctcagaagcacaaccagagtgagtatgaggattcggccggcgaatgctgctcctgtccaaagacagactctcagatcctgaaggagctggaggagtcctcgtttaggaagacgtttgaggattacctgcacaacgtggttttcgtccccagaaaaacctcttcaggcactggtgccgaggaccctaggccatctcggaaacgcaggtcccttggcgatgttgggaatgtgacggtggccgtgcccacggtggcagctttccccaacacttcctcgaccagcgtgcccacgagtccggaggagcacaggccttttgagaaggtggtgaacaaggagtcgctggtcatctccggcttgcgacacttcacgggctatcgcatcgagctgcaggcttgcaaccaggacacccctgaggaacggtgcagtgtggcagcctacgtcagtgcgaggaccatgcctgaagccaaggctgatgacattgttggccctgtgacgcatgaaatctttgagaacaacgtcgtccacttgatgtggcaggagccgaaggagcccaatggtctgatcgtgctgtatgaagtgagttatcggcgatatggtgatgaggagctgcatctctgcgtctcccgcaagcacttcgctctggaacggggctgcaggctgcgtgggctgtcaccggggaactacagcgtgcgaatccgggccacctcccttgcgggcaacggctcttggacggaacccacctatttctacgtgacagactatttagacgtcccgtcaaatattgcaaaaattatcatcggccccctcatctttgtctttctcttcagtgttgtgattggaagtatttatctattcctgagaaagaggcagccagatgggccgctgggaccgctttacgcttcttcaaaccctgagtatctcagtgccagtgatgtgtttccatgctctgtgtacgtgccggacgagtgggaggtgtctcgagagaagatcaccctccttcgagagctggggcagggctccttcggcatggtgtatgagggcaatgccagggacatcatcaagggtgaggcagagacccgcgtggcggtgaagacggtcaacgagtcagccagtctccgagagcggattgagttcctcaatgaggcctcggtcatgaagggcttcacctgccatcacgtggtgcgcctcctgggagtggtgtccaagggccagcccacgctggtggtgatggagctgatggctcacggagacctgaagagctacctccgttctctgcggccagaggctgagaataatcctggccgccctccccctacccttcaagagatgattcagatggcggcagagattgctgacgggatggcctacctgaacgccaagaagtttgtgcatcgggacctggcagcgagaaactgcatggtcgcccatgattttactgtcaaaattggagactttggaatgaccagagacatctatgaaacggattactaccggaaagggggcaagggtctgctccctgtacggtggatggcaccggagtccctgaaggatggggtcttcaccacttcttctgacatgtggtcctttggcgtggtcctttgggaaatcaccagcttggcagaacagccttaccaaggcctgtctaatgaacaggtgttgaaatttgtcatggatggagggtatctggatcaacccgacaactgtccagagagagtcactgacctcatgcgcatgtgctggcaattcaaccccaagatgaggccaaccttcctggagattgtcaacctgctcaaggacgacctgcaccccagctttccagaggtgtcgttcttccacagcgaggagaacaaggctcccgagagtgaggagctggagatggagtttgaggacatggagaatgtgcccctggaccgttcctcgcactgtcagagggaggaggcggggggccgggatggagggtcctcgctgggtttcaagcggagctacgaggaacacatcccttacacacacatgaacggaggcaagaaaaacgggcggattctgaccttgcctcggtccaatccttcctaacagtgcctaccgtggcgggggcgggcaggggttcccattttcgctttcctctggtttgaaagcctctggaaaactcaggattctcacgactctaccatgtccagtggagttcagagatcgttcctatacatttctgttcatcttaaggtggactcgtttggttaccaatttaactagtcctgcagaggatttaactgtgaacctggagggcaaggggtttccacagttgctgctcctttggggcaacgacggtttcaaaccaggattttgtgttttttcgttccccccacccgcccccagcagatggaaagaaagcacctgtttttacaaattcttttttttttttttttttttttttttttgctggtgtctgagcttcagtataaaagacaaaacttcctgtttgtggaacaaaatttcgaaagaaaaaaccaaa

SEQ ID NO: 3691 - protein, 1382 aa, Homo sapiens
MGTGGRRGAAAAPLLVAVAALLLGAAGHLYPGEVCPGMDIRNNLTRLHELENCSVIEGHLQILLMFKTRPEDFRDLSFPKLIMITDYLLLFRVYGLESLKDLFPNLTVIRGSRLFFNYALVIFEMVHLKELGLYNLMNITRGSVRIEKNNELCYLATIDWSRILDSVEDNHIVLNKDDNEECGDICPGTAKGKTNCPATVINGQFVERCWTHSHCQKVCPTICKSHGCTAEGLCCHSECLGNCSQPDDPTKCVACRNFYLDGRCVETCPPPYYHFQDWRCVNFSFCQDLHHKCKNSRRQGCHQYVIHNNKCIPECPSGYTMNSSNLLCTPCLGPCPKVCHLLEGEKTIDSVTSAQELRGCTVINGSLIINIRGGNNLAAELEANLGLIEEISGYLKIRRSYALVSLSFFRKLRLIRGETLEIGNYSFYALDNQNLRQLWDWSKHNLTTTQGKLFFHYNPKLCLSEIHKMEEVSGTKGRQERNDIALKTNGDKASCENELLKFSYIRTSFDKILLRWEPYWPPDFRDLLGFMLFYKEAPYQNVTEFDGQDACGSNSWTVVDIDPPLRSNDPKSQNHPGWLMRGLKPWTQYAIFVKTLVTFSDERRTYGAKSDIIYVQTDATNPSVPLDPISVSNSSSQIILKWKPPSDPNGNITHYLVFWERQAEDSELFELDYCLKGLKLPSRTWSPPFESEDSQKHNQSEYEDSAGECCSCPKTDSQILKELEESSFRKTFEDYLHNVVFVPRKTSSGTGAEDPRPSRKRRSLGDVGNVTVAVPTVAAFPNTSSTSVPTSPEEHRPFEKVVNKESLVISGLRHFTGYRIELQACNQDTPEERCSVAAYVSARTMPEAKADDIVGPVTHEIFENNVVHLMWQEPKEPNGLIVLYEVSYRRYGDEELHLCVSRKHFALERGCRLRGLSPGNYSVRIRATSLAGNGSWTEPTYFYVTDYLDVPSNIAKIIIGPLIFVFLFSVVIGSIYLFLRKRQPDGPLGPLYASSNPEYLSASDVFPCSVYVPDEWEVSREKITLLRELGQGSFGMVYEGNARDIIKGEAETRVAVKTVNESASLRERIEFLNEASVMKGFTCHHVVRLLGVVSKGQPTLVVMELMAHGDLKSYLRSLRPEAENNPGRPPPTLQEMIQMAAEIADGMAYLNAKKFVHRDLAARNCMVAHDFTVKIGDFGMTRDIYETDYYRKGGKGLLPVRWMAPESLKDGVFTTSSDMWSFGVVLWEITSLAEQPYQGLSNEQVLKFVMDGGYLDQPDNCPERVTDLMRMCWQFNPKMRPTFLEIVNLLKDDLHPSFPEVSFFHSEENKAPESEELEMEFEDMENVPLDRSSHCQREEAGGRDGGSSLGFKRSYEEHIPYTHMNGGKKNGRILTLPRSNPS

SEQ ID NO: 3692 - DNA, 5386 bp, Homo sapiens
tgaattcctgtcggagagcgaggacggtgctggcaagaacgagaagagtgacaagagtaccagtgtgaagcgcaggctgagctgcctccgcagtcgagtgaccaggcagaaggagaaggggaagagcccagcacatctgaaggacaagggccaggatgcacgagagaggcgggagtgtgtcaatgggcaccagctgttgcaagggaccttctccggcccctccagctgccccctgtgtggcaaacctttcttgagctcagcctcgctcaaggagcacccccggggcaccctcctgtccgatggcagcccggccctgtccaggaatgtcggtatgacggtctctcagaaagggggtccccagccaacaccgagcccggctggccctgggacgcaactcggaccaatcacaggagagatggatgaagccgattctgcgtttttaaaatttaagcagacagctgatgactctctgtcccttacatctccaaacaccgagtccatttttgtagaagatccctacaccgcctcgctgaggagtgagattgagtcagacggccacgagtttgaagctgagtcctggagcctcgccgtggatgcagcctacgccaagaagcaaaagagggaggtggtgaaaagacaagatgtcctttatgagctgatgcagacagaggtgcaccacgtgcggacgctcaagatcatgctgaaggtgtactccagggccctgcaggaggagctgcagttcagcagcaaggccattggccgcctcttcccatgcgctgacgacctgctggagacgcacagccacttcctcgctcggctcaaggagcgccgccaggagtccctggaggagggcagtgaccggaattatgtcatccagaaaatcggcgacctcctggttcagcagttttcaggtgaaaatggggagagaatgaaagaaaagtacggtgtgttttgtagtggccacaatgaagctgttagtcattacaagttgctgcttcagcaaaacaagaaatttcaaaacttgatcaagaaaattggcaacttctccatcgtgcggcggcttggcgtgcaggagtgcattctcctggttacacaacgcataaccaaatacccagtgctggtggagcgcatcatccagaacacggaagctggcactgaggactatgaagacctgacccaggccttgaacctcatcaaagatatcatctcacaagtggacgccaaggtcagtgagtgtgagaagggccagcgcctcagggagatcgcagggaagatggacctgaagtcttccagcaaactcaagaacgggctcaccttccgcaaggaagacatgcttcagcggcagctccacctggagggcatgctatgctggaagaccacatcagggcgcttgaaagatatcctggctatcctgctgaccgacgtacttttgctgctacaagaaaaagatcagaaatacgtctttgcttctgtggactcaaagccacccgtcatctcgttacaaaagctcatcgtgagggaagtggccaacgaggagaaagcgatgtttctgatcagcgcctccttgcaagggccggagatgtatgaaatctacacgagctccaaagaggacaggaacgcctggatggcccacatccaaagggctgtggagagctgccctgacgaggaggaggggcccttcagcctgcccgaagaggaaaggaaggtggtcgaggcccgcgccacgagactccgggactttcaagagcggttgagcatgaaagaccagctgatcgcacagagcctcctagagaaacagcagatctacctggagatggccgagatgggcggcctcgaagacctgccccagccccgaggcctattccgtggaggggacccatccgagaccctgcagggggagctaattctcaagtcggccatgagcgagatcgagggcatccagagcctgatctgcaggcagctgggcagcgccaacggccaggcggaagacggaggcagctccacaggcccgcccaggagggctgagaccttcgcgggctacgactgcacaaacagccccaccaagaatggcagtttcaagaagaaagtcagcagcactgaccccaggccccgagactggcgaggccccccaaacagcccggacttgaagctcagtgacagtgacattcctgggagctctgaggaatcgccgcaggtggtggaggcgccaggcacggaatccgatccccgtctgcccaccgtcctggagtcggagcttgtccagcggatccagacactgtcccagctgctcctgaaccttcaggcggtaatcgcccaccaggacagctatgtggagacgcagcgggctgccatccaggagcgggagaagcagttccggctgcagtcgacgcgtgggaacctgctgctggagcaggagcggcaacgcaacttcgagaagcagcgggaggagcgcgcggccctggagaagctgcagagccagctgcggcacgagcagcagcgctgggagcgcgagcgccagtggcagcaccaggagctggagcgtgcgggcgcgcggctgcaggagcgcgagggcgaggcgcggcagctacgcgagcggctggagcaggagcgggccgagctggagcgccagcgccaggcctaccagcacgacctggagcggctgcgcgaggcccagcgtgccgtggagcgcgagcgggagcgcctggagctgctgcgccgcctcaagaagcagaacaccgcgccaggcgcgctgccgcccgacacactggccgaggcccagcccccaagccaccctcccagcttcaacggggaagggctggagggccctcgtgtgagcatgctgccatccggcgtggggccagagtacgcagagcgccccgaggtggctcgccgggacagcgcccccaccgagaaccggctggccaagagcgatgtgcccatccagctgctcagcgccaccaaccagttccagaggcaggcggccgtgcagcagcagatccccaccaagctggcggcctccaccaagggtggcaaggacaagggcggcaagagcaggggctctcagcgctgggagagctcagcgtccttcgacctgaagcagcagctgctgctcaacaagctcatggggaaagatgagagcacctcacggaaccgccgctcgctgagccctatcctgcccggcagacacagtcctgcgcccccaccagaccctggcttccccgccccgagcccaccgccagctgacagcccctccgagggcttctctctcaaggccgggggcacagccctcctgcccgggcccccagctccctcgccactgccggccacaccactcagcgccaaggaggacgccagcaaagaagacgtcatcttcttctaaaagggccgtgactcaaggaaagtttttaatggaaagttgagccagaactaaaccagggagctgtctgaaatcatagcaccccatccgggtggcggggagatcaactccgagctgtttttccgaggcagtgaggaacggtgccggctctgcacggagctgaggacaggacagaccttgctttgagaaggagctgccggccggggccacgctccacagccgccgcgcgacagtggagccaagggttagggcaccaggaggggccaggtggcgtcggcagcatctgtccccagaatcaggcagaatccacttcccaaacagagccccacgcaggttcaccatgaacctcagggtcagggaatgagccaggcacgggggcatgggcagagagggccacggggcagggcccactgagggaacatcagtggccctccagtcaggttctgtgggtttggaagcccatcgtgaaaggggctgacctttgcccctttttacttggcattggttttgaaaccagctgtttcccaaactctgcttcccaagggcaaccgttgctgttcacacgctcagcctgtctgggggagcgggcctctagcttcagccagggcgggtacacaccctgggcacagggtcctcagcccccgggaaatgagctcccagggctggcgtcccaccttccaggtgggggctggcacatcacagactgtcgagagcgccatgtcccagggcatgcagaggatgcacctagagacgttgcagcaagtggacaagtggccgctgtgcgggcccctcgcttgtagtgagctgttgcagcttacggtccgttccctggaggggtggaggaaggaggtgttgggcagcatcaaaggtgctgggacatcccagggtggtgagatccatccacgatccagctccggtggagaaagggcccatgtcaagccttgttctgcaccccaagcattggtggtaggactgggtcctggctgatcgtccttgttcccagtggggtacatgtgagcccctgccagggccaagtccttctcccgaacccagggtcctgggaactgcagatcccggggggattcagcccttctcccactgtgctggcagaggcactcctgtgacgctgaatacagtgaacagggacattcccgccactcggggacagatgggcacaagggaggggaaactccatcaggaagtgctcccctgggcagaggcgcccactgggtgctgtgggctcaggagggggcggggcaggagctggtgccaaccgggaaccagagccccacagccatacagcccattggtgacaaggtcctgagaacacagtggccaggtgtccccaggctcctggcccctccgacgacctcaactctgcccagcccggtccctggccatcagcgacgctgtccgccccccgtcagatcccatgtgtgccatgtttatcatcagtgttttgtatttttgtactgagtatcggagcactttacagaagctgactgtacattcctgttctgttgtgaagagaacattcccagaccctggcaccctcctgagccggcgtgtgccggtccagccctccgagatgccacaattccttggatgggggagaagttcaaggaatttctgctcggccacgcggtgggaaccccgcgtccccgccatgtggcagaggggtctcagtcgtgctaggcatcgggcggcagcgccgacagcccttccctcgccagtgcccctcggccactcctgggttggagcccgattttatttgtaaagttgacagtcgagcaaatgttcctattttcgtgggatctgcacacgtctttgtcagttgtggtcatgatcttagtcacctgctaattatttttacaatgattacaacatttcctcactgcgggatatttctgacccgctttagaacttaagacctgattctagcaataaacgtgtccgagatgagcggtgaaaaaaaaaaaaaaaaaaaaaaaaaaaaaaaaaaaaaaaaaa

SEQ ID NO: 3693 - protein, 1015 aa, Homo sapiens
MTVSQKGGPQPTPSPAGPGTQLGPITGEMDEADSAFLKFKQTADDSLSLTSPNTESIFVEDPYTASLRSEIESDGHEFEAESWSLAVDAAYAKKQKREVVKRQDVLYELMQTEVHHVRTLKIMLKVYSRALQEELQFSSKAIGRLFPCADDLLETHSHFLARLKERRQESLEEGSDRNYVIQKIGDLLVQQFSGENGERMKEKYGVFCSGHNEAVSHYKLLLQQNKKFQNLIKKIGNFSIVRRLGVQECILLVTQRITKYPVLVERIIQNTEAGTEDYEDLTQALNLIKDIISQVDAKVSECEKGQRLREIAGKMDLKSSSKLKNGLTFRKEDMLQRQLHLEGMLCWKTTSGRLKDILAILLTDVLLLLQEKDQKYVFASVDSKPPVISLQKLIVREVANEEKAMFLISASLQGPEMYEIYTSSKEDRNAWMAHIQRAVESCPDEEEGPFSLPEEERKVVEARATRLRDFQERLSMKDQLIAQSLLEKQQIYLEMAEMGGLEDLPQPRGLFRGGDPSETLQGELILKSAMSEIEGIQSLICRQLGSANGQAEDGGSSTGPPRRAETFAGYDCTNSPTKNGSFKKKVSSTDPRPRDWRGPPNSPDLKLSDSDIPGSSEESPQVVEAPGTESDPRLPTVLESELVQRIQTLSQLLLNLQAVIAHQDSYVETQRAAIQEREKQFRLQSTRGNLLLEQERQRNFEKQREERAALEKLQSQLRHEQQRWERERQWQHQELERAGARLQEREGEARQLRERLEQERAELERQRQAYQHDLERLREAQRAVERERERLELLRRLKKQNTAPGALPPDTLAEAQPPSHPPSFNGEGLEGPRVSMLPSGVGPEYAERPEVARRDSAPTENRLAKSDVPIQLLSATNQFQRQAAVQQQIPTKLAASTKGGKDKGGKSRGSQRWESSASFDLKQQLLLNKLMGKDESTSRNRRSLSPILPGRHSPAPPPDPGFPAPSPPPADSPSEGFSLKAGGTALLPGPPAPSPLPATPLSAKEDASKEDVIFF

SEQ ID NO: 3694 - DNA, 1143 bp, Homo sapiens
ggagttgccatggcgtcgctgagcggcctggcgtcggcgctggagtcgtacaggggccgggaccgcctgatccgagtgctggggtactgctgccagctggttggtggagttctggttgaacagtgtcccgccaggtccgaagtggggacacgtctgttggtggtgtccacccaactcagccactgcaggaccatcttgcgactctttgatgacctggccatgtttgtctacactaagcaatatggcctgggggcacaggaggaggacgcctttgtccgctgtgtctccgtcctagggaacctggctgaccagctctactacccctgtgagcacgtggcctgggcggctgatgcccgggtcctccacgtggactcttctcggtggtggacgctgagtacaaccctgtgggccctctctctgctcctgggggttgccaggtccctgtggatgctgctgaaactgagacagaggctgcggagccccacggcgcccttcaccagcccgctgccccggggcaagcggagggccatggaggcgcagatgcagtcggaggcgctgtcacttctcagcaacctggccgacctggccaacgccgtgcactggctgccccggggcgtgctgtgggccggccgcttcccgccgtggctagtgggcctcatgggcaccatctcctcaatcctcagcatgtaccaggcggcccgggccggcggccaggccgaggccactaccccctgacactgccggaagagcacagggacacagccagagcccacggagggcccttcccgcaaagcagaagccgccagggcaggggccggggctctcatggagctgcctgtggtgaaacccatgggcagggtgggtggagggactgatgcgaggtcccccaggcctcagcctggagctcctgagccgtgacagttttcaggggccgtgcagggcttcagcagcacctcctgcctgccagctggcgtcttgtatccaaatcaagatgaggaagagggggcctgtcgtgccttgagaaagctggaacgggaatcaattaaacattgtggtgctggcaaaaaaaaaaaaaaaaaaaaaaaaaaaaaaaaaaaaaaaaaaaaaaaaaaaaaaaaaaaaaaaaaaaaaaaaaaaaaaaaa

SEQ ID NO: 3695 - protein, 241 aa, Homo sapiens
MASLSGLASALESYRGRDRLIRVLGYCCQLVGGVLVEQCPARSEVGTRLLVVSTQLSHCRTILRLFDDLAMFVYTKQYGLGAQEEDAFVRCVSVLGNLADQLYYPCEHVAWAADARVLHVDSSRWWTLSTTLWALSLLLGVARSLWMLLKLRQRLRSPTAPFTSPLPRGKRRAMEAQMQSEALSLLSNLADLANAVHWLPRGVLWAGRFPPWLVGLMGTISSILSMYQAARAGGQAEATTP

SEQ ID NO: 3696 - DNA, 1669 bp, Homo sapiens
ccagggacagagggagacccaaagatctggtctgtagctaagtgaattttctaaaactcattgattcacacgccatcccttgaggtggctggtgtcccgcgatggccacaggcgccctcctgccgtgctcgcgcccgtgcccgatgtcccggctggacttcctcaaggcctcgcacttctcgctggggcctgacctgcggctgcacgagggcaccatgcgcaccacgtcgcaccgggactttgcctacccggctgccacccgggagccgccgagcctgcagccgccgcccgcgctgcttttcccaatggacccgcgctgggaccgggaagagcgcgtgtcggaggcgcaccgcgcgttcccgccgccatccacgccgccgtgggagctgctgcaagcgcaggcgcgggaacgcacgctcgccatgcaggccggcaacctgcacctgcacgaggacgcgcacgccgggatcggcctctccaacgcgcacgccgcctacggctggcccgagctgccggcgcgcacccgagagcggatccgcggcgcgcgcctcatcttcgaccgcgactccctgcctcctggcgaccgcgacaagttgcgcatcccgcccaccacgcaccaggcgctctttccaccccacgacgcgcgcccgcagcctcgcgcgcccagttgccacctcgggggccccaacaccctcaagtgggactacacgagacaagatgggacttcctaccaaagacagttccaggccctgccaggcccacctgccttgaggtgtaagagggcctcctccggagtggagctgggagactgcaagatcagctatggatcaacgtgttcggagcagaaacaggcctacaggccccaggatctgcctgaagataggtatgacaaggcccaggccacagcccacatccactgtgtaaatatccgtcctggtgacggcctcttccgcgacaggaccaccaaggccgagcacttctatgccagggagccagagccttttgttcttcaccacgatcagactccggagtcgcacatcctgaaaggaaattggtgccccggccccggcagtctggacaccttcatgcagtacttctacggccagccgccacccccgacccagccacccagccgccacgtgcctcatgagaaattgcagagtcatgtgaccctaggggagccaaagctactcaaacgcttcttcaagaccaccatgggctcggactactgcccttcagagtggagacaggtgcagaaagcgcccaacctccacttgcagcaaagctacctgccgcggggcacgggcgaattcgattttttaaccatgaaccagaagatgctgaagccacacagaacacctccggccccggtgactgaagagatgctacagcggtgcaagtacagccacatggagccccctctgggtggactgcgcttcttctcaacacaatacaaggacgagtttcctttcaagtaccagggcccagcagccctgagactgaaaaatcctcaggagggcttcgtgcccctgggcacgcctcaccagcgcggctgcagggagaagatagaccctctggtcccccagccccctatgtacctgtgccccagccagcaataaatgccatcttggcaacattcaaaaaaaaaaaaaaaaaaaaaaaaaaaaaa

SEQ ID NO: 3697 - protein, 491 aa, Homo sapiens
MSRLDFLKASHFSLGPDLRLHEGTMRTTSHRDFAYPAATREPPSLQPPPALLFPMDPRWDREERVSEAHRAFPPPSTPPWELLQAQARERTLAMQAGNLHLHEDAHAGIGLSNAHAAYGWPELPARTRERIRGARLIFDRDSLPPGDRDKLRIPPTTHQALFPPHDARPQPRAPSCHLGGPNTLKWDYTRQDGTSYQRQFQALPGPPALRCKRASSGVELGDCKISYGSTCSEQKQAYRPQDLPEDRYDKAQATAHIHCVNIRPGDGLFRDRTTKAEHFYAREPEPFVLHHDQTPESHILKGNWCPGPGSLDTFMQYFYGQPPPPTQPPSRHVPHEKLQSHVTLGEPKLLKRFFKTTMGSDYCPSEWRQVQKAPNLHLQQSYLPRGTGEFDFLTMNQKMLKPHRTPPAPVTEEMLQRCKYSHMEPPLGGLRFFSTQYKDEFPFKYQGPAALRLKNPQEGFVPLGTPHQRGCREKIDPLVPQPPMYLCPSQQ

SEQ ID NO: 3698 - DNA, 1897 bp, Homo sapiens
cccggggggagccggcggccggcgcgggcgcggcgggccgggcaggggcgaggggcgccgggtcttgccccagaagctgcgggcacatccacgcctgaaatgcggcgctcagtcctggtcaggaacccaggccacaaaggcctgagacccgtttatgaagagctcgactctgactccgaggacctagaccccaatcctgaagatctggacccggtttctgaagacccagagcctgatcctgaagacctcaacactgtcccggaagacgtggaccccagctatgaagatctggagcccgtctcggaggatctggaccccgacgccgaagctccgggctcggaaccccaagatcccgaccccatgtcttcgagtttcgacctcgatccagatgtgattggccccgtacccctgattctcgatcctaacagcgacaccctcagccccggcgatccaaaagtggaccccatctcctctggcctcactgccaccccccaggtcttggccaccagccccgcggtgctccccgcccccgccagcccgccccggcccttctcctgcccggattgcgggcgagccttccgccgcagctccgggctgagccagcatcgccgcacgcacagcggcgagaagccgtaccgctgccccgactgcgggaagtccttcagccacggtgccaccctggctcagcaccgtggcatccacactggggcgcggccgtaccagtgcgcggcctgcggcaaggccttcggctggcgctccacgctgctgaaacatcgcagcagccacagcggggagaagccgcaccactgcccggtgtgtggcaaggccttcgggcacggctcgctcctggcacagcacctgcgcacgcacggcggcccgcggccccacaagtgcccggtgtgcgccaagggcttcggccagggctctgcgctgctcaaacacctgcgcacgcacacgggcgagcggccctacccgtgtccgcagtgcggcaaggccttcgggcagagctcggcgctgctgcagcaccagcgcacacacacggccgagcgcccctaccgctgcccccactgcggcaaagccttcgggcagagctccaacttgcaacaccacctgcgcatccacacgggcgagcggccctacgcctgcccgcactgctccaaggccttcggccagagctcagcgctgctccagcacctgcacgtgcattcgggcgagcgtccctatcgctgtcagctctgcgggaaggccttcggccaggcctccagcctcaccaagcacaaacgggtgcatgagggtgcagccgctgctgcagctgccgcggccgctgcagctgcagcagcggccgccggcctgggcctcgggcctggcctaagccctgcatccatgatgaggccggggcaggtctccctcctgggtcctgatgctgtttctgtgctcggctctggcttgggcctcagccctggcaccagctctggccgcaaccctgaccctggctctgggccgggcactctgccggatcccagctccaaacccctccccggctccagatccacccccagccctactcctgtggaatcttctgacccaaaggctgggcacgacgctggtcccgaccttgtgcccagcccagaccttgatcctgtgcccagcccagaccctgatcctgtgcccagccctgatcccaaccctgtgtcctgccctgacccctgttctcccactcgtggcactgtcagcccagccctccctaccggcgagagtccagagtgggtacaggagcaaggggcactgctggggcctgatggctgaaggagacgccggcatcctcgggggcctggggaagttgtgtgttgtgcagtcagtaaaatcctcccactgcctccggaaaaaaaaaaaaaaa

SEQ ID NO: 3699 - protein, 481 aa, Homo sapiens
MSSSFDLDPDVIGPVPLILDPNSDTLSPGDPKVDPISSGLTATPQVLATSPAVLPAPASPPRPFSCPDCGRAFRRSSGLSQHRRTHSGEKPYRCPDCGKSFSHGATLAQHRGIHTGARPYQCAACGKAFGWRSTLLKHRSSHSGEKPHHCPVCGKAFGHGSLLAQHLRTHGGPRPHKCPVCAKGFGQGSALLKHLRTHTGERPYPCPQCGKAFGQSSALLQHQRTHTAERPYRCPHCGKAFGQSSNLQHHLRIHTGERPYACPHCSKAFGQSSALLQHLHVHSGERPYRCQLCGKAFGQASSLTKHKRVHEGAAAAAAAAAAAAAAAAAGLGLGPGLSPASMMRPGQVSLLGPDAVSVLGSGLGLSPGTSSGRNPDPGSGPGTLPDPSSKPLPGSRSTPSPTPVESSDPKAGHDAGPDLVPSPDLDPVPSPDPDPVPSPDPNPVSCPDPCSPTRGTVSPALPTGESPEWVQEQGALLGPDG

SEQ ID NO: 3700 - DNA, 2051 bp, Homo sapiens
agatcagctgatgccggagggtttgaagccgcgccgcgagggagcgaggtcgcagtgacagcggcgggcgatcggacccaggctgccccgccgtacccgcctgcgtcccgcgctcccgccccagcatgacagccccggcgggtccgcgcggctcagagaccgagcggcttctgacccccaaccccgggtatgggacccaggcggggccttcaccggcccctccgacacccccagaagaggaagaccttcgccgtcgtctcaaatactttttcatgagtccctgcgacaagtttcgagccaagggccgcaagccctgcaagctgatgctgcaagtggtcaagatcctggtggtcacggtgcagctcatcctgtttgggctcagtaatcagctggctgtgacattccgggaagagaacaccatcgccttccgacacctcttcctgctgggctactcggacggagcggatgacaccttcgcagcctacacgcgggagcagctgtaccaggccatcttccatgctgtggaccagtacctggcgttgcctgacgtgtcactgggccggtatgcgtatgtccgtggtgggggtgacccttggaccaatggctcagggcttgctctctgccagcggtactaccaccgaggccacgtggacccggccaacgacacatttgacattgatccgatggtggttactgactgcatccaggtggatccccccgagcggccccctccgccccccagcgacgatctcaccctcttggaaagcagctccagttacaagaacctcacgctcaaattccacaagctggtcaatgtcaccatccacttccggctgaagaccattaacctccagagcctcatcaataatgagatcccggactgctataccttcagcgtcctgatcacgtttgacaacaaagcacacagtgggcggatccccatcagcctggagacccaggcccacatccaggagtgtaagcaccccagtgtcttccagcacggagacaacagcttccggctcctgtttgacgtggtggtcatcctcacctgctccctgtccttcctcctctgcgcccgctcactccttcgaggcttcctgctgcagaacgagtttgtggggttcatgtggcggcagcggggacgggtcatcagcctgtgggagcggctggaatttgtcaatggctggtacatcctgctcgtcaccagcgatgtgctcaccatctcgggcaccatcatgaagatcggcatcgaggccaagaacttggcgagctacgacgtctgcagcatcctcctgggcacctcgacgctgctggtgtgggtgggcgtgatccgctacctgaccttcttccacaactacaatatcctcatcgccacactgcgggtggccctgcccagcgtcatgcgcttctgctgctgcgtggctgtcatctacctgggctactgcttctgtggctggatcgtgctggggccctatcatgtgaagttccgctcactctccatggtgtctgagtgcctgttctcgctcatcaatggggacgacatgtttgtgacgttcgccgccatgcaggcgcagcagggccgcagcagcctggtgtggctcttctcccagctctacctttactccttcatcagcctcttcatctacatggtgctcagcctcttcatcgcgctcatcaccggcgcctacgacaccatcaagcatcccggcggcgcaggcgcagaggagagcgagctgcaggcctacatcgcacagtgccaggacagccccacctccggcaagttccgccgcgggagcggctcggcctgcagccttctctgctgctgcggaagggacccctcggaggagcattcgctgctggtgaattgattcgacctgactgccgttggaccgtaggccctggactgcagagacccccgcccccgaccccgcttatttatttgtagggtttgcttttaaggatcggctccctgtcgcgcccgaggagggcctggacctttcgtgtcggacccttgggggcggggagactgggtggggagggtgttgaataaa

SEQ ID NO: 3701 - protein, 580 aa, Homo sapiens
MTAPAGPRGSETERLLTPNPGYGTQAGPSPAPPTPPEEEDLRRRLKYFFMSPCDKFRAKGRKPCKLMLQVVKILVVTVQLILFGLSNQLAVTFREENTIAFRHLFLLGYSDGADDTFAAYTREQLYQAIFHAVDQYLALPDVSLGRYAYVRGGGDPWTNGSGLALCQRYYHRGHVDPANDTFDIDPMVVTDCIQVDPPERPPPPPSDDLTLLESSSSYKNLTLKFHKLVNVTIHFRLKTINLQSLINNEIPDCYTFSVLITFDNKAHSGRIPISLETQAHIQECKHPSVFQHGDNSFRLLFDVVVILTCSLSFLLCARSLLRGFLLQNEFVGFMWRQRGRVISLWERLEFVNGWYILLVTSDVLTISGTIMKIGIEAKNLASYDVCSILLGTSTLLVWVGVIRYLTFFHNYNILIATLRVALPSVMRFCCCVAVIYLGYCFCGWIVLGPYHVKFRSLSMVSECLFSLINGDDMFVTFAAMQAQQGRSSLVWLFSQLYLYSFISLFIYMVLSLFIALITGAYDTIKHPGGAGAEESELQAYIAQCQDSPTSGKFRRGSGSACSLLCCCGRDPSEEHSLLVN

SEQ ID NO: 3702 - DNA, 4471 bp, Homo sapiens
gcggaacgctagcggtgttggcgcggagtggaccccggctgcggcccctggcaatggcgccaccatcggtcccggagtcccagtgatgctctgtgccatagagcccccataacttcactactacgtgatagtaaatccccggcaaaaaccagcagcgccttgcaagcccacgccaccccaagcatcccaggactcttctgaaacgactccgggctaccagatcggccgtccagctggaatcaaccgatggaggctccgctgcaaactggaatggtgcttggcgtgatgatcggggccggagtggcggtggtggtcacggccgtgctcatcctcctggtggtgcggaggctgcgagtgccaaaaaccccagccccggatggcccccggtatcggttccggaagagggacaaagtgctcttctatggccggaagattatgcggaaggtgtcacaatccacctcctccctcgtggatacctctgtctccgccacctcccggccacgcatgaggaagaaactgaagatgctcaacattgccaagaagatcctgcgcatccagaaagagacgcccacgctgcagcggaaggagcccccgcccgcagtgctagaagctgacctgaccgagggcgacctggctaactcccatctgccctctgaagtgctttatatgctcaagaacgtccgggtgctgggccacttcgagaagccactcttcctggagctctgccgccacatggtcttccagcggctgggccagggtgactacgtcttccggccgggccagccagatgccagcatctacgtggtgcaggacgggctgctggagctctgtctgccagggcctgacgggaaggagtgtgtggtgaaggaagtggttcctggggacagcgtcaacagccttctcagcatcctggatgtcatcaccggtcaccagcatccccagcggaccgtgtctgcccgggcggcccgggactccacggtgctgcgcctgccggtggaagcattctccgcggtcttcaccaagtacccggagagcttggtgcgggtcgtgcagatcatcatggtgcggctgcagcgagtcaccttcctggcactgcacaactacctgggtctgaccaatgagctcttcagccacgagatccagcccctgcgtctgttccccagccccggcctcccaactcgcaccagccctgtgcggggctccaagagaatggtcagcacctcagctacagacgagcccagggagaccccagggcggccacccgatcccaccggggccccgctgcctggacctacaggggaccctgtgaagcccacatccctggaaaccccctcgccccctctgctgagccgctgcgtctccatgccaggggacatctcaggcttgcagggtggcccccgctccgacttcgacatggcctatgagcgtggccggatctccgtgtccctgcaagaagaggcctccggggggtccctggcagcccccgctcggacccccactcaggagcctcgtgagcagccggcaggcgcctgtgaatacagctactgtgaggatgagtcggccactggtggctgccctttcgggccctaccagggccgccagaccagcagcatcttcgaggcagcaaagcaggagctggccaagctgatgcggattgaggacccctccctcctgaacagcagagtcttgctgcaccacgccaaagctggcaccatcattgcccgccagggagaccaggacgtgagcctgcacttcgtgctctggggctgcctgcacgtgtaccagcgcatgatcgacaaggcggaggacgtgtgcctgttcgtagcgcagcccggggaactggtggggcagctggcggtgctcactggcgaacctctcatcttcacactgcgagcccaacgcgactgcaccttcctgcggatctccaagtccgacttctatgagatcatgcgcgcacagcccagtgtggtgctgagtgcggcgcacacggtggcagccaggatgtcgcccttcgtgcgccagatggacttcgccatcgactggactgcagtggaggcgggacgcgcgctgtacaggcagggcgaccgctccgactgcacttacatcgtgctcaatgggcggctgcgtagcgtgatccagcgaggcagtggcaagaaggagctggtgggcgagtacggccgcggcgacctcatcggcgtggtggaggcactgacccggcagccgcgagccacgacggtgcacgcggtgcgcgacacggagctggccaagcttcccgagggcaccttgggtcacatcaaacgccggtacccgcaggtcgtgacccgccttatccacctactgagccagaaaattctagggaatttgcagcagctgcaaggacccttcccagcaggctctgggttgggtgtgcccccacactcggaactcaccaacccagccagcaacctggcaactgtggcaatcctgcctgtgtgtgctgaggtccccatggtggccttcacgctggagctgcagcacgccctgcaggccatcggtccgacgctactccttaacagtgacatcatccgggcacgcctgggggcctccgcactggatagcatccaagagttccggctgtcagggtggctggcccagcaggaggatgcacaccgtatcgtactctaccagacggacgcctcgctgacgccctggaccgtgcgctgcctgcgacaggccgactgcatcctcattgtgggcctgggggaccaggagcctaccctcggccagctggagcagatgctggagaacacggctgtgcgcgcccttaagcagctagtcctgctccaccgagaggagggcgcgggccccacgcgcaccgtggagtggctaaatatgcgcagctggtgctcggggcacctgcacctgcgctgtccgcgccgcctcttttcgcgccgcagccctgccaagctgcatgagctctacgagaaggttttctccaggcgcgcggaccggcacagcgacttctcccgcttggcgagggtgctcacggggaacaccattgcccttgtgctaggcgggggcggggccaggggctgctcgcacatcggagtactaaaggcattagaggaggcgggggtccccgtggacctggtgggcggcacgtccattggctctttcatcggagcgttgtacgcggaggagcgcagcgccagccgcacgaggcagcgggcccgggagtgggccaagagcatgacttcggtgctggaacctgtgttggacctcacgtacccagtcacctccatgttcactgggtctgcctttaaccgcagcatccatcgggtcttccaggataagcagattgaggacctgtggctgccttacttcaacgtgaccacagatatcaccgcctcagccatgcgagtccacaaagatggctccctgtggcggtacgtgcgcgccagcatgacgctgtcgggctacctgcccccgctgtgcgaccccaaggacgggcacctactcatggatggcggctacatcaacaatctgccagcggacatcgcccgcagcatgggtgccaaaacggtcatcgccattgacgtggggagccaggatgagacggacctcagcacctacggggacagcctgtccggctggtggctgctgtggaagcggctgaatccctgggctgacaaggtaaaggttccagacatggctgaaatccagtcccgcctggcctacgtgtcctgtgtgcggcagctagaggttgtcaagtccagctcctactgcgagtacctgcgcccgcccatcgactgcttcaagaccatggactttgggaagttcgaccagatctatgatgtgggctaccagtacgggaaggcggtgtttggaggctggagccgtggcaacgtcattgagaaaatgctcacagaccggcggtctacagaccttaatgagagccgccgtgcagacgtgcttgccttcccaagctctggcttcactgacttggcagagattgtgtcccggattgagccccccacgagctatgtctctgatggctgtgctgacggagaggagtcagattgtctgacagagtatgaggaggacgccggacccgactgctcgagggatgaaggggggtcccccgagggcgcaagccccagcactgcctccgagatggaggaggagaagtcgattctccggcaacgacgctgtctgccccaggagccgcccggctcagccacagatgcctgaggacctcgacaggggtcaccccctccctcccacccctggactgggctgggggtggccccgtgggggtagctcactccccctcctgctgctatgcctgtgacccccgcggcccacacactggactgacctgccctgagcggggatgcagtgttgcactgatgacttgaccagcccctcccccaataaactcgcctcttggaaaaaaaaaaaaaaaaaaaaaaaaaaaaaaaaaaaaaaaaaa

SEQ ID NO: 3703 - protein, 1327 aa, Homo sapiens
MEAPLQTGMVLGVMIGAGVAVVVTAVLILLVVRRLRVPKTPAPDGPRYRFRKRDKVLFYGRKIMRKVSQSTSSLVDTSVSATSRPRMRKKLKMLNIAKKILRIQKETPTLQRKEPPPAVLEADLTEGDLANSHLPSEVLYMLKNVRVLGHFEKPLFLELCRHMVFQRLGQGDYVFRPGQPDASIYVVQDGLLELCLPGPDGKECVVKEVVPGDSVNSLLSILDVITGHQHPQRTVSARAARDSTVLRLPVEAFSAVFTKYPESLVRVVQIIMVRLQRVTFLALHNYLGLTNELFSHEIQPLRLFPSPGLPTRTSPVRGSKRMVSTSATDEPRETPGRPPDPTGAPLPGPTGDPVKPTSLETPSPPLLSRCVSMPGDISGLQGGPRSDFDMAYERGRISVSLQEEASGGSLAAPARTPTQEPREQPAGACEYSYCEDESATGGCPFGPYQGRQTSSIFEAAKQELAKLMRIEDPSLLNSRVLLHHAKAGTIIARQGDQDVSLHFVLWGCLHVYQRMIDKAEDVCLFVAQPGELVGQLAVLTGEPLIFTLRAQRDCTFLRISKSDFYEIMRAQPSVVLSAAHTVAARMSPFVRQMDFAIDWTAVEAGRALYRQGDRSDCTYIVLNGRLRSVIQRGSGKKELVGEYGRGDLIGVVEALTRQPRATTVHAVRDTELAKLPEGTLGHIKRRYPQVVTRLIHLLSQKILGNLQQLQGPFPAGSGLGVPPHSELTNPASNLATVAILPVCAEVPMVAFTLELQHALQAIGPTLLLNSDIIRARLGASALDSIQEFRLSGWLAQQEDAHRIVLYQTDASLTPWTVRCLRQADCILIVGLGDQEPTLGQLEQMLENTAVRALKQLVLLHREEGAGPTRTVEWLNMRSWCSGHLHLRCPRRLFSRRSPAKLHELYEKVFSRRADRHSDFSRLARVLTGNTIALVLGGGGARGCSHIGVLKALEEAGVPVDLVGGTSIGSFIGALYAEERSASRTRQRAREWAKSMTSVLEPVLDLTYPVTSMFTGSAFNRSIHRVFQDKQIEDLWLPYFNVTTDITASAMRVHKDGSLWRYVRASMTLSGYLPPLCDPKDGHLLMDGGYINNLPADIARSMGAKTVIAIDVGSQDETDLSTYGDSLSGWWLLWKRLNPWADKVKVPDMAEIQSRLAYVSCVRQLEVVKSSSYCEYLRPPIDCFKTMDFGKFDQIYDVGYQYGKAVFGGWSRGNVIEKMLTDRRSTDLNESRRADVLAFPSSGFTDLAEIVSRIEPPTSYVSDGCADGEESDCLTEYEEDAGPDCSRDEGGSPEGASPSTASEMEEEKSILRQRRCLPQEPPGSATDA

SEQ ID NO: 3704 - DNA, 4084 bp, Homo sapiens
atgcagaaatttctagaaaagggtggtaacttctgggtgactgccatggaaacgggtgtgcccgagatcaagtcgctggaccagtacgatttctcgcgggccaaggcggcggccagcctggcgtgggtgctgcgggccgcgttcgggggcgcagagcacgtgcccccggagctgtgggagcccttctataccgaccagtacgcgcaggagcatgtgaagcccccggtgacacggctgctgctctcagccgagctctactgcagagcctggcgccaggcactgccacagcttgaaacaccccccaacccctctgcactgctggccctgctggcgcggaggggcacagtgcctgctttgcccgagcgcccggtgcgcgaggccgacctgaggcaccagcccattctcatgggagcccacctagctgtcattgatgccctcatggctgcctttgccttcgagtggacaaagaccctgccaggtcccttggccctgaccagcttggagcacaagctgcttttctgggtggacacgaccgtccggcggctgcaggagaagaccgagcaggaagcggcccagcgagcctctccagcagcccctgcagacggggcggccccggcgcagccctcgtgccctacgcgctggtactggaagctggttcctcacgcaattgccttctgtttgaaggagtcggggagcaaaccccccatgatccgataccgcaaggaccgtgtggtggcgcgacgtgccccctgcttcccgacggtgaccagcctccaggacctggccagtggggccgcgctggccgccaccatccactgctattgtccccagctgcttcgacttgaggaggtgtgcttgaaggaccccatgtctgtggcggacagcctgtacaacctccagctcgtgcaggatttctgtgcctctcgccttcctcgtggctgccccctgtcccttgaggacttgctgtacgtcccaccgccactcaaggtcaacttggtggtgatgctggccgagttgttcatgtgttttgaggtgctcaagcccgactttgtgcaagtgaaggacttgcccgatggtcacgctgcctccccccggggcactgaggcctccccacctcagaacaacagcggcagtagttctcctgtcttcaccttccgccacccgcttctgtcatctggtggcccccagtccccactccgaggatccacaggctccctgaagtcttccccgtccatgtcccatatggaggccctgggcaaggcctggaaccggcagctcagccgtcccctctcccaggctgtgtcattcagcaccccctttggcctggacagcgacgtggatgtcgtcatgggagaccctgtgctcctccgctctgtgagctcggacagcctgggccccccgcgtcccgcgccggccaggacccccacccagccacccccggagcctggtgacctgcccaccatcgaggaagctctgcagatcatccacagtgccgagccccggctcctcccagatggggcggccgacggcagcttctacctccactcccctgaggggccctccaagccatccctggcctccccctacctgcccgaggggacctccaaaccactgtccgacaggcccaccaaagcaccagtgtacatgccacaccccgagaccccctcgaaaccatctccctgtctggtgggggaggcatcgaaaccgccagccccatccgaggggtccccgaaggcggtggcttcgtccccagcagccaccaactccgaggtgaaaatgaccagctttgcagaacgcaagaaacagctggtgaaggcagaggctgaggccggagcggggtcccccacgtccactccggccccgccggaggccctgagctcggagatgagtgagctcagcgcccggctggaggagaaacgcagagccatcgaggctcagaagcgacggattgaggccatattcgccaagcaccgccagcggctgggcaaaagcgccttcctgcaggtgcagccgcgggaagcctctggggaggcggaagcagaggcggaggaggccgattccggtccagtccctggtggggagcggcccgcaggcgagggccagggtgagccaacctcacggcccaaggcagtgaccttctcgccagacctgggcccggtgccccacgaggggctgggggaatacaatcgagcggtcagcaagctgagtgccgccttgagctcgctgcagcgggacatgcagaggctcacggaccagcagcagcggctcctggccccgcccgaggcccccggatccgccccaccacctgctgcgtgggtcatccctggccccacgacggggcccaaagctgcatcccccagccccgcccggcgagtcccggccacccggcgcagccctgggcccgggcccagccagtcaccccgcagcccgaaacacacgcggccagcggagctgcggctggcacccttgaccagggtgcttacgccaccccacgacgtagacagcctcccccacctgcgcaagttctcgccgagccaggtgcccgtgcagacgcgctcttccatcctcctggcggaggagacgccccccgaggagccagccgcccggccgggcctcatcgagatcccgctgggcagcctggcagatcccgccgccgaggacgagggagacgggagccccgctggtgctgaggattccttggaggaggaggcgtcttcggagggggagccccgggtggggctggggttcttctacaaggatgaagacaagcctgaggacgagatggcccaaaagcgggccagcctgctggagcggcagcagcggcgagcagaggaggcgcggcggcgcaagcagtggcaggaggtggagaaggaacagcggagggaggaggccgcgaggctggcccaagaggaggccccgggcccagccccgcttgtgtccgcagtcccgatggcgactccagcccctgctgcccgggctccagccgaggaggaggtgggcccccggaagggggacttcacgcggcaggagtacgagcgccgggcccagctgaagctgatggacgacctcgataaggtgctgcggccccgggctgcggggtccgggggtccaggtcggggcgggcggagggccacccggcctcgctcgggttgctgtgacgactcagccctggcacgaagcccagcccgcggcctgctgggctctcggctgagcaaaatctattcccagtccaccctgtcactgtccactgtggccaacgaggcccacaataacctcggggtgaagaggcccacgtctcgggctccctccccgtcaggtctcatgtccccaagccgcctgcctggaagccgcgaacgggactgggaaaatggcagcaatgcctcctccccagcgtcagtgcccgagtacacaggtccacggctgtacaaagaacccagcgccaagtccaacaagttcatcatccacaatgccctatcacactgctgcctggcgggcaaggtgaacgaaccgcagaagaatcgcattctggaggaaattgagaaaagcaaggccaaccacttcctgatcctctttcgcgactcgagctgccagttccgggcgctctacacgctgtcgggggagacagaggagctgtcgcggctggcagggtatgggccccggaccgtcacgcccgccatggtggaaggcatctacaagtacaactcggaccgcaagcgcttcacccagatccccgccaagaccatgtccatgagcgtcgatgccttcaccatccagggacacctctggcagggcaagaaacccaccactcccaagaagggcggcggcacccccaaatagccccacccgggcggtccacgggccgggccctgtgtgctgcggccgccatcccctggaggacagtcagtcggtattcctgggtcctgtctgtccccaaccgtgtctgggtggggctggagtctccaccctctgactttgagtccagtcctgctgtgggggctgagctgggaggttcagggactcagggctcagctcagtccccttgtctgtcctcccccacttcttgaataaaataatttaaagagaa

SEQ ID NO: 3705 - protein, 1278 aa, Homo sapiens
MQKFLEKGGNFWVTAMETGVPEIKSLDQYDFSRAKAAASLAWVLRAAFGGAEHVPPELWEPFYTDQYAQEHVKPPVTRLLLSAELYCRAWRQALPQLETPPNPSALLALLARRGTVPALPERPVREADLRHQPILMGAHLAVIDALMAAFAFEWTKTLPGPLALTSLEHKLLFWVDTTVRRLQEKTEQEAAQRASPAAPADGAAPAQPSCPTRWYWKLVPHAIAFCLKESGSKPPMIRYRKDRVVARRAPCFPTVTSLQDLASGAALAATIHCYCPQLLRLEEVCLKDPMSVADSLYNLQLVQDFCASRLPRGCPLSLEDLLYVPPPLKVNLVVMLAELFMCFEVLKPDFVQVKDLPDGHAASPRGTEASPPQNNSGSSSPVFTFRHPLLSSGGPQSPLRGSTGSLKSSPSMSHMEALGKAWNRQLSRPLSQAVSFSTPFGLDSDVDVVMGDPVLLRSVSSDSLGPPRPAPARTPTQPPPEPGDLPTIEEALQIIHSAEPRLLPDGAADGSFYLHSPEGPSKPSLASPYLPEGTSKPLSDRPTKAPVYMPHPETPSKPSPCLVGEASKPPAPSEGSPKAVASSPAATNSEVKMTSFAERKKQLVKAEAEAGAGSPTSTPAPPEALSSEMSELSARLEEKRRAIEAQKRRIEAIFAKHRQRLGKSAFLQVQPREASGEAEAEAEEADSGPVPGGERPAGEGQGEPTSRPKAVTFSPDLGPVPHEGLGEYNRAVSKLSAALSSLQRDMQRLTDQQQRLLAPPEAPGSAPPPAAWVIPGPTTGPKAASPSPARRVPATRRSPGPGPSQSPRSPKHTRPAELRLAPLTRVLTPPHDVDSLPHLRKFSPSQVPVQTRSSILLAEETPPEEPAARPGLIEIPLGSLADPAAEDEGDGSPAGAEDSLEEEASSEGEPRVGLGFFYKDEDKPEDEMAQKRASLLERQQRRAEEARRRKQWQEVEKEQRREEAARLAQEEAPGPAPLVSAVPMATPAPAARAPAEEEVGPRKGDFTRQEYERRAQLKLMDDLDKVLRPRAAGSGGPGRGGRRATRPRSGCCDDSALARSPARGLLGSRLSKIYSQSTLSLSTVANEAHNNLGVKRPTSRAPSPSGLMSPSRLPGSRERDWENGSNASSPASVPEYTGPRLYKEPSAKSNKFIIHNALSHCCLAGKVNEPQKNRILEEIEKSKANHFLILFRDSSCQFRALYTLSGETEELSRLAGYGPRTVTPAMVEGIYKYNSDRKRFTQIPAKTMSMSVDAFTIQGHLWQGKKPTTPKKGGGTPK

SEQ ID NO: 3706 - DNA, 2682 bp, Homo sapiens
tctcctgtacctgggcatccagaaaaatggtggtgatggcgcgactctcgcggcccgagcggccggaccttgtcttcgaggaagaggacctcccctatgaggaggaaatcatgcggaaccaattctctgtcaaatgctggcttcgctacatcgagttcaaacagggcgccccgaagcccaggctcaatcagctatacgagcgggcactcaagctgctgccctgcagctacaaactctggtaccgatacctgaaggcgcgtcgggcacaggtgaagcatcgctgtgtgaccgaccctgcctatgaagatgtcaacaactgtcatgagagggcctttgtgttcatgcacaagatgcctcgtctgtggctagattactgccagttcctcatggaccaggggcgcgtcacacacacccgccgcaccttcgaccgtgccctccgggcactgcccatcacgcagcactctcgaatttggcccctgtatctgcgcttcctgcgctcacacccactgcctgagacagctgtgcgaggctatcggcgcttcctcaagctgagtcctgagagtgcagaggagtacattgagtacctcaagtcaagtgaccggctggatgaggccgcccagcgcctggccaccgtggtgaacgacgagcgtttcgtgtctaaggccggcaagtccaactaccagctgtggcacgagctgtgcgacctcatctcccagaatccggacaaggtacagtccctcaatgtggacgccatcatccgcgggggcctcacccgcttcaccgaccagctgggcaagctctggtgttctctcgccgactactacatccgcagcggccatttcgagaaggctcgggacgtgtacgaggaggccatccggacagtgatgaccgtgcgggacttcacacaggtgtttgacagctacgcccagttcgaggagagcatgatcgctgcaaagatggagaccgcctcggagctggggcgcgaggaggaggatgatgtggacctggagctgcgcctggcccgcttcgagcagctcatcagccggcggcccctgctcctcaacagcgtcttgctgcgccaaaacccacaccacgtgcacgagtggcacaagcgtgtcgccctgcaccagggccgcccccgggagatcatcaacacctacacagaggctgtgcagacggtggaccccttcaaggccacaggcaagccccacactctgtgggtggcgtttgccaagttttatgaggacaacggacagctggacgatgcccgtgtcatcctggagaaggccaccaaggtgaacttcaagcaggtggatgacctggcaagcgtgtggtgtcagtgcggagagctggagctccgacacgagaactacgatgaggccttgcggctgctgcgaaaggccacggcgctgcctgcccgccgggccgagtactttgatggttcagagcccgtgcagaaccgcgtgtacaagtcactgaaggtctggtccatgctcgccgacctggaggagagcctcggcaccttccagtccaccaaggccgtgtacgaccgcatcctggacctgcgtatcgcaacaccccagatcgtcatcaactatgccatgttcctggaggagcacaagtacttcgaggagagcttcaaggcgtacgagcgcggcatctcgctgttcaagtggcccaacgtgtccgacatctggagcacctacctgaccaaattcattgcccgctatgggggccgcaagctggagcgggcacgggacctgtttgaacaggctctggacggctgccccccaaaatatgccaagaccttgtacctgctgtacgcacagctggaggaggagtggggcctggcccggcatgccatggccgtgtacgagcgtgccaccagggccgtggagcccgcccagcagtatgacatgttcaacatctacatcaagcgggcggccgagatctatggggtcacccacacccgcggcatctaccagaaggccattgaggtgctgtcggacgagcacgcgcgtgagatgtgcctgcggtttgcagacatggagtgcaagctcggggagattgaccgcgcccgggccatctacagcttctgctcccagatctgtgacccccggacgaccggcgcgttctggcagacgtggaaggactttgaggtccggcatggcaatgaggacaccatcaaggaaatgctgcgtatccggcgcagcgtgcaggccacgtacaacacgcaggtcaacttcatggcctcgcagatgctcaaggtctcgggcagtgccacgggcaccgtgtctgacctggcccctgggcagagtggcatggacgacatgaagctgctggaacagcgggcagagcagctggcggctgaggcggagcgtgaccagcccttgcgcgcccagagcaagatcctgttcgtgaggagtgacgcctcccgggaggagctggcagagctggcacagcaggtcaaccccgaggagatccagctgggcgaggacgaggacgaggacgagatggacctggagcccaacgaggttcggctggagcagcagagcgtgccagccgcagtgtttgggagcctgaaggaagactgacccgtccctcccccatcccccctccccaccccctccccaatacagctacgtttgtacatcaaaaaaaaaaaaaaaaaaaaaaaaaaaa

SEQ ID NO: 3707 - protein, 855 aa, Homo sapiens
MVVMARLSRPERPDLVFEEEDLPYEEEIMRNQFSVKCWLRYIEFKQGAPKPRLNQLYERALKLLPCSYKLWYRYLKARRAQVKHRCVTDPAYEDVNNCHERAFVFMHKMPRLWLDYCQFLMDQGRVTHTRRTFDRALRALPITQHSRIWPLYLRFLRSHPLPETAVRGYRRFLKLSPESAEEYIEYLKSSDRLDEAAQRLATVVNDERFVSKAGKSNYQLWHELCDLISQNPDKVQSLNVDAIIRGGLTRFTDQLGKLWCSLADYYIRSGHFEKARDVYEEAIRTVMTVRDFTQVFDSYAQFEESMIAAKMETASELGREEEDDVDLELRLARFEQLISRRPLLLNSVLLRQNPHHVHEWHKRVALHQGRPREIINTYTEAVQTVDPFKATGKPHTLWVAFAKFYEDNGQLDDARVILEKATKVNFKQVDDLASVWCQCGELELRHENYDEALRLLRKATALPARRAEYFDGSEPVQNRVYKSLKVWSMLADLEESLGTFQSTKAVYDRILDLRIATPQIVINYAMFLEEHKYFEESFKAYERGISLFKWPNVSDIWSTYLTKFIARYGGRKLERARDLFEQALDGCPPKYAKTLYLLYAQLEEEWGLARHAMAVYERATRAVEPAQQYDMFNIYIKRAAEIYGVTHTRGIYQKAIEVLSDEHAREMCLRFADMECKLGEIDRARAIYSFCSQICDPRTTGAFWQTWKDFEVRHGNEDTIKEMLRIRRSVQATYNTQVNFMASQMLKVSGSATGTVSDLAPGQSGMDDMKLLEQRAEQLAAEAERDQPLRAQSKILFVRSDASREELAELAQQVNPEEIQLGEDEDEDEMDLEPNEVRLEQQSVPAAVFGSLKED

SEQ ID NO: 3708 - DNA, 5576 bp, Homo sapiens
gcggccgccgcctgccgggcctcccctcgccgcggccggccgccgcgctcccgcccgggcgcccagctatgtactccccgtactgcctcacccaggatgagttccacccgttcatcgaggcactgctgcctcacgtccgcgctttctcctacacctggttcaacctgcaggcgcggaagcgcaagtacttcaagaagcatgaaaagcggatgtcgaaggacgaggagcgggcggtgaaggacgagctgctgggcgagaagcccgagatcaagcagaagtgggcatcccggctgctggccaagctgcgcaaggacatccggcccgagttccgcgaggacttcgtgctgaccatcacgggcaagaagcccccctgctgcgtgctctccaaccccgaccagaagggcaagatccggcggattgactgcctgcgccaggctgacaaggtgtggcggctggacctggtcatggtgattttgtttaaggggatccccctggaaagtactgatggggagcggctctacaagtcgcctcagtgctcgaaccccggcctgtgcgtccagccacatcacattggagtcacaatcaaagaactggatctttatctggcttactttgtccacactccggaatccggacaatcagatagttcaaaccagcaaggagatgcggacatcaaaccactgcccaacgggcacttaagtttccaggactgttttgtgacttccggggtctggaatgtgacggagctggtgagagtatcacagactcctgttgcaacagcatcagggcccaacttctccctggcggacctggagagtcccagctactacaacatcaaccaggtgaccctggggcggcggtccatcacctcccctccttccaccagcaccaccaagcgccccaagtccatcgatgacagtgagatggagagccctgttgatgacgtgttctatcccgggacaggccgttccccagcagctggcagcagccagtccagcgggtggcccaacgatgtggatgcaggcccggcttctctaaagaagtcaggaaagctggacttctgcagtgccctctcctctcagggcagctccccgcgcatggctttcacccaccacccgctgcctgtgcttgctggagtcagaccagggagcccccgggccacagcatcagccctgcacttcccctccacgtccatcatccagcagtcgagcccgtatttcacgcacccgaccatccgctaccaccaccaccacgggcaggactcactgaaggagtttgtgcagtttgtgtgctcggatggctcgggccaggccaccggacagcattcgcaacgacaggcgcctcctctgccaaccggtttgtcagcatcggaccccgggacggcaactttctgaacatcccacagcagtctcagtcctggttcctctgataagatcgacaaaagaaacaacaaaatgagaagaagaggttcctcgaaaggggggagaagaaattttgagaatggaaaaatcccccagcccagcccagccccaccgaaaagcaaaaattacacgtcgtcagccactcagcccttctctcctccagcccggggacccccgcgggccccagaagcagcccagttctcagagagcccttggaaggggtctcggtggagctgtgcaccagcagccaagcagaaagaaacacgcgacatggactctgtcaagtagaggacagaaagcaagaaaggatgcagaactgccttcctccccctgaccccgccccggccttctggggaaggaacaaagtccccaaacaaagcaaccagcacaattctgaaggggcctggcctccaccctcaccccttcctaggggaaccccaccctccacacagccggagctgccctagggagcctggagggccagcttgtaaagatgatggggtttagatccctcaggctctcccctccagactccgcccttccctccctccctccctccctccctctctgccaaggctccagcttcttcccccagctgctcccgaccaggagggggagagcagcctccacttaccccaccccacccttgggctaaaagcccccaggcgggcagggggtgacccctggagctagttgcgtgtcccagaatggagggtgttctgacaccccaccctgagccgcaagagcagtcctggggccctggacccctctgtacagtccgtaggaaaaagtcggaatgctctcgacggcctcgtcccagcctgggacaggccccctttcccctctctctgcaggccaggagggcctccttcctgccacgagggaggggagtcgggccccaggtcgcccccgcccccagccctgcatgcaggtgccctcgctccgccccatcagttcctgcccctgcccctcatgcagactgccctgctggggccgggccggagggtggagcagaaaggggaccccggagccgagcgaggaggaccaggcagccgccgctgccgcgctaagccaccacctgcgcttaggtaggcgtcctgctcgccgactttcagttccttgggagggtgttgggtgtcgtccttttcaaaagtgttttggagctttctgtgccccccgactttcccccgcctccccgccccccacgtggccacttttctctggattttagctgtaatgtctttactctttatttaggggtggggcattcattgtttgggtcttttgctgttggaatgggaactcctcctccatttgagcaacttgggaacaatttggtaacacaccacaggaagtagctctcccccccagccccctcctccctcaagggagggttggggggcctgtccagagggtcttcagaagcccccctgggagggaggggaggatgagcacgcccagctcccctccagggtgtgacttggcccctctggcttgtctttctgtgccttactcctcctcctgcgtctcccgttcctggccccttcttgagtccttgtgcctctctctttctctctctttcttaattgtatgaaaacacaaagcacaggtcaggatcctctgagagaaaatcaacattgcaccacgtaggggtgggctatgggctgtatttattgtgaatctagtttgtgaggctgtggccccgagctggcggagggagggaagaggagggagtgacgggaggggaggaggtcagcgacctggggccgtagcggcaggcgaacggtgcctgctacccagctggaagccacaaggtggctggctccaggggcggcttttgttggaagttgagtgaagccctccccctgtcctcagcgtgcagccctagaggaccccagggctgaggggcagtggatcctgcgggagtctcccggggcgtggggagtaaggccccgggggtggggggccgggtgggccgggcgtgacgcgcggtcaaagtgcaatgatttttcagttcggttggctaaacagggtcagagctgagagcgaagcagaaggggctccctgtccggcccacgtgccctttccctcgacgacagtcgagggctcgggctctgtgggactgtgggagctagggtctgcggggcgcctgcccgggcgaggtcggaagctgcaggccagctgggcccgggccggagcgtgcccggcggggctgcccgggcgggcagggggtgggggctgctcctttcccaagtggtgttgtgaggggcaatgagggcaacaggagatgtggggacgtgttaggagagaaaaaaaaaaaaacaaaaatatatatgggggaaattaacttttttttttcattgaaccaagtgcaatgcatcagagagttttcctatctttgtatgttaagagattaagaaaaaaaaattctatttttgttgtaatgtcctcgcggctctggggacgctaaaagaaccgggcctgccccgccctgcgcggggataacgaaagctgagtgtttttcccttttttttgttcgtttttagtttttttttttttaagtcgttttcctgcgttgacgaggatgatctggggtttttatttgtttcgtcgttcgttctgtttcggtgggagggctgaaggaaacgttcacattttagagtttaaaaaaaacacctcgacatttaaaaaatcaaccaacacaagatcaaaaaggaaaaggacgagagaaaaattatttttaagataattaaacataaaaccctggtgcttcttacattataaagtacgttttaaagaacccacaaactattatacataagtttatgaatcaattaaatatcctgcacttgttaggaatacgcatatcccttctttgttgagtttaacggaacgggacagcggcgtgcccccggcggctggactgctccggccgcgggtctccccgggcgcccctccctggggcccagcacccctcctcgccccatccccgtccgggtacgggggcgcggcaggggtccccggcccctcccccgcagaggtcaatgccaacgaacaaacgtcccctccctccctccctctccgccccgagcgcccttctttgagccagacgccaacttgaccctcaccagcattatcaggagcgcgctcagcaagttggtagtttcctcccccctttcccggcgcccctcccgcccccattcaacatctctcatcctatccccgaccccctccggggaacaccgggaaggctcgacgctccaggacaggaccagccacgcagacaggtcgatttgcccaggcccgcgcccgcacgcacgcacgcacacggccccgcacacagccccgccccaccccgcaaccagccctgtcgactgccttatacacccgcccccgcgctggccggccgacctagtgccttgttctcacccccgtgctggcggagcggacgccgcgctctgggtcccagaggggccgggtggctcagacgacccaccactcccccaccctgaccgtgctgaacagacccccccacacgagagaaaataaaggagcaataaagtcacgagaactttcgtcccccaatcgagagcccgaggggcaccccagccccgcctctgctcccccccaccccacccaccctcggggcgcccccctccccccgcaagccagcctgggccagccccgcttcggcccctcccgggagatccgtgcgcccgaccagcaccagcatcgcggaccgcaaaggccgcccgtcccgtcaaacaagtttcttcttaggctaagaaacgcagtatatacgagtatctctatatatagtactaatggatttggtgtgcttcccccttagcgtccccctccctctgctcctcctccttcagcctggtctccccctcttctctgccctccacccccgtctctgcactgagatacataagaaacaagggtagtttactgtctgttttgttttctgggttttcagtgtcctagcggaatgcaagtaggcagccagcccgtctgttccctctccgccccgccccgccccgcccccgtcactgcgcttctgttataccatctttgcctgactctctccggcttctccattgaatggctaatgtgtatgtgaaataaagaaataaagaaaaacaaacgcga

SEQ ID NO: 3709 - protein, 441 aa, Homo sapiens
MYSPYCLTQDEFHPFIEALLPHVRAFSYTWFNLQARKRKYFKKHEKRMSKDEERAVKDELLGEKPEIKQKWASRLLAKLRKDIRPEFREDFVLTITGKKPPCCVLSNPDQKGKIRRIDCLRQADKVWRLDLVMVILFKGIPLESTDGERLYKSPQCSNPGLCVQPHHIGVTIKELDLYLAYFVHTPESGQSDSSNQQGDADIKPLPNGHLSFQDCFVTSGVWNVTELVRVSQTPVATASGPNFSLADLESPSYYNINQVTLGRRSITSPPSTSTTKRPKSIDDSEMESPVDDVFYPGTGRSPAAGSSQSSGWPNDVDAGPASLKKSGKLDFCSALSSQGSSPRMAFTHHPLPVLAGVRPGSPRATASALHFPSTSIIQQSSPYFTHPTIRYHHHHGQDSLKEFVQFVCSDGSGQATGQHSQRQAPPLPTGLSASDPGTATF

SEQ ID NO: 3710 - DNA, 1510 bp, Homo sapiens
cagcctggcccttatctgcactgggccagcatcctccggccgctgcgccgccaggggtgagagggaggaaaccgggccgccgggggcggggagaaggcgggccggcccgggagccgctcactttccctgggggggacctacgcggagacctcggctatcctggccttccgaggcccacgaggaggcgcggcccaacgccggggcctggagcattgaggccggaccctcgcgagacagcagagcctggcctgacgctggaaaccacaccctggcccagactgccagccctgacgggacagagccagggcactcaccaggctgcaagaacagtgctggggtgagtacccccacgtcggggtccatgtgcccgcctcaggcacaggcagaggtgggccccaccatgactgagaaggcagagatggtgtgtgcccccagcccagcgcctgccccaccccctaagcctgcctcgcctgggcccccgcaggtggaggaggtgggccaccgaggaggctcctcgccccccaggctgccacctggtgtaccagtgatcagcctgggccacagcaggcccccaggggtagccatgcccaccacagagctgggcactctgcggcccccgctgctgcaactctccaccctgggaactgccccgcccactttggccctgcactaccaccctcaccccttcctcaacagtgtctacattgggccagcaggaccttttagcatcttccctagcagccggttgaagcggagaccaagccactgtgagctggacctggctgaggggcaccagccccagaaggtggcccggcgcgtgttcaccaacagccgggagcgctggcggcagcagaacgttaacggcgccttcgccgagctgaggaagctgctgccgacgcacccgcccgaccggaagctgagcaagaacgaggtgctccgcctagccatgaagtacatcggcttcctggtgcggctgctgcgcgaccaagccgcagctctggccgcaggccccacccctcccgggcctcgcaaacggccggtgcaccgggtcccagacgacggcgcccgccggggatccggacgcagggccgaggcggcagcgcgctcgcagcccgcgcccccggccgaccccgacggcagccccggtggagcggcccggcccatcaagatggagcaaaccgctttgagcccagaggtgcggtgaccgcacgcggcagcacctctgagccggagggcaccagggactcggcccagggccgtcaaggaaagggcagtggacgtgctgcgcatgttcgggagcgaactcccccgaagaaggaccagtgaagacgtcaggggcaaggtctcgggggtccggaagggtgatcatcgacccccaagggacccgcagacccttaaaaaaatcacccacaaccctctggaagtggccttgcccggtccccttcccaggggcgaggtcggcaaagcaacatggcagagcagtcataggaaaaaaaaaaaaaaaaaaaaa

SEQ ID NO: 3711 - protein, 280 aa, Homo sapiens
MCPPQAQAEVGPTMTEKAEMVCAPSPAPAPPPKPASPGPPQVEEVGHRGGSSPPRLPPGVPVISLGHSRPPGVAMPTTELGTLRPPLLQLSTLGTAPPTLALHYHPHPFLNSVYIGPAGPFSIFPSSRLKRRPSHCELDLAEGHQPQKVARRVFTNSRERWRQQNVNGAFAELRKLLPTHPPDRKLSKNEVLRLAMKYIGFLVRLLRDQAAALAAGPTPPGPRKRPVHRVPDDGARRGSGRRAEAAARSQPAPPADPDGSPGGAARPIKMEQTALSPEVR

SEQ ID NO: 3712 - DNA, 2217 bp, Homo sapiens
ccctacctcatagatatgtaggacatccccgggcccggaatgcggctctctgaccctctctgtgccctcccccgccccccgaaccaggcttggcgggcggaggcgccagcggatgtctcatgcaaggatcgtctctgtggctaagcctcactttccgctccgcccgggtgctctctagagcccggtttttcgagtggcagtctccagggctgccgaatacagcagcgatggagaacggcaccgggccctacggagaagaacgtccacgtgaagtccaggagacgacagtcaccgagggggctgccaaaatcgcctttcccagtgccaacgaggtcttttataacccggtgcaggaattcaatcgggacctgacatgtgctgtgatcaccgagtttgctcgcattcagcttggggccaaaggaatccagatcaaggttccaggagagaaggacacgcaaaaagtggtcgtggacttgtcagagcaagaggaggaaaaggttgaactgaaagagagtgaaaacctggcctcaggagaccaacctcgcacagcggccgtgggggagatctgtgaggaaggcctgcatgtgctggaaggcctggcagcttcaggcctacgttccattcgatttgccctagaggtgcctgggctcagatctgtggttgcaaacgatgcctccacccgggctgtggatctcatacgccggaatgtccagctcaatgacgtggcccacctggtacagccgagccaagcagatgcccggatgctgatgtaccagcaccagagggtgtcggagaggtttgacgtcatcgatctggacccctatggcagcccagccaccttcctggatgcagctgtgcaggctgtgagtgaaggagggttgctgtgtgtgacctgcacagacatggcggtgttggcggggaacagcggggagacgtgctacagcaagtacggggccatggccctcaagagccgggcctgccacgagatggccctgagaatcgtcctgcacagcctggacctccgcgccaactgctaccagcgcttcgtggtgccgctgctcagcatcagcgctgacttctacgtgcgtgtttttgtccgtgtcttcaccggccaggccaaggtcaaggcctcagccagcaagcaggcgctggtgttccagtgtgtgggctgcggggccttccaccttcagcgtctcggcaaagcgtcaggagtccccagcggccgggccaagttctctgcagcctgtggtccccctgtgacccccgagtgtgaacactgtgggcaacgacaccagcttggtggccccatgtgggcagagcccatccatgacctggattttgtgggccgtgtcctggaggctgtgagcgctaaccccggccgcttccacacctcggagcggatccgaggggtcctgagcgtcatcactgaggagctcccggacgtgcctctgtactacaccctggaccagctgagcagcaccatccactgcaacacaccaagcctcctgcagttgcggtcggccctcctccacgctgacttccgggtctcactctcccacgcctgtaagaacgctgtgaagacggatgcccctgcctctgccctctgggacatcatgcgttgctgggagaaggaatgtccggtgaaacgggagcgactatcagagactagcccagcgttccgcattctcagtgtggagcccaggctgcaggccaacttcaccatccgggaagatgccaaccccagctcccgacagcgaggactcaagcgcttccaggctaacccggaggccaactggggtccccggcctcgtgcccggccagggggcaaggcggccgacgaagctatggaggagagacgcaggctgcttcagaacaagcggaaggagccgccggaagatgtggcccagcgggctgcccggctcaagacatttccttgcaagaggtttaaggagggcacctgtcaacgcggggaccagtgctgctactcccacagccccccgacacccagggtttctgctgatgctgcccctgactgtccagagacctccaaccagaccccccctggacctggggctgccgctgggccaggcatagactgaaccaataaagagatgtcacgtcaccttctcccgaaaaaaaaaaaaaaaaaaaaaaaaaaaaaaaaaaaaaaaaaaaaaaaaaaaaaaaaaaaaaaaaaaaaaaaaaaaaaaaaaaaaa

SEQ ID NO: 3713 - protein, 659 aa, Homo sapiens
MQGSSLWLSLTFRSARVLSRARFFEWQSPGLPNTAAMENGTGPYGEERPREVQETTVTEGAAKIAFPSANEVFYNPVQEFNRDLTCAVITEFARIQLGAKGIQIKVPGEKDTQKVVVDLSEQEEEKVELKESENLASGDQPRTAAVGEICEEGLHVLEGLAASGLRSIRFALEVPGLRSVVANDASTRAVDLIRRNVQLNDVAHLVQPSQADARMLMYQHQRVSERFDVIDLDPYGSPATFLDAAVQAVSEGGLLCVTCTDMAVLAGNSGETCYSKYGAMALKSRACHEMALRIVLHSLDLRANCYQRFVVPLLSISADFYVRVFVRVFTGQAKVKASASKQALVFQCVGCGAFHLQRLGKASGVPSGRAKFSAACGPPVTPECEHCGQRHQLGGPMWAEPIHDLDFVGRVLEAVSANPGRFHTSERIRGVLSVITEELPDVPLYYTLDQLSSTIHCNTPSLLQLRSALLHADFRVSLSHACKNAVKTDAPASALWDIMRCWEKECPVKRERLSETSPAFRILSVEPRLQANFTIREDANPSSRQRGLKRFQANPEANWGPRPRARPGGKAADEAMEERRRLLQNKRKEPPEDVAQRAARLKTFPCKRFKEGTCQRGDQCCYSHSPPTPRVSADAAPDCPETSNQTPPGPGAAAGPGID

SEQ ID NO: 3714 - DNA, 4556 bp, Homo sapiens
tggccgccgcggctgccgctgctgctgaggcggaggccgcggaggccgcggaggcggaggccgaggccccggcgcagcggggcgcgccccgggcccaggcccggccccagccgccgctgcggagcccgccgggaccccccggagcgcggccacggcgcagccgctgccatggcccagacactgcagatggagatcccgaacttcggcaacagcatcctggagtgcctcaatgaacagcggctgcagggcctgtactgtgacgtgtcagtggtggtcaagggccatgccttcaaggcccaccgggccgtgcttgctgccagcagctcctacttccgggacctgttcaacaacagccgcagcgccgtggtggagctgccggcggctgtgcagccccagtctttccagcagatcctcagcttctgctacacgggccggctgagcatgaacgtgggcgaccagttcctgctcatgtacacggctggcttcctgcagatccaggagatcatggagaagggcaccgagttcttcctcaaggtgagctccccgagctgcgactcccagggcctgcatgcggaggaggccccatcgtcggagccccagagccccgtggcgcagacatcgggctggccagcctgtagcaccccgctgcccctcgtgtcgcgggtgaagacggagcagcaggagtcggactccgtgcagtgcatgcccgtggccaagcggctgtgggacagtggccagaaggaggctgggggcggcggcaatggcagccgcaagatggccaagttctccacgccggacctggctgccaaccggcctcaccagcccccgccaccccaacaggctccggtggtggcagcagcccagcccgccgtggctgcgggagcagggcagccagccggtggggtggcagcagcagggggtgtggtgagtgggcccagcacgtcggagcggaccagcccaggcacctcaagcgcctacaccagcgacagccctggctcctaccacaatgaggaggacgaggaggaggatggtggcgaggagggcatggatgagcagtaccggcagatctgcaacatgtacaccatgtacagcatgatgaacgtcggccagacagccgagaaggtggaggccctcccggagcaggtagcccccgagtcccgaaatcgcatccgggttcggcaagacctggcgtctctcccggctgaacttatcaaccagattgggaaccgctgccaccccaagctctacgacgagggcgacccctctgagaagctggagctggtgacaggcaccaacgtgtacatcacaagggcgcagctgatgaactgccacgtcagcgcaggcacgcggcacaaggtcctactgcggcggctcctggcctccttctttgaccggaacacgctggccaacagctgcggcaccggcatccgctcttctaccaacgatccccgtcggaagcccctggacagccgcgtgctccacgctgtcaagtactactgccagaacttcgcccccaacttcaaggagagcgagatgaatgccatcgcggccgacatgtgcaccaacgcccgccgcgtcgtgcgcaagagctggatgcccaaggtcaaggtgctcaaggctgaggatgacgcctacaccaccttcatcagtgaaacgggcaagatcgagccggacatgatgggtgtggagcatggcttcgagaccgccagccacgagggcgaggcgggtccctcggctgaagccctgcagtaacccgcccagcctcccgcggggccacacacttcccctcccaacacacacacacacctgccatcttggtcatgagctactgtctgtccctccccaggacccgcggtgggtgctgcatgttcccggccctctgcccctcctgtcctaccccctttccccaccgagagctgggccgggagaggaccgcagggcaggtggcgtgaggtccgtgttgccttctttaacacacactcgtgcagtgggggagttctggctccccaacctaacccctagccgtcatctccacactcaccaggcccaccaggggagggggctggcctgggggtcttgggaaggcccctccccaggccctaggccacctcgcggaagccttcagcctccgcccctcactgcagccccttgggacttgaggggggccccaggggttctcaggacccctcccaccacctcccagtgcttccacgtctccaaaagcgccttcctgtcaccctcgtctatccctgcgcctgggggctggggtaggcgaggccgtggggactacccattttatagctggggaaacaggctccgagaaattgcacaaccgacctcaggtggccggcagtggcgtgcctggtgccctttctcctcttccgcctctgttgctccctttggtcctctggggcctcagagaggcaggtcctaaaggagggggggtctcctgggggcagaccgagggtctcggaggatagaatgagaggtttccagggctggcagagtgtgtgcgtgtgtgtgtgcagaagttttgctttcaaacaaatgaagatacaagaggcagtaggacctgggttggaacccaggggagcagactggggggctgttgcccctccctccatctccccacacccaccccaccccacagcagggctcctggcccccacccccctgtacataatttttaaaacctttttttagcgaatgaaatattgaagtataagattccttttatttttcaaaccaatggggctgtgtctattgtccccctcggtccccaggggtggggggccttggaaggcagggcggtgttggggggctggggggcaggctgaatgtgtgtgtgtgggtgtgtatgtgtggagtgtgtgtgtgtgtttccatggtaggactccagtcccagctgctgcctaggctcctgtgggtcctgtgggtccccctcccctgttcaccttccccaacagggctatagtttaagggtgtcccaggccttggctggttggctgggcccagctcctgggggctgggcagggcagggcagggccgggtccacttccattgttagcagttgtttgcagaattttctcttttaccattcctctctttttgttctcgcccagagtgggtggttttttgttgttgttttagattttcatgtgaaggcagttttttttcttttttaactccccatccccctatgcagggtgtcatttcaccatccacatccacatccttgtttgtgtttctggccctcgtcctccctgcctctcatctgcctccccaacccccacctacccactgctcccaggggtctctccaggggcagggggattttaggagatggggtgggggccagcccctactggacccttgtaatctgatttggagaccatccccccgatgggaccagcagccccgccggcccactgggggtccctcttaacatctgcttgttgcgggggtcagtcatgagtgccagggtctggctggggtcttggcactgtcttcctggccggggcctgaaaccttagcccccagccggcctgagtgggggatattgacacccccagctaaagcacaagcaccttagtcacccctcctctccccccgcctcctggcctgccaccccaccccagcgtttaccccaaagcacaatgccctggtcacttggcaagcggctgggcctgacggaggccgaggggcagaccggggctccagccagacccctgaaaggaaggtgctcccccacttccaggccttagttggggtgggggggccagctcctgggcctggggtcttctcacccccacccccttgtcctgggtaggcccctgcctgcccctctctgccttttcctcgggtgtccctcctcgagcccctgtggcattggcttgggtggcagagcccacttgtttcagggaccccaggaggtgccccctggctcccaggactgtgtgtgggtccggggggtgggggggtggggagaagggtcgggcagggggtgcaggggaggaaactcctcaccaggagagccaaagacagggttgtgccttaccccaggagccacccctgtaccccccttgccctgccattcaccctccacccctacccctgggcggcctgctgctttttccttctcttcctcccctgccctgagctgcatggttcccccaccctgggcagccaggaaggaatctgaatggagaatcaccaaccaccagagaaaaaagactgtggggccctcccctgccaactccccttccctggccgcccactcaacccacacctctttcacgcaggacaggctgcccaccctgtccacgtgaagtgccaacgccctccccaccctgggccgagcccccacccctccctgggcccccaagtgagattgcacatttaactactgtaaggagaggagcggcgttggcaaatgtgaaccatgagaatatcagtgatactgatgagaataaactaaacgcctttgtaacaaaaaaaaaaaaaaaaaaaaaaaaaaaaaaaaaaaaaaaaaaaaaaaaaaaaaaaaaaaaaaaaaa

SEQ ID NO: 3715 - protein, 527 aa, Homo sapiens
MAQTLQMEIPNFGNSILECLNEQRLQGLYCDVSVVVKGHAFKAHRAVLAASSSYFRDLFNNSRSAVVELPAAVQPQSFQQILSFCYTGRLSMNVGDQFLLMYTAGFLQIQEIMEKGTEFFLKVSSPSCDSQGLHAEEAPSSEPQSPVAQTSGWPACSTPLPLVSRVKTEQQESDSVQCMPVAKRLWDSGQKEAGGGGNGSRKMAKFSTPDLAANRPHQPPPPQQAPVVAAAQPAVAAGAGQPAGGVAAAGGVVSGPSTSERTSPGTSSAYTSDSPGSYHNEEDEEEDGGEEGMDEQYRQICNMYTMYSMMNVGQTAEKVEALPEQVAPESRNRIRVRQDLASLPAELINQIGNRCHPKLYDEGDPSEKLELVTGTNVYITRAQLMNCHVSAGTRHKVLLRRLLASFFDRNTLANSCGTGIRSSTNDPRRKPLDSRVLHAVKYYCQNFAPNFKESEMNAIAADMCTNARRVVRKSWMPKVKVLKAEDDAYTTFISETGKIEPDMMGVEHGFETASHEGEAGPSAEALQ

SEQ ID NO: 3716 - DNA, 750 bp, Homo sapiens
atgtctctcgaagaccccttttttgtagtccgaggcgaggtgcagaaggcggtgaacacggcccgcgggctgtaccagcgctggtgcgagctcctgcaggaaagcgcggcggtcggacgcgaggagctggactggacgaccaatgagctgcggaatggcctgcgcagcatcgagtgggacctcgaggacctggaagagaccatcggtatagtggaagccaacccaggcaagttcaagctcccagccggggacctgcaggagagaaaggtgttcgtggagcggatgcgagaggcagtccaggaaatgaaggaccatatggtcagcccaacagccgtagcatttttggagaggaataacagagagatactcgcaggcaagccagctgcccagaagtcacccagcgacctgctggatgccagcgcagtctcggccacatctcgctacatcgaggagcagcaggccacacagcagctgatcatggatgaacaggatcaacagctggagatggtgtctgggagcatccaggttctgaagcacatgtccggccgcgttggagaagagctggacgagcagggcatcatgctggatgccttcgcccaagagatggaccacacccagtcccgcatggacggggtcctcaggaagttggccaaagtatcccacatgacgagtgaccgccgacagtggtgtgccatcgccgtgctagtgggggtgcttctcctcgttctcatcttactattctctctctga

SEQ ID NO: 3717 - protein, 249 aa, Homo sapiens
MSLEDPFFVVRGEVQKAVNTARGLYQRWCELLQESAAVGREELDWTTNELRNGLRSIEWDLEDLEETIGIVEANPGKFKLPAGDLQERKVFVERMREAVQEMKDHMVSPTAVAFLERNNREILAGKPAAQKSPSDLLDASAVSATSRYIEEQQATQQLIMDEQDQQLEMVSGSIQVLKHMSGRVGEELDEQGIMLDAFAQEMDHTQSRMDGVLRKLAKVSHMTSDRRQWCAIAVLVGVLLLVLILLFSL

SEQ ID NO: 3718 - DNA, 2088 bp, Homo sapiens
ggtccgagttcggaatttcggttcaaggcccagttcctcggattgttcctgcgcaacttcagtttcccttccaggcacgggcaatgagtgtttggccgcgacgagttggaaagcccggatgcgtccttcggttgggcggggtgtctcagtgacgtcactgggggtataaaagggcctgggtggcgggcgcctgggcagagcgtcctagcagtgtcactgcgtgggttggtttgtgtagagaggcgtgagcgagcccgttgtccggagtgcacctgctgcctgttctgtccctcccgggagcccccgccgctgtcgccgtcgagtcgccatggaagtgcagaaagaggcacagcgcatcatgaccctgtcggtgtggaagatgtatcactcccgcatgcagcgcggtggcctgcggctgcaccggagtctgcagctgtcgctggtcatgcgcagcgcccgggagctctacctctcggccaaggtggaggccctcgagcccgaggtgtcgttgccggccgccctcccctctgaccctcgcctgcacccgccccgagaagccgagtccacggccgagacagcgacccccgacggtgagcacccgtttccggagccaatggacacgcaggaggcgccgacagccgaggagacctccgcctgctgtgccccgcgccccgccaaagtcagccgcaaacgacgcagcagcagcctgagcgacggcggggacgctggactggtcccgagcaagaaagcccgtctggaagaaaaggaagaagaggagggagcgtcatccgaagtcgccgatcgcctgcagccccctccggcgcaagcggagggcgcctttcccaacctggcccgcgtcctgcagaggcgcttctccggcctcctgaactgcagccccgcggcccctccgacggcgccgcccgcgtgcgaggcaaagcccgcttgccgcccggcggacagcatgctcaacgtgctcgtgcgggccgtggtggccttctgaggaccccgagcggcgctgccggagcccagagcgcgcgtcgaaccgtcggcccgagggcgcagacctgaggcgaggccacccccctccatcctgggggaagcgcccgcgaaaaccgtggagagaagccgccgcccgggctgctgagaggcccggagagggactctgtccccggggagccatcgccttcagtgtgcagggacggcaccgaggagtctgagccgggggcgcgggcgccttccgcagagacctgcgcccacaggtgctgtcttagtggactgggacgtgaacctttcgctctccttctggactgggagaagggaggcttgggtgttgtgttttttgttttgtttgtttgtttgtttttaaagatctcctcagggtcggacttcattttgtactgtgggctgtgctggccctttcaaggtttttcaagagttggttttgcgtttccaacctcggagaattccaggcactccccttccccctccgctgacatacttgtataagcggtcatcgttgcgtcatggggcaggcgtggggagcttcctgtcgccttgcgtgggtgtggggcctgggaggaggtcctggggcgtgcacccgccctgggcagtggggaggagagtggcctgagttacttcacccccgcgtgctgctggttaatgtcccgcgtctctgcaccttcgggtgggagcggggactgatctactttcacattctcaagtttttctcatctgcattagaggtgcccagtaggttcccaggttccagcgtgcccctccctcagacacacggacacaatcagccgagaagttcctggtctgaatcacgagaatgtggaggggtggggggtgtcagtggaaaggcataaggctgagctgagaccagttgctggtgaaactgggccaatctggggaggggaacatccttgccagggagtttctgagggtctgctttgtttacctttcgtgcggtggattctttttaactccgtctacctggcgttttgttagaaatgtcagataggaaaataaaaaccatttgagtaaaaaaaaaaaaaaaaaaaaaaaaaaaaaaaaaaaaaaaaaaaa

SEQ ID NO: 3719 - protein, 223 aa, Homo sapiens
MEVQKEAQRIMTLSVWKMYHSRMQRGGLRLHRSLQLSLVMRSARELYLSAKVEALEPEVSLPAALPSDPRLHPPREAESTAETATPDGEHPFPEPMDTQEAPTAEETSACCAPRPAKVSRKRRSSSLSDGGDAGLVPSKKARLEEKEEEEGASSEVADRLQPPPAQAEGAFPNLARVLQRRFSGLLNCSPAAPPTAPPACEAKPACRPADSMLNVLVRAVVAF

SEQ ID NO: 3720 - DNA, 7807 bp, Homo sapiens
cgcaccctccttccgcccctccttctccggggtcagccaggaagatgtcccgagctgctatccccggctcggcccgggcagccgccttctgagcccccgacccgaggcgccgagccgccgccgcccgatgggctgggccgtggagcgtctccgcagtcgtagctccagccgccgcgctcccagccccggcagcctcagcatcagcggcggcggcggcggcggcggcggcgtcttccgcatcgttcgccgcagcgtaacccggagccctttgctctttgcagaatggcccgcttcggagacgagatgccggcccgctacgggggaggaggctccggggcagccgccggggtggtcgtgggcagcggaggcgggcgaggagccgggggcagccggcagggcgggcagcccggggcgcaaaggatgtacaagcagtcaatggcgcagagagcgcggaccatggcactctacaaccccatccccgtccgacagaactgcctcacggttaaccggtctctcttcctcttcagcgaagacaacgtggtgagaaaatacgccaaaaagatcaccgaatggcctccctttgaatatatgattttagccaccatcatagcgaattgcatcgtcctcgcactggagcagcatctgcctgatgatgacaagaccccgatgtctgaacggctggatgacacagaaccatacttcattggaattttttgtttcgaggctggaattaaaatcattgcccttgggtttgccttccacaaaggctcctacttgaggaatggctggaatgtcatggactttgtggtggtgctaacgggcatcttggcgacagttgggacggagtttgacctacggacgctgagggcagttcgagtgctgcggccgctcaagctggtgtctggaatcccaagtttacaagtcgtcctgaagtcgatcatgaaggcgatgatccctttgctgcagatcggcctcctcctattttttgcaatccttatttttgcaatcatagggttagaattttatatgggaaaatttcataccacctgctttgaagaggggacagatgacattcagggtgagtctccggctccatgtgggacagaagagcccgcccgcacctgccccaatgggaccaaatgtcagccctactgggaagggcccaacaacgggatcactcagttcgacaacatcctgtttgcagtgctgactgttttccagtgcataaccatggaagggtggactgatctcctctacaatagcaacgatgcctcagggaacacttggaactggttgtacttcatccccctcatcatcatcggctccttttttatgctgaaccttgtgctgggtgtgctgtcaggggagtttgccaaagaaagggaacgggtggagaaccggcgggcttttctgaagctgaggcggcaacaacagattgaacgtgagctcaatgggtacatggaatggatctcaaaagcagaagaggtgatcctcgccgaggatgaaactgacggggagcagaggcatccctttgatggagctctgcggagaaccaccataaagaaaagcaagacagatttgctcaaccccgaagaggctgaggatcagctggctgatatagcctctgtgggttctcccttcgcccgagccagcattaaaagtgccaagctggagaactcgaccttttttcacaaaaaggagaggaggatgcgtttctacatccgccgcatggtcaaaactcaggccttctactggactgtactcagtttggtagctctcaacacgctgtgtgttgctattgttcactacaaccagcccgagtggctctccgacttcctttactatgcagaattcattttcttaggactctttatgtccgaaatgtttataaaaatgtacgggcttgggacgcggccttacttccactcttccttcaactgctttgactgtggggttatcattgggagcatcttcgaggtcatctgggctgtcataaaacctggcacatcctttggaatcagcgtgttacgagccctcaggttattgcgtattttcaaagtcacaaagtactgggcatctctcagaaacctggtcgtctctctcctcaactccatgaagtccatcatcagcctgttgtttctccttttcctgttcattgtcgtcttcgcccttttgggaatgcaactcttcggcggccagtttaatttcgatgaagggactcctcccaccaacttcgatacttttccagcagcaataatgacggtgtttcagatcctgacgggcgaagactggaacgaggtcatgtacgacgggatcaagtctcaggggggcgtgcagggcggcatggtgttctccatctatttcattgtactgacgctctttgggaactacaccctcctgaatgtgttcttggccatcgctgtggacaatctggccaacgcccaggagctcaccaaggacgagcaagaggaagaagaagcagcgaaccagaaacttgccctacagaaagccaaggaggtggcagaagtgagtcctctgtccgcggccaacatgtctatagctgtgaaagagcaacagaagaatcaaaagccagccaagtccgtgtgggagcagcggaccagtgagatgcgaaagcagaacttgctggccagccgggaggccctgtataacgaaatggacccggacgagcgctggaaggctgcctacacgcggcacctgcggccagacatgaagacgcacttggaccggccgctggtggtggacccgcaggagaaccgcaacaacaacaccaacaagagccgggcggccgagcccaccgtggaccagcgcctcggccagcagcgcgccgaggacttcctcaggaaacaggcccgctaccacgatcgggcccgggaccccagcggctcggcgggcctggacgcacggaggccctgggcgggaagccaggaggccgagctgagccgggagggaccctacggccgcgagtcggaccaccacgcccgggagggcagcctggagcaacccgggttctgggagggcgaggccgagcgaggcaaggccggggacccccaccggaggcacgtgcaccggcaggggggcagcagggagagccgcagcgggtccccgcgcacgggcgcggacggggagcatcgacgtcatcgcgcgcaccgcaggcccggggaggagggtccggaggacaaggcggagcggagggcgcggcaccgcgagggcagccggccggcccggggcggcgagggcgagggcgagggccccgacgggggcgagcgcaggagaaggcaccggcatggcgctccagccacgtacgagggggacgcgcggagggaggacaaggagcggaggcatcggaggaggaaagagaaccagggctccggggtccctgtgtcgggccccaacctgtcaaccacccggccaatccagcaggacctgggccgccaagacccacccctggcagaggatattgacaacatgaagaacaacaagctggccaccgcggagtcggccgctccccacggcagccttggccacgccggcctgccccagagcccagccaagatgggaaacagcaccgaccccggccccatgctggccatccctgccatggccaccaacccccagaacgccgccagccgccggacgcccaacaacccggggaacccatccaatcccggcccccccaagacccccgagaatagccttatcgtcaccaaccccagcggcacccagaccaattcagctaagactgccaggaaacccgaccacaccacagtggacatccccccagcctgcccaccccccctcaaccacaccgtcgtacaagtgaacaaaaacgccaacccagacccactgccaaaaaaagaggaagagaagaaggaggaggaggaagacgaccgtggggaagacggccctaagccaatgcctccctatagctccatgttcatcctgtccacgaccaacccccttcgccgcctgtgccattacatcctgaacctgcgctactttgagatgtgcatcctcatggtcattgccatgagcagcatcgccctggccgccgaggaccctgtgcagcccaacgcacctcggaacaacgtgctgcgatactttgactacgtttttacaggcgtctttacctttgagatggtgatcaagatgattgacctggggctcgtcctgcatcagggtgcctacttccgtgacctctggaatattctcgacttcatagtggtcagtggggccctggtagcctttgccttcactggcaatagcaaaggaaaagacatcaacacgattaaatccctccgagtcctccgggtgctacgacctcttaaaaccatcaagcggctgccaaagctcaaggctgtgtttgactgtgtggtgaactcacttaaaaacgtcttcaacatcctcatcgtctacatgctattcatgttcatcttcgccgtggtggctgtgcagctcttcaaggggaaattcttccactgcactgacgagtccaaagagtttgagaaagattgtcgaggcaaatacctcctctacgagaagaatgaggtgaaggcgcgagaccgggagtggaagaagtatgaattccattacgacaatgtgctgtgggctctgctgaccctcttcaccgtgtccacgggagaaggctggccacaggtcctcaagcattcggtggacgccacctttgagaaccagggccccagccccgggtaccgcatggagatgtccattttctacgtcgtctactttgtggtgttccccttcttctttgtcaatatctttgtggccttgatcatcatcaccttccaggagcaaggggacaagatgatggaggaatacagcctggagaaaaatgagagggcctgcattgatttcgccatcagcgccaagccgctgacccgacacatgccgcagaacaagcagagcttccagtaccgcatgtggcagttcgtggtgtctccgcctttcgagtacacgatcatggccatgatcgccctcaacaccatcgtgcttatgatgaagttctatggggcttctgttgcttatgaaaatgccctgcgggtgttcaacatcgtcttcacctccctcttctctctggaatgtgtgctgaaagtcatggcttttgggattctgaattatttccgcgatgcctggaacatcttcgactttgtgactgttctgggcagcatcaccgatatcctcgtgactgagtttgggaataacttcatcaacctgagctttctccgcctcttccgagctgcccggctcatcaaacttctccgtcagggttacaccatccgcattcttctctggacctttgtgcagtccttcaaggccctgccttatgtctgtctgctgatcgccatgctcttcttcatctatgccatcattgggatgcaggtgtttggtaacattggcatcgacgtggaggacgaggacagtgatgaagatgagttccaaatcactgagcacaataacttccggaccttcttccaggccctcatgcttctcttccggagtgccaccggggaagcttggcacaacatcatgctttcctgcctcagcgggaaaccgtgtgataagaactctggcatcctgactcgagagtgtggcaatgaatttgcttatttttactttgtttccttcatcttcctctgctcgtttctgatgctgaatctctttgtcgccgtcatcatggacaactttgagtacctcacccgagactcctccatcctgggcccccaccacctggatgagtacgtgcgtgtctgggccgagtatgaccccgcagcttgcggtcggattcattataaggatatgtacagtttattacgagtaatatctccccctctcggcttaggcaagaaatgtcctcatagggttgcttgcaagcggcttctgcggatggacctgcccgtcgcagatgacaacaccgtccacttcaattccaccctcatggctctgatccgcacagccctggacatcaagattgccaagggaggagccgacaaacagcagatggacgctgagctgcggaaggagatgatggcgatttggcccaatctgtcccagaagacgctagacctgctggtcacacctcacaagtccacggacctcaccgtggggaagatctacgcagccatgatgatcatggagtactaccggcagagcaaggccaagaagctgcaggccatgcgcgaggagcaggaccggacacccctcatgttccagcgcatggagcccccgtccccaacgcaggaagggggacctggccagaacgccctcccctccacccagctggacccaggaggagccctgatggctcacgaaagcggcctcaaggagagcccgtcctgggtgacccagcgtgcccaggagatgttccagaagacgggcacatggagtccggaacaaggcccccctaccgacatgcccaacagccagcctaactctcagtccgtggagatgcgagagatgggcagagatggctactccgacagcgagcactacctccccatggaaggccagggccgggctgcctccatgccccgcctccctgcagagaaccagaggagaaggggccggccacgtgggaataacctcagtaccatctcagacaccagccccatgaagcgttcagcctccgtgctgggccccaaggcccgacgcctggacgattactcgctggagcgggtcccgcccgaggagaaccagcggcaccaccagcggcgccgcgaccgcagccaccgcgcctctgagcgctccctgggccgctacaccgatgtggacacaggcttggggacagacctgagcatgaccacccaatccggggacctgccgtcgaaggagcgggaccaggagcggggccggcccaaggatcggaagcatcgacagcaccaccaccaccaccaccaccaccaccatcccccgccccccgacaaggaccgctatgcccaggaacggccggaccacggccgggcacgggctcgggaccagcgctggtcccgctcgcccagcgagggccgagagcacatggcgcaccggcagtagttccgtaagtggaagcccagccccctcaacatctggtaccagcactccgcggcggggccgccgccagctcccccagaccccctccaccccccggccacacgtgtcctattcccctgtgatccgtaaggccggcggctcggggcccccgcagcagcagcagcagcagcagcagcagcagcaggcggtggccaggccgggccgggcggccaccagcggccctcggaggtacccaggccccacggccgagcctctggccggagatcggccgcccacggggggccacagcagcggccgctcgcccaggatggagaggcgggtcccaggcccggcccggagcgagtcccccagggcctgtcgacacggcggggcccggtggccggcatctggcccgcacgtgtccgaggggcccccgggtccccggcaccatggctactaccggggctccgactacgacgaggccgatggcccgggcagcgggggcggcgaggaggccatggccggggcctacgacgcgccaccccccgtacgacacgcgtcctcgggcgccaccgggcgctcgcccaggactccccgggcctcgggcccggcctgcgcctcgccttctcggcacggccggcgactccccaacggctactacccggcgcacggactggccaggccccgcgggccgggctccaggaagggcctgcacgaaccctacagcgagagtgacgatgattggtgctaagcccgggcgagg

SEQ ID NO: 3721 - protein, 2261 aa, Homo sapiens
MARFGDEMPARYGGGGSGAAAGVVVGSGGGRGAGGSRQGGQPGAQRMYKQSMAQRARTMALYNPIPVRQNCLTVNRSLFLFSEDNVVRKYAKKITEWPPFEYMILATIIANCIVLALEQHLPDDDKTPMSERLDDTEPYFIGIFCFEAGIKIIALGFAFHKGSYLRNGWNVMDFVVVLTGILATVGTEFDLRTLRAVRVLRPLKLVSGIPSLQVVLKSIMKAMIPLLQIGLLLFFAILIFAIIGLEFYMGKFHTTCFEEGTDDIQGESPAPCGTEEPARTCPNGTKCQPYWEGPNNGITQFDNILFAVLTVFQCITMEGWTDLLYNSNDASGNTWNWLYFIPLIIIGSFFMLNLVLGVLSGEFAKERERVENRRAFLKLRRQQQIERELNGYMEWISKAEEVILAEDETDGEQRHPFDGALRRTTIKKSKTDLLNPEEAEDQLADIASVGSPFARASIKSAKLENSTFFHKKERRMRFYIRRMVKTQAFYWTVLSLVALNTLCVAIVHYNQPEWLSDFLYYAEFIFLGLFMSEMFIKMYGLGTRPYFHSSFNCFDCGVIIGSIFEVIWAVIKPGTSFGISVLRALRLLRIFKVTKYWASLRNLVVSLLNSMKSIISLLFLLFLFIVVFALLGMQLFGGQFNFDEGTPPTNFDTFPAAIMTVFQILTGEDWNEVMYDGIKSQGGVQGGMVFSIYFIVLTLFGNYTLLNVFLAIAVDNLANAQELTKDEQEEEEAANQKLALQKAKEVAEVSPLSAANMSIAVKEQQKNQKPAKSVWEQRTSEMRKQNLLASREALYNEMDPDERWKAAYTRHLRPDMKTHLDRPLVVDPQENRNNNTNKSRAAEPTVDQRLGQQRAEDFLRKQARYHDRARDPSGSAGLDARRPWAGSQEAELSREGPYGRESDHHAREGSLEQPGFWEGEAERGKAGDPHRRHVHRQGGSRESRSGSPRTGADGEHRRHRAHRRPGEEGPEDKAERRARHREGSRPARGGEGEGEGPDGGERRRRHRHGAPATYEGDARREDKERRHRRRKENQGSGVPVSGPNLSTTRPIQQDLGRQDPPLAEDIDNMKNNKLATAESAAPHGSLGHAGLPQSPAKMGNSTDPGPMLAIPAMATNPQNAASRRTPNNPGNPSNPGPPKTPENSLIVTNPSGTQTNSAKTARKPDHTTVDIPPACPPPLNHTVVQVNKNANPDPLPKKEEEKKEEEEDDRGEDGPKPMPPYSSMFILSTTNPLRRLCHYILNLRYFEMCILMVIAMSSIALAAEDPVQPNAPRNNVLRYFDYVFTGVFTFEMVIKMIDLGLVLHQGAYFRDLWNILDFIVVSGALVAFAFTGNSKGKDINTIKSLRVLRVLRPLKTIKRLPKLKAVFDCVVNSLKNVFNILIVYMLFMFIFAVVAVQLFKGKFFHCTDESKEFEKDCRGKYLLYEKNEVKARDREWKKYEFHYDNVLWALLTLFTVSTGEGWPQVLKHSVDATFENQGPSPGYRMEMSIFYVVYFVVFPFFFVNIFVALIIITFQEQGDKMMEEYSLEKNERACIDFAISAKPLTRHMPQNKQSFQYRMWQFVVSPPFEYTIMAMIALNTIVLMMKFYGASVAYENALRVFNIVFTSLFSLECVLKVMAFGILNYFRDAWNIFDFVTVLGSITDILVTEFGNNFINLSFLRLFRAARLIKLLRQGYTIRILLWTFVQSFKALPYVCLLIAMLFFIYAIIGMQVFGNIGIDVEDEDSDEDEFQITEHNNFRTFFQALMLLFRSATGEAWHNIMLSCLSGKPCDKNSGILTRECGNEFAYFYFVSFIFLCSFLMLNLFVAVIMDNFEYLTRDSSILGPHHLDEYVRVWAEYDPAACGRIHYKDMYSLLRVISPPLGLGKKCPHRVACKRLLRMDLPVADDNTVHFNSTLMALIRTALDIKIAKGGADKQQMDAELRKEMMAIWPNLSQKTLDLLVTPHKSTDLTVGKIYAAMMIMEYYRQSKAKKLQAMREEQDRTPLMFQRMEPPSPTQEGGPGQNALPSTQLDPGGALMAHESGLKESPSWVTQRAQEMFQKTGTWSPEQGPPTDMPNSQPNSQSVEMREMGRDGYSDSEHYLPMEGQGRAASMPRLPAENQRRRGRPRGNNLSTISDTSPMKRSASVLGPKARRLDDYSLERVPPEENQRHHQRRRDRSHRASERSLGRYTDVDTGLGTDLSMTTQSGDLPSKERDQERGRPKDRKHRQHHHHHHHHHHPPPPDKDRYAQERPDHGRARARDQRWSRSPSEGREHMAHRQ

SEQ ID NO: 3722 - DNA, 7812 bp, Homo sapiens
cgcaccctccttccgcccctccttctccggggtcagccaggaagatgtcccgagctgctatccccggctcggcccgggcagccgccttctgagcccccgacccgaggcgccgagccgccgccgcccgatgggctgggccgtggagcgtctccgcagtcgtagctccagccgccgcgctcccagccccggcagcctcagcatcagcggcggcggcggcggcggcggcggcgtcttccgcatcgttcgccgcagcgtaacccggagccctttgctctttgcagaatggcccgcttcggagacgagatgccggcccgctacgggggaggaggctccggggcagccgccggggtggtcgtgggcagcggaggcgggcgaggagccgggggcagccggcagggcgggcagcccggggcgcaaaggatgtacaagcagtcaatggcgcagagagcgcggaccatggcactctacaaccccatccccgtccgacagaactgcctcacggttaaccggtctctcttcctcttcagcgaagacaacgtggtgagaaaatacgccaaaaagatcaccgaatggcctccctttgaatatatgattttagccaccatcatagcgaattgcatcgtcctcgcactggagcagcatctgcctgatgatgacaagaccccgatgtctgaacggctggatgacacagaaccatacttcattggaattttttgtttcgaggctggaattaaaatcattgcccttgggtttgccttccacaaaggctcctacttgaggaatggctggaatgtcatggactttgtggtggtgctaacgggcatcttggcgacagttgggacggagtttgacctacggacgctgagggcagttcgagtgctgcggccgctcaagctggtgtctggaatcccaagtttacaagtcgtcctgaagtcgatcatgaaggcgatgatccctttgctgcagatcggcctcctcctattttttgcaatccttatttttgcaatcatagggttagaattttatatgggaaaatttcataccacctgctttgaagaggggacagatgacattcagggtgagtctccggctccatgtgggacagaagagcccgcccgcacctgccccaatgggaccaaatgtcagccctactgggaagggcccaacaacgggatcactcagttcgacaacatcctgtttgcagtgctgactgttttccagtgcataaccatggaagggtggactgatctcctctacaatagcaacgatgcctcagggaacacttggaactggttgtacttcatccccctcatcatcatcggctccttttttatgctgaaccttgtgctgggtgtgctgtcaggggagtttgccaaagaaagggaacgggtggagaaccggcgggcttttctgaagctgaggcggcaacaacagattgaacgtgagctcaatgggtacatggaatggatctcaaaagcagaagaggtgatcctcgccgaggatgaaactgacggggagcagaggcatccctttgatggagctctgcggagaaccaccataaagaaaagcaagacagatttgctcaaccccgaagaggctgaggatcagctggctgatatagcctctgtgggttctcccttcgcccgagccagcattaaaagtgccaagctggagaactcgaccttttttcacaaaaaggagaggaggatgcgtttctacatccgccgcatggtcaaaactcaggccttctactggactgtactcagtttggtagctctcaacacgctgtgtgttgctattgttcactacaaccagcccgagtggctctccgacttcctttactatgcagaattcattttcttaggactctttatgtccgaaatgtttataaaaatgtacgggcttgggacgcggccttacttccactcttccttcaactgctttgactgtggggttatcattgggagcatcttcgaggtcatctgggctgtcataaaacctggcacatcctttggaatcagcgtgttacgagccctcaggttattgcgtattttcaaagtcacaaagtactgggcatctctcagaaacctggtcgtctctctcctcaactccatgaagtccatcatcagcctgttgtttctccttttcctgttcattgtcgtcttcgcccttttgggaatgcaactcttcggcggccagtttaatttcgatgaagggactcctcccaccaacttcgatacttttccagcagcaataatgacggtgtttcagatcctgacgggcgaagactggaacgaggtcatgtacgacgggatcaagtctcaggggggcgtgcagggcggcatggtgttctccatctatttcattgtactgacgctctttgggaactacaccctcctgaatgtgttcttggccatcgctgtggacaatctggccaacgcccaggagctcaccaaggacgagcaagaggaagaagaagcagcgaaccagaaacttgccctacagaaagccaaggaggtggcagaagtgagtcctctgtccgcggccaacatgtctatagctgtgaaagagcaacagaagaatcaaaagccagccaagtccgtgtgggagcagcggaccagtgagatgcgaaagcagaacttgctggccagccgggaggccctgtataacgaaatggacccggacgagcgctggaaggctgcctacacgcggcacctgcggccagacatgaagacgcacttggaccggccgctggtggtggacccgcaggagaaccgcaacaacaacaccaacaagagccgggcggccgagcccaccgtggaccagcgcctcggccagcagcgcgccgaggacttcctcaggaaacaggcccgctaccacgatcgggcccgggaccccagcggctcggcgggcctggacgcacggaggccctgggcgggaagccaggaggccgagctgagccgggagggaccctacggccgcgagtcggaccaccacgcccgggagggcagcctggagcaacccgggttctgggagggcgaggccgagcgaggcaaggccggggacccccaccggaggcacgtgcaccggcaggggggcagcagggagagccgcagcgggtccccgcgcacgggcgcggacggggagcatcgacgtcatcgcgcgcaccgcaggcccggggaggagggtccggaggacaaggcggagcggagggcgcggcaccgcgagggcagccggccggcccggggcggcgagggcgagggcgagggccccgacgggggcgagcgcaggagaaggcaccggcatggcgctccagccacgtacgagggggacgcgcggagggaggacaaggagcggaggcatcggaggaggaaagagaaccagggctccggggtccctgtgtcgggccccaacctgtcaaccacccggccaatccagcaggacctgggccgccaagacccacccctggcagaggatattgacaacatgaagaacaacaagctggccaccgcggagtcggccgctccccacggcagccttggccacgccggcctgccccagagcccagccaagatgggaaacagcaccgaccccggccccatgctggccatccctgccatggccaccaacccccagaacgccgccagccgccggacgcccaacaacccggggaacccatccaatcccggcccccccaagacccccgagaatagccttatcgtcaccaaccccagcggcacccagaccaattcagctaagactgccaggaaacccgaccacaccacagtggacatccccccagcctgcccaccccccctcaaccacaccgtcgtacaagtgaacaaaaacgccaacccagacccactgccaaaaaaagaggaagagaagaaggaggaggaggaagacgaccgtggggaagacggccctaagccaatgcctccctatagctccatgttcatcctgtccacgaccaacccccttcgccgcctgtgccattacatcctgaacctgcgctactttgagatgtgcatcctcatggtcattgccatgagcagcatcgccctggccgccgaggaccctgtgcagcccaacgcacctcggaacaacgtgctgcgatactttgactacgtttttacaggcgtctttacctttgagatggtgatcaagatgattgacctggggctcgtcctgcatcagggtgcctacttccgtgacctctggaatattctcgacttcatagtggtcagtggggccctggtagcctttgccttcactggcaatagcaaaggaaaagacatcaacacgattaaatccctccgagtcctccgggtgctacgacctcttaaaaccatcaagcggctgccaaagctcaaggctgtgtttgactgtgtggtgaactcacttaaaaacgtcttcaacatcctcatcgtctacatgctattcatgttcatcttcgccgtggtggctgtgcagctcttcaaggggaaattcttccactgcactgacgagtccaaagagtttgagaaagattgtcgaggcaaatacctcctctacgagaagaatgaggtgaaggcgcgagaccgggagtggaagaagtatgaattccattacgacaatgtgctgtgggctctgctgaccctcttcaccgtgtccacgggagaaggctggccacaggtcctcaagcattcggtggacgccacctttgagaaccagggccccagccccgggtaccgcatggagatgtccattttctacgtcgtctactttgtggtgttccccttcttctttgtcaatatctttgtggccttgatcatcatcaccttccaggagcaaggggacaagatgatggaggaatacagcctggagaaaaatgagagggcctgcattgatttcgccatcagcgccaagccgctgacccgacacatgccgcagaacaagcagagcttccagtaccgcatgtggcagttcgtggtgtctccgcctttcgagtacacgatcatggccatgatcgccctcaacaccatcgtgcttatgatgaagttctatggggcttctgttgcttatgaaaatgccctgcgggtgttcaacatcgtcttcacctccctcttctctctggaatgtgtgctgaaagtcatggcttttgggattctgaattatttccgcgatgcctggaacatcttcgactttgtgactgttctgggcagcatcaccgatatcctcgtgactgagtttgggaataacttcatcaacctgagctttctccgcctcttccgagctgcccggctcatcaaacttctccgtcagggttacaccatccgcattcttctctggacctttgtgcagtccttcaaggccctgccttatgtctgtctgctgatcgccatgctcttcttcatctatgccatcattgggatgcaggtgtttggtaacattggcatcgacgtggaggacgaggacagtgatgaagatgagttccaaatcactgagcacaataacttccggaccttcttccaggccctcatgcttctcttccggagtgccaccggggaagcttggcacaacatcatgctttcctgcctcagcgggaaaccgtgtgataagaactctggcatcctgactcgagagtgtggcaatgaatttgcttatttttactttgtttccttcatcttcctctgctcgtttctgatgctgaatctctttgtcgccgtcatcatggacaactttgagtacctcacccgagactcctccatcctgggcccccaccacctggatgagtacgtgcgtgtctgggccgagtatgaccccgcagcttgcggtcggattcattataaggatatgtacagtttattacgagtaatatctccccctctcggcttaggcaagaaatgtcctcatagggttgcttgcaagcggcttctgcggatggacctgcccgtcgcagatgacaacaccgtccacttcaattccaccctcatggctctgatccgcacagccctggacatcaagattgccaagggaggagccgacaaacagcagatggacgctgagctgcggaaggagatgatggcgatttggcccaatctgtcccagaagacgctagacctgctggtcacacctcacaagtccacggacctcaccgtggggaagatctacgcagccatgatgatcatggagtactaccggcagagcaaggccaagaagctgcaggccatgcgcgaggagcaggaccggacacccctcatgttccagcgcatggagcccccgtccccaacgcaggaagggggacctggccagaacgccctcccctccacccagctggacccaggaggagccctgatggctcacgaaagcggcctcaaggagagcccgtcctgggtgacccagcgtgcccaggagatgttccagaagacgggcacatggagtccggaacaaggcccccctaccgacatgcccaacagccagcctaactctcagtccgtggagatgcgagagatgggcagagatggctactccgacagcgagcactacctccccatggaaggccagggccgggctgcctccatgccccgcctccctgcagagaaccagaggagaaggggccggccacgtgggaataacctcagtaccatctcagacaccagccccatgaagcgttcagcctccgtgctgggccccaaggcccgacgcctggacgattactcgctggagcgggtcccgcccgaggagaaccagcggcaccaccagcggcgccgcgaccgcagccaccgcgcctctgagcgctccctgggccgctacaccgatgtggacacaggcttggggacagacctgagcatgaccacccaatccggggacctgccgtcgaaggagcgggaccaggagcggggccggcccaaggatcggaagcatcgacagcaccaccaccaccaccaccaccaccaccatcccccgccccccgacaaggaccgctatgcccaggaacggccggaccacggccgggcacgggctcgggaccagcgctggtcccgctcgcccagcgagggccgagagcacatggcgcaccggcagggcagtagttccgtaagtggaagcccagccccctcaacatctggtaccagcactccgcggcggggccgccgccagctcccccagaccccctccaccccccggccacacgtgtcctattcccctgtgatccgtaaggccggcggctcggggcccccgcagcagcagcagcagcagcagcagcagcagcaggcggtggccaggccgggccgggcggccaccagcggccctcggaggtacccaggccccacggccgagcctctggccggagatcggccgcccacggggggccacagcagcggccgctcgcccaggatggagaggcgggtcccaggcccggcccggagcgagtcccccagggcctgtcgacacggcggggcccggtggccggcatctggcccgcacgtgtccgaggggcccccgggtccccggcaccatggctactaccggggctccgactacgacgaggccgatggcccgggcagcgggggcggcgaggaggccatggccggggcctacgacgcgccaccccccgtacgacacgcgtcctcgggcgccaccgggcgctcgcccaggactccccgggcctcgggcccggcctgcgcctcgccttctcggcacggccggcgactccccaacggctactacccggcgcacggactggccaggccccgcgggccgggctccaggaagggcctgcacgaaccctacagcgagagtgacgatgattggtgctaagcccgggcgagg

SEQ ID NO: 3723 - protein, 2505 aa, Homo sapiens
MARFGDEMPARYGGGGSGAAAGVVVGSGGGRGAGGSRQGGQPGAQRMYKQSMAQRARTMALYNPIPVRQNCLTVNRSLFLFSEDNVVRKYAKKITEWPPFEYMILATIIANCIVLALEQHLPDDDKTPMSERLDDTEPYFIGIFCFEAGIKIIALGFAFHKGSYLRNGWNVMDFVVVLTGILATVGTEFDLRTLRAVRVLRPLKLVSGIPSLQVVLKSIMKAMIPLLQIGLLLFFAILIFAIIGLEFYMGKFHTTCFEEGTDDIQGESPAPCGTEEPARTCPNGTKCQPYWEGPNNGITQFDNILFAVLTVFQCITMEGWTDLLYNSNDASGNTWNWLYFIPLIIIGSFFMLNLVLGVLSGEFAKERERVENRRAFLKLRRQQQIERELNGYMEWISKAEEVILAEDETDGEQRHPFDGALRRTTIKKSKTDLLNPEEAEDQLADIASVGSPFARASIKSAKLENSTFFHKKERRMRFYIRRMVKTQAFYWTVLSLVALNTLCVAIVHYNQPEWLSDFLYYAEFIFLGLFMSEMFIKMYGLGTRPYFHSSFNCFDCGVIIGSIFEVIWAVIKPGTSFGISVLRALRLLRIFKVTKYWASLRNLVVSLLNSMKSIISLLFLLFLFIVVFALLGMQLFGGQFNFDEGTPPTNFDTFPAAIMTVFQILTGEDWNEVMYDGIKSQGGVQGGMVFSIYFIVLTLFGNYTLLNVFLAIAVDNLANAQELTKDEQEEEEAANQKLALQKAKEVAEVSPLSAANMSIAVKEQQKNQKPAKSVWEQRTSEMRKQNLLASREALYNEMDPDERWKAAYTRHLRPDMKTHLDRPLVVDPQENRNNNTNKSRAAEPTVDQRLGQQRAEDFLRKQARYHDRARDPSGSAGLDARRPWAGSQEAELSREGPYGRESDHHAREGSLEQPGFWEGEAERGKAGDPHRRHVHRQGGSRESRSGSPRTGADGEHRRHRAHRRPGEEGPEDKAERRARHREGSRPARGGEGEGEGPDGGERRRRHRHGAPATYEGDARREDKERRHRRRKENQGSGVPVSGPNLSTTRPIQQDLGRQDPPLAEDIDNMKNNKLATAESAAPHGSLGHAGLPQSPAKMGNSTDPGPMLAIPAMATNPQNAASRRTPNNPGNPSNPGPPKTPENSLIVTNPSGTQTNSAKTARKPDHTTVDIPPACPPPLNHTVVQVNKNANPDPLPKKEEEKKEEEEDDRGEDGPKPMPPYSSMFILSTTNPLRRLCHYILNLRYFEMCILMVIAMSSIALAAEDPVQPNAPRNNVLRYFDYVFTGVFTFEMVIKMIDLGLVLHQGAYFRDLWNILDFIVVSGALVAFAFTGNSKGKDINTIKSLRVLRVLRPLKTIKRLPKLKAVFDCVVNSLKNVFNILIVYMLFMFIFAVVAVQLFKGKFFHCTDESKEFEKDCRGKYLLYEKNEVKARDREWKKYEFHYDNVLWALLTLFTVSTGEGWPQVLKHSVDATFENQGPSPGYRMEMSIFYVVYFVVFPFFFVNIFVALIIITFQEQGDKMMEEYSLEKNERACIDFAISAKPLTRHMPQNKQSFQYRMWQFVVSPPFEYTIMAMIALNTIVLMMKFYGASVAYENALRVFNIVFTSLFSLECVLKVMAFGILNYFRDAWNIFDFVTVLGSITDILVTEFGNNFINLSFLRLFRAARLIKLLRQGYTIRILLWTFVQSFKALPYVCLLIAMLFFIYAIIGMQVFGNIGIDVEDEDSDEDEFQITEHNNFRTFFQALMLLFRSATGEAWHNIMLSCLSGKPCDKNSGILTRECGNEFAYFYFVSFIFLCSFLMLNLFVAVIMDNFEYLTRDSSILGPHHLDEYVRVWAEYDPAACGRIHYKDMYSLLRVISPPLGLGKKCPHRVACKRLLRMDLPVADDNTVHFNSTLMALIRTALDIKIAKGGADKQQMDAELRKEMMAIWPNLSQKTLDLLVTPHKSTDLTVGKIYAAMMIMEYYRQSKAKKLQAMREEQDRTPLMFQRMEPPSPTQEGGPGQNALPSTQLDPGGALMAHESGLKESPSWVTQRAQEMFQKTGTWSPEQGPPTDMPNSQPNSQSVEMREMGRDGYSDSEHYLPMEGQGRAASMPRLPAENQRRRGRPRGNNLSTISDTSPMKRSASVLGPKARRLDDYSLERVPPEENQRHHQRRRDRSHRASERSLGRYTDVDTGLGTDLSMTTQSGDLPSKERDQERGRPKDRKHRQHHHHHHHHHHPPPPDKDRYAQERPDHGRARARDQRWSRSPSEGREHMAHRQGSSSVSGSPAPSTSGTSTPRRGRRQLPQTPSTPRPHVSYSPVIRKAGGSGPPQQQQQQQQQQQAVARPGRAATSGPRRYPGPTAEPLAGDRPPTGGHSSGRSPRMERRVPGPARSESPRACRHGGARWPASGPHVSEGPPGPRHHGYYRGSDYDEADGPGSGGGEEAMAGAYDAPPPVRHASSGATGRSPRTPRASGPACASPSRHGRRLPNGYYPAHGLARPRGPGSRKGLHEPYSESDDDWC

SEQ ID NO: 3724 - DNA, 1042 bp, Homo sapiens
tctgctcagaaaactgctcttcttggcacccacttttctccctcctgtctctgggccacccttcttctttccactgggtgggccatggatgcatggacttcagatagctcggacccctgggtgctgacgagatgggaccctcgggacccctggaggactcgcagtgctgaccactagccgcgtcgcctgagccccagcgctgatgcgatacagtttccccctcactgtgctggagggagaagaccctgggatttctgagcgaggcccgtggatgttgaagtcttcctgggtccccgactccatgctctcgcgccccagttactatgacgccctgcacaaccgcagctcggggcacgcccagcgccctgcaggacactcggcctccccggctcagcatctgcttcgagggcccccctctgaggcggcggggcggcgtggtggatcaccgagatgtcatcttggcccaccaggcccacaaaatccacagcaccccccaggccaggaggaaagaatgggagaagctaccagaggatgtgcttcacccaaacaagggagtaaaccaagaagagggaaacagagaacactggacttaagaaatccaacaatgagaagcaaagggaatctcctggatgatgataaagagagagcccaggatgaaagctgtatgccagggaaagtcctgattagaccatgtgacaagtcttcaggaaagactgcttctggatgataaaatgaactgaatacctgttaagagacttggggggtcaaatttgcaataagtaccaaacaaagaagattaaaaaatgataagtcccaagggaaacaatatgttgtaaagaaaaagtagctatagtttgttcatgacataactgtaacttgccttgtacatgataatataaacaccgaatcttcctcactttgtgaaagaacaatattgggcaaatgcgcaggttttggaaagttccatgtgtagggggatggagggagaaattagcaaaatcctccttttctatagctaatacctataaagtgctacaacacc

SEQ ID NO: 3725 - protein, 174 aa, Homo sapiens [sequence omitted]

SEQ ID NO: 3726 - DNA, 1061 bp, Homo sapiens
gagacggactcttgctatgttgcccaggctggtcttgaactcctggcctcaagcaatcctcctgcctcagcctcccaaagcacggggattacaaaccctgctgagggatgcccaagaagttccagggtgagaacaccaagtcggcagcggcccgggcacggagggcagaggccaaggcggccgctgatgccaagaagcagaaggagctggaggatgcctactggaaggacgacgacaaacacgtcatgaggaaggagcagcgcaaggaggagaaggagaagcggcgcctcgaccagctggaacgtaagaaggagacgcagcgcctactggaggaggaggactccaagctcaagggcggcaaggcgccgcgggtggccacgtccagcaaggtcacccgggcccagatcgaggacacgctgcgccgagaccatcagctcagggaggccccggacacagccgagaaagccaagagccatctggaggtgccgctggaggagaacgtgaaccgccgcgtgctggaggagggcagcgtggaggcgcgcaccatcgaggacgccattgcagtgctcagcgtggcggaggaggcggccgaccggcacccagaaagacgcatgcgggcagccttcacagcctttgaggaagcccagctgccgcggctcaaacaagagaaccccaacatgcggctgtcgcagctgaaacagctgctcaagaaggagtggctccgctctcctgacaaccccatgaaccagcgggccgtgcccttcaatgcccccaagtgagcccagaacttggggagccagttcacccacggggtggtccaggtcacgactctgcacgcccttaggccaggtcagctgcgagggtcacagagcgttccgggggccaaggcgccgggccccggggccatgctcttatcaccagccacccgtcctcccgccagagggtccctgccccgagtgacaccccatcccctcccatcccccggcgcgtgtgtgtagagcctcagggctgagtgcccaataaaggtggcggcaaggctaaaaaaaaaaaaaaaaaaaaaa

SEQ ID NO: 3727 - protein, 223 aa, Homo sapiens
MPKKFQGENTKSAAARARRAEAKAAADAKKQKELEDAYWKDDDKHVMRKEQRKEEKEKRRLDQLERKKETQRLLEEEDSKLKGGKAPRVATSSKVTRAQIEDTLRRDHQLREAPDTAEKAKSHLEVPLEENVNRRVLEEGSVEARTIEDAIAVLSVAEEAADRHPERRMRAAFTAFEEAQLPRLKQENPNMRLSQLKQLLKKEWLRSPDNPMNQRAVPFNAPK

SEQ ID NO: 3728 - DNA, 2657 bp, Homo sapiens
ggtggtctgagctggagccacgctttctgttggagggggcagctgaaggagaacagcaagacatatccggcggccctacggactcggagagctggagggaccccggagatctcaaagggacaggaaaggcagcagcagccaccctctctcccagtcaagtggtcaccagcaggactgaaggggacagcccctttgcagtggctcggcgaggagacccctgcaccctagggtcagtgcaggagcccagccgctgagccatgccgggccccgggcggcctgcagcgagcccaacccctgcacccaggtagtcatgaacagccacagctacaatggcagcgtggggcggccgctgggcagcgggccgggcgccctgggacgagaccctccggaccctgaggccggccaccccccacaacccccgcacagcccgggcctccaggtggtagtggccaagagtgagccagcccggccctcacccggcagcccccgggggcagccccaggaccaggacgatgacgaggatgatgaggaagatgaggccggcaggcagagagcctcggggaaaccctcaaatgtgggccaccgcctgggccaccggcgggcgctcttcgagaagcggaagcgcctcagcgactatgccctcattttcggcatgtttggcatcgtcgtcatggtgacggagaccgagctgtcctggggggtgtacaccaaggagtctctgtactcattcgcactcaaatgcctcatcagcctctccacggccatcctgctgggtctcgttgtcctctaccatgcccgggagatccagctgttcatggtggacaacggggctgatgactggcgcatcgccatgacctgcgagcgcgtgttcctcatctcgctagagctggcagtgtgcgccattcacccggtgcccggccactaccgcttcacgtggacggcgcggctggccttcacgtacgcgccctcggtggccgaggccgacgtggacgtgctgctgtccatccccatgttcctgcgcctctacctgctgggccgggtgatgctactgcacagcaaaatcttcacggacgcctcgagccgcagcatcggggccctcaacaagatcaccttcaacacgcgcttcgtcatgaagacactcatgaccatctgccccggcaccgtgctgctggtcttcagcatctcctcctggatcatcgcagcctggaccgtgcgcgtctgcgagaggtaccacgacaagcaggaagtgaccagcaacttcctgggggccatgtggctgatttccatcaccttcctctccattggctacggcgacatggtgccccacacctactgcgggaagggtgtgtgcctgctcactggcatcatgggagctggctgtaccgcgctcgtggtggctgtggtggctcggaagctggagctcaccaaggctgagaagcacgtgcacaacttcatgatggacactcagctcaccaagcgggtaaaaaacgccgctgctaacgttctcagggagacgtggctcatctacaaacataccaggctggtgaagaagccagaccaagcccgggttcggaaacaccagcgtaagttcctccaagccatccatcaggctcagaagctccggagtgtgaagatcgagcaagggaagctgaacgaccaggctaacacgcttaccgacctagccaagacccagaccgtcatgtacgaccttgtatcggagctgcacgctcagcacgaggagctggaggcccgcctggccaccctggaaagccgcttggatgcgctgggtgcctctctacaggccctgcctggcctcatcgcccaagccatacgcccacccccgcctcccctgcctcccaggcccggccccggcccccaagaccaggcagcccggagctccccctgccggtggacgcccgtggccccctcggactgcgggtgacggccctgcccgccaccagacccctaaatcttggccatcgtgtggccgccacctccgggaagccttgtacagtggcgcctcttggagttcaagaagccaacgctgagtcaggctgagtggactgaggcctgccccgcccagactgcccaggcagagggcagggctggaccatgggtgagggcaggggagcccggagcttcctctggtcacctggtcccccgactctccccaggcccccggtgggcatggagcagcccggggaggggtccgtgctggttctgaataaagcaggacccgcctagtggctgcctgtgtgcatggctggaaggcactggtgatgtcccaggaggtagacctccagccctgggtaccaagatgaatgtgggaatcagaaaaacctgttcccatcaccggcctagcctagaatcctagcctagaagccctctctccctctgggctggagctcagtgagggacaactctctagggacacctgtaccagccccacctggcgctgagatccctcagacagcatggcccagccctggccagaagcatcgctccccttcaaccaaccgcgttgatggacacccactgtgtgccaggccccagcggggcccatgggggaggtgacctgggtgaggaaggtcatttgggtttttgtgagatttgtattgagcacctgctgtctacagagaatgtgatgatgtcaatta

SEQ ID NO: 3729 - protein, 543 aa, Homo sapiens
MNSHSYNGSVGRPLGSGPGALGRDPPDPEAGHPPQPPHSPGLQVVVAKSEPARPSPGSPRGQPQDQDDDEDDEEDEAGRQRASGKPSNVGHRLGHRRALFEKRKRLSDYALIFGMFGIVVMVTETELSWGVYTKESLYSFALKCLISLSTAILLGLVVLYHAREIQLFMVDNGADDWRIAMTCERVFLISLELAVCAIHPVPGHYRFTWTARLAFTYAPSVAEADVDVLLSIPMFLRLYLLGRVMLLHSKIFTDASSRSIGALNKITFNTRFVMKTLMTICPGTVLLVFSISSWIIAAWTVRVCERYHDKQEVTSNFLGAMWLISITFLSIGYGDMVPHTYCGKGVCLLTGIMGAGCTALVVAVVARKLELTKAEKHVHNFMMDTQLTKRVKNAAANVLRETWLIYKHTRLVKKPDQARVRKHQRKFLQAIHQAQKLRSVKIEQGKLNDQANTLTDLAKTQTVMYDLVSELHAQHEELEARLATLESRLDALGASLQALPGLIAQAIRPPPPPLPPRPGPGPQDQAARSSPCRWTPVAPSDCG

SEQ ID NO: 3730 - DNA, 2539 bp, Homo sapiens
ggaagttcgccgacgacgcgcccgccctgggccaccggcgccggcccaagttcgccgggggggcccggaggaagcttgggggacgcgacgggggaacgcggaaaccccggggatctgcaggcgcgcccgggccgtgtgccttctctccgcgtgtccaaaccgtgtccccagccgcgcgccatgcgctctgggggcgtgcgcagcttcgcgctggagctggcgcggggcccgggcggcgcctaccgcggcggggagcggctgtgcggccgggtgctgctggaggcggcggcgccgctgcgggtgcgagcgctcgaggtgaaggcgcgcggcggggcggccacccactggttggagggtcgcagcgtgggcgtcaacgccgtatccagcgactacgcggccgcggagacctacctgcggcgtcggcagctgctgctccgagataccggggagaccacgacgctgcctcctgggcgccatgagttcctgttcagcttccagctgcccccgaccctggtgacatccttcgagggcaaacacggtagtgtccgctactgtatcaaggccaccctgcaccggccctgggtcccagcacgccgggcaaggaaggtgttcactgtcatcgagcctgtggacatcaacacgccagccctgctggcacctcaagcgggggctcgggaaaaggttgcccgatcctggtactgtaaccgtggcctagtctccctttcggccaagatcgaccgcaagggctacaccccaggagaggtcatccctgtctttgccgagatcgacaacggctccacacgtcctgtgctgcctcgggcagccgtggtgcagacacagacgttcatggcccgaggcgcccgaaagcagaaacgggcagtggtggccagcctcgcgggcgagccggtgggccccgggcagcgggcgctgtggcagggccgggcactgcggatccccccagtgggtccttccatcctgcactgccgcgttctacacgtggactacgcactcaaggtctgtgtggatatcccaggaacgtccaagctgctgctggagctgccactggtgatcggcaccattcccttgcacccttttggcagccgttcctccagcgtgggcagccacgccagcttcctgctggactggaggctgggggccttgccggagcggcctgaggctcctcctgagtactcggaggtggtagccgacactgaggaggcagccttggggcagagccccttcccgcttccgcaggaccccgacatgagccttgaaggcccgttcttcgcctacatccaagagttccgctaccgcccgccacccctgtactctgaggaggatccaaacccactcttgggggacatgaggccgcgctgcatgacttgctgaacggcacagggacccctcgaggaacaaggttgcacaccagctttcagccaccatgactgtggggagtggctggaccaagggctgacctccccgactgcatcaaagttggggaaccaagtctcagagtgaggcgggggcctttcggatatcacatgggacagaggaagagcccggctggaatctgacttacctggaccgctgtccttgtgaggcattgaatgcccagtgcagtatccgagagactgtttaataacctgtcttcccagccaattggtggtgctggaatcccctaggagccttcagtctgggagaaacagagccagacatagacagttccagcatcacagaaccagaagaagagacctgcaactgtgagagtccagacaggaagcagagaaggcgtccttgcggaaagggcattttagctgaggctttggagtacgaataggagctcagcaggcagacgaatgaggaataaaggtcagagaaggtcagagctgagtgacgtttggaatccaccccgtttattgtagaactgggggttcagagggcaggtgcctcagagttgaggccacacagtgaggtctggtgggtgaaaggacccaggaacgaggcgttcaggaaagcaggttgtcagagctatgtggagtctgtgggtggcaggggcagccgctccagcctttgaagactttgaaagccagagattcctggcgcaggcttggacttcctgggagctcctccaagtacccaggggcatcagagctgcctgggtgttacatggcccagggaacccaggttcagggtaggacaggcaagaccagatacccaatgtgcaaagtgaaaacactgggctccctgttaaacgatgaagaattcaagacagtgacagcattacgtcacccctggggacagaggtcagcctaaggtgacacacggggactactgtgcttccggaggctccctgtgtcctggaggagaaaagcattagagggggcagctggacaagctcccaactgcagagtcccagccctggctggggcagggccccggcctgggactcagcatttctgatatgccttaagaattcattctgttttgtacaattattttttaaaagtaaacgtgtggagaaagaaaaaaaaaaaaaaaa

SEQ ID NO: 3731 - protein, 402 aa, Homo sapiens
MRSGGVRSFALELARGPGGAYRGGERLCGRVLLEAAAPLRVRALEVKARGGAATHWLEGRSVGVNAVSSDYAAAETYLRRRQLLLRDTGETTTLPPGRHEFLFSFQLPPTLVTSFEGKHGSVRYCIKATLHRPWVPARRARKVFTVIEPVDINTPALLAPQAGAREKVARSWYCNRGLVSLSAKIDRKGYTPGEVIPVFAEIDNGSTRPVLPRAAVVQTQTFMARGARKQKRAVVASLAGEPVGPGQRALWQGRALRIPPVGPSILHCRVLHVDYALKVCVDIPGTSKLLLELPLVIGTIPLHPFGSRSSSVGSHASFLLDWRLGALPERPEAPPEYSEVVADTEEAALGQSPFPLPQDPDMSLEGPFFAYIQEFRYRPPPLYSEEDPNPLLGDMRPRCMTC

SEQ ID NO: 3732 - DNA, 2518 bp, Homo sapiens
gggattttctgctccggttggtgagcgcgcctgcgcgttgacggcgattttgcgttctgaggctgcagcgtcggcatcttgagctgccggttcgcgagttcgaggccaggttccgcctgtcgtgggttcgcaccccggacgcgatgctattcgacaaggtgaaagcgttctcggtgcagttggacggcgcgaccgcgggcgtcgagcccgtgtttagcggcggccaggccgtggcgggccgggtgctgctggagctgtcaagcgccgcgcgtgtgggtgccctgaggctgcgcgcgcggggccgcgcccacgtgcactggaccgagtcgcgcagcgcgggctcgagcacggcttacacgcagagctacagtgaacgcgtggaggtcgtgagccaccgcgccacgctcctggcgccagataccggggagaccacgacgctgcctcctgggcgccatgagttcctgttcagcttccagctgcccccgaccctggtgacatccttcgagggcaaacacggtagtgtccgctactgtatcaaggccaccctgcaccggccctgggtcccagcacgccgggcaaggaaggtgttcactgtcatcgagcctgtggacatcaacacgccagccctgctggcacctcaagcgggggctcgggaaaaggttgcccgatcctggtactgtaaccgtggcctagtctccctttcggccaagatcgaccgcaagggctacaccccaggagaggtcatccctgtctttgccgagatcgacaacggctccacacgtcctgtgctgcctcgggcagccgtggtgcagacacagacgttcatggcccgaggcgcccgaaagcagaaacgggcagtggtggccagcctcgcgggcgagccggtgggccccgggcagcgggcgctgtggcagggccgggcactgcggatccccccagtgggtccttccatcctgcactgccgcgttctacacgtggactacgcactcaaggtctgtgtggatatcccaggaacgtccaagctgctgctggagctgccactggtgatcggcaccattcccttgcacccttttggcagccgttcctccagcgtgggcagccacgccagcttcctgctggactggaggctgggggccttgccggagcggcctgaggctcctcctgagtactcggaggtggtagccgacactgaggaggcagccttggggcagagccccttcccgcttccgcaggaccccgacatgagccttgaaggcccgttcttcgcctacatccaagagttccgctaccgcccgccacccctgtactctgaggaggatccaaacccactcttgggggacatgaggccgcgctgcatgacttgctgaacggcacagggacccctcgaggaacaaggttgcacaccagctttcagccaccatgactgtggggagtggctggaccaagggctgacctccccgactgcatcaaagttggggaaccaagtctcagagtgaggcgggggcctttcggatatcacatgggacagaggaagagcccggctggaatctgacttacctggaccgctgtccttgtgaggcattgaatgcccagtgcagtatccgagagactgtttaataacctgtcttcccagccaattggtggtgctggaatcccctaggagccttcagtctgggagaaacagagccagacatagacagttccagcatcacagaaccagaagaagagacctgcaactgtgagagtccagacaggaagcagagaaggcgtccttgcggaaagggcattttagctgaggctttggagtacgaataggagctcagcaggcagacgaatgaggaataaaggtcagagaaggtcagagctgagtgacgtttggaatccaccccgtttattgtagaactgggggttcagagggcaggtgcctcagagttgaggccacacagtgaggtctggtgggtgaaaggacccaggaacgaggcgttcaggaaagcaggttgtcagagctatgtggagtctgtgggtggcaggggcagccgctccagcctttgaagactttgaaagccagagattcctggcgcaggcttggacttcctgggagctcctccaagtacccaggggcatcagagctgcctgggtgttacatggcccagggaacccaggttcagggtaggacaggcaagaccagatacccaatgtgcaaagtgaaaacactgggctccctgttaaacgatgaagaattcaagacagtgacagcattacgtcacccctggggacagaggtcagcctaaggtgacacacggggactactgtgcttccggaggctccctgtgtcctggaggagaaaagcattagagggggcagctggacaagctcccaactgcagagtcccagccctggctggggcagggccccggcctgggactcagcatttctgatatgccttaagaattcattctgttttgtacaattattttttaaaagtaaacgtgtggagaaagaaaaaaaaaaaaaaaaa

SEQ ID NO: 3733 - protein, 407 aa, Homo sapiens
MLFDKVKAFSVQLDGATAGVEPVFSGGQAVAGRVLLELSSAARVGALRLRARGRAHVHWTESRSAGSSTAYTQSYSERVEVVSHRATLLAPDTGETTTLPPGRHEFLFSFQLPPTLVTSFEGKHGSVRYCIKATLHRPWVPARRARKVFTVIEPVDINTPALLAPQAGAREKVARSWYCNRGLVSLSAKIDRKGYTPGEVIPVFAEIDNGSTRPVLPRAAVVQTQTFMARGARKQKRAVVASLAGEPVGPGQRALWQGRALRIPPVGPSILHCRVLHVDYALKVCVDIPGTSKLLLELPLVIGTIPLHPFGSRSSSVGSHASFLLDWRLGALPERPEAPPEYSEVVADTEEAALGQSPFPLPQDPDMSLEGPFFAYIQEFRYRPPPLYSEEDPNPLLGDMRPRCMTC

SEQ ID NO: 3734 - DNA, 2100 bp, Homo sapiens
ggtggctgaacctcgcaggtggcagagaggctcccctggggctgtggggctctacgtggatccgatggagccgctggtgacctgggtggtccccctcctcttcctcttcctgctgtccaggcagggcgctgcctgcagaaccagtgagtgctgttttcaggacccgccatatccggatgcagactcaggctcggcctcgggccctagggacctgagatgctatcggatatccagtgatcgttacgagtgctcctggcagtatgagggtcccacagctggggtcagccacttcctgcggtgttgccttagctccgggcgctgctgctacttcgccgccggctcagccaccaggctgcagttctccgaccaggctggggtgtctgtgctgtacactgtcacactctgggtggaatcctgggccaggaaccagacagagaagtctcctgaggtgaccctgcagctctacaactcagttaaatatgagcctcctctgggagacatcaaggtgtccaagttggccgggcagctgcgtatggagtgggagaccccggataaccaggttggtgctgaggtgcagttccggcaccggacacccagcagcccatggaagttgggcgactgcggacctcaggatgatgatactgagtcctgcctctgccccctggagatgaatgtggcccaggaattccagctccgacgacggcagctggggagccaaggaagttcctggagcaagtggagcagccccgtgtgcgttccccctgaaaaccccccacagcctcaggtgagattctcggtggagcagctgggccaggatgggaggaggcggctgaccctgaaagagcagccaacccagctggagcttccagaaggctgtcaagggctggcgcctggcacggaggtcacttaccgactacagctccacatgctgtcctgcccgtgtaaggccaaggccaccaggaccctgcacctggggaagatgccctatctctcgggtgctgcctacaacgtggctgtcatctcctcgaaccaatttggtcctggcctgaaccagacgtggcacattcctgccgacacccacacagaaccagtggctctgaatatcagcgtcggaaccaacgggaccaccatgtattggccagcccgggctcagagcatgacgtattgcattgaatggcagcctgtgggccaggacgggggccttgccacctgcagcctgactgcgccgcaagacccggatccggctggaatggcaacctacagctggagtcgagagtctggggcaatggggcaggaaaagtgttactacattaccatctttgcctctgcgcaccccgagaagctcaccttgtggtctacggtcctgtccacctaccactttgggggcaatgcctcagcagctgggacaccgcaccacgtctcggtgaagaatcatagcttggactctgtgtctgtggactgggcaccatccctgctgagcacctgtcccggcgtcctaaaggagtatgttgtccgctgccgagatgaagacagcaaacaggtgtcagagcatcccgtgcagcccacagagacccaagttaccctcagtggcctgcgggctggtgtagcctacacggtgcaggtgcgagcagacacagcgtggctgaggggtgtctggagccagccccagcgcttcagcatcgaagtgcaggtttctgattggctcatcttcttcgcctccctggggagcttcctgagcatccttctcgtgggcgtccttggctaccttggcctgaacagggccgcacggcacctgtgcccgccgctgcccacaccctgtgccagctccgccattgagttccctggagggaaggagacttggcagtggatcaacccagtggacttccaggaagaggcatccctgcaggaggccctggtggtagagatgtcctgggacaaaggcgagaggactgagcctctcgagaagacagagctacctgagggtgcccctgagctggccctggatacagagttgtccttggaggatggagacaggtgcaaggccaagatgtgatcgttgaggctcagagagggtgagtgactcgcccgaggctacgtagc

SEQ ID NO: 3735 - protein, 662 aa, Homo sapiens
MEPLVTWVVPLLFLFLLSRQGAACRTSECCFQDPPYPDADSGSASGPRDLRCYRISSDRYECSWQYEGPTAGVSHFLRCCLSSGRCCYFAAGSATRLQFSDQAGVSVLYTVTLWVESWARNQTEKSPEVTLQLYNSVKYEPPLGDIKVSKLAGQLRMEWETPDNQVGAEVQFRHRTPSSPWKLGDCGPQDDDTESCLCPLEMNVAQEFQLRRRQLGSQGSSWSKWSSPVCVPPENPPQPQVRFSVEQLGQDGRRRLTLKEQPTQLELPEGCQGLAPGTEVTYRLQLHMLSCPCKAKATRTLHLGKMPYLSGAAYNVAVISSNQFGPGLNQTWHIPADTHTEPVALNISVGTNGTTMYWPARAQSMTYCIEWQPVGQDGGLATCSLTAPQDPDPAGMATYSWSRESGAMGQEKCYYITIFASAHPEKLTLWSTVLSTYHFGGNASAAGTPHHVSVKNHSLDSVSVDWAPSLLSTCPGVLKEYVVRCRDEDSKQVSEHPVQPTETQVTLSGLRAGVAYTVQVRADTAWLRGVWSQPQRFSIEVQVSDWLIFFASLGSFLSILLVGVLGYLGLNRAARHLCPPLPTPCASSAIEFPGGKETWQWINPVDFQEEASLQEALVVEMSWDKGERTEPLEKTELPEGAPELALDTELSLEDGDRCKAKM

SEQ ID NO: 3736 - DNA, 1881 bp, Homo sapiens
ggtggctgaacctcgcaggtggcagagaggctcccctggggctgtggggctctacgtggatccgatggagccgctggtgacctgggtggtccccctcctcttcctcttcctgctgtccaggcagggcgctgcctgcagaaccagtgagtgctgttttcaggacccgccatatccggatgcagactcaggctcggcctcgggccctagggacctgagatgctatcggatatccagtgatcgttacgagtgctcctggcagtatgagggtcccacagctggggtcagccacttcctgcggtgttgccttagctccgggcgctgctgctacttcgccgccggctcagccaccaggctgcagttctccgaccaggctggggtgtctgtgctgtacactgtcacactctgggtggaatcctgggccaggaaccagacagagaagtctcctgaggtgaccctgcagctctacaactcagttaaatatgagcctcctctgggagacatcaaggtgtccaagttggccgggcagctgcgtatggagtgggagaccccggataaccaggttggtgctgaggtgcagttccggcaccggacacccagcagcccatggaagttgggcgactgcggacctcaggatgatgatactgagtcctgcctctgccccctggagatgaatgtggcccaggaattccagctccgacgacggcagctggggagccaaggaagttcctggagcaagtggagcagccccgtgtgcgttccccctgaaaaccccccacagcctcaggtgagattctcggtggagcagctgggccaggatgggaggaggcggctgaccctgaaagagcagccaacccagctggagcttccagaaggctgtcaagggctggcgcctggcacggaggtcacttaccgactacagctccacatgctgtcctgcccgtgtaaggccaaggccaccaggaccctgcacctggggaagatgccctatctctcgggtgctgcctacaacgtggctgtcatctcctcgaaccaatttggtcctggcctgaaccagacgtggcacattcctgccgacacccacacagatggcatgatctcagctcactgcaacctccgccttccagattcaagagattctcctgcttcagcctcccgagtagctgggattacaggcatctgccaccatacccggctaattttgtatttttagtagagacggggtttcaccacgttggccaggctggtctcgaactcctgacctcaagtgatccacctgccttggcctcccaaagtgttgggattataggcgtgagccaccatgcccagcctaatttttgtatttttagtagagatggagtttcaccatgttgcccaggctggtctcaaactcctgccctcaggtgatccacccacctcagcctctcaaagtgctgggattacaggtgtgagccactgtggccgacctactatttttattatttttgagctaggttctcagtctgttggcagactggagtgcaatcatggctcactgcagccttgaactcccagactcaagtgatccttccacctcagcctctggagtagctgggactacagacatgcaccaccacacctggttaattttttatttttattttttgtagagacaggtgtctctctacgttgcccaggctggtctcgaactcctgggctcaagtgatccacccatctccacctcccaaagtgctaggattacaggcgtgagccaccgtacccagcctggtcccatatcatagtgaaatggtgcctgtaaagctctcagcattggcttggcacatgcagttggtactcaataaacggctgttgctatccccaaaaaaaaaaaaaaaaaaaaaaaaa

SEQ ID NO: 3737 - protein, 381 aa, Homo sapiens
MEPLVTWVVPLLFLFLLSRQGAACRTSECCFQDPPYPDADSGSASGPRDLRCYRISSDRYECSWQYEGPTAGVSHFLRCCLSSGRCCYFAAGSATRLQFSDQAGVSVLYTVTLWVESWARNQTEKSPEVTLQLYNSVKYEPPLGDIKVSKLAGQLRMEWETPDNQVGAEVQFRHRTPSSPWKLGDCGPQDDDTESCLCPLEMNVAQEFQLRRRQLGSQGSSWSKWSSPVCVPPENPPQPQVRFSVEQLGQDGRRRLTLKEQPTQLELPEGCQGLAPGTEVTYRLQLHMLSCPCKAKATRTLHLGKMPYLSGAAYNVAVISSNQFGPGLNQTWHIPADTHTDGMISAHCNLRLPDSRDSPASASRVAGITGICHHTRLILYF

SEQ ID NO: 3738 - DNA, 5890 bp, Homo sapiens
atggacgagtcgagcctcctgcggcgccgcgggctccagaaggagctgagcctgccacgccgaggacgtggctgccgcagcgggaaccgcaagagcttggtggtaggaacgccctccccgaccctctcccggcccctgtcgccattgtcggtcccaacggcaggcagcagccccttggatagtcctcggaatttctcggctgcctctgccctaaatttcccctttgcccggagggcagacggcagaagatggtccctcgcgtctctcccatcttccggctatggaaccaacacacccagctccaccctctcgtcaagctcatcctcccgggaacgtctccaccagcttcccttccagccgacgccggacgagctgcacttcctgtccaagcacttccgcagctcagagaatgtgcttgatgaggaaggcggccggtcaccccgcctccgaccccgctctcgcagtctcagcccgggccgtgcaacggggaccttcgacaatgagattgtcatgatgaatcacgtgtaccgggagaggttccccaaggccacagcacagatggagggccgtctgcaggagttcctgacggcctacgcgcccggcgcccggctggcgctggctgatggcgtcttgggcttcatccaccaccagatcgtcgagctggcccgagactgcttggccaagtctggcgagaacctcgtcacctcccgctacttcctagagatgcaggagaagctggagcggcttctgcaggatgcccatgagcgttcggacagtgaggaggtcagcttcatcgtccagcttgtccggaaactgctgatcatcatctcacggccagctcggctgctggagtgtctggagtttgaccctgaggaattttaccacctgctggaggcggctgagggccatgcgcgggagggccaaggcattaagactgaccttccacagtacatcattgggcagctgggcctggccaaggaccccctggaggagatggtgccactgagtcacctcgaagaagaacagcccccagcacctgagtccccagagagccgcgccctggtcggccagtcacggaggaagccatgcgaaagcgactttgagaccatcaaactcattagcaacggagcctatggggccgtctacctggtgcggcaccgtgacacacggcagcgctttgccatcaagaagatcaacaaacagaacttgatcctgcgtaaccagatccagcaggtctttgtggagcgtgacattctcacctttgccgagaacccctttgtggtcagcatgttctgctcctttgagacccggcgccacctatgtatggtcatggaatacgtggaaggcggcgactgcgccacgctcctgaagaacatgggcccgctgcccgtggacatggcccgcctgtacttcgccgagacggtgttggcgctggagtacctgcataactatggcatcgtgcaccgtgacctcaaaccagacaatctgctcatcacctcgcttggccacatcaagctcacggacttcggcctgtccaagatcggcctcatgagcatggccaccaacctctatgagggccacatcgagaaggacgcccgagagttcatcgacaagcaggtgtgtgggacgccggagtacatagcccccgaggtgatcttccgccagggctatgggaagccagtggactggtgggccatgggcgtcgtcctctatgagtttctggtgggctgcgtgcctttctttggagatacccccgaggaactcttcggtcaggtggtcagcgatgagatcatgtggccagagggagatgaggcccttccagcagacgcccaggacctcatcaccaggttgctccggcagagcccgctggaccgtctgggcactggtggcacccacgaagtgaagcagcacccctttttcctggccctggactgggcagggcttctccgacacaaagccgagttcgtgccccagctcgaagctgaggatgataccagctactttgacacacgttcggaacgttaccgccatctgggctccgaggacgacgagaccaatgatgaagaatcgtccacagagatcccccagttctcctcctgctcccaccggttcagcaaggtctacagcagctctgagttcctggccgtccagcccactcctaccttcgctgaaaggagcttcagtgaagaccgggaggaggggtgggagcgcagcgaagtggactatggccgccggctgagtgctgacatccggctgaggtcctggacatcctctggatcctcctgtcagtcatcttcgtcccagcccgagcggggtcccagcccatctctcctgaataccatcagcctggacacaatgcccaagtttgccttctcatcagaggatgagggggtaggcccaggccctgcaggccccaagaggcccgtcttcattctaggggagcctgaccccccaccagcggccaccccagtgatgcccaagccctcgagcctttctgccgacacagctgctctcagccacgcccgcctacggagcaatagcatcggcgcccgacactccacaccaaggcctctggatgccggccggggccgccgccttgggggcccaagagacccagcccctgagaagtccagagcctcctccagcggtggcagtggtggcggcagtgggggccgcgtgcccaagtcagcctctgtctctgccctgtccctcatcatcacggcagatgatggcagcggcggccccctcatgagccccctttccccgcgctctctgtcctcgaacccgtcgtcccgtgactcttcgccgagccgagacccgtcccccgtgtgtggcagcctgcggccccccatcgttatccacagctctggcaagaagtacggcttcagcctgcgggcgatccgcgtctacatgggtgatagcgacgtctacactgtgcaccacgtcgtctggagtgtggaggacggaagccccgcccaggaggcgggcctgcgggctggggacctcatcacccacatcaacggggagtcagtgctggggctggtgcacatggacgtcgtggagctgctgctgaagagcggcaacaagatatccctgcggaccacagccctggagaacacctccatcaaggtgggccccgcccggaagaatgtggccaagggccgcatggcacgcaggagcaagaggagccgtcggcgggagacccaggatcggcggaagtcacttttcaagaagatctccaagcagacctccgtgctgcacaccagccgcagcttctcctccggactccaccactcactgtcatccagtgagagcctccccggctcgcccacccacagcctctcccccagccccaccactccctgccgaagcccagcccctgatgtcccagcagataccactgcatccccacccagcgcatccccgagctccagcagccccgcctccccagctgctgctggccacacccgccccagctccctgcacggcctggctgccaagcttgggccaccccgccccaagactggccgccgcaagtccaccagcagcatcccgccctccccgctggcctgcccgcccatctccgcgcccccaccccgctcgccctcgcccctgcccgggcacccgcccgcacctgcccgatccccgcggctgcgccggggccagtcagctgacaagctgggcacaggggagcggctggatggggaggcggggcggcgcactcgtgggccagaggccgagctcgtggtcatgcggcggctgcacctgtccgagcgccgagactccttcaagaagcaggaggccgtgcaggaggttagcttcgatgagccgcaggaggaggccactgggctgcccacctcagtgccacagatcgccgtggagggcgaggaagccgtgccagtagctctcgggcccaccggaagagactgatcccctgccaggtctctccctggcatcaaagttacgcgttttcttgtgcaatgttttttccgtaaagtcatgcctggatggggactgagccaccagcctgacacccagaaggcgagaagccatctcggtccttgctggaaggtggagacatcgcttgtgttctggtgtcaatcggggctggatggggcaagaatgggggacaagggtggctttgtaaatagcagcaaatccctgcaactaatttattactttttttttctttttttttttttttttttgagacagagtctcactctgttgcccgggctggagtgcagcggcgtgatctcagctcactgcaacctccgcctcccaagttcaagcgattgtcctgcctcagcttcccaagtggctgggattacaggcgcccaccactatgcccagctaattttttgtatttttagtacagacggggtttcaccatgttggtcaggctggtctcgaactcctgacctcatgatttgcctgcctttgcctcccaaagtgctgggattacaggcgtgagccactgggcccagcctaatttattactttttataagcgatagccgtactgagccgccccctgaaggcggctgccaggtcttgccccaggcacctgggactctgtttgcaggccctgccctctgggctgagaaggatgcactttggacaagtcatctgtgtttgtgttttccagtttttctgtactttttaagtgttttgtgttacctggtctcattcccctccccacacctacccatttgaggggatggagttgaagtcacctggtcacctgtaccggcccagttcggctacaacctggagtgtccgtaaacaattcctctcacccacaaaacaatgtaatcccagcgatggactggattctgaaggccacttcccaccatcatagctgccatgcccaggcagtgcctgctctatatatagagtctgcctccaatcctgctggcttcagcctggagaagggatatgggagctggagctttgatggatgaataggtgttcaccggatctgggcagaggggtcatccgctccccaggtgggcactgataaaggaaggtacaggcctcacctggaactgccaaggcagcctccagaaatgctcggctgtctcggggcacgctccagtatgccagtcctgcgggattacgtccagctacttccagaaacactcagtgtcccctcccctcaggctctgccttggcctggccttgtccagtctaccctggacaagatgccgtgtgtttgaggcccagcagagtaagcccttggccgtgatgtgtctgaaacacctgttaggggttccctccatatgtcagagcctctctgggatgaagttcaagccagaaaacccagtcgaggctcaagtttgaatttcagcttcactgtgtggctctgggaaaatggctttcccactctgtgcctcagtttccttgtgtttacaagactaatcccattgactgtttattaagcacctactgtgtgccaagcgcttttacgtggcttctccctcagccagccttgagaaggctggaggtggtgtcatcacctccattttacagacaaagcagctgagaccccagcgaggggcggagacctgtcccacgatcacccagcaggagtcgtggcagaacggagcatcagccagaccctgttgtgggcgttgtcatcaagggagcttgaatggagggtctggtgtcagatacagccgactccagccccagctcatcccccatgatgctgtgtgacccactgggcactctggtgagggagctttccagacatcaacagcccactctgcttccctttctgagtcccctgtccagcactgcctagtgttggagggtagaccaaggctgtgcatgattcaccccctccttccatcctggagctggcagtgaataaaagcccgtatttacaa

SEQ ID NO: 3739 - protein, 1309 aa, Homo sapiens
MDESSLLRRRGLQKELSLPRRGRGCRSGNRKSLVVGTPSPTLSRPLSPLSVPTAGSSPLDSPRNFSAASALNFPFARRADGRRWSLASLPSSGYGTNTPSSTLSSSSSSRERLHQLPFQPTPDELHFLSKHFRSSENVLDEEGGRSPRLRPRSRSLSPGRATGTFDNEIVMMNHVYRERFPKATAQMEGRLQEFLTAYAPGARLALADGVLGFIHHQIVELARDCLAKSGENLVTSRYFLEMQEKLERLLQDAHERSDSEEVSFIVQLVRKLLIIISRPARLLECLEFDPEEFYHLLEAAEGHAREGQGIKTDLPQYIIGQLGLAKDPLEEMVPLSHLEEEQPPAPESPESRALVGQSRRKPCESDFETIKLISNGAYGAVYLVRHRDTRQRFAIKKINKQNLILRNQIQQVFVERDILTFAENPFVVSMFCSFETRRHLCMVMEYVEGGDCATLLKNMGPLPVDMARLYFAETVLALEYLHNYGIVHRDLKPDNLLITSLGHIKLTDFGLSKIGLMSMATNLYEGHIEKDAREFIDKQVCGTPEYIAPEVIFRQGYGKPVDWWAMGVVLYEFLVGCVPFFGDTPEELFGQVVSDEIMWPEGDEALPADAQDLITRLLRQSPLDRLGTGGTHEVKQHPFFLALDWAGLLRHKAEFVPQLEAEDDTSYFDTRSERYRHLGSEDDETNDEESSTEIPQFSSCSHRFSKVYSSSEFLAVQPTPTFAERSFSEDREEGWERSEVDYGRRLSADIRLRSWTSSGSSCQSSSSQPERGPSPSLLNTISLDTMPKFAFSSEDEGVGPGPAGPKRPVFILGEPDPPPAATPVMPKPSSLSADTAALSHARLRSNSIGARHSTPRPLDAGRGRRLGGPRDPAPEKSRASSSGGSGGGSGGRVPKSASVSALSLIITADDGSGGPLMSPLSPRSLSSNPSSRDSSPSRDPSPVCGSLRPPIVIHSSGKKYGFSLRAIRVYMGDSDVYTVHHVVWSVEDGSPAQEAGLRAGDLITHINGESVLGLVHMDVVELLLKSGNKISLRTTALENTSIKVGPARKNVAKGRMARRSKRSRRRETQDRRKSLFKKISKQTSVLHTSRSFSSGLHHSLSSSESLPGSPTHSLSPSPTTPCRSPAPDVPADTTASPPSASPSSSSPASPAAAGHTRPSSLHGLAAKLGPPRPKTGRRKSTSSIPPSPLACPPISAPPPRSPSPLPGHPPAPARSPRLRRGQSADKLGTGERLDGEAGRRTRGPEAELVVMRRLHLSERRDSFKKQEAVQEVSFDEPQEEATGLPTSVPQIAVEGEEAVPVALGPTGRD

SEQ ID NO: 3740 - DNA, 4935 bp, Homo sapiens
gtctggagaagagagtttccacgttgtcatcataggatctggactcaagtgaccaaaaccttgcttggatttttacctgatgaagtttgtcttgaaaagtgaaaatggttccatttccattttccctgttctcaagggatggaagaagcgagcctgtgccttggagtgtcttcggcggagccggaagctgagccccacctgagtggccccgtcctcaacggccagtatgccatgagtcagaagctgcaccagatcacctcccagctcagccatgccttccccgagctccatccccggcccaaccccgaggagaagccccccgcatccctggaggagaaggcccacgtgcccatgagcggccagcccatgggcagtcagatggcgctcctggccaaccagctgggccgggaggtggacaccagcctcaacgggagggtggacttgcagcagttcctcaacgggcagaacctgggcatcatgtcccagatgagcgacatcgaggacgacgcccgcaagaaccgcaagtacccgtgcccactctgcggcaagcgcttccgcttcaacagcatcctctccctgcacatgcgcacgcacacgggcgagaagcccttcaagtgcccgtactgcgaccacagggcggcgcagaaggggaacctcaagattcacctgcggacccacaagctgggcaacctgggcaaggggcgtgggcgtgtgcgcgaggagaaccgcctgctgcacgagctggaggagcgcgccatcctgcgggacaagcagctgaaaggcagcctgctgcagccccggccggacctgaagcccccgccgcacgcccagcaggccccgctggccgcctgcaccctggccctgcaggctaaccacagcgttcccgacgtggcccacccggtgccctcgcccaagcctgccagcgtgcaggaggacgcggtggccccggcggcgggcttccgctgtaccttctgcaagggcaagttcaagaagcgcgaggagctggaccgccacatccgcatcttgcacaagccctacaagtgcacgttgtgcgacttcgcggcttcgcaggaggaggagctcatcagccacgtggagaaggcacacatcacggccgagtcggcccagggccagggccccaacggcggtggcgagcagtcggccaacgagttccgctgcgaggtgtgcggtcaggtgttcagccaggcgtggttcctcaagggtcacatgcgcaagcacaaagactcctttgagcactgctgccagatctgcggccggcgcttcaaggagccctggttcctcaagaaccacatgaaggtccacctcaacaagctgtcggtgaagaacaagtcccccagcgaccccgaggtgcctgtgcccatgggcggcatgtcccaggaggcccacgccaacctgtactccaggtacctctcctgcctgcagagtggcttcatgaccccggacaaagccggcctgagcgagcccagccagctctatggcaagggcgagctgcccatgaaggagaaggaagcgctggggaagctgctgtctcccatctccagcatggcccacggcgtcccggagggggacaagcactccctcctgggatgcctcaatctcgtgccgccgctgaaatccagctgcatcgagcggctgcaggcggctgccaaggctgcggagatggaccccgtgaacagctaccaggcttggcagctcatggccaggggcatggccatggaacatggcttcttgtctaaagagcatccgctgcagcgcaaccacgaagacactttggcaaacgccggggttctgtttgataaggagaagcgggagtacgtgttagtgggagcagatggctccaagcagaaaatgcctgctgatttggttcacagcactaaagtgggcagccagagagacctgccaagtaagctcgaccctttagaaagcagtcgggattttttgtcacacgggctgaaccagactctcgagtataacctgcagggtcctgggaacatgaaggagaagcccaccgagtgccccgactgcggccgggtgttccgcacttaccaccaggtggtcgtgcactcccgtgtccacaagcgggaccgcaagggcgaggaggatgggctgcacgtgggcctggatgagcggcgtggctcgggcagtgaccaggagtcccagtcggtgagccgctccaccacgccgggctcctctaacgtcaccgaggagagcggggtcggaggcggcctctcccagaccgggagtgcccaggaggacagcccgcacccctcctcgccatcctcctcagacattggcgaggaggctgggagatctgccggcgtccagcaaccagcgctgcttcgcgacagaagcctgggctcggccatgaaggactgcccgtactgtgggaaaactttccggacatcccatcaccttaaggtgcacctgaggatacacacaggtgagaaaccctacaagtgtccgcactgtgactatgccggcacgcagtcagcatccttaaaataccacttagagcgacaccatcgggagcggcagaacggggctgggccgctgtctgggcaacccccaaatcaagaccacaaggatgagatgtcaagcaaagcttctctgttcatcaggccagacatcctgaggggggccttcaagggtctccctggaatcgacttcagaggaggccctgcatctcagcagtggacatcaggggttctctcctctggagatcactcggggcaggccacgggcatgtcttcggaggtcccctcagatgctctgaaaggcactgaccttccttccaaaagcacccacttctctgagatcggaagagcttatcaaagcattgtgagcaacggtgtgaatttccaagggtccttgcaagctttcatggacagttttgtcctcagttccttgaagaaggagaaggacatgaaggacaaagccctggctgaccccccttccatgaaagtccacggagtggatggtggtgaggagaaacccagtggcaagtcctcccagaggaagtccgagaaatctcagtatgaacccctggacttgtctgtgcggccagatgccgcctccctcccgggctcctcggtaactgtgcaggacagcattgcatggcacggctgcttgttttgtgctttcacaacgtcctccatggagctcatggcccttcatctccaggccaaccacctgggcaaagcgaaacgcaaagataacaccatcggggtcacagtcaactgcaaagaccaagcccgggaggcgagtaagatggccctgctgccctcgttacaatcaaacaaagacctgggcctctccaatatgatcagctctctagactctgcttctgagaagatggcccaaggtcagctcaaggagactctgggagagcagaagagcggtgcatggaccggccacgtggaccctgcattttgtaacttcccatcagacttctacaagcagtttggtgtttacccaggcatggttggctcaggggcctccagttcctgccccaacaaggagcctgatggaaaggcccactctgaagaggatgtccccatcctgatccccgaaaccacgagtaagaacactactgatgacctctctgacattgcctcctcagaggacatggactcctccaagggggagaacaacgatgaagaggatgttgaaaccgaaccggaaatgatgaccaagccactgtctgccctcagcaaagacagcagcagcgatggcggggacagcctgcagcccacaggcacctcccagcccgtccagggactggtctcacctttatcccaagcaccggagaagcagtggcacagccagggtcttctccaagcccaggaccccttggcgggcctgccaaagccggagcgggggccccagagcctggacaagccgatgaacatgctgtcggtcctcagggcctacagttctgatggcttagcagcctttaacggacttgcaagtagcacagcaaattctggatgtatcaagaggccagacttgtgtggtaagtgacactccctgtcctagtcggtctatctggacttgcccttgtctgttcgtggtcctcggtggttatctgcagcttgttaatcgtgtaaagtcaagagaagaatgtatacacatatgtgtgttgaataattactattggcataggtatgtgtatacacacggtgcaccaatctacagtatatatagcagagaatcagaggctaaaaatattaccccatatgttccagtattagtcatggattgcaaaggcttagtaacttgagcaggagagaaaactccctcaaagtcataaatcctgagtgacaactgctgctggatgacagatcccttcacctgtggacaacctggctgggggtggggggctgttccaccagctcacctgagcatgtagaggtgggtcctgcagtggtctcgtgggtattactgcttgtgtctgattgtcctgtattttgtaacactttagaagaatacagaaaagtgcagtaattctctttctccatagtatttaagcagaaatattgctagtttaatattgtgtcaggtcgtcctattaaccaggagcagatgacagtaaaatttcagtgaatagcaccttgacatctacaacttaaaaatggtgattgaagcaaaatatgtaaacttgtacggggtgatcgtgtgctttggaacagagtattgttgaagtaattagaagatatattaaggtgttcctggtaatgaaggcatgtaagttataataattgtagctttctgaataagtgtcaaactatatctttaagtgtgctgtatgctgagttacaagttaggtcatttatgaatggaatgtaaaataatactaaaaatgcttcaataacttatcttggtattgctaataaaaaaaaaaagctgtgaaacatt

SEQ ID NO: 3741 - protein, 1300 aa, Homo sapiens
MEEASLCLGVSSAEPEAEPHLSGPVLNGQYAMSQKLHQITSQLSHAFPELHPRPNPEEKPPASLEEKAHVPMSGQPMGSQMALLANQLGREVDTSLNGRVDLQQFLNGQNLGIMSQMSDIEDDARKNRKYPCPLCGKRFRFNSILSLHMRTHTGEKPFKCPYCDHRAAQKGNLKIHLRTHKLGNLGKGRGRVREENRLLHELEERAILRDKQLKGSLLQPRPDLKPPPHAQQAPLAACTLALQANHSVPDVAHPVPSPKPASVQEDAVAPAAGFRCTFCKGKFKKREELDRHIRILHKPYKCTLCDFAASQEEELISHVEKAHITAESAQGQGPNGGGEQSANEFRCEVCGQVFSQAWFLKGHMRKHKDSFEHCCQICGRRFKEPWFLKNHMKVHLNKLSVKNKSPSDPEVPVPMGGMSQEAHANLYSRYLSCLQSGFMTPDKAGLSEPSQLYGKGELPMKEKEALGKLLSPISSMAHGVPEGDKHSLLGCLNLVPPLKSSCIERLQAAAKAAEMDPVNSYQAWQLMARGMAMEHGFLSKEHPLQRNHEDTLANAGVLFDKEKREYVLVGADGSKQKMPADLVHSTKVGSQRDLPSKLDPLESSRDFLSHGLNQTLEYNLQGPGNMKEKPTECPDCGRVFRTYHQVVVHSRVHKRDRKGEEDGLHVGLDERRGSGSDQESQSVSRSTTPGSSNVTEESGVGGGLSQTGSAQEDSPHPSSPSSSDIGEEAGRSAGVQQPALLRDRSLGSAMKDCPYCGKTFRTSHHLKVHLRIHTGEKPYKCPHCDYAGTQSASLKYHLERHHRERQNGAGPLSGQPPNQDHKDEMSSKASLFIRPDILRGAFKGLPGIDFRGGPASQQWTSGVLSSGDHSGQATGMSSEVPSDALKGTDLPSKSTHFSEIGRAYQSIVSNGVNFQGSLQAFMDSFVLSSLKKEKDMKDKALADPPSMKVHGVDGGEEKPSGKSSQRKSEKSQYEPLDLSVRPDAASLPGSSVTVQDSIAWHGCLFCAFTTSSMELMALHLQANHLGKAKRKDNTIGVTVNCKDQAREASKMALLPSLQSNKDLGLSNMISSLDSASEKMAQGQLKETLGEQKSGAWTGHVDPAFCNFPSDFYKQFGVYPGMVGSGASSSCPNKEPDGKAHSEEDVPILIPETTSKNTTDDLSDIASSEDMDSSKGENNDEEDVETEPEMMTKPLSALSKDSSSDGGDSLQPTGTSQPVQGLVSPLSQAPEKQWHSQGLLQAQDPLAGLPKPERGPQSLDKPMNMLSVLRAYSSDGLAAFNGLASSTANSGCIKRPDLCGK

SEQ ID NO: 3742 - DNA, 3265 bp, Homo sapiens
aggcttcgtccgccgttaggttgcggctgctgtggttgccaacgctacactgggtagaacgccagacaggggccacttttcgagaccgagtagagacggacagtgaggaggataggacccacttacacgcttttatgtcagccgcgatccaacccccacaagcgtctgcaaaacccttcctggggccttggcgacagccctgtgtcctcacggcgcgcagaggcggcgccgcgaaccttgtgtgcattttacacgacggcggggactgaggtccctcgcagcccagagccggagcccggggtcggccgagcccgcaggaccggcttcctcgccgactctcacggcctcacccagccccctgggcccatggcggcgccggcgttgtgctcggagagcatcactctaggtgccgtctttgaagaaggactctctaggtcctgctgttgttttaggggatcattccagcggaagtctggccctaccaaaagctgggagagggaatgagagcctcgagggcaagaggcattagtatcatttgaagacgtggttgtgaccttcactggagaggaatgggggcacctggacctggcccagaggaccctgtaccaggaggtaatgctggagacctgcaggctcctggtctcactggggcatcctgttcccaaaccagagctgatctatctactggaacatggacaggaactgtggacagtgaagagaggcctctcccaaagcacctgcgcaggtgaaaaagcaaaacccaagattacagagcctactgcttctcagctggccttctctgaggaatcctctttccaggaacttctggcacagagatcctcaagagattccaggttggggcaagctagagatgaggaaaagctaataaaaattcaggaagggaacttgaggccaggaacaaacccccacaaagagatatgccctgagaagttgagttataaacatgatgatttggagccagatgatagtctgggcttaagggttttacaggaacgagtcactccacaagatgctctccatgagtgtgactctcaaggaccaggaaaagaccccatgactgatgcaaggaataacccttacacatgcacggaatgtgggaaagggtttagcaagaagtgggcccttgttcggcatcaacagattcatgctggagtgaagccctatgagtgcaatgagtgtgggaaagcctgtcgttatatggctgatgtcattcgacatatgaggcttcatactggggaaaaaccatacaagtgtattgagtgtgggaaagccttcaaacgcaggtttcacctcacggagcaccagcgtattcacaccggagataagccctatgagtgcaaagaatgtggcaaagcattcacccaccgctcttcttttatccagcataatatgactcacactcgagaaaaaccctttttatgcaaagaatgtgggaaagctttttactacagctcctcatttgctcaacatatgaggattcatactggaaagaaactctatgagtgcggtgaatgtggaaaggccttcacgcaccgctccacatttatccagcacaatgtgacccacacaggagaaaaaccatttttatgtaaagaatgtggaaaaaccttttgcctcaactcatccttcactcagcacatgaggattcacactggagagaaaccctatgagtgcggtgaatgtggaaaggcctttactcatcgctccactttcatccgacataagaggacccataccggagagaagccctttgagtgcaaagaatgtgggaaggccttttgtgacagctcttccttaattcaacatatgaggattcacactggtgagaagccttatgagtgcagtgaatgtggaaagacttttacacaccactctgtttttattcgacataataggacccacagtggacaaaaacccttggagtgcaaagaatgtgcaaaagccttttactatagctcttccttcactcgacacatgaggattcacactggagagaagccctatgtttgtagagaatgtggaaaggcttttacccaacctgcaaattttgttcggcataataggatccacactggagaaaaaccttttgaatgcaaagaatgtgagaaagccttctgtgacaactttgctttaactcagcacatgagaactcacactggagagaaaccctttgaatgcaatgaatgtggaaagaccttcagccacagttcatcgttcactcaccatcgaaagattcataccagagtttaaaagatacaggaaggcctattacaagtgtgtttgtctttagtgaactcatagtggtgacatacctttccttttgagtataactattgagggaaatattttggccagagagatgtcttagtatctgataatttatactaactagaaacagaattgtccctgtgaaatctttttatggcaggtaatcacttgtcatccaaagaattatattaaagattcacccagtttagagccttacactgtacctgagaataatcgaggggagagacctggtggttaacatgcatttaggtaaaatgtcaggaacaactttcctcttattaatactataaatccatctcaagcatattttaaaataatgagagatggaggaaacaatctagaagataaaagaaaaagatgtgcataacttgttttcagtttccctgtttatgacagtttgtcatttggcgggttgggggatggagcagggaataagacattgaaaaagtctcatcccctttgtgtgttttacatatatatatctctaagtccagagccaggagagttggaccattgagggcagctctgccaacatttagtaaaagtattcattgttccaaaactgtcatctctacccttgagggagtgtgtctttgtgagaaatataaaggcttgagtcatgaaatacttaacacatgtgcacatgtacacatgtacatttatatgcagtgaattgttactcgtggtagttaggttctgtgaattttctgtgcacactgaattagtgaatgctgaatgattgttgctaggggaaatacagcgttagcttctgtgagcctctgatccaaacatttttatcaaccagtcaacacataaccttcttctatgggtatttgtttgtttgtttgtttaaagacactttatcagtgtttcttgaataattataattattctttataataaaaatattttaattataaaaaaaaaaaaaaaaaaaacaaaaaaaaaaaaaaaa

SEQ ID NO: 3743 - protein, 551 aa, Homo sapiens
MLETCRLLVSLGHPVPKPELIYLLEHGQELWTVKRGLSQSTCAGEKAKPKITEPTASQLAFSEESSFQELLAQRSSRDSRLGQARDEEKLIKIQEGNLRPGTNPHKEICPEKLSYKHDDLEPDDSLGLRVLQERVTPQDALHECDSQGPGKDPMTDARNNPYTCTECGKGFSKKWALVRHQQIHAGVKPYECNECGKACRYMADVIRHMRLHTGEKPYKCIECGKAFKRRFHLTEHQRIHTGDKPYECKECGKAFTHRSSFIQHNMTHTREKPFLCKECGKAFYYSSSFAQHMRIHTGKKLYECGECGKAFTHRSTFIQHNVTHTGEKPFLCKECGKTFCLNSSFTQHMRIHTGEKPYECGECGKAFTHRSTFIRHKRTHTGEKPFECKECGKAFCDSSSLIQHMRIHTGEKPYECSECGKTFTHHSVFIRHNRTHSGQKPLECKECAKAFYYSSSFTRHMRIHTGEKPYVCRECGKAFTQPANFVRHNRIHTGEKPFECKECEKAFCDNFALTQHMRTHTGEKPFECNECGKTFSHSSSFTHHRKIHTRV

SEQ ID NO: 3744 - DNA, 3101 bp, Homo sapiens
cggcgtccagtcttcgtccgccgttaggttgcggctgctgtggttgccaacgctacactgggtagaacgccagacaggggccacttttcgagaccgagtagagacggacagtgaggaggataggacccacttacacgcttttatgtcagccgcgatcccacccccacaagcgtctgcaaaacccttcctggggccttggcgacagccctgtgtcctcacggcgcgcagaggcggcgccgcgaaccttgtgtgcattttacacgacggcggggactgaggtccctcgcagcccagagccggagcccggggtcggccgagcccgcaggaccggcttcctcgccgactctcacggcctcacccagccccctgggcccatggcggcgccggcgttggcattagtatcatttgaagacgtggttgtgaccttcactggagaggaatgggggcacctggacctggcccagaggaccctgtaccaggaggtgatgctggagacctgcaggctcctggtctcactggggcatcctgttcccaaaccagagctgatctatctactggaacatggacaggaactgtggacagtgaagagaggcctctcccaaagcacctgcgcaggtgaaaaagcaaaacccaagattacagagcctactgcttctcagctggccttctctgaggaatcctctttccaggaacttctggcacagagatcctcaagagattccaggttggggcaagctagagatgaggaaaagctaataaaaattcaggaagggaacttgaggccaggaacaaacccccacaaagagatatgccctgagaagttgagttataaacatgatgatttggagccagatgatagtctgggcttaagggttttacaggaacgagtcactccacaagatgctctccatgagtgtgactctcaaggaccaggaaaagaccccatgactgatgcaaggaataacccttacacatgcacggaatgtgggaaagggtttagcaagaagtgggcccttgttcggcatcaacagattcatgctggagtgaagccctatgagtgcaatgagtgtgggaaagcctgtcgttatatggctgatgtcattcgacatatgaggcttcatactggggaaaaaccatacaagtgtattgagtgtgggaaagccttcaaacgcaggtttcacctcacggagcaccagcgtattcacaccggagataagccctatgagtgcaaagaatgtggcaaagcattcacccaccgctcttcttttatccagcataatatgactcacactcgagaaaaaccctttttatgcaaagaatgtgggaaagctttttactacagctcctcatttgctcaacatatgaggattcatactggaaagaaactctatgagtgcggtgaatgtggaaaggccttcacgcaccgctccacatttatccagcacaatgtgacccacacaggagaaaaaccatttttatgtaaagaatgtggaaaaaccttttgcctcaactcatccttcactcagcacatgaggattcacactggagagaaaccctatgagtgcggtgaatgtggaaaggcctttactcatcgctccactttcatccgacataagaggacccataccggagagaagccctttgagtgcaaagaatgtgggaaggccttttgtgacagctcttccttaattcaacatatgaggattcacactggtgagaagccttatgagtgcagtgaatgtggaaaggcttttacacaccactctgtttttattcgacataataggacccacagtggacaaaaacccttggagtgcaaagaatgtgcaaaagccttttactatagctcttccttcactcgacacatgaggattcacactggagagaagccctatgtttgtagagaatgtggaaaggcttttacccaacctgcaaattttgttcggcataataggatccacactggagaaaaaccttttgaatgcaaagaatgtgagaaagccttctgtgacaactttgctttaactcagcacatgagaactcacactggagagaaaccctttgaatgcaatgaatgtggaaagaccttcagccacagttcatcgttcactcaccatcgaaagattcataccagagtttaaaagatacaggaaggcctattacaagtgtgtttgtctttagtgaactcatagtggtgacatacctttccttttgagtataactattgagggaaatattttggccagagagatgtcttagtatctgataatttatactaactagaaacagaattgtccctgtgaaatctttttatggcaggtaatcacttgtcatccaaagaattatattaaagattcacccagtttagagccttacactgtacctgagaataatcgaggggagagacctggtggttaacatgcatttaggtaaaatgtcaggaacaactttcctcttattaatactataaatccatctcaagcatattttaaaataatgagagatggaggaaacaatctagaagataaaagaaaaagatgtgcataacttgttttcagtttccctgtttatgacagtttgtcatttggcgggttgggggatggagcagggaataagacattgaaaaagtctcatcccctttgtgtgttttacatatatatatctctaagtccagagccaggagagttggaccattgagggcagctctgccaacatttagtaaaagtattcattgttccaaaactgtcatctctacccttgagggagtgtgtctttgtgagaaatataaaggcttgagtcatgaaatacttaacacatgtgcacatgtacacatgtacatttatatgcagtgaattgttactcgtggtagttaggttctgtgaattttctgtgcacactgaattagtgaatgctgaatgattgttgctaggggaaatacagcgttagcttctgtgagcctctgatccaaacatttttatcaaccagtcaacacataaccttcttctatgggtatttgtttgtttgtttgtttaaagacactttatcagtgtttcttgaataattataattattctttataataaaaatattttaattatagc

SEQ ID NO: 3745 - protein, 588 aa, Homo sapiens
MAAPALALVSFEDVVVTFTGEEWGHLDLAQRTLYQEVMLETCRLLVSLGHPVPKPELIYLLEHGQELWTVKRGLSQSTCAGEKAKPKITEPTASQLAFSEESSFQELLAQRSSRDSRLGQARDEEKLIKIQEGNLRPGTNPHKEICPEKLSYKHDDLEPDDSLGLRVLQERVTPQDALHECDSQGPGKDPMTDARNNPYTCTECGKGFSKKWALVRHQQIHAGVKPYECNECGKACRYMADVIRHMRLHTGEKPYKCIECGKAFKRRFHLTEHQRIHTGDKPYECKECGKAFTHRSSFIQHNMTHTREKPFLCKECGKAFYYSSSFAQHMRIHTGKKLYECGECGKAFTHRSTFIQHNVTHTGEKPFLCKECGKTFCLNSSFTQHMRIHTGEKPYECGECGKAFTHRSTFIRHKRTHTGEKPFECKECGKAFCDSSSLIQHMRIHTGEKPYECSECGKAFTHHSVFIRHNRTHSGQKPLECKECAKAFYYSSSFTRHMRIHTGEKPYVCRECGKAFTQPANFVRHNRIHTGEKPFECKECEKAFCDNFALTQHMRTHTGEKPFECNECGKTFSHSSSFTHHRKIHTRV

SEQ ID NO: 3746 - DNA, 5302 bp, Homo sapiens
agaccggcccctgcgcgatatgagcaccgctcaggactgcagctgttgggcaccagcagccaggtctgcaggctccgcgaagcctggcccggaccgtagcttctgcaagcagtccaggtgtatcctggggtcactggagggcagagcctgctcagagcgagtacagaagcagcccaggtcttcccagcaccaggttcactggaagtgccaggccaccacctccttcatgctcctctgtgatcacctctccaagtcccggtgtcaggagccttctctgtggccgccctggagagacttgagcctgggacgtgacgtgctgggctgtgaagctttctgagaagggaaacctgtggcctgacctgcctgaatgctgcacccaacctcatctcttcctgggagaaaccaacaactgtcagcattgacaccatcaggcctttcccttctaatttaaccttgcagccaaccacacggctatctgtgcgggatctctccccaagctcaaggacatgagatgcggatcaggcccaagaggctggatgccaaacctatcctctccatgtgaagcaccaacttgggggtgtcaactaaaaatatgagacccgtaaacttggaaaggaaaactttatttcttgagaagggttgcaaactgcaggctgggaagtgacacctccagctgagaccacaaacagtggactttctcaaactggggtattgacctctgatgaaccgccatgcaaacccgtgcctttcaacataaaaagaagcccttcgaggtgctcaccttcaagcttgctagaggaggaggaagagcaggttgagtttgacataactagaatgggttgagcctttccagcagagtaaggttctttcatggtggacagtggccacccactgccatttctacaagaagattttgcttcttaggcactgagttcctggttctttcactagagaaaaatgagtaggttggcaatccagtacttccatcttctgtgaagacctgggcaggcgacgggggcttgggggcgggggcagggaccaaagacaaggctgccatttgctgtgcccaccacagagggacatttactccacctgaagcacaagtattttctcagtgatgttggctcctacaaagtcaaaaggggtaggctccctggcttacgctccaggagtttggactgaaagggacactaaaagtgtcttcctctaagtttatgatgttgccctcctctggctacaacagtgctctggccataagcatcccaggttctctgaatgatggtgggtatggaaatgttcccaaacacaggtatggcggtgtcccctcccactgtaccaatctatgcccagggctggaaggtccgtggtgctctgaactggattcataaacagtagcatctccaaccacaagtgtggtgtcaggccctccaacagtagcacatgtgctcccgtgggtgcctgatagaaagtgggaacatgtgtttattagccaggtgggccccaaatgctctgacgaggtgcagaaagaggactctttgtcacagttgtgctgtgccctcccattgcaacacatgtgctctgaacaggtggagcccaggtgctttgcatgtaggcggacacaagagggcctctaagcacaagtgtggtgttggaaccctcaaggctaccgatgcattctggccaggtgtgtcccaggtggtctgactatagacagcaacagaattatctccagcaccgttatagagatacccgtccaactgatgtgctctagcgggatgggacccgggtgatccgaacacaaggaggaacagaagtttattctgatatatgctccttcttagcgatgttatctacttcaatagtaacggtatgctttggctgggtgggcctcagtcactctgtagccaggaaggaaagggctcccaaaacagatttctgctccgtagagctgatcttccctcattgcaacagggatgctataggcaggcaggacctggtgctcaggtctaagcccctcctagaataagttgtggttctgagtgttgtcagcccttctgcagatttcaatgacccctgacaaggagccagggtttgggacagacacaatgactgcaaacctgccaccacccaaaggggcttagatattgatggtgcatggcactgctgcagtggccctttatcttgatccccttttttttttgagacggagtttcgctctgttgcccaggctggagtgcagtggcgcgatcttggctcactgcaagctccgcctccagggttcatgccattctcctgcctcaggcctccacctctcaggttcaagcgattctcccgcctccgcctctgcctcctgggttcaagcaaacctccgtctcctggatccaagtgattctcctgcctcagcctcccaattagctgggactacaggtgtgcgcaaccacgcccagctaatttttgtatttttagtagagatggggtttcaccatgttggccaggctggtctcgaactcctgacctcaggtgatctgcgcgcctcggcctcccaaagtgctgggattacaggcgtgagacaccgtgcccggccctcagtctcttttaagcaaggatcaggggagtaatcagatggcccatatagcgctcctgctattgaaggagcgcagatgtcgctcagatagcgacaggaagagaagtcagtttccccctacaggtaggatcagtacttttcctaagtggctgcacttctttgaggtgcaagcatacagtgctgtctttctgagagccctggcgtgacaccaaggggaggcccccttctgatgtaaacactgagcttgctgggttgcataaggcctctcaggggtgatataaaccgagggggtaaaggtgaccgtgttgctcccaggaactgttttcagaagatgcacaggtgcagcaggaggattcctgccagaagcaggaacagagagggcagggagaaaaaggaggatggtggcctgggggccaggcggggtgaggcttactgaggaagttgtccgtgaagagcagtttgtgtgctgtctgacactgagagtctagtaagaaatttggagaggtctcctagctgcatgttcctccaaggcaaaccatgctggatgtttgtgacatgtcattggaacacacaccagagaaagtgtgtgctagagcagagagggaagacaaggcaccaaaggacaaaggggaatcccagcaggacttttgagagcttgagacagctcatgctctttgcaggtgcttggcaccaggtgtgcccgatgacatggaaaagcatccaggactgtgtattataggaccccacataactgtcacccccagatcgccaggtctgcaggctcctcagcatctaacctaggggcagcaactagtgcctgtgagtctcctagcccttttctctggggttattggaggtcagaggtcagagcgccctagatcctgccaggaaggggccctggctcacaggaggtcagggtaggagaggtgggggtgtggccagcagggatcaactctgtctcatgccattactggtgcacccaggtggcccagcagggctgcagctgcaagacacgtgctctgatggggaggagagaccaagcagtgtggggcgtgatttgccctgacctcttcctttcaggcaacctctgcagaggacactagtttacccccacaatgtccccttcccatgtggtagctcagggttaccacacactctttcctccagggatccctctagggcctctcaagtcttggagcaggcatatcttctctgtggccacccaggaaggtgtgggtccatgggcatgagatgtgagtccagctgggctgtgaaggtttctgagatgggtacttggcaccccaattttcccaggtcctgcaccccataccatcccttccaggcaagcagatcttccctcttttaacaaatttttcgaattgcaaacagcatttaggactttgcgccttcctcaggtcacccatgtgggcgtaagggagagtcaggatttgaactcagactgtctgattccagagtttatccattgaccacctgacagtggtgatgcctcatcatgtgtgtcacgtatttacatttttaaatagtccttagggtacttagcaccatgtacacctgtcatgagagtgttcactgcctgcatcagaagatgcagggtggagagcaccaattgtcagcacaaccatattgggcatttctctgctaaatgagtcttgcacaaaccacacagctgtctgtgaactatcttctcccaggtacaggacaggaggccacttaggtgcaagatacactctgtcttaagagccttatgctccaaggacaccaacatctcttgtgacaattccatagacctactttttaggatcctggctgaaattggcaatttactgatatcaaatagtgtactctatcaggatggtaaatagttccttatatttagaactcttttttttttttggacagagtttcactcttgttgcccaggctggagtgcaatagtgcaatctcagctccctatagcctccacctcccgggttcaagtgattatcctgcctcagcctctcgagtagctgggactacaggcatgcaccactatgcccagctaattttgtatttttagtagacactgggtttcaccacgttggtcaggctggtctcgaactcctgacctcaggtgatccacctacctcagcttcccaaaagcgtgagccaccgcgcccggcctttagaatgctttaattttctctcagagactattttgtggttgggaatgacaaattacagttcatgagctgaattctttccagtctgtttctgtaatgccaataaccttagaatggtgataagagttttcaaagtttgtagaaaagaggaaaggaaaaaagggagaaaaacagaggaaaatatgcaacagagaccatatgcaatcttcagagcctataatatctactatctggtcctttacagaaaaatttgcctcttttgtgattttcagtgtataagtcttgtacagtatttactaatttatccttatgtgttttataagttttttgtatgctatcgtaaatggtatcttttacattttagttttcagtattcaccactggaaaatacagttgatttttatatattcaccttgtatgctagaactttgctaaattcactctttacttttaatagtttctttgtgaattccttaggatattctatgttcacagtcatgttttctatgaacaaagagagttttgcttcttccttttt

SEQ ID NO: 3747 - protein, 156 aa, Homo sapiens [sequence omitted]

SEQ ID NO: 3748 - DNA, 2735 bp, Homo sapiens
aatgtagcctgaaactacatttctcagcggccactggaacgacctcaatctctgcctcctcgccagttcattgtggtcgttgacccggcagcgagctttggagttcatcgagggagaagtcagcgcccagctccgaggttggagcagccccgccgggcaacttgaatttctgcaaacgaacacagcaccgggagctctgcagacctgtgtcggcgcggaacccggactgagacatgccttttgaacttctcagatagaggaaccccagtgaagactgatcagttcttacaattctcaaagcatggcccataaatatgtgggtttgcagtatcacggatcagtgacatttgaggatgtggccatagccttctcccagcaggagtgggagagtctggactcttcccagaggggcttgtacagagatgtgatgttggagaactacaggaacttggtgtcaatgggacattcccgttctaaaccacatgtgatcgccttattggaacaatggaaagagcctgaagtgacagtgaggaaagatggaagaagatggtgcacaggataagaaagctccagtctacaaacaaaacatgccagaagatttttaggcgatgatgccacctgcacatggaaccaaaagatttgcagttggaagatgatacaatcggctgtaaagaaatgcccacctctgaaaactgtccatcttttgctctacatcagaaaataagtagacagaaaccacgtgaatgtcgggaatatggaaagaccctttgtcaagactcaaagcctgttcaacatgaaagaatacatagtagtgaaaaacccaacagatgtaaagaatgtgggaagaactttagtaatggacatcaactcaccatacatcagagattgcatgttggtgagaaaccctataaatatgaaaaatgtgggaaggcctttatcagtggctcagcctttgttaggcatgggagaattcacactggtgagaagccactcaaatgtaagcaatgtggaaagactattagcggtagctatcaacttacagtacataagagtattcatactgggaagaaaccatatgagtgcggggaatgttggaaagcttttctagtatatggaaagcttacccggcatcagagtactcacactggtgaaaaaccctttgggtgtgaggagtgtgggaaggccttcagtaccttttcatacctggttcaacatcagcgaattcataccagtgaaaaaccttacgaatgcaaagaatgtgggaaggcctttagcactagctcaccccttgttaagcatcagagaattcatactggcgagaaaccctatgaatgtaaggagtgtgggaagtccttcactgtgtatggacagcttactcgacatcagagtattcatactggtgagaaaccttttgaatgtaaggaatgtggaaaggcctttagacttagttccttccttcatgcacatcagcgaattcatgcagagataaagccctacggatgcaaggaatgcgggaaaaccttcagtcgtgcctcatatcttgttcaacatggaagacttcacactggcgagaagccctatgaatgtaaggagtgtggcaaggcctttagtactggctcataccttgttcagcatcagaggatccatactggggagaaaccctatgaatgtaaggaatgtggcaaagcctttattagtcgccatcagcttaccgtacatcaaagggttcatactggagagaaaccctatgagtgtaaggaatgtggcaaggccttcagagtgcacgtacatctcacacagcatcggaaaattcatactgatgtaaagccctatgaatgtaaggaatgtggaaagactcttagtcgagcctcgtaccttgtacaacatagcagaatccatactggtaagaagccctatgagtgtaaggagtgtggcaaggccttcagttctggctcataccttgttcagcatcaaagaattcatactggggagaaaccctatgaatgtaacaaatgtgggaaagcctttactgtttatggacaacttattggacatcagagtgttcacactggtgagaaaccttttgaatgtaaggaatgcgggaaggcctttagacttaattcattccttactgaacatcagcgggtacacactggtgagaaaccctttaaatgcaaaaaatgtgggaagacctttagatacagttcagcccttaaagtgcatctgagaaaacatatgagtgttataccctaagagtctgaggagtgtgggaagtgcttcgtgtgtggctcaaacattgttgaacatcggggaatttatgctggtaggaaactttcaaatgtgaagaatattggcaggtctattctcatcttataattcataatataactcagaaaacataagaatattcctttgtcatttataggtttgtaataccaatatttatactggtggaccattcagaaaaagtgggaaacgttattacttaatggttacagcactgacagcatgaacttttatatgatgcatttattctaatgtgattgtatgaacaagtgaataaaaaaccttggacctcctaaaaaaaaaaaaaaaaaaaaaaaaaaaaaaaaaaaaaaaaaaaaaaaaaaaaaaaaaaaaaaaaaaaaaaaaaaaaaaaaaaaaaaaaaaaaaaaaaaaaaaaaaaaaaaaaaaaaaaaaaaaaaaaaaaaaaaaaaaaaaaaaaaaaaaaaaaa

SEQ ID NO: 3749 - protein, 542 aa, Homo sapiens
MEPKDLQLEDDTIGCKEMPTSENCPSFALHQKISRQKPRECREYGKTLCQDSKPVQHERIHSSEKPNRCKECGKNFSNGHQLTIHQRLHVGEKPYKYEKCGKAFISGSAFVRHGRIHTGEKPLKCKQCGKTISGSYQLTVHKSIHTGKKPYECGECWKAFLVYGKLTRHQSTHTGEKPFGCEECGKAFSTFSYLVQHQRIHTSEKPYECKECGKAFSTSSPLVKHQRIHTGEKPYECKECGKSFTVYGQLTRHQSIHTGEKPFECKECGKAFRLSSFLHAHQRIHAEIKPYGCKECGKTFSRASYLVQHGRLHTGEKPYECKECGKAFSTGSYLVQHQRIHTGEKPYECKECGKAFISRHQLTVHQRVHTGEKPYECKECGKAFRVHVHLTQHRKIHTDVKPYECKECGKTLSRASYLVQHSRIHTGKKPYECKECGKAFSSGSYLVQHQRIHTGEKPYECNKCGKAFTVYGQLIGHQSVHTGEKPFECKECGKAFRLNSFLTEHQRVHTGEKPFKCKKCGKTFRYSSALKVHLRKHMSVIP

SEQ ID NO: 3750 - DNA, 3302 bp, Homo sapiens
gggtgcctgacagtgtggatatgacatcagccatggccagaggggcttatggcaggcctggctctgatttttgccatggaacagagggcaaggacttaccttctgagcataacgtttctgtagaaggagtggcacaggacaggagtcccgaggcaactctgtgcccccagaagacctgcccctgtgacatatgtggcctacgtttgaaagacattttgcatttggctgaacaccagacaacacatcccaggcagaaaccatttgtgtgtgaggcatatgtgaaaggctctgagttcagtgcaaaccttccccagaaacaggtgcagcagaacgtacacaaccctatcagaacggaggagggccaggcttcccctgtaaagacctgcagagaccacacatcagatcagctttccacctgcagggagggtgggaaggactttgtggccacagcagggtttctgcagtgtgaggtcactcccagcgatggggagccgcacgaggccaccgaaggtgtggtggattttcacattgcactaaggcataacaagtgctgtgaatctggggatgccttcaataacaaatccactcttgttcagcaccagagaatccacagcagagaaaggccttatgaatgcagcaaatgtggaatcttcttcacttacgccgctgacctcactcaacaccagaaagttcacaatagaggaaaaccgtatgagtgctgtgaatgtggaaaattcttcagccagcactccagccttgttaaacatcgcagggttcacaccggtgaaagccctcacgtgtgtggtgactgtgggaaattcttcagccgaagctccaacctcattcagcataagagggttcacactggtgaaaagccatatgagtgcagcgactgtgggaagttcttcagccagcgttccaacctcattcatcataagagggttcatacgggcagaagtgcccatgagtgcagtgaatgtgggaaatctttcaactgcaactccagcctaattaaacattggagagttcacactggagaaagaccttacaagtgtaacgaatgtgggaaattcttcagccacattgccagcctcattcaacatcagatagttcacactggcgagcggcctcacgggtgtggtgagtgtgggaaagccttcagccgaagctctgacctcatgaaacatcagcgagttcacactggtgagcggccttatgaatgcaatgaatgtgggaagttatttagccagagctccagcctcaatagccatcggagacttcacactggtgaacggccttaccagtgcagtgaatgtgggaaattctttaaccaaagctccagcctcaataaccaccggagacttcacaccggcgagcggccttatgagtgcagcgaatgtgggaaaaccttcaggcagaggtccaatctgaggcagcacctgaaagttcacaaaccagacaggccttacgaatgcagcgaatgtgggaaagccttcaaccaaaggcctaccctcattcggcatcagaagattcacatcagagaaaggagcatggagaatgtgctccttccctgttcacagcacacaccagagataagctctgagaacagaccttatcagggcgctgtcaactacaagttgaaacttgttcatccaagtacccaccctggggaggttccctaggaatgctagctgtgttggaagctttctggagacaagttacattctcttactgtagagtttatcagcgttttttcactgctggggttgtgatagaagccatgtcagcaccacacactgcagctctccaaagagtgtgtccaccactccactgtgctcagggaaggcagacctctcctctctctttccaatccctaaagggaattaggagtagtctgaagccttgggaagatgtcattcccgccctgtatggctggtttagccatggacatgaccagcttttggctgtgaagacctgagcagggttttgccaacagcttgttctagagaaggtttccctttttctgggacattgttggtctcatgttatgcctgtgaaggatttgtccagccttcatgttactctacacaacaacttatctcctgtgtattgccctggttcatgtgatgataatggccttatgataaagccgcctttagtcttccatgttctgatcactgtgtggggtggttcaagagcagagttaagatctaccaaactgaaggggtctccagattatcttggaggggacaggaggatggcagagaaacaactgtcaatccagatttgacctcatttgcattgccaccaaggcctcctaggaaaaattgtaggaatttatgggtataatattgtggtctgaatggcgtgaatttttatcccgaggagggggcagttgtgacaacctccagtgcatgtgggaacagcatgaattgggtcccttattcccagggggtgccccatattccccaatactgtaaagcagatgctgtttagcacctgccaaggagccatatgccctgaagttcagcattaggcaggtatctcttaactgtaagacataccaggcccagctgggaccataatttgtacagaaacactggatgtgattaatagggagtaggcgagattatagcaaaccagcagaaatggaactctgctaaatgtgcatccgtgaatgctcccttgaatgtggctgtgcaggattcagggtttgcagaaattctcaggacctcagacctctgtcctatgactaatgttactggcagagcaaataatctaaaggttttggttttgtggattaccatctccgtgctgtgcatctgaaggccagtgctgtgctggcaggaaaatagggactgagaaaaagcagatcctatactatagggactgtagtatctatgacgtagccagccattctttgctcccaaggcaagaagaaagagatgacagagtcaatatagggttgccaaatcggattttctaaaatgagtaggaagttggatttttatgtgcaacagtttcttttaatgctttgttgatatgtgattgtcatgcaataattattcatatttggtaagttttgtacatatattatgtacactcagggaaccaataccataatcatgataatgaacgtatccatcacctgcaaagctacctcatgcccctttacattccctccttgccttccctaggaaaccgttgatttacattttttactttagatttgtttgccttttctagaattaacacaattggaatcataaagtatttatactctcaaaaaaaaaaaaaaaaaa

SEQ ID NO: 3751 - protein, 553 aa, Homo sapiens
MTSAMARGAYGRPGSDFCHGTEGKDLPSEHNVSVEGVAQDRSPEATLCPQKTCPCDICGLRLKDILHLAEHQTTHPRQKPFVCEAYVKGSEFSANLPQKQVQQNVHNPIRTEEGQASPVKTCRDHTSDQLSTCREGGKDFVATAGFLQCEVTPSDGEPHEATEGVVDFHIALRHNKCCESGDAFNNKSTLVQHQRIHSRERPYECSKCGIFFTYAADLTQHQKVHNRGKPYECCECGKFFSQHSSLVKHRRVHTGESPHVCGDCGKFFSRSSNLIQHKRVHTGEKPYECSDCGKFFSQRSNLIHHKRVHTGRSAHECSECGKSFNCNSSLIKHWRVHTGERPYKCNECGKFFSHIASLIQHQIVHTGERPHGCGECGKAFSRSSDLMKHQRVHTGERPYECNECGKLFSQSSSLNSHRRLHTGERPYQCSECGKFFNQSSSLNNHRRLHTGERPYECSECGKTFRQRSNLRQHLKVHKPDRPYECSECGKAFNQRPTLIRHQKIHIRERSMENVLLPCSQHTPEISSENRPYQGAVNYKLKLVHPSTHPGEVP

SEQ ID NO: 3752 - DNA, 2715 bp, Homo sapiens
gtcgggtgggggcggcggccgcggaaggccaggccggtgccctgcggggacgcccagcgcagcccagccccgcgcagcccagccctgccctgccctgccctgccctgccctgccctgcgcccggggcgcgcccaccgcgccgcatccatgttcgacaccacaccccactctggccggagcacgccaagcagctccccatcgctccggaaacggctgcagctcctgcccccaagccggcccccacctgagccagaaccaggcaccatggtggagaagggatcagatagctcctcagagaagggtggggtgcctgggacccccagcacccagagcctaggcagccggaacttcatccgcaacagcaagaagatgcagagctggtacagtatgctgagccccacttataagcagcgtaatgaggacttccggaaactgttcagcaaactccccgaagcagaacgcctcattgtggattactcctgcgccctgcagcgtgagatcctgctccagggccgcctctacctctctgagaactggatctgcttctacagcaacatcttccgctgggagaccacgatctccatccagctgaaggaagtgacatgtctgaagaaggaaaagacggccaagctgatccccaacgccatccagatctgcacggagagcgagaagcatttcttcacttcctttggggcccgtgaccgctgcttcctcctcatcttccgcctctggcagaatgcactgcttgaaaagacgctgagtccccgcgagctctggcacctggtgcatcagtgctacggctcagagctgggcctcaccagtgaggatgaggactatgtctcccccttgcagctgaacggtctggggacccccaaggaagtgggagatgtgatcgccctgagcgacatcacctcctcgggggcagctgaccgcagccaggagccaagcccagtgggttcgcgccgtggccatgtcacgcccaacctttcccgagccagcagcgacgcagaccatggggcagaggaggacaaggaggagcaggtagacagccagccagacgcctcctccagccagacagtgaccccggtggctgaacccccgagcacagagcccacccagcctgacgggcccaccaccctgggccccttggatctgctgcccagtgaggagctattgacagacacaagtaactcctcttcatccactggggaggaagcagacttggctgccctgcttcccgacctctccggccgcctcctcatcaactctgtcttccatgtgggcgctgagcggctccagcagatgctcttctcggactcgcccttcctccagggcttcctacagcagtgcaagttcacagacgtgaccctgagcccctggagtggggacagcaagtgccaccagcgccgggtgctgacgtacaccatccccatcagcaacccactgggccccaagagcgcctccgtggtggagacacagacgctgttccggcgcggcccccaggccggcgggtgtgtggtggactccgaggtgctgacgcagggcatcccctaccaggactacttctacactgcccaccgctactgcatcctgggtctggcccggaacaaggcgcggctccgagtgtcttctgagatccgctaccgaaagcagccgtggagcctggtgaagtcgctcattgagaagaactcgtggagcggcattgaagactatttccaccatctggagcgagagctcgccaaggctgagaagctgtctctggaggaaggcgggaaggatgcccggggcttgctatccggcctgcggcggcggaagcggcccctgagctggcgggctcacggggacgggccccagcacccagatcctgacccctgtgcccgggccggcattcacacctcgggctccctcagctcccgcttctccgaaccatctgtggaccagggccccggggcaggcatccccagtgccctggttctcatcagcattgtgatctgtgtgagccttatcatcctcatcgccctcaacgtcctgctcttctaccgcctctggtccctggaaaggacagcccacacctttgagtcctggcacagcctggccctggccaagggcaagttcccccagacggccacagagtgggccgagatcctggcgctgcagaagcaattccacagcgtggaggtgcacaagtggaggcagatcctgcgggcctccgtggagctcctggatgagatgaagttctcgctggagaagctgcaccaaggcatcacagtctcagaccctccctttgacacccagccccggcccgatgacagcttttcctgaggaccccggccacgcagctgttcccccacatggacagatggacacacagagcctcggcggccactgctggcacggtgtgagcgccaggcatctcccacccgcccctcccgacggcccaaccaggggctgtgcagacgtggggaccacggaaccgagatgcactttagaccagggagctggcccggcctctggcaggccccccactaacttattttgcccggctgaggttgtggggggcgcctcctggggtgcacgattccctcagctctgggtttaatgtattatatttatttggggccgacagtgccccaataaagggtcagaagtgaaaaaaaaaaaaaaaaaaaaaaaaaaaaaaaaaaaaaaaaaaaaaaaaaaaaaaaaaaaaaaaaa

SEQ ID NO: 3753 - protein, 724 aa, Homo sapiens
MFDTTPHSGRSTPSSSPSLRKRLQLLPPSRPPPEPEPGTMVEKGSDSSSEKGGVPGTPSTQSLGSRNFIRNSKKMQSWYSMLSPTYKQRNEDFRKLFSKLPEAERLIVDYSCALQREILLQGRLYLSENWICFYSNIFRWETTISIQLKEVTCLKKEKTAKLIPNAIQICTESEKHFFTSFGARDRCFLLIFRLWQNALLEKTLSPRELWHLVHQCYGSELGLTSEDEDYVSPLQLNGLGTPKEVGDVIALSDITSSGAADRSQEPSPVGSRRGHVTPNLSRASSDADHGAEEDKEEQVDSQPDASSSQTVTPVAEPPSTEPTQPDGPTTLGPLDLLPSEELLTDTSNSSSSTGEEADLAALLPDLSGRLLINSVFHVGAERLQQMLFSDSPFLQGFLQQCKFTDVTLSPWSGDSKCHQRRVLTYTIPISNPLGPKSASVVETQTLFRRGPQAGGCVVDSEVLTQGIPYQDYFYTAHRYCILGLARNKARLRVSSEIRYRKQPWSLVKSLIEKNSWSGIEDYFHHLERELAKAEKLSLEEGGKDARGLLSGLRRRKRPLSWRAHGDGPQHPDPDPCARAGIHTSGSLSSRFSEPSVDQGPGAGIPSALVLISIVICVSLIILIALNVLLFYRLWSLERTAHTFESWHSLALAKGKFPQTATEWAEILALQKQFHSVEVHKWRQILRASVELLDEMKFSLEKLHQGITVSDPPFDTQPRPDDSFS

SEQ ID NO: 3754 - DNA, 1521 bp, Homo sapiens
gctgggcccccggcggtaaccggagcgggggggccgcgccccccctcctcccccctcgccggtcccagagccgcagctgctgcgcccgcgcgctcccggggacattctaaccgccgccaggtcccgccgcctctcgccccgctattaataccggcggcccgggaggggggcgcagcacgcgccgcgcagccatggggaggctgctggccttagtggtcggcgcggcactggtgtcctcagcctgcgggggctgcgtggaggtggactcggagaccgaggccgtgtatgggatgaccttcaaaattctttgcatctcctgcaagcgccgcagcgagaccaacgctgagaccttcaccgagtggaccttccgccagaagggcactgaggagtttgtcaagatcctgcgctatgagaatgaggtgttgcagctggaggaggatgagcgcttcgagggccgcgtggtgtggaatggcagccggggcaccaaagacctgcaggatctgtctatcttcatcaccaatgtcacctacaaccactcgggcgactacgagtgccacgtctaccgcctgctcttcttcgaaaactacgagcacaacaccagcgtcgtcaagaagatccacattgaggtagtggacaaagccaacagagacatggcatccatcgtgtctgagatcatgatgtatgtgctcattgtggtgttgaccatatggctcgtggcagagatgatttactgctacaagaagatcgctgccgccacggagactgctgcacaggagaatgcctcggaatacctggccatcacctctgaaagcaaagagaactgcacgggcgtccaggtggccgaatagccctggccctgggccccgcctcaaggaagagccagccgtaatggggactctccaggcaccgcctgcccccagcgtgggggtggccactcctgggccccagaaagcctcagagtcctgccgacggagccactggggtgggagggggcagggggcttggctcgcacccccactttcgcctcctccagctcctgccccgccggccgcgcaccgccatgcatgatgggtaaagcaatactgccgctgcccccaccctgcttctgctgcctgtttggggaggggggcggtgaggtgggggcagcggccccgcacccctcctccttgctgatttgcacacattggccgcttcagacacgcacttctggggccagcccctccccgcctcctccctgcctggcggcaggggtcgcgatgatgggctggagcagtttggggcagggggttctgggacccactccgactccccctccccggcatcatttcccctcccgcttcctccggctggacctggggtcccccctccctgtaatgcactcctgccccggcccaacctcgccctctctcaccagccttgaactgtggccacctagaaaggggcccattcagcctcgtctctttacagaagtagttttgttcatgaaataaagactcttggacttgaaaaaaaaaaaaaaaa

SEQ ID NO: 3755 - protein, 218 aa, Homo sapiens
MGRLLALVVGAALVSSACGGCVEVDSETEAVYGMTFKILCISCKRRSETNAETFTEWTFRQKGTEEFVKILRYENEVLQLEEDERFEGRVVWNGSRGTKDLQDLSIFITNVTYNHSGDYECHVYRLLFFENYEHNTSVVKKIHIEVVDKANRDMASIVSEIMMYVLIVVLTIWLVAEMIYCYKKIAAATETAAQENASEYLAITSESKENCTGVQVAE

SEQ ID NO: 3756 - DNA, 1170 bp, Homo sapiens
gctgggcccccggcggtaaccggagcgggggggccgcgccccccctcctcccccctcgccggtcccagagccgcagctgctgcgcccgcgcgctcccggggacattctaaccgccgccaggtcccgccgcctctcgccccgctattaataccggcggcccgggaggggggcgcagcacgcgccgcgcagccatggggaggctgctggccttagtggtcggcgcggcactggtgtcctcagcctgcgggggctgcgtggaggtggactcggagaccgaggccgtgtatgggatgaccttcaaaattctttgcatctcctgcaagcgccgcagcgagaccaacgctgagaccttcaccgagtggaccttccgccagaagggcactgaggagtttgtcaagatcctgcgctatgagaatgaggtgttgcagctggaggaggatgagcgcttcgagggccgcgtggtgtggaatggcagccggggcaccaaagacctgcaggatctgtctatcttcatcaccaatgtcacctacaaccactcgggcgactacgagtgccacgtctaccgcctgctcttcttcgaaaactacgagcacaacaccagcgtcgtcaagaagatccacattgaggtagtggacaaaggtgagtcgggtgctgcctgcccctttaccgtcacccaccggagagccagatggagggacagatggcaggcagtggacaggacaggctggctctgtgcctggccagccaaccgcccacagcagcgggctgagggggaggggagcagcccctcctgcccactccagctctggcctctgtttctctccagcccacggagaggtcaaagcatgcctgtcccccacagacgctccgggtacagaacccagctctgtcacctgtgctgtatgacctctggcaggtgccttctgtctctgagccaaagggttgtcctgggcttgcccgggataataatccgatgtgtttctcggggtgtggtttgagccattcttccatcatggggttcatgaggattgagcagctgcaggcacacgcctggcttccagcagagccttgcaggtggtggcgagggtggcggttcttactgttcgagtagctcagccctgctgccctctgtggtgatgaggcaagagagcgtgccacctagagcagagt

SEQ ID NO: 3757 - protein, 268 aa, Homo sapiens
MGRLLALVVGAALVSSACGGCVEVDSETEAVYGMTFKILCISCKRRSETNAETFTEWTFRQKGTEEFVKILRYENEVLQLEEDERFEGRVVWNGSRGTKDLQDLSIFITNVTYNHSGDYECHVYRLLFFENYEHNTSVVKKIHIEVVDKGESGAACPFTVTHRRARWRDRWQAVDRTGWLCAWPANRPQQRAEGEGSSPSCPLQLWPLFLSSPRRGQSMPVPHRRSGYRTQLCHLCCMTSGRCLLSLSQRVVLGLPGIIIRCVSRGVV

SEQ ID NO: 3758 - DNA, 1783 bp, Homo sapiens
tcgagcccgctttccagggaccctacctgagggcccacaggtgaggcagcctggcctagcaggccccacgccaccgcctctgcctccaggccgcccgctgctgcggggccaccatgctcctgcccaggcctggagactgacccgaccccggcactacctcgaggctccgcccccacctgctggaccccagggtcccaccctggcccaggaggtcagccagggaatcattaacaagaggcagtgacatggcgcagaaggagggtggccggactgtgccatgctgctccagacccaaggtggcagctctcactgcggggaccctgctacttctgacagccatcggggcggcatcctgggccattgtggctgttctcctcaggagtgaccaggagccgctgtacccagtgcaggtcagctctgcggacgctcggctcatggtctttgacaagacggaagggacgtggcggctgctgtgctcctcgcgctccaacgccagggtagccggactcagctgcgaggagatgggcttcctcagggcactgacccactccgagctggacgtgcgaacggcgggcgccaatggcacgtcgggcttcttctgtgtggacgaggggaggctgccccacacccagaggctgctggaggtcatctccgtgtgtgattgccccagaggccgtttcttggccgccatctgccaagactgtggccgcaggaagctgcccgtggaccgcatcgtgggaggccgggacaccagcttgggccggtggccgtggcaagtcagccttcgctatgatggagcacacctctgtgggggatccctgctctccggggactgggtgctgacagccgcccactgcttcccggagcggaaccgggtcctgtcccgatggcgagtgtttgccggtgccgtggcccaggcctctccccacggtctgcagctgggggtgcaggctgtggtctaccacgggggctatcttccctttcgggaccccaacagcgaggagaacagcaacgatattgccctggtccacctctccagtcccctgcccctcacagaatacatccagcctgtgtgcctcccagctgccggccaggccctggtggatggcaagatctgtaccgtgacgggctggggcaacacgcagtactatggccaacaggccggggtactccaggaggctcgagtccccataatcagcaatgatgtctgcaatggcgctgacttctatggaaaccagatcaagcccaagatgttctgtgctggctaccccgagggtggcattgatgcctgccagggcgacagcggtggtccctttgtgtgtgaggacagcatctctcggacgccacgttggcggctgtgtggcattgtgagttggggcactggctgtgccctggcccagaagccaggcgtctacaccaaagtcagtgacttccgggagtggatcttccaggccataaagactcactccgaagccagcggcatggtgacccagctctgaccggtggcttctcgctgcgcagcctccagggcccgaggtgatcccggtggtgggatccacgctgggccgaggatgggacgtttttcttcttgggcccggtccacaggtccaaggacaccctccctccagggtcctctcttccacagtggcgggcccactcagccccgagaccacccaacctcaccctcctgacccccatgtaaatattgttctgctgtctgggactcctgtctaggtgcccctgatgatgggatgctctttaaataataaagatggttttgatt

SEQ ID NO: 3759 - protein, 417 aa, Homo sapiens
MAQKEGGRTVPCCSRPKVAALTAGTLLLLTAIGAASWAIVAVLLRSDQEPLYPVQVSSADARLMVFDKTEGTWRLLCSSRSNARVAGLSCEEMGFLRALTHSELDVRTAGANGTSGFFCVDEGRLPHTQRLLEVISVCDCPRGRFLAAICQDCGRRKLPVDRIVGGRDTSLGRWPWQVSLRYDGAHLCGGSLLSGDWVLTAAHCFPERNRVLSRWRVFAGAVAQASPHGLQLGVQAVVYHGGYLPFRDPNSEENSNDIALVHLSSPLPLTEYIQPVCLPAAGQALVDGKICTVTGWGNTQYYGQQAGVLQEARVPIISNDVCNGADFYGNQIKPKMFCAGYPEGGIDACQGDSGGPFVCEDSISRTPRWRLCGIVSWGTGCALAQKPGVYTKVSDFREWIFQAIKTHSEASGMVTQL

SEQ ID NO: 3760 - DNA, 2363 bp, Homo sapiens
tcgagcccgctttccagggaccctacctgagggcccacaggtgaggcagcctggcctagcaggccccacgccaccgcctctgcctccaggccgcccgctgctgcggggccaccatgctcctgcccaggcctggagactgacccgaccccggcactacctcgaggctccgcccccacctgctggaccccagggtaaggacaagggcccccagactcacagttccagccctgaggacaggggttccctcatccccccacccagcctaatgcccacctcctaatagaggggttcctggggacctgaagagggggcactatgacgtctccccaagcacctaggtgttctgtcctgctcttccttcagactcagccgttggaccccagtcctttcctccccagacccaggagttccagccctcaggcccctcctccctcatactagggagtcctggcccccaaattcctcctttcccaagacttatgatttcaggtcctcagctgtctcctccctcaaaccgggatcctcagtcccctgctccaccaggctcaggcatgggggtccccatccctgcaaatccaggcgtccccccgctgctggtcagacactgaccccatccttgaacccagcccaatctgcgtccgtgatcacggcgtgctctggccaaggcccagtccctacagcctgcctggatggacgcctgggactgggggcgccaggactgggctgggctgggctcccccaggccctgcctccccgtccatctcctcacaggtcccaccctggcccaggaggtcagccagggaatcattaacaagaggcagtgacatggcgcagaaggagggtggccggactgtgccatgctgctccagacccaaggtggcagctctcactgcggggaccctgctacttctgacagccatcggggcggcatcctgggccattgtggctgttctcctcaggagtgaccaggagccgctgtacccagtgcaggtcagctctgcggacgctcggctcatggtctttgacaagacggaagggacgtggcggctgctgtgctcctcgcgctccaacgccagggtagccggactcagctgcgaggagatgggcttcctcagggcactgacccactccgagctggacgtgcgaacggcgggcgccaatggcacgtcgggcttcttctgtgtggacgaggggaggctgccccacacccagaggctgctggaggtcatctccgtgtgtgattgccccagaggccgtttcttggccgccatctgccaagactgtggccgcaggaagctgcccgtggaccgcatcgtgggaggccgggacaccagcttgggccggtggccgtggcaagtcagccttcgctatgatggagcacacctctgtgggggatccctgctctccggggactgggtgctgacagccgcccactgcttcccggagcggaaccgggtcctgtcccgatggcgagtgtttgccggtgccgtggcccaggcctctccccacggtctgcagctgggggtgcaggctgtggtctaccacgggggctatcttccctttcgggaccccaacagcgaggagaacagcaacgatattgccctggtccacctctccagtcccctgcccctcacagaatacatccagcctgtgtgcctcccagctgccggccaggccctggtggatggcaagatctgtaccgtgacgggctggggcaacacgcagtactatggccaacaggccggggtactccaggaggctcgagtccccataatcagcaatgatgtctgcaatggcgctgacttctatggaaaccagatcaagcccaagatgttctgtgctggctaccccgagggtggcattgatgcctgccagggcgacagcggtggtccctttgtgtgtgaggacagcatctctcggacgccacgttggcggctgtgtggcattgtgagttggggcactggctgtgccctggcccagaagccaggcgtctacaccaaagtcagtgacttccgggagtggatcttccaggccataaagactcactccgaagccagcggcatggtgacccagctctgaccggtggcttctcgctgcgcagcctccagggcccgaggtgatcccggtggtgggatccacgctgggccgaggatgggacgtttttcttcttgggcccggtccacaggtccaaggacaccctccctccagggtcctctcttccacagtggcgggcccactcagccccgagaccacccaacctcaccctcctgacccccatgtaaatattgttctgctgtctgggactcctgtctaggtgcccctgatgatgggatgctctttaaataataaagatggttttgatt

SEQ ID NO: 3761 - protein, 417 aa, Homo sapiens; identical to SEQ ID NO: 3759

SEQ ID NO: 3762 - DNA, 1433 bp, Homo sapiens
gtaaactgaactggggctgggcaacaggaaaaaagaagaaaccacagattagagaaatctcggcggtcaggaggcccggggtctaagatgtaaagaggtaaacagatttagggattgattgtctgctggggtgggttgagaggagaaaagggaagaaaagtcgggggactacgtcctcagacctgacctgagtggtgagaggtggacccaggaggagtggcaggtggtggcggggttttgcagagctcagttggaggccctctccgaggcagcttgatggaacgtgggagagccgggctggagtcacagtttttattttgctagggaggtagtcagtggcgcacaaagggtaacaagcagtgatagtggggatgctttccattttaggaaacttttcctaaaaggaagtggcaattttaactaatctcccctccgccgctcccagctgccgctccagatgctgctgctgccgccgcggccaccccaccctcggtcctcctctccggaggccatggacccaccgccccccaaggctccccctttccccaaggcggaaggcccctcctccactccttcctcggcggcggggccccgacccccgcggctgggccgccacctcctcatcgacgccaatggggtcccctacacatacacggtgcagctggaggaggagccccggggcccgccccagcgcgaggcgcccccaggagagcccggccctcgcaagggctacagctgcccggagtgcgcccgtgtctttgccagccctctgcggctgcagagccaccgcgtgtcgcactcggacctcaagcccttcacgtgcggcgcctgcggcaaggccttcaagcgctccagccacctgtcgcggcatcgcgccacgcaccgcgcccgcgccgggccgccgcacacctgcccgctctgcccacgccgcttccaggacgccgcggagctggcgcagcacgtgcgcctccactaagctcgagacccggcctgtgctgccctgcccgtctcagggccaccaagtctgacccacacagcgtcactcactcccacacacaccccctggctctgctgaggttactgccttaccctgggcctcagtttccccaccttccaaagggaggagcatcattccttccttaccccctttctagctgtgtgatgtagaccaaagtcgttgcccctccctgggcctgggaaccagtcggaactgggttccagtccagctgtgctgtgtgagcctgtgcaagtgacatgacctctctaaaccttggttttctgctctctggagcggtgaaccggtggttgtctgcggggaagagatgataaagagcacgggcacggtctggttcatttctgtatctaccccccttccgcccacgcccccgaccctttgctcaataaacattccgcactccaaaaaaaaaaaaaaa

SEQ ID NO: 3763 - protein, 172 aa, Homo sapiens
MLLLPPRPPHPRSSSPEAMDPPPPKAPPFPKAEGPSSTPSSAAGPRPPRLGRHLLIDANGVPYTYTVQLEEEPRGPPQREAPPGEPGPRKGYSCPECARVFASPLRLQSHRVSHSDLKPFTCGACGKAFKRSSHLSRHRATHRARAGPPHTCPLCPRRFQDAAELAQHVRLH

SEQ ID NO: 3764 - DNA, 1152 bp, Homo sapiens
cccctcgcacccccgcgcccccagtccccgcgtccccggcgccgccggcccggagctgcccggaagtctcggttccgccgccggcgctcgccaggggaagcccggggccgcccgggacctcggcccgttcctccggacccgagaggccgccgcacgggctgccgctccagatgctgctgctgccgccgcggccaccccaccctcggtcctcctctccggaggccatggacccaccgccccccaaggctccccctttccccaaggcggaaggcccctcctccactccttcctcggcggcggggccccgacccccgcggctgggccgccacctcctcatcgacgccaatggggtcccctacacatacacggtgcagctggaggaggagccccggggcccgccccagcgcgaggcgcccccaggagagcccggccctcgcaagggctacagctgcccggagtgcgcccgtgtctttgccagccctctgcggctgcagagccaccgcgtgtcgcactcggacctcaagcccttcacgtgcggcgcctgcggcaaggccttcaagcgctccagccacctgtcgcggcatcgcgccacgcaccgcgcccgcgccgggccgccgcacacctgcccgctctgcccacgccgcttccaggacgccgcggagctggcgcagcacgtgcgcctccactaagctcgagacccggcctgtgctgccctgcccgtctcagggccaccaagtctgacccacacagcgtcactcactcccacacacaccccctggctctgctgaggttactgccttaccctgggcctcagtttccccaccttccaaagggaggagcatcattccttccttaccccctttctagctgtgtgatgtagaccaaagtcgttgcccctccctgggcctgggaaccagtcggaactgggttccagtccagctgtgctgtgtgagcctgtgcaagtgacatgacctctctaaaccttggttttctgctctctggagcggtgaaccggtggttgtctgcggggaagagatgataaagagcacgggcacggtctggttcatttctgtatctaccccccttccgcccacgcccccgaccctttgctcaataaacattccgcactccaaaaaaaaaaaaaaaaaaaaa

SEQ ID NO: 3765 - protein, 172 aa, Homo sapiens; identical to SEQ ID NO: 3763

SEQ ID NO: 3766 - DNA, 1258 bp, Homo sapiens
ctagaccctcttctctcccttcggcttctctctttcggccggcgccgccagttcctggggcacacccagaggtccccttctcgccgccgcctgcaactgcgagggtagcccggggccgcttggagtcgcccggacctgagaggctgctgcactgggcctcagccagccctccggatgctggtgctgccatccccctgccctcagcctctggcattttcctccgttgagaccatggagggccctccccgtcggacttgccgctccccagaacctggaccttcctcctccatcggatctccccaggcttcatctcctccaaggcccaaccactacctgcttattgacactcagggtgtcccctacacagtgctggtggacgaggagtcacagagggagccaggggccagtggggctccaggccagaaaaagtgctacagctgccccgtgtgctcaagggtcttcgagtacatgtcctaccttcagcgacacagcatcacccactcggaggtaaagcccttcgagtgtgacatctgtgggaaggcattcaagcgcgccagccacttggcacggcaccattccattcacctggcgggtggtgggcggccccacggctgcccgctctgccctcgccgcttccgggatgcgggtgagctggcccagcacagccgggtgcactctggggaacgcccgtttcagtgtccacactgccctcgccgctttatggagcagaacacactgcagaaacacacgcggtggaagcatccatgagccgggctgccgggtgccccaggtaccacaggactttgcagggagcctggactcctgtccagacacctggtgagagcctgaggctggtgttcagggccctggacacagacacagagcagccgcatctcaaaggcagagccctgcctgaaggaggaatccgtgagtaatcttcaggtcctccgtgttctggagctgagatgggaatgagcccctacacagaatggagtcctctagcctaaagatatcagctgttccatggcagagccttgactggatggaggtggggagtgtggtgtgtaaagtctctggcctcataaaaggtggctgtgggtcgtcaggaatctgcgccatcttcctggggcttctgcgctgttgttggggaagggaccccagtcctgccttccaccccccaaccaggcctgagactgatcaaacaataaacacgtttcccactctgaaaaaaaaaaaaaaaaaaaaaaaaaaaaaaaaa

SEQ ID NO: 3767 - protein, 197 aa, Homo sapiens
MLVLPSPCPQPLAFSSVETMEGPPRRTCRSPEPGPSSSIGSPQASSPPRPNHYLLIDTQGVPYTVLVDEESQREPGASGAPGQKKCYSCPVCSRVFEYMSYLQRHSITHSEVKPFECDICGKAFKRASHLARHHSIHLAGGGRPHGCPLCPRRFRDAGELAQHSRVHSGERPFQCPHCPRRFMEQNTLQKHTRWKHP

SEQ ID NO: 3768 - DNA, 1993 bp, Homo sapiens
ggctggggaggagcaggaacagtcaggactggaatctagctttgctccaaagccagctcttaattaccaacatggggatgggggtggcgtgttcctggccctcattttccgggagaggggtaactcccccgattttggcccccacatccctgagaaccttggggtctggctgtaggaggtaggggagctctgaggggtccgcgctggctagttcctgagagagcgttaaaagtagattctcctttcgctccaactttctcggtgtctcaaacactctcctgccttctgggcccattgggcacaccgccacccaatccggggacccccggagactcgccagctctccaggatgggaatttcgtgatgttccctgcctgagcttcggggagggcgggggagtgctgtaaggggctatcgcgcaagtgcagaccctctgcttctgccgcaaacggcgggcctcacctggacccggggactcttcaacgaggggcgctagcctggcccgactgggcgagtccccgcgtccctgcccgttccgtcgctcagttccacgacacgctcccctgccgccccgcctgttcgcgggtgggtgggcgcttccctcggctccccgtgacactttgcagacgctccccggcgccgggcatgggcgccgccgccgtcggtccccgagccggattccgcgagcggtgcccctgaggccctcggctgctggggtccgtaggaagccgcgccatgaatgaccggagcagtcggaggcggacaatgaaggacgatgagaccttcgagatctccattcccttcgatgaggcaccccacctagacccacagatcttttacagtctgagcccctctcggagaaacttcgaggagcctccggaggctgcgtcctccgccctggctctgatgaacagcgtcaagacccagctgcacatggctctggagaggaactcctggctgcagaagcgcatcgaggacctggaggaagagagggacttcctgcggtgccagctggacaaattcatctcttctgctcggatggaggcagaggaccactgccggatgaagcctgggcccaggcggatggagggggacagccgtggtggggctgggggcgaggcctcggaccctgagtcagcagcctcctccctcagcggagcgtccgaagaaggcagcgccagtgagaggaggcggcagaagcagaagggaggtgctagtcggaggcgctttgggaagcccaaggcccgggagaggcagcgagtgaaggacgccgacggggtcctctgccggtacaagaagatcctgggcaccttccagaagctcaagagcatgtcgcgggccttcgagcaccaccgcgtggacaggaacaccgtggcgctgaccacgcccatcgccgagctgctcattgtggcccccgagaagctggccgaggtgggcgagttcgacccctccaaggagcgcctgctcgagtactcccgccgctgctttctggccctggacgacgagacgctcaagaaggtgcaggcgctcaagaagagcaagctgctgctgcccatcacctaccgcttcaagcggtgatcgcaccacgcctccgcgcctccacccgggccttcctcccccgtggaccccggtggatgacctgcccctctccccgccgcgcccctgcccctcctcctcgctccctgggttgggggctcccttagccgggcccccaagcgcgacggccccggaccggccgcggccccttcccgaacgccggcacccccttccgcttgggctgcccagccctgtcctcgccgggccccttcctcctggaaaaccaggcaggcgggtgcccccccctcgagtgggggactgtacagaccccgtctccgccctggccccgcggaggagctgcccacctgattcccggacagacctccccaactccgcgtgagacagagaattattcagataatttaaattaaaaaacgacgtgaaaatttggaataaa

SEQ ID NO: 3769 - protein, 280 aa, Homo sapiens
MNDRSSRRRTMKDDETFEISIPFDEAPHLDPQIFYSLSPSRRNFEEPPEAASSALALMNSVKTQLHMALERNSWLQKRIEDLEEERDFLRCQLDKFISSARMEAEDHCRMKPGPRRMEGDSRGGAGGEASDPESAASSLSGASEEGSASERRRQKQKGGASRRRFGKPKARERQRVKDADGVLCRYKKILGTFQKLKSMSRAFEHHRVDRNTVALTTPIAELLIVAPEKLAEVGEFDPSKERLLEYSRRCFLALDDETLKKVQALKKSKLLLPITYRFKR

SEQ ID NO: 3770 - DNA, 3136 bp, Homo sapiens
ggagagcgcgccacagaacgacttttacgcaggcgcagaagcctgtttcccctcacccgcggcttccaccctgcgcaggcgcaaaaagccgcgctggcaacctccgcagcggtcgcgcgcacccttcacccctcttgctgcttttgtctggcacaaccttctcaggccctccgcgaggccggccctttttttctttcactttccccacccggagagccaggtgccgagaactaggacctcgtccccttctctatcccttcccctgatccatctcgtctctgttctccttcccttttccgttcccgaagccggaaggagccgaggtacccacggaaaaagtcgaagctgtccccggagagtgaggccttcacgaagcggtggcggaaggagccgaagttctctgatcggaggcgtgagcaagtggcatctccggaaagagccgaaacacggactcgagcttaatcccaggaggggcccgagggcgagatccggaaatctccggaaagagccgaaggccgggacggttaggattgtcggaagtggccgattgcttggacagggccggcggagaagatcggagcaagtccgtggaagaagccaaagactgggacggattgaattgttggaagaacccgaactcgcagaggggactgggcgcagtggcacacgaggacacacggaaacctccgaacgttgaggagataatctcggaaaagttacggaaacctgggaagtcggcgaaaccctacgttcgggtgttttcggaagcagccgaagcggccgcctgcttcgccttcgtccagtatccggagatagccgaggcgcttcggagccaggctcggggggaggggcaagctcgcgggcgggcgggcgggtgagggggcggagcccgggcggggcggggagggctgccggaggcttgattaggtaggaggtggcgaagcgccggcggcggccggaagtagccgaagccagcggcggaagtagccgaagcggctggagcgggcggcaaggcgaggcgaaagctgcacagggccctacgcggccgcctcagcatgtcggacttcgacgagttcgagcggcagctcaacgagaataaacaagagcgggacaaggagaaccggcatcggaagcgcagccacagccgctctcggagccgggaccgcaaacgccggagccggagccgcgaccggcgcaaccgggaccagcggagcgcctcccgggacaggcgacgacgcagcaaacctttgaccagaggcgctaaagaggagcacggtggactgattcgttccccccgccacgagaagaagaagaaggtccgtaaatactgggacgtgccacccccaggctttgagcacatcaccccaatgcagtacaaggccatgcaagctgcgggtcagattccagccactgctcttctccccaccatgacccctgacggtctggctgtgaccccaacgccggtgcccgtggtcgggagccagatgaccagacaagcccggcgcctctacgtgggcaacatcccctttggcatcactgaggaggccatgatggatttcttcaacgcccagatgcgcctgggggggctgacccaggcccctggcaacccagtgttggctgtgcagattaaccaggacaagaattttgcctttttggagttccgctcagtggacgagactacccaggctatggcctttgatggcatcatcttccagggccagtcactaaagatccgcaggcctcacgactaccagccgcttcctggcatgtcagagaacccctccgtctatgtgcctggggttgtgtccactgtggtccccgactctgcccacaagctgttcatcgggggcttacccaactacctgaacgatgaccaggtcaaagagctgctgacatcctttgggcccctcaaggccttcaacctggtcaaggacagtgccacggggctctccaagggctacgccttctgtgagtacgtggacatcaacgtcacggatcaggccattgcggggctgaacggcatgcagctgggggataagaagctgctggtccagagggcgagtgtgggagccaagaatgccacgctgagcaccatcaatcagacgcctgtgaccctgcaagtgccgggcttgatgagctcccaggtgcagatgggcggccacccgactgaggtcctgtgcctcatgaacatggtgctgcctgaggagctgctggacgacgaggagtatgaggagatcgtggaggatgtgcgggacgagtgcagcaagtacgggcttgtcaagtccatcgagatcccccggcctgtggacggcgtcgaggtgcccggctgcggaaagatctttgtggagttcacctctgtgtttgactgccagaaagccatgcagggcctgacgggccgcaagttcgccaacagagtggttgtcacaaaatactgtgaccccgactcttatcaccgccgggacttctggtagaggcggctgggggagggtgggggcagggctggctgggggcttctccccactcccgccccccccttatccccctctgaagacgatgggcagaggagtgacagccgcagacacacgacagccggcagcaactggaatggcagcaattaagggtggggggcgggggttggggggttggggggttagggcagggaggggactggggaagtgcgcacacagcccacacagacaacacgcacccacacagacacagagggaaggggttgggatggggacagggtgcacagcagggcggggtaggaccccagcccctcccaaaacagcctctccttctcccatagacccctttcttctccccttccccacggtaggaacatagcgtgtttatattttatggccaaactattttgaattttgttgtccggccctcagtgccctgccctctcccttaccaggaccacagctctgttccttcggcctctggtcctctctggtcccctcctgggtttcttacgtagttgatttttcctctttagtctcccccgacctgcgcccagccccgtggcccctgcccctctcctactctctgtggcagtttcatatttgctaagacgaatttgctcattaaacattttgttgtattttactttaaaaaaaaaaaaaaaaaa

SEQ ID NO: 3771 - protein, 471 aa, Homo sapiens
MSDFDEFERQLNENKQERDKENRHRKRSHSRSRSRDRKRRSRSRDRRNRDQRSASRDRRRRSKPLTRGAKEEHGGLIRSPRHEKKKKVRKYWDVPPPGFEHITPMQYKAMQAAGQIPATALLPTMTPDGLAVTPTPVPVVGSQMTRQARRLYVGNIPFGITEEAMMDFFNAQMRLGGLTQAPGNPVLAVQINQDKNFAFLEFRSVDETTQAMAFDGIIFQGQSLKIRRPHDYQPLPGMSENPSVYVPGVVSTVVPDSAHKLFIGGLPNYLNDDQVKELLTSFGPLKAFNLVKDSATGLSKGYAFCEYVDINVTDQAIAGLNGMQLGDKKLLVQRASVGAKNATLSTINQTPVTLQVPGLMSSQVQMGGHPTEVLCLMNMVLPEELLDDEEYEEIVEDVRDECSKYGLVKSIEIPRPVDGVEVPGCGKIFVEFTSVFDCQKAMQGLTGRKFANRVVVTKYCDPDSYHRRDFW

SEQ ID NO: 3772 - DNA, 3148 bp, Homo sapiens
ggagagcgcgccacagaacgacttttacgcaggcgcagaagcctgtttcccctcacccgcggcttccaccctgcgcaggcgcaaaaagccgcgctggcaacctccgcagcggtcgcgcgcacccttcacccctcttgctgcttttgtctggcacaaccttctcaggccctccgcgaggccggccctttttttctttcactttccccacccggagagccaggtgccgagaactaggacctcgtccccttctctatcccttcccctgatccatctcgtctctgttctccttcccttttccgttcccgaagccggaaggagccgaggtacccacggaaaaagtcgaagctgtccccggagagtgaggccttcacgaagcggtggcggaaggagccgaagttctctgatcggaggcgtgagcaagtggcatctccggaaagagccgaaacacggactcgagcttaatcccaggaggggcccgagggcgagatccggaaatctccggaaagagccgaaggccgggacggttaggattgtcggaagtggccgattgcttggacagggccggcggagaagatcggagcaagtccgtggaagaagccaaagactgggacggattgaattgttggaagaacccgaactcgcagaggggactgggcgcagtggcacacgaggacacacggaaacctccgaacgttgaggagataatctcggaaaagttacggaaacctgggaagtcggcgaaaccctacgttcgggtgttttcggaagcagccgaagcggccgcctgcttcgccttcgtccagtatccggagatagccgaggcgcttcggagccaggctcggggggaggggcaagctcgcgggcgggcgggcgggtgagggggcggagcccgggcggggcggggagggctgccggaggcttgattaggtaggaggtggcgaagcgccggcggcggccggaagtagccgaagccagcggcggaagtagccgaagcggctggagcgggcggcaaggcgaggcgaaagctgcacagggccctacgcggccgcctcagcatgtcggacttcgacgagttcgagcggcagctcaacgagaataaacaagagcgggacaaggagaaccggcatcggaagcgcagccacagccgctctcggagccgggaccgcaaacgccggagccggagccgcgaccggcgcaaccgggaccagcggagcgcctcccgggacaggcgacgacgcagcaaacctttgaccagaggcgctaaagaggagcacggtggactgattcgttccccccgccacgagaagaagaagaaggtccgtaaatactgggacgtgccacccccaggctttgagcacatcaccccaatgcagtacaaggccatgcaagctgcgggtcagattccagccactgctcttctccccaccatgacccctgacggtctggctgtgaccccaacgccggtgcccgtggtcgggagccagatgaccagacaagcccggcgcctctacgtgggcaacatcccctttggcatcactgaggaggccatgatggatttcttcaacgcccagatgcgcctgggggggctgacccaggcccctggcaacccagtgttggctgtgcagattaaccaggacaagaattttgcctttttggagttccgctcagtggacgagactacccaggctatggcctttgatggcatcatcttccagggccagtcactaaagatccgcaggcctcacgactaccagccgcttcctggcatgtcagagaacccctccgtctatgtgcctggggttgtgtccactgtggtccccgactctgcccacaagctgttcatcgggggcttacccaactacctgaacgatgaccaggtcaaagagctgctgacatcctttgggcccctcaaggccttcaacctggtcaaggacagtgccacggggctctccaagggctacgccttctgtgagtacgtggacatcaacgtcacggatcaggccattgcggggctgaacggcatgcagctgggggataagaagctgctggtccagagggcgagtgtgggagccaagaatgccacgctggtgagccccccgagcaccatcaatcagacgcctgtgaccctgcaagtgccgggcttgatgagctcccaggtgcagatgggcggccacccgactgaggtcctgtgcctcatgaacatggtgctgcctgaggagctgctggacgacgaggagtatgaggagatcgtggaggatgtgcgggacgagtgcagcaagtacgggcttgtcaagtccatcgagatcccccggcctgtggacggcgtcgaggtgcccggctgcggaaagatctttgtggagttcacctctgtgtttgactgccagaaagccatgcagggcctgacgggccgcaagttcgccaacagagtggttgtcacaaaatactgtgaccccgactcttatcaccgccgggacttctggtagaggcggctgggggagggtgggggcagggctggctgggggcttctccccactcccgccccccccttatccccctctgaagacgatgggcagaggagtgacagccgcagacacacgacagccggcagcaactggaatggcagcaattaagggtggggggcgggggttggggggttggggggttagggcagggaggggactggggaagtgcgcacacagcccacacagacaacacgcacccacacagacacagagggaaggggttgggatggggacagggtgcacagcagggcggggtaggaccccagcccctcccaaaacagcctctccttctcccatagacccctttcttctccccttccccacggtaggaacatagcgtgtttatattttatggccaaactattttgaattttgttgtccggccctcagtgccctgccctctcccttaccaggaccacagctctgttccttcggcctctggtcctctctggtcccctcctgggtttcttacgtagttgatttttcctctttagtctcccccgacctgcgcccagccccgtggcccctgcccctctcctactctctgtggcagtttcatatttgctaagacgaatttgctcattaaacattttgttgtattttactttaaaaaaaaaaaaaaaaaa

SEQ ID NO: 3773 - protein, 475 aa, Homo sapiens
MSDFDEFERQLNENKQERDKENRHRKRSHSRSRSRDRKRRSRSRDRRNRDQRSASRDRRRRSKPLTRGAKEEHGGLIRSPRHEKKKKVRKYWDVPPPGFEHITPMQYKAMQAAGQIPATALLPTMTPDGLAVTPTPVPVVGSQMTRQARRLYVGNIPFGITEEAMMDFFNAQMRLGGLTQAPGNPVLAVQINQDKNFAFLEFRSVDETTQAMAFDGIIFQGQSLKIRRPHDYQPLPGMSENPSVYVPGVVSTVVPDSAHKLFIGGLPNYLNDDQVKELLTSFGPLKAFNLVKDSATGLSKGYAFCEYVDINVTDQAIAGLNGMQLGDKKLLVQRASVGAKNATLVSPPSTINQTPVTLQVPGLMSSQVQMGGHPTEVLCLMNMVLPEELLDDEEYEEIVEDVRDECSKYGLVKSIEIPRPVDGVEVPGCGKIFVEFTSVFDCQKAMQGLTGRKFANRVVVTKYCDPDSYHRRDFW

SEQ ID NO: 3774 - DNA, 2430 bp, Homo sapiens
ctgttgcttcccgtctcctcggcggctcccctcccccgcccggctctccgcgccccttctgggcggcggggcggcggagccgtcggcgtgcggccctccttgcgttcgtgcgtgcgcccgtggcccggcgcacgtcccgcgacaccgaggccgagcggggcagggggctgaccgccatgaccccccagagcccggcgtgagggggccgagatgcggtgacctgccagcacctgccgcagccttcgtccgggagtcgccccatctctccacgcatcggggccctgtgccccttgctgctgcagccgggcaccatgtcgacctcgtccttgaggcgccagatgaagaacatcgtccacaactactcagaggcggagatcaaggttcgagaggccacgagcaatgacccctggggcccatccagctccctcatgtcagagattgccgacctcacctacaacgttgtcgccttctcggagatcatgagcatgatctggaagcggctcaatgaccatggcaagaactggcgtcacgtttacaaggccatgacgctgatggagtacctcatcaagaccggctcggagcgcgtgtcgcagcagtgcaaggagaacatgtacgccgtgcagacgctgaaggacttccagtacgtggaccgcgacggcaaggaccagggcgtgaacgtgcgtgagaaagctaagcagctggtggccctgctgcgcgacgaggaccggctgcgggaagagcgggcgcacgcgctcaagaccaaggaaaagctggcacagaccgccacggcctcatcagcagctgtgggctcaggcccccctcccgaggcggagcaggcgtggccgcagagcagcggggaggaggagctgcagctccagctggccctggccatgagcaaggaggaggccgaccaggaggagcggatccgtcgcggggatgacctgcggctgcagatggcaatcgaggagagcaagagggagactgggggcaaggaggagtcgtccctcatggaccttgctgacgtcttcacggccccagctcctgccccgaccacagacccctgggggggcccagcacccatggctgctgccgtccccacggctgcccccacctcggacccctggggcggcccccctgtccctccagctgctgatccctggggaggtccagcccccacgccggcctctggggacccctggaggcctgctgcccctgcaggaccctcagttgacccttggggtgggaccccagcccctgcagctggggaggggcccacgcctgatccatggggaagttccgatggtggggtcccggtcagtgggccctcagcctccgatccctggacaccggccccggccttctcagatccctggggagggtcacctgccaagcccagcaccaatggcacaacagccgggggattcgacacggagcccgacgagttctctgactttgaccgactccgcacggcactgccgacctccgggagcagcgcaggagagctggagctgctggcaggagaggtgccggcccgaagccctggggcgtttgacatgagtggggtcaggggatctctggctgaggctgtgggcagccccccacctgcagccacaccaactcccacgccccccacccggaagacgccggagtcattcctggggcccaatgcagccctcgtcgacctggactcgctggtgagccggccgggccccacgccgcctggagccaaggcctccaaccccttcctgccaggcggaggcccagccactggcccttccgtcaccaaccccttccagcccgcgcctcccgcgacgctcaccctgaaccagctccgtctcagtcctgtgcctcccgtccctggagcgccacccacgtacatctctccccttggcgggggccctggcctgccccccatgatgcccccgggccccccggcccccaacactaatcccttcctcctataatccagggcggaagggggcctggctccatccggctgccccattccggctccctgggagatcagtgttgtgagtgcatgtgaaatgggggatccccacccccagtgcccttccccttcctggggcccactcacactacaccctcttcctttcccaccccacctccccggagagaaactggacatggggcctggggaggggagctggccagaggaggacccctttcccgtggcattagaagggggaggggtggctggggcccccacccattccccctccctccaaactcccaacccccagtcagtgtttgagcctcctcgttcccctcacgcacccgctcacgcaccctcggtgaatccttggtgatgattttggcaactttgggaataaatggcaattcccacgggcttggcaaaaaaaaaaaaaaaaaaaaaaaaaaaaaaaaaaaaaaaaaaaaaaaaaaaaaaaa

SEQ ID NO: 3775 - protein, 550 aa, Homo sapiens
MSTSSLRRQMKNIVHNYSEAEIKVREATSNDPWGPSSSLMSEIADLTYNVVAFSEIMSMIWKRLNDHGKNWRHVYKAMTLMEYLIKTGSERVSQQCKENMYAVQTLKDFQYVDRDGKDQGVNVREKAKQLVALLRDEDRLREERAHALKTKEKLAQTATASSAAVGSGPPPEAEQAWPQSSGEEELQLQLALAMSKEEADQEERIRRGDDLRLQMAIEESKRETGGKEESSLMDLADVFTAPAPAPTTDPWGGPAPMAAAVPTAAPTSDPWGGPPVPPAADPWGGPAPTPASGDPWRPAAPAGPSVDPWGGTPAPAAGEGPTPDPWGSSDGGVPVSGPSASDPWTPAPAFSDPWGGSPAKPSTNGTTAGGFDTEPDEFSDFDRLRTALPTSGSSAGELELLAGEVPARSPGAFDMSGVRGSLAEAVGSPPPAATPTPTPPTRKTPESFLGPNAALVDLDSLVSRPGPTPPGAKASNPFLPGGGPATGPSVTNPFQPAPPATLTLNQLRLSPVPPVPGAPPTYISPLGGGPGLPPMMPPGPPAPNTNPFLL

SEQ ID NO: 3776 - DNA, 3484 bp, Homo sapiens
acacctcagttcacaatcctggggcgatatggcagaatcttttttttcggattttggcttgttgtggtatctgaaggagctcagaaaggaagagttttggaaatttaaggagctcctcaaacaacctttggagaaatttgaactcaagccaatcccctgggctgagctgaagaaggcctccaaagaagatgtagcaaagctgctggacaaacattacccaggaaagcaggcatgggaggtaacactgaacctgtttctacagatcaataggaaagatctctggacaaaggctcaggaagagatgagaaataagctaaacccatacagaaagcatatgaaggaaacatttcaactcatatgggagaaggaaacctgtcttcacgtccctgagcatttctacaaagaaaccatgaaaaatgagtataaagaattgaatgacgcatatactgctgcggctagacgacacactgtggtcctggaaggtcctgatggaattggaaaaacaacccttttaagaaaagtgatgttggactgggcagagggaaacttatggaaggacaggttcacatttgtgtttttcctcaatgtctgtgaaatgaacggtatcgcagagaccagcttactggagctcctctctagggactggccggagtcttcagagaagatcgaagacattttttcccagccagagagaattctgttcatcatggatggctttgagcaactgaagtttaacttacaacttaaggctgacttgagcgatgattggaggcagcggcagccaatgccaattatcctgagcagtttgttgcaaaaaaagatgcttccagaatcctctctccttattgcattaggaaaactggctatgcaaaaacactattttatgttgcggcatccaaaactcataaagctcttaggattcagtgaatctgaaaagaagtcgtatttctcctacttctttggtgagaagagcaaagccctgaaagtcttcaattttgtgagagataatgggccgctgtttatcttgtgccataatccctttacgtgctggttggtctgtacttgtgtgaaacagaggctagagaggggagaagaccttgaaataaactcccaaaacaccacctatttatatgcatcctttttaacaactgtattcaaagcaggaagtcagagttttccacctaaggtgaacagagcccgactaaaaagcctgtgtgctttggctgcagagggaatttggacatatacatttgtattttcccatggggatctccggaggaatgggttatctgagtctgagggcgtgatgtgggtgggtatgagactcctccaaaggagaggggactgttttgccttcatgcatctgtgtatccaagagttttgtgccgccatgttttatttgctcaaacgacccaaagacgatcctaacccggccattggaagcataacccagcttgtaagagcaagtgtggttcagcctcaaaccctcttgacccaggtggggatattcatgtttggaatttcaacagaagaaatcgtcagcatgctggagacctcctttggttttccactgtcaaaagacctaaagcaggaaataacccaatgccttgaaagtttaagtcaatgtgaagctgatagggaagccatagctttccaggaactattcattggtttgtttgaaactcaggaaaaagaatttgtaaccaaagtgatgaatttctttgaagaagttttcatttatattggtaacatagaacatttggtaatagcttcattctgcctgaagcattgtcaacatttaacgacacttcgcatgtgtgtggagaatatctttccagatgactcaggatgcatctcagattacaatgagaagctcgtctactggcgggagctttgctcaatgttcattaccaacaagaacttccagattttagacatggaaaataccagccttgatgatccctccctggcgattctttgcaaagcgctggctcagcctgtttgtaaactccgaaaactcatatttacttctgtgtactttggacatgattcagaattatttaaggcagttcttcacaaccctcatctgaaacttctgagcctgtacggcactagcctctcccagtctgacatcagacacctgtgtgagacgctgaaacatccaatgtgcaagatagaagagctgatactgggaaagtgtgacatctccagtgaagtttgtgaagacatcgcctccgtcctggcctgcaacagcaagctgaaacacctctccttggtagaaaatcccttgagggacgaaggaatgacgttgctgtgtgaagccctgaagcactcacactgtgccctggagaggctgatgttgatgtactgctgtctcacctctgtctcctgtgactccatttccgaagtcctcttgtgcagtaagtccctgtccctcctcgatctgggctcaaatgccctggaagataatggagtggcatctctgtgtgcagcgctgaagcacccaggctgcagcatacgggagctgtggttgatgggctgtttccttacttccgattcctgtaaggacattgctgctgttcttatttgcaatgggaaactgaagaccctgaaacttgggcataatgaaataggagacactggtgtcagacagttatgtgcagctttgcagcatcctcactgtaaattagagtgtctcgggctgcaaacgtgtccgatcacccgtgcctgctgcgacgacatcgccgcagcactcatcgcctgcaaaacactgaggagcctgaacctcgactggattgccttggatgctgatgcagtggtggtgctgtgtgaggcattgagccacccggactgtgccctgcagatgctggggctgcacaaatctggctttgatgaagaaactcagaagatcctgatgtctgtggaagaaaaaattccccatctgaccatttcacatggaccttggattgacgaggaatacaagatcaggggtgtgctcctctgatggggaacaccctgaagtagtcgtctcacaaaggctttccttggccacagtgggaccttcacctggcacctctatcctgtaattgcacatcatggcagcagggctgtgatttcagaggtactccctaagtgttctagcaatatgattatggagtgtgattcagtgtacatgctgattgtctttgcctcggtcctatatccccttgtctttagaaatcccatcctgccttgtgatatttagaagcacaagtacgttaaacaagtgctaaacgctctggaaagcatggctttattttcttaatggatgtcttggtgtgtaggagcatgcatttgtaggcaccacaatccggatacttctgacacagaagtgatgctagaatgtgtctatagattgtattgctagcatccagactttctagtttgtccagatttcgatttgatcaattttcttgtccaataaaaaagcatttccaaatctcta

SEQ ID NO: 3777 - protein, 991 aa, Homo sapiens
MAESFFSDFGLLWYLKELRKEEFWKFKELLKQPLEKFELKPIPWAELKKASKEDVAKLLDKHYPGKQAWEVTLNLFLQINRKDLWTKAQEEMRNKLNPYRKHMKETFQLIWEKETCLHVPEHFYKETMKNEYKELNDAYTAAARRHTVVLEGPDGIGKTTLLRKVMLDWAEGNLWKDRFTFVFFLNVCEMNGIAETSLLELLSRDWPESSEKIEDIFSQPERILFIMDGFEQLKFNLQLKADLSDDWRQRQPMPIILSSLLQKKMLPESSLLIALGKLAMQKHYFMLRHPKLIKLLGFSESEKKSYFSYFFGEKSKALKVFNFVRDNGPLFILCHNPFTCWLVCTCVKQRLERGEDLEINSQNTTYLYASFLTTVFKAGSQSFPPKVNRARLKSLCALAAEGIWTYTFVFSHGDLRRNGLSESEGVMWVGMRLLQRRGDCFAFMHLCIQEFCAAMFYLLKRPKDDPNPAIGSITQLVRASVVQPQTLLTQVGIFMFGISTEEIVSMLETSFGFPLSKDLKQEITQCLESLSQCEADREAIAFQELFIGLFETQEKEFVTKVMNFFEEVFIYIGNIEHLVIASFCLKHCQHLTTLRMCVENIFPDDSGCISDYNEKLVYWRELCSMFITNKNFQILDMENTSLDDPSLAILCKALAQPVCKLRKLIFTSVYFGHDSELFKAVLHNPHLKLLSLYGTSLSQSDIRHLCETLKHPMCKIEELILGKCDISSEVCEDIASVLACNSKLKHLSLVENPLRDEGMTLLCEALKHSHCALERLMLMYCCLTSVSCDSISEVLLCSKSLSLLDLGSNALEDNGVASLCAALKHPGCSIRELWLMGCFLTSDSCKDIAAVLICNGKLKTLKLGHNEIGDTGVRQLCAALQHPHCKLECLGLQTCPITRACCDDIAAALIACKTLRSLNLDWIALDADAVVVLCEALSHPDCALQMLGLHKSGFDEETQKILMSVEEKIPHLTISHGPWIDEEYKIRGVLL

SEQ ID NO: 3778 - DNA, 1257 bp, Homo sapiens
atgctgttggtggccaccatattggacagcccgggtctagaccctttttaccacttcaactctatgtcgaataatgaacgatattcttcattccagctagcatgtgaaattcagaagtcagcagccatgactcttcacgtctgtacccgtattgcctggtacaagggatatcacatagtaggtaaaaacctgtccaatagtaacaatctcaatgatggcagaatgaaatcagaatctgattggattaaaaaggagggaaagggtgtggctaaggtgggtggagacaccctctggtataaaagcccctggcaggcagctctcactccagatctgagctgtccgcagaagcagctggaggccaggggagaaactccagaaggagagacatttgccatggctgagcacttcaaacagatcattagatgtcctgtctgtctaaaagatcttgaagaagccgtgcaactgaaatgtggatatgcctgctgcctccagtgcctcaattcactccagaaggagcccgatggggaaggtttactgtgccgtttctgctctgtggtctctcagaaggatgacatcaagcccaagtacaagctgagggcgctggtttccatcatcaaggaactagagcccaagctgaaatctgttctaacaatgaacccaaggatgaggaagtttcaagtggatatgacgttcgatgtggacacagccaacaactatctcatcatttctgaagacctgaggagtttccgaagtggggatttgagccagaataggaaggagcaagctgagaggttcgacactgccctgtgcgtcctgggcacccctcgcttcacttccggccgccattactgggaggtggacgtgggcaccagccaagtgtgggatgtgggcgtgtgcaaggaatctgtgaaccgacaggggaagattgtgctttcttcagaacacggcttcttgactgtgggttgcagagaaggaaaggtctttgctgccagcactgtgcctatgactcctctctgggtgagtccccagttgcacagagtggggattttcctggatgtaggtatgaggtccattgccttttacaatgttagtgatgggtgccatatctacacattcatcgagattcctgtttgcgagccctggcgtccattttttgctcataaacgtggaagtcaagatgatcagagcatcctgagtatctgttctgtgatcaatccatccgctgccagtgccccagtttcttctgagggaaagtaa

SEQ ID NO: 3779 - protein, 418 aa, Homo sapiens
MLLVATILDSPGLDPFYHFNSMSNNERYSSFQLACEIQKSAAMTLHVCTRIAWYKGYHIVGKNLSNSNNLNDGRMKSESDWIKKEGKGVAKVGGDTLWYKSPWQAALTPDLSCPQKQLEARGETPEGETFAMAEHFKQIIRCPVCLKDLEEAVQLKCGYACCLQCLNSLQKEPDGEGLLCRFCSVVSQKDDIKPKYKLRALVSIIKELEPKLKSVLTMNPRMRKFQVDMTFDVDTANNYLIISEDLRSFRSGDLSQNRKEQAERFDTALCVLGTPRFTSGRHYWEVDVGTSQVWDVGVCKESVNRQGKIVLSSEHGFLTVGCREGKVFAASTVPMTPLWVSPQLHRVGIFLDVGMRSIAFYNVSDGCHIYTFIEIPVCEPWRPFFAHKRGSQDDQSILSICSVINPSAASAPVSSEGK

SEQ ID NO: 3780 - DNA, 3439 bp, Homo sapiens
ccacgcgtccggccaaggagacctggtggcagggttgatctcatatttcttgtgcctcaaaatcccttctctgaagtctgccttccctggagaagcaagatggcagaatcggattctactgactttgacctgctgtggtatctagagaatctcagtgacaaggaatttcagagttttaagaagtatctggcacgcaagattcttgatttcaaactgccacagtttccactgatacagatgacaaaagaagaactggctaacgtgttgccaatctcttatgagggacagtatatatggaatatgctcttcagcatattttcaatgatgcgtaaggaagatctttgtaggaagatcattggcagacgaaaccgcaatcaggaggcatgcaaagctgtcatgaggagaaaattcatgctgcaatgggaaagtcacacttttggaaaatttcattataaattttttcgtgacgtttcgtcagatgtgttctacatacttcaattagcctatgattctaccagctattattcagcaaacaatctcaatgtgttcctgatgggagagagagcatctggaaaaactattgttataaatctggctgtgttgaggtggatcaagggtgagatgtggcagaacatgatctcgtacgtcgttcacctcacttctcacgaaataaaccagatgaccaacagcagcttggctgagctaatcgccaaggactggcctgacggccaggctcccattgcagacatcctgtctgatcccaagaaactccttttcatcctcgaggacttggacaacataagattcgagttaaatgtcaatgaaagtgctttgtgtagtaacagcacccagaaagttcccattccagttctcctggtcagtttgctgaagagaaaaatggctccaggctgctggttcctcatctcctcaaggcccacacgtgggaataatgtaaaaacgttcttgaaagaggtagattgctgcacgaccttgcagctgtcgaatgggaagagggagatatattttaactctttctttaaagaccgccagagggcgtcggcagccctccagcttgtacatgaggatgaaatactcgtgggtctgtgccgagtcgccatcttatgctggatcacgtgtactgtcctgaagcggcagatggacaaggggcgtgacttccagctctgctgccaaacacccactgatctacatgcccactttcttgctgatgcgttgacatcagaggctggacttactgccaatcagtatcacctaggtctcctaaaacgtctgtgtttgctggctgcaggaggactgtttctgagcaccctgaatttcagtggtgaagacctcagatgtgttgggtttactgaggctgatgtctctgtgttgcaggccgcgaatattcttttgccgagcaacactcataaagaccgttacaagttcatacacttgaacgtccaggagttttgtacagccattgcatttctgatggcagtacccaactatctgatcccctcaggcagcagagagtataaagagaagagagaacaatactctgactttaatcaagtgtttactttcatttttggtcttctaaatgcaaacaggagaaagattcttgagacatcctttggataccagctaccgatggtagacagcttcaagtggtactcggtgggatacatgaaacatttggaccgtgacccggaaaagttgacgcaccatatgcctttgttttactgtctctatgagaatcgggaagaagaatttgtgaagacgattgtggatgctctcatggaggttacagtttaccttcaatcagacaaggatatgatggtctcattatactgtctggattactgctgtcacctgaggacacttaagttgagcgttcagcgcatctttcaaaacaaagagccacttataaggccaactgctagtcaaatgaagagccttgtctactggagagagatctgctctcttttttatacaatggagagcctccgggagctgcatatctttgacaatgaccttaatggtatttcagaaaggattctgtctaaagccctggagcattctagctgtaaacttcgcacactcaagttgtcctatgtctcgactgcttctggttttgaagacttactcaaggctttggctcgtaatcggagcctgacatacctgagtatcaactgtacgtccatttccctaaatatgttttcacttctgcatgacatcctgcacgagcccacatgccaaataagtcatctgagcttgatgaaatgtgatttgcgagccagcgaatgcgaagaaatcgcctctctcctcatcagtggcgggagtctgagaaaactgaccttatccagcaatccgctgaggagcgacgggatgaacatactgtgtgatgccttgcttcatcccaactgcactcttatatcactggtgttagtcttctgctgtctcactgaaaattgctgcagcgcccttggaagagtgcttctgttcagcccaactctaagacaactagacctgtgtgtgaatcgcttaaaaaattacggagtgttgcatgtgacgtttcccttgctgtttccaacctgtcagttagaggagcttcatctgtctggctgtttctttagcagcgatatctgtcaatatattgccatagttattgctactaatgaaaaactgaggagcctggagattgggagcaacaaaatagaagatgcaggaatgcagctgctatgtggtggtttgagacatcccaactgcatgttggtgaatattgggctagaagagtgcatgttaaccagtgcctgctgtcgatctcttgcctctgttcttaccaccaacaaaacactagaaagactcaacttgcttcaaaatcacttgggcaatgatggagttgcaaaacttcttgagagcttgatcagcccagattgtgtacttaaggtagttgggcttccattaactggcctgaacacacaaacccagcagttgctgatgactgtaaaggaaagaaaacccagtttgatctttctgtctgaaacttggtctttaaaggaaggcagagaaattggtgtgacacctgcttctcagccaggttcaataatacctaattctaatttggattacatgtttttcaaatttcccagaatgtctgcagccatgagaacgtcaaatacagcatctaggcaacccctttgatcatgttgtacgtaaacagtatttattataaattactaccgtgactgggatgcaagagaattaggactataattttcctatttgatgtgtgtgtgtgtgtgtgtgtgtgtgtgtgtgtgtgtgtgtgtgtgtgaccttgatccagtcaaccacttcaaattcctacactgtctcaagagtattaaaaggattatatgaagtaataaaggataaaatgcattggaaaaaaaaaaaaaaa

SEQ ID NO: 3781 - protein, 1033 aa, Homo sapiens
MAESDSTDFDLLWYLENLSDKEFQSFKKYLARKILDFKLPQFPLIQMTKEELANVLPISYEGQYIWNMLFSIFSMMRKEDLCRKIIGRRNRNQEACKAVMRRKFMLQWESHTFGKFHYKFFRDVSSDVFYILQLAYDSTSYYSANNLNVFLMGERASGKTIVINLAVLRWIKGEMWQNMISYVVHLTSHEINQMTNSSLAELIAKDWPDGQAPIADILSDPKKLLFILEDLDNIRFELNVNESALCSNSTQKVPIPVLLVSLLKRKMAPGCWFLISSRPTRGNNVKTFLKEVDCCTTLQLSNGKREIYFNSFFKDRQRASAALQLVHEDEILVGLCRVAILCWITCTVLKRQMDKGRDFQLCCQTPTDLHAHFLADALTSEAGLTANQYHLGLLKRLCLLAAGGLFLSTLNFSGEDLRCVGFTEADVSVLQAANILLPSNTHKDRYKFIHLNVQEFCTAIAFLMAVPNYLIPSGSREYKEKREQYSDFNQVFTFIFGLLNANRRKILETSFGYQLPMVDSFKWYSVGYMKHLDRDPEKLTHHMPLFYCLYENREEEFVKTIVDALMEVTVYLQSDKDMMVSLYCLDYCCHLRTLKLSVQRIFQNKEPLIRPTASQMKSLVYWREICSLFYTMESLRELHIFDNDLNGISERILSKALEHSSCKLRTLKLSYVSTASGFEDLLKALARNRSLTYLSINCTSISLNMFSLLHDILHEPTCQISHLSLMKCDLRASECEEIASLLISGGSLRKLTLSSNPLRSDGMNILCDALLHPNCTLISLVLVFCCLTENCCSALGRVLLFSPTLRQLDLCVNRLKNYGVLHVTFPLLFPTCQLEELHLSGCFFSSDICQYIAIVIATNEKLRSLEIGSNKIEDAGMQLLCGGLRHPNCMLVNIGLEECMLTSACCRSLASVLTTNKTLERLNLLQNHLGNDGVAKLLESLISPDCVLKVVGLPLTGLNTQTQQLLMTVKERKPSLIFLSETWSLKEGREIGVTPASQPGSIIPNSNLDYMFFKFPRMSAAMRTSNTASRQPL

SEQ ID NO: 3782 - DNA, 3339 bp, Homo sapiens
atttatttattgttcctggtcactgtctctttgaggattggtatctctgctccagaaaagatggcagcctctttcttctctgattttggtcttatgtggtatctggaggagctcaaaaaggaggagttcaggaaatttaaagaacatctcaagcaaatgactttgcagcttgaactcaagcagattccctggactgaggtcaaaaaagcatcccgggaagaacttgcaaacctcttgatcaagcactatgaagaacaacaagcttggaacataaccttaagaatctttcaaaagatggatagaaaggatctctgcatgaaggtcatgagggagagaacaggatacacaaagacctatcaagctcacgcaaagcagaaattcagccgcttatggtccagcaagtctgtcactgagattcacctatactttgaggaggaagtcaagcaagaagaatgtgaccatttggaccgcctttttgctcccaaggaaactgggaaacagccacgtacagtgattattcaaggaccacaaggaattggaaaaacgacactcctgatgaagctgatgatggcctggtcggacaacaagatctttcgggataggttcctgtacacgttctatttctgctgcagagaactgagggagttgccgccaacgagtttggctgacttgatttccagagagtggcctgaccccgctgctcctataacagagatcgtgtctcaaccggagagactcttgttcgtcatcgacagcttcgaagagctgcagggcggcttgaacgaacccgattcggatctgtgtggtgacttgatggagaaacggccggtgcaggtgcttctgagcagtttgctgaggaagaagatgctcccggaggcctccctgctcatcgccatcaaacccgtgtgcccgaaggagctccgggatcaggtgacgatctcagaaatctaccagccccggggattcaacgagagtgataggttagtgtatttctgctgtttcttcaaagacccgaaaagagccatggaagccttcaatcttgtaagagaaagtgaacagctgttttccatatgccaaatcccgctcctctgctggatcctgtgtaccagtctgaagcaagagatgcagaaaggaaaagacctggccctgacctgccagagcactacctctgtgtactcctctttcgtctttaacctgttcacacctgagggtgccgagggcccgactccgcaaacccagcaccagctgaaggccctgtgctccctggctgcagagggtatgtggacagacacatttgagttttgtgaagacgacctccggagaaatggggttgttgacgctgacatccctgcgctgctgggcaccaagatacttctgaagtacggggagcgtgagagctcctacgtgttcctccacgtgtgtatccaggagttctgtgccgccttgttctatttgctcaagagccaccttgatcatcctcacccagctgtgagatgtgtacaggaattgctagttgccaattttgaaaaagcaaggagagcacattggatttttttggggtgttttctaactggccttttaaataaaaaggaacaagaaaaactggatgcgttttttggcttccaactgtcccaagagataaagcagcaaattcaccagtgcctgaagagcttaggggagcgtggcaatcctcagggacaggtggattccttggcgatattttactgtctctttgaaatgcaggatcctgcctttgtgaagcaggcagtgaacctcctccaagaagctaactttcatattattgacaacgtggacttggtggtttctgcctactgcttaaaatactgctccagcttgaggaaactctgtttttccgttcaaaatgtctttaagaaagaggatgaacacagctctacgtcggattacagcctcatctgttggcatcacatctgctctgtgctcaccaccagcgggcacctcagagagctccaggtgcaggacagcaccctcagcgagtcgacctttgtgacctggtgtaaccagctgaggcatcccagctgtcgccttcagaagcttggaataaataacgtttccttttctggccagagtgttctgctctttgaggtgctcttttatcagccagacttgaaatacctgagcttcaccctcacgaaactctctcgtgatgacatcaggtccctctgtgatgccttgaactacccagcaggcaacgtcaaagagctagcgctggtaaattgtcacctctcacccattgattgtgaagtccttgctggccttctaaccaacaacaagaagctgacgtatctgaatgtatcctgcaaccagttagacacaggcgtgccccttttgtgtgaagccctgtgcagcccagacacggtcctggtatacctgatgttggctttctgccacctcagcgagcagtgctgcgaatacatctctgaaatgcttctgcgtaacaagagcgtgcgctatctagacctcagtgccaatgtcctgaaggacgaaggactgaaaactctctgcgaggccttgaaacatccggactgctgcctggattcactgtgtttggtaaaatgttttatcactgctgctggctgtgaagacctcgcctctgctctcatcagcaatcaaaacctgaagattctgcaaattgggtgcaatgaaatcggagatgtgggtgtgcagctgttgtgtcgggctctgacgcatacggattgccgcttagagattcttgggttggaagaatgtgggttaacgagcacctgctgtaaggatctcgcgtctgttctcacctgcagtaagaccctgcagcagctcaacctgaccttgaacaccttggaccacacaggggtggttgtactctgtgaggccctgagacacccagagtgtgccctgcaggtgctcgggctgagaaaaactgattttgatgaggaaacccaggcacttctgacggctgaggaagagagaaatcctaacctgaccatcacagatgactgtgacacaatcacaagggtagagatctgattgcgaggaacctgggctctgactcgaacacctgcaaaggacagggactgggaccgttacttacatgacactgcacccaggagatacaaatcattgacactctgagttgtgagatttctggcaccccattcatagatttgatatgatacacgtggtttttatgtgctctgtggccttggatgagtcactgaaaggccttcatggtctctcggtctcacaaggacctcttaacccctcaataaagtgttacatttctaaacattggaaaaaaaaaaaaaaaaaaaaaaaaaaaaa

SEQ ID NO: 3783 - protein, 994 aa, Homo sapiens
MAASFFSDFGLMWYLEELKKEEFRKFKEHLKQMTLQLELKQIPWTEVKKASREELANLLIKHYEEQQAWNITLRIFQKMDRKDLCMKVMRERTGYTKTYQAHAKQKFSRLWSSKSVTEIHLYFEEEVKQEECDHLDRLFAPKETGKQPRTVIIQGPQGIGKTTLLMKLMMAWSDNKIFRDRFLYTFYFCCRELRELPPTSLADLISREWPDPAAPITEIVSQPERLLFVIDSFEELQGGLNEPDSDLCGDLMEKRPVQVLLSSLLRKKMLPEASLLIAIKPVCPKELRDQVTISEIYQPRGFNESDRLVYFCCFFKDPKRAMEAFNLVRESEQLFSICQIPLLCWILCTSLKQEMQKGKDLALTCQSTTSVYSSFVFNLFTPEGAEGPTPQTQHQLKALCSLAAEGMWTDTFEFCEDDLRRNGVVDADIPALLGTKILLKYGERESSYVFLHVCIQEFCAALFYLLKSHLDHPHPAVRCVQELLVANFEKARRAHWIFLGCFLTGLLNKKEQEKLDAFFGFQLSQEIKQQIHQCLKSLGERGNPQGQVDSLAIFYCLFEMQDPAFVKQAVNLLQEANFHIIDNVDLVVSAYCLKYCSSLRKLCFSVQNVFKKEDEHSSTSDYSLICWHHICSVLTTSGHLRELQVQDSTLSESTFVTWCNQLRHPSCRLQKLGINNVSFSGQSVLLFEVLFYQPDLKYLSFTLTKLSRDDIRSLCDALNYPAGNVKELALVNCHLSPIDCEVLAGLLTNNKKLTYLNVSCNQLDTGVPLLCEALCSPDTVLVYLMLAFCHLSEQCCEYISEMLLRNKSVRYLDLSANVLKDEGLKTLCEALKHPDCCLDSLCLVKCFITAAGCEDLASALISNQNLKILQIGCNEIGDVGVQLLCRALTHTDCRLEILGLEECGLTSTCCKDLASVLTCSKTLQQLNLTLNTLDHTGVVVLCEALRHPECALQVLGLRKTDFDEETQALLTAEEERNPNLTITDDCDTITRVEI

SEQ ID NO: 3784 - DNA, 413 bp, Homo sapiens
agaacccactgcctcctgatgaagtccctactgttcacccttgcagtttttatgctcctggcccaattggtctcaggtaattggtatgtgaaaaagtgtctaaacgacgttggaatttgcaagaagaagtgcaaacctgaagagatgcatgtaaagaatggttgggcaatgtgcggcaaacaaagggactgctgtgttccagctgacagacgtgctaattatcctgttttctgtgtccagacaaagactacaagaatttcaacagtaacagcaacaacagcaacaacaactttgatgatgactactgcttcgatgtcttcgatggctcctacccccgtttctcccactggttgaacattccagcctctgtctcctgctctaggatccccgactcattaaagcaaagaggctta

SEQ ID NO: 3785 - protein, 111 aa, Homo sapiens
MKSLLFTLAVFMLLAQLVSGNWYVKKCLNDVGICKKKCKPEEMHVKNGWAMCGKQRDCCVPADRRANYPVFCVQTKTTRISTVTATTATTTLMMTTASMSSMAPTPVSPTG

SEQ ID NO: 3786 - DNA, 439 bp, Homo sapiens
atggggctcttcatgatcattgcaattctgctgttccagaaacccacagtaaccgaacaacttaagaagtgctggaataactatgtacaaggacattgcaggaaaatctgcagagtaaatgaagtgcctgaggcactatgtgaaaatgggagatactgttgcctcaatatcaaggaactggaagcatgtaaaaaaattacaaagccacctcgtccaaagccagcaacacttgcactgactcttcaagactatgttacaataatagaaaatttcccaagcctgaagacacagtctacataaatcaaatacaatttcgttttcacttgcttctcaacctagtctaataaactaaggtgatgagatatacatcttcttccttttggtttcttgatccttaaaatgaccttcgagcatattctaataaagtgcattgccagtt

SEQ ID NO: 3787 - protein, 99 aa, Homo sapiens
MGLFMIIAILLFQKPTVTEQLKKCWNNYVQGHCRKICRVNEVPEALCENGRYCCLNIKELEACKKITKPPRPKPATLALTLQDYVTIIENFPSLKTQST

SEQ ID NO: 3788 - DNA, 672 bp, Homo sapiens
caaccatgaagctcctttttcctatctttgccagcctcatgctacagtaccaggtgaacacagaatttattggcttgagacgctgtttaatgggtttggggagatgcagggatcactgcaatgtggatgaaaaagagatacagaaatgcaagatgaaaaaatgttgtgttggaccaaaagtggttaaattgattaaaaactacctgcaatatggaacaccaaatgtacttaatgaagacgtccaagaaatgctaaaacctgccaagaattctagtgctgtgatacaaagaaaacatattttatctgttctcccccaaatcaaaagcactagcttttttgctaataccaactttgtcatcattccaaatgccacccctatgaactctgccaccatcagcactatgaccccaggacagatcacatacactgctacttctaccaagagtaacaccaaagaaagcagagattctgccactgcctcgccaccaccagcaccacctccaccaaacatactgccaacaccatcactggagctagaggaagcagaagagcagtaatgtggatctttcccttaaaactccaagttcctctctatttttgctatctataaaatgacatagaactgtttcctctgtcatcagtcattcaataaacactgtttgagcacctaca

SEQ ID NO: 3789 - protein, 183 aa, Homo sapiens
MKLLFPIFASLMLQYQVNTEFIGLRRCLMGLGRCRDHCNVDEKEIQKCKMKKCCVGPKVVKLIKNYLQYGTPNVLNEDVQEMLKPAKNSSAVIQRKHILSVLPQIKSTSFFANTNFVIIPNATPMNSATISTMTPGQITYTATSTKSNTKESRDSATASPPPAPPPPNILPTPSLELEEAEEQ

SEQ ID NO: 3790 - DNA, 2119 bp, Homo sapiens
ctccattaaaccaccaccagctccccaagccaccccttcagccatgaagttcctgctcctggtcttggcagccctcggattcctgacccaggtgatcccagccagtgcaggtgggtcaaaatgtgtgagtaacaccccaggatactgcaggacatgttgccactggggggagacagcattgttcatgtgcaacgcttccagaaaatgctgcatcagctactccttcctgccgaagcctgacctaccacagctcatcggtaaccactggcaatcaaggagaagaaacacacaaaggaaagacaagaagcaacaaacgaccgtaacatcataataaccactgctatcgcctccaccaactcagagaaatatcatttccacagttccaattcctcctacattgctgagtactagccaaggctcctctttatggggcagatatctatagccaaccccaaaacttctgtcttctatcattctgtcattcatctagtaactaatttggagtttgtatctatcttacgagaacaatcatcatgcagattcgtccacaggggatctgtcagtttgggtcctccaaatgaaaaatgtcaagacagaattggacatgcaaaagattgactgggagaacacacctctgatggacaaaggtgagacagagcagccacaggcagggagagccttcagactgcaacgctggcctgatacgtgtcaaaggagagagggatagaggaggattgaatagaaggagactaagactgcagctctaagaaagtctcagccaaacagatggggaggcccaaagcaaggcttgcccctcagaggagctcacgcagggcaggaatagccaggttctcatatcccaggggttcagacttggctgagaacagcccctggagaacatggggtgactgctaccataggtctggaagtatgaggctgtccaccaactatccccttgaagcaagttctcttgaaaggaaatctaaacagtgcacccccatggctgccacggagtataaggagggagagaaaggagctgaaagtctaggtttggccagctaggtagactgacttgtgaggtatttatttattcatttgagtaacaaagcagacagaatacatagccaccattggtagtacaccccaaaagcaaggatggcatgatgctggtgactcaaacgtgcctactcatggtgtcaaattggcataatcctcttgggaagctgtgtggaaataagcacagagaagcagaactctaattgcttaatccactaaacattacttctgggaattggctcatcataaattatccaagagaaagcacaaagttatgggcacaaaggttttccatataatattatttaaaatgctgagaaaatgaaaaaatctaaatggtgaaatatatactaatgccatctataaatacaaacaaatagaatgtttatagaataatggaacataataacattattcaaaattgcatttatgctatagttgtcaaaattgtctccttatatgatacaaaactcatgaaaattatgacttttttgtttggttggaaagcagaattatgcataaatttcctcttacagttcgatgcccattagttttatataacatttatttgacacgtactgacttctatctgagaagaacaaaccaaaacactcaggcctaaataattaaaaacggtcctaaaaactagcaaaccagataagaaaagatgttaatgcccattccctaacttatgtcttagaccaaaattaattctagatggttttaaaatgacagtgtaaaagtaaagtattaaaagattgtgtggtcaaatattcaatttaagagcaaggaaattcttataaatataacaatagaggcagaactcatgtaagaataaattgattaggtggtattaaatattaagttcttatgtatgtcaaaagatatcattttgaaattcatccatcttattgggtattgcaggagttcattcctttttgtttataaatactcttccgtcatatgaatagtattcatttgtatactggtttgttgatggacatttgggttgttcccagtttatggctattacaaataaagcttctatgaacatttatgtaca

SEQ ID NO: 3791 - protein, 95 aa, Homo sapiens
MKFLLLVLAALGFLTQVIPASAGGSKCVSNTPGYCRTCCHWGETALFMCNASRKCCISYSFLPKPDLPQLIGNHWQSRRRNTQRKDKKQQTTVTS

SEQ ID NO: 3792 - DNA, 1555 bp, Homo sapiens
aaagcatcgggtctcgggacttctgagtggcctgggttaccgcgcgatctacactgagacaaggaagttggaaaagccgagtagttataccagaagatcagggtctcacagactcgcaacttctcttccattttccccaatggcgcatgtcttacaaaaacccaagcactctgggactcactccatagtccaggagttccaggttccggattatgttccatggcagcagtccaagcaggaaaccaagccatctactctgcctccagtccaacaagccaacagccttcatacaagcaaaatgaagactttgactagggtccaaccagtgtttcacttcaagcccactacggtggtgacaagctgccagccgaagaatccaagagaactacatagaaggcggaagttggaccctgggaagatgcatgccaaaatctggttaatgaagacgtcgctcaggagcgggagggccgctctgcgagagctccgaagccgtgagaacttcctcagcaagctcaaccgggagctgatcgagaccatccaggagatggagaacagcacgaccctgcacgtgcgggccctgctgcagcagcaggacaccttggcgaccatcatcgacatcttggagtactcaaacaagaagaggctgcagcaattgaaatctgagcttcaggagtgggaagaaaagaagaaatgcaagatgagctatcttgagcagcaggcagagcagctgaatgccaagattgagaagacccaggaggaagtgaacttcctgagcacttacatggaccatgagtattccatcaagtctgtccagatctccactcttatgcgccagctgcagcaggttaaggacagccagcaggatgagctggatgacctcggtgagatgcgcagaaaggtcctggaatccttgtccgacaagattcagaagaagaagaaaaaaattctgagttctgtggtggcggaaacccagcgtccctatgaagaggctctcctacagaagatgtgggaaagccaggacttcctgaaatgcatgcaaaggttcagagaatttattgaccagtttgaggagaacatgcctgtattaagggccgaggtggaagagctccaagcccagacccgggaaccccgagaggtcatatttgaggatgttctgcttcggagacccaagtgcaccccagacatggatgtcatcctcaacattcctgtggaagagccactacccttctagatggcagtgccatgggccgccctcccctcctgctctcttcccagcacctggagccttggatcatttacttccaggaccggatctccattcagaccctgatctacagtctccctgctccctctgcccttcctccctctttctttccctccctccctccctcccttcttccccccttcccttccctcctccttccttcctcctctccctccctccctcctttctttcttcctgtggttttttcctctcttcttcccttctttctggttggtgctgctgggccaggtgggaatttctgattaaatctgctattccttttttaccaat

SEQ ID NO: 3793 - protein, 363 aa, Homo sapiens
MAHVLQKPKHSGTHSIVQEFQVPDYVPWQQSKQETKPSTLPPVQQANSLHTSKMKTLTRVQPVFHFKPTTVVTSCQPKNPRELHRRRKLDPGKMHAKIWLMKTSLRSGRAALRELRSRENFLSKLNRELIETIQEMENSTTLHVRALLQQQDTLATIIDILEYSNKKRLQQLKSELQEWEEKKKCKMSYLEQQAEQLNAKIEKTQEEVNFLSTYMDHEYSIKSVQISTLMRQLQQVKDSQQDELDDLGEMRRKVLESLSDKIQKKKKKILSSVVAETQRPYEEALLQKMWESQDFLKCMQRFREFIDQFEENMPVLRAEVEELQAQTREPREVIFEDVLLRRPKCTPDMDVILNIPVEEPLPF

SEQ ID NO: 3794 - DNA, 2773 bp, Homo sapiens
ggaggatgctgggaaggaggtaaaatggccaccggcggcggcgcggaggaagagaggaaacgggggcggccgcagcttctgccccccgcgcggcccgcggcccggggcgaggaggccgacggcggccgcgagaagatgggctgggcccaggtggtgaagaatctagccgagaagaagggcgaattccgcgagccgcggccgccgcggcgggaggaggaaagcggcggcggtggagggagcgccgggctcggcggccccgcgggcctggcggcgccggacctcggcgacttcccaccggctggccgcggggatccgaagggccgtcggagagatccggccggcgaggcggtggacccccgcaaaaagaagggcgctgcggaggcgggcaggaggaagaaggccgaggcggcggcggccgccatggcgaccccggccaggcccggcgaggccgaggacgcggccgagcggcccctccaggatgagccggcggcggcggcaggcccgggcaagggtcgcttcctcgtccgcatctgtttccagggagacgagggcgcctgcccgacccgggacttcgtggtaggagcgcttatcctgcgctccatcggcatggacccgagcgacatctacgcggtcatccagatcccgggcagccgcgaattcgacgtgagcttccgctcagcggagaagctggccctgttcctacgcgtctacgaggagaagcgggagcaggaggactgctgggagaactttgtggtgctggggcggagcaagtccagcttgaagacgctcttcatcctcttccggaacgagacggtggacgtggaggacattgtgacttggctcaagcgccactgcgacgtgctggccgtgccggtgaaagtgaccgacaggtttgggatctggaccggggagtacaaatgcgagatcgagctgcgccagggggagggcggggtcaggcacttgccaggggccttcttcctgggggccgagaggggctacagctggtacaaggggcagcccaagacatgctttaaatgtggttcccggacccacatgagcggcagctgcacgcaggacaggtgcttcaggtgcggggaggaggggcacctgagcccttactgccggaagggcatcgtgtgcaacctctgtggcaagcgaggacacgcctttgcccagtgtcccaaagcagtgcacaattccgtggcagctcagctaaccggcgtggccgggcactaaacacccgcctgcctgccagggtgaacacacagccagcttatccctcttaagtgccaaaacttttttttaaaccattttttatcgtttttgaaggagatctttttaaaacctacaagagacatctctctatgccttcttaaaccgagtttactccatttcagcctgttctgaattggtgactctgtcaccaataacgactgcggagaactgtagcgtgcagatgtgttgcccctcccttttaaaattttattttcgtttttctattgggtatttgttttgtttcttgtactttttctctctctccttgcccccctcccgccctccccgccccataccttttcttcccctggattttcaccctttgggctgccttgctcatctttatgccccagcactaggtacggggcccaacacgtggtaggcactccatcagtgtttgctgaattgaaaacattgttgactgtggcttctatcagagtgtctaccttttgcagctcttcccctccctcatttaatttgctgcttttaatctacgtggtctgagaatttgtgaaaccagtgttgttagaagtgtatataatctgaatcaataagctctgaatggtggccaagggcctctcttatggcacaaagatgcatggacttcatgacagctcttttggtggctcagaagccattttttatagaatcatggaatctagaatattcctgctggaaagaacctgagagttggtttggaccaattccctggttttccagcagatgaaacaggcccaaagaggttaaatgactgggtgaaaatcacatagctgtctggtgccagagccagcctatagtagagtcccctgaccccaagcccggtgctcattccactacctctcacacttcacaacaatttcctcaacacttgagggcccagaaagtctgatctctccagaatgatcagcccagaggaatgctgagaaatcacctggaggagggagcagaaagagaaggtttttaaggaggggcttctgaatacttgggagatacggaacggaccaaggaccacactccagggtgcattcgttgctccctggggcaccacttctggattacagtgtgccaggtcctttggaggccctaccccttccccattcattgccaccagtgagaaatgggggtgcccctgtgtaaagaaacctaccaaaggtttacatttgcaccttagcctcaatagctacgaaccctagagaagcagctagctggagctcatgtgcaactcctgattctcaggagaaagatggattttaacccaaaattatgagtgagctgttaactctaaaatgtacttgggagataggccaagcgagaggtcatgggccaactaagtgttatccagtagaaaagacagtacactgcttttcttttagtgtttgcttttcctttgctatatgttttgctatttccttgtggcttagaatgtaaaattgattgttaaaagttttgttctgaataaatatttatcttttgtattgctaaaaaaaaaaaaaaaaaa

SEQ ID NO: 3795 - protein, 403 aa, Homo sapiens
MATGGGAEEERKRGRPQLLPPARPAARGEEADGGREKMGWAQVVKNLAEKKGEFREPRPPRREEESGGGGGSAGLGGPAGLAAPDLGDFPPAGRGDPKGRRRDPAGEAVDPRKKKGAAEAGRRKKAEAAAAAMATPARPGEAEDAAERPLQDEPAAAAGPGKGRFLVRICFQGDEGACPTRDFVVGALILRSIGMDPSDIYAVIQIPGSREFDVSFRSAEKLALFLRVYEEKREQEDCWENFVVLGRSKSSLKTLFILFRNETVDVEDIVTWLKRHCDVLAVPVKVTDRFGIWTGEYKCEIELRQGEGGVRHLPGAFFLGAERGYSWYKGQPKTCFKCGSRTHMSGSCTQDRCFRCGEEGHLSPYCRKGIVCNLCGKRGHAFAQCPKAVHNSVAAQLTGVAGH

SEQ ID NO: 3796 - DNA, 4645 bp, Homo sapiens
ccgcggcggagccagaggctgcaggaagagcccgcgggggcccggagggtgcgattcctcggcccccgcaaaacaatgtgtgttgtgagccaggacgcaacttgccggaggcggcgggggcgcgccgagcccgcctgagaccgcgctgaccttctccccccgccgtccgttgggcccgagcgcccagctcctcgctccccagttcgcgggggccgggccgagccgcggggcggggccgcccctccgtcgccgctgcctcctcccccacccccagccgcggaggatgcggacggcccccggcggcgtctagcggccccgggcccaggcgcgatggtgcagcagcggggcgcgagggccaagcgggacggcgggccgccgcccccgggacccgggccggccgaggagggggcgcgcgagcccggctggtgcaagaccccgagcggccacatcaagaggccgatgaacgcattcatggtgtggtcgcagcacgaacggcggaagatcatggaccagtggcccgacatgcacaacgccgagatctccaagcgcctgggccgccgctggcagctgctgcaggactcggagaagatcccgttcgtgcgggaggcggagcggctgcggctcaagcacatggcggattacccggactacaagtaccggccgcgcaaaaagagcaagggggcgcccgccaaggcgcggccccgcccccccggtggtagcggtggcggcagccggctcaagcccgggccgcagctgcctggccgcgggggccgccgagcagcgggagggcctttggggggcggggcggcggcgcccgaggacgacgatgaagacgacgacgaggagctgctggaagtgcgcctggtcgagaccccggggcgggagctgtggaggatggtcccggcgggacgggccgctcggggacaagcggagcgcgcccaagggccgtcgggcgagggggcggccgccgccgccgccgcctccccgacaccgtcggaggacgaggagccggaggaagaggaggaggaggcggcagcggctgaggaaggtgaagaggagacggtggcgtcgggggaggagtcgctgggctttctgtccaggctgccccctggcccggccggcctggactgcagcgccctggatcgcgacccggacctgcagcctccctcgggcacgtcgcacttcgagttcccggactactgcacccccgaggttaccgagatgatcgcgggggactggcgcccgtctagcatcgcagacctggttttcacctactgagcccaccgtcagcggggcgcgcacgcccccaaaccagctgtttacatacaggaatcaggtattggggcccctcggaggccgaggctggcaccccatctcccgcgcagcctgccccctcctggacgtgcccatcccccctcagatccagacatgcccctcccccgcagacacaccccaaggcagcccaacccccaccccttccccgacacccaagcccctccccacgtcgccccctcctgcacagccaccagcagccagccccctccgatacacctcccgtcctctcctacagacctgcacccctccccccttttgcacacgcccctcctcgtggccggaggacccgccccctcctttgctccggaatctctcctccctcgcccggcccgccttctctgggttaggggggcgatgcggccgggtggcaacgcacgcgcctcctgcgcccctcccttccctggggggaggggcgcaccccttttatccccggagcgctagggcccgcccctccgctggggcccacccccttcgtgcgcatgcttaatgcttctggggaggagggggctggtcccagcggagccgcactcttcgcccgctccgggcaaaagcgggggcgagtgtagagcgatcctgggaaatcctttgatccgggagccctaggtttcctctccagccaacggggcgtcgctgccttaatgggaggagcactcggaagggttggtttgggcctgaaactctcccaagtggcatagccccttttccggtatggggtctcctacacccacgcgcaccacctctccggtcgcgtggctgcctctacagcctacctatacgtccctttttccccccaactgggaattgagaggtaaggtctttctctggaaatccagcagtagaggaagggaccacccaagaaaactaaaaaccaaggcaccttaccagtctgtctggggacaggatccctgctgcaccttccccaccccctcctgggaagtgccccctcacctcagggcacccgcaacctgggctcctccctgagcgcaccggcccttcctgtcacccaggtccaccctcagtactcaagctgcagtatacagcgggaaaaactgaggcactttggtgctaggggtttgggactgaggcgtggagagcagatgtgatggcaggaagactctcgcttttaaacatctggtttgggagagaccatcgacttggccagtgagactgagaatggattccgagtagtgatgggccgtttgcacctcggtttttccacgtgagaaatggggagaacgctgctgttaggaggaagttgtgtccagttcagggtgccctcgggagccctgtccctgttgctgtggcccctctcacgccgccatctctctgccccgccccgcccctccggcctccccacaccccccttgccctcactacctgtatctcaccggcgtgtgttcaccctcccgggtggctcacacactctcattcacacacacaaatctcaggaacaaacggtcccagagtcctccggacccctgcccagggtctctgcaggtctctgccccacgcgttcccgtcgctgacaaagccaccagctgcctcctttaagcttggtgctccggctctgggcctttcttgcgctctattttttttttttttttttttaagaaaaacaacaacaacaaaaaaagacaatgaaaaaaaaaacgtcatgtgagtgaagagatgtcactgtctgtggtcttggagaactagtctcgtagctgaggggtggggtccctctgtctggggcactggcacccacagcaggactccgccagtctgatgccaggactgaataaagtgtatttgccccgaccttgccctgtggttctgcatgtctgtgctcttcctcaaccctccctaaacagtttgccagattcaagtccgtgtgatttgggcccgagctgggtgtcccagggcaagccaccttgcctgtctaggcctctatgtcaggactccctggccttcatgaagaatagcaaactcatccctgtagggaccaggcaggtaacatagacgagtgactctgggtggacagtggtgtcatgacccacttcaaggggcctacctcctgccagttgtgaccctgtgggaatgcagtccacagtggccaggtggccagatttttcaagaaaagctggatggatgtttctgagtcatcttaatttcaaaatgagactcatattttaaaatttctgtgggccaaatgaaacaagtatgcaggcaggtctggtccgagggggctggcttggccatgcctttctgtgcctttaatgaggactaagaagcaagattgggccacactgtctggactcaaagcccagctccaccactgagcacccgtgtgactctttccatatgtataacgtggggataataataatagctgcttcacaggatgaaatgaagtttgaggtgagaagcattcaccatggtgcccatcgtgttactccattgtcagaggaggaaacggggtcaggcaggaaagcaacttaaaggagggcctgcaagcagccagggtcagagacagggcttggttctgcttcctggtgaagcatggcttcggggtgctgcctctccctccctgtttgaatctgcagattgtgttaggcccccagctgagggcctggagtggtgggattggtcccagtgcctggcgcacattggcctgcagagtagattaactgaatgaccaaagagcaacagaagtctagtgattcttgtctttgaggttctgactggtgttttacaactgagtccaaggcttttccctcctttgtccctctgacacccctccccctaattctcatctgtcagatccagtgtattcctaagctgggacaaagcctctgttttcccagtaggagccagggctgagtgtggaaattacagtgactgcttcttctcagcttctctggttgaaagcaagctggcgaagtaagaggaggtagagttgagaaggtgtggaagatagggacagctgcccccagaactcccttcaagggaggacttccccagctatgggaagtgccatcagggtggccgcagctgcagagagccacttcacctgagaccacgcccttcctggggcagcctgtatctggtgtctgagtgaggcatggtataaacacctggtcatttcaatccaacatgggacggacactgacagacagtactcccagcaggcccaggccagccagggcttcgtcaggcctgcagcacaatttgacttcctatgcccaggcctgcttcctcttcttcctcttcttttcacaggtgcttattcctaataaacatcttgcaacccaaaaaaaaaaaaaaaaaa

SEQ ID NO: 3797 - protein, 315 aa, Homo sapiens
MVQQRGARAKRDGGPPPPGPGPAEEGAREPGWCKTPSGHIKRPMNAFMVWSQHERRKIMDQWPDMHNAEISKRLGRRWQLLQDSEKIPFVREAERLRLKHMADYPDYKYRPRKKSKGAPAKARPRPPGGSGGGSRLKPGPQLPGRGGRRAAGGPLGGGAAAPEDDDEDDDEELLEVRLVETPGRELWRMVPAGRAARGQAERAQGPSGEGAAAAAAASPTPSEDEEPEEEEEEAAAAEEGEEETVASGEESLGFLSRLPPGPAGLDCSALDRDPDLQPPSGTSHFEFPDYCTPEVTEMIAGDWRPSSIADLVFTY

SEQ ID NO: 3798 - DNA, 2042 bp, Homo sapiens
gcaggcagagagatgaggaaactgagacccagaaaggtggaagcacttgtctaaggtcacgcctccaggaagcagtgtgtccacgactccagtccaagtggtcaggctccagagcccacagtcccaggggtccatgatgccgagctgcaatcgttcctgcagctgcagccgcggccccagcgtggaggatggcaagtggtatggggtccgctcctacctgcacctcttctatgaggactgtgcaggcactgctctcagcgacgaccctgagggacctccggtcctgtgcccccgccggccctggccctcactgtgttggaagatcagcctgtcctcggggaccctgcttctgctgctgggtgtggcggctctgaccactggctatgcagtgccccccaagctggagggcatcggtgagggtgagttcctggtgttggatcagcgggcagccgactacaaccaggccctgggcacctgtcgcctggcaggcacagcgctctgtgtggcagctggagttctgctcgccatctgcctcttctgggccatgataggctggctgagccaggacaccaaggcagagcccttggaccccgaagccgacagccacgtggaggtcttcggggatgagccagagcagcagttgtcacccattttccgcaatgccagtggccagtcatggttctcgccacccgccagcccctttgggcaatcttctgtgcagactatccagcccaagagggactcctgagctgcccacatggcctaagatgtgggtcctggatccttcccccttctcaccataaccccctctcagtgtttccccaacttctccctttagagcccaactccaggtcaaatctggagctcaaatcccagtgctccctccccaggagtggggccccaactcttccaagataccagcattcctcaagtcctcccaaaacttcctacccacaccctcttcccaaggccctcaggggcagaaaacatctccttcaacccgtccccactccttcctctgcatgaccttgggcaaacccttgccctttcaagccatcagctcctgcctctctgccatgagggctttggatcagattcctcttctcgccaggatgaggacacgcactgccctccatagacacagatgaaggggtgggggtcattcagctcgaatgggtcccagatgctcacttggcctttccctgcaggatgagtgaagacgtttgcctctcacagtgtgtcttctacctgcattttggcatcagagccccccagcccacccaccacaggcaattactagccctagttgataggtgaggtgggtgaagaaggctggaggtgacatgtccgaggtcacacaacaaagcagcatgcaggaactagaaacacatcttcagcctcctcctgggccagctcttgtgctacaggtggggcggagccagcccctcaccttcctggttccctgagggtcctcagggtggaggacaggtttggcccagaaagactagccagaggcctgatggtcccaggtggctctggatatactttggatatggatttaaatggtctctaagagccgggggtagggggcaggaaaagtgggttgtctttgcccctcaaagtccacctacctagaaaccaagcccacggtcttggccgtgaccctgataataaatgggctctctcagaggcgccagcccctccctccccagccggaggcgtcatctctcttctgtaccactagagggagctctgatgcagctggagagcagcgctcaaggctctcgcccctcccctccctaacccttaccttcagtctccaccagcctgaagggcctcctaggggatcctcaggcggcccccaccagggcacaccctactgtccttgtgcctcacgccccctcctcatcctgcaccccttccatcccaccttccctttcaataaacagctgggatggaaaaaaaaaaaaagaaaaaaaaaaaaaaaaaaaaaaaaaaaaaaaaaaaaaaaaaaaaaaaaaaaaaaaaaaaaaaaaaaaaaa

SEQ ID NO: 3799 - protein, 204 aa, Homo sapiens
MMPSCNRSCSCSRGPSVEDGKWYGVRSYLHLFYEDCAGTALSDDPEGPPVLCPRRPWPSLCWKISLSSGTLLLLLGVAALTTGYAVPPKLEGIGEGEFLVLDQRAADYNQALGTCRLAGTALCVAAGVLLAICLFWAMIGWLSQDTKAEPLDPEADSHVEVFGDEPEQQLSPIFRNASGQSWFSPPASPFGQSSVQTIQPKRDS

SEQ ID NO: 3800 - DNA, 2469 bp, Homo sapiens
gacagagcaagactctgtctcaaaaaaaaaaaaaaaaagagcaaattttttttccaaggtgatagggagagtccgtggctgatgtctgcactgaccagacgcccctagggggccagcgagggcgggtcccaggtgcagcggatgcagaggagagaggcccgggcgcggcgcgggggatggtgcgatcccgggcccgagggcatcagacggcggctgattagctccggtttgcatcacccggaccgggggattagctccggtttgcatcacccggaccgggggattagctccggtttgcatcacccggaccgggggccgggcgcgcacgagactcgcagcggaagtggaggcggctccgcgcgcgtccgctgctaggacccgggcagggctggagctgggctgggatcccgagctcggcagcagcgcagcgggccggcccacctgctggtgccctggaggctctgagccccggcggcgcccgggcccacgcggaacgacggggcgagatgcgagccacccctctggctgctcctgcgggttccctgtccaggaagaagcggttggagttggatgacaacttagataccgagcgtcccgtccagaaacgagctcgaagtgggccccagcccagactgcccccctgcctgttgcccctgagcccacctactgctccagatcgtgcaactgctgtggccactgcctcccgtcttgggccctatgtcctcctggagcccgaggagggcgggcgggcctaccaggccctgcactgccctacaggcactgagtatacctgcaaggtgtaccccgtccaggaagccctggccgtgctggagccctatgcgcggctgcccccgcacaagcatgtggctcggcccactgaggtcctggctggtacccagctcctctacgcctttttcactcggacccatggggacatgcacagcctggtgcgaagccgccaccgtatccctgagcctgaggctgccgtgctcttccgccagatggccaccgccctggcgcactgtcaccagcacggtctggtcctgcgtgatctcaagctgtgtcgctttgtcttcgctgaccgtgagaggaagaagctggtgctggagaacctggaggactcctgcgtgctgactgggccagatgattccctgtgggacaagcacgcgtgcccagcctacgtgggacctgagatactcagctcacgggcctcatactcgggcaaggcagccgatgtctggagcctgggcgtggcgctcttcaccatgctggccggccactaccccttccaggactcggagcctgtcctgctcttcggcaagatccgccgcggggcctacgccttgcctgcaggcctctcggcccctgcccgctgtctggttcgctgcctccttcgtcgggagccagctgaacggctcacagccacaggcatcctcctgcacccctggctgcgacaggacccgatgcccttagccccaacccgatcccatctctgggaggctgcccaggtggtccctgatggactggggctggacgaagccagggaagaggagggagacagagaagtggttctgtatggctaggaccaccctactacacgctcagctgccaacagtggattgagtttgggggtagctccaagccttctcctgcctctgaactgagccaaaccttcagtgccttccagaagggagaaaggcagaagcctgtgtggagtgtgctgtgtacacatctgctttgttccacacacatgcagttcctgcttgggtgcttatcaggtgccaagccctgttctcggtgctgggagtacagcagtgagcaaaggagacaatattccctgctcacagagatgacaaactggcatccttgagctgacaacacttttccatgaccataggtcactgtctacactgggtacactttgtaccagtgtcggcctccactgatgctggtgctcaggcacctctgtccaaggacaatccctttcacaaacaaaccagctgcctttgtatcttgtaccttttcagagaaagggaggtatccctgtgccaaaggctccaggcctctcccctgcaactcaggacccaagcccagctcactctgggaactgtgttcccagcatctctgtcctcttgattaagagattctccttccaggcctaagcctgggatttgggccagagataagaatccaaactatgaggctagttcttgtctaactcaagactgttctggaatgagggtccaggcctgtcaaccatggggcttctgacctgagcaccaaggttgagggacaggattaggcagggtctgtcctgtggccacctggaaagtcccaggtgggactcttctggggacacttggggtccacaatcccaggtccatactctaggttttggataccatgagtatgtatgtttacctgtgcctaataaaggagaattatgaaataaaaaaaaaaaaaaaaaaa

SEQ ID NO: 3801 - protein, 358 aa, Homo sapiens
MRATPLAAPAGSLSRKKRLELDDNLDTERPVQKRARSGPQPRLPPCLLPLSPPTAPDRATAVATASRLGPYVLLEPEEGGRAYQALHCPTGTEYTCKVYPVQEALAVLEPYARLPPHKHVARPTEVLAGTQLLYAFFTRTHGDMHSLVRSRHRIPEPEAAVLFRQMATALAHCHQHGLVLRDLKLCRFVFADRERKKLVLENLEDSCVLTGPDDSLWDKHACPAYVGPEILSSRASYSGKAADVWSLGVALFTMLAGHYPFQDSEPVLLFGKIRRGAYALPAGLSAPARCLVRCLLRREPAERLTATGILLHPWLRQDPMPLAPTRSHLWEAAQVVPDGLGLDEAREEEGDREVVLYG

SEQ ID NO: 3802 - DNA, 2570 bp, Homo sapiens
gggagtccggggacccgcgatcagccccggaggacggggtggggtcgccccaaacaggagcgccgggaccgctgggaccccgcactcggcgtccgccgccgccgggtagccgggcagtggaggtcccggatgaggcgacaatttttccggccccccctcccagtcccgccccacttccggggccgccactttcactttctcttccgccgaagccgctccccttgcgaagaactggggcctcccgggaggagagagggctttgccttgaaacccgggacgccaggggcgctcccgcaagtgggggtcctccgggacttggaacgccccggctgggtggtgtccgggcgtcctttccccgcttcttcccacctcggctggtcccgtttcctcctgcgcccagtgcggacctgtctcggcgcccgctgccctctcaccgccccacgcaggatcccggcctggtcaccgggcagtgtgatgcttcccgactgccgcggggacagcgaggcacacacagggcttgggccgcgccggaggccacacggcctggctgagttgctcctggtctcccgcctctcccaggcgacccggaggtagcatttcccaggaggcacggtcccccccagggggatgggcacagccacgccagatggacgagaagaccaagaaaggctgtgggtgagcgtggaggatgctcagatgcacaccgtcaccatctggctcacagtgcgccctgatatgacagtggcgtctctcaaggacatggtttttctggactatggcttcccaccagtcttgcagcagtgggtgattgggcagcggctggcacgagaccaggagaccctgcactcccatggggtgcggcagaatggggacagtgcctacctctatctgctgtcagcccgcaacacctccctcaaccctcaggagctgcagcgggagcggcagctgcggatgctggaagatctgggcttcaaggacctcacgctgcagccgcggggccctctggagccaggccccccaaagcccggggtcccccaggaacccggacgggggcagccagatgcagtgcctgagcccccaccggtgggctggcagtgccccgggtgcaccttcatcaacaagcccacgcggcctggctgtgagatgtgctgccgggcgcgccccgaggcctaccaggtccccgcctcataccagcccgacgaggaggagcgagcgcgcctggcgggcgaggaggaggcgctgcgtcagtaccagcagcggaagcagcagcagcaggaggggaactacctgcagcacgtccagctggaccagaggagcctggtgctgaacacggagcccgccgagtgccccgtgtgctactcggtgctggcgcccggcgaggccgtggtgctgcgtgagtgtctgcacaccttctgcagggagtgcctgcagggcaccatccgcaacagccaggaggcggaggtctcctgccccttcattgacaacacctactcgtgctcgggcaagctgctggagagggagatcaaggcgctcctgacccctgaggattaccagcgatttctagacctgggcatctccattgctgaaaaccgcagtgccttcagctaccattgcaagaccccagattgcaagggatggtgcttctttgaggatgatgtcaatgagttcacctgccctgtgtgtttccacgtcaactgcctgctctgcaaggccatccatgagcagatgaactgcaaggagtatcaggaggacctggccctgcgggctcagaacgatgtggctgcccggcagacgacagagatgctgaaggtgatgctgcagcagggcgaggccatgcgctgcccccagtgccagatcgtggtacagaagaaggacggctgcgactggatccgctgcaccgtctgccacaccgagatctgctgggtcaccaagggcccacgctggggccctgggggcccaggagacaccagcgggggctgccgctgcagggtaaatgggattccttgccacccaagctgtcagaactgccactgagctaaagatggtggggccacatgctgacccagccccacatccacattctgttagaatgtagctcagggagcttcgtggacggccttgcttgctgtagcgttgtaggggccctgcctgcactgcggttgtccacggtcacatctgccccagtgcctttgtccttcccttggggcttgccggccagacttctctcccctgcggctcccacctctgcctgaccccagccttaaacatagcccctggccagaggccttgctgggtggagcctctgtgtgactccatactcctcccaccacaacactcatctgtcaaacaccaagcactctcagcctccccgccttcagctgtcagctttctggggctaacttctctgcctttgtggttggaggcctgaggcctcttggaactcttgctaacctgttcagagccaggaaggagactgcacagttttgaaagcacagcccgtcaggtccggctctgcgtctccctctctgcagcctgtgtaagctattataattaaaatggttttccgggaa

SEQ ID NO: 3803 - protein, 468 aa, Homo sapiens
MGTATPDGREDQERLWVSVEDAQMHTVTIWLTVRPDMTVASLKDMVFLDYGFPPVLQQWVIGQRLARDQETLHSHGVRQNGDSAYLYLLSARNTSLNPQELQRERQLRMLEDLGFKDLTLQPRGPLEPGPPKPGVPQEPGRGQPDAVPEPPPVGWQCPGCTFINKPTRPGCEMCCRARPEAYQVPASYQPDEEERARLAGEEEALRQYQQRKQQQQEGNYLQHVQLDQRSLVLNTEPAECPVCYSVLAPGEAVVLRECLHTFCRECLQGTIRNSQEAEVSCPFIDNTYSCSGKLLEREIKALLTPEDYQRFLDLGISIAENRSAFSYHCKTPDCKGWCFFEDDVNEFTCPVCFHVNCLLCKAIHEQMNCKEYQEDLALRAQNDVAARQTTEMLKVMLQQGEAMRCPQCQIVVQKKDGCDWIRCTVCHTEICWVTKGPRWGPGGPGDTSGGCRCRVNGIPCHPSCQNCH

SEQ ID NO: 3804 - DNA, 2715 bp, Homo sapiens
gggagtccggggacccgcgatcagccccggaggacggggtggggtcgccccaaacaggagcgccgggaccgctgggaccccgcactcggcgtccgccgccgccgggtagccgggcagtggaggtcccggatgaggcgacaatttttccggccccccctcccagtcccgccccacttccggggccgccactttcactttctcttccgccgaagccgctccccttgcgaagaactggggcctcccgggaggagagagggctttgccttgaaacccgggacgccaggggcgctcccgcaagtgggggtcctccgggacttggaacgccccggctgggtggtgtccgggcgtcctttccccgcttcttcccacctcggctggtcccgtttcctcctgcgcccagtgcggacctgtctcggcgcccgctgccctctcaccgccccacgcaggatcccggcctggtcaccgggcagtgtgatgcttcccgactgccgcggggacagcgaggcacacacagggcttgggccgcgccggaggccacacggcctggctgagttgctcctggtctcccgcctctcccaggcgacccggaggtagcatttcccaggaggcacggtcccccccagggggatgggcacagccacgccagatggacgagaagaccaagaaagcagaggaaatggccctgagcctcacccgagcagtggcgggcggggatgaacaggtggcaatgaagtgtgccatctggctggcagagcaacgggtgcccctgagtgtgcaactgaagcctgaggtctccccaacgcaggacatcaggctgtgggtgagcgtggaggatgctcagatgcacaccgtcaccatctggctcacagtgcgccctgatatgacagtggcgtctctcaaggacatggtttttctggactatggcttcccaccagtcttgcagcagtgggtgattgggcagcggctggcacgagaccaggagaccctgcactcccatggggtgcggcagaatggggacagtgcctacctctatctgctgtcagcccgcaacacctccctcaaccctcaggagctgcagcgggagcggcagctgcggatgctggaagatctgggcttcaaggacctcacgctgcagccgcggggccctctggagccaggccccccaaagcccggggtcccccaggaacccggacgggggcagccagatgcagtgcctgagcccccaccggtgggctggcagtgccccgggtgcaccttcatcaacaagcccacgcggcctggctgtgagatgtgctgccgggcgcgccccgaggcctaccaggtccccgcctcataccagcccgacgaggaggagcgagcgcgcctggcgggcgaggaggaggcgctgcgtcagtaccagcagcggaagcagcagcagcaggaggggaactacctgcagcacgtccagctggaccagaggagcctggtgctgaacacggagcccgccgagtgccccgtgtgctactcggtgctggcgcccggcgaggccgtggtgctgcgtgagtgtctgcacaccttctgcagggagtgcctgcagggcaccatccgcaacagccaggaggcggaggtctcctgccccttcattgacaacacctactcgtgctcgggcaagctgctggagagggagatcaaggcgctcctgacccctgaggattaccagcgatttctagacctgggcatctccattgctgaaaaccgcagtgccttcagctaccattgcaagaccccagattgcaagggatggtgcttctttgaggatgatgtcaatgagttcacctgccctgtgtgtttccacgtcaactgcctgctctgcaaggccatccatgagcagatgaactgcaaggagtatcaggaggacctggccctgcgggctcagaacgatgtggctgcccggcagacgacagagatgctgaaggtgatgctgcagcagggcgaggccatgcgctgcccccagtgccagatcgtggtacagaagaaggacggctgcgactggatccgctgcaccgtctgccacaccgagatctgctgggtcaccaagggcccacgctggggccctgggggcccaggagacaccagcgggggctgccgctgcagggtaaatgggattccttgccacccaagctgtcagaactgccactgagctaaagatggtggggccacatgctgacccagccccacatccacattctgttagaatgtagctcagggagcttcgtggacggccttgcttgctgtagcgttgtaggggccctgcctgcactgcggttgtccacggtcacatctgccccagtgcctttgtccttcccttggggcttgccggccagacttctctcccctgcggctcccacctctgcctgaccccagccttaaacatagcccctggccagaggccttgctgggtggagcctctgtgtgactccatactcctcccaccacaacactcatctgtcaaacaccaagcactctcagcctccccgccttcagctgtcagctttctggggctaacttctctgcctttgtggttggaggcctgaggcctcttggaactcttgctaacctgttcagagccaggaaggagactgcacagttttgaaagcacagcccgtcaggtccggctctgcgtctccctctctgcagcctgtgtaagctattataattaaaatggttttccgggaa

SEQ ID NO: 3805 - protein, 500 aa, Homo sapiens
MALSLTRAVAGGDEQVAMKCAIWLAEQRVPLSVQLKPEVSPTQDIRLWVSVEDAQMHTVTIWLTVRPDMTVASLKDMVFLDYGFPPVLQQWVIGQRLARDQETLHSHGVRQNGDSAYLYLLSARNTSLNPQELQRERQLRMLEDLGFKDLTLQPRGPLEPGPPKPGVPQEPGRGQPDAVPEPPPVGWQCPGCTFINKPTRPGCEMCCRARPEAYQVPASYQPDEEERARLAGEEEALRQYQQRKQQQQEGNYLQHVQLDQRSLVLNTEPAECPVCYSVLAPGEAVVLRECLHTFCRECLQGTIRNSQEAEVSCPFIDNTYSCSGKLLEREIKALLTPEDYQRFLDLGISIAENRSAFSYHCKTPDCKGWCFFEDDVNEFTCPVCFHVNCLLCKAIHEQMNCKEYQEDLALRAQNDVAARQTTEMLKVMLQQGEAMRCPQCQIVVQKKDGCDWIRCTVCHTEICWVTKGPRWGPGGPGDTSGGCRCRVNGIPCHPSCQNCH

SEQ ID NO: 3806 - DNA, 2020 bp, Homo sapiens
ccgatgccgagcgggtgctacgtcccgcggtcggagccgcgtcttctcccggctccgccaccagccggggctcgggtgggggcccggggccccggggcatggccctccggagtgcgcagggcgacggccccacctccggccactgggacggcggcgcggagaaggcagactttaacgccaaaaggaaaaagaaagtggcagagatacaccaggctctgaacagtgatcccactgatgtggctgcccttagacgcatggctatcagtgaaggagggctcctgactgatgagatcagacgaaaagtgtggcccaagctcctcaatgtcaatgccaatgacccacctcctatatcagggaagaacctacggcagatgagcaaggactaccaacaagtgttgctggacgtccggcggtcattgcggcggttccctcctggcatgccagaggaacagagagaagggctccaggaagaactgattgacatcatcctcctcatcttggagcgcaaccctcagctgcactactaccagggctaccatgacattgtggtcacatttctgctggtggtaggcgagaggctggcaacatccctggtagaaaaattatctacccaccacctcagggattttatggatccaacaatggacaacaccaagcatatattaaactatctgatgcccatcattgaccaggtgaatccagagctccatgacttcatgcagagtgctgaggtagggaccatctttgccctcagctggctcatcacctggtttgggcatgtcctgtctgacttcaggcacgtcgtgcggttatatgacttcttcctggcctgccacccactgatgccgatttactttgcagccgtgattgtgttgtatcgcgagcaggaagtcctggactgtgactgtgacatggcctcggtccaccacctgttgtcccagatccctcaggacttgccctatgagacactgatcagcagagcaggagacctttttgttcagtttcccccatccgaacttgctcgggaggccgctgcccaacagcaagctgagaggacggcagcctctactttcaaagactttgagctggcatcagcccagcagaggcctgatatggtgctgcggcagcggtttcggggacttctgcggcctgaagatcgaacaaaagatgtcctgaccaagccaaggaccaaccgctttgtgaaattggcagtgatggggctgacagtggcacttggagcggctgcactggctgtggtgaaaagtgccctggaatgggcccctaagtttcagctgcagctgtttccctgaaagccagagaagaccttcctcttacatcacattaaggcacccactcactaccttggcgtcgttttttgggtctgacttgactcgtcaactgctggtctctcccacctggttggaaatgtcgttggaaacttgcaaagactctccagaccttagggaacaagaggcatcactcagtccttctgggacagcttccctgcctcagaaaacggaatctctgtctgtgaccttctcctgccccatttcacttgctcaacaccagactttaatctgactgtagctcataagaccctcattccagagagggtgctgccccatacccggaaggaggaacgctgcacagagaggccaagaagcatctggacagacaggccttgctgggtttagaccttatgctttttgtccagtttcatctcaacacagctgccatgcttcagccatgcctatccaatgacgtctccataaaaggcccaggaacacgggagcttctgaagagctgaacatgtggagggaggggaacgagaacttgtccatgtgccaagagggtggcgcacccccactccatggggacagaagctccagcatttgcccaggacccgtccagacctcaccctgtgtgtatcttcatctggctgtttacttatttgtatccttttctaataatgtttgtaataaactggtaaacataaaaaaaaaaaaaaaaaaaaaaaaaa

SEQ ID NO: 3807 - protein, 403 aa, Homo sapiens
MALRSAQGDGPTSGHWDGGAEKADFNAKRKKKVAEIHQALNSDPTDVAALRRMAISEGGLLTDEIRRKVWPKLLNVNANDPPPISGKNLRQMSKDYQQVLLDVRRSLRRFPPGMPEEQREGLQEELIDIILLILERNPQLHYYQGYHDIVVTFLLVVGERLATSLVEKLSTHHLRDFMDPTMDNTKHILNYLMPIIDQVNPELHDFMQSAEVGTIFALSWLITWFGHVLSDFRHVVRLYDFFLACHPLMPIYFAAVIVLYREQEVLDCDCDMASVHHLLSQIPQDLPYETLISRAGDLFVQFPPSELAREAAAQQQAERTAASTFKDFELASAQQRPDMVLRQRFRGLLRPEDRTKDVLTKPRTNRFVKLAVMGLTVALGAAALAVVKSALEWAPKFQLQLFP

SEQ ID NO: 3808 - DNA, 2732 bp, Homo sapiens
cccgcctcctggtaggagggggtttccgcttccggcagcagcggctgcagcctcgctctggtccctgcggctggcggccgagccgtgtgtctcctcctccatcgccgccatattgtctgtgtgagcagaggggagagcggccgccgccgctgccgcttccaccacagtttgaagaaaacaggtctgaaacaaggtcttacccccagctgcttctgaacacagtgactgccagatctccaaacatcaagtccagctttgtccgccaacctgtctgacatgtcgggacccgtgccaagcagggccagagtttacacagatgttaatacacacagacctcgagaatactgggattacgagtcacatgtggtggaatggggaaatcaagatgactaccagctggttcgaaaattaggccgaggtaaatacagtgaagtatttgaagccatcaacatcacaaataatgaaaaagttgttgttaaaattctcaagccagtaaaaaagaagaaaattaagcgtgaaataaagattttggagaatttgagaggaggtcccaacatcatcacactggcagacattgtaaaagaccctgtgtcacgaacccccgccttggtttttgaacacgtaaacaacacagacttcaagcaattgtaccagacgttaacagactatgatattcgattttacatgtatgagattctgaaggccctggattattgtcacagcatgggaattatgcacagagatgtcaagccccataatgtcatgattgatcatgagcacagaaagctacgactaatagactggggtttggctgagttttatcatcctggccaagaatataatgtccgagttgcttcccgatacttcaaaggtcctgagctacttgtagactatcagatgtacgattatagtttggatatgtggagtttgggttgtatgctggcaagtatgatctttcggaaggagccatttttccatggacatgacaattatgatcagttggtgaggatagccaaggttctggggacagaagatttatatgactatattgacaaatacaacattgaattagatccacgtttcaatgatatcttgggcagacactctcgaaagcgatgggaacgctttgtccacagtgaaaatcagcaccttgtcagccctgaggccttggatttcctggacaaactgctgcgatatgaccaccagtcacggcttactgcaagagaggcaatggagcacccctatttctacactgttgtgaaggaccaggctcgaatgggttcatctagcatgccagggggcagtacgcccgtcagcagcgccaatatgatgtcagggatttcttcagtgccaaccccttcaccccttggacctctggcaggctcaccagtgattgctgctgccaacccccttgggatgcctgttccagctgccgctggcgctcagcagtaacggccctatctgtctcctgatgcctgagcagaggtgggggagtccaccctctccttgatgcagcttgcgcctggcggggaggggtgaaacacttcagaagcaccgtgtctgaaccgttgcttgtggatttatagtagttcagtcataaaaaaaaaattataataggctgattttcttttttctttttttttttaactcgaacttttcataactcaggggattccctgaaaaattacctgcaggtggaatatttcatggacaaatttttttttctcccctcccaaatttagttcctcatcacaaaagaacaaagataaaccagcctcaatcccggctgctgcatttaggtggagacttcttcccattcccaccattgttcctccaccgtcccacactttagggggttggtatctcgtgctcttctccagagattacaaaaatgtagcttctcaggggaggcaggaagaaaggaaggaaggaaagaaggaagggaggacccaatctataggagcagtggactgcttgctggtcgcttacatcactttactccataagcgcttcagtggggttatcctagtggctcttgtggaagtgtgtcttagttacatcaagatgttgaaaatctacccaaaatgcagacagatactaaaaacttctgttcagtaagaatcatgtcttactgatctaaccctaaatccaactcatttatacttttatttttagttcagtttaaaatgttgataccttccctcccaggctccttaccttggtcttttccctgttcatctcccaacatgctgtgctccatagctggtaggagagggaaggcaaaatctttcttagttttctttgtcttggccattttgaattcatttagttactgggcataacttactgctttttacaaaagaaacaaacattgtctgtacaggtttcatgctagagctaatgggagatgtggccacactgacttccattttaagctttctaccttcttttcctccgaccgtccccttccctcacatgccatccagtgagaagacctgctcctcagtcttgtaaatgtatcttgagaggtaggagcagagccactatctccattgaagctgaaatggtagacctgtaattgtgggaaaactataaactctcttgttacagccccgccaccccttgctgtgtgtatatatataatactttgtccttcatatgtgaaagatccagtgttggaattctttggtgtaaataaacgtttggttttatttatcaaaaaaaaaaaaaaa

SEQ ID NO: 3809 - protein, 391 aa, Homo sapiens
MSGPVPSRARVYTDVNTHRPREYWDYESHVVEWGNQDDYQLVRKLGRGKYSEVFEAINITNNEKVVVKILKPVKKKKIKREIKILENLRGGPNIITLADIVKDPVSRTPALVFEHVNNTDFKQLYQTLTDYDIRFYMYEILKALDYCHSMGIMHRDVKPHNVMIDHEHRKLRLIDWGLAEFYHPGQEYNVRVASRYFKGPELLVDYQMYDYSLDMWSLGCMLASMIFRKEPFFHGHDNYDQLVRIAKVLGTEDLYDYIDKYNIELDPRFNDILGRHSRKRWERFVHSENQHLVSPEALDFLDKLLRYDHQSRLTAREAMEHPYFYTVVKDQARMGSSSMPGGSTPVSSANMMSGISSVPTPSPLGPLAGSPVIAAANPLGMPVPAAAGAQQ

SEQ ID NO: 3810 - DNA, 2849 bp, Homo sapiens
cccgcctcctggtaggagggggtttccgcttccggcagcagcggctgcagcctcgctctggtccctgcggctggcggccgagccgtgtgtctcctcctccatcgccgccatattgtctgtgtgagcagaggggagagcggccgccgccgctgccgcttccaccacagctctatcaaggcttgtcaagcagtgtgctcatcacatggtaaatcatgcagcgtggaacctcataaaatctccaagaaacatcattcacccatactgactagtttcacatctctttgtttgaagaaaacaggtctgaaacaaggtcttacccccagctgcttctgaacacagtgactgccagatctccaaacatcaagtccagctttgtccgccaacctgtctgacatgtcgggacccgtgccaagcagggccagagtttacacagatgttaatacacacagacctcgagaatactgggattacgagtcacatgtggtggaatggggaaatcaagatgactaccagctggttcgaaaattaggccgaggtaaatacagtgaagtatttgaagccatcaacatcacaaataatgaaaaagttgttgttaaaattctcaagccagtaaaaaagaagaaaattaagcgtgaaataaagattttggagaatttgagaggaggtcccaacatcatcacactggcagacattgtaaaagaccctgtgtcacgaacccccgccttggtttttgaacacgtaaacaacacagacttcaagcaattgtaccagacgttaacagactatgatattcgattttacatgtatgagattctgaaggccctggattattgtcacagcatgggaattatgcacagagatgtcaagccccataatgtcatgattgatcatgagcacagaaagctacgactaatagactggggtttggctgagttttatcatcctggccaagaatataatgtccgagttgcttcccgatacttcaaaggtcctgagctacttgtagactatcagatgtacgattatagtttggatatgtggagtttgggttgtatgctggcaagtatgatctttcggaaggagccatttttccatggacatgacaattatgatcagttggtgaggatagccaaggttctggggacagaagatttatatgactatattgacaaatacaacattgaattagatccacgtttcaatgatatcttgggcagacactctcgaaagcgatgggaacgctttgtccacagtgaaaatcagcaccttgtcagccctgaggccttggatttcctggacaaactgctgcgatatgaccaccagtcacggcttactgcaagagaggcaatggagcacccctatttctacactgttgtgaaggaccaggctcgaatgggttcatctagcatgccagggggcagtacgcccgtcagcagcgccaatatgatgtcagggatttcttcagtgccaaccccttcaccccttggacctctggcaggctcaccagtgattgctgctgccaacccccttgggatgcctgttccagctgccgctggcgctcagcagtaacggccctatctgtctcctgatgcctgagcagaggtgggggagtccaccctctccttgatgcagcttgcgcctggcggggaggggtgaaacacttcagaagcaccgtgtctgaaccgttgcttgtggatttatagtagttcagtcataaaaaaaaaattataataggctgattttcttttttctttttttttttaactcgaacttttcataactcaggggattccctgaaaaattacctgcaggtggaatatttcatggacaaatttttttttctcccctcccaaatttagttcctcatcacaaaagaacaaagataaaccagcctcaatcccggctgctgcatttaggtggagacttcttcccattcccaccattgttcctccaccgtcccacactttagggggttggtatctcgtgctcttctccagagattacaaaaatgtagcttctcaggggaggcaggaagaaaggaaggaaggaaagaaggaagggaggacccaatctataggagcagtggactgcttgctggtcgcttacatcactttactccataagcgcttcagtggggttatcctagtggctcttgtggaagtgtgtcttagttacatcaagatgttgaaaatctacccaaaatgcagacagatactaaaaacttctgttcagtaagaatcatgtcttactgatctaaccctaaatccaactcatttatacttttatttttagttcagtttaaaatgttgataccttccctcccaggctccttaccttggtcttttccctgttcatctcccaacatgctgtgctccatagctggtaggagagggaaggcaaaatctttcttagttttctttgtcttggccattttgaattcatttagttactgggcataacttactgctttttacaaaagaaacaaacattgtctgtacaggtttcatgctagagctaatgggagatgtggccacactgacttccattttaagctttctaccttcttttcctccgaccgtccccttccctcacatgccatccagtgagaagacctgctcctcagtcttgtaaatgtatcttgagaggtaggagcagagccactatctccattgaagctgaaatggtagacctgtaattgtgggaaaactataaactctcttgttacagccccgccaccccttgctgtgtgtatatatataatactttgtccttcatatgtgaaagatccagtgttggaattctttggtgtaaataaacgtttggttttatttatcaaaaaaaaaaaaaaa

SEQ ID NO: 3811 - protein, 391 aa, Homo sapiens; identical to SEQ ID NO: 3809

SEQ ID NO: 3812 - DNA, 2522 bp, Homo sapiens
cccgcctcctggtaggagggggtttccgcttccggcagcagcggctgcagcctcgctctggtccctgcggctggcggccgagccgtgtgtctcctcctccatcgccgccatattgtctgtgtgagcagaggggagagcggccgccgccgctgccgcttccaccacagaaatcaagatgactaccagctggttcgaaaattaggccgaggtaaatacagtgaagtatttgaagccatcaacatcacaaataatgaaaaagttgttgttaaaattctcaagccagtaaaaaagaagaaaattaagcgtgaaataaagattttggagaatttgagaggaggtcccaacatcatcacactggcagacattgtaaaagaccctgtgtcacgaacccccgccttggtttttgaacacgtaaacaacacagacttcaagcaattgtaccagacgttaacagactatgatattcgattttacatgtatgagattctgaaggccctggattattgtcacagcatgggaattatgcacagagatgtcaagccccataatgtcatgattgatcatgagcacagaaagctacgactaatagactggggtttggctgagttttatcatcctggccaagaatataatgtccgagttgcttcccgatacttcaaaggtcctgagctacttgtagactatcagatgtacgattatagtttggatatgtggagtttgggttgtatgctggcaagtatgatctttcggaaggagccatttttccatggacatgacaattatgatcagttggtgaggatagccaaggttctggggacagaagatttatatgactatattgacaaatacaacattgaattagatccacgtttcaatgatatcttgggcagacactctcgaaagcgatgggaacgctttgtccacagtgaaaatcagcaccttgtcagccctgaggccttggatttcctggacaaactgctgcgatatgaccaccagtcacggcttactgcaagagaggcaatggagcacccctatttctacactgttgtgaaggaccaggctcgaatgggttcatctagcatgccagggggcagtacgcccgtcagcagcgccaatatgatgtcagggatttcttcagtgccaaccccttcaccccttggacctctggcaggctcaccagtgattgctgctgccaacccccttgggatgcctgttccagctgccgctggcgctcagcagtaacggccctatctgtctcctgatgcctgagcagaggtgggggagtccaccctctccttgatgcagcttgcgcctggcggggaggggtgaaacacttcagaagcaccgtgtctgaaccgttgcttgtggatttatagtagttcagtcataaaaaaaaaattataataggctgattttcttttttctttttttttttaactcgaacttttcataactcaggggattccctgaaaaattacctgcaggtggaatatttcatggacaaatttttttttctcccctcccaaatttagttcctcatcacaaaagaacaaagataaaccagcctcaatcccggctgctgcatttaggtggagacttcttcccattcccaccattgttcctccaccgtcccacactttagggggttggtatctcgtgctcttctccagagattacaaaaatgtagcttctcaggggaggcaggaagaaaggaaggaaggaaagaaggaagggaggacccaatctataggagcagtggactgcttgctggtcgcttacatcactttactccataagcgcttcagtggggttatcctagtggctcttgtggaagtgtgtcttagttacatcaagatgttgaaaatctacccaaaatgcagacagatactaaaaacttctgttcagtaagaatcatgtcttactgatctaaccctaaatccaactcatttatacttttatttttagttcagtttaaaatgttgataccttccctcccaggctccttaccttggtcttttccctgttcatctcccaacatgctgtgctccatagctggtaggagagggaaggcaaaatctttcttagttttctttgtcttggccattttgaattcatttagttactgggcataacttactgctttttacaaaagaaacaaacattgtctgtacaggtttcatgctagagctaatgggagatgtggccacactgacttccattttaagctttctaccttcttttcctccgaccgtccccttccctcacatgccatccagtgagaagacctgctcctcagtcttgtaaatgtatcttgagaggtaggagcagagccactatctccattgaagctgaaatggtagacctgtaattgtgggaaaactataaactctcttgttacagccccgccaccccttgctgtgtgtatatatataatactttgtccttcatatgtgaaagatccagtgttggaattctttggtgtaaataaacgtttggttttatttatcaaaaaaaaaaaaaaa

SEQ ID NO: 3813 - protein, 255 aa, Homo sapiens
MYEILKALDYCHSMGIMHRDVKPHNVMIDHEHRKLRLIDWGLAEFYHPGQEYNVRVASRYFKGPELLVDYQMYDYSLDMWSLGCMLASMIFRKEPFFHGHDNYDQLVRIAKVLGTEDLYDYIDKYNIELDPRFNDILGRHSRKRWERFVHSENQHLVSPEALDFLDKLLRYDHQSRLTAREAMEHPYFYTVVKDQARMGSSSMPGGSTPVSSANMMSGISSVPTPSPLGPLAGSPVIAAANPLGMPVPAAAGAQQ

SEQ ID NO: 3814 - DNA, 2722 bp, Homo sapiens
cacagcagcccccgcgcccgccgtgccgccgccgggacgtggggcccttgggccgtcgggccgcctggggagcgccagcccggatccggctgcccagatgcgggcgccactctgcctgctcctgctcgtcgcccacgccgtggacatgctcgccctgaaccgaaggaagaagcaagtgggcactggcctggggggcaactgcacaggctgtatcatctgctcagaggagaacggctgttccacctgccagcagaggctcttcctgttcatccgccgggaaggcatccgccagtacggcaagtgcctgcacgactgtccccctgggtacttcggcatccgcggccaggaggtcaacaggtgcaaaaaatgtggggccacttgtgagagctgcttcagccaggacttctgcatccggtgcaagaggcagttttacttgtacaaggggaagtgtctgcccacctgcccgccgggcactttggcccaccagaacacacgggagtgccagggggagtgtgaactgggtccctggggcggctggagcccctgcacacacaatggaaagacctgcggctcggcttggggcctggagagccgggtacgagaggctggccgggctgggcatgaggaggcagccacctgccaggtgctttctgagtcaaggaaatgtcccatccagaggccctgcccaggagagaggagccccggccagaagaagggcaggaaggaccggcgcccacgcaaggacaggaagctggaccgcaggctggacgtgaggccgcgccagcccggcctgcagccctgaccgccggctctcccgactctctggtcctagtcctcggcccctgcacacctcctcctgctccttctcctcctctcctcttactctttctcctctgtcttctccatttgtcctctctttctttccacccttctatcatttttctgtcagtctaccttccctttctttttcttttttatttcctttatttcttccacctccattctcctctcctttctccctccctccttcccttccttcctcttctttctcacttatcttttatctttccttttctttcttcctgtgtttcttcctgtccttcaccgcatccttctctctctccctcctcttgtctccctctcacacacactttaagagggaccatgagcctgtgccctcccctgcagctttctctatctacaacttaaagaaagcaaacatcttttcccaggcctttccctgaccccatctttgcagagaaagggtttccagagggcaaagctgggacacagcacaggtgaatcctgaaggccctgcttctgctctgggggaggctccaggaccctgagctgtgagcacctggttctctggacagtccccagaggccatttccacagccttcagccaccagccaccccgaggagctggctggacaaggctccagggcttccagaggcctggcttggacacctcccccagctggccgtggagggtcacaacctggcctctgggtgggcagccagccctggagggcatcctctgcaagctgcctgccaccctcatcggcactcccccacaggcctccctctcatgggttccatgcccctttttcccaagccggatcaggtgagctgtcactgctgggggatccacctgcccagcccagaagaggccactgaaacggaaaggaaagctgagattatccagcagctctgttccccacctcagcgcttcctgcccatgtggggaaacaggtctgagaaggaaggggcttgcccagggtcacacaggaagccttcaggctctgcttctgcctgatggctctgctcagcacattcacggtggagaggagaatttgggggtcacttgaggggggaaatgtagggaattgtgggtggggagcaagggaagatccgtgcactcgtccacacccaccaccacactcgctgacacccacccccacacgctgacacccacccccacacttgcccacacccatcaccgcactcgcccacacccaccaccacactgccccacacccaccaccacactcccccacacccaccaccacactcgcccacacccaccaccagtgacttgagcatctgtgcttcgctgtgacgcccctcgccctaggcaggaacgacgctgggaggagtctccaggtcagacccagcttggaagcaagtctgtcctcactgcctatccttctgccatcataacacccccttcctgctctgctccccggaatcctcagaaacgggatttgtatttgccgtgactggttggcctgaacacgtagggctccgtgactgggacaggaatgggcaggagaagcaagagtcggagctccaaggggcccaggggtggcctggggaaggaagatggtcagcaggctgggggagaggctctaggtgatgaaatattacattcccgaccccaagagagcacccaccctcagacctgccctccacctggcagctggggagccctggcctgaacccccccctcccagcaggcccaccctctctctgacttccctgctctcacctccccgagaacagctagagccccctcctccgcctggccaggccaccagcttctcttctgcaaacgtttgtgcctctgaaatgctccgttgttattgtttcaagaccctaacttttttttaaaactttcttaataaagggaaaagaaacttgtaaaaaaaaaaaaaaaaaa

SEQ ID NO: 3815 - protein, 234 aa, Homo sapiens
MRAPLCLLLLVAHAVDMLALNRRKKQVGTGLGGNCTGCIICSEENGCSTCQQRLFLFIRREGIRQYGKCLHDCPPGYFGIRGQEVNRCKKCGATCESCFSQDFCIRCKRQFYLYKGKCLPTCPPGTLAHQNTRECQGECELGPWGGWSPCTHNGKTCGSAWGLESRVREAGRAGHEEAATCQVLSESRKCPIQRPCPGERSPGQKKGRKDRRPRKDRKLDRRLDVRPRQPGLQP

SEQ ID NO: 3816 - DNA, 2536 bp, Homo sapiens
cacagcagcccccgcgcccgccgtgccgccgccgggacgtggggcccttgggccgtcgggccgcctggggagcgccagcccggatccggctgcccagatgcgggcgccactctgcctgctcctgctcgtcgcccacgccgtggacatgctcgccctgaaccgaaggaagaagcaagtgggcactggcctggggggcaactgcacaggctgtatcatctgctcagaggagaacggctgttccacctgccagcagaggctcttcctgttcatccgccgggaaggcatccgccagtacggcaagtgcctgcacgactgtccccctgggtacttcggcatccgcggccaggaggtcaacaggtgcaaaaaatgtggggccacttgtgagagctgcttcagccaggacttctgcatccggtgcaagaggcagttttacttgtacaaggggaagtgtctgcccacctgcccgccgggcactttggcccaccagaacacacgggagtgccaggagaggagccccggccagaagaagggcaggaaggaccggcgcccacgcaaggacaggaagctggaccgcaggctggacgtgaggccgcgccagcccggcctgcagccctgaccgccggctctcccgactctctggtcctagtcctcggcccctgcacacctcctcctgctccttctcctcctctcctcttactctttctcctctgtcttctccatttgtcctctctttctttccacccttctatcatttttctgtcagtctaccttccctttctttttcttttttatttcctttatttcttccacctccattctcctctcctttctccctccctccttcccttccttcctcttctttctcacttatcttttatctttccttttctttcttcctgtgtttcttcctgtccttcaccgcatccttctctctctccctcctcttgtctccctctcacacacactttaagagggaccatgagcctgtgccctcccctgcagctttctctatctacaacttaaagaaagcaaacatcttttcccaggcctttccctgaccccatctttgcagagaaagggtttccagagggcaaagctgggacacagcacaggtgaatcctgaaggccctgcttctgctctgggggaggctccaggaccctgagctgtgagcacctggttctctggacagtccccagaggccatttccacagccttcagccaccagccaccccgaggagctggctggacaaggctccagggcttccagaggcctggcttggacacctcccccagctggccgtggagggtcacaacctggcctctgggtgggcagccagccctggagggcatcctctgcaagctgcctgccaccctcatcggcactcccccacaggcctccctctcatgggttccatgcccctttttcccaagccggatcaggtgagctgtcactgctgggggatccacctgcccagcccagaagaggccactgaaacggaaaggaaagctgagattatccagcagctctgttccccacctcagcgcttcctgcccatgtggggaaacaggtctgagaaggaaggggcttgcccagggtcacacaggaagccttcaggctctgcttctgcctgatggctctgctcagcacattcacggtggagaggagaatttgggggtcacttgaggggggaaatgtagggaattgtgggtggggagcaagggaagatccgtgcactcgtccacacccaccaccacactcgctgacacccacccccacacgctgacacccacccccacacttgcccacacccatcaccgcactcgcccacacccaccaccacactgccccacacccaccaccacactcccccacacccaccaccacactcgcccacacccaccaccagtgacttgagcatctgtgcttcgctgtgacgcccctcgccctaggcaggaacgacgctgggaggagtctccaggtcagacccagcttggaagcaagtctgtcctcactgcctatccttctgccatcataacacccccttcctgctctgctccccggaatcctcagaaacgggatttgtatttgccgtgactggttggcctgaacacgtagggctccgtgactgggacaggaatgggcaggagaagcaagagtcggagctccaaggggcccaggggtggcctggggaaggaagatggtcagcaggctgggggagaggctctaggtgatgaaatattacattcccgaccccaagagagcacccaccctcagacctgccctccacctggcagctggggagccctggcctgaacccccccctcccagcaggcccaccctctctctgacttccctgctctcacctccccgagaacagctagagccccctcctccgcctggccaggccaccagcttctcttctgcaaacgtttgtgcctctgaaatgctccgttgttattgtttcaagaccctaacttttttttaaaactttcttaataaagggaaaagaaacttgtaaaaaaaaaaaaaaaaaa

SEQ ID NO: 3817 - protein, 172 aa, Homo sapiens
MRAPLCLLLLVAHAVDMLALNRRKKQVGTGLGGNCTGCIICSEENGCSTCQQRLFLFIRREGIRQYGKCLHDCPPGYFGIRGQEVNRCKKCGATCESCFSQDFCIRCKRQFYLYKGKCLPTCPPGTLAHQNTRECQERSPGQKKGRKDRRPRKDRKLDRRLDVRPRQPGLQP

SEQ ID NO: 3818 - DNA, 3241 bp, Homo sapiens
ggcttccccgccccgccccgtccccgggcgtctccattttggtctcaggtgtggactcggcaagaaccagcgcaagagggaagcggagttatagctaccccggccgcggagccggctcactgcactacccccgcccccttctttcctccagacgccgaagtcgcgggcgctcatggcgggcctggaggtactgttcgcatcggcagcgccggccatcacctgcaggcaggacgcgctcgtctgcttcttgcattgggaagtggtgacacacggttactgcggcttgggtgtcggtgaccagccgggtcccaatgataagaagtcagaactgctgccagctgggtggaacaacaataaagacctgtatgtcctccggtatgagtataaggatgggtccagaaagctccttgtgaaagccatcaccgtggagagcagcatgatcctcaatgtgctggaatatggctcacagcaagtggcagacttgaccctgaacttggatgattatatcgatgcagaacacctgggtgacttccacaggacctacaagaacagtgaggagcttcggtctcgtattgtgtctggaatcatcacacctatccatgagcagtgggaaaaggctaatgtaagcagtccccaccgggagttcccccctgctaccgccagagaggtggacccactccggattcctccacaccacccacacaccagtcggcagcctccctggtgtgatcccctgggcccgtttgttgtcgggggagaagacttagacccttttgggcctcggagaggtggcatgattgtggatcccctgagatctggcttcccaagagcacttattgacccttcctcaggcctcccgaaccgacttcctccaggcgctgtgcccccaggagctcgctttgacccctttggacccattgggaccagcccacccggacctaacccagaccatctccccccgccgggctacgatgacatgtacctgtgaaggcctcaagaatgtaacatcccaggcttccctccattctcctggagctgccaccgctgtccccatcagcaaccatgttcttgcaggctgggggcaagggattctgctcatgtgtttgcagaccggctgggatagcctccccaccccttatcagagccaagacacctgctgcagctctccacctagctgcagatagctcccaaagagaaatcagtgtgtctctttcaccatcagctcctcccctttcaccaccagctcctctccacttcccaagggagactccggcaaccttcagcaacatatatcctcgaccagatgcagtgctataagaacagaacgcattttggatgttattattaagaaccaaatgtcaatacagaattcatgttgccggtttcccacttttctttttacattaatgcatagctgcttccatttatgagactttagagtttgagtttctgtagggctgaatgactctttttcctgcccagggcccattcttgcttctcaggcaccttccgtttattaattgccattgctcctgacatcactaagatgggtccccttctggctgcatgaatggaaatgagtgactggaaatcccataggccacaagaatgactttcacaagggcaggaacattgtggaaagactgcatcattctgatgaggcaaaatcctccagctattcctgtctgggccagttttgtaggtccatctgtgcatgggcagcagtagtcaaaaagccaaggaaaaaacagagcagacctgaaggctaatcttatttttgccactaacttagtgaatgaccctaagcaagttccttctcctcttagggccttgtgccaagcctatgaaattggaggtggctttcctgctctaaagcattttgatgtctcattctgtgtttggtaacccctataaactggggcagaggaaaagaatgatggttcaaggccatacttcccttgaaccttgtgtggttcttgcctaactctgtggtttttggaccccatggggcccagacagagcacaggagcatgggctgcctctgagtgtggtgttgaacttcgggaggagcagggagccctgcaccttgtgtcctggcccacctgacctttggtgttctccggatccttttcagcccgaggcctgacagacgcgggcagtgatgagccctgttctggagtggaaagagcacgatagagcaccaggctaagaggcacgagatcaaggcggtagtcacttccgctctgcagctagcatttcaaccatatgtggatcctttcatttctcagctccctggattccttcccctaaattaggacctattatttacctgtaggtaagcaagctactgtagctcttctgaggtatctgccaggctgttttctgtagcctcagattgcctatctgcttagcctgagaacaggtagatgaaaactaaactgatgcctaggcccagggtcagtctcagatggaagctgggcctgggtggggaggctagcatgcgtggctccctgggtatttctgtcagtccccatggcaagcagtgatttagtaaaacaccccagagtcagggaagccaaccaccttgaaacctttagaacatctctgctttggagaaagacccagagatcaggcagaggtgcagattcaatcattactcataacctttgagagctggcaaatgggaggagtgttagtctttgttttggaattggaccattcttgcaaccaaaaggacttagagcagtttgctcataaagacatcctttattataaaaggaagtatttaaaggatgatagagaccatcagatagaagcagggaaggtagataacttttaggaccttgatgtgaggaaaagataaaatttaaacaataaatttgccacttagattttctagcagcaaagtccgaaaagatagttatatacaaaattctgttttctgaaaacaaaattgtgattcaccttcagaattggccattttttttgtgagtttccttgcatcaaggacactgagaaacacagtcattgtcttaggtgttctatgggaggaagtgaatagagcctttaggaacttcctggtcaagcttatggtgcttattttgatctgggccacttccctccttccagtcatgagtaatcatcaaggagcaagttggagtgtttcaggtgtatattttgtagaacccaaaagattggagccttaacaataaacatcagcactaagtgacctgttaaaaaa

SEQ ID NO: 3819 - protein, 271 aa, Homo sapiens
MAGLEVLFASAAPAITCRQDALVCFLHWEVVTHGYCGLGVGDQPGPNDKKSELLPAGWNNNKDLYVLRYEYKDGSRKLLVKAITVESSMILNVLEYGSQQVADLTLNLDDYIDAEHLGDFHRTYKNSEELRSRIVSGIITPIHEQWEKANVSSPHREFPPATAREVDPLRIPPHHPHTSRQPPWCDPLGPFVVGGEDLDPFGPRRGGMIVDPLRSGFPRALIDPSSGLPNRLPPGAVPPGARFDPFGPIGTSPPGPNPDHLPPPGYDDMYL

SEQ ID NO: 3820 - DNA, 3204 bp, Homo sapiens
ctctggcataggctcttggtagtgggggcccagacagggaggcacctgccacctgcttcccttctcagccacccacagccctcatagggcagaatgggactcttgctgatgtagacgccgaagtcgcgggcgctcatggcgggcctggaggtactgttcgcatcggcagcgccggccatcacctgcaggcaggacgcgctcgtctgcttcttgcattgggaagtggtgacacacggttactgcggcttgggtgtcggtgaccagccgggtcccaatgataagaagtcagaactgctgccagctgggtggaacaacaataaagacctgtatgtcctccggtatgagtataaggatgggtccagaaagctccttgtgaaagccatcaccgtggagagcagcatgatcctcaatgtgctggaatatggctcacagcaagtggcagacttgaccctgaacttggatgattatatcgatgcagaacacctgggtgacttccacaggacctacaagaacagtgaggagcttcggtctcgtattgtgtctggaatcatcacacctatccatgagcagtgggaaaaggctaatgtaagcagtccccaccgggagttcccccctgctaccgccagagaggtggacccactccggattcctccacaccacccacacaccagtcggcagcctccctggtgtgatcccctgggcccgtttgttgtcgggggagaagacttagacccttttgggcctcggagaggtggcatgattgtggatcccctgagatctggcttcccaagagcacttattgacccttcctcaggcctcccgaaccgacttcctccaggcgctgtgcccccaggagctcgctttgacccctttggacccattgggaccagcccacccggacctaacccagaccatctccccccgccgggctacgatgacatgtacctgtgaaggcctcaagaatgtaacatcccaggcttccctccattctcctggagctgccaccgctgtccccatcagcaaccatgttcttgcaggctgggggcaagggattctgctcatgtgtttgcagaccggctgggatagcctccccaccccttatcagagccaagacacctgctgcagctctccacctagctgcagatagctcccaaagagaaatcagtgtgtctctttcaccatcagctcctcccctttcaccaccagctcctctccacttcccaagggagactccggcaaccttcagcaacatatatcctcgaccagatgcagtgctataagaacagaacgcattttggatgttattattaagaaccaaatgtcaatacagaattcatgttgccggtttcccacttttctttttacattaatgcatagctgcttccatttatgagactttagagtttgagtttctgtagggctgaatgactctttttcctgcccagggcccattcttgcttctcaggcaccttccgtttattaattgccattgctcctgacatcactaagatgggtccccttctggctgcatgaatggaaatgagtgactggaaatcccataggccacaagaatgactttcacaagggcaggaacattgtggaaagactgcatcattctgatgaggcaaaatcctccagctattcctgtctgggccagttttgtaggtccatctgtgcatgggcagcagtagtcaaaaagccaaggaaaaaacagagcagacctgaaggctaatcttatttttgccactaacttagtgaatgaccctaagcaagttccttctcctcttagggccttgtgccaagcctatgaaattggaggtggctttcctgctctaaagcattttgatgtctcattctgtgtttggtaacccctataaactggggcagaggaaaagaatgatggttcaaggccatacttcccttgaaccttgtgtggttcttgcctaactctgtggtttttggaccccatggggcccagacagagcacaggagcatgggctgcctctgagtgtggtgttgaacttcgggaggagcagggagccctgcaccttgtgtcctggcccacctgacctttggtgttctccggatccttttcagcccgaggcctgacagacgcgggcagtgatgagccctgttctggagtggaaagagcacgatagagcaccaggctaagaggcacgagatcaaggcggtagtcacttccgctctgcagctagcatttcaaccatatgtggatcctttcatttctcagctccctggattccttcccctaaattaggacctattatttacctgtaggtaagcaagctactgtagctcttctgaggtatctgccaggctgttttctgtagcctcagattgcctatctgcttagcctgagaacaggtagatgaaaactaaactgatgcctaggcccagggtcagtctcagatggaagctgggcctgggtggggaggctagcatgcgtggctccctgggtatttctgtcagtccccatggcaagcagtgatttagtaaaacaccccagagtcagggaagccaaccaccttgaaacctttagaacatctctgctttggagaaagacccagagatcaggcagaggtgcagattcaatcattactcataacctttgagagctggcaaatgggaggagtgttagtctttgttttggaattggaccattcttgcaaccaaaaggacttagagcagtttgctcataaagacatcctttattataaaaggaagtatttaaaggatgatagagaccatcagatagaagcagggaaggtagataacttttaggaccttgatgtgaggaaaagataaaatttaaacaataaatttgccacttagattttctagcagcaaagtccgaaaagatagttatatacaaaattctgttttctgaaaacaaaattgtgattcaccttcagaattggccattttttttgtgagtttccttgcatcaaggacactgagaaacacagtcattgtcttaggtgttctatgggaggaagtgaatagagcctttaggaacttcctggtcaagcttatggtgcttattttgatctgggccacttccctccttccagtcatgagtaatcatcaaggagcaagttggagtgtttcaggtgtatattttgtagaacccaaaagattggagccttaacaataaacatcagcactaagtgacctgttaaaaaa

SEQ ID NO: 3821 - protein, 271 aa, Homo sapiens; identical to SEQ ID NO: 3819

SEQ ID NO: 3822 - DNA, 3158 bp, Homo sapiens
ggcttccccgccccgccccgtccccgggcgtctccattttggtctcaggtgtggactcggcaagaaccagcgcaagagggaagcggagttatagctaccccggccgcggagccggctcactgcactacccccgcccccttctttcctccagacgccgaagtcgcgggcgctcatggcgggcctggaggtactgttcgcatcggcagcgccggccatcacctgcaggcaggacgcgctcgtctgcttcttgcattgggaagtggtgacacacggttactgcggcttgggtgtcggtgaccagccgggtcccaatgataagaagtcagaactgctgccagctgggtggaacaacaataaagacctgtatgtcctccggtatgagtataaggatgggtccagaaagctccttgtgaaagccatcaccgtggagagcagcatgatcctcaatgtgctggacctacaagaacagtgaggagcttcggtctcgtattgtgtctggaatcatcacacctatccatgagcagtgggaaaaggctaatgtaagcagtccccaccgggagttcccccctgctaccgccagagaggtggacccactccggattcctccacaccacccacacaccagtcggcagcctccctggtgtgatcccctgggcccgtttgttgtcgggggagaagacttagacccttttgggcctcggagaggtggcatgattgtggatcccctgagatctggcttcccaagagcacttattgacccttcctcaggcctcccgaaccgacttcctccaggcgctgtgcccccaggagctcgctttgacccctttggacccattgggaccagcccacccggacctaacccagaccatctccccccgccgggctacgatgacatgtacctgtgaaggcctcaagaatgtaacatcccaggcttccctccattctcctggagctgccaccgctgtccccatcagcaaccatgttcttgcaggctgggggcaagggattctgctcatgtgtttgcagaccggctgggatagcctccccaccccttatcagagccaagacacctgctgcagctctccacctagctgcagatagctcccaaagagaaatcagtgtgtctctttcaccatcagctcctcccctttcaccaccagctcctctccacttcccaagggagactccggcaaccttcagcaacatatatcctcgaccagatgcagtgctataagaacagaacgcattttggatgttattattaagaaccaaatgtcaatacagaattcatgttgccggtttcccacttttctttttacattaatgcatagctgcttccatttatgagactttagagtttgagtttctgtagggctgaatgactctttttcctgcccagggcccattcttgcttctcaggcaccttccgtttattaattgccattgctcctgacatcactaagatgggtccccttctggctgcatgaatggaaatgagtgactggaaatcccataggccacaagaatgactttcacaagggcaggaacattgtggaaagactgcatcattctgatgaggcaaaatcctccagctattcctgtctgggccagttttgtaggtccatctgtgcatgggcagcagtagtcaaaaagccaaggaaaaaacagagcagacctgaaggctaatcttatttttgccactaacttagtgaatgaccctaagcaagttccttctcctcttagggccttgtgccaagcctatgaaattggaggtggctttcctgctctaaagcattttgatgtctcattctgtgtttggtaacccctataaactggggcagaggaaaagaatgatggttcaaggccatacttcccttgaaccttgtgtggttcttgcctaactctgtggtttttggaccccatggggcccagacagagcacaggagcatgggctgcctctgagtgtggtgttgaacttcgggaggagcagggagccctgcaccttgtgtcctggcccacctgacctttggtgttctccggatccttttcagcccgaggcctgacagacgcgggcagtgatgagccctgttctggagtggaaagagcacgatagagcaccaggctaagaggcacgagatcaaggcggtagtcacttccgctctgcagctagcatttcaaccatatgtggatcctttcatttctcagctccctggattccttcccctaaattaggacctattatttacctgtaggtaagcaagctactgtagctcttctgaggtatctgccaggctgttttctgtagcctcagattgcctatctgcttagcctgagaacaggtagatgaaaactaaactgatgcctaggcccagggtcagtctcagatggaagctgggcctgggtggggaggctagcatgcgtggctccctgggtatttctgtcagtccccatggcaagcagtgatttagtaaaacaccccagagtcagggaagccaaccaccttgaaacctttagaacatctctgctttggagaaagacccagagatcaggcagaggtgcagattcaatcattactcataacctttgagagctggcaaatgggaggagtgttagtctttgttttggaattggaccattcttgcaaccaaaaggacttagagcagtttgctcataaagacatcctttattataaaaggaagtatttaaaggatgatagagaccatcagatagaagcagggaaggtagataacttttaggaccttgatgtgaggaaaagataaaatttaaacaataaatttgccacttagattttctagcagcaaagtccgaaaagatagttatatacaaaattctgttttctgaaaacaaaattgtgattcaccttcagaattggccattttttttgtgagtttccttgcatcaaggacactgagaaacacagtcattgtcttaggtgttctatgggaggaagtgaatagagcctttaggaacttcctggtcaagcttatggtgcttattttgatctgggccacttccctccttccagtcatgagtaatcatcaaggagcaagttggagtgtttcaggtgtatattttgtagaacccaaaagattggagccttaacaataaacatcagcactaagtgacctgttaaaaaa

SEQ ID NO: 3823 - protein, 99 aa, Homo sapiens
MAGLEVLFASAAPAITCRQDALVCFLHWEVVTHGYCGLGVGDQPGPNDKKSELLPAGWNNNKDLYVLRYEYKDGSRKLLVKAITVESSMILNVLDLQEQ

SEQ ID NO: 3824 - DNA, 5274 bp, Homo sapiens
gcaggtggggccgccgcggaactccaggtccggccgggagcagaggggcgggggcgagagggaagtgggcgggagccgcgatctgagtagccagcgtcgccggcgaccgcggagttctgggctagtgggaccccgcgcgggctggttcgggatgagcgatggcatcggtcaaggtggccgtgagggtccggcccatgaatcgcagggaaaaggacttggaggccaagttcattattcagatggagaaaagcaaaacgacaatcacaaacttaaagataccagaaggaggcactggggactcaggaagagaacggaccaagaccttcacctatgacttttctttttattctgctgatacaaaaagcccagattacgtttcacaagaaatggttttcaaaaccctcggcacagatgtcgtgaagtctgcatttgaaggttataatgcttgtgtctttgcatatgggcaaactggatctggaaagtcatacactatgatgggaaattctggagattctggcttaatacctcggatctgtgaaggactcttcagtcggataaatgaaaccaccagatgggatgaagcttcttttcgaactgaagtcagctacttagaaatttataacgaacgtgtgagagatctacttcggcggaagtcatctaaaaccttcaatttgagagtccgtgagcatcccaaagaaggcccttatgttgaggatttatccaaacatttagtacagaattatggtgacgtagaagaacttatggatgcgggcaatatcaaccggaccaccgcagcgactgggatgaacgacgtcagtagcaggtctcatgccatcttcaccatcaagttcactcaggctaaatttgattctgaaatgccatgtgaaaccgtcagtaagatccacttggttgatcttgccggaagtgagcgtgcagatgccaccggagccaccggggttaggctaaaggaagggggaaatattaacaagtccctcgtgactctggggaacgtcatttctgccttagctgatttatctcaggatgctgcaaatactcttgcaaagaagaagcaagttttcgtgccttacagggattctgtgttgacttggttgttaaaagatagccttggaggaaactctaaaactatcatgattgccaccatttcacctgctgatgtcaattatggagaaaccctaagtactcttcgctatgcaaatagagccaaaaacatcatcaacaagcctaccattaatgaggatgccaacgtcaaacttatccgtgagctgcgagctgaaatagccagactgaaaacgctgcttgctcaagggaatcagattgccctcttagactcccccacagctttaagtatggaggaaaaacttcagcagaatgaagcaagagttcaagaattgaccaaggaatggacaaataagtggaatgaaacccaaaatattttgaaagaacaaactctagccctcaggaaagaagggattggagttgttttggattctgaactgcctcatttgattggcatcgatgatgaccttttgagtactggaatcatcttatatcatttaaaggaaggtcagacatacgttggtagagacgatgcttccacggagcaagatattgttcttcatggccttgacttggagagtgagcattgcatctttgaaaatatcggggggacagtgactctgatacccctgagtgggtcccagtgctctgtgaatggtgttcagatcgtggaggccacacatctaaatcaaggtgctgtgattctcttgggaagaaccaatatgtttcgctttaaccatccaaaggaagccgccaagctcagggagaagaggaagagtggccttctgtcctccttcagcttgtccatgaccgacctctcgaagtcccgtgagaacctgtctgcagtcatgttgtataaccccggacttgaatttgagaggcaacagcgtgaagaacttgaaaaattagaaagtaaaaggaaactcatagaagaaatggaggaaaagcagaaatcagacaaggctgaactggagcggatgcagcaggaggtggagacccagcgcaaggagacagaaatcgtgcagctccagattcgcaagcaggaggagagcctcaaacgccgcagcttccacatcgagaacaagctaaaggatttacttgcggagaaggaaaaatttgaagaggagaggctgagggaacagcaggaaatcgagctgcagaagaagagacaagaagaagagacctttctccgcgtccaagaagaactccaacgactcaaagaactcaacaacaacgagaaggctgagaagtttcagatatttcaagaactggaccagctccaaaaggaaaaagatgaacagtatgccaagcttgaactggaaaaaaagagactagaggagcaggagaaggagcaggtcatgctcgtggcccatctggaagagcagctccgagagaagcaggagatgatccagctcctgcggcgtggggaggtacagtgggtggaagaggagaagagggacctggaaggcattcgggaatccctcctgcgggtgaaggaggctcgtgccggaggggatgaagatggcgaggagttagaaaaggctcaactgcgtttcttcgaattcaagagaaggcagcttgtcaagctagtgaacttggagaaggacctggttcagcagaaagacatcctgaaaaaagaagtccaagaagaacaggagatcctagagtgtttaaaatgtgaacatgacaaagaatctagattgttggaaaaacatgatgagagtgtcacagatgtcacggaagtgcctcaagatttcgagaaaataaagccagtggagtacaggctgcaatataaagaacgccagctacagtacctcctgcagaatcacttgccaactctgttggaagaaaagcagagagcatttgaaattcttgacagaggccctctcagcttagacaacactctttatcaagtagaaaaggaaatggaagaaaaagaagaacagcttgcacagtaccaggccaatgcaaaccagctgcaaaagctccaagccacctttgaattcactgccaacattgcacgtcaggaggaaaaagtgaggaaaaaggaaaaggagattttggagtccagagagaagcagcagagagaggcgctggagcgggccctggccaggctggagaggagacattctgcgctgcagaggcactccaccctgggcatggagattgaagagcagaggcagaaacttgccagtctgaacagtggcagcagagagcagtcagggctccaggctagcctggaggctgagcaggaagccctggagaaggaccaggagaggttagaatatgaaatccagcagctgaaacagaagatttatgaggtcgatggtgttcaaaaagatcatcatgggaccctggaagggaaggtggcttcttccagcttgccagtcagtgctgaaaaatcacacctggttcccctcatggatgccaggatcaatgcttacattgaagaagaagtccaaagacgccttcaggatttgcatcgtgtgattagtgaaggctgcagtacatctgcagacacgatgaaggataatgagaaacttcacaatggcaccattcaacgtaaactaaaatatgagcggatggtttctcgctctttgggcgcaaatccagatgacctgaaggacccaattaaaattagtatcccacgctacgtcctctgcgggcaaggaaaggatgcacacttcgagtttgaggtcaagattactgtcctagatgagacatggactgtattcaggcgttacagtcgttttcgagaaatgcataaaacattgaagttaaagtatgcagagcttgctgcccttgaatttcctccaaagaaactatttggaaataaggatgaacgtgtgattgctgagagacgaagtcacttagagaaatacctcagggactttttcagcgtgatgctccagtccgcaacatctcccctccacatcaacaaagtgggactgactctctcgaaacataccatttgtgagttttcaccattcttcaagaaaggagtctttgactacagcagccacgggacggggtagagccaggggtgatggaggaaccaccacagcagtgccttctcgtcgaagcgggctccgatgcagggcagctcccccatgcgaggatccgggtctgcctcctcctgctgaagacagacatgcagcagcgggcccgggccacctcacgtttccatacctagtgcctgagtttggggatgggatgctctgcctgctgatgtggccctgacaggcagccgttaccgttccattgcggttgaacgtggccttttcccacagtgcttccttctcactgcgcagcaaagttcgtcccctgtggcaagatagatgtggttgggccatcgtgggttccctgagcccagccagcctgggacctcccaaagtgggtggcttaccagaccacccttaaatgactttcatctggtttcctctttcaccaaaatatactcgtattttttatatttcttccatgtggctggctatattccaagaaaagcattttaaattatttcattgtatttttttctttttttccctcatttgaatcagaacttttatataaaacccaaacactgatgtttacacagaatttcatattctgcaaaagggattttttgatccaatcatgactgtagtcttccatgcttgacaaattggatgtagacaacattacttaaaacttctataaatccctacaattaggatatttatttaaccttgaatattcaagaacattctcccaaatctaaatggctactgtgcattcttgagctttttctgctaagcacaaaatgaacgcaaagctaaatgcatatttttaagtattattcacattttttgttacagaatctattggatctttggctggaaaactagaatttatagcagtttattaatgataccttaaattactcaggacttaatgtagcattgcacttctgtgtacagtaaaactgctttgttttactaaagagaaaaatgtgagtggaaaaaatatgtatgtggtatatactcaaatgtatataattctatctatagatttatatatgtatacattctgtacagtagttccatcaaaatatgtaataattcacaccaattttattaaatgtatttgctttttcaaaatttaaattgagctgctatcaatattaaatgaagttatggcatctaaaaaaaaaaaaaa

SEQ ID NO: 3825 - protein, 1317 aa, Homo sapiens
MASVKVAVRVRPMNRREKDLEAKFIIQMEKSKTTITNLKIPEGGTGDSGRERTKTFTYDFSFYSADTKSPDYVSQEMVFKTLGTDVVKSAFEGYNACVFAYGQTGSGKSYTMMGNSGDSGLIPRICEGLFSRINETTRWDEASFRTEVSYLEIYNERVRDLLRRKSSKTFNLRVREHPKEGPYVEDLSKHLVQNYGDVEELMDAGNINRTTAATGMNDVSSRSHAIFTIKFTQAKFDSEMPCETVSKIHLVDLAGSERADATGATGVRLKEGGNINKSLVTLGNVISALADLSQDAANTLAKKKQVFVPYRDSVLTWLLKDSLGGNSKTIMIATISPADVNYGETLSTLRYANRAKNIINKPTINEDANVKLIRELRAEIARLKTLLAQGNQIALLDSPTALSMEEKLQQNEARVQELTKEWTNKWNETQNILKEQTLALRKEGIGVVLDSELPHLIGIDDDLLSTGIILYHLKEGQTYVGRDDASTEQDIVLHGLDLESEHCIFENIGGTVTLIPLSGSQCSVNGVQIVEATHLNQGAVILLGRTNMFRFNHPKEAAKLREKRKSGLLSSFSLSMTDLSKSRENLSAVMLYNPGLEFERQQREELEKLESKRKLIEEMEEKQKSDKAELERMQQEVETQRKETEIVQLQIRKQEESLKRRSFHIENKLKDLLAEKEKFEEERLREQQEIELQKKRQEEETFLRVQEELQRLKELNNNEKAEKFQIFQELDQLQKEKDEQYAKLELEKKRLEEQEKEQVMLVAHLEEQLREKQEMIQLLRRGEVQWVEEEKRDLEGIRESLLRVKEARAGGDEDGEELEKAQLRFFEFKRRQLVKLVNLEKDLVQQKDILKKEVQEEQEILECLKCEHDKESRLLEKHDESVTDVTEVPQDFEKIKPVEYRLQYKERQLQYLLQNHLPTLLEEKQRAFEILDRGPLSLDNTLYQVEKEMEEKEEQLAQYQANANQLQKLQATFEFTANIARQEEKVRKKEKEILESREKQQREALERALARLERRHSALQRHSTLGMEIEEQRQKLASLNSGSREQSGLQASLEAEQEALEKDQERLEYEIQQLKQKIYEVDGVQKDHHGTLEGKVASSSLPVSAEKSHLVPLMDARINAYIEEEVQRRLQDLHRVISEGCSTSADTMKDNEKLHNGTIQRKLKYERMVSRSLGANPDDLKDPIKISIPRYVLCGQGKDAHFEFEVKITVLDETWTVFRRYSRFREMHKTLKLKYAELAALEFPPKKLFGNKDERVIAERRSHLEKYLRDFFSVMLQSATSPLHINKVGLTLSKHTICEFSPFFKKGVFDYSSHGTG

SEQ ID NO: 3826 - DNA, 2437 bp, Homo sapiens
agacactggccgcgggccaccatctggacgcgatcccccgctagggcctccctggtctgggccaaagttggtggccaccttcgcgcgggctgcgccctccttctcttccctgccctcctcccccggggcccgcgcccgctgcctccagcacgcgcgtcggcaggctcggcaagcgaagaggagcggctcgccccagggcgcccctcgcccagcctgccggccaggcgagcgcgacgagagtctccccgcaccccttcctctcccgggggccgagagggttgggctccgccccggcgccgcagctcccgactccccgccgctcgggctgccgccgctgccccgcgcccggcgctcggggcagccgggggcgcaggcggagagcgcagggcggggagaggcgtggggagcagagcggcgctgaggggagggcagaggaggagagagcctggcagcggaggagcagaggcgggcgccgcaccgccccgcacgctcgctcgctcgggagagtcgcgggcggccgcttgggcgcacttgccgggtcaccttgtcccggaggagaaatggcttccctgaggcaagtgtaacctacattcccagcccaccagcctgacgcccagccagggagagagtaccatggatggcatcattgaacagaagagcatgctggtgcacagtaaaatcagtgatgctggcaagaggaatggtttaattaacaccagaaacttgatggccgagagcagagatggtctggtgtctgtttacccagcgccccagtaccagagccaccgggtgggggccagcacagtgccggccagcctggacagcagcaggagtgagccgatgcagcagctgctggaccccaacaccctgcagcagtcagtggagtcccgctaccggcccaacatcatcctctattcagagggcgtgctgcgctcctggggggacggtgtggccgccgactgctgcgagaccaccttcatcgaggaccggtcgcccaccaaagacagcctcgagtacccggatgggaagttcattgacctctcagctgatgacataaaaatccacaccctgtcctacgatgtggaggaggaggaggagttccaggagctggagagcgactactcaagcgacacagagagtgaggacaatttcctcatgatgcccccgcgggaccacctgggcctcagtgtcttctccatgctctgctgcttctggcctctgggcatcgcagccttctacttgtcccatgagaccaacaaagccgtggccaagggggacttgcaccaggccagcaccagctcccggcgggccctattcctggcagtgctgtccatcaccattgggactggcgtctatgtgggcgtggccgtggccctcatcgcctacctctccaagaacaaccacctgtgagcttcctgcgaatggagggggagcacccggggccaggtctgtgtggacgtggaggaagcaggcataccgcatgatgctgtacagtacaaatgattgccaaatgatgccacgaagccctgggatttcctacccatggatttattttgtttttatcctttaatttcatgttcacagcactgtgtagagcaccagacagacgggcactgctaatccttccaaaggaaagctccaaagatcccagcccgcaaggctgtctctggatggattctggtggatgaatggcaacgcggctctctgcagcctgccagtgcccagagtgccaccgcattagcaatatacaaacagtccaaaaaagtgtttattttttatggaatacggtgcaataggcagaggacaagggacacatcactcttctgtctgtggccctgctggagtcctttgtgccccccggagtccacacgccttccctgcaagacgagaatggggctgggaagaaagaggcaacaccacggctggcaggagccccgctgcactgctctgcagacccattggcctgaccctgagaagcagagccagcaaagcccgggacctgcccctctttctttcccttcacaccaccccagcctcaggatgtcaagccacctccggaacgtgtctacactccacagctaccccgcagcaatacgcactcttgggacctcgctgatctaggatggggaggcaggccaccgcccctcccaagactcctcaagaaagagccccgcggttgctccggaaactcgaggcactgcagctatgggcactgcctcagcctaaagacacaggggcgcctcccaatcaccgcgctggcggatgctcaccccgtcataagcagaaactagtgatcctggaaatgagatgggccttactctgtcgactaaatgaatagctattttcttgtcattttttaaagtgcaactcttgcttcatgctgcttaagttaccagatgaatgctgagaaataagtaatcacagacattttaatacc

SEQ ID NO: 3827 - protein, 258 aa, Homo sapiens
MDGIIEQKSMLVHSKISDAGKRNGLINTRNLMAESRDGLVSVYPAPQYQSHRVGASTVPASLDSSRSEPMQQLLDPNTLQQSVESRYRPNIILYSEGVLRSWGDGVAADCCETTFIEDRSPTKDSLEYPDGKFIDLSADDIKIHTLSYDVEEEEEFQELESDYSSDTESEDNFLMMPPRDHLGLSVFSMLCCFWPLGIAAFYLSHETNKAVAKGDLHQASTSSRRALFLAVLSITIGTGVYVGVAVALIAYLSKNNHL

SEQ ID NO: 3828 - DNA, 928 bp, Homo sapiens
gctgtggccctggcacctgcccctgggctgggacagcccactgttccatgctgcccaagaaggctcagcacaggcacaaaccattgcccggcactggcccgtgctgcctgagaaggattggcacgggcacagaccactgcccccacctgccctgcgccatctacccaagaaggctcggcacgggcaccaaccactgcctccaactgccccatgctgcctgagaaggcactgcacggccacccccaactgccccgcactgtccctacccgggcagccatgcgagcggctggaactctgctggccttctgctgcctggtcttgagcaccactgggggcccttccccagatacttgttcccaggaccttaactcacgtgtgaagccaggatttcctaaaacaataaagaccaatgacccaggagtcctccaagcagccagatacagtgttgaaaagttcaacaactgcacgaacgacatgttcttgttcaaggagtcccgcatcacaagggccctagttcagatagtgaaaggcctgaaatatatgctggaggtggaaattggcagaactacctgcaagaaaaaccagcacctgcgtctggatgactgtgacttccaaaccaaccacaccttgaagcagactctgagctgctactctgaagtctgggtcgtgccctggctccagcacttcgaggtgcctgttctccgttgtcactgacccccgcctcttcagcaagaccacagccatgacaaacaccaggatgcatgctccttgtcccctcccacccgcctcatgacccagcctcacagaccctctcaggcctctgacgagtgagcgggtgaagtgccactgggtcaccgcagggcagctggaatggcagcatggtagcacctcctaacagattaaatagatcacatttgcttctaaaatt

SEQ ID NO: 3829 - protein, 167 aa, Homo sapiens
MLPEKALHGHPQLPRTVPTRAAMRAAGTLLAFCCLVLSTTGGPSPDTCSQDLNSRVKPGFPKTIKTNDPGVLQAARYSVEKFNNCTNDMFLFKESRITRALVQIVKGLKYMLEVEIGRTTCKKNQHLRLDDCDFQTNHTLKQTLSCYSEVWVVPWLQHFEVPVLRCH

SEQ ID NO: 3830 - DNA, 2251 bp, Homo sapiens
gcgcaacgtcatttccgcgtacgggggagggcgggcctggagtctgagccggcgccgctcagtgtgaggtggtttctgcgggtgaggctggcgcccgtaccatgagcgaggcggacgggctgcgacagcgccggcccctgcggccgcaggtcgtcacagacgatgatggccaggccccggaggctaaggacggcagctcctttagcggcagagttttccgagtgaccttcttgatgctggctgtttctctcaccgttcccctgcttggagccatgatgctgctggaatctcctatagatccacagcctctcagcttcaaagaacccccgctcttgcttggtgttctgcatccaaatacgaagctgcgacaggcagaaaggctgtttgaaaatcaacttgttggaccggagtccatagcacatattggggatgtgatgtttactgggacagcagatggccgggtcgtaaaacttgaaaatggtgaaatagagaccattgcccggtttggttcgggcccttgcaaaacccgagatgatgagcctgtgtgtgggagacccctgggtatccgtgcagggcccaatgggactctctttgtggccgatgcatacaagggactatttgaagtaaatccctggaaacgtgaagtgaaactgctgctgtcctccgagacacccattgaggggaagaacatgtcctttgtgaatgatcttacagtcactcaggatgggaggaagatttatttcaccgattctagcagcaaatggcaaagacgagactacctgcttctggtgatggagggcacagatgacgggcgcctgctggagtatgatactgtgaccagggaagtaaaagttttattggaccagctgcggttcccgaatggagtccagctgtctcctgcagaagactttgtcctggtggcagaaacaaccatggccaggatacgaagagtctacgtttctggcctgatgaagggcggggctgatctgtttgtggagaacatgcctggatttccagacaacatccggcccagcagctctggggggtactgggtgggcatgtcgaccatccgccctaaccctgggttttccatgctggatttcttatctgagagaccctggattaaaaggatgatttttaagctctttagtcaagagacggtgatgaagtttgtgccgcggtacagcctcgtcctagaactcagcgacagcggtgccttccggagaagcctgcatgatcccgatgggctggtggccacctacatcagcgaggtgcacgaacacgatgggcacctgtacctgggctctttcaggtcccccttcctctgcagactcagcctccaggctgtttagccctcccagatagctgcccctgccacgcaggccaggagtcttcacactcaggcaccaggcctggtccaggaggagctgtggacacagtcgtggttcaagtgtccacatgcacctgttagtccctgagaggtggtgggaatggctgcttcattcctcgaggatgcccgggccccacctgggcttgtctttctgtttagagggaagtgtaacatatctgccatgaggaacataaattcatgtaaagccattttctcttaaacaaaacaaaactttctaagtacagtcattctctaggatttgggaagctccttgcacttggaacagggctcaggtgggtggagcagtaaggcactacccagagagcttgctgctgcggccctgtcctgcggcctcaaagttcttctttactatatataacgtgcggtcatacctttcttcgttgtggtggggatggaagagcagagggagcatggcccaggggtgttgaggccagcggtgagagccgtgttagccaagacatggaactgtgttctcaagggttatgtggggcgtgggctctccatagtgtgtatgaaaagcttgttgactctagcggctcagagaggactttgctgggtttctttctgtgaatatctccgtgctgaccatgctggaattggatgattctgcaattcgggacctactgcaggggtccgtttagtaacgtcttgtctgtgatctttgttcttgacctctagaccccaagatgtgaacagtgcacgtgttaatgtcatctttgctcatgtgttataagccccaagttgctgtatattttcacaagtatgtctacacactggtcatgattttgataataaataacgataaatcgaaaaaaaaaaaaaaaaaaaaaaaaaaaaaaa

SEQ ID NO: 3831 - protein, 416 aa, Homo sapiens
MSEADGLRQRRPLRPQVVTDDDGQAPEAKDGSSFSGRVFRVTFLMLAVSLTVPLLGAMMLLESPIDPQPLSFKEPPLLLGVLHPNTKLRQAERLFENQLVGPESIAHIGDVMFTGTADGRVVKLENGEIETIARFGSGPCKTRDDEPVCGRPLGIRAGPNGTLFVADAYKGLFEVNPWKREVKLLLSSETPIEGKNMSFVNDLTVTQDGRKIYFTDSSSKWQRRDYLLLVMEGTDDGRLLEYDTVTREVKVLLDQLRFPNGVQLSPAEDFVLVAETTMARIRRVYVSGLMKGGADLFVENMPGFPDNIRPSSSGGYWVGMSTIRPNPGFSMLDFLSERPWIKRMIFKLFSQETVMKFVPRYSLVLELSDSGAFRRSLHDPDGLVATYISEVHEHDGHLYLGSFRSPFLCRLSLQAV

SEQ ID NO: 3832 - DNA, 4488 bp, Homo sapiens
aaaaggaaaacgaggcaccgagaagttaaggaacttgctcaaggtcacagagtttgaactcaggctacagatgctgcagcaactggagaaagtcctcatcgccccatatcacccaccaccgacccccagcaggacgtgacccccgccaggacggaggccggcagctggggggctggagcatgggacccagaacacggactcaggcttgcgcagcctcctggcttctaggcgggagcctagaaaggcgccagcccctttcgcgtgctgctgagactccaggggtggggttcactctcaggggcgcacaaaggcatgaaaaccttggcttcagcctctgagatgcggaactgaccgacctattgtcttgggacccaccagtgcgcttgggtgcaccagcccccttaacgttggtgccggctccctcccggctcctccccatcccagagggtcccctcgccccaggccctgagcctgcgtcctggggtcctgggccgcacgtgcctctggcagctcgaagaagctgtcggggcttgcaggagagcgtgcaaactgaaaccaaaacaggccgactcgaggaacatccgggtgggaccgcagactcaccggagcgcagcgcctgggccagggcctgggaccctgctccgccccgcgctcccctgcaccccttccccacgctgctcccctcttcctaagcggccccccctctcccgggcagcagaagaaggggtgggacccgggcgggctccgggagggggccctggaggaatggatggtggcggaagggcggagcaggggcggggcccgcggagactccacggggcgccccgggcgtgaggcacccactctgggagcacagagagctcaggtagcctgcctagatggcggcgcgcaccctgggccgcggcgtcgggaggctgctgggcagcctgcgagggctctcggggcagcccgcgcggccgccgtgcggggtgagcgcgccgcgcagggcggcctcgggaccctcgggcagcgctcccgcagttgcagcagcagcagcacagccaggctcgtatcccgcgctgagtgcacaggcagcccgggagccggccgccttctgggggcctctggcgcgggacactctcgtgtgggacaccccctaccacaccgtctgggactgcgacttcagcactggcaagatcggctggttcctgggaggccagttaaatgtctctgtcaactgcttggaccagcatgttcggaagtcccccgagagcgttgctttgatctgggagcgcgatgagcctggaacggaagtgaggatcacctacagggaactactggagaccacgtgccgcctggccaacacgctgaagaggcatggagtccaccgtggggaccgtgttgccatctacatgcccgtgtccccattggctgtggcagcaatgctggcctgtgccaggatcggagctgtccacacagtcatctttgctggcttcagtgcagagtccttggctgggaggatcaatgatgccaagtgcaaggtggttatcaccttcaaccaaggactccggggtgggcgcgtggtggagctgaagaaaatagtggatgaggctgtgaagcactgccccaccgtgcagcatgtcctggtggctcacaggacagacaacaaggtccacatgggggatctggacgtcccgctggagcaggaaatggccaaggaggaccctgtttgcgccccagagagcatgggcagtgaggacatgctcttcatgctgtacacctcagggagcaccggaatgcccaagggcatcgtccatacccaggcaggctacctgctctatgccgccctgactcacaagcttgtgtttgaccaccagccaggtgacatctttggctgtgtggccgacatcggttggattacaggacacagctacgtggtgtatgggcctctctgcaatggtgccaccagcgtcctttttgagagcaccccagtttatcccaatgctggtcggtactgggagacagtagagaggttgaagatcaatcagttctatggcgccccaacggctgtccggctgttgctgaaatacggtgatgcctgggtgaagaagtatgatcgctcctccctgcggaccctggggtcagtgggagagcccatcaactgtgaggcctgggagtggcttcacagggtggtgggggacagcaggtgcacgctggtggacacctggtggcagacagaaacaggtggcatctgcatcgcaccacggccctcggaagaaggggcggaaatcctccctgccatggcgatgaggcccttctttggcatcgtccccgtcctcatggatgagaagggcagcgtcgtggagggcagcaacgtctccggggccctgtgcatctcccaggcctggccgggcatggccaggaccatctatggcgaccaccagcgatttgtggacgcctacttcaaggcctacccaggctattacttcactggagacggggcttaccgaactgagggcggctattaccagatcacagggcggatggatgatgtcatcaacatcagtggccaccggctggggaccgcagagattgaggacgccatcgccgaccaccctgcagtaccagaaagtgctgtcattggctacccccacgacatcaaaggagaagctgcctttgccttcattgtggtgaaagatagtgcgggtgactcagatgtggtggtgcaggagctcaagtccatggtggccaccaagatcgccaaatatgctgtgcctgatgagatcctggtggtgaaacgtcttccaaaaaccaggtctgggaaggtcatgcggcggctcctgaggaagatcatcactagtgaggcccaggagctgggagacactaccaccttggaggaccccagcatcatcgcagagatcctgagtgtctaccagaagtgcaaggacaagcaggctgctgctaagtgagctggcaccttgtggggctcttgggatgggcgggcacccaagccctggcttgtccttcccagaaggtacccctgaggttggcgtcttcctacgtcccagaagcagcccccaccccacacatgacccacaccgccctcacgtgaagctgggctgagagccctttctcccatccattggaggtcccaggagtgtcacccatggagaggctatgcgacatggctagggctggttctgccatctgagtttggtttcctggaatgaaaaggcattgccatctccattcctctgccctcttgagccagcacaggaaggtgaggccctgggatagcgcgcctgctcagataacacagagctagttagctagtagcaaccgtgttttctccagatctgtctagatacaaaggtcagaaatcttatttttatacttttatattgtggaagaacagcatgcaacactcacatgtagtgtgtggatttacttgaacatgttctttttaacatgtagttatgaaaatctccttttttgcctctactggtgaggaaacatgaggatcagaggccacatttttaattattgttagtgtatttggaagtctgaattggagatgtttgtacctctgtctaaacagttcccttgagaacttccaagcctccggcatcttttcctggtgagtgtttctcctgtgcttggttgtgtataatggagctaactcctaagcggtggggtgaatgtggccgccttagttctgaagctactccagttatgttctgtttcttcaagctgtgatccagaaagatttttgtgcccccagatgcctcttgataggagaggcaacatactccaaatagttgggttcttcagggaagctattagaaactcaggtgacttgttagagcactaacttggtcagagccaaatcctggcaaacgctgcctgaccttcactctgtggttggggcggtgagaaccactgaggtccaatgatgagacttggaggtctggatccagtctctctttgttttaatgtgacttaggtgctgtcaacattagcaagataatggaaatcacgacgccagtgggtgcttacctccctgctaggcatgcaggggctggcggttggcaggggaaggaggcccagtgagccgggtcccttaggggagggagagtttgtcctctttgccccacagtctacccttcagggccttgtggcagtgccagtgttcggggggtgtctgggccactgagtacccactcggtcgtggttgtgctggcctcttgggtgagtgaacctgtgaagcccaggaggtggtgttggctgcagggtacacaaatactgagtggtggtcttttgttacaggcttagcaacaaagctgtgccctgggcatggggggctgtagtgtagctacagttgtgcgtttgtgaaatggcttagctttccatgttgctgagaggaacctggacatggtcccgggcatctgaatgatctgtaggggagggagttcaaataaagctttattttgttcaaaaaaaaaaaaaaaa

SEQ ID NO: 3833 - protein, 689 aa, Homo sapiens [sequence omitted]

SEQ ID NO: 3834 - DNA, 1956 bp, Homo sapiens
tccagagaggctcgcgccttgcttgctaaggaaccatgaccggccgggactcgctttccgacgggcgcactagcagcagggcgctggtgcctggcggttcccctaggggctcgcgcccccggggcttcgccatcacggacctgctgggcttggaggccgagctgccggcgcccgctggcccaggacagggatctggctgcgagggtccggcagtcgcgccgtgcccgggcccggggcttgacggctccagcctggcgcgtggggccctaccgctgggactcggcctcctctgtggcttcggcacgcagccgccggcggccgctcgagcaccctgcctgctcctagcggacgtgccgttcctgccgcccaggggccccgagcccgctgccccgctggctcccagccgtccgccgcctgcgctcggccgccagaagcgcagcgacagcgtctccacgtccgatgaggacagccagtctgaagacaggaatgacctaaaggcatcccccaccttgggcaagaggaagaagcggcggcacaggacagttttcactgctcaccagctggaagagttggagaaggcattcagcgaggcccactaccctgatgtgtatgcccgagaaatgctggctgtgaaaactgagctccccgaagaccggatacaggtctggtttcaaaaccgcagggccaaatggcgcaagcgggagaagcgctggggcggcagcagcgtgatggccgagtacgggctgtacggggccatggtgcgccactgcatcccgctgccagactccgtgctcaactccgccgagggcggcctgctgggctcctgcgcgccctggctcctggggatgcataaaaaatccatggggatgataaggaagccaggaagtgaagataagttggcaggactctggggctctgaccacttcaaagaaggttctagccagagtgagtcaggatcacagagaggctcagataaagtgagccctgagaatggcttggaagatgtggctattgacctctccagctctgcccggcaggagaccaagaaagtgcaccctggggctggtgctcaaggaggctccaactccacggcactggaggggccccagccagggaaggtgggagccacatgagacccacaggtcccactgtcaaaggctgaaaatgtgcatattcctcactggcattttccaaaagacaaaaattgtccaagacatatactctcagtttgattttcttctgacaatgtcaagataaaatgcaatgccacttgctttaagaggacagatgagtgacctagggaaaattctatttcattctagaatggaaacggttccttaatggcactttaaccagttaacttggtgcaaaacttttgattctcttttgtagcttgagcagggaggatccgaagttcaaaaatgatttcactgctgggcatcatttgagatgtgtggttcaatgtactgtatagatgaataggttaggtctgatgtcctcattctcaattaggaaatataaaattgtttaatatccagaagaatctgatatcatcatagtgaagactccatacagacacatgaatgaattatattgtctttaccttgaacttggccttggatatttcaattttcttgttagggagtaattttgtgttttcttgagtgtcacttgataggctatgcatattggaattcaaagaaacccatactctagtcgtttctgcatttcctttaaaaatagcatgggatcatatttaaacaattgttggatagctggaaacagtgtttttaggtcagaccaggcttttggtctttcaaaatttgtgattgaaagcactttagtgacttggattttgtaaatctttcctttcctgcgtttcctttgccatttatttattctttaaaaataaacattttgtggtgtgtttaaaaaaaaaaaaaaaaaaaaaaaaaa

SEQ ID NO: 3835 - protein, 365 aa, Homo sapiens
MTGRDSLSDGRTSSRALVPGGSPRGSRPRGFAITDLLGLEAELPAPAGPGQGSGCEGPAVAPCPGPGLDGSSLARGALPLGLGLLCGFGTQPPAAARAPCLLLADVPFLPPRGPEPAAPLAPSRPPPALGRQKRSDSVSTSDEDSQSEDRNDLKASPTLGKRKKRRHRTVFTAHQLEELEKAFSEAHYPDVYAREMLAVKTELPEDRIQVWFQNRRAKWRKREKRWGGSSVMAEYGLYGAMVRHCIPLPDSVLNSAEGGLLGSCAPWLLGMHKKSMGMIRKPGSEDKLAGLWGSDHFKEGSSQSESGSQRGSDKVSPENGLEDVAIDLSSSARQETKKVHPGAGAQGGSNSTALEGPQPGKVGAT

SEQ ID NO: 3836 - DNA, 943 bp, Homo sapiens
tccagagaggctcgcgccttgcttgctaaggaaccatgaccggccgggactcgctttccgacgggcgcactagcagcagggcgctggtgcctggcggttcccctaggggctcgcgcccccggggcttcgccatcacggacctgctgggcttggaggccgagctgccggcgcccgctggcccaggacagggatctggctgcgagggtccggcagtcgcgccgtgcccgggcccggggcttgacggctccagcctggcgcgtggggccctaccgctgggactcggcctcctctgtggcttcggcacgcagccgccggcggccgctcgagcaccctgcctgctcctagcggacgtgccgttcctgccgcccaggggccccgagcccgctgccccgctggctcccagccgtccgccgcctgcgctcggccgccagaagcgcagcgacagcgtctccacgtccgatgaggacagccagtctgaagacaggaatgacctaaaggcatcccccaccttgggcaagaggaagaagcggcggcacaggacagttttcactgctcaccagctggaagagttggagaaggcattcagcgaggcccactaccctgatgtgtatgcccgagaaatgctggctgtgaaaactgagctccccgaagaccggatacaggtgtctggggtcccttttctccgctccaaagataccacagagaacgtgtcattcccacattcagtgagccaatcagcagtcccttctctatagccaacacgctccctttgcatagaaactgagggtcccttagctgaaggcaccacaagagcttgcccctatgaccctcatgccttttttcattttattattatttagtatcaaatcattctttaaaatcacatgataatgtgtgctgcaactagaaactataaagatatgtcaatgaaaaaaaaaaaaaa

SEQ ID NO: 3837 - protein, 239 aa, Homo sapiens
MTGRDSLSDGRTSSRALVPGGSPRGSRPRGFAITDLLGLEAELPAPAGPGQGSGCEGPAVAPCPGPGLDGSSLARGALPLGLGLLCGFGTQPPAAARAPCLLLADVPFLPPRGPEPAAPLAPSRPPPALGRQKRSDSVSTSDEDSQSEDRNDLKASPTLGKRKKRRHRTVFTAHQLEELEKAFSEAHYPDVYAREMLAVKTELPEDRIQVSGVPFLRSKDTTENVSFPHSVSQSAVPSL

SEQ ID NO: 3838 - DNA, 2762 bp, Homo sapiens
gtggggtcgtatcccgcgggtggaggccggggtggcgccggccggggcgggggagcccaaaagaccggctgccgcctgctccccggaaaagggcactcgtctccgtgggtgtggcggagcgcgcggtgcatggaatgggctatgtgaatgaaaaaaggtatccgttatgaaacttccagaaaaacgagctacatttttcagcagccgcagcacggtccttggcaaacaaggatgagaaaaatatccaaccacgggagcctgcgggtggcgaaggtggcataccccctggggctgtgtgtgggcgtgttcatctatgttgcctacatcaagtggcaccgggccaccgccacccaggccttcttcagcatcaccagggcagccccgggggcccggtggggtcagcaggcccacagccccctggggacagctgcagacgggcacgaggtcttctacgggatcatgtttgatgcaggaagcactggcacccgagtacacgtcttccagttcacccggccccccagagaaactcccacgttaacccacgaaaccttcaaagcagtgaagccaggtctttctgcctatgctgatgatgttgaaaagagcgctcagggaatccgggaactactggatgttgctaaacaggacattccgttcgacttctggaaggccacccctctggtcctcaaggccacagctggcttacgcctgttacctggagaaaaggcccagaagttactgcagaaggtgaaagaagtatttaaagcatcgcctttccttgtaggggatgactgtgtttccatcatgaacggaacagatgaaggcgtttcggcgtggatcaccatcaacttcctgacaggcagcttgaaaactccaggagggagcagcgtgggcatgctggacttgggcggaggatccactcagatcgccttcctgccacgcgtggagggcaccctgcaggcctccccacccggctacctgacggcactgcggatgtttaacaggacctacaagctctattcctacagctacctcgggctcgggctgatgtcggcacgcctggcgatcctgggcggcgtggaggggcagcctgctaaggatggaaaggagttggtcagcccttgcttgtctcccagtttcaaaggagagtgggaacacgcagaagtcacgtacagggtttcagggcagaaagcagcggcaagcctgcacgagctgtgtgctgccagagtgtcagaggtccttcaaaacagagtgcacaggacggaggaagtgaagcatgtggacttctatgctttctcctactattacgaccttgcagctggtgtgggcctcatagatgcggagaagggaggcagcctggtggtgggggacttcgagatcgcagccaagtacgtgtgtcggaccctggagacacagccgcagagcagccccttctcatgcatggacctcacctacgtcagcctgctactccaggagttcggctttcccaggagcaaagtgctgaagctcactcggaaaattgacaatgttgagaccagctgggctctgggggccatttttcattacatcgactccctgaacagacagaagagtccagcctcatagtggccgagccatccctgtccccgtcagcagtgtctgtgtgtctgcataaaccctcctgtcctggacgtgacttcatcctgaggagccacagcacaggccgtgctggcactttctgcacactggctctgggacttgcagaaggcctggtgctgccctggcatcagcctcttccagtcacatctggccagagggctgtctggacctgggccctgctcaatgccacctgtctgcctgggctccaagtgggcaggaccaggacagaaccacaggcacacactgagggggcagtgtggctccctgcctgtcccatccccatgccccgtccgcggggctgtggctgctgctgtgcatgtccctgcgatgggagtcttgtctcccagcctgtcagtttcctccccagggcagagctccccttcctgcaagagtctgggaggcggtgcaggctgtcctggctgctctggggaagccgagggacagccataacacccccgggacagtaggtctgggcggcaccactgggaactctggacttgagtgtgtttgctcttccttgggtatgaatgtgtgagttcacccagaggcctgctctcctcacacattgtgtggtttggggttaatgatggagggagacacctcttcatagacggcaggtgcccacctttcagggagtctcccagcatgggcggatgccgggcatgagctgctgtaaactatttgtggctgtgctgcttgagtgacgtctctgtcgtgtgggtgccaagtgcttgtgtagaaactgtgttctgagcccccttttctggacaccaactgtgtcctgtgaatgtatcgctactgtgagctgttcccgcctagccagggccatgtcttaggtgcagctgtgccacgggtcagctgagccacagtcccagaaccaagctctcggtgtctcgggccaccatccgcccacctcgggctgaccccacctcctccatggacagtgtgagccccgggccgtgcatcctgctcagtgtggcgtcagtgtcggggctgagccccttgagctgcttcagtgaatgtacagtgcccggcacgagctgaacctcatgtgttccactcccaataaaaggttgacaggggcttctccttcaaaaaaaaaaaaaaaaaaaaaaaaaaaaaaaaaa

SEQ ID NO: 3839 - protein, 484 aa, Homo sapiens
MKKGIRYETSRKTSYIFQQPQHGPWQTRMRKISNHGSLRVAKVAYPLGLCVGVFIYVAYIKWHRATATQAFFSITRAAPGARWGQQAHSPLGTAADGHEVFYGIMFDAGSTGTRVHVFQFTRPPRETPTLTHETFKAVKPGLSAYADDVEKSAQGIRELLDVAKQDIPFDFWKATPLVLKATAGLRLLPGEKAQKLLQKVKEVFKASPFLVGDDCVSIMNGTDEGVSAWITINFLTGSLKTPGGSSVGMLDLGGGSTQIAFLPRVEGTLQASPPGYLTALRMFNRTYKLYSYSYLGLGLMSARLAILGGVEGQPAKDGKELVSPCLSPSFKGEWEHAEVTYRVSGQKAAASLHELCAARVSEVLQNRVHRTEEVKHVDFYAFSYYYDLAAGVGLIDAEKGGSLVVGDFEIAAKYVCRTLETQPQSSPFSCMDLTYVSLLLQEFGFPRSKVLKLTRKIDNVETSWALGAIFHYIDSLNRQKSPAS

SEQ ID NO: 3840 - DNA, 4131 bp, Homo sapiens
gcagtgccgggcgccagagcagcggcgccagagcagctgcaccatcccggcgttcgcgtgtgccgccgctttcctcctccatctcttttcctccgcctccgccggcgcgatggcgaagccgctgacggacagcgagaagcggaagcagatcagcgtgcgcggcctggcggggctaggcgacgtggccgaggtgcggaagagcttcaaccggcacttgcacttcacgctggtcaaggaccgcaatgtggccacgccccgcgactacttcttcgcgctggcgcacacggtgcgcgaccacctcgtgggccgctggatccgcacgcagcagcactactacgagcgcgaccccaagcgcatttattatctttccctggaattctacatgggtcgcacgctgcagaacacgatggtgaacctgggccttcagaatgcctgcgatgaagccatctatcagttggggttagacttggaggaactcgaggagatagaagaagatgctggccttgggaatggaggcctggggaggctggcagcgtgtttccttgactcaatggctaccttgggcctggcagcatacggctatggaatccgctatgaatttgggatttttaaccagaagattgtcaatggctggcaggtagaggaggccgatgactggctgcgctacggcaacccctgggagaaagcgcggcctgagtatatgcttcccgtgcacttctacggacgcgtggagcacacccccgacggcgtgaagtggctggacacacaggtggtgctggccatgccctacgacaccccagtgcccggctacaagaacaacaccgtcaacaccatgcggctgtggtccgccaaggctcccaacgacttcaagctgcaggacttcaacgtgggagactacatcgaggcggtcctggaccggaacttggctgagaacatctccagggtcctgtatccaaatgataacttctttgaggggaaggagctgcggctgaagcaggagtacttcgtggtggccgccacgctccaggacatcatccgccgcttcaagtcgtccaagttcggctgccgggaccctgtgagaacctgtttcgagacgttcccagacaaggtggccatccagctgaacgacacccaccccgccctctccatccctgagctcatgcggatcctggtggacgtggagaaggtggactgggacaaggcctgggaaatcacgaagaagacctgtgcatacaccaaccacactgtgctgcctgaggccttggagcgctggcccgtgtccatgtttgagaagctgctgccgcggcacctggagataatctatgccatcaaccagcggcacctggaccacgtggccgcgctgtttcccggcgatgtggaccgcctgcgcaggatgtctgtgatcgaggagggggactgcaagcggatcaacatggcccacctgtgtgtgattgggtcccatgctgtcaatggtgtggcgaggatccactcggagatcgtgaaacagtcggtctttaaggatttttatgaactggagccagagaagttccagaataagaccaatggcatcaccccccgccggtggctgctgctgtgcaacccggggctggccgataccatcgtggagaaaattggggaggagttcctgactgacctgagccagctgaagaagctgctgccgctggtcagtgacgaggtgttcatcagggacgtggccaaggtcaaacaggagaacaagctcaagttctcggccttcctggagaaggagtacaaggtgaagatcaacccctcctccatgttcgatgtgcatgtgaagaggatccacgagtacaagcggcagctgctcaactgcctgcacgtcgtcaccctgtacaatcgaatcaagagagacccggccaaggcttttgtgcccaggactgttatgattgggggcaaggcagcgcccggttaccacatggccaagctgatcatcaagttggtcacctccatcggcgacgtcgtcaatcatgacccagttgtgggtgacaggttgaaagtgatcttcctggagaactaccgtgtgtccttggctgagaaagtgatcccggccgctgatctgtcgcagcagatctccactgcaggcaccgaggcctcaggcacaggcaacatgaagttcatgctcaacggggccctcaccatcggcaccatggacggcgccaacgtggagatggccgaggaggccggggccgagaacctcttcatcttcggcctgcgggtggaggatgtcgaggccttggaccggaaagggtacaatgccagggagtactacgaccacctgcccgagctgaagcaggccgtggaccagatcagcagtggctttttttctcccaaggagccagactgcttcaaggacatcgtgaacatgctgatgcaccatgacaggttcaaggtgtttgcagactatgaagcctacatgcagtgccaggcacaggtggaccagctgtaccggaaccccaaggagtggaccaagaaggtcatcaggaacatcgcctgctcgggcaagttctccagtgaccggaccatcacggagtatgcacgggagatctggggtgtggagccctccgacctgcagatcccgccccccaacatcccccgggactaggcacaccctgccttggcgggaccagcgggcatttgttttcttgctgactttgcacctccttttttccccaaacactttgccagccactggtggtccctgcttttctgagtaccatgtttccaggaggggccatgggggtcagggtggttttgagagagcagggtaaggaaggaatgtgctagaagtgctcctagtttcttgtaaaggaagccagagttgacagtacaaagggtcgtggccagccctgcagcttcagcacctgccccacccagagtgggagtcaggtggagccacctgctgggctcccccagaactttgcacacatcttgctatgtattagccgatgtctttagtgttgagcctctggattctggggtctgggccagtggccatagtgaagcctgggaatgagtgttactgcagcatctgggctgccagccacagggaagggccaagccccatgtagccccagtcatcctgcccagccctgcctcctggccatgccgggaggggtcggatcctctaggcatcgccttcacagccccctgccccctgccctctgtcctggctctgcacctggtatatgggtcatggacccagatggggctttccctttgtagccatccaatgggcattgtgtgggtgcttggaacccgggatgactgagggggacactggagtgggtgcttgtgtctgctgtctcagaggccttggtcaggatgaagttggctgacacagcttagcttggttttgcttattcaaaagagaaaataactacacatggaaatgaaactagctgaagccttttcttgttttagcaactgaaaattgtacttggtcacttttgtgcttgaggaggcccattttctgcctggcagggggcaggtctgtgccctcccgctgactcctgctgtgtcctgaggtgcatttcctgttgtacacacaagggccaggctccattctccctccctttccaccagtgccacagcctcgtctggaaaaaggaccaggggtcccggaggaacccatttgtgctctgcttggacagcaggcctggcactgggaggtgggggtgagcccctcacagccttgcccctccccaaggctggcaacctgcctcccattgcccaagagagagggcagggaacaggctactgtccttccctgtggaattgccgagaaatctagcaccttgcatgctggatctgggctgcggggaggctctttttctccctggcctccagtgcccaccaggaggatctgcgcacggtgcacagcccaccagagcactacagccttttattgagtggggcaagtgctgggctgtggtcgtgccctgacagcatcttccccaggcagcggctctgtggaggaggccatactcccctagttggccactggggccaccaccctgaccaccactgtgcccctcattgttactgccttgtgagataaaaactgattaaacctttgtggctgtggttggctga

SEQ ID NO: 3841 - protein, 843 aa, Homo sapiens
MAKPLTDSEKRKQISVRGLAGLGDVAEVRKSFNRHLHFTLVKDRNVATPRDYFFALAHTVRDHLVGRWIRTQQHYYERDPKRIYYLSLEFYMGRTLQNTMVNLGLQNACDEAIYQLGLDLEELEEIEEDAGLGNGGLGRLAACFLDSMATLGLAAYGYGIRYEFGIFNQKIVNGWQVEEADDWLRYGNPWEKARPEYMLPVHFYGRVEHTPDGVKWLDTQVVLAMPYDTPVPGYKNNTVNTMRLWSAKAPNDFKLQDFNVGDYIEAVLDRNLAENISRVLYPNDNFFEGKELRLKQEYFVVAATLQDIIRRFKSSKFGCRDPVRTCFETFPDKVAIQLNDTHPALSIPELMRILVDVEKVDWDKAWEITKKTCAYTNHTVLPEALERWPVSMFEKLLPRHLEIIYAINQRHLDHVAALFPGDVDRLRRMSVIEEGDCKRINMAHLCVIGSHAVNGVARIHSEIVKQSVFKDFYELEPEKFQNKTNGITPRRWLLLCNPGLADTIVEKIGEEFLTDLSQLKKLLPLVSDEVFIRDVAKVKQENKLKFSAFLEKEYKVKINPSSMFDVHVKRIHEYKRQLLNCLHVVTLYNRIKRDPAKAFVPRTVMIGGKAAPGYHMAKLIIKLVTSIGDVVNHDPVVGDRLKVIFLENYRVSLAEKVIPAADLSQQISTAGTEASGTGNMKFMLNGALTIGTMDGANVEMAEEAGAENLFIFGLRVEDVEALDRKGYNAREYYDHLPELKQAVDQISSGFFSPKEPDCFKDIVNMLMHHDRFKVFADYEAYMQCQAQVDQLYRNPKEWTKKVIRNIACSGKFSSDRTITEYAREIWGVEPSDLQIPPPNIPRD

SEQ ID NO: 3842 - DNA, 1983 bp, Homo sapiens
gccggcgcagcggcctgggctgggatgtgaggagcggcgggttccgggctccgggctctgggtggcggcggctgtgagcggcggcactgcggcgcaggccagcgggcgccgtcggcggctggccctgtcggccgcgggatgaggaagcggaccgagcccgtcgccttggagcatgagcgctgcgccgccgcgggctcgtcctcctccggctcggccgccgcggcgctggacgccgactgccgcctgaagcagaacctacgcctgacgggcccggcggcggctgagccgcgctgcgcagccgacgcgggaatgaagcgggcgctgggcaggcgaaagggcgtgtggttgcgcctgaggaagatacttttctgtgttttggggttgtacattgccattccatttctcatcaaactatgtcctggaatacaggccaaactgattttcttgaatttcgtaagagttccctatttcattgatttgaaaaaaccacaggatcaaggtttgaatcacacgtgtaactactacctgcagccagaggaagacgtgaccattggagtctggcacaccgtccctgcagtctggtggaagaacgcccaaggcaaagaccagatgtggtatgaggatgccttggcttccagccaccctatcattctgtacctgcatgggaacgcaggtaccagaggaggcgaccaccgcgtggagctttacaaggtgctgagttcccttggttaccatgtggtcacctttgactacagaggttggggtgactcagtgggaacgccatctgagcggggcatgacctatgacgcactccacgtttttgactggatcaaagcaagaagtggtgacaaccccgtgtacatctggggccactctctgggcactggcgtggcgacaaatctggtgcggcgcctctgtgagcgagagacgcctccagatgcccttatattggaatctccattcactaatatccgcgaagaagctaagagccatccattttcagtgatatatcgatacttccctgggtttgactggttcttccttgatcctattacaagtagtggaattaaatttgcaaatgatgaaaacgtgaagcacatctcctgtcccctgctcatcctgcacgctgaggacgacccggtggtgcccttccagcttggcagaaagctctatagcatcgccgcaccagctcgaagcttccgagatttcaaagttcagtttgtgccctttcattcagaccttggctacaggcacaaatacatttacaagagccctgagctgccacggatactgagggaattcctggggaagtcggagcctgagcaccagcactgagcctggccgtgggaaggaagcatgaagacctctgccctcctcccgttttcctccagtcagcagcccggtatcctgaagccccggggggccggcacctgcaatgctcaggagcccagctcgcacctggagagcacctcagatcccaggcggggaggcccctgcaggcctgcagtgcccggaggcctgagcatggctgtgtggaaagcgtgggtggcaggcatgtggctctccttgccgcccctcaacctgagatcttgttgggagacttaatggcagcaggcagccatcactgcctgcttgatgctgcactgagctggacagggggagtccgggcaggggactcttggggctcgggaccatgctgagctttttggcaccacccacagagaacgtggggtccaggttctttctgcaccttcccagcacatgcagaatgactccagtggttccatcgtcccctcctgccctgtgtacctgcttgcctttctcagctgccccacctcccctgggctggcccactcacccacagtggaagtgcccgggatctgcacttcctcccctttcacctacctgtacacctaacctggccttagactgagctttatttaagaataaaatcgtggtggtggtcaaaaaaaaaaaaaaaaa

SEQ ID NO: 3843 - protein, 398 aa, Homo sapiens
MRKRTEPVALEHERCAAAGSSSSGSAAAALDADCRLKQNLRLTGPAAAEPRCAADAGMKRALGRRKGVWLRLRKILFCVLGLYIAIPFLIKLCPGIQAKLIFLNFVRVPYFIDLKKPQDQGLNHTCNYYLQPEEDVTIGVWHTVPAVWWKNAQGKDQMWYEDALASSHPIILYLHGNAGTRGGDHRVELYKVLSSLGYHVVTFDYRGWGDSVGTPSERGMTYDALHVFDWIKARSGDNPVYIWGHSLGTGVATNLVRRLCERETPPDALILESPFTNIREEAKSHPFSVIYRYFPGFDWFFLDPITSSGIKFANDENVKHISCPLLILHAEDDPVVPFQLGRKLYSIAAPARSFRDFKVQFVPFHSDLGYRHKYIYKSPELPRILREFLGKSEPEHQH

SEQ ID NO: 3844 - DNA, 1610 bp, Homo sapiens
gccggcgcagcggcctgggctgggatgtgaggagcggcgggttccgggctccgggctctgggtggcggcggctgtgagcggcggcactgcggcgcaggccagcgggcgccgtcggcggctggccctgtcggccgcgggatgaggaagcggaccgagcccgtcgccttggagcatgagcgctgcgccgccgcgggctcgtcctcctccggctcggccgccgcggcgctggacgccgactgccgcctgaagcagaacctacgcctgacgggcccggcggcggctgagccgcgctgcgcagccgacgcgggaatgaagcgggcgctgggcaggcgaaagggcgtgtggttgcgcctgaggaagatacttttctgtgttttggggttgtacattgccattccatttctcatcaaactatgtcctggaatacaggccaaactgattttcttgaatttcgtaagagttccctatttcattgatttgaaaaaaccacaggatcaaggtttgaatcacacgtgtaactactacctgcagccagaggaagacgtgaccattggagtctggcacaccgtccctgcagtctggtggaagaacgcccaaggcaaagaccagatgtggtatgaggatgccttggcttccagccaccctatcattctgtacctgcatgggaacgcaggtaccagaggaggcgaccaccgcgtggagctttacaaggtgctgagttcccttggttaccatgtggtcacctttgactacagaggttggggtgactcagtgggaacgccatctgagcggggcatgacctatgacgcactccacgtttttgactggatcaaagcaagaagtggtgacaaccccgtgtacatctggggccactctctgggcactggcgtggcgacaaatctggtgcggcgcctctgtgagcgagagacgcctccagatgcccttatattggaatctccattcactaatatccgcgaagaagctaagagccatccattttcagtgatatatcgatacttccctgggtttgactggttcttccttgatcctattacaagtagtggaattaaatttgcaaatgatgaaaacgtgaagcacatctcctgtcccctgctcatcctgcacgctgaggacgacccggtggtgcccttccagcttggcagaaagctctatagcatcgccgcaccagctcgaagcttccgagatttcaaagttcagtttgtgccctttcattcagaccttggctacaggcacaaatacatttacaagagccctgagctgccacggatactgagacctcagcagggcccaggttccagcccagatcccagcatgtggtcagagctggtgtgactgaagccaacaggtgacacggtcatcgaagagcagcagacaaaactaaaactaacccaaaggcagctgaaagtggagggcaggtgaattcccagccctcgccggattcaacttttgccaacggtgaagaactgccctgagctgcaaaccttacaaagtctgtaactctagataaaccataccatgtgctaactgcactgaaataaaacactaactacattataatgtcaaaaaaaaaaaaaaaaaaaaaaaaaaaa

SEQ ID NO: 3845 - protein, 404 aa, Homo sapiens
MRKRTEPVALEHERCAAAGSSSSGSAAAALDADCRLKQNLRLTGPAAAEPRCAADAGMKRALGRRKGVWLRLRKILFCVLGLYIAIPFLIKLCPGIQAKLIFLNFVRVPYFIDLKKPQDQGLNHTCNYYLQPEEDVTIGVWHTVPAVWWKNAQGKDQMWYEDALASSHPIILYLHGNAGTRGGDHRVELYKVLSSLGYHVVTFDYRGWGDSVGTPSERGMTYDALHVFDWIKARSGDNPVYIWGHSLGTGVATNLVRRLCERETPPDALILESPFTNIREEAKSHPFSVIYRYFPGFDWFFLDPITSSGIKFANDENVKHISCPLLILHAEDDPVVPFQLGRKLYSIAAPARSFRDFKVQFVPFHSDLGYRHKYIYKSPELPRILRPQQGPGSSPDPSMWSELV

SEQ ID NO: 3846 - DNA, 1861 bp, Homo sapiens
gggagcgcggagcggaggccgaggcgagagcctggcgctgtaggactagaacgaaaggagtgaggcgccgagagcccagataccattttggcgtgagagctggtggttggcaaggccgcgggagtgggaagcgtccgccatgttctgcgaaaaagccatggaactgatccgcgagctgcatcgcgcgcccgaagggcaactgcctgccttcaacgaggatggactcagacaagttctggaggagatgaaagctttgtatgaacaaaaccagtctgatgtgaatgaagcaaagtcaggtggacgaagtgatttgataccaactatcaaatttcgacactgttctctgttaagaaatcgacgctgcactgtagcatacctgtatgaccgcttgcttcggatcagagcactcagatgggaatatggtagcatcttgccaaatgcattacgatttcacatggctgctgaagaaatggagtggtttaataattataaaagatctcttgctacttatatgaggtcactgggaggagatgaaggtttggacattacacaggatatgaaaccaccaaaaagcctatatattgaagtccggtgtctaaaagactatggagaatttgaagttgatgatggcacttcagtcctattaaaaaaaaatagccagcactttttacctcgatggaaatgtgagcagctgatcagacaaggagtcctggagcacatcctgtcatgaccatgcgccgaggcacttccaggcttcactcaactcatggactcctctgtactcactctctccaccactcccttcacctccctctttgattttagaagctatagacattgtttaagataactaagaatacttggctaagaagtataatttgctaactattaaggactttctttttttaatgttgtacactattcttcctactcttttttggttttggttttgttttgtagagactgtctcactatgttgcccaagctggtctcaaactcctggcctcaagcagtcctcccaccttagcttctcaaagtgttgagatcacaggcgtgagccactgcacccggcccctactcctttttctaataagctgtatctgtaatcacagcattcctacagttgttacagtgtgttttttaaatgaaagtaaacatggttacatttgaatctcttaaataagcagtcacttggctggacaggaagaaggtagatcctgtgtgtcttgttttctggtcatgtgtattgtacaagctagagagctgaatttctgagatacacattttcaaatcacatgcaagtgaagatgatggtctgtagaaattttcagtatatataatgtttaatgacatactaatttatcatctggctatttgggaaggaaggacacacatggattttgcacatttccaccatggtggctggtgtggcttgtggctatggggtgatcaccagtatcaccactttggaaggggacagtgaaattggggctagagaaggaactttgtacagttttccctgagattcagattgactgaaaagtcacatgaagagttgattgtcttttaatggtatgttttaaacagctgacattttaaattttgatgaaatccagtttattcgtttgttcttttatgctttgggtgttgcatccgagaaatcttttcccatcccaagatcacaattttttttcctttttacttctagaagtgttataattttaagctttatactttggtctatgacccgtttttttttttgttttgttttgttttttcgtttgtttctttgttttgagatggagcctgggtgatagagtgagacactgtcttgccaaaaaaaaaaaaaaaaaaaaaaaaa

SEQ ID NO: 3847 - protein, 196 aa, Homo sapiens
MFCEKAMELIRELHRAPEGQLPAFNEDGLRQVLEEMKALYEQNQSDVNEAKSGGRSDLIPTIKFRHCSLLRNRRCTVAYLYDRLLRIRALRWEYGSILPNALRFHMAAEEMEWFNNYKRSLATYMRSLGGDEGLDITQDMKPPKSLYIEVRCLKDYGEFEVDDGTSVLLKKNSQHFLPRWKCEQLIRQGVLEHILS

SEQ ID NO: 3848 - DNA, 4979 bp, Homo sapiens
gcggtacgggggtggtgccgcgctcctggccccgcgcgggcggacggcggaggcgcctcccagcctgctatgggatggatgaagaagagaaccactatgtctcgcagctcagggaagtctacagcagctgcgacaccacggggactggctttctggaccgccaggagctgacccagctctgccttaagcttcacctggagcagcagctgcccgtcctcctgcagacgcttctcggaaacgaccatttcgccagggttaactttgaggaatttaaggaaggttttgtggctgtgttgtcttcaaatgctggtgttcgcccctcagatgaagacagtagttctttggaatcagctgcctccagtgccatccctccaaagtatgtgaatggttctaagtggtatggccgtcggagccggcctgagctatgtgacgctgccacagaagccagacgcgtgccggagcagcaaacccaggccagcctgaaaagtcacctctggcgctcagcgtctctggagagcgtggagagtcccaagtcagatgaagaggccgagagcactaaagaagctcagaatgaattatttgaagcacaaggacagctgcagacctgggattctgaggactttgggagcccccagaagtcctgcagcccctcctttgacaccccagagagccagatccggggcgtgtgggaagagctgggggtgggcagcagcggacacctgagcgagcaggagctggctgtggtctgccagagcgtcgggctccagggactcgagaaagaggaactcgaagacctgtttaacaaactggatcaagacggagacggcaaagtgagtcttgaggaattccagcttggcctcttcagtcatgagcccgcgctacttctagagtcttccactcgggttaaaccgagcaaggcttggtctcattaccaggtcccagaggagagcggctgccacaccaccacaacctcatccctcgtgtccctgtgctccagcctgcgcctcttctccagcattgacgatggttctggcttcgcttttcctgatcaggtcctggccatgtggacccaggaggggattcagaatggcagggagatcttgcagagcctggacttcagcgtggacgagaaggtgaaccttctggagctgacctgggcccttgacaacgagctcatgacagtggacagtgccgtccagcaggcagccctggcctgctaccaccaggagctgagctaccagcaagggcaggtggagcagctggcaagggagcgtgacaaggcaaggcaggacctggagagggccgagaagaggaacctggagtttgtgaaagagatggacgactgccactccaccctggagcagctcacggagaagaaaatcaagcatctggagcaggggtaccgggaaaggctgagcctcctgcggtctgaggtggaggcggagcgagagctgttctgggagcaggcccacaggcagagggccgcgctggagtgggacgtggggcgcctgcaggctgaggaggctggcctccgcgagaagctgaccctggccctgaaggaaaacagtcgcctacagaaggagattgtggaagtggtggaaaagctttcggattcggagaggctggccctgaagctgcagaaggacctggagtttgtgctgaaggacaagctggagccacagagtgcagagctcctggcccaggaggagcggttcgcagcagtcctgaaggaatacgagctcaagtgccgggacctgcaggaccgcaacgatgagctgcaagctgagctggaaggcctgtgggcgcggctgcccaagaaccggcacagcccctcatggagcccggatgggcgcagacggcagctccctggactcggcccagcaggcatttcattcctgggtaattctgctccagtgagtatagaaacggagctgatgatggagcaggtaaaggagcattaccaagacctcaggacccagctggagaccaaggtaaattactacgaaagggaaattgcggcactgaaaaggaactttgagaaggagaggaaggacatggagcaggctcgcaggcgcgaggtcagcgtgctggagggtcagaaggccgacctggaggagctccacgagaagtctcaggaggtcatctggggcctgcaggagcagctgcaggacacagcccgcggccccgagcctgagcagatgggcctggcaccctgctgcacccaggcactgtgtggcctggccctgcggcatcacagccacctgcagcagatcaggagagaggctgaggcggagctgagtggagagctgtcggggctgggagccctgcccgctcgcagagacctgaccttggagctggaggagccgccgcagggacccctgccacgcgggagccagaggtcggagcagctggagctggagagggcactgaagctgcagccctgtgcgagcgagaagcgcgcccagatgtgcgtatcgttggccctcgaggaggaggagttggagcttgcccgcgggaagcgagtggacgggccctccctggaagcagagatgcaggccctgccgaaagatgggctggtggcaggaagtggccaggagggcacacgtggcctcctaccactgcgtccgggctgtggggagcggccactggcctggctggccccaggtgatggcagagagtctgaggaggcggcaggagccgggcctcgccgcaggcaagcccaggacacagaagctacgcagagcccggcccccgcccctgccccggcatcccacggcccctcagagaggtggtcacgcatgcagccctgtggagtggatggggatattgtcccaaaggagccagagcctttcggcgcgagcgcagcggggctggagcagcctggagcccgggagctgcctctgctgggaacagagagagacgcctcgcaaacccagccacggatgtgggagccacccctgaggccggccgcttcgtgcaggggacaggctgagaggctacaggccattcaggaagagcgagcacgaagctggagcaggggcacccaggagcaggcctcggagcagcaggcccgggccgagggcgccctggagcctgggtgtcacaagcacagtgtggaggttgccaggagagggtccttgccatcccacctccagctcgcagacccgcagggttcctggcaggagcagcttgctgccccagaagagggggagaccaaaatagcgctggagagagagaaggatgacatggaaaccaaacttctacatctggaagacgtcgtccgggctctggagaaacatgtagatttgagagagaacgacagactggagttccatagactttctgaagaaaacactttgttgaaaaacgatctgggaagggttcggcaagagcttgaagctgcagaaagtactcacgatgcacagaggaaggaaattgaggttttaaagaaagacaaggaaaaggcctgctctgagatggaggtgctcaacagacagaatcagaactacaaggatcaattatcccagctcaatgtcagggttcttcaactgggacaggaggcttctacccaccaggcccaaaacgaggagcatcgtgtgaccattcagatgttaacacagagcctggaggaggtggttcgcagtgggcagcagcagagtgaccaaatccaaaaacttagagttgaacttgaatgcctgaatcaggaacatcagagcctgcagctgccatggtcagagctgacccagacccttgaggaaagtcaagaccaggtgcagggagctcacctgaggctgaggcaggcccaggcccagcacttgcaggaggtccggctggtgccccaggaccgtgtggccgagctgcatcgcctgctcagccttcagggagagcaggccaggaggcgcctggatgcacagcgggaagaacatgagaaacagctgaaagccacagaagagcgggtggaagaggcggagatgattctgaagaatatggaaatgctcctccaagagaaagtggataagctgaaggagcagtttgaaaagaacacgaagtccgacctgctgctgaaggagctgtacgtggagaacgcccacctggtgagagcacttcaggccaccgaggagaagcagcgaggcgccgagaaacaaagccgcctcttggaagaaaaagttcgcgctctcaacaaactcgtcagtaggattgcccccgcagccctctctgtgtaaagacagattattttctaggattcattcgaaagcacatcttttaaattaagccactgtgctgccttagattccgtgggtcatgagccatgagtcctgggacatctgaggattgggattctttgttcaccccgcagatagttaatgaatggtctgccctgggcaagatggaggtgggggctgggggaatatgcatgttgcagaagccggcgtttttattagcggtcctgagtaatttcccttggcaaaattcccagttttgccactctctggagccagatcctgggagctgtcagcaaggagcaggtaagtgagcagttatggacagcactttccatgtggtgcttccgaccctggctgtcagagtgaaatgtaaagtcagggctctgtacagttttgccatttcactgttctgctttaagcttagcttattagaactcttggtggagggtgcgtacacacattccagaaaaggcttcactcgctgggaacgtcaacccagcgagaaaggaggggaagccccttctccggggaccttatctgtggactcaggaatgatggtgtttattgcaaatgcacaatctttttcccattgaaatgtcatcacactggaaattgtactatatgtaaaaaaaaaaaaaagtatagttttatatttgaaatgtatgcaaattatggccatatggctgattggaatgtactactgtaatataaaaagtcactgtatttgcaataaattcttttctattaaaaaaaaaa

SEQ ID NO: 3849 - protein, 1382 aa, Homo sapiens
MDEEENHYVSQLREVYSSCDTTGTGFLDRQELTQLCLKLHLEQQLPVLLQTLLGNDHFARVNFEEFKEGFVAVLSSNAGVRPSDEDSSSLESAASSAIPPKYVNGSKWYGRRSRPELCDAATEARRVPEQQTQASLKSHLWRSASLESVESPKSDEEAESTKEAQNELFEAQGQLQTWDSEDFGSPQKSCSPSFDTPESQIRGVWEELGVGSSGHLSEQELAVVCQSVGLQGLEKEELEDLFNKLDQDGDGKVSLEEFQLGLFSHEPALLLESSTRVKPSKAWSHYQVPEESGCHTTTTSSLVSLCSSLRLFSSIDDGSGFAFPDQVLAMWTQEGIQNGREILQSLDFSVDEKVNLLELTWALDNELMTVDSAVQQAALACYHQELSYQQGQVEQLARERDKARQDLERAEKRNLEFVKEMDDCHSTLEQLTEKKIKHLEQGYRERLSLLRSEVEAERELFWEQAHRQRAALEWDVGRLQAEEAGLREKLTLALKENSRLQKEIVEVVEKLSDSERLALKLQKDLEFVLKDKLEPQSAELLAQEERFAAVLKEYELKCRDLQDRNDELQAELEGLWARLPKNRHSPSWSPDGRRRQLPGLGPAGISFLGNSAPVSIETELMMEQVKEHYQDLRTQLETKVNYYEREIAALKRNFEKERKDMEQARRREVSVLEGQKADLEELHEKSQEVIWGLQEQLQDTARGPEPEQMGLAPCCTQALCGLALRHHSHLQQIRREAEAELSGELSGLGALPARRDLTLELEEPPQGPLPRGSQRSEQLELERALKLQPCASEKRAQMCVSLALEEEELELARGKRVDGPSLEAEMQALPKDGLVAGSGQEGTRGLLPLRPGCGERPLAWLAPGDGRESEEAAGAGPRRRQAQDTEATQSPAPAPAPASHGPSERWSRMQPCGVDGDIVPKEPEPFGASAAGLEQPGARELPLLGTERDASQTQPRMWEPPLRPAASCRGQAERLQAIQEERARSWSRGTQEQASEQQARAEGALEPGCHKHSVEVARRGSLPSHLQLADPQGSWQEQLAAPEEGETKIALEREKDDMETKLLHLEDVVRALEKHVDLRENDRLEFHRLSEENTLLKNDLGRVRQELEAAESTHDAQRKEIEVLKKDKEKACSEMEVLNRQNQNYKDQLSQLNVRVLQLGQEASTHQAQNEEHRVTIQMLTQSLEEVVRSGQQQSDQIQKLRVELECLNQEHQSLQLPWSELTQTLEESQDQVQGAHLRLRQAQAQHLQEVRLVPQDRVAELHRLLSLQGEQARRRLDAQREEHEKQLKATEERVEEAEMILKNMEMLLQEKVDKLKEQFEKNTKSDLLLKELYVENAHLVRALQATEEKQRGAEKQSRLLEEKVRALNKLVSRIAPAALSV

SEQ ID NO: 3850 - DNA, 2352 bp, Homo sapiens
aggctacggttcgcgccagcggccggcgctatggggctgagccgcgtgcgggcggttttctttgacttggacaacactctcatcgacacggccggggcgagcaggagaggcatgttggaggtgataaaactcttacaatcaaaataccattataaagaagaggctgaaatcatctgtgataaagttcaagttaaactcagcaaggaatgttttcatccttacaatacatgcattactgatttaaggacttcacattgggaagaagcaatccaggaaacaaaaggtggtgcagccaatagaaaattggctgaagaatgttatttcctttggaaatctacacgtttacagcatatgacactagcagaagacgtcaaagccatgcttactgaacttcgaaaggaggtccgcctacttctattaacgaatggggacagacagacccagagggagaagattgaggcttgtgcctgtcagtcctattttgacgctgttgttgtaggtggagagcagagagaggagaaaccagcaccgtccatattttattactgctgcaatcttctcggagtacaacctggggactgtgtgatggtcggtgacacattagaaaccgacatccaaggaggcctcaatgcaggattgaaagcaacagtctggatcaataaaaatggaatagtgccactgaagtcctccccagttccgcattacatggtttcttctgtgctagagttacctgctctcttacaaagtatagactgcaaagtcagtatgtccacttaaagcacataaaagggcatgattatgaatgttagaatcaatttgctgagtatgaaataagaaaagttagggcactccacttatgataatccagctctaagaataattttacttatgatttaatggccaatattttgaaggtcttcccaaccctattgcttctaagttgtaacaaccaaccattgagtggtacttatatctgaaaattcagattgcatgaattcaggtcagtagtatagcccagaaaatttaaggaaatatattatttgttagtctgtatctggagctttttaaaattatgttattaatcttttagtatcttggctgcataatgccaagcaggattgctttacacatggatgcacaaatgtaaggtttatcttctggcttaaaaatagatatttttaaaaaatagattttctaaaacacagatttatgaaagcaagtgaatctggttaatatgaaataagtactaagtcacatgcaaatcaaggtattatatagtgaaattattttgcatattttgaaaacataaaccatagtttttgcctactttggatgtatactttcttttatgaacctgatttttctgtatgacatttttttttttttcagagggcagggagcaatttttctatggcatgtgacagattcctccagttagaaaaagctgttaaaatcaacacatggtgctcttttaccgtgacattttctcacctgtgcacagtgagccgatagcttccttttagtcttcacctctcaaggaaatgtttttactgtcttttcccagacacacagtggggttgagggagctaggctgttttgctagagataattgcaaggcacgtggcactaaaagtcatttttcttctgtggatccataagaggaacatttcctcagtgtagcctaacaatgcagcccccaatctgttcctttttttttttgaaatgggatctctgtcgcccaggttggagtgccatggcaccatctcggctcactgcaacctctgcctcctgagctcaagtgatcctcccacctcagcctcccaagggtgtgtgtgactacaagtacacactaccacgcccagctaatgtgtttttttgtagagatgggattttgccatgttgcccaggctggtctcgaattcctggattcaagtgatcctcccacctcagcctcctaaagtcctaggattataggcatgagccactgtgcctggccctctcatctgatagaaaattagattttgctatgagccatttcctgagggccaatttaatactcgtgtgactcttcttagagttaccatctgccttaaatttcctctgtttttcacattcttggaaatatatcattgttttgcaaatttctatatctaattcagggtttaccaggagcttaataattaatggctacatagcaaggcatcgtcttggaaccggagaattttctctagactattaggctagacagtctcatgattatactaaccaaacctggagtaaagtggttgaaaaaaaagaaagtataaaggggcttattaaagtggttaataaatatgaaaaaaaaaaaaaaaa

SEQ ID NO: 3851 - protein, 248 aa, Homo sapiens
MGLSRVRAVFFDLDNTLIDTAGASRRGMLEVIKLLQSKYHYKEEAEIICDKVQVKLSKECFHPYNTCITDLRTSHWEEAIQETKGGAANRKLAEECYFLWKSTRLQHMTLAEDVKAMLTELRKEVRLLLLTNGDRQTQREKIEACACQSYFDAVVVGGEQREEKPAPSIFYYCCNLLGVQPGDCVMVGDTLETDIQGGLNAGLKATVWINKNGIVPLKSSPVPHYMVSSVLELPALLQSIDCKVSMST

SEQ ID NO: 3852 - DNA, 3264 bp, Homo sapiens
gggcgtcagcgagccgtgagatgcgtggtccaccatcggtgacctcaccgcctcggttcgccctcagccgccccgattggccatctgcaagcttcccttctccgtggagagcaggaagacagtcatgggacctcagggagccaggagacaggctttcttggcatttggggatgtcactgtggatttcacccagaaggaatggaggctgctgagccctgctcagagggccctgtacagggaggtgacactggagaactacagccacctggtctcactaggaattctccattctaaaccagaactcatcaggcggctagagcaaggggaagtgccctggggagaagagagaagacgccggccaggcccctgtgcaggaatatatgcagaacatgtcctgcggcccaagaatcttggacttgcacatcagaggcaacagcaactacaattttctgatcaaagcttccagagtgacacagctgaaggtcaagagaaagaaaaaagcactaagcccatggcattttccagcccacccctaagacatgcagtaagctcaaggaggaggaacagtgtagtggaaatagagtctagtcaaggccagagggaaaatcctacagaaatagacaaagtattgaaaggaatagaaaattcaagatggggagcattcaagtgtgcagagcgtgggcaagacttcagccggaagatgatggtaatcatacacaaaaaagcacattccaggcagaaactttttacatgcagggagtgtcaccagggctttagagatgagtcagcattgctcttgcaccagaacacacacacaggagagaagtcctatgtgtgcagtgtgtgtgggcgaggcttcagcctcaaggccaacctcctcagacaccagaggacacactcaggagagaagccttttctgtgcaaggtgtgtggacgaggctataccagtaagtcatacctcactgtgcatgagagaacacacacaggagagaagccttatgaatgccaggagtgtgggcgaaggtttaacgataagtcctcatacaacaagcacttgaaggcgcattcaggggagaagccttttgtgtgcaaggagtgtgggcgaggctatactaataagtcatacttcgttgtgcacaagagaatacactcaggagagaagccttacagatgccaggagtgtggccgaggctttagcaataagtcacaccttatcacacaccagaggacacactcaggggagaagccctttgcgtgcaggcagtgtaagcaaagttttagcgtgaaaggaagtctcctcagacaccagagaacacactcaggggagaagccttttgtgtgcaaggattgtgagcgaagctttagccaaaagtcaactcttgtctaccaccagagaacacactcaggggagaaaccttttgtttgtagagaatgtgggcaaggatttattcagaagtcaacccttgtgaaacatcagatcacacactcagaggagaagccttttgtgtgcaaggactgtggacgaggctttatccaaaagtcaaccttcactttacaccagaggacacactcagaggagaagccttatggatgtcgggagtgtgggcgaaggtttcgggataagtcctcctataacaagcacctgagggcacacttgggtgagaaacgttttttctgcagggattgtgggcgaggctttaccttgaagccaaatctcaccatacatcagaggacacactcaggagagaagcccttcatgtgcaagcagtgtgagaaaagttttagtttgaaggcaaatcttcttagacatcagtggacacactcgggggaaaggccatttaattgcaaggattgcgggcgaggcttcatcctaaaatcaactctcctcttccaccagaagacacactcaggggagaagcctttcatctgtagtgaatgtgggcaaggatttatctggaagtcaaatcttgtgaaacaccagcttgcacattctggcaagcagccttttgtatgcaaggagtgtgggcgaggcttcaactggaagggaaatctcctcacacaccagaggacacactcaggggagaagcccttcgtgtgtaatgtgtgtgggcaaggcttcagctggaagagaagtctcaccagacaccactggcggatacactcaaaggagaagccttttgtttgccaggagtgtaagcgaggctataccagtaagtcagacctcactgtgcatgaaagaatacacacaggagagaggccttatgaatgccaagagtgtggacgaaagtttagcaataagtcatactacagtaagcacttaaagagacacttacgtgagaagcgtttttgtacagggagtgtgggtgaggcttcatcttgaagttatatctcaccatccatcagaggacacactcaggagagtaactttgctttgttacaagctttagttgaggctgcataacttgttcgtgaagatataacagaggcagacagaatccagagggctacagagaacctgaattcaacccatgtgtccccaagagattcagagaaaagaggtcaatgtttagggaacagagatgccagttgaggggagggcattacctgggctattggggaaatgtggtctctttcctactgagcacatattcttgttgtatttgtgccaggctgtgctttctaaggactgctcttagccagtgactgcagagcagggataccaaggcaggcctgttacactctccccaacctccttggactgcaaacaatctaggacacctccaccaaacctcctcttgcactttccctctggcttccctcccagccttccttggtttggatgttttgtcccctccttaatttatgttgaaactctacataaactgtttactgttgaaacagtgtaagtattaggaggtgggacctttgggaagtgattaagtcaagtcacgaagatagagctttgcgaatgggatcaggtgcccttatgaaaaggcttgatagagggagtttgtcctgtggcccttctattttctgctctgtgaggacacaatgctcctcccttccaaaagatgcagcatgaaggcatcatcttggaaacagacatgagccctcaacagacaactgcacctactgatgttttgatgttgaacttcccagcctccagaactctgggaaaataaagtcctctttatacaaaaaaaaaaaaaaaaaaaaaaaaaaaaaaaaaaaaaaaaaaaaaaaaaaaaaaaaaaaaaaaaaaaa

SEQ ID NO: 3853 - protein, 751 aa, Homo sapiens
MGPQGARRQAFLAFGDVTVDFTQKEWRLLSPAQRALYREVTLENYSHLVSLGILHSKPELIRRLEQGEVPWGEERRRRPGPCAGIYAEHVLRPKNLGLAHQRQQQLQFSDQSFQSDTAEGQEKEKSTKPMAFSSPPLRHAVSSRRRNSVVEIESSQGQRENPTEIDKVLKGIENSRWGAFKCAERGQDFSRKMMVIIHKKAHSRQKLFTCRECHQGFRDESALLLHQNTHTGEKSYVCSVCGRGFSLKANLLRHQRTHSGEKPFLCKVCGRGYTSKSYLTVHERTHTGEKPYECQECGRRFNDKSSYNKHLKAHSGEKPFVCKECGRGYTNKSYFVVHKRIHSGEKPYRCQECGRGFSNKSHLITHQRTHSGEKPFACRQCKQSFSVKGSLLRHQRTHSGEKPFVCKDCERSFSQKSTLVYHQRTHSGEKPFVCRECGQGFIQKSTLVKHQITHSEEKPFVCKDCGRGFIQKSTFTLHQRTHSEEKPYGCRECGRRFRDKSSYNKHLRAHLGEKRFFCRDCGRGFTLKPNLTIHQRTHSGEKPFMCKQCEKSFSLKANLLRHQWTHSGERPFNCKDCGRGFILKSTLLFHQKTHSGEKPFICSECGQGFIWKSNLVKHQLAHSGKQPFVCKECGRGFNWKGNLLTHQRTHSGEKPFVCNVCGQGFSWKRSLTRHHWRIHSKEKPFVCQECKRGYTSKSDLTVHERIHTGERPYECQECGRKFSNKSYYSKHLKRHLREKRFCTGSVGEASS

SEQ ID NO: 3854 - DNA, 2786 bp, Homo sapiens
tgaaataggagccaaggtatgctatgagccaaggattatgagtaatccaattttgtgcactttaagccatttgaaaaacagaaaagcaaaacaacaaaataatttttaagaaattgaatatagggtgttatgctctgaatgtgtccccctaaaattaatcaccaatgtcataagattaggaagtagggctttaaggtagtgattcagtcatgaagggagagtgttcacgaatgagtttaggatccttacacaaggactggatggagtgggcttcccctgttttgcccttccaccttctgccatgtgaggacacagtgcatctcctcctgaagacacagtgcacaagataccatcttggatgcagagaccagaccctcaccagacaccaatcctgctggcaccttgatcttggacttctagcctatggaactgtaagattggggaagatgccaggtgatagaatccaccctgcctctgacagcatccaatctggagcaaaggcttatttcaaccctcccccaagctcccaatacaagcccaaattctggaacaggtcctttccaacacctccttcagagaagctccctggctccaggcagtgcttgctcccctcactgcagcaggaagcctaacttgcgaactgcaggtgtgttccaggtggtcactggatgcaaggcattgacagatggatcccatcgatacccccactgcaaaaccatagtgcagtgaatagaagacacttctctgcaccccaaaagctccatgctgattgtgagaaggaaatgctggatggaggggttcctggaactactgtgagggtttcttttgatttctcctgcttagaaatggtgagagaactttggatgtggaacgtggaggaggaggaacacgaagtggggatctccacttggggtggtcagcactgcgggtgcccagcaaagtcactgcctggtccacatcccggaggggtctctgcgcctcagtcggcatcgcagctgatggtgaaacttttggtgtggcagaagagtgtccacaaacttcggaagatcgctgctcagagtgaggaatggagttgtattttgaataaaatatccacgcatccttttgtgagcaaggagcatgatggtacttagacctaccatttctcgttatggtggttgcggttacagtggggctggggtgtttacctggagcctggacatccactgggacatgatacccactgggaattttttgtgtcaatctggtctctgatgtccacctggggattgggtatccacctaaggcctgatgtttacctggagccagatgtgcacctgagacctgatgtctatctgtggccttatgttcccctggggaccgatgcacacctgaaggataggtattcatctggggcctgatacccaccagtagtatgggtgtcaaccttggggctggtgttcagctggcgtccactgtctacttggggcctggtgtacacatggggcctgggcatccacctgagacttgatgtttaatatggtctggagttcttttggggcctgttgtaccctggagcctgggtgtacacctggagcctgatgtcccaggtgaacaactgggtcccaggtgatcttcaggccctaggtgaaaactccaggctctaggtggacaaccaggctccaggctgatgtttactggggccagatgtctaccaggccccaggtgaaatccccaggctccaaatggacaacatagccccaggttccaggtggacattggaatccagatcaacaccaggccccagatggacacccaggcctgtggtggacatcggactgcagaaggtcatctggctcgaggtggacatcgggccccaggtggatgcctggtccccaggtggatatcgggccccacttggacaccagtccctgggtggataccttggcctcgggtggatatccagtctctagctaagcatcaggctccagggggacccaggccctagctgactggggactagtgttcatatggggccacatgtccatctgggccctaggtgtcaacttgtagcctgatgtcaacctggaagctggtgttcaccagagaggactaaggtcctcctggtgcctggtgtccaacttgggactttgtgtccacctggagaccgatgtccacttgggaccggatgtccagctggagcaagatgtccacctgcagcctaaaacttcacctaaggcctgatgttccccagggcctacagagcctatgtatctacctagggacttgtgtccaggtggggcctgaattccacctggggcctggaattaacctgggacctgatgtccacctgagacgtgggtgttcctctggagtctgatatctatctggggcccgggtgtcctcctgtggtctgatgtccacttgtaggctggtgtccacctggggcctgggtgtccacctaggaacctgatgtatacctgaagtccagtgtctacgtgggtactgatgtctaccaggaaagtgatataaacctggggcctgatagccacctgggccctgagtgtccacatatgttctgatttctcttttggcctgagtgtagggcctgagtgccacctgcttcctgacgttcaccaggaacctaggtattcacttgggagccctgggggcctctgcccttttggccgcgttgtctcctggcttttagggtggtgggattctcggctctgattgcagcaggtggattcacttagctctcctccccttttagcattactgtcttctgtaataaacctctcactttg

SEQ ID NO: 3855 - protein, 154 aa, Homo sapiens
MQGIDRWIPSIPPLQNHSAVNRRHFSAPQKLHADCEKEMLDGGVPGTTVRVSFDFSCLEMVRELWMWNVEEEEHEVGISTWGGQHCGCPAKSLPGPHPGGVSAPQSASQLMVKLLVWQKSVHKLRKIAAQSEEWSCILNKISTHPFVSKEHDGT

SEQ ID NO: 3856 - DNA, 476 bp, Homo sapiens
gtttagatgttttcctagaaacatgattgtttattggcattgatctcacagtctggtgaggacttctttactgataatgtcaagttcaggttaccctcccaaccaaggagcattcagcacagaacaaagtcattatcctcctcactctgtaaagtatacgtttcccagcacccaccaccagcaggatccagcatttggaggcaaacatgaagctccatcctctccaattctggggcaaccgtgtggagatgatcaaaatgcttcaccttcaaaactttcaaaggaagagttaatagagtgtatggatcgtgtagatcgagaaattgcaaaagtagaacagcagatccttaaactgaaaaagaaacaagtaaaagtcttcgtctaatatattctaagaatgtatgtttttctccctacagaagatatttttgagttttccatattttgaaactttacataaaaggaatcattcctta

SEQ ID NO: 3857 - protein, 102 aa, Homo sapiens
MSSSGYPPNQGAFSTEQSHYPPHSVKYTFPSTHHQQDPAFGGKHEAPSSPILGQPCGDDQNASPSKLSKEELIECMDRVDREIAKVEQQILKLKKKQVKVFV

SEQ ID NO: 3858 - DNA, 1911 bp, Homo sapiens
atggtagcgctgcataaggggaggatcccgccggcagggcccagcgtcctagcgggttgggacgcggctgacagcgagcgatggctgcgcgcagcgttccgtccggcgagtgacccccctccgccgcgagtcagctctccgcccgctcccttgccgagtcgcgaccggtgcggacgacggcgtttgcgtggcacgtggtcgggccgcctggccctgggaaagcgtcccacggtgggggcgcgccggtctcccggagcgggaccgggtcggaggatggacgagaatcacgagcgatgtggccctggcgttgagtttgtggctgtggtcgcttcggggccccggtggcgggaccaggggctcgtgaggcaggtcttggtgggtgccgagggccttccggcgtcccaggcggggcgccgcgggaccgccctcgtgtctgtggcggtgggatcccgcggccgtgttttcctggtggcccggccatgcctgaggtttctccctcagccgcccctctgcgggctcccaggtgcccttgccctcgcggtccccggcccttgcctgtctgcgcccccttccccgcccgccgcccgccgatcctctctcctccccgagcggctcaccggctttacgtcggttggtggccgcgtctgggaccgaaccgggcaccgccttgtggaaaaaaaagaatagaatataccctgttaaatcagacatgatacttgcttttgtggagcttatgctttagtgcagaaacagaaagtcaagcaaaaactcaaactatgtaactttaaattggatatgtgctaatgaaggaaaatgtggcactgtaagaaaaaataatagggagttaaaggataaataggagtttgctggatgaaatttatgaagagctgaagatttcaaacaaaagaaactgatgcaggagggtgcagctttggagtcaagaatgaagttctaggagatagagagcaaagaaatggtgggagaggaggtcaaacaagacaaatctctcctctgccttctccttatcagactactcaacatgaaggcaataagaatgaagacctctatgtataataattgacttccacttaataaataaggttacttggtacactggtcgacaaaaccttgaaatgttgatgtttaagggctgttgattgctggcagcaaagaagtccaactgtgctggtacccgagatagcgtctccacattttcttccaggatcatcacctttgttctaaatagctcccacatagtgtgaacagaagtcatatgttttagattttctgccttggcacccaggaaaccagtatgattgagtaaacatattaaacttcctctgcatttccagcctgaacagatgttgagtacaagctgatccacctacgttcaacctgagagagtccacatccacagactgtttcatttccctttttcaatttacatagaagcatagattcttgctggcatatacaaatgcgccatttaaggcaatcaaaaatggttccacatctcatctgatttccacaattgttgctgtaacgatggactactgaggagagagacaatttctctggcacatcttcccacattttagcaacatgttcatggagagccaatattcagtaattacagcccaattcctcacaatttcacaattcgctaacaatatgcattttcacaatgtaaagctgattttcctttaaccaaatcaaacatgaaaagatagctgcatgcaatgggcaatctagatcattagaagattgatgtaaaattagaggacactgagactggaatagattgcaaacttcagggagctcagaaaacttgtaaactctacattttgaggaaatatgttgtcgatgcttttgcaactctatgcagtaacttaacaaataaagccttaaagt

SEQ ID NO: 3859 - protein, 228 aa, Homo sapiens [sequence omitted]

SEQ ID NO: 3860 - DNA, 898 bp, Homo sapiens
ggggattcaccgtttgggtgaagacggaggcgggttctggacagacgtaggctgtcagggagtgtttacttcgcctccacttctgttcctccctgccctggtgctgctccaggtcacatactcgtcctgagccggcttcagcctgtccgcgcagaagtctcccggagccatggcctagtactcttatgtgaagtctagcaagctcgtgctcaagggaaccgaggtgaagagctgggtcctgcagctctggtgggagcctcctcagttcttttcggatgcactccacccccgcgaatccggtggaagccgtggtgcagagagccggctttgtggcctcccaggcttcgctccgaccctggaaacaggatagacgggcgggtgacccgtggccccgtacccacgagtttgggtaccctgaggcatctctccaggcctctgcctgtaagaagaaaaagagcaaagataagaagagaaaaagagaagatgaagaaacccagcttgatacgttggaatctggtgaacagtaacaaactttggtgaaatttcaggaaccatagccattgaaatggatgagggaacctatatacatgcactcgacaatggtctttttaccctgggagctccacacaaagaagaatcgccctgaaatctggctatggaaaatatcttggtataaattcagatgaacttgttgggcattcagatgcaattggaccaagagaacaatgggaaccagtctttcaaaatgggaaaatggctttgttggcctcaaatagctgctttattagatgcaatgaagcaggggacatagaagcaaaaagtaaaacagcaggagaagaagaaatgatcaagattagatcctgtgcggaaaaaaaaaaaaaaaaaaaaaaaaaaaaaa

SEQ ID NO: 3861 - protein, 83 aa, Homo sapiens
MHSTPANPVEAVVQRAGFVASQASLRPWKQDRRAGDPWPRTHEFGYPEASLQASACKKKKSKDKKRKREDEETQLDTLESGEQ

SEQ ID NO: 3862 - DNA, 2982 bp, Homo sapiens
gcgtacaaaaccggagcctcgggccgggctgcgtgagggaggagggttcatcatgcctagtggcgtataagaagaccccgccaccggtccctccacgcaccacttcaaagccgttcatctcagtcacagtccagagcagtactgagtctgcccaggacacctacctggacagccaggaccacaagagcgaggtgactagccagtcgggcctgagcaactcgtcggacagcctggacagcagtacccgaccgcccagcgtgacacggggtggagtcgccccagcccctgaggccccagagccacccccaaaacatgcagctctgaaaagtgaacaagggacgctgaccagctctgagtcccaccccgaggccgcccccaaaaggaaactgtcatcgataggaatacaagttgactgcattcagccagtgccaaaagaggagcccagtcccgctaccaaattccagtccatcggggttcaggtagaggacgactggcgaagcagcgtcccctctcacagtatgtcctcccgacgggacacagactcggatacccaggatgccaatgactcaagctgtaagtcatctgagaggagcctcccggactgtacccctcaccccaactccatcagcatcgatgccggtccccggcaggcccccaagattgcccagatcaagcgcaacctctcctatggagacaacagcgaccctgccctagaggcgtcctcgctgcccccacccgacccctggctcgagacctcctccagctccccagcagagccggcacagccaggggcctgccgccgagacggctactggttcctaaagctactgcaggcagaaacagagcggctggaaggctggtgctgccagatggacaaggagaccaaagagaacaacctctctgaagaagtcttaggaaaagtcctcagtgctgtgggcagtgcccagctactgatgtcccagaaattccagcagttccggggcctctgtgagcaaaacttgaaccctgatgccaacccacgccccacagcccaggacctggcagggttctgggacctgctacagctgtccatcgaggatatcagcatgaagttcgatgaactctaccacctcaaggccaacagctggcagctggtggagacccccgagaagaggaaggaagagaagaaaccaccccctccggtcccaaagaagccagccaaatccaagccggcagtgagccgcgacaaggcctcagacgccagcgacaagcagcgccaggaggcccgcaagagactcctggcggccaagcgggcagcttctgtgcggcagaactcagccaccgagagcgcagacagcatcgagatttatgtcccggaggcccagaccaggctctgagaccatgcaggaggaaagaaacgattttaaatcattaaaaacacaaaaactaagtgcgaacggaacagagttttctcaacctttgctatggttattctgtctagagaccctgagccaactttcaaattgacgcatacaagggctcacaatttggcttttttgggtccctcccagctttaggttatgaagattttactcacaaaaaaaatcaacaaaaatcacgaaactagaaaactttttttttcctcttgctggccgtggtggactagatagatggacgtcggcaactcccggcccagcctccatactgcggtctttttactcgttctatctgatgagaactcacactagcttgtttacaagatgacgacagtccaagggcagccttgggcacctgccatgtccctcctttccccagctatccccgctctgaccttgattttcattcttatgtttttctcttttcccttcagagctcacacagtggtcaccattgtggcaagcggctttctgggtctcagccctctctgcggttgagggcccagaggacagagagatggacatgcgtcccctccctccccccgccaagtgctcacacacaacctcacgcgcacacacacacacgcagatggaggcgcctcactgggaggtgccccgccagccctgggcagtgtcaggcaggactcactcaccgctgagcagatgagggaagttttagtcttggcgggtggaaatgagacgaagccacagttatcacactccagactcctgcccttttattttctccagccccttcttccttcagcaaaatctaggactcccgagtggcttccagggggccgtcagtcctcagccgcgcctgtgtccggtgcccgaggggcgggcggcggtgtctgtatgtatgtgtacatatgcacatagaccttagagtgtatagttaacaaacgcccatctgctcacccatgcccacccagcgccgccgccgctggctctcggggcacctggcaggaggcgggtgtgtgaatagcatatatttttacatgtactatatctaggtgtgtgtacaagtgtgtgtaaaaatatataccttgtgtgtaagcagccctttttttttttggtctccacccccctccccccgccccgcactcctaagggcccatctgcccagcctctgagttttctgttctattttttttttaaccccaattatccttctctctctcctgcccccgcatcccactcccagggtgtcacgagccctgagctgcaatggcccgggcctgcagggcggggtaggggagggcaggggctgagccccgaagccagctcagtacctgaggggctgctctatgctgtgtatgcgcctctctggcatccgagacatcctcttggctggcgcttgctgcagggggggacccccccccgtccccaggtgaaccaagggtctgctccggggcccatttccagcttggccgccgtctgtgaccttgggcaagtcacttgacctctgtgtgcctcaacttcctcctctgtaaaacggggacagtccctgcccctccctacctcacaggcatgttgtgagaataaatgaggtaacgtgtaccaa

SEQ ID NO: 3863 - protein, 285 aa, Homo sapiens
MSSRRDTDSDTQDANDSSCKSSERSLPDCTPHPNSISIDAGPRQAPKIAQIKRNLSYGDNSDPALEASSLPPPDPWLETSSSSPAEPAQPGACRRDGYWFLKLLQAETERLEGWCCQMDKETKENNLSEEVLGKVLSAVGSAQLLMSQKFQQFRGLCEQNLNPDANPRPTAQDLAGFWDLLQLSIEDISMKFDELYHLKANSWQLVETPEKRKEEKKPPPPVPKKPAKSKPAVSRDKASDASDKQRQEARKRLLAAKRAASVRQNSATESADSIEIYVPEAQTRL

SEQ ID NO: 3864 - DNA, 5011 bp, Homo sapiens
ggggcgcccgcgggccggagccggggcgggggccggggcctaggcgcgcggacctgcgagcggacccgagaggcggcggcggcgcagcggaacggcagagcgggccggaggcggccgaggcgcccggcgcaggcacccgtgcctcccctctgccaggaaccttggggccttgtgtgtgaccaggacctggtggcccccgggcggtggcagagcccctgtcccaagctgcttcctgccggcacctctgatcaagtgcctagagggatgtgtgtgccagccctcggtccagtgcccgctcctgagctgactcctgctgggccccgacagcttgccgtgtttcctgtgcctgtagctccctggttggatagctgccgcccgggagaggtgacccgggcgccctgctagggtgaaggcccctgccctcggcccgggatcatgaaaggcctcggtgacagccgcccccgccacctctccgacagcctagacccaccccacgagcccctgtttgcagggaccgaccgcaacccctacctgctgtcgcccacggaggccttcgcccgcgaggcccgcttccccgggcagaacaccctgccaggagatggcctctttcccctcaacaaccagctgcccccgcccagcagcacctttccccgcatccactacaactcccacttcgaggtgccagaggagagccccttccccagccatgcccaagccaccaagatcaaccggctgcccgccaacctcctggaccagtttgagaagcagctgcccatccaccgtgatggcttcagcaccctccaatttccccgtggcgaggccaaggcccgtggtgagagccctggccgcatccgccacctggtccactcagtccagcggcttttcttcaccaaggcaccctcactggagggcacagcgggcaaggtcggtggcaatggcagcaagaagggtggcatggaggacggcaagggccggagggccaaaagcaaggagcgggccaaggctggggagcccaaacggcgcagccgctccaacatctcaggctggtggagctccgatgacaacttggacggcgaggccggcgccttccgcagcagtggcccagcctctgggctgatgacactaggccgccaggcagaacgcagccagccacgctacttcatgcacgcctacaacaccatcagtgggcacatgctcaaaaccaccaagaacaacactactgagctgactgccccaccacccccgcccgcacccccagccacctgccccagccttggggtgggcactgacaccaactacgtcaaacggggctcctggtccactctgaccctcagccacgcccacgaggtctgccagaagacctcagccaccttggataagagcctgctcaagtccaaatcctgccaccagggtctagcctaccattacctgcaggtgcccggcggcggcggcgagtggagcaccacgctgctgtccccacgcgagacggatgccgcggccgagggccctatcccgtgccggcgcatgcgcagcggcagctacatcaaggccatgggcgacgaggacagcgacgagtccggcggcagccccaagccctcacccaagaccgcggcgcggcgccagagctatctgagggccacgcagcagtcgctgggagagcagagcaacccccgcaggagtctggaccgcctggattcagtggacatgctgctgccctccaagtgtccgagctgggaagaggactacacccccgtcagcgacagcctcaacgactccagctgcatcagccagatttttggacaggcctccctgatcccccagttgtttggccatgagcagcaggtacgggaggcagagctgagtgaccagtatgaggcggcctgcgagtcagcctgcagtgaagcggagtccacagcggcagagacgcttgacttgccactgcccagctacttccgctcccgcagccacagctacctgcgtgccatccaggcaggctgctcgcaggaggaggacagtgtctccctgcagtccctctccccaccgcccagtaccggcagcctcagcaatagtcgcacgcttccgagttcatcatgcctagtggcgtataagaagaccccgccaccggtccctccacgcaccacttcaaagccgttcatctcagtcacagtccagagcagtactgagtctgcccaggacacctacctggacagccaggaccacaagagcgaggtgactagccagtcgggcctgagcaactcgtcggacagcctggacagcagtacccgaccgcccagcgtgacacggggtggagtcgccccagcccctgaggccccagagccacccccaaaacatgcagctctgaaaagtgaacaagggacgctgaccagctctgagtcccaccccgaggccgcccccaaaaggaaactgtcatcgataggaatacaagagaggactagaaggaacggttcccacctctcggaggacaacggacccaaagcgatcgatgtgatggcaccctcctcagaaagcagcgtcccctctcacagtatgtcctcccgacgggacacagactcggatacccaggatgccaatgactcaagctgtaagtcatctgagaggagcctcccggactgtacccctcaccccaactccatcagcatcgatgccggtccccggcaggcccccaagattgcccagatcaagcgcaacctctcctatggagacaacagcgaccctgccctagaggcgtcctcgctgcccccacccgacccctggctcgagacctcctccagctccccagcagagccggcacagccaggggcctgccgccgagacggctactggttcctaaagctactgcaggcagaaacagagcggctggaaggctggtgctgccagatggacaaggagaccaaagagaacaacctctctgaagaagtcttaggaaaagtcctcagtgctgtgggcagtgcccagctactgatgtcccagaaattccagcagttccggggcctctgtgagcaaaacttgaaccctgatgccaacccacgccccacagcccaggacctggcagggttctgggacctgctacagctgtccatcgaggatatcagcatgaagttcgatgaactctaccacctcaaggccaacagctggcagctggtggagacccccgagaagaggaaggaagagaagaaaccaccccctccggtcccaaagaagccagccaaatccaagccggcagtgagccgcgacaaggcctcagacgccagcgacaagcagcgccaggaggcccgcaagagactcctggcggccaagcgggcagcttctgtgcggcagaactcagccaccgagagcgcagacagcatcgagatttatgtcccggaggcccagaccaggctctgagaccatgcaggaggaaagaaacgattttaaatcattaaaaacacaaaaactaagtgcgaacggaacagagttttctcaacctttgctatggttattctgtctagagaccctgagccaactttcaaattgacgcatacaagggctcacaatttggcttttttgggtccctcccagctttaggttatgaagattttactcacaaaaaaaatcaacaaaaatcacgaaactagaaaactttttttttcctcttgctggccgtggtggactagatagatggacgtcggcaactcccggcccagcctccatactgcggtctttttactcgttctatctgatgagaactcacactagcttgtttacaagatgacgacagtccaagggcagccttgggcacctgccatgtccctcctttccccagctatccccgctctgaccttgattttcattcttatgtttttctcttttcccttcagagctcacacagtggtcaccattgtggcaagcggctttctgggtctcagccctctctgcggttgagggcccagaggacagagagatggacatgcgtcccctccctccccccgccaagtgctcacacacaacctcacgcgcacacacacacacgcagatggaggcgcctcactgggaggtgccccgccagccctgggcagtgtcaggcaggactcactcaccgctgagcagatgagggaagttttagtcttggcgggtggaaatgagacgaagccacagttatcacactccagactcctgcccttttattttctccagccccttcttccttcagcaaaatctaggactcccgagtggcttccagggggccgtcagtcctcagccgcgcctgtgtccggtgcccgaggggcgggcggcggtgtctgtatgtatgtgtacatatgcacatagaccttagagtgtatagttaacaaacgcccatctgctcacccatgcccacccagcgccgccgccgctggctctcggggcacctggcaggaggcgggtgtgtgaatagcatatatttttacatgtactatatctaggtgtgtgtacaagtgtgtgtaaaaatatataccttgtgtgtaagcagccctttttttttttggtctccacccccctccccccgccccgcactcctaagggcccatctgcccagcctctgagttttctgttctattttttttttaaccccaattatccttctctctctcctgcccccgcatcccactcccagggtgtcacgagccctgagctgcaatggcccgggcctgcagggcggggtaggggagggcaggggctgagccccgaagccagctcagtacctgaggggctgctctatgctgtgtatgcgcctctctggcatccgagacatcctcttggctggcgcttgctgcagggggggacccccccccgtccccaggtgaaccaagggtctgctccggggcccatttccagcttggccgccgtctgtgaccttgggcaagtcacttgacctctgtgtgcctcaacttcctcctctgtaaaacggggacagtccctgcccctccctacctcacaggcatgttgtgagaataaatgaggtaacgtgtaccaa

SEQ ID NO: 3865 - protein, 989 aa, Homo sapiens
MKGLGDSRPRHLSDSLDPPHEPLFAGTDRNPYLLSPTEAFAREARFPGQNTLPGDGLFPLNNQLPPPSSTFPRIHYNSHFEVPEESPFPSHAQATKINRLPANLLDQFEKQLPIHRDGFSTLQFPRGEAKARGESPGRIRHLVHSVQRLFFTKAPSLEGTAGKVGGNGSKKGGMEDGKGRRAKSKERAKAGEPKRRSRSNISGWWSSDDNLDGEAGAFRSSGPASGLMTLGRQAERSQPRYFMHAYNTISGHMLKTTKNNTTELTAPPPPPAPPATCPSLGVGTDTNYVKRGSWSTLTLSHAHEVCQKTSATLDKSLLKSKSCHQGLAYHYLQVPGGGGEWSTTLLSPRETDAAAEGPIPCRRMRSGSYIKAMGDEDSDESGGSPKPSPKTAARRQSYLRATQQSLGEQSNPRRSLDRLDSVDMLLPSKCPSWEEDYTPVSDSLNDSSCISQIFGQASLIPQLFGHEQQVREAELSDQYEAACESACSEAESTAAETLDLPLPSYFRSRSHSYLRAIQAGCSQEEDSVSLQSLSPPPSTGSLSNSRTLPSSSCLVAYKKTPPPVPPRTTSKPFISVTVQSSTESAQDTYLDSQDHKSEVTSQSGLSNSSDSLDSSTRPPSVTRGGVAPAPEAPEPPPKHAALKSEQGTLTSSESHPEAAPKRKLSSIGIQERTRRNGSHLSEDNGPKAIDVMAPSSESSVPSHSMSSRRDTDSDTQDANDSSCKSSERSLPDCTPHPNSISIDAGPRQAPKIAQIKRNLSYGDNSDPALEASSLPPPDPWLETSSSSPAEPAQPGACRRDGYWFLKLLQAETERLEGWCCQMDKETKENNLSEEVLGKVLSAVGSAQLLMSQKFQQFRGLCEQNLNPDANPRPTAQDLAGFWDLLQLSIEDISMKFDELYHLKANSWQLVETPEKRKEEKKPPPPVPKKPAKSKPAVSRDKASDASDKQRQEARKRLLAAKRAASVRQNSATESADSIEIYVPEAQTRL

SEQ ID NO: 3866 - DNA, 3798 bp, Homo sapiens
gtccgtccgtccgcccgcccgcccgcccgcccgcgcttccgtcctgtccagccgccagtcctccagcccgtgtccccgctccgcccgctttgtctctccccggctcgctgtctctttgtctctgccctcgcgctcctccgcagcccctccctcgctccccatctcgggtccccttctcagagcgctcttcagccctcagagccgccctttctgggcgaccccactcttcgggactccccctcagagcgcccccagatcttttggggttccccttgagaacaccttccactctccccaagggctccccgtgagtttcttgcacatcctttgggggttctgcaccccaagtcgctggggtctcgcctcctctgaacccccattgcccctgggctttccctcttctgggtgttccccatatccactgggagctcctaggtcccaagttggggtctttctccttgggaccccccaatatgtcctcagctccctgacttcaggagctcctctctgctttcccctggtttgtcccctgtcgctgtctctccttgttctctctcaggtctccgagcacccccacttctcgggatcggggtcccctgctttgctctccctgcccctctgtgcccccacatctgtctcggtggtctcgccactctgtgcctcttgcgctgaaggcccccctttgagcctgcttctttgcctggggcccttggcccccccttgctttttcagccctagccccctgtctccccttctctctgctccttgtctccctctccctttttctgtctttgccgggtctctgggtctctgacccccatccggccctcatggctttgtgtctggagctcttgaagcaatgttcatcatgcctagtggcgtataagaagaccccgccaccggtccctccacgcaccacttcaaagccgttcatctcagtcacagtccagagcagtactgagtctgcccaggacacctacctggacagccaggaccacaagagcgaggtgactagccagtcgggcctgagcaactcgtcggacagcctggacagcagtacccgaccgcccagcgtgacacggggtggagtcgccccagcccctgaggccccagagccacccccaaaacatgcagctctgaaaagtgaacaagggacgctgaccagctctgagtcccaccccgaggccgcccccaaaaggaaactgtcatcgataggaatacaagttgactgcattcagccagtgccaaaagaggagcccagtcccgctaccaaattccagtccatcggggttcaggtagaggacgactggcgaagcagcgtcccctctcacagtatgtcctcccgacgggacacagactcggatacccaggatgccaatgactcaagctgtaagtcatctgagaggagcctcccggactgtacccctcaccccaactccatcagcatcgatgccggtccccggcaggcccccaagattgcccagatcaagcgcaacctctcctatggagacaacagcgaccctgccctagaggcgtcctcgctgcccccacccgacccctggctcgagacctcctccagctccccagcagagccggcacagccaggggcctgccgccgagacggctactggttcctaaagctactgcaggcagaaacagagcggctggaaggctggtgctgccagatggacaaggagaccaaagagaacaacctctctgaagaagtcttaggaaaagtcctcagtgctgtgggcagtgcccagctactgatgtcccagaaattccagcagttccggggcctctgtgagcaaaacttgaaccctgatgccaacccacgccccacagcccaggacctggcagggttctgggacctgctacagctgtccatcgaggatatcagcatgaagttcgatgaactctaccacctcaaggccaacagctggcagctggtggagacccccgagaagaggaaggaagagaagaaaccaccccctccggtcccaaagaagccagccaaatccaagccggcagtgagccgcgacaaggcctcagacgccagcgacaagcagcgccaggaggcccgcaagagactcctggcggccaagcgggcagcttctgtgcggcagaactcagccaccgagagcgcagacagcatcgagatttatgtcccggaggcccagaccaggctctgagaccatgcaggaggaaagaaacgattttaaatcattaaaaacacaaaaactaagtgcgaacggaacagagttttctcaacctttgctatggttattctgtctagagaccctgagccaactttcaaattgacgcatacaagggctcacaatttggcttttttgggtccctcccagctttaggttatgaagattttactcacaaaaaaaatcaacaaaaatcacgaaactagaaaactttttttttcctcttgctggccgtggtggactagatagatggacgtcggcaactcccggcccagcctccatactgcggtctttttactcgttctatctgatgagaactcacactagcttgtttacaagatgacgacagtccaagggcagccttgggcacctgccatgtccctcctttccccagctatccccgctctgaccttgattttcattcttatgtttttctcttttcccttcagagctcacacagtggtcaccattgtggcaagcggctttctgggtctcagccctctctgcggttgagggcccagaggacagagagatggacatgcgtcccctccctccccccgccaagtgctcacacacaacctcacgcgcacacacacacacgcagatggaggcgcctcactgggaggtgccccgccagccctgggcagtgtcaggcaggactcactcaccgctgagcagatgagggaagttttagtcttggcgggtggaaatgagacgaagccacagttatcacactccagactcctgcccttttattttctccagccccttcttccttcagcaaaatctaggactcccgagtggcttccagggggccgtcagtcctcagccgcgcctgtgtccggtgcccgaggggcgggcggcggtgtctgtatgtatgtgtacatatgcacatagaccttagagtgtatagttaacaaacgcccatctgctcacccatgcccacccagcgccgccgccgctggctctcggggcacctggcaggaggcgggtgtgtgaatagcatatatttttacatgtactatatctaggtgtgtgtacaagtgtgtgtaaaaatatataccttgtgtgtaagcagccctttttttttttggtctccacccccctccccccgccccgcactcctaagggcccatctgcccagcctctgagttttctgttctattttttttttaaccccaattatccttctctctctcctgcccccgcatcccactcccagggtgtcacgagccctgagctgcaatggcccgggcctgcagggcggggtaggggagggcaggggctgagccccgaagccagctcagtacctgaggggctgctctatgctgtgtatgcgcctctctggcatccgagacatcctcttggctggcgcttgctgcagggggggacccccccccgtccccaggtgaaccaagggtctgctccggggcccatttccagcttggccgccgtctgtgaccttgggcaagtcacttgacctctgtgtgcctcaacttcctcctctgtaaaacggggacagtccctgcccctccctacctcacaggcatgttgtgagaataaatgaggtaacgtgtaccaa

SEQ ID NO: 3867 - protein, 453 aa, Homo sapiens
MALCLELLKQCSSCLVAYKKTPPPVPPRTTSKPFISVTVQSSTESAQDTYLDSQDHKSEVTSQSGLSNSSDSLDSSTRPPSVTRGGVAPAPEAPEPPPKHAALKSEQGTLTSSESHPEAAPKRKLSSIGIQVDCIQPVPKEEPSPATKFQSIGVQVEDDWRSSVPSHSMSSRRDTDSDTQDANDSSCKSSERSLPDCTPHPNSISIDAGPRQAPKIAQIKRNLSYGDNSDPALEASSLPPPDPWLETSSSSPAEPAQPGACRRDGYWFLKLLQAETERLEGWCCQMDKETKENNLSEEVLGKVLSAVGSAQLLMSQKFQQFRGLCEQNLNPDANPRPTAQDLAGFWDLLQLSIEDISMKFDELYHLKANSWQLVETPEKRKEEKKPPPPVPKKPAKSKPAVSRDKASDASDKQRQEARKRLLAAKRAASVRQNSATESADSIEIYVPEAQTRL

SEQ ID NO: 3868 - DNA, 1212 bp, Homo sapiens
ggagtccagacccgacggccggcccagttccacgcacccagcgagcccaagcgccttctccgcaccagggaagccccacccaccagaagccaagatgtccagcaagcgggccaaagccaagaccaccaagaagcggccacagcgggccacatccaatgtcttcgcaatgtttgaccagtcccagatccaggagtttaaggaggctttcaacatgattgaccagaaccgtgatggcttcattgacaaggaggacctgcacgacatgctggcctcgctggggaagaaccccacagacgaatacctggagggcatgatgagcgaggccccggggcccatcaacttcaccatgttcctcaccatgtttggggagaagctgaacggcacggaccccgaggatgtgattcgcaacgcctttgcctgcttcgacgaggaagcctcaggtttcatccatgaggaccacctccgggagctgctcaccaccatgggtgaccgcttcacagatgaggaagtggacgagatgtaccgggaggcacccattgataagaaaggcaacttcaactacgtggagttcacccgcatcctcaaacatggcgccaaggataaagacgactaggccaccccagccccctgacaccccagcccccgccagtcacccctccccgcacacacccgtccataccagctccctgcccatgaccctcgctcagggatccccctttgaggggttagggtcccagttcccagtggaagaaacaggccaggagaagtgcgtgccgagctgaggcagatgttcccacagtgaccccagagccctgggctatagtctctgacccctccaaggaaagaccaccttctggggacatgggctggagggcaggacctagaggcaccaagggaaggccccattccggggctgttccccgaggaggaagggaaggggctctgtgtgccccccaggaggaagaggccctgagtcctgggatcagacaccccttcacgtgtatccccacacaaatgcaagctcaccaaggtcccctctcagtccccttccctacaccctgaccggccactgccgcacacccacccagagcacgccacccgccatgggagtgtgctcaggagtcgcgggcagcgtggacatctgtcccagagggggcagaatctccaatagaggactgagcactgctaaaaaaaaaaaaaaaaaaaaaaaaa

SEQ ID NO: 3869 - protein, 172 aa, Homo sapiens
MSSKRAKAKTTKKRPQRATSNVFAMFDQSQIQEFKEAFNMIDQNRDGFIDKEDLHDMLASLGKNPTDEYLEGMMSEAPGPINFTMFLTMFGEKLNGTDPEDVIRNAFACFDEEASGFIHEDHLRELLTTMGDRFTDEEVDEMYREAPIDKKGNFNYVEFTRILKHGAKDKDD

SEQ ID NO: 3870 - DNA, 1044 bp, Homo sapiens
ggagtccagacccgacggccggcccagttccacgcacccagcgagcccaagcgccttctccgcaccagggaagccccacccaccagaagccaagatgtccagcaagcgggccaaagccaagaccaccaagaagcggccacagcgggccacatccaatgtcttcgcaatgtttgaccagtcccagatccaggagtttaaggaggctttcaacatgattgaccagaaccgtgatggcttcattgacaaggaggacctgcacgacatgctggcctcgctgggtttcatccatgaggaccacctccgggagctgctcaccaccatgggtgaccgcttcacagatgaggaagtggacgagatgtaccgggaggcacccattgataagaaaggcaacttcaactacgtggagttcacccgcatcctcaaacatggcgccaaggataaagacgactaggccaccccagccccctgacaccccagcccccgccagtcacccctccccgcacacacccgtccataccagctccctgcccatgaccctcgctcagggatccccctttgaggggttagggtcccagttcccagtggaagaaacaggccaggagaagtgcgtgccgagctgaggcagatgttcccacagtgaccccagagccctgggctatagtctctgacccctccaaggaaagaccaccttctggggacatgggctggagggcaggacctagaggcaccaagggaaggccccattccggggctgttccccgaggaggaagggaaggggctctgtgtgccccccaggaggaagaggccctgagtcctgggatcagacaccccttcacgtgtatccccacacaaatgcaagctcaccaaggtcccctctcagtccccttccctacaccctgaccggccactgccgcacacccacccagagcacgccacccgccatgggagtgtgctcaggagtcgcgggcagcgtggacatctgtcccagagggggcagaatctccaatagaggactgagcactgctaaaaaaaaaaaaaaaaaaa

SEQ ID NO: 3871 - protein, 118 aa, Homo sapiens
MSSKRAKAKTTKKRPQRATSNVFAMFDQSQIQEFKEAFNMIDQNRDGFIDKEDLHDMLASLGFIHEDHLRELLTTMGDRFTDEEVDEMYREAPIDKKGNFNYVEFTRILKHGAKDKDD

SEQ ID NO: 3872 - DNA, 3425 bp, Homo sapiens
gcgagctgtcaggccgagtgtcaggccgggcaggtacgcggcgcgcgcccccggcgccccccgctccccgccgggacgccccgcgccgagccggaggccgcgtggacccgaaagccgctgggaaaagtttacccaaggtccagcctagcccctaggcaccatgtcggacagtgatctaggtgaggacgaaggcctcctctccctggcgggcaaaaggaagcgcagggggaacctgcccaaggagtcggtgaagatcctccgggactggctgtacttgcaccgctacaacgcctacccctcagagcaggagaagctgagcctttctggacagaccaacctgtcagtgctgcaaatatgtaactggttcatcaatgcccggcggcggcttctcccagacatgcttcggaaggatggcaaagaccctaatcagtttaccatttcccgccgcgggggtaaggcctcagatgtggccctcccccgtggcagcagcccctcagtgctggctgtgtctgtcccagcccccaccaatgtgctctccctgtctgtgtgctccatgccgcttcactcaggccagggggaaaagccagcagcccctttcccacgtggggagctggagtctcccaagcccctggtgacccctggtagcacacttactctgctgaccagggctgaggctggaagccccacaggtggactcttcaacacgccaccacccacacccccagagcaggacaaagaggacttcagcagcttccagctgctggtggaggtggcgctacagagggctgctgagatggagcttcagaagcagcaggacccatcactcccattactgcacactcccatccctttagtctctgaaaatccccagtaggcatctgccaagaagggtgctgaaggctccagccagctgtcctgggtttccgttttggttccctttcatacagagggttttctatggatcactgccaaacattgggatcatctcctctgtccagaggtcttcaacaggaagatgccagctggcaccactgcactgtgatgggggccctctcctctgctgactctgccgtttctccaggcctccgctcagtgatgagaccaagagatcggagacaagcatggtgctgctgcttctgctgcttctccagaaaatccctgggacacctttgttccagcctggtttcctgggctgggctcaggaaagctgccaaattcagtcctatgttgggtccaagctgcccctgtgctgtttctgtcaagccaggtgtggacattccaagttcatatgcgtgaacaaaagaaaagaggaacccagtggatgtaacagaaccgactccagttgaatgtttagatttttgctaaactgttttctttttcccttttttgctgtggtttgcattcacggcagtagttagcccaggtgtggggaacgagagtgcactgcatgatagcgttctggtgagctgggaaggacccaccactgccactgaggattgttttggaagaaaggaatatttttatcttggggaccagctaagtctctgcagtagtgtgaaattccaaatggttgttttatcattggtttggtttaccaaaaaaaaggcagggaaaaaaaaaaaaaacaaccgtatgagcgcattggcttgtctgccgcaggcacagaagggtagaaagccacagcagggggcagtccagcagactctgactcaactttctaggcacctagcagagaaagataagatcaaaaggtgtttggtttttcttttaatttttattgtagtttttttgggtgggtgggggaagtaaactagactgaagcgatggattttttttttcttttttttctttagtgtttttccctttgttcttgaacacttttgccctgcagcctcagttttgaattcttttagcaacttggattagaggggcccatatgtcagaagctcccagcacctcctacttgggagaaaagtgagccatctgctggtcaggaagtcctccagagaggcagcttttcccacaatggtggcaggaaactttggggaaagcaggaatggtgtccactgctgcggaggaactgccttcagagaaggtggggctggaaaagggttagaagcctcctagctgggattgtctttgtttcacctttctttaaattagaattacagaagcccctgcccagtgaacagataacaattggtcttatgctcctccctttcccccattttttcttttgctgttttgttttttgttttttgtttgtttgtttgtttttttgagacagagtcatgctctgtcacccgggctggagtgcagtggtgcgatctcagctcactgtaacctccgcctcccgggttcaagcaattatttgcctcagcctcccgagtagctgggattataggcacccgccaccatgtctggcttttagtagagacggggtttcaccatcttggccaggctggtcttggaactcctgacctcgtgagccaccacgcccagcctcttttgctgtttcattgctgacagtgttcaacaatatgccccatctttatatatcctaagaaacactaatcctaggttattgctagccaaaatatttttgtcctgagtagtgtcactgggccaaaagatagatcaggacgacagcctttagttttcctgaaatcaccaggtcaggcacaaggagaaaaggttcctggatactgactaacttgggtgggtctagccaggagaaagacagtaacatgtgttctgtactttctgggaagatccctgaagccatcacagaggctccccaacttctgagtcgcccatctgttgctgtgggagtgtgaacggatcgctgaaggagagggagctttgctctctctaggtgggcaagtttcctgggctctctgtgttgcctccctctggcttcttcctcccgtgccctctccccgtgtgccccagggggatcagggatcctcaccctcctgaggcccagtggggaagaatgaacatggcttcatccaggttaactgatgctgccatttgcccagcctcttccatcccagccctgtcagtgagcccaggtctggtgcaactgctgcaggatgcctgtagtagggaactctggaagtgtattgggctgaggtgggattttccctccccacagtgcactgagcaatggagggtggtgagggagccatgctgctgaattctggttggcatttccccattatgtaaaatggggtgttgggtagggcagactctgcttgggtttggttgtaagataaacctggaggagaagcacagttgtcccattgaattatttgagcaaaaactactgtaaataacttttttgtcttttgtcaaataaaatttttttttgtttttttaagcagaaaaaaaaaaaaaaaaaaaaaaaaaaaaaaaaaaaaaaa

SEQ ID NO: 3873 - protein, 237 aa, Homo sapiens
MSDSDLGEDEGLLSLAGKRKRRGNLPKESVKILRDWLYLHRYNAYPSEQEKLSLSGQTNLSVLQICNWFINARRRLLPDMLRKDGKDPNQFTISRRGGKASDVALPRGSSPSVLAVSVPAPTNVLSLSVCSMPLHSGQGEKPAAPFPRGELESPKPLVTPGSTLTLLTRAEAGSPTGGLFNTPPPTPPEQDKEDFSSFQLLVEVALQRAAEMELQKQQDPSLPLLHTPIPLVSENPQ

SEQ ID NO: 3874 - DNA, 1091 bp, Homo sapiens
cgcggcgcctgctctgtagagccggcggaaccgggtagcttggccaggttgtgaggaaccgcagcgcgccgcaggaccgggccgctgagcctgcagccgccccgcgccgtgacctgcgaccctagaccccgactccctttggctcagcccgcgcgccccaggcccggcccgggcggcgcgacgggaggatgagcggcgggcggcggaaggaggagccgcctcagccgcagctggccaacggggccctcaaagtctccgtctggagtaaggtgctgcggagcgacgcggcctgggaggataaggatgaatttttagatgtgatctactggttccgacagatcattgctgtggtcctgggtgtcatttggggagttttgccattacgagggttcttgggaatagcaggattctgcctgatcaatgcaggagtcctgtacctctacttcagcaattacctacagattgatgaggaagaatatggtggcacgtgggagctcacgaaggaagggtttatgacctcttttgccttgttcatggtcatttggatcatcttttacactgccatccattatgactgatggtgtacagctcccaagtgctccctatccagtccaaaggaccctcttgattacagcacaggaacttgatcgttggggaaccccagccccttggaacttggaagacccgtgtttcctggaccgcgaatcagtgtgttgggcatcagtgttttctgcaagggttgtgacctgaaactttttaaaaaccacccacctttggggaagcatttctgaatttatccatcaccaaccatttcttcttggataccatcaagtaacagctattatttgccaagtggagctgtcatttaatttgatgcacctctggattcagatgaaacattaaattgtcttcctcgattctccatcgggtgtagagtttttaaactatcaatggcatttcaagtcttctgaaacagcatggctgtatgtgcgtggtccatagcacagtacatgcagcatctaataagagtttccattgtagaatgttttcacatacttgaataaatcaaatctttaattgagaaaaaaaaa

SEQ ID NO: 3875 - protein, 129 aa, Homo sapiens
MSGGRRKEEPPQPQLANGALKVSVWSKVLRSDAAWEDKDEFLDVIYWFRQIIAVVLGVIWGVLPLRGFLGIAGFCLINAGVLYLYFSNYLQIDEEEYGGTWELTKEGFMTSFALFMVIWIIFYTAIHYD

SEQ ID NO: 3876 - DNA, 961 bp, Homo sapiens
cgcggcgcctgctctgtagagccggcggaaccgggtagcttggccaggttgtgaggaaccgcagcgcgccgcaggaccgggccgctgagcctgcagccgccccgcgccgtgacctgcgaccctagaccccgactccctttggctcagcccgcgcgccccaggcccggcccgggcggcgcgacgggaggatgagcggcgggcggcggaaggaggagccgcctcagccgcagctggccaacggggccctcaaagtctccgtctggagtaaggtgctgcggagcgacgcggcctgggaggataaggatgaatttttagatgtgatctactggttccgacagatcattgctgtggtcctgggtgtcatttggggagttttgccattacgagggttcttgggaatagcagggtcatttggatcatcttttacactgccatccattatgactgatggtgtacagctcccaagtgctccctatccagtccaaaggaccctcttgattacagcacaggaacttgatcgttggggaaccccagccccttggaacttggaagacccgtgtttcctggaccgcgaatcagtgtgttgggcatcagtgttttctgcaagggttgtgacctgaaactttttaaaaaccacccacctttggggaagcatttctgaatttatccatcaccaaccatttcttcttggataccatcaagtaacagctattatttgccaagtggagctgtcatttaatttgatgcacctctggattcagatgaaacattaaattgtcttcctcgattctccatcgggtgtagagtttttaaactatcaatggcatttcaagtcttctgaaacagcatggctgtatgtgcgtggtccatagcacagtacatgcagcatctaataagagtttccattgtagaatgttttcacatacttgaataaatcaaatctttaattgagaaaaaaaaa

SEQ ID NO: 3877 - protein, 143 aa, Homo sapiens
MSGGRRKEEPPQPQLANGALKVSVWSKVLRSDAAWEDKDEFLDVIYWFRQIIAVVLGVIWGVLPLRGFLGIAGSFGSSFTLPSIMTDGVQLPSAPYPVQRTLLITAQELDRWGTPAPWNLEDPCFLDRESVCWASVFSARVVT

SEQ ID NO: 3878 - DNA, 2497 bp, Homo sapiens
gtgacagagctcaaagggccctgggccttccctccctggctcggctgtgcttgggagggttccccagtccagaatccctaaggagaatggggcagctgatccatccctggtgtacaaactgctgactgcagacagatgctgagctacccaaaccaacacctagcctctccctgaagatcctcccaggctgagagagttctgggtgtcctaggaccaaggacactggcagacttccagaagggcccccaaagccctaacctgtccagccagagcatgcgtctcagcagagctgtcttcccaagcctttgatgacaaaccaatttccctcgatgatgtgcttctgagtgctctgctgaggaacaatgggaagtctgcccagcagaagaaaatctctgccaagcccaagcttgagttcctctgtccaaggccagggacctgtgaccatggaagcagagagaagcaaggccacagccgtggccctgggcagtttcccggcaggtggcccggccgagctgtcgctgagactcggggagccattgaccatcgtctctgaggatggagactggtggacggtgctgtctgaagtctcaggcagagagtataacatccccagcgtccacgtggccaaagtctcccatgggtggctgtatgagggcctgagcagggagaaagcagaggaactgctgttgttacctgggaaccctggaggggccttcctcatccgggagagccagaccaggagaggctcttactctctgtcagtccgcctcagccgccctgcatcctgggaccggatcagacactacaggatccactgccttgacaatggctggctgtacatctcaccgcgcctcaccttcccctcactccaggccctggtggaccattactctgagctggcggatgacatctgctgcctactcaaggagccctgtgtcctgcagagggctggcccgctccctggcaaggatatacccctacctgtgactgtgcagaggacaccactcaactggaaagagctggacagctccctcctgttttctgaagctgccacaggggaggagtctcttctcagtgagggtctccgggagtccctcagcttctacatcagcctgaatgacgaggctgtctctttggatgatgcctaggcccaaaggagaggccaaaagggaaaccaaggctgcacacctagaaccccaattcagcctcctgggcaccccagaggcaaggctgtgcactcagggagggagggtgggacacagaggtgcatctagggtcccacctgtacccttgctctttcctctcttagcccttagaagtcacctacttccttccagtgccatgatcccacctgcgacctctagtgcgagtgcagagaaggtgggaccagggccagggttccaaaaagagaataagcctcctggggggtctgacctagttagttcttgagtttggggtttccagtaccatctggatgccctgcctgttgagccccattctacatccccaccattaaccaggccccacccacaaggtagaaacaacccctagagtcaacgagaaagtcattttcagaaaatctacaagtctcgttgagaccaccaccatacctcagaaggtaggactgtggcctagaagggaaaggaaagctgagatgatgtcttaccgtagcagcagatcttggatggtccaggctctatgtgacctccagagcaaagagaaagacttcggacagtctaggtcctcaaatgtcccccattgaggacaacagccccagctctttttcttttttttgagacggagtcttgccctgttgcccatgctggagtgcaatggcacgatctcagctcactgcaacctccatctcctggattcaaacaattctcctgcctcagcctccagaatagctgggattacaggcgtacaccaccatgcctggctaatttttttgtatttttagtagacatggggtttcaccacattggccaggctggtgtcgaactcctgacctcaggtgatccacccaccttggcctcccaaagtgctgggattacaggtgtgagccacggcacccagcctagctctcagatctctatttcattttgtggcttaccattccctagcacactggccttgccatcttgtggccgaataaaaaataacacctcttaagtctagcacactgcagtgaggccaggcacctcagtgctgggcaggggcatcagaaggtgctaagccctctctccacaatgccaagacggagaccacagcctacaccaaatccagcccttgatttccctgctgcctccataaacagaaagaggtctgctggatccgctaagggatcagggagaggaagaaagagggatggggtgggaggcaccccctccagtgctcctactggttcccaagctacaggtggggtgggaaaggctttatcaggtatcatcaacaggttctcaattaaagatttgatttattcaagtatgtgaaaaaa

SEQ ID NO: 3879 - protein, 261 aa, Homo sapiens
MGSLPSRRKSLPSPSLSSSVQGQGPVTMEAERSKATAVALGSFPAGGPAELSLRLGEPLTIVSEDGDWWTVLSEVSGREYNIPSVHVAKVSHGWLYEGLSREKAEELLLLPGNPGGAFLIRESQTRRGSYSLSVRLSRPASWDRIRHYRIHCLDNGWLYISPRLTFPSLQALVDHYSELADDICCLLKEPCVLQRAGPLPGKDIPLPVTVQRTPLNWKELDSSLLFSEAATGEESLLSEGLRESLSFYISLNDEAVSLDDA

SEQ ID NO: 3880 - DNA, 2447 bp, Homo sapiens
gtgacagagctcaaagggccctgggccttccctccctggctcggctgtgcttgggagggttccccagtccagaatccctaaggagaatggggcagctgatccatccctggtgtacaaactgctgactgcagacagatgctgagctacccaaaccaacacctagcctctccctgaagatcctcccaggctgagagagttctgggtgtcctaggaccaaggacactggcagacttccagaagggcccccaaagccctaacctgtccagccagagcatgcgtctcagcagagctgtcttcccaagcctttgatgacaaaccaatttccctcgatgatgtgcttctgagtgctctgctgaggaacaatgggaagtctgcccagcagaagaaaatctctgccaagcccaagcttgagttcctctgtccaaggccagggacctgtgaccatggaagcagagagaagcaaggccacagccgtggccctgggcagtttcccggcaggtggcccggccgagctgtcgctgagactcggggagccattgaccatcgtctctgaggatggagactggtggacggtgctgtctgaagtctcaggcagagagtataacatccccagcgtccacgtggccaaagtctcccatgggtggctgtatgagggcctgagcagggagaaagcagaggaactgctgttgttacctgggaaccctggaggggccttcctcatccgggagagccagaccaggagaggctcttactctctgtcagtccgcctcagccgccctgcatcctgggaccggatcagacactacaggatccactgccttgacaatggctggctgtacatctcaccgcgcctcaccttcccctcactccaggccctggtggaccattactctgagggctggcccgctccctggcaaggatatacccctacctgtgactgtgcagaggacaccactcaactggaaagagctggacagctccctcctgttttctgaagctgccacaggggaggagtctcttctcagtgagggtctccgggagtccctcagcttctacatcagcctgaatgacgaggctgtctctttggatgatgcctaggcccaaaggagaggccaaaagggaaaccaaggctgcacacctagaaccccaattcagcctcctgggcaccccagaggcaaggctgtgcactcagggagggagggtgggacacagaggtgcatctagggtcccacctgtacccttgctctttcctctcttagcccttagaagtcacctacttccttccagtgccatgatcccacctgcgacctctagtgcgagtgcagagaaggtgggaccagggccagggttccaaaaagagaataagcctcctggggggtctgacctagttagttcttgagtttggggtttccagtaccatctggatgccctgcctgttgagccccattctacatccccaccattaaccaggccccacccacaaggtagaaacaacccctagagtcaacgagaaagtcattttcagaaaatctacaagtctcgttgagaccaccaccatacctcagaaggtaggactgtggcctagaagggaaaggaaagctgagatgatgtcttaccgtagcagcagatcttggatggtccaggctctatgtgacctccagagcaaagagaaagacttcggacagtctaggtcctcaaatgtcccccattgaggacaacagccccagctctttttcttttttttgagacggagtcttgccctgttgcccatgctggagtgcaatggcacgatctcagctcactgcaacctccatctcctggattcaaacaattctcctgcctcagcctccagaatagctgggattacaggcgtacaccaccatgcctggctaatttttttgtatttttagtagacatggggtttcaccacattggccaggctggtgtcgaactcctgacctcaggtgatccacccaccttggcctcccaaagtgctgggattacaggtgtgagccacggcacccagcctagctctcagatctctatttcattttgtggcttaccattccctagcacactggccttgccatcttgtggccgaataaaaaataacacctcttaagtctagcacactgcagtgaggccaggcacctcagtgctgggcaggggcatcagaaggtgctaagccctctctccacaatgccaagacggagaccacagcctacaccaaatccagcccttgatttccctgctgcctccataaacagaaagaggtctgctggatccgctaagggatcagggagaggaagaaagagggatggggtgggaggcaccccctccagtgctcctactggttcccaagctacaggtggggtgggaaaggctttatcaggtatcatcaacaggttctcaattaaagatttgatttattcaagtatgtgaaaaaa

SEQ ID NO: 3881 - protein, 210 aa, Homo sapiens
MGSLPSRRKSLPSPSLSSSVQGQGPVTMEAERSKATAVALGSFPAGGPAELSLRLGEPLTIVSEDGDWWTVLSEVSGREYNIPSVHVAKVSHGWLYEGLSREKAEELLLLPGNPGGAFLIRESQTRRGSYSLSVRLSRPASWDRIRHYRIHCLDNGWLYISPRLTFPSLQALVDHYSEGWPAPWQGYTPTCDCAEDTTQLERAGQLPPVF

SEQ ID NO: 3882 - DNA, 2928 bp, Homo sapiens
gctgctgcactgacggcgggtgcccgcgcctcagagttactgatttattcttgagattcctctactctcgttatctgacctcatggatgaacttcaggatgttcagctcacagagatcaaaccacttctaaatgataaggaacatgatatagaaacaactcatggtgtggtccacgtcactataagaggcttacccaaaggaaacagaccagttatactaacatatcatgacattggcctcaaccataaatcctgtttcaatgcattctttaactttgaggatatgcaagagatcacccagcactttgctgtctgtcatgtggatgccccaggccagcaggaaggtgcaccctctttcccaacagggtatcagtaccccacaatggatgagctggctgaaatgctgcctcctgttcttacccacctaagcctgaaaagcatcattggaattggagttggagctggagcttacatcctcagcagatttgcactcaaccatccagagcttgtggaaggccttgtgctcattaatgttgacccttgcgctaaaggctggattgactgggcagcttccaaactctctggcctgacaaccaatgttgtggacattattttggctcatcactttgggcaggaagagttacaggccaacctggacctgatccaaacctacagaatgcatattgcccaagacatcaaccaagacaacctgcagctcttcttgaattcctacaatggacgcagagacctggagatcgaaagacccatactgggccaaaatgataacaaatcaaaaacattaaagtgttctactttactggtggtaggggacaattcgcctgcagttgaggctgtggtcgaatgcaattcccgcctgaaccctataaatacaactttgctaaagatggcggactgtgggggactgccccaggtagttcagcctgggaagctcaccgaggccttcaagtactttttgcagggaatgggctacataccatctgccagcatgactcggctcgcccgatcacgaacccactcaacctcgagtagcctcggctctggagaaagtcccttcagccggtctgtcaccagcaatcagtcagatggaactcaagaatcctgtgagtcccctgatgtcctggacagacaccagaccatggaggtgtcctgctaagcagatgctcctcccctggaccattgcaagtccatccttcaaatgaccactccataatataacatttcatccagtaaactggcctctactatctttaactcatgcatggccactgaacctctctctagtagcctggatttatcattctctctgcctgcccacccccttttttgtatagcccaagaaccacttccatgccatactgtaacattccaacatctttagctgatcagatctctccatatcctctcttgccagctttttcccgtgctcccccaactatgtatcagataagattctttgatcccgactctgtgtgtgcgagcacgcgtgtctgtgtttgtgtgtgcatagttctgtggttttagacacgctttcttgtagtgcttctgcaaaaaacaaaaaagggacttattttgcattctcaatggtgtttttaagggaattaggcagaacagatttctaggttgggtaggccactgcattctcttttgtttgcaaattggtcaacaaaatttgcaaagtgatttcaggagagagcagctttgaggaatgtggaaaatcataattgccgtctggaccattgattgattgtgaccagtagcagaagggtgcctgttacatagagaggctccttctgtccaaatgaatttctgtatactcttctataaataaaagggaggaatatattctgctggaagcccatgaaccatcgctgaggttctgatacaacatagagttttttccaaggagtgaatgtggtttaattactggactctcttagcacaggaaggtggaaacaaaatgccaggcctctgctctgaagagcaaaactgctgtcgctgcagtatctgataccagacatccacatatccacaagaagtgcctcttaggtctgtgacagagagtgtgtctccattcctcagttcccagaaaggggagaggtttggcctaaaaagcatgtagatgggggagaaatgggtggggggagaggaacagccattaacacagtatcatgtttaacaagtatagccttgatttcagtagatgtaatggaagccaaattaaattgatacagaacccatttctcagagtctttttttttttttgagacagagtctcgctgttacccaggctggagtgcaatggcgcaaacttggctcactgcaacctctgccccctgggttcaagcgattctcctgcctcagcctcccgagtagctgagactacaggcacctgccaccatacccagctaagttatgtatttttagtagagatggagtttcaccatgttggccaggctggtctcaaactcctgacctcaggtgatccacctgcctcagcctcccaaagtgctgggattacaggcatgagtcattgctcccagccattagaaagattgttaatcctatgaactcccttttgtaggagagaaagggccaatctgtaggggtagccctgtccaggtaaagttgttttcagcctcatgtctactgttaggtgagggagtcacagccagacagagagtattgctggagggtgagagaattgtggagaccaactaccacatagcaagagcccagctcttgggagcattgagatgtaagctcagggttacacagttccaaatcttgggaaggggcttttcagacagactgtttgctttctgctgagataaggaatgcatcactctgccagagtatgactttttacagattattaaataaagctgcatatgtctcattgttacctga

SEQ ID NO: 3883 - protein, 363 aa, Homo sapiens
MDELQDVQLTEIKPLLNDKEHDIETTHGVVHVTIRGLPKGNRPVILTYHDIGLNHKSCFNAFFNFEDMQEITQHFAVCHVDAPGQQEGAPSFPTGYQYPTMDELAEMLPPVLTHLSLKSIIGIGVGAGAYILSRFALNHPELVEGLVLINVDPCAKGWIDWAASKLSGLTTNVVDIILAHHFGQEELQANLDLIQTYRMHIAQDINQDNLQLFLNSYNGRRDLEIERPILGQNDNKSKTLKCSTLLVVGDNSPAVEAVVECNSRLNPINTTLLKMADCGGLPQVVQPGKLTEAFKYFLQGMGYIPSASMTRLARSRTHSTSSSLGSGESPFSRSVTSNQSDGTQESCESPDVLDRHQTMEVSC

SEQ ID NO: 3884 - DNA, 2964 bp, Homo sapiens
gctgctgcactgacggcgggtgcccgcgcctcagagttactgatttattcttgagattcctctactctcgttatctgacctcatggatgaacttcaggatgttcagctcacagagatcaaaccacttctaaatgataagaatggtacaagaaacttccaggactttgactgtcaggaacatgatatagaaacaactcatggtgtggtccacgtcactataagaggcttacccaaaggaaacagaccagttatactaacatatcatgacattggcctcaaccataaatcctgtttcaatgcattctttaactttgaggatatgcaagagatcacccagcactttgctgtctgtcatgtggatgccccaggccagcaggaaggtgcaccctctttcccaacagggtatcagtaccccacaatggatgagctggctgaaatgctgcctcctgttcttacccacctaagcctgaaaagcatcattggaattggagttggagctggagcttacatcctcagcagatttgcactcaaccatccagagcttgtggaaggccttgtgctcattaatgttgacccttgcgctaaaggctggattgactgggcagcttccaaactctctggcctgacaaccaatgttgtggacattattttggctcatcactttgggcaggaagagttacaggccaacctggacctgatccaaacctacagaatgcatattgcccaagacatcaaccaagacaacctgcagctcttcttgaattcctacaatggacgcagagacctggagatcgaaagacccatactgggccaaaatgataacaaatcaaaaacattaaagtgttctactttactggtggtaggggacaattcgcctgcagttgaggctgtggtcgaatgcaattcccgcctgaaccctataaatacaactttgctaaagatggcggactgtgggggactgccccaggtagttcagcctgggaagctcaccgaggccttcaagtactttttgcagggaatgggctacataccatctgccagcatgactcggctcgcccgatcacgaacccactcaacctcgagtagcctcggctctggagaaagtcccttcagccggtctgtcaccagcaatcagtcagatggaactcaagaatcctgtgagtcccctgatgtcctggacagacaccagaccatggaggtgtcctgctaagcagatgctcctcccctggaccattgcaagtccatccttcaaatgaccactccataatataacatttcatccagtaaactggcctctactatctttaactcatgcatggccactgaacctctctctagtagcctggatttatcattctctctgcctgcccacccccttttttgtatagcccaagaaccacttccatgccatactgtaacattccaacatctttagctgatcagatctctccatatcctctcttgccagctttttcccgtgctcccccaactatgtatcagataagattctttgatcccgactctgtgtgtgcgagcacgcgtgtctgtgtttgtgtgtgcatagttctgtggttttagacacgctttcttgtagtgcttctgcaaaaaacaaaaaagggacttattttgcattctcaatggtgtttttaagggaattaggcagaacagatttctaggttgggtaggccactgcattctcttttgtttgcaaattggtcaacaaaatttgcaaagtgatttcaggagagagcagctttgaggaatgtggaaaatcataattgccgtctggaccattgattgattgtgaccagtagcagaagggtgcctgttacatagagaggctccttctgtccaaatgaatttctgtatactcttctataaataaaagggaggaatatattctgctggaagcccatgaaccatcgctgaggttctgatacaacatagagttttttccaaggagtgaatgtggtttaattactggactctcttagcacaggaaggtggaaacaaaatgccaggcctctgctctgaagagcaaaactgctgtcgctgcagtatctgataccagacatccacatatccacaagaagtgcctcttaggtctgtgacagagagtgtgtctccattcctcagttcccagaaaggggagaggtttggcctaaaaagcatgtagatgggggagaaatgggtggggggagaggaacagccattaacacagtatcatgtttaacaagtatagccttgatttcagtagatgtaatggaagccaaattaaattgatacagaacccatttctcagagtctttttttttttttgagacagagtctcgctgttacccaggctggagtgcaatggcgcaaacttggctcactgcaacctctgccccctgggttcaagcgattctcctgcctcagcctcccgagtagctgagactacaggcacctgccaccatacccagctaagttatgtatttttagtagagatggagtttcaccatgttggccaggctggtctcaaactcctgacctcaggtgatccacctgcctcagcctcccaaagtgctgggattacaggcatgagtcattgctcccagccattagaaagattgttaatcctatgaactcccttttgtaggagagaaagggccaatctgtaggggtagccctgtccaggtaaagttgttttcagcctcatgtctactgttaggtgagggagtcacagccagacagagagtattgctggagggtgagagaattgtggagaccaactaccacatagcaagagcccagctcttgggagcattgagatgtaagctcagggttacacagttccaaatcttgggaaggggcttttcagacagactgtttgctttctgctgagataaggaatgcatcactctgccagagtatgactttttacagattattaaataaagctgcatatgtctcattgttacctga

SEQ ID NO: 3885 - protein, 375 aa, Homo sapiens
MDELQDVQLTEIKPLLNDKNGTRNFQDFDCQEHDIETTHGVVHVTIRGLPKGNRPVILTYHDIGLNHKSCFNAFFNFEDMQEITQHFAVCHVDAPGQQEGAPSFPTGYQYPTMDELAEMLPPVLTHLSLKSIIGIGVGAGAYILSRFALNHPELVEGLVLINVDPCAKGWIDWAASKLSGLTTNVVDIILAHHFGQEELQANLDLIQTYRMHIAQDINQDNLQLFLNSYNGRRDLEIERPILGQNDNKSKTLKCSTLLVVGDNSPAVEAVVECNSRLNPINTTLLKMADCGGLPQVVQPGKLTEAFKYFLQGMGYIPSASMTRLARSRTHSTSSSLGSGESPFSRSVTSNQSDGTQESCESPDVLDRHQTMEVSC

SEQ ID NO: 3886 - DNA, 2095 bp, Homo sapiens
gatcagggagtatcggctgcgggtgcgcaaggcgtccaggagtgacctggggctgtggagagcgacccgtggccttgtgtttcaggtacggaggttccggactggacgggcgtcaggaagtcacagacttgtcctctgatgtggccccgcccgccgccgcactaatctcttcggcgtcgtacccgtcggcccagctcgacccgccgcagccccggccccgaccgtggacactgggggtccccgagggcgctgcgacctcctcccggagtttaccacctaggatgacttcagtgactagatcagagatcatagatgaaaaaggaccagtgatgtctaagactcatgatcatcaattggaatcaagtctcagtcctgtggaagtgtttgctaaaacatctgcctccctggagatgaatcaaggcgtttcagaggaaagaattcaccttggctctagccctaaaaaagggggaaattgtgatctcagccaccaggaaagacttcagtcgaagtcccttcatttgtctcctcaagaacaatctgccagttatcaagacaggaggcaatcctggcggcgagcaagtatgaaagaaacgaaccggcggaagtcgctgcatcccattcaccagggcatcacagagctcagccggtctatcagtgtcgatttagcagaaagcaaacggcttggctgtctcctgctttccagttcccagttctctattcagaaacttgaacctttcctaagggacactaagggcttcagtcttgaaagttttagagccaaagcatcttctctttctgaagaattgaaacattttgcagacggactggaaactgatggaactctacaaaaatgttttgaagattcaaatggaaaagcatcagatttttctttggaagcatctgtggctgagatgaaggaatacataacaaagttttctttagaacgtcagacttgggatcagctcttgcttcactaccagcaggaggctaaagagatattgtccagaggatcaactgaggccaaaattactgaggtcaaagtggaacctatgacatatcttgggtcttctcagaatgaagttcttaatacaaaacctgactaccagaaaatattacagaaccagagcaaagtctttgactgtatggagttggtgatggatgaactgcaaggatcagtgaaacagctgcaggcctttatggatgaaagtacccagtgcttccagaaggtgtcagtacagctcggaaagagaagcatgcaacaattagatccctcaccagctcgaaaactgttgaagcttcagctacagaacccacctgccatacatggatctggatctggatcttgtcagtgactttatgagagtttctgccacaaggtgcccaagaggagaggaatgggaagagtgccccagcacgtggtgactgcgtgatttctgctcgttgcctttgaagataactggcaggactgactgtagaacactttgacttttttcaaaaagtgatggaatttgtacatccaaatgaatattgtatagacaattttcccaggaatgtgcaaaatgcttgaaagttcaaacttcttttttgaaatgatcttcagatccagtggcccattcttttatctttatcctgtgaaggtgtttttcaggttttgaaacaatccaaaaatcatttaggaccaagtctaaggaaacattttagtggccaagttggattccgattgtaaaggaatgatactaattttctagcatggctctgaaggtgattttaggtagaagagttttgaggctgggcgcaatggctcacgcctgtaatcctagcattttgggtgactgaggcgggtggattgcttgagcccagaagttgaagaccagcctgagaaataaggtgaaaccctgtctacaaaaaatacaaaaagttagctgggtgtggtggcgtgtgcctgtagtgctagctactcagaaggctgaggtgggaggattgtttgagcccaggaggttgaggctgcagtgagttctaattgcgccactgcactccagcctgagcgacagagtgagacactgtcttaaaaaaaattaaaaattgtaagaaaatg

SEQ ID NO: 3887 - protein, 356 aa, Homo sapiens
MTSVTRSEIIDEKGPVMSKTHDHQLESSLSPVEVFAKTSASLEMNQGVSEERIHLGSSPKKGGNCDLSHQERLQSKSLHLSPQEQSASYQDRRQSWRRASMKETNRRKSLHPIHQGITELSRSISVDLAESKRLGCLLLSSSQFSIQKLEPFLRDTKGFSLESFRAKASSLSEELKHFADGLETDGTLQKCFEDSNGKASDFSLEASVAEMKEYITKFSLERQTWDQLLLHYQQEAKEILSRGSTEAKITEVKVEPMTYLGSSQNEVLNTKPDYQKILQNQSKVFDCMELVMDELQGSVKQLQAFMDESTQCFQKVSVQLGKRSMQQLDPSPARKLLKLQLQNPPAIHGSGSGSCQ

SEQ ID NO: 3888 - DNA, 2701 bp, Homo sapiens
gagcctgcgcaggaggccaataggctgccaatactccttggactccccgccagggccctgctgtcagtgcgcctgcgcgcgggtccggcgccgaggttcttgactgctgtgccggacgccaggtgtagccatgcagcgagccgattccgagcagccctccaagcgtccccgttgcgatgacagcccgagaaccccctcaaacaccccttccgcagaggcagactggtccccgggcctggaactccatcccgactacaagacatggggtccggagcaggtgtgctccttcctcaggcgcggtggctttgaagagccggtgctgctgaagaacatccgagaaaatgaaatcacaggcgcattactgccttgtcttgatgagtctcgttttgaaaatcttggagtaagttccttgggggagaggaagaagctgcttagttatatccagcgattggttcaaatccacgttgatacaatgaaggtaattaatgatcctatccatggccacattgagctccaccctctcctcgtccgaatcattgatacacctcaatttcaacgtcttcgatacatcaaacagctgggaggtggttactatgtttttccaggagcttcacacaatcgatttgagcatagtctaggggtggggtatctagcaggatgtctagttcacgcactgggtgaaaaacaaccagagctgcagataagtgaacgagatgttctctgtgttcagattgctggactttgtcatgatctcggtcatgggccattttctcacatgtttgatggacgatttattccacttgctcgcccggaggtgaaatggacgcatgaacaaggctcagttatgatgtttgagcaccttattaattctaatggaattaagcctgtcatggaacaatatggtctcatccctgaagaagatatttgctttataaaggaacaaattgtaggaccacttgaatcacctgtcgaagattcattgtggccatataaagggcgtcctgaaaacaaaagcttcctttatgagatagtatctaataaaagaaatggcattgatgtggacaaatgggattattttgccagggactgccatcatcttggaatccaaaataattttgattacaagcgctttattaagtttgcccgtgtctgtgaagtagacaatgagttgcgtatttgtgctagagataaggaagttggaaatctgtatgacatgttccacactcgcaactctttacaccgtagagcttatcaacacaaagttggcaacattattgatacaatgattacagatgctttcctcaaagcagatgactacatagagattacaggtgctggaggaaaaaagtatcgcatttctacagcaattgacgacatggaagcctatactaagctgacagataacatttttctggagattttatactctactgatcccaaattgaaagacgcacgagagattttaaaacaaattgaataccgtaatctattcaagtatgtgggtgagacgcagccaacaggacaaataaagattaaaagggaggactatgaatctcttccaaaagaggttgccagtgctaaacccaaagtattgctagacgtgaaactgaaggctgaagattttatagtggatgttatcaacatggattatggaatgcaagaaaagaatccaattgatcatgttagcttctattgtaagactgcccccaacagagcaatcaggattactaaaaaccaggtttcacaacttctgccagagaaatttgcagagcagctgattcgagtatattgtaagaaggtggacagaaagagtttgtatgccgcaagacaatattttgttcagtggtgtgcagacagaaatttcaccaagccgcaggatggcgatgttatagccccactcataacacctcaaaaaaaggaatggaacgacagtacttcagtccaaaatccaactcgcctccgagaagcatccaaaagcagagtccagctttttaaagatgacccaatgtgaatgtctgtagtcagttgtttacaaactccctctcctgcacaattcatttagaggcttcaatcatagaattctgcaaattaatgacaactcatgctttaattttgtattttgaatgtacacgcatgctgaagctaagtaacttttaatcaaagaaataagatggtattaggcaaatcttactatactatgaaaagcattaccttgcctatttttaatattattaaagcctttctccttcagtagtctattttcttagaataacaactcttttatctattctgaactctattttttttcttttttaagagacaaggttttgctctgttgcccagcttggactcgaactttcctgggctcaagcgaccctcctgcctcagccccccaagtagctgggactaaagtcatgtgccaccacacccagcttactctgaacttttatgacagatgattgttttttgtttttaatgtagaaatgagacaagggtacaaattggaactagaaattgacattgtcattgacaaacatggctaaaaacaaaacatcaaatcctgcccccgtgaagagttccctgtcacctcaagtttgaggatagtcctctaagagtgacctaagcataagtgaaagacacctcccctcacccttctagccccctacaaggtgccaggttggggtaaagagttggagatgat

SEQ ID NO: 3889 - protein, 626 aa, Homo sapiens
MQRADSEQPSKRPRCDDSPRTPSNTPSAEADWSPGLELHPDYKTWGPEQVCSFLRRGGFEEPVLLKNIRENEITGALLPCLDESRFENLGVSSLGERKKLLSYIQRLVQIHVDTMKVINDPIHGHIELHPLLVRIIDTPQFQRLRYIKQLGGGYYVFPGASHNRFEHSLGVGYLAGCLVHALGEKQPELQISERDVLCVQIAGLCHDLGHGPFSHMFDGRFIPLARPEVKWTHEQGSVMMFEHLINSNGIKPVMEQYGLIPEEDICFIKEQIVGPLESPVEDSLWPYKGRPENKSFLYEIVSNKRNGIDVDKWDYFARDCHHLGIQNNFDYKRFIKFARVCEVDNELRICARDKEVGNLYDMFHTRNSLHRRAYQHKVGNIIDTMITDAFLKADDYIEITGAGGKKYRISTAIDDMEAYTKLTDNIFLEILYSTDPKLKDAREILKQIEYRNLFKYVGETQPTGQIKIKREDYESLPKEVASAKPKVLLDVKLKAEDFIVDVINMDYGMQEKNPIDHVSFYCKTAPNRAIRITKNQVSQLLPEKFAEQLIRVYCKKVDRKSLYAARQYFVQWCADRNFTKPQDGDVIAPLITPQKKEWNDSTSVQNPTRLREASKSRVQLFKDDPM

SEQ ID NO: 3890 - DNA, 4270 bp, Homo sapiens
gcaggtggttgtgggtagcgcgcctgggagggagaaagaagtcgggggccgtggcgcgcagcccgcggggcctgaagggatgttcgaggacaagccccacgctgagggggcggcggtggtcgccgcagccggggaggcgctacaggccctgtgccaggagctgaacctggacgaggggagcgcggccgaagccctggacgactttactgccatccgaggcaactacagcctagagggagaagttacacactggttggcatgttcattatatgttgcatgccgcaaaagcattattcccacggttggaaagggtatcatggaaggcaactgtgtttcacttaccagaatactacgttcagctaaattaagtttaatacaattttttagtaaaatgaagaaatggatggacatgtcaaatctaccacaagaatttcgtgaacgtatagaaaggctagagagaaattttgaggtgtctactgtaatattcaaaaaatatgagccaatttttttagatatatttcaaaatccatatgaagaaccaccaaagttaccacgaagccggaagcagaggaggattccttgcagtgttaaggatctgtttaatttctgttggacactttttgtttatactaagggtaattttcggatgattggggatgacttagtaaactcttatcatttacttctatgctgcttggatctgatttttgccaatgcgattatgtgcccaaatagacaagacttgctaaatccatcatttaaaggtttaccatctgattttcatactgctgactttacggcttctgaagagccaccctgcatcattgctgtactgtgtgaactgcatgatggacttctcgtagaagcaaaaggaataaaggagcactactttaagccatatatttcaaaactctttgacaggaagatattaaaaggagaatgcctcctggacctttcaagttttactgataatagcaaagcagtgaataaggagtatgaagagtatgttctaactgttggtgattttgatgagaggatctttttgggagcagacgcagaagaggaaattggaacacctcgaaagttcactcgtgacaccccattagggaaactgacagcacaggctaatgtggagtataaccttcaacagcactttgaaaaaaaaaggtcatttgcaccttctaccccactgaccggacggagatatttacgagaaaaagaagcagtcattactcctgttgcatcagccacccaaagtgtgagccggttacagagtattgtggctggtctgaaaaatgcaccaagtgaccaacttataaatatttttgaatcttgtgtgcgtaatcctgtggaaaacattatgaaaatactaaaaggaataggagagactttctgtcaacactatactcaatcaacagatgaacagccaggatctcacatagactttgctgtaaacagactaaagctggcagaaattttgtattataaaatactagagactgtaatggttcaggaaacacgaagacttcatggaatggacatgtcagttcttttagagcaagatatatttcatcgttccttgatggcttgttgtttggaaattgtgctctttgcctatagctcacctcgtacttttccttggattattgaagttctcaacttgcaaccattttacttttataaggttattgaggtggtgatccgctcagaagaggggctctcaagggacatggtgaaacacctaaacagcattgaagaacagattttggagagtttagcatggagtcacgattctgcactgtgggaggctctccaggtttctgcaaacaaagttcctacctgtgaagaagttatattcccaaataactttgaaacaggaaatggaggaaatgtgcagggacatcttcccctgatgccaatgtctcctctaatgcacccaagagtcaaggaagttcgaactgacagtgggagtcttcgaagagatatgcaaccattgtctccaatttctgtccatgaacgctacagttctcctaccgcagggagtgctaagagaagactctttggagaggaccccccaaaggaaatgcttatggacaagatcataacagaaggaacaaaattgaaaatcgctccttcttcaagcattactgctgaaaatgtatcaattttacctggtcaaactcttctaacaatggccacagccccagtaacaggaacaacaggacataaagttacaattccattacatggtgtcgcaaatgatgctggagagatcacactgatacctctttccatgaatacaaatcaggagtccaaagtcaagagtcctgtatcacttactgctcattcattaattggtgcttctccaaaacagaccaatctgactaaagcacaagaggtacattcaactggaataaacaggccaaagagaactgggtccttagcactattttacagaaaggtctatcatttggcaagtgtacgcttacgtgatctatgtctaaaactggatgtttcaaatgagttacgaaggaagatatggacgtgttttgaattcactttagttcactgtcctgatctaatgaaagacaggcatttggatcagctcctcctttgtgccttttatatcatggcaaaggtaacaaaagaagaaagaacttttcaagaaattatgaaaagttataggaatcagccccaagctaatagtcacgtatatagaagtgttctgctgaaaagtattccaagagaagttgtggcatataataaaaatataaatgatgactttgaaatgatagattgtgacttagaagatgctacaaaaacacctgactgttccagtggaccagtgaaagaggaaagaggtgatcttataaaattttacaatacaatatatgtaggaagagtgaagtcatttgcactgaaatacgacttggcgaatcaggaccatatgatggatgctccaccactctctccttttccacatattaaacaacagccaggctcaccacgccgcatttcccagcagcactccatttatatttccccgcacaagaatgggtcaggccttacaccaagaagcgctctgctgtacaagttcaatggcagcccttctaagagtttgaaagatatcaacaacatgataaggcaaggtgagcagagaaccaagaagcgagtaatagccatcgatagtgatgcagaatcccctgccaaacgcgtctgtcaagaaaatgatgacgttttactgaaacgactacaggatgttgtcagtgaaagagcaaatcattaatgttgttcttgtttctatgataaaagcactttcagattgttctgcagaaagttggagctctgtccttcaaaccttttagccctatagatgataaatatcactgggttataagaaaaaattgcacaaaaattatgtgctttttaaaatatttatccaaaatgtagttgacagagatgtattttgagttggattggaaaggaatattttaagtgccttttaaaaatactaatagtccggccaggcgctgtggctcacgcctgtaatcccaggactttgggaggccaaggcgggcagatcaccggaggtcaggagttcgagaccagcctgaccaacatggagaaaccccatctctactaaaaatacaaaattagccgggtgtggtggcgcatgcctgtaatcccagctacttgggaggctgaggcagaattgcttgaacccaggaagcggaggttgtggtgagccaaggttgcgccactgcactccagcctgggcaacaagagtaaaactccatctcaaaaaatatatatatatatataaatagggaattttttttaatgtttgctccttgagttttcaagatgaaataaggagaaaccccataactttttagctctcttttaaaaataaatgtctccttctgtgttctgtaatatgaggataaataatctacttttgatagcatgctttgagatatttgtattcttaatttaatattgaaggaaggggttggttcccatagtacctggccagagggttatataccatcctgtctctggcccactgtggtaattccacatccaggtaccaccgccattcagagttgtctcaccccttctcgtgccttttctctccttgagctttataaacagatttgtacctgagccccagtgctacactcatccttgctttccagccctaagccatctcagcctgatgtcacaacccaataaatggggcactttcttcttttgtaaactattatca

SEQ ID NO: 3891 - protein, 1068 aa, Homo sapiens
MFEDKPHAEGAAVVAAAGEALQALCQELNLDEGSAAEALDDFTAIRGNYSLEGEVTHWLACSLYVACRKSIIPTVGKGIMEGNCVSLTRILRSAKLSLIQFFSKMKKWMDMSNLPQEFRERIERLERNFEVSTVIFKKYEPIFLDIFQNPYEEPPKLPRSRKQRRIPCSVKDLFNFCWTLFVYTKGNFRMIGDDLVNSYHLLLCCLDLIFANAIMCPNRQDLLNPSFKGLPSDFHTADFTASEEPPCIIAVLCELHDGLLVEAKGIKEHYFKPYISKLFDRKILKGECLLDLSSFTDNSKAVNKEYEEYVLTVGDFDERIFLGADAEEEIGTPRKFTRDTPLGKLTAQANVEYNLQQHFEKKRSFAPSTPLTGRRYLREKEAVITPVASATQSVSRLQSIVAGLKNAPSDQLINIFESCVRNPVENIMKILKGIGETFCQHYTQSTDEQPGSHIDFAVNRLKLAEILYYKILETVMVQETRRLHGMDMSVLLEQDIFHRSLMACCLEIVLFAYSSPRTFPWIIEVLNLQPFYFYKVIEVVIRSEEGLSRDMVKHLNSIEEQILESLAWSHDSALWEALQVSANKVPTCEEVIFPNNFETGNGGNVQGHLPLMPMSPLMHPRVKEVRTDSGSLRRDMQPLSPISVHERYSSPTAGSAKRRLFGEDPPKEMLMDKIITEGTKLKIAPSSSITAENVSILPGQTLLTMATAPVTGTTGHKVTIPLHGVANDAGEITLIPLSMNTNQESKVKSPVSLTAHSLIGASPKQTNLTKAQEVHSTGINRPKRTGSLALFYRKVYHLASVRLRDLCLKLDVSNELRRKIWTCFEFTLVHCPDLMKDRHLDQLLLCAFYIMAKVTKEERTFQEIMKSYRNQPQANSHVYRSVLLKSIPREVVAYNKNINDDFEMIDCDLEDATKTPDCSSGPVKEERGDLIKFYNTIYVGRVKSFALKYDLANQDHMMDAPPLSPFPHIKQQPGSPRRISQQHSIYISPHKNGSGLTPRSALLYKFNGSPSKSLKDINNMIRQGEQRTKKRVIAIDSDAESPAKRVCQENDDVLLKRLQDVVSERANH

SEQ ID NO: 3892 - DNA, 3371 bp, Homo sapiens
gcaggtggttgtgggtagcgcgcctgggagggagaaagaagtcgggggccgtggcgcgcagcccgcggggcctgaagggatgttcgaggacaagccccacgctgagggggcggcggtggtcgccgcagccggggaggcgctacaggccctgtgccaggagctgaacctggacgaggggagcgcggccgaagccctggacgactttactgccatccgaggcaactacagcctagagggagaagttacacactggttggcatgttcattatatgttgcatgccgcaaaagcattattcccacggttggaaagggtatcatggaaggcaactgtgtttcacttaccagaatactacgttcagctaaattaagtttaatacaattttttagtaaaatgaagaaatggatggacatgtcaaatctaccacaagaatttcgtgaacgtatagaaaggctagagagaaattttgaggtgtctactgtaatattcaaaaaatatgagccaatttttttagatatatttcaaaatccatatgaagaaccaccaaagttaccacgaagccggaagcagaggaggattccttgcagtgttaaggatctgtttaatttctgttggacactttttgtttatactaagggtaattttcggatgattggggatgacttagtaaactcttatcatttacttctatgctgcttggatctgatttttgccaatgcgattatgtgcccaaatagacaagacttgctaaatccatcatttaaaggtttaccatctgattttcatactgctgactttacggcttctgaagagccaccctgcatcattgctgtactgtgtgaactgcatgatggacttctcgtagaagcaaaaggaataaaggagcactactttaagccatatatttcaaaactctttgacaggaagatattaaaaggagaatgcctcctggacctttcaagttttactgataatagcaaagcagtgaataaggagtatgaagagtatgttctaactgttggtgattttgatgagaggatctttttgggagcagacgcagaagaggaaattggaacacctcgaaagttcactcgtgacaccccattagggaaactgacagcacaggctaatgtggagtataaccttcaacagcactttgaaaaaaaaaggtcatttgcaccttctaccccactgaccggacggagatatttacgagaaaaagaagcagtcattactcctgttgcatcagccacccaaagtgtgagccggttacagagtattgtggctggtctgaaaaatgcaccaagtgaccaacttataaatatttttgaatcttgtgtgcgtaatcctgtggaaaacattatgaaaatactaaaaggaataggagagactttctgtcaacactatactcaatcaacagatgaacagccaggatctcacatagactttgctgtaaacagactaaagctggcagaaattttgtattataaaatactagagactgtaatggttcaggaaacacgaagacttcatggaatggacatgtcagttcttttagagcaagatatatttcatcgttccttgatggcttgttgtttggaaattgtgctctttgcctatagctcacctcgtacttttccttggattattgaagttctcaacttgcaaccattttacttttataaggttattgaggtggtgatccgctcagaagaggggctctcaagggacatggtgaaacacctaaacagcattgaagaacagattttggagagtttagcatggagtcacgattctgcactgtgggaggctctccaggtttctgcaaacaaagttcctacctgtgaagaagttatattcccaaataactttgaaacaggaaatggaggaaatgtgcagggacatcttcccctgatgccaatgtctcctctaatgcacccaagagtcaaggaagttcgaactgacagtgggagtcttcgaagagatatgcaaccattgtctccaatttctgtccatgaacgctacagttctcctaccgcagggagtgctaagagaagactctttggagaggaccccccaaaggaaatgcttatggacaagatcataacagaaggaacaaaattgaaaatcgctccttcttcaagcattactgctgaaaatgtatcaattttacctggtcaaactcttctaacaatggccacagccccagtaacaggaacaacaggacataaagttacaattccattacatggtgtcgcaaatgatgctggagagatcacactgatacctctttccatgaatacaaatcaggagtccaaagtcaagagtcctgtatcacttactgctcattcattaattggtgcttctccaaaacagaccaatctgactaaagcacaagaggtacattcaactggaataaacaggccaaagagaactgggtccttagcactattttacagaaaggtctatcatttggcaagtgtacgcttacgtgatctatgtctaaaactggatgtttcaaatgagttacgaaggaagatatggacgtgttttgaattcactttagttcactgtcctgatctaatgaaagacaggcatttggatcagctcctcctttgtgccttttatatcatggcaaaggtaacaaaagaagaaagaacttttcaagaaattatgaaaagttataggaatcagccccaagctaatagtcacgtatatagaagtgttctgctgaaaagtattccaagagaagttgtggcatataataaaaatataaatgatgactttgaaatgatagattgtgacttagaagatgctacaaaaacacctgactgttccagtggaccagtgaaagaggaaagaggtgatcttataaaattttacaatacaatatatgtaggaagagtgaagtcatttgcactgaaatacgacttggcgaatcaggaccatatgatggatgctccaccactctctccttttccacatattaaacaacagccaggctcaccacgccgcatttcccagcagcactccatttatatttccccgcacaagaatgggtcaggccttacaccaagaagcgctctgctgtacaagttcaatggcagcccttctaaggtaaggtgaataggctaaaagttggatttcagattaacagtcagtaactgttaatcctgcctctttttttttttttcttttttggccaagttactactatactaataaaatatgaaatgttaactatgaaaaaaaaaaaaaaaaaaaaaaaaaaaaaaaaaaaaaaaaaaaaaaaaaaaaaaaaaaaaaaaaaaaaaaaaaaaaaaaaaaaaaaaaaaaaaaaaaaaaaaaaaaaaaaaaaaaaaaaaaaaaaaaa

SEQ ID NO: 3893 - protein, 1014 aa, Homo sapiens
MFEDKPHAEGAAVVAAAGEALQALCQELNLDEGSAAEALDDFTAIRGNYSLEGEVTHWLACSLYVACRKSIIPTVGKGIMEGNCVSLTRILRSAKLSLIQFFSKMKKWMDMSNLPQEFRERIERLERNFEVSTVIFKKYEPIFLDIFQNPYEEPPKLPRSRKQRRIPCSVKDLFNFCWTLFVYTKGNFRMIGDDLVNSYHLLLCCLDLIFANAIMCPNRQDLLNPSFKGLPSDFHTADFTASEEPPCIIAVLCELHDGLLVEAKGIKEHYFKPYISKLFDRKILKGECLLDLSSFTDNSKAVNKEYEEYVLTVGDFDERIFLGADAEEEIGTPRKFTRDTPLGKLTAQANVEYNLQQHFEKKRSFAPSTPLTGRRYLREKEAVITPVASATQSVSRLQSIVAGLKNAPSDQLINIFESCVRNPVENIMKILKGIGETFCQHYTQSTDEQPGSHIDFAVNRLKLAEILYYKILETVMVQETRRLHGMDMSVLLEQDIFHRSLMACCLEIVLFAYSSPRTFPWIIEVLNLQPFYFYKVIEVVIRSEEGLSRDMVKHLNSIEEQILESLAWSHDSALWEALQVSANKVPTCEEVIFPNNFETGNGGNVQGHLPLMPMSPLMHPRVKEVRTDSGSLRRDMQPLSPISVHERYSSPTAGSAKRRLFGEDPPKEMLMDKIITEGTKLKIAPSSSITAENVSILPGQTLLTMATAPVTGTTGHKVTIPLHGVANDAGEITLIPLSMNTNQESKVKSPVSLTAHSLIGASPKQTNLTKAQEVHSTGINRPKRTGSLALFYRKVYHLASVRLRDLCLKLDVSNELRRKIWTCFEFTLVHCPDLMKDRHLDQLLLCAFYIMAKVTKEERTFQEIMKSYRNQPQANSHVYRSVLLKSIPREVVAYNKNINDDFEMIDCDLEDATKTPDCSSGPVKEERGDLIKFYNTIYVGRVKSFALKYDLANQDHMMDAPPLSPFPHIKQQPGSPRRISQQHSIYISPHKNGSGLTPRSALLYKFNGSPSKVR

SEQ ID NO: 3894 - DNA, 3481 bp, Homo sapiens
accaaccccgccaggtcgcgggcactcccaccagctcgcagccctccttcggaccctcgatccgagagcgccccagccagagcttgtgcccatgcccctgtcccgcaggggaaggggatcccgcctggccggctctcgagcggcgactagtaacctcccgcgggcgacagccctctccccaaagagtgccggccgcggggccctgtctataagccacgcgcaactcctcacccggcggcgccattcctccgagcaggtcccgccggagtccgagccgcgggctgacttccgctcgggaaagtggctccaagagcccgccacaggggacgccagggactcgcggcaggctctgcgggccaggatgagttctaagcacaggatctgtagtcaggaagaagtagtgatcccctgtgcctatgacagtgattcagaaagtgtggatttggagctgagcaacttagagattattaaaaaaggctcaagtagcattgaactgacagacttggacatccctgacatccctggactccattgtgagcccctgtcacatagccccagacacctgacccaacaggacccgctcagtgaggccattgttgagaaactgatccagtccatccagaaggttttcaatggtgagctaaagggtgaacttgaaaagctgaaattcctaggagatctgtcttctctcagccaagctttaccttatgatgaaaccgcaaaatcattcattcacagccacatagcagacattgtgcataccttaaatgtactggtacaagaggaacgcccgcattctctgtccagttccatgcgccaggaggtctttgtcaccatcgctgatctcagttaccaagatgtccatttgctgttgggctctgaagatcgagctgagttgttcagtcttaccatcaagagtataatcactctgccctctgtaaggacccttacccagatacaggaaatcatgcccaatgggacctgcaacacagagtgtctttacaggcagacgtttcaggcattctctgagatgctccagagtttggtggtaaaagacccacatttggaaaatcttgacaccattattaagcacttggtcccctggttacagtcagtcaaagaccatgagcgggaacgggccacggccagcatggctcaagttctgaagtgcctatccaaacatctcaacttgaagcttccactgcgattccaaagacttggacacctagtggctctgatggcactgctctgtggggacccacaggaaaaggtggctgaggaggctgcagagggcattcactccctgctgcatatcaccctgaggctgaagtatatcactcatgacaagaaagatcagcaaaacttgaaaagagcattgacaaaatgtcgagaattcctggagctccacagctctgccgctaaatgcttctacaactgtcccttcagaattgcccaggtctttgaaggttttcttgattcaaatgagctctgccagtttataatgactacatttgataccctgaaaaccctgaaacatccctgcatccagcgatcagcaggagaattactgctaactttggcgaaaaatacagagtcccaatttgagaaggtgccagaaattatgggagttatctgtgcccagttatccataatcagccagcctagagtccgccaacaaatcataaataccgtgagtttatttatatccagacccaagtacacagatatagtgctcagcttccttctgtgtcatccagtgccgtataacaggcacctggctgaggtgtggagaatgctgtcggtggagcttcccagcacgacctggattctgtggaggctcctgaggaagctgcagaaatgccataatgagcctgcacaggagaagatggcatatgtggctgtggctgcaacagatgccctttatgaggtgtttttgggaaacaggcttcgagcagctacgttccgactctttcctcagcttctcatgacactgcttatccagattcatcacagcatcggcctcaccatgtctgatgtcgacatcccaagtggcctgtacacagaacaggaagtgccttcagaggtcacccctttgtgctttgccatgcaggctacaaagactctcctcctcagaacatgctgcttgcaggaattcaacatcatggaaaagaataaaggatgggctctcctgggaggaaaagatggccatcttcagggactatttctccttgccaacgcattgctggaaagaaatcagctccttgcacagaaggtcatgtacttattagtccctcttcttaaccgagggaatgataaacataaactcacatctgcaggcttttttgtggagcttctccggagtccagtggccaagagactgcccagcatatactctgttgcccgctttaaagactggctacaagatggaaatcatctctttagaattctcggcctgaggggactgtacaatcttgttggacaccaggagatgagagaagacatcaagagcctgttgccatacattgtagacagcttgcgtgaaaccgatgagaagatcgttctgtcagccatccagatactcctgcaacttgttagaacaatggatttcactaccctggctgccatgatgaggaccctgttctccttatttggtgatgtgagatctgatgttcatcgtttctccgtgactctctttggagccgccataaagtctgtaaaaaacccagataagaagagtatagagaaccaagtcctggacagcttggtcccactacttctgtattctcaggatgaaaatgatgcagtagctgaggagagcaggcaagtcctaactatatgtgcccagttcctgaagtggaagctgccccaagaagtgtactccaaagatccctggcacatcaaacctactgaagcaggaacaatctgcagattctttgaaaaaaagtgcaaggggaaaattaacatcctagaacaaacactgatgtactccaagaacccaaaacttcccatcagaagatcagcagtcttgtttgtaggccttttatcgaagtacatggatcacaatgagctcaggaggatgggtactgactggatagaggacgatctgagagacctgctgtgtgaccctgagccctcgctgtgcatcatcgcttcccagactctgttactagtccagatggcgagggccgaaccaaaacctaagcagagagtgaactggttgcagaagctcatgggcaggtcctctgcctagaaacacaaggcaagcaacatcagagacagaatcttgctatgttgtgcggcaagctagtcttgaactcatggcctcaagtcatcctcctgtgtcagcctcccaaagtgctgggattacaagcatgcaccacggcacccagcagaattccagtcttgagaaacaggtcaaggacagcttcaaaagagattctaaataaatgttaatgttacaatgttaaaaaaaaaaaaaaaa

SEQ ID NO: 3895 - protein, 1052 aa, Homo sapiens
MPLSRRGRGSRLAGSRAATSNLPRATALSPKSAGRGALSISHAQLLTRRRHSSEQVPPESEPRADFRSGKWLQEPATGDARDSRQALRARMSSKHRICSQEEVVIPCAYDSDSESVDLELSNLEIIKKGSSSIELTDLDIPDIPGLHCEPLSHSPRHLTQQDPLSEAIVEKLIQSIQKVFNGELKGELEKLKFLGDLSSLSQALPYDETAKSFIHSHIADIVHTLNVLVQEERPHSLSSSMRQEVFVTIADLSYQDVHLLLGSEDRAELFSLTIKSIITLPSVRTLTQIQEIMPNGTCNTECLYRQTFQAFSEMLQSLVVKDPHLENLDTIIKHLVPWLQSVKDHERERATASMAQVLKCLSKHLNLKLPLRFQRLGHLVALMALLCGDPQEKVAEEAAEGIHSLLHITLRLKYITHDKKDQQNLKRALTKCREFLELHSSAAKCFYNCPFRIAQVFEGFLDSNELCQFIMTTFDTLKTLKHPCIQRSAGELLLTLAKNTESQFEKVPEIMGVICAQLSIISQPRVRQQIINTVSLFISRPKYTDIVLSFLLCHPVPYNRHLAEVWRMLSVELPSTTWILWRLLRKLQKCHNEPAQEKMAYVAVAATDALYEVFLGNRLRAATFRLFPQLLMTLLIQIHHSIGLTMSDVDIPSGLYTEQEVPSEVTPLCFAMQATKTLLLRTCCLQEFNIMEKNKGWALLGGKDGHLQGLFLLANALLERNQLLAQKVMYLLVPLLNRGNDKHKLTSAGFFVELLRSPVAKRLPSIYSVARFKDWLQDGNHLFRILGLRGLYNLVGHQEMREDIKSLLPYIVDSLRETDEKIVLSAIQILLQLVRTMDFTTLAAMMRTLFSLFGDVRSDVHRFSVTLFGAAIKSVKNPDKKSIENQVLDSLVPLLLYSQDENDAVAEESRQVLTICAQFLKWKLPQEVYSKDPWHIKPTEAGTICRFFEKKCKGKINILEQTLMYSKNPKLPIRRSAVLFVGLLSKYMDHNELRRMGTDWIEDDLRDLLCDPEPSLCIIASQTLLLVQMARAEPKPKQRVNWLQKLMGRSSA

SEQ ID NO: 3896 - DNA, 2133 bp, Homo sapiens
accaaccccgccaggtcgcgggcactcccaccagctcgcagccctccttcggaccctcgatccgagagcgccccagccagagcttgtgcccatgcccctgtcccgcaggggaaggggatcccgcctggccggctctcgagcggcgactagtaacctcccgcgggcgacagccctctccccaaagagtgccggccgcggggccctgtctataagccacgcgcaactcctcacccggcggcgccattcctccgagcaggtcccgccggagtccgagccgcgggctgacttccgctcgggaaagtggctccaagagcccgccacaggggacgccagggactcgcggcaggctctgcgggccaggatgagttctaagcacaggatctgtagtcaggaagaagtagtgatcccctgtgcctatgacagtgattcagaaagtgtggatttggagctgagcaacttagagattattaaaaaaggctcaagtagcattgaactgacagacttggacatccctgacatccctggactccattgtgagcccctgtcacatagccccagacacctgacccaacaggacccgctcagtgaggccattgttgagaaactgatccagtccatccagaaggttttcaatggtgagctaaagggtgaacttgaaaagctgaaattcctaggagatctgtcttctctcagccaagctttaccttatgatgaaaccgcaaaatcattcattcacagccacatagcagacattgtgcataccttaaatgtactggtacaagaggaacgcccgcattctctgtccagttccatgcgccaggaggtctttgtcaccatcgctgatctcagttaccaagatgtccatttgctgttgggctctgaagatcgagctgagttgttcagtcttaccatcaagagtataatcactctgccctctgtaaggacccttacccagatacaggaaatcatgcccaatgggacctgcaacacagagtgtctttacaggcagacgtttcaggcattctctgagatgctccagagtttggtggtaaaagacccacatttggaaaatcttgacaccattattaagcacttggtcccctggttacagtcagtcaaagaccatgagcgggaacgggccacggccagcatggctcaagttctgaagtgcctatccaaacatctcaacttgaagcttccactgcgattccaaagacttggacacctagtggctctgatggcactgctctgtggggacccacaggaaaaggtggctgaggaggctgcagagggcattcactccctgctgcatatcaccctgaggctgaagtatatcactcatgacaagaaagatcagcaaaacttgaaaagagcattgacaaaatgtcgagaattcctggagctccacagctctgccgctaaatgcttctacaactgtcccttcagaattgcccaggtctttgaaggttttcttgattcaaatgagctctgccagtttataatgactacatttgataccctgaaaaccctgaaacatccctgcatccagcgatcagcaggagaattactgctaactttggcgaaaaatacagagtcccaatttgagaaggtgccagaaattatgggagttatctgtgcccagttatccataatcagccagcctagagtccgccaacaaatcataaataccgtgagtttatttatatccagacccaagtacacagatatagtgctcagcttccttctgtgtcatccagtgccgtataacaggcacctggctgaggtgtggagaatgctgtcggtggagcttcccagcacgacctggattctgtggaggctcctgaggaagctgcagaaatgccataatgagcctgcacaggagaagatggcatatgtggctgtggctgtaagcccttgagctttgcccctctaatgtcagcccctcccaggatgactgaccccacaccccagtggagagtgttccttttggtccctctcaaagcctgcatctgtcatccatttataagtctacagtgtttctgccaagggattgacatggagggagctggggagagtgaaggagtcagaatgccttaatacaaactcgtccaacctgcaaaaaaaaaaaaaaaa

SEQ ID NO: 3897 - protein, 608 aa, Homo sapiens
MPLSRRGRGSRLAGSRAATSNLPRATALSPKSAGRGALSISHAQLLTRRRHSSEQVPPESEPRADFRSGKWLQEPATGDARDSRQALRARMSSKHRICSQEEVVIPCAYDSDSESVDLELSNLEIIKKGSSSIELTDLDIPDIPGLHCEPLSHSPRHLTQQDPLSEAIVEKLIQSIQKVFNGELKGELEKLKFLGDLSSLSQALPYDETAKSFIHSHIADIVHTLNVLVQEERPHSLSSSMRQEVFVTIADLSYQDVHLLLGSEDRAELFSLTIKSIITLPSVRTLTQIQEIMPNGTCNTECLYRQTFQAFSEMLQSLVVKDPHLENLDTIIKHLVPWLQSVKDHERERATASMAQVLKCLSKHLNLKLPLRFQRLGHLVALMALLCGDPQEKVAEEAAEGIHSLLHITLRLKYITHDKKDQQNLKRALTKCREFLELHSSAAKCFYNCPFRIAQVFEGFLDSNELCQFIMTTFDTLKTLKHPCIQRSAGELLLTLAKNTESQFEKVPEIMGVICAQLSIISQPRVRQQIINTVSLFISRPKYTDIVLSFLLCHPVPYNRHLAEVWRMLSVELPSTTWILWRLLRKLQKCHNEPAQEKMAYVAVAVSP

SEQ ID NO: 3898 - DNA, 2028 bp, Homo sapiens
accaaccccgccaggtcgcgggcactcccaccagctcgcagccctccttcggaccctcgatccgagagcgccccagccagagcttgtgcccatgcccctgtcccgcaggggaaggggatcccgcctggccggctctcgagcggcgactagtaacctcccgcgggcgacagccctctccccaaagagtgccggccgcggggccctgtctataagccacgcgcaactcctcacccggcggcgccattcctccgagcaggtcccgccggagtccgagccgcgggctgacttccgctcgggaaagtggctccaagagcccgccacaggggacgccagggactcgcggcaggctctgcgggccaggatgagttctaagcacaggatctgtagtcaggaagaagtagtgatcccctgtgcctatgacagtgattcagaaagtgtggatttggagctgagcaacttagagattattaaaaaaggctcaagtagcattgaactgacagacttggacatccctgacatccctggactccattgtgagcccctgtcacatagccccagacacctgacccaacaggacccgctcagtgaggccattgttgagaaactgatccagtccatccagaaggttttcaatggtgagctaaagggtgaacttgaaaagctgaaattcctaggagatctgtcttctctcagccaagctttaccttatgatgaaaccgcaaaatcattcattcacagccacatagcagacattgtgcataccttaaatgtactggtacaagaggaacgcccgcattctctgtccagttccatgcgccaggaggtctttgtcaccatcgctgatctcagttaccaagatgtccatttgctgttgggctctgaagatcgagctgagttgttcagtcttaccatcaagagtataatcactctgccctctgtaaggacccttacccagatacaggaaatcatgcccaatgggacctgcaacacagagtgtctttacaggcagacgtttcaggcattctctgagatgctccagagtttggtggtaaaagacccacatttggaaaatcttgacaccattattaagcttccactgcgattccaaagacttggacacctagtggctctgatggcactgctctgtggggacccacaggaaaaggtggctgaggaggctgcagagggcattcactccctgctgcatatcaccctgaggctgaagtatatcactcatgacaagaaagatcagcaaaacttgaaaagagcattgacaaaatgtcgagaattcctggagctccacagctctgccgctaaatgcttctacaactgtcccttcagaattgcccaggtctttgaaggttttcttgattcaaatgagctctgccagtttataatgactacatttgataccctgaaaaacctgaaacatccctgcatccagcgatcagcaggagaattactgctaactttggcgaaaaatacagagtcccaatttgagaaggtgccagaaattatgggagttatctgtgcccagttatccataatcagccagcctagagtccgccaacaaatcataaataccgtgagtttatttatatccagacccaagtacacagatatagtgctcagcttccttctgtgtcatccagtgccgtataacaggcacctggctgaggtgtggagaatgctgtcggtggagcttcccagcacgacctggattctgtggaggctcctgaggaagctgcagaaatgccataatgagcctgcacaggagaagatggcatatgtggctgtggctgtaagcccttgagctttgcccctctaatgtcagcccctcccaggatgactgaccccacaccccagtggagagtgttccttttggtccctctcaaagcctgcatctgtcatccatttataagtctacagtgtttctgccaagggattgacatggagggagctggggagagtgaaggagtcagaatgccttaatacaaactcgtccaacctgcaaaaaaaaaaaaaaaa

SEQ ID NO: 3899 - protein, 573 aa, Homo sapiens
MPLSRRGRGSRLAGSRAATSNLPRATALSPKSAGRGALSISHAQLLTRRRHSSEQVPPESEPRADFRSGKWLQEPATGDARDSRQALRARMSSKHRICSQEEVVIPCAYDSDSESVDLELSNLEIIKKGSSSIELTDLDIPDIPGLHCEPLSHSPRHLTQQDPLSEAIVEKLIQSIQKVFNGELKGELEKLKFLGDLSSLSQALPYDETAKSFIHSHIADIVHTLNVLVQEERPHSLSSSMRQEVFVTIADLSYQDVHLLLGSEDRAELFSLTIKSIITLPSVRTLTQIQEIMPNGTCNTECLYRQTFQAFSEMLQSLVVKDPHLENLDTIIKLPLRFQRLGHLVALMALLCGDPQEKVAEEAAEGIHSLLHITLRLKYITHDKKDQQNLKRALTKCREFLELHSSAAKCFYNCPFRIAQVFEGFLDSNELCQFIMTTFDTLKNLKHPCIQRSAGELLLTLAKNTESQFEKVPEIMGVICAQLSIISQPRVRQQIINTVSLFISRPKYTDIVLSFLLCHPVPYNRHLAEVWRMLSVELPSTTWILWRLLRKLQKCHNEPAQEKMAYVAVAVSP

SEQ ID NO: 3900 - DNA, 2509 bp, Homo sapiens
ttccagcgttgcgagacggtcggttccaagtgggcctgggcgcgggggagaggcgggtctgtcctcgggaactgcaaggccctgtgagcgggaggactgggatcccggccgcggctgctggaagcgtcgaagctcagcgggccgcggacatgacctgtgcttagaactcatcctggcccgcagagcctgccgcgagtccctggcgtcccctgtggcgggctcttggagccactttcccgagcggaagtcagcccgcggctcggactccggcgggacctgctcggaggaatggcgccgccgggttcaagcactgtcttcctgttggccctgacaatcatagccagcacctgggctctgacgcccactcactacctcaccaagcatgacgtggagagactaaaagcctcgctggatcgccctttcacaaatttggaatctgccttctactccatcgtgggactcagcagccttggtgctcaggtgccagatgcaaagaaagcatgtacctacatcagatctaaccttgatcccagcaatgtggattccctcttctacgctgcccaggccagccaggccctctcaggatgtgagatctctatttcaaatgagaccaaagatctgcttctggcagctgtcagtgaggactcatctgttacccagatctaccatgcagttgcagctctaagtggctttggccttcccttggcatcccaagaagcactcagtgcccttactgctcgtctcagcaaggaggagactgtgctggcaacagtccaggctctgcagacagcatcccacctgtcccagcaggctgacctgaggagcatcgtggaggagattgaggaccttgttgctcgcctggatgaactcgggggcgtgtatctccagtttgaagaaggactggaaacaacagcgttatttgtggctgccacctacaagctcatggatcatgtggggactgagccatccattaaggaggatcaggtcatccagctgatgaacgcgatcttcagcaagaagaactttgagtccctctccgaagccttcagcgtggcctctgcagctgctgtgctctcgcataatcgctaccacgtgccagttgtggttgtgcctgagggctctgcttccgacactcatgaacaggctatcttgcggttgcaagtcaccaatgttctgtctcagcctctgactcaggccactgttaaactagaacatgctaaatctgttgcttccagagccactgtcctccagaagacatccttcacccctgtaggggatgtttttgaactaaatttcatgaacgtcaaattttccagtggttattatgacttccttgtcgaagttgaaggtgacaaccggtatattgcaaataccgtagagctcagagtcaagatctccactgaagttggcatcacaaatgttgatctttccaccgtggataaggatcagagcattgcacccaaaactacccgggtgacatacccagccaaagccaagggcacattcatcgcagacagccaccagaacttcgccttgttcttccagctggtagatgtgaacactggtgctgaactcactcctcaccagacatttgtccgactccataaccagaagactggccaggaagtggtgtttgttgccgagccagacaacaagaacgtgtacaagtttgaactggatacctctgaaagaaagattgaatttgactctgcctctggcacctacactctctacttaatcattggagatgccactttgaagaacccaatcctctggaatgtggctgatgtggtcatcaagttccctgaggaagaagctccctcgactgtcttgtcccagaaccttttcactccaaaacaggaaattcagcacctgttccgcgagcctgagaagaggccccccaccgtggtgtccaatacattcactgccctgatcctctcgccgttgcttctgctcttcgctctgtggatccggattggtgccaatgtctccaacttcacttttgctcctagcacgattatatttcacctgggacatgctgctatgctgggactcatgtatgtctactggactcagctcaacatgttccagaccttgaagtacctggccatcctgggcagtgtgacgtttctggctggcaatcggatgctggcccagcaggcagtcaagagaacagcacattagttccagaagaaagatggaaattctgaaaactgaatgtcaagaaaaggagtcaagaacaattcacagtatgagaagaaaaatggaaaaaaaaaactttatttaaaaaagaaaaaagtccagattgtagttatacttttgcttgtttttcagtttccccaacacacagcagatacctggtgagctcagatagtctctttctctgacactgtgtaagaagctgtgaatattcctaacttacccagatgttgcttttgaaaagttgaaatgtgtaattgttttggaataaagagggtaacaataggaacaaaaaaaaaaaaaaaaaaaa

SEQ ID NO: 3901 - protein, 631 aa, Homo sapiens
MAPPGSSTVFLLALTIIASTWALTPTHYLTKHDVERLKASLDRPFTNLESAFYSIVGLSSLGAQVPDAKKACTYIRSNLDPSNVDSLFYAAQASQALSGCEISISNETKDLLLAAVSEDSSVTQIYHAVAALSGFGLPLASQEALSALTARLSKEETVLATVQALQTASHLSQQADLRSIVEEIEDLVARLDELGGVYLQFEEGLETTALFVAATYKLMDHVGTEPSIKEDQVIQLMNAIFSKKNFESLSEAFSVASAAAVLSHNRYHVPVVVVPEGSASDTHEQAILRLQVTNVLSQPLTQATVKLEHAKSVASRATVLQKTSFTPVGDVFELNFMNVKFSSGYYDFLVEVEGDNRYIANTVELRVKISTEVGITNVDLSTVDKDQSIAPKTTRVTYPAKAKGTFIADSHQNFALFFQLVDVNTGAELTPHQTFVRLHNQKTGQEVVFVAEPDNKNVYKFELDTSERKIEFDSASGTYTLYLIIGDATLKNPILWNVADVVIKFPEEEAPSTVLSQNLFTPKQEIQHLFREPEKRPPTVVSNTFTALILSPLLLLFALWIRIGANVSNFTFAPSTIIFHLGHAAMLGLMYVYWTQLNMFQTLKYLAILGSVTFLAGNRMLAQQAVKRTAH

SEQ ID NO: 3902 - DNA, 454 bp, Homo sapiens
atgccactctgggtgttcttctttgtgatcctcaccctcagcaacagctcccactgctccccacctccccctttgaccctcaggatgcggcggtatgcagatgccatcttcaccaacagctaccggaaggtgctgggccagctgtccgcccgcaagctgctccaggacatcatgagcaggcagcagggagagagcaaccaagagcgaggagcaagggcacggcttggtcgtcaggtagacagcatgtgggcagaacaaaagcaaatggaattggagagcatcctggtggccctgctgcagaagcacagcaggaactcccagggatgaagattcctcctgtgacccgggctacctgtagccaaaatgcaactggatccagttaatcctctcatttctgacccactttttcctttgaaaatacaataaaattcccccataccggtgtgcatttaaa

SEQ ID NO: 3903 - protein, 108 aa, Homo sapiens
MPLWVFFFVILTLSNSSHCSPPPPLTLRMRRYADAIFTNSYRKVLGQLSARKLLQDIMSRQQGESNQERGARARLGRQVDSMWAEQKQMELESILVALLQKHSRNSQG

SEQ ID NO: 3904 - DNA, 1268 bp, Homo sapiens
gggaactacttccgggggagcggcgcggcggcgcgggagttggttctaaagagtggtgagtcagaagagacgtcaggcagcaagcgacttgggccatggcctctgacctagacttctcacctccggaggtgcccgagcccactttcctggagaacctgctacggtacggactcttcctgggagccatcttccagctcatctgtgtgctggccatcatcgtacccattcccaagtcccacgaggcggaggctgaaccgtctgagcccagaagtgctgaggtgacgaggaagcccaaggctgctgttccttctgtgaacaagaggcccaagaaagagactaagaagaagcggtagaagaggaggcctgaggagctgggcgggcagggagagggtcttggggacagccctcctgggaatctacattgtgttcccccgcattccaggctcagggtctgaggaggctgtgacgccctatgaccgcagagatctagacagtcgtaacagtccccaggctccagctgggcaatccaccacttcctcttccttctgcttctgtgacggtttagagtcaagggggctgaaacacactgtgagcatagactgtattaggtttgttcagaagccgggtcagctcacagagtcacattttcttgcttagtcatgtgtccctccttgagttgccccctccttgtgggtttacactacatttgggagtcattgtctaatgctgacaagcacaccctctcccattatttgtgcactacagatctcctcctgatcagtcacctttgttgctgctgtgtagacagagccaggcctcacctgtttgtttaggccaagatgccatggacatgcagcgttagtgatcccactagctgtgacagccaggcccagaaaatgcctggcgtgagagccagcagacagccaggccagggtaggcagtgcctgcttctgctccatcaggtgcaggggatttggctgaaggcgtgcatatttcctgggcacaaacttcctgagcctctgaaatgggaggctcgtcaatttcagaccaacctcttttcaacccatcatagcacgttcaaggtgtgccttttacttctacctgtacatcccccatcccttcaattctttcattccctgaccagtgagagggttcctgggggaagtatggtgaataaactgacatgcatgcttcagaaaaaaaaaaaaaaaaaaaaaaaaaaaaaaaaaaaaaaaaaaaaaaaaaaaaaaaaaaaaaaaaaaaaaaaa

SEQ ID NO: 3905 - protein, 85 aa, Homo sapiens
MASDLDFSPPEVPEPTFLENLLRYGLFLGAIFQLICVLAIIVPIPKSHEAEAEPSEPRSAEVTRKPKAAVPSVNKRPKKETKKKR

SEQ ID NO: 3906 - DNA, 1385 bp, Homo sapiens
gggaactacttccgggggagcggcgcggcggcgcgggaggatctctcaccccgtcactcagggtggcgcaatcacgactcattggctcactgcagcctagacctcccagctggagcaattctcctgcctcagccttctgagtagctgggactacagttggttctaaagagtggtgagtcagaagagacgtcaggcagcaagcgacttgggccatggcctctgacctagacttctcacctccggaggtgcccgagcccactttcctggagaacctgctacggtacggactcttcctgggagccatcttccagctcatctgtgtgctggccatcatcgtacccattcccaagtcccacgaggcggaggctgaaccgtctgagcccagaagtgctgaggtgacgaggaagcccaaggctgctgttccttctgtgaacaagaggcccaagaaagagactaagaagaagcggtagaagaggaggcctgaggagctgggcgggcagggagagggtcttggggacagccctcctgggaatctacattgtgttcccccgcattccaggctcagggtctgaggaggctgtgacgccctatgaccgcagagatctagacagtcgtaacagtccccaggctccagctgggcaatccaccacttcctcttccttctgcttctgtgacggtttagagtcaagggggctgaaacacactgtgagcatagactgtattaggtttgttcagaagccgggtcagctcacagagtcacattttcttgcttagtcatgtgtccctccttgagttgccccctccttgtgggtttacactacatttgggagtcattgtctaatgctgacaagcacaccctctcccattatttgtgcactacagatctcctcctgatcagtcacctttgttgctgctgtgtagacagagccaggcctcacctgtttgtttaggccaagatgccatggacatgcagcgttagtgatcccactagctgtgacagccaggcccagaaaatgcctggcgtgagagccagcagacagccaggccagggtaggcagtgcctgcttctgctccatcaggtgcaggggatttggctgaaggcgtgcatatttcctgggcacaaacttcctgagcctctgaaatgggaggctcgtcaatttcagaccaacctcttttcaacccatcatagcacgttcaaggtgtgccttttacttctacctgtacatcccccatcccttcaattctttcattccctgaccagtgagagggttcctgggggaagtatggtgaataaactgacatgcatgcttcagaaaaaaaaaaaaaaaaaaaaaaaaaaaaaaaaaaaaaaaaaaaaaaaaaaaaaaaaaaaaaaaaaaaaaaaa

SEQ ID NO: 3907 - protein, 85 aa, Homo sapiens; identical to SEQ ID NO: 3905

SEQ ID NO: 3908 - DNA, 3734 bp, Homo sapiens
caaatgcgaacttaggctgttacacaactgctggggtctgttctcgccgcccgcccggcagtcaggcagcgtcgccgccgtggtagcagcctcagccgtttctggagtctcgggcccacagtcaccgccgcttacctgcgcctcctcgagcctccggagtccccgtccgcccgcacaggccggttcgccgtctgcgtctcccccacgccgcctcgcctgccgccgcgctcgtccctccgggccgacatgagtggggaccacctccacaacgattcccagatcgaagcggatttccgattgaatgattctcataaacacaaagataaacacaaagatcgagaacaccggcacaaagaacacaagaaggagaaggaccgggaaaagtccaagcatagcaacagtgaacataaagattctgaaaagaaacacaaagagaaggagaagaccaaacacaaagatggaagctcagaaaagcataaagacaaacataaagacagagacaaggaaaaacgaaaagaggaaaaggttcgagcctctggggatgcaaaaataaagaaggagaaggaaaatggcttctctagtccaccacaaattaaagatgaacctgaagatgatggctattttgttcctcctaaagaggatataaagccattaaagagacctcgagatgaggatgatgctgattataaacctaagaaaattaaaacagaagataccaagaaggagaagaaaagaaaactagaagaagaagaggatggtaaattgaaaaaacccaagaataaagataaagataaaaaagttcctgagccagataacaagaaaaagaagccgaagaaagaagaggaacagaagtggaaatggtgggaagaagagcgctatcctgaaggcatcaagtggaaattcctagaacataaaggtccagtatttgccccaccatatgagcctcttccagagaatgtcaagttttattatgatggtaaagtcatgaagctgagccccaaagcagaggaagtagctacgttctttgcaaaaatgctcgaccatgaatatactaccaaggaaatatttaggaaaaatttctttaaagactggagaaaggaaatgactaatgaagagaagaatattatcaccaacctaagcaaatgtgattttacccagatgagccagtatttcaaagcccagacggaagctcggaaacagatgagcaaggaagagaaactgaaaatcaaagaggagaatgaaaaattactgaaagaatatggattctgtattatggataaccacaaagagaggattgctaacttcaagatagagcctcctggacttttccgtggccgcggcaaccaccccaagatgggcatgctgaagagacgaatcatgcccgaggatataatcatcaactgtagcaaagatgccaaggttccttctcctcctccaggacataagtggaaagaagtccggcatgataacaaggttacttggctggtttcctggacagagaacatccaaggttccattaaatacatcatgcttaaccctagttcacgaatcaagggtgagaaggactggcagaaatacgagactgctcggcggctgaaaaaatgtgtggacaagatccggaaccagtatcgagaagactggaagtccaaagagatgaaagtccggcagagagctgtagccctgtacttcatcgacaagcttgctctgagagcaggcaatgaaaaggaggaaggagaaacagcggacactgtgggctgctgctcacttcgtgtggagcacatcaatctacacccagagttggatggtcaggaatatgtggtagagtttgacttcctcgggaaggactccatcagatactataacaaggtccctgttgagaaacgagtttttaagaacctacaactatttatggagaacaagcagcccgaggatgatctttttgatagactcaatactggtattctgaataagcatcttcaggatctcatggagggcttgacagccaaggtattccgtacatacaatgcctccatcacgctacagcagcagctaaaagaactgacagccccggatgagaacatcccagcgaagatcctttcttataaccgtgccaatcgagctgttgcaattctttgtaaccatcagagggcaccaccaaaaacttttgagaagtctatgatgaacttgcaaactaagattgatgccaagaaggaacagctagcagatgcccggagagacctgaaaagtgctaaggctgatgccaaggtcatgaaggatgcaaagacgaagaaggtagtagagtcaaagaagaaggctgttcagagactggaggaacagttgatgaagctggaagttcaagccacagaccgagaggaaaataaacagattgccctgggaacctccaaactcaattatctggaccctaggatcacagtggcttggtgcaagaagtggggtgtcccaattgagaagatttacaacaaaacccagcgggagaagtttgcctgggccattgacatggctgatgaagactatgagttttagccagtctcaagaggcagagttctgtgaagaggaacagtgtggtttgggaaagatggataaactgagcctcacttgccctcgtgcctgggggagagaggcagcaagtcttaacaaaccaacatctttgcgaaaagataaacctggagatattataagggagagctgagccagttgtcctatggacaacttatttaaaaatatttcagatatcaaaattctagctgtatgatttgttttgaattttgtttttattttcaagagggcaagtggatgggaatttgtcagcgttctaccaggcaaattcactgtttcactgaaatgtttggattctcttagctactgtatgcaaagtccgattatattggtgcgtttttacagttagggttttgcaataacttctatattttaatagaaataaattcctaaactcccttccctctctcccatttcaggaatttaaaattaagtagaacaaaaaacccagcgcacctgttagagtcgtcactctctattgtcatggggatcaattttcattaaacttgaagcagtcgtggctttggcagtgttttggttcagacacctgttcacagaaaaagcatgatgggaaaatatttcctgacttgagtgttcctttttaaatgtgaatttttatttctttttaattattttaaaatatttaaacctttttcttgatcttaaagatcgtgtagattggggttggggagggatgaagggcgagtgaatctaaggataatgaaataatcagtgactgaaaccattttcccatcatcctttgttctgagcattcgctgtaccctttaagatatccatctttttctttttaaccctaatctttcacttgaaagattttattgtataaaaagtttcacaggtcaataaacttagaggaaaatgagtatttggtccaaaaaaaggaaaaataatcaagattttagggcttttattttttcttttgtaattgtgtaaaaaatggaaaaaaacataaaaagcagaattttaatgtgaagacattttttgctataatcattagttttagaggcattgttagtttagtgtgtgtgcagagtccatttcccacatctttcctcaagtatcttctatttttatcatgaattcccttttaatcaactgtaggttatttaaaataaattcctacaacttaatggaaa

SEQ ID NO: 3909 - protein, 765 aa, Homo sapiens
MSGDHLHNDSQIEADFRLNDSHKHKDKHKDREHRHKEHKKEKDREKSKHSNSEHKDSEKKHKEKEKTKHKDGSSEKHKDKHKDRDKEKRKEEKVRASGDAKIKKEKENGFSSPPQIKDEPEDDGYFVPPKEDIKPLKRPRDEDDADYKPKKIKTEDTKKEKKRKLEEEEDGKLKKPKNKDKDKKVPEPDNKKKKPKKEEEQKWKWWEEERYPEGIKWKFLEHKGPVFAPPYEPLPENVKFYYDGKVMKLSPKAEEVATFFAKMLDHEYTTKEIFRKNFFKDWRKEMTNEEKNIITNLSKCDFTQMSQYFKAQTEARKQMSKEEKLKIKEENEKLLKEYGFCIMDNHKERIANFKIEPPGLFRGRGNHPKMGMLKRRIMPEDIIINCSKDAKVPSPPPGHKWKEVRHDNKVTWLVSWTENIQGSIKYIMLNPSSRIKGEKDWQKYETARRLKKCVDKIRNQYREDWKSKEMKVRQRAVALYFIDKLALRAGNEKEEGETADTVGCCSLRVEHINLHPELDGQEYVVEFDFLGKDSIRYYNKVPVEKRVFKNLQLFMENKQPEDDLFDRLNTGILNKHLQDLMEGLTAKVFRTYNASITLQQQLKELTAPDENIPAKILSYNRANRAVAILCNHQRAPPKTFEKSMMNLQTKIDAKKEQLADARRDLKSAKADAKVMKDAKTKKVVESKKKAVQRLEEQLMKLEVQATDREENKQIALGTSKLNYLDPRITVAWCKKWGVPIEKIYNKTQREKFAWAIDMADEDYEF

SEQ ID NO: 3910 - DNA, 5205 bp, Homo sapiens
gagccgccgccgggtcccgctcgtctgccgcctcagcctcagccccaacctcagccgccgccgttgcgcttgctcccgggcggtcctggcctgtgccgccgccgcccccagcgtcggagccatggcgggcgccgcgtccccttgcgccaacggctgcgggcccggcgcgccctcggacgccgaggtgctgcacctctgccgcagcctcgaggtgggcaccgtcatgactttgttctactccaagaagtcgcagcgacccgagcggaagaccttccaggtcaagctggagacgcgccagatcacgtggagccggggcgccgacaagatcgagggggccattgacattcgtgaaattaaggagatccgcccagggaagacctcacgggactttgatcgctatcaagaggacccagctttccggccggaccagtcacattgctttgtcattctctatggaatggaatttcgcctgaaaacgctgagcctgcaagccacatctgaggatgaagtgaacatgtggatcaagggcttaacttggctgatggaggatacattgcaggcacccacacccctgcagattgagaggtggctccggaagcagttttactcagtggatcggaatcgtgaggatcgtatatcagccaaggacctgaagaacatgctgtcccaggtcaactaccgggtccccaacatgcgcttcctccgagagcggctgacggacctggagcagcgcagcggggacatcacctacgggcagtttgctcagctgtaccgcagcctcatgtacagcgcccagaagacgatggacctccccttcttggaagccagtactctgagggctggggagcggccggagctttgccgagtgtcccttcctgagttccagcagttccttcttgactaccagggggagctgtgggctgttgatcgcctccaggtgcaggagttcatgctcagcttcctccgagaccccttacgagagatcgaggagccatacttcttcctggatgagtttgtcaccttcctgttctccaaagagaacagtgtgtggaactcgcagctggatgcagtatgcccggacaccatgaacaaccctctttcccactactggatctcctcctcgcacaacacgtacctgaccggggaccagttctccagtgagtcctccttggaagcctatgctcgctgcctgcggatgggctgtcgctgcattgagttggactgctgggacggcccggatgggatgccagttatttaccatgggcacacccttaccaccaagatcaagttctcagatgtcctgcacaccatcaaggagcatgcctttgtggcctcagagtacccagtcatcctgtccattgaggaccactgcagcattgcccagcagagaaacatggcccaatacttcaagaaggtgctgggggacacactcctcaccaagcccgtggagatctctgccgacgggctcccctcacccaaccagcttaagaggaagatcctcatcaagcacaagaagctggctgagggcagtgcctacgaggaggtgcctacatccatgatgtactctgagaacgacatcagcaactctatcaagaatggcatcctctacctggaggaccctgtgaaccacgaatggtatccccactactttgttctgaccagcagcaagatctactactctgaggagaccagcagtgaccagggcaacgaggatgaggaggagcccaaggaggtcagcagcagcacagagctgcactccaatgagaagtggttccatgggaagctaggggcagggcgtgacgggcgtcacatcgctgagcgcctgcttactgagtactgcatcgagaccggagcccctgacggctccttcctcgtgcgagagagtgagaccttcgtgggcgactacacgctctctttctggcggaacgggaaagtccagcactgccgtatccactcccggcaagatgctgggacccccaagttcttcttgacagacaacctcgtctttgactccctctatgacctcatcacgcactaccagcaggtgcccctgcgctgtaatgagtttgagatgcgactttcagagcctgtcccacagaccaacgcccacgagagcaaagagtggtaccacgcgagcctgaccagagcacaggctgagcacatgctaatgcgcgtccctcgtgatggggccttcctggtgcggaagcggaatgaacccaactcatatgccatctctttccgggctgagggcaagatcaagcattgccgtgtccagcaagagggccagacagtgatgctagggaactcggagttcgacagccttgttgacctcatcagctactatgagaaacacccgctataccgcaagatgaagctgcgctatcccatcaacgaggaggcactggagaagattggcacagctgagcctgactacggggccctgtatgagggacgcaaccctggcttctatgtagaggcaaaccctatgccaactttcaagtgtgcagtcaaagccctctttgactacaaggcccagagggaggacgagctgaccttcatcaagagcgccatcatccagaatgtggagaagcaagagggaggctggtggcgaggggactacggagggaagaagcagctgtggttcccatcaaactacgtggaagagatggtcaaccccgtggccctggagccggagagggagcacttggacgagaacagccccctaggggacttgctgcggggggtcttggatgtgccggcttgtcagattgccatccgtcctgagggcaagaacaaccggctcttcgtcttctccatcagcatggcgtcggtggcccactggtccctggatgttgctgccgactcacaggaggagctgcaggactgggtgaaaaagatccgtgaagtggcccagacagcagacgccaggctcactgaagggaagataatggaacggaggaagaagattgccctggagctctctgaacttgtcgtctactgccggcctgttccctttgatgaagagaagattggcacagaacgtgcttgctaccgggacatgtcatccttcccggaaaccaaggctgagaaatacgtgaacaaggccaaaggcaagaagttccttcagtacaatcgactgcagctctcccgcatctaccccaagggccagcgactggattcctccaactacgatcctttgcccatgtggatctgtggcagtcagcttgtggccctcaacttccagacccctgacaagcctatgcagatgaaccaggccctcttcatgacgggcaggcactgtggctacgtgctgcagccaagcaccatgcgggatgaggccttcgacccctttgacaagagcagcctccgcgggctggagccatgtgccatctctattgaggtgctgggggcccgacatctgccaaagaatggccgaggcattgtgtgtccttttgtggagattgaggtggctggagctgagtatgacagcaccaagcagaagacagagtttgtggtggacaatggactcaaccctgtatggccagccaagcccttccacttccagatcagtaaccctgaatttgcctttctgcgcttcgtggtgtatgaggaagacatgtttagtgaccagaatttcctggctcaggctactttcccagtaaaaggcctgaagacaggatacagagcagtgcctttgaagaacaactacagtgaggacctggagttggcctccctgctgatcaagattgacattttccctgccaagcaggagaatggtgacctcagtcccttcagtggtacgtccctgcgggagcggggctcagatgcctcaggccagctgtttcatggccgagcccgggaaggctcctttgaatcccgctaccagcagccgtttgaggacttccgcatctcccaggagcatctcgcagaccattttgacagtcgagaacgaagggccccaagaaggactcgggtcaatggagacaaccgcctctagttgtaccccagcctcgttggagagcagcaggtgctgtgcgccttgtagaatgccgcgaactgggttctttggaagcagccccctgtggcggccttccgggtctcgcagcctgaagcctggattccagcagtgaatgctagacagaaaccaagccattaatgagatgttattactgttttgggcctccatgccccagctctggatgaaggcaaaaactgtactgtgtttcgcattaagcacacacatctggccctgacttctggagatggatccttccatcttgtggggccaggaccatggccgaagccccttggagagagaggctgcctcagccagtggcacaggagactccaaggagctactgacattcctaagagtggaggaggaggaggagccttgctgggccagggaaacaaagtttacattgtcctgtagctttaaaaccacagctgggcagggtgagaagctagatgcccctgcagtttggccctggagccagggcagaggaatgtagggcctgcatggagaagggttctgccctgcctgaggaggaggacacagcacaagggcacattgcccatggctgggaacatgacccagcctgaaagatacaggggatcatgttaaaaatagcagtattatttttcgtctcaatggtattgtaactaagttatttactcctcctgctcctcacccctgtagggaaaccttggagaggagagtggcaggtgggctgcctgctgtgttaagaggacttagtttgtgatgtaaggcactgtcaggaatggggggcgggccagggtgggaagagaagaaatagcagagcctattttggtgaggttttttgtttttaagtcaaagaagactcagtatgctttccctgaggaatgaaaaagggattgaggagttgcctgactcctgggtgggtggggtacaggcagttaggtgctgaatgaagctgccatccttgctgcagcttctaactggtaaaaagatccagggatggagatgggaaggttagaaaggcagccctcacctctgaggacagaggccggggtccaggcccgtgggcgcaaaggtgcctcatagcatagccagcattcagcacacacaaacctactgcccacatttgggctcagggttggccatttgctagttctgctgccctcttaagatctgactgccaaataaatcatcctcatgtcctt

SEQ ID NO: 3911 - protein, 1291 aa, Homo sapiens
MAGAASPCANGCGPGAPSDAEVLHLCRSLEVGTVMTLFYSKKSQRPERKTFQVKLETRQITWSRGADKIEGAIDIREIKEIRPGKTSRDFDRYQEDPAFRPDQSHCFVILYGMEFRLKTLSLQATSEDEVNMWIKGLTWLMEDTLQAPTPLQIERWLRKQFYSVDRNREDRISAKDLKNMLSQVNYRVPNMRFLRERLTDLEQRSGDITYGQFAQLYRSLMYSAQKTMDLPFLEASTLRAGERPELCRVSLPEFQQFLLDYQGELWAVDRLQVQEFMLSFLRDPLREIEEPYFFLDEFVTFLFSKENSVWNSQLDAVCPDTMNNPLSHYWISSSHNTYLTGDQFSSESSLEAYARCLRMGCRCIELDCWDGPDGMPVIYHGHTLTTKIKFSDVLHTIKEHAFVASEYPVILSIEDHCSIAQQRNMAQYFKKVLGDTLLTKPVEISADGLPSPNQLKRKILIKHKKLAEGSAYEEVPTSMMYSENDISNSIKNGILYLEDPVNHEWYPHYFVLTSSKIYYSEETSSDQGNEDEEEPKEVSSSTELHSNEKWFHGKLGAGRDGRHIAERLLTEYCIETGAPDGSFLVRESETFVGDYTLSFWRNGKVQHCRIHSRQDAGTPKFFLTDNLVFDSLYDLITHYQQVPLRCNEFEMRLSEPVPQTNAHESKEWYHASLTRAQAEHMLMRVPRDGAFLVRKRNEPNSYAISFRAEGKIKHCRVQQEGQTVMLGNSEFDSLVDLISYYEKHPLYRKMKLRYPINEEALEKIGTAEPDYGALYEGRNPGFYVEANPMPTFKCAVKALFDYKAQREDELTFIKSAIIQNVEKQEGGWWRGDYGGKKQLWFPSNYVEEMVNPVALEPEREHLDENSPLGDLLRGVLDVPACQIAIRPEGKNNRLFVFSISMASVAHWSLDVAADSQEELQDWVKKIREVAQTADARLTEGKIMERRKKIALELSELVVYCRPVPFDEEKIGTERACYRDMSSFPETKAEKYVNKAKGKKFLQYNRLQLSRIYPKGQRLDSSNYDPLPMWICGSQLVALNFQTPDKPMQMNQALFMTGRHCGYVLQPSTMRDEAFDPFDKSSLRGLEPCAISIEVLGARHLPKNGRGIVCPFVEIEVAGAEYDSTKQKTEFVVDNGLNPVWPAKPFHFQISNPEFAFLRFVVYEEDMFSDQNFLAQATFPVKGLKTGYRAVPLKNNYSEDLELASLLIKIDIFPAKQENGDLSPFSGTSLRERGSDASGQLFHGRAREGSFESRYQQPFEDFRISQEHLADHFDSRERRAPRRTRVNGDNRL

SEQ ID NO: 3912 - DNA, 5202 bp, Homo sapiens
gagccgccgccgggtcccgctcgtctgccgcctcagcctcagccccaacctcagccgccgccgttgcgcttgctcccgggcggtcctggcctgtgccgccgccgcccccagcgtcggagccatggcgggcgccgcgtccccttgcgccaacggctgcgggcccggcgcgccctcggacgccgaggtgctgcacctctgccgcagcctcgaggtgggcaccgtcatgactttgttctactccaagaagtcgcagcgacccgagcggaagaccttccaggtcaagctggagacgcgccagatcacgtggagccggggcgccgacaagatcgagggggccattgacattcgtgaaattaaggagatccgcccagggaagacctcacgggactttgatcgctatcaagaggacccagctttccggccggaccagtcacattgctttgtcattctctatggaatggaatttcgcctgaaaacgctgagcctgcaagccacatctgaggatgaagtgaacatgtggatcaagggcttaacttggctgatggaggatacattgcaggcacccacacccctgcagattgagaggtggctccggaagcagttttactcagtggatcggaatcgtgaggatcgtatatcagccaaggacctgaagaacatgctgtcccaggtcaactaccgggtccccaacatgcgcttcctccgagagcggctgacggacctggagcagcgcagcggggacatcacctacgggcagtttgctcagctgtaccgcagcctcatgtacagcgcccagaagacgatggacctccccttcttggaagccagtactctgagggctggggagcggccggagctttgccgagtgtcccttcctgagttccagcagttccttcttgactaccagggggagctgtgggctgttgatcgcctccaggtgcaggagttcatgctcagcttcctccgagaccccttacgagagatcgaggagccatacttcttcctggatgagtttgtcaccttcctgttctccaaagagaacagtgtgtggaactcgcagctggatgcagtatgcccggacaccatgaacaaccctctttcccactactggatctcctcctcgcacaacacgtacctgaccggggaccagttctccagtgagtcctccttggaagcctatgctcgctgcctgcggatgggctgtcgctgcattgagttggactgctgggacggcccggatgggatgccagttatttaccatgggcacacccttaccaccaagatcaagttctcagatgtcctgcacaccatcaaggagcatgcctttgtggcctcagagtacccagtcatcctgtccattgaggaccactgcagcattgcccagcagagaaacatggcccaatacttcaagaaggtgctgggggacacactcctcaccaagcccgtggagatctctgccgacgggctcccctcacccaaccagcttaagaggaagatcctcatcaagcacaagaagctggctgagggcagtgcctacgaggaggtgcctacatccatgatgtactctgagaacgacatcagcaactctatcaagaatggcatcctctacctggaggaccctgtgaaccacgaatggtatccccactactttgttctgaccagcagcaagatctactactctgaggagaccagcagtgaccagggcaacgaggatgaggaggagcccaaggaggtcagcagcagcacagagctgcactccaatgagaagtggttccatgggaagctaggggcagggcgtgacgggcgtcacatcgctgagcgcctgcttactgagtactgcatcgagaccggagcccctgacggctccttcctcgtgcgagagagtgagaccttcgtgggcgactacacgctctctttctggcggaacgggaaagtccagcactgccgtatccactcccggcaagatgctgggacccccaagttcttcttgacagacaacctcgtctttgactccctctatgacctcatcacgcactaccagcaggtgcccctgcgctgtaatgagtttgagatgcgactttcagagcctgtcccacagaccaacgcccacgagagcaaagagtggtaccacgcgagcctgaccagagcacaggctgagcacatgctaatgcgcgtccctcgtgatggggccttcctggtgcggaagcggaatgaacccaactcatatgccatctctttccgggctgagggcaagatcaagcattgccgtgtccagcaagagggccagacagtgatgctagggaactcggagttcgacagccttgttgacctcatcagctactatgagaaacacccgctataccgcaagatgaagctgcgctatcccatcaacgaggaggcactggagaagattggcacagctgagcctgactacggggccctgtatgagggacgcaaccctggcttctatgtagaggcaaaccctatgccaactttcaagtgtgcagtcaaagccctctttgactacaaggcccagagggaggacgagctgaccttcatcaagagcgccatcatccagaatgtggagaagcaagagggaggctggtggcgaggggactacggagggaagaagcagctgtggttcccatcaaactacgtggaagagatggtcaaccccgtggccctggagccggagagggagcacttggacgagaacagccccctaggggacttgctgcggggggtcttggatgtgccggcttgtcagattgccatccgtcctgagggcaagaacaaccggctcttcgtcttctccatcagcatggcgtcggtggcccactggtccctggatgttgctgccgactcacaggaggagctgcaggactgggtgaaaaagatccgtgaagtggcccagacagcagacgccaggctcactgaagggaagataatggaacggaggaagaagattgccctggagctctctgaacttgtcgtctactgccggcctgttccctttgatgaagagaagattggcacagaacgtgcttgctaccgggacatgtcatccttcccggaaaccaaggctgagaaatacgtgaacaaggccaaaggcaagaagttccttcagtacaatcgactgcagctctcccgcatctaccccaagggccagcgactggattcctccaactacgatcctttgcccatgtggatctgtggcagtcagcttgtggccctcaacttccagacccctgacaagcctatgcagatgaaccaggccctcttcatgacgggcaggcactgtggctacgtgctgcagccaagcaccatgcgggatgaggccttcgacccctttgacaagagcagcctccgcgggctggagccatgtgccatctctattgaggtgctgggggcccgacatctgccaaagaatggccgaggcattgtgtgtccttttgtggagattgaggtggctggagctgagtatgacagcaccaagcagaagacagagtttgtggtggacaatggactcaaccctgtatggccagccaagcccttccacttccagatcagtaaccctgaatttgcctttctgcgcttcgtggtgtatgaggaagacatgtttagtgaccagaatttcctggctcaggctactttcccagtaaaaggcctgaagacaggatacagagcagtgcctttgaagaacaactacagtgaggacctggagttggcctccctgctgatcaagattgacattttccctgccaaggagaatggtgacctcagtcccttcagtggtacgtccctgcgggagcggggctcagatgcctcaggccagctgtttcatggccgagcccgggaaggctcctttgaatcccgctaccagcagccgtttgaggacttccgcatctcccaggagcatctcgcagaccattttgacagtcgagaacgaagggccccaagaaggactcgggtcaatggagacaaccgcctctagttgtaccccagcctcgttggagagcagcaggtgctgtgcgccttgtagaatgccgcgaactgggttctttggaagcagccccctgtggcggccttccgggtctcgcagcctgaagcctggattccagcagtgaatgctagacagaaaccaagccattaatgagatgttattactgttttgggcctccatgccccagctctggatgaaggcaaaaactgtactgtgtttcgcattaagcacacacatctggccctgacttctggagatggatccttccatcttgtggggccaggaccatggccgaagccccttggagagagaggctgcctcagccagtggcacaggagactccaaggagctactgacattcctaagagtggaggaggaggaggagccttgctgggccagggaaacaaagtttacattgtcctgtagctttaaaaccacagctgggcagggtgagaagctagatgcccctgcagtttggccctggagccagggcagaggaatgtagggcctgcatggagaagggttctgccctgcctgaggaggaggacacagcacaagggcacattgcccatggctgggaacatgacccagcctgaaagatacaggggatcatgttaaaaatagcagtattatttttcgtctcaatggtattgtaactaagttatttactcctcctgctcctcacccctgtagggaaaccttggagaggagagtggcaggtgggctgcctgctgtgttaagaggacttagtttgtgatgtaaggcactgtcaggaatggggggcgggccagggtgggaagagaagaaatagcagagcctattttggtgaggttttttgtttttaagtcaaagaagactcagtatgctttccctgaggaatgaaaaagggattgaggagttgcctgactcctgggtgggtggggtacaggcagttaggtgctgaatgaagctgccatccttgctgcagcttctaactggtaaaaagatccagggatggagatgggaaggttagaaaggcagccctcacctctgaggacagaggccggggtccaggcccgtgggcgcaaaggtgcctcatagcatagccagcattcagcacacacaaacctactgcccacatttgggctcagggttggccatttgctagttctgctgccctcttaagatctgactgccaaataaatcatcctcatgtcctt

SEQ ID NO: 3913 - protein, 1290 aa, Homo sapiens
MAGAASPCANGCGPGAPSDAEVLHLCRSLEVGTVMTLFYSKKSQRPERKTFQVKLETRQITWSRGADKIEGAIDIREIKEIRPGKTSRDFDRYQEDPAFRPDQSHCFVILYGMEFRLKTLSLQATSEDEVNMWIKGLTWLMEDTLQAPTPLQIERWLRKQFYSVDRNREDRISAKDLKNMLSQVNYRVPNMRFLRERLTDLEQRSGDITYGQFAQLYRSLMYSAQKTMDLPFLEASTLRAGERPELCRVSLPEFQQFLLDYQGELWAVDRLQVQEFMLSFLRDPLREIEEPYFFLDEFVTFLFSKENSVWNSQLDAVCPDTMNNPLSHYWISSSHNTYLTGDQFSSESSLEAYARCLRMGCRCIELDCWDGPDGMPVIYHGHTLTTKIKFSDVLHTIKEHAFVASEYPVILSIEDHCSIAQQRNMAQYFKKVLGDTLLTKPVEISADGLPSPNQLKRKILIKHKKLAEGSAYEEVPTSMMYSENDISNSIKNGILYLEDPVNHEWYPHYFVLTSSKIYYSEETSSDQGNEDEEEPKEVSSSTELHSNEKWFHGKLGAGRDGRHIAERLLTEYCIETGAPDGSFLVRESETFVGDYTLSFWRNGKVQHCRIHSRQDAGTPKFFLTDNLVFDSLYDLITHYQQVPLRCNEFEMRLSEPVPQTNAHESKEWYHASLTRAQAEHMLMRVPRDGAFLVRKRNEPNSYAISFRAEGKIKHCRVQQEGQTVMLGNSEFDSLVDLISYYEKHPLYRKMKLRYPINEEALEKIGTAEPDYGALYEGRNPGFYVEANPMPTFKCAVKALFDYKAQREDELTFIKSAIIQNVEKQEGGWWRGDYGGKKQLWFPSNYVEEMVNPVALEPEREHLDENSPLGDLLRGVLDVPACQIAIRPEGKNNRLFVFSISMASVAHWSLDVAADSQEELQDWVKKIREVAQTADARLTEGKIMERRKKIALELSELVVYCRPVPFDEEKIGTERACYRDMSSFPETKAEKYVNKAKGKKFLQYNRLQLSRIYPKGQRLDSSNYDPLPMWICGSQLVALNFQTPDKPMQMNQALFMTGRHCGYVLQPSTMRDEAFDPFDKSSLRGLEPCAISIEVLGARHLPKNGRGIVCPFVEIEVAGAEYDSTKQKTEFVVDNGLNPVWPAKPFHFQISNPEFAFLRFVVYEEDMFSDQNFLAQATFPVKGLKTGYRAVPLKNNYSEDLELASLLIKIDIFPAKENGDLSPFSGTSLRERGSDASGQLFHGRAREGSFESRYQQPFEDFRISQEHLADHFDSRERRAPRRTRVNGDNRL

SEQ ID NO: 3914 - DNA, 8192 bp, Homo sapiens
gtgatagccgtcaaaggcagcaaatagactgaatgaaagatgagcttctgcctttatatccttctctcctgctacccaactcattgtggtgaaggaaaaagaaaacgcgggtggagactgcactatatgcttaggactgaaatgcaactgcagaagcaacatgtgaccttttagagatgcttgtgggactgcataaagtgaagagggaaactggaaaaaaacaatgaaattgaatagggaaaacctgctttctgcaaacaactgaaaaagctgcatttagaaactgtttctttggccctcatcgagaagctggaacttgtattgttaggccccttatgggacaagctctcaactgctgatcacccagtgattgtcaccatggccagcaagaggaaatccaccacaccatgcatgatcccagtgaagactgtggtgttgcaagatgccagcatggaggcccagcccgctgagaccttgcctgaaggaccccagcaggatctgcccccagaagcatctgctgccagcagtgaggcagcacagaaccccagcagtactgatggctctacactggccaatgggcatcggagcactttagatggctatttatattcctgtaaatactgcgatttcagatcccatgacatgacccaatttgtgggacatatgaactcagagcacacagactttaataaagacccaacctttgtatgcagtgggtgcagttttctggcaaaaacccctgaggggctttccttgcacaatgccacatgtcactccggggaagccagctttgtgtggaacgtggccaagccagacaatcatgtggttgtggagcagagcatccctgagagcaccagcactcctgacctagcgggtgagcccagtgctgaaggggctgatggacaggcagaaatcatcattaccaaaactccaatcatgaagataatgaaaggcaaagctgaagccaaaaaaattcatacactcaaggagaatgtccctagccagcctgtgggtgaggccttaccaaagctgtcgactggagaaatggaggtgagagagggggaccattccttcatcaatggggcagttccagtcagccaggcatctgccagctctgcaaaaaacccccatgccgccaacgggcccctgataggaacagtgccagttttgccagctggcatagcacagttcctctccctccagcagcagcccccagtgcatgcccaacaccatgtccaccagccactgcccacggccaaggcccttcccaaagtgatgatccccctgagcagcattccaacgtacaatgcagccatggactctaacagcttcctgaagaactccttccacaagttcccctaccccaccaaagccgagctctgctatttgactgtggtgaccaagtatccagaagaacagctcaagatctggttcacagcccaaaggctgaagcaggggatcagctggtcccctgaggagattgaggatgcccggaaaaagatgttcaatacagtcatccagtctgtgcctcagcccacaattacggttctaaataccccactcgtcgccagtgctggcaatgtccagcatctcatccaggccgctcttccaggtcacgttgtggggcagccagagggtacaggagggggacttctggtcactcagccattgatggccaatgggttgcaagcaacaagttcccctctccccctcacggtgacatccgtccccaagcagccaggtgtggcacccattaacactgtgtgttcaaatacaacgtcagctgtgaaggtggtcaatgcggcccagtcgctcctcacggcctgccccagcataacctcccaagccttccttgatgctagcatctacaaaaataagaaatctcatgaacagctgtcagctctgaaagggagcttctgtcggaaccagttcccagggcagagcgaagttgaacatctcacaaaagtgacgggcctcagtaccagagaggtgcggaaatggttcagtgatcgtagataccactgccggaacttgaagggctccagagcgatgatacctggagatcacagttccatcatcattgactctgtgccagaggtgtccttctccccatcgtccaaggtccctgaggtaacctgcattccgacaacagccacactagcaacccacccttctgccaaacgacaatcttggcaccagactcctgacttcacaccaaccaaatacaaggagagagcccctgagcagctcagagccctggagagcagttttgcacaaaaccctcttcctcttgatgaggaactggaccgcctgagaagtgaaaccaaaatgacccgacgagaaattgatagctggttttcagagagacggaaaaaagtgaatgctgaggagaccaagaaggctgaggagaatgcctctcaggaggaagaggaggctgctgaggatgagggtggagaagaggatttggccagtgagctaagggtctctggtgaaaatggctctctggaaatgcccagcagccatatcttggcagagcgcaaagtcagccccattaaaatcaacctgaagaacctgagggtcactgaagccaatggcaggaacgagattccagggctgggtgcctgtgaccctgaggatgatgagtcaaacaaactggcagagcagctcccaggcaaagtgagctgcaaaaagactgcccagcagcggcacttgctgcggcagctctttgtccagacacagtggccaagcaaccaggactatgactccatcatggcccagacgggtctgccacggccagaggtggtgcgctggtttggagatagcaggtacgcactgaagaacggccaactcaaatggtacgaagactataagcgaggcaacttcccaccagggctactggtcattgcccctggcaaccgggagctcctgcaggactattacatgacacacaagatgctgtatgaagaggacctgcagaacctctgtgacaagacccagatgagctcccagcaggtcaagcagtggtttgctgagaaaatgggggaggagaccagagccgtggcagacacaggcagtgaggaccagggccctggtactggtgagctcacagcagttcacaaagggatgggtgacacctattcagaggtgtctgagaacagtgagtcgtgggagccccgtgtccctgaggccagctcagagccctttgacacatcgagtccccaggctggacgtcagctcgaaacagactgaatttgatctgattaatgtgaaggactggccagtctgggaaaccgcctgccacgtggaagagccaaacccgactctctgctgccacatgccgttcccatgcccggctgctgggcacctgggagagcttccagaatcctcgcagacagcccagagcctgccgctaccctcggcctgcccaccaccaagcaagcagcaagcaagatggggttctcatcagttcttcctcccacaatgtaggacctttcctttaccttccaatggataaaatagttcagagttcatagtcatattcatagacacagaatcaagcttttaacatatacatccacctctatatgttaaataaaacatcagattatcaacactgtcattacgtagaaactttggttagccaagcagtgcattgtcagttacgtcatctctaaaaatgacctgtgtctgttctctggggattgctgggtcacaggtgcccctcaccttccacagtcaggcagggaagttataggcacaaagctacgtctggaacccctttgtgccccctttgtgttcctcaaggaagcagtacctttgaagagatctctgctgcattaagtgatgaccggctacgtttcatgtcaggcttgctttgccttgtgggctactcagtgcagaacctgctgtaaccctcagttcaaaaaatggactggcaatgtgattagcgttggatgctttaccattctctttagttgttaccgtaattctgctttttcatgggagtttgaatcatggaccataacttttcagttatcagatcaactaaagaaacatttgttgttaagcctaatgtgctgacctatgtgcctgcattttttttttaatctagacatgtttggagtgagagaaagatggaaaaaagacatggggtagggacgtaagtggaaatctatagccacagcctgaagctttgaccactgcggttttcagagccctttctccacactcatttcagagcctcctatggtttgggaaggaataacacactggcccattagtaagggtgaaggctggagggatttgttgacttcttggaattatcagaggtagggtggtctttagcacaaagacttgcatgcagagatccctggcagaacacccagagtgcccgtggctcccaccccagggtctggccggtgtgctggatgcatgcccaagggtgctgggcatcactggtccttgtgaggatgcttttaaagttttatatttatgtccccaaacttggaaacaagaactctactttagcctaaccctcatgtccttttttgaattgagaaaattacaggaaatggtgcctttgaaaattagaaaacttgcttacagagctgttctaaatggtaaatcctcaatttccccaagaccggttgctctgagagtagctggtaaagaggggcgaactaaagacctgtccacctgtagctccgctcatttcttagaaaccacctgcttcccagagtgccaagccacaagtaccaggcttcgtgggcacagacacctcctgggctgggcagagtgacagtgctagaagaccccagagagagggcaagggctttgggcaagaagcactggtggtgttttagggaccgtccttctcccctacccagggaactggacctggcagggcaccgtgctcatgtggctccaaggacaagcatggcggtggccccttctgccttccaggagaggtcttgcttttgaaaccaaaatcatgttcttctaaagtgtcatcttctgccctccctgtcccaatagggaccacatcttatttgtctcaaacagggacttgtgagtacttggcaagttttgcagcctatttttgtattcttaatttggggagtaaagatgtttggtctcaaaaacctttgaggaattgccaagaatggcgagtgattgctttccttcagagaacagacacttggaatttctccttttagtgtttatatacgtgcagattaatttatatatatatatatacacacacacatatacagtataaatactcatttgattctcgtaaaacgcgcatctggcgtgtgcagttgagaaacttggtggcacatgggtgttgggggagtagcctgtgttggagggacaccagtgcactaggcagctggggcggcccaggctgaagccatctccgggtgtctgagaaaccacccagtgcctcacctccagatcctgctggcatcacctccagagccctgcatgcactggctgaagagttggtctgtggagaggattttcttggttacttgtattcacggttaatttacaacccaaacagcaaaacacagttggtggacaagttcatgcaggacctacagtgacccagccatgggcactagctcatctttcaggtggaaaagtacagtgctgcctgccctggtatgtttttcttatagatgttagccctgcccaacagccagggctacactacaaaaggcaagaatgcccatgtaaggagcccagcagtctggacagatccttcttcctctgctgttggatgagagtgagtgagtatgctctggaccttatccttgaaagatgatcaaaagcgatgatgagggaggcagtcatcacgcaggtgcttaaagggacattgtaggaggtactcaagggtttgggggcaaaaccctgaatccagccagtcgtgcacagagacacacccacactagcccagtggcagtgggggatgtgggatggcagcagccaggtatgtagccctgtcacaggacagctcactgtggttttgcacactgcctaagggttaaattgtgttgttgccttcagtagaaggcatttgtgggctgcagagttgagagttgggtgaggttagtctctcctgaagaaaaagcctataaaaagtggctaatcttatcccttttctctgtatgcagttggactcgtcagagatagtaaaatcatcttttagtgtttttttgttgctgatgtcttgtacccatttgttttttacatggggttgtagatcgagttctcaaaggtgaaaccagatgatcattctgataaaggaaatttaaatttgatacatatgctttgtatattttgattacttgttttcgtttttgactataaaggagcttttttattttgggaggggaggagtgtcatttttgagaatcttgggttcctgaaaaagaacgccctagttggatggcttgccagggccttggggtttggtagtgattgtacaacttaaagctcctttctcttggctgagtgacaggtggctgttcaggtggaccaaagcaccttgacacaaggactccacactgtgctctctagtagcacaaggaggaagttggacagaacattgggtagtgccttgcgggctcacacatgtactagtggtctcatctccagctagccttgggaggccgtcccaccaggaaatctctctattccgtagcctgagatgtgcccttgtgggttttatcctgctcagtcagtggcctaggggcaggtcctgtgttctctccctctctctcctggctctgggacatctgtccctggctgcctttcatggaggaaggacactggcctttctggttggatgctgtgtggatgctctctgcttgagcctcgtggtctcttgtctctttttggaccaatatcctcagattggtgcagctttttcagttcagatatcacaccccaagtggataaaggcaacttgcaggagaggagagccagccaagaagaaaattttaaaaccaaacctcgtttaggattttcctaaagtcatcttctcttttttcttgctcagagtttacctgggagatttcaccagtttgactcaccatttgcagatgtgcttttgtattaaatttaaattttcacatatcacatccattctcaaggtagttatatgctggagaagaaaaatcctctagacacatgaaggcccacatagtcaagtcttccagggcaaagccagcagcccacccaggtcaggtagccagcagggctcagttcccctcactccagacacggaccctcctcttcagggtctcttgacccagcttccttctctccttttacctgagagcacagacctctctcagccagcctgcccagaccacggggggctactcccatgtagtttggggagcacttgatctcagaaaagctccattgtctgagcaaatgggcagttgtggagctcaagcctttctcctgtgctcaagtcccttccccaagcaaggcttcaacctcatctacccaccatgtagttttctctggccatttaagtggggcggcagggacatggttgggccatgccacaccagggctggtgaggcaaccagttttgattttgacagagtggctggaggaaaagtggcaatcaaggtgctgcttggtttgctctgagtgcaaatggaaccaacaggtttctgctgcaatctgtgtgttcccagtgccaggtcacaccaggaggggtggggcagggctaaccaagtggtctctgaactcaccgagcgtctgcacttggttgtgaagttaatgggagtacagagagcgtctggccttggagaggggttgagagcctcctttttggttcttcattcctgagctcttgcctgcccacaaatctgacctctttgaatggggacgcagtccttcaacagagaagtttctatggcaaagaagtttctatttagctctagatccagcagagtcatccattctaactgccctgaagtctagagcaggggagggaacccagaggctggggatgagactaggcagaccctggttaccatatggacaaggacaggggaaagcacccccttcctcaatttctgaaagttctatctttgggttcgcaggactttgaggatgataaagaacatataggtactagcttgttgttgctggtccaaagcttccac

SEQ ID NO: 3915 - protein, 956 aa, Homo sapiens
MASKRKSTTPCMIPVKTVVLQDASMEAQPAETLPEGPQQDLPPEASAASSEAAQNPSSTDGSTLANGHRSTLDGYLYSCKYCDFRSHDMTQFVGHMNSEHTDFNKDPTFVCSGCSFLAKTPEGLSLHNATCHSGEASFVWNVAKPDNHVVVEQSIPESTSTPDLAGEPSAEGADGQAEIIITKTPIMKIMKGKAEAKKIHTLKENVPSQPVGEALPKLSTGEMEVREGDHSFINGAVPVSQASASSAKNPHAANGPLIGTVPVLPAGIAQFLSLQQQPPVHAQHHVHQPLPTAKALPKVMIPLSSIPTYNAAMDSNSFLKNSFHKFPYPTKAELCYLTVVTKYPEEQLKIWFTAQRLKQGISWSPEEIEDARKKMFNTVIQSVPQPTITVLNTPLVASAGNVQHLIQAALPGHVVGQPEGTGGGLLVTQPLMANGLQATSSPLPLTVTSVPKQPGVAPINTVCSNTTSAVKVVNAAQSLLTACPSITSQAFLDASIYKNKKSHEQLSALKGSFCRNQFPGQSEVEHLTKVTGLSTREVRKWFSDRRYHCRNLKGSRAMIPGDHSSIIIDSVPEVSFSPSSKVPEVTCIPTTATLATHPSAKRQSWHQTPDFTPTKYKERAPEQLRALESSFAQNPLPLDEELDRLRSETKMTRREIDSWFSERRKKVNAEETKKAEENASQEEEEAAEDEGGEEDLASELRVSGENGSLEMPSSHILAERKVSPIKINLKNLRVTEANGRNEIPGLGACDPEDDESNKLAEQLPGKVSCKKTAQQRHLLRQLFVQTQWPSNQDYDSIMAQTGLPRPEVVRWFGDSRYALKNGQLKWYEDYKRGNFPPGLLVIAPGNRELLQDYYMTHKMLYEEDLQNLCDKTQMSSQQVKQWFAEKMGEETRAVADTGSEDQGPGTGELTAVHKGMGDTYSEVSENSESWEPRVPEASSEPFDTSSPQAGRQLETD

SEQ ID NO: 3916 - DNA, 3827 bp, Homo sapiens
cgcctcccctccgcggccccagccgctagcagcgccggccactccgcgggacgcagccgccgcgaagcgccaggcggccgggccagcgagctcgggggccgaaggggaccccgggaccctcggggcgggacccgggccgaccagcggcgggggcggcgcggcgctgcaggcggacacccggcggggggcaccgcgcggggccgggcagaggcgcgggggccgctatgggccgccgccgcctgctcgtctggctgtgcgccgtcgcggcgctgctctcgggggcgcaggccaggggcaccccgctcctggcgcggcctgcgccgcccggtgcctcccgctacagtctctacacgacgggatggcgcccgcggctgcgcccggggccgcacaaggccctctgtgcctatgtggtgcacaggaatgtgacctgcatcctacaggagggagcggagagctacgtaaaggctgaataccggcagtgtagatgggggcccaagtgccccgggacagtcacgtaccgcacagtactcagacccaaatacaaggttggctacaagacagtgacagacctcgcctggcgttgctgtcccggcttcactgggaaacgctgccctgagcacctcacggaccatggggctgcctcaccccagctggagcctgagcctcagattccttcagggcagctggacccaggccccaggcccccttcctacagcagagcagcccccagccctcatggaaggaaaggcccagggctgtttggtgagcggctggaacgcctggagggtgatgtccagcgcctggctcaaacatatggtaccctcagtggcctggtggctagccacgaggatcccaacaggatgactggtggccccagggctcctgctgtccctgtgggctttggggtcatccctgaggggcttgtgggcccaggagacagagccagagggccactaacacctcccttagacgagatcctaagcaaggtgacagaggtgagcaacactcttcagaccaaggtgcagcttctagacaaggtgcatgggctggcacttggccatgaggcccacctgcagcggctgcgggaagccccaccatccccgctcacctccctggccctgctggaggagtacgtggaccgacggctgcaccgactctgggggagcctgctggatggctttgagcagaagctgcaaggcgtccagagtgagtgtgacctgcgggtgcaggaggtacggcggcaatgtgaggagggtcaggccgccagccggaggctgcaccagagccttgatggccgggagctggccctgcgccaggagctgtcacagctgggcagccagctgcagggcctgagcgtgtctggcaggggcagctgctgtgggcaactagccttgatcaatgcccgtatggatggccttgagagggccctgcaggcagtcaccgagacccaaaggggccccggtgccccggccggggatgagcttacgaggctctctgctgccatgctcgagggaggtgtggacgggctgcttgagggtctggagacgctcaatgggacagagggtggagcaaggggatgctgtctgaggttggacatgggggggtggggagtgggcggctttgggaccatgctggaagagcgcgtgcagagcctcgaggagcgcctagcaacattggctggggagctaagccatgacagcgcctctccgggcaggtcagctcggccccttgtacagacagagctggctgtgctagagcaacggttggtctcactggagacttcgtgcaccccgagcaccacctcagccatcctggacagcctcgtggcagaggtgaaggcctggcagagccggagcgaggccctcctacgccaggtggccagccacgcagcactgctccagcagctcaatggcactgtggccgaggtccagggacagctggcagaagggacgggcagctcacttcaaggcgagatcactctgctcaaggtcaatctgaactcagtgagcaagtcgctcacaggcctcagtgactctgtcagccagtactctgatgccttcttggctgccaacacgtccctggatgagcgggaacgcaaggtggaagccgaagtccaggccatccaggagcaggtcagcagccaaggctccaggcttcaggctggccacaggcaggtcctgaacctgcgtggggagctggagcaactcaaggctggtgtggccaaggtggccagtgggctgagccgctgccaggacacagcccagaaacttcagcacacagtgggacactttgaccagcgggtggcacaagtggagggtgcgtgcaggaggctgggcctgctggccgcgggcctggacagcttgcccactgagccactgaggcccagagagggcctgtggagccatgtggaccagctgaatcgtacgctggcccagcacacgcaggacattgcccgcctccgggatgacctactggactgccaggcccagctggctgagcaggtgcggccagggcaagccaactagacaggctggccaggacccaacccctagatcccaccaactcggggaacatcaccccagagcccagccttatccagcagcgccttccagccttccctggctagcccaaatggcactaaggaggccactgagggaatcctccacgtggctgtcccagccaccaaaacccatgcacagtgctgcagaaactggacagttccggacagcggtcaaggcaaggatgtcatgcttgaaggccagggtagacttgagagagttcacattccactgtcagcaaatcagtgtctggacagccagctgcagggcctgagcatggctggcaggggcagctgctgtggcaaactggccttgatcagtgtccgtatgtaaggccttgagaggaccctgcaggcagtcagcaccagcctcagcaactgtgcagagacctacaggcccacagccagtggcctgtccgcattgccctgtgcccacaagcaacagtccacagcccttggtggcttctgttccttgtcccctcggcttctcttcgcagccatcaggactaggtttgtgcaggaaggtgatgcccactggaactctcctcacacctggcagcttcatggatgttgtatctgaactaaggaccagaggctgccagatgtttctggctcctcacgtgtccttcaggacagaacagaagcacaaagactcagccaagagttctctttattccctttgatcctcccccaaggtgagggcttaggcagctgtagaaccccaggaaagaacggaatccaggcaatctgtttagagaccccccactccaaatttatccttttcctttccttcccctaagatgtttccagggccctctggtgcccacactgtcctcttccttccacttgggggtggggaaatccttcctgcgaggtcagggcatttctctacaaagtggcctgaatgaggccaggccctgagaaggagccaccagctggaggaaaggggctccaagccttgcttttaacacccctgcaaaacccccaccctcccaagatgttcacaaaaggtgagaaattcaggtacgaaaccatcaatggacaacttgaaaatgcatgttcctcaggcctatgcagttcccagagactcttgacaccggtctctgctgaggctcccagcctcagtttcccccacagcagcacgggccccactgtgctgctcttcaggtccccacagccctgcctttggttcctggacatttggtattctgccctccactctggtactatcagagtagggcaggctctggattaaagcttttagccggtc

SEQ ID NO: 3917 - protein, 766 aa, Homo sapiens
MGRRRLLVWLCAVAALLSGAQARGTPLLARPAPPGASRYSLYTTGWRPRLRPGPHKALCAYVVHRNVTCILQEGAESYVKAEYRQCRWGPKCPGTVTYRTVLRPKYKVGYKTVTDLAWRCCPGFTGKRCPEHLTDHGAASPQLEPEPQIPSGQLDPGPRPPSYSRAAPSPHGRKGPGLFGERLERLEGDVQRLAQTYGTLSGLVASHEDPNRMTGGPRAPAVPVGFGVIPEGLVGPGDRARGPLTPPLDEILSKVTEVSNTLQTKVQLLDKVHGLALGHEAHLQRLREAPPSPLTSLALLEEYVDRRLHRLWGSLLDGFEQKLQGVQSECDLRVQEVRRQCEEGQAASRRLHQSLDGRELALRQELSQLGSQLQGLSVSGRGSCCGQLALINARMDGLERALQAVTETQRGPGAPAGDELTRLSAAMLEGGVDGLLEGLETLNGTEGGARGCCLRLDMGGWGVGGFGTMLEERVQSLEERLATLAGELSHDSASPGRSARPLVQTELAVLEQRLVSLETSCTPSTTSAILDSLVAEVKAWQSRSEALLRQVASHAALLQQLNGTVAEVQGQLAEGTGSSLQGEITLLKVNLNSVSKSLTGLSDSVSQYSDAFLAANTSLDERERKVEAEVQAIQEQVSSQGSRLQAGHRQVLNLRGELEQLKAGVAKVASGLSRCQDTAQKLQHTVGHFDQRVAQVEGACRRLGLLAAGLDSLPTEPLRPREGLWSHVDQLNRTLAQHTQDIARLRDDLLDCQAQLAEQVRPGQAN

SEQ ID NO: 3918 - DNA, 8192 bp, Homo sapiens
atgaccaatgggtctgtgttttggaccggcgaagcccaatggcgcgacagggaaggcgggcccgagatgggttagggtgtccttgcagggtgtctgagctaaacttcaccaaataatagctgtttgtattttggctgctgcaggagccattttagaaataaatatcttccttcaatagatgaaaatgaaaatacagaaaaaagagaagcagttgtcaaatttaaaagttttgaatcactccccaatgtctgatgcctctgtcaattttgactacaaatctccatccccatttgactgcagcactgatcaagaagagaaaattgaagatgttgctagtcactgtctgcctcagaaggacctgtatactgctgaagaggaagctgctaccctttttcctaggaaaatgacatcccataatgggatggaggacagtggaggaggaggtactggagtgaagaagaaacggaagaaaaaggagccaggagaccaagagggtgcagcaaagggaagcaaggacagagagcccaagccaaagaggaaacgagaaccgaaagagccaaaggaacccagaaaggccaaggagccgaagaaggccaaggagcacaaggagccgaagcaaaaagatggggcaaagaaggcacggaagccccgggaggcctcgggcaccaaggaggccaaagagaagaggagctgcactgactctgcagccaggacgaagtccaggaaggccagcaaggagcaaggaccaaccccagtggagaaaaagaagaaaggaaaaaggaaaagtgaaactacagtggagagtttagagctggatcagggcctgacgaacccatctctgcggagtcctgaggagtccactgagtctacagacagccagaaacgacgctcgggaaggcaagtaaagcgcagaaaatacaatgaggacctggacttcaaagtggtggatgatgatggggaaacaattgctgttcttggagctggtcgaacatctgcactctcagcctctacactggcctggcaggcggaggagcctccagaagatgatgcaaacatcattgagaagatcctggcatctaagactgtccaggaggttcacccaggagaacctccgttcgacttggagctgttctacgttaagtatagaaatttttcctacttacattgtaaatgggccacaatggaagagctcgaaaaggatcctcgcatcgcacagaagatcaagcgatttaggaataaacaagcccagatgaagcacatttttacggagcctgatgaagacttgttcaatccagactatgtagaagttgatcgcatcttggaggtggcccacaccaaggatgcagaaacaggggaggaggtaacacattacctggtgaagtggtgctcactaccatatgaagaaagcacgtgggagctagaggaagatgtagatcctgcaaaagttaaagaatttgaatctcttcaagttctccctgaaattaagcatgtggagcggcctgcttcagactcctggcagaaacttgagaagtctcgcgagtataagaacagtaaccagctccgggagtaccagctggaagggatgaactggcttctttttaactggtataacagaaaaaactgtattttggctgatgagatgggcctagggaaaaccatccagtccatcacattcctttcagaaatatttctgagaggaatccacggcccttttctcattatcgcccctctctccaccatcactaactgggagcgggagttccggacatggacagagatgaatgccattgtgtaccacggcagccagatcagcaggcagatgatccagcagtatgaaatggtgtacagagacgcccagggaaaccccctttcaggagtcttcaagttccacgtcgtcatcacaacatttgaaatgatcctagcagactgcccagagttgaagaagattcactggagctgtgtgataattgatgaagcccacagactgaagaataggaactgcaaacttctggagggtctaaagcttatggccctggaacataaagtgcttctcactggaacacccttgcagaactctgtggaggagctcttcagtttgttaaattttctggagccatcacagtttccttcagagaccgctttcttggaggaatttggagatctgaaaacagaggagcaggtaaagaaactgcagtctatcctaaaaccaatgatgcttcggcggctgaaagatgatgtggaaaagaaccttgctcccaaacaagagacgatcattgaggtggaactgaccaatatccagaaaaagtactaccgtgccatcctcgagaagaacttttccttcctgaccaagggggcaaatcagcacaacatgcccaatctcatcaacaccatgatggagctgaggaagtgctgtaaccatccctacctgatcaatggagcagaggagaaaattctagaagatttccgaaaaacccacagccctgatgcccctgactttcagctgcaggccatgattcaggcagcaggaaagcttgtgttgattgataaactactccctaagctgattgcaggtggccacaaagtactcatcttctcccagatggtgcgctgcctcgacatcctagaagattacctcatccagagaagatacacctatgagcgaattgatgggcgagtacggggaaacctgcgccaggcagccatcgaccggttctgtaagccagattcagaccgctttgtctttcttctgtgcaccagagcgggaggcctggggatcaatctcacagctgctgatacctgcatcatatttgattctgactggaacccacaaaatgacttgcaggctcaggcccgatgtcaccgcataggccagagcaaagctgtgaaggtgtatcgcctcatcactcgaaattcctacgagcgcgagatgtttgacaaggccagcctaaagctggggctggacaaggctgttcttcaggacatcaaccgaaagggcggcaccaatggggtacagcagctctcaaaaatggaggtggaggacctactccggaaaggtgcttatggagccttaatggatgaagaagatgaaggctccaagttctgtgaagaagacatagaccagattctgcagaggcgaacgcacaccatcaccatccagtctgaggggaaagggtccacttttgccaaggctagctttgtggcttcaggaaacagaacagatatttccttagatgatcctaacttttggcagaaatgggctaaaatagctgaactagacactgaagcaaagaatgaaaaggaaagcttagtgatcgaccgacctcgcgtgagaaagcagaccaaacactacaactcgtttgaggaagacgagctcatggagttttcagagttagacagcgactcagacgaaaggcccacgagatccaggcgcctcaatgacaaagccaggcgctacctccgagcggagtgcttccgggtagagaagaacctgctcatctttggctggggccggtggaaggacatcctgactcatggccgattcaagtggcatctgaacgagaaggacatggagatgatttgccgtgccctcctggtgtactgtgtcaagcattataagggggacgagaagatcaagagtttcatttgggaactgatcacacctaccaaagatgggcaagcccagaccctccagaaccactcaggcttatctgccccagtccccagagggaggaaggggaagaagacgaagaaccagttgctaatcccagagctaaaggatgcagattggctagccacctgcaaccccgaggtggtcttgcatgatgatggctataagaaacacctcaaacagcactgcaacaaagtacttttgcgagtccggatgctgtactacctaaaagctgaaatactgggagaagcagctgagaaagcatttgaaggatctcctgccagggagctggatgtacctctgcctgacatcgactacatggagatcccagtggactggtgggatgctgaagccgataagtcacttctcattggcgtgttcaagcatggttatgaaaggtacaatgccatgcgagcagacccagcactttgcttcctggagaaagttgggatgcccgatgagaagtccctttctgcagaacagggtgttacagatgggacctcagacattcctgaaagaggcaacacagataaagaagacaatgctgaggacaaagtagatggcctccagaaacaaacggagagttccagtgatggaggtgatggcgtttttagcgaaaagaaggatgacagccgggcagcccaggatggctccgacccagacaaatcgccctggccagtttcctccgccctcacagctcgtctcagacgtctggtcactgtttaccagcgctgcaaccgcaaggaactgtgccggcctgaaattctgggaccaggtaaccaaggatattgggttcaggaagagatgttcaggagaacctcagaaatggacctcatcaacaaggaagcccaaaagaggtggactaggagagaacaagcagacttctatagaacagtgtcttcctttggtgttgtttacgatcaagaaaagaaaacctttgactggacacagttccgcatcatttcccgtttggacaagaagtcggatgagagcctggaacagtatttttatagttttgtggccatgtgccggaatgtctgtcgtctacccacatggaaagatggcggtcccccagataccaccatctacgttgaacccatcactgaggaacgtgctgcaagaactctgtaccgcattgaactgttacggaaagtccgagagcaagtgctcaagtgccctcagctgcatgaacgcctccagctgtgcaggcccagcctctacctcccagtctggtgggagtgtgggaagcatgatcgagacctgctcatcggcactgccaaacatgggctgaaccgcactgactgttacatcatgaacgacccccagctgtccttcctggatgcctatagaaactatgcccagcataaaagatctggcacccaggcaccaggaaatctctgttgcctttaccagaccaactccaagttatatgaatctcttacatattctcaaatgagtaggacttcagagtcccttgaaaatgaacctgaaaatctagtgagagtagaaagcagagatgatcatctcagcctgcctgatgtgacatgtgaaaactttatttctaaagttcaggatgtcatttccatcaaccatgatgaaagtctgctgcctgagtccttagagagcatgatgtatggtaagaaggtgctcagccaagaaccaagctcttttcaggagagcccaagtaccaatactgaatctagaaaagatgttattaccatctcaataagcaaagatgggaactgccagtctggtggccctgaggcagaaatagcttctggccctacttttatgggtagcttagaagcaggaggagtagctcaagcaaacatcaaaaatggaaaacatttgttgatgtctatttcaaaggaaggggagctctgctgcagtgaggcaggacagagacctgaaaacattggccagctggaagccaagtgtttagcttccccttccttgaatccaggaaatgaaagtgggtttgtagatatgtgcagtcttagtgtctgtgactccaaaagaaacctgtcatcagatcagcaattaattgatttattggaaaacaaaagcttagaaagtaaattgattttgagtcagaaccacagtgatgaggaggaagaagaggaggaaaacgaggaggaaaacttagccatggcagtaggcatgggggaaaggccagaggtattgcatctcacggagcccactactaacatctcaagggaaaagaaccaaggcttccaagatgaaaccaagaaaggaagcttagaggtggcaaaccagactcctgggctacagagggctttccccgctccagcagcctgtcagtgccactgcaaacacatggagaggtggatgcatggcctcgagaatgatgaatttgaaatcgagaaacccaaggcttatatcccagatctgttcaaaagtaaaaccaatactatcgccatggagggtgaacccactgctattccatcacagccgtttaaagtgaagcatgagcttttaaaagaaccttggaaagaaagtgcagaggggcaaaacgttttccccacatatcctcttgaaggaagtgagctcaaatcagaagacatggattttgagaataaagatgattatgatagagacggaaactgccatagtcaagattatccagggaagtactctgaagaggagagcaagagctcaacatcgggcatcacaggagacattggggatgagctacaggaggctcgagctcccactattgctcagctgctacaggagaaaactctctattccttctctgagtggccaaaggaccgcgtgataattaaccgcctagataatatctgccacgtggtgttaaaggggaagtggccctctagccagcagtatgagccctcaggcacactgcccaccccggtattaaccagcagtgctggttctcgaaccagcctctcagagccggaagcagcagaacacagcttcagcaacggcgcagcattggcggcccagatccacaaggagagcttcttagctccagtattcacaaaggatgaacaaaagcacaggcgtccctatgagtttgaggtggagagggatgcaaaggctcggggcctggagcagttctctgccacccacgggcacacccctatcatcctcaatggctggcatggggagtcagctatggacctctcctgctcatcagaggggtccccaggagccacatcccctttcccagtgagcgccagcacccctaagattggggctatcagttcacttcagggagcccttggcatggacttgtctgggattctgcaagctggcctgatccatcctgtgactggacagattgtcaatggaagcctcagaagagatgatgcagccacgaggaggcggagagggaggcggaaacatgttgaaggagggatggacctcatctttttgaaggagcagacacttcaggcgggaatcttggaagtccatgaagacccagggcaggccaccttgagcaccacacaccctgaggggccagggcctgccacctcggctcctgagccagctacggcagccagcagccaagccgagaaatccattcccagcaagagtctgcttgactggctaaggcagcaggctgactactccttagaagttcctggctttggggcaaatttttcagacaaaccaaagcagaggaggccacgctgtaaagaacctggaaaattagatgtcagctccctgagcggggaagagagagttcctgccatccccaaggagccaggactgagggggtttcttccagaaaacaagttcaatcacactctggctgagcctattcttcgagatacgggcccccgcaggagggggaggcggcctcggagcgaactcctgaaggctccttccattgtggcagactctccctctggaatggggccactgttcatgaatggactgattgctgggatggacctggtaggacttcagaacatgagaaatatgccaggcatccccctcaccgggctggtggggtttccagctggctttgccacgatgccaacaggtgaagaggtcaaaagtaccctgagcatgctgcccatgatgctgccaggcatggctgctgtgccccagatgtttggtgttgggggactcctcagtccacccatggcaaccacctgcacttccactgctccggcgtctctatcaagcacaacgaaaagtggtacggcagtgactgaaaagactgcggaagacaagccgagtagccatgatgtgaaaacagacactttagctgaggacaagcctggtccaggtccattttctgatcagtctgaacctgcaataactactagtagtcctgtggcttttaacccatttctcatcccaggagtatctcctggactcatttacccatccatgttcctctcccctggtatgggcatggctctgccagccatgcagcaggccagacactcggaaatagtaggtctggagagccagaagaggaagaagaagaagacaaagggggacaaccccaactcccacccagagcctg

SEQ ID NO: 3919 - protein, 2715 aa, Homo sapiens
MKMKIQKKEKQLSNLKVLNHSPMSDASVNFDYKSPSPFDCSTDQEEKIEDVASHCLPQKDLYTAEEEAATLFPRKMTSHNGMEDSGGGGTGVKKKRKKKEPGDQEGAAKGSKDREPKPKRKREPKEPKEPRKAKEPKKAKEHKEPKQKDGAKKARKPREASGTKEAKEKRSCTDSAARTKSRKASKEQGPTPVEKKKKGKRKSETTVESLELDQGLTNPSLRSPEESTESTDSQKRRSGRQVKRRKYNEDLDFKVVDDDGETIAVLGAGRTSALSASTLAWQAEEPPEDDANIIEKILASKTVQEVHPGEPPFDLELFYVKYRNFSYLHCKWATMEELEKDPRIAQKIKRFRNKQAQMKHIFTEPDEDLFNPDYVEVDRILEVAHTKDAETGEEVTHYLVKWCSLPYEESTWELEEDVDPAKVKEFESLQVLPEIKHVERPASDSWQKLEKSREYKNSNQLREYQLEGMNWLLFNWYNRKNCILADEMGLGKTIQSITFLSEIFLRGIHGPFLIIAPLSTITNWEREFRTWTEMNAIVYHGSQISRQMIQQYEMVYRDAQGNPLSGVFKFHVVITTFEMILADCPELKKIHWSCVIIDEAHRLKNRNCKLLEGLKLMALEHKVLLTGTPLQNSVEELFSLLNFLEPSQFPSETAFLEEFGDLKTEEQVKKLQSILKPMMLRRLKDDVEKNLAPKQETIIEVELTNIQKKYYRAILEKNFSFLTKGANQHNMPNLINTMMELRKCCNHPYLINGAEEKILEDFRKTHSPDAPDFQLQAMIQAAGKLVLIDKLLPKLIAGGHKVLIFSQMVRCLDILEDYLIQRRYTYERIDGRVRGNLRQAAIDRFCKPDSDRFVFLLCTRAGGLGINLTAADTCIIFDSDWNPQNDLQAQARCHRIGQSKAVKVYRLITRNSYEREMFDKASLKLGLDKAVLQDINRKGGTNGVQQLSKMEVEDLLRKGAYGALMDEEDEGSKFCEEDIDQILQRRTHTITIQSEGKGSTFAKASFVASGNRTDISLDDPNFWQKWAKIAELDTEAKNEKESLVIDRPRVRKQTKHYNSFEEDELMEFSELDSDSDERPTRSRRLNDKARRYLRAECFRVEKNLLIFGWGRWKDILTHGRFKWHLNEKDMEMICRALLVYCVKHYKGDEKIKSFIWELITPTKDGQAQTLQNHSGLSAPVPRGRKGKKTKNQLLIPELKDADWLATCNPEVVLHDDGYKKHLKQHCNKVLLRVRMLYYLKAEILGEAAEKAFEGSPARELDVPLPDIDYMEIPVDWWDAEADKSLLIGVFKHGYERYNAMRADPALCFLEKVGMPDEKSLSAEQGVTDGTSDIPERGNTDKEDNAEDKVDGLQKQTESSSDGGDGVFSEKKDDSRAAQDGSDPDKSPWPVSSALTARLRRLVTVYQRCNRKELCRPEILGPGNQGYWVQEEMFRRTSEMDLINKEAQKRWTRREQADFYRTVSSFGVVYDQEKKTFDWTQFRIISRLDKKSDESLEQYFYSFVAMCRNVCRLPTWKDGGPPDTTIYVEPITEERAARTLYRIELLRKVREQVLKCPQLHERLQLCRPSLYLPVWWECGKHDRDLLIGTAKHGLNRTDCYIMNDPQLSFLDAYRNYAQHKRSGTQAPGNLCCLYQTNSKLYESLTYSQMSRTSESLENEPENLVRVESRDDHLSLPDVTCENFISKVQDVISINHDESLLPESLESMMYGKKVLSQEPSSFQESPSTNTESRKDVITISISKDGNCQSGGPEAEIASGPTFMGSLEAGGVAQANIKNGKHLLMSISKEGELCCSEAGQRPENIGQLEAKCLASPSLNPGNESGFVDMCSLSVCDSKRNLSSDQQLIDLLENKSLESKLILSQNHSDEEEEEEENEEENLAMAVGMGERPEVLHLTEPTTNISREKNQGFQDETKKGSLEVANQTPGLQRAFPAPAACQCHCKHMERWMHGLENDEFEIEKPKAYIPDLFKSKTNTIAMEGEPTAIPSQPFKVKHELLKEPWKESAEGQNVFPTYPLEGSELKSEDMDFENKDDYDRDGNCHSQDYPGKYSEEESKSSTSGITGDIGDELQEARAPTIAQLLQEKTLYSFSEWPKDRVIINRLDNICHVVLKGKWPSSQQYEPSGTLPTPVLTSSAGSRTSLSEPEAAEHSFSNGAALAAQIHKESFLAPVFTKDEQKHRRPYEFEVERDAKARGLEQFSATHGHTPIILNGWHGESAMDLSCSSEGSPGATSPFPVSASTPKIGAISSLQGALGMDLSGILQAGLIHPVTGQIVNGSLRRDDAATRRRRGRRKHVEGGMDLIFLKEQTLQAGILEVHEDPGQATLSTTHPEGPGPATSAPEPATAASSQAEKSIPSKSLLDWLRQQADYSLEVPGFGANFSDKPKQRRPRCKEPGKLDVSSLSGEERVPAIPKEPGLRGFLPENKFNHTLAEPILRDTGPRRRGRRPRSELLKAPSIVADSPSGMGPLFMNGLIAGMDLVGLQNMRNMPGIPLTGLVGFPAGFATMPTGEEVKSTLSMLPMMLPGMAAVPQMFGVGGLLSPPMATTCTSTAPASLSSTTKSGTAVTEKTAEDKPSSHDVKTDTLAEDKPGPGPFSDQSEPAITTSSPVAFNPFLIPGVSPGLIYPSMFLSPGMGMALPAMQQARHSEIVGLESQKRKKKKTKGDNPNSHPEPAPSCEREPSGDENCAEPSAPLPAEREHGAQAGEGALKDSNNDTN

SEQ ID NO: 3920 - DNA, 8192 bp, Homo sapiens
cctcccgcctcagttcgcgccgcgcctcggcttggaacgcaggagcgccggctccgggagcccgagcggagccagccgcgcgcacagccagcggccgcgccggcgatgcggggccaccccgcgcccgccccagtcccggccccggcccccgcgggaaggggctgagctgcccgccgccgcccggatggcgagcctcgccgcgctcgccctcagcctgctcctgaggctgcagctgccgccactgcccggcgcccgggctcagagcgccccaggtggctgttcctttgatgagcactacagcaactgtggttatagtgtggctctagggaccaatgggttcacctgggagcagattaacacatgggagaaaccaatgctggaccaggcagtgcccacaggatctttcatgatggtgaacagctctgggagagcctctggccagaaggcccaccttctcctgccaaccctgaaggagaatgacacccactgcatcgacttccattactacttctccagccgtgacaggtccagcccaggggccttgaacgtctacgtgaaggtgaatggtggcccccaagggaaccctgtgtggaatgtgtccggggtcgtcactgagggctgggtgaaggcagagctcgccatcagcactttctggccacatttctatcaggtgatatttgaatccgtctcattgaagggtcatcctggctacatcgccgtggacgaggtccgggtccttgctcatccatgcagaaaagcacctcattttctgcgactccaaaacgtggaggtgaatgtggggcagaatgccacatttcagtgcattgctggtgggaagtggtctcagcatgacaagctttggctccagcaatggaatggcagggacacggccctgatggtcacccgtgtggtcaaccacaggcgcttctcagccacagtcagtgtggcagacactgcccagcggagcgtcagcaagtaccgctgtgtgatccgctctgatggtgggtctggtgtgtccaactacgcggagctgatcgtgaaagagcctcccacgcccattgctcccccagagctgctggctgtgggggccacatacctgtggatcaagccaaatgccaactccatcatcggggatggccccatcatcctgaaggaagtggaatatcgcaccaccacaggcacgtgggcagagacccacatagtcgactctcccaactataagctgtggcatctggaccccgatgttgagtatgagatccgagtgctcctcacacgaccaggtgaggggggtacgggaccgccagggcctcccctcaccaccaggaccaagtgtgcagatccggtacatggcccacagaacgtggaaatcgtagacatcagagcccggcagctgaccctgcagtgggagcccttcggctacgcggtgacccgctgccatagctacaacctcaccgtgcagtaccagtatgtgttcaaccagcagcagtacgaggccgaggaggtcatccagacctcctcccactacaccctgcgaggcctgcgccccttcatgaccatccggctgcgactcttgctgtctaaccccgagggccgaatggagagcgaggagctggtggtgcagactgaggaagacgttccaggagctgttcctctagaatccatccaaggggggccctttgaggagaagatctacatccagtggaaacctcccaatgagaccaatggggtcatcacgctctacgagatcaactacaaggctgtcggctcgctggacccaagtgctgacctctcgagccagagggggaaagtgttcaagctccggaatgaaacccaccacctctttgtgggtctgtacccagggaccacctattccttcaccatcaaggccagcacagcaaagggctttgggccccctgtcaccactcggattgccaccaaaatttcagctccatccatgcctgagtacgacacagacaccccattgaatgagacagacacgaccatcacagtgatgctgaaacccgctcagtcccggggagctcctgtcagtgtttatcagctggttgtcaaggaggagcgacttcagaagtcacggagggcagctgacattattgagtgcttttcggtgcccgtgagctatcggaatgcctccagcctcgattctctacactactttgctgctgagttgaagcctgccaacctgcctgtcacccagccatttacagtgggtgacaataagacatacaatggctactggaaccctcctctctctcccctgaaaagctacagcatctacttccaggcactcagcaaagccaatggagagaccaaaatcaactgtgttcgtctggctacaaaaggtgcctccacccagaattctaacactgtggagccagagaagcaggtggacaacaccgtgaagatggctggcgtgatcgctggcctcctcatgttcatcatcattctcctgggcgtgatgctcaccatcaaaaggagaagaaatgcttattcctactcctattacttgtcccaaaggaagctggccaagaagcagaaggagacccagagtggagcccagagggagatggggcctgtggcctctgccgacaaacccaccaccaagctcagcgccagccgcaatgatgaaggcttctcttctagttctcaggacgtcaacggattcacagatggcagccgcggggagctttcccagcccaccctcacgatccagactcatccctaccgcacctgtgaccctgtggagatgagctacccccgggaccagttccaacccgccatccgggtggctgacttgctgcagcacatcacgcagatgaagagaggccagggctacgggttcaaggaggaatacgaggccttaccagaggggcagacagcttcgtgggacacagccaaggaggatgaaaaccgcaataagaatcgatatgggaacatcatatcctacgaccattcccgggtgaggctgctggtgctggatggagacccgcactctgactacatcaatgccaactacattgacggataccatcgacctcggcactacattgcgactcaaggtccgatgcaggagactgtaaaggacttttggagaatgatctggcaggagaactccgccagcatcgtcatggtcacaaacctggtggaagtgggcagggtgaaatgtgtgcgatactggccagatgacacggaggtctacggagacattaaagtcaccctgattgaaacagagcccctggcagaatacgtcatacgcaccttcacagtccagaagaaaggctaccatgagatccgggagctccgcctcttccacttcaccagctggcctgaccacggcgttccctgctatgccactggccttctgggcttcgtccgccaggtcaagttcctcaaccccccggaagctgggcccatagtggtccactgcagtgctggggctgggcggactggctgcttcattgccattgacaccatgcttgacatggccgagaatgaaggggtggtggacatcttcaactgcgtgcgtgagctccgggcccaaagggtcaacctggtacagacagaggagcaatatgtgtttgtgcacgatgccatcctggaagcgtgcctctgtggcaacactgccatccctgtgtgtgagttccgttctctctactacaatatcagcaggctggacccccagacaaactccagccaaatcaaagatgaatttcagaccctcaacattgtgacaccccgtgtgcggcccgaggactgcagcattgggctcctgccccggaaccatgataagaatcgaagtatggacgtgctgcctctggaccgctgcctgcccttccttatctcagtggacggagaatccagcaattacatcaacgcagcactgatggatagccacaagcagcctgccgccttcgtggtcacccagcaccctctacccaacaccgtggcagacttctggaggctggtgttcgattacaactgctcctctgtggtgatgctgaatgagatggacactgcccagttctgtatgcagtactggcctgagaagacctccgggtgctatgggcccatccaggtggagttcgtctccgcagacatcgacgaggacatcatccacagaatattccgcatctgtaacatggcccggccacaggatggttatcgtatagtccagcacctccagtacattggctggcctgcctaccgggacacgcccccctccaagcgctctctgctcaaagtggtccgacgactggagaagtggcaggagcagtatgacgggagggagggacgtactgtggtccactgcctaaatgggggaggccgtagtggaaccttctgtgccatctgcagtgtgtgtgagatgatccagcagcaaaacatcattgacgtgttccacatcgtgaaaacactgcgtaacaacaaatccaacatggtggagaccctggaacagtataaatttgtatacgaggtggcactggaatatttaagctccttttagctcaatgggatggggaacctgccggagtccagaggctgctgtgaccaagcccccttttgtgtgaatggcagtaactgggctcaggagctctgaggtggcaccctgcctgactccaaggagaagactggtggccctgtgttccacggggggctctgcaccttctgaggggtctcctgttgccgtgggagatgctgctccaaaaggcccaggcttccttttcaacctaaccagccacagccaagggcccaagcagaagtacacccacaagcaaggccttggatttctggctcccagaccacctgcttttgttctgagtttgtggatctcttggcaagccaactgtgcaggtgctggggagtgggaggctcccctgccctccttctccttaggagtggaggagatgtgtgttctgctcctctacgtcatggaaaagattgaggctcttgggggtcactgctctgctgccccctgcaacctccttcaggggcctctggcaccagacatttgcagtctggaccagtgtgaccttacgatgttccctaggccacaagagaggccccccatcctcacacctaacctgcatggggcttcgcccacaaccattctgtaccccttccccagcctgggccttgaccgtccagcattcactggccggccagctgtgtccacagcagtttttgataaaggtgttctttgcttttttgtgtggtcagtgggagggggtggaactgcagggaacttctctgctcctccttgtctttgtaaaaagggaccacctccctggggcagggcttgggctgacctgtaggatgtaacccctgtgtttctttggtggtagctttctttggaagagacaaacaagataagatttgattattttccaaagtgtatgtgaaaagaaactttcttttggagggtgtaaaatcttagtctcttatgtcaaaaagaagggggcgggggagtttgagtatgtacctctaagacaaatctctcgggccttttattttttcctggcaatgtccttaaaagctcccaccctgggacagcatgccactgagcaaggagagatgggtgagcctgaagatggtccctttggtttctggggcaaatagagcaccagctttgtgcataatttggatgtccaaatttgaactccttcctaaagaaacccagcagccaccttgaaaaaggccattgtggagcccattatactttgatttaaaataggccaagagaatcaggcctggagatctagggtcttgtccaaagtgtgagtgagtcaatgagagggaaccaacatttgctaagtctctactgtatgccagggatcatgcttggcactttccataggacatttcacacagtccttagaacccccaggagagagctactgacttgttatcatctccatttgatcatctcctccaatgaggaaacccacgcaccttccttagtaatgaaatcctgggttccaaaggggcaggtaatggcaatgagacttctccgtgctgttttcttcatcttctctaagccaagcaattattttatggagggaaaataaggccagaaacttctgagcagataactccacaaatggaaatttagtactttcttcctgatgccagttcttctgggaagcgcagaatttcagatatattttagtaacacattcccagctccccaggaaagccagtctcatctaatttcttagtcagtaaaaacaattccctgttccttcaggctatgaatggaccagccagggaaactctcgaccttgatctctagccagtgcttaggcccaatatctgacagcctcaggtgggctgggacctaggaagctccatcttgaaggctggtctagccccagacagggcatgaggggcagagaattcaagaaggtacagctttggccctcaagagcccactgtatgctggggaaatggaaccatggtgcagtagtgtggagtggatgagtgttccatgagcctaggagcaagaaagtctcttcggcctcgggcttcctggagaaggggacgtccattcctgctgggtcttaacaagcataaaaaggaaaaaaaggaaactcaggcaaagggatccatatgtgcaatggcaaagaaatgtgaaaaggcattgggagaagcagtctgggggaggccagcccagtgcgggcacagcacaacacggggagcagcaagagatgagccagggtccaggagacagatgcccatcgcgagtacagactttgtcctattggcaacaaggagtccatggagctttagagagatgcactcagcttcgtgttggccaagactccttctgggccaatggggctgcctcttttcctttcatcagacactgtgaaaacattcccttaagcgtgcactttttaatatcacatctatttgtctgtctgctcattgttttgttgctggaactaaatatgcaatggatcatgagactcagattctatgagaaacccagggtctctgctttaccacggagcagggtcaccaacccagatctccaggcccatgaggatggaacatgaaaggagccgacaaaagttgcttccattggcatgggctctggagctgtccagaagtccagggacaccagacttgatcaaggaagggctgtcactttagaggttcaaaaggaagtgcctcaaagcaaaggcaagcaaaggaaccccacgatgaacttgctcttttcctttgatgagcctctccccaggtgtatttcagcagaccccggggacccacccccactgggcctgctggcctccctcggctccagcccaatgccccagctggccttccccagcctgcaaggagcctgtagcatggcaaatctgcctgctgtatgctattttcttagatcttggtacatccagacaggatgagggtggagggagagctatttaacacaaatcctaagatttttttctgctcaggaaggggtgaaatagctggcagatacaaaagacagtggcttttatcattttaaatggtaggaatttaaggtgtgacttcagggagaaacaaacttgcaaaaaaaaaaaatctcaggccatgttggggtaacccagcaagggccagtgatgatttcccccagctcatccccttattttcccacaacccaaccattctctaaagcaggacagtgaataggtcttaggccagtgcacacaggaagaaattgaggcttatggatggggatgacttccctaagatcccatgggacaaggatgtggcaaggcttggatgagatggggcaccagtgcccaggaatttgaacattttcctttacccaggaaatctccggagccaacaccaccacccccagggggtctccccaccccaccccatttacagggtgagctcagcctgtcatgagcagaggaaaatattattaatgctctctgagtctttacaacaggagctcttacctcatagatgtgggctctgtttggggaagatgcaaggaagtaatgagaagcccaggaaatttctccacctgtgtttatggcctaaatagcttcaggatgtatcttagctgcactccaacattgcatcctttctggggtgaagaatctgggccaaccaggggtccttgggcctctagaaggccacagtaggcctctctttgtgggaatggaaggggacagttt

SEQ ID NO: 3921 - protein, 1444 aa, Homo sapiens
MASLAALALSLLLRLQLPPLPGARAQSAPGGCSFDEHYSNCGYSVALGTNGFTWEQINTWEKPMLDQAVPTGSFMMVNSSGRASGQKAHLLLPTLKENDTHCIDFHYYFSSRDRSSPGALNVYVKVNGGPQGNPVWNVSGVVTEGWVKAELAISTFWPHFYQVIFESVSLKGHPGYIAVDEVRVLAHPCRKAPHFLRLQNVEVNVGQNATFQCIAGGKWSQHDKLWLQQWNGRDTALMVTRVVNHRRFSATVSVADTAQRSVSKYRCVIRSDGGSGVSNYAELIVKEPPTPIAPPELLAVGATYLWIKPNANSIIGDGPIILKEVEYRTTTGTWAETHIVDSPNYKLWHLDPDVEYEIRVLLTRPGEGGTGPPGPPLTTRTKCADPVHGPQNVEIVDIRARQLTLQWEPFGYAVTRCHSYNLTVQYQYVFNQQQYEAEEVIQTSSHYTLRGLRPFMTIRLRLLLSNPEGRMESEELVVQTEEDVPGAVPLESIQGGPFEEKIYIQWKPPNETNGVITLYEINYKAVGSLDPSADLSSQRGKVFKLRNETHHLFVGLYPGTTYSFTIKASTAKGFGPPVTTRIATKISAPSMPEYDTDTPLNETDTTITVMLKPAQSRGAPVSVYQLVVKEERLQKSRRAADIIECFSVPVSYRNASSLDSLHYFAAELKPANLPVTQPFTVGDNKTYNGYWNPPLSPLKSYSIYFQALSKANGETKINCVRLATKGASTQNSNTVEPEKQVDNTVKMAGVIAGLLMFIIILLGVMLTIKRRRNAYSYSYYLSQRKLAKKQKETQSGAQREMGPVASADKPTTKLSASRNDEGFSSSSQDVNGFTDGSRGELSQPTLTIQTHPYRTCDPVEMSYPRDQFQPAIRVADLLQHITQMKRGQGYGFKEEYEALPEGQTASWDTAKEDENRNKNRYGNIISYDHSRVRLLVLDGDPHSDYINANYIDGYHRPRHYIATQGPMQETVKDFWRMIWQENSASIVMVTNLVEVGRVKCVRYWPDDTEVYGDIKVTLIETEPLAEYVIRTFTVQKKGYHEIRELRLFHFTSWPDHGVPCYATGLLGFVRQVKFLNPPEAGPIVVHCSAGAGRTGCFIAIDTMLDMAENEGVVDIFNCVRELRAQRVNLVQTEEQYVFVHDAILEACLCGNTAIPVCEFRSLYYNISRLDPQTNSSQIKDEFQTLNIVTPRVRPEDCSIGLLPRNHDKNRSMDVLPLDRCLPFLISVDGESSNYINAALMDSHKQPAAFVVTQHPLPNTVADFWRLVFDYNCSSVVMLNEMDTAQFCMQYWPEKTSGCYGPIQVEFVSADIDEDIIHRIFRICNMARPQDGYRIVQHLQYIGWPAYRDTPPSKRSLLKVVRRLEKWQEQYDGREGRTVVHCLNGGGRSGTFCAICSVCEMIQQQNIIDVFHIVKTLRNNKSNMVETLEQYKFVYEVALEYLSSF

SEQ ID NO: 3922 - DNA, 8192 bp, Homo sapiens
cctcccgcctcagttcgcgccgcgcctcggcttggaacgcaggagcgccggctccgggagcccgagcggagccagccgcgcgcacagccagcggccgcgccggcgatgcggggccaccccgcgcccgccccagtcccggccccggcccccgcgggaaggggctgagctgcccgccgccgcccggatggcgagcctcgccgcgctcgccctcagcctgctcctgaggctgcagctgccgccactgcccggcgcccgggctcagagcgccccaggtggctgttcctttgatgagcactacagcaactgtggttatagtgtggctctagggaccaatgggttcacctgggagcagattaacacatgggagaaaccaatgctggaccaggcagtgcccacaggatctttcatgatggtgaacagctctgggagagcctctggccagaaggcccaccttctcctgccaaccctgaaggagaatgacacccactgcatcgacttccattactacttctccagccgtgacaggtccagcccaggggccttgaacgtctacgtgaaggtgaatggtggcccccaagggaaccctgtgtggaatgtgtccggggtcgtcactgagggctgggtgaaggcagagctcgccatcagcactttctggccacatttctatcaggtgatatttgaatccgtctcattgaagggtcatcctggctacatcgccgtggacgaggtccgggtccttgctcatccatgcagaaaagcacctcattttctgcgactccaaaacgtggaggtgaatgtggggcagaatgccacatttcagtgcattgctggtgggaagtggtctcagcatgacaagctttggctccagcaatggaatggcagggacacggccctgatggtcacccgtgtggtcaaccacaggcgcttctcagccacagtcagtgtggcagacactgcccagcggagcgtcagcaagtaccgctgtgtgatccgctctgatggtgggtctggtgtgtccaactacgcggagctgatcgtgaaagagcctcccacgcccattgctcccccagagctgctggctgtgggggccacatacctgtggatcaagccaaatgccaactccatcatcggggatggccccatcatcctgaaggaagtggaatatcgcaccaccacaggcacgtgggcagagacccacatagtcgactctcccaactataagctgtggcatctggaccccgatgttgagtatgagatccgagtgctcctcacacgaccaggtgaggggggtacgggaccgccagggcctcccctcaccaccaggaccaagtgtgcagatccggtacatggcccacagaacgtggaaatcgtagacatcagagcccggcagctgaccctgcagtgggagcccttcggctacgcggtgacccgctgccatagctacaacctcaccgtgcagtaccagtatgtgttcaaccagcagcagtacgaggccgaggaggtcatccagacctcctcccactacaccctgcgaggcctgcgccccttcatgaccatccggctgcgactcttgctgtctaaccccgagggccgaatggagagcgaggagctggtggtgcagactgaggaagacgttccaggagctgttcctctagaatccatccaaggggggccctttgaggagaagatctacatccagtggaaacctcccaatgagaccaatggggtcatcacgctctacgagatcaactacaaggctgtcggctcgctggacccaagtgctgacctctcgagccagagggggaaagtgttcaagctccggaatgaaacccaccacctctttgtgggtctgtacccagggaccacctattccttcaccatcaaggccagcacagcaaagggctttgggccccctgtcaccactcggattgccaccaaaatttcagctccatccatgcctgagtacgacacagacaccccattgaatgagacagacacgaccatcacagtgatgctgaaacccgctcagtcccggggagctcctgtcagtgtttatcagctggttgtcaaggaggagcgacttcagaagtcacggagggcagctgacattattgagtgcttttcggtgcccgtgagctatcggaatgcctccagcctcgattctctacactactttgctgctgagttgaagcctgccaacctgcctgtcacccagccatttacagtgggtgacaataagacatacaatggctactggaaccctcctctctctcccctgaaaagctacagcatctacttccaggcactcagcaaagccaatggagagaccaaaatcaactgtgttcgtctggctacaaaagcaccaatgggcagcgcccaggtgaccccggggactccactctgcctcctcaccacaggtgcctccacccagaattctaacactgtggagccagagaagcaggtggacaacaccgtgaagatggctggcgtgatcgctggcctcctcatgttcatcatcattctcctgggcgtgatgctcaccatcaaaaggagaagaaatgcttattcctactcctattacttgtcccaaaggaagctggccaagaagcagaaggagacccagagtggagcccagagggagatggggcctgtggcctctgccgacaaacccaccaccaagctcagcgccagccgcaatgatgaaggcttctcttctagttctcaggacgtcaacggattcacagatggcagccgcggggagctttcccagcccaccctcacgatccagactcatccctaccgcacctgtgaccctgtggagatgagctacccccgggaccagttccaacccgccatccgggtggctgacttgctgcagcacatcacgcagatgaagagaggccagggctacgggttcaaggaggaatacgaggccttaccagaggggcagacagcttcgtgggacacagccaaggaggatgaaaaccgcaataagaatcgatatgggaacatcatatcctacgaccattcccgggtgaggctgctggtgctggatggagacccgcactctgactacatcaatgccaactacattgacggataccatcgacctcggcactacattgcgactcaaggtccgatgcaggagactgtaaaggacttttggagaatgatctggcaggagaactccgccagcatcgtcatggtcacaaacctggtggaagtgggcagggtgaaatgtgtgcgatactggccagatgacacggaggtctacggagacattaaagtcaccctgattgaaacagagcccctggcagaatacgtcatacgcaccttcacagtccagaagaaaggctaccatgagatccgggagctccgcctcttccacttcaccagctggcctgaccacggcgttccctgctatgccactggccttctgggcttcgtccgccaggtcaagttcctcaaccccccggaagctgggcccatagtggtccactgcagtgctggggctgggcggactggctgcttcattgccattgacaccatgcttgacatggccgagaatgaaggggtggtggacatcttcaactgcgtgcgtgagctccgggcccaaagggtcaacctggtacagacagaggagcaatatgtgtttgtgcacgatgccatcctggaagcgtgcctctgtggcaacactgccatccctgtgtgtgagttccgttctctctactacaatatcagcaggctggacccccagacaaactccagccaaatcaaagatgaatttcagaccctcaacattgtgacaccccgtgtgcggcccgaggactgcagcattgggctcctgccccggaaccatgataagaatcgaagtatggacgtgctgcctctggaccgctgcctgcccttccttatctcagtggacggagaatccagcaattacatcaacgcagcactgatggatagccacaagcagcctgccgccttcgtggtcacccagcaccctctacccaacaccgtggcagacttctggaggctggtgttcgattacaactgctcctctgtggtgatgctgaatgagatggacactgcccagttctgtatgcagtactggcctgagaagacctccgggtgctatgggcccatccaggtggagttcgtctccgcagacatcgacgaggacatcatccacagaatattccgcatctgtaacatggcccggccacaggatggttatcgtatagtccagcacctccagtacattggctggcctgcctaccgggacacgcccccctccaagcgctctctgctcaaagtggtccgacgactggagaagtggcaggagcagtatgacgggagggagggacgtactgtggtccactgcctaaatgggggaggccgtagtggaaccttctgtgccatctgcagtgtgtgtgagatgatccagcagcaaaacatcattgacgtgttccacatcgtgaaaacactgcgtaacaacaaatccaacatggtggagaccctggaacagtataaatttgtatacgaggtggcactggaatatttaagctccttttagctcaatgggatggggaacctgccggagtccagaggctgctgtgaccaagcccccttttgtgtgaatggcagtaactgggctcaggagctctgaggtggcaccctgcctgactccaaggagaagactggtggccctgtgttccacggggggctctgcaccttctgaggggtctcctgttgccgtgggagatgctgctccaaaaggcccaggcttccttttcaacctaaccagccacagccaagggcccaagcagaagtacacccacaagcaaggccttggatttctggctcccagaccacctgcttttgttctgagtttgtggatctcttggcaagccaactgtgcaggtgctggggagtgggaggctcccctgccctccttctccttaggagtggaggagatgtgtgttctgctcctctacgtcatggaaaagattgaggctcttgggggtcactgctctgctgccccctgcaacctccttcaggggcctctggcaccagacatttgcagtctggaccagtgtgaccttacgatgttccctaggccacaagagaggccccccatcctcacacctaacctgcatggggcttcgcccacaaccattctgtaccccttccccagcctgggccttgaccgtccagcattcactggccggccagctgtgtccacagcagtttttgataaaggtgttctttgcttttttgtgtggtcagtgggagggggtggaactgcagggaacttctctgctcctccttgtctttgtaaaaagggaccacctccctggggcagggcttgggctgacctgtaggatgtaacccctgtgtttctttggtggtagctttctttggaagagacaaacaagataagatttgattattttccaaagtgtatgtgaaaagaaactttcttttggagggtgtaaaatcttagtctcttatgtcaaaaagaagggggcgggggagtttgagtatgtacctctaagacaaatctctcgggccttttattttttcctggcaatgtccttaaaagctcccaccctgggacagcatgccactgagcaaggagagatgggtgagcctgaagatggtccctttggtttctggggcaaatagagcaccagctttgtgcataatttggatgtccaaatttgaactccttcctaaagaaacccagcagccaccttgaaaaaggccattgtggagcccattatactttgatttaaaataggccaagagaatcaggcctggagatctagggtcttgtccaaagtgtgagtgagtcaatgagagggaaccaacatttgctaagtctctactgtatgccagggatcatgcttggcactttccataggacatttcacacagtccttagaacccccaggagagagctactgacttgttatcatctccatttgatcatctcctccaatgaggaaacccacgcaccttccttagtaatgaaatcctgggttccaaaggggcaggtaatggcaatgagacttctccgtgctgttttcttcatcttctctaagccaagcaattattttatggagggaaaataaggccagaaacttctgagcagataactccacaaatggaaatttagtactttcttcctgatgccagttcttctgggaagcgcagaatttcagatatattttagtaacacattcccagctccccaggaaagccagtctcatctaatttcttagtcagtaaaaacaattccctgttccttcaggctatgaatggaccagccagggaaactctcgaccttgatctctagccagtgcttaggcccaatatctgacagcctcaggtgggctgggacctaggaagctccatcttgaaggctggtctagccccagacagggcatgaggggcagagaattcaagaaggtacagctttggccctcaagagcccactgtatgctggggaaatggaaccatggtgcagtagtgtggagtggatgagtgttccatgagcctaggagcaagaaagtctcttcggcctcgggcttcctggagaaggggacgtccattcctgctgggtcttaacaagcataaaaaggaaaaaaaggaaactcaggcaaagggatccatatgtgcaatggcaaagaaatgtgaaaaggcattgggagaagcagtctgggggaggccagcccagtgcgggcacagcacaacacggggagcagcaagagatgagccagggtccaggagacagatgcccatcgcgagtacagactttgtcctattggcaacaaggagtccatggagctttagagagatgcactcagcttcgtgttggccaagactccttctgggccaatggggctgcctcttttcctttcatcagacactgtgaaaacattcccttaagcgtgcactttttaatatcacatctatttgtctgtctgctcattgttttgttgctggaactaaatatgcaatggatcatgagactcagattctatgagaaacccagggtctctgctttaccacggagcagggtcaccaacccagatctccaggcccatgaggatggaacatgaaaggagccgacaaaagttgcttccattggcatgggctctggagctgtccagaagtccagggacaccagacttgatcaaggaagggctgtcactttagaggttcaaaaggaagtgcctcaaagcaaaggcaagcaaaggaaccccacgatgaacttgctcttttcctttgatgagcctctccccaggtgtatttcagcagaccccggggacccacccccactgggcctgctggcctccctcggctccagcccaatgccccagctggccttccccagcctgcaaggagcctgtagcatggcaaatctgcctgctgtatgctattttcttagatcttggtacatccagacaggatgagggtggagggagagctatttaacacaaatcctaagatttttttctgctcaggaaggggtgaaatagctggcagatacaaaagacagtggcttttatcattttaaatggtaggaatttaaggtgtgacttcagggagaaacaaacttgcaaaaaaaaaaaatctcaggccatgttggggtaacccagcaagggccagtgatgatttcccccagctcatccccttattttcccacaacccaaccattctctaaagcaggacagtgaataggtcttaggccagtgcacacaggaagaaattgaggcttatggatggggatgacttccctaagatcccatgggacaaggatgtggcaaggcttggatgagatggggcaccagtgcccaggaatttgaacattttcctttacccaggaaatctccggagccaacaccaccacccccagggggtctccccaccccaccccatttacagggtgagctcagcctgtcatgagcagaggaaaatattattaatgctctctgagtctttacaacaggagctcttacctcatagatgtgggctctgtttggggaagatgcaaggaagtaatgagaagcccaggaaatttctccacctgtgtttatggcctaaatagcttcaggatgtatcttagctgcactccaacattgcatcctttctggggtgaagaatctgggccaaccaggggtcct

SEQ ID NO: 3923 - protein, 1463 aa, Homo sapiens
MASLAALALSLLLRLQLPPLPGARAQSAPGGCSFDEHYSNCGYSVALGTNGFTWEQINTWEKPMLDQAVPTGSFMMVNSSGRASGQKAHLLLPTLKENDTHCIDFHYYFSSRDRSSPGALNVYVKVNGGPQGNPVWNVSGVVTEGWVKAELAISTFWPHFYQVIFESVSLKGHPGYIAVDEVRVLAHPCRKAPHFLRLQNVEVNVGQNATFQCIAGGKWSQHDKLWLQQWNGRDTALMVTRVVNHRRFSATVSVADTAQRSVSKYRCVIRSDGGSGVSNYAELIVKEPPTPIAPPELLAVGATYLWIKPNANSIIGDGPIILKEVEYRTTTGTWAETHIVDSPNYKLWHLDPDVEYEIRVLLTRPGEGGTGPPGPPLTTRTKCADPVHGPQNVEIVDIRARQLTLQWEPFGYAVTRCHSYNLTVQYQYVFNQQQYEAEEVIQTSSHYTLRGLRPFMTIRLRLLLSNPEGRMESEELVVQTEEDVPGAVPLESIQGGPFEEKIYIQWKPPNETNGVITLYEINYKAVGSLDPSADLSSQRGKVFKLRNETHHLFVGLYPGTTYSFTIKASTAKGFGPPVTTRIATKISAPSMPEYDTDTPLNETDTTITVMLKPAQSRGAPVSVYQLVVKEERLQKSRRAADIIECFSVPVSYRNASSLDSLHYFAAELKPANLPVTQPFTVGDNKTYNGYWNPPLSPLKSYSIYFQALSKANGETKINCVRLATKAPMGSAQVTPGTPLCLLTTGASTQNSNTVEPEKQVDNTVKMAGVIAGLLMFIIILLGVMLTIKRRRNAYSYSYYLSQRKLAKKQKETQSGAQREMGPVASADKPTTKLSASRNDEGFSSSSQDVNGFTDGSRGELSQPTLTIQTHPYRTCDPVEMSYPRDQFQPAIRVADLLQHITQMKRGQGYGFKEEYEALPEGQTASWDTAKEDENRNKNRYGNIISYDHSRVRLLVLDGDPHSDYINANYIDGYHRPRHYIATQGPMQETVKDFWRMIWQENSASIVMVTNLVEVGRVKCVRYWPDDTEVYGDIKVTLIETEPLAEYVIRTFTVQKKGYHEIRELRLFHFTSWPDHGVPCYATGLLGFVRQVKFLNPPEAGPIVVHCSAGAGRTGCFIAIDTMLDMAENEGVVDIFNCVRELRAQRVNLVQTEEQYVFVHDAILEACLCGNTAIPVCEFRSLYYNISRLDPQTNSSQIKDEFQTLNIVTPRVRPEDCSIGLLPRNHDKNRSMDVLPLDRCLPFLISVDGESSNYINAALMDSHKQPAAFVVTQHPLPNTVADFWRLVFDYNCSSVVMLNEMDTAQFCMQYWPEKTSGCYGPIQVEFVSADIDEDIIHRIFRICNMARPQDGYRIVQHLQYIGWPAYRDTPPSKRSLLKVVRRLEKWQEQYDGREGRTVVHCLNGGGRSGTFCAICSVCEMIQQQNIIDVFHIVKTLRNNKSNMVETLEQYKFVYEVALEYLSSF

SEQ ID NO: 3924 - DNA, 2731 bp, Homo sapiens
gcgcttggcgggagatagaaaagtgcttcaacccgcgccggcggcgactgcagttcctgcgagcgaggagcgcgggacctgctgacacgctgacgccttcgagcgcggcccggggcccggagcggccggagcagcccgggtcctgaccccggcccggctcccgctccgggctctgccggcgggcgggcgagcgcggcgcggtccgggccggggggatgtctcggcggacgcgctgcgaggatctggatgagctgcactaccaggacacagattcagatgtgccggagcagagggatagcaagtgcaaggtcaaatggacccatgaggaggacgagcagctgagggccctggtgaggcagtttggacagcaggactggaagttcctggccagccacttccctaaccgcactgaccagcaatgccagtacaggtggctgagagttttgaatccagaccttgtcaaggggccatggaccaaagaggaagaccaaaaagtcatcgagctggttaagaagtatggcacaaagcagtggacactgattgccaagcacctgaagggccggctggggaagcagtgccgtgaacgctggcacaaccacctcaaccctgaggtgaagaagtcttgctggaccgaggaggaggaccgcatcatctgcgaggcccacaaggtgctgggcaaccgctgggccgagatcgccaagatgttgccagggaggacagacaatgctgtgaagaatcactggaactctaccatcaaaaggaaggtggacacaggaggcttcttgagcgagtccaaagactgcaagcccccagtgtacttgctgctggagctcgaggacaaggacggcctccagagtgcccagcccacggaaggccagggaagtcttctgaccaactggccctccgtccctcctaccataaaggaggaggaaaacagtgaggaggaacttgcagcagccaccacatcgaaggaacaggagcccatcggtacagatctggacgcagtgcgaacaccagagcccttggaggaattcccgaagcgtgaggaccaggaaggctccccaccagaaacgagcctgccttacaagtgggtggtggaggcagctaacctcctcatccccgctgtgggttctagcctctctgaagccctggacttgatcgagtcggaccctgatgcttggtgtgacctgagtaaatttgacctccctgaggaaccatctgcagaggacagtatcaacaacagcctagtgcagctgcaagcgtcacatcagcagcaagtcctgccaccccgccagccttccgccctggtgcccagtgtgaccgagtaccgcctggatggccacaccatctcagacctgagccggagcagccggggcgagctgatccccatctcccccagcactgaagtcgggggctctggcattggcacaccgccctctgtgctcaagcggcagaggaagaggcgtgtggctctgtcccctgtcactgagaatagcaccagtctgtccttcctggattcctgtaacagcctcacgcccaagagcacacctgttaagaccctgcccttctcgccctcccagtttctgaacttctggaacaaacaggacacattggagctggagagcccctcgctgacatccaccccagtgtgcagccagaaggtggtggtcaccacaccactgcaccgggacaagacacccctgcaccagaaacatgctgcgtttgtaaccccagatcagaagtactccatggacaacactccccacacgccaaccccgttcaagaacgccctggagaagtacggacccctgaagcccctgccacagaccccgcacctggaggaggacttgaaggaggtgctgcgttctgaggctggcatcgaactcatcatcgaggacgacatcaggcccgagaagcagaagaggaagcctgggctgcggcggagccccatcaagaaagtccggaagtctctggctcttgacattgtggatgaggatgtgaagctgatgatgtccacactgcccaagtctctatccttgccgacaactgccccttcaaactcttccagcctcaccctgtcaggtatcaaagaagacaacagcttgctcaaccagggcttcttgcaggccaagcccgagaaggcagcagtggcccagaagccccgaagccacttcacgacacctgcccctatgtccagtgcctggaagacggtggcctgcggggggaccagggaccagcttttcatgcaggagaaagcccggcagctcctgggccgcctgaagcccagccacacatctcggaccctcatcttgtcctgaggtgttgagggtgtcacgagcccattctcatgtttacaggggttgtgggggcagagggggtctgtgaatctgagagtcattcaggtgacctcctgcagggagccttctgccaccagcccctccccagactctcaggtggaggcaacagggccatgtgctgccctgttgccgagcccagctgtgggcggctcctggtgctaacaacaaagttccacttccaggtctgcctggttccctccccaaggccacagggagctccgtcagcttctcccaagcccacgtcaggcctggcctcatctcagaccctgcttaggatgggggatgtggccaggggtgctcctgtgctcaccctctcttggtgcatttttttggaagaataaaattgcctctctcttaaaaaaaaaaaaaaaaaa

SEQ ID NO: 3925 - protein, 700 aa, Homo sapiens
MSRRTRCEDLDELHYQDTDSDVPEQRDSKCKVKWTHEEDEQLRALVRQFGQQDWKFLASHFPNRTDQQCQYRWLRVLNPDLVKGPWTKEEDQKVIELVKKYGTKQWTLIAKHLKGRLGKQCRERWHNHLNPEVKKSCWTEEEDRIICEAHKVLGNRWAEIAKMLPGRTDNAVKNHWNSTIKRKVDTGGFLSESKDCKPPVYLLLELEDKDGLQSAQPTEGQGSLLTNWPSVPPTIKEEENSEEELAAATTSKEQEPIGTDLDAVRTPEPLEEFPKREDQEGSPPETSLPYKWVVEAANLLIPAVGSSLSEALDLIESDPDAWCDLSKFDLPEEPSAEDSINNSLVQLQASHQQQVLPPRQPSALVPSVTEYRLDGHTISDLSRSSRGELIPISPSTEVGGSGIGTPPSVLKRQRKRRVALSPVTENSTSLSFLDSCNSLTPKSTPVKTLPFSPSQFLNFWNKQDTLELESPSLTSTPVCSQKVVVTTPLHRDKTPLHQKHAAFVTPDQKYSMDNTPHTPTPFKNALEKYGPLKPLPQTPHLEEDLKEVLRSEAGIELIIEDDIRPEKQKRKPGLRRSPIKKVRKSLALDIVDEDVKLMMSTLPKSLSLPTTAPSNSSSLTLSGIKEDNSLLNQGFLQAKPEKAAVAQKPRSHFTTPAPMSSAWKTVACGGTRDQLFMQEKARQLLGRLKPSHTSRTLILS

SEQ ID NO: 3926 - DNA, 773 bp, Homo sapiens
gacatcatagtatatccgtgagtcaagcggctgtgggtttttggctcttgcatctgctatagttctgtctcgggtgccatttgctaactctgttctctgtgtagctgcttttggcagctcctcatctctcttctaatccaccactcacagtcctagagaacagaccacaagttaagaccgtcacctacagaatcccaagggccaaaactgggcagaggacaactccatccttcttacaaaagggcttctccacaagaagcatttccgttagactctagcagtgagataccctgcttcaagaatttctcatggagccagaagcctttgaaatttgcccttatgatcctcaccaccgaatcccactcagcagattccagtaccacctggcatcgtgcaggagaaagaaccccaagaaagccaaaaagatggccacctgcaaatacaacgcctgccacgtggtccccatcaaaaatctggaggaacatgaggctgtttgtgtcaacaggagcgctgtggaagaagaggacaccgagaaccctctgaaagtcagtcctcctagttcagagcagaacgatgacacccagcagactttttttcctcaaaaggttgtttgtgaaaatgacacgaaagagtcagcaagagagaccagtccccagaagatcctcagaccaggacagtaaactgccagctgaggaaggagcacacgcctcatcaatgcatggaagaacgtgcaatgcatcagaataaaagacatgcaaagtaaactaaaaaaa

SEQ ID NO: 3927 - protein, 123 aa, Homo sapiens
MEPEAFEICPYDPHHRIPLSRFQYHLASCRRKNPKKAKKMATCKYNACHVVPIKNLEEHEAVCVNRSAVEEEDTENPLKVSPPSSEQNDDTQQTFFPQKVVCENDTKESARETSPQKILRPGQ

SEQ ID NO: 3928 - DNA, 842 bp, Homo sapiens
gacatcatagtatatccgtgagtcaagcggctgtgggtttttggctcttgcatctgctatagttctgtctcgggtgccatttgctaactctgttctctgtgtagctgcttttggcagctcctcatctctcttctaatccaccactcacagtcctagagaacagaccacaagttaagaccgtcacctacagaatcccaagggccaaaactgggcagaggacaactccatccttcttacaaaagggcttctccacaagaagcatttccgttagactctagcagtgagataccctgcttcaagaatttctcatggagccagaagcctttgaaatttgcccttatgatcctcaccaccgaatcccactcagcagattccagtaccacctggcatcgtgcaggagaaagaaccccaagaaagccaaaaagatggccacctgcaaatacaacgcctgccacgtggtccccatcaaaaatctggaggaacatgaggctgtttgtgtcaacaggagcgctgtggaagaagaggacaccgagaaccctctgaaagtcagtcctcctagttcagagcagaacgatgacacccagcaggtctcaccctgccttcccagccccgatatctggaatgtcgatggcgctaattgccagcatgtgtttgtccttaagactttttttcctcaaaaggttgtttgtgaaaatgacacgaaagagtcagcaagagagaccagtccccagaagatcctcagaccaggacagtaaactgccagctgaggaaggagcacacgcctcatcaatgcatggaagaacgtgcaatgcatcagaataaaagacatgcaaagtaaacta

SEQ ID NO: 3929 - protein, 148 aa, Homo sapiens
MEPEAFEICPYDPHHRIPLSRFQYHLASCRRKNPKKAKKMATCKYNACHVVPIKNLEEHEAVCVNRSAVEEEDTENPLKVSPPSSEQNDDTQQVSPCLPSPDIWNVDGANCQHVFVLKTFFPQKVVCENDTKESARETSPQKILRPGQ

SEQ ID NO: 3930 - DNA, 2533 bp, Homo sapiens
cgcagccctggcgcagacgcgtgggctccgtggcgatgcggggtgttgcctgaggctccactgaagctatggcataatttgcagaatttgcacttcattacttttctgaaattcaaacaaattctgaaactgcacgagttctggctgagagctgtggatctgtgcattttgatggtgacagtgcctacgtggggatgagtgacggaaacccagagctcctgtcaaccagccagacctacaacggccagagcgagaacaacgaagactatgagatccccccgataacacctcccaacctcccggagccatccctcctgcacctgggggaccacgaagccagctaccactcgctgtgccacggcctcacccccaacggtctgctccctgcctactcctatcaggccatggacctcccagccatcatggtgtccaacatgctagcacaggacagccacctgctgtcgggccagctgcccacgatccaggagatggtccactcggaagtggctgcctatgactcgggccggcccgggcccctgctgggtcgcccggcaatgctggccagccacatgagtgccctcagccagtcccagctcatctcgcagatgggcatccggagcagcatcgcccacagctccccatcaccgccggggagcaagtcagcgaccccctctccctccagctccactcaggaagaggagtcggaagtgcatttcaagatctcgggagaaaagagaccttcagccgacccaggaaaaaaggccaagaacccgaagaagaagaaaaagaaggaccccaatgagccgcagaagcctgtgtcggcctacgcactcttcttcagagacactcaggccgccatcaagggtcagaaccccagtgccactttcggtgacgtgtccaaaatcgtggcctccatgtgggacagcctgggagaggaacagaagcaggcctacaagaggaagacagaagcagcaaagaaggaatatctgaaggccctggcagcctaccgggctagcctcgtctccaagagctccccagatcaaggtgagaccaagagcactcaggcaaacccaccagccaaaatgctcccacccaagcagcccatgtatgccatgccaggcctggcctccttcctgacgccgtcggacctgcaggccttccgcagtggggcctcccctgccagcctcgcccggacgctgggctccaagtctctgctgccaggcctcagtgcgtccccgccgccgccaccctccttcccgctcagccccacactgcaccagcagctgtcactgccccctcacgcccagggcgccctcctcagtccacctgttagcatgtccccagccccccagccccctgtcctgcccacccccatggcactccaggtgcagctggcgatgagcccctcacctccagggccacaggacttcccgcacatctctgagttccccagcagctcgggatcctgctcacctggcccatccaaccccaccagcagcggggactgggacagcagctaccccagtggggagtgtggcatcagcacctgcagcctgctccccagggacaaatcgctctacctcacctaatcccgcctccctaccatccctgaggctcgctggaaggcactgctcagagcctgaagggctgacagcagaaaagaggccctggccagaggcagggtggcccatcggagagagcagtgacacacccattgcccgggggctgagtctcttcctcaacctcccaccagactctgcagaggcagcccactgcccaccaccagcccaaagaacctgcaggaaccttccgcccgctgacctgcttgctccagggtaactgtggaccctgtcctcgccctgcgcacggtaccctatgtctggacacccggccccagctccagccccagcccaggtgggccgcccctggcggggtcgcttaccaacggacacccaccccagatgcatgggccagagggccggcccccggcatagatgtgcacatcggttttccagtgtgaacaaaagattacgaaacctagaaactgttggttccgtgtaagtagttgactacgtgttttagaactgtgctgaagacatctgtaagactattttgtgggggaaaaaagtagtttcctttaaggtaaaaagcattttatatgatccttagcacatttttaagttttatcttaagggagacgcgcacaaaagcggctgccaaaccgtttcgtcatcctcacagcaaggaccggacgcttgctagccaccccggagcactgctctccttttaatcatgtattcatctattttaaattgccggcgacgacttttgtctatttatgaagaaaccttgagaacgaagttacagcttatcctaccgtgtgtgtggttttggggtttcgtttgggtttgggttcttgacgtcgtttgcagctgtttcctggccctggcgagtgtctgtcttggtgcccagtgcttctctcaaatctctttataataaaacttctgaaaagctgaaaaaaaaaaaaaaaaaa

SEQ ID NO: 3931 - protein, 464 aa, Homo sapiens
MSDGNPELLSTSQTYNGQSENNEDYEIPPITPPNLPEPSLLHLGDHEASYHSLCHGLTPNGLLPAYSYQAMDLPAIMVSNMLAQDSHLLSGQLPTIQEMVHSEVAAYDSGRPGPLLGRPAMLASHMSALSQSQLISQMGIRSSIAHSSPSPPGSKSATPSPSSSTQEEESEVHFKISGEKRPSADPGKKAKNPKKKKKKDPNEPQKPVSAYALFFRDTQAAIKGQNPSATFGDVSKIVASMWDSLGEEQKQAYKRKTEAAKKEYLKALAAYRASLVSKSSPDQGETKSTQANPPAKMLPPKQPMYAMPGLASFLTPSDLQAFRSGASPASLARTLGSKSLLPGLSASPPPPPSFPLSPTLHQQLSLPPHAQGALLSPPVSMSPAPQPPVLPTPMALQVQLAMSPSPPGPQDFPHISEFPSSSGSCSPGPSNPTSSGDWDSSYPSGECGISTCSLLPRDKSLYLT

SEQ ID NO: 3932 - DNA, 1083 bp, Homo sapiens
atgagcatccaaaagacgtatctggagggagattttgtctttcctgtgagcagcagcagcttcctacggaccctgctggagccccagctcggatcagcccttctgacagcaatgaatgcttcgtgctgcctgccctctgttcagccaacactgcctaatggctcggagcacctccaagcccctttcttcagcaaccagagcagcagcgccttctgtgagcaggtcttcatcaagcccgaggttttcctgtctctgggcatcgtcagtctgctggaaaacatcctggttatcctggccgtggtcaggaacggcaacctgcactccccgatgtacttctttctctgcagcctggcggtggccgacatgctggtaagtgtgtccaatgccctggagaccatcatgatcgccatcgtccacagcgactacctgaccttcgaggaccagtttatccagcacatggacaacatcttcgactccatgatctgcatctccctggtggcctccatctgcaacctcctggccatcgccgtcgacaggtacgtcaccatcttttacgcgctccgctaccacagcatcatgaccgtgaggaaggccctcaccttgatcgtggccatctgggtctgctgcggcgtctgtggcgtggtgttcatcgtctactcggagagcaaaatggtcattgtgtgcctcatcaccatgttcttcgccatgatgctcctcatgggcaccctctacgtgcacatgttcctctttgcgcggctgcacgtcaagcgcatagcagcactgccacctgccgacggggtggccccacagcaacactcatgcatgaagggggcagtcaccatcaccattctcctgggcgtgttcatcttctgctgggcccccttcttcctccacctggtcctcatcatcacctgccccaccaacccctactgcatctgctacactgcccacttcaacacctacctggtcctcatcatgtgcaactccgtcatcgacccactcatctacgctttccggagcctggaattgcgcaacacctttagggagattctctgtggctgcaacggcatgaacttgggatag

SEQ ID NO: 3933 - protein, 360 aa, Homo sapiens
MSIQKTYLEGDFVFPVSSSSFLRTLLEPQLGSALLTAMNASCCLPSVQPTLPNGSEHLQAPFFSNQSSSAFCEQVFIKPEVFLSLGIVSLLENILVILAVVRNGNLHSPMYFFLCSLAVADMLVSVSNALETIMIAIVHSDYLTFEDQFIQHMDNIFDSMICISLVASICNLLAIAVDRYVTIFYALRYHSIMTVRKALTLIVAIWVCCGVCGVVFIVYSESKMVIVCLITMFFAMMLLMGTLYVHMFLFARLHVKRIAALPPADGVAPQQHSCMKGAVTITILLGVFIFCWAPFFLHLVLIITCPTNPYCICYTAHFNTYLVLIMCNSVIDPLIYAFRSLELRNTFREILCGCNGMNLG

SEQ ID NO: 3934 - DNA, 3066 bp, Homo sapiens
gggtcagctccgcccaccctccccggcctccgcccgcctcccgggtcagcggcgcgggtgctgcgcctagctgcgcaccatggccgggttgctggcgttgctgggtccggcaggcagggtgggcgcccgggtccggcctcgcgccacctggctcctgggcgccaccgccccctgcgccccgccgcccctggccctggccctgctcccgcccaggctagacgcccggctgctccgcacggcgcgcggggactgccgcggccaccaggaccccagccaggccacggggacaacaggcagcagcgtcagctgcacagaggagaaaaagcaaagcaagtcacagcaactgaaaaagatttttcaagagtatggcactgttggcgtgtcattgcacattggaatctcattaatttccttgggcatattttacatggttgtgtcaagtggtgtggacatgcctgcaatcctgctgaaactcggatttaaagagtccctggtacagtcaaaaatggcagcaggcacaagtaccttcgtggtggcctatgcaatccacaagctgtttgcgccagtgagaatcagcattacgctagtctctgtgcccttgattgtcagatattttcgaaaagtgggattttttaaacctccagctgcaaaaccttaatgaactcttcagtcgtacacactgaaaacctatttcttctaaattacatgatttggattggttttagggttttagggttgtagggtttcttttggagaggtagggggctaattgctatgttctcatggataaactttgccagcaaaaatcaggcttttgaacaattttaattttttgcctcataaattttgtgaatgctattcattatagggcttgtatatataatctaaaatgtcagcaaggcatcggagatgggttaacatctcaaaacaaaatagcctacaaatgttccttgtgggagactttggcgagggtctgtgggtaaaagcaccagggggttaatcttggctcagtttcctaaaaagcattgattaatttaactggcttttaaatatccccttccgctgatatttgttgtcagctgcctacagtttaatatgcagcgttcacaaaacagctgccagtgctacaattaatgaagcaaaacttaatatgtaatcacaatctaaattagcatcaatactttgacattcattacattggtttgggggaagaaaagtagttctggtatgtttcattgatccccagataccttccaatctggacatgatggggctgattccagatggtttttctgaaatttcattaaggtaggtcagcgtcatttgtctctgtttaggtaaaatataaaaaccctgcccagtagcagtggcatcgcttggttcctgatgcccatgttccagaggaattcggataccacaaacagctaagacaatctcagcttttcttagacaatcttctatctcaaacttcagacattccagaattgtcatgatgtttacactgtctgagttaaaaatcctgttcaagaaaaaaaaagattttgtatcacttcttaaaaaggaatattcatagcacttgtcacaaatagaaggcaaccatgagataatacaagccagggagaggcttgtattacatgacaggtgtaattagtctgctgagccagctttacccaatgaagggcatatgtgttagagagattagctaagagtagaaattcgagcatagaggccaggtgcggtggctcacgcctgtaatcccagcactttgggaggttgaggcaggcgtgtcacttgaggccaggagttcgagaccagcctggccaacatgatgaaaccccgtctctactacaaatacaaaaattagccgggtgtggtggcacacgcctgtagtcccagctactggggaggctgaggcagcattgcttgaacccaggaggtggaggttgcagtgagccaagatcacaccactgcactccagcctgggcgacagagggagacactgtctccaaaagaaagaaatcccagcgtagatccaaactgagacactgaggcttcgtccttatagtagtcaggagcaggcgattgaagtaattctgtcctgcggggttcagcatcatgcacgttccccctgggccattctctgatgcagggcacttgctccacactctgggaacccagattcaccagtctgccctgtcacgtagttgaaggagttgcatttatctttctggctcctaattcctttaaaattacatttgttgcagaacctccacaaggctaaataaaattacatttgtgaccatcagagaactgaataaaccattaactggccatcctggttttgcagagatcaggttgttgacagttcctggttgacccacagctacccatgtcagttatctccactaacatatccaagaatctttgtaggacaatttctccacctgcaaggtctttcaggtagaactcttcttttaaggcaattagcccattgccaaaaggttttactgtcttaaagctgtctttctgagatctaattccaaggacttctccacagctaagtgagatgcctcacaccattaggtgatgctttggacagaacagagtattttcatcttgtgtttaaagcaattccttggcttcggctcctcaccactttctatgccagtctcccatttatgtccctagtaatgcctatgcaaaaaaaaaaaaagaaaaaaaagaaaaactgatggtgaaacctacaggtttaagggcttaaatctcaaactttgttaggagtaacaggagcgtgctgagcgggcaagcaataaaacaaatcataccaaaaagccacattgctctctcctaagccccaaccccactccactcctgtggccaggggtccaaacagaaaataaccggagaagacaaggaggtcaaaggatcagggaactaagcattatgtgaattcaccagcaagatgtacagaacgcctgtgtttacattgtttttatggaactagcagaataaaacatctattttaaaaatgaaaaaaaaaaaaaaaaaaaaaaaaaaaaaaaaaaa

SEQ ID NO: 3935 - protein, 192 aa, Homo sapiens
MAGLLALLGPAGRVGARVRPRATWLLGATAPCAPPPLALALLPPRLDARLLRTARGDCRGHQDPSQATGTTGSSVSCTEEKKQSKSQQLKKIFQEYGTVGVSLHIGISLISLGIFYMVVSSGVDMPAILLKLGFKESLVQSKMAAGTSTFVVAYAIHKLFAPVRISITLVSVPLIVRYFRKVGFFKPPAAKP

SEQ ID NO: 3936 - DNA, 2346 bp, Homo sapiens
acaaggcagcctcgctcgagcgcaggccaatcggctttctagctagagggtttaactcctatttaaaaagaagaacctttgaattctaacggctgagctcttggaagacttgggtccttgggtcgcaggtgggagccgacgggtgggtagaccgtgggggatatctcagtggcggacgaggacggcggggacaaggggcggctggtcggagtggcggagcgtcaagtcccctgtcggttcctccgtccctgagtgtccttggcgctgccttgtgcccgcccagcgcctttgcatccgctcctgggcaccgaggcgccctgtaggatactgcttgttacttattacagctagaggcatcatggaccgatctaaagaaaactgcatttcaggacctgttaaggctacagctccagttggaggtccaaaacgtgttctcgtgactcagcaatttccttgtcagaatccattacctgtaaatagtggccaggctcagcgggtcttgtgtccttcaaattcttcccagcgcattcctttgcaagcacaaaagcttgtctccagtcacaagccggttcagaatcagaagcagaagcaattgcaggcaaccagtgtacctcatcctgtctccaggccactgaataacacccaaaagagcaagcagcccctgccatcggcacctgaaaataatcctgaggaggaactggcatcaaaacagaaaaatgaagaatcaaaaaagaggcagtgggctttggaagactttgaaattggtcgccctctgggtaaaggaaagtttggtaatgtttatttggcaagagaaaagcaaagcaagtttattctggctcttaaagtgttatttaaagctcagctggagaaagccggagtggagcatcagctcagaagagaagtagaaatacagtcccaccttcggcatcctaatattcttagactgtatggttatttccatgatgctaccagagtctacctaattctggaatatgcaccacttggaacagtttatagagaacttcagaaactttcaaagtttgatgagcagagaactgctacttatataacagaattggcaaatgccctgtcttactgtcattcgaagagagttattcatagagacattaagccagagaacttacttcttggatcagctggagagcttaaaattgcagattttgggtggtcagtacatgctccatcttccaggaggaccactctctgtggcaccctggactacctgccccctgaaatgattgaaggtcggatgcatgatgagaaggtggatctctggagccttggagttctttgctatgaatttttagttgggaagcctccttttgaggcaaacacataccaagagacctacaaaagaatatcacgggttgaattcacattccctgactttgtaacagagggagccagggacctcatttcaagactgttgaagcataatcccagccagaggccaatgctcagagaagtacttgaacacccctggatcacagcaaattcatcaaaaccatcaaattgccaaaacaaagaatcagctagcaaacagtcttaggaatcgtgcagggggagaaatccttgagccagggctgccatataacctgacaggaacatgctactgaagtttattttaccattgactgctgccctcaatctagaacgctacacaagaaatatttgttttactcagcaggtgtgccttaacctccctattcagaaagctccacatcaataaacatgacactctgaagtgaaagtagccacgagaattgtgctacttatactggttcataatctggaggcaaggttcgactgcagccgccccgtcagcctgtgctaggcatggtgtcttcacaggaggcaaatccagagcctggctgtggggaaagtgaccactctgccctgaccccgatcagttaaggagctgtgcaataaccttcctagtacctgagtgagtgtgtaacttattgggttggcgaagcctggtaaagctgttggaatgagtatgtgattctttttaagtatgaaaataaagatatatgtacagacttgtattttttctctggtggcattcctttaggaatgctgtgtgtctgtccggcaccccggtaggcctgattgggtttctagtcctccttaaccacttatctcccatatgagagtgtgaaaaataggaacacgtgctctacctccatttagggatttgcttgggatacagaagaggccatgtgtctcagagctgttaagggcttatttttttaaaacattggagtcatagcatgtgtgtaaactttaaatatgcaaataaataagtatctatgtctaaaaaaa

SEQ ID NO: 3937 - protein, 403 aa, Homo sapiens
MDRSKENCISGPVKATAPVGGPKRVLVTQQFPCQNPLPVNSGQAQRVLCPSNSSQRIPLQAQKLVSSHKPVQNQKQKQLQATSVPHPVSRPLNNTQKSKQPLPSAPENNPEEELASKQKNEESKKRQWALEDFEIGRPLGKGKFGNVYLAREKQSKFILALKVLFKAQLEKAGVEHQLRREVEIQSHLRHPNILRLYGYFHDATRVYLILEYAPLGTVYRELQKLSKFDEQRTATYITELANALSYCHSKRVIHRDIKPENLLLGSAGELKIADFGWSVHAPSSRRTTLCGTLDYLPPEMIEGRMHDEKVDLWSLGVLCYEFLVGKPPFEANTYQETYKRISRVEFTFPDFVTEGARDLISRLLKHNPSQRPMLREVLEHPWITANSSKPSNCQNKESASKQS

SEQ ID NO: 3938 - DNA, 2554 bp, Homo sapiens
acaaggcagcctcgctcgagcgcaggccaatcggctttctagctagagggtttaactcctatttaaaaagaagaacctttgaattctaacggctgagctcttggaagacttgggtccttgggtcgcaggtgggagccgacgggtgggtagaccgtgggggatatctcagtggcggacgaggacggcggggacaaggggcggctggtcggagtggcggagcgtcaagtcccctgtcggttcctccgtccctgagtgtccttggcgctgccttgtgcccgcccagcgcctttgcatccgctcctgggcaccgaggcgccctgtaggatactgcttgttacttattacagctagagggtctcactccattgcccaggccagagtgcggggatatttgataagaaacttcagtgaaggccgggcgcggtggctcatgcccgtaatcccagcattttcggaggccgaggctggagtgcaatggtgtgatctcagctcactgcaacctctgcttcctgggtttaagtgattctcctgcctcagcctcccgagtagctgggattacaggcatcatggaccgatctaaagaaaactgcatttcaggacctgttaaggctacagctccagttggaggtccaaaacgtgttctcgtgactcagcaatttccttgtcagaatccattacctgtaaatagtggccaggctcagcgggtcttgtgtccttcaaattcttcccagcgcattcctttgcaagcacaaaagcttgtctccagtcacaagccggttcagaatcagaagcagaagcaattgcaggcaaccagtgtacctcatcctgtctccaggccactgaataacacccaaaagagcaagcagcccctgccatcggcacctgaaaataatcctgaggaggaactggcatcaaaacagaaaaatgaagaatcaaaaaagaggcagtgggctttggaagactttgaaattggtcgccctctgggtaaaggaaagtttggtaatgtttatttggcaagagaaaagcaaagcaagtttattctggctcttaaagtgttatttaaagctcagctggagaaagccggagtggagcatcagctcagaagagaagtagaaatacagtcccaccttcggcatcctaatattcttagactgtatggttatttccatgatgctaccagagtctacctaattctggaatatgcaccacttggaacagtttatagagaacttcagaaactttcaaagtttgatgagcagagaactgctacttatataacagaattggcaaatgccctgtcttactgtcattcgaagagagttattcatagagacattaagccagagaacttacttcttggatcagctggagagcttaaaattgcagattttgggtggtcagtacatgctccatcttccaggaggaccactctctgtggcaccctggactacctgccccctgaaatgattgaaggtcggatgcatgatgagaaggtggatctctggagccttggagttctttgctatgaatttttagttgggaagcctccttttgaggcaaacacataccaagagacctacaaaagaatatcacgggttgaattcacattccctgactttgtaacagagggagccagggacctcatttcaagactgttgaagcataatcccagccagaggccaatgctcagagaagtacttgaacacccctggatcacagcaaattcatcaaaaccatcaaattgccaaaacaaagaatcagctagcaaacagtcttaggaatcgtgcagggggagaaatccttgagccagggctgccatataacctgacaggaacatgctactgaagtttattttaccattgactgctgccctcaatctagaacgctacacaagaaatatttgttttactcagcaggtgtgccttaacctccctattcagaaagctccacatcaataaacatgacactctgaagtgaaagtagccacgagaattgtgctacttatactggttcataatctggaggcaaggttcgactgcagccgccccgtcagcctgtgctaggcatggtgtcttcacaggaggcaaatccagagcctggctgtggggaaagtgaccactctgccctgaccccgatcagttaaggagctgtgcaataaccttcctagtacctgagtgagtgtgtaacttattgggttggcgaagcctggtaaagctgttggaatgagtatgtgattctttttaagtatgaaaataaagatatatgtacagacttgtattttttctctggtggcattcctttaggaatgctgtgtgtctgtccggcaccccggtaggcctgattgggtttctagtcctccttaaccacttatctcccatatgagagtgtgaaaaataggaacacgtgctctacctccatttagggatttgcttgggatacagaagaggccatgtgtctcagagctgttaagggcttatttttttaaaacattggagtcatagcatgtgtgtaaactttaaatatgcaaataaataagtatctatgtctaaaaaaa

SEQ ID NO: 3939 - protein, 403 aa, Homo sapiens; identical to SEQ ID NO: 3937

SEQ ID NO: 3940 - DNA, 2245 bp, Homo sapiens
acaaggcagcctcgctcgagcgcaggccaatcggctttctagctagagggtttaactcctatttaaaaagaagaacctttgaattctaacggctgagctcttggaagacttgggtccttgggtcgcaggtgggagccgacggggtctcactccattgcccaggccagagtgcggggatatttgataagaaacttcagtgaaggccgggcgcggtggctcatgcccgtaatcccagcattttcggaggccgaggcatcatggaccgatctaaagaaaactgcatttcaggacctgttaaggctacagctccagttggaggtccaaaacgtgttctcgtgactcagcaatttccttgtcagaatccattacctgtaaatagtggccaggctcagcgggtcttgtgtccttcaaattcttcccagcgcattcctttgcaagcacaaaagcttgtctccagtcacaagccggttcagaatcagaagcagaagcaattgcaggcaaccagtgtacctcatcctgtctccaggccactgaataacacccaaaagagcaagcagcccctgccatcggcacctgaaaataatcctgaggaggaactggcatcaaaacagaaaaatgaagaatcaaaaaagaggcagtgggctttggaagactttgaaattggtcgccctctgggtaaaggaaagtttggtaatgtttatttggcaagagaaaagcaaagcaagtttattctggctcttaaagtgttatttaaagctcagctggagaaagccggagtggagcatcagctcagaagagaagtagaaatacagtcccaccttcggcatcctaatattcttagactgtatggttatttccatgatgctaccagagtctacctaattctggaatatgcaccacttggaacagtttatagagaacttcagaaactttcaaagtttgatgagcagagaactgctacttatataacagaattggcaaatgccctgtcttactgtcattcgaagagagttattcatagagacattaagccagagaacttacttcttggatcagctggagagcttaaaattgcagattttgggtggtcagtacatgctccatcttccaggaggaccactctctgtggcaccctggactacctgccccctgaaatgattgaaggtcggatgcatgatgagaaggtggatctctggagccttggagttctttgctatgaatttttagttgggaagcctccttttgaggcaaacacataccaagagacctacaaaagaatatcacgggttgaattcacattccctgactttgtaacagagggagccagggacctcatttcaagactgttgaagcataatcccagccagaggccaatgctcagagaagtacttgaacacccctggatcacagcaaattcatcaaaaccatcaaattgccaaaacaaagaatcagctagcaaacagtcttaggaatcgtgcagggggagaaatccttgagccagggctgccatataacctgacaggaacatgctactgaagtttattttaccattgactgctgccctcaatctagaacgctacacaagaaatatttgttttactcagcaggtgtgccttaacctccctattcagaaagctccacatcaataaacatgacactctgaagtgaaagtagccacgagaattgtgctacttatactggttcataatctggaggcaaggttcgactgcagccgccccgtcagcctgtgctaggcatggtgtcttcacaggaggcaaatccagagcctggctgtggggaaagtgaccactctgccctgaccccgatcagttaaggagctgtgcaataaccttcctagtacctgagtgagtgtgtaacttattgggttggcgaagcctggtaaagctgttggaatgagtatgtgattctttttaagtatgaaaataaagatatatgtacagacttgtattttttctctggtggcattcctttaggaatgctgtgtgtctgtccggcaccccggtaggcctgattgggtttctagtcctccttaaccacttatctcccatatgagagtgtgaaaaataggaacacgtgctctacctccatttagggatttgcttgggatacagaagaggccatgtgtctcagagctgttaagggcttatttttttaaaacattggagtcatagcatgtgtgtaaactttaaatatgcaaataaataagtatctatgtctaaaaaaa

SEQ ID NO: 3941 - protein, 403 aa, Homo sapiens; identical to SEQ ID NO: 3937

SEQ ID NO: 3942 - DNA, 2135 bp, Homo sapiens
acaaggcagcctcgctcgagcgcaggccaatcggctttctagctagagggtttaactcctatttaaaaagaagaacctttgaattctaacggctgagctcttggaagacttgggtccttgggtcgcaggtgggagccgacgggcatcatggaccgatctaaagaaaactgcatttcaggacctgttaaggctacagctccagttggaggtccaaaacgtgttctcgtgactcagcaatttccttgtcagaatccattacctgtaaatagtggccaggctcagcgggtcttgtgtccttcaaattcttcccagcgcattcctttgcaagcacaaaagcttgtctccagtcacaagccggttcagaatcagaagcagaagcaattgcaggcaaccagtgtacctcatcctgtctccaggccactgaataacacccaaaagagcaagcagcccctgccatcggcacctgaaaataatcctgaggaggaactggcatcaaaacagaaaaatgaagaatcaaaaaagaggcagtgggctttggaagactttgaaattggtcgccctctgggtaaaggaaagtttggtaatgtttatttggcaagagaaaagcaaagcaagtttattctggctcttaaagtgttatttaaagctcagctggagaaagccggagtggagcatcagctcagaagagaagtagaaatacagtcccaccttcggcatcctaatattcttagactgtatggttatttccatgatgctaccagagtctacctaattctggaatatgcaccacttggaacagtttatagagaacttcagaaactttcaaagtttgatgagcagagaactgctacttatataacagaattggcaaatgccctgtcttactgtcattcgaagagagttattcatagagacattaagccagagaacttacttcttggatcagctggagagcttaaaattgcagattttgggtggtcagtacatgctccatcttccaggaggaccactctctgtggcaccctggactacctgccccctgaaatgattgaaggtcggatgcatgatgagaaggtggatctctggagccttggagttctttgctatgaatttttagttgggaagcctccttttgaggcaaacacataccaagagacctacaaaagaatatcacgggttgaattcacattccctgactttgtaacagagggagccagggacctcatttcaagactgttgaagcataatcccagccagaggccaatgctcagagaagtacttgaacacccctggatcacagcaaattcatcaaaaccatcaaattgccaaaacaaagaatcagctagcaaacagtcttaggaatcgtgcagggggagaaatccttgagccagggctgccatataacctgacaggaacatgctactgaagtttattttaccattgactgctgccctcaatctagaacgctacacaagaaatatttgttttactcagcaggtgtgccttaacctccctattcagaaagctccacatcaataaacatgacactctgaagtgaaagtagccacgagaattgtgctacttatactggttcataatctggaggcaaggttcgactgcagccgccccgtcagcctgtgctaggcatggtgtcttcacaggaggcaaatccagagcctggctgtggggaaagtgaccactctgccctgaccccgatcagttaaggagctgtgcaataaccttcctagtacctgagtgagtgtgtaacttattgggttggcgaagcctggtaaagctgttggaatgagtatgtgattctttttaagtatgaaaataaagatatatgtacagacttgtattttttctctggtggcattcctttaggaatgctgtgtgtctgtccggcaccccggtaggcctgattgggtttctagtcctccttaaccacttatctcccatatgagagtgtgaaaaataggaacacgtgctctacctccatttagggatttgcttgggatacagaagaggccatgtgtctcagagctgttaagggcttatttttttaaaacattggagtcatagcatgtgtgtaaactttaaatatgcaaataaataagtatctatgtctaaaaaaa

SEQ ID NO: 3943 - protein, 403 aa, Homo sapiens; identical to SEQ ID NO: 3937

SEQ ID NO: 3944 - DNA, 2231 bp, Homo sapiens
acaaggcagcctcgctcgagcgcaggccaatcggctttctagctagagggtttaactcctatttaaaaagaagaacctttgaattctaacggctgagctcttggaagacttgggtccttgggtcgcagggtctcactccattgcccaggccagagtgcggggatatttgataagaaacttcagtgaaggccgggcgcggtggctcatgcccgtaatcccagcattttcggaggccgaggcatcatggaccgatctaaagaaaactgcatttcaggacctgttaaggctacagctccagttggaggtccaaaacgtgttctcgtgactcagcaatttccttgtcagaatccattacctgtaaatagtggccaggctcagcgggtcttgtgtccttcaaattcttcccagcgcattcctttgcaagcacaaaagcttgtctccagtcacaagccggttcagaatcagaagcagaagcaattgcaggcaaccagtgtacctcatcctgtctccaggccactgaataacacccaaaagagcaagcagcccctgccatcggcacctgaaaataatcctgaggaggaactggcatcaaaacagaaaaatgaagaatcaaaaaagaggcagtgggctttggaagactttgaaattggtcgccctctgggtaaaggaaagtttggtaatgtttatttggcaagagaaaagcaaagcaagtttattctggctcttaaagtgttatttaaagctcagctggagaaagccggagtggagcatcagctcagaagagaagtagaaatacagtcccaccttcggcatcctaatattcttagactgtatggttatttccatgatgctaccagagtctacctaattctggaatatgcaccacttggaacagtttatagagaacttcagaaactttcaaagtttgatgagcagagaactgctacttatataacagaattggcaaatgccctgtcttactgtcattcgaagagagttattcatagagacattaagccagagaacttacttcttggatcagctggagagcttaaaattgcagattttgggtggtcagtacatgctccatcttccaggaggaccactctctgtggcaccctggactacctgccccctgaaatgattgaaggtcggatgcatgatgagaaggtggatctctggagccttggagttctttgctatgaatttttagttgggaagcctccttttgaggcaaacacataccaagagacctacaaaagaatatcacgggttgaattcacattccctgactttgtaacagagggagccagggacctcatttcaagactgttgaagcataatcccagccagaggccaatgctcagagaagtacttgaacacccctggatcacagcaaattcatcaaaaccatcaaattgccaaaacaaagaatcagctagcaaacagtcttaggaatcgtgcagggggagaaatccttgagccagggctgccatataacctgacaggaacatgctactgaagtttattttaccattgactgctgccctcaatctagaacgctacacaagaaatatttgttttactcagcaggtgtgccttaacctccctattcagaaagctccacatcaataaacatgacactctgaagtgaaagtagccacgagaattgtgctacttatactggttcataatctggaggcaaggttcgactgcagccgccccgtcagcctgtgctaggcatggtgtcttcacaggaggcaaatccagagcctggctgtggggaaagtgaccactctgccctgaccccgatcagttaaggagctgtgcaataaccttcctagtacctgagtgagtgtgtaacttattgggttggcgaagcctggtaaagctgttggaatgagtatgtgattctttttaagtatgaaaataaagatatatgtacagacttgtattttttctctggtggcattcctttaggaatgctgtgtgtctgtccggcaccccggtaggcctgattgggtttctagtcctccttaaccacttatctcccatatgagagtgtgaaaaataggaacacgtgctctacctccatttagggatttgcttgggatacagaagaggccatgtgtctcagagctgttaagggcttatttttttaaaacattggagtcatagcatgtgtgtaaactttaaatatgcaaataaataagtatctatgtctaaaaaaa

SEQ ID NO: 3945 - protein, 403 aa, Homo sapiens; identical to SEQ ID NO: 3937

SEQ ID NO: 3946 - DNA, 2121 bp, Homo sapiens
acaaggcagcctcgctcgagcgcaggccaatcggctttctagctagagggtttaactcctatttaaaaagaagaacctttgaattctaacggctgagctcttggaagacttgggtccttgggtcgcaggcatcatggaccgatctaaagaaaactgcatttcaggacctgttaaggctacagctccagttggaggtccaaaacgtgttctcgtgactcagcaatttccttgtcagaatccattacctgtaaatagtggccaggctcagcgggtcttgtgtccttcaaattcttcccagcgcattcctttgcaagcacaaaagcttgtctccagtcacaagccggttcagaatcagaagcagaagcaattgcaggcaaccagtgtacctcatcctgtctccaggccactgaataacacccaaaagagcaagcagcccctgccatcggcacctgaaaataatcctgaggaggaactggcatcaaaacagaaaaatgaagaatcaaaaaagaggcagtgggctttggaagactttgaaattggtcgccctctgggtaaaggaaagtttggtaatgtttatttggcaagagaaaagcaaagcaagtttattctggctcttaaagtgttatttaaagctcagctggagaaagccggagtggagcatcagctcagaagagaagtagaaatacagtcccaccttcggcatcctaatattcttagactgtatggttatttccatgatgctaccagagtctacctaattctggaatatgcaccacttggaacagtttatagagaacttcagaaactttcaaagtttgatgagcagagaactgctacttatataacagaattggcaaatgccctgtcttactgtcattcgaagagagttattcatagagacattaagccagagaacttacttcttggatcagctggagagcttaaaattgcagattttgggtggtcagtacatgctccatcttccaggaggaccactctctgtggcaccctggactacctgccccctgaaatgattgaaggtcggatgcatgatgagaaggtggatctctggagccttggagttctttgctatgaatttttagttgggaagcctccttttgaggcaaacacataccaagagacctacaaaagaatatcacgggttgaattcacattccctgactttgtaacagagggagccagggacctcatttcaagactgttgaagcataatcccagccagaggccaatgctcagagaagtacttgaacacccctggatcacagcaaattcatcaaaaccatcaaattgccaaaacaaagaatcagctagcaaacagtcttaggaatcgtgcagggggagaaatccttgagccagggctgccatataacctgacaggaacatgctactgaagtttattttaccattgactgctgccctcaatctagaacgctacacaagaaatatttgttttactcagcaggtgtgccttaacctccctattcagaaagctccacatcaataaacatgacactctgaagtgaaagtagccacgagaattgtgctacttatactggttcataatctggaggcaaggttcgactgcagccgccccgtcagcctgtgctaggcatggtgtcttcacaggaggcaaatccagagcctggctgtggggaaagtgaccactctgccctgaccccgatcagttaaggagctgtgcaataaccttcctagtacctgagtgagtgtgtaacttattgggttggcgaagcctggtaaagctgttggaatgagtatgtgattctttttaagtatgaaaataaagatatatgtacagacttgtattttttctctggtggcattcctttaggaatgctgtgtgtctgtccggcaccccggtaggcctgattgggtttctagtcctccttaaccacttatctcccatatgagagtgtgaaaaataggaacacgtgctctacctccatttagggatttgcttgggatacagaagaggccatgtgtctcagagctgttaagggcttatttttttaaaacattggagtcatagcatgtgtgtaaactttaaatatgcaaataaataagtatctatgtctaaaaaaa

SEQ ID NO: 3947 - protein, 403 aa, Homo sapiens; identical to SEQ ID NO: 3937

SEQ ID NO: 3948 - DNA, 2295 bp, Homo sapiens
aagaacccggaagtggtggagccaacggccagccagacctgtggcagtcccagccccagggtgctctccgcggtcggccatttatcggtgaagcaacagccccttgacgtcaagcttgacgcattggagataaagtccaaggaggtgaactaacctttgaacgtgccactggcagggaaactgtcttccttttctccaagatgtacagaaccaaagtgggcttgaaggaccgccagcagctctacaagctgatcattagccagctgctatatgacggctacatcagcatcgccaatggcctcatcaatgaaatcaagcctcagtctgtgtgtgcaccctcggagcagctcctgcatctcatcaaactcggaatggaaaacgatgacaccgcagttcagtatgcaattggtcgttcagatactgttgcccctggcacagggattgacctggaatttgatgcagatgttcagactatgtccccagaggcttctgagtacgaaacatgctatgtcacatcacataaaggaccatgccgtgtagctacctatagtagagatggacagttaatagctactgggtctgctgatgcttcgataaagatacttgacacagagaggatgttggccaaaagtgccatgccaatagaggtcatgatgaatgagaccgcacaacaaaatatggaaaaccacccagtgattcgaactctttatgaccatgtggatgaagtcacgtgccttgctttccacccaacagaacagatcctggcttctggttcaagggattatactcttaaattatttgattattccaaaccatcagcaaaaagagccttcaaatacattcaggaagctgaaatgttacgttccatctcttttcatccttctggagactttatacttgtcggaactcagcatcctactcttcgcctttatgatatcaacacctttcaatgttttgtctcttgcaatcctcaagatcaacacaccgatgctatatgttccgttaattacaattctagtgccaatatgtacgtaactggaagcaaggacggctgcatcaaattatgggatggtgtttcaaatcgatgcatcacaacttttgagaaagcacatgacggtgctgaagtttgttctgccattttttccaaaaattctaaatacattctctcaagtggaaaagactctgtagctaaactttgggaaatatcaacgggacgaacactggtcagatacacgggcgcgggtttaagtggacgccaggtgcaccggacacaggctgtgtttaaccacaccgaggactatgtgttgctgcccgacgagaggacgatcagtctttgctgctgggactcgaggacagccgagcggagaaacctgctgtcgttggggcacaacaatattgtacgctgcatagtgcactcccccaccaaccccgggttcatgacgtgcagcgatgacttcagagcgcggttttggtaccggagatcgaccactgactgagccaccctctccgtagggttctttctcgaggactctaccctcctcccccacgtcctgtctcagctgcagtcgtaagtccgtgcaccatccttgacgttttgctgccacctctgtccacattcttcttggatttgtataaaagaatctttttttaccttgatgtagaatcatggtggaaaaagttggaaacacagatctgtgcagttctacattcactgattattacagtgtgattttcatcggttttgtaagtacaggacttgccgtttcttttgatctcttgattgaaggaggatagggcattaaagtgcttttgacatgaggaattttcatttggttcttctgtcaactttcttgcttattctgctgaaccctctgtgtatttcccttccaggtatatttgaacagataagcaggcatgcagctctgagactcctgagttttatgccattatcaaaagcattttcaagaatccctcaattctatcctgaaatgatgttattctgataataaagctcagatctgcaactttattgttatatatttttcacttctgtaaaattaatggccagtttttcctgacaatttataggaacagtatctttcaacatactccctacattatccttcaatatctgcaatacttgtctttagtaactgtatttctggtaagattatgatttcatgagaaacaattgaaaatatatccgatctaattaaattaggtcagcctgctattgctctcaggtgttgcctgtcttcacgaatgattagtatcgattgacctctttcttaggtg

SEQ ID NO: 3949 - protein, 431 aa, Homo sapiens
MYRTKVGLKDRQQLYKLIISQLLYDGYISIANGLINEIKPQSVCAPSEQLLHLIKLGMENDDTAVQYAIGRSDTVAPGTGIDLEFDADVQTMSPEASEYETCYVTSHKGPCRVATYSRDGQLIATGSADASIKILDTERMLAKSAMPIEVMMNETAQQNMENHPVIRTLYDHVDEVTCLAFHPTEQILASGSRDYTLKLFDYSKPSAKRAFKYIQEAEMLRSISFHPSGDFILVGTQHPTLRLYDINTFQCFVSCNPQDQHTDAICSVNYNSSANMYVTGSKDGCIKLWDGVSNRCITTFEKAHDGAEVCSAIFSKNSKYILSSGKDSVAKLWEISTGRTLVRYTGAGLSGRQVHRTQAVFNHTEDYVLLPDERTISLCCWDSRTAERRNLLSLGHNNIVRCIVHSPTNPGFMTCSDDFRARFWYRRSTTD

SEQ ID NO: 3950 - DNA, 2292 bp, Homo sapiens
ggcaggattcgcgcctccatttttccaggagagagcgggataccaagagaaccggaccagctggtactgggacacggggagagtagctggtgcggtcggctggggcatttagagaaaaccacagaaacgactggggcgagactggaagagtcgagagttagcaagctggcagggaaactgtcttccttttctccaagatgtacagaaccaaagtgggcttgaaggaccgccagcagctctacaagctgatcattagccagctgctatatgacggctacatcagcatcgccaatggcctcatcaatgaaatcaagcctcagtctgtgtgtgcaccctcggagcagctcctgcatctcatcaaactcggaatggaaaacgatgacaccgcagttcagtatgcaattggtcgttcagatactgttgcccctggcacagggattgacctggaatttgatgcagatgttcagactatgtccccagaggcttctgagtacgaaacatgctatgtcacatcacataaaggaccatgccgtgtagctacctatagtagagatggacagttaatagctactgggtctgctgatgcttcgataaagatacttgacacagagaggatgttggccaaaagtgccatgccaatagaggtcatgatgaatgagaccgcacaacaaaatatggaaaaccacccagtgattcgaactctttatgaccatgtggatgaagtcacgtgccttgctttccacccaacagaacagatcctggcttctggttcaagggattatactcttaaattatttgattattccaaaccatcagcaaaaagagccttcaaatacattcaggaagctgaaatgttacgttccatctcttttcatccttctggagactttatacttgtcggaactcagcatcctactcttcgcctttatgatatcaacacctttcaatgttttgtctcttgcaatcctcaagatcaacacaccgatgctatatgttccgttaattacaattctagtgccaatatgtacgtaactggaagcaaggacggctgcatcaaattatgggatggtgtttcaaatcgatgcatcacaacttttgagaaagcacatgacggtgctgaagtttgttctgccattttttccaaaaattctaaatacattctctcaagtggaaaagactctgtagctaaactttgggaaatatcaacgggacgaacactggtcagatacacgggcgcgggtttaagtggacgccaggtgcaccggacacaggctgtgtttaaccacaccgaggactatgtgttgctgcccgacgagaggacgatcagtctttgctgctgggactcgaggacagccgagcggagaaacctgctgtcgttggggcacaacaatattgtacgctgcatagtgcactcccccaccaaccccgggttcatgacgtgcagcgatgacttcagagcgcggttttggtaccggagatcgaccactgactgagccaccctctccgtagggttctttctcgaggactctaccctcctcccccacgtcctgtctcagctgcagtcgtaagtccgtgcaccatccttgacgttttgctgccacctctgtccacattcttcttggatttgtataaaagaatctttttttaccttgatgtagaatcatggtggaaaaagttggaaacacagatctgtgcagttctacattcactgattattacagtgtgattttcatcggttttgtaagtacaggacttgccgtttcttttgatctcttgattgaaggaggatagggcattaaagtgcttttgacatgaggaattttcatttggttcttctgtcaactttcttgcttattctgctgaaccctctgtgtatttcccttccaggtatatttgaacagataagcaggcatgcagctctgagactcctgagttttatgccattatcaaaagcattttcaagaatccctcaattctatcctgaaatgatgttattctgataataaagctcagatctgcaactttattgttatatatttttcacttctgtaaaattaatggccagtttttcctgacaatttataggaacagtatctttcaacatactccctacattatccttcaatatctgcaatacttgtctttagtaactgtatttctggtaagattatgatttcatgagaaacaattgaaaatatatccgatctaattaaattaggtcagcctgctattgctctcaggtgttgcctgtcttcacgaatgattagtatcgattgacctctttcttaggtg

SEQ ID NO: 3951 - protein, 431 aa, Homo sapiens; identical to SEQ ID NO: 3949

SEQ ID NO: 3952 - DNA, 2323 bp, Homo sapiens
aactaacctttgaacgtgccagtaagtaagatggcgagaaaagcaagagagagtgggaccgatcgatagcgcagcggtcggcttggcgccctttcagcgtgcgcagtgaacgtgcgctcggagcggtagattgggcaggattcgcgcctccatttttccaggagagagcgggataccaagagaaccggaccagctgctggcagggaaactgtcttccttttctccaagatgtacagaaccaaagtgggcttgaaggaccgccagcagctctacaagctgatcattagccagctgctatatgacggctacatcagcatcgccaatggcctcatcaatgaaatcaagcctcagtctgtgtgtgcaccctcggagcagctcctgcatctcatcaaactcggaatggaaaacgatgacaccgcagttcagtatgcaattggtcgttcagatactgttgcccctggcacagggattgacctggaatttgatgcagatgttcagactatgtccccagaggcttctgagtacgaaacatgctatgtcacatcacataaaggaccatgccgtgtagctacctatagtagagatggacagttaatagctactgggtctgctgatgcttcgataaagatacttgacacagagaggatgttggccaaaagtgccatgccaatagaggtcatgatgaatgagaccgcacaacaaaatatggaaaaccacccagtgattcgaactctttatgaccatgtggatgaagtcacgtgccttgctttccacccaacagaacagatcctggcttctggttcaagggattatactcttaaattatttgattattccaaaccatcagcaaaaagagccttcaaatacattcaggaagctgaaatgttacgttccatctcttttcatccttctggagactttatacttgtcggaactcagcatcctactcttcgcctttatgatatcaacacctttcaatgttttgtctcttgcaatcctcaagatcaacacaccgatgctatatgttccgttaattacaattctagtgccaatatgtacgtaactggaagcaaggacggctgcatcaaattatgggatggtgtttcaaatcgatgcatcacaacttttgagaaagcacatgacggtgctgaagtttgttctgccattttttccaaaaattctaaatacattctctcaagtggaaaagactctgtagctaaactttgggaaatatcaacgggacgaacactggtcagatacacgggcgcgggtttaagtggacgccaggtgcaccggacacaggctgtgtttaaccacaccgaggactatgtgttgctgcccgacgagaggacgatcagtctttgctgctgggactcgaggacagccgagcggagaaacctgctgtcgttggggcacaacaatattgtacgctgcatagtgcactcccccaccaaccccgggttcatgacgtgcagcgatgacttcagagcgcggttttggtaccggagatcgaccactgactgagccaccctctccgtagggttctttctcgaggactctaccctcctcccccacgtcctgtctcagctgcagtcgtaagtccgtgcaccatccttgacgttttgctgccacctctgtccacattcttcttggatttgtataaaagaatctttttttaccttgatgtagaatcatggtggaaaaagttggaaacacagatctgtgcagttctacattcactgattattacagtgtgattttcatcggttttgtaagtacaggacttgccgtttcttttgatctcttgattgaaggaggatagggcattaaagtgcttttgacatgaggaattttcatttggttcttctgtcaactttcttgcttattctgctgaaccctctgtgtatttcccttccaggtatatttgaacagataagcaggcatgcagctctgagactcctgagttttatgccattatcaaaagcattttcaagaatccctcaattctatcctgaaatgatgttattctgataataaagctcagatctgcaactttattgttatatatttttcacttctgtaaaattaatggccagtttttcctgacaatttataggaacagtatctttcaacatactccctacattatccttcaatatctgcaatacttgtctttagtaactgtatttctggtaagattatgatttcatgagaaacaattgaaaatatatccgatctaattaaattaggtcagcctgctattgctctcaggtgttgcctgtcttcacgaatgattagtatcgattgacctctttcttaggtg

SEQ ID NO: 3953 - protein, 431 aa, Homo sapiens; identical to SEQ ID NO: 3949

SEQ ID NO: 3954 - DNA, 2545 bp, Homo sapiens
ctttttgatcgtttcccatgtgttgtcagatagctccatagaattcagtttctgagaaccagccagaagcatgcagtgacattgcacaatctgcctctgaagctggagatactagctgcagagctcaggggagctgctccacatcaccgacatgaagggaacaggcatcatggactgtgcgcccaaggcactcctggccagggcactttatgacaactgccctgactgctctgacgagctggctttcagcagaggggacatcctgaccattctggagcaacacgtgccagaaagcgagggttggtggaagtgtttgctccatgggaggcaaggcctggcccctgccaaccgcctccaaatcctcacggaggtcgctgcagacaggccgtgccccccattcctgagaggcctggaagaagctcctgccagctcagaggagacctatcaggtgcccactctaccccgccctcccactccaggccccgtttatgagcagatgaggagttgggcggaggggccccagccccctactgcccaagtctatgaattccccgaccctcccaccagtgccagaatcatctgtgaaaagactctcagctttccaaaacaggccatcctcacgcttcccagacctgtccgggcctcactgccgactctgccttcccaggtgtatgacgtgcctacccagcaccggggccccgtggtcctgaaggagccagagaagcagcagttatatgacataccagccagccccaagaaggcaggactccatcccccagacagccaagcaagtgggcagggtgttcccctgatatcagtgactaccttaagaagaggcggttacagcacattaccaaatcctcagaaatcggaatggatttatgacactccagtgtctccaggaaaggccagcgtcagaaacacgcctctcaccagctttgcggaagaatcaaggccccacgctctccccagttccagctccactttctacaatcctccaagtggcagatccaggtccctcactccacaactgaataacaatgtgcccatgcagaaaaaactcagccttccagaaattccttcttatggctttcttgtacccagaggcacatttcctttggatgaagatgtcagctacaaggttccttcaagctttctgattccccgagtggaacagcagaacaccaagcccaatatttatgacatccctaaagcaacgtcgagtgtttctcaggctgggaaggagctggagaaagccaaggaggtgtcagagaattccgcgggccataattcctcatggttctccagacggacaacttccccatctcctgaaccggacagattatcaggttccagttctgacagcagagctagcatcgtttcctcgtgctccaccacatccaccgacgactcctccagctcttcctcggaggagtcagcaaaggagctctccttggacctggatgtggccaaggagacagtgatggctctgcagcacaaggtggtcagctctgtcgctggcctgatgctctttgtcagcaggaagtggagattccgagactatctggaggccaacattgatgcaatccacaggtccactgatcacatagaagaatctgtaagagaatttctggattttgcccgaggagtccatgggactgcctgtaacctcactgacagtaaccttcagaacagaattcgggaccagatgcagaccatctccaactcctaccgcatcctgcttgaaacaaaggaaagcttggataatcgcaattggcctctggaagttcttgtgactgacagtgtccagaacagcccagatgaccttgagaggtttgtcatggtggcacggatgcttccagaagacatcaagaggtttgcctccattgtcattgccaatggaaggctcctttttaagcggaactgtgaaaaggaagagactgtgcagttgaccccaaatgcagaatttaagtgtgaaaaatacatccagcctccccaaagagaaactgaatcacaccaaaagagtaccccttccactaagcaaagggaagatgaacactcttctgaactattaaagaaaaatagggcaaatatctgtggacagaatcctggccctcttatacctcagccttcgagtcaacagactcctgagaggaaaccccgcttatctgaacactgccggctgtactttggggcgctcttcaaagccatcagcgcatttcacggcagcctcagcagcagccagcccgcggagatcatcactcagagcaagctggtcatcatggtgggacagaagctggtggacacgctgtgcatggagacccaggagagggacgtgcgcaatgagatcctccgcggcagcagtcacctctgcagcctgctcaaggacgtagcgctggccactaagaatgccgtgctcacataccccagccctgccgcgctggggcacctccaggcggaggctgagaagctggagcaacacacgcggcagttcagagggacactgggatgaggactgtctacctcccttcctcctctgctcacc

SEQ ID NO: 3955 - protein, 786 aa, Homo sapiens
MKGTGIMDCAPKALLARALYDNCPDCSDELAFSRGDILTILEQHVPESEGWWKCLLHGRQGLAPANRLQILTEVAADRPCPPFLRGLEEAPASSEETYQVPTLPRPPTPGPVYEQMRSWAEGPQPPTAQVYEFPDPPTSARIICEKTLSFPKQAILTLPRPVRASLPTLPSQVYDVPTQHRGPVVLKEPEKQQLYDIPASPKKAGLHPPDSQASGQGVPLISVTTLRRGGYSTLPNPQKSEWIYDTPVSPGKASVRNTPLTSFAEESRPHALPSSSSTFYNPPSGRSRSLTPQLNNNVPMQKKLSLPEIPSYGFLVPRGTFPLDEDVSYKVPSSFLIPRVEQQNTKPNIYDIPKATSSVSQAGKELEKAKEVSENSAGHNSSWFSRRTTSPSPEPDRLSGSSSDSRASIVSSCSTTSTDDSSSSSSEESAKELSLDLDVAKETVMALQHKVVSSVAGLMLFVSRKWRFRDYLEANIDAIHRSTDHIEESVREFLDFARGVHGTACNLTDSNLQNRIRDQMQTISNSYRILLETKESLDNRNWPLEVLVTDSVQNSPDDLERFVMVARMLPEDIKRFASIVIANGRLLFKRNCEKEETVQLTPNAEFKCEKYIQPPQRETESHQKSTPSTKQREDEHSSELLKKNRANICGQNPGPLIPQPSSQQTPERKPRLSEHCRLYFGALFKAISAFHGSLSSSQPAEIITQSKLVIMVGQKLVDTLCMETQERDVRNEILRGSSHLCSLLKDVALATKNAVLTYPSPAALGHLQAEAEKLEQHTRQFRGTLG

SEQ ID NO: 3956 - DNA, 1639 bp, Homo sapiens
gggatttcgcgggaaatcccggaagtgacagctttgggggtttgctgctggctctgactcccgtcctgcgatgggttgcgacgggggaacaatccccaagaggcatgaactggtgaaggggccgaagaaggttgagaaggtcgacaaagatgctgaattagtggcccaatggaactattgtactctaagtcaggaaatattaagacgaccaatagttgcctgtgaacttggcagactttataacaaagatgccgtcattgaatttctcttggacaaatctgcagaaaaggctcttgggaaggcagcatctcacattaaaagcattaagaatgtgacagagctgaagctttctgataatcctgcctgggaaggggataaaggaaacactaaaggtgacaagcacgatgacctccagcgggcgcgtttcatctgccccgttgtgggcctggagatgaacggccgacacaggttctgcttccttcggtgctgcggctgtgtgttttctgagcgagccttgaaagagataaaagcggaagtttgccacacgtgtggggctgccttccaggaggatgatgtcatcgtgctcaatggcaccaaggaggatgtggacgtgctgaagacaaggatggaggagagaaggctgagagcgaagctggaaaagaaaccaaagaaacccaaggcagcagagtctgcttcaaaaccagatgtcagtgaagaagccccagggccatcaaaagttaagacagggaagcctgaagaagccagccttgattctagagagaagaaaaccaacttggctcccaaaagcacagcaatgaatgagagctcttctggaaaagctgggaagcctccgtgtggagccacaaagaggtccatcgctgacagtgaagaatcggaggcctacaagtccctctttaccactcacagctccgccaagcgctccaaggaggagtctgcccactgggtcacccacacgtcctactgcttctgaagcccgcactgccaccgctcctgccccagaaggttgtttagtttccacgtaggcaggtcgctttgtgcctctgagtgcgctgctgtgtgttctctctatagttctgtgtcataaagctgtcctgggccagccttcaagctgggtgttggccactcttgatgtgaggcgtgtcggttccaggggggacatgggaggggctgcacagtggcccgaggtcatgcttgcttccacctgcaggtgcatttggtcctttccatggccaggaagccctgtgggctgcactttttatgcttgcagtaacaagagactccagagtcctcaccggtgcagagttggcacatattaattaactaaaattctaatgatcttgctaccagcaataaatcaagtaggccaagtgaaactgggctttaaaaaggatggatttcaaatacactgtgcccactagaagcttcgaagggcctcgtccctctgctacagccctgggaggagccaggatccttgttggtctagctaaatactgttaggggagtgtgccccatctcatcatttcgaagatagcagagtcatagttgggcacccagtgattgggttcaaaaataaagctggtctgcctctccaaaaaaaaaaaaaaaaaaaaaaaaaaaa

SEQ ID NO: 3957 - protein, 306 aa, Homo sapiens
MGCDGGTIPKRHELVKGPKKVEKVDKDAELVAQWNYCTLSQEILRRPIVACELGRLYNKDAVIEFLLDKSAEKALGKAASHIKSIKNVTELKLSDNPAWEGDKGNTKGDKHDDLQRARFICPVVGLEMNGRHRFCFLRCCGCVFSERALKEIKAEVCHTCGAAFQEDDVIVLNGTKEDVDVLKTRMEERRLRAKLEKKPKKPKAAESASKPDVSEEAPGPSKVKTGKPEEASLDSREKKTNLAPKSTAMNESSSGKAGKPPCGATKRSIADSEESEAYKSLFTTHSSAKRSKEESAHWVTHTSYCF

SEQ ID NO: 3958 - DNA, 905 bp, Homo sapiens
aaaacaaaaacatgatggcctctcccagcaaagctccagggttggaaagagtcccctggcagggaattggcaccccgtcgtgcccatcctctctctctgactgcctgctggaaatgcccccatctccctttgagtcctcctcccgggcaacccctgtgacctgtaacctctgtcctgaaatcatcacaatggccagagtggcctcagctcagggcctctgtgacatcaccaagggcctggcaccaggtgcccagtctcccagttgcgagggcaagcaaacccgtcatgagcaactcccttccccatctctgctcaccatgtggacgctgaaatcgtccctggtcctgcttctgtgcctcacctgcagctatgcctttatgttctcttctctgagacagaaaactagcgaaccccaggggaaggtgcaatacggagagcactttcggattcggcagaatctaccagagcacacccaaggctggcttgggagcaaatggctctggcttctttttgttgttgtgccgtttgtgatactgcagtgtcaaagagacagtgagaagaataaggagcagagtcctcctggccttcgaggcggccaacttcactctccattaaagaaaaaaagaaatgcttcccccaacaaagactgtgcattcaataccttaatggaactcgaggtggagcttatgaaatttgtgtccaaagtgcggaatcttaaacgtgccatggcaacaggtagtggcagtaacctcaggcttcgaaagtcagagatgcctgcagatccataccatgtcacgatctgtgaaatatggggagaagaaagctctagctgaatggatttgtgtgtcaggagagaaaaaagttgagtgttgacaaactgtatgcaaactaataaaactattctg

SEQ ID NO: 3959 - protein, 171 aa, Homo sapiens
MWTLKSSLVLLLCLTCSYAFMFSSLRQKTSEPQGKVQYGEHFRIRQNLPEHTQGWLGSKWLWLLFVVVPFVILQCQRDSEKNKEQSPPGLRGGQLHSPLKKKRNASPNKDCAFNTLMELEVELMKFVSKVRNLKRAMATGSGSNLRLRKSEMPADPYHVTICEIWGEESSS

SEQ ID NO: 3960 - DNA, 694 bp, Homo sapiens
gacatcaccaagggcctggcaccaggtgcccagtcttccagttgcgagggcaagcaaacccgtcatgagcaactcccttccccatctctgctcaccatgtggacgctgaaatcgtccctggtcctgcttctgtgcctcacctgcagctatgcctttatgttctcttctctgagacagaaaactagcgaaccccaggggaaggtgccgtgtggagagcactttcggattcggcagaacctaccagagcacacccaaggctggcttgggagcaaatggctctggcttttgtttgctgttgtgccgtttgtgatactgcagtgtcaaagagacagtgagaagaataaggagcagagtcctcctggccttcgaggcttcccatttcgcactccactaaagaaaaatcaaaatgcttctctttacaaagactgtgtattcaataccttaaacgaacttgaagtggagcttttgaaatttgtgtccgaagtgcagaatcttaaaggtgccatggcaacaggcagtggcagtaacctcaagcttcgaaggtcagagatgcctgcagatccataccatgtcacaatctgtaaaatatggggagaagaaagctctagctgaatggatttgtgtgtcaggagagaaaaaagttgagtgttgacaaactgtatgcaaactaataaaactattctgaagaaaagaa

SEQ ID NO: 3961 - protein, 171 aa, Homo sapiens
MWTLKSSLVLLLCLTCSYAFMFSSLRQKTSEPQGKVPCGEHFRIRQNLPEHTQGWLGSKWLWLLFAVVPFVILQCQRDSEKNKEQSPPGLRGFPFRTPLKKNQNASLYKDCVFNTLNELEVELLKFVSEVQNLKGAMATGSGSNLKLRRSEMPADPYHVTICKIWGEESSS

SEQ ID NO: 3962 - DNA, 7292 bp, Homo sapiens
aacactgatatttgcatttaatggggaacaaaagatgaagaaggaaaaggaatatattcactaaggattctatctgcttactgctacagacctatgtgttaaggaattcttctcctcctccttgcgtagaagttgatcagcactgtggtcagactgcatttatcttgtcattgccagaagaaatcttggacagaatgtaacagtacgtctctctctgattgcgatggaaggtgataaactgatactcctttattaaagttacatcgcactcaccacagaaaaccattctttaaagtgaatagaaaccaagcccttgtgaacacttctattgaacatgactcatggagaagagcttggctctgatgtgcaccaggattctattgttttaacttacctagaaggattactaatgcatcaggcagcagggggatcaggtactgccgttgacaaaaagtctgctgggcataatgaagaggatcagaactttaacatttctggcagtgcatttcccacctgtcaaagtaatggtccagttctcaatacacatacatatcaggggtctggcatgctgcacctcaaaaaagccagactgttgcagtcttctgaggactggaatgcagcaaagcggaagaggctgtctgattctatcatgaatttaaacgtaaagaaggaagctttgctagctggcatggttgacagtgtgcctaaaggcaaacaggatagcacattactggcctctttgcttcagtcattcagctctaggctgcagactgttgctctgtcacaacaaatcaggcagagcctcaaggagcaaggatatgccctcagtcatgattctttaaaagtggagaaggatttaaggtgctatggtgttgcatcaagtcacttaaaaactttgttgaagaaaagtaaagttaaagatcaaaagcctgatacgaatcttcctgatgtgactaaaaacctcatcagagataggtttgcagagtctcctcatcatgttggacaaagtggaacaaaggtcatgagtgaaccgttgtcatgtgctgcaagattacaggctgttgcaagcatggtggaaaaaagggctagtcctgccacctcacctaaacctagtgttgcttgtagccagttagcattacttctgtcaagcgaagcccatttgcagcagtattctcgagaacacgctttaaaaacgcaaaatgcaaatcaagcagcaagtgaaagacttgctgctatggccagattgcaagaaaatggccagaaggatgttggcagttaccagctcccaaaaggaatgtcaagccatcttaatggtcaggcaagaacatcatcaagcaaactgatggctagcaaaagtagtgctacagtgtttcaaaatccaatgggtatcattccttcttcccctaaaaatgcaggttataagaactcactggaaagaaacaatataaaacaagctgctaacaatagtttgcttttacatcttcttaaaagccagactatacctaagccaatgaatggacacagtcacagtgagagaggaagcatttttgaggaaagtagtacacctacaactattgatgaatattcagataacaatcctagttttacagatgacagcagtggtgatgaaagttcttattccaactgtgttcccatagacttgtcttgcaaacaccgaactgaaaaatcagaatctgaccaacctgtttccctggataacttcactcaatccttgctaaacacttgggatccaaaagtcccagatgtagatatcaaagaagatcaagatacctcaaagaattctaagctaaactcacaccagaaagtaacacttcttcaattgctacttggccataagaatgaagaaaatgtagaaaaaaacaccagccctcagggagtacacaatgatgtgagcaagttcaatacacaaaattatgcaaggacttctgtgatagaaagccccagtacaaatcggactactccagtgagcactccacctttacttacatcaagcaaagcagggtctcccatcaatctctctcaacactctctggtcatcaaatggaattccccaccatatgtctgcagtactcagtctgaaaagctaacaaatactgcatctaaccactcaatggaccttacaaaaagcaaagacccaccaggagagaaaccagcccaaaatgaaggtgcacagaactctgcaacgtttagtgccagtaagctgttacaaaatttagcacaatgtggaatgcagtcatccatgtcagtggaagagcagagacccagcaaacagctgttaactggaaacacagataaaccgataggtatgattgatagattaaatagccctttgctctcaaataaaacaaatgcagttgaagaaaataaagcatttagtagtcaaccaacaggtcctgaaccagggctttctggttctgaaatagaaaatctgcttgaaagacgtactgtcctccagttgctcctggggaaccccaacaaagggaagagtgaaaaaaaagagaaaactcccttaagagatgaaagtactcaggaacactcagagagagctttaagtgaacaaatactgatggtgaaaataaaatctgagccttgtgatgacttacaaattcctaacacaaatgtgcacttgagccatgatgctaagagtgccccattcttgggtatggctcctgctgtgcagagaagcgcacctgccttaccagtgtccgaagactttaaatcggagcctgtttcacctcaggatttttctttctccaagaatggtctgctaagtcgattgctaagacaaaatcaagatagttacctggcagatgattcagacaggagtcacagaaataatgaaatggcacttctagaatcaaagaatctttgcatggtccctaagaaaaggaagctttatactgagccattagaaaatccatttaaaaagatgaaaaacaacattgttgatgctgcaaacaatcacagtgccccagaagtactgtatgggtccttgcttaaccaggaagagctgaaatttagcagaaatgatcttgaatttaaatatcctgctggtcatggctcagccagcgaaagtgaacacaggagttgggccagagagagcaaaagctttaatgttctgaaacagctgcttctctcagaaaactgtgtgcgagatttgtccccgcacagaagtaactctgtggctgacagtaaaaagaaaggacacaaaaataatgtgaccaacagcaaacctgaatttagcatttcttctttaaatggactgatgtacagttccactcagcccagcagttgcatggataacaggacattttcatacccaggtgtagtaaaaactcctgtgagtcctactttccctgagcacttgggctgtgcagggtctagaccagaatctgggcttttgaatgggtgttccatgcccagtgagaaaggacccattaagtgggttatcactgatgcggagaagaatgagtatgaaaaagactctccaagattgaccaaaaccaacccaatactatattacatgcttcaaaaaggaggcaattctgttaccagtcgagaaacacaagacaaggacatttggagggaggcttcatctgctgaaagtgtctcacaggtcacagccaaagaagagttacttcctactgcagaaacgaaagcttctttctttaatttaagaagcccttacaatagccatatgggaaataatgcttctcgcccacacagcgcaaatggagaagtttatggacttctgggaagcgtgctaacgataaagaaagaatcagaataaaatgtacctgccatccagttttggatctttttaaaactaatgagtatgaacttgagatctgtataaataagagcatgatttgaaaaaaagcatggtataattgaaacttttttcattttgaaaagtattggttactggtgatgttgaaatatgcatactaatttttgcttaacattagatgtcatgaggaaactactgaactagcaattggttgtttaacacttctgtatgcatcagataacaactgtgagtagcctatgaatgaaattcttttataaatattaggcataaattaaaatgtaaaactccattcatagtggattaatgcattttgctgcctttattagggtactttattttgcttttcagaagtcagcctacataacacatttttaaagtctaaactgttaaacaactctttaaaggataattatccaataaaaaaaaacctagtgctgattcacagcttattatccaattcaaaaataaattagaaaaatatatgcttacatttttcacttttgctaaaaagaaaaaaaaaaggtgtttatttttaactcttggaagaggttttgtggttcccaatgtgtctgtcccaccctgatccttttcaatatatatttctttaaaccttgtgctacttagtaaaaattgattacaattgagggaagtttgatagatcctttaaaaaaaaggcagatttccattttttgtattttaactactttactaaattaatactcctccttttacagaattagaaaagttaacatttatctttaggtggtttcctgaaaagttgaatatttaagaaattgtttttaacagaagcaaaatggcttttctttggacagttttcaccatctcttgtaaaagttaattctcaccattcctgtggtacctgcgagtgttatgaccaggattccttaaacctgaactcagaccacttgcattagaaccatctggagcacttgttttaaaatgcagattcataggcagcatctcagatctacagaacaagaatctctgctaagtggacctggaatcttccatctgcatcttaacatgctctctaggtgtttcttgtgtttgagaaccatgacttatgactttcctcagaacatgagactgtaaaacaaaaacaaaaaactatgtgatgcctctattttccccaatacagtcacacatcagctcaaaatttgcaatattgtagttcatatattaccgttatgtctttggaaatcgggttcagaacactttttatgacaaaaattgggtggaggggataactttcatatctggctcaacatctcaggaaaatctgtgattatttgtgtgttctaatgagtaacatctacttagttagccttagggatggaaaaacagggccacttaccaaactcaggtgattccaggatggtttggaaacttctcctgaatgcatccttaacctttattaaaaccattgtcctaagaacaatgccaacaaagcttacaacatttagtttaaacccaagaagggcactaaactcagattgactaaataaaaagtacaaagggcacatatacgtgacagaattgtacacaatcactccattggatcttttactttaaagtagtgatgaaaagtacatgttgatactgtcttagaagaaattaatatattagtgaagccacatggggtttcagttgcgaaacaggtctgtttttatgttcagtttgtacaatccacaattcattcaccagatattttgttcttaattgtgaaccaggttagcaaatgacctatcaaaaattattctataatcactactagttaggatattgatttaaaattgttctacttgaagtggtttctaagatttttatattaaaaataggtgtgatttcctaatatgatctaaaaccctaaatggttatttttcctcagaatgatttgtaaatagctactggaaatattatacagtaataggagtgggtattatgcaacatcatggagaagtgaaggcataggcttattctgacataaaattccactggccagttgaatatattctattccatgtccatactatgacaatcttattgtcaacactatataaataagcttttaaacaagtcatttttcttgatcgttgtggaaggtttggagccttagaggtatgtcagaaaaaatatgttggtattctcccttgggtagggggaaatgacctttttacaagagagtgaaatttaggtcagggaaaagaccaagggccagcattgctacttttgtgtgtgtgtgtgtgggttttgttttgtttttttggttggctggttgttttcgttgttgttaacaaaggaatgagaatatgtaatacttaaataaacatgaccacgaagaatgctgttctgatttactagagaatgttcccaatttgaatttagggtgattttaaagaacagtgagaaagggcatacatccacagattcactttgtttatgcatatgtagatacaaggatgcacatatacacattttcaaggactattttagatatctagacaatttcttctaataaagtcatttgtgaaagggtactacagcttattgacatcagtaaggtagcattcattacctgtttattctctgctgcatcttacagaagagtaaactggtgagagtatatattttatatatatatatatatatatatatataatatgtatatatatatatattgacttgttacatgaagatgttaaaatcggtttttaaaggtgatgtaaatagtgatttccttaatgaaaaatacatattttgtattgttctaatgcaacagaaaagccttttaatctctttggttcctgtatattccatgtataagtgtaaatataatcagacaggtttaaaagttgtgcatgtatgtatacagttgcaagtctggacaaatgtatagaataaaccttttatttaagttgtgattacctgctgcatgaaaagtgcatgggggaccctgtgcatctgtgcatttggcaaaatgtcttaacaaatcagatcagatgttcatcctaacatgacagtattccatttctggacatgacgtctgtggtttaagctttgtgaaagaatgtgctttgattcgaagggtcttaaagaatttttttaatcgtcaaccacttttaaacataaagaattcacacaactactttcatgaattttttaatcccattgcaaacattattccaagagtatcccagtattagcaatactggaatataggcacattaccattcatagtaagaattctggtgtttacacaaccaaatttgatgcgatctgctcagtaatataatttgccatttttattagaaatttaatttcttcatgtgatgtcatgaaactgtacatactgcagtgtgaatttttttgttttgttttttaatcttttagtgtttacttcctgcagtgaatttgaataaatgagaaaaaatgcattgtc

SEQ ID NO: 3963 - protein, 1158 aa, Homo sapiens
MTHGEELGSDVHQDSIVLTYLEGLLMHQAAGGSGTAVDKKSAGHNEEDQNFNISGSAFPTCQSNGPVLNTHTYQGSGMLHLKKARLLQSSEDWNAAKRKRLSDSIMNLNVKKEALLAGMVDSVPKGKQDSTLLASLLQSFSSRLQTVALSQQIRQSLKEQGYALSHDSLKVEKDLRCYGVASSHLKTLLKKSKVKDQKPDTNLPDVTKNLIRDRFAESPHHVGQSGTKVMSEPLSCAARLQAVASMVEKRASPATSPKPSVACSQLALLLSSEAHLQQYSREHALKTQNANQAASERLAAMARLQENGQKDVGSYQLPKGMSSHLNGQARTSSSKLMASKSSATVFQNPMGIIPSSPKNAGYKNSLERNNIKQAANNSLLLHLLKSQTIPKPMNGHSHSERGSIFEESSTPTTIDEYSDNNPSFTDDSSGDESSYSNCVPIDLSCKHRTEKSESDQPVSLDNFTQSLLNTWDPKVPDVDIKEDQDTSKNSKLNSHQKVTLLQLLLGHKNEENVEKNTSPQGVHNDVSKFNTQNYARTSVIESPSTNRTTPVSTPPLLTSSKAGSPINLSQHSLVIKWNSPPYVCSTQSEKLTNTASNHSMDLTKSKDPPGEKPAQNEGAQNSATFSASKLLQNLAQCGMQSSMSVEEQRPSKQLLTGNTDKPIGMIDRLNSPLLSNKTNAVEENKAFSSQPTGPEPGLSGSEIENLLERRTVLQLLLGNPNKGKSEKKEKTPLRDESTQEHSERALSEQILMVKIKSEPCDDLQIPNTNVHLSHDAKSAPFLGMAPAVQRSAPALPVSEDFKSEPVSPQDFSFSKNGLLSRLLRQNQDSYLADDSDRSHRNNEMALLESKNLCMVPKKRKLYTEPLENPFKKMKNNIVDAANNHSAPEVLYGSLLNQEELKFSRNDLEFKYPAGHGSASESEHRSWARESKSFNVLKQLLLSENCVRDLSPHRSNSVADSKKKGHKNNVTNSKPEFSISSLNGLMYSSTQPSSCMDNRTFSYPGVVKTPVSPTFPEHLGCAGSRPESGLLNGCSMPSEKGPIKWVITDAEKNEYEKDSPRLTKTNPILYYMLQKGGNSVTSRETQDKDIWREASSAESVSQVTAKEELLPTAETKASFFNLRSPYNSHMGNNASRPHSANGEVYGLLGSVLTIKKESE

SEQ ID NO: 3964 - DNA, 1114 bp, Homo sapiens
acactgcgctgcccagaggccccgctgactcctgccagcctccaggtccccgtggtaccaaagctgaacatggacgtgaccatccagcacccctggttcaagcgcaccctggggcccttctaccccagccggctgttcgaccagtttttcggcgagggcctttttgagtatgacctgctgcccttcctgtcgtccaccatcagcccctactaccgccagtccctcttccgcaccgtgctggactccggcatctctgaggttcgatccgaccgggacaagttcgtcatcttcctcgatgtgaagcacttctccccggaggacctcaccgtgaaggtgcaggacgactttgtggagatccacggaaagcacaacgagcgccaggacgaccacggctacatttcccgtgagttccaccgccgctaccgcctgccgtccaacgtggaccagtcggccctctcttgctccctgtctgccgatggcatgctgaccttctgtggccccaagatccagactggcctggatgccacccacgccgagcgagccatccccgtgtcgcgggaggagaagcccacctcggctccctcgtcctaagcaggcattgcctcggctggctcccctgcagccctggcccatcatggggggagcaccctgagggcggggtgtctgtcttcctttgcttcccttttttcctttccaccttctcacatggaatgagggtttgagagagcagccaggagagcttagggtctcagggtgtcccagaccccgacaccggccagtggcggaagtgaccgcacctcacactcctttagatagcagcctggctcccctggggtgcaggcgcctcaactctgctgagggtccagaaggagggggtgacctccggccaggtgcctcctgacacacctgcagcctccctccgcggcgggccctgcccacacctcctggggcgcgtgaggcccgtggggccggggcttctgtgcacctgggctctcgcggcctcttctctcagaccgtcttcctccaacccctctatgtagtgccgctcttggggacatgggtcgcccatgagagcgcagcccgcggcaatcaataaacagcaggtgatacaagc

SEQ ID NO: 3965 - protein, 173 aa, Homo sapiens
MDVTIQHPWFKRTLGPFYPSRLFDQFFGEGLFEYDLLPFLSSTISPYYRQSLFRTVLDSGISEVRSDRDKFVIFLDVKHFSPEDLTVKVQDDFVEIHGKHNERQDDHGYISREFHRRYRLPSNVDQSALSCSLSADGMLTFCGPKIQTGLDATHAERAIPVSREEKPTSAPSS

SEQ ID NO: 3966 - DNA, 2815 bp, Homo sapiens
atttccagtggatgcaatagtgccgaccatgtgcacatggggtcaggatctcaggcccaccagctggactgcagcgagtacccatggtctcagggaaaaggtcccctgctgcaggctgtgggggacctcggctctcacagtggctatgcctgagaaagcccctccagacttgccaacctggcccgcgtgtcctgtccggagggcagggtggggctggtgctggttacagatgatcctcaagggcacagcacgcaagccaccaggcgcccctcctgcagctgggtcagagagaggcacagggagcctggctccctccaggtcagtctccaccagggccaccccggtgacctgcaggagaggaaggcagacgaggagtggccctgcccctgagggcgcatcgtgcaggtggcacaagggggtcatctgcatcctggtcaagggggagcccacctgcctcctccaggtcgggaacactccctggaggccatggtgtggagcgtccacccgggcttcgtcctccagctcagctgctgggccctgggaagggacaggcccagcacccgttcagccgggctgagccgcaggcagagcgccttgcctgggagagacaaacccaccgctgaggacacaccctcaaggttcacccttccccacttctgtgttgcccttagctctaaggtgctaattccatctctagtttcaacaggctgattgctcttaagggaaaatggggttgcacaatccgactgtggtggccggggctcttggtctccccccagtaagaggatggactttccagccctgctgatggtcagcggggaccacgtggaggctttggcagatgaaatggggcacatgacatagccctgccccagtggaagcctcagagccatggctgggctccgccaggcttgctccagcggccatgaggaccatgccccacaggcaggggctgcacctccaccctggttccagaaggaagaggcacagccgacatgccgctcgagcaggaaaccctggggaaggtgggacatgagatcctgtgtctgatactacagtgtaaccggctagaaactgactcaaaggggcatttttacagcagaaagaggcgaagcacacgtgcatctgccatcctgtgattgtcaggccccgtttaggagtggacagctccatggttgtgtttgagccccacaccggccctggggggttatactgccctggaggacagctgacctcagttctccaagcttccattcccccttgtatgggcacagcaccccaaccttcttttggcagctcccacgccccccagtgctggtgggctctagggctctggtccctgatgctcagaggcacagagacagcattcctcaggggccctgatcctctggcccggttcagactgtggtggggcctcgggacctttccagaaccttggaagtgggtagcaccctttgctgggacagacatgcctggagctccgggcattgggccactgctgggataagcccacgacagaatgaagccgggcaggcagaaagagctgcgggctccctggccactcctgtttccgtaaagggcctggtgtctcatttcctacttaccttggactttaagggcctcctgcagcctttgtcacacactcttcttatttttttgtccattacaaccttttacagcggcacaagccattgttctcagggccaacgcgtgagtcctgtggtgagtttcctattagtgtggctcgagaaggtaccccgtgctgacgaagcctggagaggcagggccacactgcagagcctcaggccaagggtggcggtgctggggtctcatgagcccagggttcactgcccaccaggcggcattagcctgcggctttggcgcccagaagtccgacaggcagcaaagtctcctgctcctggctgctggccaggagagcccagctgggcctcacctgatcgagaggaaacgcctgtgtcctctaatcagcatctcactgacagagtcacccctggtacagcaagtgggctttcaaggacatcaggtggctgcattcaggctggtaacaacaccgccctcagctctcacagtctgaggaagccccctgaaaagtcactggagtggggctgcaggaaccccacaaaggcctttcctgctcctgaataattcccaagcacctaggactccccgggcctggcttctccgccagcccaacctccggacctgaagaccaagcagtgcccaagtgtgaggtccctggagaaggaggaggaagagtggaaggaggtggagggtaacgcatccagaggaagacgctgagggtcaggctggccctgggtctgacctgtccttgggatcaactgcttcattaaaaaacatccgcctaaactgtggagacagaggaaggatcagtgcttgccaagggctgggggaggaggaacaggcagagcgcagagggtttcagggcagtgccgctctgcgtgacgccatcacggagggtccaggtcatcacacgtctctccaaacccctagaatgcccaacactcactctgaagccttctgtcaatgtgggatcatctgtcgtaaagtctgcaccgctgtggtgggggcgtggatagtgggggaggctgtgcgtgtgtgggggcagggagtgtatgggaaatctctgtaccttccgctcaatttggctgcgaacctaaactgctctaaaaaaagtctatttttaaaaagcatatgcccgaaaagtccttgaaaatgcatctttccctaaatattcaaatttatgttcattaataaaatagcacatatttattct

SEQ ID NO: 3967 - protein, 182 aa, Homo sapiens [sequence omitted]

SEQ ID NO: 3968 - DNA, 4723 bp, Homo sapiens
atgcggcgcggccccggaggcagcagcagcggcggcggcagccggagcagtaggcacccgagcagcgccagcggccgagcgggcggcttcctggcctgggcgctccggtggcggcggaggtgcgcgcggagccatggttatcatgtcggagttcagcgcggaccccgcgggccagggtcagggccagcagaagcccctccgggtgggtttttacgacatcgagcggaccctgggcaaaggcaacttcgcggtggtgaagctggcgcggcatcgagtcaccaaaacgcaggttgcaataaaaataattgataaaacacgattagattcaagcaatttggagaaaatctatcgtgaggttcagctgatgaagcttctgaaccatccacacatcataaagctttaccaggttatggaaacaaaggacatgctttacatcgtcactgaatttgctaaaaatggagaaatgtttgattatttgacttccaacgggcacctgagtgagaacgaggcgcggaagaagttctggcaaatcctgtcggccgtggagtactgtcacgaccatcacatcgtccaccgggacctcaagaccgagaacctcctgctggatggcaacatggacatcaagctggcagattttggatttgggaatttctacaagtcaggagagcctctgtccacgtggtgtgggagccccccgtatgccgccccggaagtctttgaggggaaggagtatgaaggcccccagctggacatctggagcctgggcgtggtgctgtacgtcctggtctgcggttctctccccttcgatgggcctaacctgccgacgctgagacagcgggtgctggagggccgcttccgcatccccttcttcatgtctcaagactgtgagagcctgatccgccgcatgctggtggtggaccccgccaggcgcatcaccatcgcccagatccggcagcaccggtggatgcgggctgagccctgcttgccgggacccgcctgccccgccttctccgcacacagctacacctccaacctgggcgactacgatgagcaggcgctgggtatcatgcagaccctgggcgtggaccggcagaggacggtggagtcactgcaaaacagcagctataaccactttgctgccatttattacctcctccttgagcggctcaaggagtatcggaatgcccagtgcgcccgccccgggcctgccaggcagccgcggcctcggagctcggacctcagtggtttggaggtgcctcaggaaggtctttccaccgaccctttccgacctgccttgctgtgcccgcagccgcagaccttggtgcagtccgtcctccaggccgagatggactgtgagctccagagctcgctgcagtggcccttgttcttcccggtggatgccagctgcagcggagtgttccggccccggcccgtgtccccaagcagcctgctggacacagccatcagtgaggaggccaggcaggggccgggcctagaggaggagcaggacacgcaggagtccctgcccagcagcacgggccggaggcacaccctggccgaggtctccacccgcctctccccactcaccgcgccatgtatagtcgtctccccctccaccacggcaagtcctgcagagggaaccagctctgacagttgtctgaccttctctgcgagcaaaagccccgcggggctcagtggcaccccggccactcaggggctgctgggcgcctgctccccggtcaggctggcctcgcccttcctggggtcgcagtccgccaccccagtgctgcaggctcaggggggcttgggaggagctgttctgctccctgtcagcttccaggagggacggcgggcgtcggacacctcactgactcaagggctgaaggcctttcggcagcagctgaggaagaccacgcggaccaaagggtttctgggactgaacaaaatcaaggggctggctcgccaggtgtgccaggtccctgccagccgggccagcaggggcggcctgagccccttccacgcccctgcacagagcccaggcctgcacggcggcgcagccggcagccgggagggctggagcctgctggaggaggtgctagagcagcagaggctgctccagttacagcaccacccggccgctgcacccggctgctcccaggccccccagccggcccctgccccgtttgtgatcgccccctgtgatggccctggggctgccccgctccccagcaccctcctcacgtcggggctcccgctgctgccgcccccactcctgcagaccggcgcgtccccggtggcctcagcggcgcagctcctggacacacacctgcacattggcaccggccccaccgccctccccgctgtgcccccaccacgcctggccaggctggccccaggttgtgagcccctggggctgctgcagggggactgtgagatggaggacctgatgccctgctccctaggcacgtttgtcctggtgcagtgagggcagccctgcatcctggcacggacactgactcttacagcaataacttcagaggaggtgaagacatctggcctcaaagccaagaactttctagaagcgaaataagcaatacgttaggtgttttggctttttagtttatttttgttttatttttttcttgcactgagtgacctcaactttgagtagggactggaaactttaggaagaaagataattgaggggcgtgtctgggggcgggggcaggaggggagcggggtggagggaacacgtgcagtgccgtggtgtggggatctcggcccctctctctgggttcgtcgtggttgagatgattacctcggacgtctacggaaacgagcgggcgcattgttgtccgcttgtgtgtgtgtgtgtgtgtgtgtgtgtgcgcgtgcattgattactatccatttctttagtcaacgctctccacttcctgatttctgctttaaggaaaactgtgaactttctgcttcatgtatcagttttaaagcagcccaggcaaagatcatctacagattctaggaattctctcccctgaaatcaaaacctggaagacttttttttcttattttagttgagaagtttcataaactgctcaaggattagttttccaggactctgcggaggaacggcaggaagaacctcagagagggcagaggtgacttcaaagtgctggggactccgtcctgagggtcacttggccctgagcccctgcgtgcccttgcggaagcccagaagcttcttcctgctgcacctcccgtttccgctgctgctgacgtttatgcatttcatgatggggtccaacaagaacacctgacttgggtgaagttgtgcaatattggaggctgactgtagggctgggcagctgggagacaggctcatggctcatggctcatggctcagggcggtgcctgccctgggccgggacccccctccccaccccccacctaggctttttgggttttgttcaaggaaggtaaagtgagaggtttaggtcagtgtttttaagtttttgttttttttttaaagcaaatcctgtatatgtatctacatgggagacaggtagacactacttatttgttacattttgtactatacgtttgtgttccaggtttcagcttccctcgctcctgttgttaagaagcgtccctgtcagcacaggtgtgcattgaggaaggggccccagggccttcgctccctcagcactggggtggaggcggcaggaaggggcggcccttacctggcaggtctgggcgcacctttagcaggtggactccgtggggctccaccagccagaagcctctggaaggcaacgaaggcaatgctgctccctgagtccagtccccgcccccaaacccagcccaggtgccttcagctacttcggcttcttaaaccctgcagtgttaaacagaggcattgagaaaggggaaaggcgggtatttttaaaagccaaagattgacccagttacttgagggtagggaggcgggcccagtgcaggaggctgcatccctggcctgctggtgcccaccgggggctgtgcctgtgccgggccgcagggaagctggctgcccccattcctgctgctgctgctgctgctgctctgtggctgtttcaaagactgggcgaaaggctgtccggagggcagaccaggtgccttgccgcagagaaaacaccaaagtctcctgttcgctcataaagaagtttttgggatgggagagaatccagaccatcttggggcagccaggcccttgccttcatttttacagaggtagcacaactgattccaacacaaaaccccttcccctttttaaaatgatttctgttctaatgccatagatcaaaggcctcagaaaccattgtgtgtttcctctttgaagcaatgacaagcactttactttcacggtggtttttgttttttcttattgctgtggaacctcttttggaggacgttaaaggcgtgttttacttgtttttttaagagtgtgtgatgtgtgttttgtagatttcttgacagtgctgtaatacagacggcaatgcaatagcctatttaaagacactacgtgatctgattgagatgtacatagtttttttttttaccataactgaattattttatctcttatgttaacatgagaaatgtatgccaaatgattagttgatgtatgttttttaatttaatatttaaataaaatatttggaaggaaaaaaaaaaaaaaaaa

SEQ ID NO: 3969 - protein, 783 aa, Homo sapiens
MVIMSEFSADPAGQGQGQQKPLRVGFYDIERTLGKGNFAVVKLARHRVTKTQVAIKIIDKTRLDSSNLEKIYREVQLMKLLNHPHIIKLYQVMETKDMLYIVTEFAKNGEMFDYLTSNGHLSENEARKKFWQILSAVEYCHDHHIVHRDLKTENLLLDGNMDIKLADFGFGNFYKSGEPLSTWCGSPPYAAPEVFEGKEYEGPQLDIWSLGVVLYVLVCGSLPFDGPNLPTLRQRVLEGRFRIPFFMSQDCESLIRRMLVVDPARRITIAQIRQHRWMRAEPCLPGPACPAFSAHSYTSNLGDYDEQALGIMQTLGVDRQRTVESLQNSSYNHFAAIYYLLLERLKEYRNAQCARPGPARQPRPRSSDLSGLEVPQEGLSTDPFRPALLCPQPQTLVQSVLQAEMDCELQSSLQWPLFFPVDASCSGVFRPRPVSPSSLLDTAISEEARQGPGLEEEQDTQESLPSSTGRRHTLAEVSTRLSPLTAPCIVVSPSTTASPAEGTSSDSCLTFSASKSPAGLSGTPATQGLLGACSPVRLASPFLGSQSATPVLQAQGGLGGAVLLPVSFQEGRRASDTSLTQGLKAFRQQLRKTTRTKGFLGLNKIKGLARQVCQVPASRASRGGLSPFHAPAQSPGLHGGAAGSREGWSLLEEVLEQQRLLQLQHHPAAAPGCSQAPQPAPAPFVIAPCDGPGAAPLPSTLLTSGLPLLPPPLLQTGASPVASAAQLLDTHLHIGTGPTALPAVPPPRLARLAPGCEPLGLLQGDCEMEDLMPCSLGTFVLVQ

SEQ ID NO: 3970 - DNA, 3013 bp, Homo sapiens
cattgccctctgccccgcagcctgcccgttcccaggccagcgagggcgctcccaggccggtctgcagccagaacacagcccgttccatgtgcttgtcctcgggacacattaggaatgaacccaggcctcagtcctggcctcctcctcaaggctgggtgctcagacgtccccctcagcccctttctctagaccttccggctgaacaaacgagaacatctcacagccctgcaacagccaggagctgctcgtggagctccacgcccggctggagagagaggaggcaccctgggcagcccgccagcacccaggctctcacagtggaagcccacgtcttcttgggctctattttgaaagctgttctttccacgacggctttgacaagaatcgatttgagtgagccggcgtgtcaatacaggccagcacaggactggcctcagggccacattggggagggtggcgaccaggccctggctgcagcccacgtgggcaaaagcatggccaggcaggaggtggggcctgtgagcttggctacagcgaccgtgggcgctgggcccggggctcctcagccctgaggggagacccaggcccaggcaggctcccaggcgggctcccgggctcccagccttccgatcttctccctttgagaccttgccttctgcacagtgacaggaaagagccctgagtcccactttgcagggatgtattgcatttccagaaagttccttccgggtgcagagtgatacatgaaccctggggactcactccaacttggtattgattttctccacggaggacccagcagtcacggcccgtgtctgcacagccccttggatcctgcggaggaattcagccggcccctccccctgtgccgaaaaccacggaggcaaagccaggccagggtacagtgagaacacgggagaggactgagagaccgctggctgccgagggaggaagagcaggattcgcacccccgtcatcgctgggcccacacgccgccgacagcttccgcgtgtggccatctgtctttcagaaactctctggcagagggacccagcagatgacacgggggccgttcacactctgaaacctgcctggagtcaaaacactgctggcgagcctccaccgcaaacccaatccagatggtcttccctggtggccctcggggtggcgggcaccctgcccactccctgccagcccctgcccgctggactccaggcccggtcgagcccccgaccggtctcctgacccagcatgctgctctcccctgggcccggcttcctcgcccgctgggactcccaggcccctccagcccagccccgagagcaggagccccaagggaggcttggcggctgtggaggcgagtgggccacgtgtagctgggaggccggcaggaccaggagcccctcacagcgcagcacccacagcatcacgagccacttccactcctgggtggcctgggggcccccaccctgctctgagctgccccttgttgtgacctggggtcccccgtggtgggcccgccccttgagcctgggatccagcctcagcgaggctccagaagtgtcgtctccgccggccaggcgtcagcgcctccacccaggatcacacactcctatctctgcacttctgccctccatcctgctccacgccgcctctgcttgttattccagcacattccagggtgatgcctgctgaagccacgcagccagtgcctccaccctaccccccatctgacccaccggccccttccgcacgctggaagcctgcccggcctgaagtgtcctcacctgtcgccctatcctcccctccactccagcccaccggtgactcagccctcacagctctctcctccccgagggagccggtgacttggctctgatggtgccgggacccagccccggcatgttcagaatccttgtcctttaacctgcgtccacatgtagtcgcctccacctccctgcctgaacctccaggccctgcagagcaaacactgctgcctgcaggagacccctggggccttctccgtcccctcatcctcctaaggagcctcccctgccaccgtgccagaatgtgccggaggaacagaggcccgagcctcccgtggccccagcgaggcttcctctggggaagacagtgagcccaacgccctggctctcgaggggtggacggagtccagctggcatcaaccgggtgcccctcttcaccggtgtccacagtccttgagagcaaagggttcccagaggcgacctccctcctgcacaggcatttgtcatccttaccctctaggacagctttgccatgtgcagtgaacccctggacagtgttgcgtgccactttgccggatttggactgtatacagaccgaagcatgtggcatgaagccttctgctgtcagcaagttccttgtccctcgacagtatgtgcccaggctgcccttcaaggtggcagtgatggcagttgtctcttgcacgctgcgtacagttctgtcactgactcttacacacagccctggagacgggagagtgccgggagcattctatgcaagtgtcctggcctttgcgggcgtctccacagcacaaacacgagtcagggaccacccctcttctgcttccatgattccaccaactgggtggggcagagcagtgccagggccggaggcacgccccaggtgagggcaggtggccatgccagtgagtgcactgcgttctcagttaattcatccgaaatatttctaagtttcttgattattgcagttgcatccccaagataatgccgccctcaccaagtagaaggcacatgtgctctgatggcccctcccacactggggtcagggcacagcaacttagcgaggcgacgtgggggctcagaggacctcggaccaggctcggcacatggggcttctccagccagccagggggaagcaccctgcagactgctaacttttgcaaaatagagtaaaaaagatcagctagaaaaataaaacaaaaaaggaaagatatacaaaatacaaggcc

SEQ ID NO: 3971 - protein, 161 aa, Homo sapiens
MCLSSGHIRNEPRPQSWPPPQGWVLRRPPQPLSLDLPAEQTRTSHSPATARSCSWSSTPGWRERRHPGQPASTQALTVEAHVFLGSILKAVLSTTALTRIDLSEPACQYRPAQDWPQGHIGEGGDQALAAAHVGKSMARQEVGPVSLATATVGAGPGAPQP

SEQ ID NO: 3972 - DNA, 579 bp, Homo sapiens
ctagagagctggcgcacctcctgggcctgacgcgggcttcctggattgcataaaggctccttctccttacatagccagggcaaaggtgcatgacaactctgagcaagtcaaaacaaccgtcagcagcgggaaacctcgatgaacaaacaccgggagagtgtttctgcagatcctgctttgtgacttcgagtgaagtgtggaagcgctggaagcacttagaccctgcctgtgccgcagacccctgggaggcaccaacaccccggatcgagaagcccgatgggaaagaatgtctgggaaggacgtcatgcccgaggcttgcgtgacagtttccactcacagtgcgctcactctgaacctctgtgcacacgatgggcctgcatctcttcccactatctgctaggaaacacgaggggaaggaaatgaccgcagaagggagtgcaccgtgggggcaggaggtgctgcggccaatgggcagtgctgggagatgaaaccaacagcggcgattgccccagaaagaacttggcgctgctaaggcaatggcggcccgaaagaggcccctgacgcatgaggagcggccgc

SEQ ID NO: 3973 - protein, 77 aa, Homo sapiens
MTTLSKSKQPSAAGNLDEQTPGECFCRSCFVTSSEVWKRWKHLDPACAADPWEAPTPRIEKPDGKECLGRTSCPRLA

SEQ ID NO: 3974 - DNA, 1916 bp, Homo sapiens
ggagtgagcgcggcagtggccctggcagctggcggagcggcccagcccgtgtgcacgtggcgccggcgctgcctttcggttgccaaaattcaggctgtagacggcgagataacaagtttaaaaccccggctaagccagaagagccaaagagggacctcgccaaggccactcctcgctctctaggccgagaatactgcgcaaattctgggaggtttgggcctggcggctctccgttcccgacccccggcgtggattcgttcccgcgctttctggcgtgaggggtcagagggcgcgccgacgctcaggcgaacggagcggaggcggcagcggccatgggcgaagcgggcgccgctgaggaggcctgccggcacatgggaactaaagaggaatttgttaaagtcagaaagaaggatctggaacggctgacaactgaagtgatgcaaatacgggacttcttacccagaatactaaatggggaggtgctggagagcttccagaaattaaagattgtagaaaaaaacctggaaaggaaagagcaagaattagagcagctgaaaatggattgtgagcactttaaagcccgcctggaaaccgtgcaggccgacaacataagagagaagaaggagaaactggctcttcgacagcagttgaatgaagcgaagcagcaactcctgcagcaggcagagtattgtacagaaatgggagcagcagcgtgtaccctcttgtggggtgtctccagcagtgaggaagtcgtcaaggccattttgggaggagataaagctttgaagtttttcagcatcactggtcaaacaatggagagttttgtgaagtcgttagacggtgatgtccaggagctggattcggatgaaagtcagtttgttttcgctctggctggaattgtcacgaatgttgctgctatagcatgtggtcgtgaattcttggttaattcaagccgggtgctcttggacaccatattgcagcttctgggagacttgaagccaggacagtgtaccaaactcaaagtgctaatgctgatgtccctatacaatgtaagcatcaatttgaaaggcttgaaatacatcagcgagagtccaggattcatccctttgctgtggtggcttttgagtgatccagatgcagaggtgtgccttcatgtactgaggcttgtccagtctgtggttctggaacctgaagtcttctccaagtcggcctctgagttccggagctccctgcccctgcaacgcatcctggcaatgtccaagagccgcaacccccgcctgcaaaccgcagcccaggagctcctggaagatctccgcactctggagcataatgtgtaggtgtgctcggccaccagggttttggtgaaaatgccggtgtcccttctccccagatccctcatttgatactccaaaaccatcaccatgtaccatgtgttagagttggcaaaatgtgattgactagagatggacatgaattgatatgtatcccacataactttgtcttggaagtgagagtgcttgtaggtggttggttaagcttgccaaaggagaggccatgaaagaacctgtccttctggaaaagtggtccatgtctgtgctggctggaagagggcttgcttagggcagcttcttgctgctcagcagaccatgacctgtaggttcacctataaaacagggaaattgaataaccatctaccccattagtcagcattttcttgagatacatttctttgaaaagcaattcattctctctctagtaattgtaattaatccccccaaaatgcaagtttacttttataaccttttggtgaacctgctatttcggatgacattgggcattttagttctatattttttgtgcctcttttatttttgaataaagaaaatcagaagagttgtaaaaaaaaaaaaaaaaaa

SEQ ID NO: 3975 - protein, 334 aa, Homo sapiens
MGEAGAAEEACRHMGTKEEFVKVRKKDLERLTTEVMQIRDFLPRILNGEVLESFQKLKIVEKNLERKEQELEQLKMDCEHFKARLETVQADNIREKKEKLALRQQLNEAKQQLLQQAEYCTEMGAAACTLLWGVSSSEEVVKAILGGDKALKFFSITGQTMESFVKSLDGDVQELDSDESQFVFALAGIVTNVAAIACGREFLVNSSRVLLDTILQLLGDLKPGQCTKLKVLMLMSLYNVSINLKGLKYISESPGFIPLLWWLLSDPDAEVCLHVLRLVQSVVLEPEVFSKSASEFRSSLPLQRILAMSKSRNPRLQTAAQELLEDLRTLEHNV

SEQ ID NO: 3976 - DNA, 6113 bp, Homo sapiens
taatacttaattaccttctaataattggagcagaagatgaacccaactaatcctttcagtgggcagcagcctagtgctttttcggcgtcttctagtaatgtaggaacacttccatctaagccgccatttcgatttggtcaaccttctctttttggacaaaacagtaccttatctgggaagagctcgggattttcacaggtatccagctttccagcgtcttctggagtaagtcattcctcttcagtgcaaacattagggttcacccaaacctcaagtgttggacccttttctggacttgagcacacttccacctttgtggctacctctgggccttcaagttcatctgtgctgggaaacacaggatttagttttaaatcacccaccagtgttggggctttcccaagcacttctgcttttggacaagaagctggagaaatagtgaactctggttttgggaaaacagaattcagctttaaacctctggaaaatgcagtgttcaaaccaatactgggggctgaatctgagccagagaaaacccagagccaaattgcttctgggttttttacattttcccacccaattagtagtgcacctggaggcctggcccctttctcttttcctcaagtaacaagtagttcagctaccacttcaaattttaccttttcaaaacctgttagtagtaataattcattatctgcctttacccctgctttgtcaaaccaaaatgtagaggaagagaagagaggacctaagtcaatatttggaagttctaataatagcttcagtagcttccctgtatcatctgcggttttgggcgaacctttccaggctagcaaagcaggtgtcaggcaggggtgtgaagaagctgtttcccaggtggaaccacttcccagcctaatgaaaggactgaaaaggaaggaggaccaggatcgctccccaaggagacatggccacgagccagcagaagattcggatcctctgtcccggggcgatcatcctccagacaaacgacctgtccgcctgaatcgaccccggggaggtactttatttggtcggacgatacaggatgttttcaaaagcaataaggaagtaggtcgtctgggcaacaaggaggccaaaaaggaaactggctttgttgagtctgcagaaagtgaccacatggctatcccaggagggaatcagtctgtcctggcaccttcccggattccaggtgtgaataaagaggaagaaactgaaagtagagagaagaaagaagattctctaagaggaactccggcgcgtcagagtaacagaagcgagagcacagacagtcttgggggcttgtctccctctgaagtcacagccatccagtgcaagaacatccctgactacctcaacgacaggaccattctggagaaccattttggcaaaattgctaaagtgcagcgcatctttaccaggcgcagcaaaaagcttgcagtggtacatttctttgatcatgcatctgcagccctggctagaaagaaggggaaaagtttgcataaagacatggctatcttttggcacaggaagaaaataagccccaataagaaacccttttccctgaaggagaagaaaccaggtgacggtgaagtcagcccgagcacagaggatgcaccctttcagcactctcctcttggcaaggccgcagggaggactggtgctagcagcctcctgaataaaagctctccagtgaagaagccaagtcttctaaaggcccaccaattcgagggagactcttttgactcagcctccgagggctccgagggcctcgggccatgtgtgctctccctcagtaccctgataggcactgtggctgagacatccaaggagaagtaccgcctgcttgaccagagagacaggatcatgcggcaagctcgggtgaagagaaccgatctggacaaagcgaggacttttgttggcacctgcctggatatgtgtcctgagaaggagaggtacatgcgggagacccgtagccagctgagcgtgttcgaagtggtcccagggactgaccaggtggaccacgcagcagctgtgaaagagtacagtcggtcctcggcggatcaggaggagcccctgccccacgagctgcggcccttgccagtgctcagcaggaccatggactacctggtgacccagatcatggaccagaaggagggcagcctgcgggattggtatgacttcgtgtggaaccgcacgcgtggcatacggaaggatatcacgcagcagcacctctgtgaccccctgacggtgtccctgattgagaagtgcacccggtttcacatccactgtgcccacttcatgtgtgaggagcccatgtcctcctttgatgccaagatcaataatgagaacatgaccaagtgcctgcagagcctgaaggagatgtaccaggacctgagaaacaagggtgtcttctgtgccagcgaagcggagttccagggctacaatgttctgctcagtctcaacaagggagacatcctaagagaagtacaacagttccatcctgctgttagaaactcatctgaggtgaaatttgctgttcaggcttttgctgcattgaacagtaataattttgtgagatttttcaaactggtccagtcagcttcttacctgaacgcttgtcttttacactgttacttcagtcagatccgcaaggatgctctccgggcgctcaactttgcgtacacggtgagcacacagcgatctaccatctttcccctggatggtgtggtgcgcatgctgctgttcagagactgtgaagaggccaccgacttcctcacctgccacggcctcaccgtttccgacggctgtgtggagctgaaccggtctgcattcctggaaccagagggattatccaagaccaggaagtcggtgtttattactaggaagctgacggtgtcagtcggggaaattgtgaacggagggccattgccccccgtccctcgtcatacccctgtgtgcagcttcaactcccagaacaagtacatcggggagagcctggccgcggagctgcccgtcagcacccagagacccggctccgacacagtgggcggagggagaggagaggagtgtggtgtagagccggatgcacccctgtccagtctcccacagtctctaccagcccctgcgccctcaccagtgcctctgcctcctgtcctggcactgaccccgtctgtggcgcccagcctcttccagctgtctgtgcagcctgaaccaccgcctccagagcccgtgcccatgtactctgacgaggacctggcgcaggtggtggacgagctcatccaggaggccctgcagagggactgtgaggaagttggctctgcgggtgctgcctacgcagctgccgccctgggtgtttctaatgctgctatggaggatttgttaacagctgcaaccacgggcattttgaggcacattgcagctgaagaagtgtctaaggaaagagagcgaagggagcaggagaggcagcgggctgaagaggaaaggttgaaacaagagagagagctggtgttaagtgagctgagccagggcctggccgtggagctgatggaacgcgtgatgatggagtttgtgagggaaacctgctcccaggagttgaagaatgcagtagagacagaccagagggtccgtgtggcccgttgctgtgaggatgtctgtgcccacttagtggacttgtttctcgtggaggaaatcttccagactgcaaaggagaccctccaggagcttcagtgcttctgcaagtatctacagcggtggagggaagctgtcacagcccgcaagaaactgaggcgccaaatgcgggctttccctgctgcgccctgctgcgtggacgtgagcgaccggctgagggcgctggcgcccagcgcagagtgccccattgctgaagagaacctggccaggggcctcctggacctgggccatgcagggagattgggcatctcctgcaccaggttaaggcggctcagaaacaagacagctcaccagatgaaggttcagcacttctaccagcagctgctgagtgatgtggcatgggcgtctctggacctgccatccctcgtggctgagcacctccctgggaggcaggagcatgtgttttggaagctggtgctggtgttgccggatgtagaggagcagtccccagagagttgtggcagaattctagcaaattggttaaaagtcaagttcatgggagatgaaggctcagtggatgacacatccagcgatgctggtgggattcagacgctttcgcttttcaactcacttagcagcaaaggggatcagatgatttctgttaacgtgtgtataaaggtggcccatggcgccctcagtgatggtgccattgatgctgtggagacacagaaggacctcctgggagccagtgggctcatgctgctgcttccccccaaaatgaagagtgaggacatggcagaggaggacgtgtactggctgtcggccttgctgcagctcaagcagctcctgcaggctaagcccttccagcctgcgcttcctctggtggttcttgtgcctagcccaggaggggacgccgttgagaaggaagtagaagatggtctgatgctacaggacttggtttcagctaagctgatttcagattacactgttaccgagatccctgataccattaatgatctacaaggttcaactaaggttttgcaagcagtgcagtggctggtttcccactgcccccattcccttgacctctgctgccagactctcattcagtacgtcgaagacgggattggccatgagtttagtggccgctttttccatgacagaagagagaggcgtctgggcggtcttgcttctcaggagcctggcgccatcattgagctgtttaacagtgtgctgcagttcctggcttctgtggtgtcctctgaacagctgtgtgacctgtcctggcctgtcactgagtttgctgaggcagggggcagccggctgcttcctcacctgcactggaatgccccagagcacctggcctggctgaagcaggctgtgctcgggttccagcttccgcagatggaccttccacccctgggggccccctggctccccgtgtgctccatggttgtccagtacgcctcccagatccccagctcacgccagacacagcctgtcctccagtcccaggtggagaacctgctccacagaacctactgtaggtggaagagcaagagtccctccccagtccatggggcaggcccctcggtcatggagatcccatgggatgatcttatcgccttgtgtatcaaccacaagctgagagactggacgcccccccggcttcctgttacatcagaggcgctgagtgaagatggtcagatatgtgtgtatttttttaaaaacgatttgaaaaaatatgatgttcctttgtcgtgggaacaagccaggttgcagacgcagaaggagctacagctgagagagggacgtttggcaataaagccttttcatccttctgcaaacaattttcccataccattgcttcacatgcaccgtaactggaagaggagcacagagtgtgctcaagaggggaggattcccagcacagaggatctgatgcgaggagcttctgctgaggagctcttggcgcagtgtttgtcgagcagtctgctgctggagaaagaagagaacaagaggtttgaagatcagcttcagcaatggttgtctgaagactcaggagcatttacggatttaacttcccttcccctctatcttcctcagactctagtgtctctttctcacactattgaacctgtgatgaaaacatctgtaactactagcccacagagtgacatgatgagggagcaactgcagctgtcagaggcgacaggaacgtgtctaggcgaacgactaaagcacctggaaaggctgatccggagttcaagggaagaggaagttgcctctgagctccatctctctgcgctgctagacatggtggacatttgagcagcctgacctgtggggagggggtctctcccgaagagtttctgtttttactcaaaataatgttattctcagatgcttgatgcactgttggaaatgtgattaatttaatcatgcagataaaccatttaaatgtc

SEQ ID NO: 3977 - protein, 1980 aa, Homo sapiens
MNPTNPFSGQQPSAFSASSSNVGTLPSKPPFRFGQPSLFGQNSTLSGKSSGFSQVSSFPASSGVSHSSSVQTLGFTQTSSVGPFSGLEHTSTFVATSGPSSSSVLGNTGFSFKSPTSVGAFPSTSAFGQEAGEIVNSGFGKTEFSFKPLENAVFKPILGAESEPEKTQSQIASGFFTFSHPISSAPGGLAPFSFPQVTSSSATTSNFTFSKPVSSNNSLSAFTPALSNQNVEEEKRGPKSIFGSSNNSFSSFPVSSAVLGEPFQASKAGVRQGCEEAVSQVEPLPSLMKGLKRKEDQDRSPRRHGHEPAEDSDPLSRGDHPPDKRPVRLNRPRGGTLFGRTIQDVFKSNKEVGRLGNKEAKKETGFVESAESDHMAIPGGNQSVLAPSRIPGVNKEEETESREKKEDSLRGTPARQSNRSESTDSLGGLSPSEVTAIQCKNIPDYLNDRTILENHFGKIAKVQRIFTRRSKKLAVVHFFDHASAALARKKGKSLHKDMAIFWHRKKISPNKKPFSLKEKKPGDGEVSPSTEDAPFQHSPLGKAAGRTGASSLLNKSSPVKKPSLLKAHQFEGDSFDSASEGSEGLGPCVLSLSTLIGTVAETSKEKYRLLDQRDRIMRQARVKRTDLDKARTFVGTCLDMCPEKERYMRETRSQLSVFEVVPGTDQVDHAAAVKEYSRSSADQEEPLPHELRPLPVLSRTMDYLVTQIMDQKEGSLRDWYDFVWNRTRGIRKDITQQHLCDPLTVSLIEKCTRFHIHCAHFMCEEPMSSFDAKINNENMTKCLQSLKEMYQDLRNKGVFCASEAEFQGYNVLLSLNKGDILREVQQFHPAVRNSSEVKFAVQAFAALNSNNFVRFFKLVQSASYLNACLLHCYFSQIRKDALRALNFAYTVSTQRSTIFPLDGVVRMLLFRDCEEATDFLTCHGLTVSDGCVELNRSAFLEPEGLSKTRKSVFITRKLTVSVGEIVNGGPLPPVPRHTPVCSFNSQNKYIGESLAAELPVSTQRPGSDTVGGGRGEECGVEPDAPLSSLPQSLPAPAPSPVPLPPVLALTPSVAPSLFQLSVQPEPPPPEPVPMYSDEDLAQVVDELIQEALQRDCEEVGSAGAAYAAAALGVSNAAMEDLLTAATTGILRHIAAEEVSKERERREQERQRAEEERLKQERELVLSELSQGLAVELMERVMMEFVRETCSQELKNAVETDQRVRVARCCEDVCAHLVDLFLVEEIFQTAKETLQELQCFCKYLQRWREAVTARKKLRRQMRAFPAAPCCVDVSDRLRALAPSAECPIAEENLARGLLDLGHAGRLGISCTRLRRLRNKTAHQMKVQHFYQQLLSDVAWASLDLPSLVAEHLPGRQEHVFWKLVLVLPDVEEQSPESCGRILANWLKVKFMGDEGSVDDTSSDAGGIQTLSLFNSLSSKGDQMISVNVCIKVAHGALSDGAIDAVETQKDLLGASGLMLLLPPKMKSEDMAEEDVYWLSALLQLKQLLQAKPFQPALPLVVLVPSPGGDAVEKEVEDGLMLQDLVSAKLISDYTVTEIPDTINDLQGSTKVLQAVQWLVSHCPHSLDLCCQTLIQYVEDGIGHEFSGRFFHDRRERRLGGLASQEPGAIIELFNSVLQFLASVVSSEQLCDLSWPVTEFAEAGGSRLLPHLHWNAPEHLAWLKQAVLGFQLPQMDLPPLGAPWLPVCSMVVQYASQIPSSRQTQPVLQSQVENLLHRTYCRWKSKSPSPVHGAGPSVMEIPWDDLIALCINHKLRDWTPPRLPVTSEALSEDGQICVYFFKNDLKKYDVPLSWEQARLQTQKELQLREGRLAIKPFHPSANNFPIPLLHMHRNWKRSTECAQEGRIPSTEDLMRGASAEELLAQCLSSSLLLEKEENKRFEDQLQQWLSEDSGAFTDLTSLPLYLPQTLVSLSHTIEPVMKTSVTTSPQSDMMREQLQLSEATGTCLGERLKHLERLIRSSREEEVASELHLSALLDMVDI

SEQ ID NO: 3978 - DNA, 2991 bp, Homo sapiens
caaaaagttcgcgctgctggtcccgcgcgggcggcccctgggctttgtgtccaccaggacagcgggccgggctccctgcaggcgcgggcggcgccgaacggtgctcagcaaccacccggacagggccaggccgttttctcccgctcaggcattagtcgttggctgtgggccgccgcgggaagttgaggcctaccacggaggaggctgctgaggtggatctcaggggatccgcaagggctccctcacccttgccgggaccctgggaacccgaaacaaaatcctacgccaccagcccgccgaatgcgccccctcggccgggggtcctgggtcttcagagaagaactcggccgaatgcggtcagaaagcccgcgaaccgcctggacctgcaggccccgccgcttggagctcccgcctttcccgaccgagcccgtgtctgctcgtgtgtctcactgatgtcttaggtctcaaaaaaaaaagaaaagaaaaggtttttagtagacagaagagaaatggggccgtgggttcgtggtcccagggggaaactgacgtcgcatgaggtcgtcgtccctcagcttgagctcagcggaacataagcttgcagaggtggaaaccacggaaggtttgggtgtcttggagctctctggacaccgaagcccggacacagtcccggggtccgcaccgcctgtgacctgtggcgggaccgccggggtgggcgttttctcagctggcgcgcgcgtaggtggaacttgggaaactaactggagcgaagtggcaaaaaaccaagacagggccggtgacctcgcgcaggccgtccttaactgtggagtattccttcagctaacccctttatttcatgtgtccaagtctggtttctgggtttctttgtagtccctccgggcctgttcgtgcgccttcacttgcaaaaggttcgtcgtggagggccgtgtgcttgtttgcagcagtaacgatgcccttcccgagcgtgctggagtggctcctcgctgacgcaagctcaccttgcagcctcctcagcaactgcaacttaaacgcgccctcaggaagccctggaatctcgctcagaattttttttctttttttgagacagtctcgctgcgacgcccaggctatagcgcaatggcgcgatctcggctccctgcaacctccctcaggaagccgtggaagctcgaccgccagaaacttccttctcctgactcaggccacagtcttctgtgtggctggtctccaggaggtaaggcccgccctgcaggcaacaccggtgcttgggctcctgctgagcagttctttcctgcgagtaacagaaccagggagggaggtgggctgtggcctcccctgcccctacagtcgtctcctgcagctcccaccatgctggactcatcagcagcagagcaagtgacccgactgacgctgaagctcttgggacagaagctggagcaagaacggcagaacgtggaagggggacctgagggcctccacctcgagccaggaaatgaggaccggccggacgatgccctgcagactgctctgaagagaaggagggaccttctgcagagactccgggaacaacacctcctggacgagctctctcgggcccaggcctggagcgggccaagcagaggagccctcgggtcagccctgcccccagagctgccccccacgggcatcctacccactgcctccccatccccgctggccccagacccgccaaggatcatcctgcctacggtcccccagcctcctgccaccatcattcagcagctccctcagcagccactcatagcacagattcctcctccccaggccttccctactcaacggtcaggaagtattaaggaagacatggtggagctgctgctgctgcagaacgcacaggtgcaccagttggtcctgcagaactggatgctcaaggccctgcccccagccctgcaggacccgccacatgtgcccccgagggtcccacgagctgccaggccaaggctgcctgccgtgcaccaccaccaccaccaccaccatgctgtgtggccacctggggctgccactgtcctccagcccgcccccagcctgtggacgcctggcccaccctgagtgtgagtcacagagaccctggccggggcaccctccacccccaggcttcctcagggctgtgggctgtggcgggactatggaagggagcagggagagaccctgccaccacccggagtggctacgcgagtgtggactgcaggctcctcctggggaagctgggcaggctcgctttctggtcacggggccattccagggggcatcccttgctccgggtcccctgcagtgaggggcctgtgaaccccaccagggcaacagcccctcccagggacccctcctttcctgtagggcggcgccggcccacctgggagcctcagatccccctcttccatcacggaggtaaagttgaggccgtggacgccaccagcctgatgaaataaagatttcatccagaaagagtttaagaaaatctcagctcaggagccagaacagaaaagatcaatagctttagccacatggaagtgtgaacatcctgatggggaaaataccacaaagtctaatttaataactagggacacctgtgtgccacagctgtggcacagactcccactaaagaagtaggggtgcatggctcatgcctgtaatcccagcactttaagaggctgaggcaggaggatcacttgagctcaggaattcgagaccagcctgggtcacatagcaagaccccgtctctacaaaaaataaatttaaaaaactagccaggtgtggtgatatgcgcctgttatctcagcagctctgggggctgaggtgggaggattgcttgagcccaggagttagaagctgcagtgagctctgatggaaccactgcactatagcctggaccacagagcaggcccctgtctcaaaaaataaaataaaaaagtgaaagaagaaaaaaaaaaaaaaaaaaaa

SEQ ID NO: 3979 - protein, 322 aa, Homo sapiens
MARSRLPATSLRKPWKLDRQKLPSPDSGHSLLCGWSPGGKARPAGNTGAWAPAEQFFPASNRTREGGGLWPPLPLQSSPAAPTMLDSSAAEQVTRLTLKLLGQKLEQERQNVEGGPEGLHLEPGNEDRPDDALQTALKRRRDLLQRLREQHLLDELSRAQAWSGPSRGALGSALPPELPPTGILPTASPSPLAPDPPRIILPTVPQPPATIIQQLPQQPLIAQIPPPQAFPTQRSGSIKEDMVELLLLQNAQVHQLVLQNWMLKALPPALQDPPHVPPRVPRAARPRLPAVHHHHHHHHAVWPPGAATVLQPAPSLWTPGPP

SEQ ID NO: 3980 - DNA, 2957 bp, Homo sapiens
caaaaagttcgcgctgctggtcccgcgcgggcggcccctgggctttgtgtccaccaggacagcgggccgggctccctgcaggcgcgggcggcgccgaacggtgctcagcaaccacccggacagggccaggccgttttctcccgctcaggcattagtcgttggctgtgggccgccgcgggaagttgaggcctaccacggaggaggctgctgaggtggatctcaggggatccgcaagggctccctcacccttgccgggaccctgggaacccgaaacaaaatcctacgccaccagcccgccgaatgcgccccctcggccgggggtcctgggtcttcagagaagaactcggccgaatgcggtcagaaagcccgcgaaccgcctggacctgcaggccccgccgcttggagctcccgcctttcccgaccgagcccgtgtctgctcgtgtgtctcactgatgtcttaggtctcaaaaaaaaaagaaaagaaaaggtttttagtagacagaagagaaatggggccgtgggttcgtggtcccagggggaaactgacgtcgcatgaggtcgtcgtccctcagcttgagctcagcggaacataagcttgcagaggtggaaaccacggaaggtttgggtgtcttggagctctctggacaccgaagcccggacacagtcccggggtccgcaccgcctgtgacctgtggcgggaccgccggggtgggcgttttctcagctggcgcgcgcgtaggtggaacttgggaaactaactggagcgaagtggcaaaaaaccaagacagggccggtgacctcgcgcaggccgtccttaactgtggagtattccttcagctaacccctttatttcatgtgtccaagtctggtttctgggtttctttgtagtccctccgggcctgttcgtgcgccttcacttgcaaaaggttcgtcgtggagggccgtgtgcttgtttgcagcagtaacgatgcccttcccgagcgtgctggagtggctcctcgctgacgcaagctcaccttgcagcctcctcagcaactgcaacttaaacgcgccctcaggaagccctggaatctcgctcagaattttttttctttttttgagacagtctcgctgcgacgcccaggctatagcgcaatggcgcgatctcggctccctgcaacctccctcaggaagccgtggaagctcgaccgccagaaacttccttctcctgactcaggccacagtcttctgtgtggctggtctccaggaggtaaggcccgccctgcaggcaacaccggtgcttgggctcctgctgagcagttctttcctgcgagtaacagaaccagggagggaggtgggctgtggcctcccctgcccctacagtcgtctcctgcagctcccaccatgctggactcatcagcagcagagcaagtgacccgactgacgctgaagctcttgggacagaaagcctcttagtcattcctggagcacacagggcctttgcgtggagccaccgtctctgtcacggtctctcttcctcacagaagctggagcaagaacggcagaacgtggaagggggacctgagggcctccacctcgagccaggaaatgaggaccggccggacgatgccctgcagactgctctgaagagaaggagggaccttctgcagagactccgggaggccaccctcatgcacataaccctggaagggtcttccagtcatggccatcctgcccggagaggcgcctgtacctggcccaggctggcctgagcctgatgctgggggtgcctctgtggcgttggggctccccgtccccgtgtgcagcagctctgcatcggccttgcaggaacaacacctcctggacgagctctctcgggcccaggcctggagcgggccaagcagaggagccctcgggtcagccctgcccccagagctgccccccacgggcatcctacccactgcctccccatccccgctggccccagacccgccaaggatcatcctgcctacggtcccccagcctcctgccaccatcattcagcagctccctcagcagccactcatagcacagattcctcctccccaggccttccctactcaacggtcaggaagtattaaggaagacatggtggagctgctgctgctgcagaacgcacaggtgcaccagttggtcctgcagaactggatgctcaaggccctgcccccagccctgcaggacccgccacatgtgcccccgagggtcccacgagctgccaggccaaggctgcctgccgtgcaccaccaccaccaccaccaccatgctgtgtggccacctggggctgccactgtcctccagcccgcccccagcctgtggacgcctggcccaccctgagtggcggcgccggcccacctgggagcctcagatccccctcttccatcacggaggtaaagttgaggccgtggacgccaccagcctgatgaaataaagatttcatccagaaagagtttaagaaaatctcagctcaggagccagaacagaaaagatcaatagctttagccacatggaagtgtgaacatcctgatggggaaaataccacaaagtctaatttaataactagggacacctgtgtgccacagctgtggcacagactcccactaaagaagtaggggtgcatggctcatgcctgtaatcccagcactttaagaggctgaggcaggaggatcacttgagctcaggaattcgagaccagcctgggtcacatagcaagaccccgtctctacaaaaaataaatttaaaaaactagccaggtgtggtgatatgcgcctgttatctcagcagctctgggggctgaggtgggaggattgcttgagcccaggagttagaagctgcagtgagctctgatggaaccactgcactatagcctggaccacagagcaggcccctgtctcaaaaaataaaataaaaaagtgaaagaagaaaaaaaaaaaaaaaaaaaa

SEQ ID NO: 3981 - protein, 106 aa, Homo sapiens
MARSRLPATSLRKPWKLDRQKLPSPDSGHSLLCGWSPGGKARPAGNTGAWAPAEQFFPASNRTREGGGLWPPLPLQSSPAAPTMLDSSAAEQVTRLTLKLLGQKAS

SEQ ID NO: 3982 - DNA, 8192 bp, Homo sapiens
aagcgcgggggagggagtgtaaatagagcgaaggctgctctgtgtcagccccgtcaccgccgggcggcccgcgcggagtctgagggagatggaagttgagcaagagcagcggcgcagaaaggtggaggccgggaggacgaagcttgctcacttccgacagagaaaaacaaaaggtgacagttcgcattcggagaaaaagacggcgaagaggaagggctcggctgtcgatgcgtctgtccaggaggagagtccggtaaccaaggaggacagcgcactctgtggaggaggggacatttgcaaaagcacatcatgtgacgacacccctgatggggcaggaggggcctttgcagctcagccggaggactgtgatggagagaagagagaggacttggaacagctgcagcagaagcaagtcaatgaccatcctccagagcagtgtgggatgttcacagtcagtgaccacccaccagaacagcatgggatgttcacagtcggtgaccacccaccagaacagcgtgggatgttcacagtcagtgaccacccaccagaacagcatgggatgttcacagtcagtgaccacccaccagaacagcgtgggatgttcacaatcagtgaccaccaaccggaacagcgtgggatgttcacagtcagtgaccacacaccagaacagcgtgggatcttcacaatcagtgaccacccagcagaacagcgtgggatgttcacaaaggagtgtgaacaagaatgtgaacttgccattactgacctggagagcggccgtgaagatgaggctggcctgcatcagagtcaggccgtgcatggccttgagctggaggcgctgcgcctgagtctgagcaacatgcacacggcgcagctggagctgacacaggccaacctccagaaggagaaggagacggcattgacggagctgcgggagatgctcaacagccggcgtgcccaggagctggccctgctacagagcaggcagcagcacgagctggagctcctcagggagcagcacgcacgggagaaggaggaggtggtgctcaggtgtggacaggaagcagctgagctgaaggagaagttacaatcagaaatggagaaaaacgcccagatagtaaagaccctgaaggaagattgggaatctgaaaaagatttatgtttagaaaatctacgcaaagaactgtctgcaaagcatcaatcagaaatggaggatttacaaaaccagtttcagaaagaattggcagaacagagagctgagttggagaagatttttcaagacaaaaaccaggctgaacgggcccttaggaacctggagagtcatcatcaagcagccattgagaagttacgtgaagacctgcagtccgagcacggccggtgtttagaagacttggagttcaagttcaaagagagcgagaaagaaaaacagctggagttagagaatcttcaagcatcatatgaagacctgaaggcacaatcacaagaagagatcaggcgcttgtggtcccagcttgattctgccaggaccagtagacaggaattgagtgagctacatgagcaactcctggcgcgcacctctcgtgtggaagatttagaacagctgaagcagcgagaaaaaacccagcatgagtccgaactggagcaactgaggatttattttgaaaagaagttaagggatgctgagaaaacttaccaagaagacctaaccctgttacagcagaggctgcagggggcgagggaagatgctcttctggactctgtggaagttgggttgtcctgtgtgggtttagaagagaaacctgagaaaggaagaaaagatcacgttgatgaactcgagcctgagcgacataaggagagcctgccacgcttccaggcggagttagaagaaagccacaggcaccagctggaagcgctggagtctcccctctgcatccagcacgaggggcatgtctcagacagatgctgcgtagagacttcagcattgggacacgagtggcgtctggaaccctctgaagggcacagccaagagcttccctgggtgcatctccagggtgtgcaggacggggacttggaggccgacacagagcgggcagccagagtcttgggtctggaaactgagcacaaggtgcaactttcgcttcttcagactgagctcaaagaagaaattgaactcctaaaaatagaaaatagaaatttgtatgggaagttgcagcatgaaactcgtctgaaggacgatttggagaaggtaaaacacaatctaattgaagaccaccagaaggaactaaataatgctaagcaaaagactgagctgatgaaacaggaattccaaagaaaagaaacggactggaaagttatgaaggaggagctacagcgggaagctgaggagaagttaacattgatgctacttgaactgagagaaaaggctgaatccgagaaacagaccatcataaacaagtttgagcttcgagaagctgaaatgaggcagcttcaggaccaacaggcagcccagatcctggatctggagaggtccttgacggagcagcagggccgcctgcagcagctggaacaggacctcacttcagacgacgccctgcattgcagccagtgtgggcgggagccgcccacagcccaggacggggagcttgctgcgctccacgtgaaggaagactgcgccctgcagctgatgctggcccggagcaggtttttagaggaacgtaaagagatcaccgagaaattcagtgcggaacaagatgccttcctgcaggaggcccaggagcagcatgcccgtgagctgcagctcctccaggagagacaccagcagcagctcctgtcagtgacggcggagctcgaggccagacaccaggccgcgttgggcgagctgacagcctccttagagagcaagcagggggctctgctggctgcacgtgtggccgaactgcagacaaaacacgctgccgacctcggcgctctggagaccagacatctgtccagccttgattctttggaatcctgttacctctctgaatttcagaccatccgtgaggagcacaggcaggccctagagctcttacgagcagactttgaggaacaactgtggaaaaaggactctcttcaccaaacgattttgactcaagagttggagaaactgaagcggaaacacgaaggggagctacagtctgtgcgggaccacctgcgaaccgaagtgagcacagagctcgccggaaccgtggctcacgagctgcagggagtgcaccagggtgaatttggaagtgaaaagaaaactgctttgcatgaaaaagaggagacacttcggcttcagagtgcacaggcacagccttttcaccaagaggagaaagagtctttgtctctgcagcttcaaaagaagaatcaccaagtccagcagctgaaagaccaggttttatccttaagtcacgagatagaagagtgccgctccgagttggaggtgctgcagcagaggcgggagcgggagaaccgggaaggcgcaaacctcctctccatgctcaaggccgacgtcaacctgtcccacagcgaaagaggggccctccaggacgccctgcgcaggctgctgggtttgtttggagagacgctgagggcagccgtcaccctgaggagccggatcggggagcgcgtggggctctgcctggatgacgcgggcgcaggcctggccctgtcgacagctccggcgctggaggagacatggtctgatgtggccctcccggagttggacagaactttgtctgaatgtgcagagatgtcttccgtggctgaaattagcagccacatgcgtgaaagctttctcatgagcccagaaagtgtgcgggagtgtgagcagcccatccggagggtcttccagagcctcagcctggccgtggacggcctcatggagatggccctggactccagcaggcagctggaagaagcacgccaaattcattctcgttttgaaaaagaatttagttttaagaatgaggagacagcacaggttgtcaggaagcaccaggagctgctggagtgtttgaaggaggagagcgcagcaaaggcagagctggcgctggagctgcacaagactcagggtacccttgagggattcaaggtggagacagcagatctgaaggaggtgctggccgggaaggaggattccgagcaccgtctggtgctggagctggagagcctgagacggcagctgcagcaggcggcccaggagcaggcggcgctgagggaggagtgcacccgtctgtggagtcggggggaggccacagccacggacgccgaggccagagaagctgctctccggaaggaagtggaggatctgaccaaagaacagtcggagaccaggaagcaggctgagaaggaccgctcagccctgctctcccagatgaagattttggagtctgagttagaagaacagctgtctcagcatcgcgggtgtgccaagcaggcggaggccgtcactgccctggaacagcaggtggcatctctggacaagcatttgcgcaaccagcggcaattcatggatgagcaggcagccgagcgggagcacgagcgcgaggagttccagcaggagattcagaggctggaggggcagctccgccaggcggccaagccgcagccctggggccctcgcgacagccagcaggcgccgctggatggagaggttgagttgttacaacaaaagttgagagaaaagttggatgaatttaatgaattggctatacagaaagagtcggcagatagacaagtgttaatgcaggaagaagaaattaaacgtctggaggagatgaacatcaacatcaggaaaaaagtggcccagctccaggaagaagtggaaaaacagaaaaacatcgtgaaagggctggaacaggataaagaggtgttaaagaaacagcagatgagtagcttgcttctggcgtccacgttgcagtctacactagatgcaggcagatgtcccgagcctccttcgggcagccctcctgagggtccagaaatacagttagaggtgacacagagagcactcctgcggcgcgagagcgaggttttggacttaaaagaacagctagaaaagatgaaaggtgacttagaaagtaaaaatgaagaaatactacatctgaacttaaaattggacatgcagaacagccagactgctgtcagcctcagagaacttgaggaagagaacacgagcttgaaggtcatatataccagaagttctgagattgaagagctgaaagccactattgaaaatctgcaagagaatcagaaacgattacaaaaggagaaagcagaggaaattgaacaactccatgaagtcattgagaagctgcagcacgagctgtccctcatggggcctgtggtgcacgaagtcagcgacagtcaggctggcagtctgcagagcgagctgctctgctcccaggccgggggccctcgtgggcaggccctacagggcgagctcgaggctgcgctggaagccaaggaggccctgagccggctgctggctgaccaggagcgcaggcacagccaggccctggaggccctgcagcagcgcctccagggcgcagaggaggctgcggagctacagctggctgagctggagcgcaatgtagccctcagggaggctgaggtcgaagacatggcctcccggatccaggagttcgaagcggccctgaaagcaaaggaagcgacgattgccgagagaaatttagaaatcgacgctctgaaccagcggaaggcggcccactctgccgagctggaggccgtcctgttggccttggcccgcatccgccgcgccctggagcagcagcccctggcagccggggcggcgcctcccgagctgcagtggctccgagcgcagtgtgcccgcctcagccgccagctgcaggtgctgcaccagcggttcctgaggtgccaggtggagctggacaggcggcaggcccgcagagccacagctcacacacgggtgcccggggcccacccacagcctcgcatggatggtggcgccaaggcccaggtcaccggcgacgtggaggcctcccatgatgctgctttggagccggttgtccctgacccacagggtgatctgcagcctgtcctggtgacgttgaaggatgcacctctctgcaagcaagaaggcgtgatgtcagtgctcaccgtctgccagaggcagctgcagtcggagctgctcttggtgaaaaatgaaatgcgcctgagtctggaggacggcggcaagggtaaagaaaaagtactggaagattgtcagctgccgaaggtcgatctcgtagctcaggtgaaacagcttcaggaaaaactgaaccgtttgctgtattccatgaccttccagaatgtggatgctgccgacaccaaatctctgtggcccatggcctcagcacacctgttggagagcagctggagtgatgattcctgtgacggagaagagcctgacatatcaccccacatagacacatgtgatgccaatacagccacggggggtgtaactgatgttatcaaaaatcaggccatagacgcgtgtgatgccaatacaaccccagggggtgtaactgatgttatcaaaaattgggattccttgataccagatgaaatgccagattctcccattcaagaaaaatcagaatgtcaggacatgtctctttcttcaccgaccagcgtacttggtggctcccgccaccagagccacactgcagaggctgggccccggaagagcccggtcgggatgctggacctgtcttcctggagctcccctgaggtcctcaggaaggactggaccctggagccctggcccagcctccccgtgacaccccactcaggagccctgagcctgtgcagtgccgacacatccctgggggacagggcggacacctcgctgccacagacccaggggccggggctgctttgttccccaggcgtgtctgcagcagcgctggcactgcagtgggccgagtctccgccggctgacgaccaccatgtgcagaggacggctgtggagaaagatgtcgaagattttatcacaacatcctttgattctcaagaaacattaagttcacctcctcctggattagaaggaaaagctgatagaagtgagaaaagtgacggctcgggttttggagcaagactgagcccggggtcaggaggccctgaggctcaaactgctggtcctgtgacccctgcttccatctctggaaggtttcagccgctgccggaagccatgaaggagaaggaagtgcgtccgaagcacgtgaaggctttactgcagatggtgcgtgacgagagccaccagatcctggcgctgtcagaaggccttgcacccccaagcggcgagccacacccaccccggaaggaagacgagatacaggacatctcgctccatgggggaaagacgcaggaagtgcccaccgcgtgccccgattggagaggggaccttctgcaggttgtgcaagaggcctttgaaaaagagcaggagatgcagggggttgagctgcagccccgactcagtggctcagatctggggggtcacagctccctgctcgaaaggctggagaagatcatccgtgagcagggagacctgcaggaaaagtccctggagcatcttcgcttgccggaccggagcagcctgctgtccgagatccaggcgctgcgtgcccagctgcgcatgacgcacctgcagaaccaggagaagctgcagcacttgcgcacggcgctgacaagcgcagaggcgcgcgggagccagcaggagcaccagctgcgcaggcaggttgaactgctggcttataaagtagagcaggagaagtgcattgctggtgacttgcagaagacgctgagtgaagagcaagagaaggcaaacagcgtgcagaagctcctggcggcggagcagactgtagtgcgagatttgaagtccgacctctgtgagagcaggcagaagagcgaacagctgtcccggtccctctgcgaggtgcagcaggaggtcctccagctgagatccatgctgagcagtaaggagaacgagctgaaggccgcgcttcaggagctggagagtgagcaggggaaggggcgtgccctgcagagccagctggaggaggagcagctgcggcacctgcagagggagagccagagtgccaaggccctggaggagctgcgggcgtctttggagacacagcgtgctcagagca

SEQ ID NO: 3983 - protein, 3336 aa, Homo sapiens
MEVEQEQRRRKVEAGRTKLAHFRQRKTKGDSSHSEKKTAKRKGSAVDASVQEESPVTKEDSALCGGGDICKSTSCDDTPDGAGGAFAAQPEDCDGEKREDLEQLQQKQVNDHPPEQCGMFTVSDHPPEQHGMFTVGDHPPEQRGMFTVSDHPPEQHGMFTVSDHPPEQRGMFTISDHQPEQRGMFTVSDHTPEQRGIFTISDHPAEQRGMFTKECEQECELAITDLESGREDEAGLHQSQAVHGLELEALRLSLSNMHTAQLELTQANLQKEKETALTELREMLNSRRAQELALLQSRQQHELELLREQHAREKEEVVLRCGQEAAELKEKLQSEMEKNAQIVKTLKEDWESEKDLCLENLRKELSAKHQSEMEDLQNQFQKELAEQRAELEKIFQDKNQAERALRNLESHHQAAIEKLREDLQSEHGRCLEDLEFKFKESEKEKQLELENLQASYEDLKAQSQEEIRRLWSQLDSARTSRQELSELHEQLLARTSRVEDLEQLKQREKTQHESELEQLRIYFEKKLRDAEKTYQEDLTLLQQRLQGAREDALLDSVEVGLSCVGLEEKPEKGRKDHVDELEPERHKESLPRFQAELEESHRHQLEALESPLCIQHEGHVSDRCCVETSALGHEWRLEPSEGHSQELPWVHLQGVQDGDLEADTERAARVLGLETEHKVQLSLLQTELKEEIELLKIENRNLYGKLQHETRLKDDLEKVKHNLIEDHQKELNNAKQKTELMKQEFQRKETDWKVMKEELQREAEEKLTLMLLELREKAESEKQTIINKFELREAEMRQLQDQQAAQILDLERSLTEQQGRLQQLEQDLTSDDALHCSQCGREPPTAQDGELAALHVKEDCALQLMLARSRFLEERKEITEKFSAEQDAFLQEAQEQHARELQLLQERHQQQLLSVTAELEARHQAALGELTASLESKQGALLAARVAELQTKHAADLGALETRHLSSLDSLESCYLSEFQTIREEHRQALELLRADFEEQLWKKDSLHQTILTQELEKLKRKHEGELQSVRDHLRTEVSTELAGTVAHELQGVHQGEFGSEKKTALHEKEETLRLQSAQAQPFHQEEKESLSLQLQKKNHQVQQLKDQVLSLSHEIEECRSELEVLQQRRERENREGANLLSMLKADVNLSHSERGALQDALRRLLGLFGETLRAAVTLRSRIGERVGLCLDDAGAGLALSTAPALEETWSDVALPELDRTLSECAEMSSVAEISSHMRESFLMSPESVRECEQPIRRVFQSLSLAVDGLMEMALDSSRQLEEARQIHSRFEKEFSFKNEETAQVVRKHQELLECLKEESAAKAELALELHKTQGTLEGFKVETADLKEVLAGKEDSEHRLVLELESLRRQLQQAAQEQAALREECTRLWSRGEATATDAEAREAALRKEVEDLTKEQSETRKQAEKDRSALLSQMKILESELEEQLSQHRGCAKQAEAVTALEQQVASLDKHLRNQRQFMDEQAAEREHEREEFQQEIQRLEGQLRQAAKPQPWGPRDSQQAPLDGEVELLQQKLREKLDEFNELAIQKESADRQVLMQEEEIKRLEEMNINIRKKVAQLQEEVEKQKNIVKGLEQDKEVLKKQQMSSLLLASTLQSTLDAGRCPEPPSGSPPEGPEIQLEVTQRALLRRESEVLDLKEQLEKMKGDLESKNEEILHLNLKLDMQNSQTAVSLRELEEENTSLKVIYTRSSEIEELKATIENLQENQKRLQKEKAEEIEQLHEVIEKLQHELSLMGPVVHEVSDSQAGSLQSELLCSQAGGPRGQALQGELEAALEAKEALSRLLADQERRHSQALEALQQRLQGAEEAAELQLAELERNVALREAEVEDMASRIQEFEAALKAKEATIAERNLEIDALNQRKAAHSAELEAVLLALARIRRALEQQPLAAGAAPPELQWLRAQCARLSRQLQVLHQRFLRCQVELDRRQARRATAHTRVPGAHPQPRMDGGAKAQVTGDVEASHDAALEPVVPDPQGDLQPVLVTLKDAPLCKQEGVMSVLTVCQRQLQSELLLVKNEMRLSLEDGGKGKEKVLEDCQLPKVDLVAQVKQLQEKLNRLLYSMTFQNVDAADTKSLWPMASAHLLESSWSDDSCDGEEPDISPHIDTCDANTATGGVTDVIKNQAIDACDANTTPGGVTDVIKNWDSLIPDEMPDSPIQEKSECQDMSLSSPTSVLGGSRHQSHTAEAGPRKSPVGMLDLSSWSSPEVLRKDWTLEPWPSLPVTPHSGALSLCSADTSLGDRADTSLPQTQGPGLLCSPGVSAAALALQWAESPPADDHHVQRTAVEKDVEDFITTSFDSQETLSSPPPGLEGKADRSEKSDGSGFGARLSPGSGGPEAQTAGPVTPASISGRFQPLPEAMKEKEVRPKHVKALLQMVRDESHQILALSEGLAPPSGEPHPPRKEDEIQDISLHGGKTQEVPTACPDWRGDLLQVVQEAFEKEQEMQGVELQPRLSGSDLGGHSSLLERLEKIIREQGDLQEKSLEHLRLPDRSSLLSEIQALRAQLRMTHLQNQEKLQHLRTALTSAEARGSQQEHQLRRQVELLAYKVEQEKCIAGDLQKTLSEEQEKANSVQKLLAAEQTVVRDLKSDLCESRQKSEQLSRSLCEVQQEVLQLRSMLSSKENELKAALQELESEQGKGRALQSQLEEEQLRHLQRESQSAKALEELRASLETQRAQSSRLCVALKHEQTAKDNLQKELRIEHSRCEALLAQERSQLSELQKDLAAEKSRTLELSEALRHERLLTEQLSQRTQEACVHQDTQAHHALLQKLKEEKSRVVDLQAMLEKVQQQALHSQQQLEAEAQKHCEALRREKEVSATLKSTVEALHTQKRELRCSLEREREKPAWLQAELEQSHPRLKEQEGRKAARRSAEARQSPAAAEQWRKWQRDKEKLRELELQRQRDLHKIKQLQQTVRDLESKDEVPGSRLHLGSARRAAGSDADHLREQQRELEAMRQRLLSAARLLTSFTSQAVDRTVNDWTSSNEKAVMSLLHTLEELKSDLSRPTSSQKKMAAELQFQFVDVLLKDNVSLTKALSTVTQEKLELSRAVSKLEKLLKHHLQKGCSPSRSERSAWKPDETAPQSSLRRPDPGRLPPAASEEAHTSNVKMEKLYLHYLRAESFRKALIYQKKYLLLLIGGFQDSEQETLSMIAHLGVFPSKAERKITSRPFTRFRTAVRVVIAILRLRFLVKKWQEVDRKGALAQGKAPRPGPRARQPQSPPRTRESPPTRDVPSGHTRDPARGRRLAAAASPHSGGRATPSPNSRLERSLTASQDPEHSLTEYIHHLEVIQQRLGGVLPDSTSKKSCHPMIKQ

SEQ ID NO: 3984 - DNA, 5936 bp, Homo sapiens
gctgtcctggccgcgcccctgtcccgccgcctcccgctcctcgcctggcggatgtaggttgttggcctgaggggagctacgtagccgaggtttgcgctgccgccgccaggcccggtccggttccagcctctgcccggacgctagccggcctggccatggctgaccgcgggtgcccgctggaggcggcgccgctgcctgccgaggtgcgggagagcctggctgagctggagctggagctgtcggaaggtgacatcactcaaaaaggatatgaaaagaaaagggcaaagctgcttgcacgttatataccgcttattcaaggaatagacccatctctgcaagcagagaatagaattcctgggccctcacaaaccacggccgctgcacccaagcagcagaagtctcggcccaccgcctcgagggatgagcgcttccggtcagatgtccacactgaagccgtgcaagcagctttggccaaatacaaagagaggaagatgcctatgccttcgaagagacgttctgtccttgtgcattcgtctgtggaaacctacacccctccagacacgtcgtctgcctcagaagatgagggctctttacggcgacccgggcgactcacctccactccgctccagagccattccagcgtcgagccctggctcgaccgggtcattcagggctcgtccacctcatcctctgcatcctccacctcatctcacccgggagggagacccaccactgctcccagtgctgcagccacgccgggggccgccgctaccactgcactcgcaggcctcgaggcccacacccacatagatctgcattctgcccctcctgatgtcaccacgggcctcgtggagcattcgtactttgagcgtccacaggtggcttctgtgagaagtgttcctcgggggtgcagcgggagcatgctggaaacagcagatggtgtccctgtgaacagcagagtgtcctccaaaatccagcagcttctgaacaccctgaagaggccaaagcgccctccactgaaggagttctttgtggatgattttgaggaattgttggaagttcagcaaccagatccaaatcagccaaagcctgagggaagcgagacgagtgtgctgagaggggagcctctcactgcaggtgtcccccgaccgccgtcgctgttggccaccttgcagcgctggggcacaacacagcccaaatccccctgtctgactgccttggatacaactgggaaagccgtctacactctcacctatggtaaactttggagtcggagtttaaaactagcttatactctacttaataaactgacaagtaagaatgaacctctacttaaacctggagacagagtggcgctcgtgtttccgaatagtgaccctgtgatgttcatggttgcattttatgggtgtctcctggcagagctggttcctgtccccatagaagtgccattaacaagaaaggatgcaggcagccagcaggttgggtttctgctgggcagctgtggagtcttcttggccctgaccacagacgcttgtcagaaaggcctccccaaggcacagacaggagaggtggcagctttcaaaggttggcccccgctctcctggctagtgattgatgggaagcatctagccaagcccccaaaggactggcaccctctggcccaggacacagggactgggactgcctacattgagtataaaaccagcaaagaaggcagtacggtgggggtcacagtgtcccacgcatccctgctggcacagtgccgggctctgacccaggcgtgcgggtactcagaagctgaaacattaacaaacgtgctggatttcaaaagggatgctggtctgtggcatggcgtgttaacaagcgtcatgaacaggatgcacgtggtcagcgtcccctacgcgctgatgaaggcgaacccactctcctggatccagaaagtgtgcttctataaagctcgggccgcgctggtgaagtcgcgagacatgcactggtctctcctagctcagcggggccagagggacgtcagcctcagctcactgcgcatgctgattgtggccgatggtgccaacccgtggtcgatctcctcctgtgacgccttcctcaacgtcttccagtccagaggtctgaggccagaggtcatctgtccttgtgcaagttctcctgaggcgctgactgtcgccatccgcaggccacctgatctgggaggaccacctccaagaaaagcagtcctgtcgatgaacggtctaagttatggtgttatcagagtggatactgaagaaaagttgtcagtccttactgttcaggacgttggtcaggtgatgcctggagctaatgtatgtgttgtgaagttagaaggtaccccttatctttgtaaaactgatgaagtgggagaaatatgcgtcagttccagtgcaactggcacagcgtactatggattgcttggaatcacgaagaatgtgtttgaggcagttccggtcaccacaggaggagcacccatctttgacaggccattcaccaggacaggcctgctgggcttcatcgggcctgacaacctggtcttcatcgtgggcaaactggacgggctgatggtcactggagttcgcagacacaatgcagatgacgttgtggccaccgcactggccgtggagcccatgaagtttgtctacagaggcaggatcgctgtgttctctgtgaccgtgctgcacgacgaccggattgtcctggtggctgagcagcggccggatgcctcggaggaggacagcttccagtggatgagccgtgtgctgcaggccattgatagcatccaccaggtgggcgtgtactgtctggccctggttcctgccaacaccttgcccaaggctcctctcggagggattcacatttctgaaaccaaacagcgctttctggaagggacgctgcacccgtgtaatgtgctgatgtgccctcacacctgtgttaccaacctccccaaacctcgtcagaaacaaccagaggttggaccagcctcaatgatcgtggggaacctggttgctgggaagagaatcgctcaggcttccgggagagagctcgcccacctggaggacagcgaccaggcacggaagttcctgttcctggctgacgtgctgcagtggcgtgcccacaccactcctgaccacccgctgttcttgctgctgaacgccaagggcaccgtcacaagcactgcaacctgtgtccagctgcacaaaagggctgagagagtggccgcggctctgatggagaagggaagactgagtgttggggaccatgtggctctggtctacccaccaggggtggacctcattgccgcgttctatggctgcttgtactgtggctgcgtgcctgtcaccgtgcggcccccgcaccctcagaacctcggcaccacactgcccaccgtcaagatgatcgtggaggtcagcaagtctgcatgcgtcctcaccacgcaggctgtcacacggctgctcaggtccaaggaggctgctgctgccgtggacatcaggacctggcccaccatcctagacacagatgacatcccaaaaaagaagatagcaagcgttttcaggcccccctcccccgatgtcctcgcatacttggacttcagcgtgtcaaccactgggatattagcgggagtgaagatgtcgcacgcggccacaagcgccttatgccgctccataaagctgcagtgtgagctgtacccctcgcggcagatcgccatctgcctcgacccctactgtggccttggttttgccctgtggtgtctgtgcagtgtctactcgggacaccaatcagtgctggtgcccccgctggagctggagagcaacgtgtccctgtggctgtcggccgtcagccagtacaaggcccgcgtcaccttctgctcctactctgtgatggagatgtgcaccaagggcctaggcgcacagacgggtgtcctcaggatgaagggggtgaacctgtcatgtgtgcgcacgtgcatggtggtcgccgaggagcggcccaggattgcgctgacccagtccttctccaagctcttcaaggacctgggcctgccggcccgcgccgtaagcaccacgttcgggtgcagggtcaacgtggccatctgcctccagggcacagctggcccggaccccacaaccgtctacgtggacatgcgggcactgcgccatgacagggttcgtttggtagaacggggttctccgcacagcctgccattgatggagtctggaaagatcctccccggcgtgaaggtcatcatcgcacacaccgagaccaaaggacccttgggagactcacacctgggagagatctgggtaagcagcccccacaatgccaccgggtactacaccgtttacggggaggaggcgcttcatgccgaccacttcagtgcccggctgagttttggagacacacagaccatctgggcaaggaccggctaccttggcttccttcggcgaacagagctcactgatgccagtggagggcggcacgatgcactgtatgtggttgggtctctggatgaaactctggagctcagaggcatgcggtaccaccccatcgacattgagacctctgtcatccgagcacacaggagcatcgctgagtgtgccgtattcacctggaccaacctgctggtggtggtggtggagctggatgggctagagcaggatgccctggacctggtggccctggtgaccaacgtggtgctggaggagcactacctggtcgtgggagtggtggtcatcgtggacccaggggtgatccctatcaactctcggggtgagaagcagcgcatgcacctgcgggacggcttcctggctgaccagctggaccccatctatgtcgcctacaacatgtgagcgcagcacaccggcccaggtgccggagatgaatgagccccagcagtccaaggtgtgatgtgggaagacaccgcagagctcactcaccgggactcgcccttcctgtgctcttacagatccctctcaacaatccccgcatctccttttagaaagcacttcctgaattatttaaagaaatattttgaatctgccaagtacatttacaaaaacacggatgctggtattttaacagatggagagacaaggaaaggaaaggaaaggcctggcatgggcattgtgaggaatcacaggcaccgaggttgttctctgctgtactgcaagtttgcactttctttaggctaaaaatatagttcctgatttttaaaattcagttatttattcccacttcaaatgacaagttcatatatagaatttacgggagaaacttgagaccatttacggggagaaacttgattctgggaagatagcagagtacaaaccagctgcctcacttctgtttcacagggaggctgatggaaaaaggaagcaagctggacccatcctccctgctcacagagggcactgtggtcacacacagtgcctcctctgccagttcctttattgaaagaggtgtgctggctggccacggtggcttacacctgtaatcccagcactttgggaggccgaggcgagcagatcacgaggtcaggagaccgagaccatcctggctaacatggtgaaaccctgtctctactaaaaatacaaaaaattagccgggtgtggtggtgggcgcctgtagtcccagctacttgggaggctgaggcaggagaatggtatgaaccagggaggcggagcttgcagtgagccgagatcacgctactgcactccagcctgggtgacagcacgagatgccgtcttaaaaaaacaaaaaagaggtgtgctgcttgtcagcatgtattgtcacggacactcaataagtgccattttggactgtcaaatttagatgctttgtttcagaaagataagccagcatttagttttaaatcactttcctggtttgtaacttgatgctgtttagttaaattg

SEQ ID NO: 3985 - protein, 1571 aa, Homo sapiens
MADRGCPLEAAPLPAEVRESLAELELELSEGDITQKGYEKKRAKLLARYIPLIQGIDPSLQAENRIPGPSQTTAAAPKQQKSRPTASRDERFRSDVHTEAVQAALAKYKERKMPMPSKRRSVLVHSSVETYTPPDTSSASEDEGSLRRPGRLTSTPLQSHSSVEPWLDRVIQGSSTSSSASSTSSHPGGRPTTAPSAAATPGAAATTALAGLEAHTHIDLHSAPPDVTTGLVEHSYFERPQVASVRSVPRGCSGSMLETADGVPVNSRVSSKIQQLLNTLKRPKRPPLKEFFVDDFEELLEVQQPDPNQPKPEGSETSVLRGEPLTAGVPRPPSLLATLQRWGTTQPKSPCLTALDTTGKAVYTLTYGKLWSRSLKLAYTLLNKLTSKNEPLLKPGDRVALVFPNSDPVMFMVAFYGCLLAELVPVPIEVPLTRKDAGSQQVGFLLGSCGVFLALTTDACQKGLPKAQTGEVAAFKGWPPLSWLVIDGKHLAKPPKDWHPLAQDTGTGTAYIEYKTSKEGSTVGVTVSHASLLAQCRALTQACGYSEAETLTNVLDFKRDAGLWHGVLTSVMNRMHVVSVPYALMKANPLSWIQKVCFYKARAALVKSRDMHWSLLAQRGQRDVSLSSLRMLIVADGANPWSISSCDAFLNVFQSRGLRPEVICPCASSPEALTVAIRRPPDLGGPPPRKAVLSMNGLSYGVIRVDTEEKLSVLTVQDVGQVMPGANVCVVKLEGTPYLCKTDEVGEICVSSSATGTAYYGLLGITKNVFEAVPVTTGGAPIFDRPFTRTGLLGFIGPDNLVFIVGKLDGLMVTGVRRHNADDVVATALAVEPMKFVYRGRIAVFSVTVLHDDRIVLVAEQRPDASEEDSFQWMSRVLQAIDSIHQVGVYCLALVPANTLPKAPLGGIHISETKQRFLEGTLHPCNVLMCPHTCVTNLPKPRQKQPEVGPASMIVGNLVAGKRIAQASGRELAHLEDSDQARKFLFLADVLQWRAHTTPDHPLFLLLNAKGTVTSTATCVQLHKRAERVAAALMEKGRLSVGDHVALVYPPGVDLIAAFYGCLYCGCVPVTVRPPHPQNLGTTLPTVKMIVEVSKSACVLTTQAVTRLLRSKEAAAAVDIRTWPTILDTDDIPKKKIASVFRPPSPDVLAYLDFSVSTTGILAGVKMSHAATSALCRSIKLQCELYPSRQIAICLDPYCGLGFALWCLCSVYSGHQSVLVPPLELESNVSLWLSAVSQYKARVTFCSYSVMEMCTKGLGAQTGVLRMKGVNLSCVRTCMVVAEERPRIALTQSFSKLFKDLGLPARAVSTTFGCRVNVAICLQGTAGPDPTTVYVDMRALRHDRVRLVERGSPHSLPLMESGKILPGVKVIIAHTETKGPLGDSHLGEIWVSSPHNATGYYTVYGEEALHADHFSARLSFGDTQTIWARTGYLGFLRRTELTDASGGRHDALYVVGSLDETLELRGMRYHPIDIETSVIRAHRSIAECAVFTWTNLLVVVVELDGLEQDALDLVALVTNVVLEEHYLVVGVVVIVDPGVIPINSRGEKQRMHLRDGFLADQLDPIYVAYNM

SEQ ID NO: 3986 - DNA, 3042 bp, Homo sapiens
gctgtcctggccgcgcccctgtcccgccgcctcccgctcctcgcctggcggatgtaggttgttggcctgaggggagctacgtagccgaggtttgcgctgccgccgccaggcccggtccggttccagcctctgcccggacgctagccggcctggccatggctgaccgcgggtgcccgctggaggcggcgccgctgcctgccgaggtgcgggagagcctggctgagctggagctggagctgtcggaaggtgacatcactcaaaaaggatatgaaaagaaaagggcaaagctgcttgcacgttatataccgcttattcaaggaatagacccatctctgcaagcagagaatagaattcctgggccctcacaaaccacggccgctgcacccaagcagcagaagtctcggcccaccgcctcgagggatgagcgcttccggtcagatgtccacactgaagccgtgcaagcagctttggccaaatacaaagagaggaagatgcctatgccttcgaagagacgttctgtccttgtgcattcgtctgtggaaacctacacccctccagacacgtcgtctgcctcagaagatgagggctctttacggcgacccgggcgactcacctccactccgctccagagccattccagcgtcgagccctggctcgaccgggtcattcagggctcgtccacctcatcctctgcatcctccacctcatctcacccgggagggagacccaccactgctcccagtgctgcagccacgccgggggccgccgctaccactgcactcgcaggcctcgaggcccacacccacatagatctgcattctgcccctcctgatgtcaccacgggcctcgtggagcattcgtactttgagcgtccacaggtggcttctgtgagaagtgttcctcgggggtgcagcgggagcatgctggaaacagcagatggtgtccctgtgaacagcagagtgtcctccaaaatccagcagcttctgaacaccctgaagaggccaaagcgccctccactgaaggagttctttgtggatgattttgaggaattgttggaagttcagcaaccagatccaaatcagccaaagcctgagggaagcgagacgagtgtgctgagaggggagcctctcactgcaggtgtcccccgaccgccgtcgctgttggccaccttgcagcgctggggcacaacacagcccaaatccccctgtctgactgccttggatacaactgggaaagccgtctacactctcacctatggtaaactttggagtcggagtttaaaactagcttatactctacttaataaactgacaagtaagaatgaacctctacttaaacctggagacagagtggcgctcgtgtttccgaatagtgaccctgtgatgttcatggttgcattttatgggtgtctcctggcagagctggttcctgtccccatagaagtgccattaacaagaaaggatgcaggcagccagcaggttgggtttctgctgggcagctgtggagtcttcttggccctgaccacagacgcttgtcagaaaggcctccccaaggcacagacaggagaggtggcagctttcaaaggttggcccccgctctcctggctagtgattgatgggaagcatctagccaagcccccaaaggactggcaccctctggcccaggacacagggactgggactgcctacattgagtataaaaccagcaaagaaggcagtacggtgggggtcacagtgtcccacgcatccctgctggcacagtgccgggctctgacccaggcgtgcgggtactcagaagctgaaacattaacaaacgtgctggatttcaaaagggatgctggtctgtggcatggcgtgttaacaagcgtcatgaacaggatgcacgtggtcagcgtcccctacgcgctgatgaaggcgaacccactctcctggatccagaaagtgtgcttctataaagctcgggccgcgctggtgaagtcgcgagacatgcactggtctctcctagctcagcggggccagagggacgtcagcctcagctcactgcgcatgctgattgtggccgatggtgccaacccgtggtcgatctcctcctgtgacgccttcctcaacgtcttccagtccagaggtctgaggccagaggtcatctgtccttgtgcaagttctcctgaggcgctgactgtcgccatccgcaggccacctgatctgggaggaccacctccaagaaaagcagtcctgtcgatgaacggtctaagttatggtgttatcagagtggatactgaagaaaagttgtcagtccttactgttcaggacgttggtcaggtgatgcctggagctaatgtatgtgttgtgaagttagaaggtaccccttatctttgtaaaactgatgaagtgggagaaatatgcgtcagttccagtgcaactggcacagcgtactatggattgcttggaatcacgaagaatgtgtttgaggcagttccggtcaccacaggaggagcacccatctttgacaggccattcaccaggacaggcctgctgggcttcatcgggcctgacaacctggtcttcatcgtgggcaaactggacgggctgatggtcactggagttcgcagacacaatgcagatgacgttgtggccaccgcactggccgtggagcccatgaagtttgtctacagaggcaggatcgctgtgttctctgtgaccgtgctgcacgacgaccggattgtcctggtggctgagcagcggccggatgcctcggaggaggacagcttccagtggatgagccgtgtgctgcaggtgggcgccccggcacggcctatggttcggtgaatctcccaagctggcacccccactccactccaagtgccaagtggttggcttgtcccgcccggtcctccctggctccagctttgtttatctgtatttttcattgcaaattgacaaattacagctgtatgtatttacgggatacaaagtgatgttataatttatgaatacaatatagaataattaatatatccaaaaaaaaaaaaaaaaaaaaaaaaaa

SEQ ID NO: 3987 - protein, 889 aa, Homo sapiens
MADRGCPLEAAPLPAEVRESLAELELELSEGDITQKGYEKKRAKLLARYIPLIQGIDPSLQAENRIPGPSQTTAAAPKQQKSRPTASRDERFRSDVHTEAVQAALAKYKERKMPMPSKRRSVLVHSSVETYTPPDTSSASEDEGSLRRPGRLTSTPLQSHSSVEPWLDRVIQGSSTSSSASSTSSHPGGRPTTAPSAAATPGAAATTALAGLEAHTHIDLHSAPPDVTTGLVEHSYFERPQVASVRSVPRGCSGSMLETADGVPVNSRVSSKIQQLLNTLKRPKRPPLKEFFVDDFEELLEVQQPDPNQPKPEGSETSVLRGEPLTAGVPRPPSLLATLQRWGTTQPKSPCLTALDTTGKAVYTLTYGKLWSRSLKLAYTLLNKLTSKNEPLLKPGDRVALVFPNSDPVMFMVAFYGCLLAELVPVPIEVPLTRKDAGSQQVGFLLGSCGVFLALTTDACQKGLPKAQTGEVAAFKGWPPLSWLVIDGKHLAKPPKDWHPLAQDTGTGTAYIEYKTSKEGSTVGVTVSHASLLAQCRALTQACGYSEAETLTNVLDFKRDAGLWHGVLTSVMNRMHVVSVPYALMKANPLSWIQKVCFYKARAALVKSRDMHWSLLAQRGQRDVSLSSLRMLIVADGANPWSISSCDAFLNVFQSRGLRPEVICPCASSPEALTVAIRRPPDLGGPPPRKAVLSMNGLSYGVIRVDTEEKLSVLTVQDVGQVMPGANVCVVKLEGTPYLCKTDEVGEICVSSSATGTAYYGLLGITKNVFEAVPVTTGGAPIFDRPFTRTGLLGFIGPDNLVFIVGKLDGLMVTGVRRHNADDVVATALAVEPMKFVYRGRIAVFSVTVLHDDRIVLVAEQRPDASEEDSFQWMSRVLQVGAPARPMVR

SEQ ID NO: 3988 - DNA, 2859 bp, Homo sapiens
gctgtcctggccgcgcccctgtcccgccgcctcccgctcctcgcctggcggatgtaggttgttggcctgaggggagctacgtagccgaggtttgcgctgccgccgccaggcccggtccggttccagcctctgcccggacgctagccggcctggccatggctgaccgcgggtgcccgctggaggcggcgccgctgcctgccgaggtgcgggagagcctggctgagctggagctggagctgtcggaaggtgacatcactcaaaaaggatatgaaaagaaaagggcaaagctgcttgcacgttatataccgcttattcaaggaatagacccatctctgcaagcagagaatagaattcctgggccctcacaaaccacggccgctgcacccaagcagcagaagtctcggcccaccgcctcgagggatgagcgcttccggtcagatgtccacactgaagccgtgcaagcagctttggccaaatacaaagagaggaagatgcctatgccttcgaagagacgttctgtccttgtgcattcgtctgtggaaacctacacccctccagacacgtcgtctgcctcagaagatgagggctctttacggcgacccgggcgactcacctccactccgctccagagccattccagcgtcgagccctggctcgaccgggtcattcagggctcgtccacctcatcctctgcatcctccacctcatctcacccgggagggagacccaccactgctcccagtgctgcagccacgccgggggccgccgctaccactgcactcgcaggcctcgaggcccacacccacatagatctgcattctgcccctcctgatgtcaccacgggcctcgtggagcattcgtactttgagcgtccacaggtggcttctgtgagaagtgttcctcgggggtgcagcgggagcatgctggaaacagcagatggtgtccctgtgaacagcagagtgtcctccaaaatccagcagcttctgaacaccctgaagaggccaaagcgccctccactgaaggagttctttgtggatgattttgaggaattgttggaagttcagcaaccagatccaaatcagccaaagcctgagggaagcgagacgagtgtgctgagaggggagcctctcactgcaggtgtcccccgaccgccgtcgctgttggccaccttgcagcgctggggcacaacacagcccaaatccccctgtctgactgccttggatacaactgggaaagccgtctacactctcacctatggtaaactttggagtcggagtttaaaactagcttatactctacttaataaactgacaagtaagaatgaacctctacttaaacctggagacagagtggcgctcgtgtttccgaatagtgaccctgtgatgttcatggttgcattttatgggtgtctcctggcagagctggttcctgtccccatagaagtgccattaacaagaaaggatgcaggcagccagcaggttgggtttctgctgggcagctgtggagtcttcttggccctgaccacagacgcttgtcagaaaggcctccccaaggcacagacaggagaggtggcagctttcaaaggttggcccccgctctcctggctagtgattgatgggaagcatctagccaagcccccaaaggactggcaccctctggcccaggacacagggactgggactgcctacattgagtataaaaccagcaaagaaggcagtacggtgggggtcacagtgtcccacgcatccctgctggcacagtgccgggctctgacccaggcgtgcgggtactcagaagctgaaacattaacaaacgtgctggatttcaaaagggatgctggtctgtggcatggcgtgttaacaagcgtcatgaacaggatgcacgtggtcagcgtcccctacgcgctgatgaaggcgaacccactctcctggatccagaaagtgtgcttctataaagctcgggccgcgctggtgaagtcgcgagacatgcactggtctctcctagctcagcggggccagagggacgtcagcctcagctcactgcgcatgctgattgtggccgatggtgccaacccgtggtcgatctcctcctgtgacgccttcctcaacgtcttccagtccagaggtctgaggccagaggtcatctgtccttgtgcaagttctcctgaggcgctgactgtcgccatccgcaggccacctgatctgggaggaccacctccaagaaaagcagtcctgtcgatgaacggtctaagttatggtgttatcagagtggatactgaagaaaagttgtcagtccttactgttcaggacgttggtcaggtgatgcctggagctaatgtatgtgttgtgaagttagaaggtaccccttatctttgtaaaactgatgaagtgggagaaatatgcgtcagttccagtgcaactggcacagcgtactatggattgcttggaatcacgaagaatgtgtttgaggcagttccggtcaccacaggaggagcacccatctttgacaggccattcaccaggacaggcctgctgggcttcatcgggcctgacaacctggtcttcatcgtgggcaaactggacgggctgatggtcactggagttcgcagacacaatgcagatgacgttgtggccaccgcactggccgtggagcccatgaagtttgtctacagaggcaggtgatgcgctgcggacccccacgccgggagtagattccttcatttgcagctcgggaagtctttgtgcagtagatggaaagcccagcaaacttgaattcacaaagcctaaaaattgttgtacatcagaaaactcctaaagtaaaaggaaaatatttgcagcaatgaaaaaaaaaaaaaaaaaa

SEQ ID NO: 3989 - protein, 841 aa, Homo sapiens
MADRGCPLEAAPLPAEVRESLAELELELSEGDITQKGYEKKRAKLLARYIPLIQGIDPSLQAENRIPGPSQTTAAAPKQQKSRPTASRDERFRSDVHTEAVQAALAKYKERKMPMPSKRRSVLVHSSVETYTPPDTSSASEDEGSLRRPGRLTSTPLQSHSSVEPWLDRVIQGSSTSSSASSTSSHPGGRPTTAPSAAATPGAAATTALAGLEAHTHIDLHSAPPDVTTGLVEHSYFERPQVASVRSVPRGCSGSMLETADGVPVNSRVSSKIQQLLNTLKRPKRPPLKEFFVDDFEELLEVQQPDPNQPKPEGSETSVLRGEPLTAGVPRPPSLLATLQRWGTTQPKSPCLTALDTTGKAVYTLTYGKLWSRSLKLAYTLLNKLTSKNEPLLKPGDRVALVFPNSDPVMFMVAFYGCLLAELVPVPIEVPLTRKDAGSQQVGFLLGSCGVFLALTTDACQKGLPKAQTGEVAAFKGWPPLSWLVIDGKHLAKPPKDWHPLAQDTGTGTAYIEYKTSKEGSTVGVTVSHASLLAQCRALTQACGYSEAETLTNVLDFKRDAGLWHGVLTSVMNRMHVVSVPYALMKANPLSWIQKVCFYKARAALVKSRDMHWSLLAQRGQRDVSLSSLRMLIVADGANPWSISSCDAFLNVFQSRGLRPEVICPCASSPEALTVAIRRPPDLGGPPPRKAVLSMNGLSYGVIRVDTEEKLSVLTVQDVGQVMPGANVCVVKLEGTPYLCKTDEVGEICVSSSATGTAYYGLLGITKNVFEAVPVTTGGAPIFDRPFTRTGLLGFIGPDNLVFIVGKLDGLMVTGVRRHNADDVVATALAVEPMKFVYRGR

SEQ ID NO: 3990 - DNA, 2909 bp, Homo sapiens
gctgtcctggccgcgcccctgtcccgccgcctcccgctcctcgcctggcggatgtaggttgttggcctgaggggagctacgtagccgaggtttgcgctgccgccgccaggcccggtccggttccagcctctgcccggacgctagccggcctggccatggctgaccgcgggtgcccgctggaggcggcgccgctgcctgccgaggtgcgggagagcctggctgagctggagctggagctgtcggaaggtgacatcactcaaaaaggatatgaaaagaaaagggcaaagctgcttgcacgttatataccgcttattcaaggaatagacccatctctgcaagcagagaatagaattcctgggccctcacaaaccacggccgctgcacccaagcagcagaagtctcggcccaccgcctcgagggatgagcgcttccggtcagatgtccacactgaagccgtgcaagcagctttggccaaatacaaagagaggaagatgcctatgccttcgaagagacgttctgtccttgtgcattcgtctgtggaaacctacacccctccagacacgtcgtctgcctcagaagatgagggctctttacggcgacccgggcgactcacctccactccgctccagagccattccagcgtcgagccctggctcgaccgggtcattcagggctcgtccacctcatcctctgcatcctccacctcatctcacccgggagggagacccaccactgctcccagtgctgcagccacgccgggggccgccgctaccactgcactcgcaggcctcgaggcccacacccacatagatctgcattctgcccctcctgatgtcaccacgggcctcgtggagcattcgtactttgagcgtccacaggtggcttctgtgagaagtgttcctcgggggtgcagcgggagcatgctggaaacagcagatggtgtccctgtgaacagcagagtgtcctccaaaatccagcagcttctgaacaccctgaagaggccaaagcgccctccactgaaggagttctttgtggatgattttgaggaattgttggaagttcagcaaccagatccaaatcagccaaagcctgagggaagcgagacgagtgtgctgagaggggagcctctcactgcaggtgtcccccgaccgccgtcgctgttggccaccttgcagcgctggggcacaacacagcccaaatccccctgtctgactgccttggatacaactgggaaagccgtctacactctcacctatggtaaactttggagtcggagtttaaaactagcttatactctacttaataaactgacaagtaagaatgaacctctacttaaacctggagacagagtggcgctcgtgtttccgaatagtgaccctgtgatgttcatggttgcattttatgggtgtctcctggcagagctggttcctgtccccatagaagtgccattaacaagaaaggatgcaggcagccagcaggttgggtttctgctgggcagctgtggagtcttcttggccctgaccacagacgcttgtcagaaaggcctccccaaggcacagacaggagaggtggcagctttcaaaggttggcccccgctctcctggctagtgattgatgggaagcatctagccaagcccccaaaggactggcaccctctggcccaggacacagggactgggactgcctacattgagtataaaaccagcaaagaaggcagtacggtgggggtcacagtgtcccacgcatccctgctggcacagtgccgggctctgacccaggcgtgcgggtactcagaagctgaaacattaacaaacgtgctggatttcaaaagggatgctggtctgtggcatggcgtgttaacaagcgtcatgaacaggatgcacgtggtcagcgtcccctacgcgctgatgaaggcgaacccactctcctggatccagaaagtgtgcttctataaagctcgggccgcgctggtgaagtcgcgagacatgcactggtctctcctagctcagcggggccagagggacgtcagcctcagctcactgcgcatgctgattgtggccgatggtgccaacccgtggtcgatctcctcctgtgacgccttcctcaacgtcttccagtccagaggtctgaggccagaggtcatctgtccttgtgcaagttctcctgaggcgctgactgtcgccatccgcaggccacctgatctgggaggaccacctccaagaaaagcagtcctgtcgatgaacggtctaagttatggtgttatcagagtggatactgaagaaaagttgtcagtccttactgttcaggacgttggtcaggtgatgcctggagctaatgtatgtgttgtgaagttagaaggtaccccttatctttgtaaaactgatgaagtgggagaaatatgcgtcagttccagtgcaactggcacagcgtactatggattgcttggaatcacgaagaatgtgtttgaggcagttccggtcaccacaggaggagcacccatctttgacaggccattcaccaggacaggcctgctgggcttcatcgggcctgtgagtatgtcctcctgtaccagcactggcagtcagagaaggtagggggtgtggctaagggacacctcgttgcagccccacccttgtcctggccgttcctgacctcccatgtggccttggtcggtggcgctgacctccctgcccatcaccctacctgtgtgcagggccatccacacctccgagactggtgcacagtcctgcacacaggcctgagtcgggggtccccggggtggatgaggatgttttgctttttatatggagtggcaggtttgtgagtattcattatatcattctttaccattttggatgtctaaactattcaaaaataaatgcttctatttgtaaaaaaaaaaaaaaaaa

SEQ ID NO: 3991 - protein, 812 aa, Homo sapiens
MADRGCPLEAAPLPAEVRESLAELELELSEGDITQKGYEKKRAKLLARYIPLIQGIDPSLQAENRIPGPSQTTAAAPKQQKSRPTASRDERFRSDVHTEAVQAALAKYKERKMPMPSKRRSVLVHSSVETYTPPDTSSASEDEGSLRRPGRLTSTPLQSHSSVEPWLDRVIQGSSTSSSASSTSSHPGGRPTTAPSAAATPGAAATTALAGLEAHTHIDLHSAPPDVTTGLVEHSYFERPQVASVRSVPRGCSGSMLETADGVPVNSRVSSKIQQLLNTLKRPKRPPLKEFFVDDFEELLEVQQPDPNQPKPEGSETSVLRGEPLTAGVPRPPSLLATLQRWGTTQPKSPCLTALDTTGKAVYTLTYGKLWSRSLKLAYTLLNKLTSKNEPLLKPGDRVALVFPNSDPVMFMVAFYGCLLAELVPVPIEVPLTRKDAGSQQVGFLLGSCGVFLALTTDACQKGLPKAQTGEVAAFKGWPPLSWLVIDGKHLAKPPKDWHPLAQDTGTGTAYIEYKTSKEGSTVGVTVSHASLLAQCRALTQACGYSEAETLTNVLDFKRDAGLWHGVLTSVMNRMHVVSVPYALMKANPLSWIQKVCFYKARAALVKSRDMHWSLLAQRGQRDVSLSSLRMLIVADGANPWSISSCDAFLNVFQSRGLRPEVICPCASSPEALTVAIRRPPDLGGPPPRKAVLSMNGLSYGVIRVDTEEKLSVLTVQDVGQVMPGANVCVVKLEGTPYLCKTDEVGEICVSSSATGTAYYGLLGITKNVFEAVPVTTGGAPIFDRPFTRTGLLGFIGPVSMSSCTSTGSQRR

SEQ ID NO: 3992 - DNA, 1095 bp, Homo sapiens
tgccgcccaggacccgcagcagagacgacgcctgcagcaaggagaccaggaaggggtgagacaaggaagaggatgtctgagctggagaaggccatggtggccctcatcgacgttttccaccaatattctggaagggagggagacaagcacaagctgaagaaatccgaactcaaggagctcatcaacaatgagctttcccatttcttagaggaaatcaaagagcaggaggttgtggacaaagtcatggaaacactggacaatgatggagacggcgaatgtgacttccaggaattcatggcctttgttgccatggttactactgcctgccacgagttctttgaacatgagtgagattagaaagcagccaaacctttcctgtaacagagacggtcatgcaagaaagcagacagcaagggcttgcagcctagtaggagctgagctttccagccgtgttgtagctaattaggaagcttgatttgctttgtgattgaaaaattgaaaacctctttccaaaggctgttttaacggcctgcatcattctttctgctatattaggcctgtgtgtaagctgactggccccagggactcttgttaacagtaacttaggagtcaggtctcagtgataaagcgtgcaccgtgcagcccgccatggccgtgtagaccctaacccggagggaaccctgactacagaaattaccccggggcacccttaaaacttccactacctttaaaaaacaaagccttatccagcattatttgaaaacactgctgttctttaaatgcgttcctcatccatgcagataacagctggttggccggtgtggccctgcaagggcgtggtggcttcggcctgcttcccgggatgcgcctgatcaccaggtgaacgctcagcgctggcagcgtcctggaaaaagcaactccatcagaactcgcaatccgagccagctctgggggctccagcgtggcctccgtgacccatgcgattcaagtcgcggctgcaggatccttgcctccaacgtgcctccagcacatgcggcttccgagggcactaccgggggctctgagccaccgcgagggcctgcgttcaataaaaag

SEQ ID NO: 3993 - protein, 92 aa, Homo sapiens
MSELEKAMVALIDVFHQYSGREGDKHKLKKSELKELINNELSHFLEEIKEQEVVDKVMETLDNDGDGECDFQEFMAFVAMVTTACHEFFEHE

SEQ ID NO: 3994 - DNA, 641 bp, Homo sapiens
gagtcagagctctgcatgtctgcaccatgtcctgggctcctgtcctgctcatgctgtttgtctactgcacaggttgtggtcctcagccggtgctgcatcagccgccggccatgtcctcggcccttggaaccacaatccgcctcacctgcaccctgaggaacgaccatgacatcggtgtgtacagcgtctactggtaccagcagaggccgggccaccctcccaggttcctgctgagatatttctcacaatcagacaagagccagggcccccaggtcccccctcgcttctctggatccaaagatgtggccaggaacagggggtatttgagcatctctgagctgcagcctgaggacgaggctatgtattactgtgctatgggggcccgcagctcggagaaggaggagagggagagggagtgggaggaagaaatggaacccactgcagccaggacacgtgtcccttgaactgaagacagcagaggcacgcatccccttggagagactgtcatggaagagggtggagccgccgcccgaagcgccgaggaggctgagccactcagcatctcctggtcctgcagtgttgctgtaaatccccattggagactgcattagggaattaaagctgcttgtcactttttgctg

SEQ ID NO: 3995 - protein, 145 aa, Homo sapiens
MSWAPVLLMLFVYCTGCGPQPVLHQPPAMSSALGTTIRLTCTLRNDHDIGVYSVYWYQQRPGHPPRFLLRYFSQSDKSQGPQVPPRFSGSKDVARNRGYLSISELQPEDEAMYYCAMGARSSEKEEREREWEEEMEPTAARTRVP

SEQ ID NO: 3996 - DNA, 702 bp, Homo sapiens
aggagctctacggtgactttgaagacttggaaacaggggacgtgcacaagggaaaatcgggccccgatactcagaatgaagatgtagagaaacaaggaagaaattgaccctgacgaagaagaaagtgccaagaaaaagcatttggataagaagagaaaattgaaggagatgtttgatgtggaatatgatgaaggagaaagcacatattttgatgatcttaaaggagaaatgcagaaacaagcacagctgaatcatgcagaatttgaagatcaagatgatgaagccagagttcagtatgagggttttcgacctgggatgtacgtctgcgttgagattgaaaatgttccctgtgaatttgtgtagaactttgacccccgttaccccattatcctgggtggcttgggcaacagcgagggaaatgttggatacgtgcagatgcgtctgaagaaacatcgctggtataagaaaatcctcaagtcccgagatccaatcatattttctgtagggtggaggaggtttcagaccatcccgctctgttatatcgaagaccacaatggaagacaaaggcttctaaagtataccccacagcatgtgcatcgcggagcagccttttgggatcctatcactccacagggaactggtttcttggcaatacagtctgtcagtggcataatgcctgattttcggatagctgccacataa

SEQ ID NO: 3997 - protein, 88 aa, Homo sapiens
MRLKKHRWYKKILKSRDPIIFSVGWRRFQTIPLCYIEDHNGRQRLLKYTPQHVHRGAAFWDPITPQGTGFLAIQSVSGIMPDFRIAAT

SEQ ID NO: 3998 - DNA, 5733 bp, Homo sapiens
aattataacagctggccttctggtgggcaaaccatcccctgatggactggaagcctaccccccaccccaagccctggctgcgacagctctggaaccctgactgcctgggtgcccctcagctctggaaccctgactgcctggatgctcctcagctctggaaccctgactgcttggataccccctcagctctggaaccctgactgcctggaaccgtgatccggaacccaagatcctttcaaggcctcaggggtattgctgctgccctcctccttctcaatttaaccccgcgtccagccgtcgccaccaggggcgtcagagcgcgcgcatgctcctagctcggagccgcgccgatctcgcgccggcacctggcagccaatcgcaggtctccactggacgcgcgcgtgtggaggcgtgcgcgtcggcggcgccgggggcctgaggaggcgtagtcgccgccggctgtgccccgggagcgcctccggggctggtgcgtggccggcagctcgcgaacagcagctgatccggactggatgtgaccttctgcctggaatagctcaagttcttaaaagttgcgttgtaataaacctgaggctgggaagttcaagatcaagatgctggacgatttggttccttagtgaaggctctcttcctggctggtggatgacagccttcttgctgtgttctcacatgacagaaagaggaagcaaggtggcagtttatataaaggaagcattgggacttgtggccccaccattcaggaataaaaaaattagaaaatggaacaatcatgtgaggaagagaaagagcctgaaccacagaagaacatacaagaaaccaaacaagtagatgacgaagatgctgagctcatctttgttggtgtggaacatgtaaatgaagatgctgagctaatctttgttggggtgacttcaaattcaaaaccagtcgtttcaaacattttgaacagagtcaccccgggttcatggtcaaggagaaaaaagtatgatcaccttagaaaagatactgctcgcaaattgcagcctaaaagtcatgagaccgttacatcagaagcagtgaccgtcctgccagcttcccaacttgaatcgagatcaacagatagtcctattattattgagcctttgtctaaacctgattatagaaatagttcaccacaagttgtgcctaataactcttcagaattaccttctcctttgattacattcacagattcattgcatcatccagtaagtacagcactttcagtaggaggtataaatgaaagtcctcgtgtatcaaagcaactttccactttcgaagtaaacagcataaatcccaaaagggctaaactcagggatggaattatagaaggaaattcttcagcttcgttcccttcagatacctttcatacaatgaatactcagcaaagtacaccctcaaataatgttcatacctcattaagccatgttcagaatggagcaccttttccagcagcttttccaaaggacaatatccatttcaagcctataaatacaaatcttgatagggaaaatgaattggcaaaaacagacattttgagtctaacaagtcaaaacaagacctttgatcccaagaaagaaaatcccattgtgttacttagtgacttttactatggacagcataaaggagaagggcagccggaacagaagactcacaccacctttaaatgcctcagctgcgtgaaagttctaaaaaatgttaagtttatgaatcacgtgaagcatcatttggaatttgagaagcagaggaacgacagctgggaaaaccacaccacctgccagcactgccaccggcagtttcccactcccttccagctacagtgtcacatcgaaaatgtccacactgcccaggagccctctactgtctgtaaaatctgtgaattgtcatttgaaacagatcaggtcctcttacaacacatgaaggaccatcataagcctggcgaaatgccctatgtgtgccaggtttgccattatagatcgtcggtctttgctgatgtagaaacacattttagaacgtgccatgaaaacacaaagaatttgctttgtcccttttgtctcaaaattttcaaaacagcaacaccatacatgtgtcattataggggccactggggaaagagtgcacaccagtgttccaagtgccggctacagtttttaactttcaaggagaaaatggagcacaagacccagtgtcatcaaatgtttaagaagcctaagcaactagaaggattacctcctgaaacaaaagttactattcaagtgtcactggaacctcttcagccaggatcagtggatgtagcatccataactgtgagcacatctgactctgaaccatcactccccaggtctaaaagcaaaatttcaaaaaagtcccattaattctagtttcagtaaatctaaagcaagtatttcaaaccaaattaaaaaacctcataaaacaaaaaatacaaaccatacattattcagtagcaccaaaaatagtgaaactagtggattatatatgactttttaaacaagattcaggatatatattatttgatctgaattttgaggtattattttaaaacatctggttttcatgttaactgtatctggcttaacacataaaaggtgtttgtgtgtgtgtgtgtgagagagaaaggtattaatttatttttttaattttaattttttttttttttactttagagacagggtctcactgttacccaggctggagtgcagtggcgtgatcctagctcactgcaaccttgaacttccaggctcaagcattcctccgcctcagcctttggagagtagctaggactacaggcgcagccaccacacccagctagttttttattttaattttttgtagcgatggaatcttgttatgtcgcccagggtggtctcgaactcctgaccttaggggagcctcctgcctcagcctccccaagtgctgggttgtgtgagtcactgcccctggcacctatttattgttttggtatttcatgttactcctaagcttgaaagctcttttttctatatacagaattcatagaatttttgaaatacttagttttctttacagctttttccatgcattcagcatttcatggttaactctagtcagactggaatggctttgttatgccctggcccacttgctgccgaattcccagaagtgcctctgctgtgctggcataaaataacctgaaaagattctgaaaagccaggatgtggaattgaaagagaagctgctgcgtgagcagagaccaagaaggcggaggttagttgagggagagcagtggttctttgttctagttgaaggataggcacacattcattctagtcttggggccaggtcaaaaggaacactgcttcagagtatctttacctacctgaaaacatccaaggaagccaaaccattcaaagtaaaatggttttgtttggtgaagggcccctgcagacatcaaacagccgtcatgtatcattggtttgaggtgaaatagcaataaaattaatagaatggtgcctggtactagctgacttcctgttctgtgatctaaaggtgaatttgattcattccctctcctctcccttctggctagccgttagtggagaatgaactggccatattctcagccacagctgtaaagcaagtttcccaaggggaagaagccctaatatctataatttgaactgtactggacccatagttttaactgaaaagggccaaacaagtggtgtctgtccagttcctggactgggctaaatttagttttcccactgttaagctggaatgaggactgtcccaacaacagtaggtacagtggacaaaaatagcccagggtgactgactgaatttaaacccataatggctttatatttttctgtgcatatatatcttaccctaattgaacatgtgaagcttgcaactttatgtcttgctttggacatgaatgtattacagcttgcagctattctgttaaatgtatagtttcccagttttttgacactaatgctgtttgggtcttacctgacacacaccagtgtgcaagaaatgtctctctaattcaataagttttaagacttagagttaatgtccttcatctgatctatcctatctaatctgtactatgggtgaatctttttcccttgctctccccaggggctgtttcacagtattctggagtaccttttgagtattggttcctgaacatcagcagtcttggctgcctctgtggactcccggagttgtctccctgcttgtgttctggtgccatcctttgttcctccacccctgaccaaggtgcccagcagcctgtcttcaccagtcaaggaatccgccatcttggctgtagacataggtctggagaaatctctccctttttccttgatttctttttaaaggtaccttatctctccccactcctttcttccctcctcaatctagttaaatttcctaagctttcacaaaaatccgggaagagataattaagagcttagcatccctcttagagtagaaggcagtacagataacaaagaagttgtgagtatattatctacattttagaaaattttctgactctagatccatagattctgttgtatttatttgccggacactcatttgattgatttgcaccttgaacactatactaggtcttttcagttacgttgcttgggttaagacactttgctaaaattacagcctgaatcctttctttagttgaagaaagggtatgtgtgtgcaagtgggtgtgtgtgtgccagtttttcttgtctcaggtagatactcccactgtgtataaatagatctacagacttttcatacttacctcccgtattctgtttctgtggtaaaaatatgaagtgttttagttgtatgttgagtgattggttggtattatcaacactgttgtttgcagtttcattaaagcatgctcttaaggagtacatatggtcattaattgccaactgtagattccagtgatctggcccctgcctacctccttcctctctttttcattctctgtcatgcttctccactgttttccccaatgacgcactattttgacacactggccttgctattccttaagcaaatcacattcttcccaatccaaagactttgcacatgctgttgtctttcttagaatgcccttcccctaggcctgcatggcttgctacctcacttaattgtttgacacttcctttggttcattgagcttcaaggctcttaaaatgccactgacaatgagatctccctttaaaaaaaaaaaaaaacttctacttttcctcttaaaggcactttactctctccccactcttttcttcctcttcaaagtatttaaatttcctaggttttcatgaaaaagctggaaagcgatcagcatcaagggctttgcttctgtcttagaattgagctagcttgagtcaatttctgtgcctgcaaccaaatgaaaattaatatagtgagttctttcaggagctttctctgtttttctattgatacctctatatatttttaaggcaatgtcactttgttttgtttacaaatatattgaatatgtcaagattactattttgttattgccctttgtgaatttccttgtctattttgctcgcttgttctttcaggtgaaatttattattttattaatgttgccaaaaattataagtaaaatatcaattatagtaataaaatgttttgtgaaaaaaa

SEQ ID NO: 3999 - protein, 543 aa, Homo sapiens
MEQSCEEEKEPEPQKNIQETKQVDDEDAELIFVGVEHVNEDAELIFVGVTSNSKPVVSNILNRVTPGSWSRRKKYDHLRKDTARKLQPKSHETVTSEAVTVLPASQLESRSTDSPIIIEPLSKPDYRNSSPQVVPNNSSELPSPLITFTDSLHHPVSTALSVGGINESPRVSKQLSTFEVNSINPKRAKLRDGIIEGNSSASFPSDTFHTMNTQQSTPSNNVHTSLSHVQNGAPFPAAFPKDNIHFKPINTNLDRENELAKTDILSLTSQNKTFDPKKENPIVLLSDFYYGQHKGEGQPEQKTHTTFKCLSCVKVLKNVKFMNHVKHHLEFEKQRNDSWENHTTCQHCHRQFPTPFQLQCHIENVHTAQEPSTVCKICELSFETDQVLLQHMKDHHKPGEMPYVCQVCHYRSSVFADVETHFRTCHENTKNLLCPFCLKIFKTATPYMCHYRGHWGKSAHQCSKCRLQFLTFKEKMEHKTQCHQMFKKPKQLEGLPPETKVTIQVSLEPLQPGSVDVASITVSTSDSEPSLPRSKSKISKKSH

SEQ ID NO: 4000 - DNA, 8192 bp, Homo sapiens
atggccacgcgggtcgaggtgggctccataacgcccttgacggccgtgccaggcctgggtgagatgggcaaggaggagaccctgacgaggacctacttcctccaggccggcgaagcctctggggctcccccagcccggatcttggaagcgaagagccccctgcggagcccggcccggttactccctctgccaaggctcgcccccaaacccttctcgaaggagcaggacgtgaaatctcctgtcccgtctctgcggcccagttcgactggaccttccccctctggggggctctctgaggagccagcagcaaaggatctggacaacaggatgcccggcttggtggggcaggaggtgggcagtggggagggcccgaggacgagctcgcccctcttcaacaaggctgtgttcctgcggcccagctccagcaccatgattctcttcgaaaccaccaaaagcggccccgctctggggaaggcggttagtgagggggcggaggaggccaagctaggtgtgtccggctcccggcctgaggtggctgccaagcccgccctgcccacccagaagcctgcggggacccttccccggtcagctcccctgtctcaggacacaaaaccacctgtaccccaagaggaggcaggccaagaccatcctccctcaaaggccagcagtgtggaggacacggcacgcccccttgtggagcccaggcctcgcctgaagagaaggcccgtgtctgccattttcacggagtccattcagcctcagaagccaggccccggcgcagcggccacagtgggcaaagtgccacccacccctcccgagaagacgtgggtgaggaagcccaggcccttgtccatggacctcacggcccggtttgagaacaaagaggccttgctgaggaaggtggccgatgaaggaagtggacccacagcaggggatatggctgggctagagaggcccagagcagcgtccaagctggacagggactgtttggtcaaggcggaggctcctcttcatgatcctgatttggacttcctggaggtggccaagaaaatccgtgaacggaaggagaagatgctttcgaagccggagatgggcagccccagagccctggtggggggctcatctggggtcacccccagcaatgaccagagtccctgggaagaaaaggccaagctggacccagagccagagaaggctgctgagtccccctcacccaggctgggaaggggcctagaacttgctgaggttaagagcagagtggcggatggggaggccgcggcagggggagagtgggcctccaggaggagtgtcaggaagtgcatcagcctgtttcgggaggacagcaccttggccttggcagtggggtctgaatctcccctggccacccctgcgtccccatcggcggcaccagagccggagaaaggggttgtgagcgttcaggaacggatcagaggctggactgccgagagctcagaggctaagcccgaggtcaggaggaggacgttccaggctcggccgctgtcggcggatttgaccaaattgttttcaagttcagcttccagcaacgaagtcaaatatgagaagagtgctgagctgagcggcgagtttcctaaggaaccgagagaaaagcaaaaggaggggcacagtttggatggagcatgcatcccgagaagcccctggaagcctgggacactccgggataagtccaggcagacggagcagaaggttagctctaaccaagaccccgacagctgtcgcggtggaagctcagtggaggccccgtgcccttctgacgtcactccagaggatgaccggagcttccagactgtgtgggccacagtatttgagcaccacgtggagagacacacagtggctgaccagtcgggacgttgtctctccaccacaccccctggtgacatggcccatgcccgtgtctcagaacccaggccgaggcctgagatgggctcttggctgggcagggacccaccagacatgacaaaactgaagaaagagaactccagagggtttgacaatcccgagacggagaaattgggaccaaccacccttttgaatggtgaactgagaccgtatcacacgcctctccgggacaaataccctttgtctgaaaaccacaataataacaccttcctcaaacacttggaaaatcctcccacatcgcagagaattgagcccagatatgacattgtgcatgcagtgggagagcgtgtgcacagcgaggccatctcaccggcaccggaggagaaagcggtcacgctccgcagcctcaggtcttggctctcactgaaggacaggcagctgtcccaggaggtcacccctgctgacctggagtgtggtttggaaggtcaggcggggtccgtccaaagggccagtttgatttgggaagctcgaggcatgcctgaggctagtggaccgaagtttgggggcaattgcccgtttcccaaatggacaggcggggcagtggtgagctcgcacaaagccaccgtggcagtcagcgaagagcactgtgctcccggggccacctccgtcagggctatcaaggctgccatctgggaaagccagcatgaggggccagagggggccagaagcaagccaggagtgggagcaaggggcccaccccagggatgccccctcgatcctctttccagggctacgaatgggccttctgactcccaagcacgaacacatccagatgcatttgctgtgcagaaagggcccttcattgtagccgccagggagggtgatccagggccggcccaggtgccacagcctgcagtcagaatgcggaaagccggcgccatggaccagagaatggacagatggcggcggcggactttaccccccaacgtgaaatttgatacattcagttctcttgtcccagaggactctccacatgtggggcacagacgaacagattatgtgagccccacagccagtgccttaagaaaacctcaactatcccactacagggtggagacccaggaggtgaacccaggtgcttcacgggaccagacttccccagcagtgaagcaagggtcacctgtggaacccaaggcgacattttttgcagtcacctatcagattcccaatactcaaaaggcaaagggtgtggttctgtcaggagctgaaagcttgctggaacattctagaaaaatcactccaccctcgtctcctcattctttaacatccactttggtttctcttggtcatgaagaggcattggagatggcaggcagtaaaaactggatgaagggacgagagcatgaaaatgcaagcattttaaaaactctgaagccaacagaccgtccatcatctcttggggcctggagtctggaccctttcaatggaagaatcattgatgtggatgccttatggagtcatcggggatcagaagatggccctcgtcctcaaagcaattggaaggaaagtgcgaacaagatgtcccccagcggcggagctccccaaaccaccccgactctgaggagtcgtccaaaagatcttcctgtgagaaggaagactgatgtgatcagtgacacgttcccaggtaaaatcagagatggctacagatccagcgttcttgacattgacgccctgatggcagagtaccaggagctgtcgctgaaagtccctggggaggctcaggagaggaggagtcccaccgtggagcccagtacgttgcctcgggagaggcctgttcagctgggcggggtggagcagagaaggaggagcctgaaggagatgcccgataccgggggtctctggaaaccggccagttctgccgaaataaatcacagtttcactcctggcttaggcaagcagctggcagagaccttggagacagccatgggcaccaaatctagccctcccttctgggctctgccaccctcggctccttctgaaaggtatccagggggctctcctatacctgcggatcccaggaaaaaaacggggtttgctgaggatgacagaaaggcctttgccagtaaacatcatgttgcaaagtgtcagaattacctggctgagtcaaagccctctggtcgggaggatccaggcagtggggtcagggtgtcacccaaatcgccccccactgaccagaagaaagggaccccaaggaaatccaccgggcggggagaggaggacagtgtggcccagtggggtgaccacccacgtgactgtggacgggtgccgctggatatcaagagggcctactcagagaaggggccccctgccaacatccgagagggcctgtccatcatgcatgaagccagagagaggaggcgagagcagcccaaagggaggcccagccttactggagagaatttggaggccaaaatgggaccctgttggtgggagtcagggactggagacagtcacaaggtgctgccacgggacctggagaaggaggatgccccccaggagaaggagcgaccgctccagcaggtgtcccctgtggcctcggttccctggagaagccacagcttctgcaaagacaggaggagtgggccctttgtgagggtgcctgggacctgccaggccaatgccctgctgatttgcatagccctgcccatggttgctgaactacagaccctgccacttgctagaggccttgagcaaggttcccctcaggacctcgagtccacatggcgaatccaagtcctgtatcaggcttcctccctctcctcttttccccaggaattagcggggcctaaccccagacttgacactcatcagccagtcagccaggacacgcagcgccaggggtacagccaggcagctggcatcatccctccagcggtgccgccagtgcagaggaaccagcccttttgctgcacttttgtcggtcagcaggacccagtgctctggctatgctgtcagctggggctgtcctctgactggtactgtcagctgtggagccgactggctggtcccctggccgtgagccggcttctgaatgatttatgccgccttgaacttgactccagcgtgacaggagtgagaagagccgctcccgctagaggaaagctggaaaccgtactgtgctcaccacataacctctgggtgctggaaatggagtattactactgccccagcctgctgaagctcttgcgctacctctgggaccagctgaagcagtgtttctcccggcagcccactgaacccaaggacactgacaccctcgtgcacgaagccggcagccagtatgggacgtggacagagcagtgccagagtggggagagcttggccactgagtccccagatagcagtgccacatcgacaaggaaacagccccccagcagccgtttgtcttctctgtcctcccaaacggagcccacctcggcaggggaccagtatgactgctccagggaccagcggagcaccagcgtggaccactccagcactgacctggaatccaccgatgggatggaggggccgcctccaccggacgcctgccctgaaaagagagtagatgacttctccttcattgatcaaacctcagtcctcgactcaagtgccctcaagacccgggtgcagctcagcaagagaagccgccgccgggcccccatctcccactccctccggcgcagccgatttagtgagtccgagagcagatcacctttggaggatgagactgacaacacgtggatgttcaaagactcaacggaggagaaatcacccaggaaggaggagtcggatgaggaggagacggcatccaaagctgagaggacccctgtcagccatcctcagaggatgcctgcgtttccaggcatggatccggcagtgctaaaggctcagctgcacaagaggccagaggtggacagtcctggcgagacccccagctgggcaccccaacccaagagccccaagtcccccttccagcctggggtgctgggcagtcgcgtgctgccttccagcatggacaaggatgagaggtcggatgaaccctctccccagtggctaaaggaattgaaatccaagaagaggcaaagtctttatgagaaccaagtttgaccaggcagggaacactgccacatctacgtaacagaagccttaaccatcagaacccgcagacgaggccgagctgctgccgtttcttcctgcacaacgcttacgtgcctgggcccttcccattggattgagaacgctatccagtgcccctgtcctcgccaggctctccctggatccagacgggaagacccaacctccaggagcactcgctcatctccccagacagcacttcaggctgggaaaggagccaggctgcccagaaacgtccatgtgggtggttttgctttttatgtaaaaatttgcatttctacctattttagacaccttcatcagctccaagaacatcagtgtgaggctggaattgtctccccaggttctgaaaaacacctgcatttgtgaaagcacctcctcacccgaccccggggcaggtctttttttggaaggacatttccaaggaagatcaaactgttcattttctgctgtagtctcggtgcagggtattaccgctgggttgaggttttctattctttttttttggtgagttccttcttccccttgaggaatcagcagttccaatttttaaacatactctccctgattatgtgtatttctctttctagtggggctgtgtgcatcgttggcctatgttattgtatgtcatttttgtttgctttagaaggcgataaagcaataattcagctaattttctttgaaacttgataggtatatatgtgtttacgttaaaggacaggaggaaagatgtgcgaataatttgttctgaagtatccagtcacctcaggttatcttatccctatccaagctgtttagaagttataattgtcactcttgtatttatttccatggcttcttttcatttgagctctggtttcggtagggtgacctttgccccttggccttaagggttcataaactgcagcccaagtggtggtgcctttgcttatgaatcatcagacctgccctagtaatctttttctccagagtcttctttgaacatgacgtgggctgctggcatggaggagttgttccaaactggcctcagaacagatgcatgaatgaagggtactttttgcttttgctcacctcattttccttcatctttcttgatgaatccattatttgcaaatgctgtcaaaacatgctttccttctccctggctacctctcaggagttcatttgtctctctgtctcagcttcctccctcatcttcctttacccctcttctctgtcttagtgggtggatgggcatggatagaaatcctctgtttctttaggttaggataaacacctgggccctggtgaggcagttgctgttcagcaccagggacagcaactgcagggctgtgaggccggagcccaccttgtgtcctgttcgatgagctttggttactgatgagcaattgccagatcatgtcacccacccagccttttacacctgggagcctcatgcatctgggtttgggagtttggccctgctgatgatagtttgttttctcttcattccctgaattagtcatcagttctccgtggccatttggggattcatgcctgcaactgcttcagtcgaattcttttttaaagatccagtttatgttttataataattttgatcttatggctttcaacgtcaataggatcccctttaaaaataccctgctagtgttttgttttgttttgtttttctgagacaaggtcttactctgttgctcaagctggagtggagtggcacgatcatagctcactaacacctgggctcaagtgattctcccacctcagcctcccaagtagctgggactacaggtgtatgctaccatgaccagctaatttttaaatatttttgtagagacaagggtcttaccatgttgcccaggctggtctcgaacttctgggctcaagcaattgtccctcctcagcctcccaaagtgctcggattacagacatgagccactgcacctggcctgaaacacattcctagtcttttgatcctgacttcttatctgggctgctgtctctctttccttcaggtggaaaggaccccttggtaccatctcaagcagtaggaaaggacctgctcttacatatattgatggtcctcatgcaaaactctcaattcttaattagtcatgtctcagctcaaggatatcagacag

SEQ ID NO: 4001 - protein, 2008 aa, Homo sapiens
MATRVEVGSITPLTAVPGLGEMGKEETLTRTYFLQAGEASGAPPARILEAKSPLRSPARLLPLPRLAPKPFSKEQDVKSPVPSLRPSSTGPSPSGGLSEEPAAKDLDNRMPGLVGQEVGSGEGPRTSSPLFNKAVFLRPSSSTMILFETTKSGPALGKAVSEGAEEAKLGVSGSRPEVAAKPALPTQKPAGTLPRSAPLSQDTKPPVPQEEAGQDHPPSKASSVEDTARPLVEPRPRLKRRPVSAIFTESIQPQKPGPGAAATVGKVPPTPPEKTWVRKPRPLSMDLTARFENKEALLRKVADEGSGPTAGDMAGLERPRAASKLDRDCLVKAEAPLHDPDLDFLEVAKKIRERKEKMLSKPEMGSPRALVGGSSGVTPSNDQSPWEEKAKLDPEPEKAAESPSPRLGRGLELAEVKSRVADGEAAAGGEWASRRSVRKCISLFREDSTLALAVGSESPLATPASPSAAPEPEKGVVSVQERIRGWTAESSEAKPEVRRRTFQARPLSADLTKLFSSSASSNEVKYEKSAELSGEFPKEPREKQKEGHSLDGACIPRSPWKPGTLRDKSRQTEQKVSSNQDPDSCRGGSSVEAPCPSDVTPEDDRSFQTVWATVFEHHVERHTVADQSGRCLSTTPPGDMAHARVSEPRPRPEMGSWLGRDPPDMTKLKKENSRGFDNPETEKLGPTTLLNGELRPYHTPLRDKYPLSENHNNNTFLKHLENPPTSQRIEPRYDIVHAVGERVHSEAISPAPEEKAVTLRSLRSWLSLKDRQLSQEVTPADLECGLEGQAGSVQRASLIWEARGMPEASGPKFGGNCPFPKWTGGAVVSSHKATVAVSEEHCAPGATSVRAIKAAIWESQHEGPEGARSKPGVGARGPPQGCPLDPLSRATNGPSDSQARTHPDAFAVQKGPFIVAAREGDPGPAQVPQPAVRMRKAGAMDQRMDRWRRRTLPPNVKFDTFSSLVPEDSPHVGHRRTDYVSPTASALRKPQLSHYRVETQEVNPGASRDQTSPAVKQGSPVEPKATFFAVTYQIPNTQKAKGVVLSGAESLLEHSRKITPPSSPHSLTSTLVSLGHEEALEMAGSKNWMKGREHENASILKTLKPTDRPSSLGAWSLDPFNGRIIDVDALWSHRGSEDGPRPQSNWKESANKMSPSGGAPQTTPTLRSRPKDLPVRRKTDVISDTFPGKIRDGYRSSVLDIDALMAEYQELSLKVPGEAQERRSPTVEPSTLPRERPVQLGGVEQRRRSLKEMPDTGGLWKPASSAEINHSFTPGLGKQLAETLETAMGTKSSPPFWALPPSAPSERYPGGSPIPADPRKKTGFAEDDRKAFASKHHVAKCQNYLAESKPSGREDPGSGVRVSPKSPPTDQKKGTPRKSTGRGEEDSVAQWGDHPRDCGRVPLDIKRAYSEKGPPANIREGLSIMHEARERRREQPKGRPSLTGENLEAKMGPCWWESGTGDSHKVLPRDLEKEDAPQEKERPLQQVSPVASVPWRSHSFCKDRRSGPFVRVPGTCQANALLICIALPMVAELQTLPLARGLEQGSPQDLESTWRIQVLYQASSLSSFPQELAGPNPRLDTHQPVSQDTQRQGYSQAAGIIPPAVPPVQRNQPFCCTFVGQQDPVLWLCCQLGLSSDWYCQLWSRLAGPLAVSRLLNDLCRLELDSSVTGVRRAAPARGKLETVLCSPHNLWVLEMEYYYCPSLLKLLRYLWDQLKQCFSRQPTEPKDTDTLVHEAGSQYGTWTEQCQSGESLATESPDSSATSTRKQPPSSRLSSLSSQTEPTSAGDQYDCSRDQRSTSVDHSSTDLESTDGMEGPPPPDACPEKRVDDFSFIDQTSVLDSSALKTRVQLSKRSRRRAPISHSLRRSRFSESESRSPLEDETDNTWMFKDSTEEKSPRKEESDEEETASKAERTPVSHPQRMPAFPGMDPAVLKAQLHKRPEVDSPGETPSWAPQPKSPKSPFQPGVLGSRVLPSSMDKDERSDEPSPQWLKELKSKKRQSLYENQV

SEQ ID NO: 4002 - DNA, 853 bp, Homo sapiens
gagtctgcagacggccgtggctcctctgttcttcccgaggctacagcaacagccagaggtgttcctggggagatggcggaacagcacggagcacccgaacaggctgcagctggcaagagccatggagaccttgggggcagctacaaggtgatcttgtacgaactagagaacttccaaggcaaacgctgcgagctctcggccgagtgccccagcctgaccgacagcctgctggagaaggtgggctccatccaagtggagtccgggccgtggctggcatttgagtccagggccttccgcggggagcagtttgttctggagaagggggattatcctcgctgggatgcctggtccaacagccgtgatagtgacagccttctgtccctccggcctctgaatattgatagtccacatcacaagctgcatctgtttgagaacccagctttcagtggccgcaagatggagatagtggatgatgacgtgcccagcctgtgggctcatggcttccaggaccgtgtggcgagtgtccgtgccatcaacgggacgtgggttggctatgagttccccggctaccgtgggcgccagtacgtgtttgagcggggcgagtaccgccactggaatgagtgggacgccagccagccgcagctgcagtctgtgcgccgcatccgtgaccagaagtggcacaagcggggccgcttccccagcagctgaaaggcacccagacttcaaggacccagacccaccctggggggctgcaagggcaagaagaggaggctccagggttggggcgagggccgacctgtccacccttccctggaatctgctcaataaagcctggggttggtcccccacccgc

SEQ ID NO: 4003 - protein, 211 aa, Homo sapiens
MAEQHGAPEQAAAGKSHGDLGGSYKVILYELENFQGKRCELSAECPSLTDSLLEKVGSIQVESGPWLAFESRAFRGEQFVLEKGDYPRWDAWSNSRDSDSLLSLRPLNIDSPHHKLHLFENPAFSGRKMEIVDDDVPSLWAHGFQDRVASVRAINGTWVGYEFPGYRGRQYVFERGEYRHWNEWDASQPQLQSVRRIRDQKWHKRGRFPSS

SEQ ID NO: 4004 - DNA, 781 bp, Homo sapiens
ctcgcaggggctggtgtcactggtcattcctgcacaggacagtccaccatggcctcagatcaccagacccaggcgggcaagccacagtccctcaaccccaagatcatcatctttgagcaggaaaactttcaaggccactcgcatgagctcaatgggccctgccccaacctgaaggaaactggcgtggagaaggcaggttctgtcctagtgcaggctggaccctgggtgggctatgaacaggccaactgcaagggcgagcagtttgtgtttgagaagggtgagtacccccgctgggactcatggaccagcagccgaaggacggactccctcagctccctgaggcccatcaaagtggacagccaagagcacaagatcatcctctatgaaaaccccaacttcaccgggaagaagatggaaatcatagatgacgatgtacccagcttccacgcccatggctaccaggagaaggtgtcatctgtgcgggtgcagagtggcacgtgggttggctaccagtaccccggctaccgtgggctgcagtacctgctggagaagggagactacaaggacagcagcgactttggggcccctcacccccaggtgcagtccgtgcgccgtatccgcgacatgcagtggcaccaacgtggtgccttccacccctccaactagtgccctccccaccatgcctccttcccaggacccaggtctgctgcccaggaaccctccagacctcccagagagtgaataaagtgtgacttgcaacttgaaaaaaaaaaaaaaaaaa

SEQ ID NO: 4005 - protein, 205 aa, Homo sapiens
MASDHQTQAGKPQSLNPKIIIFEQENFQGHSHELNGPCPNLKETGVEKAGSVLVQAGPWVGYEQANCKGEQFVFEKGEYPRWDSWTSSRRTDSLSSLRPIKVDSQEHKIILYENPNFTGKKMEIIDDDVPSFHAHGYQEKVSSVRVQSGTWVGYQYPGYRGLQYLLEKGDYKDSSDFGAPHPQVQSVRRIRDMQWHQRGAFHPSN

SEQ ID NO: 4006 - DNA, 914 bp, Homo sapiens
tgtggcagatttcagaggcccttaaaatgaggccaagtgaggtggacaggtccgagccagctgaggactcctcagccacacggcacagctgcctgaggggatgtgtcactcagggagttgctgggacctactgggcccagcgttgccatcagcaccaacagcttcagagagggggacacatgccggggtgactccaaggctgtgggcggcacctgcctcagatagagaacaggcacagagacactactgggggacactactgggacactggccacccccctaccctgtgcctagatcacagcctacacactgcagccctgtgcccctcacacccagcaggttcctgctccagcgcggctcctggactggccccgggtgctggccccgggggtttcaatccaagcataattcagtgaagcatgtgtttggcagcgggacccagctcaccgttttaggtcagcccaaggccaccccctcggtcactctgttcctgccgtcctctgaggagctccaagccaacaaggccacactggtgtgtctcatgaatgacttctatctgggaatcttgacggtgacctggaaggcagatggtacccccatcacccagggcgtggagatgaccacgccctccaaacagagcaacagcaagtacatggccagcagctacctgagcctgacgcccgagcagtggaggtcccgcagaagctacagctgccaggtcatgcatgaagggagcactgcagagaagacggtggcccctgcagaatgttcataggttcccagcccccaccccacccacaggggcctggagctgcaggatcccaggggaggcgtctctctctgcatcccaagccatccagcccttctccctgtacccagtaaaccctcagtaaatatcctctttgtcaaccaga

SEQ ID NO: 4007 - protein, 224 aa, Homo sapiens
MCHSGSCWDLLGPALPSAPTASERGTHAGVTPRLWAAPASDREQAQRHYWGTLLGHWPPPYPVPRSQPTHCSPVPLTPSRFLLQRGSWTGPGCWPRGFQSKHNSVKHVFGSGTQLTVLGQPKATPSVTLFLPSSEELQANKATLVCLMNDFYLGILTVTWKADGTPITQGVEMTTPSKQSNSKYMASSYLSLTPEQWRSRRSYSCQVMHEGSTAEKTVAPAECS

SEQ ID NO: 4008 - DNA, 3601 bp, Homo sapiens
gcctagagggagaaaacttgttgaaattcagagatccccctccccctaccagtacacaccaaatcagacgcctctgaccagatctgaatttggctctcagagatttccattgtagccaggcagttggggcactttctgagtgctgcctccacctcactgtccccagcctgcctgcctccgtttccctagccctgggcctgtgccgctgtcaccatcacctgggcgccctctagtggatgaatcggattatgcacgagggggcttggagcaggattcagaaggggctcctgtccttccttgaaatgctggacgccgggatcctggaacagctcttcaggtctctgcattcctcctggcaacagccagagcctgggcgcagggggctactgttgtttgaaggctgaaggctgcagcctggtagggcactcaggagacctggcagttggctgcagggccaggtctaggggccagggcatgagggatgctctgggctggctcagccccgggcccccatgcggattgtgactgtgggggcatggccacatgatgttgaggggggatctctgaccctgaccttcttggctctgtgcatccttgaaaccagaaaggtctggaacaaatcagtgaacaatgccctaactcggggagggagccacatcctgaccccagcagcctcagaaggatccgtgtcagggttatggggcaccctgggggccccgagtctgcatgggtctccacgtgcaacttctgccggaaactctgaaaaatcccaactgcgggggtcataggacacaatcagaaatgctgatgccactgtgtgtggatccccgggccctgggggtcaggagcatgtagaaggtgggccacagggggttcataagagaatcctgtaaccgcccctgccccccaaacttagaagcccactggagggccatgggtgaaagcttgggggggtgtcctgtggagtgggtggtggggggtctttgggtttacatgctgctgggcctgagcagcaggaccccgtccacagctgatccctgggccctgctgctcagctgctctcttgagtgttgctgtggctgccgagagagcctgagtcgagcctctcttgtgccggccgtacgctgtcaggccacgctggtgagtttggcaaggcacagatgcccagagcagagaactttccttggggatttaatatgtgcgaatcttgaggtccggcaaatctttccctcagctagagagggggtttttgagaccagaatcacctcagcatcctcctgtccccagctgtgtccagcctgtctgcagggacatcctgagaggactaggctctcccctcatccacctgcgtaagtgccaccctgaagcctgtccacccatgcttggagaggcttggcctcaacctgcttagccagcagcaggcttgggcctggggtgcagtagagacccaggtggctgtggggtggttgcttcatggggtggttctgaaacgcagttggaagtgcatggacagtgccttacctgttctctgtgggaccctgtttagaaaccaggtctgagttactgggggtcatcgctacattctgatggcctagctgtgtggaggccacggtggagccccatccaaggagccagggccctgggtctagccgtgaccagaacgcatgccctggaggtgtttctcatcttgcacctgtgttgcctggtgtctcaagtggccacaaaactctgtgttagctctaggtgcccctgggcttcggaaccagggtttcccttcatctcagtgacccgggagcatctgggcagtgagtaaagagggtgatttacttgatgggtacgtttggtcctgcctaggagcccccccaggcacggtcctgggacctgaagctgccctcgttggtggaggggagggagagagcttcagggatgaggtggcgttgagctgggcgggaagggtgagcccctgcaaggtggggtgggtgtgctggggacgctgagcagcacggccagcaggtgggtcttcagctcggtacccggtgggacttgtggttggggctggtgtgtggccaggagaggggctggcagaagacaagggggactgtgaggcagctcccatccagcggttgaagcctgatggcctggctctgtgcctcagttctctcatctataaaatgagaaaacagtgccagcctcccagacctgtcatgaggatgaacgagtgaccacgtagcatgggctgggtgcgtgtcacctaacattaccagcctttgcaaggagagccctggggacctggctgagtttttcccttgcctggcccactgcacctgtccccacaggagccaaggaggtcctgctgctggcccggtagacggaccaatggagggtctcgctggacacaccggacttcaccgacatcgtgctgcagctggacgacatccagcatgccatcgccatcaactatgacccaatggagggccacgtctactggacggatgacgaggtgtgggccatccgcagggcatacctggatgggtctggggcgcagacgctgatcaacaccaagatcaacgaccccgatgacatcgcagtcaactgggtggcccgaagcctctattggacccacacaggcactgaacacatcgaggtgacgtgcctcaacagcacctcccacaagatcctggtgtcagaggacatggacgagccccgtgccattgcactgcatcccgagatgggcctcacgtactggatagactggggagagaaccctgaaatcaagcgtgccaacctggacaggcaggagctgcgcgtgctggtcaatgcttccctcgggtggcccaacggcctggccctggacctgcaggaagggaagctctactggggagatgccaagacagataagatcgaggcgatcagtgtcgatgagacgaagaggcagaccctcctgaaggacaagctcccacacattttcaggttcaccctgctgggggacttcatctactggaccgcctggcagcaccacagcatcaagcgggtacacaaggtcaaggccaaccgggacgtcatcattgaccagctgcccgacctgatggggctcaaagctgtgaacgtggacaaggtcgtcggaaccaaccctcatgcggacaggaatgggggtgcagccacctgtgcttcttcacgccccacacaacccggtttggctgccccatctagggcctggaactgctgagtgacatgaagacctgcatcatgcccaaggccttcttggtcttcaccagtagagccgccatccacaggatctccctcgagaccaacaacaacgatgtggccatcctgctctcggcgtcaaggaggcctcggccctggactttgatgtgtccagcaaccacatctactggacagacatcagcctgaaggtagcgtgggcccgaacatgcacacgtgcagcctatatgggaaaaccttccctctgtacctgcctcaaaggtttcagacatttttcttaaagcactataatatttattgtaacacaattcaagctaattaaatatgagcaagcctatttcaaaaaaaaaaaaaaaaaaaaacaaaaaaaaaaaaaaaa

SEQ ID NO: 4009 - protein, 252 aa, Homo sapiens
MEGHVYWTDDEVWAIRRAYLDGSGAQTLINTKINDPDDIAVNWVARSLYWTHTGTEHIEVTCLNSTSHKILVSEDMDEPRAIALHPEMGLTYWIDWGENPEIKRANLDRQELRVLVNASLGWPNGLALDLQEGKLYWGDAKTDKIEAISVDETKRQTLLKDKLPHIFRFTLLGDFIYWTAWQHHSIKRVHKVKANRDVIIDQLPDLMGLKAVNVDKVVGTNPHADRNGGAATCASSRPTQPGLAAPSRAWNC

SEQ ID NO: 4010 - DNA, 3628 bp, Homo sapiens
gcgggcgcgcgtcccgtccaggtccggagtaaccgccgccgccgccgccaaagctcgccaacatggcggacctggaggccgtgctggccgatgtcagttacctgatggccatggagaagagcaaggcgaccccggccgcccgcgccagcaagaggatcgtcctgccggagcccagtatccggagtgtgatgcagaagtaccttgcagagagaaatgaaataacctttgacaagattttcaatcagaaaattggtttcttgctatttaaagatttttgtttgaatgaaattaatgaagctgtacctcaggtgaagttttatgaagagataaaggaatatgaaaaacttgataatgaggaagaccgcctttgcagaagtcgacaaatttatgatgcctacatcatgaaggaacttctttcctgttcacatcctttctcaaagcaagctgtagaacacgtacaaagtcatttatccaagaaacaagtgacatcaactctttttcagccatacatagaagaaatttgtgaaagccttcgaggtgacatttttcaaaaatttatggaaagtgacaagttcactagattttgtcagtggaaaaacgttgaattaaatatccatttgaccatgaatgagttcagtgtgcataggattattggacgaggaggattcggggaagtttatggttgcaggaaagcagacactggaaaaatgtatgcaatgaaatgcttagataagaagaggatcaaaatgaaacaaggagaaacattagctttaaatgaaagaatcatgttgtctcttgtcagcacaggagactgtcctttcattgtatgtatgacctatgccttccataccccagataaactctgcttcatcctggatctgatgaacgggggcgatttgcactaccacctttcacaacacggtgtgttctctgagaaggagatgcggttttatgccactgaaatcattctgggtctggaacacgtgcacaatcggtttgttgtctacagagatttgaagccagcaaatattctcttggatgaacatggacacgcaagaatatcagatcttggtcttgcctgcgatttttccaaaaagaagcctcatgcgagtgttggcacccatgggtacatggctcccgaggtgctgcagaaggggacggcctatgacagcagtgccgactggttctccctgggctgcatgcttttcaaacttctgagaggtcacagccctttcagacaacataaaaccaaagacaagcatgaaattgaccgaatgacactcaccgtgaatgtggaacttccagacaccttctctcctgaactgaagtcccttttggagggcttgcttcagcgagacgttagcaagcggctgggctgtcacggaggcggctcacaggaagtaaaagagcacagctttttcaaaggtgttgactggcagcatgtctacttacaaaagtacccaccacccttgattcctccccggggagaagtcaatgctgctgatgcctttgatattggctcatttgatgaagaggataccaaagggattaagctacttgattgcgaccaagaactctacaagaacttccctttggtcatctctgaacgctggcagcaagaagtaacggaaacagtttatgaagcagtaaatgcagacacagataaaatcgaggccaggaagagagctaaaaataagcaacttggccacgaagaagattacgctctggggaaggactgtattatgcacgggtacatgctgaaactgggaaacccatttctgactcagtggcagcgtcgctatttttacctctttccaaatagacttgaatggagaggagagggagagtcccggcaaaatttactgacaatggaacagattctctctgtggaagaaactcaaattaaagacaaaaaatgcattttgttcagaataaaaggagggaaacaatttgtcttgcaatgtgagagtgatccagagtttgtgcagtggaagaaagagttgaacgaaaccttcaaggaggcccagcggctattgcgtcgtgccccgaagttcctcaacaaacctcggtcaggtactgtggagctcccaaagccatccctctgtcacaggaacagcaacggcctctgacacccagaaacagggagggtcctcgaggaggacacaccagggtctcagccttttggggtgaacgaggatgaggcatctgatctattcgctaccgggactcctccaggctcccgagaggagtcgggacccttcggcttggggtcagctcagctccctgccttgtcacatttgtctgcattagaaactactgaagaaataaaagttctttttctttgctacacactttggtacctatgaacctagaacttgaagtgactcctacttatcacgtaaatttttatgtctgatatcaaacacatcttagactccccagaatggaatttaaagatgttcagtgttgggtaacagattgccctaagcattgccacatattctgtctagtcactgctgattttctatgtctttgctccatactgctgggggatgggagagccacagtgtgtttcttttgtgcacttcgcaactgacttcttgtcctggggttaaaagttgaagatattttctgatgatattaaaagttgaagatatttctgcacttgggccctcctctgggagccgcacccacatgactgccctgcctctgaccagtctgttccggggccccctcagccaggtgggaatgacggacacgtactatccaagtgtatgggattaactaatcattgaaggcattcatccgtccatcattggaaagatttacagtgattctgaaggacaggccgtggagttttaggtttcaggggcaagagcagttttcaaaagtctttgagtccagtgtgcacgagtcgacaagcagtacctggcatgcaggagcactcatgggtgagtccgtctcaggtctcgacaattagcagttgtgtgacagtcattctggttccttctgcctgaccctgggagacatatcagtaatggatgtacaaaagcaggtctgttttatgtcttagtataatttcagatgaattgtattgaaaaaatgctgaggaatgaatgtgtcaaaatgggttaactgtgtatattgactttcatgtcgtcatgcatctgtcatgaatgaatgatactttgcactgggctgtacgacagtgaggaccttagggcatgaagcctttttcctggtcccagcagcatctgccctgtgaagtttgttttctcccactgcctccaggccccactgatacccccaaatagatgctgggttatgagaaccagcgaaatcccccatgtcatcagtcttaaaaaaaaaattttacaaatccacgtatttgtcccattcttggagtagttttagtgtatgtctttacattaactactaacagtataaataacttgacatcgtaattgtctgcatcctgtccttgatatttttagcagttccaaatctttgtttttgtatttgtttgctgtgttcatgggcaaagtaagtactttttaatgcagttattttgagagtttggaagataattaccaaaagggtccattatttcataagagttactttgcaa

SEQ ID NO: 4011 - protein, 688 aa, Homo sapiens
MADLEAVLADVSYLMAMEKSKATPAARASKRIVLPEPSIRSVMQKYLAERNEITFDKIFNQKIGFLLFKDFCLNEINEAVPQVKFYEEIKEYEKLDNEEDRLCRSRQIYDAYIMKELLSCSHPFSKQAVEHVQSHLSKKQVTSTLFQPYIEEICESLRGDIFQKFMESDKFTRFCQWKNVELNIHLTMNEFSVHRIIGRGGFGEVYGCRKADTGKMYAMKCLDKKRIKMKQGETLALNERIMLSLVSTGDCPFIVCMTYAFHTPDKLCFILDLMNGGDLHYHLSQHGVFSEKEMRFYATEIILGLEHVHNRFVVYRDLKPANILLDEHGHARISDLGLACDFSKKKPHASVGTHGYMAPEVLQKGTAYDSSADWFSLGCMLFKLLRGHSPFRQHKTKDKHEIDRMTLTVNVELPDTFSPELKSLLEGLLQRDVSKRLGCHGGGSQEVKEHSFFKGVDWQHVYLQKYPPPLIPPRGEVNAADAFDIGSFDEEDTKGIKLLDCDQELYKNFPLVISERWQQEVTETVYEAVNADTDKIEARKRAKNKQLGHEEDYALGKDCIMHGYMLKLGNPFLTQWQRRYFYLFPNRLEWRGEGESRQNLLTMEQILSVEETQIKDKKCILFRIKGGKQFVLQCESDPEFVQWKKELNETFKEAQRLLRRAPKFLNKPRSGTVELPKPSLCHRNSNGL

SEQ ID NO: 4012 - DNA, 1070 bp, Homo sapiens
gcacttctgggcttcagcacacatcagtgtggttcacgtgtttcctgctgttatgaaagagattggagaggactaagcttggaattgcctgtcccacagcaagaggctatggagctgggccacggagcagggcccatctgaatgacaaggagggccaacaggacttggacccctggaaagcggcctacagttccttggacacctccaagttcaagaaccagggtctgtcatccccacagcccctgcccctgggatccagcactcaaggcagctccctagggcagtgccacttgaaggagattccccctccacccccgactgctgccagcagggattctctgggcatggacccacagtccaggtccctgaagaatgcgggctctcgatcctcctcgagagagaacagggccacctcgggagagggggctcagccatgccaggggacggatgacggtcccagcttgggggctcaggaccagaggagcacgcccacgaaccagaagggcagcatcattcctaacaacattcgccacaagtttgggagcaatgtggtggaccagctggtctccgaggagcaggctcaaaaggctattgatgaagtcttcgagggccagaaaagggcaagctcatggcccagcaggacccagaatcctgtggaaatctcctccgtcttctcagactactatgacctcggctacaacatgcggtcaaacttgtttcgaggggctgctgaggagacaaagagcctcatgaaggcttcttacacaccagaggtcattgagaaatcagtgagggacttagaacactggcatggcaggaagacggatgatctggggcggtggcaccagaaaaatgctatgaacctgaacttgcagaaagcactggaagagaaatatggagaaaacagcaaatccaagagctccaagtactagttttgacacagtagaggtgtcttctactcaaataaagtgctaacaataaaaaaaaaaaaaaaaaaaaaaaaaaaaaaaaaaaaaaaaaaaaaaaaaaaaaaaaaaaaaaaaaaaaaaaaaaaaaaaaaaaaaaaaaaa

SEQ ID NO: 4013 - protein, 195 aa, Homo sapiens
MDPQSRSLKNAGSRSSSRENRATSGEGAQPCQGTDDGPSLGAQDQRSTPTNQKGSIIPNNIRHKFGSNVVDQLVSEEQAQKAIDEVFEGQKRASSWPSRTQNPVEISSVFSDYYDLGYNMRSNLFRGAAEETKSLMKASYTPEVIEKSVRDLEHWHGRKTDDLGRWHQKNAMNLNLQKALEEKYGENSKSKSSKY

SEQ ID NO: 4014 - DNA, 1167 bp, Homo sapiens
gccaacttctccagccggccggggcgagcgccagcgcggcgtccggggcgagtgacacgcagagctgaagccatggttcatcaggtgctctaccgggcgctggtctccaccaagtggctggcggagtccatcaggactggcaagctggggcccggcctgcgggtgctggacgcgtcctggtactcaccaggcacccgagaggcccgcaaggagtacctcgagcgccacgtacccggcgcctctttctttgacatagaagagtgccgggacacggcgtcgccctacgagatgatgctgcccagcgaggctggcttcgccgagtatgtgggccgcctgggcatcagcaaccacacgcacgtggtggtgtatgatggtgaacacctgggcagcttctatgctccccgggtctggtggatgttccgtgtgtttggccaccgcaccgtatcagtgctcaatggtggcttccggaactggctgaaggagggccacccggtgacatccgagccctcacgcccagaaccggccgtcttcaaagccacactggaccgctccctgctcaagacctacgagcaggtgctggagaaccttgaatctaagaggttccagctggtggattcaaggtctcaagggcggttcctgggcaccgagccggagccggatgcagtaggactggactcgggccatatccgtggtgccgtcaacatgcctttcatggacttcctgactgaggatggcttcgagaagggcccagaagagctccgtgctctgttccagaccaagaaggtggatctctcgcagcctctcattgccacgtgccgcaagggagtcaccgcctgccacgtggccttggctgcctacctctgcggcaagcctgatgtggccgtgtacgatggctcctggtccgagtggtttcgccgggcccccccagagagccgtgtgtcccagggaaagtctgagaaggcctgagccgtgacctcttctgcttactgtaactgcggccggtttagtgaccccatgacttacagccggttcttacctcttaggtgaaggagatgacatgtttttagaattgctgtgcaaggctcaccctctctctgtcaacactggaataaactttgccttttctgaaaaaaaaaaaaaaaaaaaaaaaaaaaaaaaaaaaaaaaa

SEQ ID NO: 4015 - protein, 297 aa, Homo sapiens
MVHQVLYRALVSTKWLAESIRTGKLGPGLRVLDASWYSPGTREARKEYLERHVPGASFFDIEECRDTASPYEMMLPSEAGFAEYVGRLGISNHTHVVVYDGEHLGSFYAPRVWWMFRVFGHRTVSVLNGGFRNWLKEGHPVTSEPSRPEPAVFKATLDRSLLKTYEQVLENLESKRFQLVDSRSQGRFLGTEPEPDAVGLDSGHIRGAVNMPFMDFLTEDGFEKGPEELRALFQTKKVDLSQPLIATCRKGVTACHVALAAYLCGKPDVAVYDGSWSEWFRRAPPESRVSQGKSEKA

SEQ ID NO: 4016 - DNA, 1352 bp, Homo sapiens
gggcggagcgggcgtacccccacggcccggccagtggaaggcgcgggcagcagcggctccgagtggccgcggcggtgggctgtgccggagtctcctccctttggtccgctgcaggcccgcagcccgagtgtcgccgccatggcttcgccgcagctctgccgcgcgctggtgtcggcgcaatgggtggcggaggcgctgcgggccccgcgcgctgggcagcctctgcagctgctggacgcctcctggtacctgccgaagctggggcgcgacgcgcgacgcgagttcgaggagcgccacatcccgggcgccgctttcttcgacatcgaccagtgcagcgaccgcacctcgccctacgaccacatgctgcccggggccgagcatttcgcggagtacgcaggccgcctgggcgtgggcgcggccacccacgtcgtgatctacgacgccagcgaccagggcctctactccgccccgcgcgtctggtggatgttccgcgccttcggccaccacgccgtgtcactgcttgatggcggcctccgccactggctgcgccagaacctcccgctcagctccggcaagagccaacctgctcccgccgagttccgcgctcagctcgaccccgccttcatcaagacctacgaggacatcaaggagaacctggaatcccggcgcttccaggtggtggactcccgagccactggcaggttccgcggcaccgagcccgagccccgagacggcattgaacctggccacatcccaggtaccgtgaacatccccttcacagacttcctgagccaggaggggctggagaagagccctgaggagatccgccatctgttccaggagaagaaagtggacctgtctaagccactggtggccacgtgtggctctggcgtcacagcctgccacgtggcactaggggcctacctctgcggcaagccagacgtgcccatctacgatggctcctgggtggagtggtacatgcgcgcccggcccgaggatgtcatctcagagggccgggggaagacccactgaagctgggcaggacacaggcgagctcaggtgatgccggccaccagcaatgcctggcctggtagctccgcttctgctttcaccaagagagtgtttcttcactcaactcaggtggcatttggggtgacatctcaaaggccaggaattccgttgacttgttggctgccagtaggggcgggaggaaaggcggaggcgagccctggaggagggaggccacaactccgagctgcccacctggtgctgagctggggccccgcctcctttctgttttatttttgaggaaataaaataaccaagtgctaaatcttgtaaaaaaaaaaaaa

SEQ ID NO: 4017 - protein, 297 aa, Homo sapiens
MASPQLCRALVSAQWVAEALRAPRAGQPLQLLDASWYLPKLGRDARREFEERHIPGAAFFDIDQCSDRTSPYDHMLPGAEHFAEYAGRLGVGAATHVVIYDASDQGLYSAPRVWWMFRAFGHHAVSLLDGGLRHWLRQNLPLSSGKSQPAPAEFRAQLDPAFIKTYEDIKENLESRRFQVVDSRATGRFRGTEPEPRDGIEPGHIPGTVNIPFTDFLSQEGLEKSPEEIRHLFQEKKVDLSKPLVATCGSGVTACHVALGAYLCGKPDVPIYDGSWVEWYMRARPEDVISEGRGKTH

SEQ ID NO: 4018 - DNA, 1626 bp, Homo sapiens
gggcggagcgggcgtacccccacggcccggccagtggaaggcgcgggcagcagcggctccgagtggccgcggcggtgggctgtgccggagtctcctccctttggtccgctgcaggttggtggcgggaggaggggacagctgcgggcgcggggagggggcgccgcgccgcgggggccatggcggagccaggaagccgggagtccgagacccgggtcgccaatataaatgcttgatgagtgaatgaatgacttccgtctgggacttggttgcaaataaagccgagctgcatcttagggaggggtggagactttgcccctgtttgtgccttgaagccagcagggccttgccctaggatacctccacccaccctcctgcccagcaagtggaggcccgcagcccgagtgtcgccgccatggcttcgccgcagctctgccgcgcgctggtgtcggcgcaatgggtggcggaggcgctgcgggccccgcgcgctgggcagcctctgcagctgctggacgcctcctggtacctgccgaagctggggcgcgacgcgcgacgcgagttcgaggagcgccacatcccgggcgccgctttcttcgacatcgaccagtgcagcgaccgcacctcgccctacgaccacatgctgcccggggccgagcatttcgcggagtacgcaggccgcctgggcgtgggcgcggccacccacgtcgtgatctacgacgccagcgaccagggcctctactccgccccgcgcgtctggtggatgttccgcgccttcggccaccacgccgtgtcactgcttgatggcggcctccgccactggctgcgccagaacctcccgctcagctccggcaagagccaacctgctcccgccgagttccgcgctcagctcgaccccgccttcatcaagacctacgaggacatcaaggagaacctggaatcccggcgcttccaggtggtggactcccgagccactggcaggttccgcggcaccgagcccgagccccgagacggcattgaacctggccacatcccaggtaccgtgaacatccccttcacagacttcctgagccaggaggggctggagaagagccctgaggagatccgccatctgttccaggagaagaaagtggacctgtctaagccactggtggccacgtgtggctctggcgtcacagcctgccacgtggcactaggggcctacctctgcggcaagccagacgtgcccatctacgatggctcctgggtggagtggtacatgcgcgcccggcccgaggatgtcatctcagagggccgggggaagacccactgaagctgggcaggacacaggcgagctcaggtgatgccggccaccagcaatgcctggcctggtagctccgcttctgctttcaccaagagagtgtttcttcactcaactcaggtggcatttggggtgacatctcaaaggccaggaattccgttgacttgttggctgccagtaggggcgggaggaaaggcggaggcgagccctggaggagggaggccacaactccgagctgcccacctggtgctgagctggggccccgcctcctttctgttttatttttgaggaaataaaataaccaagtgctaaatcttgtaaaaaaaaaaaaa

SEQ ID NO: 4019 - protein, 297 aa, Homo sapiens; identical to SEQ ID NO: 4017

SEQ ID NO: 4020 - DNA, 1450 bp, Homo sapiens
gggcggagcgggcgtacccccacggcccggccagtggaaggcgcgggcagcagcggctccgagtggccgcggcggtgggctgtgccggagtctcctccctttggtccgctgcaggttggtggcgggaggaggggacagctgcgggcgcggggagggggcgccgcgccgcgggggccatggcggagccaggaagccgggagtccgagacccgggcccgcagcccgagtgtcgccgccatggcttcgccgcagctctgccgcgcgctggtgtcggcgcaatgggtggcggaggcgctgcgggccccgcgcgctgggcagcctctgcagctgctggacgcctcctggtacctgccgaagctggggcgcgacgcgcgacgcgagttcgaggagcgccacatcccgggcgccgctttcttcgacatcgaccagtgcagcgaccgcacctcgccctacgaccacatgctgcccggggccgagcatttcgcggagtacgcaggccgcctgggcgtgggcgcggccacccacgtcgtgatctacgacgccagcgaccagggcctctactccgccccgcgcgtctggtggatgttccgcgccttcggccaccacgccgtgtcactgcttgatggcggcctccgccactggctgcgccagaacctcccgctcagctccggcaagagccaacctgctcccgccgagttccgcgctcagctcgaccccgccttcatcaagacctacgaggacatcaaggagaacctggaatcccggcgcttccaggtggtggactcccgagccactggcaggttccgcggcaccgagcccgagccccgagacggcattgaacctggccacatcccaggtaccgtgaacatccccttcacagacttcctgagccaggaggggctggagaagagccctgaggagatccgccatctgttccaggagaagaaagtggacctgtctaagccactggtggccacgtgtggctctggcgtcacagcctgccacgtggcactaggggcctacctctgcggcaagccagacgtgcccatctacgatggctcctgggtggagtggtacatgcgcgcccggcccgaggatgtcatctcagagggccgggggaagacccactgaagctgggcaggacacaggcgagctcaggtgatgccggccaccagcaatgcctggcctggtagctccgcttctgctttcaccaagagagtgtttcttcactcaactcaggtggcatttggggtgacatctcaaaggccaggaattccgttgacttgttggctgccagtaggggcgggaggaaaggcggaggcgagccctggaggagggaggccacaactccgagctgcccacctggtgctgagctggggccccgcctcctttctgttttatttttgaggaaataaaataaccaagtgctaaatcttgtaaaaaaaaaaaaa

SEQ ID NO: 4021 - protein, 297 aa, Homo sapiens; identical to SEQ ID NO: 4017

SEQ ID NO: 4022 - DNA, 1854 bp, Homo sapiens
agactgcgggcctgcggggaagggcgaagcggggcgggaccgggggcgggagcagcgcggggcgggaccctacccgcggcccacgcggagccaggaggcgcggactacagctcccggcctgccccgcgtgcggtccccgcccgcccccagcgcccgggaggaggatgcagacgccgcggccggcgatgaggatggaggccggggaggcagcgccgccggcgggggcgggcggccgcgccgcaggcggctggggcaagtgggtgcggctcaacgtggggggcacggtgttcctgaccacccggcagacgctgtgccgcgagcagaagtccttcctcagccgcctgtgccagggggaagagctgcagtcggaccgggatgagaccggggcctacctcattgaccgtgaccccacctacttcgggcccatcctgaacttcctccggcatggcaagctggtgctggacaaggacatggctgaggagggggtcctggaggaagccgagttctacaacatcggcccgctgatccgcatcatcaaagaccggatggaagagaaggactacacggtcacccaggtcccacccaagcacgtgtaccgcgtgctgcagtgccaggaggaggagctcacgcaaatggtctccaccatgtctgatggctggcgcttcgagcagctggtgaacatcggctcctcctacaactacggcagcgaggaccaggcagagttcctgtgtgtggtgtccaaggagctccacagcaccccaaacgggctgagctcagagtccagccgcaaaaccaagagcacggaggagcagctggaggagcagcagcagcaggaggaggaggtggaggaggtggaggtggaacaggtgcaggtggaggcagatgcacaggagaaaggttcccgtccgcaccctctcagacctgaggctgagcttgcagtgagggcttctcctcggcccctcgcccgcccccagagctgccatccctgctgttacaagccagaggcacccggatgtgaggccccagatcacctccagggacttggggttcccatctgaaatcctttatttttgtaccatggggtgggccccgggcctgagaaggaagaagcaccctctccccggcctcctctgtctgcacccgtggggctgtgacttactcctgcctccaggggcggggcggggcccccctgggacctcttaaggcccaaggtgggccccaggacctctgggcagagtggactgctcatggcagatgtgtggcaatgtctggctgtgtctctccggcacctgcgtcccctctcccgggctcccctgctgcatggtggatgtgctccttcctggcccggtcacattgcctccttgagccttagtccagggggtcactcctcccaccccacctacctcacagggttgttgtgagggtgcacagaggagcaaagtccctgaaggccctcaggcagtatataggggccgcccaccttcagctgccctgggatgggaaggacccagcccgacccctgggcataacactgtgtttgcaaatggagattcaggtattggggatgcaggttgtggggagctggcctggcagagtaggggtagttggcttggccttctctttggtgatcccacccccagccatttgcattgctggcccagcgcctggcctggggggcggggagaggcagcagaaggggctgggcaggggcggtggaggactcaggaactgcccggggagagtgggtatggcggctgagccaggggccctcctgtgtttgacttcccgggatgggtccttgcttctcagctgtgtccgaccccaccatgtaataaaacccaaaggaacagccca

SEQ ID NO: 4023 - protein, 290 aa, Homo sapiens
MRMEAGEAAPPAGAGGRAAGGWGKWVRLNVGGTVFLTTRQTLCREQKSFLSRLCQGEELQSDRDETGAYLIDRDPTYFGPILNFLRHGKLVLDKDMAEEGVLEEAEFYNIGPLIRIIKDRMEEKDYTVTQVPPKHVYRVLQCQEEELTQMVSTMSDGWRFEQLVNIGSSYNYGSEDQAEFLCVVSKELHSTPNGLSSESSRKTKSTEEQLEEQQQQEEEVEEVEVEQVQVEADAQEKGSRPHPLRPEAELAVRASPRPLARPQSCHPCCYKPEAPGCEAPDHLQGLGVPI

SEQ ID NO: 4024 - DNA, 3212 bp, Homo sapiens
cttgagccagacccagtccagctctggtgcctgccctctggtgcgagctgacctgagatgcacttccctcctctgtgagctgtctcggcacccacttgcagtcactgccgcctgatgttgttactcttccactccaaaaggatgcccgtggccgaggccccccaggtggctggcgggcagggggacggaggtgatggcgaggaagcggagccggaggggatgttcaaggcctgtgaggactccaagagaaaagcccggggctacctccgcctggtgcccctgtttgtgctgctggccctgctcgtgctggcttcggcgggggtgctactctggtatttcctagggtacaaggcggaggtgatggtcagccaggtgtactcaggcagtctgcgtgtactcaatcgccacttctcccaggatcttacccgccgggaatctagtgccttccgcagtgaaaccgccaaagcccagaagatgctcaaggagctcatcaccagcacccgcctgggaacttactacaactccagctccgtctattcctttggggagggacccctcacctgcttcttctggttcattctccaaatccccgagcaccgccggctgatgctgagccccgaggtggtgcaggcactgctggtggaggagctgctgtccacagtcaacagctcggctgccgtcccctacagggccgagtacgaagtggaccccgagggcctagtgatcctggaagccagtgtgaaagacatagctgcattgaattccacgctgggttgttaccgctacagctacgtgggccagggccaggtcctccggctgaaggggcctgaccacctggcctccagctgcctgtggcacctgcagggccccaaggacctcatgctcaaactccggctggagtggacgctggcagagtgccgggaccgactggccatgtatgacgtggccgggcccctggagaagaggctcatcacctcggtgtacggctgcagccgccaggagcccgtggtggaggttctggcgtcgggggccatcatggcggtcgtctggaagaagggcctgcacagctactacgaccccttcgtgctctccgtgcagccggtggtcttccaggcctgtgaagtgaacctgacgctggacaacaggctcgactcccagggcgtcctcagcaccccgtacttccccagctactactcgccccaaacccactgctcctggcacctcacggtgccctctctggactacggcttggccctctggtttgatgcctatgcactgaggaggcagaagtatgatttgccgtgcacccagggccagtggacgatccagaacaggaggctgtgtggcttgcgcatcctgcagccctacgccgagaggatccccgtggtggccacggccgggatcaccatcaacttcacctcccagatctccctcaccgggcccggtgtgcgggtgcactatggcttgtacaaccagtcggacccctgccctggagagttcctctgttctgtgaatggactctgtgtccctgcctgtgatggggtcaaggactgccccaacggcctggatgagagaaactgcgtttgcagagccacattccagtgcaaagaggacagcacatgcatctcactgcccaaggtctgtgatgggcagcctgattgtctcaacggcagcgacgaagagcagtgccaggaaggggtgccatgtgggacattcaccttccagtgtgaggaccggagctgcgtgaagaagcccaacccgcagtgtgatgggcggcccgactgcagggacggctcggatgaggagcactgtgactgtggcctccagggcccctccagccgcattgttggtggagctgtgtcctccgagggtgagtggccatggcaggccagcctccaggttcggggtcgacacatctgtgggggggccctcatcgctgaccgctgggtgataacagctgcccactgcttccaggaggacagcatggcctccacggtgctgtggaccgtgttcctgggcaaggtgtggcagaactcgcgctggcctggagaggtgtccttcaaggtgagccgcctgctcctgcacccgtaccacgaagaggacagccatgactacgacgtggcgctgctgcagctcgaccacccggtggtgcgctcggccgccgtgcgccccgtctgcctgcccgcgcgctcccacttcttcgagcccggcctgcactgctggattacgggctggggcgccttgcgcgagggcggccccatcagcaacgctctgcagaaagtggatgtgcagttgatcccacaggacctgtgcagcgaggtctatcgctaccaggtgacgccacgcatgctgtgtgccggctaccgcaagggcaagaaggatgcctgtcagggtgactcaggtggtccgctggtgtgcaaggcactcagtggccgctggttcctggcggggctggtcagctggggcctgggctgtggccggcctaactacttcggcgtctacacccgcatcacaggtgtgatcagctggatccagcaagtggtgacctgaggaactgcccccctgcaaagcagggcccacctcctggactcagagagcccagggcaactgccaagcagggggacaagtattctggcggggggtgggggagagagcaggccctgtggtggcaggaggtggcatcttgtctcgtccctgatgtctgctccagtgatggcaggaggatggagaagtgccagcagctgggggtcaagacgtcccctgaggacccaggcccacacccagcccttctgcctcccaattctctctcctccgtccccttcctccactgctgcctaatgcaaggcagtggctcagcagcaagaatgctggttctacatcccgaggagtgtctgaggtgcgccccactctgtacagaggctgtttgggcagccttgcctccagagagcagattccagcttcggaagcccctggtctaacttgggatctgggaatggaaggtgctcccatcggaggggaccctcagagccctggagactgccaggtgggcctgctgccactgtaagccaaaaggtggggaagtcctgactccagggtccttgccccacccctgcctgccacctgggccctcacagcccagaccctcactgggaggtgagctcagctgccctttggaataaagctgcctgatcaaaaaaaaaaaaaaaaaaaaa

SEQ ID NO: 4025 - protein, 811 aa, Homo sapiens
MLLLFHSKRMPVAEAPQVAGGQGDGGDGEEAEPEGMFKACEDSKRKARGYLRLVPLFVLLALLVLASAGVLLWYFLGYKAEVMVSQVYSGSLRVLNRHFSQDLTRRESSAFRSETAKAQKMLKELITSTRLGTYYNSSSVYSFGEGPLTCFFWFILQIPEHRRLMLSPEVVQALLVEELLSTVNSSAAVPYRAEYEVDPEGLVILEASVKDIAALNSTLGCYRYSYVGQGQVLRLKGPDHLASSCLWHLQGPKDLMLKLRLEWTLAECRDRLAMYDVAGPLEKRLITSVYGCSRQEPVVEVLASGAIMAVVWKKGLHSYYDPFVLSVQPVVFQACEVNLTLDNRLDSQGVLSTPYFPSYYSPQTHCSWHLTVPSLDYGLALWFDAYALRRQKYDLPCTQGQWTIQNRRLCGLRILQPYAERIPVVATAGITINFTSQISLTGPGVRVHYGLYNQSDPCPGEFLCSVNGLCVPACDGVKDCPNGLDERNCVCRATFQCKEDSTCISLPKVCDGQPDCLNGSDEEQCQEGVPCGTFTFQCEDRSCVKKPNPQCDGRPDCRDGSDEEHCDCGLQGPSSRIVGGAVSSEGEWPWQASLQVRGRHICGGALIADRWVITAAHCFQEDSMASTVLWTVFLGKVWQNSRWPGEVSFKVSRLLLHPYHEEDSHDYDVALLQLDHPVVRSAAVRPVCLPARSHFFEPGLHCWITGWGALREGGPISNALQKVDVQLIPQDLCSEVYRYQVTPRMLCAGYRKGKKDACQGDSGGPLVCKALSGRWFLAGLVSWGLGCGRPNYFGVYTRITGVISWIQQVVT

SEQ ID NO: 4026 - DNA, 4045 bp, Homo sapiens
gcagccagagctcagcagggccctggagagatggccacggtcccagcaccggggaggactggagagcgcgcgctgccaccgccccatgtctcagccagggcttccttcctcggctccaccctgtggatgtaatggcggcccctgctctgtcctggcgtctgcccctcctcatcctcctcctgcccctggctacctcttgggcatctgcagcggtgaatggcacttcccagttcacatgcttctacaactcgagagccaacatctcctgtgtctggagccaagatggggctctgcaggacacttcctgccaagtccatgcctggccggacagacggcggtggaaccaaacctgtgagctgctccccgtgagtcaagcatcctgggcctgcaacctgatcctcggagccccagattctcagaaactgaccacagttgacatcgtcaccctgagggtgctgtgccgtgagggggtgcgatggagggtgatggccatccaggacttcaagccctttgagaaccttcgcctgatggcccccatctccctccaagttgtccacgtggagacccacagatgcaacataagctgggaaatctcccaagcctcccactactttgaaagacacctggagttcgaggcccggacgctgtccccaggccacacctgggaggaggcccccctgctgactctcaagcagaagcaggaatggatctgcctggagacgctcaccccagacacccagtatgagtttcaggtgcgggtcaagcctctgcaaggcgagttcacgacctggagcccctggagccagcccctggccttcaggacaaagcctgcagcccttgggaaggacaccattccgtggctcggccacctcctcgtgggcctcagcggggcttttggcttcatcatcttagtgtacttgctgatcaactgcaggaacaccgggccatggctgaagaaggtcctgaagtgtaacaccccagacccctcgaagttcttttcccagctgagctcagagcatggaggagacgtccagaagtggctctcttcgcccttcccctcatcgtccttcagccctggcggcctggcacctgagatctcgccactagaagtgctggagagggacaaggtgacgcagctgctcctgcagcaggacaaggtgcctgagcccgcatccttaagcagcaaccactcgctgaccagctgcttcaccaaccagggttacttcttcttccacctcccggatgccttggagatagaggcctgccaggtgtactttacttacgacccctactcagaggaagaccctgatgagggtgtggccggggcacccacagggtcttccccccaacccctgcagcctctgtcaggggaggacgacgcctactgcaccttcccctccagggatgacctgctgctcttctcccccagtctcctcggtggccccagccccccaagcactgcccctgggggcagtggggccggtgaagagaggatgcccccttctttgcaagaaagagtccccagagactgggacccccagcccctggggcctcccaccccaggagtcccagacctggtggattttcagccaccccctgagctggtgctgcgagaggctggggaggaggtccctgacgctggccccagggagggagtcagtttcccctggtccaggcctcctgggcagggggagttcagggcccttaatgctcgcctgcccctgaacactgatgcctacttgtccctccaagaactccagggtcaggacccaactcacttggtgtagacagatggccagggtgggaggcaggcagctgcctgctctgcgccgagcctcagaaggaccctgttgagggtcctcagtccactgctgaggacactcagtgtccagttgcagctggacttctccacccggatggcccccacccagtcctgcacacttggtccatccatttccaaacctccactgctgctcccgggtcctgctgcccgagccaggaactgtgtgtgttgcaggggggcagtaactccccaactccctcgttaatcacaggatcccacgaatttaggctcagaagcatcgctcctctccagccctgcagctattcaccaatatcagtcctcgcggctctccagggctccctgccctgacctcttccctgggttttctgccccagcctcctccttccctcccctccccgtccacagggcagcctgagcgtgctttccaaaacccaaatatggccacgctccccctcggttcaaaaccttgcacaggtcccactgccctcagccccacttctcagcctggtacttgtacctccggtgtcgtgtggggacatccccttctgcaatcctccctaccgtcctcctgagccactcagagctccctcacaccccctctgttgcacatgctattccctggggctgctgtgcgctccccctcatctaggtgacaaacttccctgactcttcaagtgccggttttgcttctcctggagggaagcactgcctcccttaatctgccagaaacttctagcgtcagtgctggagggagaagctgtcagggacccagggcgcctggagaaagaggccctgttactattcctttgggatctctgaggcctcagagtgcttggctgctgtatctttaatgctggggcccaagtaagggcacagatccccccacaaagtggatgcctgctgcatcttcccacagtggcttcacagacccacaagagaagctgatggggagtaaaccctggagtccgaggcccaggcagcagccccgcctagtggtgggccctgatgctgccaggcctgggacctcccactgccccctccactggaggggtctcctctgcagctcagggactggcacactggcctccagaagggcagctccacagggcagggcctcattatttttcactgccccagacacagtgcccaacaccccgtcgtataccctggatgaacgaattaattacctggcaccacctcgtctgggctccctgcgcctgacattcacacagagaggcagagtcccgtgcccattaggtctggcatgccccctcctgcaaggggctcaaccccctaccccgacccctccacgtatctttcctaggcagatcacgttgcaatggctcaaacaacattccaccccagcaggacagtgaccccagtcccagctaactctgacctgggagccctcaggcacctgcacttacaggccttgctcacagctgattgggcacctgaccacacgcccccacaggctctgaccagcagcctatgagggggtttggcaccaagctctgtccaatcaggtaggctgggcctgaactagccaatcagatcaactctgtcttgggcgtttgaactcagggagggaggcccttgggagcaggtgcttgtggacaaggctccacaagcgttgagccttggaaaggtagacaagcgttgagccactaagcagaggaccttgggttcccaatacaaaaatacctactgctgagagggctgctgaccatttggtcaggattcctgttgcctttatatccaaaataaactcccctttcttgaggttgtctgagtcttgggtctatgccttgaaaaaagctgaattattggacagtctcacctcctgccatagggtcctgaatgtttcagaccacaaggggctccacacctttgctgtgtgttctggggcaacctactaatcctctctgcaagtcggtctccttatccccccaaatggaaattgtatttgccttctccactttgggaggctcccacttcttgggagggttacattttttaagtcttaatcatttgtgacatatgtatctatacatccgtatcttttaatgatccgtgtgtaccatctttgtgattatttccttaatattttttctttaagtcagttcattttcgttgaaatacatttatttaaagaaaaatctttgttactctgtaaatgaaaaaacccattttcgctataaataaaaggtaactgtacaaaataagtacaatgcaacaaaa

SEQ ID NO: 4027 - protein, 551 aa, Homo sapiens
MAAPALSWRLPLLILLLPLATSWASAAVNGTSQFTCFYNSRANISCVWSQDGALQDTSCQVHAWPDRRRWNQTCELLPVSQASWACNLILGAPDSQKLTTVDIVTLRVLCREGVRWRVMAIQDFKPFENLRLMAPISLQVVHVETHRCNISWEISQASHYFERHLEFEARTLSPGHTWEEAPLLTLKQKQEWICLETLTPDTQYEFQVRVKPLQGEFTTWSPWSQPLAFRTKPAALGKDTIPWLGHLLVGLSGAFGFIILVYLLINCRNTGPWLKKVLKCNTPDPSKFFSQLSSEHGGDVQKWLSSPFPSSSFSPGGLAPEISPLEVLERDKVTQLLLQQDKVPEPASLSSNHSLTSCFTNQGYFFFHLPDALEIEACQVYFTYDPYSEEDPDEGVAGAPTGSSPQPLQPLSGEDDAYCTFPSRDDLLLFSPSLLGGPSPPSTAPGGSGAGEERMPPSLQERVPRDWDPQPLGPPTPGVPDLVDFQPPPELVLREAGEEVPDAGPREGVSFPWSRPPGQGEFRALNARLPLNTDAYLSLQELQGQDPTHLV

SEQ ID NO: 4028 - DNA, 2954 bp, Homo sapiens
tccctcctctgctgggcctgggggtctgggccagcaacaagttagtattgcagacatgggccaaggagccagaggccatgcagtggctcagggtccgtgagtcgcctggggaggccacaggacacagggtcaccatggggacagccgccctgggtcccgtctgggcagcgctcctgctctttctcctgatgtgtgagatccctatggtggagctcacctttgacagagctgtggccagcggctgccaacggtgctgtgactctgaggaccccctggatcctgcccatgtatcctcagcctcttcctccggccgcccccacgccctgcctgagatcagaccctacattaatatcaccatcctgaagggtgacaaaggggacccaggcccaatgggcctgccagggtacatgggcagggagggtccccaaggggagcctggccctcagggcagcaagggtgacaagggggagatgggcagccccggcgccccgtgccagaagcgcttcttcgccttctcagtgggccgcaagacggccctgcacagcggcgaggacttccagacgctgctcttcgaaagggtctttgtgaaccttgatgggtgctttgacatggcgaccggccagtttgctgctcccctgcgtggcatctacttcttcagcctcaatgtgcacagctggaattacaaggagacgtacgtgcacattatgcataaccagaaagaggctgtcatcctgtacgcgcagcccagcgagcgcagcatcatgcagagccagagtgtgatgctggacctggcctacggggaccgcgtctgggtgcggctcttcaagcgccagcgcgagaacgccatctacagcaacgacttcgacacctacatcaccttcagcggccacctcatcaaggccgaggacgactgagggcctctgggccaccctcccggctggagagctcaggtgctggtcccgtcccctgcagggctcagtttgcactgctgtgaagcaggaaggccagggaggtccccggggacctggcattctggggagaccctgcttctatcttggctgccatcatccctcccagcctatttctgctcctctcttctctcttggacctattttaagaagcttgctaacctaaatattctagaactttcccagcctcgtagcccagcacttctcaaacttggaaatgcatgcgaatcacccggggttcgtgttaaatgcagattctgactcagcaggtctgagtgggtccaggattctgtgtttctcatatgttcctgggtgatgctgatggggtcagtctatgaaccacactggagcaaccaggttctaggactttctcaatattctagtactttctgaacattctggaatcctccccacattctagaattctcccaacatttttttttcttgagacagagtcttgctctgttgcccaggctagagtgcagtggtgcaatctcagttcactgcaacctctgcctcccgggttcaagcgattcttctgcctcagcctccctagtggctgggattacaggcgcctgctaccatgcctggctaatttttgtatttttagtagagatggggtttcaccatattggccaggctggtcttgaactcctgacttcaggtgacccacccgcctcggcctctcaaaatgctgggattacaggtgtgagccaccgtgcctggccaattccaacattcttaaattctctcatccctccagggctccccgtgctatgttctctttaccccttccccctcttctcttgctcaggcctgcaccactgcagccaccgttcatttattcattcattaaacactgagcactcactctgtgctgggtcccgggaagggtgagggggtcagacacaggccctgcccctgccctcagtgactggccagtccagcccaggcggggagagatgtgtacataggttttaaagcagacccagagctcatgggggcctgtgttctgggtgttcaggtgctgctggtcctccattacccactgctccccaaggctggtgggacggggtcccggtggcaggggcaggtatctccttcccgttcctcatccacctgcccagtgctcatcgttacagcaaaccccagggggccttggccaggtcaagggttctgtgaggagaggacccaggagtgtgggggcatttggggggtgaagtggcccccgaagaatggaacccacacccatagctctccccacagctgatacggcatcctgcgagaagacctgccctcctcactgggatccccttcctgcctcctcccagggctctgccagggccttgctcagtcccttccaccaaagtcatctgaacttccgtttccccagggcctccagctgccctcagacactgatgtctgtccccaggtgctctctgcccctcatgcccctctcaccggcccagtgccccgactctccaggctttatcaaggtgctaaggcccgggtgggcagctcctcgtctcagagccctcctccggcctggtgctgcctttacaaacacctgcaggagaagggccacggaagccccaggctttagagccctcagcaggtctggggagctagagcaaaggagggacctcaggccttccgtttcttcttccagggtggggtggcctggtgttcccctagccttccaaacccaggtggcctgcccttctccccagagggaggcggcctccgcccattggtgctcatgcagactctggggctgaggtgccccggggggtgatctctggtgctcacagccgaggagccgtggctccatggccagatgacggaaacagggtctgaccaagtgccaggaagacctgtgctataaaccaccctgcctgatcctgcccctgcctgaccccgccacgccctgccgtccagcatgattaaagaatgctgtctcctcttggcaaaaaaaaaaaaaaaaaa

SEQ ID NO: 4029 - protein, 278 aa, Homo sapiens
MQWLRVRESPGEATGHRVTMGTAALGPVWAALLLFLLMCEIPMVELTFDRAVASGCQRCCDSEDPLDPAHVSSASSSGRPHALPEIRPYINITILKGDKGDPGPMGLPGYMGREGPQGEPGPQGSKGDKGEMGSPGAPCQKRFFAFSVGRKTALHSGEDFQTLLFERVFVNLDGCFDMATGQFAAPLRGIYFFSLNVHSWNYKETYVHIMHNQKEAVILYAQPSERSIMQSQSVMLDLAYGDRVWVRLFKRQRENAIYSNDFDTYITFSGHLIKAEDD

SEQ ID NO: 4030 - DNA, 1670 bp, Homo sapiens
tccctcctctgctgggcctgggggtctgggccagcaacaagttagtattgcagacatgggccaaggagccagaggccatgcagtggctcagggtccgtgagtcgcctggggaggccacaggacacagggtcaccatggggacagccgccctgggtcccgtctgggcagcgctcctgctctttctcctgatgtgtgagatccctatggtggagctcacctttgacagagctgtggccagcggctgccaacggtgctgtgactctgaggaccccctggatcctgcccatgtatcctcagcctcttcctccggccgcccccacgccctgcctgagatcagaccctacattaatatcaccatcctgaagggtgacaaaggggacccaggcccaatgggcctgccagggtacatgggcagggagggtccccaaggggagcctggccctcagggcagcaagggtgacaagggggagatgggcagccccggcgccccgtgccagaagcgcttcttcgccttctcagtgggccgcaagacggccctgcacagcggcgaggacttccagacgctgctcttcgaaagggtctttgtgaaccttgatgggtgctttgacatggcgaccggccagtttgctgctcccctgcgtggcatctacttcttcagcctcaatgtgcacagctggaattacaaggagacgtacgtgcacattatgcataaccagaaagaggctgtcatcctgtacgcgcagcccagcgagcgcagcatcatgcagagccagagtgtgatgctggacctggcctacggggaccgcgtctgggtgcggctcttcaagcgccagcgcgagaacgccatctacagcaacgacttcgacacctacatcaccttcagcggccacctcatcaaggccgaggacgactgagggcctctgggccaccctcccggctggagagctcagctgatacggcatcctgcgagaagacctgccctcctcactgggatccccttcctgcctcctcccagggctctgccagggccttgctcagtcccttccaccaaagtcatctgaacttccgtttccccagggcctccagctgccctcagacactgatgtctgtccccaggtgctctctgcccctcatgcccctctcaccggcccagtgccccgactctccaggctttatcaaggtgctaaggcccgggtgggcagctcctcgtctcagagccctcctccggcctggtgctgcctttacaaacacctgcaggagaagggccacggaagccccaggctttagagccctcagcaggtctggggagctagagcaaaggagggacctcaggccttccgtttcttcttccagggtggggtggcctggtgttcccctagccttccaaacccaggtggcctgcccttctccccagagggaggcggcctccgcccattggtgctcatgcagactctggggctgaggtgccccggggggtgatctctggtgctcacagccgaggagccgtggctccatggccagatgacggaaacagggtctgaccaagtgccaggaagacctgtgctataaaccaccctgcctgatcctgcccctgcctgaccccgccacgccctgccgtccagcatgattaaagaatgctgtctcctcttggcaaaaaaaaaaaaaaaaaa

SEQ ID NO: 4031 - protein, 278 aa, Homo sapiens; identical to SEQ ID NO: 4029

SEQ ID NO: 4032 - DNA, 2123 bp, Homo sapiens
cgcatctctcatcactccccctcattctgcctttcctcctactcacggtctcctctccctctccctctctctctctccccctccctctttctctctctctctctttctccacctcctcccgaccccctttcccctctatttctattggcttctgtgtcccttgctcccctcttctcttcctcaccctgggaagcttctcccccctatccttgcccctgcccccccaggatgtgtcctggagatggggggtgacgtaccaggctctggttgggaagtcagggccggagaccagatgggagaggctctgtggacagccgtggccgagggcctgggagggaacctgagcccgcaagcggtctagaagtgggtgccgtgtggggaccctagttaggagtgccctgggggcacctggggactgggcagggagaggggacagcagaatgataaccagcctggcggcaaggagggaagccctcaccccatgggcaggcaaatagctgactgctgaccaccctcccctcagccatggacatgcttcatccatcatcggtgtccacgacctcagaacctgagaatgcctcctcggcctggcccccagatgccaccctgggcaacgtgtcggcgggcccaagcccggcagggctggccgtcagtggcgttctgatccccctggtctacctggtggtgtgcgtggtgggcctgctgggtaactcgctggtcatctatgtggtcctgcggcacacggccagcccttcagtcaccaacgtctacatcctcaacctggcgctggccgacgagctcttcatgctggggctgcccttcctggccgcccagaacgccctgtcctactggcccttcggctccctcatgtgccgcctggtcatggcggtggatggcatcaaccagttcaccagcatattctgcctgactgtcatgagcgtggaccgctacctggccgtggtacatcccacccgctcggcccgctggcgcacagctccggtggcccgcacggtcagcgcggctgtgtgggtggcctcagccgtggtggtgctgcccgtggtggtcttctcgggagtgccccgcggcatgagcacctgccacatgcagtggcccgagccggcggcggcctggcgagccggcttcatcatctacacggccgcactgggcttcttcgggccgctgctggtcatctgcctctgctacctgctcatcgtggtgaaggtgcgctcagctgggcgccgggtgtgggcaccctcgtgccagcggcggcggcgctccgaacgcagggtcacgcgcatggtggtggccgtggtggcgctcttcgtgctctgctggatgcccttctacgtgctcaacatcgtcaacgtggtgtgcccactgcccgaggagcctgccttctttgggctctacttcctggtggtggcgctgccctatgccaacagctgtgccaaccccatcctttatggcttcctctcctaccgcttcaagcagggcttccgcagggtcctgctgcggccctcccgccgtgtgcgcagccaggagcccactgtggggcccccggagaagactgaggaggaggatgaggaggaggaggatggggaggagagcagggaggggggcaaggggaaggagatgaacggccgggtcagccagatcacgcagcctggcaccagcgggcaggagcggccgcccagcagagtggccagcaaggagcagcagctcctaccccaagaggcttccactggggagaagtccagcacgatgcgcatcagctacctgtagggcctggggaaagccaggatggcccgaggaagaggcagaagccgtgggtgtgcctagggcctacttcccaaggtgccacaggcccatgatgggatgttgaggggcctggactttgatgctattgctgccaggtcttgctgtgtgaccttgggtaggttgcttctactctctgggccttgttttctcctctgtgactcagggataggagtcatcagcctggatgagctatgtcagatgagaggtttggagggcactgttgctgggctgacctggctgagcaggcaaaaggtgggtgcagactggcctccccccagggatggagtgtcttggggcatcaacta

SEQ ID NO: 4033 - protein, 418 aa, Homo sapiens
MDMLHPSSVSTTSEPENASSAWPPDATLGNVSAGPSPAGLAVSGVLIPLVYLVVCVVGLLGNSLVIYVVLRHTASPSVTNVYILNLALADELFMLGLPFLAAQNALSYWPFGSLMCRLVMAVDGINQFTSIFCLTVMSVDRYLAVVHPTRSARWRTAPVARTVSAAVWVASAVVVLPVVVFSGVPRGMSTCHMQWPEPAAAWRAGFIIYTAALGFFGPLLVICLCYLLIVVKVRSAGRRVWAPSCQRRRRSERRVTRMVVAVVALFVLCWMPFYVLNIVNVVCPLPEEPAFFGLYFLVVALPYANSCANPILYGFLSYRFKQGFRRVLLRPSRRVRSQEPTVGPPEKTEEEDEEEEDGEESREGGKGKEMNGRVSQITQPGTSGQERPPSRVASKEQQLLPQEASTGEKSSTMRISYL

SEQ ID NO: 4034 - DNA, 1516 bp, Homo sapiens
tgccccaccaccgctgctcctcagcaggcgcctcaccagcctccacaccccttgcgcccgcagaaacgcgcctggccctgagctgtcaccaccgacactctccaggctccggacacgatgcaggccatcaagtgtgtggtggtgggagatggggccgtgggcaagacctgccttctcatcagctacaccaccaacgcctttcccggagagtacatccccaccgtgtttgacaactattcagccaatgtgatggtggacagcaagccagtgaacctggggctgtgggacactgctgggcaggaggactacgaccgtctccggccgctctcctatccacagacggacgtcttcctcatctgcttctccctcgtcagcccagcctcttatgagaacgtccgcgccaagtggttcccagaagtgcggcaccactgccccagcacacccatcatcctggtgggcaccaagctggacctgcgggacgacaaggacaccatcgagaaactgaaggagaagaagctggctcccatcacctacccgcagggcctggcactggccaaggagattgactcggtgaaatacctggagtgctcagctctcacccagagaggcctgaaaaccgtgttcgacgaggccatccgggccgtgctgtgccctcagcccacgcggcagcagaagcgcgcctgcagcctcctctaggggttgcaccccagcgctcccacctagatgggtctgatcctccaggatccccacccaaagcctgatggcaccccggctggccatgctgtcccctccctgtggcgtttcttagcagatggctgcagagcttcgttgatggtcttttctgtactggaggcctcctgaggccaggaacgtgcaaatttgcaggtgctgcatcccaagcccctcatgctcctgccttcctgagggccagaggggagccccaggacccattaagccacccccgtgttcctgccgtcagtgccaactgccgcatgtggaagcatctacccgttcactccagtcccaccccacgcctgactcccctctggaaactgcaggccagatggttgctgccacaacttgtgtaccttcagggatggggctcttactccctcctgaggccagctgctctaatatcgatggtcctgcttgccagagagttcctctacccagcaaaaatgagtgtctcagaagtgtgctcctctggcctcagttctcctcttttggaacaacataaaacaaatttaattttctacgcctctggggatatctgctcagccaatggaaaatctgggttcaaccagcccctgccatttcttaagactttctgctgcactcacaggatcctgagctgcacttacctgtgagagtcttcaaacttttaaaccttgccagtcaggacttttgctattgcaaatagaaaacccaactcaacctgcttaagcagaaaataaatttattgattcaaaaaaaaaaaaaaaaaaaaaaaaaaaaaaaaaaaaaaaaaaaaaaaaaa

SEQ ID NO: 4035 - protein, 192 aa, Homo sapiens
MQAIKCVVVGDGAVGKTCLLISYTTNAFPGEYIPTVFDNYSANVMVDSKPVNLGLWDTAGQEDYDRLRPLSYPQTDVFLICFSLVSPASYENVRAKWFPEVRHHCPSTPIILVGTKLDLRDDKDTIEKLKEKKLAPITYPQGLALAKEIDSVKYLECSALTQRGLKTVFDEAIRAVLCPQPTRQQKRACSLL

SEQ ID NO: 4036 - DNA, 8192 bp, Homo sapiens
ggacagcgccgaggaggaagaggttgatggcggcggcggagctccgagagacctcggctgggcaggggccggccgtggcgggccggggactgcgcctctagagccgcgagttctcgggaattcgccgcagcggacgcgctcggcgaatttgtgctcttgtgccctcctccgggcttgggcccaggcccggcccctcgcacttgcccttaccttttctatcgagtccgcatccctctccagccactgcgacccggcgaagagaaaaaggaacttcccccaccccctcgggtgccgtcggagccccccagcccacccctgggtgcggcgcggggaccccgggccgaagaagagatttcctgaggattctggttttcctcgcttgtatctccgaaagaattaaaaatggccgagaatgtggtggaaccggggccgccttcagccaagcggcctaaactctcatctccggccctctcggcgtccgccagcgatggcacagattttggctctctatttgacttggagcacgacttaccagatgaattaatcaactctacagaattgggactaaccaatggtggtgatattaatcagcttcagacaagtcttggcatggtacaagatgcagcttctaaacataaacagctgtcagaattgctgcgatctggtagttcccctaacctcaatatgggagttggtggcccaggtcaagtcatggccagccaggcccaacagagcagtcctggattaggtttgataaatagcatggtcaaaagcccaatgacacaggcaggcttgacttctcccaacatggggatgggcactagtggaccaaatcagggtcctacgcagtcaacaggtatgatgaacagtccagtaaatcagcctgccatgggaatgaacacagggatgaatgcgggcatgaatcctggaatgttggctgcaggcaatggacaagggataatgcctaatcaagtcatgaacggttcaattggagcaggccgagggcgacagaatatgcagtacccaaacccaggcatgggaagtgctggcaacttactgactgagcctcttcagcagggctctccccagatgggaggacaaacaggattgagaggcccccagcctcttaagatgggaatgatgaacaaccccaatccttatggttcaccatatactcagaatcctggacagcagattggagccagtggccttggtctccagattcagacaaaaactgtactatcaaataacttatctccatttgctatggacaaaaaggcagttcctggtggaggaatgcccaacatgggtcaacagccagccccgcaggtccagcagccaggcctggtgactccagttgcccaagggatgggttctggagcacatacagctgatccagagaagcgcaagctcatccagcagcagcttgttctccttttgcatgctcacaagtgccagcgccgggaacaggccaatggggaagtgaggcagtgcaaccttccccactgtcgcacaatgaagaatgtcctaaaccacatgacacactgccagtcaggcaagtcttgccaagtggcacactgtgcatcttctcgacaaatcatttcacactggaagaattgtacaagacatgattgtcctgtgtgtctccccctcaaaaatgctggtgataagagaaatcaacagccaattttgactggagcacccgttggacttggaaatcctagctctctaggggtgggtcaacagtctgcccccaacctaagcactgttagtcagattgatcccagctccatagaaagagcctatgcagctcttggactaccctatcaagtaaatcagatgccgacacaaccccaggtgcaagcaaagaaccagcagaatcagcagcctgggcagtctccccaaggcatgcggcccatgagcaacatgagtgctagtcctatgggagtaaatggaggtgtaggagttcaaacgccgagtcttctttctgactcaatgttgcattcagccataaattctcaaaacccaatgatgagtgaaaatgccagtgtgccctccctgggtcctatgccaacagcagctcaaccatccactactggaattcggaaacagtggcacgaagatattactcaggatcttcgaaatcatcttgttcacaaactcgtccaagccatatttcctacgccggatcctgctgctttaaaagacagacggatggaaaacctagttgcatatgctcggaaagttgaaggggacatgtatgaatctgcaaacaatcgagcggaatactaccaccttctagctgagaaaatctataagatccagaaagaactagaagaaaaacgaaggaccagactacagaagcagaacatgctaccaaatgctgcaggcatggttccagtttccatgaatccagggcctaacatgggacagccgcaaccaggaatgacttctaatggccctctacctgacccaagtatgatccgtggcagtgtgccaaaccagatgatgcctcgaataactccacaatctggtttgaatcaatttggccagatgagcatggcccagccccctattgtaccccggcaaacccctcctcttcagcaccatggacagttggctcaacctggagctctcaacccgcctatgggctatgggcctcgtatgcaacagccttccaaccagggccagttccttcctcagactcagttcccatcacagggaatgaatgtaacaaatatccctttggctccgtccagcggtcaagctccagtgtctcaagcacaaatgtctagttcttcctgcccggtgaactctcctataatgcctccagggtctcaggggagccacattcactgtccccagcttcctcaaccagctcttcatcagaattcaccctcgcctgtacctagtcgtacccccacccctcaccatactcccccaagcataggggctcagcagccaccagcaacaacaattccagcccctgttcctacacctcctgccatgccacctgggccacagtcccaggctctacatccccctccaaggcagacacctacaccaccaacaacacaacttccccaacaagtgcagccttcacttcctgctgcaccttctgctgaccagccccagcagcagcctcgctcacagcagagcacagcagcgtctgttcctaccccaacagcaccgctgcttcctccgcagcctgcaactccactttcccagccagctgtaagcattgaaggacaggtatcaaatcctccatctactagtagcacagaagtgaattctcaggccattgctgagaagcagccttcccaggaagtgaagatggaggccaaaatggaagtggatcaaccagaaccagcagatactcagccggaggatatttcagagtctaaagtggaagactgtaaaatggaatctaccgaaacagaagagagaagcactgagttaaaaactgaaataaaagaggaggaagaccagccaagtacttcagctacccagtcatctccggctccaggacagtcaaagaaaaagattttcaaaccagaagaactacgacaggcactgatgccaactttggaggcactttaccgtcaggatccagaatcccttccctttcgtcaacctgtggaccctcagcttttaggaatccctgattactttgatattgtgaagagccccatggatctttctaccattaagaggaagttagacactggacagtatcaggagccctggcagtatgtcgatgatatttggcttatgttcaataatgcctggttatataaccggaaaacatcacgggtatacaaatactgctccaagctctctgaggtctttgaacaagaaattgacccagtgatgcaaagccttggatactgttgtggcagaaagttggagttctctccacagacactgtgttgctacggcaaacagttgtgcacaatacctcgtgatgccacttattacagttaccagaacaggtatcatttctgtgagaagtgtttcaatgagatccaaggggagagcgtttctttgggggatgacccttcccagcctcaaactacaataaataaagaacaattttccaagagaaaaaatgacacactggatcctgaactgtttgttgaatgtacagagtgcggaagaaagatgcatcagatctgtgtccttcaccatgagatcatctggcctgctggattcgtctgtgatggctgtttaaagaaaagtgcacgaactaggaaagaaaataagttttctgctaaaaggttgccatctaccagacttggcacctttctagagaatcgtgtgaatgactttctgaggcgacagaatcaccctgagtcaggagaggtcactgttagagtagttcatgcttctgacaaaaccgtggaagtaaaaccaggcatgaaagcaaggtttgtggacagtggagagatggcagaatcctttccataccgaaccaaagccctctttgcctttgaagaaattgatggtgttgacctgtgcttctttggcatgcatgttcaagagtatggctctgactgccctccacccaaccagaggagagtatacatatcttacctcgatagtgttcatttcttccgtcctaaatgcttgaggactgcagtctatcatgaaatcctaattggatatttagaatatgtcaagaaattaggttacacaacagggcatatttgggcatgtccaccaagtgagggagatgattatatcttccattgccatcctcctgaccagaagatacccaagcccaagcgactgcaggaatggtacaaaaaaatgcttgacaaggctgtatcagagcgtattgtccatgactacaaggatatttttaaacaagctactgaagatagattaacaagtgcaaaggaattgccttatttcgagggtgatttctggcccaatgttctggaagaaagcattaaggaactggaacaggaggaagaagagagaaaacgagaggaaaacaccagcaatgaaagcacagatgtgaccaagggagacagcaaaaatgctaaaaagaagaataataagaaaaccagcaaaaataagagcagcctgagtaggggcaacaagaagaaacccgggatgcccaatgtatctaacgacctctcacagaaactatatgccaccatggagaagcataaagaggtcttctttgtgatccgcctcattgctggccctgctgccaactccctgcctcccattgttgatcctgatcctctcatcccctgcgatctgatggatggtcgggatgcgtttctcacgctggcaagggacaagcacctggagttctcttcactccgaagagcccagtggtccaccatgtgcatgctggtggagctgcacacgcagagccaggaccgctttgtctacacctgcaatgaatgcaagcaccatgtggagacacgctggcactgtactgtctgtgaggattatgacttgtgtatcacctgctataacactaaaaaccatgaccacaaaatggagaaactaggccttggcttagatgatgagagcaacaaccagcaggctgcagccacccagagcccaggcgattctcgccgcctgagtatccagcgctgcatccagtctctggtccatgcttgccagtgtcggaatgccaattgctcactgccatcctgccagaagatgaagcgggttgtgcagcataccaagggttgcaaacggaaaaccaatggcgggtgccccatctgcaagcagctcattgccctctgctgctaccatgccaagcactgccaggagaacaaatgcccggtgccgttctgcctaaacatcaagcagaagctccggcagcaacagctgcagcaccgactacagcaggcccaaatgcttcgcaggaggatggccagcatgcagcggactggtgtggttgggcagcaacagggcctcccttcccccactcctgccactccaacgacaccaactggccaacagccaaccaccccgcagacgccccagcccacttctcagcctcagcctacccctcccaatagcatgccaccctacttgcccaggactcaagctgctggccctgtgtcccagggtaaggcagcaggccaggtgacccctccaacccctcctcagactgctcagccaccccttccagggcccccacctgcagcagtggaaatggcaatgcagattcagagagcagcggagacgcagcgccagatggcccacgtgcaaatttttcaaaggccaatccaacaccagatgcccccgatgactcccatggcccccatgggtatgaacccacctcccatgaccagaggtcccagtgggcatttggagccagggatgggaccgacagggatgcagcaacagccaccctggagccaaggaggattgcctcagccccagcaactacagtctgggatgccaaggccagccatgatgtcagtggcccagcatggtcaacctttgaacatggctccacaaccaggattgggccaggtaggtatcagcccactcaaaccaggcactgtgtctcaacaagccttacaaaaccttttgcggactctcaggtctcccagctctcccctgcagcagcaacaggtgcttagtatccttcacgccaacccccagctgttggctgcattcatcaagcagcgggctgccaagtatgccaactctaatccacaacccatccctgggcagcctggcatgccccaggggcagccagggctacagccacctaccatgccaggtcagcagggggtccactccaatccagccatgcagaacatgaatccaatgcaggcgggcgttcagagggctggcctgccccagcagcaaccacagcagcaactccagccacccatgggagggatgagcccccaggctcagcagatgaacatgaaccacaacaccatgccttcacaattccgagacatcttgagacgacagcaaatgatgcaacagcagcagcaacagggagcagggccaggaataggccctggaatggccaaccataaccagttccagcaaccccaaggagttggctacccaccacagcagcagcagcggatgcagcatcacatgcaacagatgcaacaaggaaatatgggacagataggccagcttccccaggccttgggagcagaggcaggtgccagtctacaggcctatcagcagcgactccttcagcaacagatggggtcccctgttcagcccaaccccatgagcccccagcagcatatgctcccaaatcaggcccagtccccacacctacaaggccagcagatccctaattctctctccaatcaagtgcgctctccccagcctgtcccttctccacggccacagtcccagcccccccactccagtccttccccaaggatgcagcctcagccttctccacaccacgtttccccacagacaagttccccacatcctggactggtagctgcccaggccaaccccatggaacaagggcattttgccagcccggaccagaattcaatgctttctcagcttgctagcaatccaggcatggcaaacctccatggtgcaagcgccacggacctgggactcagcaccgataactcagacttgaattcaaacctctcacagagtacactagacatacactagagacaccttgtagtattttgggagcaaaaaaattattttctcttaacaagactttttgtactgaaaacaatttttttgaatctttcgtagcctaaaagacaattttccttggaacacataagaactgtgcagtagccgtttgtggtttaaagcaaacatgcaagatgaacctgagggatgatagaatacaaagaatatatttttgttatggctggttaccaccagcctttcttcccctttgtgtgtgtggttcaagtgtgcactgggaggaggctgaggcctgtgaagccaaacaatatgctcctgccttgcacctccaataggttttattattttttttaaattaatgaacatatgtaatattaatagttattatttactggtgcagatggttgacatttttccctattttcctcactttatggaagagttaaaacatttctaaaccagaggacaaaaggggttaatgttactttaaaattacattctatatatatataaatatatataaatatatattaaaataccagttttttttctctggg

SEQ ID NO: 4037 - protein, 2414 aa, Homo sapiens
MAENVVEPGPPSAKRPKLSSPALSASASDGTDFGSLFDLEHDLPDELINSTELGLTNGGDINQLQTSLGMVQDAASKHKQLSELLRSGSSPNLNMGVGGPGQVMASQAQQSSPGLGLINSMVKSPMTQAGLTSPNMGMGTSGPNQGPTQSTGMMNSPVNQPAMGMNTGMNAGMNPGMLAAGNGQGIMPNQVMNGSIGAGRGRQNMQYPNPGMGSAGNLLTEPLQQGSPQMGGQTGLRGPQPLKMGMMNNPNPYGSPYTQNPGQQIGASGLGLQIQTKTVLSNNLSPFAMDKKAVPGGGMPNMGQQPAPQVQQPGLVTPVAQGMGSGAHTADPEKRKLIQQQLVLLLHAHKCQRREQANGEVRQCNLPHCRTMKNVLNHMTHCQSGKSCQVAHCASSRQIISHWKNCTRHDCPVCLPLKNAGDKRNQQPILTGAPVGLGNPSSLGVGQQSAPNLSTVSQIDPSSIERAYAALGLPYQVNQMPTQPQVQAKNQQNQQPGQSPQGMRPMSNMSASPMGVNGGVGVQTPSLLSDSMLHSAINSQNPMMSENASVPSLGPMPTAAQPSTTGIRKQWHEDITQDLRNHLVHKLVQAIFPTPDPAALKDRRMENLVAYARKVEGDMYESANNRAEYYHLLAEKIYKIQKELEEKRRTRLQKQNMLPNAAGMVPVSMNPGPNMGQPQPGMTSNGPLPDPSMIRGSVPNQMMPRITPQSGLNQFGQMSMAQPPIVPRQTPPLQHHGQLAQPGALNPPMGYGPRMQQPSNQGQFLPQTQFPSQGMNVTNIPLAPSSGQAPVSQAQMSSSSCPVNSPIMPPGSQGSHIHCPQLPQPALHQNSPSPVPSRTPTPHHTPPSIGAQQPPATTIPAPVPTPPAMPPGPQSQALHPPPRQTPTPPTTQLPQQVQPSLPAAPSADQPQQQPRSQQSTAASVPTPTAPLLPPQPATPLSQPAVSIEGQVSNPPSTSSTEVNSQAIAEKQPSQEVKMEAKMEVDQPEPADTQPEDISESKVEDCKMESTETEERSTELKTEIKEEEDQPSTSATQSSPAPGQSKKKIFKPEELRQALMPTLEALYRQDPESLPFRQPVDPQLLGIPDYFDIVKSPMDLSTIKRKLDTGQYQEPWQYVDDIWLMFNNAWLYNRKTSRVYKYCSKLSEVFEQEIDPVMQSLGYCCGRKLEFSPQTLCCYGKQLCTIPRDATYYSYQNRYHFCEKCFNEIQGESVSLGDDPSQPQTTINKEQFSKRKNDTLDPELFVECTECGRKMHQICVLHHEIIWPAGFVCDGCLKKSARTRKENKFSAKRLPSTRLGTFLENRVNDFLRRQNHPESGEVTVRVVHASDKTVEVKPGMKARFVDSGEMAESFPYRTKALFAFEEIDGVDLCFFGMHVQEYGSDCPPPNQRRVYISYLDSVHFFRPKCLRTAVYHEILIGYLEYVKKLGYTTGHIWACPPSEGDDYIFHCHPPDQKIPKPKRLQEWYKKMLDKAVSERIVHDYKDIFKQATEDRLTSAKELPYFEGDFWPNVLEESIKELEQEEEERKREENTSNESTDVTKGDSKNAKKKNNKKTSKNKSSLSRGNKKKPGMPNVSNDLSQKLYATMEKHKEVFFVIRLIAGPAANSLPPIVDPDPLIPCDLMDGRDAFLTLARDKHLEFSSLRRAQWSTMCMLVELHTQSQDRFVYTCNECKHHVETRWHCTVCEDYDLCITCYNTKNHDHKMEKLGLGLDDESNNQQAAATQSPGDSRRLSIQRCIQSLVHACQCRNANCSLPSCQKMKRVVQHTKGCKRKTNGGCPICKQLIALCCYHAKHCQENKCPVPFCLNIKQKLRQQQLQHRLQQAQMLRRRMASMQRTGVVGQQQGLPSPTPATPTTPTGQQPTTPQTPQPTSQPQPTPPNSMPPYLPRTQAAGPVSQGKAAGQVTPPTPPQTAQPPLPGPPPAAVEMAMQIQRAAETQRQMAHVQIFQRPIQHQMPPMTPMAPMGMNPPPMTRGPSGHLEPGMGPTGMQQQPPWSQGGLPQPQQLQSGMPRPAMMSVAQHGQPLNMAPQPGLGQVGISPLKPGTVSQQALQNLLRTLRSPSSPLQQQQVLSILHANPQLLAAFIKQRAAKYANSNPQPIPGQPGMPQGQPGLQPPTMPGQQGVHSNPAMQNMNPMQAGVQRAGLPQQQPQQQLQPPMGGMSPQAQQMNMNHNTMPSQFRDILRRQQMMQQQQQQGAGPGIGPGMANHNQFQQPQGVGYPPQQQQRMQHHMQQMQQGNMGQIGQLPQALGAEAGASLQAYQQRLLQQQMGSPVQPNPMSPQQHMLPNQAQSPHLQGQQIPNSLSNQVRSPQPVPSPRPQSQPPHSSPSPRMQPQPSPHHVSPQTSSPHPGLVAAQANPMEQGHFASPDQNSMLSQLASNPGMANLHGASATDLGLSTDNSDLNSNLSQSTLDIH

SEQ ID NO: 4038 - DNA, 3310 bp, Homo sapiens
ggcaggccaatatggcttcctgcacctggtgacgcttggcgaaactgaggtctcatggagaagccccggagtattgaggagaccccatcttcagaaccaatggaggaagaggaagatgacgacttggagctgtttggtggctatgatagtttccggagttataacagcagtgtgggcagtgagagcagctcctatctggaggagtcaagtgaagcagaaaatgaggatcgggaagcaggggaactgccgacctccccgctgcatttgctcagccctgggactcctcgctccttggatggcagtggttctgagccagctgtctgtgagatgtgtggtatcgtgggtacaagggaagccttcttctccaagaccaagaggttctgcagcgtctcctgctccaggagctactcctccaactccaagaaagccagtatcttggctaggttacagggaaaaccaccgaccaaaaaagccaaagtcctgcacaaggctgcctggtctgccaaaattggagccttcctccactctcaagggacaggacagctggcagatgggacaccaacaggacaagacgctctggtcttgggcttcgactgggggaagttcctgaaggatcacagttacaaggctgctcccgtcagctgtttcaagcacgtcccactctatgaccagtgggaggatgtgatgaaagggatgaaggtggaggtgctcaacagtgatgctgtgctccccagccgggtgtactggatcgcctctgtcatccagacagcagggtatcgggtgctgcttcggtatgaaggctttgaaaatgacgccagccatgacttctggtgcaacctgggaacagtggatgtccaccccattggctggtgtgccatcaacagcaagatcctagtgcccccacggaccatccatgccaagttcaccgactggaagggctacctcatgaaacggctggtgggctccaggacgcttcccgtggatttccacatcaagatggtggagagcatgaagtacccctttaggcagggcatgcggctggaagtggtggacaagtcccaggtgtcacgcactcgcatggctgtggtggacacagtaatcgggggtcgcctacggctcctctacgaggatggtgacagtgacgacgacttctggtgccacatgtggagccccctgatccacccagtgggttggtcacgacgtgtgggccacggcatcaagatgtcagagaggcgaagtgacatggcccatcaccccaccttccggaagatctactgtgatgccgttccttacctcttcaagaaggtacgagcagtctacacagaaggcggttggtttgaggaagggatgaagctggaggccattgaccccctgaatctgggcaacatctgcgtggcaactgtctgtaaggttctcctggatggatacctgatgatctgtgtggacggggggccctccacagatggcttggactggttctgctaccatgcctcttcccacgccatcttcccggccaccttctgtcagaagaatgacattgagctcacaccgccaaaaggttatgaggcacagactttcaactgggagaactacttggagaagaccaagtcgaaagccgctccatcgagactctttaacatggattgcccaaaccatggcttcaaggtgggcatgaagctggaggccgtggacctgatggagccccggctcatctgtgtggccacggtgaaacgagtggtgcatcggctcctcagcatccactttgacggctgggacagcgagtacgaccagtgggtggactgcgagtccccagacatctaccccgtcggctggtgtgagctcaccggctaccagctccagcctcctgtggccgcaggtaaactacccaggtccctctgagcagccctggtaacaagggtgggaagaagggacagctgttctccggcccctcctccagccccgccctctcctcattgcccagaaccggccacaccgctgaaggccaaagaggccacaaagaagaaaaagaaacagtttgggaagaaaaggaaaagaatcccgcccactaagacgcgacccctcagacaggggtccaagaagcccctgctggaggacgaccctcagggtgccaggaagatctcgtcggagcctgttcctggcgagatcattgctgtgcgtgtgaaggaagagcatctagacgtggcctcgcccgacaaggcttcaagtccagagctgcctgtctccgtcgagaacatcaagcaggaaacagacgactgagccttcctgcctccagcctggcttctagctggaagccagcccagcgtttctctaccaccaccaccatgcctccacctgactttggcttggagactgatcctctctgtgtaaattctgcccggtgctgtgaaggctggacggtggaggacctgctggggtctcctgggacccgcctgttgcttctgccctcccctgtggaaaggtctatatgacgggccgcctgaggccccagaactcgtctgtgaaccaccttttccagccagagttcccaaagctggaacgctagctgcctgctcttccttaagatggcctccccccgacccgccacggccctcagttgccagggatggggccaccactgtcacactgtggaatacaagacagtgaactctgtctgcctgaacgagccatgtaaattaagttctagagcagctctctgagcaggataaggtcccctgacagtgagttgtgtggtgggggcagcctctgcctcaaaaattcaccaagcagaatgcctctcagcctcatgtgttggtcctctgctcctcctagctccccagggatgttggggacccagcttgtctcggcagctaagaagcagtgaccaggatgtggattttggcgacctgtgtggtggccttgagctgctttctgtgtttgtgaggactgactcccatttcctaaaggaaatgcccccggggaggacattgggaggaagatggcctgagtgtgcactttggctctgctacctgctcctgaagccccgctaaaaataattcatccaagattcctttgtagttaaagggtccagttctgactggagcctctagagagctgggcttgtatgttcttttggccttttgttcctacctaaatgaagaaaccatgcctggaggggccgtgaacacagaaccctcaagacaaggatgacagagctggaggacacatctagctgccattgcaacctcactgggctccccagactctgtgtgtgagaaattaaaccccctgcttgcttgaaaaaaaaaaaaaa

SEQ ID NO: 4039 - protein, 614 aa, Homo sapiens
MEKPRSIEETPSSEPMEEEEDDDLELFGGYDSFRSYNSSVGSESSSYLEESSEAENEDREAGELPTSPLHLLSPGTPRSLDGSGSEPAVCEMCGIVGTREAFFSKTKRFCSVSCSRSYSSNSKKASILARLQGKPPTKKAKVLHKAAWSAKIGAFLHSQGTGQLADGTPTGQDALVLGFDWGKFLKDHSYKAAPVSCFKHVPLYDQWEDVMKGMKVEVLNSDAVLPSRVYWIASVIQTAGYRVLLRYEGFENDASHDFWCNLGTVDVHPIGWCAINSKILVPPRTIHAKFTDWKGYLMKRLVGSRTLPVDFHIKMVESMKYPFRQGMRLEVVDKSQVSRTRMAVVDTVIGGRLRLLYEDGDSDDDFWCHMWSPLIHPVGWSRRVGHGIKMSERRSDMAHHPTFRKIYCDAVPYLFKKVRAVYTEGGWFEEGMKLEAIDPLNLGNICVATVCKVLLDGYLMICVDGGPSTDGLDWFCYHASSHAIFPATFCQKNDIELTPPKGYEAQTFNWENYLEKTKSKAAPSRLFNMDCPNHGFKVGMKLEAVDLMEPRLICVATVKRVVHRLLSIHFDGWDSEYDQWVDCESPDIYPVGWCELTGYQLQPPVAAGKLPRSL

SEQ ID NO: 4040 - DNA, 3205 bp, Homo sapiens
ggcaggccaatatggcttcctgcacctggtgacgcttggcgaaactgaggtctcatggagaagccccggagtattgaggagaccccatcttcagaaccaatggaggaagaggaagatgacgacttggagctgtttggtggctatgatagtttccggagttataacagcagtgtgggcagtgagagcagctcctatctggaggagtcaagtgaagcagaaaatgaggatcgggaagcaggggaactgccgacctccccgctgcatttgctcagccctgggactcctcgctccttggatggcagtggttctgagccagctgtctgtgagatgtgtggtatcgtgggtacaagggaagccttcttctccaagaccaagaggttctgcagcgtctcctgctccaggagctactcctccaactccaagaaagccagtatcttggctaggttacagggaaaaccaccgaccaaaaaagccaaagtcctgcacaaggctgcctggtctgccaaaattggagccttcctccactctcaagggacaggacagctggcagatgggacaccaacaggacaagacgctctggtcttgggcttcgactgggggaagttcctgaaggatcacagttacaaggctgctcccgtcagctgtttcaagcacgtcccactctatgaccagtgggaggatgtgatgaaagggatgaaggtggaggtgctcaacagtgatgctgtgctccccagccgggtgtactggatcgcctctgtcatccagacagcagggtatcgggtgctgcttcggtatgaaggctttgaaaatgacgccagccatgacttctggtgcaacctgggaacagtggatgtccaccccattggctggtgtgccatcaacagcaagatcctagtgcccccacggaccatccatgccaagttcaccgactggaagggctacctcatgaaacggctggtgggctccaggacgcttcccgtggatttccacatcaagatggtggagagcatgaagtacccctttaggcagggcatgcggctggaagtggtggacaagtcccaggtgtcacgcactcgcatggctgtggtggacacagtaatcgggggtcgcctacggctcctctacgaggatggtgacagtgacgacgacttctggtgccacatgtggagccccctgatccacccagtgggttggtcacgacgtgtgggccacggcatcaagatgtcagagaggcgaagtgacatggcccatcaccccaccttccggaagatctactgtgatgccgttccttacctcttcaagaaggtacgagcagtctacacagaaggcggttggtttgaggaagggatgaagctggaggccattgaccccctgaatctgggcaacatctgcgtggcaactgtctgtaaggttctcctggatggatacctgatgatctgtgtggacggggggccctccacagatggcttggactggttctgctaccatgcctcttcccacgccatcttcccggccaccttctgtcagaagaatgacattgagctcacaccgccaaaaggttatgaggcacagactttcaactgggagaactacttggagaagaccaagtcgaaagccgctccatcgagactctttaacatggattgcccaaaccatggcttcaaggtgggcatgaagctggaggccgtggacctgatggagccccggctcatctgtgtggccacggtgaaacgagtggtgcatcggctcctcagcatccactttgacggctgggacagcgagtacgaccagtgggtggactgcgagtccccagacatctaccccgtcggctggtgtgagctcaccggctaccagctccagcctcctgtggccgcagaaccggccacaccgctgaaggccaaagaggccacaaagaagaaaaagaaacagtttgggaagaaaaggaaaagaatcccgcccactaagacgcgacccctcagacaggggtccaagaagcccctgctggaggacgaccctcagggtgccaggaagatctcgtcggagcctgttcctggcgagatcattgctgtgcgtgtgaaggaagagcatctagacgtggcctcgcccgacaaggcttcaagtccagagctgcctgtctccgtcgagaacatcaagcaggaaacagacgactgagccttcctgcctccagcctggcttctagctggaagccagcccagcgtttctctaccaccaccaccatgcctccacctgactttggcttggagactgatcctctctgtgtaaattctgcccggtgctgtgaaggctggacggtggaggacctgctggggtctcctgggacccgcctgttgcttctgccctcccctgtggaaaggtctatatgacgggccgcctgaggccccagaactcgtctgtgaaccaccttttccagccagagttcccaaagctggaacgctagctgcctgctcttccttaagatggcctccccccgacccgccacggccctcagttgccagggatggggccaccactgtcacactgtggaatacaagacagtgaactctgtctgcctgaacgagccatgtaaattaagttctagagcagctctctgagcaggataaggtcccctgacagtgagttgtgtggtgggggcagcctctgcctcaaaaattcaccaagcagaatgcctctcagcctcatgtgttggtcctctgctcctcctagctccccagggatgttggggacccagcttgtctcggcagctaagaagcagtgaccaggatgtggattttggcgacctgtgtggtggccttgagctgctttctgtgtttgtgaggactgactcccatttcctaaaggaaatgcccccggggaggacattgggaggaagatggcctgagtgtgcactttggctctgctacctgctcctgaagccccgctaaaaataattcatccaagattcctttgtagttaaagggtccagttctgactggagcctctagagagctgggcttgtatgttcttttggccttttgttcctacctaaatgaagaaaccatgcctggaggggccgtgaacacagaaccctcaagacaaggatgacagagctggaggacacatctagctgccattgcaacctcactgggctccccagactctgtgtgtgagaaattaaaccccctgcttgcttgaaaaaaaaaaaaaa

SEQ ID NO: 4041 - protein, 705 aa, Homo sapiens
MEKPRSIEETPSSEPMEEEEDDDLELFGGYDSFRSYNSSVGSESSSYLEESSEAENEDREAGELPTSPLHLLSPGTPRSLDGSGSEPAVCEMCGIVGTREAFFSKTKRFCSVSCSRSYSSNSKKASILARLQGKPPTKKAKVLHKAAWSAKIGAFLHSQGTGQLADGTPTGQDALVLGFDWGKFLKDHSYKAAPVSCFKHVPLYDQWEDVMKGMKVEVLNSDAVLPSRVYWIASVIQTAGYRVLLRYEGFENDASHDFWCNLGTVDVHPIGWCAINSKILVPPRTIHAKFTDWKGYLMKRLVGSRTLPVDFHIKMVESMKYPFRQGMRLEVVDKSQVSRTRMAVVDTVIGGRLRLLYEDGDSDDDFWCHMWSPLIHPVGWSRRVGHGIKMSERRSDMAHHPTFRKIYCDAVPYLFKKVRAVYTEGGWFEEGMKLEAIDPLNLGNICVATVCKVLLDGYLMICVDGGPSTDGLDWFCYHASSHAIFPATFCQKNDIELTPPKGYEAQTFNWENYLEKTKSKAAPSRLFNMDCPNHGFKVGMKLEAVDLMEPRLICVATVKRVVHRLLSIHFDGWDSEYDQWVDCESPDIYPVGWCELTGYQLQPPVAAEPATPLKAKEATKKKKKQFGKKRKRIPPTKTRPLRQGSKKPLLEDDPQGARKISSEPVPGEIIAVRVKEEHLDVASPDKASSPELPVSVENIKQETDD

SEQ ID NO: 4042 - DNA, 2310 bp, Homo sapiens
atggtgcaaggggggattcagagcagctcagtggcctcaggctctggagaagccaccaactccaacgcaggggctggagcctgggacccaaaggagactccaaaacagacgatagtccagccccggagctccacccatgtccccttggtgctgccgcttcttgtacttctgctgctggccccggctaggcaggccgccgcccagcgctgcccacaggcctgcatctgtgacaactccaggcgacacgttgcctgccggtaccagaacctcactgaggtgccagacgccatccctgagctgacccagcggctggacctgcagggcaatttgctgaaggtgatccccgcagccgccttccagggcgtgcctcacctcacacacctggacctgcgccactgcgaggtggagctggtggccgagggcgccttccgtggcctgggccgcctgctcctgctcaacctggcctccaaccacctgcgtgagctgccccaggaggcgctggacgggctgggctcgttgcggcggctggagctggaggggaacgcactggaggagctgcggccggggacgttcggggcactgggtgcgctggccacgctaaacctggcccacaacgccctggtttacctgcccgccatggccttccaggggctactgcgcgtccgctggctgcggctgtcgcacaacgcgctcagcgtgctggcccccgaggccctggctggcctgcccgccctgagacggctcagcctacaccacaacgagctccaggctctgcccgggcctgtcttgtcccaggcccgcggcctggcccgtctggagctgggccacaacccgctcacctacgcgggcgaggaggacgggctggcgctgcccggcctgcgggagctgctgctggacggcggggccctgcaggccctgggtcccagggccttcgcacactgtccgcgcctgcacaccctcgacctccgcgggaaccagctagacaccctgcccccgctgcagggcccgggccagctgcgccggctgcggctgcaggggaatccgctgtggtgcggctgccaggcgcggcccctactcgagtggctggcgcgggcgcgcgaagaggaagagctggaagagcgggctgtggccgggccccgcgcccctccgcgcggccctccgcgcggccccggggaggagcgggcagtcgcgccttgccctcgcgcctgcgtgtgcgtccccgagtcccggcacagcagctgcgagggctgcggcctgcaggcggtgccccgcggcttccccagcgacacccagctcctggacctgaggcggaaccacttcccctcggtgccccgagcggccttccccggcctgggccacctggtgtcgctgcacctgcagcactgcggcatcgcggagctggaagcgggcgccctggccgggctgggccgcctgatctacctgtacctctccgacaaccagctcgcaggcctcagcgctgctgcccttgaaggggctccccgcctcggctacctgtacctagaacgcaaccgtttcctgcaggtgccaggggctgccctgcgcgccctgcccagcctcttctccctgcacctgcaggacaacgctgtggaccgcctggcacctggggacctggggagaacacgggccttgcgctgggtctacctgagtggaaaccgcatcaccgaagtgtcccttggggcgctgggcccagctcgggagctggagaagctgcacctggacaggaatcagctgcgagaggtgcccactggggccttggaggggctgcctgccctcctggagctgcagctctcgggcaacccactcagggccttgcgtgacggagccttccagcctgtgggcaggtcgctgcagcacctcttcctgaacagcagtggcctggagcagatttgtcctggggccttttcaggcctggggcccgggctccagagcctgcacctgcagaagaaccagcttcgggccctgcctgccctgcccagtctcagccagctggagctcatcgacctcagcagcaatcccttccactgtgactgccagctgcttccgctgcacaggtggcttactgggctgaacctgcgggtgggggccacctgcgccacccctcccaatgcccgtggccagagggtgaaggctgcagctgctgtctttgaagactgcccgggctgggctgccagaaaggccaagcggacaccagcctccaggcccagtgccaggagaacccccatcaaaggaagacagtgctccctgatctgtggcagcataatctccatctctgtcccaaccttcacgtga

SEQ ID NO: 4043 - protein, 769 aa, Homo sapiens
MVQGGIQSSSVASGSGEATNSNAGAGAWDPKETPKQTIVQPRSSTHVPLVLPLLVLLLLAPARQAAAQRCPQACICDNSRRHVACRYQNLTEVPDAIPELTQRLDLQGNLLKVIPAAAFQGVPHLTHLDLRHCEVELVAEGAFRGLGRLLLLNLASNHLRELPQEALDGLGSLRRLELEGNALEELRPGTFGALGALATLNLAHNALVYLPAMAFQGLLRVRWLRLSHNALSVLAPEALAGLPALRRLSLHHNELQALPGPVLSQARGLARLELGHNPLTYAGEEDGLALPGLRELLLDGGALQALGPRAFAHCPRLHTLDLRGNQLDTLPPLQGPGQLRRLRLQGNPLWCGCQARPLLEWLARAREEEELEERAVAGPRAPPRGPPRGPGEERAVAPCPRACVCVPESRHSSCEGCGLQAVPRGFPSDTQLLDLRRNHFPSVPRAAFPGLGHLVSLHLQHCGIAELEAGALAGLGRLIYLYLSDNQLAGLSAAALEGAPRLGYLYLERNRFLQVPGAALRALPSLFSLHLQDNAVDRLAPGDLGRTRALRWVYLSGNRITEVSLGALGPARELEKLHLDRNQLREVPTGALEGLPALLELQLSGNPLRALRDGAFQPVGRSLQHLFLNSSGLEQICPGAFSGLGPGLQSLHLQKNQLRALPALPSLSQLELIDLSSNPFHCDCQLLPLHRWLTGLNLRVGATCATPPNARGQRVKAAAAVFEDCPGWAARKAKRTPASRPSARRTPIKGRQCSLICGSIISISVPTFT

SEQ ID NO: 4044 - DNA, 3040 bp, Homo sapiens
aaatcctcctcctccgccatcatccgccgcggtgcggagagcaggtggtgctggaagcgcgtgaggccgggagctcgagagagctaacagactagccggctggacatctggaccgctggatccggaggtggcgaccccggcctgacccggaccctaaatccgtccccgccccagagggcggaggcgcgcgctcgattccccccacgcggcggcgccgcctgtttacgtctgcagatctccaggggagcccaccagcctagtcaacatggcctcggaagacattgccaagctggcagagacacttgccaagactcaggtggccgggggacagctgagtttcaaaggcaagagcctcaaactcaacactgcagaagatgctaaagatgtgattaaagagattgaagactttgacagcttggaggctctgcgtctggaaggcaacacagtgggcgtggaagcagccagggtcatcgccaaggccttagagaagaagtcggagttgaagcgctgccactggagtgacatgttcacgggaaggctgcggaccgagatcccaccagccctgatctcactaggggaaggactcatcacagctggggctcagctggtggagctggacttaagcgacaacgcattcgggcccgacggtgtgcaaggcttcgaggccctgctcaagagctcagcctgcttcaccctgcaggaactcaagctcaacaactgtggcatgggcattggcggcggcaagatcctggctgcagctctgaccgaatgtcaccggaaatccagtgcccaaggcaagcctctggccctgaaggtctttgtggctggcagaaaccgtctggagaatgatggcgccactgccttggcagaagcttttagggtcatcgggaccctggaggaggtccacatgccacagaatgggatcaaccaccctggcatcactgccctggcccaggctttcgctgtcaaccccctgctgcgggtcatcaacctgaatgacaacaccttcactgagaagggcgccgtggccatggccgagaccttgaagaccttgcggcaggtggaggtgattaattttggggactgcctggtgcgctccaagggtgcagttgccattgcagatgccatccgcggcggcctgcccaagctaaaggagctgaacttgtcattctgtgaaatcaagagggatgctgccctggctgttgctgaggccatggcagacaaagctgagctggagaagctggacctgaatggcaacaccctgggagaagaaggctgtgaacagcttcaggaggtgctggagggcttcaacatggccaaggtgctggcgtccctcagtgatgacgaggacgaggaggaggaggaggaaggagaagaggaagaagaggaagcagaagaagaggaggaggaagatgaggaagaggaggaagaagaggaggaggaggaggaagaagagcctcagcagcgagggcagggagagaagtcagccacgccctcacggaagattctggaccctaacactggggagccagctcccgtgctgtcctccccacctcctgcagacgtctccaccttcctggcttttccctctccagagaagctgctgcgcctagggcccaagagctccgtgctgatagcccagcagactgacacgtctgaccccgagaaggtggtctctgccttcctaaaggtgtcatctgtgttcaaggacgaagctactgtgaggatggcagtgcaggatgcagtagatgccctgatgcagaaggctttcaactcctcgtccttcaactccaacaccttcctcaccaggctgctcgtgcacatgggtctgctcaagagtgaagacaaggtcaaggccattgccaacctgtacggccccctgatggcgctgaaccacatggtgcagcaggactatttccccaaggcccttgcacccctgctgctggcgttcgtgaccaagcccaacagcgccctggaatcctgctccttcgcccgccacagtctgctgcagacgctgtacaaggtctagactcaaagcctctcccatcccttggcctggaccagtgagctggggagggactcggatgaactgaggcgcagcctacgccattgccttggacaggactctggccacaggcagggcgggtctgtgtcccatgtgtcctgtcagtcccctgagtatgtgtgtgggtgtggcgcatgtgcaggtctgtgcctcctgtcgggatttgggttttaacgtcttctgctggcccagccctgctctgttgtggggagttggcccccaggggaaagggctgtgagctgctccgccattaaactcacctccacctgagggcgctctgctgatctccgcctgggccctgatggccgtccccacccacctgccttccggcccggctccctggcggagccagaacccagggagttgcccgcgtgctgtccttcccctctgtgttgtgattgggttgtttcctgccctgcctggggctgcttctcgtcaccaagccctggtcctgcggcagctgtcacccctaccatccataccactgtgctgaccgctcagcctgaagagcagagaatgccatgggtgggactgtgggggtcggatcgtggggttgttggcagagggcaaccctgggccccacaccgtgtggacaggcagacaccagattgtccaggagcaggagctgctgggactgcgctggccccggacctagtgggccttctcctggctgctgagatgtcgtctgtgactggcctggctggagggggagtgttgacaacccaaagctgttctccagtctggggagggagaggcagggtccccaatgtccgagctgcatctggacgctgctcttaaaggacctcctggggcaggggagcggtagggtctggactgggcagatgctgtatgacctccctgagcacccgtgactgccccatgctttcccctttgtgctctgtgtgtgtctgggctgtgcccgggggcttcacaaataaagtcgtgtggcagcttcaaaaaaaaaaaaaaaaaaaa

SEQ ID NO: 4045 - protein, 587 aa, Homo sapiens
MASEDIAKLAETLAKTQVAGGQLSFKGKSLKLNTAEDAKDVIKEIEDFDSLEALRLEGNTVGVEAARVIAKALEKKSELKRCHWSDMFTGRLRTEIPPALISLGEGLITAGAQLVELDLSDNAFGPDGVQGFEALLKSSACFTLQELKLNNCGMGIGGGKILAAALTECHRKSSAQGKPLALKVFVAGRNRLENDGATALAEAFRVIGTLEEVHMPQNGINHPGITALAQAFAVNPLLRVINLNDNTFTEKGAVAMAETLKTLRQVEVINFGDCLVRSKGAVAIADAIRGGLPKLKELNLSFCEIKRDAALAVAEAMADKAELEKLDLNGNTLGEEGCEQLQEVLEGFNMAKVLASLSDDEDEEEEEEGEEEEEEAEEEEEEDEEEEEEEEEEEEEEPQQRGQGEKSATPSRKILDPNTGEPAPVLSSPPPADVSTFLAFPSPEKLLRLGPKSSVLIAQQTDTSDPEKVVSAFLKVSSVFKDEATVRMAVQDAVDALMQKAFNSSSFNSNTFLTRLLVHMGLLKSEDKVKAIANLYGPLMALNHMVQQDYFPKALAPLLLAFVTKPNSALESCSFARHSLLQTLYKV

SEQ ID NO: 4046 - DNA, 5868 bp, Homo sapiens
gccgaggggctggaaatgaaagtaaagcgctccagagccacatggacggagctgccggggcggcggcgccgggagcaggatgcggccgcccgtaattaaatagcatttactcttattattactaataataataacgtaatcatacctctagtcatagcataccatttatcgggctcggcgcaggcccgcggggagcgcagcccggcggagagactgatggagaggcagaaacggaaggcggacatcgagaaagggctgcagttcattcagtcgacactacccctaaagcaagaagaatatgaggcctttctgctcaagctggtgcagaatctgtttgctgagggcaatgatctgttccgggagaaggactataagcaggctctggtgcagtacatggaagggctgaacgtggccgactacgctgcctctgaccaggtggccctgccccgggagctgctgtgcaagctgcatgtcaatagggccgcctgctacttcaccatgggcctgtatgagaaggcgctggaggacagcgagaaggcgctgggcctggacagtgagagtatccgggcgttgttccgcaaggcacgcgctctcaatgaactgggacgccacaaggaggcctacgagtgcagcagccggtgttccctcgccctgccccacgatgaaagcgtgactcagcttggtcaggagctggcccagaaactggggctgcgagttcgcaaggcgtataagaggccccaggaattggaaaccttttctctgctcagtaacggcactgcggctggcgtggcagatcagggaacttctaatggattggggtccatagatgacatcgaaacagactgctacgtggaccctcgaggctccccagcccttctcccctccacgcccacgatgcccctgttccctcacgttctggacctgctggcccccctggacagcagcaggaccctccccagcaccgacagcctggatgacttctcagacggggatgtctttggcccagagctggacaccctcctggactcgctgtctctggtccagggtggcctgtctggcagcggcgtgcctagtgagttgccccagctgatacccgtgttccccggcgggaccccactgctaccacctgtggtgggtggctccatccctgtctccagcccactgccccccgcctccttcggcttggtcatggacccctccaagaagctggccgcctctgtgctggatgccctcgatcccccgggccccacgctggaccccctggacctgctgccgtactcggagacccggctggatgcactcgacagctttgggtcgacacgaggctccctggacaaacctgactccttcatggaggagaccaactcacaggaccaccgtccccctagcggtgctcagaaaccagccccctcgccagagccctgcatgcccaacactgccttgctcatcaagaaccccttggctgccacccacgagttcaagcaggcctgccagctctgctaccccaagacaggcccccgggctggcgactacacctaccgtgagggccttgagcacaagtgcaagcgggacatcctgctcggccggctccggagctcggaggaccagacctggaagcggatccggccccggcccactaagaccagcttcgtgggctcctactacctgtgcaaagacatgattaacaagcaggactgtaagtacggggataactgcaccttcgcctaccatcaggaggagatcgacgtgtggaccgaggagcggaagggcaccctcaaccgcgacctgctcttcgacccgctggggggtgttaagcgcggcagcctcaccatcgccaagctcctgaaggagcaccagggcatcttcaccttcctctgcgagatctgctttgacagtaaaccccggatcatcagcaaaggcaccaaggactctccgtctgtctgctccaacctggctgccaagcacagcttctacaacaacaagtgcctggtgcacatcgtccgctccacctccctcaagtactccaagatccgccagttccaggagcacttccagttcgacgtgtgccgccatgaggtgcgctacggctgcctgcgggaggacagctgccacttcgcccacagcttcatcgagctcaaggtctggctgctgcagcagtactcaggcatgacccacgaagacatcgttcaggagtctaagaagtactggcagcagatggaggcgcatgcggggaaggccagcagcagcatgggtgctccgaggacacatgggcccagcacctttgacctgcagatgaagtttgtatgtggccagtgctggagaaacgggcaggtggtggagcctgacaaggacctcaagtactgtagtgccaaggcccggcactgctggaccaaggagcggcgggtccttctggtgatgtccaaggccaagaggaaatgggtgtcagtgaggccactgccatccattcgtaacttcccacagcaatacgatctctgcatccatgcacagaacggccgcaagtgccaatatgtggggaactgctccttcgcacacagcccggaggagagggacatgtggaccttcatgaaggagaacaagatcctggacatgcagcagacctatgacatgtggctgaaaaaacacaacccaggaaagcctggagaagggacccccatcagttctcgggaaggggagaagcagatccagatgcccacggactacgcggacatcatgatgggctaccactgctggctctgcggcaagaacagcaacagcaagaagcagtggcagcagcacatccagtccgagaagcacaaggagaaggtcttcacgtccgacagtgacgccagcggctgggccttccgcttccccatgggcgagttccggctctgcgacaggctccagaagggcaaagcctgcccagatggggacaagtgccgctgcgcccatggacaggaggagctcaacgagtggctggaccggcgcgaggtgctgaagcagaagttggccaaggctcgcaaggacatgctgctgtgcccacgggacgacgactttggcaaatacaacttcctgctgcaagaggacggggaccttgccggtgccaccccagaagcccctgctgctgctgccaccgccaccactggggagtagggccaggtgttggccgtgggtgaagtcctggggtcagggggtggggtggggccagaaggcctgatagaagggtcagggcaggccaggggggtggggggccgccctcatcaggcagcccccagccccctgaggccctgtccatcttctccccaccaccgccccggtgtgcgtacccaggcgcacgtgctgcagcccccggaggccccgctgaaacctgggctgcccttcccccacccccacggctctcctggttgaggagggaggggcctggctgacccctccagcttcagcctccagctttaacttctgtctgctcctaatgggggcccaaagctcagggctggggagcctggggtccccacttgaatctccagcaggagggtccttctctccctggcccgtcctcctcccaccccctccccctgggggcaaatcaggacacaacagagggcagaggccccattagctttaaaatgtagccccaggttggagctgggaacactgtactggccacttaccctctggggcctcagctttccctccggaaggctgggaggaggtgggctagatgatctttggagcttaaggagtcccagccctttctctgatgccaccacctgaaccctgctccctcgtgggccagtgaaaatagactgtaggtcctcagagccttcagagatgatccagcccaaaccccattttgcagagaggaaaactgaggcctagaagggaggagtggtccacccacggtcccagcacaaggcagagctgggatgaaaacagggctgaaaagactcagggccaattattggctgagcccacggtcccctcagcagggatgcgatggtctctgaatcagtgtgcagctggggtcccaggcagcgctgcctgggggctggggaggggaggcccagaggagggctggccatgtgagcaccccatgaagggaccgccccctcccaaggatggtccctttgggtgcagcagcagaggtcacctcctgacatgcgctctgggaaaggtggcagagggcaggacaccatgagctcaggatctgtgtgaggtgtgggaggtgggaagggtgagggtctgggggaatgcggagaaaagggaggcttgaccccgggcaccatgggccactccaggatgggacacggcccctctttcttggggacccagtatgtcctctcctctagacccagacatacagttataaccgtctgtcctagcccctccctaatccctggccctcccagctgtctgggacttcagtggacccccagcccctgcccccactcaccaaggcctcgctcgtccctctcgtctgacatgtctgtgtgcacccccctcctctccaccctaccttccatcaaccagggcagatccaccgtgccctggttccccagacattccagaatgccccacatcattggcacaggagtggggcagccccggaaggaaccagggattaggctgtaggggggtgagaaggagagaagggaccaccccattcttctcaagcaaggattgccagcgcgcgctgacacagtgatgggctgcccagggctggaggggacgctgttcctcccgccgccactgcccaacctttcctgataatcgtggcatgcgccctttcctcttccctgccccaccccctggccgcagcaggccagcactgcagagtttgggtgctggtggtgtggctgtaggggaggggagaccacacccaaggtgggggctgtggccatgtgtggccgtgatgtcgatgatactcgttttccctgatccgtggtgttgcagtccgttgtcaccagccttgtttctagtgtgtatatatgtcgcccccgtgatgcatatatacacaggtattaaatatatcgctctatataatattatatatgtgtgtggtatccaaggaatcacttttatgagggctaaagataaagaatttggccagaaaatgcagccatccttgtgtgattaggagggtttcaggggccactggactatttgcaaggtgacagggactggagccatggctcagaggtgattcgggcagccagggacaggagccaccctccccaggcccaactctgctagcttcccagaccacccccatcgagtgcggagagagtgggagtgctcagggaaagaaggtgatttgtatttgtctccccgctgaaaagaacaggattcaagtccagagttttcatcttcagcctgtgatctgtccagggacccttgggatctggggcttcctggcctggccagagctggagcccccacagggtaaggaagagagagtgggaggcagagtgtgatggggaggagggacaggaagacccttttaatgatgagggtaactatttcagttgtgagccttctagggccccaggctgggaggctcagaggactgaatctgggacctgtgttccccccggcaggcagggacaagatggcatggcaagcatgggggcggggtgggtggggagggatgctgcatttctcagctgggcagtaatcaatttaatggtcctttaaaatgtctgtgtattaaaaatttaagaataccacactttaatattaaatattcataaggtctagtatcttgataataatgtagatgttttaataacaatttttgtccttcttaaaataaaatgaaagaaacttgcttcccttagcctttgttctagaaaataaacttgtgcactttga

SEQ ID NO: 4047 - protein, 977 aa, Homo sapiens
MERQKRKADIEKGLQFIQSTLPLKQEEYEAFLLKLVQNLFAEGNDLFREKDYKQALVQYMEGLNVADYAASDQVALPRELLCKLHVNRAACYFTMGLYEKALEDSEKALGLDSESIRALFRKARALNELGRHKEAYECSSRCSLALPHDESVTQLGQELAQKLGLRVRKAYKRPQELETFSLLSNGTAAGVADQGTSNGLGSIDDIETDCYVDPRGSPALLPSTPTMPLFPHVLDLLAPLDSSRTLPSTDSLDDFSDGDVFGPELDTLLDSLSLVQGGLSGSGVPSELPQLIPVFPGGTPLLPPVVGGSIPVSSPLPPASFGLVMDPSKKLAASVLDALDPPGPTLDPLDLLPYSETRLDALDSFGSTRGSLDKPDSFMEETNSQDHRPPSGAQKPAPSPEPCMPNTALLIKNPLAATHEFKQACQLCYPKTGPRAGDYTYREGLEHKCKRDILLGRLRSSEDQTWKRIRPRPTKTSFVGSYYLCKDMINKQDCKYGDNCTFAYHQEEIDVWTEERKGTLNRDLLFDPLGGVKRGSLTIAKLLKEHQGIFTFLCEICFDSKPRIISKGTKDSPSVCSNLAAKHSFYNNKCLVHIVRSTSLKYSKIRQFQEHFQFDVCRHEVRYGCLREDSCHFAHSFIELKVWLLQQYSGMTHEDIVQESKKYWQQMEAHAGKASSSMGAPRTHGPSTFDLQMKFVCGQCWRNGQVVEPDKDLKYCSAKARHCWTKERRVLLVMSKAKRKWVSVRPLPSIRNFPQQYDLCIHAQNGRKCQYVGNCSFAHSPEERDMWTFMKENKILDMQQTYDMWLKKHNPGKPGEGTPISSREGEKQIQMPTDYADIMMGYHCWLCGKNSNSKKQWQQHIQSEKHKEKVFTSDSDASGWAFRFPMGEFRLCDRLQKGKACPDGDKCRCAHGQEELNEWLDRREVLKQKLAKARKDMLLCPRDDDFGKYNFLLQEDGDLAGATPEAPAAAATATTGE

SEQ ID NO: 4048 - DNA, 4382 bp, Homo sapiens
cggcagctgcagcgggtcgcacggctccggcccatctcggggggcgggcgggggaggcgaggtgcgcgagccgagtccggggcacgatgtccgacgcgggcggcggaaagaagccgcctgtggacccgcaggcaggacccggtccggggccggggcgcgcagctggggaaaggggcctgtcggggtccttccccctggtcctgaagaagctgatggagaaccccccgcgcgaggcgcgcctcgataaggaaaaggggaaggaaaagctggaggaggacgaggccgcagccgccagcaccatggctgtctcagcctccctcatgccacccatctgggacaagaccatcccatatgatggcgaatctttccacctggagtacatggacctggatgagttcctgctggagaatggcatccccgccagccccacccacctggcccacaacctgctgctgcctgtagcagagctagaagggaaggagtctgccagctcttccacagcatccccaccatcctcctccactgccatctttcagccctctgaaaccgtgtccagcacagaatcttccctggagaaggagagggagactcccagtcccatcgaccccaattgtgtggaagtggatgtgaacttcaatccggaccccgccgacctggtgctctccagtgtgccaggcggggagctcttcaaccctcggaagcacaagtttgctgaggaggacctgaagccccagcctatgatcaaaaaggccaagaaggtctttgtccccgacgagcagaaggatgaaaagtactggacaagacgcaagaagaacaacgtggcagctaaacggtcacgggatgcccggcgcctgaaagagaatcagatcaccatccgggcagccttcctggagaaggagaacacagccctgcggacggaggtggccgagctacgcaaggaggtgggcaagtgcaagaccatcgtgtccaagtatgagaccaaatacgggcccttgtaacccgtgccccccgcccgggcggggtactgcctgcacctcagacctctgcctgggggctccctgtaacccctcacacgcgtggagacttatgactcgtcgtgggcgcatggcggcgcacctgctgcaggagcggccacgtctcagcttcattataccatggcctgcgcacgtggcgacgtccctgaggggccagtctcctcactggtggggaacgcaagagaatctgcgtagatgggtgactcagccttagtttctattcttggatgtcccagttgaatcagaaggggacctctggagtacacacctctctcctgggcgctcagggtccctggactctccctcagtctccagcctgggctgccgagggctatctctgcagaatgagttgtgatcattgtcaccctatgtcttctcaggtagcagggcgcgtttccacttaaggtgtgtctgtcacgcacctcattctccccagacagtctttgagtaacatctgttcccatcttccttggaagcaggacacaccagctcctccgtcagtgtctgcatgggtagcaggctgcaggagtggggtctctgcacagcctgggatggggcttggggctggggcctgcagcagaagtgtgcccagcgtttctcggctcccgcaccccttttcccttatggctctgaggccatcggctgtctctgcatttcattggctgtggaggagagactcctaggatggctgctgtctgagccatgagtgccagggctgagagaggcctcttcatttcctctccaggctactcagaggccatgtgaagctcgtttgtcccactagaccaggcctctgggcctgctctttctttccacccaatgtccagtcttggatcatagatttaaaaggaaaacccctcttatctaggaggctttaacttcctggaccccaggattcaccttcctagtggtgtttagaaaatgcctccacagcccccttccaccatgggcatgagagctggggtgtgtttcttgagaagctcccttttttcttgctctgctcaccggtgtggcctgggctggagtgcactctccctgggggcagctggggcctcgcaattcttgcttcaggatctctcccatgcgagctgcccggagggtgtcagcagggcaagacacctagtctagagtcaccaaggtcacagtgccactttcacgggatagcaggctcttgggacttttacacaggcctagggtcccctcagtcttggtcccaggagatgggggccactcgtgaggctggccatgctgtggcttctcacagctgtggtctcccctgcctcacaacgactcctttctcttgtgtggcgggactcgcccttttgctgtgctcagaagattcactgaggaaactcatggaagcctctgctcatttgggtcactgggacacccctgagatgggtgtgtttatttgctcagggcgggcagcctatggtgaagaggagacagaggcgatgggcgtgcttcgtcctccgtaacactggctttatttaccgtggtggttcagagtcccaggccctgacctctaaagacttttcataacagacgttaagaccaagccgtggacctcaccccaggggaatgccacggccctttggggacctgcacacccacctctccgggggacttgacaaggggccctgaggccaagggaggtcactcctccctccaggcccctgacttttactttgtggttctctaaaaaccatgtacacactttcactctattgtaaccacacagggcaggcgcatccagcatgtcagtgtcctgccccgggcagctctccctcccgggcacgctccctctggcctggtggatcaccaagagggcggttctcattttgttattagtggaagagccttgagcttaaaagctcttcattttctttgccggaaagtatatggtttgtgtttttgcagttttatttttttaaggatggacactaaatctctggtgtccatgttccgagcccggtggctgggatggtggctcgatgtgtctcctctttatcccgccctctgcctgtttggtgccctcccttctttcccccaggcagtgggtatcgggttctttcccaaagtgcttacttggaaagagtgtggctgctggactcttttcgaaatgcccctctgagtcaggagcctggtggggacaagatggaggatgtccacagaggctgacctgtgggggaaaagaagtgctcaggtaaggttgtctcctctcctgtcctaaaaaaatccatgcttgcaggagagggttggtgcctgctcagtttctgtcgagggaatgggagtctcctcggctccctcctgggccctctgcttcttggaggccgaccgctggagactgcggctcctgtgcttggatctttgacatctgtcagtcactggaggctagagaagttgactttaccttggctttctgtgggttcccgatgggcttggaagtgccgtctacttcctaagcatcctgtctaaagctttgtggcaccctcagtgcaacctcagaacagacaaatcatgaatgagctggaactttgcaagaatattcatattataaatgtctcatctgatggaggaacgtgtgcatttagagagagggagagttttcaaggtttatggcaactttgtggaggacctgggtaactcttacccttggccaaaggaagaggttttcctgtctggcttctgaggttggagggggcacttagcagtgaaccttaagtctgggtacatgtaaccctgctgaggggctgtgcaggccgctcctacggtcctttggcctgaggcagggcgggaggcatgcaagccagtgggggaaaacccctctgaagctgggcagccctctacctgggccccgggagccgtgctccttggaacgcaaagggccgaggagcatctggttttcatggcaaagctctactccagagctcctttaacatctgctaattaagtgcaataaatttttctagaaaatggcaaagatgacttccaggtggatattgctctcttacggtgttggggatgccagaacaccacttggttttatttttctaagtgcatgtgatgtgatagagtgtgtggggctctgtgtccttccctgggagctggcattccagcgggcccctctctttacctttgttgggggaaggaggcaagagagaaattccttcttcccagccagagagggcagaagcagaccgtagcccattggccttatgtgcgtgtgtgcgtgcgagtgtgtcactgctggtgggccggagtgatgtggtgggagggaagccgggaatgtatccttttcagacaaaattaaatattttgaaatgagaaaaaaaaaaaaaaaaaaaa

SEQ ID NO: 4049 - protein, 303 aa, Homo sapiens
MSDAGGGKKPPVDPQAGPGPGPGRAAGERGLSGSFPLVLKKLMENPPREARLDKEKGKEKLEEDEAAAASTMAVSASLMPPIWDKTIPYDGESFHLEYMDLDEFLLENGIPASPTHLAHNLLLPVAELEGKESASSSTASPPSSSTAIFQPSETVSSTESSLEKERETPSPIDPNCVEVDVNFNPDPADLVLSSVPGGELFNPRKHKFAEEDLKPQPMIKKAKKVFVPDEQKDEKYWTRRKKNNVAAKRSRDARRLKENQITIRAAFLEKENTALRTEVAELRKEVGKCKTIVSKYETKYGPL

SEQ ID NO: 4050 - DNA, 4575 bp, Homo sapiens
cagggaggggaagacggggagccggacgcacgaccggcgagcacagaagggcacaggagctgctccgcgagataccagcgagctgaggcgcggggctggctgggaagtagtcccggccgggccctggccccgcccctgcagggcggagggacgcatcacgcaggggtggggaagccggatccgtgcgcagggttgctaagggtgaaacttttcattgactttgctcacttcgggccggggcgcgggaaggtgcgggttgttggctgaggcaagccgtggctcgggcgacgcggggccaggagggcaggaccgtctgccggcgacagcccataccgtctgccgttgcgcgacacgaaccaccctccgatccgccatccccgcgtcgtcgccgctagtccgcccgcccgccctcgggccccccgctgccgagcccgacctcctaagagctgaaagaaattattgagagtcatagtccatagccccctgcttcgtcccccaaccctcaacgacgaaaaggacttcggtcccctggcccggcgacgcccgggaaggaaaggagagcgacctccgccccgcgctcaggccaccctggagggagaagccgccccgcggccggtagagcgccccgccgccgcggagacccgaagccgcctggagcccaaggctgtacacgtgccctgtgctgattctctgcctaggaaaggaccatgcagctagagatcaaagtggccctgaacttcatcatctcctacttgtacaacaagctgccccggcgccgggcagacctgtttggggaggagctagagcggcttttgaaaaagaaatatgaaggccactggtaccctgagaagccactgaaaggctctggcttccgctgtgttcacattggggagatggtggaccccgtggtggagctggccgccaagcggagtggcctggcggtggaagatgtgcgggccaatgtgcctgaggagctgagtgtctggattgatccctttgaggtgtcctaccagattggtgagaagggagctgtgaaagtgctgtacctggatgacagtgagggttgcggtgccccagagctggacaaggagatcaagagcagcttcaaccctgacgcccaggtgttcgtgcccattggcagccaggacagctccctgtccaactccccatcgccatcctttggccagtcacccagccctaccttcattccccgctccgctcagcccatcaccttcaccaccgcctccttcgctgccaccaaatttggctccactaagatgaagaaggggggcggggcagcaagtggtgggggtgtagccagcagtggggcgggtggccagcagccaccacagcagcctcgcatggcccgctcacccaccaacagcctgctgaagcacaagagcctctctctgtctatgcattcactgaacttcatcacggccaacccggcccctcagtcccagctctcacccaatgccaaggagttcgtgtacaacggtggtggctcacccagcctcttctttgatgcggccgatggccagggcagcggcaccccaggcccgtttggaggcagtggggctggcacctgcaacagcagcagctttgacatggcccaggtatttggaggtggtgccaacagcctcttcctggagaagacaccctttgtggaaggcctcagctacaacctgaacaccatgcagtatcccagccagcagttccagcccgtggtgctggccaactgaccatctacctgcccgtggggccaggagcacccaagaccacagaaaagagaaaggaaaggccaaaaaaaagaggaaaagaaaaatgtacaaaaagattttcgatcttctcactcttacttctagaaaaaagatccagcccaggcacggaatgggagggccctgcaaagcacccaagtgtgtttcactcaccccttaccgctcgcccaccggcctgtgatttatttggttggtttgggttttatatttctttttcttttttttttttcttacatgtagttttctatataacatctttaatgagtggcttcctgtgctaagaatggtccagatgtgaactgctgctccctgctcctcccttcctccttcacactcctagtttaggattgatgtgtccaagctcatagggaagaaagagctgcagctggagcctgaccctccctggaacagggagaggctggcccgtgtcactgcctctgtcacccagctatcctcgcactcaaagccatccaacctcagcaggccttctcgggccctgccacctgaataggtctgaccccagtccccactccctttcaggctgggccacagggagttgctggctggccacttgacaccctccccctggagctgatgtctgtgactacagggagattagcacttcgtctagtgaaactcctttcatctctgtcctatggccccaccccaccattccctctaggcccagaccatcatcatggccctggccattgatgtgtatgggctttctttccctcatgcagccccttcttccccaggctggatgttgtgggtagggaggggtgtgtgtgtgtgtatttggtttgctgtccttttttaaaggattccaagccatgtgaaacttcccttctggatgtgattctgggtcgcaagtccttatttatatgtgaggctggggaatgggctgggggtattggcagtccttttgcagggcagtgtgtgtggtggggtgacaccgctgtggcttagcccaagacactcccagaggaaaacactgcagaaggaactggtttgcagactgtggaaggatctgcagttttgtttttgaccaaaaaaataataataagttagctctgaagggcagagggaatacccaagcccctgatgcctatgagaagtccctggacttcaaccctcctgttgtttggccttagcccagagggagctgctcacctgagcacccttgggggtgggcagagaggcagggtgggattttagagttagtgtctgtgcgggggcagccctgagcctggagttgagactttggggtctcttagtttggaggtgttgagtgcatttgtgcccctgcctggttgagagcttcttggtacctcttgccaccccttctcactgccctgacccaaccccactggaccttgatgctgcgaggagtggtgtcctgacggactcagcactcccgcctgatgtattggatcataggagagcacttgctctcctgcctctgccaggagagggcttgttcctccaactctaggaggccaggcaagcatggacaggagccaagggagcagggtcattaactttttcttctttgcaaagtgggcacttggcatcagggtcccaatcaccagaaagcaccaaagcccctggcaccccacccactccatcctacccagggaccccaagtaggcaactgttatggcagtgggtccagcccaggccagcactgccagcctcctctccctgcagtaggcaccagctctacctcccccggcaggcaatgtcctggcttctcagcccagcaccatctgttcccctagacttctcaggggccagcccagtctgggccaccctttgtttccctcatcctcggctcccacacaggtgacagacccagcagatagcttctctctgggaaaggttggatgctgccttacatccccttctagccctcctcccatccacacacacaggcacccacccacaccaggtcggcttgtttctcacatgtagggagagaggggagaccaacccctttgtgtcttttgaaatacgaagaaaaatgtgtgttcaggagcatgactccagtgctgcgctcttgggcccagttcagtctgtcttgtctcaaatctaggcatttttgcttcaattttattttttttaagaatacaaaaacagaaatctgcactaatttacctggtttcgtaggaaaacttttttttattttttacattttttggtgtccgtttgtattgaataatttgctacatttgtaaaatgtaagaggtatataatatatgtatatttctaacgtaaaaaacataatttttttcttttcaagattttttcttaaaaagatgagagaaacatattttttcaggaaaaacaaactttaaaaaaaaaagaggagaaataaaaccttttctcccctttccccatcctctatctatccctctttcccaggaacaaatcaaaaggtggattatcttctgaagaatggaaactgttagtccagaatgatgtgtttttctcaatgcagtgagttatagattctctagttttctccctagggatgggaagggggcattgaggcaagcctggagaggagcccggggagcagggtcatgaacttttttctttagtgaaggaggaatacaatcaagggttttgtattcagaatgttgtgcaatattttggaatgggacattggtgtgtttagagattttagtttaaaaacaaaacaaaaagattgatcaaatctgtacagtttctattgttccagatttttttaagtttgtattaaaagcatgatacataatagccttcaaaaaaaaaa

SEQ ID NO: 4051 - protein, 344 aa, Homo sapiens
MQLEIKVALNFIISYLYNKLPRRRADLFGEELERLLKKKYEGHWYPEKPLKGSGFRCVHIGEMVDPVVELAAKRSGLAVEDVRANVPEELSVWIDPFEVSYQIGEKGAVKVLYLDDSEGCGAPELDKEIKSSFNPDAQVFVPIGSQDSSLSNSPSPSFGQSPSPTFIPRSAQPITFTTASFAATKFGSTKMKKGGGAASGGGVASSGAGGQQPPQQPRMARSPTNSLLKHKSLSLSMHSLNFITANPAPQSQLSPNAKEFVYNGGGSPSLFFDAADGQGSGTPGPFGGSGAGTCNSSSFDMAQVFGGGANSLFLEKTPFVEGLSYNLNTMQYPSQQFQPVVLAN

SEQ ID NO: 4052 - DNA, 1105 bp, Homo sapiens
aggtcggacggaagttcccgaagcttccggtggccggcttagttaggagctatggctaaacatcatcctgatttgatcttttgccgcaagcaggctggtgttgccatcggaagactgtgtgaaaaatgtgatggcaagtgtgtgatttgtgactcctatgtgcgtccctgcactctggtgcgcatatgtgatgagtgtaactatggatcttaccaggggcgctgtgtgatctgtggaggacctggggtctctgatgcctattattgtaaggagtgcaccatccaggagaaggacagagatggctgcccaaagattgtcaatctggggagctctaagacagacctcttctatgaacgcaaaaaatacggcttcaagaagaggtgattggtgggtggccccttcctccccccaacatcagtctgctgcagctgccagaaaacatgcctactactaccagcagaaagggagcagagcccagagcatcaccaggagtgcctgctagtgtactggcagcttgccaccccctcctctcccttcacccagacacgtggtagggatggaaaaggattcttcacagagcactctggcacaccatatcggagaaaacttgatagattagttaatggtttttcttgaattcgagaagcaaagatctgttctccatattggtatgttctccctcaaccaagatcttctaaaaagaaataatattttagtcttctgcttgaggaactgactgtgaagcgacgcccagtgaaaaacatgttcttgcagcagctctggtggcagctgtccttgaggaacctttggtgtgtggtgggaagctatcagaacaagaaatgtaggcatttcccgttttttttggggggggggtgggggggcagggctctgccctcttgaaaggcatttacttgtttaacacttgtccagctacagtggggtacagtagctggctattcacaggcatcatcatagcccactagtctcatattattttccttttgagaaattggaaactctttctgttgctattatattaataaagttggtgtttattttctggtaaaaaaaaaaaaaaaaaaaaaaaaaaaaaaaaaaaaaaaaa

SEQ ID NO: 4053 - protein, 110 aa, Homo sapiens
MAKHHPDLIFCRKQAGVAIGRLCEKCDGKCVICDSYVRPCTLVRICDECNYGSYQGRCVICGGPGVSDAYYCKECTIQEKDRDGCPKIVNLGSSKTDLFYERKKYGFKKR

SEQ ID NO: 4054 - DNA, 2744 bp, Homo sapiens
ctcatctttgtcagtgcacaaaatggcgccctacagcctactggtgactcggctgcagaaagctctgggtgtgcggcagtaccatgtggcctcagtcctgtgccaacgggccaaggtggcgatgagccactttgagcccaacgagtacatccattatgacctgctagagaagaacattaacattgttcgcaaacgactgaaccggccgctgacactctcggagaagattgtgtatggacacctggatgaccccgccagccaggaaattgagcgaggcaagtcgtacctgcggctgcggccggaccgtgtggccatgcaggatgcgacggcccagatggccatgctccagttcatcagcagcgggctgtccaaggtggctgtgccatccaccatccactgtgaccatctgattgaagcccaggttgggggcgagaaagacctgcgccgggccaaggacatcaaccaggaagtttataatttcctggcaactgcaggtgccaaatatggcgtgggcttctggaagcctggatctggaatcattcaccagattattctggaaaactatgcgtaccctggtgttcttctgattggcactgactcccacacccccaatggtggcggccttgggggcatctgcattggagttgggggtgccgatgctgtggatgtcatggctgggatcccctgggagctgaagtgccccaaggtgattggcgtgaagctgacgggctctctctccggttggtcctcacccaaagatgtgatcctgaaggtggcaggcatcctcacggtgaaaggtggcacaggtgcaatcgtggaataccacgggcctggtgtagactccatctcctgcactggcatggcgacaatctgcaacatgggtgcagaaattggggccaccacttccgtgttcccttacaaccacaggatgaagaagtacctgagcaagaccggccgggaagacattgccaatctagctgatgaattcaaggatcacttggtgcctgaccctggctgccattatgaccaactaattgaaattaacctcagtgagctgaagccacacatcaatgggcccttcacccctgacctggctcaccctgtggcagaagtgggcaaggtggcagagaaggaaggatggcctctggacatccgagtgggtctaattggtagctgcaccaattcaagctatgaagatatggggcgctcagcagctgtggccaagcaggcactggcccatggcctcaagtgcaagtcccagttcaccatcactccaggttccgagcagatccgcgccaccattgagcgggacggctatgcacagatcttgagggatctgggtggcattgtcctggccaatgcttgtggcccctgcattggccagtgggacaggaaggacatcaagaagggggagaagaacacaatcgtcacctcctacaacaggaacttcacgggccgcaacgacgcaaaccccgagacccatgcctttgtcacgtccccagagattgtcacagccctggccattgcgggaaccctcaagttcaacccagagaccgactacctgacgggcacggatggcaagaagttcaggctggaggctccggatgcagatgagcttcccaaaggggagtttgacccagggcaggacacctaccagcacccacccaaggacagcagcgggcagcatgtggacgtgagccccaccagccagcgcctgcagctcctggagccttttgacaagtgggatggcaaggacctggaggacctgcagatcctcatcaaggtcaaagggaagtgtaccactgaccacatctcagctgctggcccctggctcaagttccgtgggcacttggataacatctccaacaacctgctcattggtgccatcaacattgaaaacggcaaggccaactccgtgcgcaatgccgtcactcaggagtttggccccgtccctgacactgcccgctactacaagaaacatggcatcaggtgggtggtgatcggagacgagaactacggcgagggctcgagccgggagcatgcagctctggagcctcgccaccttgggggccgggccatcatcaccaagagctttgccaggatccacgagaccaacctgaagaaacagggcctgctgcctctgaccttcgctgacccggctgactacaacaagattcaccctgtggacaagctgaccattcagggcctgaaggacttcacccctggcaagcccctgaagtgcatcatcaagcaccccaacgggacccaggagaccatcctcctgaaccacaccttcaacgagacgcagattgagtggttccgcgctggcagtgccctcaacagaatgaaggaactgcaacagtgagggcagtgcctccccgccccgccgctggcgtcaagttcagctccacgtgtgccatcagtggatccgatccgtccagccatggcttcctattccaagatggtgtgaccagacatgcttcctgctccccgcttagcccacggagtgactgtggttgtggtgggggggttcttaaaataactttttagcccccgtcttcctattttgagtttggttcagatcttaagcagctccatgcaactgtatttatttttgatgacaagactcccatctaaagtttttctcctgcctgatcatttcattggtggctgaaggattctagagaaccttttgttcttgcaaggaaaacaagaatccaaaaccagtgactgttctgtgaaaa

SEQ ID NO: 4055 - protein, 780 aa, Homo sapiens
MAPYSLLVTRLQKALGVRQYHVASVLCQRAKVAMSHFEPNEYIHYDLLEKNINIVRKRLNRPLTLSEKIVYGHLDDPASQEIERGKSYLRLRPDRVAMQDATAQMAMLQFISSGLSKVAVPSTIHCDHLIEAQVGGEKDLRRAKDINQEVYNFLATAGAKYGVGFWKPGSGIIHQIILENYAYPGVLLIGTDSHTPNGGGLGGICIGVGGADAVDVMAGIPWELKCPKVIGVKLTGSLSGWSSPKDVILKVAGILTVKGGTGAIVEYHGPGVDSISCTGMATICNMGAEIGATTSVFPYNHRMKKYLSKTGREDIANLADEFKDHLVPDPGCHYDQLIEINLSELKPHINGPFTPDLAHPVAEVGKVAEKEGWPLDIRVGLIGSCTNSSYEDMGRSAAVAKQALAHGLKCKSQFTITPGSEQIRATIERDGYAQILRDLGGIVLANACGPCIGQWDRKDIKKGEKNTIVTSYNRNFTGRNDANPETHAFVTSPEIVTALAIAGTLKFNPETDYLTGTDGKKFRLEAPDADELPKGEFDPGQDTYQHPPKDSSGQHVDVSPTSQRLQLLEPFDKWDGKDLEDLQILIKVKGKCTTDHISAAGPWLKFRGHLDNISNNLLIGAINIENGKANSVRNAVTQEFGPVPDTARYYKKHGIRWVVIGDENYGEGSSREHAALEPRHLGGRAIITKSFARIHETNLKKQGLLPLTFADPADYNKIHPVDKLTIQGLKDFTPGKPLKCIIKHPNGTQETILLNHTFNETQIEWFRAGSALNRMKELQQ

SEQ ID NO: 4056 - DNA, 4465 bp, Homo sapiens
gggcaaagcgcgagcggctgtgcgcggtgcgtggtgcgtggtgcgtgatacgagcggcggcacgtggcgcgggtgcggggcgtggagtggcgtggcgtggagtggcgtggcgtggcggggtctcgcggcgcgggcgcgcacccggagctgtggacggagagtgcctccctctggcctcagtttcctcatgttgtagtagcggagcatggcccggaccgggcccccgagaccgccccgtgcaacctcaccgccagcctgggggcctcagcgactgggacgggaccaaggggctcggggattctccctgcccccggccctggtgcgtgactgaccctcctgttcccagagcccccagcgcaggccgggatgttcgtcctggtggaaatggtggacaccgtccggatccccccttggcagtttgagaggaagctcaacgactccattgccgaggagctgaacaagaagttggccaacaaggtcgtgtacaacgtgggactctgcatttgtctgtttgatatcaccaaactggaggatgcctatgtattccctggggatggcgcatcacacaccaaagtccattttcgctgcgtggtgtttcatccattcctagatgagattctcattgggaagatcaaaggctgcagcccagaaggagtgcacgtctctctaggcttcttcgatgacattctcatccccccagagtcactgcagcagccagccaagttcgacgaagcggagcaggtgtgggtgtgggagtacgagacggaggaaggagcacacgacctctacatggacaccggcgaggagatccgcttccgggtggtggacgagagctttgttgacacgtcccccacagggcccagctcagcagatgccaccacttccagtgaggagctgccaaagaaggaggctccgtacacgcttgtgggatccatcagtgagccaggcctgggccttctctcctggtggaccagcaactagccctggggctggacagtggaccctaccagcctgcgggaaggtggtatggccggctgtgaagacaacagcagctgaggccgatgctaaggagatagtgtctcgagctggacagtgaggcaaggccaggagtgcccaccagcttgccccgctcctccaccatctaggccctgctcctccttcactgcagtgatggatccatctgtggctgtggctgttgggcctccactgaccttgactgaaaagacccttcctggaccctggacttgacaacaaacggcacagacaccaatcactcacagaacagtcactggttttggattcttgttttccttgcaagaacaaaaggttctctagaatccttcagccaccaatgaaatgatcaggcaggagaaaaactttagatgggagtcttgtcatcaaaaataaatacagttgcatggagctgcttaagatctgaaccaaactcaaaataggaagacgggggctaaaaagttattttaagaacccccccaccacaaccacagtcactccgtgggctaagcggggagcaggaagcatgtctggtcacaccatcttggaataggaagccatggctggacggatcggatccactgatggcacacgtggagctgaacttgacgccagcggcggggcggggaggcactgccctcactgttgcagttccttcattctgttgagggcactgccagcgcggaaccactcaatctgcgtctcgttgaaggtgtggttcaggaggatggtctcctgggtcccgttggggtgcttgatgatgcacttcaggggctgcaaggagaaggtgggtgtgggtggaagtggtgggtactgtgtgcccttggccccgcaggggggtcagggagacagggcactgcctggggacctaagaggtcagcaggcaaaccaaatcctaggccagtctgtgcctgatggcccaggtcagacccaggtggcacctacaggggattcctggggcccagagggtcctgcagtgggtgggctgtcccctgagtgccaggtcctggtgagtaaagggaggttggggaggtgtgagggccccgggttgactccaacccccaactctgagaagccactttgctttctctgtggggccacctggagaactgggggcctttccagctggaatgaagcctcctgggagaagctaccctggggccagtgcaggaggggaaacaaggtggctgcccctcaccccaccacctcagggggacccgggcccctaaccttgccaggggtgaagtccttcaggccctgaatggtcagcttgtccacagggtgaatcttgttgtagtcagccgggtcagcgaaggtcagaggcagcaggccctgtttcttcaggttggtctctggaaagcaggcggcattcggtcatcgggggcctgactagcctggagagcttcattttctgaacccatctggggctctgggagatgcccctaatcctgctgcctgggacaatgcccgggcagtgactatggggccctggtctgctccctttcactaggggtgcccctagcaagtgtgcgctggtgctgaggtctgcgaggccttcctgctgcacattcatgatcagaaagaaccccctggcacatgtcctagatctcagcggctcagatctacaagcctggaagcagggcctgcgggaagccgggaagctgagcgtcggatgtgcactgtgtgagcctaagaaggggcaagaggctgacgggcctgtgggctgcagtggacacagcctagaaccaggcccaactcagccacgggcagggagagtgaccttgatcactagggatgggatgaggatggcctgggtacagactccagctcaccgtggatcctggcaaagctcttggtgatgatggcccggcccccaaggtggcgaggctccagagctgcatgctcccggctcgagccctcgccgtagttctcgtctccgatcaccacccacctgatgccatgtttctgtcaggcaagcgggggtaaggttataaggcagaggagggcaccgtcctcacctgtctggccctacctgcctggcctcacccacctggcgcctgggcatcctgaggctcccggtaaaggggctggaggggcccttcctcgcctgctgcctaagggcaagtgaagcctgcgtgaatgagacccaaacgaggccccgaggggacagaggcacgtggttgtttgcagtggcaaagaagacagaagccacccattggtgcttggcagaggcaggtgtgtgtggagggaggttgggtgagacagggacggcctccgggccccacacaagatgcatctgtgaagctcaaggcgcccccttcctgggagcaccctctgccccacccagccaccagggggtgccagagtcctttcacccggctgggccaggacttgggttcagccctggttctgtttgtttctcaaagcagaaaaagtccaatcacctcagaccctctctgcctgctcactgtgaggccccgtgtagccccctctctgagcttttggcctctgacttcctgagtcggcccccttccttgtctttgtctagggccagatatcctaagatatctctcactaactcctcctggtgcagggacccggctgtaccaccggacctgggcctcatgccttctcagccacagggaggggctgcaggcctctcctcccttccacagcagtcccctttgggcttggtcggcctccttcccagtttccactcccctaatgtcctccctgcacctgccttgcaggccccttcaggagtgaccactggcattgcccctatcaactctgacccaccttgtagtagcgggcagtgtcagggacggggccaaactcctgagtgacggcattgcgcacggagttggccttgccgttttcaatgttgatggcaccaatgagcaggttgttggagatgttatccaagtgcccacggaacttgagccaggggccagcagctgagatgtggtcagtggtacacttccctttgaccttgggtggtaagtagagaggacagaggtcagggcatggccctggaggggtggatgacaagccctccagaggcaggcagcaggccccggggcccaggaggggtgacagaggggtgagaggcaggcaagtcttcagacacgtgttctgtggtcctggtgcttccaccctaaggccacatgggctcaggccaggccttcatcccctcaaaggcctctggctgctcagtctcccttatggggcagaggccgcccaaagttgggacaggtcaatgttcgctcacccttcaggcctcagctgcaagatcagccacagacctcatgctggacacaggagcccaggacatgcctgggtcctggctgatgactgattagtctcttctgtcacaggggtgcctggagaccccttaataagcagcataaataaatatctgacacagattggaggcctctggccacaccaaaaa

SEQ ID NO: 4057 - protein, 204 aa, Homo sapiens
MFVLVEMVDTVRIPPWQFERKLNDSIAEELNKKLANKVVYNVGLCICLFDITKLEDAYVFPGDGASHTKVHFRCVVFHPFLDEILIGKIKGCSPEGVHVSLGFFDDILIPPESLQQPAKFDEAEQVWVWEYETEEGAHDLYMDTGEEIRFRVVDESFVDTSPTGPSSADATTSSEELPKKEAPYTLVGSISEPGLGLLSWWTSN

SEQ ID NO: 4058 - DNA, 4520 bp, Homo sapiens
gggcaaagcgcgagcggctgtgcgcggtgcgtggtgcgtggtgcgtgatacgagcggcggcacgtggcgcgggtgcggggcgtggagtggcgtggcgtggagtggcgtggcgtggcggggtctcgcggcgcgggcgcgcacccggagctgtggacggagagtgcctccctctggcctcagtttcctcatgttgtagtagcggagcatggcccggaccgggcccccgagaccgccccgtgcaacctcaccgccagcctgggggcctcagcgactgggacgggaccaaggggctcggggattctccctgcccccggccctggtgcgtgactgaccctcctgttcccagagcccccagcgcaggccgggatgttcgtcctggtggaaatggtggacaccgtccggatccccccttggcagtttgagaggaagctcaacgactccattgccgaggagctgaacaagaagttggccaacaaggtcgtgtacaacgtgggactctgcatttgtctgtttgatatcaccaaactggaggatgcctatgtattccctggggatggcgcatcacacaccaaagtccattttcgctgcgtggtgtttcatccattcctagatgagattctcattgggaagatcaaaggctgcagcccagaaggagtgcacggtaacagtggccctgacgcctcagacaagacttgggaacactgtgggggcaggagtctctctaggcttcttcgatgacattctcatccccccagagtcactgcagcagccagccaagttcgacgaagcggagcaggtgtgggtgtgggagtacgagacggaggaaggagcacacgacctctacatggacaccggcgaggagatccgcttccgggtggtggacgagagctttgttgacacgtcccccacagggcccagctcagcagatgccaccacttccagtgaggagctgccaaagaaggaggctccgtacacgcttgtgggatccatcagtgagccaggcctgggccttctctcctggtggaccagcaactagccctggggctggacagtggaccctaccagcctgcgggaaggtggtatggccggctgtgaagacaacagcagctgaggccgatgctaaggagatagtgtctcgagctggacagtgaggcaaggccaggagtgcccaccagcttgccccgctcctccaccatctaggccctgctcctccttcactgcagtgatggatccatctgtggctgtggctgttgggcctccactgaccttgactgaaaagacccttcctggaccctggacttgacaacaaacggcacagacaccaatcactcacagaacagtcactggttttggattcttgttttccttgcaagaacaaaaggttctctagaatccttcagccaccaatgaaatgatcaggcaggagaaaaactttagatgggagtcttgtcatcaaaaataaatacagttgcatggagctgcttaagatctgaaccaaactcaaaataggaagacgggggctaaaaagttattttaagaacccccccaccacaaccacagtcactccgtgggctaagcggggagcaggaagcatgtctggtcacaccatcttggaataggaagccatggctggacggatcggatccactgatggcacacgtggagctgaacttgacgccagcggcggggcggggaggcactgccctcactgttgcagttccttcattctgttgagggcactgccagcgcggaaccactcaatctgcgtctcgttgaaggtgtggttcaggaggatggtctcctgggtcccgttggggtgcttgatgatgcacttcaggggctgcaaggagaaggtgggtgtgggtggaagtggtgggtactgtgtgcccttggccccgcaggggggtcagggagacagggcactgcctggggacctaagaggtcagcaggcaaaccaaatcctaggccagtctgtgcctgatggcccaggtcagacccaggtggcacctacaggggattcctggggcccagagggtcctgcagtgggtgggctgtcccctgagtgccaggtcctggtgagtaaagggaggttggggaggtgtgagggccccgggttgactccaacccccaactctgagaagccactttgctttctctgtggggccacctggagaactgggggcctttccagctggaatgaagcctcctgggagaagctaccctggggccagtgcaggaggggaaacaaggtggctgcccctcaccccaccacctcagggggacccgggcccctaaccttgccaggggtgaagtccttcaggccctgaatggtcagcttgtccacagggtgaatcttgttgtagtcagccgggtcagcgaaggtcagaggcagcaggccctgtttcttcaggttggtctctggaaagcaggcggcattcggtcatcgggggcctgactagcctggagagcttcattttctgaacccatctggggctctgggagatgcccctaatcctgctgcctgggacaatgcccgggcagtgactatggggccctggtctgctccctttcactaggggtgcccctagcaagtgtgcgctggtgctgaggtctgcgaggccttcctgctgcacattcatgatcagaaagaaccccctggcacatgtcctagatctcagcggctcagatctacaagcctggaagcagggcctgcgggaagccgggaagctgagcgtcggatgtgcactgtgtgagcctaagaaggggcaagaggctgacgggcctgtgggctgcagtggacacagcctagaaccaggcccaactcagccacgggcagggagagtgaccttgatcactagggatgggatgaggatggcctgggtacagactccagctcaccgtggatcctggcaaagctcttggtgatgatggcccggcccccaaggtggcgaggctccagagctgcatgctcccggctcgagccctcgccgtagttctcgtctccgatcaccacccacctgatgccatgtttctgtcaggcaagcgggggtaaggttataaggcagaggagggcaccgtcctcacctgtctggccctacctgcctggcctcacccacctggcgcctgggcatcctgaggctcccggtaaaggggctggaggggcccttcctcgcctgctgcctaagggcaagtgaagcctgcgtgaatgagacccaaacgaggccccgaggggacagaggcacgtggttgtttgcagtggcaaagaagacagaagccacccattggtgcttggcagaggcaggtgtgtgtggagggaggttgggtgagacagggacggcctccgggccccacacaagatgcatctgtgaagctcaaggcgcccccttcctgggagcaccctctgccccacccagccaccagggggtgccagagtcctttcacccggctgggccaggacttgggttcagccctggttctgtttgtttctcaaagcagaaaaagtccaatcacctcagaccctctctgcctgctcactgtgaggccccgtgtagccccctctctgagcttttggcctctgacttcctgagtcggcccccttccttgtctttgtctagggccagatatcctaagatatctctcactaactcctcctggtgcagggacccggctgtaccaccggacctgggcctcatgccttctcagccacagggaggggctgcaggcctctcctcccttccacagcagtcccctttgggcttggtcggcctccttcccagtttccactcccctaatgtcctccctgcacctgccttgcaggccccttcaggagtgaccactggcattgcccctatcaactctgacccaccttgtagtagcgggcagtgtcagggacggggccaaactcctgagtgacggcattgcgcacggagttggccttgccgttttcaatgttgatggcaccaatgagcaggttgttggagatgttatccaagtgcccacggaacttgagccaggggccagcagctgagatgtggtcagtggtacacttccctttgaccttgggtggtaagtagagaggacagaggtcagggcatggccctggaggggtggatgacaagccctccagaggcaggcagcaggccccggggcccaggaggggtgacagaggggtgagaggcaggcaagtcttcagacacgtgttctgtggtcctggtgcttccaccctaaggccacatgggctcaggccaggccttcatcccctcaaaggcctctggctgctcagtctcccttatggggcagaggccgcccaaagttgggacaggtcaatgttcgctcacccttcaggcctcagctgcaagatcagccacagacctcatgctggacacaggagcccaggacatgcctgggtcctggctgatgactgattagtctcttctgtcacaggggtgcctggagaccccttaataagcagcataaataaatatctgacacagattggaggcctctggccacaccaaaaa

SEQ ID NO: 4059 - protein, 123 aa, Homo sapiens
MFVLVEMVDTVRIPPWQFERKLNDSIAEELNKKLANKVVYNVGLCICLFDITKLEDAYVFPGDGASHTKVHFRCVVFHPFLDEILIGKIKGCSPEGVHGNSGPDASDKTWEHCGGRSLSRLLR

SEQ ID NO: 4060 - DNA, 4378 bp, Homo sapiens
gggcaaagcgcgagcggctgtgcgcggtgcgtggtgcgtggtgcgtgatacgagcggcggcacgtggcgcgggtgcggggcgtggagtggcgtggcgtggagtggcgtggcgtggcggggtctcgcggcgcgggcgcgcacccggagctgtggacggagagtgcctccctctggcctcagtttcctcatgttgtagtagcggagcatggcccggaccgggcccccgagaccgccccgtgcaacctcaccgccagcctgggggcctcagcgactgggacgggaccaaggggctcggggattctccctgcccccggccctggtgcgtgactgaccctcctgttcccagagcccccagcgcaggccgggatgttcgtcctggtggaaatggtggacaccgtccggatccccccttggcagtttgagaggaagctcaacgactccattgccgaggagctgaacaagaagttggccaacaaggtcgtgtacaacgtgggactctgcatttgtctgtttgatatcaccaaactggaggatgcctatgtattccctggggatggcgcatcacacaccaaagtctctctaggcttcttcgatgacattctcatccccccagagtcactgcagcagccagccaagttcgacgaagcggagcaggtgtgggtgtgggagtacgagacggaggaaggagcacacgacctctacatggacaccggcgaggagatccgcttccgggtggtggacgagagctttgttgacacgtcccccacagggcccagctcagcagatgccaccacttccagtgaggagctgccaaagaaggaggctccgtacacgcttgtgggatccatcagtgagccaggcctgggccttctctcctggtggaccagcaactagccctggggctggacagtggaccctaccagcctgcgggaaggtggtatggccggctgtgaagacaacagcagctgaggccgatgctaaggagatagtgtctcgagctggacagtgaggcaaggccaggagtgcccaccagcttgccccgctcctccaccatctaggccctgctcctccttcactgcagtgatggatccatctgtggctgtggctgttgggcctccactgaccttgactgaaaagacccttcctggaccctggacttgacaacaaacggcacagacaccaatcactcacagaacagtcactggttttggattcttgttttccttgcaagaacaaaaggttctctagaatccttcagccaccaatgaaatgatcaggcaggagaaaaactttagatgggagtcttgtcatcaaaaataaatacagttgcatggagctgcttaagatctgaaccaaactcaaaataggaagacgggggctaaaaagttattttaagaacccccccaccacaaccacagtcactccgtgggctaagcggggagcaggaagcatgtctggtcacaccatcttggaataggaagccatggctggacggatcggatccactgatggcacacgtggagctgaacttgacgccagcggcggggcggggaggcactgccctcactgttgcagttccttcattctgttgagggcactgccagcgcggaaccactcaatctgcgtctcgttgaaggtgtggttcaggaggatggtctcctgggtcccgttggggtgcttgatgatgcacttcaggggctgcaaggagaaggtgggtgtgggtggaagtggtgggtactgtgtgcccttggccccgcaggggggtcagggagacagggcactgcctggggacctaagaggtcagcaggcaaaccaaatcctaggccagtctgtgcctgatggcccaggtcagacccaggtggcacctacaggggattcctggggcccagagggtcctgcagtgggtgggctgtcccctgagtgccaggtcctggtgagtaaagggaggttggggaggtgtgagggccccgggttgactccaacccccaactctgagaagccactttgctttctctgtggggccacctggagaactgggggcctttccagctggaatgaagcctcctgggagaagctaccctggggccagtgcaggaggggaaacaaggtggctgcccctcaccccaccacctcagggggacccgggcccctaaccttgccaggggtgaagtccttcaggccctgaatggtcagcttgtccacagggtgaatcttgttgtagtcagccgggtcagcgaaggtcagaggcagcaggccctgtttcttcaggttggtctctggaaagcaggcggcattcggtcatcgggggcctgactagcctggagagcttcattttctgaacccatctggggctctgggagatgcccctaatcctgctgcctgggacaatgcccgggcagtgactatggggccctggtctgctccctttcactaggggtgcccctagcaagtgtgcgctggtgctgaggtctgcgaggccttcctgctgcacattcatgatcagaaagaaccccctggcacatgtcctagatctcagcggctcagatctacaagcctggaagcagggcctgcgggaagccgggaagctgagcgtcggatgtgcactgtgtgagcctaagaaggggcaagaggctgacgggcctgtgggctgcagtggacacagcctagaaccaggcccaactcagccacgggcagggagagtgaccttgatcactagggatgggatgaggatggcctgggtacagactccagctcaccgtggatcctggcaaagctcttggtgatgatggcccggcccccaaggtggcgaggctccagagctgcatgctcccggctcgagccctcgccgtagttctcgtctccgatcaccacccacctgatgccatgtttctgtcaggcaagcgggggtaaggttataaggcagaggagggcaccgtcctcacctgtctggccctacctgcctggcctcacccacctggcgcctgggcatcctgaggctcccggtaaaggggctggaggggcccttcctcgcctgctgcctaagggcaagtgaagcctgcgtgaatgagacccaaacgaggccccgaggggacagaggcacgtggttgtttgcagtggcaaagaagacagaagccacccattggtgcttggcagaggcaggtgtgtgtggagggaggttgggtgagacagggacggcctccgggccccacacaagatgcatctgtgaagctcaaggcgcccccttcctgggagcaccctctgccccacccagccaccagggggtgccagagtcctttcacccggctgggccaggacttgggttcagccctggttctgtttgtttctcaaagcagaaaaagtccaatcacctcagaccctctctgcctgctcactgtgaggccccgtgtagccccctctctgagcttttggcctctgacttcctgagtcggcccccttccttgtctttgtctagggccagatatcctaagatatctctcactaactcctcctggtgcagggacccggctgtaccaccggacctgggcctcatgccttctcagccacagggaggggctgcaggcctctcctcccttccacagcagtcccctttgggcttggtcggcctccttcccagtttccactcccctaatgtcctccctgcacctgccttgcaggccccttcaggagtgaccactggcattgcccctatcaactctgacccaccttgtagtagcgggcagtgtcagggacggggccaaactcctgagtgacggcattgcgcacggagttggccttgccgttttcaatgttgatggcaccaatgagcaggttgttggagatgttatccaagtgcccacggaacttgagccaggggccagcagctgagatgtggtcagtggtacacttccctttgaccttgggtggtaagtagagaggacagaggtcagggcatggccctggaggggtggatgacaagccctccagaggcaggcagcaggccccggggcccaggaggggtgacagaggggtgagaggcaggcaagtcttcagacacgtgttctgtggtcctggtgcttccaccctaaggccacatgggctcaggccaggccttcatcccctcaaaggcctctggctgctcagtctcccttatggggcagaggccgcccaaagttgggacaggtcaatgttcgctcacccttcaggcctcagctgcaagatcagccacagacctcatgctggacacaggagcccaggacatgcctgggtcctggctgatgactgattagtctcttctgtcacaggggtgcctggagaccccttaataagcagcataaataaatatctgacacagattggaggcctctggccacaccaaaaa

SEQ ID NO: 4061 - protein, 175 aa, Homo sapiens
MFVLVEMVDTVRIPPWQFERKLNDSIAEELNKKLANKVVYNVGLCICLFDITKLEDAYVFPGDGASHTKVSLGFFDDILIPPESLQQPAKFDEAEQVWVWEYETEEGAHDLYMDTGEEIRFRVVDESFVDTSPTGPSSADATTSSEELPKKEAPYTLVGSISEPGLGLLSWWTSN

SEQ ID NO: 4062 - DNA, 4159 bp, Homo sapiens
gcgcgagcggctgtgcgcggtgcgtggtgcgtggtgcgagagcccccagcgcaggccgggatgttcgtcctggtggaaatggtggacaccgtccggatccccccttggcagtttgagaggaagctcaacgactccattgccgaggagctgaacaagaagttggccaacaaggtcgtgtacaacgtgggactctgcatttgtctgtttgatatcaccaaactggaggatgcctatgtattccctggggatggcgcatcacacaccaaagtccattttcgctgcgtggtgtttcatccattcctagatgagattctcattgggaagatcaaaggctgcagcccagaaggagtgcacgtctctctaggcttcttcgatgacattctcatccccccagagtcactgcagcagccagccaagttcgacgaagcggagcaggtgtgggtgtgggagtacgagacggaggaaggagcacacgacctctacatggacaccggcgaggagatccgcttccgggtggtggacgagagctttgttgacacgtcccccacagggcccagctcagcagatgccaccacttccagtgaggagctgccaaagaaggaggctccgtacacgcttgtgggatccatcagtgagccaggcctgggccttctctcctggtggaccagcaactagccctggggctggacagtggaccctaccagcctgcgggaaggtggtatggccggctgtgaagacaacagcagctgaggccgatgctaaggagatagtgtctcgagctggacagtgaggcaaggccaggagtgcccaccagcttgccccgctcctccaccatctaggccctgctcctccttcactgcagtgatggatccatctgtggctgtggctgttgggcctccactgaccttgactgaaaagacccttcctggaccctggacttgacaacaaacggcacagacaccaatcactcacagaacagtcactggttttggattcttgttttccttgcaagaacaaaaggttctctagaatccttcagccaccaatgaaatgatcaggcaggagaaaaactttagatgggagtcttgtcatcaaaaataaatacagttgcatggagctgcttaagatctgaaccaaactcaaaataggaagacgggggctaaaaagttattttaagaacccccccaccacaaccacagtcactccgtgggctaagcggggagcaggaagcatgtctggtcacaccatcttggaataggaagccatggctggacggatcggatccactgatggcacacgtggagctgaacttgacgccagcggcggggcggggaggcactgccctcactgttgcagttccttcattctgttgagggcactgccagcgcggaaccactcaatctgcgtctcgttgaaggtgtggttcaggaggatggtctcctgggtcccgttggggtgcttgatgatgcacttcaggggctgcaaggagaaggtgggtgtgggtggaagtggtgggtactgtgtgcccttggccccgcaggggggtcagggagacagggcactgcctggggacctaagaggtcagcaggcaaaccaaatcctaggccagtctgtgcctgatggcccaggtcagacccaggtggcacctacaggggattcctggggcccagagggtcctgcagtgggtgggctgtcccctgagtgccaggtcctggtgagtaaagggaggttggggaggtgtgagggccccgggttgactccaacccccaactctgagaagccactttgctttctctgtggggccacctggagaactgggggcctttccagctggaatgaagcctcctgggagaagctaccctggggccagtgcaggaggggaaacaaggtggctgcccctcaccccaccacctcagggggacccgggcccctaaccttgccaggggtgaagtccttcaggccctgaatggtcagcttgtccacagggtgaatcttgttgtagtcagccgggtcagcgaaggtcagaggcagcaggccctgtttcttcaggttggtctctggaaagcaggcggcattcggtcatcgggggcctgactagcctggagagcttcattttctgaacccatctggggctctgggagatgcccctaatcctgctgcctgggacaatgcccgggcagtgactatggggccctggtctgctccctttcactaggggtgcccctagcaagtgtgcgctggtgctgaggtctgcgaggccttcctgctgcacattcatgatcagaaagaaccccctggcacatgtcctagatctcagcggctcagatctacaagcctggaagcagggcctgcgggaagccgggaagctgagcgtcggatgtgcactgtgtgagcctaagaaggggcaagaggctgacgggcctgtgggctgcagtggacacagcctagaaccaggcccaactcagccacgggcagggagagtgaccttgatcactagggatgggatgaggatggcctgggtacagactccagctcaccgtggatcctggcaaagctcttggtgatgatggcccggcccccaaggtggcgaggctccagagctgcatgctcccggctcgagccctcgccgtagttctcgtctccgatcaccacccacctgatgccatgtttctgtcaggcaagcgggggtaaggttataaggcagaggagggcaccgtcctcacctgtctggccctacctgcctggcctcacccacctggcgcctgggcatcctgaggctcccggtaaaggggctggaggggcccttcctcgcctgctgcctaagggcaagtgaagcctgcgtgaatgagacccaaacgaggccccgaggggacagaggcacgtggttgtttgcagtggcaaagaagacagaagccacccattggtgcttggcagaggcaggtgtgtgtggagggaggttgggtgagacagggacggcctccgggccccacacaagatgcatctgtgaagctcaaggcgcccccttcctgggagcaccctctgccccacccagccaccagggggtgccagagtcctttcacccggctgggccaggacttgggttcagccctggttctgtttgtttctcaaagcagaaaaagtccaatcacctcagaccctctctgcctgctcactgtgaggccccgtgtagccccctctctgagcttttggcctctgacttcctgagtcggcccccttccttgtctttgtctagggccagatatcctaagatatctctcactaactcctcctggtgcagggacccggctgtaccaccggacctgggcctcatgccttctcagccacagggaggggctgcaggcctctcctcccttccacagcagtcccctttgggcttggtcggcctccttcccagtttccactcccctaatgtcctccctgcacctgccttgcaggccccttcaggagtgaccactggcattgcccctatcaactctgacccaccttgtagtagcgggcagtgtcagggacggggccaaactcctgagtgacggcattgcgcacggagttggccttgccgttttcaatgttgatggcaccaatgagcaggttgttggagatgttatccaagtgcccacggaacttgagccaggggccagcagctgagatgtggtcagtggtacacttccctttgaccttgggtggtaagtagagaggacagaggtcagggcatggccctggaggggtggatgacaagccctccagaggcaggcagcaggccccggggcccaggaggggtgacagaggggtgagaggcaggcaagtcttcagacacgtgttctgtggtcctggtgcttccaccctaaggccacatgggctcaggccaggccttcatcccctcaaaggcctctggctgctcagtctcccttatggggcagaggccgcccaaagttgggacaggtcaatgttcgctcacccttcaggcctcagctgcaagatcagccacagacctcatgctggacacaggagcccaggacatgcctgggtcctggctgatgactgattagtctcttctgtcacaggggtgcctggagaccccttaataagcagcataaataaatatctgacacagattggaggcctctggccacaccaaaaa

SEQ ID NO: 4063 - protein, 204 aa, Homo sapiens; identical to SEQ ID NO: 4057

SEQ ID NO: 4064 - DNA, 2380 bp, Homo sapiens
cacacacacacacacacaatcttccagacccatcccctgcctgccagctccacgagccagagagagacagagcgcggacgccgcaggaggcagtgcctggaccccagctgcccaggagagacggagcccgtggctggtgaggccgcagagcagggccaggccgggccctgcccgcaaggacgaccaaacccctcaccggcccctgggccccagagcccaccaggctctcctgctggccccaccatgacttcagagtcgacgtcacccccagttgtgcccccgctccactcccccaagtccccagtctggcccaccttccccttccacagggagggcagcagggtctgggagcggggtggtgtcccacctcgggacctacccagccctctgcccaccaagcggaccaggacctattcagcgacagcccgggcctcagctggccccgtgttcaagggcgtctgtaagcagttctcacgctcacagggccatggcttcatcacccccgagaacgggtccgaggacatcttcgtacatgtgtctgacatcgagggggagtacgtgccagtggagggcgacgaggtgacctacaagatgtgccctatccctcccaagaaccagaagttccaggccgtggaggtggtgctcactcagctggccccccacactccccacgagacgtggtctggccaggtcgtgggctcctaggctgagtggttcacaggccagctggccgggggttggggagccacacagggtgaacgggcagcagccggctccatgccccactgccctggctgatgagtccttcggtggcctcagtgtgcacgtctgtctgtccgtctgtgcttgtggctatgagcgtgtgcctccacccaccccacgacccgtgactactgtgcaagctggccaggaggtaggtggagggcaaggccaccagacctggcttcgcgctgtccactgcctctctcctcccctccctgccgcagacacgcaggacccgctcgccctcctgcttacccgtccccacggtgactgagctgcgagagcctgcgctgggctcactccctggcctccgcccctgagctgtcccgtgtcagtccctggcccggagccaggctctctgtgctacttacatctccctcccttggctgaggtcccccgccacagcctggacccttccctcagaagcctggccgatgggtgcttttggggagcctctcagcctggcagtggcgctgggctccttcccctgggctgtactgagccgagcccaggggtttgcagagggtgggggtccatctctccagcttggctgcagacctcctttaccctgactcacaagccccactgatgctctgggccatgcccggctgacggctgctgtggatgccgcgagggacggacacacgtccggggcacccacgaggagggcccccagcctgggagactggccctgcggcctccacgtcaaactctcttcccaaagccctaacagaccagtggccgaggtgtggctcttattgcatccatccctgaagatgtgtggctgttgctgtcacctggagtccttttggggccaagatgtgtgtgcacccggggtcgtggccattcactcccaggcaggggtgagggtggcctggcccaggaggccaggaaggagggccctgtctgcctccacctctgggtgcaccccctgcctaccaccctcccttctagagagcacatcgcctgaccggggagaagtggggccgtggttcgagggagggctggccaggggtgggacccttatgagactcagtctgtgagtaaaactgggggctcaaatgcccaggatgaggggatcagtgactgtctaggaggatcccttgccttgtaggtgccccaagaccgcagggtagaaatcagccgggatgcctgcatcccacccccggccccagggcccaccacataaaatctgggagcccagagctgctgaggtgtggtcagctcccctaaaatgggcacggcccagcctgtcccatgaggaataaaggcccctggcccccttgagagagggcttgttggtgagggctgactcctgggggcccccaaggctcccctcctgtggggaggccaccttttaaggcaccactagcagtcaggatatggtggcatcagccctggggcctcctgggtggcaggggggcagcagctctcctccccactcacaggccctgcagtgctcatttggaattcctcccaagacccctggccacccagaccccccattcttcctaacactggcaataaaccctcaactgtgaaaaaaaaaaaaaaaaaaaaaaaaaaaaaaaaaaaaaaaaaaaaaaaaaaaaaaaaaaaaaaaaaaaaaaaaaaaaaa

SEQ ID NO: 4065 - protein, 153 aa, Homo sapiens
MTSESTSPPVVPPLHSPKSPVWPTFPFHREGSRVWERGGVPPRDLPSPLPTKRTRTYSATARASAGPVFKGVCKQFSRSQGHGFITPENGSEDIFVHVSDIEGEYVPVEGDEVTYKMCPIPPKNQKFQAVEVVLTQLAPHTPHETWSGQVVGS

SEQ ID NO: 4066 - DNA, 1210 bp, Homo sapiens
agccatggcagtcaccgcccaggcagcccgcagaagggagcgcgtcctctgcctgtttgacgtggacgggaccctcacgccggctcgccagaaaattgaccctgaggtggccgccttcctgcagaagctacgaagtagagtgcagatcggtgtggtgggcggctctgactactgtaagatcgctgagcagctgggtgacggggatgaagtcattgagaagtttgattatgtgtttgccgagaacgggacggtgcagtataagcacggacgactgctctccaagcagaccatccagaaccacctgggggaggagctgctgcaggacttgatcaacttctgcctcagctacatggccctgctcaggctgcccaagaagcgtggaaccttcatcgagttccggaatggcatgctgaacatctcgcccatcggccggagctgcaccctggaggagaggatcgagttctccgaactggacaagaaagagaagatccgggagaagttcgtggaagacctgaaaacagagtttgctggcaaagggctgaggttctctcgaggaggcatgatcagctttgacgtcttccccgagggctgggacaagcgctactgcctggatagcctggaccaggacagcttcgacaccatccacttctttgggaacgagactagccctggtgggaacgactttgagatctttgccgacccccggactgttggccacagcgtggtgtctcctcaggacacggtgcagcgatgccgggagattttcttcccagagacagctcatgaggcgtgaccggggcccacatctgtgtgtcgtgacttctgaagagtttggcctaggcctaaagagaggtcctggtgttggatagatgccagggcccctcctctggcccaggacgcctgctgcaagcccacccagatggggccagagtctgtgtggacaaccgtccccagccagtctgctcctagtggcactggcttcgtcctcccagggcccagagtgttccccatgctccacctggtgccccaggccacagctgctgcttgtatttcggtacagaagaggtttctttctgcaccaggaggaggcgtgctcaagtatcggtacgagatctagcctgccctgcctgcctgccctgggcgatgaggtacggtggggaaggtgcctattttagagaactttgtcacagtattaaagttccctcgtgcc

SEQ ID NO: 4067 - protein, 262 aa, Homo sapiens
MAVTAQAARRRERVLCLFDVDGTLTPARQKIDPEVAAFLQKLRSRVQIGVVGGSDYCKIAEQLGDGDEVIEKFDYVFAENGTVQYKHGRLLSKQTIQNHLGEELLQDLINFCLSYMALLRLPKKRGTFIEFRNGMLNISPIGRSCTLEERIEFSELDKKEKIREKFVEDLKTEFAGKGLRFSRGGMISFDVFPEGWDKRYCLDSLDQDSFDTIHFFGNETSPGGNDFEIFADPRTVGHSVVSPQDTVQRCREIFFPETAHEA

SEQ ID NO: 4068 - DNA, 745 bp, Homo sapiens
gtcgggtacgggaaggtccaagccgctgccgggtgcccgagggccgtcgtggccgccgtcgccacgggtcccaatggagccgccgaatctctatccggtgaagctctacgtgtacgacctgtccaaaggcctggcccggcggctcagccccatcatgctggggaaacaactggaaggcatctggcacacatccatagttgtgcacaaggatgagttcttcttcggcagtggtggtatctccagctgccccccgggagggacattgcttgggcctccagactctgtggttgatgtggggagtacagaagtcacagaagaaatctttctggagtacctctcctccctgggggagtccctgttccgaggtgaggcctacaacctctttgaacacaattgtaacaccttcagcaacgaagtggcacagttcctgactgggcggaagattccttcttacatcacagacctgccctctgaagttctctccacgccctttggacaggcacttcggcccctcctggactccattcagatccagcctccaggagggagctccgtgggcagacccaacggccagagctaacaggactgcctgggaccgccctgcctcaccagggcttttcctttttaaacaaaacaaaccctaccagatttctattttataattttacatcagagctaacaaccaggggacggctttttaaatttcccagggaaggagaccgtcaggccgcatgtagacaatgct

SEQ ID NO: 4069 - protein, 168 aa, Homo sapiens
MEPPNLYPVKLYVYDLSKGLARRLSPIMLGKQLEGIWHTSIVVHKDEFFFGSGGISSCPPGGTLLGPPDSVVDVGSTEVTEEIFLEYLSSLGESLFRGEAYNLFEHNCNTFSNEVAQFLTGRKIPSYITDLPSEVLSTPFGQALRPLLDSIQIQPPGGSSVGRPNGQS

SEQ ID NO: 4070 - DNA, 2156 bp, Homo sapiens
gcgcatgcgtggattgtcgtcttctgtccaagttggtcgcttccctgcgccaaagtgagcagtagccaacatgtcagggtgggagtcatattacaaaaccgagggcgatgaagaagcagaggaagaacaagaagagaaccttgaagcaagtggagactataaatattcaggaagagatagtttgatttttttggttgatgcctccaaggctatgtttgaatctcagagtgaagatgagttgacaccttttgacatgagcatccagtgtatccaaagtgtgtacatcagtaagatcataagcagtgatcgagatctcttggctgtggtgttctatggtaccgagaaagacaaaaattcagtgaattttaaaaatatttacgtcttacaggagctggataatccaggtgcaaaacgaattctagagcttgaccagtttaaggggcagcagggacaaaaacgtttccaagacatgatgggccacggatctgactactcactcagtgaagtgctgtgggtctgtgccaacctctttagtgatgtccaattcaagatgagtcataagaggatcatgctgttcaccaatgaagacaacccccatggcaatgacagtgccaaagccagccgggccaggaccaaagccggtgatctccgagatacaggcatcttccttgacttgatgcacctgaagaaacctgggggctttgacatatccttgttctacagagatatcatcagcatagcagaggatgaggacctcagggttcactttgaggaatccagcaagctagaagacctgttgcggaaggttcgcgccaaggagaccaggaagcgagcactcagcaggttaaagctgaagctcaacaaagatatagtgatctctgtgggcatttataatctggtccagaaggctctcaagcctcctccaataaagctctatcgggaaacaaatgaaccagtgaaaaccaagacccggacctttaatacaagtacaggcggtttgcttctgcctagcgataccaagaggtctcagatctatgggagtcgtcagattatactggagaaagaggaaacagaagagctaaaacggtttgatgatccaggtttgatgctcatgggtttcaagccgttggtactgctgaagaaacaccattacctgaggccctccctgttcgtgtacccagaggagtcgctggtgattgggagctcaaccctgttcagtgctctgctcatcaagtgtctggagaaggaggttgcagcattgtgcagatacacaccccgcaggaacatccctccttattttgtggctttggtgccacaggaagaagagttggatgaccagaaaattcaggtgactcctccaggcttccagctggtctttttaccctttgctgatgataaaaggaagatgccctttactgaaaaaatcatggcaactccagagcaggtgggcaagatgaaggctatcgttgagaagcttcgcttcacatacagaagtgacagctttgagaaccccgtgctgcagcagcacttcaggaacctggaggccttggccttggatttgatggagccggaacaagcagtggacctgacattgcccaaggttgaagcaatgaataaaagactgggctccttggtggatgagtttaaggagcttgtttacccaccagattacaatcctgaagggaaagttaccaagagaaaacacgataatgaaggttctggaagcaaaaggcccaaggtggagtattcagaagaggagctgaagacccacatcagcaagggtacgctgggcaagttcactgtgcccatgctgaaagaggcctgccgggcttacgggctgaagagtgggctgaagaagcaggagctgctggaagccctcaccaagcacttccaggactgaccagaggccgcgcgtccagctgcccttccgcagtgtggccaggctgcctggccttgtcctcagccagttaaaatgtgtttctcctgagctaggaagagtctacccgacataagtcgagggactttatgtttttgaggctttctgttgccatggtgatggtgtagccctcccactttgctgttccttactttactgcctgaataaagagccctaagtttgtactatatactgttaaaaaaaaaaaaaaaaaaaaaaa

SEQ ID NO: 4071 - protein, 609 aa, Homo sapiens
MSGWESYYKTEGDEEAEEEQEENLEASGDYKYSGRDSLIFLVDASKAMFESQSEDELTPFDMSIQCIQSVYISKIISSDRDLLAVVFYGTEKDKNSVNFKNIYVLQELDNPGAKRILELDQFKGQQGQKRFQDMMGHGSDYSLSEVLWVCANLFSDVQFKMSHKRIMLFTNEDNPHGNDSAKASRARTKAGDLRDTGIFLDLMHLKKPGGFDISLFYRDIISIAEDEDLRVHFEESSKLEDLLRKVRAKETRKRALSRLKLKLNKDIVISVGIYNLVQKALKPPPIKLYRETNEPVKTKTRTFNTSTGGLLLPSDTKRSQIYGSRQIILEKEETEELKRFDDPGLMLMGFKPLVLLKKHHYLRPSLFVYPEESLVIGSSTLFSALLIKCLEKEVAALCRYTPRRNIPPYFVALVPQEEELDDQKIQVTPPGFQLVFLPFADDKRKMPFTEKIMATPEQVGKMKAIVEKLRFTYRSDSFENPVLQQHFRNLEALALDLMEPEQAVDLTLPKVEAMNKRLGSLVDEFKELVYPPDYNPEGKVTKRKHDNEGSGSKRPKVEYSEEELKTHISKGTLGKFTVPMLKEACRAYGLKSGLKKQELLEALTKHFQD

SEQ ID NO: 4072 - DNA, 1520 bp, Homo sapiens
gccgcgcggggccatttccgctgctgcttctgtgagtttttccggtgcacgcgagtgcttctgaaacgtcagctgcgctcccctaggagtgctgagcccgcggaaccgcagccatgactgaggctgatgtgaatccaaaggcctatccccttgccgatgcccacctcaccaagaagctactggacctcgttcagcagtcatgtaactataagcagcttcggaaaggagccaatgaggccaccaaaaccctcaacaggggcatctctgagttcatcgtgatggctgcagacgccgagccactggagatcattctgcacctgccgctgctgtgtgaagacaagaatgtgccctacgtgtttgtgcgctccaagcaggccctggggagagcctgtggggtctccaggcctgtcatcgcctgttctgtcaccatcaaagaaggctcgcagctgaaacagcagatccaatccattcagcagtccattgaaaggctcttagtctaaacctgtggcctctgccacgtgctccctgccagcttcccccctgaggttgtgtatcatattatctgtgttagcatgtagtattttcagctactctctattgttataaaatgtagtactaaatctggtttctggatttttgtgttgtttttgttctgttttacagggttgctatcccccttcctttcctccctccctctgccatccttcatccttttatcctccctttttggaacaagtgttcagagcagacagaagcagggtggtggcaccgttgaaaggcagaaagagccaggagaaagctgatggagccaggacagagatctggttccagctttcagccactagcttcctgttgtgtgcggggtgtggtggaattaaacagcattcattgtgtgtccctgtgcctggcacacagaatcattcatacgtgttcaagtgatcaaggggtttcatttgctcttgggggattaggtatcatttggggaggaagcatgtgttctgtgaggttgttcggctatgtccaagtgtcgtttactaatgtacccctgctgtttgcttttggtaatgtgatgttgatgttctccccctacccacaaccatgcccttgagggtagcagggcagcagcataccaaagagatgtgctgcaggactccggaggcagcctgggtgggtgagccatggggcagttgacctgggtcttgaaagagtcgggagtgacaagctcagagagcatgaactgatgctggcatgaaggattccaggaagatcatggagacctggctggtagctgtaacagagatggtggagtccaaggaaacagcctgtctctggtgaatgggactttctttggtggacacttggcaccagctctgagagcccttcccctgtgtcctgccaccatgtgggtcagatgtactctctgtcacatgaggagagtgctagttcatgtgttctccattcttgtgagcatcctaataaatctgttccattttgatgacaaaaaaaaaaaaaaaaaaaaa

SEQ ID NO: 4073 - protein, 128 aa, Homo sapiens
MTEADVNPKAYPLADAHLTKKLLDLVQQSCNYKQLRKGANEATKTLNRGISEFIVMAADAEPLEIILHLPLLCEDKNVPYVFVRSKQALGRACGVSRPVIACSVTIKEGSQLKQQIQSIQQSIERLLV

SEQ ID NO: 4074 - DNA, 1601 bp, Homo sapiens
ggagttacgtagaagacagggcgtcctggtgtacgggctggccctggacgtcacttccgctggcggcagtggcgtcacttcctgctcttgggggcggggcatccgtgtccttgcggtgctgggcagcagaccgtccaaaccgacacgcgtggtatcctcgcggtgtccggcaagagactaccaagacagacgctatgactgaggctgatgtgaatccaaaggcctatccccttgccgatgcccacctcaccaagaagctactggacctcgttcagcagtcatgtaactataagcagcttcggaaaggagccaatgaggccaccaaaaccctcaacaggggcatctctgagttcatcgtgatggctgcagacgccgagccactggagatcattctgcacctgccgctgctgtgtgaagacaagaatgtgccctacgtgtttgtgcgctccaagcaggccctggggagagcctgtggggtctccaggcctgtcatcgcctgttctgtcaccatcaaagaaggctcgcagctgaaacagcagatccaatccattcagcagtccattgaaaggctcttagtctaaacctgtggcctctgccacgtgctccctgccagcttcccccctgaggttgtgtatcatattatctgtgttagcatgtagtattttcagctactctctattgttataaaatgtagtactaaatctggtttctggatttttgtgttgtttttgttctgttttacagggttgctatcccccttcctttcctccctccctctgccatccttcatccttttatcctccctttttggaacaagtgttcagagcagacagaagcagggtggtggcaccgttgaaaggcagaaagagccaggagaaagctgatggagccaggacagagatctggttccagctttcagccactagcttcctgttgtgtgcggggtgtggtggaattaaacagcattcattgtgtgtccctgtgcctggcacacagaatcattcatacgtgttcaagtgatcaaggggtttcatttgctcttgggggattaggtatcatttggggaggaagcatgtgttctgtgaggttgttcggctatgtccaagtgtcgtttactaatgtacccctgctgtttgcttttggtaatgtgatgttgatgttctccccctacccacaaccatgcccttgagggtagcagggcagcagcataccaaagagatgtgctgcaggactccggaggcagcctgggtgggtgagccatggggcagttgacctgggtcttgaaagagtcgggagtgacaagctcagagagcatgaactgatgctggcatgaaggattccaggaagatcatggagacctggctggtagctgtaacagagatggtggagtccaaggaaacagcctgtctctggtgaatgggactttctttggtggacacttggcaccagctctgagagcccttcccctgtgtcctgccaccatgtgggtcagatgtactctctgtcacatgaggagagtgctagttcatgtgttctccattcttgtgagcatcctaataaatctgttccattttgatgacaaaaaaaaaaaaaaaaaaaaa

SEQ ID NO: 4075 - protein, 128 aa, Homo sapiens; identical to SEQ ID NO: 4073

SEQ ID NO: 4076 - DNA, 4992 bp, Homo sapiens
ggctatcctactgcagctggctgcatcagatgtgccaggcctgccctctagctcccaacaccatctgcctgatctaagctttgccatgttgttgtcactgctgggtgcctgtgctgtggtggggccattccatggccctgagtgggagccagtgcagggcctgctctcccagaatcacagctgcagggaccctcagtgctgtggcaacctgcttgtcctctgcctctttctggtctggcaggtccggcactgttggcaccaggtcaccaggacccgcttcagcacaaggaatgtcatcaaggtgccactgcagaagcgggcagtgccctccatgaggtgcgaaactgtcttcaagctgactcctgaattcttcagtcctggaaagtccaggggcctagattctcaacaatgcgcacaaaggcagagatggggataccggaggagcctccaggaatcatgggcccagaacctgctctctccacagcacccatgtccaggcccaccttcgggtgtccacacccactctgagcccatcttttgtaccacctccatttcaaacacctgtttactgcctcagaacagttcctggaaagcatggcaggtgccttggtgtctccatgatggtcagactcgccctgccttggacatgtgtcaagagatggagcagctgctgcttcactcacaggaaaggttggtgtcactggagcctgtcatcagtgtgaggtctcgccccacctccatgaccttaaccacctctcttccaaacttactttcagctgagaggctgcagttctgcccccagagagctcctgcctgatccttcccaccaaacactgagaatgtgcacttggaagtcttggcactgtcgaccagaggcctgggaaccagggggtaaaaaccagaaagcaggcagagaggatagtagagagacccaggctccaaggtgggtgaaccagacagggagcagacgggaggatgcttcagaaatccaggcatctggggagtagttcccagtagactttggaatggagggtgatgcagagactaacgtgttggagtgtgcaaaccagagactagtaataagtgaaactgatggcgagatcttgacaccagggtgggacacccaggaccggatgggagttgagagtagaaccaacattcaggaactagggaatagaaaccagagggaggctggaggtgagaatctccctgaaacccaggcacatatgggagagaaccaagaacagttaagatgtaaaattgatgcagagacccaaacacctgagtgggagaaccaggataagaatggaagtgaggatgctgtggagacccagacatttgagaagaaggacaagaaagaggctggagaggaggatggggaagagatccaggctcaaggattggggaagcaaggccagactggagatgagaatggtgaggagacccagacaccacagtgggagaaacaagatcagatgaaaggtgatgcggatgtggaaattcagatggaagaggggagaaacaaggatcaggttggaggtcaggatgctgcacaaacccaatcatgtgggagggagaacgtgggagaagtaaaaaaagagaatagtgtagagacccaggccttggattggggaaaacaggaatgtgttggaaatgggaatgttacagagatccagacaccaaggtgggagaagcatgatcaaggtggaagtaagaaagctaagaagacccaagcatctgggggagagaaccagaaacaattaagtcatgaaattcaagtggggtggggaaataagggcctgagaagagatgaagatgctaaggaaacccagatagctaccaagaagaagctcagggagataagagaaggattgggtggtgatccaggcactatggtggggaaaccggagacaagtagcaagtgaaatttatagagaatttgagatactatgttgggagaatcagaactggattggaggtgaacatagagcagaaattcaggcatcagagaagagagaccaaagaaaggatggatgtgaggatggcacaaatatcctggcacccgaggctgagatccaggaacaattaaaaggtgaaactgatgtggagactcagagcaatgagccacttagagaagaggatggtacagacattcagtcactagggaggagagaggttaaaggtgaggatgataaagacacccaggaacttgggaggaaaaatcagggtcagttaggaaatgaatttagtggaaagattcacataccaaaggggaagaatcaggaacatattagaggcgaagatggtgcacatacccagatatctgagtcagggaactggggcaaattaacaagtcaaattgatggagaaatgcattcagcagaatggaagaaagatcagcagattggaggtgagaatggggcagaaattcagatacaagggaagagaaacctgagagaagttggaggtgaggacggtgtaaagacctgggcacctgggaaagaaacccagagtcagtttagaagtgatcttggtagaaagatccttttatcagagtggaagagccagaagcagatgggaagtgagaatggaacagaaattcaggctccagtggagagaaaccagagagaacctggaggtgaggacggtgtaaagactcagagacctaagagagagaacgaggaccagttagatagtgaaattggagggagccattcaccagggaggaggaactgggagctgattggaaaggatgttgcagaaaatcaggcatcagagaagagaaaccagagagaggttggaaacgaggacggtagaatgatctggaggcttaggggaaaaaactggaggcttagagcgaagaaacagactgttaaaaagtaaagataatggaaagacccgtttatcagagtggaagaaccaggaacagggtggaggtgggaatgatgaagaaattcaaatacaggggaagagaaacctgagagggaccacagctgatgatggtacagagacccaggctcctgcaggagatgaccagggacagttaagagttgaaattgctgaagagatccaggtacaagggcaaggaaataagaatgacggtggagttgaggatgttgcagaactccaggatataggaagccagagaaagtgcacagatgaggatgttggagagcctcgagcaccaaggggaggaaacaaggatctggtcagaggagaggatgctgtgagggacagtctccaagtcgactgttctgggagtgagaggcccacaggcaggaagcacagcctaccatggcctccagccttcactggctatggatgtgggacccgggaacaggaacaggcagtggctgtgaatggtttcatctctgccccctgtcctgagatgaatcctgtcccccactggggtgaagtcttcctgctggtgggtggggagggagagcatctggccagccagggcacaacccctgccagggatcatagagtggggatcagtccagcctcccagcaggcccaacctgaatcctggagaagacgacaaagggacaaaggggtggatccagagaaggcccccagcctgactcggcagtcccaaaaccctccgtctctgacagctcccttgggcatgccctctgcctgctcctgtctcccgtgtggcccagccccggaagctgccatcattctagcgggtcctcccaccgccctcactgtcctgcccaaggggacaggcctcaagaagagcaaacgactgctcctggagtccctcatgcggaggaggattgcacacctgaagtggggtcttccccggcggatcctggagtcctatttcctgtttaacttcttaggatcttgctcattgacccttgctggggcgaggctctctggactgaacacaggccaggagctccaagcccagcaggaaaggtattgtgaggcccaaggctccccaccaggccttaagtccccagagaggttccagagggttcagcgcccagacagaaaaagctcgaaacttcctatacaagccagagctctggagaggaacagaccgcacatgtcagagcccattaagcatttccatccagcctgaaaaggccaggagagtcaggccaccagggggcgccagagaaccacaggagatccaggaagcgcttgctaggaccaagctcccagctcccaggacccccaggccggcagcggagtccaggagctggtgtggcccacaaagggtcggagagcctcccagtgagaacagtaggggcaggaaaatgatcaggtcaagggtctcccagctggcagagagggctcccagcagagtgaggacttcattctctagggcagaccacgcccactggaggaaggaatgtacatcctgggaggcctctaagctccccagactcaaatgccagcagctcacatactggagaagaggaagcctggaatctacagggtgcagaggggctgggcagcagccttcctgccattctgcagaacctgtcagcttcaaagggaggctccactctgcggtggcaaagctgggcctgacccttctggccaagatgtcctggtccccacagctcgccaagcgcaagcacttggcccctaacctgagcctgagggaacctgattctactctgcctcccaaagtgggtgatcctcgtgcaggggaggacagcatcggagatcacactgcttcacagagggatcttcagctgcaaggtcactgctgtactggggccacccttcctaagacagagagtccccagggccaggaggcacctgggaacccaaatggggctccacagaatacacgagcctccaaaaagtttagtattatgaagcatctgaattttttttctcttccagaatggctttaaaaagtagactcaggcccagagtcctcaggacatatcagaaaagctttgagagtgtcctgatccctgcaaagcctctaataaattggtcatttgggcaaaaaaaaaaaaaaaa

SEQ ID NO: 4077 - protein, 234 aa, Homo sapiens
MNPVPHWGEVFLLVGGEGEHLASQGTTPARDHRVGISPASQQAQPESWRRRQRDKGVDPEKAPSLTRQSQNPPSLTAPLGMPSACSCLPCGPAPEAAIILAGPPTALTVLPKGTGLKKSKRLLLESLMRRRIAHLKWGLPRRILESYFLFNFLGSCSLTLAGARLSGLNTGQELQAQQERYCEAQGSPPGLKSPERFQRVQRPDRKSSKLPIQARALERNRPHMSEPIKHFHPA

SEQ ID NO: 4078 - DNA, 1279 bp, Homo sapiens
ctttcagttgctttgctgttagcctgttggaccttcgagcctagctgctcgcacaggactcggccacctgcccttcctgcaccgactggccagctcaagaggtttggatatggaccttcttcaattcctggccttcctctttgtcctgcttttgtctgggatgggagccacaggcaccttgaggacctccctggacccaagcctggagatctacaagaagatgtttgaggtgaagcggcgggagcagctgttggcactgaagaacctggcacagctgaacgacatccaccagcagtacaagatccttgatgtcatgctcaaggggctctttaaggtgctggaggactcccggacagtgctcaccgctgctgatgtgctcccagatgggcccttcccccaggacgagaagctgaaggatgctttctcccacgtggtggagaacacggccttcttcggcgatgtggtgctgcgcttcccgaggattgtgcactattactttgaccacaactccaactggaacctcctcatccgctggggtatcagtttctgcaaccagacaggcgtcttcaaccaggggccccactcgcccatcctcagcctgatggcccaggagctggggatcagtgagaaagactccaacttccagaacccatttaaaatcgaccgcacagagttcattcccagcactgaccctttccagaaggccctgagagaagaagagaaacgccgaaagaaagaggagaagcggaaggagatccgaaaaggcccaaggatctccagatcccagtctgagttatagccctggagcagctcagggctcagggggccacaaggaggcaggtcgggaggaagaagaggtggaggtgtggttgtggtggagagcaccagctagccccttccagaaggggaggccacatttgcccggccccctggagctgggtctgagccccagctgaagggactgagcctcagatggctggattttctctcaggggcctcctgctgaaggggccttcagaggattttatgctggaaatatgaccctgtgcagactgctgggggaggcaggaggatgcctgcctggaccctgttggtggctgaagacctctggccagctggcttccgcccttggtggggaagcagcagaactaggttctgagccacgggtcagggtgccaccctgctgctggccccactgtgtcacagagctgcctggcacaggtcccagcccctctgcagagacacaataaaagccagcagaccctttggaccgacaaaa

SEQ ID NO: 4079 - protein, 229 aa, Homo sapiens
MDLLQFLAFLFVLLLSGMGATGTLRTSLDPSLEIYKKMFEVKRREQLLALKNLAQLNDIHQQYKILDVMLKGLFKVLEDSRTVLTAADVLPDGPFPQDEKLKDAFSHVVENTAFFGDVVLRFPRIVHYYFDHNSNWNLLIRWGISFCNQTGVFNQGPHSPILSLMAQELGISEKDSNFQNPFKIDRTEFIPSTDPFQKALREEEKRRKKEEKRKEIRKGPRISRSQSEL

SEQ ID NO: 4080 - DNA, 4325 bp, Homo sapiens
gccctttctgtgcggcgcccgggcgcaacgcaaacatggcggcgggtggcacccgtcggtgaggcggtgccgggcgggggttgtcgggtgtcatgggcggtggcgacggcaccgcccccgcgtctccctgagcgggacggcagggggggcttctgcgctgagccgggcgatggacgacagcggcgagctgggtggtctggagaccatggagaccctcacggagctgggcgacgagctgaccctgggagacatcgacgagatgctgcaatttgtcagtaatcaagtgggagagttccctgacttgttttcagaacagctgtgtagctcctttcctggcagtggtggtagtggtagcagcagcggcagcagtggcagcagcagcagcagcagcaatggcaggggcagcagcagcggagctgtggacccttcagtgcaacggtcattcacccaggtcacattaccttccttctctccctcggcggcctccccacaggctccaactctgcaagtcaaggtttctcccacctcagttcccaccacacccagggcaactcctattcttcagccccgcccccagccccagcctcaacctcaaactcagctgcaacaacagacggtaatgatcacgccaacattcagcaccactccgcagacgaggatcatccagcagcctttgatataccagaatgcagctactagctttcaagtccttcagcctcaagtccaaagcctggtgacatcctcccaggtacagccggtcaccattcagcagcaggtgcagacagtacaggcccagcgggtgctgacacaaacggccaatggcacgctgcagacccttgccccggctacggtgcagacagttgctgcgccacaggtgcagcaggtcccggtcctggtccagcctcagatcatcaagacagattcccttgttttgaccacactgaagacagatggcagccctgttatggctgcggtccagaacccggccctcaccgccctcaccacccctatccagacggctgcccttcaagtaccaaccctggtgggcagcagtgggaccattctgaccacaatgcctgtaatgatggggcaagagaaagtgcccattaagcaggtacctgggggagtcaagcagcttgagccccccaaagaaggagaaaggcggacaacccataatatcattgagaaacgatatcgctcctccatcaatgacaaaatcatcgaattgaaagacctggtcatggggacagacgccaagatgcacaagtctggcgttctgaggaaggccattgattacatcaaatacttgcagcaggtcaatcataaactgcgccaggagaacatggtgctgaagctggcaaatcaaaagaacaagcttctaaagggcatcgacctaggcagtctggtggacaatgaggtggacctgaagatcgaggactttaatcagaatgtccttctgatgtcccccccagcctctgactcagggtcccaggctggcttctctccctactccattgactctgagccaggaagccctctattggatgatgcaaaggtcaaagatgagccagactctcctcctgtggcgctgggcatggtagaccgctcacggattcttctgtgtgtcctcaccttcctgtgcctctcctttaaccccctgacttccctgctgcagtggggaggggcccacgactctgaccagcacccacactcaggctctggccgcagtgtcctgtcattcgagtcaggttctgggggctggtttgactggatgatgcctactcttctcttatggctggtaaatggtgtgattgtcctgagcgtctttgtgaagctgctggttcatggggagccagtgatccggccacactcgcgctcctcggtcaccttctggaggcaccggaaacaggcagatctggatctcgccagaggagattttgcagctgctgccggcaacctacaaacctgcctggcagttttgggccgggcactgcccacctcccgcctggacctggcctgcagcctctcctggaacgtgatccgctacagcctgcagaagctacgcctggtgcgctggctgctcaagaaagtcttccagtgccggcgggccacgccagccactgaggcaggctttgaagacgaagctaagaccagcgcccgggatgcggctctggcctatcaccggctgcaccagctgcacatcacagggaagcttcctgcaggatccgcctgttccgatgtacacatggcgttgtgtgccgtgaacctggctgaatgtgcagaggagaagatcccaccgagcacactggttgagatccatctgactgctgccatggggctcaagacccggtgtggaggcaagctgggcttcctggccagctacttcctcagccgagcccagagcctgtgtggccccgagcacagtgctgttcctgactccctgcgctggctctgccaccccctgggccagaagtttttcatggagcggagctggtctgtgaagtcagctgccaaggagagtctatactgtgcccagaggaacccagctgaccccattgcgcaggtccaccaggccttctgcaagaacctgctggagcgagctatagagtccttggtgaaacctcaggccaagaagaaggctggagaccaggaagaagagagctgtgaattctccagtgctctggagtacttgaaattacttcattcttttgtggactctgtgggggttatgagccccccactctccaggagctccgtgctcaagtccgccctgggtccagacatcatctgtcggtggtggacgtctgcaatcactgtggccatcagctggctccagggagacgatgcagctgtgcgctctcattttaccaaagtggaacgcatccccaaggccctggaagtgacagagagccccctggtgaaggccatcttccatgcctgcagagccatgcatgcctcactccctgggaaagcagatgggcagcagagttccttctgccattgcgagagggccagtggccacctatggagcagcctcaacgtcagtggggccacctctgaccctgccctcaaccacgtggtccagctgctcacctgtgacctgctactgtcgctacggacagcgctctggcaaaaacaggccagtgccagccaggctgtgggggagacctaccacgcgtcaggcgctgaactggcgggcttccaacgggacctgggcagcctgcgcaggctggcacacagcttccgcccagcataccgcaaggtgttcctgcatgaagccaccgtgcgcctgatggcaggagccagccccacccgcacccaccagctgctggaacacagcctgcggcggcgcaccacgcagagcaccaagcacggagaggtggatgcctggcccggccagcgagagcgggccaccgccatcctgctggcctgccgccacctgcccctctccttcctctcctccccgggccagcgggcagtgctgctggccgaagctgcccgcaccctggagaaggtgggcgaccggcgctcctgcaacgactgccagcagatgattgttaagctgggtggtggcactgccattgccgcctcctgaccaccaggctcagcccacccctccacctctctctcgatttctctctctccccctcagcatcttcccgctgagagtggtggggaagagccttgtcttcttagctgtcacctgccgaggcttctgggccactcaggccagtgcacccctgggcagagccccttaaagctgctgtcactagatgcccatggtccagggcctggtgggcgtgagaggataggtggcagggcagaaactgggcagccctgacttgatagcagcagggggagctcccaagctgccaagcccctgcctccagccttcctgagtttctctctcctgaaccctactctctcctttttgcttcctcagtttttatcaggctttctctgggggacagcagtctctgagcaccagggagcagttgccctcaggcctgtgcccagcatgccctcccctttttatacgaatgttttctaccagtgtgcttgggtttgccatgatgcgaggctgagttgctgtagcgtcttgattctctccctgggtctgcgttccctcccctgggcctgactgagcctgctcattgtttttccctttattacacaggacagccaggggaggaggggggcccagccctgggaggctggtgggaggcagggggcaggcctgcggatgcatgaaataatgttggcattattttttaattttttaaaaaataaatggtatcttatttaaaaaaaaaaaaaaaaaaaaa

SEQ ID NO: 4081 - protein, 1141 aa, Homo sapiens
MDDSGELGGLETMETLTELGDELTLGDIDEMLQFVSNQVGEFPDLFSEQLCSSFPGSGGSGSSSGSSGSSSSSSNGRGSSSGAVDPSVQRSFTQVTLPSFSPSAASPQAPTLQVKVSPTSVPTTPRATPILQPRPQPQPQPQTQLQQQTVMITPTFSTTPQTRIIQQPLIYQNAATSFQVLQPQVQSLVTSSQVQPVTIQQQVQTVQAQRVLTQTANGTLQTLAPATVQTVAAPQVQQVPVLVQPQIIKTDSLVLTTLKTDGSPVMAAVQNPALTALTTPIQTAALQVPTLVGSSGTILTTMPVMMGQEKVPIKQVPGGVKQLEPPKEGERRTTHNIIEKRYRSSINDKIIELKDLVMGTDAKMHKSGVLRKAIDYIKYLQQVNHKLRQENMVLKLANQKNKLLKGIDLGSLVDNEVDLKIEDFNQNVLLMSPPASDSGSQAGFSPYSIDSEPGSPLLDDAKVKDEPDSPPVALGMVDRSRILLCVLTFLCLSFNPLTSLLQWGGAHDSDQHPHSGSGRSVLSFESGSGGWFDWMMPTLLLWLVNGVIVLSVFVKLLVHGEPVIRPHSRSSVTFWRHRKQADLDLARGDFAAAAGNLQTCLAVLGRALPTSRLDLACSLSWNVIRYSLQKLRLVRWLLKKVFQCRRATPATEAGFEDEAKTSARDAALAYHRLHQLHITGKLPAGSACSDVHMALCAVNLAECAEEKIPPSTLVEIHLTAAMGLKTRCGGKLGFLASYFLSRAQSLCGPEHSAVPDSLRWLCHPLGQKFFMERSWSVKSAAKESLYCAQRNPADPIAQVHQAFCKNLLERAIESLVKPQAKKKAGDQEEESCEFSSALEYLKLLHSFVDSVGVMSPPLSRSSVLKSALGPDIICRWWTSAITVAISWLQGDDAAVRSHFTKVERIPKALEVTESPLVKAIFHACRAMHASLPGKADGQQSSFCHCERASGHLWSSLNVSGATSDPALNHVVQLLTCDLLLSLRTALWQKQASASQAVGETYHASGAELAGFQRDLGSLRRLAHSFRPAYRKVFLHEATVRLMAGASPTRTHQLLEHSLRRRTTQSTKHGEVDAWPGQRERATAILLACRHLPLSFLSSPGQRAVLLAEAARTLEKVGDRRSCNDCQQMIVKLGGGTAIAAS

SEQ ID NO: 4082 - DNA, 1263 bp, Homo sapiens
atggcgcgggccggggcgcggggactgctcggcggccgccgtcctcccggcctccggctcgcgctcgcgcttcggctcgcgttgctgctggcgcggccgccgtcgggccgcgcgggagcccccgaggcgcagggtcccgcggcgcccggcacgacagccccggaggggggcgaccgctgccgcggctactacgacgtgatgggccagtgggacccgcccttcaactgcagctccggagcctacagcttctgctgcggcacgtgcggctaccgcttctgctgccacgacgggccgcggcgcctcgaccagagccgctgttccaactacgacacgccggcctgggtccagacaggccggccgcccgcccgcgcccgcgacaccgcagcgccccgggaccccggccgcgagcgcagccatacggccgtctacgctgtgtgcggcgtcgcagcgctgctggtgctggccggcatcggggcgcgcctgggactggagagggcgcacagcccgcgcgcgcggcgcacagtgaccagggcgctgacagagcttctgaagcagccgggcccccaggagccactgcctcccaccctgggcccacccctgggtggctgtgtccaggtgcagatgggggacggcctcccccggggctccccccacaacagcgcaggtcccaggactccgcgcctggctcgagcgtcgcctccgggcgagccgttcatgagggtggcaccccccgggctggctgccgccgccgctgcgcgtgactcggagccaggccctgttccaggcgctggaggctgcggcgaagacaggcttggctcgcagcctcgcccggagaacggtcccccaggttctcaccgaacggcctcggggagaggactacggagaggtgacagcgagggcggagtgaaccggggcatcggaccgagccgcggcggcggcagcctgacgctgcagccagactacgccaagtacgccacgttcaaggccgccgcgctcaaggccgcagaggccgccccgcgggacttctgtcagcgtttccccgccctcgagccgtccccgcgtcgcccggcccggcccgccccgctcagccacccgacggctcgggccttccaggtaccccggcgacccgggcacgcggcccggcgccagttcagtgtgaagatgcctgagaccttcaacccgcagctccccggcctttacggcagcgcgggccgcgggtcccggtacctaaggaccaatagcaagaccgaggtcaccgtgtga

SEQ ID NO: 4083 - protein, 420 aa, Homo sapiens
MARAGARGLLGGRRPPGLRLALALRLALLLARPPSGRAGAPEAQGPAAPGTTAPEGGDRCRGYYDVMGQWDPPFNCSSGAYSFCCGTCGYRFCCHDGPRRLDQSRCSNYDTPAWVQTGRPPARARDTAAPRDPGRERSHTAVYAVCGVAALLVLAGIGARLGLERAHSPRARRTVTRALTELLKQPGPQEPLPPTLGPPLGGCVQVQMGDGLPRGSPHNSAGPRTPRLARASPPGEPFMRVAPPGLAAAAAARDSEPGPVPGAGGCGEDRLGSQPRPENGPPGSHRTASGRGLRRGDSEGGVNRGIGPSRGGGSLTLQPDYAKYATFKAAALKAAEAAPRDFCQRFPALEPSPRRPARPAPLSHPTARAFQVPRRPGHAARRQFSVKMPETFNPQLPGLYGSAGRGSRYLRTNSKTEVTV

SEQ ID NO: 4084 - DNA, 898 bp, Homo sapiens
gcaccatgaggcgagggccccggagcctgcggggcagggacgcgccagcccccacgccctgcgtcccggccgagtgcttcgacctgctggtccgccactgcgtggcctgcgggctcctgcgcacgccgcggccgaaaccggccggggccagcagccctgcgcccaggacggcgctgcagccgcaggagtcggtgggcgcgggggccggcgaggcggcgctgcccctgcccgggctgctctttggcgcccccgcgctgctgggcctggcactggtcctggcgctggtcctggtgggtctggtgagctggaggcggcgacagcggcggcttcgcggcgcgtcctccgcagaggcccccgacggagacaaggacgccccagagcccctggacaaggtcatcattctgtctccgggaatctctgatgccacagctcctgcctggcctcctcctggggaagacccaggaaccaccccacctggccacagtgtccctgtgccagccacagagctgggctccactgaactggtgaccaccaagacggccggccctgagcaacaatagcagggagccggcaggaggtggcccctgccctccctctggacccccagccaggggcttggaaatcaaattcagctcttcactccagcatgcacatgccctctttctgggaccaggctaacctgcagaagcacagacactacagaccacagcattcagcccccatggagtttggtgtgcttgcctttggcttcagacctcaccatctttgacagcccttgaaggtggtagcccagctcctgttcctgtgccttcaaaaggctggggcactatgagtaaaagaccgcttttaaaatggggaaggcaccattaagccaaaatgaatctgaaaaaagacaaaa

SEQ ID NO: 4085 - protein, 184 aa, Homo sapiens
MRRGPRSLRGRDAPAPTPCVPAECFDLLVRHCVACGLLRTPRPKPAGASSPAPRTALQPQESVGAGAGEAALPLPGLLFGAPALLGLALVLALVLVGLVSWRRRQRRLRGASSAEAPDGDKDAPEPLDKVIILSPGISDATAPAWPPPGEDPGTTPPGHSVPVPATELGSTELVTTKTAGPEQQ

SEQ ID NO: 4086 - DNA, 855 bp, Homo sapiens
ggctggactcagggcggtttgaaagatcggcgcgcaccgcaggagcaacggttggtcctgcggctgtgatgtcggtgttgaggcccctggacaagctgcccggcctgaacacggccaccatcttgctggtgggcacggaggatgctcttctgcagcagctggcggactcgatgctcaaagaggactgcgcctccgagctgaaggtccacttggcaaagtccctccctttgccctccagtgtgaatcggccccgaattgacctgatcgtgtttgtggttaatcttcacagcaaatacagtctccagaacacagaggagtccctgcgccatgtggatgccagcttcttcttggggaaggtgtgtttcctcgccacaggtggtggaaggctttagggccaccatggcgcagcgcctggtgcgcgtgctgcagatctgtgctggccacgtgcccggtgtctcagctctgaacctgctgtccctgctgagaagctctgagggcccctccctggaggacctgtgagggtggctggcccctgggctgccccttctcatggcttcgtgctgactccataaacattctctgttgaggatgtccagtcagggcttgacaggcccaggctcagcccgccgtggctgggaaggttccctgcagtgccagtgctgcagcagggagagctgggcagaagcagcgagggggcccagctggcgagactgtagccccctcccactcccacactcactcttgcagagcctgtgtctttaagcagctggcgtgttacatctccatttaaggtttcctttgaacaaaaggtctgtggctaaaaaaagtttaaaaatcaaaaaaaaaaaaaaaaaa

SEQ ID NO: 4087 - protein, 107 aa, Homo sapiens
MSVLRPLDKLPGLNTATILLVGTEDALLQQLADSMLKEDCASELKVHLAKSLPLPSSVNRPRIDLIVFVVNLHSKYSLQNTEESLRHVDASFFLGKVCFLATGGGRL

SEQ ID NO: 4088 - DNA, 947 bp, Homo sapiens
ggctggactcagggcggtttgaaagatcggcgcgcaccgcaggagcaacggttggtcctgcggctgtgatgtcggtgttgaggcccctggacaagctgcccggcctgaacacggccaccatcttgctggtgggcacggaggatgctcttctgcagcagctggcggactcgatgctcaaagaggactgcgcctccgagctgaaggtccacttggcaaagtccctccctttgccctccagtgtgaatcggccccgaattgacctgatcgtgtttgtggttaatcttcacagcaaatacagtctccagaacacagaggagtccctgcgccatgtggatgccagcttcttcttggggaaggtgtgtttcctcgccacaggtgctgggcgggagagccactgcagcattcaccggcacaccgtggtgaagctggcccacacctatcaaagccccctgctctactgtgacctggaggtggaaggctttagggccaccatggcgcagcgcctggtgcgcgtgctgcagatctgtgctggccacgtgcccggtgtctcagctctgaacctgctgtccctgctgagaagctctgagggcccctccctggaggacctgtgagggtggctggcccctgggctgccccttctcatggcttcgtgctgactccataaacattctctgttgaggatgtccagtcagggcttgacaggcccaggctcagcccgccgtggctgggaaggttccctgcagtgccagtgctgcagcagggagagctgggcagaagcagcgagggggcccagctggcgagactgtagccccctcccactcccacactcactcttgcagagcctgtgtctttaagcagctggcgtgttacatctccatttaaggtttcctttgaacaaaaggtctgtggctaaaaaaagtttaaaaatcaaaaaaaaaaaaaaaaaa

SEQ ID NO: 4089 - protein, 180 aa, Homo sapiens
MSVLRPLDKLPGLNTATILLVGTEDALLQQLADSMLKEDCASELKVHLAKSLPLPSSVNRPRIDLIVFVVNLHSKYSLQNTEESLRHVDASFFLGKVCFLATGAGRESHCSIHRHTVVKLAHTYQSPLLYCDLEVEGFRATMAQRLVRVLQICAGHVPGVSALNLLSLLRSSEGPSLEDL

SEQ ID NO: 4090 - DNA, 4607 bp, Homo sapiens
cccgcgccccgctcagccttgcagccccgcgcccggagcatctccctggaggaacggagacaaaggaggattcatgtccaaagggctcccagagaccaggacggacgcagccatgtcagagctggtgcctgagcccaggcctaagccagcggtgcccatgaagcccatgagcatcaactccaacctgctgggctacatcggcatcgacaccatcatcgagcagatgcgcaagaagaccatgaagaccggtttcgacttcaacatcatggtcgttggccagagtggactgggcaaatcaacgctggtcaacacgctcttcaaatcccaagtgagccgcaaggcctccagctggaaccgggaggagaagatccccaagacagtggagatcaaagctatcgggcatgtgatagaggaaggcggtgtcaaaatgaagctgaccgtcatcgacaccccaggctttggagaccaaatcaacaatgaaaactgctgggagcccattgagaagtacatcaatgagcagtacgagaagttcctgaaggaggaggtcaacatcgccaggaagaaacgcatccctgacactcgtgtccactgctgcctttacttcatctctcccacaggacactccttgcgacctctggatcttgagttcatgaaacacctcagcaaggttgtgaacatcatccctgtcattgctaaggctgacaccatgaccctggaggagaagtctgaattcaagcaaagggttcgcaaggagcttgaagtaaatggcattgaattctacccccagaaggaatttgatgaggatttggaggataagacggagaatgacaaaatcaggcaggagagcatgccttttgctgtggtgggaagtgacaaggagtaccaagtgaatggcaagagggtcctcggccgaaaaactccatgggggatcatcgaagtggaaaacctcaaccactgtgagtttgccctgcttcgagactttgtcatcaggacccacctccaggacctcaaggaagtgacacacaacatccactatgagacttacagggccaagcggctcaatgacaatggaggcctccctccggtgagcgtggacacagaggaaagccacgacagtaacccatgacgaccacttctctgtgtcatcacacatacccacttcacacacacacatcccaaataccaccaccaaccaccttcttcctctcaactctgtcccacaggcctgtctggtatttgtggagcatcttgtctgtgtgtgtgtgtgtgtgtgtgtgtgtgtgtgtgtgtgtgacagagagagagcgagagagcctgtgtgtgtgcatgcaggggtgaggtattttcactgccctccctggagagtcccttgtaagtttggctcctccatgcctgtccattatctgtctcctttccttgtgtcccaaaacaaagctgtttgcctcactcaggagatctgggggaggtttcatttaaaagtgctgggagcaggtgagccacaggcaactcttctctcggaacctgcacacaaactggggctatagagattctccaaggacagatggcagtggagctagacctgagtagggggcagggagttcaggacaaccctcctgtaagttgggggtggtctgggggtaaggctggggcttcctgggaaaaggaaggccatgagaaggcagagaagtaggccagagctgggttcttgcagaaagcatcagtgcctacaaatggagctccacccttcagtctgtgtcgtgttcagtgtcacaaagctaccacctgtcaccagagcctactgctgctctccactcaactggcctctgctgccaggccactgcctgtctctgcttccgactttgtcttctttctccctttccctccttccctcatacattgctttctctccctctcctgcgtgtctctgacatctctcacttccttttagatgaatctactttaggttcattcctatatttagcatttatgcccagtctacttccagaaatgactttagactgcctttcacataaaatcacaaaactacaggacagtacaaacagattgccagagaaatctgggtcaaagaaaggaataggaaagaaagtttctgtagtcaagcacctgaacaggccctgagctcacaggcagccaatgtaaagagggaaacacagtgagttatgcagttcccagtgtccagttaaaggaagcacacatgctagtcatgtgagacaaccttttattgggacatcaggttctagaactaattctaaagaagtatcagaaacaatatacataatttgtctttcttagtaatttggcttcaaagacaaatttttgaccacacctccgttttctccgtcagacttctctcccttctaagcaggcttctctgttgctccatttgcttcatacatacttgacctctcttttctattccccatcacttttgtgctgaagctaatcatatttatgtctgtctttctctacttttccctaattccctctcctcctgactcctgtagacattcccaatgatacccaccgtcatacatttaggcttttcttgcctttccctgaagccctgtatttattaatgcatatatttcccctgcttgttgtacaagtaagttactcttttcctttaatctgtaagattcatgaaattcggggccagggaaacagtttagccttagggaagggaaaacactaagtgaaactgtttacaataacctcatacaaccttctgtcccatctcctggttcagcctaggtgtttcactggtcctctatgaatcccagcacttataatcccagtcttttatcactcaggtgctaggaaaaaaaacatagactcaagacccaagattcaatggaccaggagaaaggggggcggtgatcaggtcaccagtgaccccaacctatgctctcggtctttcctggaggctgccaacccagccctcatcctcccttgctcacaaagttacagggtaggcacctgtcaggacagaacagcagcagcgctacagcccagaggttatacatttcaacagaacagggatccttggctactgtagaagcagtcctgtatggagaccttggaccagcaggggaagatctatgggcatgggaggtgggcgttggaaaggctgagtaggaatggtgcctggcacccctgaaccatgatctgagcctccctggagaaggtattttatatgtctgctgccagctgctggtctccacaccctcaaccgttctcaacccccctgcagggagaaggcctcctgggcactgtccttccacctgtgccagccaccccctgccccactgctgaatgaaggccatttcaagcgctgcttctcactccattcctctcagctgttattgctgcagggccaagccctttttagtgctgtgctcgtccagctcaccaccacagcccctctcagccctcagtaggtgggaggggccagctgcctctttaggccagttgcatcctccatttatccaaaccactcctctcctcccagtggagtggggttctgccagtacagccctactgcatcatctgcgtcagccggtcctagcccatctgcagggtgaaagaactcatcaagagctccttctgcccttgtaagcccatcccagctacttgtaaccatctctaagggcaatggcattgctccctacccattcatctgcatgagctactcttggcttccttaaagggtcaagaaagcaatttttctgcttactagattcattgagatcagctgtgtgagccccaaagtgggacaagggtgtctccttcattacttaaagatattcatgagggtgggtcactacagatgttggggagcaagggctaggatcactttttaaaaaatcaccacttgtggctgtcccagagtgcggttgtacatcctccccacctcataacgcagccactgaggaagagtggttttcctaagaagacattgctggagttgactttcttctgtccaaacaaacaaacaaaaactaaacacacacacaaacccccagaaacccacaatatgtacacgctaaggaaaaactagcacccttctgtccactcagcaataagagggatctcttcccacctaccctacctactcctacccccaacccccttccccattaatgtgagtaatgaattagcctgaccacaggtggtcactgtaggctaatggaaaatacccaagggagggcaaagccccccatcagatgcatgaatgtttgcgaatgttgactgccactgccccacacactgtgtctttatagaattcccctttgcccaccctcttcctgtctccacctggacacaacttgctcaaaggctggtgacttgtgggccattcatctacaaccaagtcctgatggagcaagaggcccacgcctaggggatgcaagaacaacccgtttcttaaatgttaccagtcccagccaatcttacggtgacattacagttaaatttcccaattgaaaacaagcaaacagacactcaaactggtcctgtaattgttgctagactttatgtgttgtacaactaaacattgctgtttgaacagtaaaaaaaaaaaaaaaaaa

SEQ ID NO: 4091 - protein, 337 aa, Homo sapiens
MSELVPEPRPKPAVPMKPMSINSNLLGYIGIDTIIEQMRKKTMKTGFDFNIMVVGQSGLGKSTLVNTLFKSQVSRKASSWNREEKIPKTVEIKAIGHVIEEGGVKMKLTVIDTPGFGDQINNENCWEPIEKYINEQYEKFLKEEVNIARKKRIPDTRVHCCLYFISPTGHSLRPLDLEFMKHLSKVVNIIPVIAKADTMTLEEKSEFKQRVRKELEVNGIEFYPQKEFDEDLEDKTENDKIRQESMPFAVVGSDKEYQVNGKRVLGRKTPWGIIEVENLNHCEFALLRDFVIRTHLQDLKEVTHNIHYETYRAKRLNDNGGLPPVSVDTEESHDSNP

SEQ ID NO: 4092 - DNA, 2249 bp, Homo sapiens
cccgcgccccgctcagccttgcagccccgcgcccggagcatctccctggaggaacggagacaaaggaggattcatgtccaaagggctcccagagaccaggacggacgcagccatgtcagagctggtgcctgagcccaggcctaagccagcggtgcccatgaagcccatgagcatcaactccaacctgctgggctacatcggcatcgacaccatcatcgagcagatgcgcaagaagaccatgaagaccggtttcgacttcaacatcatggtcgttggccagagtggactgggcaaatcaacgctggtcaacacgctcttcaaatcccaagtgagccgcaaggcctccagctggaaccgggaggagaagatccccaagacagtggagatcaaagctatcgggcatgtgatagaggaaggcggtgtcaaaatgaagctgaccgtcatcgacaccccaggctttggagaccaaatcaacaatgaaaactgctgggagcccattgagaagtacatcaatgagcagtacgagaagttcctgaaggaggaggtcaacatcgccaggaagaaacgcatccctgacactcgtgtccactgctgcctttacttcatctctcccacaggacactccttgcgacctctggatcttgagttcatgaaacacctcagcaaggttgtgaacatcatccctgtcattgctaaggctgacaccatgaccctggaggagaagtctgaattcaagcaaagggttcgcaaggagcttgaagtaaatggcattgaattctacccccagaaggaatttgatgaggatttggaggataagacggagaatgacaaaatcaggcaggagagcatgccttttgctgtggtgggaagtgacaaggagtaccaagtgaatggcaagagggtcctcggccgaaaaactccatgggggatcatcgaagtggaaaacctcaaccactgtgagtttgccctgcttcgagactttgtcatcaggacccacctccaggacctcaaggaagtgacacacaacatccactatgagacttacagggccaagcggctcaatgacaatggaggcctccctccgggagaaggcctcctgggcactgtccttccacctgtgccagccaccccctgccccactgctgaatgaaggccatttcaagcgctgcttctcactccattcctctcagctgttattgctgcagggccaagccctttttagtgctgtgctcgtccagctcaccaccacagcccctctcagccctcagtaggtgggaggggccagctgcctctttaggccagttgcatcctccatttatccaaaccactcctctcctcccagtggagtggggttctgccagtacagccctactgcatcatctgcgtcagccggtcctagcccatctgcagggtgaaagaactcatcaagagctccttctgcccttgtaagcccatcccagctacttgtaaccatctctaagggcaatggcattgctccctacccattcatctgcatgagctactcttggcttccttaaagggtcaagaaagcaatttttctgcttactagattcattgagatcagctgtgtgagccccaaagtgggacaagggtgtctccttcattacttaaagatattcatgagggtgggtcactacagatgttggggagcaagggctaggatcactttttaaaaaatcaccacttgtggctgtcccagagtgcggttgtacatcctccccacctcataacgcagccactgaggaagagtggttttcctaagaagacattgctggagttgactttcttctgtccaaacaaacaaacaaaaactaaacacacacacaaacccccagaaacccacaatatgtacacgctaaggaaaaactagcacccttctgtccactcagcaataagagggatctcttcccacctaccctacctactcctacccccaacccccttccccattaatgtgagtaatgaattagcctgaccacaggtggtcactgtaggctaatggaaaatacccaagggagggcaaagccccccatcagatgcatgaatgtttgcgaatgttgactgccactgccccacacactgtgtctttatagaattcccctttgcccaccctcttcctgtctccacctggacacaacttgctcaaaggctggtgacttgtgggccattcatctacaaccaagtcctgatggagcaagaggcccacgcctaggggatgcaagaacaac

SEQ ID NO: 4093 - protein, 345 aa, Homo sapiens
MSELVPEPRPKPAVPMKPMSINSNLLGYIGIDTIIEQMRKKTMKTGFDFNIMVVGQSGLGKSTLVNTLFKSQVSRKASSWNREEKIPKTVEIKAIGHVIEEGGVKMKLTVIDTPGFGDQINNENCWEPIEKYINEQYEKFLKEEVNIARKKRIPDTRVHCCLYFISPTGHSLRPLDLEFMKHLSKVVNIIPVIAKADTMTLEEKSEFKQRVRKELEVNGIEFYPQKEFDEDLEDKTENDKIRQESMPFAVVGSDKEYQVNGKRVLGRKTPWGIIEVENLNHCEFALLRDFVIRTHLQDLKEVTHNIHYETYRAKRLNDNGGLPPGEGLLGTVLPPVPATPCPTAE

SEQ ID NO: 4094 - DNA, 2267 bp, Homo sapiens
atctacggggcggcaggaggcccgaagcaagatggcggtgaatcagagccacaccgagaaccgccgcggagccctcatccctaacggtgaaagtctcttgaagcggtctccgaatgtggagctctccttcccacagcgatcagaaggctcaaatgtctttagtggtagaaagacaggaacattgtttctcacttcataccgggtgattttcataacttcatgctccatcagtgatcccatgttgtcttttatgatgccatttgatctgatgacgaacctcactgttgaacaaccagtatttgctgcaaacttcattaagggaactattcaggcagctccatatggtggctgggaaggacaagctacttttaaattagtcttcagaaatggaggtgccattgaatttgcccagttgatggtgaaagctgcctctgctgctgcccgaggatttccacttagaaccttaaatgactggttcagctctatgggaatttatgtaattactggggaagggaatatgtgcactccacagatgccttgttcagttattgtctatggagccccacctgcaggatatggagccccacctcccggatacggagccccacctgcaggatatggagcccaacccgtaggaaatgaaggcccgcctgtgggatacagagcctcacctgtgcgatatggagccccacctcttggatacggagccccacctgcaggatatggagccccacctctaggatatggagccccacctcttggatatggaaccccacctctcggatatggagccccacctctcggatatggagccccacctgcaggaaatgaaggcccgcctgcgggatacagagcctcacctgctggatcaggagccaggcctcacgaatctacagcagcccaggctcctgaaaacgaggcttctcttccctctgcctcctcttctcaggtccattcttaaccttctaagatgtaaaccttgaagactcaccaagcaaagaggtaccctaaaattgaagtcaggataaggaggacgactcaggtatgtgatcacaggcttctcgcaggtagttgttccaccctttggaagggcaatcttatgggggaaggtgaaactttacttctgtgcctagattttagaagcagaatcaactcttaaatagctggctaaaggaagaataccattgtggggctaattccccagtaatttggttgacattgggttgcatttttaaacataactttttccacactcgcattcaaggttcctgtcttcccatcctcattcaagaaacatttattatgctccgtttgctaggcactaagatgcgtgctaaaaacgtcatgttgaacacttagttgtttgagaaagctaaattttcaatagtaagagtgttataaattacggtggatccacaaattggagtattatacacctgttgaaaactatgtctagaggtagagaaagccttctttgaggagaccaaaaccaacaaataaaagcatgataaattgactatatcaaaatttaaaacttctctatgacagaagttaaaagataggcaacagaataggaaaaagtgattttcaacatatatattaatttatagtcagaatacgtgaataactacaaatcaattctccccaaaatgacagaaatatgaattgccgaataaccaaggcaatagcatggccagaaaacgtttgaaaagatgttcagcttgactagtgttagggaaatgcaacctgagatgagaaaacatttttatctccaaagatttacaaatattaaaactcttgatatggcactttcacattttaaaatatgcctgcgagaaaacttgcatgtgtgcacaaagatgcatgtgggaagatttcattatattcattgtttctaacagcacaaaattagaaataacctatatgtccattaataggaaatatatgaataggctatggtatgcccatactacgtatgcagaaatttctaagacttgttgataaggagaaaagcaagttgtagggagcatatactatagtgattttcagcctcatcagactgaatgccccattttataacaaatatttatattttataacaaacgtttatatttgtatatttataacaaatattttgtaatgtctccttcacttcaatgaagtttgtagataattgcatatgattccacaccatttcaaccaaaattaataggccataaatgtgatagaggaaataaaaggagtttgtagtaaaaaaaaaaaaaaaa

SEQ ID NO: 4095 - protein, 309 aa, Homo sapiens
MAVNQSHTENRRGALIPNGESLLKRSPNVELSFPQRSEGSNVFSGRKTGTLFLTSYRVIFITSCSISDPMLSFMMPFDLMTNLTVEQPVFAANFIKGTIQAAPYGGWEGQATFKLVFRNGGAIEFAQLMVKAASAAARGFPLRTLNDWFSSMGIYVITGEGNMCTPQMPCSVIVYGAPPAGYGAPPPGYGAPPAGYGAQPVGNEGPPVGYRASPVRYGAPPLGYGAPPAGYGAPPLGYGAPPLGYGTPPLGYGAPPLGYGAPPAGNEGPPAGYRASPAGSGARPHESTAAQAPENEASLPSASSSQVHS

SEQ ID NO: 4096 - DNA, 1978 bp, Homo sapiens
ctgctccggagtgacgcgggcccgggcgcgacggtctcggcggcggcggcggcggcgacagagcgagcgcggcgcggggccaccatgggggcccagctcagcacgttgggccatatggtgctcttcccagtctggttcctgtacagtctgctcatgaagctgttccagcgctccacgccagccatcaccctcgagagcccggacatcaagtacccgctgcggctcatcgaccgggagatcatcagccatgacacccggcgcttccgctttgccctgccgtcaccccagcacatcctgggcctccctgtcggccagcacatctacctctcggctcgaattgatggaaacctggtcgtccggccctatacacccatctccagcgatgatgacaagggcttcgtggacctggtcatcaaggtttacttcaaggacacccatcccaagtttcccgctggagggaagatgtctcagtacctggagagcatgcagattggagacaccattgagttccggggccccagtgggctgctggtctaccagggcaaagggaagttcgccatccgacctgacaaaaagtccaaccctatcatcaggacagtgaagtctgtgggcatgatcgcgggagggacaggcatcaccccgatgctgcaggtgatccgcgccatcatgaaggaccctgatgaccacactgtgtgccacctgctctttgccaaccagaccgagaaggacatcctgctgcgacctgagctggaggaactcaggaacaaacattctgcacgcttcaagctctggtacacgctggacagagcccctgaagcctgggactacggccagggcttcgtgaatgaggagatgatccgggaccaccttccacccccagaggaggagccgctggtgctgatgtgtggccccccacccatgatccagtacgcctgccttcccaacctggaccacgtgggccaccccacggagcgctgcttcgtcttctgagggccgggcacggtcacacggccacccgccccgcgcaccccacgccctgttcacgctcacccagtcacctccccacatcgcacactggggccccgggttcagcctggcctgcccgtgccctggtgaatcacctggctgagcagttcccctggagccccttcgggagcagggctgtgtcccagatgggccacggctgagccttcagagtacgtcctgcctggcacttactggtccttaccagagacgcccagccccatccctgtcctcatgacccctcgtccaccccccacacacactataaggctgagggctgccagcagccccgtctgcccaccattcccggccgtggaccatagtcgggatgtcagcagacacacatgggcagcccaaagctgcaggtgccagggcccaccccagcctcgcctgtcacccccactcccgcctcagggccaggcccaggcctcaccacctgacgctgcatgagacattgacaccagaaagccctcttgggggcactgctccctaccccagggccctggccagccgggagcttggctctcctctggctagagtgggaagagggggctggccatggggccctcccagaacctcagcatttccttccagcccatccaaacactgaggcagccttggggaaccccgagctggggggttggcagcccactgcaccgcctcagggttttggggtcctgggctggggccaccatccctgatggcagaactcccacaaccacatgtatttattcctctgtcctaaaccgtcccctccttccctcacccccagcacagggggattctgagcagtgcctcttgtctgagggacatatcagtgacctcgacgttgcctttagactacagttgtgttagcctcttgcgtattggctttttcagagtcatttatgagcagaaaaaaaaaaagtaaaactttgctaatattaaaaaaaaaaaaaaaaaaaaaaaaaaaaaa

SEQ ID NO: 4097 - protein, 301 aa, Homo sapiens
MGAQLSTLGHMVLFPVWFLYSLLMKLFQRSTPAITLESPDIKYPLRLIDREIISHDTRRFRFALPSPQHILGLPVGQHIYLSARIDGNLVVRPYTPISSDDDKGFVDLVIKVYFKDTHPKFPAGGKMSQYLESMQIGDTIEFRGPSGLLVYQGKGKFAIRPDKKSNPIIRTVKSVGMIAGGTGITPMLQVIRAIMKDPDDHTVCHLLFANQTEKDILLRPELEELRNKHSARFKLWYTLDRAPEAWDYGQGFVNEEMIRDHLPPPEEEPLVLMCGPPPMIQYACLPNLDHVGHPTERCFVF

SEQ ID NO: 4098 - DNA, 2000 bp, Homo sapiens
aggggttggccctggagtctgccagccacactgggaaaacattggagcttggtctgccatcctgaactgtggttcccctgcctcccagcccggctgtgagtgctcagcgaccctgacaggctgacagttgggccatatggtgctcttcccagtctggttcctgtacagtctgctcatgaagctgttccagcgctccacgccagccatcaccctcgagagcccggacatcaagtacccgctgcggctcatcgaccgggagatcatcagccatgacacccggcgcttccgctttgccctgccgtcaccccagcacatcctgggcctccctgtcggccagcacatctacctctcggctcgaattgatggaaacctggtcgtccggccctatacacccatctccagcgatgatgacaagggcttcgtggacctggtcatcaaggtttacttcaaggacacccatcccaagtttcccgctggagggaagatgtctcagtacctggagagcatgcagattggagacaccattgagttccggggccccagtgggctgctggtctaccagggcaaagggaagttcgccatccgacctgacaaaaagtccaaccctatcatcaggacagtgaagtctgtgggcatgatcgcgggagggacaggcatcaccccgatgctgcaggtgatccgcgccatcatgaaggaccctgatgaccacactgtgtgccacctgctctttgccaaccagaccgagaaggacatcctgctgcgacctgagctggaggaactcaggaacaaacattctgcacgcttcaagctctggtacacgctggacagagcccctgaagcctgggactacggccagggcttcgtgaatgaggagatgatccgggaccaccttccacccccagaggaggagccgctggtgctgatgtgtggccccccacccatgatccagtacgcctgccttcccaacctggaccacgtgggccaccccacggagcgctgcttcgtcttctgagggccgggcacggtcacacggccacccgccccgcgcaccccacgccctgttcacgctcacccagtcacctccccacatcgcacactggggccccgggttcagcctggcctgcccgtgccctggtgaatcacctggctgagcagttcccctggagccccttcgggagcagggctgtgtcccagatgggccacggctgagccttcagagtacgtcctgcctggcacttactggtccttaccagagacgcccagccccatccctgtcctcatgacccctcgtccaccccccacacacactataaggctgagggctgccagcagccccgtctgcccaccattcccggccgtggaccatagtcgggatgtcagcagacacacatgggcagcccaaagctgcaggtgccagggcccaccccagcctcgcctgtcacccccactcccgcctcagggccaggcccaggcctcaccacctgacgctgcatgagacattgacaccagaaagccctcttgggggcactgctccctaccccagggccctggccagccgggagcttggctctcctctggctagagtgggaagagggggctggccatggggccctcccagaacctcagcatttccttccagcccatccaaacactgaggcagccttggggaaccccgagctggggggttggcagcccactgcaccgcctcagggttttggggtcctgggctggggccaccatccctgatggcagaactcccacaaccacatgtatttattcctctgtcctaaaccgtcccctccttccctcacccccagcacagggggattctgagcagtgcctcttgtctgagggacatatcagtgacctcgacgttgcctttagactacagttgtgttagcctcttgcgtattggctttttcagagtcatttatgagcagaaaaaaaaaaagtaaaactttgctaatattaaaaaaaaaaaaaaaaaaaaaaaaaaaaaa

SEQ ID NO: 4099 - protein, 278 aa, Homo sapiens
MKLFQRSTPAITLESPDIKYPLRLIDREIISHDTRRFRFALPSPQHILGLPVGQHIYLSARIDGNLVVRPYTPISSDDDKGFVDLVIKVYFKDTHPKFPAGGKMSQYLESMQIGDTIEFRGPSGLLVYQGKGKFAIRPDKKSNPIIRTVKSVGMIAGGTGITPMLQVIRAIMKDPDDHTVCHLLFANQTEKDILLRPELEELRNKHSARFKLWYTLDRAPEAWDYGQGFVNEEMIRDHLPPPEEEPLVLMCGPPPMIQYACLPNLDHVGHPTERCFVF

SEQ ID NO: 4100 - DNA, 2106 bp, Homo sapiens
actgccctccggccgccgcgccgcccgcccgccggggccccgctgtccgccgcccgccgccgctggagctagagatggatttgcagccgctgcaagtgtgtggaagggccgtgttcgtgttggcaaagaaggtcggctgctgagccagggcgtgtctcccggaggcctgtgggctgccaggatccccacctctctgcaatgggctgcccaggctgaccagccggttcctgctggaagctcctggtctgatctggggataccatgtccaagccccccgacctcctgctgcggctgctccggggcgccccaaggcagcgggtctgcaccctgttcatcatcggcttcaagttcacgtttttcgtctccatcatgatctactggcacgttgtgggagagcccaaggagaaagggcagctctataacctgccagcagagatcccctgccccaccttgacaccccccaccccaccctcccacggccccactccaggcaacatcttcttcctggagacttcagaccggaccaaccccaacttcctgttcatgtgctcggtggagtcggccgccagaactcaccccgaatcccacgtgctggtcctgatgaaagggcttccgggtggcaacgcctctctgccccggcacctgggcatctcacttctgagctgcttcccgaatgtccagatgctcccgctggacctgcgggagctgttccgggacacacccctggccgactggtacgcggccgtgcaggggcgctgggagccctacctgctgcccgtgctctccgacgcctccaggatcgcactcatgtggaagttcggcggcatctacctggacacggacttcattgttctcaagaacctgcggaacctgaccaacgtgctgggcacccagtcccgctacgtcctcaacggcgcgttcctggccttcgagcgccggcacgagttcatggcgctgtgcatgcgggacttcgtggaccactacaacggctggatctggggtcaccagggcccgcagctgctcacgcgggtcttcaagaagtggtgttccatccgcagcctggccgagagccgcgcctgccgcggcgtcaccaccctgccccctgaggccttctaccccatcccctggcaggactggaagaagtactttgaggacatcaaccccgaggagctgccgcggctgctcagtgccacctatgctgtccacgtgtggaacaagaagagccagggcacgcggttcgaggccacgtccagggcactgctggcccagctgcatgcccgctactgccccacgacgcacgaggccatgaaaatgtacttgtgaggggcccgccaggtcacctccccaacctgctcctgatggggcactgggccgcccttcccggggaggcaagattgagggcccgggagagggaggcccgagctgccaccgggcttaggcaggctgttgaggagctgtgggagcaggcccagtgggaggctgtggacaccccgaggacagtgtcctgtctcgaggcagggctgacacatggtgccatagccagcggagggcgctcagtgagtgccccgggccttctagacaacaggcaggaaggatgaacctcagggcacccccaggtggtgcggaaagccaggcagttgggacagaggtgcccacgagggcagaggccggtgctaaggggatggggaagaagggacaagattcccagagaggagaggaggctgttggtaggaaagtggcagggctgggggagacccagccccaagggtccggggcggaggatgctttgttcttttctggttttggttcctctttcgcggggggtgggggaggtcaacagggactgagtggggcagaggcccagaagtgccagcctggggagccgtttgggggcagccccttctgcccaccccatccttcttcctctccagagatgccaggggggcgtgtatgctctgccccttccctcagacaggggctgggtggggaggctctttaggctcaggagaagcattttaaagaaacccccaccctgccgcccgcattataaacacaggagaataatcaatagaataaaagtgaccgactgtcaaaaaaaaaaaaaaa

SEQ ID NO: 4101 - protein, 353 aa, Homo sapiens
MSKPPDLLLRLLRGAPRQRVCTLFIIGFKFTFFVSIMIYWHVVGEPKEKGQLYNLPAEIPCPTLTPPTPPSHGPTPGNIFFLETSDRTNPNFLFMCSVESAARTHPESHVLVLMKGLPGGNASLPRHLGISLLSCFPNVQMLPLDLRELFRDTPLADWYAAVQGRWEPYLLPVLSDASRIALMWKFGGIYLDTDFIVLKNLRNLTNVLGTQSRYVLNGAFLAFERRHEFMALCMRDFVDHYNGWIWGHQGPQLLTRVFKKWCSIRSLAESRACRGVTTLPPEAFYPIPWQDWKKYFEDINPEELPRLLSATYAVHVWNKKSQGTRFEATSRALLAQLHARYCPTTHEAMKMYL

SEQ ID NO: 4102 - DNA, 2725 bp, Homo sapiens
gttacgcgcagccccgcccccgcggcctcgtcgctcctgctgaggcggtagccgcttttcgtcgactcttaccggttggctgggccagctgcgccgcggctcacagctgacgatgggggaccccagcaagcaggacatcttgaccatcttcaagcgcctccgctcggtgcccactaacaaggtgtgttttgattgtggtgccaaaaatcccagctgggcaagcataacctatggagtgttcctttgcattgattgctcagggtcccaccggtcacttggtgttcacttgagttttattcgatctacagagttggattccaactggtcatggtttcagttgcgatgcatgcaagtcggaggaaacgctagtgcatcttccttttttcatcaacatgggtgttccaccaatgacaccaatgccaagtacaacagtcgtgctgctcagctctatagggagaaaatcaaatcgctcgcctctcaagcaacacggaagcatggcactgatctgtggcttgatagttgtgtggttccacctttgtcccctccaccaaaggaggaagatttttttgcctctcacgtttctcctgaggtgagtgacacagcgtgggcatcagcaatagcagaaccatcttctttaacatcaaggcctgtggaaaccactttggaaaataatgaaggtggacaagagcaaggaccaagtgtggaaggtcttaatgtaccaacaaaggctactttagaggtatcctctatcataaaaaagaaaccaaatcaagctaaaaaaggccttggggccaaaaaaggaagtttgggagctcagaaactggcaaacacatgctttaatgaaattgaaaaacaagctcaagctgcggataaaatgaaggagcaggaagacctggccaaggtggtatctaaagaagaatcaattgtttcatcattacgattagcctataaggatcttgaaattcaaatgaagaaagacgaaaagatgaacattagtggcaaaaaaaatgttgactcagacagactcggcatgggatttggaaattgcagaagtgttatttcacattcagtgacttcagatatgcagaccatagagcaggaatcacccattatggcaaaaccaagaaaaaagtataatgatgacagtgacgattcatattttacttccagctcaaggtactttgacgagccagtggagttaaggagcagttctttctctagctgggatgacagttcagattcctattggaaaaaagagaccagcaaagatactgaaacagttctgaaaaccacaggctattcagacagacctactgctcgccgcaagccagattatgagccagttgaaaatacagatgaggcccagaagaagtttggcaatgtcaaggccatttcatcagatatgtattttggaagacaatcccaggctgattatgagaccagggcccgcctagagaggctgtcggcaagttcctccataagctcggctgatctgttcgaggagccgaggaagcagccagcagggaactacagcctgtccagtgtgctgcccaacgcccccgacatggcgcagttcaagcagggagtgagatcggttgctggaaaactctccgtctttgctaatggagtcgtgacttcaattcaggatcgctacggttcttaatactgaagtcatgatgtgtatttcctggagaaattcctctttaaatgaacaagtaaccacatctcaggcggcagtgaagtccagatagttttgcagattgttttgctactttttcatatggtatatgtttctgatttttaatatttcttttgagaaattctgagttctgatgtaggagctttcctgtgatttctgtttcacgttccttcctgtcacaccctcctttggcgtctctgtgtatatccttgctttattttcttggaacctttgatttcaacactgagggcctggagacctcggctcctcctgctcctgaaccaggaggcttcatgtgggggaggaggagaggtctccatgtgacacatgggctcagggctgccagaatcagcggatgctggatgggcctgcagaaacaacactcaccacacacacttccttcaaaagaccaaaagtgactggtgtctcgtgtgacagattgcttcatttatgtttctacatagtaaggtgactgccaaataatatttgaagtcatctgtctctttgtaaattattttatatgacctataaatttaaaaatgtttttcagtgagtgcttttaacaaacttaagcttctgccctgccaagggaattaatgttatcttgtgaaaggtgttgctgtttgaattgatgagaaatggaagatgagaactccctaagagttctcataataaatcatctcatcacaaatcaatacggtatacagagttaaagtggaatgaggtaagaagatacagctacagaaaatagttgcgtgtatgggagaacagtcattgtaattgggtagttttgttaataaatatttttaaatcttgcttttcagaaattaccgaatgtgtataaacaaataaagaaaaataatttagctgtgttttagacagcattagaatatattgttcagcacagtaaaatatatttgaaatttgataagccaaaaatgtggttttgaatgaatattttgtgaatctttcttaaaagctcaaatttgtagacttctaaatagaataaacacttgcagcagatgg

SEQ ID NO: 4103 - protein, 516 aa, Homo sapiens
MGDPSKQDILTIFKRLRSVPTNKVCFDCGAKNPSWASITYGVFLCIDCSGSHRSLGVHLSFIRSTELDSNWSWFQLRCMQVGGNASASSFFHQHGCSTNDTNAKYNSRAAQLYREKIKSLASQATRKHGTDLWLDSCVVPPLSPPPKEEDFFASHVSPEVSDTAWASAIAEPSSLTSRPVETTLENNEGGQEQGPSVEGLNVPTKATLEVSSIIKKKPNQAKKGLGAKKGSLGAQKLANTCFNEIEKQAQAADKMKEQEDLAKVVSKEESIVSSLRLAYKDLEIQMKKDEKMNISGKKNVDSDRLGMGFGNCRSVISHSVTSDMQTIEQESPIMAKPRKKYNDDSDDSYFTSSSRYFDEPVELRSSSFSSWDDSSDSYWKKETSKDTETVLKTTGYSDRPTARRKPDYEPVENTDEAQKKFGNVKAISSDMYFGRQSQADYETRARLERLSASSSISSADLFEEPRKQPAGNYSLSSVLPNAPDMAQFKQGVRSVAGKLSVFANGVVTSIQDRYGS

SEQ ID NO: 4104 - DNA, 3255 bp, Homo sapiens
accgttgcggccgcaggggtctgggcagggctgggcagtgctgccggagcaaaagcggtagcgggagcccggccggagctgggtctggagacgccgtggcagcctgaacggagtgtgcgacggattgggaggtttgtctacagattttgagcgttcgaagttgacccctgactaagtatactttgctgctccctcagcctttgaaaaaatgtctgtcacatatgatgattccgttggagtagaagtgtccagcgacagcttctgggaggtcgggaactacaagcggactgtgaagcggatcgacgatggccaccgcctgtgcagcgacctcatgaactgcctgcatgagcgggcgcgcatcgagaaggcgtatgcgcagcagctcactgagtgggcccggcgctggaggcagcttgtggagaaagggccccagtacgggaccgtggagaaggcctggatggccttcatgtccgaggcagagagggtgagcgagctgcacctcgaggtgaaggcctcactgatgaacgatgacttcgagaagatcaagaactggcagaaggaagcctttcacaagcagatgatgggcggcttcaaggagaccaaggaagctgaggacggctttcggaaggcacagaagccctgggccaagaagctgaaagaggtagaagcagcaaagaaagcccaccatgcagcgtgcaaagaggagaagctggctatctcacgagaagccaacagcaaggcagacccatccttcaaccctgaacagctcaagaaattgcaagacaaaatagaaaagtgcaagcaagatgttcttaagaccaaagagaagtatgagaagtccctcaaggaactcgaccagggcacaccccagtacatggagaacatggagcaggtgtttgagcagtgccagcagttcgaggagaaacgccttcgcttcttccgggaggttctgctggaggttcagaagcacctaaacctgtccaatgtggctggttacaaagccatttaccatgacctggagcagagcatcagagcagctgatgcagtggaggacctgaggtggttccgagccaatcacgggccaggcatggccatgaactggccgcagtttgaggagtggtccgcagacctgattcgaaccctcagccggagagagaagaagaaggccactgacggcttcaccctgacgggcatcaaccagacaggcgaccagtttttgccgagtaagcccagcagcacccttaatgtcccgagcaaccccgcccagtctgcgcagtcacagtccagctacaaccccttcgaggatgaggacgacacgggcagcaccgtcagtgagaaggaggacattaaggccaaaaatgtgagcagctacgagaagacccagagctatcccaccgactggtcagacgatgagtctaacaaccccttctcctccacggatgccaatggggactcgaatccattcgacgacgacgccacctcggggacggaagtgcgagtccgggccctgtatgactatgaggggcaggagcatgatgagctgagcttcaaggctggggatgagctgaccaagatggaggacgaggatgagcagggctggtgcaagggacgcttggacaacgggcaagttggcctatacccggcaaattatgtggaggcgatccagtgatgagtcggggacaggccagcggggggacggaggcggcgggcccaggagcctcagccagccacgtgggcatccactccttttcctgcaagagatgatggttccattgctcttggcttcatggtgttcctggaaggcagatgagctggtcatttcgcctgggactcggcacctttccgagtgcagctggagggatctgagcgcaggaagacgcagaacaacagaaatagccgcccctccccgcccactgtgcctgttggcctatcatagatctctatgttcttgactttgtctctcctttccgagtcaatggtgggttacactgatcttgttccactgattactctctctgacgagtccatcacctgcaacttaaatgaacaagcttacatcccattttgagtgaagattttgaggtttttaatttaaaggctgtgtacagttatacttttttatacacctgttcatttctacttaaattatggcacagattgatgcgcaccagtcttgaggaaacgatctccctattcccttaccctgttactcagccacgccgtgtgtaggcttagcctcaggtggcagatgtttgaggaaaggaattatgccaggaaggtgggaccgggttatggtcgggtttctattgggaatgctctttgtgcttttgggcatctgaatggaagctttacatagaaccttaggtagaactcccccaaatcgccatatttaaaaattattttcactctattcttgcttaaaactgtactcttttgcaaattaacaattttatcactgattcagagttaaaaagaagactaacttttcaagcaaatgcatctgtaaagatgctttagattagactgtcatgtctcagtgtctatctgtatatattatttgatattcagagaatctaaagcactcgtctactgttttaatgagatttaacagcttttaacagtgagtttcgtttgtaaactgcttgaagtctgtggcattcaggcacacgtctggctggccggctgggtctcctcccgggctcagtgggcctggggcctctctgacgtggtgcctgctggagggaggctcgtcgtcaccagctgactgctggtccggcttctgaccggcctttgtcctggctccgtagcagaacactgtaaaagtgcccgcgtctttgcagtagttgcagatttcagtcgtcgtgttacttgtgcacaaacagaagctgggtcttacccgcagcacgagtgtctcgggctgcccggagtcgcccgggagcaggtgctgcagccagagttacgcgggggccacgcgggccggcgggggtggggggaacgtgggggaacctgtgtttcacgtgactcagcagtgcccgccgccgtcaccagctatgcattcactccgtttccagtgagcagatgtcttgcttggaaagtggacctgtgtctgtgtctgtcctgagaacttaccagcagaaatcctcatttctgtgctacggatttaccaaaaattgtcaagtctttttcagtttaacagttcctttacatgtgtagtatttgaggaaaaaaatcaataaacagttgatctcgtgcata

SEQ ID NO: 4105 - protein, 486 aa, Homo sapiens
MSVTYDDSVGVEVSSDSFWEVGNYKRTVKRIDDGHRLCSDLMNCLHERARIEKAYAQQLTEWARRWRQLVEKGPQYGTVEKAWMAFMSEAERVSELHLEVKASLMNDDFEKIKNWQKEAFHKQMMGGFKETKEAEDGFRKAQKPWAKKLKEVEAAKKAHHAACKEEKLAISREANSKADPSFNPEQLKKLQDKIEKCKQDVLKTKEKYEKSLKELDQGTPQYMENMEQVFEQCQQFEEKRLRFFREVLLEVQKHLNLSNVAGYKAIYHDLEQSIRAADAVEDLRWFRANHGPGMAMNWPQFEEWSADLIRTLSRREKKKATDGFTLTGINQTGDQFLPSKPSSTLNVPSNPAQSAQSQSSYNPFEDEDDTGSTVSEKEDIKAKNVSSYEKTQSYPTDWSDDESNNPFSSTDANGDSNPFDDDATSGTEVRVRALYDYEGQEHDELSFKAGDELTKMEDEDEQGWCKGRLDNGQVGLYPANYVEAIQ

SEQ ID NO: 4106 - DNA, 2992 bp, Homo sapiens
cagcggggcccgcattgagcatgggcgcggcggccgtgcgctggcacttgtgcgtgctgctggccctgggcacacgcgggcggctggccgggggcagcgggctcccagggtcagtcgacgtggatgagtgctcagagggcacagatgactgccacatcgatgccatctgtcagaacgcgcccaagtcctacaaatgcctctgcaagccaggctacaagggggaaggcaagcagtgtggagacattgacgagtgtgagaatgactactacaatgggggctgtgtccacgagtgcatcaacatcccggggaactacaggtgtacctgctttgatggcttcatgctggcacacgatggacacaactgcctggatgtggacgagtgtcaggacaataatggtggctgccagcagatctgcgtcaatgccatgggcagctacgagtgtcagtgccacagtggcttcttccttagtgacaaccagcatacctgcatccaccgctccaatgagggtatgaactgcatgaacaaagaccatggctgtgcccacatctgccgggagacgcccaaaggtggggtggcctgcgactgcaggcccggctttgaccttgcccaaaaccagaaggactgcacactaacctgtaattatggaaacggaggctgccagcacagctgtgaggacacagacacaggccccacgtgtggttgccaccagaagtacgccccccactcagacggtcgcacgtgcatcgagacgtgcgcagtcaataacggaggctgcgaccggacatgcaaggacacagccactggcgtgcgatgcagctgccccgttggattcacactgcagccggacgggaagacatgcaaagacatcaacgagtgcctggtcaacaacggaggctgcgaccacttctgccgcaacaccgtaggcagcttcgagtgcggctgccggaagggctacaagctgctcaccgacgagcgcacctgccaggacatcgacgagtgctccttcgagcggacctgtgaccacatctgcatcaactccccgggcagcttccagtgcctgtgtcaccgcggctacatcctctacgggacaacccactgcggagatgtggacgagtgcagcatgagcaacgggagctgtgaccagggctgcgtcaacaccaagggcagctacgagtgcgtctgtcccccggggaggcggctccactggaaccggaaggattgcgtggagacaggcaagtgtctttctcgcgccaagacctccccccgggcccagctgtcctgcagcaaggcaggcggtgtggagagctgcttcctttcctgcccggctcacacactcttcgtgccagactcggaaaatagctacgtcctgagctgcggagttccagggccgcagggcaaggcgctgcagaaacgcaacggcaccagctctggcctcgggcccagctgctcagatgcccccaccacccccatcaaacagaaggcccgcttcaagatccgagatgccaagtgccacctccggccccacagccaggcacgagcaaaggagaccgccaggcagccgctgctggaccactgccatgtgactttcgtgaccctcaagtgtgactcctccaagaagaggcgccgtggccgcaagtccccatccaaggaggtgtcccacattacagcagagtttgagatcgagacaaagatggaagaggcctcagacacatgcgaagcggactgcttgcggaagcgagcagaacagagcctgcaggccgccatcaagaccctgcgcaagtccatcggccggcagcagttctatgtccaggtctcaggcactgagtacgaggtagcccagaggccagccaaggcgctggaggggcagggggcatgtggcgcaggccaggtgctacaggacagcaaatgcgttgcctgtgggcctggcacccacttcggtggtgagctcggccagtgtgtgccatgtatgccaggaacataccaggacatggaaggccagctcagttgcacaccgtgccccagcagcgacgggcttggtctgcctggtgcccgcaacgtgtcggaatgtggaggccagtgttctccaggcttcttctcggccgatggcttcaagccctgccaggcctgccccgtgggcacgtaccagcctgagcccgggcgcaccggctgcttcccctgtggagggggtttgctcaccaaacacgaaggcaccacctccttccaggactgcgaggctaaagtgcactgctcccccggccaccactacaacaccaccacccaccgctgcatccgctgccccgtcggcacctaccagcccgagtttggccagaaccactgcatcacctgtccgggcaacaccagcacagacttcgatggctccaccaacgtcacacactgcaaaaaccagcactgcggcggcgagcttggtgactacaccggctacatcgagtcccccaactaccctggcgactacccagccaacgctgaatgcgtctggcacatcgcacctcccccaaagcgcaggatcctcatcgtggtccctgagatcttcctgcccatcgaggatgagtgcggcgatgttctggtcatgaggaagagtgcctctcccacgtccatcaccacctatgagacctgccagacctacgagaggcccatcgccttcacctcccgctcccgcaagctctggatccagttcaaatccaatgaaggcaacagcggcaaaggcttccaagtgccctatgtcacctacgatgaggactaccagcaactcatagaggacatcgtgcgcgatgggcgcctgtacgcctcggagaaccaccaggaaattttgaaagacaagaagctgatcaaggccctcttcgacgtgctggcgcatccccagaactacttcaagtacacagcccaggaatccaaggagatgttcccacggtccttcatcaaactgctgcgctccaaagtgtctcggttcctgcggccctacaaataaccggg

SEQ ID NO: 4107 - protein, 988 aa, Homo sapiens
MGAAAVRWHLCVLLALGTRGRLAGGSGLPGSVDVDECSEGTDDCHIDAICQNAPKSYKCLCKPGYKGEGKQCGDIDECENDYYNGGCVHECINIPGNYRCTCFDGFMLAHDGHNCLDVDECQDNNGGCQQICVNAMGSYECQCHSGFFLSDNQHTCIHRSNEGMNCMNKDHGCAHICRETPKGGVACDCRPGFDLAQNQKDCTLTCNYGNGGCQHSCEDTDTGPTCGCHQKYAPHSDGRTCIETCAVNNGGCDRTCKDTATGVRCSCPVGFTLQPDGKTCKDINECLVNNGGCDHFCRNTVGSFECGCRKGYKLLTDERTCQDIDECSFERTCDHICINSPGSFQCLCHRGYILYGTTHCGDVDECSMSNGSCDQGCVNTKGSYECVCPPGRRLHWNRKDCVETGKCLSRAKTSPRAQLSCSKAGGVESCFLSCPAHTLFVPDSENSYVLSCGVPGPQGKALQKRNGTSSGLGPSCSDAPTTPIKQKARFKIRDAKCHLRPHSQARAKETARQPLLDHCHVTFVTLKCDSSKKRRRGRKSPSKEVSHITAEFEIETKMEEASDTCEADCLRKRAEQSLQAAIKTLRKSIGRQQFYVQVSGTEYEVAQRPAKALEGQGACGAGQVLQDSKCVACGPGTHFGGELGQCVPCMPGTYQDMEGQLSCTPCPSSDGLGLPGARNVSECGGQCSPGFFSADGFKPCQACPVGTYQPEPGRTGCFPCGGGLLTKHEGTTSFQDCEAKVHCSPGHHYNTTTHRCIRCPVGTYQPEFGQNHCITCPGNTSTDFDGSTNVTHCKNQHCGGELGDYTGYIESPNYPGDYPANAECVWHIAPPPKRRILIVVPEIFLPIEDECGDVLVMRKSASPTSITTYETCQTYERPIAFTSRSRKLWIQFKSNEGNSGKGFQVPYVTYDEDYQQLIEDIVRDGRLYASENHQEILKDKKLIKALFDVLAHPQNYFKYTAQESKEMFPRSFIKLLRSKVSRFLRPYK

SEQ ID NO: 4108 - DNA, 2395 bp, Homo sapiens
cggggccagtctgtttccaggtctggcggggggccgggctgcggtggcggcagcggtgggagatgccggggcggccggcggaggcccatgtggcgctctaggtgggatgccagcgtcctgaaggcggaggccctggccctcctcccctgcggcctgggcatggcattctcccagtcccacgtgatggccgctcggcggcaccagcacagccggctcatcatcgaggtggacgagtacagctccaaccccacccaggccttcaccttctacaacatcaaccagggccgcttccagccaccgcatgtgcagatggtggacccggtgcctcacgatgcccccaaacctccaggctacacccgcttcgtctgcgtctctgatacccactcgaggacggaccccatccagatgccgtacggcgacgtgctgatccacgctggggacttcactgagctggggctcccgagcgaggtgaagaagttcaacgagtggctgggcagcctgccctacgagtacaagatcgtgatcgcaggcaaccacgagctgacctttgaccaggagttcatggccgacctcatcaagcaggacttttactacttcccatctgtgtcgaagctgaagccggagaactatgagaatgtgcagtcgctgctgaccaactgcatctaccttcaggactcggaggtcaccgtgcggggcttccggatctatggctccccatggcagccctggttctacggctggggcttcaacctcccgcgaggccaagccctgctggagaaatggaacctcattcccgaaggcgtagacatcctgataacccatggaccaccactgggcttcctggactgggtccccaagaagatgcagcgggtgggctgtgtggagctgctcaacacggtgcagaggcgcgtccagccgcggttacatgtctttggccacatccacgaagggtatggtgtcatggcagatgggacgaccacctatgtgaatgcgtccgtatgcactgtgaactaccagcccgtgaacccgcccatagtcatcgacctccccacaccccggaactcctgactgctccccactgcccctgccctgcccgcccgtgtcagctccacaggcctggcccggccactgttccttccatgctgagttgcctggacgacccatctggctgcggggactggcctagcaggcaggtcagggccttggaacgactctttagccttctgtcacctggagttgggaccctgcgcatccccatcaggggttctgtgctcatttactttttctgcgtgtacatcctgcgtgtacctcgttaaaggacctactaagctcatggccctgtcatgtttgggaaatgactaaatcttcattcttctcccttggacgccctcctggtttgggaagctgctgctcttgaatgggttttggaagttacacaaaatctccctctaaccacgggtctgtgtggcggcatgcccctgggttggggtgggtgggaggattcgtgagctgcacacagacagtccctttctctcctcccaagtgagggaggagacaggcccaaggcggaggccctccgagggagcatttagggacatctcaggaattcagaccgcacctggccaggcccacagctgtttgcctggcattgttcccccctttttcttcccataggcatttttgtttacttgaacaatgacctgagtgtcctaggcattcactcggagcctggatgatgggggctggttctacagaatgagccactggcattcgtgcccaggaccagtgagagcgttcccagtcatggggggatgacccttggtcccacggggaacacactgctctgtagaatgcggtagcctggatggagggtctgcaggcttaggctgcagcaggcctgccatgggtgtgaacccatgtccaggcacgcaccgacacacatgcacgcacgcacccctcttaattgaaccaagtgggtcctgtgtttctcttttctgccccgtagtgaggttctgttccttggtgcggcttcccttgcaccgttaggattctgtctggcatgcctgcagccgaggaagcccaggaccagccggccctgtgaattggagggtggcacagggaccgagcgggccccaggctccagcagccccaccttggacagcttctttttcttctttgaattaggactggagcgggtggggccagggcggtggtgggaaccggtagggcctagatgaggggcaggcagtcaggcagaaatgggcaagttcagggtcagattctgtcgttatttaatattttgttcatcatggactttttctgcatttattttgatttttaacgttgcattaaagtagtattatttgtcctgaaaaaaaaaaaaaaaaaaaaaaaa

SEQ ID NO: 4109 - protein, 326 aa, Homo sapiens
MWRSRWDASVLKAEALALLPCGLGMAFSQSHVMAARRHQHSRLIIEVDEYSSNPTQAFTFYNINQGRFQPPHVQMVDPVPHDAPKPPGYTRFVCVSDTHSRTDPIQMPYGDVLIHAGDFTELGLPSEVKKFNEWLGSLPYEYKIVIAGNHELTFDQEFMADLIKQDFYYFPSVSKLKPENYENVQSLLTNCIYLQDSEVTVRGFRIYGSPWQPWFYGWGFNLPRGQALLEKWNLIPEGVDILITHGPPLGFLDWVPKKMQRVGCVELLNTVQRRVQPRLHVFGHIHEGYGVMADGTTTYVNASVCTVNYQPVNPPIVIDLPTPRNS

SEQ ID NO: 4110 - DNA, 4817 bp, Homo sapiens
gaccccgcggcttggggtccgcgcacgcgggtgccggcccagctaggcggagaatcgaggaggggttcccgggctcatcgcagaggattggaagggcctagattactgcccaatgacaaaagtgtgggcttaatgtcctcactcttcagggagagaatgtggactttagcatttgaactgaatatttgagattgaagatttctgaataggatttaatgtgcaaaatggcgattataccagactggcttaggtcgcatcctcacacacgaaaatttacacattcaagaccccattcttcaccgtgtagagtatattcaaggaatggttccccaaataagttcagatcttcttcaaccacagctgttgcaaatccaacactgtcctccttagatgttaaacggattttatttcaaaaaattaccgacagaggggatgagttgcaaaaagcctttcagctgctggatactggtcagaacttgactgtgtcaaaaagtgaactgagaagaatcatcacagacttcctgatgccgctcacacgagaacagtttcaggacgtgttggctcagatcccccttagcacctctggtactgtaccgtaccttgcctttctgtccaggtttggtggaattgacctatatataaatggtataaagaggggaggtgggaatgaaatgaattgctgccgcacattaagagaacttgaaatccaagtgggagaaaaggttttcaaaaacattaagactgttatgaaagcctttgagctcattgatgttaacaagactggactggttcgaccgcaggagctaagaagggttctggagaccttctgtatgaagttaagagacgaggaatacgaaaagttttcgaaacactacaacatccacaaggatactgcagtagattacaacgtgtttttgaagaatctcagcataaataacgacttgaaccttagatattgtatgggaaatcaagaggtctcattggagaatcaacaagccaaaaattccaaaaaggaacgtttgctaggttctgcatcatctgaagatatctggagaaactactccttggatgaaattgagaggaacttttgtctacaactttcgaagtcttatgaaaaggttgaaaaggccctcagtgcaggggacccctgtaaaggtggctacgtgtcttttaattatctaaagattgtcctcgacacttttgtataccaaataccaagaagaatttttatccagttaatgaaaagatttggacttaaagccaccactaaaatcaattggaagcaatttctaacatcatttcatgagcctcaggggttgcaagttagcagtaaaggtcccctgacaaaaagaaatagcatcaactctagaaatgaatctcacaaggaaaacatcatcacaaagttatttagacacactgaagatcactctgcgtcactgaagaaagcattactgataatcaacactaaacccgatggaccgataacaagagaagaatttcgatatattctaaattgcatggctgtaaaactaagcgattcagaattcaaagaactaatgcaaatgcttgaccctggggacactggagtggtcaacaccagcatgtttattgatctgattgaagagaactgtaggatgagaaagacatctccctgtacagatgctaagacacctttcctcctggcctgggattcagtggaagaaattgttcatgatacaattactaggaacctacaagctttttataacatgctacgctcatatgaccttggagacacagggcgcattggccgaaataatttcaagaaaatcatgcacgtcttctgtccatttttaacgaatgcacatttcataaaactctgcagtaagattcaggacattggttcaggaagaatcctttacaagaaacttttggcatgcataggaattgatggcccacccactgtctctccagttcttgttccaaaggatcagctgttaagtgaacatttacaaaaagatgaacagcagcagccagatctttctgagagaaccaagctcacggaggataaaaccaccctgaccaagaagatgaccacagaagaagtgattgaaaaattcaaaaagtgtatacagcagcaggacccggcattcaaaaaacgatttcttgacttcagcaaggagcctaatggaaaaattaacgtgcatgactttaagaaggtactggaagacactgggatgcccatggacgatgatcagtatgccctgctgaccactaaaataggcttcgagaaggaagggatgagctatcttgattttgcagcaggatttgaagatcctccaatgagagggccggaaaccactccgccgcagcctccaactccttcaaaaagttacgtgaacagccactttatcaccgcagaagaatgcctgaagcttttccctaggaggctgaaggagtcattccgggacccctactctgccttctttaaaacagatgctgacagggatggcataatcaacatgcatgaccttcacagactgctcctgcatctactgcttaatctcaaagacgacgagtttgagcgcttccttggccttcttggcttgagacttagtgtcactttaaattttcgggaatttcaaaatttgtgtgagaagagaccatggagaacagatgaagcgcctcaaagactcattagaccaaaacagaaggttgcggattcagaactagcttgtgagcaggctcatcagtatcttgttaccaaagcaaaaaacagatggtcagacttgtctaagaattttctagaaaccgataatgagggcaatggcattcttcgacgccgggacataaagaacgcactgtacggttttgatattcccctcacaccaagagagtttgaaaagctttgggcaagatacgacaccgagggaaaagggcacattacttaccaggaatttttacagaaattgggtattaactattcgcctgctgtccatcggccctgtgcagaggattatttcaacttcatgggtcattttacaaagccacagcagctacaggaagagatgaaggagctgcagcagagcacagagaaggctgtggcagccagggataagcttatggaccgccatcaagatatcagcaaagcattcaccaaaactgatcaatccaaaaccaactacatatccatatgcaagatgcaggaagtgctggaagaatgtggatgttctcttaccgaaggggagctgacccatctgctaaacagttggggagtcagccggcatgataatgctatcaattacctcgacttcctgagagcagtggagaacagcaagtcaacaggagctcagcccaaggaaaaagaagagagcatgccaatcaattttgcaacgctgaatccacaggaggctgtgaggaagatccaggaagtagttgagtcctcccagctggctttgtccacggcattttctgcattggataaagaggatacaggatttgtaaaggctacagaattcggacaagttcttaaggatttctgttacaaactaacggacaatcagtatcattattttttgaggaaactaagaattcatctaaccccctatataaattggaaatattttctccagaactttagctgtttccttgaggagacagctgatgagtgggctgagaaaatgcccaaaggcccgccgcctacctctcccaaggccacagccgacagagacatcctggctcgcctccacaaagcagtgacttcccattaccatgccatcacccaggagtttgagaattttgacaccatgaaaacgaacaccatctccagagaggagtttagggccatttgtaatcgccgcgtccaaatcctgacggacgaacagtttgacagactctggaacgagatgccagtcaatgccaaggggaggctgaaatacccggacttcctgagcaggttcagttccgagacagcagccacaccaatggccactggtgactcggccgtggcccagagagggagcagtgtccctgacgtctcggaaggcaccagatctgccctctcattgcccactcaggagctgagaccagggtcaaagtcgcagagccacccctgtactccagcgagcaccaccgtgatcccgggcactccacccttgcagaactgtgatcccatagagagcaggctccggaagagaatccagggctgctggcgccagctcctgaaagaatgcaaggagaaggacgtggccagacagggggacatcaacgcctccgatttcctggctcttgtggagaaattcaacctggacataagcaaagaggagtgtcagcagctcattataaaatacgacttaaagagcaacgggaaatttgcatactgtgacttcattcagagctgtgtcctcctgctaaaagcaaaggaaagctcactgatgcacaggatgaagatccagaatgcacacaagatgaaagaagccggcgcggagacgccatctttttactctgctctgctgcgtattcagcccaaaattgtgcactgctggaggccaatgcggcgcacgttcaaaagctatgatgaggctggaacagggctgctaagcgtcgcagatttcaggacggtcctgagacagtacagcatcaacctctctgaggaagagttcttccatattctggagtattacgataagacgctgtcttcaaaaatctcctacaacgacttcctccgggcattcctccagtagacacccctgctgtgtgcccagcgggacgacagccacagggcctgtttcaaggctaataaaatcctataatttgggggttaaaaaaaaaaaaaaaaa

SEQ ID NO: 4111 - protein, 1501 aa, Homo sapiens
MCKMAIIPDWLRSHPHTRKFTHSRPHSSPCRVYSRNGSPNKFRSSSTTAVANPTLSSLDVKRILFQKITDRGDELQKAFQLLDTGQNLTVSKSELRRIITDFLMPLTREQFQDVLAQIPLSTSGTVPYLAFLSRFGGIDLYINGIKRGGGNEMNCCRTLRELEIQVGEKVFKNIKTVMKAFELIDVNKTGLVRPQELRRVLETFCMKLRDEEYEKFSKHYNIHKDTAVDYNVFLKNLSINNDLNLRYCMGNQEVSLENQQAKNSKKERLLGSASSEDIWRNYSLDEIERNFCLQLSKSYEKVEKALSAGDPCKGGYVSFNYLKIVLDTFVYQIPRRIFIQLMKRFGLKATTKINWKQFLTSFHEPQGLQVSSKGPLTKRNSINSRNESHKENIITKLFRHTEDHSASLKKALLIINTKPDGPITREEFRYILNCMAVKLSDSEFKELMQMLDPGDTGVVNTSMFIDLIEENCRMRKTSPCTDAKTPFLLAWDSVEEIVHDTITRNLQAFYNMLRSYDLGDTGRIGRNNFKKIMHVFCPFLTNAHFIKLCSKIQDIGSGRILYKKLLACIGIDGPPTVSPVLVPKDQLLSEHLQKDEQQQPDLSERTKLTEDKTTLTKKMTTEEVIEKFKKCIQQQDPAFKKRFLDFSKEPNGKINVHDFKKVLEDTGMPMDDDQYALLTTKIGFEKEGMSYLDFAAGFEDPPMRGPETTPPQPPTPSKSYVNSHFITAEECLKLFPRRLKESFRDPYSAFFKTDADRDGIINMHDLHRLLLHLLLNLKDDEFERFLGLLGLRLSVTLNFREFQNLCEKRPWRTDEAPQRLIRPKQKVADSELACEQAHQYLVTKAKNRWSDLSKNFLETDNEGNGILRRRDIKNALYGFDIPLTPREFEKLWARYDTEGKGHITYQEFLQKLGINYSPAVHRPCAEDYFNFMGHFTKPQQLQEEMKELQQSTEKAVAARDKLMDRHQDISKAFTKTDQSKTNYISICKMQEVLEECGCSLTEGELTHLLNSWGVSRHDNAINYLDFLRAVENSKSTGAQPKEKEESMPINFATLNPQEAVRKIQEVVESSQLALSTAFSALDKEDTGFVKATEFGQVLKDFCYKLTDNQYHYFLRKLRIHLTPYINWKYFLQNFSCFLEETADEWAEKMPKGPPPTSPKATADRDILARLHKAVTSHYHAITQEFENFDTMKTNTISREEFRAICNRRVQILTDEQFDRLWNEMPVNAKGRLKYPDFLSRFSSETAATPMATGDSAVAQRGSSVPDVSEGTRSALSLPTQELRPGSKSQSHPCTPASTTVIPGTPPLQNCDPIESRLRKRIQGCWRQLLKECKEKDVARQGDINASDFLALVEKFNLDISKEECQQLIIKYDLKSNGKFAYCDFIQSCVLLLKAKESSLMHRMKIQNAHKMKEAGAETPSFYSALLRIQPKIVHCWRPMRRTFKSYDEAGTGLLSVADFRTVLRQYSINLSEEEFFHILEYYDKTLSSKISYNDFLRAFLQ

SEQ ID NO: 4112 - DNA, 4459 bp, Homo sapiens
gaccccgcggcttggggtccgcgcacgcgggtgccggcccagctaggcggagaatcgaggaggggttcccgggctcatcgcagaggattggaagggcctagattactgcccaatgacaaaagtgtgggcttaatgtcctcactcttcagggagagaatgtggactttagcatttgaactgaatatttgagattgaagatttctgaataatcccccttagcacctctggtactgtaccgtaccttgcctttctgtccaggtttggtggaattgacctatatataaatggtataaagaggggaggtgggaatgaaatgaattgctgccgcacattaagagaacttgaaatccaagtgggagaaaaggttttcaaaaacattaagactgttatgaaagcctttgagctcattgatgttaacaagactggactggttcgaccgcaggagctaagaagggttctggagaccttctgtatgaagttaagagacgaggaatacgaaaagttttcgaaacactacaacatccacaaggatactgcagtagattacaacgtgtttttgaagaatctcagcataaataacgacttgaaccttagatattgtatgggaaatcaagaggtctcattggagaatcaacaagccaaaaattccaaaaaggaacgtttgctaggttctgcatcatctgaagatatctggagaaactactccttggatgaaattgagaggaacttttgtctacaactttcgaagtcttatgaaaaggttgaaaaggccctcagtgcaggggacccctgtaaaggtggctacgtgtcttttaattatctaaagattgtcctcgacacttttgtataccaaataccaagaagaatttttatccagttaatgaaaagatttggacttaaagccaccactaaaatcaattggaagcaatttctaacatcatttcatgagcctcaggggttgcaagttagcagtaaaggtcccctgacaaaaagaaatagcatcaactctagaaatgaatctcacaaggaaaacatcatcacaaagttatttagacacactgaagatcactctgcgtcactgaagaaagcattactgataatcaacactaaacccgatggaccgataacaagagaagaatttcgatatattctaaattgcatggctgtaaaactaagcgattcagaattcaaagaactaatgcaaatgcttgaccctggggacactggagtggtcaacaccagcatgtttattgatctgattgaagagaactgtaggatgagaaagacatctccctgtacagatgctaagacacctttcctcctggcctgggattcagtggaagaaattgttcatgatacaattactaggaacctacaagctttttataacatgctacgctcatatgaccttggagacacagggcgcattggccgaaataatttcaagaaaatcatgcacgtcttctgtccatttttaacgaatgcacatttcataaaactctgcagtaagattcaggacattggttcaggaagaatcctttacaagaaacttttggcatgcataggaattgatggcccacccactgtctctccagttcttgttccaaaggatcagctgttaagtgaacatttacaaaaagatgaacagcagcagccagatctttctgagagaaccaagctcacggaggataaaaccaccctgaccaagaagatgaccacagaagaagtgattgaaaaattcaaaaagtgtatacagcagcaggacccggcattcaaaaaacgatttcttgacttcagcaaggagcctaatggaaaaattaacgtgcatgactttaagaaggtactggaagacactgggatgcccatggacgatgatcagtatgccctgctgaccactaaaataggcttcgagaaggaagggatgagctatcttgattttgcagcaggatttgaagatcctccaatgagagggccggaaaccactccgccgcagcctccaactccttcaaaaagttacgtgaacagccactttatcaccgcagaagaatgcctgaagcttttccctaggaggctgaaggagtcattccgggacccctactctgccttctttaaaacagatgctgacagggatggcataatcaacatgcatgaccttcacagactgctcctgcatctactgcttaatctcaaagacgacgagtttgagcgcttccttggccttcttggcttgagacttagtgtcactttaaattttcgggaatttcaaaatttgtgtgagaagagaccatggagaacagatgaagcgcctcaaagactcattagaccaaaacagaaggttgcggattcagaactagcttgtgagcaggctcatcagtatcttgttaccaaagcaaaaaacagatggtcagacttgtctaagaattttctagaaaccgataatgagggcaatggcattcttcgacgccgggacataaagaacgcactgtacggttttgatattcccctcacaccaagagagtttgaaaagctttgggcaagatacgacaccgagggaaaagggcacattacttaccaggaatttttacagaaattgggtattaactattcgcctgctgtccatcggccctgtgcagaggattatttcaacttcatgggtcattttacaaagccacagcagctacaggaagagatgaaggagctgcagcagagcacagagaaggctgtggcagccagggataagcttatggaccgccatcaagatatcagcaaagcattcaccaaaactgatcaatccaaaaccaactacatatccatatgcaagatgcaggaagtgctggaagaatgtggatgttctcttaccgaaggggagctgacccatctgctaaacagttggggagtcagccggcatgataatgctatcaattacctcgacttcctgagagcagtggagaacagcaagtcaacaggagctcagcccaaggaaaaagaagagagcatgccaatcaattttgcaacgctgaatccacaggaggctgtgaggaagatccaggaagtagttgagtcctcccagctggctttgtccacggcattttctgcattggataaagaggatacaggatttgtaaaggctacagaattcggacaagttcttaaggatttctgttacaaactaacggacaatcagtatcattattttttgaggaaactaagaattcatctaaccccctatataaattggaaatattttctccagaactttagctgtttccttgaggagacagctgatgagtgggctgagaaaatgcccaaaggcccgccgcctacctctcccaaggccacagccgacagagacatcctggctcgcctccacaaagcagtgacttcccattaccatgccatcacccaggagtttgagaattttgacaccatgaaaacgaacaccatctccagagaggagtttagggccatttgtaatcgccgcgtccaaatcctgacggacgaacagtttgacagactctggaacgagatgccagtcaatgccaaggggaggctgaaatacccggacttcctgagcaggttcagttccgagacagcagccacaccaatggccactggtgactcggccgtggcccagagagggagcagtgtccctgacgtctcggaaggcaccagatctgccctctcattgcccactcaggagctgagaccagggtcaaagtcgcagagccacccctgtactccagcgagcaccaccgtgatcccgggcactccacccttgcagaactgtgatcccatagagagcaggctccggaagagaatccagggctgctggcgccagctcctgaaagaatgcaaggagaaggacgtggccagacagggggacatcaacgcctccgatttcctggctcttgtggagaaattcaacctggacataagcaaagaggagtgtcagcagctcattataaaatacgacttaaagagcaacgggaaatttgcatactgtgacttcattcagagctgtgtcctcctgctaaaagcaaaggaaagctcactgatgcacaggatgaagatccagaatgcacacaagatgaaagaagccggcgcggagacgccatctttttactctgctctgctgcgtattcagcccaaaattgtgcactgctggaggccaatgcggcgcacgttcaaaagctatgatgaggctggaacagggctgctaagcgtcgcagatttcaggacggtcctgagacagtacagcatcaacctctctgaggaagagttcttccatattctggagtattacgataagacgctgtcttcaaaaatctcctacaacgacttcctccgggcattcctccagtagacacccctgctgtgtgcccagcgggacgacagccacagggcctgtttcaaggctaataaaatcctataatttgggggttaaaaaaaaaaaaaaaaa

SEQ ID NO: 4113 - protein, 1349 aa, Homo sapiens
MNCCRTLRELEIQVGEKVFKNIKTVMKAFELIDVNKTGLVRPQELRRVLETFCMKLRDEEYEKFSKHYNIHKDTAVDYNVFLKNLSINNDLNLRYCMGNQEVSLENQQAKNSKKERLLGSASSEDIWRNYSLDEIERNFCLQLSKSYEKVEKALSAGDPCKGGYVSFNYLKIVLDTFVYQIPRRIFIQLMKRFGLKATTKINWKQFLTSFHEPQGLQVSSKGPLTKRNSINSRNESHKENIITKLFRHTEDHSASLKKALLIINTKPDGPITREEFRYILNCMAVKLSDSEFKELMQMLDPGDTGVVNTSMFIDLIEENCRMRKTSPCTDAKTPFLLAWDSVEEIVHDTITRNLQAFYNMLRSYDLGDTGRIGRNNFKKIMHVFCPFLTNAHFIKLCSKIQDIGSGRILYKKLLACIGIDGPPTVSPVLVPKDQLLSEHLQKDEQQQPDLSERTKLTEDKTTLTKKMTTEEVIEKFKKCIQQQDPAFKKRFLDFSKEPNGKINVHDFKKVLEDTGMPMDDDQYALLTTKIGFEKEGMSYLDFAAGFEDPPMRGPETTPPQPPTPSKSYVNSHFITAEECLKLFPRRLKESFRDPYSAFFKTDADRDGIINMHDLHRLLLHLLLNLKDDEFERFLGLLGLRLSVTLNFREFQNLCEKRPWRTDEAPQRLIRPKQKVADSELACEQAHQYLVTKAKNRWSDLSKNFLETDNEGNGILRRRDIKNALYGFDIPLTPREFEKLWARYDTEGKGHITYQEFLQKLGINYSPAVHRPCAEDYFNFMGHFTKPQQLQEEMKELQQSTEKAVAARDKLMDRHQDISKAFTKTDQSKTNYISICKMQEVLEECGCSLTEGELTHLLNSWGVSRHDNAINYLDFLRAVENSKSTGAQPKEKEESMPINFATLNPQEAVRKIQEVVESSQLALSTAFSALDKEDTGFVKATEFGQVLKDFCYKLTDNQYHYFLRKLRIHLTPYINWKYFLQNFSCFLEETADEWAEKMPKGPPPTSPKATADRDILARLHKAVTSHYHAITQEFENFDTMKTNTISREEFRAICNRRVQILTDEQFDRLWNEMPVNAKGRLKYPDFLSRFSSETAATPMATGDSAVAQRGSSVPDVSEGTRSALSLPTQELRPGSKSQSHPCTPASTTVIPGTPPLQNCDPIESRLRKRIQGCWRQLLKECKEKDVARQGDINASDFLALVEKFNLDISKEECQQLIIKYDLKSNGKFAYCDFIQSCVLLLKAKESSLMHRMKIQNAHKMKEAGAETPSFYSALLRIQPKIVHCWRPMRRTFKSYDEAGTGLLSVADFRTVLRQYSINLSEEEFFHILEYYDKTLSSKISYNDFLRAFLQ

SEQ ID NO: 4114 - DNA, 1689 bp, Homo sapiens
atgacaagaaacgccagacccaacattgtcctgctgatggcagatgaccttggagtgggggatttgtgctgctacggtaataactcagtgagcacacctaatattgaccgcctggcaagtgaaggagtgaggcttacccagcatctcgcagctgcttccatgtgcaccccaagtcgggctgccttcctgaccggccggtaccccatcagatcagggatggtgtctgcctacaacctgaaccgtgccttcacgtggcttggtgggtcaggtggtcttcccaccaatgaaacgacttttgccaagctgctgcagcaccgtggctaccgcacgggactcataggcaaatggcacctgggtttgagctgcgcctctcggaatgatcactgttaccacccgctcaaccatggttttcactacttttacggggtgccttttggacttttaagcgactgccaggcatccaagacaccagaactgcaccgctggctcaggatcaaactgtggatctccacggtagcccttgccctggttccttttctgcttctcattcccaagttcgcccgctggttctcagtgccatggaaggtcatctttgtctttgctctcctcgcctttctgtttttcacttcctggtactctagttatggatttactcgacgttggaattgcatccttatgaggaaccatgaaattatccagcagccaatgaaagaggagaaagtagcttccctcatgctgaaggaggcacttgctttcattgaaaggtacaaaagggaaccttttctcctctttttttccttcctgcacgtacatactccactcatctccaaaaagaagtttgttgggcgcagtaaatatggcaggtatggggacaatgtagaagaaatggattggatggtgggtaaaatcctggatgccctggaccaggagcgcctggccaaccacaccttggtgtacttcacctctgacaacgggggccacctggagcccctggacggggctgttcagctgggtggctggaacgggatctacaaaggtggcaaaggaatgggaggatgggaaggaggtatccgtgtgccagggatattccggtggccgtcagtcttggaggctgggagagtgatcaatgagcccaccagcttaatggacatctatccgacgctgtcttatataggcggagggatcttgtcccaggacagagtgattgacggccagaacctaatgcccctgctggaaggaagggcgtcccactccgaccacgagttcctcttccactactgtggggtctatctgcacacggtcaggtggcatcagaaggactgtgcaactgtgtggaaagctcattatgtgactcctaaattctaccctgaaggaacaggtgcctgctatgggagtggaatatgttcatgttcgggggatgtaacctaccacgacccaccactcctctttgacatctcaagagacccttcagaagcccttccactgaaccctgacaatgagccattatttgactccgtgatcaaaaagatggaggcagccataagagagcatcgtaggacactaacacctgtcccacagcagttctctgtgttcaacacaatttggaaaccatggctgcagccttgctgtgggaccttccccttctgtgggtgtgacaaggaagatgacatccttcccatggctccctga

SEQ ID NO: 4115 - protein, 562 aa, Homo sapiens
MTRNARPNIVLLMADDLGVGDLCCYGNNSVSTPNIDRLASEGVRLTQHLAAASMCTPSRAAFLTGRYPIRSGMVSAYNLNRAFTWLGGSGGLPTNETTFAKLLQHRGYRTGLIGKWHLGLSCASRNDHCYHPLNHGFHYFYGVPFGLLSDCQASKTPELHRWLRIKLWISTVALALVPFLLLIPKFARWFSVPWKVIFVFALLAFLFFTSWYSSYGFTRRWNCILMRNHEIIQQPMKEEKVASLMLKEALAFIERYKREPFLLFFSFLHVHTPLISKKKFVGRSKYGRYGDNVEEMDWMVGKILDALDQERLANHTLVYFTSDNGGHLEPLDGAVQLGGWNGIYKGGKGMGGWEGGIRVPGIFRWPSVLEAGRVINEPTSLMDIYPTLSYIGGGILSQDRVIDGQNLMPLLEGRASHSDHEFLFHYCGVYLHTVRWHQKDCATVWKAHYVTPKFYPEGTGACYGSGICSCSGDVTYHDPPLLFDISRDPSEALPLNPDNEPLFDSVIKKMEAAIREHRRTLTPVPQQFSVFNTIWKPWLQPCCGTFPFCGCDKEDDILPMAP

SEQ ID NO: 4116 - DNA, 2012 bp, Homo sapiens
cctttgcagaacagcctgtctgttctgctcctagacattagagagataatacggctgatagacaacaagaaggtattccaagctgcacaatgaggcccaggagacccttggtcttcatgtctttggtgtgtgcactcttgaacacatgccaggcacacagggtgcatgacgacaagcctaatattgtcctaatcatggttgatgacctgggtattggagatctgggctgctacggcaatgacaccatgaggacgcctcacatcgaccgccttgccagggaaggcgtgcgactgactcagcacatctctgccgcctccctctgcagcccaagccggtccgcgttcttgacgggaagataccccatccgatcaggtatggtttctagtggtaatagacgtgtcatccaaaatcttgcagtccccgcaggcctccctcttaatgagacaacacttgcagccttgctaaagaagcaaggatacagcacggggcttataggcaaatggcaccaaggcttgaactgcgactcccgaagtgaccagtgccaccatccatataattatgggtttgactactactatggcatgccgttcactctcgttgacagctgctggccggacccctctcgtaacacggaattagcctttgagagtcagctctggctctgtgtgcagctagttgccattgccatcctcaccctaacctttgggaagctgagcggctgggtctctgttccctggctcctgatcttctccatgattctgtttattttcctcttgggctatgcttggttctccagccacacgtcccctttatactgggactgcctcctcatgcgggggcacgagatcacggagcagcccatgaaggctgaacgagctggatccattatggtgaaggaagcgatttcctttttagaaaggcacagtaaggaaactttccttctctttttctcctttcttcacgtgcacacacctctccccaccacggacgatttcactggcaccagcaagcatggcttgtatggggataatgtggaagagatggactccatggtgggcaagattcttgatgctatcgatgattttggcctaaggaacaacacccttgtctactttacatcagatcacggagggcatttggaagctaggcgagggcatgcccaacttggtggatggaatggaatatacaaaggtggaaaaggcatggggggctgggaaggtggaatccgcgtcccaggaattgtccgatggcctggaaaggtaccagctggacggttgattaaggaacctacaagtttaatggatattttaccaactgtcgcatcagtgtcaggaggaagtctccctcaggacagggtcattgacggccgagacctcatgcccttgctgcagggcaacgtcaggcactcggagcatgaatttcttttccactactgtggctcctacctgcacgccgtgcggtggatccccaaggacgacagtgggtcagtttggaaggctcactatgtgaccccggtattccagccaccagcttctggtggctgctatgtcacctcattatgcagatgtttcggagaacaggttacctaccacaacccccctctgctcttcgatctctccagggacccctcagagtccacacccctgacacctgccacagagcccctccatgattttgtgattaaaaaggtggccaacgccctgaaggaacaccaggaaaccatcgtgcctgtgacctaccaactctcagaactgaatcagggcaggacgtggctgaagccttgctgtggggtgttcccattttgtctgtgtgacaaggaagaggaagtctctcagcctcggggtcctaacgagaagagataattacaatcaggctaccagaggaagcctttggtcctaacgagaagagataattacaatcaggctaccaaaggaagcactaactttggtgctttcaagttggcaaggagtgcatttaatagtcaataaattcatctaccattccagattatt

SEQ ID NO: 4117 - protein, 590 aa, Homo sapiens
MRPRRPLVFMSLVCALLNTCQAHRVHDDKPNIVLIMVDDLGIGDLGCYGNDTMRTPHIDRLAREGVRLTQHISAASLCSPSRSAFLTGRYPIRSGMVSSGNRRVIQNLAVPAGLPLNETTLAALLKKQGYSTGLIGKWHQGLNCDSRSDQCHHPYNYGFDYYYGMPFTLVDSCWPDPSRNTELAFESQLWLCVQLVAIAILTLTFGKLSGWVSVPWLLIFSMILFIFLLGYAWFSSHTSPLYWDCLLMRGHEITEQPMKAERAGSIMVKEAISFLERHSKETFLLFFSFLHVHTPLPTTDDFTGTSKHGLYGDNVEEMDSMVGKILDAIDDFGLRNNTLVYFTSDHGGHLEARRGHAQLGGWNGIYKGGKGMGGWEGGIRVPGIVRWPGKVPAGRLIKEPTSLMDILPTVASVSGGSLPQDRVIDGRDLMPLLQGNVRHSEHEFLFHYCGSYLHAVRWIPKDDSGSVWKAHYVTPVFQPPASGGCYVTSLCRCFGEQVTYHNPPLLFDLSRDPSESTPLTPATEPLHDFVIKKVANALKEHQETIVPVTYQLSELNQGRTWLKPCCGVFPFCLCDKEEEVSQPRGPNEKR

SEQ ID NO: 4118 - DNA, 8192 bp, Homo sapiens
atgcccaagcgcgcgcactggggggccctctccgtggtgctgatcctgctttggggccatccgcgagtggcgctggcctgcccgcatccttgtgcctgctacgtccccagcgaggtccactgcacgttccgatccctggcttccgtgcccgctggcattgctagacacgtggaaagaatcaatttggggtttaatagcatacaggccctgtcagaaacctcatttgcaggactgaccaagttggagctacttatgattcacggcaatgagatcccaagcatccccgatggagctttaagagacctcagctctcttcaggttttcaagttcagctacaacaagctgagagtgatcacaggacagaccctccagggtctctctaacttaatgaggctgcacattgaccacaacaagatcgagtttatccaccctcaagctttcaacggcttaacgtctctgaggctactccatttggaaggaaatctcctccaccagctgcaccccagcaccttctccacgttcacatttttggattatttcagactctccaccataaggcacctctacttagcagagaacatggttagaactcttcctgccagcatgcttcggaacatgccgcttctggagaatctttacttgcagggaaatccgtggacctgcgattgtgagatgagatggtttttggaatgggatgcaaaatccagaggaattctgaagtgtaaaaaggacaaagcttatgaaggcggtcagttgtgtgcaatgtgcttcagtccaaagaagttgtacaaacatgagatacacaagctgaaggacatgacttgtctgaagccttcaatagagtcccctctgagacagaacaggagcaggagtattgaggaggagcaagaacaggaagaggatggtggcagccagctcatcctggagaaattccaactgccccagtggagcatctctttgaatatgaccgacgagcacgggaacatggtgaacttggtctgtgacatcaagaaaccaatggatgtgtacaagattcacttgaaccaaacggatcctccagatattgacataaatgcaacagttgccttggactttgagtgtccaatgacccgagaaaactatgaaaagctatggaaattgatagcatactacagtgaagttcccgtgaagctacacagagagctcatgctcagcaaagaccccagagtcagctaccagtacaggcaggatgctgatgaggaagctctttactacacaggtgtgagagcccagattcttgcagaaccagaatgggtcatgcagccatccatagatatccagctgaaccgacgtcagagtacggccaagaaggtgctactttcctactacacccagtattctcaaacaatatccaccaaagatacaaggcaggctcggggcagaagctgggtaatgattgagcctagtggagctgtgcaaagagatcagactgtcctggaagggggtccatgccagttgagctgcaacgtgaaagcttctgagagtccatctatcttctgggtgcttccagatggctccatcctgaaagcgcccatggatgacccagacagcaagttctccattctcagcagtggctggctgaggatcaagtccatggagccatctgactcaggcttgtaccagtgcattgctcaagtgagggatgaaatggaccgcatggtatatagggtacttgtgcagtctccctccactcagccagccgagaaagacacagtgacaattggcaagaacccaggggagtcggtgacattgccttgcaatgctttagcaatacccgaagcccaccttagctggattcttccaaacagaaggataattaatgatttggctaacacatcacatgtatacatgttgccaaatggaactctttccatcccaaaggtccaagtcagtgatagtggttactacagatgtgtggctgtcaaccagcaaggggcagaccattttacggtgggaatcacagtgaccaagaaagggtctggcttgccatccaaaagaggcagacgcccaggtgcaaaggctctttccagagtcagagaagacatcgtggaggatgaagggggctcgggcatgggagatgaagagaacacttcaaggagacttctgcatccaaaggaccaagaggtgttcctcaaaacaaaggatgatgccatcaatggagacaagaaagccaagaaagggagaagaaagctgaaactctggaagcattcggaaaaagaaccagagaccaatgttgcagaaggtcgcagagtgtttgaatctagacgaaggataaacatggcaaacaaacagattaatccggagcgctgggctgatattttagccaaagtccgtgggaaaaatctccctaagggcacagaagtacccccgttgattaaaaccacaagtcctccatccttgagcctagaagtcacaccaccttttcctgctgtttctcccccctcagcatctcctgtgcagacagtaaccagtgctgaagaatcctcagcagatgtacctctacttggtgaagaagagcacgttttgggtaccatttcctcagccagcatggggctagaacacaaccacaatggagttattcttgttgaacctgaagtaacaagcacacctctggaggaagttgttgatgacctttctgagaagactgaggagataacttccactgaaggagacctgaaggggacagcagcccctacacttatatctgagccttatgaaccatctcctactctgcacacattagacacagtctatgaaaagcccacccatgaagagacggcaacagagggttggtctgcagcagatgttggatcgtcaccagagcccacatccagtgagtatgagcctccattggatgctgtctccttggctgagtctgagcccatgcaatactttgacccagatttggagactaagtcacaaccagatgaggataagatgaaagaagacacctttgcacaccttactccaacccccaccatctgggttaatgactccagtacatcacagttatttgaggattctactataggggaaccaggtgtcccaggccaatcacatctacaaggactgacagacaacatccaccttgtgaaaagtagtctaagcactcaagacaccttactgattaaaaagggtatgaaagagatgtctcagacactacagggaggaaatatgctagagggagaccccacacactccagaagttctgagagtgagggccaagagagcaaatccatcactttgcctgactccacactgggtataatgagcagtatgtctccagttaagaagcctgcggaaaccacagttggtaccctcctagacaaagacaccacaacagtaacaacaacaccaaggcaaaaagttgctccgtcatccaccatgagcactcacccttctcgaaggagacccaacgggagaaggagattacgccccaacaaattccgccaccggcacaagcaaaccccacccacaacttttgccccatcagagactttttctactcaaccaactcaagcacctgacattaagatttcaagtcaagtggagagttctctggttcctacagcttgggtggataacacagttaatacccccaaacagttggaaatggagaagaatgcagaacccacatccaagggaacaccacggagaaaacacgggaagaggccaaacaaacatcgatataccccttctacagtgagctcaagagcgtccggatccaagcccagcccttctccagaaaataaacatagaaacattgttactcccagttcagaaactatacttttgcctagaactgtttctctgaaaactgagggcccttatgattccttagattacatgacaaccaccagaaaaatatattcatcttaccctaaagtccaagagacacttccagtcacatataaacccacatcagatggaaaagaaattaaggatgatgttgccacaaatgttgacaaacataaaagtgacattttagtcactggtgaatcaattactaatgccataccaacttctcgctccttggtctccactatgggagaatttaaggaagaatcctctcctgtaggctttccaggaactccaacctggaatccctcaaggacggcccagcctgggaggctacagacagacatacctgttaccacttctggggaaaatcttacagaccctccccttcttaaagagcttgaggatgtggatttcacttccgagtttttgtcctctttgacagtctccacaccatttcaccaggaagaagctggttcttccacaactctctcaagcataaaagtggaggtggcttcaagtcaggcagaaaccaccacccttgatcaagatcatcttgaaaccactgtggctattctcctttctgaaactagaccacagaatcacacccctactgctgcccggatgaaggagccagcatcctcgtccccatccacaattctcatgtctttgggacaaaccaccaccactaagccagcacttcccagtccaagaatatctcaagcatctagagattccaaggaaaatgttttcttgaattatgtggggaatccagaaacagaagcaaccccagtcaacaatgaaggaacacagcatatgtcagggccaaatgaattatcaacaccctcttccgaccgggatgcatttaacttgtctacaaagctggaattggaaaagcaagtatttggtagtaggagtctaccacgtggcccagatagccaacgccaggatggaagagttcatgcttctcatcaactaaccagagtccctgccaaacccatcctaccaacagcaacagtgaggctacctgaaatgtccacacaaagcgcttccagatactttgtaacttcccagtcacctcgtcactggaccaacaaaccggaaataactacatatccttctggggctttgccagagaacaaacagtttacaactccaagattatcaagtacaacaattcctctcccattgcacatgtccaaacccagcattcctagtaagtttactgaccgaagaactgaccaattcaatggttactccaaagtgtttggaaataacaacatccctgaggcaagaaacccagttggaaagcctcccagtccaagaattcctcattattccaatggaagactccctttctttaccaacaagactctttcttttccacagttgggagtcacccggagaccccagatacccacttctcctgccccagtaatgagagagagaaaagttattccaggttcctacaacaggatacattcccatagcaccttccatctggactttggccctccggcacctccgttgttgcacactccgcagaccacgggatcaccctcaactaacttacagaatatccctatggtctcttccacccagagttctatctcctttataacatcttctgtccagtcctcaggaagcttccaccagagcagctcaaagttctttgcaggaggacctcctgcatccaaattctggtctcttggggaaaagccccaaatcctcaccaagtccccacagactgtgtccgtcaccgctgagacagacactgtgttcccctgtgaggcaacaggaaaaccaaagcctttcgttacttggacaaaggtttccacaggagctcttatgactccgaataccaggatacaacggtttgaggttctcaagaacggtaccttagtgatacggaaggttcaagtacaagatcgaggccagtatatgtgcaccgccagcaacctgcacggcctggacaggatggtggtcttgctttcggtcaccgtgcagcaacctcaaatcctagcctcccactaccaggacgtcactgtctacctgggagacaccattgcaatggagtgtctggccaaagggaccccagccccccaaatttcctggatcttccctgacaggagggtgtggcaaactgtgtcccccgtggagagccgcatcaccctgcacgaaaaccggaccctttccatcaaggaggcgtccttctcagacagaggcgtctataagtgcgtggccagcaatgcagccggggcggacagcctggccatccgcctgcacgtggcggcactgccccccgttatccaccaggagaagctggagaacatctcgctgcccccggggctcagcattcacattcactgcactgccaaggctgcgcccctgcccagcgtgcgctgggtgctcggggacggtacccagatccgcccctcgcagttcctccacgggaacttgtttgttttccccaacgggacgctctacatccgcaacctcgcgcccaaggacagcgggcgctatgagtgcgtggccgccaacctggtaggctccgcgcgcaggacggtgcagctgaacgtgcagcgtgcagcagccaacgcgcgcatcacgggcacctccccgcggaggacggacgtcaggtacggaggaaccctcaagctggactgcagcgcctcgggggacccctggccgcgcatcctctggaggctgccgtccaagaggatgatcgacgcgctcttcagttttgatagcagaatcaaggtgtttgccaatgggaccctggtggtgaaatcagtgacggacaaagatgccggagattacctgtgcgtagctcgaaataaggttggtgatgactacgtggtgctcaaagtggatgtggtgatgaaaccggccaagattgaacacaaggaggagaacgaccacaaagtcttctacgggggtgacctgaaagtggactgtgtggccaccgggcttcccaatcccgagatctcctggagcctcccagacgggagtctggtgaactccttcatgcagtcggatgacagcggtggacgcaccaagcgctatgtcgtcttcaacaatgggacactctactttaacgaagtggggatgagggaggaaggagactacacctgctttgctgaaaatcaggtcgggaaggacgagatgagagtcagagtcaaggtggtgacagcgcccgccaccatccggaacaagacttacttggcggttcaggtgccctatggagacgtggtcactgtagcctgtgaggccaaaggagaacccatgcccaaggtgacttggttgtccccaaccaacaaggtgatccccacctcctctgagaagtatcagatataccaagatggcactctccttattcagaaagcccagcgttctgacagcggcaactacacctgcctggtcaggaacagcgcgggagaggataggaagacggtgtggattcacgtcaacgtccagccacccaagatcaacggtaaccccaaccccatcaccaccgtgcgggagatagcagccgggggcagtcggaaactgattgactgcaaagctgaaggcatccccaccccgagggtgttatgggcttttcccgagggtgtggttctgccagctccatactatggaaaccggatcactgtccatggcaacggttccctggacatcaggagtttgaggaagagcgactccgtccagctggtatgcatggcacgcaacgagggaggggaggcgaggttgatcgtgcagctcactgtcctggagcccatggagaaacccatcttccacgacccgatcagcgagaagatcacggccatggcgggccacaccatcagcctcaactgctctgccgcggggaccccgacacccagcctggtgtgggtccttcccaatggcaccgatctgcagagtggacagcagctgcagcgcttctaccacaaggctgacggcatgctacacattagcggtctctcctcggtggacgctggggcctaccgctgcgtggcccgcaatgccgctggccacacggagaggctggtctccctgaaggtgggactgaagccagaagcaaacaagcagtatcataacctggtcagcatcatcaatggtgagaccctgaagctcccctgcacccctcccggggctgggcagggacgtttctcctggacgctccccaatggcatgcatctggagggcccccaaaccctgggacgcgtttctcttctggacaatggcaccctcacggttcgtgaggcctcggtgtttgacaggggtacctatgtatgcaggatggagacggagtacggcccttcggtcaccagcatccccgtgattgtgatcgccta

SEQ ID NO: 4119 - protein, 2828 aa, Homo sapiens
MPKRAHWGALSVVLILLWGHPRVALACPHPCACYVPSEVHCTFRSLASVPAGIARHVERINLGFNSIQALSETSFAGLTKLELLMIHGNEIPSIPDGALRDLSSLQVFKFSYNKLRVITGQTLQGLSNLMRLHIDHNKIEFIHPQAFNGLTSLRLLHLEGNLLHQLHPSTFSTFTFLDYFRLSTIRHLYLAENMVRTLPASMLRNMPLLENLYLQGNPWTCDCEMRWFLEWDAKSRGILKCKKDKAYEGGQLCAMCFSPKKLYKHEIHKLKDMTCLKPSIESPLRQNRSRSIEEEQEQEEDGGSQLILEKFQLPQWSISLNMTDEHGNMVNLVCDIKKPMDVYKIHLNQTDPPDIDINATVALDFECPMTRENYEKLWKLIAYYSEVPVKLHRELMLSKDPRVSYQYRQDADEEALYYTGVRAQILAEPEWVMQPSIDIQLNRRQSTAKKVLLSYYTQYSQTISTKDTRQARGRSWVMIEPSGAVQRDQTVLEGGPCQLSCNVKASESPSIFWVLPDGSILKAPMDDPDSKFSILSSGWLRIKSMEPSDSGLYQCIAQVRDEMDRMVYRVLVQSPSTQPAEKDTVTIGKNPGESVTLPCNALAIPEAHLSWILPNRRIINDLANTSHVYMLPNGTLSIPKVQVSDSGYYRCVAVNQQGADHFTVGITVTKKGSGLPSKRGRRPGAKALSRVREDIVEDEGGSGMGDEENTSRRLLHPKDQEVFLKTKDDAINGDKKAKKGRRKLKLWKHSEKEPETNVAEGRRVFESRRRINMANKQINPERWADILAKVRGKNLPKGTEVPPLIKTTSPPSLSLEVTPPFPAVSPPSASPVQTVTSAEESSADVPLLGEEEHVLGTISSASMGLEHNHNGVILVEPEVTSTPLEEVVDDLSEKTEEITSTEGDLKGTAAPTLISEPYEPSPTLHTLDTVYEKPTHEETATEGWSAADVGSSPEPTSSEYEPPLDAVSLAESEPMQYFDPDLETKSQPDEDKMKEDTFAHLTPTPTIWVNDSSTSQLFEDSTIGEPGVPGQSHLQGLTDNIHLVKSSLSTQDTLLIKKGMKEMSQTLQGGNMLEGDPTHSRSSESEGQESKSITLPDSTLGIMSSMSPVKKPAETTVGTLLDKDTTTVTTTPRQKVAPSSTMSTHPSRRRPNGRRRLRPNKFRHRHKQTPPTTFAPSETFSTQPTQAPDIKISSQVESSLVPTAWVDNTVNTPKQLEMEKNAEPTSKGTPRRKHGKRPNKHRYTPSTVSSRASGSKPSPSPENKHRNIVTPSSETILLPRTVSLKTEGPYDSLDYMTTTRKIYSSYPKVQETLPVTYKPTSDGKEIKDDVATNVDKHKSDILVTGESITNAIPTSRSLVSTMGEFKEESSPVGFPGTPTWNPSRTAQPGRLQTDIPVTTSGENLTDPPLLKELEDVDFTSEFLSSLTVSTPFHQEEAGSSTTLSSIKVEVASSQAETTTLDQDHLETTVAILLSETRPQNHTPTAARMKEPASSSPSTILMSLGQTTTTKPALPSPRISQASRDSKENVFLNYVGNPETEATPVNNEGTQHMSGPNELSTPSSDRDAFNLSTKLELEKQVFGSRSLPRGPDSQRQDGRVHASHQLTRVPAKPILPTATVRLPEMSTQSASRYFVTSQSPRHWTNKPEITTYPSGALPENKQFTTPRLSSTTIPLPLHMSKPSIPSKFTDRRTDQFNGYSKVFGNNNIPEARNPVGKPPSPRIPHYSNGRLPFFTNKTLSFPQLGVTRRPQIPTSPAPVMRERKVIPGSYNRIHSHSTFHLDFGPPAPPLLHTPQTTGSPSTNLQNIPMVSSTQSSISFITSSVQSSGSFHQSSSKFFAGGPPASKFWSLGEKPQILTKSPQTVSVTAETDTVFPCEATGKPKPFVTWTKVSTGALMTPNTRIQRFEVLKNGTLVIRKVQVQDRGQYMCTASNLHGLDRMVVLLSVTVQQPQILASHYQDVTVYLGDTIAMECLAKGTPAPQISWIFPDRRVWQTVSPVESRITLHENRTLSIKEASFSDRGVYKCVASNAAGADSLAIRLHVAALPPVIHQEKLENISLPPGLSIHIHCTAKAAPLPSVRWVLGDGTQIRPSQFLHGNLFVFPNGTLYIRNLAPKDSGRYECVAANLVGSARRTVQLNVQRAAANARITGTSPRRTDVRYGGTLKLDCSASGDPWPRILWRLPSKRMIDALFSFDSRIKVFANGTLVVKSVTDKDAGDYLCVARNKVGDDYVVLKVDVVMKPAKIEHKEENDHKVFYGGDLKVDCVATGLPNPEISWSLPDGSLVNSFMQSDDSGGRTKRYVVFNNGTLYFNEVGMREEGDYTCFAENQVGKDEMRVRVKVVTAPATIRNKTYLAVQVPYGDVVTVACEAKGEPMPKVTWLSPTNKVIPTSSEKYQIYQDGTLLIQKAQRSDSGNYTCLVRNSAGEDRKTVWIHVNVQPPKINGNPNPITTVREIAAGGSRKLIDCKAEGIPTPRVLWAFPEGVVLPAPYYGNRITVHGNGSLDIRSLRKSDSVQLVCMARNEGGEARLIVQLTVLEPMEKPIFHDPISEKITAMAGHTISLNCSAAGTPTPSLVWVLPNGTDLQSGQQLQRFYHKADGMLHISGLSSVDAGAYRCVARNAAGHTERLVSLKVGLKPEANKQYHNLVSIINGETLKLPCTPPGAGQGRFSWTLPNGMHLEGPQTLGRVSLLDNGTLTVREASVFDRGTYVCRMETEYGPSVTSIPVIVIAYPPRITSEPTPVIYTRPGNTVKLNCMAMGIPKADITWELPDKSHLKAGVQARLYGNRFLHPQGSLTIQHATQRDAGFYKCMAKNILGSDSKTTYIHVF

SEQ ID NO: 4120 - DNA, 3844 bp, Homo sapiens
aaaggcaggcattctctttccttttccttctctcctgagcgctcctgcagttcctggggcgtagtaggggatccacaagcgtttgtgaccagtgaagttctttacaagggtgagatctgcacgggaggacccgagcgagggtctcggcttgccaggaagccggggttccccgggaagcgtggagttcacccgcgcactcgaagtgcctttgcaaaattatatctgggtgttggcacccagccactattctgccaatgaagtacatcctggtcacgggtggggtcatctcaggcattggtaaagggatcattgccagcagcattggaacgattctaaaatcatgtggactccgagttactgccataaaaatcgacccctatattaacatcgatgctggcactttttcaccttatgaacacggtgaagtcttcgtcttaaatgatggtggagaagttgatttagaccttggaaattatgaaagatttttggatattaatctttataaagacaacaatatcaccacggggaagatatatcagcatgtgatcaataaagagaggcgtggtgattacctggggaaaacagtgcaagttgtccctcacattactgatgctgtccaggagtgggttatgaatcaagccaaggtgccggtggatggtaataaggaagagccccaaatatgcgttattgagctgggaggcaccattggagacatcgaaggaatgccgtttgtggaggcgtttagacaattccagtttaaggcgaaaagagagaatttctgtaatatccacgttagccttgtcccacagctcagtgctaccggagaacaaaaaaccaaacccacccaaaacagcgtccgcgcactgaggggtttaggcctgtctccagatctgattgtctgccgaagttcaacgcccattgagatggccgtgaaggagaagatttctatgttttgtcacgtgaaccctgaacaggtcatatgtatccatgatgtttcttccacataccgagttcctgtgcttttagaggaacaaagcattgtgaaatattttaaggagagattgcacctgcccatcggtgattctgcaagtaatttgctttttaagtggagaaatatggctgacaggtatgaaaggttacagaaaatatgctccatagccctggttggcaaatacaccaagctcagagactgctacgcctctgtgttcaaagccctggaacactcagccctggccatcaaccacaagttgaatctgatgtacatagactccattgatctggagaagatcactgaaaccgaggaccctgtgaaatttcatgaagcttggcagaagctatgcaaagctgatggtattcttgtgcctggaggctttggaatcagaggaacattgggaaaactccaggcgatttcttgggcaaggacaaagaagattccttttctgggagtttgtcttgggatgcaactagcagtgatagagtttgcaagaaactgccttaacttgaaagatgctgattccacagagtttaggccaaatgccccagttcctctggtgattgatatgcccgagcacaaccctggcaatttgggaggaacaatgagactgggaataagaagaactgttttcaaaactgaaaattcaatattaaggaaactttatggtgatgttccttttatagaagaaagacacagacatcggttcgaggtaaaccctaacctgatcaaacaatttgagcagaatgacttaagttttgtaggtcaggatgttgatggagacaggatggaaatcattgaactggcaaatcatccttattttgttggtgtccagttccatcctgagttttcttctaggccgatgaagccttcccctccgtatctggggctgttacttgcagcaactgggaacctgaatgcctacttgcaacagggttgcaaactgtcttccagtgatagatacagtgatgccagtgatgacagcttttcagagccaaggatagctgagttggaaataagctgaaatgaatacatgactgggaataatggggactgcctgtgaggcctctgaaataattgaaggcaagatgaaggaactatctgaagaaatcactacactcttagagaatccctctgttctccagcaaacatgggatgtaaagcctcacagggaatctgataatacatacttctgtcaaccagaaccagaggggtagttttcttttccctccagaggcagcctttggtacttaaaatatctgtagctgattaaatttttcccaacaacctcactggggagaaagtgtgttcatgttttgtccagcggatcaggatgttaggatgacgagcaagagtccaggtcactgtgcctttgctgtgttgtatggaaaggatggcagggaacatgctgtaagtaattttgagtaagaaaatgagtcactgtgttacctggaactcagccacagatttgtgtgtggtccaagatcattgcagtttctcaccctgtttatttcctggtaaaagtaaaattgaataggtccaagacttgggggtggcaagtaaggctttgcctcaggcacaaaatttaagggggctccaaaaaactcaggaatcaagatcagcaatacagtctgagtatcccttatgtgaaatgcttggggctagaagtgttttgaatttcagattttggaatatttgcatatacatgcgatatcttggggatgagactcaagactaaacatgaaattcatttatgcttcatatacaccttatatacatagcctaaaggtaatttgatacaatattttaaataattttgtgcatgaaacaaagtttcgactgcattttgactgtgatttctggcatgagatcagttatggaattttccacttctagcgtcatgttggcattcagaaattttgaaattttggagcattttggattttcagattagggatgctcaacctgtatatatattttttaatcgacgtgaaattcacgtaacatagaattaaccattttgaagtgaacaatttggttgcattcactgatgttgagcaaccaccacctttaactatttccaaaacattttcatcactccaaaataaatgcctgtacacactagcagtcactccctatcttcccctccacctgtccgctggcaaccactgatctcctttttatttctgtggctttttctattctggatatttcatataagtggaattacacaatatatgtggtcttttgtgtctggcttcttctgagacagtaggaagggggcttggctttggctcacccccactagagcattttttcatgcattcccactgatcacaaaacccatactactacctcattgacaccatacctgctaacctcgaggctttagtcatacaaagaaaatggcctttctgtattgttcttctgtgctctcataatgcttaaccatgtcttttacttaaacaattccaggaactggccttaggagatccaaatagggaaccaagattgcagagtgtcccatcttgggagggaatgctgaataattaattgatttacagccttgttgccgctggccagaccaccaggtggcccattactcgagatgatcatcacaaccagatgatgctaacctatatcctctacccttcgcgtgctttgtctgggaagtcttttggccccatgtcagtttctattgcattgagagcccaagagcccctggtcagtcaggcttccatttagcatggcgtttgcaaggtttacccatgttgtagcatgtgtcagaatttcattcctttctatggctgaataaaattccattgtatgaatataccacaaaaaaaaaaaaaa

SEQ ID NO: 4121 - protein, 586 aa, Homo sapiens
MKYILVTGGVISGIGKGIIASSIGTILKSCGLRVTAIKIDPYINIDAGTFSPYEHGEVFVLNDGGEVDLDLGNYERFLDINLYKDNNITTGKIYQHVINKERRGDYLGKTVQVVPHITDAVQEWVMNQAKVPVDGNKEEPQICVIELGGTIGDIEGMPFVEAFRQFQFKAKRENFCNIHVSLVPQLSATGEQKTKPTQNSVRALRGLGLSPDLIVCRSSTPIEMAVKEKISMFCHVNPEQVICIHDVSSTYRVPVLLEEQSIVKYFKERLHLPIGDSASNLLFKWRNMADRYERLQKICSIALVGKYTKLRDCYASVFKALEHSALAINHKLNLMYIDSIDLEKITETEDPVKFHEAWQKLCKADGILVPGGFGIRGTLGKLQAISWARTKKIPFLGVCLGMQLAVIEFARNCLNLKDADSTEFRPNAPVPLVIDMPEHNPGNLGGTMRLGIRRTVFKTENSILRKLYGDVPFIEERHRHRFEVNPNLIKQFEQNDLSFVGQDVDGDRMEIIELANHPYFVGVQFHPEFSSRPMKPSPPYLGLLLAATGNLNAYLQQGCKLSSSDRYSDASDDSFSEPRIAELEIS

SEQ ID NO: 4122 - DNA, 3947 bp, Homo sapiens
gggtgacgggagctgcctgtgctggaggaatcactttttaggcgcttgttttggaccattgcacaaacccgggtgcaaaccccaagctcaccagcgtgagtgagctgggccagcagcagggaggagaggggaaggtgggcgaggagggcgccgcgcaccccgaggcccgtgtgggcggtgggaagatcccgggggcggctttggacagccccggcagcgaccccttccccagcccgacaggtgagcgccaggccagccgcggggtggagcccgccgtgcccaccggccaccctccccggtgctaccaccaccgcgcagattatatctgggtgttggcacccagccactattctgccaatgaagtacatcctggtcacgggtggggtcatctcaggcattggtaaagggatcattgccagcagcattggaacgattctaaaatcatgtggactccgagttactgccataaaaatcgacccctatattaacatcgatgctggcactttttcaccttatgaacacggtgaagtcttcgtcttaaatgatggtggagaagttgatttagaccttggaaattatgaaagatttttggatattaatctttataaagacaacaatatcaccacggggaagatatatcagcatgtgatcaataaagagaggcgtggtgattacctggggaaaacagtgcaagttgtccctcacattactgatgctgtccaggagtgggttatgaatcaagccaaggtgccggtggatggtaataaggaagagccccaaatatgcgttattgagctgggaggcaccattggagacatcgaaggaatgccgtttgtggaggcgtttagacaattccagtttaaggcgaaaagagagaatttctgtaatatccacgttagccttgtcccacagctcagtgctaccggagaacaaaaaaccaaacccacccaaaacagcgtccgcgcactgaggggtttaggcctgtctccagatctgattgtctgccgaagttcaacgcccattgagatggccgtgaaggagaagatttctatgttttgtcacgtgaaccctgaacaggtcatatgtatccatgatgtttcttccacataccgagttcctgtgcttttagaggaacaaagcattgtgaaatattttaaggagagattgcacctgcccatcggtgattctgcaagtaatttgctttttaagtggagaaatatggctgacaggtatgaaaggttacagaaaatatgctccatagccctggttggcaaatacaccaagctcagagactgctacgcctctgtgttcaaagccctggaacactcagccctggccatcaaccacaagttgaatctgatgtacatagactccattgatctggagaagatcactgaaaccgaggaccctgtgaaatttcatgaagcttggcagaagctatgcaaagctgatggtattcttgtgcctggaggctttggaatcagaggaacattgggaaaactccaggcgatttcttgggcaaggacaaagaagattccttttctgggagtttgtcttgggatgcaactagcagtgatagagtttgcaagaaactgccttaacttgaaagatgctgattccacagagtttaggccaaatgccccagttcctctggtgattgatatgcccgagcacaaccctggcaatttgggaggaacaatgagactgggaataagaagaactgttttcaaaactgaaaattcaatattaaggaaactttatggtgatgttccttttatagaagaaagacacagacatcggttcgaggtaaaccctaacctgatcaaacaatttgagcagaatgacttaagttttgtaggtcaggatgttgatggagacaggatggaaatcattgaactggcaaatcatccttattttgttggtgtccagttccatcctgagttttcttctaggccgatgaagccttcccctccgtatctggggctgttacttgcagcaactgggaacctgaatgcctacttgcaacagggttgcaaactgtcttccagtgatagatacagtgatgccagtgatgacagcttttcagagccaaggatagctgagttggaaataagctgaaatgaatacatgactgggaataatggggactgcctgtgaggcctctgaaataattgaaggcaagatgaaggaactatctgaagaaatcactacactcttagagaatccctctgttctccagcaaacatgggatgtaaagcctcacagggaatctgataatacatacttctgtcaaccagaaccagaggggtagttttcttttccctccagaggcagcctttggtacttaaaatatctgtagctgattaaatttttcccaacaacctcactggggagaaagtgtgttcatgttttgtccagcggatcaggatgttaggatgacgagcaagagtccaggtcactgtgcctttgctgtgttgtatggaaaggatggcagggaacatgctgtaagtaattttgagtaagaaaatgagtcactgtgttacctggaactcagccacagatttgtgtgtggtccaagatcattgcagtttctcaccctgtttatttcctggtaaaagtaaaattgaataggtccaagacttgggggtggcaagtaaggctttgcctcaggcacaaaatttaagggggctccaaaaaactcaggaatcaagatcagcaatacagtctgagtatcccttatgtgaaatgcttggggctagaagtgttttgaatttcagattttggaatatttgcatatacatgcgatatcttggggatgagactcaagactaaacatgaaattcatttatgcttcatatacaccttatatacatagcctaaaggtaatttgatacaatattttaaataattttgtgcatgaaacaaagtttcgactgcattttgactgtgatttctggcatgagatcagttatggaattttccacttctagcgtcatgttggcattcagaaattttgaaattttggagcattttggattttcagattagggatgctcaacctgtatatatattttttaatcgacgtgaaattcacgtaacatagaattaaccattttgaagtgaacaatttggttgcattcactgatgttgagcaaccaccacctttaactatttccaaaacattttcatcactccaaaataaatgcctgtacacactagcagtcactccctatcttcccctccacctgtccgctggcaaccactgatctcctttttatttctgtggctttttctattctggatatttcatataagtggaattacacaatatatgtggtcttttgtgtctggcttcttctgagacagtaggaagggggcttggctttggctcacccccactagagcattttttcatgcattcccactgatcacaaaacccatactactacctcattgacaccatacctgctaacctcgaggctttagtcatacaaagaaaatggcctttctgtattgttcttctgtgctctcataatgcttaaccatgtcttttacttaaacaattccaggaactggccttaggagatccaaatagggaaccaagattgcagagtgtcccatcttgggagggaatgctgaataattaattgatttacagccttgttgccgctggccagaccaccaggtggcccattactcgagatgatcatcacaaccagatgatgctaacctatatcctctacccttcgcgtgctttgtctgggaagtcttttggccccatgtcagtttctattgcattgagagcccaagagcccctggtcagtcaggcttccatttagcatggcgtttgcaaggtttacccatgttgtagcatgtgtcagaatttcattcctttctatggctgaataaaattccattgtatgaatataccacaaaaaaaaaaaaaa

SEQ ID NO: 4123 - protein, 586 aa, Homo sapiens; identical to SEQ ID NO: 4121

SEQ ID NO: 4124 - DNA, 2030 bp, Homo sapiens
tctccctgggagtcgcgcagagtggagtcaaaggcaaccagtgctcgctgcggtctctggggatcgggaccgcggcggcggcccgcgagcgggatgttccggggcttgagcagttggttgggcttgcagcagccggtggcaggcggtgggcagcccaatggagatgctccacccgagcagccgtccgagacggtggctgagtctgcggaggaggagctgcagcaagcgggagaccaggagctcctccaccaggccaaagacttcggcaactatttatttaactttgcatctgctgccacaaaaaagataactgaatcagttgctgaaacagcacaaacaataaagaaatccgtagaagaaggaaaaatagatggcatcattgacaagacaattataggagattttcagaaggaacagaaaaaatttgttgaagagcaacatacaaagaagtcagaagcagctgtgcccccatgggttgacactaacgatgaagaaacaattcaacaacaaattttggccttatcagctgacaagaggaatttccttcgtgaccctccggctggcgtgcaatttaatttcgactttgatcagatgtaccccgtggccctggtcatgctccaggaggatgagctgctaagcaagatgagatttgccctcgttcctaaacttgtgaaggaagaagtgttctggaggaactacttttaccgcgtctccctgattaagcagtcagcccagctcacggccctggctgcccaacagcaggccgcagggaaggaggagaagagcaatggcagagagcaagatttgccgctggcagaggcagtacggcccaaaacgccacccgttgtaatcaaatctcagcttaaaactcaagaggatgaggaagaaatttctactagcccaggtgtttctgagtttgtcagtgatgccttcgatgcctgtaacctaaatcaggaagatctaaggaaagaaatggagcaactagtgcttgacaaaaagcaagaggagacagccgtactggaagaggattctgcagattgggaaaaagaactgcagcaggaacttcaagaatatgaagtggtgacagaatctgaaaaacgagatgaaaactgggataaggaaatagagaaaatgcttcaagaggaaaattagctgttcctgaaatagaagaataatccttaacagtctgcaaactgacattaaattctagatgttgacaattactgaatcagaaggcatgaaagagtataattttatgaaattcaaaattattcttttttcaagttgaaacttgcctcttctactttaaaaaagtatatagaacagttacttctaataatcagaaagagatgttttatagaacatttctttaatataaagttagagatgtcttcataggcagtatggctatctttgccacagaaacataagtaaaattttagagttctgttttccatgaggtcaaaaatataatttattcctcagtcatggttttctaaatatctgtactccacattccattttaattgatatgagggtgttaaagtacctacttaatgggttgattattatcaaaatgaccaaattataccaaagaacttaagaggaagcactttcagaactattcacttgccaggtattttctaaaattccacctgaaagccaaaagataaaataaataacttgattttaatgatataagcatcacacaattttacattaagaaatactgtgcaggccatgcgtggtggctcaggcctgtaatcccagcactttgggaggccgaggtgggcagatcaccggaggtcaggagttcgagaccagccttgccaacatagtgaaaccctgtctttactaaaaatacaaaaattagccgggcatggtggcaggcacctgtaatcccaggtactagggaggcttttgaacccaggaggcagaggttgcagcgagctgagatcgcgccactgcactccagcctgggtgatagagtgagattcagtctcaaaaaaaaaaaaaaaaaaaaaaaaaaa

SEQ ID NO: 4125 - protein, 352 aa, Homo sapiens
MFRGLSSWLGLQQPVAGGGQPNGDAPPEQPSETVAESAEEELQQAGDQELLHQAKDFGNYLFNFASAATKKITESVAETAQTIKKSVEEGKIDGIIDKTIIGDFQKEQKKFVEEQHTKKSEAAVPPWVDTNDEETIQQQILALSADKRNFLRDPPAGVQFNFDFDQMYPVALVMLQEDELLSKMRFALVPKLVKEEVFWRNYFYRVSLIKQSAQLTALAAQQQAAGKEEKSNGREQDLPLAEAVRPKTPPVVIKSQLKTQEDEEEISTSPGVSEFVSDAFDACNLNQEDLRKEMEQLVLDKKQEETAVLEEDSADWEKELQQELQEYEVVTESEKRDENWDKEIEKMLQEEN

SEQ ID NO: 4126 - DNA, 2045 bp, Homo sapiens
gagattctgtgccccttgtcgggccgcttgtttggctgctgccgtcacctcatggcgacgcgggtagaggaggcagcgcggggaagaggcggcggcgccgaagaggcgactgaggccggacggggcggacggcgacgcagcccgcggcagaagtttgaaattggcacaatggaagaagctggaatttgtgggctaggggtgaaagcagatatgttgtgtaactctcaatcaaatgatattcttcaacatcaaggctcaaattgtggtggcacaagtaacaagcattcattggaagaggatgaaggcagtgactttataacagagaacaggaatttggtgagcccagcatactgcacgcaagaatcaagagaggaaatccctgggggagaagctcgaacagatccccctgatggtcagcaagattcagagtgcaacaggaacaaagaaaaaactttaggaaaagaagttttattactgatgcaagccctaaacaccctttcaaccccagaggagaagctggcagctctctgtaagaaatatgctgatcttctggaggagagcaggagtgttcagaagcaaatgaagatcctgcagaagaagcaagcccagattgtgaaagagaaagttcacttgcagagtgaacatagcaaggctatcttggcaagaagcaagctagaatctctttgcagagaacttcagcgtcacaataagacgttaaaggaggaaaatatgcagcaggcacgagaggaagaagaacgacgtaaagaagcaactgcacatttccagattaccttagatgaaattcaagcccagctggagcagcatgacatccacaacgccaaactccgacaggaaaacattgagctgggggagaagctaaagaagctcatcgaacagtacgcactgagggaagagcacattgataaggtgttcaaacgtaaggaactgcaacagcagctcgtggatgccaaactgcagcaaacgacacaactgataaaagaagctgatgaaaaacatcagagagagagagagtttttattaaaagaagcgacagaatcgaggcacaaatacgaacaaatgaaacagcaggaagtacaactaaaacagcagctttctctttatatggataagtttgaagaattccagactaccatggcaaaaagcaatgaactgtttacaaccttcagacaggaaatggaaaagatgacaaagaaaattaaaaaactggaaaaagaaacaataatttggcgtaccaaatgggaaaacaataataaagcacttctgcaaatggctgaagagaaaacagtccgtgataaagagtacaaggcccttcaaataaaactggaacggttagagaagctgtgcagggctcttcaaacagaaaggaatgagctcaatgagaaggtggaagtcctgaaagagcaggtatccatcaaagcggccatcaaagcggcgaacagggatttagcaacacctgtgatgcagccctgtactgccctggattctcacaaggagctgaacacttcctcgaaaagagccctgggagcgcacctggaggctgagcccaagagtcagagaagcgctgtgcaaaagcccccgtccacaggctctgctccggccatcgagtcggttgactaagatgaggtgtgatcactgtattgagagatatattttgtgtataactttctctgttagtagttaactattggttttgtggtgaaaattttcttactttttctaccatatctgtattttcttagaactactggacttatgtggtacaggaggctgcttagcagttttgaatagtttaatctataaattttcctcagctgtgttgcacatcagcctcgttctccctccactggaatgcatgtgttcactgccttgtcctttctctccctgctccttgcacattatcatcctaatgaaaatttcactgacagggccgaccattacaagggaactttgttctgacgatggttccttgatgtgaaaacaatattaatttaaacgtcttagcccccccccccataatattattc

SEQ ID NO: 4127 - protein, 528 aa, Homo sapiens
MATRVEEAARGRGGGAEEATEAGRGGRRRSPRQKFEIGTMEEAGICGLGVKADMLCNSQSNDILQHQGSNCGGTSNKHSLEEDEGSDFITENRNLVSPAYCTQESREEIPGGEARTDPPDGQQDSECNRNKEKTLGKEVLLLMQALNTLSTPEEKLAALCKKYADLLEESRSVQKQMKILQKKQAQIVKEKVHLQSEHSKAILARSKLESLCRELQRHNKTLKEENMQQAREEEERRKEATAHFQITLDEIQAQLEQHDIHNAKLRQENIELGEKLKKLIEQYALREEHIDKVFKRKELQQQLVDAKLQQTTQLIKEADEKHQREREFLLKEATESRHKYEQMKQQEVQLKQQLSLYMDKFEEFQTTMAKSNELFTTFRQEMEKMTKKIKKLEKETIIWRTKWENNNKALLQMAEEKTVRDKEYKALQIKLERLEKLCRALQTERNELNEKVEVLKEQVSIKAAIKAANRDLATPVMQPCTALDSHKELNTSSKRALGAHLEAEPKSQRSAVQKPPSTGSAPAIESVD

SEQ ID NO: 4128 - DNA, 1946 bp, Homo sapiens
gcctcgtcagctgcctgggcgggctgggaggcgcgggttgaaaagtctcgttccaagtttggagagagagagaagagcgcctcagacctcggtacccgcgagcggggaggaggcaggaaagaaggacgcggcgtctggggagcacccaggcagcaagacggggcccgggctttcgacagtggggagtgtgacgcgcttgggaaaggcaggagcgccagcggtcgggctgctcttggctaacgagaggagtccgaggcggcggcgaggggcgaacgacccgacgcaagatggcgagtaaagagatgtttgaagatactgtggaggagcgtgtcatcaatgaagaatataaaatctggaagaagaatacaccgtttctatatgacctggttatgacccatgctcttcagtggcccagtcttaccgttcagtggcttcctgaagtgactaaacctgaaggaaaagattatgcccttcattggctagtgctggggactcatacgtctgatgagcagaatcatctggtggttgctcgagtacatattcccaatgatgatgcacagtttgatgcttcccattgtgacagtgacaagggtgaatttggtggctttggttctgtaacaggaaaaattgaatgtgaaattaaaatcaatcacgaaggagaagtaaaccgtgctcgttacatgccgcagaatcctcacatcattgctacaaaaacaccatcttctgatgtgttggtttttgactatacaaaacaccctgctaaaccagacccaagtggagaatgtaatcctgatctcagattaagaggtcaccagaaggaaggctatggtctctcctggaattcaaatttgagtggacatctcctaagtgcatctgatgaccatactgtttgtctgtgggatataaacgcaggaccaaaagaaggcaaaattgtggatgctaaagccatctttactggccactcagctgttgtagaggatgtggcctggcacctgctgcacgagtcattgtttggatctgttgctgatgatcagaaacttatgatatgggacaccaggtccaataccacctccaagccgagtcacttggtggatgcgcacactgccgaagtcaactgcctctcattcaatccctacagcgaatttattctagccaccggctctgcggataagaccgtagctttatgggatctgcgtaacttaaaattaaaactccataccttcgaatctcataaagatgaaattttccaggtccactggtctccacataatgaaactattctggcttcaagtggtactgaccgccgcctgaatgtgtgggatttaagtaaaattggggaagaacaatcagcagaagatgcagaagatgggcctccagaactcctgtttattcatggaggacacactgctaagatttcagattttagctggaaccccaatgagccttgggtcatttgctcagtgtctgaggataacatcatgcagatatggcaaatggctgaaaatatttacaatgatgaagagtcagatgtcacgacatccgaactggagggacaaggatcttaaacccaaagtacgagaaatgtttctgttgaatgtaatgctacatgaatgcttgatttatcaagcgccaaaaaggcattgtatagtaggaaatgtaagtggggtggcttatggcttctttatcctctgattctagcactttcaagtgagctgttgcgtactgtatcatattgtagctattagggaagagaagaatgttgcttaagaaagaacatcaccattgattttaaatacaagtagcagggtattgcctttgattcaactgttttaagtcctcattttctcaaactaagtgcttgctgttcccaaatatgcaagaataacttttacactttttccttccaacacttcttgattggctttgcagaaataaagttttaaaat

SEQ ID NO: 4129 - protein, 425 aa, Homo sapiens
MASKEMFEDTVEERVINEEYKIWKKNTPFLYDLVMTHALQWPSLTVQWLPEVTKPEGKDYALHWLVLGTHTSDEQNHLVVARVHIPNDDAQFDASHCDSDKGEFGGFGSVTGKIECEIKINHEGEVNRARYMPQNPHIIATKTPSSDVLVFDYTKHPAKPDPSGECNPDLRLRGHQKEGYGLSWNSNLSGHLLSASDDHTVCLWDINAGPKEGKIVDAKAIFTGHSAVVEDVAWHLLHESLFGSVADDQKLMIWDTRSNTTSKPSHLVDAHTAEVNCLSFNPYSEFILATGSADKTVALWDLRNLKLKLHTFESHKDEIFQVHWSPHNETILASSGTDRRLNVWDLSKIGEEQSAEDAEDGPPELLFIHGGHTAKISDFSWNPNEPWVICSVSEDNIMQIWQMAENIYNDEESDVTTSELEGQGS

SEQ ID NO: 4130 - DNA, 2285 bp, Homo sapiens
ccgggaggaagcggccgcgcggcagctgcggggcgtgggggtggtggtggcggcggcggtggtggcggcggcggcggcggcggcagctgaggccgaggaggcggtggctgtggcggacgcagcagcaccccagctagggatagggctccgccgcgcccccttgctggccccatggaggcggcagcggcggcggcggcggcggcagcggcagcggcagcggcgggcgggggctgtggctccgggccgccgccgctgctgctgagcgagggcgagcagcagtgctactccgagctcttcgcgcgctgtgccggcgccgcgggcgggggccccgggtctgggccccccgaggccgccagagtcgcccccggcacggccactgcggccgccggccccgtggctgacctgtttcgggcatcgcagctgcccgccgagacgctgcaccagatcacagaactgtgtggtgcaaagcgggttggttattttggtccaacacagttttacattgccctgaaattaattgctgcagcacaatctggcctcccggtacggatagagagtattaaatgtgaattgcctctgcctcgctttatgatgtcaaagaatgatggtgagatacgatttgggaacccagctgagctgcatggaactaaggttcagattccatatttaactacagaaaaaaattccttcaaaagaatggacgatgaggataaacagcaggaaacacagtctcccacgatgtcacccctcgcctcccctccttcttccccgcctcattaccagagggtgcccttgagccatggctacagcaaactgcggagcagcgcagaacagatgcatccagcaccttatgaagctaggcagccccttgtccagcccgagggatcctcatcagggggcccaggaaccaagccccttcggcatcaggcttcccttatccggtccttttcagtggagagggaactacaggataacagcagttaccccgacgaaccctggaggataacagaagaacagcgcgagtactatgtcaatcagttccgatcccttcagccagacccaagctctttcatttcaggttctgtggccaagaacttcttcaccaaatcaaagctttccattccagaactctcctatatatgggagcttagtgatgctgactgtgatggagccctgaccctgcctgagttctgtgctgcgtttcatctcattgtggctcggaagaacggctacccattgcctgagggcctccctccaactctgcagccagaatacctgcaggcagcttttcctaagcccaaatgggactgtcaattatttgattcttattctgagtcactgccggcaaatcaacaacctcgtgacttgaatcggatggagaagacatctgttaaagacatggctgaccttcctgtccctaaccaggatgtaactagtgatgacaaacaagctttgaaaagtactatcaatgaagccttaccaaaggacgtgtctgaggatccagcaactcccaaggattccaacagtctcaaagcaagaccaagatccagatcttactctagcacctccatagaagaggccatgaaaaggggcgaggaccctcccaccccgccacctcggccacagaaaacccattccagagcctcctccttggatctgaataaagtcttccagcccagtgtgccagctaccaagtcaggattgttacccccaccacctgcgctccctccaagaccttgtccatcacagtctgaacaagtgtcggaggccgagttactcccacagctgagcagagccccatcccaggctgcagaaagtagtccagcaaagaaggatgtactgtattctcagccaccatcaaagcccattcgtaggaaattcagaccagaaaaccaagctacagaaaaccaagagccttccactgctgcaagtgggccagcttctgcggcaaccatgaaaccgcatccaacagtccaaaagcagtcttccaaacagaagaaggccattcaaactgctatccgcaaaaataaagaggcaaacgcagtgctggctcggctgaacagtgagctccagcagcagctcaaggaggttcatcaagaacgaattgcattggaaaaccaattggaacaacttcgtccggtcactgtgttgtgacccccccatggttcaagtgacagtgggtgaccttgtctgccaagatctttcttttgaatgttttgaacccaactacttgtcatagatgtttgactgtgtcaaaagctgtgagcagcaaaatataatccata

SEQ ID NO: 4131 - protein, 521 aa, Homo sapiens
MMSKNDGEIRFGNPAELHGTKVQIPYLTTEKNSFKRMDDEDKQQETQSPTMSPLASPPSSPPHYQRVPLSHGYSKLRSSAEQMHPAPYEARQPLVQPEGSSSGGPGTKPLRHQASLIRSFSVERELQDNSSYPDEPWRITEEQREYYVNQFRSLQPDPSSFISGSVAKNFFTKSKLSIPELSYIWELSDADCDGALTLPEFCAAFHLIVARKNGYPLPEGLPPTLQPEYLQAAFPKPKWDCQLFDSYSESLPANQQPRDLNRMEKTSVKDMADLPVPNQDVTSDDKQALKSTINEALPKDVSEDPATPKDSNSLKARPRSRSYSSTSIEEAMKRGEDPPTPPPRPQKTHSRASSLDLNKVFQPSVPATKSGLLPPPPALPPRPCPSQSEQVSEAELLPQLSRAPSQAAESSPAKKDVLYSQPPSKPIRRKFRPENQATENQEPSTAASGPASAATMKPHPTVQKQSSKQKKAIQTAIRKNKEANAVLARLNSELQQQLKEVHQERIALENQLEQLRPVTVL

SEQ ID NO: 4132 - DNA, 2142 bp, Homo sapiens
gcagaaggtgacgggaaacaggccgcagacctgaacttccaaccgtatgtaggcgagaagccggtgccgatactcccactatcccacaatgtcccactgggccccagagtggaagagggcggaggctaatccaagagaccttggggccagctgggatgtcaggggcagcagaggcagtggctggagtggccccttcggccatcagggaccgagagcagcaggctcccgtgaaccaccactctgctttaaaataaagaacaatatggttggtgtggtcattggttacagtggatcaaaaataaaagatctacaacattcgacaaacactaaaatacagatcataaacggggaatctgaagcaaaagtcagaatttttggcaatagggaaatgaaagcaaaggccaaagcggctatagaaacacttattagaaaacaagaaagctacaactcagaatccagtgtggataatgctgcatcccaaacccctattggaagaaatctaggcagaaatgacattgttggagaagctgagccattgtcaaattgggatcgcattagggcagcagtcgtggagtgcgaaaagagaaaatgggcagatctaccaccagttaagaaaaacttttacatagaatccaaagcaacaagctgcatgtctgaaatgcaggtgattaactggagaaaggaaaatttcaacataacgtgtgatgacttgaaaagtggtgaaaagcgtctcattccaaaaccaacttgcaggtttaaagacgcttttcagcaataccctgatcttctgaaaagcataataagggtagggattgtaaagccaacgccaattcagtcacaggcatggccaattattctacaaggaatagatcttatagtagttgcacaaaccggaacagggaaaacattgtcctatctaatgcctgggtttattcatcttgattctcaaccaatatctagagagcaaaggaatgggcctgggatgctagtccttacacccactagagagttggctcttcacgtggaagctgaatgttcaaagtattcatataaaggtctcaaaagcatttgcatatatggtggtagaaacagaaatggacaaatagaagacattagcaaaggtgtagatatcattattgcaactcctgggaggctgaatgacctacaaatgaataactctgtcaacctaagaagcataacctacttggttatagatgaggcagataaaatgctggatatggaatttgaaccccagataaggaagattttattagatgtgcgcccagaccgacagactgttatgacaagtgcaacttggccagatactgtacgtcaactagcactttcttatttgaaagatcctatgattgtttatgttggtaatctgaatctagtggctgtaaatacagtgaagcaaaatataattgttaccacagaaaaagaaaaacgagctctcacccaagaattcgtagagaacatgtcacccaacgacaaagtcatcatgtttgtcagccaaaaacatattgctgatgacttgtcaagcgacttcaatatccaaggcatatctgcagaatcattacatggcaacagtgaacagagtgatcaagagcgagcagtagaggactttaaaagcggaaacataaagatactgattacaactgatatagtatcccgaggtcttgatcttaatgatgtcacacatgtatataattatgatttcccaaggaatattgacgtatatgtacacagagtagggtacattggacggacaggaaagactggcacatcagttaccctcatcactcagagagattcgaaaatggccggtgaattgattaaaattctggacagagcaaatcagagtgttccggaagatcttgtagtaatggctgagcaatacaagttaaatcaacaaaagaggcacagagaaacacgatcaagaaaacctggacaaagacgcaaggagttttattttttaagttgaaaagttgtaccaggctactggaagattccaggcatgttaaagatatgcagtattgaatatatgtaaggaagtattggaaacatactagccatttgaagacataactaattcttaaataatactgctaaactttcaaaaaaaaaaaaaaaaaaaaaaaa

SEQ ID NO: 4133 - protein, 631 aa, Homo sapiens
MSHWAPEWKRAEANPRDLGASWDVRGSRGSGWSGPFGHQGPRAAGSREPPLCFKIKNNMVGVVIGYSGSKIKDLQHSTNTKIQIINGESEAKVRIFGNREMKAKAKAAIETLIRKQESYNSESSVDNAASQTPIGRNLGRNDIVGEAEPLSNWDRIRAAVVECEKRKWADLPPVKKNFYIESKATSCMSEMQVINWRKENFNITCDDLKSGEKRLIPKPTCRFKDAFQQYPDLLKSIIRVGIVKPTPIQSQAWPIILQGIDLIVVAQTGTGKTLSYLMPGFIHLDSQPISREQRNGPGMLVLTPTRELALHVEAECSKYSYKGLKSICIYGGRNRNGQIEDISKGVDIIIATPGRLNDLQMNNSVNLRSITYLVIDEADKMLDMEFEPQIRKILLDVRPDRQTVMTSATWPDTVRQLALSYLKDPMIVYVGNLNLVAVNTVKQNIIVTTEKEKRALTQEFVENMSPNDKVIMFVSQKHIADDLSSDFNIQGISAESLHGNSEQSDQERAVEDFKSGNIKILITTDIVSRGLDLNDVTHVYNYDFPRNIDVYVHRVGYIGRTGKTGTSVTLITQRDSKMAGELIKILDRANQSVPEDLVVMAEQYKLNQQKRHRETRSRKPGQRRKEFYFLS

SEQ ID NO: 4134 - DNA, 2682 bp, Homo sapiens
atctccatcctgctcggcgccagcttcagccgctaccaggtcgaggagagcgtggagcacctgctggcgccccagcacagcctggccaagatcgagcgcaacctcgttaacagcctcttcccggtcaaccgctccaagcaccgtctctactcggacctgcagacccccgggcgctacggccgggtcatcgtcacctccttccagaaagccaacatgctggaccagcatcacaccgacctgatcttaaagttgcatgctgctgtcaccaagatccaggttccaaggcctggttttaattacacgtttgcccatatatgtatcctgaataatgataagacttgcatcgtggatgacatagtgcacgtcctggaagagctaaagaatgctcgggccaccaatcggaccaattttgctatcacatacccaatcacccacttaaaggacgggagggctgtgtacaatgggcaccagcttgggggcgtcactgtgcacagcaaagaccgggtgaaatctgcagaggccatccagctcacctactacctgcagtcaatcaacagtctcaatgacatggtggctgagaggtgggagtccagcttctgcgacactgtcagactgtttcagaaatccaacagcaaagtcaaaatgtacccttacacgtcctcctcactgagggaagatttccagaagaccagccgcgtatcagaacgttacctggtcaccagcctgattctggtggttaccatggccatcctgtgctgctctatgcaggactgcgtccgcagcaaaccctggctaggcctgctcggattggtgaccataagcctggccactctcactgcagccgggatcatcaatcttactggtgggaaatataattccaccttcctgggagtccctttcgtcatgctaggtcatggattatatgggacttttgaaatgttatcctcctggaggaaaactagagaagaccaacatgttaaagagagaactgcagcagtctatgcagactccatgctctccttttctctcaccactgccatgtacctggtcacctttggcataggggccagccctttcacgaacattgaggcagccaggattttctgctgcaattcctgtattgcaatcttcttcaactacctctatgtactctcgttttatggttccagcctagtgttcactggctacatagaaaacaattaccagcatagtatcttctgtagaaaagtcccaaagcctgaggcattgcaggagaagccggcatggtacaggtttctcctgacggccagattcagtgaggacacggctgaaggcgaggaagcgaacacttacgagagtcacctattggtatgtttcctcaaacgctattactgtgactggataaccaacacctatgtcaagccttttgtagttctcttttaccttatttatatttcctttgccttaatgggctatctgcaggtcagtgaagggtcagaccttagtaacattgtagcaaccgcgacacaaaccattgagtacactactgcccagcaaaagtacttcagcaactacagtcctgtgattgggttttacatatatgagtctatagaatactggaacactagtgtccaagaagatgttctagaatacaccaaggggtttgtgcggatatcccggtttgagagctatttaaattaccttcggaaactcaatgtatccactggcttgcctaagaaaaatttcacagacatgttgaggaattcctttctgaaagcccctcaattttcacattttcaagaggacatcatcttctctaaaaaatacaatgatgaggtcgatgtagtggcctccagaatgtttttggtggccaagaccatggaaacaaacagagaagaactctatgatctcttggaaaccctgaggagactttctgtcacctccaaggtgaagttcatcgtcttcaatccgtcctttgtatacatggatcgatatgcctcctctctgggagcccccctgcacaactcctgcatcagtgctttgttcctgctcttcttctcggcattcctggtggcagattcactgattaacgtctggatcactctcacagttgtgtccgtggagtttggagtgataggtttcatgacattatggaaagtagaactggactgcatttctgtgctatgcttaatttatggaattaattacacaattgacaattgtgctccaatgttatccgcatttgttctgggcaaggatttcacaagaactaaatgggtaaaaaatgccctggaagtgcatggggtagctattttacagagttacctctgctatattgttggtctgattcctcttgcagctgtgccttcaaatctgacctgtacactgttcaggtgcttgtttttaatagcatttgtcaccttctttcactgctttgccattttacctgtgatactgactttcctgccaccctctaagaaaaaaaggaaagagaagaaaaatcctgagaaccgggaggaaattgagtgtgtagaaatggtagatatcgatagtacccgtgtggttgaccaaattacaacagtgtgataatgtctgcttggcatattttcaccttaggtcttatcaagaccaaagagattatgttaatgaaacaattaaattcaaagttcttcccttttttaaagataggaaacaggcattgcc

SEQ ID NO: 4135 - protein, 783 aa, Homo sapiens
MLDQHHTDLILKLHAAVTKIQVPRPGFNYTFAHICILNNDKTCIVDDIVHVLEELKNARATNRTNFAITYPITHLKDGRAVYNGHQLGGVTVHSKDRVKSAEAIQLTYYLQSINSLNDMVAERWESSFCDTVRLFQKSNSKVKMYPYTSSSLREDFQKTSRVSERYLVTSLILVVTMAILCCSMQDCVRSKPWLGLLGLVTISLATLTAAGIINLTGGKYNSTFLGVPFVMLGHGLYGTFEMLSSWRKTREDQHVKERTAAVYADSMLSFSLTTAMYLVTFGIGASPFTNIEAARIFCCNSCIAIFFNYLYVLSFYGSSLVFTGYIENNYQHSIFCRKVPKPEALQEKPAWYRFLLTARFSEDTAEGEEANTYESHLLVCFLKRYYCDWITNTYVKPFVVLFYLIYISFALMGYLQVSEGSDLSNIVATATQTIEYTTAQQKYFSNYSPVIGFYIYESIEYWNTSVQEDVLEYTKGFVRISRFESYLNYLRKLNVSTGLPKKNFTDMLRNSFLKAPQFSHFQEDIIFSKKYNDEVDVVASRMFLVAKTMETNREELYDLLETLRRLSVTSKVKFIVFNPSFVYMDRYASSLGAPLHNSCISALFLLFFSAFLVADSLINVWITLTVVSVEFGVIGFMTLWKVELDCISVLCLIYGINYTIDNCAPMLSAFVLGKDFTRTKWVKNALEVHGVAILQSYLCYIVGLIPLAAVPSNLTCTLFRCLFLIAFVTFFHCFAILPVILTFLPPSKKKRKEKKNPENREEIECVEMVDIDSTRVVDQITTV

SEQ ID NO: 4136 - DNA, 3624 bp, Homo sapiens
cagtactgtacaaggaaaaccccgtcggatctgttattgcgggatacttgtgaaatatacataggattctttcttatggctgcatcccggatctggaaattttacttggggaccaggaggatttgaaaggctgcatgtactcagaagatttgcaagcaacactccaattcttgtcatagagctcgcagacttctcacttatcggcttttttccttccttattttttaagaattattcttattttcccctctctttttctgctctctcctctctcagtctctccttttctatctgcctcttcatttttctcctagtctgtttttttttttcctgctctgcacctggattgtatcttcagcaaacaatcgggcactttgagaactaactggagacagtcttgtagggaagatctgtatggaattatctgcttttatggtgaacttggcatttgtgaatgggaatcttgttcacaatattaattgctagcaaaaacaagaaaaagaacacaggagtaaaacgtggatttttctgaatacgcattgtgatgaccagcaattaccttaccgactaatatccagaggagaataatttggaagactgttgtggggaacagcctttaagagctggaagatgaaagctccgattccacacttgattctcttatacgctacttttactcagagtttgaaggttgtgaccaaaagaggctccgccgatggatgcactgactggtctatcgatatcaagaaatatcaagttttggtgggagagcctgttcgaatcaaatgtgcactcttttatggttatatcagaacaaattactcccttgcccaaagtgctggactcagtttgatgtggtacaaaagttctggtcctggagactttgaagagccaatagcctttgacggaagtagaatgagcaaagaagaagactccatttggttccggccaacattgctacaggacagtggtctctacgcctgtgtcatcagaaactccacttactgtatgaaagtatccatctcactgacagtgggtgaaaatgacactggactctgctataattccaagatgaagtattttgaaaaagctgaacttagcaaaagcaaggaaatttcatgccgtgacatagaggattttctactgccaaccagagaacctgaaatcctttggtacaaggaatgcaggacaaaaacatggaggccaagtattgtattcaaaagagatactctgcttataagagaagtcagagaagatgacattggaaattatacctgtgaattaaaatatggaggctttgttgtgagaagaactactgaattaactgttacagcccctctgactgataagccacccaagcttttgtatcctatggaaagtaaactgacaattcaggagacccagctgggtgactctgctaatctaacctgcagagctttctttgggtacagcggagatgtcagtcctttaatttactggatgaaaggagaaaaatttattgaagatctggatgaaaatcgagtttgggaaagtgacattagaattcttaaggagcatcttggggaacaggaagtttccatctcattaattgtggactctgtggaagaaggtgacttgggaaattactcctgttatgttgaaaatggaaatggacgtcgacacgccagcgttctccttcataaacgagagctaatgtacacagtggaacttgctggaggccttggtgctatactcttgctgcttgtatgtttggtgaccatctacaagtgttacaagatagaaatcatgctcttctacaggaatcattttggagctgaagagctcgatggagacaataaagattatgatgcatacttatcatacaccaaagtggatcctgaccagtggaatcaagagactggggaagaagaacgttttgcccttgaaatcctacctgatatgcttgaaaagcattatggatataagttgtttataccagatagagatttaatcccaactggaacatacattgaagatgtggcaagatgtgtagatcaaagcaagcggctgattattgtcatgaccccaaattacgtagttagaaggggctggagcatctttgagctggaaaccagacttcgaaatatgcttgtgactggagaaattaaagtgattctaattgaatgcagtgaactgagaggaattatgaactaccaggaggtggaggccctgaagcacaccatcaagctcctgacggtcattaaatggcatggaccaaaatgcaacaagttgaactccaagttctggaaacgtttacagtatgaaatgccttttaagaggatagaacccattacacatgagcaggctttagatgtcagtgagcaagggccttttggggagctgcagactgtctcggccatttccatggccgcggccacctccacagctctagccactgcccatccagatctccgttctacctttcacaacacgtaccattcacaaatgcgtcagaaacactactaccgaagctatgagtacgacgtacctcctaccggcaccctgcctcttacctccataggcaatcagcatacctactgtaacatccctatgacactcatcaacgggcagcggccacagacaaaatcgagcagggagcagaatccagatgaggcccacacaaacagtgccatcctgccgctgttgccaagggagaccagtatatccagtgtgatatggtgacagaaaagcaagggacatcccgtccctgggaggttgagtggaatctgcagtccagtgcctggaactaaatcctcgactgctgctgttaaaaaacatgcattagaatctctagaacacgaggaaaaacagggtcttgtacatatgttttttggaatttctttgtagcatcagtgtcctcctgttttaccatgtcttttaccattacattttttgactttgttttatatgtcgttggaatttgtaaatttacattttttttaaagaagagactgatgtgtagatagaaaaccctttttttgcttcattagtttagttttagaatgggtttttattttatttccttttttaaaattttactttgcttttaacatttccttggggtgcttggacaaatctatccgatgggacaaggagcaccggattctttctcgggttctgcctagcatcaactgggccacgtcggccttcagagaacagtgcaacaaatgccagcattgccattcgggggaaaaaaaaaaaaaaaaaaaaaagatgagaagaacacttgttcataggagggccccaccagtcagagccctgaatctcttccttgtcccacctcattccccacctctacctttctaatggcggcatgatgtgtaaactctgtgcaggggtgggggcgggtctaactgtcttaacattcaagtcactgctcttcagaatacactctagacccaaaggtgtgctaatcacttcacagtgaccactacagagtactaagaagagaagatcaagggcatgaaattggggaagagtgttatttccgttttttaaatgagttgatgtacccttatatatatatacatatatatataaatataaatatatataaaaacaacaaaacaaaacaaaaaaagaaaa

SEQ ID NO: 4137 - protein, 696 aa, Homo sapiens
MKAPIPHLILLYATFTQSLKVVTKRGSADGCTDWSIDIKKYQVLVGEPVRIKCALFYGYIRTNYSLAQSAGLSLMWYKSSGPGDFEEPIAFDGSRMSKEEDSIWFRPTLLQDSGLYACVIRNSTYCMKVSISLTVGENDTGLCYNSKMKYFEKAELSKSKEISCRDIEDFLLPTREPEILWYKECRTKTWRPSIVFKRDTLLIREVREDDIGNYTCELKYGGFVVRRTTELTVTAPLTDKPPKLLYPMESKLTIQETQLGDSANLTCRAFFGYSGDVSPLIYWMKGEKFIEDLDENRVWESDIRILKEHLGEQEVSISLIVDSVEEGDLGNYSCYVENGNGRRHASVLLHKRELMYTVELAGGLGAILLLLVCLVTIYKCYKIEIMLFYRNHFGAEELDGDNKDYDAYLSYTKVDPDQWNQETGEEERFALEILPDMLEKHYGYKLFIPDRDLIPTGTYIEDVARCVDQSKRLIIVMTPNYVVRRGWSIFELETRLRNMLVTGEIKVILIECSELRGIMNYQEVEALKHTIKLLTVIKWHGPKCNKLNSKFWKRLQYEMPFKRIEPITHEQALDVSEQGPFGELQTVSAISMAAATSTALATAHPDLRSTFHNTYHSQMRQKHYYRSYEYDVPPTGTLPLTSIGNQHTYCNIPMTLINGQRPQTKSSREQNPDEAHTNSAILPLLPRETSISSVIW

SEQ ID NO: 4138 - DNA, 1626 bp, Homo sapiens
acttccgctttggaggcgaggacccgagcgagtgtagggggtgcggcgtctggtcagccaggggtgaattctcaggactggtcggcagtcaagccatcatgcctcgtggtcagaagagtaagctccgtgcccgtgagaaacgccgcaaggcccgagatgagacccggggtctcaatgttcctcaggtcactgaagcagaggaagaagaggccccctgctgttcctcttctgtttctgggggtgctgcttcaagctctcctgctgctggcattccccagaagcctcagagagccccaaccactgccgctgctgcggctgcgggtgtttcatccacaaaatctaaaaaaggtgccaagagccaccaaggtgagaaaaatgcaagttcctcccaggcctcaacatctactaagagcccaagcgaagatcctctaaccaggaagtcagggtcgttggtgcagttcctgttgtacaagtataaaataaaaaagtccgttacaaagggagaaatgctgaaaattgttggcaaaaggttcagggagcacttccctgagatcctcaagaaagcctctgagggcctcagtgttgtctttggccttgagctgaataaagtcaaccccaacggccacacttacaccttcatcgacaaggtagacctcactgatgaggaatccctgctcagttcctgggactttcccaggagaaagcttctgatgcctctcctgggtgtgatcttcttaaatggcaactcagctactgaggaagagatctgggaattcctgaatatgttgggagtctatgatggagaggagcactcagtctttggggaaccctggaagctcatcaccaaagatctggtgcaggaaaaatatctggagtacaagcaggtgcccagcagtgatcccccacgctttcaattcctgtggggtccgagagcctatgctgaaaccagcaagatgaaagtcctggagtttttggccaaggtaaatggtaccaccccctgtgccttcccaacccattacgaagaagctttgaaagatgaagagaaagccggagtctgagccagagttgtagccaggccttgcactactgccatagccaatcaatctcccaaagccaagtttacctgctgttctcacccccaatgaggtcttaggcagattctttactttgtaattcaaaaggcctgttaacctttgttcttgttatgcatgaataacttgttgactttttttttttctctttttcaactagtgtttcaacaggtttatttagattcagaatgtaaatttacaaatgatatagatcaccctgttattgctgtttttcagggacagtagaaagtgttttgttttttgagtgaaacaacttattaataaaaatccttaaatcacttttgtaatccaggacaagaaaatgtggcattagagtagaaatatctttggaaatgtgaaagaccccatagtgaaatatttgggatcagaagccagaggggtaaaagtggtcaattcttggtttacttcatttaatctttcttttcataaagatacatacctggatttgtttatgttattcaagaatgtgtgagaaattaaaccatagttagttaaaaaaaaaaaaaaaaaaaaa

SEQ ID NO: 4139 - protein, 319 aa, Homo sapiens
MPRGQKSKLRAREKRRKARDETRGLNVPQVTEAEEEEAPCCSSSVSGGAASSSPAAGIPQKPQRAPTTAAAAAAGVSSTKSKKGAKSHQGEKNASSSQASTSTKSPSEDPLTRKSGSLVQFLLYKYKIKKSVTKGEMLKIVGKRFREHFPEILKKASEGLSVVFGLELNKVNPNGHTYTFIDKVDLTDEESLLSSWDFPRRKLLMPLLGVIFLNGNSATEEEIWEFLNMLGVYDGEEHSVFGEPWKLITKDLVQEKYLEYKQVPSSDPPRFQFLWGPRAYAETSKMKVLEFLAKVNGTTPCAFPTHYEEALKDEEKAGV

SEQ ID NO: 4140 - DNA, 6507 bp, Homo sapiens
ctgggtctcaacggcagtgtctcctaccagatcgtgccgtcgcaggtgcgggacatgcctgtcttcacctatgtctccatcaatcccaactcaggcgacatctacgcgctgcgatcctttaaccacgagcagaccaaggcgttcgaattcaaggtgctggccaaggacggcggccttccctcattgcaaagcaacgctacggtgcgggtcatcatcctcgacgtcaacgacaacaccccggtcatcacggccccacctctgattaacggcactgccgaggtctacataccccgcaactctggcataggctacctggtgactgttgtcaaggcagaagactacgatgagggcgaaaatggccgagtcacctacgacatgaccgagggcgaccgcggcttctttgaaatagaccaggtcaatggcgaagtcagaaccacccgcaccttcggggagagctccaagtcctcctatgagcttatcgtggtggctcacgaccacggcaagacatctctctctgcctctgctctcgtcctaatctacttgtcccctgctctcgatgcccaagagtcaatgggctctgtgaacttgtccttgattttcattattgccctgggctccattgcgggcatcctctttgtaactatgatcttcgtggcaatcaagtgcaagcgagacaacaaagagatccggacctacaactgcagaattgctgagtactcctatgggcatcaaaagaaatcaagcaagaagaaaaaaatcagtaagaatgacatccgcctggtaccccgggatgtggaggagacagacaagatgaacgttgtcagttgctcttccctgacctcctccctcaactattttgactaccaccagcagacgctgcccctgggctgccgccgctctgagagcactttcctgaatgtggagaaccagaatacccgcaacaccagtgctaaccacatctaccatcactctttcaacagccaggggccccagcagcctgacctgattatcaacggtgcgcctctgcctgagactgaaaactattcttttgactccaactacgtgaatagccgagcccatttaatcaagagctccaccttcaaggacttagagggcaacagcctgaaggatagtggacatgaggagagtgaccaaactgacagtgagcatgatgtccagcggagcctgtattgtgatactgctgtcaacgatgtgctgaacaccagtgtgacctccatgggatctcagatgcctgatcatgatcagaatgaaggatttcattgccgggaagaatgccggattcttggccactctgacaggtgctggatgccccggaaccccatgcccatccgttccaagtcccctgagcatgtgaggaacatcatcgcgctgtctattgaagctactgctgctgatgtcgaggcttatgacgactgcggccccaccaaacggactttcgcaaccttcgggaaagatgtcagcgaccacccggctgaggagaggcctaccctgaaaggcaagaggactgtcgatgtgaccatctgcagccccaaggtcaacagcgttatccgggaggcaggcaatggctgtgaggcgattagccctgtcacctcccccctccacctcaagagctctctgcccaccaagccttccgtgtcttacaccattgccctggctcccccagcccgtgatctggagcagtatgtcaacaatgtcaacaatggccctactcgtccctctgaagctgagccccgtggagctgatagcgagaaagtcatgcatgaggtcagccccattctgaaggaaggtcgcaacaaagagtcccctggtgtgaagcgtctgaaggatatcgttctctaaaccagtctccaggaagaagagaaagaaaccacactggctagtgaagaagcaggagcttcttgttttaattgctcaccaatggttggttcttgagtggctatatttcagagcttttcctaaatgtattgtttataggtgattatcattctgtgacagtcccttgtttcaacaggcagcaggggtgttcagttggagcaaattagctttggcttgagttgttcatggggccttgatgttggggaaacagagacaaattcagttgtgaaaagtattatgtattaagtgtttgaatttatatatttttctatgtcaaaattataatataaattaccattgtttgtggaggattacatttaaaaaagcaaaaagtgaaaaaaaaaagctctggacatctttaataagctcgccactgttttttgtagtgtagacaagttaatggtcatttattgtgtactattcattgattcagtgatgtgaaattgagcccccaaaaggttgtttctgaagctcgagtacttcccaatgccgctactttgctgtggacacccctgctttaaaaacccttttgctagctgtgctattgttgtatttgatattgcaaattgctatgtgtgtggtgatggcaaaaggcttttaaaagttggtgttttctttttcttaaaaaaataataaaactacagacaaaaacaaagtgcaaacaactgagacagcaaatgaatgagcaacaccatgcatatagattgagtacttggagaatactcacgttttttaactcatgtagtgattgctcaccactttgcaaagtatttttcctgcctttcagtggtctgcccaggtccatgatagatcattgcagaaagtcatttttggataggctgctatctaatttgcagttgtcagaaatactgtgctgaaagttttatgacatccatcttttaaattttcaggccctgaacaggaaagttgctcctgaagttatgtttccaggcttagaaattccctctctccaatcatctaaaattgaagatgactgaatctattttaagatctaaattagcatctcttcagacacacacttcctgattcagtgtttcccaatcatgattagaattagactgcaaagcacgtcatgggctgggattgagaactccatgttgctctgtatcttaggcttatatacgtagggatagagtaagcagtacaaagtgtatattttggaaaagacaggtaacaggtaacagcatcgctaatccaattactgtgccttctaaacggagacactcagacacttgaactcatctttttatgactaatagttttttgattaaaaatgtgaacaagaaaatactaaaataaaaatcctttcgatttagccaactctttttgctgtaggctaggaatacaccctttttaaattaacacactgtagatcctttttttctgttttaacattcctctaactcccccatttatcttttgtctattaatattcactagccaacatagtatttttgcagcctaagagttcattatttaaaaataaactaaagaaatatgtcacctttgttctgccttggtcttaagagagttgtttctagagaaacaagttttatggttctgttttcatttgtttcattttttgaaattcaggaatacacagagagaaggcctagaggttagagcactagaatgcaaaagaggatttattttcttaagtttaggtagataagtcagctcttttgaatgttttacttatttttgcctgagttcctagctttacgcattactaggaatattttcttttacaggagggagaagggttttgagggagggggtgggtaaggcagtagggatggggttaggtaggggagaacatttctgaaaaagaacttataatgaagctacaaatccatccttatttcttattcagtgctgaatactacctcatgcaaaatattggtgtggctgcaaatttccctctgaagctgacacaattaaggatgaattaccataacatcttcatttttcctcatttcattgcctctcatacagttttctccctctgatttatttcattttggtagtggattttgaattaagtatttatttctctttgcaagtgactatttgattaacacattaaaaattttttaaaaatttcccctttaagttatgatggctgcctatagaatttagactgtttctcaccctgatccatcctgatattatgttattagctacgatttcaaggtcactttgaagtcagacttcacagttttctacaggtgtatttcttgctatgctcagtgggaaccagggagcagaaaagattgtggaaagtgggaacattaattgtcacgtggctgttgagccagagaggccactggctgccatgcctcttaccagccaagttttaaatggttagagtggcattggcattgattttgcttttctcttgggttttcttcatttcttttcataattcatcttcaagctatagatccatccttcttccctatccaaatactttgttctcagcgggcagtcagatttttttggcttccaaacctcactgagcatgttcagagaattcctctcattaaggaaatatttttccccacaattgtctgatgtatgagtcctctcagaagcacaagtgcatactaggaaggctttgtaaactggttttgtaggcaggctgtacctgcaaataggcattctgagcaaggatcctaaatttccctttggctcatgtcccccccgccccaccccaccttctcctttttggcatgtctggtgaaatgctacaaggttcacagggccaaatattctcccttttgttctctaaacatgttgcacacataaactcaagggagtgatttcggttcctaagtcctagggagttctattccatttattctgatgtcccttttaaggaggagttggtgttgaagtgtgacatgctttaatgataactgctttggcaattccccagacaggtatacttcttcatccaaaattgcacctaaggtgttcatttagacaaaattgttcgcttagtgatccactgatctctaatcagaaatatttttaaaaaatacaatttagatctctgaaaattggaaccactcaagagtatcatcttgatagtgttacttcagcatatgactgactgattttatgaagggagtttagctgacttttccctgtagccctatcatattaaaaacaaaaagtggtccacttgaagcagcaaggacaaagggcagtttagggagaggcagggtgaaggggatagctcgattgggcatccagagtggaaaaggattattattgtacataatagcagttctggctggaattccaatccactttctggggatcattttgatgttgaatgttcccccaaagcattctgacaagtttggtccacttggctctttaccccgggtaataagacccttattgactttgaaaaactggcataaatgagcttaagaaatccattgtatacagtcctagtgtttgccttcttggtaaaattacatttaaggatgtcatttcatgagtcaaattgtatctgctgacactgaagtgtattgagatgttgttctttagtttaagtatgtaacaaagtaatattcaaaggggatgtttgggggtggggctgggaccgggtggctttatattgataatgaaatattccagagcaaaacacattgtcctaatgaagttgttgcagctctcttcgttttcttgtgccgctggaattggcttgtgggtcacttgttgtgcaaaagtgaattaatttcaaataggaatcatattgcttttgtgaaacaaagaaaatttaccaccttgtctgatacatagattggaaggcgctcttggtaaagaataacccacaaacacctgatcttgattggaaagcattgtaggtcattagggaaaactgatgatgctgactgttgctccagccgtgttggcaattcaagatgaccttgttactaactgaaagttgctgtcaaccttagcaaacaaaccagctaacaccattacagcactggttaagtagatttttactggcactggctggcgttcagctgaggaaggctaggatacagactttaatgaccaagagccagactagctcgagctagaaatcagcaacaaatacctccttgtgctatttgaatgctaaggtattagttgcaataggcttacgccttcgctcctctagtgaggggaatgagcctgatgacactattactgtttacctgtcaaaccagggtggaaatttagagggatgcaagtacagtatgtctcattaagcagtctctgttgctgattatatgaagataaaattgttgtatatgctgatctgtatgttatgtacattttcacagtgattgaatcattgtaaaaagaaaaaagacaaaaaagaatcaccactgtctattttatgaagatgataaagcagctttattaaattattacagttatgtttcaaatggtgttatctgccacattgtttccttttatctggtggttctctgtttccccctttaaatgtgttttctctgcttcaaaaatttaatgcattttagtattaaaggctattatggaaaaagtaataaaaaaaaaaaa

SEQ ID NO: 4141 - protein, 601 aa, Homo sapiens
MPVFTYVSINPNSGDIYALRSFNHEQTKAFEFKVLAKDGGLPSLQSNATVRVIILDVNDNTPVITAPPLINGTAEVYIPRNSGIGYLVTVVKAEDYDEGENGRVTYDMTEGDRGFFEIDQVNGEVRTTRTFGESSKSSYELIVVAHDHGKTSLSASALVLIYLSPALDAQESMGSVNLSLIFIIALGSIAGILFVTMIFVAIKCKRDNKEIRTYNCRIAEYSYGHQKKSSKKKKISKNDIRLVPRDVEETDKMNVVSCSSLTSSLNYFDYHQQTLPLGCRRSESTFLNVENQNTRNTSANHIYHHSFNSQGPQQPDLIINGAPLPETENYSFDSNYVNSRAHLIKSSTFKDLEGNSLKDSGHEESDQTDSEHDVQRSLYCDTAVNDVLNTSVTSMGSQMPDHDQNEGFHCREECRILGHSDRCWMPRNPMPIRSKSPEHVRNIIALSIEATAADVEAYDDCGPTKRTFATFGKDVSDHPAEERPTLKGKRTVDVTICSPKVNSVIREAGNGCEAISPVTSPLHLKSSLPTKPSVSYTIALAPPARDLEQYVNNVNNGPTRPSEAEPRGADSEKVMHEVSPILKEGRNKESPGVKRLKDIVL

SEQ ID NO: 4142 - DNA, 1309 bp, Homo sapiens
tatctatgtaacaaatcgcagcacaggagtcccctgggctccctcaggctctggtatgacatatttgagccatataaattcagcttctcctctggcatctgttagccgactcacttgcaactccacctcagcagtggtctctcagtcctctcaaagcaaggaaagagtactgtgtgctgagagaccatggcaaagaatcctccagagaattgtgaagactgtcacattctaaatgcagaagcttttaaatccaagaaaatatgtaaatcacttaagatttgtggactggtgtttggtatcctgaccctaactctaattgtcctgttttgggggagcaagcacttctggccggaggtacccaaaaaagcctatgacatggagcacactttctacagcagtggagagaagaagaagatttacatggaaattgatcctgtgaccagaactgaaatattcagaagcggaaatggcactgatgaaacattggaagtacacgactttaaaaacggatacactggcatctacttcgtgggtcttcaaaaatgttttatcaaaactcagattaaagtgattcctgaattttctgaaccagaagaggaaatagatgagaatgaagaaattaccacaactttctttgaacagtcagtgatttgggtcccagcagaaaagcctattgaaaaccgagattttcttaaaaattccaaaattctggagatttgtgataacgtgaccatgtattggatcaatcccactctaatatcagtttctgagttacaagactttgaggaggagggagaagatcttcactttcctgccaacgaaaaaaaagggattgaacaaaatgaacagtgggtggtccctcaagtgaaagtagagaagacccgtcacgccagacaagcaagtgaggaagaacttccaataaatgactatactgaaaatggaatagaatttgatcccatgctggatgagagaggttattgttgtatttactgccgtcgaggcaaccgctattgccgccgcgtctgtgaacctttactaggctactacccatatccatactgctaccaaggaggacgagtcatctgtcgtgtcatcatgccttgtaactggtgggtggcccgcatgctggggagggtctaataggaggtttgagctcaaatgcttaaactgctggcaacatataataaatgcatgctattcaatgaatttctgcctatgaggcatctggcccctggtagccagctctccagaattacttgtaggtaattcctctcttcatgttctaataaacttctacattatcaaaaaa

SEQ ID NO: 4143 - protein, 317 aa, Homo sapiens
MAKNPPENCEDCHILNAEAFKSKKICKSLKICGLVFGILTLTLIVLFWGSKHFWPEVPKKAYDMEHTFYSSGEKKKIYMEIDPVTRTEIFRSGNGTDETLEVHDFKNGYTGIYFVGLQKCFIKTQIKVIPEFSEPEEEIDENEEITTTFFEQSVIWVPAEKPIENRDFLKNSKILEICDNVTMYWINPTLISVSELQDFEEEGEDLHFPANEKKGIEQNEQWVVPQVKVEKTRHARQASEEELPINDYTENGIEFDPMLDERGYCCIYCRRGNRYCRRVCEPLLGYYPYPYCYQGGRVICRVIMPCNWWVARMLGRV

SEQ ID NO: 4144 - DNA, 2069 bp, Homo sapiens
cgctcgtaagttttcggcagtttccggggagactcggggactccgcgtctcgctctctgtgttccaatcgcccggtgcggtggtgcagggtctcgggctagtcatggcgtccccgtctcggagactgcagactaaaccagtcattacttgtttcaagagcgttctgctaatctacacttttattttctggatcactggcgttatccttcttgcagttggcatttggggcaaggtgagcctggagaattacttttctcttttaaatgagaaggccaccaatgtccccttcgtgctcattgctactggtaccgtcattattcttttgggcacctttggttgttttgctacctgccgagcttctgcatggatgctaaaactgtatgcaatgtttctgactctcgtttttttggtcgaactggtcgctgccatcgtaggatttgttttcagacatgagattaagaacagctttaagaataattatgagaaggctttgaagcagtataactctacaggagattatagaagccatgcagtagacaagatccaaaatacgttgcattgttgtggtgtcaccgattatagagattggacagatactaattattactcagaaaaaggatttcctaagagttgctgtaaacttgaagattgtactccacagagagatgcagacaaagtaaacaatgaaggttgttttataaaggtgatgaccattatagagtcagaaatgggagtcgttgcaggaatttcctttggagttgcttgcttccaactgattggaatctttctcgcctactgcctctctcgtgccataacaaataaccagtatgagatagtgtaacccaatgtatctgtgggcctattcctctctacctttaaggacatttagggtcccccctgtgaattagaaagttgcttggctggagaactgacaacactacttactgatagaccaaaaaactacaccagtaggttgattcaatcaagatgtatgtagacctaaaactacaccaataggctgattcaatcaagatccgtgctcgcagtgggctgattcaatcaagatgtatgtttgctatgttctaagtccaccttctatcccattcatgttagatcgttgaaaccctgtatccctctgaaacactggaagagctagtaaattgtaaatgaagtaatactgtgttcctcttgactgttatttttcttagtagggggcctttggaaggcactgtgaatttgctattttgatgtagtgttacaagatggaaaattgattcctctgactttgctattgatgtagtgtgatagaaaattcacccctctgaactggctccttcccagtcaaggttatctggtttgattgtataatttgcaccaagaagttaaaatgttttatgactctctgttctgctgacaggcagagagtcacattgtgtaatttaatttcagtcagtcaatagatggcatccctcatcagggttgccagatggtgataacagtgtaaggccttgggtctaaggcatccacgactggaagggactactgatgttctgtgatacatcaggtttcagcacacaacttacatttctttgcctccaaattgaggcatttattatgatgttcatactttccctcttgtttgaaagtttctaattattaaatggtgtcggaattgttgtattttccttaggaattcagtggaacttatcttcattaaatttagctggtaccaggttgatatgacttgtcaatattatggtcaactttaagtcttagttttcgtttgtgcctttgattaataagtataactcttatacaataaatactgctttcctctaaaaagatcgtgtttaaattaacttgtagaaaatctgctggaatggttgttgttttccactgagaaagctaagccctacatttctattcagagtactgtttttagatgtgaaatataagcctgcggccttaactctgtattaaaaaaaatgtttttgtttaaaaaaaactgttcccataggtgcagcaaaccaccatggcacatgtatacctatgtaacaaacctgcacatt

SEQ ID NO: 4145 - protein, 245 aa, Homo sapiens
MASPSRRLQTKPVITCFKSVLLIYTFIFWITGVILLAVGIWGKVSLENYFSLLNEKATNVPFVLIATGTVIILLGTFGCFATCRASAWMLKLYAMFLTLVFLVELVAAIVGFVFRHEIKNSFKNNYEKALKQYNSTGDYRSHAVDKIQNTLHCCGVTDYRDWTDTNYYSEKGFPKSCCKLEDCTPQRDADKVNNEGCFIKVMTIIESEMGVVAGISFGVACFQLIGIFLAYCLSRAITNNQYEIV

SEQ ID NO: 4146 - DNA, 2133 bp, Homo sapiens
ctgagttcctctaatccctgtgttccttctcccccatctttctaaaacccttctctgagagaggaataactatagcttcagggataatatagctttaaggaaacttttggcagatgtggacgtcgtaacatctgggcagtgttaacagaatcccggaggccgggacagaccaggagccactcgttctaggaatgttaaagtagaaggttttttccaattgatgagaggagcagagaggaaggagaaagaggaggagagagaaaaagggcacaaaataccataaaacagatcccatatttctgcttcccctcacttttagaagttaattgatggctgacttctgaaagtcactttcctttgccctggtacttcaggccatatacatcttttcttgtctccataatcctccctttcaaggatggccagtcagctaactcaaagaggagctctctttctgctgttcttcctaactccggcagtgacaccaacatggtatgcaggttctggctactatccggatgaaagctacaatgaagtatatgcagaggaggtcccacaggctcctgccctggactaccgagtcccccgatggtgttatacattaaatatccaggatggagaagccacatgctactcaccgaagggaggaaattatcacagcagcctgggcacgcgttgtgagctctcctgtgaccggggctttcgattgattggaaggaggtcggtgcaatgcctgccaagccgtcgttggtctggaactgcctactgcaggcagatgagatgccacgcactaccattcatcactagtggcacttacacctgcacaaatggagtgcttcttgactctcgctgtgactacagctgttccagtggctaccacctggaaggtgatcgcagccgaatctgcatggaagatgggagatggagtggaggcgagcctgtatgtgtagacatagatccccccaagatccgctgtccccactcacgtgagaagatggcagagccagagaaattgactgctcgagtatactgggacccaccgttggtgaaagattctgctgatggtaccatcaccagggtgacacttcggggccctgagcctggctctcactttcccgaaggagagcatgtgattcgttacactgcctatgaccgagcctacaaccgggccagctgcaagttcattgtgaaagtacaagtgagacgctgcccaactctgaaacctccgcagcacggctacctcacctgcacctcagcgggggacaactatggtgccacctgtgaataccactgtgatggcggttatgatcgccaggggacaccctcccgggtctgtcagtccagccgccagtggtcaggttcaccaccaatctgtgctcctatgaagattaacgtcaacgtcaactcagctgctggtctcttggatcaattctatgagaaacagcgactcctcatcatctcagctcctgatccttccaaccgatattataaaatgcagatctctatgctacagcaatccacctgtggactggatttgcggcatgtgaccatcattgaactggtgggacagccacctcaggaggtggggcgcatccgggagcaacagctgtcagccaacatcatcgaggagctcaggcaatttcagcgcctcactcgctcctacttcaacatggtgttgattgacaagcagggtattgaccgagaccgctacatggaacctgtcacccccgaggaaatcttcacattcattgatgactacctactgagcaatcaggagttgacccagcgtcgggagcaaagggacatatgcgagtgaacttgagccagggcatggttaaagtcaagggaaaagctcctctagttagctgaaactgggacctaataaaaggaggaaatgttttcccacagttctagggacaggactctgaggtgggtgagtttgacaaatcctgcagtgtttccaggcatccttttaggactgtgtaatagtttccctagaagctaggtagggactgaggacaggccttgggcagtgggttgggggtagaagttcttcctttcctaacccgggcccctgcccagctctccaaagtctttcagaaaagtaaatcctaaattcagtgaaaaaaaaac

SEQ ID NO: 4147 - protein, 465 aa, Homo sapiens
MASQLTQRGALFLLFFLTPAVTPTWYAGSGYYPDESYNEVYAEEVPQAPALDYRVPRWCYTLNIQDGEATCYSPKGGNYHSSLGTRCELSCDRGFRLIGRRSVQCLPSRRWSGTAYCRQMRCHALPFITSGTYTCTNGVLLDSRCDYSCSSGYHLEGDRSRICMEDGRWSGGEPVCVDIDPPKIRCPHSREKMAEPEKLTARVYWDPPLVKDSADGTITRVTLRGPEPGSHFPEGEHVIRYTAYDRAYNRASCKFIVKVQVRRCPTLKPPQHGYLTCTSAGDNYGATCEYHCDGGYDRQGTPSRVCQSSRQWSGSPPICAPMKINVNVNSAAGLLDQFYEKQRLLIISAPDPSNRYYKMQISMLQQSTCGLDLRHVTIIELVGQPPQEVGRIREQQLSANIIEELRQFQRLTRSYFNMVLIDKQGIDRDRYMEPVTPEEIFTFIDDYLLSNQELTQRREQRDICE

SEQ ID NO: 4148 - DNA, 3914 bp, Homo sapiens
cacagcgctcggccgtcgagcggggtcgctaacccgcactctcttcggacctacgacatcgcggcttctctggcgttggccagtcagccacagggaactagtaaaaaaagaaaaagaaaaaataaagtgaaagaggcgtgttgtctagtttcaaaggagaggagagaagagactgagtcgccctgtgttgcccaggctggtcttgaactcctaggctcaagagatcctcctgcctcagcctcccaaagtgctgggattacaggcaactctggtagctctccttgtctggttgttttgaagaaagaagagtagaagaaaaagttgagtaaatcatgtcggagttactggacctttcttttctgtctgaggaggaaaaggatttgattctcagtgttctacagcgagatgaagaggtccggaaagcagatgagaaaaggattaggcgactaaagaatgagttactggagataaaaaggaaaggggccaagaggggcagccaacactacagtgatcggacctgtgcccggtgccaggagagcctgggccgtttgagtcccaaaaccaatacttgtcggggttgtaatcacctggtgtgtcgggactgccgcatacaggaaagcaatggtacctggaggtgcaaggtgtgcgccaaggaaatagagttgaagaaagcaactggggactggttttatgaccagaaagtgaatcgctttgcttaccgcacaggtagtgagataatcaggatgtccctgcgccacaaacctgcagtgagtaaaagagagacagtgggacagtccctccttcatcagacacagatgggtgacatctggccaggaagaaagatcattcaggagcggcagaaggagcccagtgtgctatttgaagtgccaaagctgaaaagtggaaagagtgcattggaagctgagagtgagagtctggatagcttcacagctgactcggatagcacctccaggagagactctctggataaatctggcctctttccagaatggaagaagatgtctgctcccaaatctcaagtagaaaaggaaactcagcctggaggtcaaaatgtggtatttgtggatgagggtgagatgatatttaagaagaacaccagaaaaatcctcaggccttcagagtacactaaatctgtgatagatcttcgcccagaagatgtggtacatgaaagtggctccttgggagacagaagcaaatccgtcccaggcctcaatgtggatatggaagaggaagaagaagaagaagacattgaccacctagtgaagttacatcgccagaagctagccagaagcagcatgcaaagtggctcctccatgagtacgatcggcagcatgatgagcatctacagtgaagctggtgatttcgggaacatctttgtgactggcaggattgccttttccctgaagtatgagcagcaaacccagagtctggttgtccatgtgaaggagtgccatcagctggcctatgctgatgaagccaagaagcgctctaacccatatgtgaagacttaccttctgcctgacaagtcccgccaaggaaaaagaaaaaccagcatcaagcgggacactgttaatccactatatgatgagacgctgaggtatgagatcccagaatctctcctggcccagaggaccctgcagttctcagtttggcatcatggtcgttttggcagaaacactttccttggagaggcagagatccagatggattcctggaagcttgataagaaactggatcattgcctccctttacatggaaagatcagtgctgagtccccgactggcttgccatcacacaaaggcgagttggtggtttcattgaaatacatcccagcctccaaaacccctgttggaggtgaccggaaaaagagtaaaggtggggaagggggagagctccaggtgtggatcaaagaagccaagaacttgacggctgccaaagcaggagggacttcagacagctttgtcaagggatacctccttcccatgaggaacaaggccagtaaacgtaaaactcctgtgatgaagaagaccctgaatcctcactacaaccatacatttgtctacaatggtgtgaggctggaagatctacagcatatgtgcctggaactgactgtgtgggaccgggagcccctggccagcaatgacttcctgggaggggtcaggctgggtgttggcactgggatcagtaatggggaagtggtggactggatggactcgactggggaagaagtgagcctgtggcagaagatgcgacagtacccagggtcttgggcagaagggactctgcagctccgttcctcaatggccaagcagaagctgggtttatgagtccctgtcctcttctgcaggtccagccctggcgagggcaggtcagaggaagtgaagaaatcaagagcaaagatttataatttaatgtgtatgtgtgtatgtgtgtatgtgtgtgtgtgtgtgtgtgtgtgtgtgtgtgtacaaacatgtattttctgcaaatctcattatgctggctagagtgatgcagacttgttcttctttttaaagcagtctcaagaataagcatttctttaaaatgtttctgtgtataatctagtttattttcagagtccattttttcttatgtctttataaggttcacttaacttaaaaacagcttttaaaacaactttttatcttctgtcttgctatcattgttcctacttccctaggaagccctggctacctttcgcattaggaccagtctgggttttaaggctctgggaagcagggttggttagtaaagacaggaatgttggggagaggtgagtagttccttcctctttctcctctccaatttatgcttttaacttattttctacctggataaacttctggaacttggcttttaaatttaacttttctagtttttaagcagtttccaccttgctttggtctaatgcttttctttgaaatgctaacagaattcccaagctttttccagttctagatatctttactagacctttgggggactcttataatggagctgcttttgaaaagcactttaattagataatgtattttgactaaatcacgaggatgcccagtgagagcttctagctgatctcagaggaccagagtgactgagggtaaagtgtctcacagcccatgctgaattttctgcattttaaactgatactgcagtcattggagagagagctcctcatttctcgaatgaaagatgagatatattcatcctcatgtaccacatctgtcttagtgtttgcgtctggggtgtgttatcaaacagagcatggtctacatcccactgtgtcaaccagaagagccaagtgttatctcaattggcccagtgtttctccaggctggggactgttaagggctctaagggaatgtagacagagtctccctgttattctgacttcctgcttgatgagctttcagttcctgtttttgctattgtttcctaaatttgacctacatattacatgggtgtagtgtgttgaggcttttcaaagaagggtctagtgagctaagtttcatcttctggtactcattgatcaaactgacctttctattctcataagcgtttctacccaaagttgtgtgtggaaggagtgtatagcagagaggaaatccctttcaacagagtcagctgctaactgatttcctataagcacactggattaagggcagccacagtggtttctactgtatgtatgaaccgaatggaggaatgttttcaaagattgatttggtgtggattgcaattgtaatggaaggcataacttgggatcccgggctgtaacttgctcttttgtttcccacccccctgacatgtatgtgtgctttaataaagctttctcacttgtcaaaaaaaaaaaaaaaaaaaaaaaaaaaaaa

SEQ ID NO: 4149 - protein, 671 aa, Homo sapiens
MSELLDLSFLSEEEKDLILSVLQRDEEVRKADEKRIRRLKNELLEIKRKGAKRGSQHYSDRTCARCQESLGRLSPKTNTCRGCNHLVCRDCRIQESNGTWRCKVCAKEIELKKATGDWFYDQKVNRFAYRTGSEIIRMSLRHKPAVSKRETVGQSLLHQTQMGDIWPGRKIIQERQKEPSVLFEVPKLKSGKSALEAESESLDSFTADSDSTSRRDSLDKSGLFPEWKKMSAPKSQVEKETQPGGQNVVFVDEGEMIFKKNTRKILRPSEYTKSVIDLRPEDVVHESGSLGDRSKSVPGLNVDMEEEEEEEDIDHLVKLHRQKLARSSMQSGSSMSTIGSMMSIYSEAGDFGNIFVTGRIAFSLKYEQQTQSLVVHVKECHQLAYADEAKKRSNPYVKTYLLPDKSRQGKRKTSIKRDTVNPLYDETLRYEIPESLLAQRTLQFSVWHHGRFGRNTFLGEAEIQMDSWKLDKKLDHCLPLHGKISAESPTGLPSHKGELVVSLKYIPASKTPVGGDRKKSKGGEGGELQVWIKEAKNLTAAKAGGTSDSFVKGYLLPMRNKASKRKTPVMKKTLNPHYNHTFVYNGVRLEDLQHMCLELTVWDREPLASNDFLGGVRLGVGTGISNGEVVDWMDSTGEEVSLWQKMRQYPGSWAEGTLQLRSSMAKQKLGL

SEQ ID NO: 4150 - DNA, 1354 bp, Homo sapiens
ccaaacatggatcctcatgattttattttctagattggctgataggctgaataatctcctgtagggtaagaagtgtcaactgtatcaagcacatggaggtggactggctacaggagaaagtgtgacgtgggtgaaggagttcttattgagccatgggaggaagaaatagtacagaagagcaaagaataataatgagtcagctagacagaagacaggagtcatcagatttgtaccctagttactcgacccatcaactgactgtggtttttgggaacaggcccggcaccacctctgcgcacaaccccgcgggcctggctcaggcgggagtgcggggccagcaccatgagcgccccgggcagccccgaccaggcctatgacttcctgctcaagttcctgctggtgggcgacagggacgtaggcaagagtgagatcctggagagcctgcaggatggtgcagctgagtccccgtacagccatctcggggggatcgactacaagacgaccaccatcctgctggacggccagcgggtgaagctgaagctctgggatacgtcggggcagggaagattttgtaccatattccgctcctactctcgtggtgcacaaggagtgatcctggtctacgacattgcaaaccgctggtctttcgagggtatggatcgatggattaagaagattgaggaacatgcccctggtgtccctaaaatcctggtggggaatcgcctacatctggcattcaagaggcaggtgcccagggagcaggcccaggcctacgccgagcgcctgggtgtgaccttctttgaggtcagccctctgtgcaatttcaacatcatagagtctttcacggagctggccaggatagtgctgctgcggcacaggatgaattggctcgggaggccgagcaaggtactgagcttgcaagacctctgctgccgcaccatcgtgtcctgcacacctgtgcatctggtggacaagctcccgctccccagtaccttaagaagccacctcaagtccttctccatggctaagggcctgaatgccaggatgatgcgaggcctctcctactccctcaccaccagctccactcacaagagcagcctctgcaaagtggagatcgtctgcccaccccagagcccacccaaaaactgcaccagaaacagctgcaaaatttcttaaggaaggcaccaaaaggaaacaagctggaatcgctccaggaaaaactctggttacacctggaagatggaagtcgcattgtagattcaagaaattagttttcagtttctcacgggaaccatgctgcttgggaatgtgtgtgatgccttctgtcaataaaaacacattacacaaaaaaaaa

SEQ ID NO: 4151 - protein, 277 aa, Homo sapiens
MSAPGSPDQAYDFLLKFLLVGDRDVGKSEILESLQDGAAESPYSHLGGIDYKTTTILLDGQRVKLKLWDTSGQGRFCTIFRSYSRGAQGVILVYDIANRWSFEGMDRWIKKIEEHAPGVPKILVGNRLHLAFKRQVPREQAQAYAERLGVTFFEVSPLCNFNIIESFTELARIVLLRHRMNWLGRPSKVLSLQDLCCRTIVSCTPVHLVDKLPLPSTLRSHLKSFSMAKGLNARMMRGLSYSLTTSSTHKSSLCKVEIVCPPQSPPKNCTRNSCKIS

SEQ ID NO: 4152 - DNA, 1294 bp, Homo sapiens
tgggctgcggcattcacgtgatctgcacgggcgcagatgtaggcaccggtccgagtgcctgccctctgtccccgcggctgggtctcgtctgctccggttcctgggctcctaattcttggtccagcttcttccaggtctgcgcgtctgttgttcccagcgctctgcgaagcctgaaaaggaggagcaacctgtccagaatccccgcaggacaggaaaaggaggggaaatctcgacatggaaaaactctacagtgaaaatgaaggaatggcttcaaaccaaggaaagatggaaaatgaagaacagccacaagacgagagaaagccagaagtaacttgtactctggaagacaagaagttagaaaacgagggaaagacagaaaacaagggcaaaacaggagatgaggaaatgttaaaggataaaggaaagccagagagtgagggagaggcaaaagaaggaaagtcagagagggagggagagtcagagatggagggaggatcagagagagagggaaaaccagagatagagggaaagccagagagtgaaggagagccagggagtgaaacaagggctgcaggaaagcgcccagctgaggatgatgtacccaggaaagccaaaagaaaaactaataaggggctggctcattacctcaaggagtataaagaggccatacatgatatgaatttcagcaatgaggacatgataagagaatttgacaatatggctaaggtgcaggatgagaagagaaaaagcaaacagaaattgggggcgtttttgtggatgcaaagaaatttacaggaccccttctaccctagaggtccaagggaattcaggggtggctgcagggccccacgaagggacattgaagacattccttatgtgtagtgtccctggcaggcatttaccaggccatgtgctttaacgttacggtaatactttactttaggcatccctcctgttgctagcagccttttgacctatctgcaatgcagtgttctcagtaggaaatgttcatctgttacatggaaaaaatgttgatggtgcattgtaaaattaaaaaacacaacttgcagaaccaaatatatggcatcagtacatttttgtaaaactacaaagatacttacctagtaatatagtatagaaaacaattctgaaagctgtgtccactaaaagattaacagtggttatctctgggtgattttttctgttcttttttgttcatctgtccatttttctcctaaaaacagatttctttagtcataaaaataataaaatataaagtattggaaaaaaaaaa

SEQ ID NO: 4153 - protein, 215 aa, Homo sapiens
MEKLYSENEGMASNQGKMENEEQPQDERKPEVTCTLEDKKLENEGKTENKGKTGDEEMLKDKGKPESEGEAKEGKSEREGESEMEGGSEREGKPEIEGKPESEGEPGSETRAAGKRPAEDDVPRKAKRKTNKGLAHYLKEYKEAIHDMNFSNEDMIREFDNMAKVQDEKRKSKQKLGAFLWMQRNLQDPFYPRGPREFRGGCRAPRRDIEDIPYV

SEQ ID NO: 4154 - DNA, 1293 bp, Homo sapiens
tgggctgcggcattcacgtgatctgcacgggcgcagatgtaggcaccggtccgagtgcctgccctctgtccccgcggctgggtctcgtctgctccggttcctgggctcctaattcttggtccagcttcttccaggtctgcgcgtctgttgttcccagcgctctgcgaagcctgaaaaggaggagcaacctgtccagaatccccgcagacaggaaaaggaggggaaatctcgacatggaaaaactctacagtgaaaatgaaggaatggcttcaaaccaaggaaagatggaaaatgaagaacagccacaagacgagagaaagccagaagtaacttgtactctggaagacaagaagttagaaaacgagggaaagacagaaaacaagggcaaaacaggagatgaggaaatgttaaaggataaaggaaagccagagagtgagggagaggcaaaagaaggaaagtcagagagggagggagagtcagagatggagggaggatcagagagagagggaaaaccagagatagagggaaagccagagagtgaaggagagccagggagtgaaacaagggctgcaggaaagcgcccagctgaggatgatgtacccaggaaagccaaaagaaaaactaataaggggctggctcattacctcaaggagtataaagaggccatacatgatatgaatttcagcaatgaggacatgataagagaatttgacaatatggctaaggtgcaggatgagaagagaaaaagcaaacagaaattgggggcgtttttgtggatgcaaagaaatttacaggaccccttctaccctagaggtccaagggaattcaggggtggctgcagggccccacgaagggacattgaagacattccttatgtgtagtgtccctggcaggcatttaccaggccatgtgctttaacgttacggtaatactttactttaggcatccctcctgttgctagcagccttttgacctatctgcaatgcagtgttctcagtaggaaatgttcatctgttacatggaaaaaatgttgatggtgcattgtaaaattaaaaaacacaacttgcagaaccaaatatatggcatcagtacatttttgtaaaactacaaagatacttacctagtaatatagtatagaaaacaattctgaaagctgtgtccactaaaagattaacagtggttatctctgggtgattttttctgttcttttttgttcatctgtccatttttctcctaaaaacagatttctttagtcataaaaataataaaatataaagtattggaaaaaaaaaa

SEQ ID NO: 4155 - protein, 215 aa, Homo sapiens; identical to SEQ ID NO: 4153

SEQ ID NO: 4156 - DNA, 1289 bp, Homo sapiens
tgggctgcggcattcacgtgatctgcacgggcgcagatgtaggcaccggtccgagtgcctgccctctgtccccgcggctgggtctcgtctgctccggttcctgggctcctaattcttggtccagcttcttccaggtctgcgcgtctgttgttcccagcgctctgcgaagcctgaaaaggaggagcaacctgtccagaatccccgcaggaaaaggaggggaaatctcgacatggaaaaactctacagtgaaaatgaaggaatggcttcaaaccaaggaaagatggaaaatgaagaacagccacaagacgagagaaagccagaagtaacttgtactctggaagacaagaagttagaaaacgagggaaagacagaaaacaagggcaaaacaggagatgaggaaatgttaaaggataaaggaaagccagagagtgagggagaggcaaaagaaggaaagtcagagagggagggagagtcagagatggagggaggatcagagagagagggaaaaccagagatagagggaaagccagagagtgaaggagagccagggagtgaaacaagggctgcaggaaagcgcccagctgaggatgatgtacccaggaaagccaaaagaaaaactaataaggggctggctcattacctcaaggagtataaagaggccatacatgatatgaatttcagcaatgaggacatgataagagaatttgacaatatggctaaggtgcaggatgagaagagaaaaagcaaacagaaattgggggcgtttttgtggatgcaaagaaatttacaggaccccttctaccctagaggtccaagggaattcaggggtggctgcagggccccacgaagggacattgaagacattccttatgtgtagtgtccctggcaggcatttaccaggccatgtgctttaacgttacggtaatactttactttaggcatccctcctgttgctagcagccttttgacctatctgcaatgcagtgttctcagtaggaaatgttcatctgttacatggaaaaaatgttgatggtgcattgtaaaattaaaaaacacaacttgcagaaccaaatatatggcatcagtacatttttgtaaaactacaaagatacttacctagtaatatagtatagaaaacaattctgaaagctgtgtccactaaaagattaacagtggttatctctgggtgattttttctgttcttttttgttcatctgtccatttttctcctaaaaacagatttctttagtcataaaaataataaaatataaagtattggaaaaaaaaaa

SEQ ID NO: 4157 - protein, 215 aa, Homo sapiens; identical to SEQ ID NO: 4153

SEQ ID NO: 4158 - DNA, 1353 bp, Homo sapiens
tgggctgcggcattcacgtgatctgcacgggcgcagatgtaggcaccggtccgagtgcctgccctctgtccccgcggctgggtctcgtctgctccggttcctgggctcctaattcttggtccagcttcttccaggtcagtgtgcgggccttccacgctgccagcggaacactggaatggcggaaggggaacgggtctgcgcgtctgttgttcccagcgctctgcgaagcctgaaaaggaggagcaacctgtccagaatccccgcaggacaggaaaaggaggggaaatctcgacatggaaaaactctacagtgaaaatgaaggaatggcttcaaaccaaggaaagatggaaaatgaagaacagccacaagacgagagaaagccagaagtaacttgtactctggaagacaagaagttagaaaacgagggaaagacagaaaacaagggcaaaacaggagatgaggaaatgttaaaggataaaggaaagccagagagtgagggagaggcaaaagaaggaaagtcagagagggagggagagtcagagatggagggaggatcagagagagagggaaaaccagagatagagggaaagccagagagtgaaggagagccagggagtgaaacaagggctgcaggaaagcgcccagctgaggatgatgtacccaggaaagccaaaagaaaaactaataaggggctggctcattacctcaaggagtataaagaggccatacatgatatgaatttcagcaatgaggacatgataagagaatttgacaatatggctaaggtgcaggatgagaagagaaaaagcaaacagaaattgggggcgtttttgtggatgcaaagaaatttacaggaccccttctaccctagaggtccaagggaattcaggggtggctgcagggccccacgaagggacattgaagacattccttatgtgtagtgtccctggcaggcatttaccaggccatgtgctttaacgttacggtaatactttactttaggcatccctcctgttgctagcagccttttgacctatctgcaatgcagtgttctcagtaggaaatgttcatctgttacatggaaaaaatgttgatggtgcattgtaaaattaaaaaacacaacttgcagaaccaaatatatggcatcagtacatttttgtaaaactacaaagatacttacctagtaatatagtatagaaaacaattctgaaagctgtgtccactaaaagattaacagtggttatctctgggtgattttttctgttcttttttgttcatctgtccatttttctcctaaaaacagatttctttagtcataaaaataataaaatataaagtattggaaaaaaaaaa

SEQ ID NO: 4159 - protein, 215 aa, Homo sapiens; identical to SEQ ID NO: 4153

SEQ ID NO: 4160 - DNA, 1154 bp, Homo sapiens
gtgggcaccagcccccgcgcccgcccgcccgccctgcggtccggtcctggcgcccgcgcagaaccagctgtctgagctgcccgggcagcgggggagcagcgagcgggcttccgcgagccggagaaggcacaggcctgtcccgggtcccggcaggtcagtgtgaaggtctgcgcgtctgttcccagcgctctgcgaggcctaaaaaggaggagcaacctgtccagaatccctgcaggacaggaaaaggaggggaaatctcgacatggaaaaaccctacaataaaaatgaaggaaacctggaaaacgagggaaagccagaagatgaagtagagcctgatgatgaaggaaagtcagacgaggaagaaaagccagacgtggaggggaagacagaatgcgagggaaagagagaggatgagggagagccaggtgatgagggacaactggaagatgagggaagccaggaaaagcagggcaggtccgaaggtgagggcaagccacaaggcgagggcaagccagcctcccaggcaaagccagagagccagccgcgggccgccgaaaagcgcccggctgaagattatgtgccccggaaagcaaaaagaaaaacggacagggggacggacgattcccccaaggactctcaggaggacttacaggaaaggcatctgagcagtgaggagatgatgagagaatgtggagatgtgtcaagggctcaagaggagctaaggaaaaaacagaaaatgggtggttttcattggatgcaaagagatgtacaggatccattcgccccaaggggacaacggggtgtcaggggagtgaggggtggaggtaggggccagaggggcttacacgatatcccatacctttaatgcctttggccttccattctgatttctctgatgagaatattgctggccctgctttccctggtaggtatttgccaggcccaatgctttaaccttaagctgatactttgctttagatgtcagtctcgttaccagcagccttttgacccaactacggcgctctatattttagtagaggattttcacccatgtgcatggaaaagatgttcatggtacattgtaaaaaaataaaattaaaattaaaaaaagtttgcagaaccgcaaaaaaaaaaaaaaaaaaaaaaaaaaaaaa

SEQ ID NO: 4161 - protein, 200 aa, Homo sapiens
MEKPYNKNEGNLENEGKPEDEVEPDDEGKSDEEEKPDVEGKTECEGKREDEGEPGDEGQLEDEGSQEKQGRSEGEGKPQGEGKPASQAKPESQPRAAEKRPAEDYVPRKAKRKTDRGTDDSPKDSQEDLQERHLSSEEMMRECGDVSRAQEELRKKQKMGGFHWMQRDVQDPFAPRGQRGVRGVRGGGRGQRGLHDIPYL

SEQ ID NO: 4162 - DNA, 1142 bp, Homo sapiens
gtgggcaccagcccccgcgcccgcccgcccgccctgcggtccggtcctggcgcccgcgcagaaccagctgtctgagctgcccgggcagcgggggagcagcgagcgggcttccgcgagccggagaaggcacaggcctgtcccgggtcccggcaggtctgcgcgtctgttcccagcgctctgcgaggcctaaaaaggaggagcaacctgtccagaatccctgcaggacaggaaaaggaggggaaatctcgacatggaaaaaccctacaataaaaatgaaggaaacctggaaaacgagggaaagccagaagatgaagtagagcctgatgatgaaggaaagtcagacgaggaagaaaagccagacgtggaggggaagacagaatgcgagggaaagagagaggatgagggagagccaggtgatgagggacaactggaagatgagggaagccaggaaaagcagggcaggtccgaaggtgagggcaagccacaaggcgagggcaagccagcctcccaggcaaagccagagagccagccgcgggccgccgaaaagcgcccggctgaagattatgtgccccggaaagcaaaaagaaaaacggacagggggacggacgattcccccaaggactctcaggaggacttacaggaaaggcatctgagcagtgaggagatgatgagagaatgtggagatgtgtcaagggctcaagaggagctaaggaaaaaacagaaaatgggtggttttcattggatgcaaagagatgtacaggatccattcgccccaaggggacaacggggtgtcaggggagtgaggggtggaggtaggggccagaggggcttacacgatatcccatacctttaatgcctttggccttccattctgatttctctgatgagaatattgctggccctgctttccctggtaggtatttgccaggcccaatgctttaaccttaagctgatactttgctttagatgtcagtctcgttaccagcagccttttgacccaactacggcgctctatattttagtagaggattttcacccatgtgcatggaaaagatgttcatggtacattgtaaaaaaataaaattaaaattaaaaaaagtttgcagaaccgcaaaaaaaaaaaaaaaaaaaaaaaaaaaaaa

SEQ ID NO: 4163 - protein, 200 aa, Homo sapiens; identical to SEQ ID NO: 4161

SEQ ID NO: 4164 - DNA, 1208 bp, Homo sapiens
tcttttttttgcctgtccaccatctccctattaccctttggtcgagagggaaagcagaagaagtctgctggtcacagcggggcacctcgaggagaggacgactaggagcacacggcccggaaaggtccagaataactgtgcttgaagaagaaaattcccaacatggacaaaccacgcaaagaaaatgaagaagagccgcagagcgcgcccaagaccgatgaggagaggcctccggtggagcactctcccgaaaagcagtcccccgaggagcagtcttcggaggagcagtcctcggaggaggagttctttcctgaggagctcttgcctgagctcctgcctgagatgctcctctcggaggagcgccctccgcaggagggtctttccaggaaggacctgtttgaggggcgccctcccatggagcagcctccttgtggagtaggaaaacataagcttgaagaaggaagctttaaagaaaggttggctcgttctcgcccgcaatttagaggggacatacatggcagaaatttaagcaatgaggagatgatacaggcagcagatgagctagaagagatgaaaagagtaagaaacaaactgatgataatgcactggaaggcaaaacggagccgtccttatcctatttaatgtgttcggcctttaattctgttttgcctgctaatagtattgccattgccacctggactttctgtttgcattttcttaatgccttttcccatattctgaattttaactttttgtgaggctttattttagatgtttagcatgtaactcgcttaaagttgaggtttccccctaaaatctacaagtttccctctttcagtcatgagccctacacatttgcatgaaagatgtacattatatattgtgaaacgaaaaaagcaattttcaaatggtatatattgtatcccatttttgtaaaaaaaatgtatatttatatattaatatgcaaagaaaaagctaaaagtatagacttcaaaggcataacagtggttgtgtggtaagataataggtgattttttaaatttttgttttatctgaatttctcattttttcaggacaaacgttttacttgtgttgcaaaaatatataatgaaaaaatcacacaattttgaagaaaactgtcaatcagcttataacgacaatgtggcacttaataaatacttgtcagaactttaaaaaaaaaaaaaaaa

SEQ ID NO: 4165 - protein, 159 aa, Homo sapiens
MDKPRKENEEEPQSAPKTDEERPPVEHSPEKQSPEEQSSEEQSSEEEFFPEELLPELLPEMLLSEERPPQEGLSRKDLFEGRPPMEQPPCGVGKHKLEEGSFKERLARSRPQFRGDIHGRNLSNEEMIQAADELEEMKRVRNKLMIMHWKAKRSRPYPI

SEQ ID NO: 4166 - DNA, 1220 bp, Homo sapiens
aggaagaggcaatactacccgagactagatgcggaccgtctctggcaaccaggaaaaggcaaatacaaagagaggtctgctggtcacagcggggcacctcgaggagaggacgactaggagcacacggcccggaaaggtccagaataactgtgcttgaagaagaaaattcccaacatggacaaaccacgcaaagaaaatgaagaagagccgcagagcgcgcccaagaccgatgaggagaggcctccggtggagcactctcccgaaaagcagtcccccgaggagcagtcttcggaggagcagtcctcggaggaggagttctttcctgaggagctcttgcctgagctcctgcctgagatgctcctctcggaggagcgccctccgcaggagggtctttccaggaaggacctgtttgaggggcgccctcccatggagcagcctccttgtggagtaggaaaacataagcttgaagaaggaagctttaaagaaaggttggctcgttctcgcccgcaatttagaggggacatacatggcagaaatttaagcaatgaggagatgatacaggcagcagatgagctagaagagatgaaaagagtaagaaacaaactgatgataatgcactggaaggcaaaacggagccgtccttatcctatttaatgtgttcggcctttaattctgttttgcctgctaatagtattgccattgccacctggactttctgtttgcattttcttaatgccttttcccatattctgaattttaactttttgtgaggctttattttagatgtttagcatgtaactcgcttaaagttgaggtttccccctaaaatctacaagtttccctctttcagtcatgagccctacacatttgcatgaaagatgtacattatatattgtgaaacgaaaaaagcaattttcaaatggtatatattgtatcccatttttgtaaaaaaaatgtatatttatatattaatatgcaaagaaaaagctaaaagtatagacttcaaaggcataacagtggttgtgtggtaagataataggtgattttttaaatttttgttttatctgaatttctcattttttcaggacaaacgttttacttgtgttgcaaaaatatataatgaaaaaatcacacaattttgaagaaaactgtcaatcagcttataacgacaatgtggcacttaataaatacttgtcagaactttaaaaaaaaaaaaaaaa

SEQ ID NO: 4167 - protein, 159 aa, Homo sapiens; identical to SEQ ID NO: 4165

SEQ ID NO: 4168 - DNA, 1220 bp, Homo sapiens
tcttttttttgcctgtccaccatctccctattaccctttggtcgagagggaaagcagaagaagtctgctggtcacagcggggcacctcgaggagaggacgactaggagcacacggcccggaaaggtccaggtcagggaagggaataactgtgcttgaagaagaaaattcccaacatggacaaaccacgcaaagaaaatgaagaagagccgcagagcgcgcccaagaccgatgaggagaggcctccggtggagcactctcccgaaaagcagtcccccgaggagcagtcttcggaggagcagtcctcggaggaggagttctttcctgaggagctcttgcctgagctcctgcctgagatgctcctctcggaggagcgccctccgcaggagggtctttccaggaaggacctgtttgaggggcgccctcccatggagcagcctccttgtggagtaggaaaacataagcttgaagaaggaagctttaaagaaaggttggctcgttctcgcccgcaatttagaggggacatacatggcagaaatttaagcaatgaggagatgatacaggcagcagatgagctagaagagatgaaaagagtaagaaacaaactgatgataatgcactggaaggcaaaacggagccgtccttatcctatttaatgtgttcggcctttaattctgttttgcctgctaatagtattgccattgccacctggactttctgtttgcattttcttaatgccttttcccatattctgaattttaactttttgtgaggctttattttagatgtttagcatgtaactcgcttaaagttgaggtttccccctaaaatctacaagtttccctctttcagtcatgagccctacacatttgcatgaaagatgtacattatatattgtgaaacgaaaaaagcaattttcaaatggtatatattgtatcccatttttgtaaaaaaaatgtatatttatatattaatatgcaaagaaaaagctaaaagtatagacttcaaaggcataacagtggttgtgtggtaagataataggtgattttttaaatttttgttttatctgaatttctcattttttcaggacaaacgttttacttgtgttgcaaaaatatataatgaaaaaatcacacaattttgaagaaaactgtcaatcagcttataacgacaatgtggcacttaataaatacttgtcagaactttaaaaaaaaaaaaaaaa

SEQ ID NO: 4169 - protein, 159 aa, Homo sapiens; identical to SEQ ID NO: 4165

SEQ ID NO: 4170 - DNA, 1826 bp, Homo sapiens
cacgtcggctgctgggaagatctggattctcgtttcaggtcaccatcagaaaagctaagtttgctgtatagtgaggatcaggagatctgatcctgattgcagaaccttccctgattacagaatcttggatgatttcacaaaagttcatcttcattgcagatacctgcctttctttctaggttgtatctcccacttcacccttctagaccatcccagaagatctataagatttcatctgggaaatcactaggagttcttggaagggaaagaaggaagattgttggttggaataaaaacagggttgaatgagttccagaaagcagggttctcaacctcgtggacagcaatctgcagaagaagagaacttcaaaaaaccaactagaagcaacatgcagagaagtaaaatgagaggggcctcctcaggaaagaagacagctggtccacagcagaaaaatcttgaaccagctctcccaggaagatggggtggtcgctctgcagagaaccccccttcaggatccgtgaggaagaccagaaagaacaagcagaagactcctggaaacggagatggtggcagtaccagcgaagcacctcagccccctcggaagaaaagggcccgggcagaccccactgttgaaagtgaggaggcgtttaagaatagaatggaggttaaagtgaagattcctgaagaattaaaaccatggcttgttgaggactgggacttagttaccaggcagaagcagctgtttcaactccctgccaagaaaaatgtagatgcaattctggaggagtatgcaaattgcaagaaatcgcagggaaatgttgataataaggaatatgcggttaatgaagttgtggcaggaataaaagaatatttcaatgtgatgttgggcactcagctgctctacaaatttgagaggccccagtatgctgaaatcctcttggctcaccctgatgctccaatgtcccaggtttatggagcaccacacctactgagattatttgtaagaattggagcaatgttggcctatacgccccttgatgagaaaagccttgcattattgttgggctatttgcatgatttcctaaaatatctggcaaagaattctgcatctctctttactgccagtgattacaaagtggcttctgctgagtaccaccgcaaagccctgtgagcgtctacagacagctcaccatttttgtcctgtatctgtaaacactttttgttcttagtctttttcttgtaaaattgatgttctttaaaatcgttaatgtataacagggcttatgtttcagtttgttttccgttctgttttaaacagaaaataaaaggagtgtaagctccttttctcatttcaaagttgctaccagtgtatgcagtaattagaacaaagaagaaacattcagtagaacattttattgcctagttgacaacattgcttgaatgctggtggttcctatccctttgacactacacaattttctaatatgtgttaatgctatgtgacaaaacgccctgattcctagtgccaaaggttcaacttaatgtatatacctgaaaacccatgcatttgtgctctttttttttttatggtgcttgaagtaaaacagcccatcctctgcaagtccatctatgttgttcttaggcattctatctttgctcaaattgttgaaggatggtgatttgtttcatggtttttgtatttgagtctaatgcacgttctaacatgatagaggcaatgcattattgtgtagccacggttttctggaaaagttgatattttaggaattgtatttcagatcttaaataaaatttgtttctaaatttc

SEQ ID NO: 4171 - protein, 288 aa, Homo sapiens
MSSRKQGSQPRGQQSAEEENFKKPTRSNMQRSKMRGASSGKKTAGPQQKNLEPALPGRWGGRSAENPPSGSVRKTRKNKQKTPGNGDGGSTSEAPQPPRKKRARADPTVESEEAFKNRMEVKVKIPEELKPWLVEDWDLVTRQKQLFQLPAKKNVDAILEEYANCKKSQGNVDNKEYAVNEVVAGIKEYFNVMLGTQLLYKFERPQYAEILLAHPDAPMSQVYGAPHLLRLFVRIGAMLAYTPLDEKSLALLLGYLHDFLKYLAKNSASLFTASDYKVASAEYHRKAL

SEQ ID NO: 4172 - DNA, 732 bp, Homo sapiens
aggcagttgcgggttgcaggagttcaggaaaggaggtgggactagagtcaacctggaatagctctacagtaacaatggcagcctttttgttgctgggacatccatacaggcaacttagctggtgaaaggactctggattggttggcagtctgcttttttttttccaaggtgatcactttactgtagaagaaatgaggttaacagaaaagagtgagggagaacaacaactcaagcccaacaactctaatgcacccaatgaagatcaagaagaagaaatccaacagtcagaacagcatactccagcaaggcagcgaacacaaagagcagacacacagccatccagatgtcgattgccttcacgtaggacacctacaacatccagcgacagaacgatcaaccttcttgaagtccttccgtggcctactgagtggattttcaacccctatcgattgcctgctctttttgagctttatcctgaatttcttctggtgtttaaagaagccttccatgacatatcccattgtctgaaagcccagatggaaaagatcggactgcccatcatactccacctcttcgcactctccaccctctacttctacaagtttttccttcctacaattctttccctttctttctttattcttcttgtacttctgcttctgctttttattattgtcttcattctgatcttcttctgattcttttgtttcaataaacagcaatgagcatgaa

SEQ ID NO: 4173 - protein, 168 aa, Homo sapiens
MRLTEKSEGEQQLKPNNSNAPNEDQEEEIQQSEQHTPARQRTQRADTQPSRCRLPSRRTPTTSSDRTINLLEVLPWPTEWIFNPYRLPALFELYPEFLLVFKEAFHDISHCLKAQMEKIGLPIILHLFALSTLYFYKFFLPTILSLSFFILLVLLLLLFIIVFILIFF

SEQ ID NO: 4174 - DNA, 3038 bp, Homo sapiens
tcaatcagaaagcccttttcattgcaggagaagaggacaaagatactcagagagaaaaagtaaaagaccgaagaaggaggctggagagaccaggatccttccagctgaacaaagtcagccacaaagcagactagccagccggctacaattggagtcagagtcccaaagacatgggcttgttagagtgctgtgcaagatgtctggtaggggccccctttgcttccctggtggccactggattgtgtttctttggggtggcactgttctgtggctgtggacatgaagccctcactggcacagaaaagctaattgagacctatttctccaaaaactaccaagactatgagtatctcatcaatgtgatccatgccttccagtatgtcatctatggaactgcctctttcttcttcctttatggggccctcctgctggctgagggcttctacaccaccggcgcagtcaggcagatctttggcgactacaagaccaccatctgcggcaagggcctgagcgcaacggtaacagggggccagaaggggaggggttccagaggccaacatcaagctcattctttggagcgggtgtgtcattgtttgggaaaatggctaggacatcccgacaagtttgtgggcatcacctatgccctgaccgttgtgtggctcctggtgtttgcctgctctgctgtgcctgtgtacatttacttcaacacctggaccacctgccagtctattgccttccccagcaagacctctgccagtataggcagtctctgtgctgatgccagaatgtatggtgttctcccatggaatgctttccctggcaaggtttgtggctccaaccttctgtccatctgcaaaacagctgagttccaaatgaccttccacctgtttattgctgcatttgtgggggctgcagctacactggtttccctgctcaccttcatgattgctgccacttacaactttgccgtccttaaactcatgggccgaggcaccaagttctgatcccccgtagaaatccccctttctctaatagcgaggctctaaccacacagcctacaatgctgcgtctcccatcttaactctttgcctttgccaccaactggccctcttcttacttgatgagtgtaacaagaaaggagagtcttgcagtgattaaggtctctctttggactctcccctcttatgtacctcttttagtcattttgcttcatagctggttcctgctagaaatgggaaatgcctaagaagatgacttcccaactgcaagtcacaaaggaatggaggctctaattgaattttcaagcatctcctgaggatcagaaagtaatttcttctcaaagggtacttccactgatggaaacaaagtggaaggaaagatgctcaggtacagagaaggaatgtctttggtcctcttgccatctataggggccaaatatattctctttggtgtacaaaatggaattcattctggtctctctattaccactgaagatagaagaaaaaagaatgtcagaaaaacaataagagcgtttgcccaaatctgcctattgcagctgggagaagggggtcaaagcaaggatctttcacccacagaaagagagcactgaccccgatggcgatggactactgaagccctaactcagccaaccttacttacagcataagggagcgtagaatctgtgtagacgaagggggcatctggccttacacctcgttagggaagagaaacagggtgttgtcagcatcttctcactcccttctccttgataacagctaccatgacaaccctgtggtttccaaggagctgagaatagaaggaaactagcttacatgagaacagactggcctgaggagcagcagttgctggtggctaatggtgtaacctgagatggccctctggtagacacaggatagataactctttggatagcatgtctttttttctgttaattagttgtgtactctggcctctgtcatatcttcacaatggtgctcatttcatgggggtattatccattcagtcatcgtaggtgatttgaaggtcttgatttgttttagaatgatgcacatttcatgtattccagtttgtttattacttatttggggttgcatcagaaatgtctggagaataattctttgattatgactgttttttaaactaggaaaattggacattaagcatcacaaatgatattaaaaattggctagttgaatctattgggattttctacaagtattctgcctttgcagaaacagatttggtgaatttgaatctcaatttgagtaatctgatcgttctttctagctaatggaaaatgattttacttagcaatgttatcttggtgtgttaagagttaggtttaacataaaggttattttctcctgatatagatcacataacagaatgcaccagtcatcagctattcagttggtaagcttccaggaaaaaggacaggcagaaagagtttgagacctgaatagctcccagatttcagtcttttcctgtttttgttaactttgggttaaaaaaaaaaaaagtctgattggttttaattgaaggaaagatttgtactacagttcttttgttgtaaagagttgtgttgttcttttcccccaaagtggtttcagcaatatttaaggagatgtaagagctttacaaaaagacacttgatacttgttttcaaaccagtatacaagataagcttccaggctgcatagaaggaggagagggaaaatgttttgtaagaaaccaatcaagataaaggacagtgaagtaatccgtaccttgtgttttgttttgatttaataacataacaaataaccaacccttccctgaaaacctcacatgcatacatacacatatatacacacacaaagagagttaatcaactgaaagtgtttccttcatttctgatatagaattgcaattttaacacacataaaggataaacttttagaaacttatcttacaaagtgtattttataaaattaaagaaaataaaattaagaatgttctcaatcaaaaaaaaaaaaaaa

SEQ ID NO: 4175 - protein, 277 aa, Homo sapiens
MGLLECCARCLVGAPFASLVATGLCFFGVALFCGCGHEALTGTEKLIETYFSKNYQDYEYLINVIHAFQYVIYGTASFFFLYGALLLAEGFYTTGAVRQIFGDYKTTICGKGLSATVTGGQKGRGSRGQHQAHSLERVCHCLGKWLGHPDKFVGITYALTVVWLLVFACSAVPVYIYFNTWTTCQSIAFPSKTSASIGSLCADARMYGVLPWNAFPGKVCGSNLLSICKTAEFQMTFHLFIAAFVGAAATLVSLLTFMIAATYNFAVLKLMGRGTKF

SEQ ID NO: 4176 - DNA, 2933 bp, Homo sapiens
tcaatcagaaagcccttttcattgcaggagaagaggacaaagatactcagagagaaaaagtaaaagaccgaagaaggaggctggagagaccaggatccttccagctgaacaaagtcagccacaaagcagactagccagccggctacaattggagtcagagtcccaaagacatgggcttgttagagtgctgtgcaagatgtctggtaggggccccctttgcttccctggtggccactggattgtgtttctttggggtggcactgttctgtggctgtggacatgaagccctcactggcacagaaaagctaattgagacctatttctccaaaaactaccaagactatgagtatctcatcaatgtgatccatgccttccagtatgtcatctatggaactgcctctttcttcttcctttatggggccctcctgctggctgagggcttctacaccaccggcgcagtcaggcagatctttggcgactacaagaccaccatctgcggcaagggcctgagcgcaacgtttgtgggcatcacctatgccctgaccgttgtgtggctcctggtgtttgcctgctctgctgtgcctgtgtacatttacttcaacacctggaccacctgccagtctattgccttccccagcaagacctctgccagtataggcagtctctgtgctgatgccagaatgtatggtgttctcccatggaatgctttccctggcaaggtttgtggctccaaccttctgtccatctgcaaaacagctgagttccaaatgaccttccacctgtttattgctgcatttgtgggggctgcagctacactggtttccctgctcaccttcatgattgctgccacttacaactttgccgtccttaaactcatgggccgaggcaccaagttctgatcccccgtagaaatccccctttctctaatagcgaggctctaaccacacagcctacaatgctgcgtctcccatcttaactctttgcctttgccaccaactggccctcttcttacttgatgagtgtaacaagaaaggagagtcttgcagtgattaaggtctctctttggactctcccctcttatgtacctcttttagtcattttgcttcatagctggttcctgctagaaatgggaaatgcctaagaagatgacttcccaactgcaagtcacaaaggaatggaggctctaattgaattttcaagcatctcctgaggatcagaaagtaatttcttctcaaagggtacttccactgatggaaacaaagtggaaggaaagatgctcaggtacagagaaggaatgtctttggtcctcttgccatctataggggccaaatatattctctttggtgtacaaaatggaattcattctggtctctctattaccactgaagatagaagaaaaaagaatgtcagaaaaacaataagagcgtttgcccaaatctgcctattgcagctgggagaagggggtcaaagcaaggatctttcacccacagaaagagagcactgaccccgatggcgatggactactgaagccctaactcagccaaccttacttacagcataagggagcgtagaatctgtgtagacgaagggggcatctggccttacacctcgttagggaagagaaacagggtgttgtcagcatcttctcactcccttctccttgataacagctaccatgacaaccctgtggtttccaaggagctgagaatagaaggaaactagcttacatgagaacagactggcctgaggagcagcagttgctggtggctaatggtgtaacctgagatggccctctggtagacacaggatagataactctttggatagcatgtctttttttctgttaattagttgtgtactctggcctctgtcatatcttcacaatggtgctcatttcatgggggtattatccattcagtcatcgtaggtgatttgaaggtcttgatttgttttagaatgatgcacatttcatgtattccagtttgtttattacttatttggggttgcatcagaaatgtctggagaataattctttgattatgactgttttttaaactaggaaaattggacattaagcatcacaaatgatattaaaaattggctagttgaatctattgggattttctacaagtattctgcctttgcagaaacagatttggtgaatttgaatctcaatttgagtaatctgatcgttctttctagctaatggaaaatgattttacttagcaatgttatcttggtgtgttaagagttaggtttaacataaaggttattttctcctgatatagatcacataacagaatgcaccagtcatcagctattcagttggtaagcttccaggaaaaaggacaggcagaaagagtttgagacctgaatagctcccagatttcagtcttttcctgtttttgttaactttgggttaaaaaaaaaaaaagtctgattggttttaattgaaggaaagatttgtactacagttcttttgttgtaaagagttgtgttgttcttttcccccaaagtggtttcagcaatatttaaggagatgtaagagctttacaaaaagacacttgatacttgttttcaaaccagtatacaagataagcttccaggctgcatagaaggaggagagggaaaatgttttgtaagaaaccaatcaagataaaggacagtgaagtaatccgtaccttgtgttttgttttgatttaataacataacaaataaccaacccttccctgaaaacctcacatgcatacatacacatatatacacacacaaagagagttaatcaactgaaagtgtttccttcatttctgatatagaattgcaattttaacacacataaaggataaacttttagaaacttatcttacaaagtgtattttataaaattaaagaaaataaaattaagaatgttctcaatcaaaaaaaaaaaaaaa

SEQ ID NO: 4177 - protein, 242 aa, Homo sapiens
MGLLECCARCLVGAPFASLVATGLCFFGVALFCGCGHEALTGTEKLIETYFSKNYQDYEYLINVIHAFQYVIYGTASFFFLYGALLLAEGFYTTGAVRQIFGDYKTTICGKGLSATFVGITYALTVVWLLVFACSAVPVYIYFNTWTTCQSIAFPSKTSASIGSLCADARMYGVLPWNAFPGKVCGSNLLSICKTAEFQMTFHLFIAAFVGAAATLVSLLTFMIAATYNFAVLKLMGRGTKF

SEQ ID NO: 4178 - DNA, 1049 bp, Homo sapiens
cgagcggcacgtgtcaggccaccgaggtccaagccgcacttgctgccccattgaggacgaggaggcagcaggagcagtgacggtgactctaaggagccggattcccggcacgcagagctgacctgcctggcacccgcggccctctcctgtttccttcccattgtgttggcaccctaaaaagaaagaataaaacaacaacaggaaaaaaaggaaaatatttaaattgtgacaaaaacccactgggttctcttggttacaaactccttcccttctggtgctgcaaaaatgagtgggaaatccctgctcttaaaggtcattctcttgggtgatggtggagttgggaaaagttcgcttatgaaccgttacgtaaccaacaaatttgactcccaggcttttcacaccataggggtagagttcttaaatcgagatctggaggtagatggacgctttgtaaccctccagatctgggacactgcagggcaggaacgtttcaagagccttaggacacccttctacaggggagcagactgctgcctcttgaccttcagcgtggatgatcggcagagcttcgagaatcttggtaactggcagaaagaatttatttactatgcggatgtgaaggaccctgagcatttcccctttgtagttctgggtaacaaggtagacaaagaggataggcaagtgactactgaggaggcacaaacctggtgcatggagaatggggattacccttatttagaaactagtgccaaagatgatactaatgtgacagtggcctttgaagaagctgtcaggcaggtgctggctgtagaggaacagctggagcattgcatgttgggtcacaccattgacttgaacagtggctccaaagcagggtcttcgtgctgttaaagatagggagccttttaaaaatgtgccccaaattgatcagtcagtagtgtaagaataactgtgcccctctaagagtgcacacacacgcacacaagagggtaagagacaaggttctgattgtgaaacagagcctttcaaattgaagtgtagattgattt

SEQ ID NO: 4179 - protein, 201 aa, Homo sapiens
MSGKSLLLKVILLGDGGVGKSSLMNRYVTNKFDSQAFHTIGVEFLNRDLEVDGRFVTLQIWDTAGQERFKSLRTPFYRGADCCLLTFSVDDRQSFENLGNWQKEFIYYADVKDPEHFPFVVLGNKVDKEDRQVTTEEAQTWCMENGDYPYLETSAKDDTNVTVAFEEAVRQVLAVEEQLEHCMLGHTIDLNSGSKAGSSCC

SEQ ID NO: 4180 - DNA, 1308 bp, Homo sapiens
atggggtttgatttctcacacttcttcatcaagcatggcttgaagaaggaagacattatgacagacccatttgaaaatctgcaaagctgtggactcagaagaatgtacggagtccagattctttgcatacagttccaggaaggaccgcggcaaccgcggctgcccggaggtccgaactggagggtggccgcagccgtgacttccttgggaaccgcgctgcctcgactcggctacctctctgcgaagcactcgctaagccgggcagccccggggtcgcttagcggcccaggaggcgccagcgatcctgttcccctgcagagctatggggaccggaaggcgaaacagagctgtcgacgcgggagcatacgctgcccaccagtggagcgcaggtcatcaaagccgaatccgaatttgaattctgtgcggctgattgcagagctggtaggccgacggtttcccgcaggaaatgtctcctactactaccaaatctgtatcagcaacagcagcagctccaaggacagtatgtgtggcaatgcaagtacctgctgtcatgacatcagaaaatttcaactatggcggttgaaagaaccagcggaacttcaccaccaaggggctgcagttggtgatggtaacctagcgaatgacctcagtattgttcaggatgcagccaaaatccagctccatcatctcaaagctgaggttggggtagatcgccccaaacccccttcaaggacagattttctgcttcagctgctgggacagcagttggatgccagtcatcagccatcagttccttcagacctcaagttggcccacaatgtcagccatgtggtgactacaaaaggccctcccactggtgatcagcagcttatctgttcctcctatccactggcagctgcctccaagatggctgagccttcctctgagatgacctccaacaaaggcctgagcaccaaggagcccaaagcggccaatgccacgatggcccacaagcagaagaggcatgggcactctcaccccagccgctgcagggacagcttcaccacctattttccccgggtgctgaagcaggttcacgcgggcctcagcctttcccccgaggcagtggatgtcatagattccttcgttcacgacatcttggagcacatcgccaccaaggccggccacttggcccactataccaagtgcaccaccatcacctcctgcgagatgcagaccaccattcgcctgatgttcccggggcagatgggcaagcacgccatatccaggggctccaagactctgctccactacaccaggagcaagtga

SEQ ID NO: 4181 - protein, 435 aa, Homo sapiens [sequence omitted]

SEQ ID NO: 4182 - DNA, 1729 bp, Homo sapiens
tgcagggctctgggcgggaaggctaacctggtgcggagccagcctgggtctcagccccgcgtacggcctttcacgagtcttcaagccttcaggctttcttctagtcaagatgagtgataaaccagacttgtcggaagtggagaagtttgacaggtcaaaactgaagaaaactaatactgaagaaaaaaatactcttccctcaaaggaaaaacttcattatgtgcgatatggcaagagagaaagtgaatacgctgatataagaagcaagaaaccttccttccttccagatgtgtgtcagtagaattacagagtgtccacggaaacagctcatgccctagtgtacagtggtgcagccaatgagtgacctgaagtctatgagcaacactcattgtcccaatgtgggacgagtgaccgaagctgaacccacaacagccttcctgtgatattccacgtggtggttaaaggcatggcgatgtgattctttacctgatgtttttgtttgcagtgtttgtaatcatggtcttttagggatatgaatccaaagctaagattaatatacgttccttgaccctaacatcaagttatacagagcattgtcagccattagaagaagtcagataacgcttatttcctcaaaagattggcatattaatattcacgttaatattaatacaggctacctttcattgtgctctcttctgggtcccaagtcttggtatttttagaatttttttttttctataagtgtattgctgaatttcagagcaggtgctgacttacccattgctttccttttccattgatttccagtcgcccgagtatgtggacaagagaacatactctgggattgcaacccacaggaatttattatgttgtgccttgaagctcaatatgtggccatttttgttaaatgtttcccgtaaattttgaaacatctcataaacaacccttctccttcatatgtagaaaccagtaaaggatggcactctcagtcaaaccacgaagcaaaagctggataaatgacaaaaatcaaaattttcttgagcccgtcagaagtgggaaagaaccaccccagagggacccaacacatagccacatagattatttcaccatttaaagaggaccccttggtcaagagggaaaagggttcggggcaggatagtagccagagcttccctgagtagtgcagatgggaagaggggaaggtcacctccagagctccacttgggatccatagagaaatgatatagaaccaagaagtccactcactgggatttgttactttctgtttttccagaatattagaaaaatattatgaaaatagttgaagagaaatgttatgaaaatagttgaaggagaccaagaaaaactcccacaaaatcagctgcaagtaaatccctctggatggtgccgccacatgttcctacaagtccagaacaacccttgccaaaccaaagacacttggcagaaccctgttcctttctagagacagagctgtatacctgttccaaaacaccacatctcactcagtgacttatttctcattatgctaattgttttgctgtaaagtgccaatgtttctgtgaattaagacatacgaataaatttctgaagttaaaaaaaaaaaaaaaaaaaaaaaaaaaaaaaaaaaaaaaaaaaaaaaaaaaaaaaaaaaaaaaaaaaaaaaaaaaaaaaaaaaaaaaaaaaaaaaaaaaaaaaaaaaaaaaaa

SEQ ID NO: 4183 - protein, 63 aa, Homo sapiens
MSDKPDLSEVEKFDRSKLKKTNTEEKNTLPSKEKLHYVRYGKRESEYADIRSKKPSFLPDVCQ

SEQ ID NO: 4184 - DNA, 935 bp, Homo sapiens
gaagctggcccgagatgtggagccatgctgcgtaccgaagtgccccggcttccccggtccacaaccgccattgtctggtcgtgccatctaatggccactgcctccgccatggctggaccttcctctgagacgacctctgaggaacagctgatcacccaggagcccaaagaggccaactccactacgtcccagaagcagagcaagcagaggaagcgagggcgccatgggccccgcaggtgccactccaactgccgcggggacagcttcgccacctatttccgccgggtgctgaagcaggttcaccagggcctcagcctttcccgggaggccgtgagtgtcatggattctttggttcatgacatattggaccgcatcgccaccgaggctggtcacctggcccgctccaccaagcgccagaccatcactgcctgggagacccggatggctgtgcgcctgctgctgccggggcagatgggcaagctcgccgagtccgaaggcacgaaggctgtcctcagaacttcactgtatgccatacagcaacagagaaagtgaatacgctgatacaagaagcaagaatattagaaaaatgtcatgaaaatagttgaagagaaatgctcactgcacaaggagaccaagaaaaaccccccacgaaatcagccacaactaaatcgctctggacggtgccgccaggtgaccctacatgtccggagcaacactttgaaaaccaaagacgcttggcagaaccctgttcctttccagagacagagctgtgtaccttgtctaaaacaccgcatctcactcagtgacttatttctcattatgctaattgttttcgctttaaagcgccagtctttctgtcaaatgggacatacaaataaatttctaaaattaaaaaaaaaaaaaaaaaaaaaaaaaaaaagaaaaaaaaaaaaaaa

SEQ ID NO: 4185 - protein, 175 aa, Homo sapiens
MLRTEVPRLPRSTTAIVWSCHLMATASAMAGPSSETTSEEQLITQEPKEANSTTSQKQSKQRKRGRHGPRRCHSNCRGDSFATYFRRVLKQVHQGLSLSREAVSVMDSLVHDILDRIATEAGHLARSTKRQTITAWETRMAVRLLLPGQMGKLAESEGTKAVLRTSLYAIQQQRK

SEQ ID NO: 4186 - DNA, 2157 bp, Homo sapiens
atgaagtgtcacgcagggagcctctcagcaaacctacctgcgttgaaggtgactggatggtcccgttgcgtggcatctcgtcaaccaatcacagtgggcgtctgcgggcctaagcgccccttgtggcccagctcggagaaaccattcaactttcatactttggcgaagctccatgacataggcctgggcaatgattttttggatatgaccctgaaagcccagcaacagaagcaaaaaagccatgcgaccataccaaagtgccccccacttccctggtccccaaccgtcactctctgttcttgctatctaatggccgctgcttccgccatggctgaggcttcctctgagacaacctcggaggaaggccagagcatccaggagcccaaagaggccaactccacgaaggcccagaagcagaagaggcgagggtgccgaggctcccgcaggcgccacgccaaccgccgtggggacagcttcggggacagcttcaccccctatttcccccgggtgctgaagcaggttcaccagggcctcagcctttcccaggaggccgtgagtgtcatggattctatgatccatgacatattggaccgcatcgccaccgaggctggtcagctggcccattacaccaagcgcgtgaccatcacctcccgggacatccagatggccgtgcgactgctgctgccggggaagatgggcaagctcgccgaggcccagggcacgaatgccgccctcagaacttcattatgtgcgatatggcaacagagaaagtgaatatgctgatacaagaagcaagaaaccttccttacttccaggtgtgtgtcagtaggattacggagtgtccacggaaacagctcatgccctagtgtacagtggtacagccaatgagtgacctgcagtctatgagcaacagtcattgacccaatgtggggggagtgacccaagctgaacccacagcagccttcctgttatattcaacctggtgtttaaaggaacggcagtgtgattctttacctgatgtttttgtttgcattgcttgtaatcatgatcttttagggatatgaatccaaagctaagattagaatatgtaccttgtccctaacatcaagttatacagaacattggcaaccattagtagaagtcagataaggcttatttcctcaaaagattagcatatttatattcatgttaatattaatataggctacctttcattgtgctctcttctgggtcccaagtcttggcattttaagcatttttttctataagtgtattgctgaatttcagagcaggtgctcactttcccattgctttccttttccattgatttccagtcgcccgagtatgtggacaagagaacatactctgggactgcaacccacaggaatttattatgttgtgccttgaagctcaacatgtggccatttttgttaaatgtttcccgtaaattttgaaacatctcataaacaacccttctccttcatatgtagaaaccagtaaaggatggcactctcagtcaaaccatgaaacaaaagctggataaatgacaaaaatcaaaattttcttgagcccatcagaagtgggaaagaaccaccccagagggcccaacacatagccacatagattattccaccatttaaagaggaccccttggtcaagagggaaacagggtcagggcaagatggtagccagagcttccctgagtagtgcagatgggaagaggggaaggtcacctccagagctccacttgggatccatagagaaatgatatagaaccaagaagtccactcattgggatctgttactttctgtttttccagattattagaaaaatattacagaaatagctgaagagaaatgttatgaaaatagttgaagttgtgcttattgcacgaggagaccaagaaaaaccccacaaaatcagctgcaagtaaatccttctggatggtgccaccaaatgttcctacaagtccggaacaacccttgccaaaccaaagacccttgccagaaccctgcttcttcccagagacagagctgtgtacctgacaaaacaccacatctcactcagtgacttatttctcattatgctaattgttttgctgtaaaatgccaatgtttctgtgaattaagacatacgaataaatttctgaagttacc

SEQ ID NO: 4187 - protein, 257 aa, Homo sapiens
MKCHAGSLSANLPALKVTGWSRCVASRQPITVGVCGPKRPLWPSSEKPFNFHTLAKLHDIGLGNDFLDMTLKAQQQKQKSHATIPKCPPLPWSPTVTLCSCYLMAAASAMAEASSETTSEEGQSIQEPKEANSTKAQKQKRRGCRGSRRRHANRRGDSFGDSFTPYFPRVLKQVHQGLSLSQEAVSVMDSMIHDILDRIATEAGQLAHYTKRVTITSRDIQMAVRLLLPGKMGKLAEAQGTNAALRTSLCAIWQQRK

SEQ ID NO: 4188 - DNA, 6241 bp, Homo sapiens
gggaagcaaagaggattgtgggagctccgttgtgcgtcgcttaagtgagggcggcggatgggcgaaggtccggtgactgcgactgtcgctgctttctgaggccacaggaaaggggccgtcggtcgccgccatgacagcgagcgaggcggagtttcttccatctgcacccagttgtcttcagcatgggggagcagaaccactctcccgggaaggagcttcagcacaggacgcgagcagaggctccaggaaagaaaagctggcattcccaggcctatgcccttggggccgtttccaactttatgtctacttttctgacctttcctatctataaggttgtgttccggcaacagatccatgccatggcagtgtcagaggctgtgagacagctttggcatgaaggtcctcaatacttctaccggggaatctaccctcctcttctctccaagacgttgcaagggactcttctgtttgggacttatgatagcctgctgtgctttctctctcctgttgggccacacaccctgggacaccgctgggctgccgggctcatgtctggcgtggtggaggccgtggcactcagcccctttgaaagggtgcaaaatgtgctccaggatggtcgcaagcaagctcgcttccccagcaccttctgcattctcaaggaattcaattcttatgggctttgggggcggctgtcactgggctactatcgtggtttctggcctgtcctggccaggaacagcctggggagtgctctatatttttctttcaaggaccccatccaggatggcctggcagagcaaggcctgccccactgggttcctgccttggtgtctggtagtgtcaatggaacaatcacctgcctagttctgtatcctctgattgtgctggttgctaatatgcagtcccatattggatggcagaacatgccaagcctgtgggcctctgcccaggatgtatggaacactcggggccgaaagctgctcctgatctaccgtggaggctccctagtcatcctaaggtccagtgtgacatggggcctcactacggcaatccatgacttcctgcagaggaagtcgcactccaggaaagagctgaagactgactagctgcagaaagtgtggcatggcagctttgttattctaaatcttccctggttggttctatatagcttacttctttggctaggttgcctaatacagccatcctttagcatctataaactcattgcatgggagaagttcccaactaccaacctgttgagcaaggacaaagcccaaaagtattccttagtcaaaaagaaacgttcaccccagtctctccacagtttcagtagcctcagagccaggaggcctttaaataacatgtaacccagattaagtgtcattcctttaaggaattccttggcaataaacagaaacttaaaaagatgaccttacttaggcactctgagctctgggacccctctaggtgtcctccagaccaaactgagtggaactccaatttcaaagaactatgcttgactcttaggatgggaattccataaaacttctcagatggctacattttcatgatattgttcactgcctctaccaccacctctcacttctcaaggctgtgggtcctactttcagggtagcagctgtggctggaaatcctaaattaggcttgcatgaactcgtcaggtgccacaagaactagtggggctggagatgggagtgagaagaggcgtggcccatggatggaaagaataaaaactttgaaagaaaagatttaattacatgcaaaatagaaacatttgctatagtctgcttggtgttatctgctaggacatttccgagagcaaggtgataacattgcctagaaaccgtttgagtttccctaagaaacctggaaatgaagtgaccatatctcttcacagaaaattgcatattttgttgatgtggttaaatgtagttactatgacataaagatcagaaatcttagcctgtcattcagagccattcaaaatatggtcatcatataactttcaacatattgtcactccacttacataaaccccaaacactagccataatgaactattgttctctccccagacattccatgaactttcccatggccatactctggcccacactattctttccacctgcagtgctccttcttcacatgccagtctaccaaaatccttccagttccttgaagcccagctcagaggtcaccttctctatggagttcttgattttcccctactgaatgtgacattagtctctgtgatgcccctttcttttttttttttttgagacggagtttcgctcttgttgcccaggctggagtgccaatggtgtgatctcagctcactgcaacctccacctcccggattcaagtgattctcctgcctcagcctcccgagtagctggaattacaggcgcccaccaccatgcctggctaattttgtatttttagtagagatggggtctctccatgttggtcaggctggtctcgaactcccaacctcatcaggtgatccacccacctcggtctcccaaagtgctgggattacaggcgtgagccaccgcgcccagcctctgtgatgcccctttctaacagcacttcatacagggtactgattccattatgtcactaatctcatgtgaccctttgttcttgtattcttcaatacctcctactagactgtaaaactcattgaaagcagggatttttgtatgcattttaaaatcttccattgtgcctaggtgctcaataacgttggtcaaattactgagttgattatcaagctgtgatatggtatatcctcagggtgctgtcccttgtacatgacgataaagttattgactcactgtcagcaagacacgtgcctttgggctgtgtttttgctttcttttaataattgatttagttttgtgctaatgataatgatgctgctactgataataataataacaataataaaaattactttcaactggcacatttgatgagtttatattactgatggcatgtttgctattagcaccagttcaggaactgaaatttcacaaacagaatcacactgtacaactgtaccatttgtttcaactctggaattttgaggatttccaagatgacatgtgttatagtttccccctacagatatcttagtaatgccctcctcttgcatctccttactgaaccaaatttgtcctgtatttgtcttacttggttgtagatttagcagtgagaacttctcactgaatgccacagaaattaaagacatggttgttggaggtatgatgtcagagagcatttgccaccaaggttggcagaaaatggctggtccaggagagctgaagatgagcttccacatctgcagatcgggatgtgttgggacagtactcaacttgtggattcaaggaagtatgaacacagagtctgcataaggaaaggaaaaagatgcattcatctcccaagtacaccggtgatttccacttatgtcattctgtccatccatgtccctttcttcattttaacttcttatttaaaaataatttcaaacatttaaaaatgttgcaagcataaataaagcttaaagaacacccatgtcccctttaccctaattcccctattattaatgtttctccccatttgctttattatttaagtgtgcactctgtctatacacacacaggatattttttccctgaactatctgagagttgcatacatcagttttcaatattcctagattcaatgtttgtagatccaaattattttttaagagaccgtgttttatctctgacaatgggacagttattacagaatataataaaatgaaaactcacacaatatatgtgatattgtgaaatatatacttggtctttgatcctgtttcttggcatacaactcctaaaatccttagaatttccaaagtgatatctttttgtatgctaataattgactgatggctggcagcctctggttgcttcaggatgggaactagtcaccaggaagaccaaggcaccattagagggttgggacttaacagcctcattcccgacctccagggaggggagagggatggaaggttaagttgatcaccagtggccaatgatttaatcaatcatgcctacgcaatgaagcttccataaaaaccccaaagcactgggtttggagagcttccagatagctgaacatgtggaggttcctggagggtggtgacccagggagggcacagaagctctgagccccttccgcagtacctcaccctatgcatctcttcatctctatcctttgatatatcctttataataaagtggtaaacgttaagtatttccccaagttctgtgaccctttctggcaaattaaacccaaagaaggggtcatgtgaactcaaacttgaagcccatctgtcagaagttctggaggcttggatttgcgactggtgtctgaagggcctgggaacagtcttgtgaaacctagtcctcagcttgtgggatatgacgctatctccaggtagattgtgtcagaatggaattggagtacacccagctggtgttcgctgcagaactgattgctcacttagtgtgtgggaaaactccacacatctggacatggaaatattctgtgctgattgccgtggtgtaagagcaatgcaaaaagtttgggtattttcccctcggagtatattttgaagctaaattgctaataattgcttaaatttactatatttgcctttataaaaactttatgtatgttgaagcttgaagctatgcaattataatataaacatggatttacaactaaagcatgttataatttaaataattgagtttttcaaatcggttcatatgaaatcctaggcaatattgtaaaattatacagacctgtcaactttttccacttaaaagttgtgagcaaaatttaagggcatagtcgttttcaagtaattttaaatgtcaatgttaatatttagtttagtgatgttaatggagctatgttttctgatattaaaaatgagttttaggagttgagaccaataaaataaggaggtaataaatatctatatctgtttaaacacataaaatatacaatttaacactaaaattacttggtataaaaagtcaaaaaaaggaataaaaagccatcatacaacacaatatatgcgtgatatatatttttctctaaatataaactacatcagcttttataaagctcaagttgaaataataacgttttatgacaaatcattatatggtatattctgacttaattttgcatttacaatttatttttaaacactaaatagcattataattttactgggataactatatatagtgtagtatattaaagttaataaaatgacgttgcatatgagagaaaaagcataataaatcagaaacaatataaaaagctttcagaaaagataaaaatattgtatttctctagtctgttcactctccagtgtctctggttctttcatatcatcttcctttcctcaaatcttttaatactccctccctcatcatttccaactagtgaccctactttctatttcattaagaaaacagatacattcagaagagaactgccagtttaaagaacatttacaaagccatcacccatgtaataaccagccagagcaagaaatagagccctttaataacctactcttctccccccaccactgatgacaccgctccctccatcttaggtgtagcccccatgctgacttttgtaataataatttctttgcttttgtttataagttttcttccttataagcatctctaaacaacagttttgttttacagatgttcaaacattaaatgctttttagacttggaattgtgactatcttgtttcactccacattgcttgtgagactcattgatattgcagatagctgtagttgatccatttttattgttgtacagtttaccattgtataaatataccatgatttattcatgataactttgaggaacattctggttgtttgcaggttttatttttacagttcattagttttattgatgtataataattgtatatgtttatggggtatatgtgatattttgatacatgtgtacaatgtgtaatgattaaatcaaggtaattgggatatccatcagctcaaacatttatcatttctttgcattgggaacattccaaatcttctcttctagctattttgaaatacacaataaattgaatactgtggtcaaaaaaaaaaaaaaaa

SEQ ID NO: 4189 - protein, 307 aa, Homo sapiens
MGEQNHSPGKELQHRTRAEAPGKKSWHSQAYALGAVSNFMSTFLTFPIYKVVFRQQIHAMAVSEAVRQLWHEGPQYFYRGIYPPLLSKTLQGTLLFGTYDSLLCFLSPVGPHTLGHRWAAGLMSGVVEAVALSPFERVQNVLQDGRKQARFPSTFCILKEFNSYGLWGRLSLGYYRGFWPVLARNSLGSALYFSFKDPIQDGLAEQGLPHWVPALVSGSVNGTITCLVLYPLIVLVANMQSHIGWQNMPSLWASAQDVWNTRGRKLLLIYRGGSLVILRSSVTWGLTTAIHDFLQRKSHSRKELKTD

SEQ ID NO: 4190 - DNA, 2985 bp, Homo sapiens
gtgaggcgagcctggagctcatttccaggcgcccttccctcttcggaactaagggagacttgtgggcttttgcacactggctgtagggttcccgggaaagactggagcagcgaacaggagggagagaggtggacaggcagagtctgcacctgccgcctgcacctccgttagggcgacagggcagctggtgtttcgctcctggagtgtgcctacctcgcaaggggggcgagggccacaggctgaggcgcccgcgtcccggagtgcaccgcttggccgaggcaaggtgttgctggggcaaggctgctccgaagcgaagtcgcgcaaaaggaagagtctgggaggcaggcgacttaggagagtctagtcactgagagacagaggcagcatctgccattctaactacggagctgagtaatttagaaaccctccttaactctccctttccagctctccccaaagtccacagaagctctgctgaactctagaaatcttccctggctggggggaagtttactagtatcctctttggctaagacagggagtggaaaaaacaggcggggctgtactgtccgctgtttggggagacgcggtcttcctcgcgcccccttcagccactccgactgcctgggaagtcccagcccgcgctctccggaacccggctcgccgtctcgccctggacatggaactacgcatctgagacctgctggacgttttgctggccgttttgcaagactcagctgtcaagaaaagtgaaggatgaagccaccatttcttttggcccttgtggtctgttctgtagtcagcacaaatctgaagatggtgtcaaagagaaattctgtggatggctgcattgactggtcagtggatctcaagacatacatggctttggcaggtgaaccagtccgagtgaaatgtgcccttttctacagttatattcgtaccaactatagcacggcccagagcactgggctcaggcttatgtggtacaaaaacaaaggtgatttggaagagcccatcatcttttcagaggtcaggatgagcaaagaggaagattcaatatggtttcactcagctgaggcacaagacagtggattctacacttgtgttttaagaaactcaacatattgcatgaaggtgtcaatgtccttgactgttgcagagaatgaatcaggcctgtgctacaacagcaggatccgctatttagaaaaatctgaagtcactaaaagaaaggagatctcctgtccagacatggatgactttaaaaagtccgatcaggagcctgatgttgtgtggtataaggaatgcaagccaaaaatgtggagaagcataataatacagaaaggaaatgctcttctgatccaagaagttcaagaagaagatggaggaaattacacatgtgaacttaaatatgaaggaaaacttgtaagacgaacaactgaattgaaagttacagctttactcacagacaagcctcccaagccattgttccccatggagaatcagccaagtgttatagatgtccagctgggtaagcctctgaacatcccctgcaaagcattcttcggattcagtggagagtctgggccaatgatctactggatgaaaggagaaaagtttattgaagaactggcaggtcacattagagaaggtgaaataaggcttctcaaagagcatcttggagaaaaagaagttgaattggcactcatctttgactcagttgtggaagctgacctggcgaattatacctgccatgttgaaaaccgaaatggacggaaacatgccagtgttttgctgcgtaaaaaggatttaatctataaaattgagcttgcagggggcctgggagcaatcttcctcctccttgtactgctggtggtcatttacaaatgctacaacattgaattgatgctcttctacaggcagcactttggagctgatgaaactaatgatgacaacaaggaatatgatgcctatctctcttacacaaaagtggaccaagatactttagactgtgacaatcctgaagaagagcagtttgctcttgaagtactgccagatgtcctggaaaaacactatggatataaactcttcatcccagaaagagacctgattccaagtggaacatacatggaagatctcacaagatatgttgaacaaagcagaagacttattatcgtgctaactccagactatattctcagacggggatggagtattttcgaactggaaagcagactccataacatgctagtcagtggagaaatcaaagtgattttgattgagtgtacagaattaaaagggaaagtgaattgccaggaagtggaatcactaaagcgtagcatcaaacttctgtccctgatcaagtggaagggatccaaaagcagcaaattaaattctaagttttggaagcacttagtatatgaaatgcccatcaagaaaaaagaaatgctacctcggtgccatgttctggactccgcagaacaaggactttttggagaactccagcctataccctctattgccatgaccagtacttcagccactctggtgtcatctcaggctgatctccctgaattccacccttcagattcaatgcaaatcaggcactgttgcagaggttataaacatgagataccagccacgaccttgccagtaccttccttaggcaaccaccatacttattgtaacctgcctctgacgctactcaacggacagctaccccttaataacaccctgaaagatacccaggaatttcacaggaacagttctttgctgcctttatcctccaaagagcttagctttaccagtgatatttggtagtgaaaaatctgaattcctctgaacagctagataagcatagagaatttctgttataccaagcataaagtacacctaataacgttgtgttaaaaaagtgtttgaagaaaaaggtacaaaaatggcttttatacttaaatatttttgtttacatttccagaatagtggggg

SEQ ID NO: 4191 - protein, 686 aa, Homo sapiens
MKPPFLLALVVCSVVSTNLKMVSKRNSVDGCIDWSVDLKTYMALAGEPVRVKCALFYSYIRTNYSTAQSTGLRLMWYKNKGDLEEPIIFSEVRMSKEEDSIWFHSAEAQDSGFYTCVLRNSTYCMKVSMSLTVAENESGLCYNSRIRYLEKSEVTKRKEISCPDMDDFKKSDQEPDVVWYKECKPKMWRSIIIQKGNALLIQEVQEEDGGNYTCELKYEGKLVRRTTELKVTALLTDKPPKPLFPMENQPSVIDVQLGKPLNIPCKAFFGFSGESGPMIYWMKGEKFIEELAGHIREGEIRLLKEHLGEKEVELALIFDSVVEADLANYTCHVENRNGRKHASVLLRKKDLIYKIELAGGLGAIFLLLVLLVVIYKCYNIELMLFYRQHFGADETNDDNKEYDAYLSYTKVDQDTLDCDNPEEEQFALEVLPDVLEKHYGYKLFIPERDLIPSGTYMEDLTRYVEQSRRLIIVLTPDYILRRGWSIFELESRLHNMLVSGEIKVILIECTELKGKVNCQEVESLKRSIKLLSLIKWKGSKSSKLNSKFWKHLVYEMPIKKKEMLPRCHVLDSAEQGLFGELQPIPSIAMTSTSATLVSSQADLPEFHPSDSMQIRHCCRGYKHEIPATTLPVPSLGNHHTYCNLPLTLLNGQLPLNNTLKDTQEFHRNSSLLPLSSKELSFTSDIW

SEQ ID NO: 4192 - DNA, 1390 bp, Homo sapiens
gggagagagatcttcctctctcttcgggcgtgttaagacagcggggttggcctgtacttcctctggccctggctgaagagggctagtgaaaccgttaaacccctaggcgatcatggccttgagacctgaggaccccagtagcgggttccggcatagcaacgtggtggccttcatcaacgagaaaatggccaggcacacgaaaggccccgagttctatcttgagaatatatccttatcctgggagaaggtggaagacaagctgagggccatactggaggacagcgaggtgcccagtgaggtcaaagaggcctgcacctggggcagcctggccttgggtgtgcgctttgcccacaggcaggcacagctacaaaggcacagggtgcggtggctgcacggcttcgccaaactgcacaaatcagccgcacaggccttggcatcagacctgaagaagctcagggagcagcaggagacggaacgcaaggaggcggcctcccggctaagaatggcccagaccagcctcgtggaggtgcagaaagagagagacaaggagctggtgtctccccatgagtgggagcagggggcagggtggccaggcctggccactgccggaggggtttgcacagaaggagcagctgaggaggaagaagaggcggcggtggctgctgctggtgctgctggaggaaaaggagcagaagaagagcagagggatgtggaggttgtggctgcccctgtggaggccatggctccccctgtggaggctggggctgcccccatggagacccagttcccccacgtggaggccagggctgcctccatggagaccacagagaagctggagagaatcctcctgcagctccttggagatgctgatcaggaaaagtacacctattgggggcagaaggagggagatctccggtcggtcgaaacagccacatcttatttctctggaaccacgaacccctggtccagagcctcatcagaacctcttcctgtccagctccctgcctcatactcatactcatactcaagccctttttcctccttctcagacatacccactatatcccctccacaagcaacagtcacagcaccagttccgcctcagctgccttccgactgggaggcctttgatactagcctgtggtctgatggggggccccacagaatagaccatcaggagcacccaagagacaggagatactccgaacctcatcagcaaagacctccagtatatcgcaggccaggggactgggactgcccttggtgtaacgctgtgaatttttcacggagggatacttgcttcgactgtgggaagggaatctggctgcaaaaacctcattgagtgcagaaatgcaaaatagaaccgaagcatgtataaaaaaaaaaaaaa

SEQ ID NO: 4193 - protein, 409 aa, Homo sapiens
MALRPEDPSSGFRHSNVVAFINEKMARHTKGPEFYLENISLSWEKVEDKLRAILEDSEVPSEVKEACTWGSLALGVRFAHRQAQLQRHRVRWLHGFAKLHKSAAQALASDLKKLREQQETERKEAASRLRMAQTSLVEVQKERDKELVSPHEWEQGAGWPGLATAGGVCTEGAAEEEEEAAVAAAGAAGGKGAEEEQRDVEVVAAPVEAMAPPVEAGAAPMETQFPHVEARAASMETTEKLERILLQLLGDADQEKYTYWGQKEGDLRSVETATSYFSGTTNPWSRASSEPLPVQLPASYSYSYSSPFSSFSDIPTISPPQATVTAPVPPQLPSDWEAFDTSLWSDGGPHRIDHQEHPRDRRYSEPHQQRPPVYRRPGDWDCPWCNAVNFSRRDTCFDCGKGIWLQKPH

SEQ ID NO: 4194 - DNA, 8082 bp, Homo sapiens
ggacagcgctctcgacacggagcacccttctagcttcttcgtctccaggactgacgctcaggctcctctctcgccttagcccaacttgctttcccgcctcgcaaactccggtttccctccactcccaactcttttcactacacgtttcccctcctctatctcccacgccacgaaccccgatccccagactcctctctcccgccctcctccttcctctctcctcccttcaactcttcatccgcttccacctcagactctgcgcgcacccaattcagtcgcccgctcccgttcggctcctcgaagccatggcgggacctgggggctggagggacagggaggtcacggatctgggccacctgccggatccaactggaatattctcactagataaaaccattggccttggtacttatggcagaatctatttgggacttcatgagaagactggtgcatttacagctgttaaagtgatgaacgctcgtaagacccctttacctgaaataggaaggcgagtgagagtgaataaatatcaaaaatctgttgggtggagatacagtgatgaggaagaggatctcaggactgaactcaaccttctgaggaagtactctttccacaaaaacattgtgtccttctatggagcatttttcaagctgagtccccctggtcagcggcaccaactttggatggtgatggagttatgtgcagcaggttcggtcactgatgtagtgagaatgaccagtaatcagagtttaaaagaaggttggattgcttatatctgccgagaaatccttcagggcttagctcaccttcacgcacaccgagtaattcaccgggacatcaaaggtcagaatgtgctgctgactcataatgctgaagtaaaactggttgattttggagtgagtgcccaggtgagcagaactaatggaagaaggaatagtttcattgggacaccatactggatggcacctgaggtgattgactgtgatgaggacccaagacgctcctatgattacagaagtgatgtgtggtctgtgggaattactgccattgaaatggctgaaggagcccctcctctgtgtaaccttcaacccttggaagctctcttcgttattttgcgggaatctgctcccacagtcaaatccagcggatggtcccgtaagttccacaatttcatggaaaagtgtacgataaaaaatttcctgtttcgtcctacttctgcaaacatgcttcaacacccatttgttcgggatataaaaaatgaacgacatgttgttgagtcattaacaaggcatcttactggaatcattaaaaaaagacagaaaaaaggaatacctttgatctttgaaagagaagaagctattaaggaacagtacaccgtgagaagattcagaggaccctcttgcactcacgagcttctgagattgccaaccagcagcagatgcagaccacttagagtcctgcatggggaaccctctcagccaaggtggctacctgatcgagaagagccacaggtccaggcacttcagcagctacagggagcagccagggtattcatgccactgcaggctctggacagtgcacctaagcctctaaaggggcaggctcaggcacctcaacgactacaaggggcagctcgggtgttcatgccactacaggctcaggtgaaggctaaggcctctaaacctctacaaatgcagattaaggcacctccacgactacggagggcagccagggtgctcatgccactacaggcacaggttagggcacctaggcttctgcaggtacagtcccaggtatccaaaaagcagcaggcccagacccagacatcagaaccacaagatttggaccaggtaccagaggaatttcagagtcaagatcaggtacccgaacaacaaaggcagggccaggcccctgaacaacagcagaggcacaaccaggtgcctgaacaagagctggagcagaaccaggcacctgaacagccagaggtacaggaacaggctgccgagcctgcacaggcagggactgaggcagaggaacctgagtcattacgagtaaatgcccaggtatttctgcccctgctatcacaagatcaccatgtgctgttgccactacatttggatactcaggtgctcattccagtagaggggcaaactgaaggatcacctcaggcacaggcttggacactagagcccccacaggcaattggctcagttcaagcactgatagagggactatcaagagacttgcttcgggcgccaaactcaaataactcaaagccacttggtccgttgcaaaccctgatggaaaatctgtcatcaaataggttttactcacaaccagaacaggcacgggagaaaaaatcaaaagtttctactctgaggcaagcactggcaaaaagactatcaccaaagaggttcggggcaaagtcatcatggagacctgaaaagcttgaactctcggatttagaagcccgcaggcaaaggcgccaacgcagatgggaagatatctttaatcagcatgaggaagaattgagacaagttgataaagacaaagaagatgaatcatcagacaatgatgaagtatttcattcgattcaggctgaagtccagatagagccattgaagccatacatttcaaatcctaaaaaaattgaggttcaagagagatctccttctgtgcctaacaaccaggatcatgcacatcatgtcaagttctcttcaagcgttcctcagcggtctcttttggaacaagctcagaagcccattgacatcagacaaaggagttcgcaaaatcgtcaaaattggctggcagcatcagaatcttcttctgaggaagaaagtcctgtgactggaaggaggtctcagtcatcaccaccttattctactattgatcagaagttgctggttgacatccatgttccagatggatttaaagtaggaaaaatatcaccccctgtatacttgacaaacgaatgggtaggctataatgcactctctgaaatcttccggaatgattggttaactccggcacctgtcattcagccacctgaagaggatggtgattatgttgaactctatgatgccagtgctgatactgatggtgatgatgatgatgagtctaatgatacttttgaagatacctatgatcatgccaatggcaatgatgacttggataaccaggttgatcaggctaatgatgtttgtaaagaccatgatgatgacaacaataagtttgttgatgatgtaaataataattattatgaggcgcctagttgtccaagggcaagctatggcagagatggaagctgcaagcaagatggttatgatggaagtcgtggaaaagaggaagcctacagaggctatggaagccatacagccaatagaagccatggaggaagtgcagccagtgaggacaatgcagccattggagatcaggaagaacatgcagccaatataggcagtgaaagaagaggcagtgagggtgatggaggtaagggagtcgttcgaaccagtgaagagagtggagcccttggactcaatggagaagaaaattgctcagagacagatggtccaggattgaagagacctgcgtctcaggactttgaatatctacaggaggagccaggtggtggaaatgaggcctcaaatgccattgactcaggtgctgcaccgtcagcacctgatcatgagagtgacaataaggacatatcagaatcaccaacacaatcagatttttctgccaatcactcatctccttccaaaggttctgggatgtctgctgatgctaactttgccagtgccatcttatacgctggattcgtagaagtacctgaggaatcacctaagcaaccctctgaagtcaatgttaacccactctatgtctctcctgcatgtaaaaaaccactaatccacatgtatgaaaaggagttcacttctgagatctgctgcggttctttgtggggagtcaatttgctgttgggaacccgatctaatctatatctgatggacagaagtggaaaggctgacattactaaacttataaggcgaagaccattccgccagattcaagtcttagagccactcaatttgctgattaccatctcaggtcataagaacagacttcgggtgtatcatctgacctggttgaggaacaagattttgaataatgatccagaaagtaaaagaaggcaagaagaaatgctgaagacagaggaagcctgcaaagctattgataagttaacaggctgtgaacacttcagtgtcctccaacatgaagaaacaacatatattgcaattgctttgaaatcatcaattcacctttatgcatgggcaccaaagtcctttgatgaaagcactgctattaaagtatgcattgatcaatcagcagactctgaaggagactacatgtcctatcaagcctatatacgaatactggcaaaaatacaggcagctgatccagtgaaccggtttaagagaccagatgagctccttcatttgctgaagctcaaggtatttccaacacttgatcataagccagtgacagttgacctggctattggttctgaaaaaagactaaagattttcttcagctcagcagatggatatcacctcatcgatgcagaatctgaggttatgtctgatgtgaccctgccaaagaatcccctggaaatcattataccacagaatatcatcattttacctgattgcttgggaattggcatgatgctcaccttcaatgctgaagccctctctgtggaagcaaatgaacaactcttcaagaagatccttgaaatgtggaaagacataccatcttctatagcttttgaatgtacacagcgaaccacaggatggggccaaaaggccattgaagtgcgctctttgcaatccagggttctggaaagtgagctgaagcgcaggtcaattaagaagctgagattcctgtgcacccggggtgacaagctgttctttacctctaccctgcgcaatcaccacagccgggtttacttcatgacacttggaaaacttgaagagctccaaagcaattatgatgtctaaaagtttccagtgatttattaccacattataaacatcatgtataggcagtctgcatcttcagatttcagagattaaatgagtattcagttttatttttagtaaagattaaatccaaaactttacttttaatgtagcacagaatagttttaatgagaaatgcagctttatgtataaaattaactatagcaagctctaggtactccaatggtgtacaatgtcttttgcacaaactttgtaacttttgttactgtgaattcaaacattactctttggacagtttggacagtatctgtattcagattttacaacatggagtaaagaaacctgttatgaattagattacaagcagccttcaaaagaattggcactgggataagatttttcagaaaaagaaaaacatcggcaaactgtgtgtgatttttccaaagctatataaagaaccaaaggtttagtcaagaaacaaaaatcttaaagattattataacccagactaaggttgaacaacctgcatgcccagagaaaactatggcgacaaaggggaaaaggccaccactcgttttctcactgattcatgccaattaagcctacagttaaagaccagttttgttcttttcacccatttttaagctggttttctcctgataagaagaaaggaagaaagccccagacgcttggtttttctcagaacccccaaaagatgtgcaatagctgttgttacaaaccaccaaataatacagttgtgagcctgaatacaggactgaactcctatacacgtgtactgtagaatgagtattttttaataccttaaggtaggcgtcaaattctactccccaaagcagagatggattgatttatcaaaattattatctggccaacagtgtgactatcagacagcatcaaatatttgcccaatccaagattagactacacaaaagcttccttccagtattaaacaaaaagaattaaacataactatgaaaaaactttgctaatatctgtgtttttcagatttcattttttgtaaaatcagaaattaatctaaacatattcagtgataagttcatgtgtaacgacttaatgttaaaggttaaaaaaaagatttcacaaaatatacaactttcaccatatatataagcctgcaaaattagagtagtgaaagtcatgctagtccatcacccaaatatgttatagacgccatagacaggtgatgtttggtcacctatggtaactgctacctgatgaagagcataatttctgcatatccatcctcaataccatggtaaattctggggcaatagagaagcaacagaactgccacaaagtatacctcaatataattcctctagttctgcttctaaaatctgaggacagtgctagtgggaaaataattttcaaactacctggttaaccaaaatacaaaagcagctgactatgtgtgatttcataatagcacatttcttgacacttagtgctagaaatgaagatttggattttcctaacaacttacatcaagaatgtagtgtagctcattattgagaatttaggaaagcctgaatccattaattaaggaaataaatgtgactcacatttcttttactgtgacacaataatgtgatcctaaaactggcttatccttgagtgtttacaactcaaacaactttttgaatgcagtagttttttttttttaaaaacaaacttttatgtcaaattttttttcttagaagtagtcttcattattataaatttgtacaccaaaaggccatggggaactttgtgcaagtacctcatcgctgagcaaatggagcttgctatgttttaatttcagaaaatttcctcatatacgtagtgtgtagaatcaagtcttttaataattcattttttcttcataatatttactcaaagttaagcttaaaaataagttttatcttaaaatcatatttgaagacagtaagacagtaaactattttaggaagtcaacccccattgcactctgtggcagttattctggtaaaaataggcaaaagtgacctgaatctacaatgatgtcccaaagtaaccaagtaagagagattgtaaatgataaaccgagctttaaaggataaagtgttaataaagaaaggaagctgggcacatgtcaaaaagggagatcgaaatgttaggtaatcatttagaaaggacagaaaatatttaaagtggctcataggtaatgaatatttctgacttagatgtaaatccatctggaatctttacatcctttgccagctgaaacaagaaagtgaagggacaatgatatttcatggtcagtttattttgtaagagacagaagaaattatatctatacattaccttgtagcagcagtacctggaagccccagcccgtcacagaagtgtggaggggggctcctgactagacaatttccctagcccttgtgatttgaagcatgaaagttctggcaggttatgagcagcactagggataaagtatggttttattttggtgtaatttaggtttttcaacaaagcccttgtctaaaataaaaggcattattggaaatatttgaaaactagaaaatgatggataaaagggctgataagaaaatttctggctgtcagtagaagtgagataagatcctcagaggaaacagtaagaagggataatcattaagatagtaaaacaggcaaagcagaatcacatgtgcacacacacatacacatgtaaacattggaatgcataagttttaatattttagcgctatcagtttctaaatgcattaattactaactgccctctcccaagattcatttagttcaaacagtatccgtaaactaggaataatgccacatgcattcaatgggaccttttaagtactcttcagtttgttccaagaaatgtgcctactgaaatcaaattaatttgtattcaatgtgtacttcaagactgctaattgtttcatctgaaagcctacaatgaatcattgttcaaccttgaaaaataaaattttgtaaatcaaaaaaaaaaaaaaaaaaa

SEQ ID NO: 4195 - protein, 1582 aa, Homo sapiens
MAGPGGWRDREVTDLGHLPDPTGIFSLDKTIGLGTYGRIYLGLHEKTGAFTAVKVMNARKTPLPEIGRRVRVNKYQKSVGWRYSDEEEDLRTELNLLRKYSFHKNIVSFYGAFFKLSPPGQRHQLWMVMELCAAGSVTDVVRMTSNQSLKEGWIAYICREILQGLAHLHAHRVIHRDIKGQNVLLTHNAEVKLVDFGVSAQVSRTNGRRNSFIGTPYWMAPEVIDCDEDPRRSYDYRSDVWSVGITAIEMAEGAPPLCNLQPLEALFVILRESAPTVKSSGWSRKFHNFMEKCTIKNFLFRPTSANMLQHPFVRDIKNERHVVESLTRHLTGIIKKRQKKGIPLIFEREEAIKEQYTVRRFRGPSCTHELLRLPTSSRCRPLRVLHGEPSQPRWLPDREEPQVQALQQLQGAARVFMPLQALDSAPKPLKGQAQAPQRLQGAARVFMPLQAQVKAKASKPLQMQIKAPPRLRRAARVLMPLQAQVRAPRLLQVQSQVSKKQQAQTQTSEPQDLDQVPEEFQSQDQVPEQQRQGQAPEQQQRHNQVPEQELEQNQAPEQPEVQEQAAEPAQAGTEAEEPESLRVNAQVFLPLLSQDHHVLLPLHLDTQVLIPVEGQTEGSPQAQAWTLEPPQAIGSVQALIEGLSRDLLRAPNSNNSKPLGPLQTLMENLSSNRFYSQPEQAREKKSKVSTLRQALAKRLSPKRFGAKSSWRPEKLELSDLEARRQRRQRRWEDIFNQHEEELRQVDKDKEDESSDNDEVFHSIQAEVQIEPLKPYISNPKKIEVQERSPSVPNNQDHAHHVKFSSSVPQRSLLEQAQKPIDIRQRSSQNRQNWLAASESSSEEESPVTGRRSQSSPPYSTIDQKLLVDIHVPDGFKVGKISPPVYLTNEWVGYNALSEIFRNDWLTPAPVIQPPEEDGDYVELYDASADTDGDDDDESNDTFEDTYDHANGNDDLDNQVDQANDVCKDHDDDNNKFVDDVNNNYYEAPSCPRASYGRDGSCKQDGYDGSRGKEEAYRGYGSHTANRSHGGSAASEDNAAIGDQEEHAANIGSERRGSEGDGGKGVVRTSEESGALGLNGEENCSETDGPGLKRPASQDFEYLQEEPGGGNEASNAIDSGAAPSAPDHESDNKDISESPTQSDFSANHSSPSKGSGMSADANFASAILYAGFVEVPEESPKQPSEVNVNPLYVSPACKKPLIHMYEKEFTSEICCGSLWGVNLLLGTRSNLYLMDRSGKADITKLIRRRPFRQIQVLEPLNLLITISGHKNRLRVYHLTWLRNKILNNDPESKRRQEEMLKTEEACKAIDKLTGCEHFSVLQHEETTYIAIALKSSIHLYAWAPKSFDESTAIKVCIDQSADSEGDYMSYQAYIRILAKIQAADPVNRFKRPDELLHLLKLKVFPTLDHKPVTVDLAIGSEKRLKIFFSSADGYHLIDAESEVMSDVTLPKNPLEIIIPQNIIILPDCLGIGMMLTFNAEALSVEANEQLFKKILEMWKDIPSSIAFECTQRTTGWGQKAIEVRSLQSRVLESELKRRSIKKLRFLCTRGDKLFFTSTLRNHHSRVYFMTLGKLEELQSNYDV

SEQ ID NO: 4196 - DNA, 1559 bp, Homo sapiens
attaacttccttccaaaatgtcaccattcctgtacctggttctcttggtacttgggcttcatgctacaatccactgtgcatcacctgaaggcaaagtaacagcctgccattcatcccaaccaaatgccactctctacaagatgtcatccattaatgctgactttgcattcaatctgtaccggaggttcactgtggagaccccagataagaacatcttcttttcccctgtgagcatttctgcagctttggttatgctttcctttggggcctgctgcagcacccaaactgagattgtggagaccttggggttcaacctcacagacactccaatggtagagatccagcatggcttccagcatctgatctgttcactgaattttccaaagaaggaactggaattgcagataggaaatgccctcttcattggcaagcatctgaaaccactggcaaagttcttgaatgatgtcaagaccctctatgagactgaagtcttttctaccgacttctccaacatttctgcagccaagcaggagattaacagtcatgtggagatgcaaaccaaagggaaagttgtgggtctaattcaagacctcaagccaaacaccactatggtcttagtgaactatattcactttaaagcccagtgggcaaatccttttgatccatccaagacagaagacagttccagcttcttaatagacaagaccaccactgttcaagtgcccatgatgcaccagatggaacaatactatcacctagtggatatggaattgaactgcacagttctgcaaatggactacagcaagaatgctctggcactctttgttcttcccaaggagggacagatggagtcagtggaagctgccatgtcatctaaaacactgaagaagtggaaccgcttactacagaagggatgggttgacttgtttgttccaaagttttccatttctgccacatatgaccttggagccacacttttgaagatgggcattcagcatgcctattctgaaaatgctgatttttctggactcacagaggacaatggtctgaaactttccaatgctgcccataaggctgtgctgcacattggtgaaaagggaactgaagctgcagctgtccctgaagttgaactttcggatcagcctgaaaacactttcctacaccctattatccaaattgatagatctttcatgttgttgattttggagagaagcacaaggagtattctctttctagggaaagttgtgaacccaacggaagcgtagttgggaaaaaggccattggctaattgcacgtgtgtattgcaatgggaaataaataaataatatagcctggtgtgattgatgtgagcttggacttgcattcccttatgatgggatgaagattgaaccctggctgaactttgttggctgtggaagaggccaatcctatggcagagcattcagaatgtcaatgagtaattcattattatccaaagcataggaaggctctatgtttgtatatttctctttgtcagaatacccctcaactcatttgctctaataaatttgactgggttg

SEQ ID NO: 4197 - protein, 415 aa, Homo sapiens
MSPFLYLVLLVLGLHATIHCASPEGKVTACHSSQPNATLYKMSSINADFAFNLYRRFTVETPDKNIFFSPVSISAALVMLSFGACCSTQTEIVETLGFNLTDTPMVEIQHGFQHLICSLNFPKKELELQIGNALFIGKHLKPLAKFLNDVKTLYETEVFSTDFSNISAAKQEINSHVEMQTKGKVVGLIQDLKPNTTMVLVNYIHFKAQWANPFDPSKTEDSSSFLIDKTTTVQVPMMHQMEQYYHLVDMELNCTVLQMDYSKNALALFVLPKEGQMESVEAAMSSKTLKKWNRLLQKGWVDLFVPKFSISATYDLGATLLKMGIQHAYSENADFSGLTEDNGLKLSNAAHKAVLHIGEKGTEAAAVPEVELSDQPENTFLHPIIQIDRSFMLLILERSTRSILFLGKVVNPTEA

SEQ ID NO: 4198 - DNA, 3958 bp, Homo sapiens
ttttcaagaggctgcagctgacaagaagcttcaagcataggttaatatcagagaagcacatgacctgggcaatctgcatgtgatgccaaccaagccttggaaagacagtgcaaccacagaagtgccgagctgggtaaaggccctgctggacaagcagttggagtgagaatcaagacagccggaccacaggaccagacccaccaggatccacatgacagtggtatcttccggtatcatcctattcaaacaacgtgttcaagcatccttggaaaattgaggtggagaacaggccacacaagctgtaaaccctttgtagtcataagacgaaagaggatttgttaagagtattgttttgggtagaacttgcattagcagtgacaaagatagccacctcaacctttggtaataacccttggcacacaaatataaaccataatggagtctgagtatgtcctatgcgactggaaagaccagttgtggccagcaaaagttttgtccagatctgaaacttcatcaaacagtaagaggaaaaaggcattttctctagaagttcaaatactctcactagatgaaaaaattaaattggacagcacagaaacaaagatcctaaataaatctcaaattgaagccattgctgcctcattaggactacagtcagaggacagtgctccacctacagaggaaactgcctatggaagatcactaaaagtggcactgggtattctgaatgagagaacaaatttgagtcaagcaagcacttcagatgaagaggagatcactatgctgtctcaaaatgtaccacaaaaacagtccgattcaccccctcataaaaaataccggaaggatgaaggtgacttaccagggtgtcttgaggaaagggaaaactcagcatgcttgttagcatcttcagagagtgatgattccctgtatgatgataaatcacaagcacccacaatggtcgatactattccaagtgaagtggaaacaaagtcattacaaaactctagctggtgcgagactttcccttcactttcggaagataatgatgaaaaagagaacaagaataagattgatatctcagcagttatgtctgtgcattctgcagtcaaagaggaaagtgcatgtgttaaagatgaaaagtttgctccacctttgtcacctttgtcatcagatatgctcattatgcccaaagctttgaaagaagagagcgaggatacctgcctagagaccctggctgttccctctgaatgctctgctttctcagagaatattgaggatcctggagagggtccctcaaatccatgcttagataccagccagaatcaaccttccatggaatcagagatgggggctgcagcatgccctgggagttgttcaagggaatgcgaggtttcatttagtgcctctaaccctgtctgggattattcacatcttatgagtagtgaaagaaattttcagagactggattttgaagaacttgaggaagaaggtcaagcctctgacaagtcattgcttccaagtcgcattaatctttctctattagatgatgatgaggaagacgaagaacttccacgcttcattttacattatgagacacatccgtttgaaacaggaatgatagtctggtttaaatatcagaaatatccattttggccagcagtgataaaaagtatcagacgaaaagagaggaaagcaagtgtgctttttgttgaggcaaacatgaattctgaaaagaagggcattagagtaaattttagaagattaaagaaatttgattgtaaagagaaacaaatgctagtggacaaagccagggaggattatagtgagagtattgactggtgcatctcactaatttgtgactacagagttagaataggttgtggttctttcacgggctctttgcttgagtattatgctgctgatattagttacccagttaggaaagaaacaaaacaggatactttcaggaacaaatttccaaagctgcataatgaagatgccagggaaccgatggctgtaacttcccagaccaagaaaatgtccttccaaaaaattctccctgaccggatgaaggctgctcgggaccgagccaacaagaacctggtggacttcattgtgaatgcaaagggaacagagaaccatcttctggccattgtaaatggcacaaaaggatccagatggctgaaatcatttttgaatgcaaataggttcacaccctgtattgaaacatactttgaggatgaagatcagttggatgaagtggtgaaatatttacaagaagtctgcaatcaaatagatcaaataatgccaacttggataaaagatgataaaattaaatttatcctataagttcttctgccagaagcaattatttgttcaatttctgctgttgatgggttagattacgaggcagctgaagcaaagtatctaaaaggaccatgtctaggctacagggaaagagaattatttgatgcaaaaataatatatgaaaagagacgaaaagcaccaacaaatgaagctcactaaatgtgctgaaagttgaaaccatgacagggagctctcatagatactagttgaaaaaagtctctgaacaattctctctaatacatattttctgcaaatgggagcatggataatgtgttcacttttttttgagatctctaggatctgtggttataattacatctttatttccttttcttgcgcttcttcaaagttaattttgtcaacatatttcagcagttctactttcccgtacattttttagaaagcataattcctaaatgattttgaagggaaagtactattttgttttatgacacttttgagtctatgctgtattgttaaatatattgtgcacaattattttaatgttaaaattgcactggtgttagatattaacgaagatgattggaaaaaagtctgaaagatacatcatttctatattccttgcttaatttttataaaatattgggttttcccttaagatagttgaagtatttttcttgccatgcctatttatttttgcaaaaaaattatctgctatatagaaccaaagatagattcgctttgctatatattataactatacttgcttttgcaataaaacaacttgtaattcaaaaatgaagattatctgcatatagtatttatgtgtgtgaataacatcttggcatgcagaaaataattttggctgctttgaacaggattgttcattctacacttccctgaaattccatttttgggagtgtctatccttcaatggctgaatagttccttaaatcagacaagctcctggctatcttcataaccagcagtgagtagatcttcttaatatagctgtctgaccacatgtggaaggcagctagacttattgtatttacagcctggccactctagacatatgaatccaggctgactgcttaagtgcccatctcgtttgatataaactgtagaaaaggcaagcactttgttctgagtcttttatctccaaatacatagttgtctcaaaccaagcaagctttatcaaaatggcttatttgcagaatagttccaatgatataaatgccaactggcaagtcattccaaactgcttgaaggagtagatgaaccagaatctgagaatttggaaataggtcacagaaaaagcctccatttggctaaatatgacaattatctgagtatggttaaatacatacaattaaatgtctgaagccaatgagttgtttattctaacttgaaatatatttttgtgagaataaatgttagaaaagttagtttattttggaaacctgccgtgaaaggaaattctaaaggcttaacatgaaactgtctgcatttctacctgttagacaatggttgctcttgggctcttgttatacagtcatatggctacacgtttatgtaaagtttgcaaaagtttggtgttttgatttataataaaactgttatattattc

SEQ ID NO: 4199 - protein, 637 aa, Homo sapiens
MESEYVLCDWKDQLWPAKVLSRSETSSNSKRKKAFSLEVQILSLDEKIKLDSTETKILNKSQIEAIAASLGLQSEDSAPPTEETAYGRSLKVALGILNERTNLSQASTSDEEEITMLSQNVPQKQSDSPPHKKYRKDEGDLPGCLEERENSACLLASSESDDSLYDDKSQAPTMVDTIPSEVETKSLQNSSWCETFPSLSEDNDEKENKNKIDISAVMSVHSAVKEESACVKDEKFAPPLSPLSSDMLIMPKALKEESEDTCLETLAVPSECSAFSENIEDPGEGPSNPCLDTSQNQPSMESEMGAAACPGSCSRECEVSFSASNPVWDYSHLMSSERNFQRLDFEELEEEGQASDKSLLPSRINLSLLDDDEEDEELPRFILHYETHPFETGMIVWFKYQKYPFWPAVIKSIRRKERKASVLFVEANMNSEKKGIRVNFRRLKKFDCKEKQMLVDKAREDYSESIDWCISLICDYRVRIGCGSFTGSLLEYYAADISYPVRKETKQDTFRNKFPKLHNEDAREPMAVTSQTKKMSFQKILPDRMKAARDRANKNLVDFIVNAKGTENHLLAIVNGTKGSRWLKSFLNANRFTPCIETYFEDEDQLDEVVKYLQEVCNQIDQIMPTWIKDDKIKFIL

SEQ ID NO: 4200 - DNA, 3861 bp, Homo sapiens
ccacgcgtccgggacggggcaaactagcttttgggagtgaagcgggtacgcagttatccaacaatgtctggtgagtcaggacagcctgaggctggtccctcacatgcagggctagattggccgaaccctgagaggaatcgggctggggtcccgggaggggtgatccgaagagctggttcccaagggcccaggtcctggatccaaaaggttcttgagcagattatggactcacctcgccagtgtgtcaccccctcggaggtggtgcctgtaactgtgctggccgtccagaggtacctgttagaggatgagccacgcgacacggtgcccaagcctcccctttattgctatgatgtgacgatctcagatggggtgtaccaggagaagtgctacctggaccccagcttgaactctctcgtatatcaaaatattcttaaagttggcattcaaatgagaatttccagggtctcatgtctttacaatgagaaaaggataggccaggggatcctgtgcatagataacgtccactgtggggagacttcagacagtatttctttagaaactcccttcagaaatagagcgcaccaggagaaaccagagaggcctttaagaggcgggaagagtcattacctggcgctgtggaataacgaagatccctatggagatatctggttaacagacaagcaacctgaggaacacaactttagcgataccaaaataatttccctttctcatcttgaaatgacctggactaacagaagaaattttcctgcattgcttgtgaggatcttacataaatcaaaactgcgatactatggaaaacctgataaaaagatgattgaaccatatcagacctttttggaagttgctgacagttcaggcacagtgtcagtgattatgtggaatgccctgtgtcctgagtggtataaaagtttgcgggttggtttagttcttctgcttcaagactattctgttaaaaagagttatccattcagaatacagcctgtccccgtggatccacagatcaaactaatttctacaatggaaatctgcctgaatcttcgagatcccccaacaaatataattatcattccagaaaagcaggtgaaaccagaatggagactgccaaagctaaatcaccgatttaccacaaggtcagaactggatgatatgccagaaaattgcatctgtgatgttattggccttttagtttttgtaggaagggtccagcggtcaaaaaagaaagaaaaccgtgaagatttttggtcatatcgctggattcacattgctgacggtacttcagaacaaccatttatagtggaactgttttcaacatcgcagccagaaatctttgaaaatatttacccaatggcatattttgtgtgtacacagttgaaagttgtcagaaatgacaatcaagtacctaagctgctttacctcaccactacaaatgagagtggagtgtttattactggtcatagaggccagccgtatacgtatgatgccaaggtaaaaaactttattcaatggattagaacaaagtctgattccggggaacagaagaatatggttattggtggatattacccctatccaccagtgccagagacattttccaagtatagtagttctattaaagttgagtcgctcttgacagctataagtgaagtcaggaaggagattgaagacttgcagtatagggaacaaaagcgcattgcaattcaggggataattactgctataaagtatatcccccatagcagtgcgactgaaagtgcctcagcatcagaaacacttcggaatgctaacagaccctcgacctctcaagcagctagagtagaaatgcaagaaagaaatggtaaacggcatcaagatgatgagcctgtgaattctcagtatttccaaactacatctacaaatttaagtctgagcaataaaataagaattcttcaaggcccacacgctaatccagttgctgtacctcaaccaggagcttctgtacaaacaaagggaattaaaccgggcatgccaagcatcttcaaccgtcgagcaaatataaatgctaatctgcaagggaaagccagaaaaactataagtgataggtgggagagtcagctgtggagagagaaaaagtttggcttaatagatcacctacactacagccgtgtttatcctgaaagtattccacggaaatttatgtttgaacacagaaagtttcttagtgaccagtataattctcagcctgcgaaatatgtaccaccagaaggaaggcccccaaaacttgatgattttaagagcgcccgaagccttggacattttgaagtaaccatactaggtctgaaccatgagatagcaatcgatgttgctttcctacccatgtattgtccagaagatattcgaacatctcaaatagacacactgttgacctccatgaattacagctgtgcatatccacaggacacaactggaaatgaccgattgccaggtccaagagcggttgcaggtgatattataaaagcagcaactgaactggatagagtgcatatcgtcggtatcttggatatctgtaatttgggtaataataaagtggaagtctatttgcacaagatttatagtccagagaatacttcttaaaagttagcaaatgaaattattacagattatacgagtgtactgctttaaagatattccatcattttgctggtaatttcagtaactgttttcagcaagaatattacatgagctctaaagttattaagcagttttatgttcgttttgtgtttagggagctttttaaaacacttcatttcagattcattattgaaaaaggtcatcaaaataatttttgtgtataagggaatttaccttgcttaccttactagtatgactattatcttgacttctggtaatttatgttcactattccatttgtgaagtgtactttcattctaaagcctcagtataaggcatcctaacttacaagagtaactttccatggacatttaacatccttccaattttattcacatataatgggaaattttgaattgccagtttgaagactgttctcctaaagtgttcaacctgcacttcttacaaccaaggtagtttgtatcattttcaaaagtacacattattagggtctagttgcccctggtccttagcttgctcagctgcaaaataagcgtgctaaattaaattgtcttaaggtttttccacttcattttgtgactttgtgtggttcgaatttctcagtattttaaccagtgtgttgatgttaaagtcaaaggccgcagtatgtctatattcttgctgtactcattggtagtttcagtatatgtaatgtgagtttaaatagtgaaattgtatctcatattaacatttcaaatgctcatattgaaaatggaaaatagtaaacacaggaattgattttattctggttgtctataatacttcattttaaatgtaaatggccactctgcatttgcaaggcccggtggttgacatctgtgtggtttgttagatgagacaaaatgaccattaaatgagtttatagattattctgtatcaagataaatctgattccagttaagctataaacttgtgggattttcttgtagccctatagttctgtgacttcatttgctatacgctttaaatgtgttgagcagcctatgaacctaaagacatactgcagtttgttcataaatgtattcagtcttttattctttataattgtgtgtaaatgttaactaaacagtggattcctctcgtgttacagttttgagtgaattattaaagaagttaaaatgcaataaaaaaaaaaaaaaaaaaaaaaaaaaaaaaaaaaaaaaaaaaaaaaaa

SEQ ID NO: 4201 - protein, 855 aa, Homo sapiens
MSGESGQPEAGPSHAGLDWPNPERNRAGVPGGVIRRAGSQGPRSWIQKVLEQIMDSPRQCVTPSEVVPVTVLAVQRYLLEDEPRDTVPKPPLYCYDVTISDGVYQEKCYLDPSLNSLVYQNILKVGIQMRISRVSCLYNEKRIGQGILCIDNVHCGETSDSISLETPFRNRAHQEKPERPLRGGKSHYLALWNNEDPYGDIWLTDKQPEEHNFSDTKIISLSHLEMTWTNRRNFPALLVRILHKSKLRYYGKPDKKMIEPYQTFLEVADSSGTVSVIMWNALCPEWYKSLRVGLVLLLQDYSVKKSYPFRIQPVPVDPQIKLISTMEICLNLRDPPTNIIIIPEKQVKPEWRLPKLNHRFTTRSELDDMPENCICDVIGLLVFVGRVQRSKKKENREDFWSYRWIHIADGTSEQPFIVELFSTSQPEIFENIYPMAYFVCTQLKVVRNDNQVPKLLYLTTTNESGVFITGHRGQPYTYDAKVKNFIQWIRTKSDSGEQKNMVIGGYYPYPPVPETFSKYSSSIKVESLLTAISEVRKEIEDLQYREQKRIAIQGIITAIKYIPHSSATESASASETLRNANRPSTSQAARVEMQERNGKRHQDDEPVNSQYFQTTSTNLSLSNKIRILQGPHANPVAVPQPGASVQTKGIKPGMPSIFNRRANINANLQGKARKTISDRWESQLWREKKFGLIDHLHYSRVYPESIPRKFMFEHRKFLSDQYNSQPAKYVPPEGRPPKLDDFKSARSLGHFEVTILGLNHEIAIDVAFLPMYCPEDIRTSQIDTLLTSMNYSCAYPQDTTGNDRLPGPRAVAGDIIKAATELDRVHIVGILDICNLGNNKVEVYLHKIYSPENTS

SEQ ID NO: 4202 - DNA, 2688 bp, Homo sapiens
atagagctgatgtatccagaggttatgttgctagaggtgagatcagttacctacgtgcaactgaaatttcaaacttctgttcagcagggacgtgagtggacaatggtgactgatagttggaaatatcagcaaacatcttaaattttatactcaaatgaatgagcaatgaaccaggagaataggtccagttttttttggctccttgtaatttttacctttttacttaaaattacagcatctttttcaatgagtgcctatgtgactgtgacttattacaatgaaaccagcaactacactgcaatagagacatgtgaatgtggcgtttatggattagcttcaccagtggctaatgctatgggagtggtaggcatccctaagaacaataactaccaagcttgtgaccacaacactgagtttagtaatactaagaagccctggattgcgctgatagaaagaggtaattgtacattttcagaaaaaattcaaacagcgggcagaagaaatgctgatgctgttgtgatttacaatgctccagagactggcaatcagacgatacagatggcaaattttggtgcagtagacattgttgcaatcatgatcggcaatctgaaaggcacaaaaattctgcaatctattcaaagaggcatacaagtgacaatggtcatagaagtagggaaaaaacatggcccttgggtgaatcactattcaatttttttcgtttctgtgtccttttttattattacggcggcaactgtgggctattttatcttttattctgctcgaaggctacggaatgcaagagctcaaagcaggaagcagaggcaattaaaggcagatgctaaaaaagctattggaaggcttcaactacgcacactgaaacaaggagacaaggaaattggccctgatggagatagttgtgctgtgtgcattgaattgtataaaccaaatgatttggtacgcatcttaacgtgcaaccatattttccataagacatgtgttgacccatggctgttagaacacaggacttgccccatgtgcaaatgtgacatactcaaagctttgggaattgaggtggatgttgaagatggatcagtgtctttacaagtccctgtatccaatgaaatatctaatagtgcctcctcccatgaagaggataatcgcagcgagaccgcatcatctggatatgcttcagtacagggaacagatgaaccgcctctggaggaacacgtgcagtcaacaaatgaaagtctacagctggtaaaccatgaagcaaattctgtggcagtggatgttattcctcatgttgacaacccaacctttgaagaagacgaaactcctaatcaagagactgctgttcgagaaattaaatcttaaaatctgtgtaaatagaaaacttgaaccattagtaataacagaactgccaatcagggcctagtttctattaataaattggataaatttaataaaataagagtgatactgaaagtgctcagatgactaatattatgctatagttaaatggcttaaaatatttaacctgttaacttttttccacaaactcattataatatttttcataggcaagtttcctctcagtagtgataacaacatttttagacattcaaaactgtcttcaagaagtcacgtttttcatttataacaattttcttataaaaacatgttgcttttaaaatgtggagtagctgtaatcactttattttatgatagtatcttaatgaaaaatactacttctttagcttgggctacatgtgtcagggtttttctccaggtgcttatattgatctggaattgtaatgtaaaaagcaatgcaaacttaggcgagtacttcttgaaatgtctatttaagctgctttaagttaatagaaaagattaaagcaaaatattcatttttactttttcttatttttaaaattaggctgaatgtacttcatgtgatttgtcaaccatagtttatcagagattatggacttaattgattggtatattagtgacatcaacttgacacaagattagacaaaaaattccttacaaaaatactgtgtaactatttctcaaacttgtgggatttttcaaaagctcagtatatgaatcatcatactgtttgaaattgctaatgacagagtaagtaacactaatattggtcattgatcttcgttcatgaattagtctacagaaaaaaaatgttctgtaaaattagtctgttgaaaatgttttccaaacaatgttactttgaaaattgagtttatgtttgacctaaatgggctaaaattacattagataaactaaaattctgtccgtgtaactataaattttgtgaatgcattttcctggtgtttgaaaaagaagggggggagaattccaggtgccttaatataaagtttgaagcttcatccaccaaagttaaatagagctatttaaaaatgcactttatttgtactctgtgtggcttttgttttagaattttgttcaaattatagcagaatttaggcaaaaataaaacagacatgtatttttgtttgctgaatggatgaaaccattgcattcttgtacactgatttgaaatgctgtaaatatgtcccaatttgtattgattctctttaaatataaaatgtaaataaaatattccaataaaagtttgtgtctggtgttagtttaaaaaaaaaaaaa

SEQ ID NO: 4203 - protein, 402 aa, Homo sapiens
MNQENRSSFFWLLVIFTFLLKITASFSMSAYVTVTYYNETSNYTAIETCECGVYGLASPVANAMGVVGIPKNNNYQACDHNTEFSNTKKPWIALIERGNCTFSEKIQTAGRRNADAVVIYNAPETGNQTIQMANFGAVDIVAIMIGNLKGTKILQSIQRGIQVTMVIEVGKKHGPWVNHYSIFFVSVSFFIITAATVGYFIFYSARRLRNARAQSRKQRQLKADAKKAIGRLQLRTLKQGDKEIGPDGDSCAVCIELYKPNDLVRILTCNHIFHKTCVDPWLLEHRTCPMCKCDILKALGIEVDVEDGSVSLQVPVSNEISNSASSHEEDNRSETASSGYASVQGTDEPPLEEHVQSTNESLQLVNHEANSVAVDVIPHVDNPTFEEDETPNQETAVREIKS

SEQ ID NO: 4204 - DNA, 2851 bp, Homo sapiens
gcttcacgctaaagccccagagcccgacgcggcagccgcggtagcggagaagactggagctccgaggagctgcatctgcggcaacctgtgtgctgacgctacgtgcctcctggctccgacgtagctcgcagctccccagtctcactccattccttccccacctggcgcgcacctgctcaagaccagggtcctgccaagcgctaggagggcgcgtgccaggggcgctagggaactgcggagcgcgcgcgccatggggccgccgcctggggccggggtctcctgccgcggtggctgcggcttttccagattgctggcatggtgcttcctgctggccctgagtccgcaggcacccggttcccggggggctgaagcagtgtggaccgcgtacctcaacgtgtcctggcgggttccgcacacgggagtgaaccgtacggtgtgggagctgagcgaggagggcgtgtacggccaggactcgccgctggagcctgtggctggggtcctggtaccgcccgacgggcccggggcgcttaacgcctgtaacccgcacacgaatttcacggtgcccacggtttggggaagcaccgtgcaagtctcttggttggccctcatccaacgcggcgggggctgcaccttcgcagacaagatccatctggcttatgagagaggggcgtctggagccgtcatctttaacttccccgggacccgcaatgaggtcatccccatgtctcacccgggtgcagtagacattgttgcaatcatgatcggcaatctgaaaggcacaaaaattctgcaatctattcaaagaggcatacaagtgacaatggtcatagaagtagggaaaaaacatggcccttgggtgaatcactattcaatttttttcgtttctgtgtccttttttattattacggcggcaactgtgggctattttatcttttattctgctcgaaggctacggaatgcaagagctcaaagcaggaagcagaggcaattaaaggcagatgctaaaaaagctattggaaggcttcaactacgcacactgaaacaaggagacaaggaaattggccctgatggagatagttgtgctgtgtgcattgaattgtataaaccaaatgatttggtacgcatcttaacgtgcaaccatattttccataagacatgtgttgacccatggctgttagaacacaggacttgccccatgtgcaaatgtgacatactcaaagctttgggaattgaggtggatgttgaagatggatcagtgtctttacaagtccctgtatccaatgaaatatctaatagtgcctcctcccatgaagaggataatcgcagcgagaccgcatcatctggatatgcttcagtacagggaacagatgaaccgcctctggaggaacacgtgcagtcaacaaatgaaagtctacagctggtaaaccatgaagcaaattctgtggcagtggatgttattcctcatgttgacaacccaacctttgaagaagacgaaactcctaatcaagagactgctgttcgagaaattaaatcttaaaatctgtgtaaatagaaaacttgaaccattagtaataacagaactgccaatcagggcctagtttctattaataaattggataaatttaataaaataagagtgatactgaaagtgctcagatgactaatattatgctatagttaaatggcttaaaatatttaacctgttaacttttttccacaaactcattataatatttttcataggcaagtttcctctcagtagtgataacaacatttttagacattcaaaactgtcttcaagaagtcacgtttttcatttataacaattttcttataaaaacatgttgcttttaaaatgtggagtagctgtaatcactttattttatgatagtatcttaatgaaaaatactacttctttagcttgggctacatgtgtcagggtttttctccaggtgcttatattgatctggaattgtaatgtaaaaagcaatgcaaacttaggcgagtacttcttgaaatgtctatttaagctgctttaagttaatagaaaagattaaagcaaaatattcatttttactttttcttatttttaaaattaggctgaatgtacttcatgtgatttgtcaaccatagtttatcagagattatggacttaattgattggtatattagtgacatcaacttgacacaagattagacaaaaaattccttacaaaaatactgtgtaactatttctcaaacttgtgggatttttcaaaagctcagtatatgaatcatcatactgtttgaaattgctaatgacagagtaagtaacactaatattggtcattgatcttcgttcatgaattagtctacagaaaaaaaatgttctgtaaaattagtctgttgaaaatgttttccaaacaatgttactttgaaaattgagtttatgtttgacctaaatgggctaaaattacattagataaactaaaattctgtccgtgtaactataaattttgtgaatgcattttcctggtgtttgaaaaagaagggggggagaattccaggtgccttaatataaagtttgaagcttcatccaccaaagttaaatagagctatttaaaaatgcactttatttgtactctgtgtggcttttgttttagaattttgttcaaattatagcagaatttaggcaaaaataaaacagacatgtatttttgtttgctgaatggatgaaaccattgcattcttgtacactgatttgaaatgctgtaaatatgtcccaatttgtattgattctctttaaatataaaatgtaaataaaatattccaataaaagtttgtgtctggtgttagtttaaaaaaaaaaaaa

SEQ ID NO: 4205 - protein, 428 aa, Homo sapiens
MGPPPGAGVSCRGGCGFSRLLAWCFLLALSPQAPGSRGAEAVWTAYLNVSWRVPHTGVNRTVWELSEEGVYGQDSPLEPVAGVLVPPDGPGALNACNPHTNFTVPTVWGSTVQVSWLALIQRGGGCTFADKIHLAYERGASGAVIFNFPGTRNEVIPMSHPGAVDIVAIMIGNLKGTKILQSIQRGIQVTMVIEVGKKHGPWVNHYSIFFVSVSFFIITAATVGYFIFYSARRLRNARAQSRKQRQLKADAKKAIGRLQLRTLKQGDKEIGPDGDSCAVCIELYKPNDLVRILTCNHIFHKTCVDPWLLEHRTCPMCKCDILKALGIEVDVEDGSVSLQVPVSNEISNSASSHEEDNRSETASSGYASVQGTDEPPLEEHVQSTNESLQLVNHEANSVAVDVIPHVDNPTFEEDETPNQETAVREIKS

SEQ ID NO: 4206 - DNA, 5726 bp, Homo sapiens
acgtgggagagaagggagggttgggggaagtgtggaaaacctgaacctgagctgctgtcgcctgaggaagatttggtgggaggagaagcagaggggaagagacgggttgagagtgaggtgaggagggcatctaggtcactgctcccggggggcacaaagttcgcgatgtggctgaagcctgaggaagtgcttctgaaaaatgcgctgaagctgtggctgatggaaaggtccaacgactacttcgtgctgcagcggcgtcggggctacggggaggaaggcggaggggggctcacagggcttctggttgggactcttgattcagtcttggactctactgctaaagtagctccatttcgcatcctacaccagacaccagattctcaagtttacttgtcaattgcatgtggagccaacagagaagaaataaccaagcattgggattggttggaacaaaatattatgaagaccttatctgtatttgattcaaatgaagatattactaattttgtacaaggaaaaataagaggattaattgctgaagagggaaaacattgttttgcaaaagaagatgatcctgagaaatttcgagaagcccttttgaaatttgaaaaatgttttggtttaccagagaaggagaagttagtgacctattattcatgcagttattggaaaggacgggttccttgtcagggttggctttatcttagcaccaactttctgagcttctattcttttttgttgggatcagaaataaaactcattatctcctgggatgaagtctcaaaacttgaaaagacttcaaatgtcatactgacagagagtattcacgtgtgttcccaaggagagaatcactacttttcaatgtttttgcacattaaccaaacataccttcttatggaacagctggcaaactatgccattagaagactttttgataaggaaacatttgataatgacccagtcctttataatcctctacagatcaccaaaagaggtctggaaaatagagcccacagtgagcaatttaatgccttttttaggctgcccaaaggagagagtttgaaagaagtacatgaatgtttcttatgggtaccattcagccacttcaatactcatgggaaaatgtgcatctcagaaaattatatctgctttgctagccaagatggcaatcagtgtagtgtaatcattccactacgagaggtcttagctatagataagacaaatgattccagcaaatctgtcatcattagcatcaaaggaaaaacagcttttcgcttccatgaagttaaagactttgaacaactggtagcaaaactcaggctcagatgcggagcagcttcaactcaatatcatgatattagcacagagcttgctattagttctgagtctacagagccatctgataattttgaggtgcaatctttgacaagtcagagggaatgcagtaaaactgtgaacactgaagccttaatgacagtatttcaccctcagaatttggagactcttaattctaaaatgttgaaagaaaaaatgaaggaacagtcatggaaaatactgtttgcagaatgtggacgtggtgttagtatgtttcgaaccaaaaagactcgagatcttgttgtaagagggattccagaaacattaagaggagaactctggatgcttttttcaggtgctgttaatgacatggctactaatcctgactattatactgaagtggttgagcagtccttagggacctgcaacttggctactgaagaaattgaacgtgatttacgtcgctctctgcctgagcacccagcctttcagagtgatactggcatatctgctctgagaagggtactcacagcttatgcatacaggaatcccaaaattggatactgccaggcaatgaatattttgacttcagtgctgcttctatatgcaaaagaggaagaagctttttggcttctggttgctgtatgtgaacgaatgttgcctgattattttaatcgtcgaattattggtgccttggtggatcaggcagtctttgaagaacttatcagggatcaccttcctcagctgacagaacacatgactgatatgacattcttttcctcagtttctctctcttggtttctcacactttttattagtgtgctacctattgaaagtgcagtgaatgtggtggactgtttcttctatgatggaataaaggccattttgcaactgggattggcaatacttgactataatttagacaaactgctgacttgtaaagatgatgctgaagctgtgacagccttaaacaggttctttgacaatgtcactaataaggatagtccattgccttcaaatgttcagcaaggttcaaatgtgagtgatgaaaaaaccagtcatactagagtggatattacagatttgattagagaatcaaatgagaaatatggtaatattcgctatgaagatatacatagtatgcgctgtcgaaataggttgtatgtgatacagaccctagaggaaacaacaaaacagaatgtgttgcgtgttgtatcacaagatgtgaaattgagccttcaagaattggatgaactttatgtcatctttaagaaagagctgtttttatcttgttattggtgtttgggttgcccagtattgaagcatcatgaccccagtctgccatatttggaacagtatcagattgactgccagcagttcagagcgttgtatcacttgttgagtccctgggctcattctgcaaataaagactcactagctttatggacattcagattgttagatgaaaactctgattgccttataaacttcaaagaattctcctctgcaattgacataatgtacaatggaagttttactgagaagcttaagctgctttttaagctacatattcctccagcttacactgaagtgaaatctaaggatgcttcaaaaggagatgaactttccaaggaagaattactttatttcagtcagctgcatgtttccaagcctgcaaatgagaaggaagcagaatcagcaaaacacagccctgaaaaaggcaaagggaaaattgatattcaagcatatctaagtcaatggcaagatgagcttttcaaaaaagaagaaaacattaaggatttaccaagaatgaatcagtctcagtttattcagttttcaaagaccctctataacttatttcatgaggaccctgaagaagaatcattatatcaagccattgctgttgtaaccagccttttactcaggatggaagaagttggaaggaaactacatagccctacatcatcagccaaaggattctctggtactgtctgtggttctggaggacccagtgaggaaaaaacagggagccacttggagaaagatccttgttcctttagggaggaacctcagtggtcatttgcatttgaacagattcttgcatcgctgttgaatgaaccagcattggtgaggttttttgagaaacccatagatgtaaaagccaagctggaaaatgcaagaatttctcagttaaggtctagaaccaagatgtaaatccctaggaattgcctatcatagacaagtttactaacattcctgtagctgtcagtttgattcctgtgagtagggctcagggatttatcttgttaccaatgtgtctgaaggccaaaatatatatccagaagcacaatgcatcattcctttgttgttgataatgggctttgttagcactttttaaaacaaacaaacaaacaaaacaaaaaagcaaaccacatttgttatctcaaattttgatgatattctcaaatacaaatatacttttttatatttcacaatatatgcaatatcaggggaatatgctaaatgttaccaccagagggcacaagcatatcacttttagtaaggaaattactagcttgtgttgctatttacatatgaattactgattattttgaaaagacggtgttatgcttgggtgttagtgaggctgatatgtcatgtcaatcgataaaccctactttccaaattatctaaaagattaccatttggggcccttgttttcaagttatctaactgaaatattattaatttttttaagttaatctcattcagtcttctagtaataaatgcttttttaagtaccttctacagtcttcctacctgaggggttcagaggctgctgactcacactgctaactctgttactgacaaaagcaaatcaataactctaaattctgggctgatataaagaaaaaaacaatattggatttggatttaatctgggtaaaatcagccttctgagaagggctaagaaacagttcaattaactgtataggtctttcattagaccgagacatcactagaaattctgggcactgctgtttgtggtatttgtctcagagtagcttatgactgttttggttctagctttagattttggattttcaccagtcatgtgttaatttacattagatagtaaagaatggctacactaagactgaattatcttattagtctggcaagcatataaagtatacttgtatgtaatgattgccaaggtaacagaattgctgacatctgtctaaaaagttttgactatccaatttagatgtgtaatttctatatactttatgctgtttatatttcagtcattacaccaagtccatttagagataatgggctttgttagcactttcaaaaaaaaaaaaagcaaaccatacttgtccactgtcctgtgctattcctaccaaggacaatttattaatcaattgacttagaaaatagggggagaaatcattcattggagcttctttctttagaaaagactttggttataagccttttgacttttctagatgtgaaaccatgaaagggcagacctccttcagagtgactcaagaggtctccctttcttggagggagttggtacagtcagcctttgggaagaatccactgtgaacaaagcttaacacatggggcttcatcgctcatagaatatgttattttcaaagaagttcaagaattttcaagttgagcctttgaaaatcccataaattggttttagctaaacacttactagtagtgtctttaaattatttaatcaaccttgtcttttcaaggaaattaccacttaaagagatagttggtaaataaacatctatgccttttctcagaaatgatttgctgaactatgtccatattttacagcttagataatagtttatatggaaactattatacatctgctattgtgcaatgattgttaaattatactgaagtagctctagaaagacacatgtatacaaggcactattgtacacactttgctgaatattttgtcagttgtatttacaaagaaaggtactttcttaagagcatatatgttattaatatttgatatgattttaaagtcagaatagtacagattgctgagtattatactttaggctagattaattaaaattgaatactgaaagagattttttgagttgcaaaaagtttataaatgcaaagcaaaaagaaaacatttattttctgagtctgcaggagaaacaaactaaacattatagttttatagctgctatcttgttaaccaaacaggttgttcataatattaaaaatcttacgtagttgtgttaaactgaaccagttcattataccttatgcattaaattaaatatgttataaggtggctttacttgtctttataaaaataaatatatctactaaacatgaaaaaaaaaaaaaaaaaa

SEQ ID NO: 4207 - protein, 1120 aa, Homo sapiens
MWLKPEEVLLKNALKLWLMERSNDYFVLQRRRGYGEEGGGGLTGLLVGTLDSVLDSTAKVAPFRILHQTPDSQVYLSIACGANREEITKHWDWLEQNIMKTLSVFDSNEDITNFVQGKIRGLIAEEGKHCFAKEDDPEKFREALLKFEKCFGLPEKEKLVTYYSCSYWKGRVPCQGWLYLSTNFLSFYSFLLGSEIKLIISWDEVSKLEKTSNVILTESIHVCSQGENHYFSMFLHINQTYLLMEQLANYAIRRLFDKETFDNDPVLYNPLQITKRGLENRAHSEQFNAFFRLPKGESLKEVHECFLWVPFSHFNTHGKMCISENYICFASQDGNQCSVIIPLREVLAIDKTNDSSKSVIISIKGKTAFRFHEVKDFEQLVAKLRLRCGAASTQYHDISTELAISSESTEPSDNFEVQSLTSQRECSKTVNTEALMTVFHPQNLETLNSKMLKEKMKEQSWKILFAECGRGVSMFRTKKTRDLVVRGIPETLRGELWMLFSGAVNDMATNPDYYTEVVEQSLGTCNLATEEIERDLRRSLPEHPAFQSDTGISALRRVLTAYAYRNPKIGYCQAMNILTSVLLLYAKEEEAFWLLVAVCERMLPDYFNRRIIGALVDQAVFEELIRDHLPQLTEHMTDMTFFSSVSLSWFLTLFISVLPIESAVNVVDCFFYDGIKAILQLGLAILDYNLDKLLTCKDDAEAVTALNRFFDNVTNKDSPLPSNVQQGSNVSDEKTSHTRVDITDLIRESNEKYGNIRYEDIHSMRCRNRLYVIQTLEETTKQNVLRVVSQDVKLSLQELDELYVIFKKELFLSCYWCLGCPVLKHHDPSLPYLEQYQIDCQQFRALYHLLSPWAHSANKDSLALWTFRLLDENSDCLINFKEFSSAIDIMYNGSFTEKLKLLFKLHIPPAYTEVKSKDASKGDELSKEELLYFSQLHVSKPANEKEAESAKHSPEKGKGKIDIQAYLSQWQDELFKKEENIKDLPRMNQSQFIQFSKTLYNLFHEDPEEESLYQAIAVVTSLLLRMEEVGRKLHSPTSSAKGFSGTVCGSGGPSEEKTGSHLEKDPCSFREEPQWSFAFEQILASLLNEPALVRFFEKPIDVKAKLENARISQLRSRTKM

SEQ ID NO: 4208 - DNA, 2607 bp, Homo sapiens
acgtgggagagaagggagggttgggggaagtgtggaaaacctgaacctgagctgctgtcgcctgaggaagatttggtgggaggagaagcagaggggaagagacgggttgagagtgaggtgaggagggcatctaggtcactgctcccggggggcacaaagttcgcgatgtggctgaagcctgaggaagtgcttctgaaaaatgcgctgaagctgtggctgatggaaaggtccaacgactacttcgtgctgcagcggcgtcggggctacggggaggaaggcggaggggggctcacagggcttctggttgggactcttgattcagtcttggactctactgctaaagtagctccatttcgcatcctacaccagacaccagattctcaagtttacttgtcaattgcatgtggagccaacagagaagaaataaccaagcattgggattggttggaacaaaatattatgaagaccttatctgtatttgattcaaatgaagatattactaattttgtacaaggaaaaataagaggattaattgctgaagagggaaaacattgttttgcaaaagaagatgatcctgagaaatttcgagaagcccttttgaaatttgaaaaatgttttggtttaccagagaaggagaagttagtgacctattattcatgcagttattggaaaggacgggttccttgtcagggttggctttatcttagcaccaactttctgagcttctattcttttttgttgggatcagaaataaaactcattatctcctgggatgaagtctcaaaacttgaaaagacttcaaatgtcatactgacagagagtattcacgtgtgttcccaaggagagaatcactacttttcaatgtttttgcacattaaccaaacataccttcttatggaacagctggcaaactatgccattagaagactttttgataaggaaacatttgataatgacccagtcctttataatcctctacagatcaccaaaagaggtctggaaaatagagcccacagtgagcaatttaatgccttttttaggctgcccaaaggagagagtttgaaagaagtacatgaatgtttcttatgggtaccattcagccacttcaatactcatgggaaaatgtgcatctcagaaaattatatctgctttgctagccaagatggcaatcagtgtagtgtaatcattccactacgagaggtcttagctatagataagacaaatgattccagcaaatctgtcatcattagcatcaaaggaaaaacagcttttcgcttccatgaagttaaagactttgaacaactggtagcaaaactcaggctcagatgcggagcagcttcaactcaatatcatgatattagcacagagcttgctattagttctgagtctacagagccatctgataattttgaggtgcaatctttgacaagtcagagggaatgcagtaaaactgtgaacactgaagccttaatgacagtatttcaccctcagaatttggagactcttaattctaaaatgttgaaagaaaaaatgaaggaacagtcatggaaaatactgtttgcagaatgtggacgtggtgttagtatgtttcgaaccaaaaagactcgagatcttgttgtaagagggattccagaaacattaagaggagaactctggatgcttttttcaggtgctgttaatgacatggctactaatcctgactattatactgaagtggttgagcagtccttagggacctgcaacttggctactgaagaaattgaacgtgatttacgtcgctctctgcctgagcacccagcctttcagagtgatactggcatatctgctctgagaagggtactcacagcttatgcatacaggaatcccaaaattggatactgccaggcaatgaatattttgacttcagtgctgcttctatatgcaaaagaggaagaagctttttggcttctggttgctgtatgtgaacgaatgttgcctgattattttaatcgtcgaattattggttcagatgattttatgccactagtaagaatccaaggacaatgtgttattggggagaagtagaaaaaggaaaatctggggtagcacctggcatgctctttctccaattttctactacttactcctattccccaaattctcccatcaaggaggaaatgaactctgagacagaagatgagttttcctcaaagcttgaccaggatataagtggatgccttattgggcaaagcagagggtaaccaattagaaggccctggcttctcttgattgatagctgagaactcatcagagggatcagtgctttctctgtgtattgctggagtctgaaagtgtgactctcatgtcactgattcatttctgaagtgttaaattcagaataaatttttgataatcaaaatgaacttagagaactttgttgtttggcattgtcaagagtgaagaattctaattatttgtgtatttatcttgtgttatgctagatattaaactccctgaacatgagactatttcattaattggtatagctcttataatacctagtacaggtctctgcatataataaagactcaataaataactcttcaaatgaaaaaaaaaaaaaaaaaa

SEQ ID NO: 4209 - protein, 632 aa, Homo sapiens
MWLKPEEVLLKNALKLWLMERSNDYFVLQRRRGYGEEGGGGLTGLLVGTLDSVLDSTAKVAPFRILHQTPDSQVYLSIACGANREEITKHWDWLEQNIMKTLSVFDSNEDITNFVQGKIRGLIAEEGKHCFAKEDDPEKFREALLKFEKCFGLPEKEKLVTYYSCSYWKGRVPCQGWLYLSTNFLSFYSFLLGSEIKLIISWDEVSKLEKTSNVILTESIHVCSQGENHYFSMFLHINQTYLLMEQLANYAIRRLFDKETFDNDPVLYNPLQITKRGLENRAHSEQFNAFFRLPKGESLKEVHECFLWVPFSHFNTHGKMCISENYICFASQDGNQCSVIIPLREVLAIDKTNDSSKSVIISIKGKTAFRFHEVKDFEQLVAKLRLRCGAASTQYHDISTELAISSESTEPSDNFEVQSLTSQRECSKTVNTEALMTVFHPQNLETLNSKMLKEKMKEQSWKILFAECGRGVSMFRTKKTRDLVVRGIPETLRGELWMLFSGAVNDMATNPDYYTEVVEQSLGTCNLATEEIERDLRRSLPEHPAFQSDTGISALRRVLTAYAYRNPKIGYCQAMNILTSVLLLYAKEEEAFWLLVAVCERMLPDYFNRRIIGSDDFMPLVRIQGQCVIGEK

SEQ ID NO: 4210 - DNA, 1174 bp, Homo sapiens
gggaagtaggagaccccactggctttggtcccctaagaatggactctgctgcctgtgctgctgctgccacccctgttccagccctggctttggccctagctccagacctagcacaagccccactggcactccctggcctgttaagcccatcttgccttctctcctctggacaagaagtaaatgggagtgaaagaggaacttgtctctggaggccctggctgtcttccacaaatgactccccaaggcagatgaggaagctggtggatttggctgctggtggggcaacggctgctgaggtcaccaaggctgaatccaagttccatcaccctgtcaggctcttctggcctaaatcccgctccttcgactatctgtacagtgctggggagattttactgcagaactttcctgtccaggcaaccatcaacctatacgaggactcagacagcgaagaagaagaggaagatgaagagcaggaggatgaagaagagaagtaggaggccaatgaaaaggggccagaagggtgtgtgagggtaccagggtccataccctacagcgccacagctcatcccccttcctcacccctaacctatccaaatggaggcagccagagtctgattggggttcagtttgtctggcaagttttcacagacatcagttagccggaagtattagtccagcagatagagctttctggactgaaaattgggtcatctagctgcccagctcaccctggcttacctgaatggcctgtgagctcaggcctcttgcatctcattgtctgggctgctgttgtgttgaccatgggagggttctaggagctctagaaggaaggcttgctgaagcccccaggaagcagagcagggcagggaatgcccttgtggagggaagtagtcattcctcaggccctttgactccctagccttcccaggtggccatgtagtcccgtctctctgtggaaagcctgacttctggcttcaccccaaggaataccaacagcagatccatgcaaggttggggtgcctttttgatgagtcttacaggaagggaaggcagtgtgtagagaatcggcttgctctggggatgcctccccattttgcctgctgtccattgaagtctgtgtgttggcatgagatgaatcaggagaaaaataaactggatggtgttttcctttttc

SEQ ID NO: 4211 - protein, 151 aa, Homo sapiens
MDSAACAAAATPVPALALALAPDLAQAPLALPGLLSPSCLLSSGQEVNGSERGTCLWRPWLSSTNDSPRQMRKLVDLAAGGATAAEVTKAESKFHHPVRLFWPKSRSFDYLYSAGEILLQNFPVQATINLYEDSDSEEEEEDEEQEDEEEK

SEQ ID NO: 4212 - DNA, 1030 bp, Homo sapiens
ttctgggaagtaggagaccccactggctttggtcccctaagaatggactctgctgcctgtgctgctgctgccacccctgttccagccctggctttggccctagctccagacctagcacaagccccactggcactccctggcctgttaagcccatcttgccttctctcctctggacaagaagtaaatgggagtgaaaggctcttctggcctaaatcccgctccttcgactatctgtacagtgctggggagattttactgcagaactttcctgtccaggcaaccatcaacctatacgaggactcagacagcgaagaagaagaggaagatgaagagcaggaggatgaagaagagaagtaggaggccaatgaaaaggggccagaagggtgtgtgagggtaccagggtccataccctacagcgccacagctcatcccccttcctcacccctaacctatccaaatggaggcagccagagtctgattggggttcagtttgtctggcaagttttcacagacatcagttagccggaagtattagtccagcagatagagctttctggactgaaaattgggtcatctagctgcccagctcaccctggcttacctgaatggcctgtgagctcaggcctcttgcatctcattgtctgggctgctgttgtgttgaccatgggagggttctaggagctctagaaggaaggcttgctgaagcccccaggaagcagagcagggcagggaatgcccttgtggagggaagtagtcattcctcaggccctttgactccctagccttcccaggtggccatgtagtcccgtctctctgtggaaagcctgacttctggcttcaccccaaggaataccaacagcagatccatgcaaggttggggtgcctttttgatgagtcttacaggaagggaaggcagtgtgtagagaatcggcttgctctggggatgcctccccattttgcctgctgtccattgaagtctgtgtgttggcatgagatgaatcaggagaaaaataaactggatggtgttttc

SEQ ID NO: 4213 - protein, 104 aa, Homo sapiens
MDSAACAAAATPVPALALALAPDLAQAPLALPGLLSPSCLLSSGQEVNGSERLFWPKSRSFDYLYSAGEILLQNFPVQATINLYEDSDSEEEEEDEEQEDEEEK

SEQ ID NO: 4214 - DNA, 2959 bp, Homo sapiens
agatggattttgcaaagctgtggttaacgattagaaatcctttatcacctcagcccgtggccccttgtacttcgctcccctccctcaggatccctttctccctctccaggggcatctccccctccaaggctctgcaaagaactgccctgtcttctagatgccttcttgaggctgcttgtggccacccacagacacttgtaaggaggagagaagtcagcctggcagagagactctgaaatgagggattagaggtgttcaaggagcaagagcttcagcctgaagacaagggagcagtccctgaagacgcttctactgagaggtctgccatggcctctcttggcctccaacttgtgggctacatcctaggccttctggggcttttgggcacactggttgccatgctgctccccagctggaaaacaagttcttatgtcggtgccagcattgtgacagcagttggcttctccaagggcctctggatggaatgtgccacacacagcacaggcatcacccagtgtgacatctatagcacccttctgggcctgcccgctgacatccaggctgcccaggccatgatggtgacatccagtgcaatctcctccctggcctgcattatctctgtggtgggcatgagatgcacagtcttctgccaggaatcccgagccaaagacagagtggcggtagcaggtggagtctttttcatccttggaggcctcctgggattcattcctgttgcctggaatcttcatgggatcctacgggacttctactcaccactggtgcctgacagcatgaaatttgagattggagaggctctttacttgggcattatttcttccctgttctccctgatagctggaatcatcctctgcttttcctgctcatcccagagaaatcgctccaactactacgatgcctaccaagcccaacctcttgccacaaggagctctccaaggcctggtcaacctcccaaagtcaagagtgagttcaattcctacagcctgacagggtatgtgtgaagaaccaggggccagagctggggggtggctgggtctgtgaaaaacagtggacagcaccccgagggccacaggtgagggacactaccactggatcgtgtcagaaggtgctgctgaggatagactgactttggccattggattgagcaaaggcagaaatgggggctagtgtaacagcatgcaggttgaattgccaaggatgctcgccatgccagcctttctgttttcctcaccttgctgctcccctgccctaagtccccaaccctcaacttgaaaccccattcccttaagccaggactcagaggatccctttgccctctggtttacctgggactccatccccaaacccactaatcacatcccactgactgaccctctgtgatcaaagaccctctctctggctgaggttggctcttagctcattgctggggatgggaaggagaagcagtggcttttgtgggcattgctctaacctacttctcaagcttccctccaaagaaactgattggccctggaacctccatcccactcttgttatgactccacagtgtccagactaatttgtgcatgaactgaaataaaaccatcctacggtatccagggaacagaaagcaggatgcaggatgggaggacaggaaggcagcctgggacatttaaaaaaataaaaatgaaaaaaaaacccagaacccatttctcagggcactttccagaattctctcatatttgtgggctgggatcaagcctgcagcttgaggaaagcacaaggaaaggaaagaagatctggtggaaagctcaggtggcagcggactctgactccactgaggaactgcctcagaagctgcgatcacaactttggctgaagcccctgcctcactctagggcacctgacctggcctcttgcctaaaccacaaggctaagggctatagacaatggtttccttaggaacagtaaaccagtttttctagggatggcccttggctgggggatgacagtgtgggagctgtggggtactgaggaagacaccattccttgacggtgtctaagaagccaggtggatgtgtgtggtggctccagtgggtgtttctactctgccagtgagaggcagccccctagaaactcttcaggcgtaatggaaaatcagctcaaatgagatcaggcccccccagggtccacccacagagcactacagagcctctgaaagaccatagcaccaagcgagccccttcagattcccccactgtccatcggaagatgctccagagtggctagagggcatctaagggctccagcatggcatatccatgcccacggtgctgtgtccatgatctgagtgatagctgcactgctgcctgggattgcagctgaggtgggagtggagaatggttcccaggaagacagttccacctctaaggtccgaaaatgttccctttaccctggagtgggagtgaggggtcatacaccaaaggtattttccctcaccagtctaggcatgactggcttctgaaaaattccagcacacctcctcgaacctcattgtcagcagagagggcccatctgttgtctgtaacatgcctttcacatgtccaccttcttgccatgttccagctgctctcccaacctggaaggccgtctccccttagccaagtcctcctcaggcttggagaacttcctcagcgtcacctccttcattgagccttctctgatcactccatccctctcctacccctccctcccccaaccctcaatgtataaattgcttcttgatgcttagcattcacaatttttgattgatcgttatttgtgtgtgtgtgtccgatctcacaagtatattgtaaacccttcggtgggtgggggccatatcctagacctctctgtatcccccagactatctgtaacagtgccaggcacacagtaggtgatcaataaacacttgttgattgag

SEQ ID NO: 4215 - protein, 230 aa, Homo sapiens
MASLGLQLVGYILGLLGLLGTLVAMLLPSWKTSSYVGASIVTAVGFSKGLWMECATHSTGITQCDIYSTLLGLPADIQAAQAMMVTSSAISSLACIISVVGMRCTVFCQESRAKDRVAVAGGVFFILGGLLGFIPVAWNLHGILRDFYSPLVPDSMKFEIGEALYLGIISSLFSLIAGIILCFSCSSQRNRSNYYDAYQAQPLATRSSPRPGQPPKVKSEFNSYSLTGYV

SEQ ID NO: 4216 - DNA, 3037 bp, Homo sapiens
aaccagcaaaacaaaaaaatgattattaccgaggattcattgcccagcctagaagccatcttgaactattccattttcaaccgtgaaaatgacctgctggcccagtttgatgccatcccaggcaaaaaaggcactcgtgttctcatttggaacatccgcagaaataaaaatggaaaatctgagttggactttgatacagatcaatatgacatcctggtttcagactttgacacagaagaaaaaatgactggcggtgttacctctgagctaccagaaacagaatattctttaagggcattttgtggtattctatacatgaagccacgcatgaaaatttttctgcgtcaaaagaaggtgactacccagatgattgccaagagcctggccaatgtagaatatgatacacataaacctaccttcacaaataagcaggtgagaatcacctttgggttctcttgcaagaatagtaaccagtttggaataatgatgtatcataacaaccgactcataaaatcttttgagaaggtggggtgccaggtgaagccaactcgtggagaaggtgtaggagtaattggagtcattgagtgcaatttcctaaaacctgcctacaacaaacaagactttgagtataccaaggagtaccggctaacaataaatgcccttgcccagaagctcaatgcttactggaaggaaaaaacatctcaagataattttgagacctcaactgtagccaggccaataccgaaggttcctgaccagacatgggttcagtgtgatgagtgtcttaaatggagaaagcttcctgggaagattgatccatccatgttacctgcaagatggttttgttattataattcccatccaaagtacaggagatgctctgttccagaggaacaagaactcattgatgaagacctgtgcttgagcaaagctaagaaacaagaacaaactgttgaggagaagaagaagatgcctatggaaaatgagaaccaccaggtattcagtaatccaccaaagatcctcactgttcaagaaatggctggattgaataacaagacaattggatatgagggaattcatagccctagtgtgcttccttctggtggagaagaaagcagatcaccatctcttcaacttaagcctctggattccagtgttttacagttttccagtaagtacaaatggatcctaggtgaagaaccggtggagaaacgaagaaggctccagaatgagatgacaacaccttctctagattattccatgcctgctccttacaggagggtagaagcacctgttgcctacccagaaggggagaacagccatgataaatcgagttctgagagaagtacaccaccataccttttcccagaatacccagaagcaagcaagaatacaggtcagaatagggaggtttcaattctgtatccaggggccaaagaccaacgccaggggtccctgcttcctgaagaattagaagatcagatgccaagattggtggcagaagaatctaacagaggtagcacaaccataaacaaagaagaagtcaacaagggaccttttgtagctgttgtgggtgttgccaaaggtgttagagattcaggagctcccattcagctgatcccttttaacagagaggagcttgctgagagacgaaaagcagttgaatcctggaacccagtgccttattctgtggcctctgctgcaatccctgctgcagccattggggagaaagcaagaggctatgaggagagcgaaggtcataatacaccaaagttgaagaaccagagagagctggaagaattgaagagaaccacagaaaaattggaacgtgttttggctgaaaggaatttgttccagcaaaaggtggaggagctggaacaggagaggaatcactggcagtctgaattcaagaaagtccaacatgaattggtgatctacagtacccaggaggcggaaggcttgtactggagcaagaaacacatgggttatcgccaagctgaattccagattctgaaagctgagctggaaagaaccaaagaggaaaagcaagagttaaaagagaaactgaaggaaacagagacacacctggaaatgctgcagaaggctcaggtctcctaccggaccccagagggagatgacctagaaagggctttggcaaagcttacgcggctacgtatccacgtcagctatctccttacttctgtcctccctcacttggagcttcgtgagatcgggtatgactcagaacaagtggatgggatcctgtacacggtgctggaggcaaatcacatactggattgagcaccagactgtatacccttctcttctcttatcttctgtctgttctcttttctctccctccctcacgtctctctctctctctctctctctctctctctctctcaccctcacctttatgccttatatagagaatctctgtgtaaatcctggctcataatcagtctcctttttatcagttttggtgtggagaaagaggccagtttaaataggctttcaagagtctagggtcagaaaagcaatagtcactaagctaggtgacctgaaagctttaattttcatgacctggatatgtggtctattgtatatctttttctgaaatggtttgtattcatttaggttagatcaatcagcagatattgggtccggtataccaggtattattttggggtaagctaacaagtacaactcatgtttgcagccttcgaagatgtaacaatctcgttggaaacataagacatacatcacattatacacaaaagtgtatgatatgtacaactgagtggtacagatatgacatggaagatctgggggaggaagttcaaggaaggcaccacaccagaaatgggacctaaattaaggcttaaagaatgagcatggccacactgtcagtgagtgttctttaggtggtaggactatggttgatatttttcttcttcctatcttcctgcctttttcagattttcaatattaaacttgttattcttacattggaaaaaaataaattgtttttaaaaag

SEQ ID NO: 4217 - protein, 760 aa, Homo sapiens
MIITEDSLPSLEAILNYSIFNRENDLLAQFDAIPGKKGTRVLIWNIRRNKNGKSELDFDTDQYDILVSDFDTEEKMTGGVTSELPETEYSLRAFCGILYMKPRMKIFLRQKKVTTQMIAKSLANVEYDTHKPTFTNKQVRITFGFSCKNSNQFGIMMYHNNRLIKSFEKVGCQVKPTRGEGVGVIGVIECNFLKPAYNKQDFEYTKEYRLTINALAQKLNAYWKEKTSQDNFETSTVARPIPKVPDQTWVQCDECLKWRKLPGKIDPSMLPARWFCYYNSHPKYRRCSVPEEQELIDEDLCLSKAKKQEQTVEEKKKMPMENENHQVFSNPPKILTVQEMAGLNNKTIGYEGIHSPSVLPSGGEESRSPSLQLKPLDSSVLQFSSKYKWILGEEPVEKRRRLQNEMTTPSLDYSMPAPYRRVEAPVAYPEGENSHDKSSSERSTPPYLFPEYPEASKNTGQNREVSILYPGAKDQRQGSLLPEELEDQMPRLVAEESNRGSTTINKEEVNKGPFVAVVGVAKGVRDSGAPIQLIPFNREELAERRKAVESWNPVPYSVASAAIPAAAIGEKARGYEESEGHNTPKLKNQRELEELKRTTEKLERVLAERNLFQQKVEELEQERNHWQSEFKKVQHELVIYSTQEAEGLYWSKKHMGYRQAEFQILKAELERTKEEKQELKEKLKETETHLEMLQKAQVSYRTPEGDDLERALAKLTRLRIHVSYLLTSVLPHLELREIGYDSEQVDGILYTVLEANHILD

SEQ ID NO: 4218 - DNA, 1689 bp, Homo sapiens
acccaagttggaggtaggggcctgtggaaacatgaagagggtaaacagctgtgtgaagagtgatgagcatgtcctggaggagctggaaacagaaggggagaggcagctgaaaagcctccttcagcatcaacttgatacttctgtctccattgaggaatgtatgtctaagaaagagagctttgctcctggtactatgtacaagccctttgggaaggaagcagctgggactatgactttgtcccaattccagacactgcatgagaaggaccaggaaactgcttctctcagggaattagggcttaatgaaacagaaatcttgatctggaagagccatgtttctggtgaaaagaagacaaaactgagggcaactcctgaagcaatacagaaccgtcttcaagatattgaagaaaggatctcggagcgtcagcgcattctttgcctgccacagagatttgcaaagagcaaacagctgacccggcgagaaatggaaatagaaaagtctttatttcagggagctgatcgtcactccttccttaaggctctttattaccaagatgaaccccaaaagaagaacaaaggtgatcccatgaacaacctggaaagtttttaccaagagatgataatgaaaaaacgtcttgaagagtttcaacttatgagaggtgaaccctttgcttcccactcactggtctcagctacatcagtgggtgatagtggcacagctgagagcccatcattactccaggacaagggaaaacaggcagcacagggtaaaggccccagtctccatgtggcaaatgttattgatttttcacctgagcagtgttggactgggcctaagaagctgacgcagccaatagaatttgtcccagaagatgaaatccagagaaatcgtttgtcagaggaagagatccgaaaaattcctatgttttcttcatataatccaggggaaccaaacaaggtattatacctgaagaaccttagccctcgggtgactgaaagagatcttgtgtcattgttcgctcggttccaggagaaaaaaggacctccaattcaattccgaatgatgactggacgaatgaggggccaggcctttatcacctttcccaataaggagatagcatggcaagcattgcatctagtaaatggatacaaactatatgggaaaatattggtgatagagtttggaaagaacaaaaagcaacggtcaaatctccaagcgacttctctcatatcatgtgctacaggtagcactacagaaattagtggtagctagaatatatataaattgtgggtcctggatggtctttcttgaattggaatcttggatctaggatttatgtatagacaccagtttgtttggagttgaagaggaaaaactaactgagggaggggaaaaaagtaatttcagcttttggagagaactggtagaaaacattttctattatataattgaagactatataggacagatgatatgctgagtatgaagggtaaagtgcaaagagtattattttctcaggatgaattacaacggattattcctaaggatttttaaaaatctttataatttttctggggtcctcaatatttgtctctagagataacattctttcttagactgcttcgtatacacagaaataaaaaactaattaaatgttgaaaaaaaaaaaaaaaaaaaaaaaaaaaaaa

SEQ ID NO: 4219 - protein, 413 aa, Homo sapiens
MKRVNSCVKSDEHVLEELETEGERQLKSLLQHQLDTSVSIEECMSKKESFAPGTMYKPFGKEAAGTMTLSQFQTLHEKDQETASLRELGLNETEILIWKSHVSGEKKTKLRATPEAIQNRLQDIEERISERQRILCLPQRFAKSKQLTRREMEIEKSLFQGADRHSFLKALYYQDEPQKKNKGDPMNNLESFYQEMIMKKRLEEFQLMRGEPFASHSLVSATSVGDSGTAESPSLLQDKGKQAAQGKGPSLHVANVIDFSPEQCWTGPKKLTQPIEFVPEDEIQRNRLSEEEIRKIPMFSSYNPGEPNKVLYLKNLSPRVTERDLVSLFARFQEKKGPPIQFRMMTGRMRGQAFITFPNKEIAWQALHLVNGYKLYGKILVIEFGKNKKQRSNLQATSLISCATGSTTEISGS

SEQ ID NO: 4220 - DNA, 4775 bp, Homo sapiens
acccgcgcgaggtaggcgctctggtgcttgcggaggacgcttccttcctcagatgcaccgatcttcccgatactgcctttggagcggctagattgctagccttggctgctccattggcctgccttgccccttacctgccgattgcatatgaactcttcttctgtctgtacatcgttgtcgtcggagtcgtcgcgatcgtcgtggcgctcgtgtgatggccttcgtccgtttagagtagtgtagttagttaggggccaacgaagaagaaagaagacgcgattagtgcagagatgctggaggtggtcagttactaagctagagtaagatagcggagcgaaaagagccaaacctagccggggggcgcacggtcacccaaaggaggtcgactcgccggcgcttcctatcgcgccgagctccctccattcctctccctccgccgaggcgcgaggttgcggcgcgcagcgcagcgcagctcagcgcaccgactgccgcgggctccgctgggcgattgcagccgagtccgtttctcgtctagctgccgccgcggcgaccgctgcctggtcttcctcccggacgctagtgggttatcagctaacacccgcgagcatctataacataggccaactgacgccatccttcaaaaacaactaaaggatgatatgatgaacctagcctgttaatttcgtcttctcaattttaaactttggttgcttaagactgaagcaatcatggtgaacctgaggaatgcggtgcattcattccttgtgcacctaattggcctattggtttggcaatgtgatatttctgtgagcccagtagcagctatagtaactgacattttcaatacctccgatggtggacgcttcaaattcccagacggggtacaaaactggccagcactttcaatcgtcatcataataatcatgacaataggtggcaacatccttgtgatcatggcagtaagcatggaaaagaaactgcacaatgccaccaattacttcttaatgtccctagccattgctgatatgctagtgggactacttgtcatgcccctgtctctcctggcaatcctttatgattatgtctggccactacctagatatttgtgccccgtctggatttctttagatgttttattttcaacagcgtccatcatgcacctctgcgctatatcgctggatcggtatgtagcaatacgtaatcctattgagcatagccgtttcaattcgcggactaaggccatcatgaagattgctattgtttgggcaatttctataggtgtatcagttcctatccctgtgattggactgagggacgaagaaaaggtgttcgtgaacaacacgacgtgcgtgctcaacgacccaaatttcgttcttattgggtccttcgtagctttcttcataccgctgacgattatggtgattacgtattgcctgaccatctacgttctgcgccgacaagctttgatgttactgcacggccacaccgaggaaccgcctggactaagtctggatttcctgaagtgctgcaagaggaatacggccgaggaagagaactctgcaaaccctaaccaagaccagaacgcacgccgaagaaagaagaaggagagacgtcctaggggcaccatgcaggctatcaacaatgaaagaaaagcttcgaaagtccttgggattgttttctttgtgtttctgatcatgtggtgcccatttttcattaccaatattctgtctgttctttgtgagaagtcctgtaaccaaaagctcatggaaaagcttctgaatgtgtttgtttggattggctatgtttgttcaggaatcaatcctctggtgtatactctgttcaacaaaatttaccgaagggcattctccaactatttgcgttgcaattataaggtagagaaaaagcctcctgtcaggcagattccaagagttgccgccactgctttgtctgggagggagcttaatgttaacatttatcggcataccaatgaaccggtgatcgagaaagccagtgacaatgagcccggtatagagatgcaagttgagaatttagagttaccagtaaatccctccagtgtggttagcgaaaggattagcagtgtgtgagaaagaacagcacagtcttttcctacggtacaagctacatatgtaggaaaattttcttctttaatttttctgttggtcttaactaatgtaaatattgctgtctgaaaaagtgtttttacatatagctttgcaaccttgtactttacaatcatgcctacattagtgagatttagggttctatatttactgtttataataggtggagactaacttattttgattgtttgatgaataaaatgtttatttttgctctccctcccttctttccttccttttttcctttcttccttcctttctctctttcttttgtgcatatggcaacgttcatgttcatctcaggtggcatttgcaggtgaccagaatgaggcacatgacagtggttatatttcaaccacacctaaattaacaaattcagtggacatttgttctgggttaacagtaaatatacactttacattcttgctctgctcatctacacatataaacacagtaagataggttctgctttctgatacatctgtcagtgagtcagaggcagaacctagtcttgttgttcatataggggcaaaaatttgacattgtcagaatgttgtgttggtatttactgcaatgtctgtccctaaacatagtggtattttaacatagcagctggttaaccgggactacagaagtggaaggataatgagatgtaatacaccaaatagcttttcacttcttaaggacagtgttcaaattctgattattacaacaagcaaactgaaattagtgttttcattctggtccttagtaaattcctaattctatgattaaactgggaaatgagatcccagagttatttcccaacccaggattcaacatcaattgggttttgatctcagcatcctggaaatttgtgtgcttcacacaaagtgaaattagtattttgagccttattaaaatattttcttaattatggtacctctgtctataggacttaatttagcagtccatttttgagtaaaacttgtattggaagtatagatggtagaaactttggaagttttacttgattaaggactacagaattgggcccttagaatgtgaaaaaaaaaagtaattaaaaagacacttttaccgaactcgggattacagaaacacggagtttccatttggattttaaacaaaatttatgtcattttcagatccttccaaactctctagtgcaggaaaaggctgcagctaatttgtgaaagtggcaagctcttcattgcactgcagttatttaccagaagtttaaatctttgttaaaatatagtgttgtgttacaataagtgttggccatcatttcattcgtgggcctgctgctctctaagaattcagtagcattttaatagtttctaaaccatgaaaagttttcaagcattgctaaagtcaggccattcagtctatgctgtgtgcagagtatacaagtgtttctagtaacagtatttccatacgtgcccatttcacacaactgtggataaattttggaagaattcatgatgctagttcttacgcttgacagttacttacacacctgagaatgtgcctctcagtatcttaaaattggttaatgaaaaatctgaatttctaaaacccttggtctgtgttctcaacacacagtatagataaatccaatagtctgccacaagggcagtggaagagctgctgtatttgaggaaactcatacagtctctatttgatttgcaacactggccaaacatcagtcatttgcttgagcatgcccaaatattacatgaaagtcaagtctacctgccttgcctgttaggtctgttgaagtgcatgttaaaataattatatgaagcagaatgagatgatttaattcttaccgaaatgaaaatggctgaagaaacacagcatgcatttagcatgagttctgcacatacagatggtgtcctgcatgtatgccatgtatgttgcatgaatccatcgatttgtattaatgtagggcagaatagctgatagaagaaggactgaagaaaatccttcagcaatccttaaaaagaccatgcattcagatctgaagtagtgtgagtgttagaaaaaactggaaacatctgatttctgaactatcagggcaagctcatagcacatgttttacaaagaaacaaaatataaatcacagatttccaaaagtactagcaataagttgaatgataatagctcacagcacatttgttaatgattcttgtgtcatcaagtagtagtacttaatagtacccaacctggtaattatcctcaagttgtgtgctattcgtaagttctgtgcagtttggtatgaaacaaatatactcatttggatataaatcttacccttcaatgttaaatctacaaacttttataaatgttttaaagaagtccatgtgataattgtaaaggtgatgaatttaccatcaaacaaatcattttgatgtattattatatatgtatatctgtgtaagacacgtgcaacagactgccttatattattttctgtaattcttctcctttgtcaaatggtattttttgtgaatggttgcaaagtgttgtcttattcctaattcctgtatgttatccactacaggttttatgagacttcctattaatttattaaatttattaaatgttgaaaaaaaaaaaaaaaaaaaaaaa

SEQ ID NO: 4221 - protein, 458 aa, Homo sapiens
MVNLRNAVHSFLVHLIGLLVWQCDISVSPVAAIVTDIFNTSDGGRFKFPDGVQNWPALSIVIIIIMTIGGNILVIMAVSMEKKLHNATNYFLMSLAIADMLVGLLVMPLSLLAILYDYVWPLPRYLCPVWISLDVLFSTASIMHLCAISLDRYVAIRNPIEHSRFNSRTKAIMKIAIVWAISIGVSVPIPVIGLRDEEKVFVNNTTCVLNDPNFVLIGSFVAFFIPLTIMVITYCLTIYVLRRQALMLLHGHTEEPPGLSLDFLKCCKRNTAEEENSANPNQDQNARRRKKKERRPRGTMQAINNERKASKVLGIVFFVFLIMWCPFFITNILSVLCEKSCNQKLMEKLLNVFVWIGYVCSGINPLVYTLFNKIYRRAFSNYLRCNYKVEKKPPVRQIPRVAATALSGRELNVNIYRHTNEPVIEKASDNEPGIEMQVENLELPVNPSSVVSERISSV

SEQ ID NO: 4222 - DNA, 1376 bp, Homo sapiens
gtaagaacactctcgtgagtctaacggtcttccggatgaaggctatttgaagtcgccataacctggtcagaagtgtgcctgtcggcggggagagaggcaatatcaaggttttaaatctcggagaaatggctttcgtttgcttggctatcggatgcttatatacctttctgataagcacaacatttggctgtacttcatcttcagacaccgagataaaagttaaccctcctcaggattttgagatagtggatcccggatacttaggttatctctatttgcaatggcaacccccactgtctctggatcattttaaggaatgcacagtggaatatgaactaaaataccgaaacattggtagtgaaacatggaagaccatcattactaagaatctacattacaaagatgggtttgatcttaacaagggcattgaagcgaagatacacacgcttttaccatggcaatgcacaaatggatcagaagttcaaagttcctgggcagaaactacttattggatatcaccacaaggaattccagaaactaaagttcaggatatggattgcgtatattacaattggcaatatttactctgttcttggaaacctggcataggtgtacttcttgataccaattacaacttgttttactggtatgagggcttggatcatgcattacagtgtgttgattacatcaaggctgatggacaaaatataggatgcagatttccctatttggaggcatcagactataaagatttctatatttgtgttaatggatcatcagagaacaagcctatcagatccagttatttcacttttcagcttcaaaatatagttaaacctttgccgccagtctatcttacttttactcgggagagttcatgtgaaattaagctgaaatggagcatacctttgggacctattccagcaaggtgttttgattatgaaattgagatcagagaagatgatactaccttggtgactgctacagttgaaaatgaaacatacaccttgaaaacaacaaatgaaacccgacaattatgctttgtagtaagaagcaaagtgaatatttattgctcagatgacggaatttggagtgagtggagtgataaacaatgctgggaaggtgaagacctatcgaagaaaactttgctacgtttctggctaccatttggtttcatcttaatattagttatatttgtaaccggtctgcttttgcgtaagccaaacacctacccaaaaatgattccagaatttttctgtgatacatgaagactttccatatcaagagacatggtattgactcaacagtttccagtcatggccaaatgttcaatatgagtctcaataaactgaatttttcttgcgaatgttgaaaaa

SEQ ID NO: 4223 - protein, 380 aa, Homo sapiens
MAFVCLAIGCLYTFLISTTFGCTSSSDTEIKVNPPQDFEIVDPGYLGYLYLQWQPPLSLDHFKECTVEYELKYRNIGSETWKTIITKNLHYKDGFDLNKGIEAKIHTLLPWQCTNGSEVQSSWAETTYWISPQGIPETKVQDMDCVYYNWQYLLCSWKPGIGVLLDTNYNLFYWYEGLDHALQCVDYIKADGQNIGCRFPYLEASDYKDFYICVNGSSENKPIRSSYFTFQLQNIVKPLPPVYLTFTRESSCEIKLKWSIPLGPIPARCFDYEIEIREDDTTLVTATVENETYTLKTTNETRQLCFVVRSKVNIYCSDDGIWSEWSDKQCWEGEDLSKKTLLRFWLPFGFILILVIFVTGLLLRKPNTYPKMIPEFFCDT

SEQ ID NO: 4224 - DNA, 4943 bp, Homo sapiens
attgtcgggggctattctctctcccaggaacatggcggcgagtcagggaggaggcggtaacagtgggggcggcggttgtggtggaggtggaagtagcggtggctgtggcacggctggagggggaggtggcggggctggagggggaggcggcggcggcggcgggaccctggtggtccccatcccggtaccgactcttttcggtcagccgttccccaacgggccgccgtggaacccggggagcctgcagcctcagcacaccgtgaggagcctggaccgggccctggaagaggcgggcagctccggcatcctgagcctcagtggtcggaaactccgagacttcccgggcagcggctacgacctgacggacaccacccaagcagatctttccagaaatcgttttacagaaattccttctgatgtctggttatttgcaccccttgaaacattaaatttatatcataattgcatcaaaaccattcctgaagccattaaaaatctgcagatgttaacataccttaacattagccgaaatcttttatcaacattgccaaaatacctatttgatcttccccttaaagttttggtcgtcagtaataataaactggtatccattccagaagaaattgggaagttaaaagatttaatggaattggatattagctgcaatgagattcaagtccttccccaacaaatgggaaaattacattcacttagagagctaaatataagaagaaataatcttcatgttttgccagatgaattaggagaccttcccttagtcaagctggatttctcttgtaataaagtgaccgaaattccagtttgttacagaaagctgcatcatttacaagtaataattttggataacaatccattgcaagtaccaccagcacagatatgtttaaagggtaaggtgcacatatttaagtacttaaatattcaagcatgttgcagaatggataagaaaccagattccctggatcttccatcattgagtaaacgaatgccctcacagcctctcacagacagtatggaagatttttatccaaataaaaatcatggccctgactctggaattggaagtgataatggagagaaacgattatccacaacagaaccatcagatgatgacacagtcagccttcattctcaagtctcagaatcaaatagagagcagacatcaagaaatgacagtcacataataggaagtaagactgattctcagaaagaccaggaggtatatgattttgttgaccccaacacagaagatgtagcagttcctgaacagggaaatgcacatattggatcatttgtatcattctttaagggaaaagaaaaatgttctgaaaaatctcggaaaaatgaagaattaggagatgaaaaaagacttgagaaagaacagttactggcagaggaagaggatgatgatttgaaggaagtaactgatttgaggaaaatagctgctcagttattgcagcaagaacagaagaacaggattcttaatcattcaacttctgtgatgagaaacaagccaaaacaaactgtggaatgtgaaaagagtgtctcagcagatgaagttaattcaccattatcacccctcacctggcagcccttagaaaatcagaaggatcaaatagatgaacaaccgtggccagaatctcaccctataatctggcagagtgaagaaaggaggcggagcaaacagattagaaaagaatatttcaagtataaatcaatgaggaagagttcaagtggcaatgaaaatgatgagcaagacagtgataatgctaatatgtcaacacaatctccagtatcatctgaggaatatgacagaactgatggtttttcacacagtccctttggcttgaagcctagatcagcttttagccgctcatctcgccaagaatatggggcagcagatccaggatttacaatgagaagaaagatggaacatttacgggaagagcgagagcaaatacgacaacttcgcaacaatcttgaatccaggttaaaagtaattttgcctgatgacattggagctgcactgatggatggggttgttctttgccatttagccaatcatataaggccacgttctgttgctagtattcatgtaccatcaccagcagtgcccaaactgagcatggcaaaatgtcgaagaaatgtagaaaattttcttgatgcttgtaaaaagttgggtgtctcacagaggaaagactttgtttgcctcatcatattttggaagaacgaggacttgtgaaagttggtgtcacagttcaggcgctccttgaattaccaacaaccaaggcatctcagctttctgtggcttaatataacattttaaaattctaagtgtatagtttcatttatttgaagtgatttcaaatatttcaaattcatgaataagaatattccgtcaaaaatagtttgccttaggtcacgccttaggattttaaaaaaattacattgaaacatcaaacttaaacattgaattgcccgaacttctttgggggaaaactggattaacttaataagagtatttgataaactcaaattctctttttactaagtcagttgataatcttgattatttttcagaaagcagactgatactaaatttaaaatgtagtttcaatttaataatcacattaggtttaatttttttacatcatagcatattagtaaacatctggataaaggtaattttttttagcaatttagagcaattctatatttgagttatttaatacacttctaattctagtttatacacaatttcttcaatctttggtcttagttttctagaaaaaaggagtagaaaaaacaattctggctttatattaaattcttttagtattataggttggtgccaaaatattttcagttgtactgtagattgtttacatgtgaagtgcctgtgtaattgatgactcttacatagtcttaagcatttttgcaattttttaaatgtattaatagagtcaatggaactttaaaatattttagtagattttgtaaagtcagtaatatgtgaggatttaaatgagcctcacattgtgacatttgtggttttttagttagtccattgcagtttcccttaaattggttatttcatgttgtcaaaaataccaatgttaatatgattaatttatgctatttaattttgtgaaacttaatcatcttttaaaatgtattatttgaagagtattttatttctgtattgaaaatgttacacaaagcagtaaagtttttgagaactagtgaagtactaattatcaaggacattttgataaaactgccaaagtttgggtttatatcttccctttgagcagcattctatcagtgctgcctttagctatactcagagagcagcagttgaggaataggtttttactcaaaatctggccatttgtgaatcctgtaaaccttgtgatcttcaattactttgatgttaaattaaacacagactcttctataaatattttcatgagatactgtgttacacaaagtccttgttttaacttaggtatgggtaaatttacattggtggtattgcaggaatttttcaaaaacattactgtaatgaataactgagtttcctatagaagaacctgaataattacttttgtagtaaccaagcaagcatcatatcttaagtatgtgatcatttgcacttgttacctcttaatatggatgcaacttattaaaaatgttggcctgggtatttcaaagggtatatataaaaggtaaaaaactagtgtgccaaatggtataggaacaactgtactttttttgatcagttggcatgaagccatagaattaaattttggctttagaatacagatgtgttcattacattccccaagggtcaaattggagcttttaaagaattaaagcttctatgagtatatggtttaagaattaaattattagtaatttattattttaaatatttgacctcattagttgttaattttttagttggataaaaaaaaaactcgctgacataatctccctagtgaaaacttgggtaatatatgtaagaaatggcaaataaataccttagttaatgactttttatgtagaaatttgacagcattacaaattaagtgaccattaaaaacacagcaatcattcatactgctttcataggtgttatgatagtctctgattaatcaatctagtatgaattattttacaagtgttgtcctgtttcatatctttgaagtagtagtgaaattgtaggccattttcttataacatttcagttacttttcagttaattattcctttaaaaagaaaatacagcagaacctcactgtagcattctttactgcagagcaaaattcaatttaagatgggcttctctgaggtccacatcatggcagttcatttactcttgtgccaaatggcaacaccacgtctaaagcagtttcacagcatggtcccctacaatgttataccaaggctctgatgtatttcttttagtagtttctaagtgtaaaatttattctaaatgtttttatggctattatctatttcatcagttattgaattaagaatgattttcattacttgagtgggatttgtgatttaatgacagttgaataatcaaaaatattttattaggcccccaaaatttaatagatatctatttctgttacattttattactgtatggcacaagaaagaagtgacattgggtatgttagaaatgaaataaggagtaaaaatgcattaccatttgtttaataattatctttacagaatgctagtttaatgacttttttaactgaattttttgaataaatcagaaatgtttgtattggtcacagatctatcataattgcttttctgatgcatttaaaaataaatggaacacttaaatgtatattaccgatgcaaactgtggataaagttgaaagaaaaaaaaaaaaaaaaaa

SEQ ID NO: 4225 - protein, 742 aa, Homo sapiens
MAASQGGGGNSGGGGCGGGGSSGGCGTAGGGGGGAGGGGGGGGGTLVVPIPVPTLFGQPFPNGPPWNPGSLQPQHTVRSLDRALEEAGSSGILSLSGRKLRDFPGSGYDLTDTTQADLSRNRFTEIPSDVWLFAPLETLNLYHNCIKTIPEAIKNLQMLTYLNISRNLLSTLPKYLFDLPLKVLVVSNNKLVSIPEEIGKLKDLMELDISCNEIQVLPQQMGKLHSLRELNIRRNNLHVLPDELGDLPLVKLDFSCNKVTEIPVCYRKLHHLQVIILDNNPLQVPPAQICLKGKVHIFKYLNIQACCRMDKKPDSLDLPSLSKRMPSQPLTDSMEDFYPNKNHGPDSGIGSDNGEKRLSTTEPSDDDTVSLHSQVSESNREQTSRNDSHIIGSKTDSQKDQEVYDFVDPNTEDVAVPEQGNAHIGSFVSFFKGKEKCSEKSRKNEELGDEKRLEKEQLLAEEEDDDLKEVTDLRKIAAQLLQQEQKNRILNHSTSVMRNKPKQTVECEKSVSADEVNSPLSPLTWQPLENQKDQIDEQPWPESHPIIWQSEERRRSKQIRKEYFKYKSMRKSSSGNENDEQDSDNANMSTQSPVSSEEYDRTDGFSHSPFGLKPRSAFSRSSRQEYGAADPGFTMRRKMEHLREEREQIRQLRNNLESRLKVILPDDIGAALMDGVVLCHLANHIRPRSVASIHVPSPAVPKLSMAKCRRNVENFLDACKKLGVSQRKDFVCLIIFWKNEDL

SEQ ID NO: 4226 - DNA, 1745 bp, Homo sapiens
acctcggagtgtgtggcgccatgatgcagggaagatggcttcgtttcggaagctaacgctttctgaaaaagtgccgccaaatcatcccagtcggaaaaaggttaacttcctagatatgtctctagacgacattataatctataaagagttagaagggacaaatgctgaagaagaaaagaataaaagacagaaccatagtaaaaaggaatcgccttcaagacagcaatcaaaagctcatagacatcgccatcggagaggctactcaagatgcagaagcaactctgaggaaggaaatcatgataaaaaaccatcccaaaaaccttctggattcaagtctggacaacaccctttaaatgggcagcctttaattgagcaggagaagtgcagtgacaattatgaggcccaagcagagaagaatcaaggccagtcagaggggaaccagcatcaatcagaaggaaatccggacaaatcagaagaatcccagggccaaccagaagaaaatcatcattctgagcgatcccgaaaccacttagagagatctctttctcagtcagacagatctcaagggcagctaaagagacatcatccccaatatgagagatctcatggccaatacaagagatctcatggtcaatctgagagatctcatggccactcagagagatctcatggtcactcagagagatctcatggtcactcagagagatctcatggtcactcaaagagatctcgtagccagggagatcttgtggacactcagagtgatctcatagccactcagagagatctcatagccactcagaaagatctcatagccactcagagagatctcatagccactcagagagatctcatagtcactcagagagatctcgtggccactgagagagatctcataaatcagtcagggagatctcatggccaatcagaaagacatcagagatactcaacaggtaaaaatacaataactacttaatcatcagaacaatgtgttgaattctgtggaaatagaaaagcatatatctatattctaatggctaaatatgtatttgttgaaacatgtatattgggacaaagacataaatattagaatggaggtaatacatacatagtatcaatattgtttcaacttgatgtcctctaagctatcatccagttacccaagatgtcccattaagttgttcccggtaggtctgctttccctggaagagccgtatgtactcagcctttcctattgggccttccccacaattagaatattttgacttagtgtcctgtcccccttggacgttccaacttgacttagtgtccagtgccccttggacattccaacctggtaggtaagctaatctaacaactaactgccaaattgataatatataatctatgataatgaatatctcttttgtgtctccttcctaagccatcctcagagagtccttagcagacaaatggtagatgtatctttgggcagctgaacttttctgctttcctcaaatcagaccatatgagaggatatattctatgcatagatgtaatgctaaccttctgaatatattttgaatacatttatatattcactgttgccttataaaactgttagggtaggtctgtctaccctagcaaaagaaacacagaaatttaaatgtactgggagttatgttgttaaaaacacaagatatgttaactgcagtttgtttggttattcaataaaagttttagttttaaaaaaaaaaaaaaaaaaa

SEQ ID NO: 4227 - protein, 313 aa, Homo sapiens
MASFRKLTLSEKVPPNHPSRKKVNFLDMSLDDIIIYKELEGTNAEEEKNKRQNHSKKESPSRQQSKAHRHRHRRGYSRCRSNSEEGNHDKKPSQKPSGFKSGQHPLNGQPLIEQEKCSDNYEAQAEKNQGQSEGNQHQSEGNPDKSEESQGQPEENHHSERSRNHLERSLSQSDRSQGQLKRHHPQYERSHGQYKRSHGQSERSHGHSERSHGHSERSHGHSERSHGHSKRSRSQGDLVDTQSDLIATQRDLIATQKDLIATQRDLIATQRDLIVTQRDLVATERDLINQSGRSHGQSERHQRYSTGKNTITT

SEQ ID NO: 4228 - DNA, 4520 bp, Homo sapiens
taggaacaggggagagtgcacctgctaccagtcaagctcagccagactgcaagaggaggcgaggcggagccagccgagggagtgaaccatggacaagttgaaatgcccgagtttcttcaagtgcagggagaaggagaaagtgtcggcttcatcagagaatttccatgttggtgaaaatgatgagaatcaggaccgtggtaactggtccaaaaaatcggattatcttctatctatgattggatacgcagtgggattaggaaatgtgtggagatttccatatctgacctacagcaatggtggaggcgccttcttgataccttatgcaattatgttagcattggctggtttacctttgttctttctggagtgttcactgggacaatttgctagcttaggtccagtttcagtttggaggattcttccattgtttcaaggtgtgggaattacaatggtcctgatctccatttttgtgacaatctattacaatgtcataattgcctatagtctttactacatgtttgcttcttttcaaagtgaactaccatggaaaaattgttcttcgtggtcagataaaaactgtagcagatcaccaatagtaactcactgtaatgtgagtacagtgaataaaggaatacaagagatcatccaaatgaataaaagctgggtagacatcaacaattttacctgcatcaacggcagtgaaatttatcagccagggcagcttcccagtgaacaatattggaataaagtggcgctccaacggtcaagtggaatgaatgagactggagtaattgtttggtatttagcactttgtcttcttctggcttggctcatagttggagcagcactatttaaaggaatcaaatcgtctggcaaggtggtatattttacagctcttttcccctatgtggtcctactcatcctgttagtacgaggtgcaactctggagggtgcttcaaaaggcatttcatactatattggagcccagtcaaattttacaaaacttaaggaagctgaggtatggaaagatgctgccactcagatattttactccctttcagtggcttggggtggcttagttgctctatcatcttacaataagttcaaaaacaactgcttctctgatgccattgtggtttgtttgacaaactgtctcactagcgtgtttgctggatttgctattttttctatattgggacacatggcccatatatctggaaaggaagtttctcaagttgtaaaatcaggttttgatttggcattcattgcctatccagaggctctagcccaactcccaggtggtccattttggtccatattattttttttcatgcttttaactttgggtctcgattctcagtttgcttcgattgaaacgatcacaacaacaattcaagatttatttcccaaagtgatgaagaaaatgagggttcccataactttgggctgctgcttggttttgtttctccttggtctcgtctgtgtgactcaggctggaatttactgggttcatctgattgaccacttctgtgctggatggggcattttaattgcagctatactggagctagttggaatcatctggatttatggagggaacagattcattgaggatacagaaatgatgattggagcaaagaggtggatattctggctatggtggagagcttgctggtttgtaattacgcctatccttttgattgcaatatttatctggtcattggtgcaatttcatagacctaattatggcgcaattccataccctgactggggagttgctttaggctggtgtatgattgttttctgcattatttggataccaattatggctatcataaaaataattcaggctaaaggaaacatctttcaacgccttataagttgctgcagaccagcttctaactggggtccatacctggaacaacatcgtggggaaagatataaagacatggtagatcctaaaaaagaggctgaccatgaaatacctactgttagtggcagcagaaaaccggaatgagatctcattgaaaaaaatatatgattgtataatgtgattttttttagaatagggggaaccttatttatttgtgtgttaactgaataggaaaatgtacatactatgttcatgatagtgtgatttttttcacatttaagcaggaatgcaatataaaaatgtgaatctcttaattctcagccatgtgcttattatatttctttttagattgtctatctgtataacacacacacacacacctaagagtctctatttcacaattatatttttgtaaatagtatatgcatttttaatacattggaggctttattttgaactaatttcttagagaatagttatattttctattacacaagtttaaaaatattattaacttgtattttcttaatatacaatctatcttttccacaaatatgagtgggaaataaatcagcacatttgaaagaaagtgttaaaactgaaggcctcacttaattagaaacgtgataaatatatggacaaatggactatacatactataagaggactgtagtttaatactttttacccaaatatgtttaaaaacatcgtgcatttgttacagctcatgttttctatatgaacttagtcattaatgttctttataaaaagtgaaataagatggaaaaattaggatcctacagccagtacgtgataaatctagaaaattgagttttgagtacctcttttcccatatacaatcttccttccttaggtaatttggaagaaaactatgacccatttaatttctattgtgtttcaccaaattcagtgttgttcattatacctctctgaaatataggtttaatttcaaatagaatatggacttaaatgttaatgagaaactggctttaatcaattctagcattttattactgtaatacagggctgatagagtgattttgtcttatatgagtcagttactacttacaggtgataacttgcatactattggaagataaagttgtcaaacttgtcaagaatgagaaaagccaaattagaaaatcctatgtcctagtttccttaccaaggataattaaatatatcactaagagctttatatattgattatatattgttgacaactggtttaagcatcatagcctatgatgataaacactgcctatatatgtaaatagcttttcatcaattcttaaatttcttaacctaggcttcagggagcatatgaaaccaaaattatatggaacattttctgtgtgtacatgtacatgcatttttctagggagagagtccgtaggtttatcagaatatcaaggaaaactgtgacccaaagaagtttaagaatcacatacagtgctgctggctttttgtgcttggcaaatgagtgacaatagaagaaataatttttcttacacattttaaaacgttttctcttccttgtgattgaagatgaaaggagtaagaaattaaggcatttgtttaatttatactggtaacttatttaggggggaggggacatgaaggtaggtaaataggtaggcctctaattgaaccacctctctaagttatgtacgtatatataagctgaaattgtgtttgacattctgagggttttctttttctttttcctttttttttttttttggtggggggctgggggtcagagtcttgttctgttgcctgggctggagtgcagtggcatgatctcagctcactgcaacctctgccttctggattcaagtgattctcctgcctcagcctcttgagtagctgggactacaggtgcccgccaccacaccagctaatttttgtatttttagtagaggcgaagtttccccatgttggccaggctggtcttgaactcccgacctcaagtgatctgtctacctcggcctcctaaagtgctgagattacaggtgtgagccaccgtgcccggcccattctaagggttttctttgaagacaggtcaaatgctgttagtaagtttcaggagattgttaattcctcagttataccagattttataaaatatttgagaatagatggctaacaagaggttagaaatacttttccttaattttaatccacagtatgttacatgcattctaccactacattttggtgctatttaaggtgtgcaattttctataggtgacttttgcaattcagggaagatttgggcatattaaatgaaagaatatctaattgggggaggtgtgaagggaaagaaattcttttcaaaagctgaccacaaagagtagttaaaagtttttgtcactatcttcacaagtgtgtaaagcacagatttcaacagagtgcttggcatattgtagggtgctcaatggtggtttttattattattactcagattccacagtggcaagaaacatcattctacataatggaaaacatttacatcaaatcccacttactttaatgcgaacttggagataatttatggtattgtattgtaaaccattaatgaaaactttttcacagttgagtgaaattaaaatcactatatctc

SEQ ID NO: 4229 - protein, 642 aa, Homo sapiens
MDKLKCPSFFKCREKEKVSASSENFHVGENDENQDRGNWSKKSDYLLSMIGYAVGLGNVWRFPYLTYSNGGGAFLIPYAIMLALAGLPLFFLECSLGQFASLGPVSVWRILPLFQGVGITMVLISIFVTIYYNVIIAYSLYYMFASFQSELPWKNCSSWSDKNCSRSPIVTHCNVSTVNKGIQEIIQMNKSWVDINNFTCINGSEIYQPGQLPSEQYWNKVALQRSSGMNETGVIVWYLALCLLLAWLIVGAALFKGIKSSGKVVYFTALFPYVVLLILLVRGATLEGASKGISYYIGAQSNFTKLKEAEVWKDAATQIFYSLSVAWGGLVALSSYNKFKNNCFSDAIVVCLTNCLTSVFAGFAIFSILGHMAHISGKEVSQVVKSGFDLAFIAYPEALAQLPGGPFWSILFFFMLLTLGLDSQFASIETITTTIQDLFPKVMKKMRVPITLGCCLVLFLLGLVCVTQAGIYWVHLIDHFCAGWGILIAAILELVGIIWIYGGNRFIEDTEMMIGAKRWIFWLWWRACWFVITPILLIAIFIWSLVQFHRPNYGAIPYPDWGVALGWCMIVFCIIWIPIMAIIKIIQAKGNIFQRLISCCRPASNWGPYLEQHRGERYKDMVDPKKEADHEIPTVSGSRKPE

SEQ ID NO: 4230 - DNA, 552 bp, Homo sapiens
ggggagttacaccaggcatcctggcccaaagtttcccaaatccaggcggctagaggcccactgcttcccaactaccagctgagggggtccgtcccgagaagggagaagaggccgaagaggaaacatgaacttctatttactcctagcgagcagcattctgtgtgccttgattgtcttctggaaatatcgccgctttcagagaaacactggcgaaatgtcatcaaattcaactgctcttgcactagtgagaccctcttcttctgggttaattaacagcaatacagacaacaatcttgcagtctacgacctctctcgggatattttaaataatttcccacactcaatagccaggcagaagcgaatattggtaaacctcagtatggtggaaaacaagctggttgaactggaacatactctacttagcaagggtttcagaggtgcatcacctcaccggaaatccacctaaaagcgtacaggatgtaatgccagtggtggaaatcattaaagacactttgagtagatccaaaaaaaaaaaaaaaaaaaaaaaaaaaa

SEQ ID NO: 4231 - protein, 113 aa, Homo sapiens
MNFYLLLASSILCALIVFWKYRRFQRNTGEMSSNSTALALVRPSSSGLINSNTDNNLAVYDLSRDILNNFPHSIARQKRILVNLSMVENKLVELEHTLLSKGFRGASPHRKST

SEQ ID NO: 4232 - DNA, 4154 bp, Homo sapiens
gaaatctcgcgagggtaggtgcgcgtcggtattttgcgggcaactagctcttccagctgctgtaaattgctgctgcgggagaaactggagccgctgtagccggcgcgcccttcttcccttactgcgaggagccaccgcctctttcgcgctccttatacacctatcactgggagcggtggcagcaacattccctggaccaaccgccgcctcttcaggcggccgctttgccggtcattcccgaagcccggcaactgagggcggccccctttccttaacagtctcctcgctacagatcgtctgctccctcagcctcgcccgagacccacttccccagtctcgcccgggtggaggtcgacgaggaggagacaagagtcacccttcctccaggcggcgccggccccctcacccgcgggtgtgtcctataaatggcgtcggaaagcgacaccgaggaattctatgatgcccctgaagatgtgcacctagggggcggctaccccgtggggtctccaggaaaagttgggctttcaacattcaaggaaacagagaacactgcatacaaagttggaaatgagtcccctgtacaagaattgaaacaagatgtgtctaaaaagattattgaaagtattattgaggagagtcagaaagtactacagcttgaagatgactctttggattccaaaggaaaagaactctctgatcaagctactgccagtcctattgtggctagaacagatctgagcaatatacccggactgttagccatagatcaagtactaccggaagaatcccaaaaggcagagagtcagaatacatttgaagagactgaattagaattaaaaaaatgctttccttctgatgaaacctgtgagaaaccagtagatgaaaccacgaagttaactcaaacaagttcaactgagcagcttaatgtgcttgaaactgaaacagaagtattgaacaaggaagcagtggaagtcaaaggaggtggtgatgttttagagcctgtgtcctcagactccttatctactaaagattttgccgctgtggaagaagtggcccctgccaaacccccaagacaccttactccagagcctgatatagtggctagtacaaagaagcctgttccagcacgcccacctcctccaactaatttcccacctcctagacccccacctccttctcgacctgctccaccaccaagaaaaaggaaaagcgaattggaatttgagactctgaaaactcctgatatagatgttcccaaagagaatattacgtctgattctctcctaaccgcaagcatggcttcagaaagtacggttaaggattctcagccttctcttgatttggcaagtgctaccagtggagataaaatagttaccgcccaggaaaatggaaaagcacctgatgggcagactgtagcaggtgaagtgatgggccctcagagacctagatccaactctgggagagagcttactgatgaggaaattttagccagtgtaatgattaagaacctggatactggagaagaaatacctttgagtcttgcagaagagaaactaccaacaggcattaatcctctcactctacacatcatgagaaggacaaaagaatatgtaagtaatgacgcggcacagtcagatgatgaagagaagttacagtctcagccaacagatactgatggtggaaggttaaaacagaaaacgactcaactaaagaagtttcttggaaaatcagtaaagagagcaaagcaccttgctgaggaatatggtgaacgtgctataaataaagttaaaagtgttagagatgaagtgtttcatactgatcaagatgatccttcatcaagtgatgatgaaggaatgccatacacaagaccagttaaattcaaagcagcacacggtttcaaaggaccttatgattttgatcagatcaaagtggtgcaagatcttagtggtgaacatatgggagctgtttggaccatgaaattttctcactgtggccgattacttgcctcagctggacaagacaatgtagtgagaatatgggctttaaaaaatgcttttgactatttcaacaatatgcgaatgaaatacaatactgaaggacgtgtgtccccatcaccctctcaggaaagtctaagttcatcaaaatcggatacagatacaggggtatgcagtggaactgatgaagaccctgatgataaaaacgcaccctttcggcaacggccattttgcaaatataaaggacatactgctgatctccttgatctttcatggtctaaaaactactttcttctttcttcttcaatggataaaacagtcagattatggcacatttctcgaagagaatgcctttgctgttttcaacatatagattttgtcactgccatagcttttcatccaagagatgacaggtattttctaagtgggtctttggatggaaagctccgcctttggaacatacctgacaaaaaagtggctttgtggaatgaagtagatggtcagacaaaattgatcacagctgcaaatttctgtcagaatggcaaatatgcagtgattgggacatatgatggcagatgtattttctatgatacagagcatttgaaataccatacacaaatacatgtccgatctactagagggcgcaacaaggttggaagaaaaattactggcattgagcctttacctggagaaaataagatattggtaacctcaaatgactccagaatcagactatatgatttgagagatttgtcactatccatgaagtataagggttacgtcaatagcagcagccagatcaaagcaagtttcagccatgattttacttacctcgttagtggttcagaagataagtatgtttatatctggagtacctaccatgacctaagcaagtttacttcagtcaggagagatcgtaatgacttctgggaaggtattaaagcccacaatgcagttgttacatcagccatctttgcaccaaacccaagtttgatgttatctttggatgtgcaatctgaaaaatcagaagggaacgagaaaagtgaagatgctgaagttttggatgccacaccttctggtattatgaagacagataacacagaagttcttctctctgctgacttcactggagcaatcaaagtgtttgttaataaaagaaaaaatgtatcttaatttgaaatggcatttaaaataaacatatcagtaagtttctatatgtatcaaaactgaaaaaatagtgttccaggctaacatacttttttaatttttattgaaagttgttcaaatataatatattttttgagaggcagtgttaatgatctaggaaaccctgggctgatagagtagaaaggaatatggctagaataacattgccaaacattaggctttatgttttgttatgtttgtgttttcgttgtataattatgaacatgcacaagtttctgcatgaaaagatattaatatattaatcacatgtatgtgccttttggttacatgcattaaatctaacagagttaaattatttcagtggctcttttggcctcttactaggggggatagtcttgtttctagcttaaacaattttttttttgcacaaaatttcatttttaataaaagtggtatcttttgactgagttattgttttgaaaatggtatataggtttccagtaggtcaacaaccatatgtaaatggtttttataaatttctcaatttggggacaagatttttttgtggtctaaattgtgggcttaagattcttttctttatatgtgtacatataatttttttttctttgccacactggagcacaatgtttctatgtaaagaattattttcattctttatccatgagcaccaggctttgctcacttaaaaaaaaattaagccacattaaggagtgagtcttcttttttacaataatgtaaaaattaaactgtttacatttttttaaagcattgtagtttttaaaaattaagctgttttgttttgtgttgttgaatttgaaagcctttgtaaatatcaatataatgtaccaatgaaataacatctggggcaatgaaaccctgatcatgttgttgatggttagcatatgtttctgaaaattaaatatgtattattaaaagttggtctccaacacttgtttaaaaaaaaaaaaaaaa

SEQ ID NO: 4233 - protein, 913 aa, Homo sapiens
MASESDTEEFYDAPEDVHLGGGYPVGSPGKVGLSTFKETENTAYKVGNESPVQELKQDVSKKIIESIIEESQKVLQLEDDSLDSKGKELSDQATASPIVARTDLSNIPGLLAIDQVLPEESQKAESQNTFEETELELKKCFPSDETCEKPVDETTKLTQTSSTEQLNVLETETEVLNKEAVEVKGGGDVLEPVSSDSLSTKDFAAVEEVAPAKPPRHLTPEPDIVASTKKPVPARPPPPTNFPPPRPPPPSRPAPPPRKRKSELEFETLKTPDIDVPKENITSDSLLTASMASESTVKDSQPSLDLASATSGDKIVTAQENGKAPDGQTVAGEVMGPQRPRSNSGRELTDEEILASVMIKNLDTGEEIPLSLAEEKLPTGINPLTLHIMRRTKEYVSNDAAQSDDEEKLQSQPTDTDGGRLKQKTTQLKKFLGKSVKRAKHLAEEYGERAINKVKSVRDEVFHTDQDDPSSSDDEGMPYTRPVKFKAAHGFKGPYDFDQIKVVQDLSGEHMGAVWTMKFSHCGRLLASAGQDNVVRIWALKNAFDYFNNMRMKYNTEGRVSPSPSQESLSSSKSDTDTGVCSGTDEDPDDKNAPFRQRPFCKYKGHTADLLDLSWSKNYFLLSSSMDKTVRLWHISRRECLCCFQHIDFVTAIAFHPRDDRYFLSGSLDGKLRLWNIPDKKVALWNEVDGQTKLITAANFCQNGKYAVIGTYDGRCIFYDTEHLKYHTQIHVRSTRGRNKVGRKITGIEPLPGENKILVTSNDSRIRLYDLRDLSLSMKYKGYVNSSSQIKASFSHDFTYLVSGSEDKYVYIWSTYHDLSKFTSVRRDRNDFWEGIKAHNAVVTSAIFAPNPSLMLSLDVQSEKSEGNEKSEDAEVLDATPSGIMKTDNTEVLLSADFTGAIKVFVNKRKNVS

SEQ ID NO: 4234 - DNA, 6639 bp, Homo sapiens
ggcagtgagtccacccgcccgccgaggtccgcccgcccgccgagacccgcccgccgccgctgccatggccgaagtgcgcaaattcaccaaacggctcagcaagcctggcacggcggctgagctccggcagagcgtgtctgaggccgtgcggggctccgtggtgctggaaaaggccaaagttgttgagcccctggactatgagaatgttattgcccaaagaaaaacccagatttacagcgaccccctccgagatctgcttatgttcccaatggaagatatatctatctcggtgataggtcgtcaacgcagaacggtgcagtctactgtaccagaagatgctgaaaagagggcccagagtttatttgttaaagagtgtattaaaacctatagcacagattggcacgtggtaaactacaagtatgaggacttctctggggactttcgaatgttgccatgtaaatctttgagaccagaaaagattcctaatcatgtatttgagatagatgaagactgtgagaaagatgaggactcatcttctttatgttctcagaagggtggtgtgataaaacaaggctggttgcataaagcaaatgtaaatagtaccatcacagtaaccatgaaggtattcaagagacgatatttttacttgacccaacttcctgacggttcatatattctcaattcctataaagatgagaaaaattcaaaagaatcgaaaggttgcatctacttggacgcctgcattgatgttgttcagtgccccaaaatgcgccgtcatgcttttgaactcaagatgttagataaatatagccattatctggctgctgaaactgagcaggaaatggaggaatggttgataactttgaaaaagattattcagatcaacaccgacagtttagttcaagaaaaaaaggagacggtagaaacagcacaagatgatgaaactagcagccaaggaaaagccgagaacatcatggcaagtttggaaaggagcatgcatccggaactgatgaagtatggaagagaaactgaacaactaaacaaactcagtagaggagatggaagacagaatctcttttcttttgattcagaagttcagaggttggacttttcaggaattgaacctgatataaagccatttgaagaaaaatgcaataaacgtttcctggtgaattgccatgatttaactttcaatatcttgggccaaattggagacaatgcaaaaggaccacccacaaatgttgagcccttttttatcaatcttgccttatttgatgtaaagaacaattgtaagatttcagcagactttcatgtagacctgaatcccccatctgtccgtgaaatgctgtggggctcttcaacccaactggccagtgacggtagcccaaagggctcttcacccgaatcttacattcatggaattgccgaatctcagttacgctacatacaacagggaattttctcagtgacgaatccacatcctgaaatttttctagttgccagaattgaaaaggtactacagggaaacattacacactgtgcagaaccctatatcaaaaattctgatccagtaaagacggcccagaaggtgcacaggacagctaaacaagtgtgtagccgccttggacaatacagaatgcccttcgcttgggctgccagacccattttcaaagatactcaaggctctcttgatctggatgggagattttctcctctgtataaacaagacagtagcaagctttcaagtgaagacattctcaagttgctctcagaatataagaagccagaaaagaccaaactgcagattattcctgggcagctaaacatcacagtagaatgtgttcctgtggatttatcaaattgtattacttcttcatatgtgcccttgaagccttttgaaaagaattgccaaaatattactgtggaggttgaagagtttgttccagaaatgacaaaatattgttatccatttactatttacaaaaaccatctgtatgtatatcccctgcaattaaaatacgatagccagaaaacatttgccaaggcaaggaacattgcagtctgtgtggaattccgggattcagatgaaagtgacgctagtgccctaaagtgtatttatggaaaacctgcagggtctgtttttaccacaaatgcttatgctgttgtctcgcatcacaaccaaaatccagagttctatgatgagattaaaattgagcttcccattcacctacatcaaaaacatcgtttgcttttcactttttatcatgtaagttgtgaaattaacacaaagggaacaaccaaaaagcaagacacagttgaaactccagttgggtttgcctgggtacctttgctgaaagatggtagaatcatcacatttgagcagcagctgccagtttccgccaatcttcccccaggctacttgaatctgaatgatgcagaatcaagaaggcaatgtaacgtggatattaaatgggtagatggtgcaaagcctttgttgaagattaaaagccacttagaatctaccatttacactcaagatctgcatgtgcacaaattcttccatcattgccagctgattcagtcaggctcgaaagaagttccaggggagctcattaaatatttaaagtgtttgcatgccatggagatccaagtcatgatacagtttctacctgtaattcttatgcaactcttccgagttctcacaaatatgacccatgaagatgacgttcctatcaactgcaccatggttctcttacatattgtatcaaagtgccatgaagaaggcttggatagttatctaagatcattcataaagtatagcttccgacctgaaaaaccgagtgctcctcaggcccagctgatacatgaaaccctggctactacgatgatagcaatattgaaacagtctgcagattttttatcaataaacaaattgctaaagtactcatggtttttctttgaaataattgcaaagtcaatggccacatacttgttggaagagaataagattaagcttccccgaggccagagatttcccgagacatatcatcatgtcttacattcactgcttcttgcaataattccccatgtgactattcggtatgcggagattcccgatgagtccagaaatgtgaactatagtttggctagcttcctgaagcgctgtttgacactaatggatagaggatttattttcaatttaataaatgactatatatctggattcagccccaaagatcctaaggttctggctgaatacaagtttgaatttctgcaaacaatttgcaatcacgaacattacattcctctgaacttgccaatggcatttgcaaaacctaaactgcagcgggttcaagattcaaatcttgaatacagtttatcagatgagtattgcaagcatcacttcttggttggtctacttctgagggaaacttccattgctcttcaggacaattatgagatcagatatacagctatctctgttataaagaatcttttgataaaacatgcatttgacacaagataccagcacaagaaccaacaagccaaaatagcacaattgtacctcccctttgttggactacttttggaaaatatacagcgattagcaggtcgagataccttgtattcttgtgcagccatgcctaattctgcatccagagatgagtttccatgtggctttacttcacctgccaatagagggagtctgagcactgacaaagacaccgcttatgggtcttttcaaaatggacatggaattaagagagaagattcaagaggttccctcatcccagaaggagcaacaggatttccagatcagggcaacactggtgaaaatacccgacagagttctacaaggagtagtgtatcccagtataaccgcctggatcagtatgaaatcagaagcctcctgatgtgctacctgtatatagtaaaaatgatttcagaagatactctcttaacttactggaataaagtatcacctcaggagctcataaacattcttatacttttagaagtatgcttgtttcactttagatatatggggaaaagaaacatagcaagggtgcatgatgcctggctgtcaaaacacttcggaatagaccgaaaatcgcaaaccatgcctgctcttcgaaacagatcaggagtaatgcaggcccggcttcagcatcttagtagcctagaaagttcatttacacttaatcacagttctacaacaactgaagcagacattttccaccaggcacttcttgaaggcaatacagctactgaagtttccctaacagtactagacaccatatcatttttcactcagtgcttcaagacccaacttttaaataatgatggccataacccattaatgaaaaaagtgtttgatatacatcttgcttttcttaaaaatggacaatctgaagtgtcgctgaaacatgtatttgcctcactgagagctttcatcagtaagtttccttcagcatttttcaaaggaagagtaaacatgtgtgctgcattttgctatgaggttttaaagtgctgcacatcgaagattagctcaaccaggaatgaagcatctgcacttttgtatcttttgatgagaaacaactttgagtataccaaaaggaaaacctttttgaggacacatctacagataataattgctgtaagccaactgatagctgatgtagcactaagcggaggatcaagatttcaggagtctttattcattatcaataattttgcaaatagtgacagacctatgaaggcaactgcctttcccgcagaagtcaaagacttgaccaagagaatccgcactgttcttatggccactgcccaaatgaaggagcatgagaaagaccctgaaatgctaattgatctccagtatagcttagccaagtcctatgcaagcaccccagagctcaggaaaacctggcttgatagcatggccaagattcatgtaaaaaatggagatttttcagaggctgcgatgtgttatgtccatgtagcagctctagttgcagagtttcttcatcgaaaaaaattatttcctaacggatgttcagcgttcaagaaaattactcccaatatagatgaagaaggagcaatgaaagaagatgctgggatgatggatgtccattatagtgaagaggtcttgctggagttgctagaacaatgtgtggatggcttatggaaggcagaacgttatgaaataatttctgagatttccaagttgatcgttccaatttatgagaaacgtcgtgagtttgagaaacttactcaagtttatagaactcttcatggagcttacacaaaaattctggaagttatgcatacaaaaaagagacttttaggcactttcttcagagttgccttttatggccaatctttttttgaagaagaagatggaaaggagtacatctataaagaaccaaagctcactggcctctcagaaatttccttgagacttgttaaactttatggtgaaaagtttggtacggagaatgtcaaaataattcaggattcagacaaggtaaatgccaaagagcttgatccaaaatatgctcatatacaagttacttatgtgaagccttactttgatgacaaagaactcacagaaaggaagaccgagtttgaaagaaatcataatatcagcagatttgtttttgaggccccttacactttatcaggcaaaaaacagggctgtatagaagaacagtgcaaacgccgtacaatcttgacaacttcaaactcgtttccttacgtgaagaagaggattcctattaactgtgaacagcagattaatttaaaaccaattgatgttgccactgatgaaataaaagataaaactgcagagctgcaaaagctttgctcctctactgacgtggacatgattcagctccaacttaaattgcagggctgtgtttctgtgcaggtcaatgctggtccattagcatatgcaagagctttcttaaatgacagccaagctagcaagtatccacctaagaaagtgagtgagttgaaagacatgtttaggaaatttatacaagcatgcagcattgcacttgaactaaatgagcggctaattaaagaagatcaagttgagtaccatgaagggctaaagtcaaatttcagagacatggtaaaagaattatctgacattatccatgagcagatattacaagaagacacaatgcattctccctggatgagcaacacattacatgtattttgtgcaattagtggtacatcaagtgaccgaggttatggttccccaagatacgctgaagtgtgaggaaatgcagatgtacgtgacaatgagactgacctttctcaggaatatttggagctgtgcaaatgttaaaatttaaagatttgatatacatggagtgtttcttctcgacaccaaaattttcatgtgttccaacagggtgcttacatatttgtaaataagcaacttgaaagtgcctggaaaattgcaccactgtgcttggtttgtacttttttaggtaaatctatatgctgaaaagtagagctcaaaaacagtagttcaatttgcttaattattgcttaaaataatggtactatgtaaaattgtataatggaatacaataaaaggtaaaacttatttgtaaaaaaaaaaaaaaa

SEQ ID NO: 4235 - protein, 2073 aa, Homo sapiens
MAEVRKFTKRLSKPGTAAELRQSVSEAVRGSVVLEKAKVVEPLDYENVIAQRKTQIYSDPLRDLLMFPMEDISISVIGRQRRTVQSTVPEDAEKRAQSLFVKECIKTYSTDWHVVNYKYEDFSGDFRMLPCKSLRPEKIPNHVFEIDEDCEKDEDSSSLCSQKGGVIKQGWLHKANVNSTITVTMKVFKRRYFYLTQLPDGSYILNSYKDEKNSKESKGCIYLDACIDVVQCPKMRRHAFELKMLDKYSHYLAAETEQEMEEWLITLKKIIQINTDSLVQEKKETVETAQDDETSSQGKAENIMASLERSMHPELMKYGRETEQLNKLSRGDGRQNLFSFDSEVQRLDFSGIEPDIKPFEEKCNKRFLVNCHDLTFNILGQIGDNAKGPPTNVEPFFINLALFDVKNNCKISADFHVDLNPPSVREMLWGSSTQLASDGSPKGSSPESYIHGIAESQLRYIQQGIFSVTNPHPEIFLVARIEKVLQGNITHCAEPYIKNSDPVKTAQKVHRTAKQVCSRLGQYRMPFAWAARPIFKDTQGSLDLDGRFSPLYKQDSSKLSSEDILKLLSEYKKPEKTKLQIIPGQLNITVECVPVDLSNCITSSYVPLKPFEKNCQNITVEVEEFVPEMTKYCYPFTIYKNHLYVYPLQLKYDSQKTFAKARNIAVCVEFRDSDESDASALKCIYGKPAGSVFTTNAYAVVSHHNQNPEFYDEIKIELPIHLHQKHRLLFTFYHVSCEINTKGTTKKQDTVETPVGFAWVPLLKDGRIITFEQQLPVSANLPPGYLNLNDAESRRQCNVDIKWVDGAKPLLKIKSHLESTIYTQDLHVHKFFHHCQLIQSGSKEVPGELIKYLKCLHAMEIQVMIQFLPVILMQLFRVLTNMTHEDDVPINCTMVLLHIVSKCHEEGLDSYLRSFIKYSFRPEKPSAPQAQLIHETLATTMIAILKQSADFLSINKLLKYSWFFFEIIAKSMATYLLEENKIKLPRGQRFPETYHHVLHSLLLAIIPHVTIRYAEIPDESRNVNYSLASFLKRCLTLMDRGFIFNLINDYISGFSPKDPKVLAEYKFEFLQTICNHEHYIPLNLPMAFAKPKLQRVQDSNLEYSLSDEYCKHHFLVGLLLRETSIALQDNYEIRYTAISVIKNLLIKHAFDTRYQHKNQQAKIAQLYLPFVGLLLENIQRLAGRDTLYSCAAMPNSASRDEFPCGFTSPANRGSLSTDKDTAYGSFQNGHGIKREDSRGSLIPEGATGFPDQGNTGENTRQSSTRSSVSQYNRLDQYEIRSLLMCYLYIVKMISEDTLLTYWNKVSPQELINILILLEVCLFHFRYMGKRNIARVHDAWLSKHFGIDRKSQTMPALRNRSGVMQARLQHLSSLESSFTLNHSSTTTEADIFHQALLEGNTATEVSLTVLDTISFFTQCFKTQLLNNDGHNPLMKKVFDIHLAFLKNGQSEVSLKHVFASLRAFISKFPSAFFKGRVNMCAAFCYEVLKCCTSKISSTRNEASALLYLLMRNNFEYTKRKTFLRTHLQIIIAVSQLIADVALSGGSRFQESLFIINNFANSDRPMKATAFPAEVKDLTKRIRTVLMATAQMKEHEKDPEMLIDLQYSLAKSYASTPELRKTWLDSMAKIHVKNGDFSEAAMCYVHVAALVAEFLHRKKLFPNGCSAFKKITPNIDEEGAMKEDAGMMDVHYSEEVLLELLEQCVDGLWKAERYEIISEISKLIVPIYEKRREFEKLTQVYRTLHGAYTKILEVMHTKKRLLGTFFRVAFYGQSFFEEEDGKEYIYKEPKLTGLSEISLRLVKLYGEKFGTENVKIIQDSDKVNAKELDPKYAHIQVTYVKPYFDDKELTERKTEFERNHNISRFVFEAPYTLSGKKQGCIEEQCKRRTILTTSNSFPYVKKRIPINCEQQINLKPIDVATDEIKDKTAELQKLCSSTDVDMIQLQLKLQGCVSVQVNAGPLAYARAFLNDSQASKYPPKKVSELKDMFRKFIQACSIALELNERLIKEDQVEYHEGLKSNFRDMVKELSDIIHEQILQEDTMHSPWMSNTLHVFCAISGTSSDRGYGSPRYAEV

SEQ ID NO: 4236 - DNA, 4006 bp, Homo sapiens
tgccaaggctccagcccggccgggctccgaggcgagaggctgcatggagtggccggcgcggctctgcgggctgtgggcgctgctgctctgcgccggcggcgggggcgggggcgggggcgccgcgcctacggaaactcagccacctgtgacaaatttgagtgtctctgttgaaaacctctgcacagtaatatggacatggaatccacccgagggagccagctcaaattgtagtctatggtattttagtcattttggcgacaaacaagataagaaaatagctccggaaactcgtcgttcaatagaagtacccctgaatgagaggatttgtctgcaagtggggtcccagtgtagcaccaatgagagtgagaagcctagcattttggttgaaaaatgcatctcacccccagaaggtgatcctgagtctgctgtgactgagcttcaatgcatttggcacaacctgagctacatgaagtgttcttggctccctggaaggaataccagtcccgacactaactatactctctactattggcacagaagcctggaaaaaattcatcaatgtgaaaacatctttagagaaggccaatactttggttgttcctttgatctgaccaaagtgaaggattccagttttgaacaacacagtgtccaaataatggtcaaggataatgcaggaaaaattaaaccatccttcaatatagtgcctttaacttcccgtgtgaaacctgatcctccacatattaaaaacctctccttccacaatgatgacctatatgtgcaatgggagaatccacagaattttattagcagatgcctattttatgaagtagaagtcaataacagccaaactgagacacataatgttttctacgtccaagaggctaaatgtgagaatccagaatttgagagaaatgtggagaatacatcttgtttcatggtccctggtgttcttcctgatactttgaacacagtcagaataagagtcaaaacaaataagttatgctatgaggatgacaaactctggagtaattggagccaagaaatgagtataggtaagaagcgcaattccacactctacataaccatgttactcattgttccagtcatcgtcgcaggtgcaatcatagtactcctgctttacctaaaaaggctcaagattattatattccctccaattcctgatcctggcaagatttttaaagaaatgtttggagaccagaatgatgatactctgcactggaagaagtacgacatctatgagaagcaaaccaaggaggaaaccgactctgtagtgctgatagaaaacctgaagaaagcctctcagtgatggagataatttatttttaccttcactgtgaccttgagaagattcttcccattctccatttgttatctgggaacttattaaatggaaactgaaactactgcaccatttaaaaacaggcagctcataagagccacaggtctttatgttgagtcgcgcaccgaaaaactaaaaataatgggcgctttggagaagagtgtggagtcattctcattgaattataaaagccagcaggcttcaaactaggggacaaagcaaaaagtgatgatagtggtggagttaatcttatcaagagttgtgacaacttcctgagggatctatacttgctttgtgttctttgtgtcaacatgaacaaattttatttgtaggggaactcatttggggtgcaaatgctaatgtcaaacttgagtcacaaagaacatgtagaaaacaaaatggataaaatctgatatgtattgtttgggatcctattgaaccatgtttgtggctattaaaactcttttaacagtctgggctgggtccggtggctcacgcctgtaatcccagcaatttgggagtccgaggcgggcggatcactcgaggtcaggagttccagaccagcctgaccaaaatggtgaaacctcctctctactaaaactacaaaaattaactgggtgtggtggcgcgtgcctgtaatcccagctactcgggaagctgaggcaggtgaattgtttgaacctgggaggtggaggttgcagtgagcagagatcacaccactgcactctagcctgggtgacagagcaagactctgtctaaaaaacaaaacaaaacaaaacaaaacaaaaaaacctcttaatattctggagtcatcattcccttcgacagcattttcctctgctttgaaagccccagaaatcagtgttggccatgatgacaactacagaaaaaccagaggcagcttctttgccaagacctttcaaagccattttaggctgttaggggcagtggaggtagaatgactccttgggtattagagtttcaaccatgaagtctctaacaatgtattttcttcacctctgctactcaagtagcatttactgtgtctttggtttgtgctaggcccccgggtgtgaagcacagaccccttccaggggtttacagtctatttgagactcctcagttcttgccacttttttttttaatctccaccagtcatttttcagaccttttaactcctcaattccaacactgatttccccttttgcattctccctccttcccttccttgtagccttttgactttcattggaaattaggatgtaaatctgctcaggagacctggaggagcagaggataattagcatctcaggttaagtgtgagtaatctgagaaacaatgactaattcttgcatattttgtaacttccatgtgagggttttcagcattgatatttgtgcattttctaaacagagatgaggtggtatcttcacgtagaacattggtattcgcttgagaaaaaaagaatagttgaacctatttctctttctttacaagatgggtccaggattcctcttttctctgccataaatgattaattaaatagcttttgtgtcttacattggtagccagccagccaaggctctgtttatgcttttggggggcatatattgggttccattctcacctatccacacaacatatccgtatatatcccctctactcttacttcccccaaatttaaagaagtatgggaaatgagaggcatttcccccaccccatttctctcctcacacacagactcatattactggtaggaacttgagaactttatttccaagttgttcaaacatttaccaatcatattaatacaatgatgctatttgcaattcctgctcctaggggaggggagataagaaaccctcactctctacaggtttgggtacaagtggcaacctgcttccatggccgtgtagaagcatggtgccctggcttctctgaggaagctggggttcatgacaatggcagatgtaaagttattcttgaagtcagattgaggctgggagacagccgtagtagatgttctactttgttctgctgttctctagaaagaatatttggttttcctgtataggaatgagattaattcctttccaggtattttataattctgggaagcaaaacccatgcctccccctagccatttttactgttatcctatttagatggccatgaagaggatgctgtgaaattcccaacaaacattgatgctgacagtcatgcagtctgggagtggggaagtgatcttttgttcccatcctcttcttttagcagtaaaatagctgagggaaaagggagggaaaaggaagttatgggaatacctgtggtggttgtgatccctaggtcttgggagctcttggaggtgtctgtatcagtggatttcccatcccctgtgggaaattagtaggctcatttactgttttaggtctagcctatgtggattttttcctaacatacctaagcaaacccagtgtcaggatggtaattcttattctttcgttcagttaagtttttcccttcatctgggcactgaagggatatgtgaaacaatgttaacatttttggtagtcttcaaccagggattgtttctgtttaacttcttataggaaagcttgagtaaaataaatattgtctttttgtatgtca

SEQ ID NO: 4237 - protein, 427 aa, Homo sapiens
MEWPARLCGLWALLLCAGGGGGGGGAAPTETQPPVTNLSVSVENLCTVIWTWNPPEGASSNCSLWYFSHFGDKQDKKIAPETRRSIEVPLNERICLQVGSQCSTNESEKPSILVEKCISPPEGDPESAVTELQCIWHNLSYMKCSWLPGRNTSPDTNYTLYYWHRSLEKIHQCENIFREGQYFGCSFDLTKVKDSSFEQHSVQIMVKDNAGKIKPSFNIVPLTSRVKPDPPHIKNLSFHNDDLYVQWENPQNFISRCLFYEVEVNNSQTETHNVFYVQEAKCENPEFERNVENTSCFMVPGVLPDTLNTVRIRVKTNKLCYEDDKLWSNWSQEMSIGKKRNSTLYITMLLIVPVIVAGAIIVLLLYLKRLKIIIFPPIPDPGKIFKEMFGDQNDDTLHWKKYDIYEKQTKEETDSVVLIENLKKASQ

SEQ ID NO: 4238 - DNA, 2212 bp, Homo sapiens
ggcgctgcctcgtctctgctacccctggttgggcggccctgcgaagcagctccttcgggcagccccgggtcgcttagcggccaaggaggcttcagttctttgccgcctgcaaggcggagaccagaaggcggaatccacagctggcgacgcgggagcatctgctgtccaccagcggagcacaggccatcaaagccgcatctgaacttgaattctgtgcagctgattgcagagctggacccggatctgcgaccccctgtggacagaggttgaccgtaccccggagaggagctttctcacggagggcactggttgcagaggctggaagtgaaataaagacgcgctcttgtttcagagttcgtcccctgctgagataggaaggcagagccacctcctctcctctcccacctgcagattaagcttttctaaaaagcctaggcatcttcttatattcagataccctatcgtcgtcagtcatggctagcatcattgcacgtgtcggtaacagccggcggctgaatgcacccttgccgccttgggcccattccatgctgaggtccctggggagaagtctcggtcctataatggccagcatggcagacagaaacatgaagttgttctcggggagggtggtgccagcccaaggggaagaaacctttgaaaactggctgacccaagtcaatggcgtcctgccagattggaatatgtctgaggaggaaaagctcaagcgcttgatgaaaacccttaggggccctgcccgcgaggtcatgcgtgtgcttcaggcgaccaaccctaacctaagtgtggcagatttcttgcgagccatgaaattggtgtttggggagtctgaaagcagtgtgactgcccatggtaaattttttaacaccctacaagctcaaggggagaaagcctccctttatgtgatccgtttagaggtgcagctccagaacgctattcaggcaggcattatagctgagaaagatgcaaaccggactcgcttgcagcagctccttttaggcggtgagctgagtagggacctccgactcagacttaaggattttctcaggatgtatgcaaatgagcaggagcggcttcccaactttctggagttaatcagaatggtaagggaggaagaggattgggatgatgcttttattaaacggaagcgtccaaaaaggtctgagtcaatggtggagagggcagtcagccctgtggcatttcagggctccccaccgatagtgatcggcagtgctgactgcaatgtgatagagatagatgataccctcgacgactccgatgaggatgtgatcctggtggagtctcaggaccctccacttccatcctggggtgcccctcccctcagagacagggccagacctcaggatgaagtgctggtcattgattccccccacaattccagggctcagtttccttccaccagtggtggttctggctataagaataacggtcctggggagatgcgtagagccaggaagcgaaaacacacaatccgctgttcgtattgtggtgaggaaggccactcaaaagaaacctgtgacaacgagagtgacaaggcccaggtttttgagaatttgatcatcactctccaggagctgacccatactgagatggagaggtcaagagtggcccctggcgaatacaatgacttctctgagccactgtaagggaccacccccaggtttcagtgaacccttacctatattcagcatccagtagtgggaaaactggggtgggggtgggggtgggacttctaactgcatgaattaatccacaaagcggctatcttttggggtggagtagaaagggtcttggataccagcacattggagggagatagcctgacctctgtccttgctccttctccctgcagcctacgggtctgttttctgtgtgtgcccatttccttgacagctttattctttgtgaaagtggtataatttattgttaaatatttgaacaataaaaaaggtacaaaaagtgaagtacaaattacccaaatctctccacccttatataatcattgtcaaccctttgatgagtgatatttccctatacctatgtacccagatagatatatgcatagataaaagtgatgaaatataagtgctgttctatctgtattttttcaccaaacaatatatgttgtgagcttctatgtcaataaatatatatatcagcaaaaaaaaaaaaaaaa

SEQ ID NO: 4239 - protein, 402 aa, Homo sapiens
MASIIARVGNSRRLNAPLPPWAHSMLRSLGRSLGPIMASMADRNMKLFSGRVVPAQGEETFENWLTQVNGVLPDWNMSEEEKLKRLMKTLRGPAREVMRVLQATNPNLSVADFLRAMKLVFGESESSVTAHGKFFNTLQAQGEKASLYVIRLEVQLQNAIQAGIIAEKDANRTRLQQLLLGGELSRDLRLRLKDFLRMYANEQERLPNFLELIRMVREEEDWDDAFIKRKRPKRSESMVERAVSPVAFQGSPPIVIGSADCNVIEIDDTLDDSDEDVILVESQDPPLPSWGAPPLRDRARPQDEVLVIDSPHNSRAQFPSTSGGSGYKNNGPGEMRRARKRKHTIRCSYCGEEGHSKETCDNESDKAQVFENLIITLQELTHTEMERSRVAPGEYNDFSEPL

SEQ ID NO: 4240 - DNA, 2277 bp, Homo sapiens
gtaggggaccgcctggggatccccggacggctgcgaggaatgagcggttggctcgggctggtttcctccctccaccgcctgcttgtttcgccatgcccgggccggacggtggggctgcagcggcgaaagcgactgaagtccgggagcagtcgcatgagcttcccggtcaccaggaggccccgggaacagacacctcaccctgacattgtggcaggaacttctggattgctttccaaagtggctgcactgttttctatccccactgggcaggaaaacatctaagaaaggaggctccccccttcccttgcagggttaccagcaattaaaaagaagtactagagaggcaaatatcggcagtatacatctaagcgctggtcggaaaagaaggaactcagcccaagaacttgcccaatctgatactggaggtgccactcaagaaccactccctccaagatgttttcctggatttcctcagcctaaagtaatccctctttttcctggctataccatctggaacagatgacttccaaggacaccgtagcaaagaaaaagagaactggaagcccatgtgccttaatcgcttcatcctagaggaggaggataaccagtggagccttttctggatttctcactagaagtaaagaccaaatttccagaaggaacctgagagataaaaagtggttggctgctcctgacctgactcatagtgtttaactgaaccataccactagtgtatactagtgtgtgtgtatgtacatgcatacacacatgcacacacacattcacacacaatcctatggtatttggtgactttggatgcccagctcttgcaacaatttcctgctgtcattcttttccctttgaatctcaggggtgagcaaactaaagaaatactatcatcttactgcttttagtatattccatagaaaaggagtggctggagtcagtgtagatcaacccaagcagtacaaatctgccagaattgcagctcagcttccttacctccagcatgtgtacctttctgaagggtaggcccttaagccagacataagtaagttatccactctgtgcataactgtctgacttggcttagaagcatgaaaggggcagaaatgtaagatgggtaaagaagggcttcatctgaaatagggccatgatgattagctctctctttccttcctttggcttcattgctgtattccatgtgggtcttgatatcttgaaactggatgagatacccaaatagtcagtccctgaatataaatcatttccttgtacagaatcactgccaaactcagtatggttaaaagatttttaacacccagctgcagcattcactctggttagaattggccatttaaatttatttcacatatgtaagtatcatatcctttataatgcattcttaattgttgctcagttcttccagattgaattcctttaaaaaattccttatgtaatcttttaattctagttggaaaacatcacttgacagttgctgtttatacaggcatgcctcgttttattgtgcctggctttattgtactttgcagatactgtgtttttcacaaatggaaggtttgtggcaaccctgcgttaagcaagtctgttggcaccattttctcgacagcatgtgctaactttgtctctgtctcacattttggtaattctctcaatgtttcaaactttttcattatgattacatctgttatgtggagctgtgatcagtgatctttgatgttaacattgtaattgttttggggtgccacaactgtgcccagataagacagtgaacttaattggtaaatgttttatgtgttcagactgttccactgactagcccttcttcaaactctctcactctccttgggcctccctattccctgaaatacaacaatattgatattaagccaattaataaccctacaatgatttccaagtgtttaagtgaaaggaaagacatgtatgtttcaccttaaatcaaaagctagaaatggccaggcgtggaggctcacgcctgtaatcccagcactttgggaggccaaggcgggcggatcacaaggtcaggagatcgagaccatcctggctaacacggtgaaaccctgtctctactaaaaaatacaaaaaattagccgggcgtagtggcaggcgcctgtagtcccagctacatgggaggctgaggcaggagaatggcgtgaacctgggaggcggagcttgcagtgagccgagatcgcgccactgcattccagcctgggtgacagagcgagactccatctc

SEQ ID NO: 4241 - protein, 80 aa, Homo sapiens
MSGWLGLVSSLHRLLVSPCPGRTVGLQRRKRLKSGSSRMSFPVTRRPREQTPHPDIVAGTSGLLSKVAALFSIPTGQENI

SEQ ID NO: 4242 - DNA, 2625 bp, Homo sapiens
acgcctcgtctcctcccgtgtccctcttcccatggagtcagtacggatcgaacagatgctgagcttgcccgctgaggtcagcagcgacaacttggagtcggcggagcgaggggcatcagcggcccaagtagacatgggcccccacccaaaggtggctgcagagggccccgcacctctaccgacgcgggagccagagcaagagcagtctccggggacctcaacgccggagagcaaagtcctgctcacgcaggcagacgccttggcgtcccgggggcgaatccgtgaagccctcgaggtgtatagacagctctccgagcggcagcagctggtggctgagcagctggagcagctggtgcgctgcctggcggagaaagtcccgcaaggcgaggcgctggcgccggcgcccccggacgagggtagcactgcaagcggcaccgtggcggcggaagagacgggggccgccgcggctgcggcggccaccgaggtgtgggacggctttaagtgccggaaatgtcatgggtttctatcagaccccgtgtccttgtcgtgtggccacaccttttgtaaactgtgcctggaacgtgggcgggccgccgaccggcgctgtgcgctgtgcggggtcaagctctccgccttgatggtggccactgggcgggcgcgtggagcccggcgggctgggcagcagccgccgccgccgctgcgagtcaacgtggtgctcagcggcctcctcggcaagttgtttccaggcccagcgcgagcgtcgcaactccggcacgagggcaaccgactgtaccgcgagcgccaggtggaggcggcactgctcaagtacaacgaggcagttaagttggctccaaatgaccacttgctttatagcaatcggtctcagatttatttcaccttggagtctcatgagaatgcactgcatgatgcagaaatagcatgtaagctccgcccgatgggttttaaggcacatttcagaaaagcccaagccttagccaccctaggcaaggtggaggaggcactaagggagtttctctactgtgtatcccttgatggaaagaacaagagagcaagatgtgaagcccaaagagacaatctggagctcccacattgttctagtcaggaggaagcagcagccaggggagatggcagcagtctgatggacccagctaaagtgaagggggatggtcagcagcaccacatgaaagaccaggaagaagaggaggagaagtgggatgctacctctccaaaagctgcttccagcaagactggaaaatgccaggaaaagaaaaggaaacattgccagattgaatcccaagaagaaacggggatgcctaataaagcctccaagcaagatcctcccactgatcagggggacaaacctgctctcagtttaccacttgcatctttcgacgcatctgaccttgaatgcgctctatgtatgagattattctatgagccagtcacaacaccttgcgggcatactttttgcttaaaatgcctagaaagatgcctagatcacaacgcaaagtgtccattgtgcaaagacggtctttcacagtgcttggcatcaagaaaatacagcaaaaatgtaataatggaggagctcatagctaaattccttccagaagaactgaaggaacgaaggaagctttatgaagaggaaatggaagaactttctaaccttaataagaatgtgcctattttcgtgtgtactatggcctatcccaccgttccttgtcccctgcacatctttgagccttgttaccgcctgatgattcgtagatgcattgagacaggcacgagacagtttggcatgtgccttggagatcctgtcaaagggtttgcagaatatggctgcatcctagagatcagaaatgttcaattctttgctgatggccgctcagtggttgacagcataggcaagaggcgcttcagggtgctccatcagagccagcgggatggctacaacacagccgacattgaatacattgaagaccaaaaggttcagggagaggattgtgctgagctcatgggattacataactgtgtctatcagcaagcatcattgtggtttcattcgctcaaattatccctaaagaatcggatactcaatcactttggtcccatgccggagaaagacgccgatcctcagatgaacccgaatggcccagcctggtgctggtggatgttagcagttcttcccttggaaagccgagctcagctccccttcctagcaatgaggtccttaaaggacagactgaatggtattcgacgagtcctggccttcatatcccgaaaccaaaactagtgagtggattgccgaagaggagctcccaccttccccactgccgtcggggggagtcttcttgtaaatatatctaattgcaataatatcttaacagaagggggtgtcaaacagaggcatcagcctgctgttgatcacagagagaaattgagtagaaagaccaaaagaatgtgacctatttgaaactttctgtcttaagatgcttcttgacatgctgcataactacataaacagcagaggtgtttaagagcccagaaaaacataatttgattttaacattaaaatttccaaaagtttaaaaaaaaaaaaaaaaaaaa

SEQ ID NO: 4243 - protein, 759 aa, Homo sapiens
MESVRIEQMLSLPAEVSSDNLESAERGASAAQVDMGPHPKVAAEGPAPLPTREPEQEQSPGTSTPESKVLLTQADALASRGRIREALEVYRQLSERQQLVAEQLEQLVRCLAEKVPQGEALAPAPPDEGSTASGTVAAEETGAAAAAAATEVWDGFKCRKCHGFLSDPVSLSCGHTFCKLCLERGRAADRRCALCGVKLSALMVATGRARGARRAGQQPPPPLRVNVVLSGLLGKLFPGPARASQLRHEGNRLYRERQVEAALLKYNEAVKLAPNDHLLYSNRSQIYFTLESHENALHDAEIACKLRPMGFKAHFRKAQALATLGKVEEALREFLYCVSLDGKNKRARCEAQRDNLELPHCSSQEEAAARGDGSSLMDPAKVKGDGQQHHMKDQEEEEEKWDATSPKAASSKTGKCQEKKRKHCQIESQEETGMPNKASKQDPPTDQGDKPALSLPLASFDASDLECALCMRLFYEPVTTPCGHTFCLKCLERCLDHNAKCPLCKDGLSQCLASRKYSKNVIMEELIAKFLPEELKERRKLYEEEMEELSNLNKNVPIFVCTMAYPTVPCPLHIFEPCYRLMIRRCIETGTRQFGMCLGDPVKGFAEYGCILEIRNVQFFADGRSVVDSIGKRRFRVLHQSQRDGYNTADIEYIEDQKVQGEDCAELMGLHNCVYQQASLWFHSLKLSLKNRILNHFGPMPEKDADPQMNPNGPAWCWWMLAVLPLESRAQLPFLAMRSLKDRLNGIRRVLAFISRNQN

SEQ ID NO: 4244 - DNA, 2502 bp, Homo sapiens
acgcctcgtctcctcccgtgtccctcttcccatggagtcagtacggatcgaacagatgctgagcttgcccgctgaggtcagcagcgacaacttggagtcggcggagcgaggggcatcagcggcccaagtagacatgggcccccacccaaaggtggctgcagagggccccgcacctctaccgacgcgggagccagagcaagagcagtctccggggacctcaacgccggagagcaaagtcctgctcacgcaggcagacgccttggcgtcccgggggcgaatccgtgaagccctcgaggtgtatagacagctctccgagcggcagcagctggtggctgagcagctggagcagctggtgcgctgcctggcggagaaagtcccgcaaggcgaggcgctggcgccggcgcccccggacgagggtagcactgcaagcggcaccgtggcggcggaagagacgggggccgccgcggctgcggcggccaccgaggtgtgggacggctttaagtgccggaaatgtcatgggtttctatcagaccccgtgtccttgtcgtgtggccacaccttttgtaaactgtgcctggaacgtgggcgggccgccgaccggcgctgtgcgctgtgcggggtcaagctctccgccttgatggtggccactgggcgggcgcgtggagcccggcgggctgggcagcagccgccgccgccgctgcgagtcaacgtggtgctcagcggcctcctcggcaagttgtttccaggcccagcgcgagcgtcgcaactccggcacgagggcaaccgactgtaccgcgagcgccaggtggaggcggcactgctcaagtacaacgaggcagttaagttggctccaaatgaccacttgctttatagcaatcggtctcagatttatttcaccttggagtctcatgagaatgcactgcatgatgcagaaatagcatgtaagctccgcccgatgggttttaaggacaatctggagctcccacattgttctagtcaggaggaagcagcagccaggggagatggcagcagtctgatggacccagctaaagtgaagggggatggtcagcagcaccacatgaaagaccaggaagaagaggaggagaagtgggatgctacctctccaaaagctgcttccagcaagactggaaaatgccaggaaaagaaaaggaaacattgccagattgaatcccaagaagaaacggggatgcctaataaagcctccaagcaagatcctcccactgatcagggggacaaacctgctctcagtttaccacttgcatctttcgacgcatctgaccttgaatgcgctctatgtatgagattattctatgagccagtcacaacaccttgcgggcatactttttgcttaaaatgcctagaaagatgcctagatcacaacgcaaagtgtccattgtgcaaagacggtctttcacagtgcttggcatcaagaaaatacagcaaaaatgtaataatggaggagctcatagctaaattccttccagaagaactgaaggaacgaaggaagctttatgaagaggaaatggaagaactttctaaccttaataagaatgtgcctattttcgtgtgtactatggcctatcccaccgttccttgtcccctgcacatctttgagccttgttaccgcctgatgattcgtagatgcattgagacaggcacgagacagtttggcatgtgccttggagatcctgtcaaagggtttgcagaatatggctgcatcctagagatcagaaatgttcaattctttgctgatggccgctcagtggttgacagcataggcaagaggcgcttcagggtgctccatcagagccagcgggatggctacaacacagccgacattgaatacattgaagaccaaaaggttcagggagaggattgtgctgagctcatgggattacataactgtgtctatcagcaagcatcattgtggtttcattcgctcaaattatccctaaagaatcggatactcaatcactttggtcccatgccggagaaagacgccgatcctcagatgaacccgaatggcccagcctggtgctggtggatgttagcagttcttcccttggaaagccgagctcagctccccttcctagcaatgaggtccttaaaggacagactgaatggtattcgacgagtcctggccttcatatcccgaaaccaaaactagtgagtggattgccgaagaggagctcccaccttccccactgccgtcggggggagtcttcttgtaaatatatctaattgcaataatatcttaacagaagggggtgtcaaacagaggcatcagcctgctgttgatcacagagagaaattgagtagaaagaccaaaagaatgtgacctatttgaaactttctgtcttaagatgcttcttgacatgctgcataactacataaacagcagaggtgtttaagagcccagaaaaacataatttgattttaacattaaaatttccaaaagtttaaaaaaaaaaaaaaaaaaaa

SEQ ID NO: 4245 - protein, 718 aa, Homo sapiens
MESVRIEQMLSLPAEVSSDNLESAERGASAAQVDMGPHPKVAAEGPAPLPTREPEQEQSPGTSTPESKVLLTQADALASRGRIREALEVYRQLSERQQLVAEQLEQLVRCLAEKVPQGEALAPAPPDEGSTASGTVAAEETGAAAAAAATEVWDGFKCRKCHGFLSDPVSLSCGHTFCKLCLERGRAADRRCALCGVKLSALMVATGRARGARRAGQQPPPPLRVNVVLSGLLGKLFPGPARASQLRHEGNRLYRERQVEAALLKYNEAVKLAPNDHLLYSNRSQIYFTLESHENALHDAEIACKLRPMGFKDNLELPHCSSQEEAAARGDGSSLMDPAKVKGDGQQHHMKDQEEEEEKWDATSPKAASSKTGKCQEKKRKHCQIESQEETGMPNKASKQDPPTDQGDKPALSLPLASFDASDLECALCMRLFYEPVTTPCGHTFCLKCLERCLDHNAKCPLCKDGLSQCLASRKYSKNVIMEELIAKFLPEELKERRKLYEEEMEELSNLNKNVPIFVCTMAYPTVPCPLHIFEPCYRLMIRRCIETGTRQFGMCLGDPVKGFAEYGCILEIRNVQFFADGRSVVDSIGKRRFRVLHQSQRDGYNTADIEYIEDQKVQGEDCAELMGLHNCVYQQASLWFHSLKLSLKNRILNHFGPMPEKDADPQMNPNGPAWCWWMLAVLPLESRAQLPFLAMRSLKDRLNGIRRVLAFISRNQN

SEQ ID NO: 4246 - DNA, 7398 bp, Homo sapiens
atggctgaatcactaagtgaaatttctgacagtctggatgttctggaggccggtgatgagggaaagaagaaatgcaaatttaaagcccttaagagcttttttgttaagaagaaggaaaaagaagccgaagatacccaggaagaagaaatgctagaactgagcttgtccagcagcaacattaacatctcttctctgcagcccgttcgggaaaatcaaccaactaaggccagggccaagagcagcatggggagcaaagccctatcccatgatagcatcttcatgttgggtcctgagcctgaaagatcagcaagtaaaatgtttccttctatggatccccagagaggcagacctcagcagagatcccatatttccagaactctgcctaaacctaggagtaaggttcctggagttgtgtctggagccatgtcaggagctgtgcttcaaaatgtgcctacaagtgcagtctgggttgctggccccaagatcactgagaacccaccatcgcgccgacgccgactcagcatcatcccacctgttatccaacctgaaataatttctaagaacttggtagaaatctctctcgatgatgagtcacctaagaatccacaaaagaaggctttaccacataagagtttgacagcgactcagagcttctctgagttatcatctggacctgattgctcacagtccttgactgcatttgccacacttgcctctaccagtagcacccagctgcccattggtttcagcaccccagccaccacccagggctgtttggattcttcagctgctcgccacaaaatgactttaaatccccgcaaacaaaagaagaaccttcaagtgattattcgtggccttccagtgtggttcagtcatttccagggtattttagagggatccctgcagtgtgtcactcagacattagaaactccaaacctggatgaaccacttccagtggaaccaaaggaggaggagccaaaccttccattggtttctgaagaagaaaagagcataaccaaaccaaaagaaatcaacgaaaagaagctgggaatggacagtgcagattcctcaagccagaaacagaacaacaaaactgagatgtatgataagaagacaacagaccaggctccaaacactgatgcttctcggagtcagggctatccaatgtcagcagcatatggaagaagatggagaagaaaaggagcaagtgtttcaggattgagtgggtgtgaattcaaaggaagaagccttaaacaatccagtgaagggtatggcctgggcgatagagctgggtcttcacctaccaataagactgccaggaatgtccctttctcgcacttgtccttagagaaggacaacatggagcagcctacaacttcacaaccagaaaccactacccctcaggggttgctttcagataaagatgacatgggaaggagaaatgctggcatagatttcggatccagaaaagcatcagcagcacagcccatacctgaaaacatggacaattccatggttagtgatccacaaccataccatgaagatgcagcttctggagctgagaagacagaagccagagcttctctctcactgatggtggaaagcctttctacaacccaagaggaggccattctctcagtagcagcagaggctcaggtgtttatgaatccttctcatatccagttagaagatcaagaagctttcagctttgatttacaaaaggcccaatccaaaatggagtcagcccaggatgttcaaactatctgcaaagaaaagccttctggaaatgttcaccagacctttacagcaagtgttttgggtatgacaagtactacagccaaaggagatgtttatgccaagactctgcctcccagaagcctttttcagtcctcaaggaagcctgatgctgaagaagtctcctcagattcagagaatattcctgaggagggggatggttctgaagaactggctcatggtcactcttcccagtccttggggaagtttgaagatgaacaagaagtcttctcagaatcaaaaagttttgttgaggacttgagcagctctgaggaggagctggacctcagatgcctctcccaggctttagaggagcctgaagatgcagaagtcttcacagaatcaagcagttatgttgaaaagtacaacacttctgatgattgcagcagctcagaggaagacctgcctctcagacaccctgctcaggccttgggaaagcccaaaaaccaacaagaagtctcctctgcttcaaataatactcctgaagagcagaatgattttatgcagcagctgccttccagatgcccttctcagcccattatgaatcctactgttcagcaacaagtccccaccagttcagtgggcacttctataaaacagagcgattccgtggagccaatccctccaagacaccctttccagccatgggtgaaccctaaagtggagcaagaagtttcctcatctccaaagagcatggctgttgaagagagcatttctatgaagcctctgcctcctaaacttctttgccagcccttgatgaatcctaaagttcaacaaaacatgttctcaggttcagaggacattgctgttgagagagtcatttctgtggagccactactccccagatattctcctcagtccttgacagatcctcaaatccggcaaatctcagaaagcacagctgttgaggaaggcacttatgtggaaccgctgcctcccagatgcctttcccagccctcggagaggcctaagttcctggactcaatgagtacttctgcagaatggagcagtcctgtggcaccaacaccttccaaatacacttccccgccatgggtgacccctaaatttgaggaactgtatcaactctctgcacatccagaaagcactactgttgaagaggacatttctaaggagcagctgcttcccagacatctttcccagttgactgtgggaaataaagtccagcaactgtcctcaaatttcgagcgggctgctattgaggcagacatttctgggagtccattgcctccccaatatgctacccagttcttaaagaggtctaaagttcaggaaatgacctcacgactagagaaaatggctgttgaaggcacttctaacaaatcaccgattcccaggcgtccgacccagtcattcgtgaaatttatggcacagcaaatcttttcagagagctctgctcttaagaggggcagtgatgtggcacctctgcctcccaatcttccttccaaatctttatcaaagcctgaagtcaagcaccaagttttctcagattcagggagtgctaatcctaagggaggcatttcttcaaagatgctacctatgaagcaccctttacagtccttggggaggcctgaagacccacagaaagttttctcttattcagagagagctcctgggaagtgcagcagttttaaagagcagctgtctcccaggcagctttcccaggccttgaggaaacctgagtatgagcaaaaagtctcccctgtttctgccagttctcctaaagagtggaggaattctaaaaagcagctgcctcccaaacattcttcccaagcctcagataggtctaaattccagccacagatgtcatcaaagggcccagtgaatgtacctgtaaagcagagcagcggtgagaagcacctgccttcaagtagtcctttccagcaacaggttcattcaagttctgtgaatgctgctgctaggcgatctgtttttgagagcaattctgacaattggttcctaggaagagatgaagcttttgcaatcaaaaccaagaaattcagccaaggttccaaaaaccccataaagagcattccagcccctgctaccaaacctgggaagttcaccattgctcctgtcaggcaaacatccacttctgggggcatttactctaagaaagaagatcttgagagtggtgatggtaataataaccagcatgcaaacctatccaatcaggatgatgttgaaaagctttttggagttcgactgaaaagagcccctccctcgcagaagtataagagtgagaaacaagataacttcacccagcttgcttcagtgccctcgggcccaatttcatcctctgtaggcaggggacataaaatcagaagcacttcccaggggctcctggatgctgcagggaacctcaccaaaatatcttacgttgcagataagcaacagagcaggcccaaatctgaaagcatggccaagaagcaacctgcttgcaagaccccaggaaagcctgctggtcaacagtcagattatgctgtctcagagccggtttggataactatggcaaagcagaagcagaagagtttcaaggcccacatttctgtgaaagagctgaaaactaagagcaatgctggagccgatgctgagactaaggagcctaaatatgagggagctggctctgcaaatgaaaaccaacctaaaaagatgttcacttccagtgtccataaacaggagaagacagcacagatgaagccacctaagcctacaaaatcagttggatttgaagctcagaagatactgcaagttcctgccatggaaaaagaaaccaaacgatcttcaactctcccagccaagttccagaacccagttgagccaattgagcctgtctggttctcactggccaggaagaaagccaaagcatggagccacatggcagaaatcacgcaataaagagctcttgtgtggagcatcagcatttattttatttagtttttttttttttttttttttttgagacagagtctcgctctgttacccagattggagtgcagtggcgcgatctccgctcactgcaagctccgcctcccgggttcacgccactctcccgcctcagtctcccgactagctgggactacaggcgcccgccatcacgcccggctaattttgttttcgtatttttagtagagacggggtttcaccatgttggccaggatggtcttgatctcctgacctcgtgatccgcccgcctcagcctcccaaaagctgggattacaggcgtgagccaccgcgcccggccaagcatcagcgttttaaatgataattgctaatagctgtattaattctatgtagtgatctttttactgtgaccacttgtattaagcaaaataagtattaagcaaactaagaatttattaagcaaaataagaatttattaagcaaaatagccttagaaatgcaaattaaaacataattatttgaatgaaataaatgccatgaatgcttaaccttccacgtagtcactgccagcacccagaaacccagcatttcctctattaaaactatcgaaaacatttgcactgctgtaaaattgcaaaatctttaactttggacaatgtgctttagaagggagaaagcaaaaacattttgttggagcaactagaaaattgtcatttccctcaaccaaataaagtaattctaatggaaacattcagatgatttgacctaaagattggcctttaggttttatgagcctagatagatgccgcaattatttggttgttgctctaagctttgcaagggatcctaaaagaggcggtggaagtgaaaattctgggtctccaagaaaatttctgcacagccagttctccaatcagcctatcaccccttgaaacatcttccctgtgtccctgggggcccctgatgctttctccttgggtgatagtaacatgcagagcacttacacaaagctccctctttggacataccccacgtcgacctgtcacaggcctggctgtagcgagcacctccctatgacgcagaatgcttcttgggaattatcttactcctctggagggttagtccatcaatgttttgcttcttgtcccaatactactgtgaccctctctgatcgcacagaaatcactgcctatcacatatatcctgttaagcactgaagaccctattgaaattagagttctacagatgccaaaagctgtactttccatcaggcagatggcaagcttactgccttgatgcacatctggagccactggagctccttcctctctggttccagcattaaggtggagaactccatgtagcttcttgtcctttcccctcagctgtctttgcttcacaaggttttagcccaaagcaagagtgcaatcccaaagccacagagaaatgaactttccgctacctggaagctttaagtgagtaaatcagcttttcccctctcattcctagaggcacacacctcaaaagttactaggctggagagaccctaccttccagtgacccactcatcccccagccacggagaagagggaagaccaaaaagggagagtgagaaagaggatgagagggatggtcagctgtgaggggagggggcaagtggcccagcaaatgttgatgcctcccttcccatcttgccacacggtctttttcttttgtagcacagcctccattaataactcctcggctgaggatgaagatgtaggcacctttacccccagagccagttccttaattggctggctttctgagatgcagaccaccctagaatctcatctaggttcactagaagttagttaaatcttcctttctctgtctttctcttcattccatcccccaaacccaccaaacactaagggagagctccctttggatgtctgggcagtaaacctagctcatttttctaggagacccagaagtgacttctgagtagttatcactgtgtctgcctctgttacactgtgctgctttgcttaaacagaaatgcaggcctggacatctgactgtgcctttatattctgagtggggtgctgccccatgcaaaaaaatccagagaggtagtgaggtgtcagagctaaacacttggtgctgggttttgttgatgctggtataatgtgacacagtacaattacatgctaaattttgcattttctctatataacatctatttttcctgatactgtgcctttgccattttgataatgctattttgattgagtgaattttatttcctttgtattcccatagtgaacaatatattaaggtagatgccctttatctgggtactcctggtagattagctgttacacctcccttcccttttttacagtgaacctgtattcagttattgtcactctgagaactctccaataacaatttcttttccacagttaacaacacagctgttacacctcccttcctttttttcacagtgaacctgtattcagctattctcactctgagaactctccaataacaatttcttttccacagttaacaacaaagttctgtttttaaatgaagagattaagttctttttaaatgcctaaaggcatattctgacaacttttctacttctttaacttttttgatttaagatatatgcaaagcaaataaattcaataa

SEQ ID NO: 4247 - protein, 1569 aa, Homo sapiens
MAESLSEISDSLDVLEAGDEGKKKCKFKALKSFFVKKKEKEAEDTQEEEMLELSLSSSNINISSLQPVRENQPTKARAKSSMGSKALSHDSIFMLGPEPERSASKMFPSMDPQRGRPQQRSHISRTLPKPRSKVPGVVSGAMSGAVLQNVPTSAVWVAGPKITENPPSRRRRLSIIPPVIQPEIISKNLVEISLDDESPKNPQKKALPHKSLTATQSFSELSSGPDCSQSLTAFATLASTSSTQLPIGFSTPATTQGCLDSSAARHKMTLNPRKQKKNLQVIIRGLPVWFSHFQGILEGSLQCVTQTLETPNLDEPLPVEPKEEEPNLPLVSEEEKSITKPKEINEKKLGMDSADSSSQKQNNKTEMYDKKTTDQAPNTDASRSQGYPMSAAYGRRWRRKGASVSGLSGCEFKGRSLKQSSEGYGLGDRAGSSPTNKTARNVPFSHLSLEKDNMEQPTTSQPETTTPQGLLSDKDDMGRRNAGIDFGSRKASAAQPIPENMDNSMVSDPQPYHEDAASGAEKTEARASLSLMVESLSTTQEEAILSVAAEAQVFMNPSHIQLEDQEAFSFDLQKAQSKMESAQDVQTICKEKPSGNVHQTFTASVLGMTSTTAKGDVYAKTLPPRSLFQSSRKPDAEEVSSDSENIPEEGDGSEELAHGHSSQSLGKFEDEQEVFSESKSFVEDLSSSEEELDLRCLSQALEEPEDAEVFTESSSYVEKYNTSDDCSSSEEDLPLRHPAQALGKPKNQQEVSSASNNTPEEQNDFMQQLPSRCPSQPIMNPTVQQQVPTSSVGTSIKQSDSVEPIPPRHPFQPWVNPKVEQEVSSSPKSMAVEESISMKPLPPKLLCQPLMNPKVQQNMFSGSEDIAVERVISVEPLLPRYSPQSLTDPQIRQISESTAVEEGTYVEPLPPRCLSQPSERPKFLDSMSTSAEWSSPVAPTPSKYTSPPWVTPKFEELYQLSAHPESTTVEEDISKEQLLPRHLSQLTVGNKVQQLSSNFERAAIEADISGSPLPPQYATQFLKRSKVQEMTSRLEKMAVEGTSNKSPIPRRPTQSFVKFMAQQIFSESSALKRGSDVAPLPPNLPSKSLSKPEVKHQVFSDSGSANPKGGISSKMLPMKHPLQSLGRPEDPQKVFSYSERAPGKCSSFKEQLSPRQLSQALRKPEYEQKVSPVSASSPKEWRNSKKQLPPKHSSQASDRSKFQPQMSSKGPVNVPVKQSSGEKHLPSSSPFQQQVHSSSVNAAARRSVFESNSDNWFLGRDEAFAIKTKKFSQGSKNPIKSIPAPATKPGKFTIAPVRQTSTSGGIYSKKEDLESGDGNNNQHANLSNQDDVEKLFGVRLKRAPPSQKYKSEKQDNFTQLASVPSGPISSSVGRGHKIRSTSQGLLDAAGNLTKISYVADKQQSRPKSESMAKKQPACKTPGKPAGQQSDYAVSEPVWITMAKQKQKSFKAHISVKELKTKSNAGADAETKEPKYEGAGSANENQPKKMFTSSVHKQEKTAQMKPPKPTKSVGFEAQKILQVPAMEKETKRSSTLPAKFQNPVEPIEPVWFSLARKKAKAWSHMAEITQ

SEQ ID NO: 4248 - DNA, 3148 bp, Homo sapiens
agagcgagcgaataagagagagagtaagagggagagagaagaagaggaagaagaggaggcggcggcagcggaggaggaggaggactagtgtggggtggaaaggaagagtgagcgagagcaagttaaggggagggggtgtaagagccagcgaattctttttctttttctattattattttgacgactcctgagttgcgcccatgctcttgtcagcttcgttttaggcgtagcatggccaggcagaagaaaatggggcaaagcgtgctccgggcggtcttctttttagtcctggggcttttgggtcattctcacggaggattccccaacaccatcagcataggtggacttttcatgagaaacacagtgcaggagcacagcgctttccgctttgccgtgcagttatacaacaccaaccagaacaccaccgagaagcccttccatttgaattaccacgtagatcacttggattcctccaatagtttttccgtgacaaatgctttctgctcccagttctcgagaggggtgtatgccatctttggattctatgaccagatgtcaatgaacaccctgacctccttctgtggggccctgcacacatcctttgttacgcctagcttccccactgacgcagatgtgcagtttgtcatccagatgcgcccagccttgaagggcgctattctgagtcttctgggtcattacaagtgggagaagtttgtgtacctctatgacacagaacgaggattttccatcctccaagcgattatggaagcagcagtgcaaaacaactggcaagtaacagcaaggtctgtgggaaacataaaggacgtccaagaattcaggcgcatcattgaagaaatggacaggaggcaggaaaagcgatacttgattgactgcgaagtcgaaaggattaacacaattttggaacaggttgtgatcctagggaaacactcaagaggttatcactacatgctcgctaacctgggttttactgatattttactggaaagagtcatgcatgggggagccaacattacaggtttccagattgtcaacaatgaaaaccctatggttcagcagttcatacagcgctgggtgaggctggatgaaagggaattccctgaagccaagaatgcaccactaaagtatacatctgcattgacacacgacgcaatactggtcatagcagaagctttccgctacctgaggaggcagcgagtagatgtgtcccggagaggaagtgctggagactgcttagcaaatcctgctgtgccctggagtcaaggaattgatattgagagagctctgaaaatggtgcaagtacaaggaatgactggaaatattcaatttgacacttatggacgtaggacaaattataccatcgatgtgtatgaaatgaaagtcagtggctctcgaaaagctggctactggaacgagtatgaaaggtttgtgcctttctcagatcagcaaatcagcaatgacagtgcatcctcagagaatcggaccatagtagtgactaccattctggaatcaccatatgtaatgtacaagaagaaccatgagcaactggaaggaaatgaacgatatgaaggctattgtgtagacctagcctatgaaatagccaaacatgtaaggatcaaatacaaattgtccatcgttggtgacgggaaatatggtgcaagggatccagagactaaaatatggaacggcatggttggggaacttgtctatgggagagctgatatagctgttgctccactcactataacattggtccgtgaagaagtcatagatttttcaaagccattcatgagcctgggcatctccatcatgataaagaagcctcagaaatcaaaaccaggcgtattctcatttctggatcccctggcttatgaaatctggatgtgcattgtctttgcttacattggagtcagcgtagttcttttcctagtcagcaggttcagtccttatgaatggcacttggaagacaacaatgaagaacctcgtgacccacaaagtcctcctgatcctccaaatgaatttggaatatttaacagtctttggttttccttgggtgcctttatgcagcaaggatgtgatatttctccaagatcactctccgggcgcattgttggaggggtttggtggttcttcaccctgatcataatttcttcctatactgccaatctcgctgctttcctgactgtggagaggatggtttctcccatagagagtgctgaagacttagctaaacagactgaaattgcatatgggaccctggactccggttcaacaaaagaatttttcagaagatccaaaattgctgtgtacgagaaaatgtggtcttacatgaaatcagcggagccatctgtgtttaccaaaacaacagcagacggagtggcccgagtgcgaaagtccaagggaaagttcgccttcctgctggagtcaaccatgaatgagtacattgagcagagaaaaccatgtgatacgatgaaagttggtggaaatctggattccaaaggctatggtgtggcaacccctaaaggctcagcattaggaaatgctgttaacctggcagtattaaaactgaatgagcaaggcctcttggacaaattgaaaaacaaatggtggtacgacaaaggagagtgcggcagcgggggcggtgactccaaggacaagaccagcgctctgagcctgagcaatgtggcaggcgttttctatatacttgtcggaggtctggggctggccatgatggtggctttgatagaattctgttacaaatcacgggcagagtccaaacgcatgaaactcacaaagaacacccaaaactttaagcctgctcctgccaccaacactcagaattatgctacatacagagaaggctacaacgtgtatggaacagagagtgttaagatctagggatcccttcccactggaggcatgtgatgagaggaaatcaccgaaaacgtggctgcttcaaggatcctgagccagatttcactctccttggtgtcgggcatgacacgaatattgctgatggtgcaatgacctttcaataggaaaaactgatttttttttccttcagtgccttatggaacactctgagactcgcgacaatgcaaaccatcattgaaatctttttgctttgctt

SEQ ID NO: 4249 - protein, 894 aa, Homo sapiens
MARQKKMGQSVLRAVFFLVLGLLGHSHGGFPNTISIGGLFMRNTVQEHSAFRFAVQLYNTNQNTTEKPFHLNYHVDHLDSSNSFSVTNAFCSQFSRGVYAIFGFYDQMSMNTLTSFCGALHTSFVTPSFPTDADVQFVIQMRPALKGAILSLLGHYKWEKFVYLYDTERGFSILQAIMEAAVQNNWQVTARSVGNIKDVQEFRRIIEEMDRRQEKRYLIDCEVERINTILEQVVILGKHSRGYHYMLANLGFTDILLERVMHGGANITGFQIVNNENPMVQQFIQRWVRLDEREFPEAKNAPLKYTSALTHDAILVIAEAFRYLRRQRVDVSRRGSAGDCLANPAVPWSQGIDIERALKMVQVQGMTGNIQFDTYGRRTNYTIDVYEMKVSGSRKAGYWNEYERFVPFSDQQISNDSASSENRTIVVTTILESPYVMYKKNHEQLEGNERYEGYCVDLAYEIAKHVRIKYKLSIVGDGKYGARDPETKIWNGMVGELVYGRADIAVAPLTITLVREEVIDFSKPFMSLGISIMIKKPQKSKPGVFSFLDPLAYEIWMCIVFAYIGVSVVLFLVSRFSPYEWHLEDNNEEPRDPQSPPDPPNEFGIFNSLWFSLGAFMQQGCDISPRSLSGRIVGGVWWFFTLIIISSYTANLAAFLTVERMVSPIESAEDLAKQTEIAYGTLDSGSTKEFFRRSKIAVYEKMWSYMKSAEPSVFTKTTADGVARVRKSKGKFAFLLESTMNEYIEQRKPCDTMKVGGNLDSKGYGVATPKGSALGNAVNLAVLKLNEQGLLDKLKNKWWYDKGECGSGGGDSKDKTSALSLSNVAGVFYILVGGLGLAMMVALIEFCYKSRAESKRMKLTKNTQNFKPAPATNTQNYATYREGYNVYGTESVKI

SEQ ID NO: 4250 - DNA, 3148 bp, Homo sapiens
agagcgagcgaataagagagagagtaagagggagagagaagaagaggaagaagaggaggcggcggcagcggaggaggaggaggactagtgtggggtggaaaggaagagtgagcgagagcaagttaaggggagggggtgtaagagccagcgaattctttttctttttctattattattttgacgactcctgagttgcgcccatgctcttgtcagcttcgttttaggcgtagcatggccaggcagaagaaaatggggcaaagcgtgctccgggcggtcttctttttagtcctggggcttttgggtcattctcacggaggattccccaacaccatcagcataggtggacttttcatgagaaacacagtgcaggagcacagcgctttccgctttgccgtgcagttatacaacaccaaccagaacaccaccgagaagcccttccatttgaattaccacgtagatcacttggattcctccaatagtttttccgtgacaaatgctttctgctcccagttctcgagaggggtgtatgccatctttggattctatgaccagatgtcaatgaacaccctgacctccttctgtggggccctgcacacatcctttgttacgcctagcttccccactgacgcagatgtgcagtttgtcatccagatgcgcccagccttgaagggcgctattctgagtcttctgggtcattacaagtgggagaagtttgtgtacctctatgacacagaacgaggattttccatcctccaagcgattatggaagcagcagtgcaaaacaactggcaagtaacagcaaggtctgtgggaaacataaaggacgtccaagaattcaggcgcatcattgaagaaatggacaggaggcaggaaaagcgatacttgattgactgcgaagtcgaaaggattaacacaattttggaacaggttgtgatcctagggaaacactcaagaggttatcactacatgctcgctaacctgggttttactgatattttactggaaagagtcatgcatgggggagccaacattacaggtttccagattgtcaacaatgaaaaccctatggttcagcagttcatacagcgctgggtgaggctggatgaaagggaattccctgaagccaagaatgcaccactaaagtatacatctgcattgacacacgacgcaatactggtcatagcagaagctttccgctacctgaggaggcagcgagtagatgtgtcccggagaggaagtgctggagactgcttagcaaatcctgctgtgccctggagtcaaggaattgatattgagagagctctgaaaatggtgcaagtacaaggaatgactggaaatattcaatttgacacttatggacgtaggacaaattataccatcgatgtgtatgaaatgaaagtcagtggctctcgaaaagctggctactggaacgagtatgaaaggtttgtgcctttctcagatcagcaaatcagcaatgacagtgcatcctcagagaatcggaccatagtagtgactaccattctggaatcaccatatgtaatgtacaagaagaaccatgagcaactggaaggaaatgaacgatatgaaggctattgtgtagacctagcctatgaaatagccaaacatgtaaggatcaaatacaaattgtccatcgttggtgacgggaaatatggtgcaagggatccagagactaaaatatggaacggcatggttggggaacttgtctatgggagagctgatatagctgttgctccactcactataacattggtccgtgaagaagtcatagatttttcaaagccattcatgagcctgggcatctccatcatgataaagaagcctcagaaatcaaaaccaggcgtattctcatttctggatcccctggcttatgaaatctggatgtgcattgtctttgcttacattggagtcagcgtagttcttttcctagtcagcaggttcagtccttatgaatggcacttggaagacaacaatgaagaacctcgtgacccacaaagtcctcctgatcctccaaatgaatttggaatatttaacagtctttggttttccttgggtgcctttatgcagcaaggatgtgatatttctccaagatcactctccgggcgcattgttggaggggtttggtggttcttcaccctgatcataatttcttcctatactgccaatctcgctgctttcctgactgtggagaggatggtttctcccatagagagtgctgaagacttagctaaacagactgaaattgcatatgggaccctggactccggttcaacaaaagaatttttcagaagatccaaaattgctgtgtacgagaaaatgtggtcttacatgaaatcagcggagccatctgtgtttaccaaaacaacagcagacggagtggcccgagtgcgaaagtccaagggaaagttcgccttcctgctggagtcaaccatgaatgagtacattgagcagagaaaaccatgtgatacgatgaaagttggtggaaatctggattccaaaggctatggtgtggcaacccctaaaggctcagcattaggaacgcctgtaaaccttgcagtattgaaactcagtgaacaaggcatcttagacaagctgaaaaacaaatggtggtacgataagggggaatgtggagccaaggactccgggagtaaggacaagaccagcgctctgagcctgagcaatgtggcaggcgttttctatatacttgtcggaggtctggggctggccatgatggtggctttgatagaattctgttacaaatcacgggcagagtccaaacgcatgaaactcacaaagaacacccaaaactttaagcctgctcctgccaccaacactcagaattatgctacatacagagaaggctacaacgtgtatggaacagagagtgttaagatctagggatcccttcccactggaggcatgtgatgagaggaaatcaccgaaaacgtggctgcttcaaggatcctgagccagatttcactctccttggtgtcgggcatgacacgaatattgctgatggtgcaatgacctttcaataggaaaaactgatttttttttccttcagtgccttatggaacactctgagactcgcgacaatgcaaaccatcattgaaatctttttgctttgctt

SEQ ID NO: 4251 - protein, 894 aa, Homo sapiens
MARQKKMGQSVLRAVFFLVLGLLGHSHGGFPNTISIGGLFMRNTVQEHSAFRFAVQLYNTNQNTTEKPFHLNYHVDHLDSSNSFSVTNAFCSQFSRGVYAIFGFYDQMSMNTLTSFCGALHTSFVTPSFPTDADVQFVIQMRPALKGAILSLLGHYKWEKFVYLYDTERGFSILQAIMEAAVQNNWQVTARSVGNIKDVQEFRRIIEEMDRRQEKRYLIDCEVERINTILEQVVILGKHSRGYHYMLANLGFTDILLERVMHGGANITGFQIVNNENPMVQQFIQRWVRLDEREFPEAKNAPLKYTSALTHDAILVIAEAFRYLRRQRVDVSRRGSAGDCLANPAVPWSQGIDIERALKMVQVQGMTGNIQFDTYGRRTNYTIDVYEMKVSGSRKAGYWNEYERFVPFSDQQISNDSASSENRTIVVTTILESPYVMYKKNHEQLEGNERYEGYCVDLAYEIAKHVRIKYKLSIVGDGKYGARDPETKIWNGMVGELVYGRADIAVAPLTITLVREEVIDFSKPFMSLGISIMIKKPQKSKPGVFSFLDPLAYEIWMCIVFAYIGVSVVLFLVSRFSPYEWHLEDNNEEPRDPQSPPDPPNEFGIFNSLWFSLGAFMQQGCDISPRSLSGRIVGGVWWFFTLIIISSYTANLAAFLTVERMVSPIESAEDLAKQTEIAYGTLDSGSTKEFFRRSKIAVYEKMWSYMKSAEPSVFTKTTADGVARVRKSKGKFAFLLESTMNEYIEQRKPCDTMKVGGNLDSKGYGVATPKGSALGTPVNLAVLKLSEQGILDKLKNKWWYDKGECGAKDSGSKDKTSALSLSNVAGVFYILVGGLGLAMMVALIEFCYKSRAESKRMKLTKNTQNFKPAPATNTQNYATYREGYNVYGTESVKI

SEQ ID NO: 4252 - DNA, 1005 bp, Homo sapiens
agagcgagcgaataagagagagagtaagagggagagagaagaagaggaagaagaggaggcggcggcagcggaggaggaggaggactagtgtggggtggaaaggaagagtgagcgagagcaagttaaggggagggggtgtaagagccagcgaattctttttctttttctattattattttgacgactcctgagttgcgcccatgctcttgtcagcttcgttttaggcgtagcatggccaggcagaagaaaatggggcaaagcgtgctccgggcggtcttctttttagtcctggggcttttgggtcattctcacggaggattccccaacaccatcagcataggtggacttttcatgagaaacacagtgcaggagcacagcgctttccgctttgccgtgcagttatacaacaccaaccagaacaccaccgagaagcccttccatttgaattaccacgtagatcacttggattcctccaatagtttttccgtgacaaatgcttgtcctgctgaaagggactacctgccttggccaggaagcatcagggaaaacaattggacagctctgccgtgctgcaaagatcatgggctgctgcacctaaaatgttcaccaggtggggcccgccaaaactgggcctattgtatctggggcgttacaggtgaactgtaagatgagaacaagatcacaagtcagcactacctcctcccttcttgagttctcaactgagtgagcatcatggagggagaagaaagaaagaagttcagcctgggtgtgtgaagctgtaaagttgcaggttgaacccaaacccattttagagacagaagaaactaccctctggagataaaataaaaagatgaagctgagatgggacaggatcaaagttgatgaaatatcaagagaggttaataaaggaacattaatttattcctcaaaaaaaaaaaaaaaaaaaaaaaaaaaaaaaaaaaaaaaaaaaaaaaaaaaaaaaaaaaaaaaaaaaaaaaaaaaaaa

SEQ ID NO: 4253 - protein, 144 aa, Homo sapiens
MARQKKMGQSVLRAVFFLVLGLLGHSHGGFPNTISIGGLFMRNTVQEHSAFRFAVQLYNTNQNTTEKPFHLNYHVDHLDSSNSFSVTNACPAERDYLPWPGSIRENNWTALPCCKDHGLLHLKCSPGGARQNWAYCIWGVTGEL

SEQ ID NO: 4254 - DNA, 4452 bp, Homo sapiens
atgtttgtttcagacacagttctaaaggaacgcctggatccagaaacactggaatcattagggcttatcaaacaatcacagcaattcaatcaaaagtcagttaaaatcaagacaaaactcttttataagcagcaaaaattcaatttgttaagagaagagaatgaaggttatgccaagctgattgctgaattggggcaagatttatctggaagtattactagtgatttaatcttagaaaatatcaaatctttaataggatgctttaatctggatcccaatagagttttggatgtcattttagaagtgtttgaatgcaggccagaacacgatgacttctttatatctttgttagaatcttacatgagtatgtgtgaaccgcaaacactgtgtcatattcttgggttcaaattcaagttttaccaggaaccaaatggcgagacaccatcatctttatacagagttgcagcagtacttctacaatttaatcttattgatttagatgatctttatgtacatcttcttccggctgataattgcattatggatgaacacaaacgagaaattgcggaagctaagcaaattgttagaaagcttacgatggttgtgttgtcttctgaaaaaatggatgagcgagagaaagaaaaggaaaaagaagaggagaaagtagagaaaccacctgataaccaaaaacttggcttgttggaagccttattaaagattggtgattggcaacatgcacagaacattatggatcagatgcctccatactatgcagcttcacacaagctaatagcccttgctatttgcaagctcattcatataactattgagcctctctaccgaagagttggagttcctaaaggtgctaaaggctcacctgttaatgctttgcaaaacaagagagcaccaaaacaagctgagagctttgaagatttgaggagagacgtgttcaatatgttctgttaccttggtcctcacctttctcacgatcccattttatttgcaaaagtggtgcgcataggcaagtcatttatgaaggagtttcagtctgatggaagcaaacaagaagataaagaaaaaacggaagttatccttagctgtttgcttagcattactgaccaggtactacttccatctctttctttgatggactgcaatgcttgtatgtctgaggaactatggggaatgtttaaaacatttccatatcagcatagatatcgtctgtatggccagtggaagaatgaaacttataacagtcacccacttttagtaaaagttaaagctcaaacaatagacagagccaaatatatcatgaagcgcctaaccaaggaaaatgtgaagccttctggaagacaaattgggaagttgagccacagcaatccaaccattttgtttgattatatcttgtcacaaatacagaagtatgataacttaataacacctgtagtagattcattgaaatacctcacttcactgaattatgatgtcttggcctattgtatcattgaagctttagctaatccagaaaaggaaagaatgaaacatgatgacacaaccatctcaagctggcttcagagtctggctagtttctgtggtgcagtttttcgtaaatatccaattgatcttgctggtcttcttcagtatgttgccaatcagctaaaggcgggcaaaagttttgacctgcttatattgaaagaagtggtacaaaaaatggcaggaatagaaattacagaggaaatgacaatggagcaactagaggctatgactggtggagagcagctaaaagctgagggtggttattttggtcagatcagaaacactaaaaaatcctctcagagattaaaggatgctctattggaccatgatcttgcccttcctctctgtctgcttatggctcagcagagaaatggggtaatctttcaggaaggtggagagaaacatttgaaacttgtgggaaagctctatgaccagtgtcatgataccctggtgcagtttggtgggtttttagcatctaatctgagcacagaagattatataaagcgagtgccttcaattgatgtactctgtaatgaatttcatacaccccatgatgcagcatttttcctgtctaggccaatgtatgcccatcatatttcgtcaaagtatgatgaacttaaaaaatcagaaaagggaagtaaacagcaacataaagttcataagtacattacatcatgtgagatggtgatggcgcctgtccatgaagcagtggtctccttacatgtttccaaagtctgggatgacatcagccctcaattctatgctacattctggtcattgacaatgtatgaccttgcagttccacacaccagctatgaacgagaagtcaataaacttaaagtccagatgaaagcaattgatgacaatcaggaaatgcccccaaataaaaagaaaaaagagaaggagcgctgtactgcccttcaggacaagcttcttgaagaagaaaagaaacagatggaacatgtacagagagttctacagagattgaaactggaaaaggacaactggcttttagcaaaatctaccaaaaatgagaccatcacaaaatttctacagctgtgtatatttcctcgatgtattttttcagcaattgatgctgtttactgtgctcgttttgttgaattggtacatcaacagaaaactccaaatttttccacacttctttgctatgatcgagttttctctgacataatttacacagttgcaagctgtactgaaaatgaagccagtcgatacggaaggtttctttgctgcatgttagagactgtgaccaggtggcatagtgatagagccacatatgaaaaggaatgtggaaactatccaggattccttaccatattacgggcaactggatttgatggtggaaataaggctgatcaattagactatgaaaattttcgacatgttgtacataaatggcattacaaactaaccaaggcatcggtacattgccttgaaacaggcgaatatactcacatcaggaatatcttgattgtgctaacaaaaatacttccttggtacccaaaagttttgaatctgggtcaagctttggaaagaagagtacacaaaatctgccaagaagaaaaagagaagaggccagatctatatgcattggctatgggctactctgggcagttgaaaagtagaaagtcatacatgatacctgaaaatgagtttcatcacaaagacccccctccgaggaatgcagttgccagtgtgcaaaatgggcctggtggtgggccttcttcatcatcaataggaagtgcatctaaatcggatgaaagcagtactgaggagactgataaatcaagggagagatctcagtgtggtgtgaaagctgttaataaagcttctagtaccacacctaaagggaattcaagcaatggaaatagtggctctaacagcaacaaagctgttaaagaaaatgacaaagaaaaagggaaagagaaagaaaaagagaaaaaagaaaagactccagctactactccagaggccagggtacttggtaaagatggtaaagaaaaaccaaaggaagagcggccaaataaagatgaaaaagcaagagagaccaaggaaagaacgccgaagtctgacaaagagaaagaaaaattcaagaaggaagaaaaagctaaagatgagaaatttaagaccactgtccccaacgcagaatcaaaatcaactcaagaaagggaaagagagaaggagccatccagagaaagagatatagcaaaggaaatgaaatcaaaggaaaatgttaaaggaggagaaaaaacaccagtttctgggtccttgaaatcacctgttcccagatcagatattccagagcctgaaagggaacaaaaacgccgcaaaattgatactcacccttctccatcacattcctccacagtaaaggacagtctcatcgaactcaaggaatcttcagcaaagctctacattaatcatactcctccaccactgtccaagagtaaggagagagaaatggacaagaaagatttggacaagtcaagggaaagatccagagaaagagagaaaaaagatgaaaaggacaggaaagagcggaaaagggatcactcaaacaacgaccgtgaagtgccaccggacttaaccaagagacgtaaagaggagaatggaacaatgggggtttcaaaacataaaagtgaaagtccttgtgaatctccttatccaaatgagaaagacaaggaaaaaaataagtcaaaatcttcaggcaaagaaaaaggcagtgattcatttaaatctgagaagatggataaaatctcctccggtggcaaaaaggagtccaggcatgataaagaaaagatagaaaagaaagagaaacgggacagttcaggaggaaaggaagagaagaaacatcataagtcctcggacaagcacagataatgaagactttccatc

SEQ ID NO: 4255 - protein, 1478 aa, Homo sapiens
MFVSDTVLKERLDPETLESLGLIKQSQQFNQKSVKIKTKLFYKQQKFNLLREENEGYAKLIAELGQDLSGSITSDLILENIKSLIGCFNLDPNRVLDVILEVFECRPEHDDFFISLLESYMSMCEPQTLCHILGFKFKFYQEPNGETPSSLYRVAAVLLQFNLIDLDDLYVHLLPADNCIMDEHKREIAEAKQIVRKLTMVVLSSEKMDEREKEKEKEEEKVEKPPDNQKLGLLEALLKIGDWQHAQNIMDQMPPYYAASHKLIALAICKLIHITIEPLYRRVGVPKGAKGSPVNALQNKRAPKQAESFEDLRRDVFNMFCYLGPHLSHDPILFAKVVRIGKSFMKEFQSDGSKQEDKEKTEVILSCLLSITDQVLLPSLSLMDCNACMSEELWGMFKTFPYQHRYRLYGQWKNETYNSHPLLVKVKAQTIDRAKYIMKRLTKENVKPSGRQIGKLSHSNPTILFDYILSQIQKYDNLITPVVDSLKYLTSLNYDVLAYCIIEALANPEKERMKHDDTTISSWLQSLASFCGAVFRKYPIDLAGLLQYVANQLKAGKSFDLLILKEVVQKMAGIEITEEMTMEQLEAMTGGEQLKAEGGYFGQIRNTKKSSQRLKDALLDHDLALPLCLLMAQQRNGVIFQEGGEKHLKLVGKLYDQCHDTLVQFGGFLASNLSTEDYIKRVPSIDVLCNEFHTPHDAAFFLSRPMYAHHISSKYDELKKSEKGSKQQHKVHKYITSCEMVMAPVHEAVVSLHVSKVWDDISPQFYATFWSLTMYDLAVPHTSYEREVNKLKVQMKAIDDNQEMPPNKKKKEKERCTALQDKLLEEEKKQMEHVQRVLQRLKLEKDNWLLAKSTKNETITKFLQLCIFPRCIFSAIDAVYCARFVELVHQQKTPNFSTLLCYDRVFSDIIYTVASCTENEASRYGRFLCCMLETVTRWHSDRATYEKECGNYPGFLTILRATGFDGGNKADQLDYENFRHVVHKWHYKLTKASVHCLETGEYTHIRNILIVLTKILPWYPKVLNLGQALERRVHKICQEEKEKRPDLYALAMGYSGQLKSRKSYMIPENEFHHKDPPPRNAVASVQNGPGGGPSSSSIGSASKSDESSTEETDKSRERSQCGVKAVNKASSTTPKGNSSNGNSGSNSNKAVKENDKEKGKEKEKEKKEKTPATTPEARVLGKDGKEKPKEERPNKDEKARETKERTPKSDKEKEKFKKEEKAKDEKFKTTVPNAESKSTQEREREKEPSRERDIAKEMKSKENVKGGEKTPVSGSLKSPVPRSDIPEPEREQKRRKIDTHPSPSHSSTVKDSLIELKESSAKLYINHTPPPLSKSKEREMDKKDLDKSRERSREREKKDEKDRKERKRDHSNNDREVPPDLTKRRKEENGTMGVSKHKSESPCESPYPNEKDKEKNKSKSSGKEKGSDSFKSEKMDKISSGGKKESRHDKEKIEKKEKRDSSGGKEEKKHHKSSDKHR

SEQ ID NO: 4256 - DNA, 2021 bp, Homo sapiens
gctttcccgacggccatcttgggaatctgacggatcggaggcatttgtgaggaggcgcgaatcaagttagcggggggaagagtcttagacctggccagtcctcagggtgagggccctgaggaagaactgagggacctcccaccatagagagaagaaaccccggcctgtactgcgctgccgtgagactggtgctccaggaaccaggtggtgacgaactgggtgtgaggcacacagcctaaagtcagcacagcagaggaggcccaggcagtgccaggagtcaaggcctgttggatctcatcatccatatccctgttgatacgtttacctgctgctcctgaagaagtcgtcatgcctcccgttccaggcgttccattccgcaacgttgacaacgactccccgacctcagttgagttagaagactgggtagatgcacagcatcccacagatgaggaagaggaggaagcctcctccgcctcttccactttgtacttagtattttccccctcttctttctccacatcctcttctctgattcttggtggtcctgaggaggaggaggtgccctctggtgtgataccaaatcttaccgagagcattcccagtagtcctccacagggtcctccacagggtccttcccagagtcctctgagctcctgctgctcctctttttcatggagctcattcagtgaggagtccagcagccagaaaggggaggatacaggcacctgtcagggcctgccagacagtgagtcctctttcacatatacactagatgaaaaggtggccgagttagtggagttcctgctcctcaaatacgaagcagaggagcctgtaacagaggcagagatgctgatgattgtcatcaagtacaaagattactttcctgtgatactcaagagagcccgtgagttcatggagcttctttttggccttgccctgatagaagtgggccctgaccacttctgtgtgtttgcaaacacagtaggcctcaccgatgagggtagtgatgatgagggcatgcccgagaacagcctcctgattattattctgagtgtgatcttcataaagggcaactgtgcctctgaggaggtcatctgggaagtgctgaatgcagtaggggtatatgctgggagggagcacttcgtctatggggagcctagggagctcctcactaaagtttgggtgcagggacattacctggagtatcgggaggtgccccacagttctcctccatattatgaattcctgtggggtccaagagcccattcagaaagcatcaagaagaaagtactagagtttttagccaagctgaacaacactgttcctagttcctttccatcctggtacaaggatgctttgaaagatgtggaagagagagtccaggccacaattgataccgcagatgatgccactgtcatggccagtgaaagcctcagtgtcatgtccagcaacgtctccttttctgagtgaagtctaggatagtttcttccccttgtgtttgaacagggcagtttaggttctaggtagtggagggccaggtggggctcgaggaacgtagtgttctttgcatttctgtcccatatgggtgatgtagagatttacctgtttttcagtattttctaaatgcttttcctttgaatagcaggtagttagcttcagagtgttaatttatgaatattagtcgcacatgtattgctctttatctggtttaagagtaacagtttgatattttgttaaaaaaatggaaataccttctcccttattttgtgatctgtaacagggtagtgtggtattgtaataggcatttttttttttttttacaatgtgcaataactcagcagttaaatagtggaacaaaattgaagggtggtcagtagtttcatttccttgtcctgcttattcttttgttcttgaaaattatatatacctggctttgcttagcttgttgaagaaagtagcagaaattaaatcttaataaaagaaagccccactaaaaaaaaaaaaaaaaaaaaaaaaaaaaa

SEQ ID NO: 4257 - protein, 373 aa, Homo sapiens
MPPVPGVPFRNVDNDSPTSVELEDWVDAQHPTDEEEEEASSASSTLYLVFSPSSFSTSSSLILGGPEEEEVPSGVIPNLTESIPSSPPQGPPQGPSQSPLSSCCSSFSWSSFSEESSSQKGEDTGTCQGLPDSESSFTYTLDEKVAELVEFLLLKYEAEEPVTEAEMLMIVIKYKDYFPVILKRAREFMELLFGLALIEVGPDHFCVFANTVGLTDEGSDDEGMPENSLLIIILSVIFIKGNCASEEVIWEVLNAVGVYAGREHFVYGEPRELLTKVWVQGHYLEYREVPHSSPPYYEFLWGPRAHSESIKKKVLEFLAKLNNTVPSSFPSWYKDALKDVEERVQATIDTADDATVMASESLSVMSSNVSFSE

SEQ ID NO: 4258 - DNA, 585 bp, Homo sapiens
ctctctcatccccttgggattcaaagctgagaagatgtaaggactggagctgcagcagtctttctgggaccattatacagagattctgtctgaggttggatccacgtggtcaaaagtattgctgaggagccagagagagactgaggtctgatgacatcacttgagccctgcagacttttcatttacgggaaaacagagaggatgaaggcctatctaaagagcgcagaaggcttttttgtcctaaataaaagtaccacaattggaaggcatgaaaattcagaccttgttttacagtctcctgacatcgacaaccaccatgcactcattgaatataacgaggcggagtgcagctttgttctccaggacttcaattcccgcaacggcacgtttgtcaacgagtgccacattcaaaacgtggctgtgaagctcatccctggagacatcctgagatttgggtctgcagggctgacctatgaactggtcattgaaaatccacctccggtgaccttcccatggacagaaaacctcccaagacctcccaactaccaggtggatgcctttgcaaataacttacccatggagtga

SEQ ID NO: 4259 - protein, 144 aa, Homo sapiens
MTSLEPCRLFIYGKTERMKAYLKSAEGFFVLNKSTTIGRHENSDLVLQSPDIDNHHALIEYNEAECSFVLQDFNSRNGTFVNECHIQNVAVKLIPGDILRFGSAGLTYELVIENPPPVTFPWTENLPRPPNYQVDAFANNLPME

SEQ ID NO: 4260 - DNA, 732 bp, Homo sapiens
aaaaaaagaagtcacttagctcttcgctggttgtcacacgtccggaggccgagccgtcgcgtacctaggatacctggaagccgaagccacacctcccgcatggcccctccggccagccgggcccctcagatgagagctgcacccaggccagcaccagtcgctcagccaccagcagcggcaccgccatctacagttggctcttctgctgctgcgccccggcagccaggtctgatggcccagatggcaaccactgcagctggcgtggctgtgggctctgctgtggggcacatactgggtcatgccattactgggggcttcagtggaggaagtaatgctgagcctgcgaggcctgacatcacttaccaggagcctcagggaacccagccggcacagcagcagcagccttgcttctgtgagatcaaacagtttctggagtgtgccgagaaccagggtgacatcaagctctgtgagggtttcaatgaggtgctgaaacagtgccgacttgcaaacggattggcctaatcaagaagttcaacctggagagatggaaaatcagctctcatactaattaatttagtataaaaatagaattggtagtgagggtataaagtgtaagcatcagttaaacttctcctgtcattcctagcttccttgcttcagaattgaaatggaagggagggtgttcctactctgtagaatctgggactgggcaaatgtttgtgtgccactgca

SEQ ID NO: 4261 - protein, 140 aa, Homo sapiens [sequence omitted]

SEQ ID NO: 4262 - DNA, 1490 bp, Homo sapiens
cataggcgaggcattcctggggtttgcgccgtatccttttacaaagtcctggctttggctggtgcgaccaaagaaaggaaaccggcgcttgagacttgtctgggctggctatggtgaagcagtgaaacggtgcagaattgtgtcaatgaggctagttcagttgtgcaagagcatttcctcaaagtaagacagaagcttttagttacgtcaacacctgctaatgttaggctggccagaaatttcctgacaaataatgggtgaaggtcgggcgtgtggtcgctcatgcctgtaatctcagcgctttgggatcacttgaggtcaggagttcgagaccagcttggccaactaggcgaaaccccatctctactgaaagtacaaaaattagccgtgtgtggtggcgcgcatctgtaatcccagctactctggaggctgaggcaggacaatcgcttgaacccaggaggcagaggttgcagtgagctgagatcacgccacttaaaagaaacgaaactttgctggtgaccatgtggtgatgaaactgagcgttttggagcgcagcaaggtgactccccatgtaattagtatagacagagagtttgtgctctaaaggttagaaataaatgttttcggcctggtggctcatgcctgtaatcccaggactttgaaaggctgagccaggcggatcacctgaggtcagggttcgagaccagcctggccaacatggtgaaacccgtctctattaaagatacaaaaattagccaggcggaagaagtcacttagctcttcgctggttgtcacacgtccggaggccgagccgtcgcgtacctaggatacctggaagccgaagccacacctcccgcatggcccctccggccagccgggcccctcagatgagagctgcacccaggccagcaccagtcgctcagccaccagcagcggcaccgccatctacagttggctcttctgctgctgcgccccggcagccaggtctgatggcccagatggcaaccactgcagctggcgtggctgtgggctctgctgtggggcacatactgggtcatgccattactgggggcttcagtggaggaagtaatgctgagcctgcgaggcctgacatcacttaccaggagcctcagggaacccagccggcacagcagcagcagccttgcttctgtgagatcaaacagtttctggagtgtgccgagaaccagggtgacatcaagctctgtgagggtttcaatgaggtgctgaaacagtgccgacttgcaaacggattggcctaatcaagaagttcaacctggagagatggaaaatcagctctcatactaattaatttagtataaaaatagaattggtagtgagggtataaagtgtaagcatcagttaaacttctcctgtcattcctagcttccttgcttcagaattgaaatggaagggagggtgttcctactctgtagaatctgggactgggcaaatgtttgtgtgccactgca

SEQ ID NO: 4263 - protein, 140 aa, Homo sapiens [sequence omitted]

SEQ ID NO: 4264 - DNA, 1562 bp, Homo sapiens
cataggcgaggcattcctggggtttgcgccgtatccttttacaaagtcctggctttggctggtgcgaccaaagaaaggaaaccggcgcttgagacttgtctgggctggctatggtgaagcagtgaaacggtgcagaattgtgtcaatgaggctagttcagttgtgcaagagcatttcctcaaagtaagacagaagcttttagttacgtcaacacctgctaatgttaggctggccagaaatttcctgacaaataatgggtgaaggtcgggcgtgtggtcgctcatgcctgtaatctcagcgctttgggatcacttgaggtcaggagttcgagaccagcttggccaactaggcgaaaccccatctctactgaaagtacaaaaattagccgtgtgtggtggcgcgcatctgtaatcccagctactctggaggctgaggcaggacaatcgcttgaacccaggaggcagaggttgcagtgagctgagatcacgccacttaaaagaaacgaaactttgctggtgaccatgtggtgatgaaactgagcgttttggagcgcagcaaggtgactccccatgtaattagtatagacagagagtttgtgctctaaaggttagaaataaatgttttcggcctggtggctcatgcctgtaatcccaggactttgaaaggctgagccaggcggatcacctgaggtcagggttcgagaccagcctggccaacatggtgaaacccgtctctattaaagatacaaaaattagccaggcggaagaagtcacttagctcttcgctggttgtcacacgtccggaggccgagccgtcgcgtacctaggatacctggaagccgaagccacacctcccgcatggcccctccggccagccgggcccctcagatgagagctgcacccaggccagcaccagtcgctcagccaccagcagcggcaccgccatctacagttggctcttctgctgctgcgccccggcagccaggtctgatggcccagatggcaaccactgcagctggcgtggctgtgggctctgctgtggggcacatactgggtcatgccattactgggggcttcagtggaggaagtaatgctgagcctgcgaggcctgacatcacttaccaggagcctcagggaacccagccggcacagcagcagcagccttgcttctgtgagatcaaacagtttctggagtgtgccgagaaccagggtgacatcaagctctgtgagggtttcaatgaggtgctgaaacagtgccgacttgcaaacggattggcctaatcaagaagttcaacctggagagatggaaaatcagctctcatactaattaatttagtataaaaatagaattggtagtgagggtataaagtgtaagcatcagttaaacttctcctgtcattcctagcttccttgcttcagaattgaaatggaagggagggtgttcctactctgtagaatctgggactgggcaaatgtttgtgtggcctccttaaactagctgttatgattttattctttgtgagttaattagaataaagtcattttcttccaaaaaagaaaaaa

SEQ ID NO: 4265 - protein, 140 aa, Homo sapiens [sequence omitted]

SEQ ID NO: 4266 - DNA, 804 bp, Homo sapiens
aaaaaaagaagtcacttagctcttcgctggttgtcacacgtccggaggccgagccgtcgcgtacctaggatacctggaagccgaagccacacctcccgcatggcccctccggccagccgggcccctcagatgagagctgcacccaggccagcaccagtcgctcagccaccagcagcggcaccgccatctacagttggctcttctgctgctgcgccccggcagccaggtctgatggcccagatggcaaccactgcagctggcgtggctgtgggctctgctgtggggcacatactgggtcatgccattactgggggcttcagtggaggaagtaatgctgagcctgcgaggcctgacatcacttaccaggagcctcagggaacccagccggcacagcagcagcagccttgcttctgtgagatcaaacagtttctggagtgtgccgagaaccagggtgacatcaagctctgtgagggtttcaatgaggtgctgaaacagtgccgacttgcaaacggattggcctaatcaagaagttcaacctggagagatggaaaatcagctctcatactaattaatttagtataaaaatagaattggtagtgagggtataaagtgtaagcatcagttaaacttctcctgtcattcctagcttccttgcttcagaattgaaatggaagggagggtgttcctactctgtagaatctgggactgggcaaatgtttgtgtggcctccttaaactagctgttatgattttattctttgtgagttaattagaataaagtcattttcttccaaaaaagaaaaaa

SEQ ID NO: 4267 - protein, 140 aa, Homo sapiens [sequence omitted]

SEQ ID NO: 4268 - DNA, 802 bp, Homo sapiens
aaaaaaaagtcacttagctcttcgctggttgtcacacgtccggaggccgagccgtcgcgtacctaggatacctggaagccgaagccacacctcccgcatggcccctccggccagccgggcccctcagatgagagctgcacccaggccagcaccagtcgctcagccaccagcagcggcaccgccatctacagttggctcttctgctgctgcgccccggcagccaggtctgatggcccagatggcaaccactgcagctggcgtggctgtgggctctgctgtggggcacatactgggtcatgccattactgggggcttcagtggaggaagtaatgctgagcctgcgaggcctgacatcacttaccaggagcctcagggaacccagccggcacagcagcagcagccttgcttctgtgagatcaaacagtttctggagtgtgccgagaaccagggtgacatcaagctctgtgagggtttcaatgaggtgctgaaacagtgccgacttgcaaacggattggcctaatcaagaagttcaacctggagagatggaaaatcagctctcatactaattaatttagtataaaaatagaattggtagtgagggtataaagtgtaagcatcagttaaacttctcctgtcattcctagcttccttgcttcagaattgaaatggaagggagggtgttcctactctgtagaatctgggactgggcaaatgtttgtgtggcctccttaaactagctgttatgattttattctttgtgagttaattagaataaagtcattttcttccaaaaaagaaaaaa

SEQ ID NO: 4269 - protein, 140 aa, Homo sapiens [sequence omitted]

SEQ ID NO: 4270 - DNA, 732 bp, Homo sapiens; identical to SEQ ID NO: 4260

SEQ ID NO: 4271 - protein, 140 aa, Homo sapiens [sequence omitted]

SEQ ID NO: 4272 - DNA, 1490 bp, Homo sapiens; identical to SEQ ID NO: 4262

SEQ ID NO: 4273 - protein, 140 aa, Homo sapiens [sequence omitted]

SEQ ID NO: 4274 - DNA, 1562 bp, Homo sapiens; identical to SEQ ID NO: 4264

SEQ ID NO: 4275 - protein, 140 aa, Homo sapiens [sequence omitted]

SEQ ID NO: 4276 - DNA, 804 bp, Homo sapiens; identical to SEQ ID NO: 4266

SEQ ID NO: 4277 - protein, 140 aa, Homo sapiens [sequence omitted]

SEQ ID NO: 4278 - DNA, 802 bp, Homo sapiens; identical to SEQ ID NO: 4268

SEQ ID NO: 4279 - protein, 140 aa, Homo sapiens [sequence omitted]

SEQ ID NO: 4280 - DNA, 2870 bp, Homo sapiens
tgctcgatgatcttctcttcccgcacgttctcgggccgggcgtggcggctcacacctgtaatctcagcactttggaaggccctggcggaaggatctcttgacgtcaggacttccaaaacagttgggcaacacagcaagaccccgttcccaggctgggggcaaagccgggctcggtggctcacgcctgtaattccagcactttgggaggccgaggtgggcggatcacctgagctcaggagttcgagaccagcctgaccaacatggtgaaacccatctctactaaacatacaaaaattacccgagcgtattggcgggcgcctgtagtcccagctacatgggaggctgaggcaggagaatcgcttgaacccgggaggcgaaggttgcagtgagccgagactgcgccactgcactacagcctggatgacaagagactcccgtctcaaaaaaaaaaaaaaaaagacacctttctttgggcttagtgagcaaacattctacgcagtgcctaatataagccggcccaggcaccacccaagccttcggccaggactgttttcccgtttcgagaaggctccatcacactccacacgggatccagtcaacagccgttccaaacatggcgcgggaaggggtggaagacaagccagcgcgacgccgtccagcctcatccccggggcacaaaggggagactaatctccaggaaactcggggtacagaatcgataaccccacaagaaactagtttccgcgagtgggccttaaggaaaaagtaggtcgggcacaagcgagctgttcagacgcacttcacagcaaagactcgcggacaacacagcgagacgaaaacggccccgtgcgcaggcgcgcggaaacacgactagcgcgcttcgggacgacccctcccccttccctcaaaggccaaggaagtggctccgacgcgcttgcgcgaggacggaatgttgaggggagggggaattctttcccttcattgtcagagagaaccgcccccgcacggcgagcgcgcgcgcgctcacgcaccactctcacactccggcgcgccaaaggctttccgcttggcgtctcgcgcatgcgcggagggggaagcagtggcgaaattggatgctttttgctgagtttctcagagaagtttctggaaagatggagccaaagggacgctggggggtggggagcgccaggaagcaagcgtttgaaagaaagcgaaaaaacccaagcgcaccgcgacacctccaaccttcaagccacggcccaagcagagcccaaggccactgagaccctcacgccagagaaaaagcacagggaccgcggcagccgctcctccctctgccactgctcagcccccgagactccccagcacggggagagggcagggggtagccatgagaaacctagagcgctcactggacttttgcgaggtggaaggaaagccgaaacccgccctttggagccgcctgtgcgcacgggccccgtcgagtgggctcagtacgttaggactcagcgtggccgccaaagcattggttgggggcgtctttcactaatttttcctaggttttctcttctatcgggctctgtggtcctttcaccacccatcttcactttggtggcctgacgctaacgctgcgagttggggaaaccgtagtaaccccgggcctgaggggcgtcccgggcggcggtgctccgtttcttccagcggttgcccctttaagaaaaagccccccggagaggggcccgtgtggctgagtaaaggtggcgtgcgcccgcacaaaggcgccgcgttgttggcgggctccggaccctgttgcccctgggcggggcggcgtgggaagaccggggcgcctgggcggggagaacgacgttggcgctagcggggcagggcagggggagggagtcacgggatttagcaggtgcttctccgcgaccgagcgactgccattttgtggtgcggccgccgccatttcgcgcggccgaggggcggggtgtgggcggagcggcgggcgcgcccgggctgtccctcggggcggcgggctaacgcggccgctttgttcttcgcttctcggctcgaggccccagtctcgaccgccgaccgcctcggaaccgggctgcatccgagctgccacgcggcgtgtgaaccttgaagcgcggccggggaatccgcaaggcgccgactctcttcctccttgcaagcccttcgaaagtgagatttctcaccccacccttgcagggtggagagaacacgtttcaaaaaggggatgcctagaactcagccgtgggaagtgcctgtctaaagccttgtgctggtgccagtagcaaacccgtgcgcgtgctcggctttgagcgatcatggagctctgcaaatagctcaactgcagagcgtgccccttagagctcctgtgctgctgggaggcctcataaaggtgccaaaaccaggtgtccccagcggttggcctctttaaaaagaaaaaaaaaaaaaggcggagtgggatgtccttgacgtgctgaaagacggagtagaatgagacgttggttttcattggctggccattaagcacgcactgcgcaactgttttccagatacgggtttatagcccattatttatatcggagccataaacttgaacaatagattggaatatcttatttttgcctgttgagaatatctcccatttaacttcttttgaaagttcagatgagtatataaataatacattgacccagtagaatctattgtgtgcgttccagcgtcatttcaaagagctattgtttttctgatttcaaaagaaatatttaaatgtgagtctttgtgttttaatgttaaccttgtggttcgaaatcaacaaagccaggaaattcaagagaact

SEQ ID NO: 4281 - protein, 179 aa, Homo sapiens
MRGGGSSGEIGCFLLSFSEKFLERWSQRDAGGWGAPGSKRLKESEKTQAHRDTSNLQATAQAEPKATETLTPEKKHRDRGSRSSLCHCSAPETPQHGERAGGSHEKPRALTGLLRGGRKAETRPLEPPVRTGPVEWAQYVRTQRGRQSIGWGRLSLIFPRFSLLSGSVVLSPPIFTLVA

SEQ ID NO: 4282 - DNA, 962 bp, Homo sapiens
gcctcttctttatatttcagcctgtttctccagaactccctgttggctcagtcctacgtgggtttactgcacaggtctgtggcccaacatgtatgaaccatactccatctgtgaggggcatctctaccctctcagtcactaaggttggaaatttccaagttatctaggactcctgcctcttcctcgcttcccacagtttgtcaccaaaaactctggagtccataccctcctctcagcagctgctggccaggttcggtcttcattccctctcacatggactctgcctctagtgtcccctcccagcaagggctgaagaagaggagactggggtgggagaaggtggaatgggggctgcctttgtcgctagcctccgcagtaacctttcttctgccacttcaaggtcagagatgaacagcagtgttggggacctgggtgttggcggctgcagcctctgggatgaccctgctcgcttcatcgtggtgcccgcggcctatgccttggcactgggcctggggctgccagccaacgtggcggccctggcaatgttcatccgcagcggcgggcgcctgggccaggccctgcttctctacctgttcaacctggctctggttgatgagttcttcacgctcacgctgcagctgtggctcacctactacctgggcctggcccggaggccgcctgccacgcggccggggccacctactacgtgtccacctatgcggcggtggtcttcgccgcgctcatcagcgtgtgccgctgcggcttcgtacgcggtcccgggcccagggcggctgcccgcctggcccggtgcctacggcgccccgcgcgcgctgcctgcgccttcgcctggctggcgggcctggcccctccctgcctggagcaccgctgggcaagctcggggctggcctccgccacggtggccttcgcggccgccttcctgctggtgctcgcggccaacgtga

SEQ ID NO: 4283 - protein, 205 aa, Homo sapiens [sequence omitted]

SEQ ID NO: 4284 - DNA, 1875 bp, Homo sapiens
agaggcaagaaaggaacagtctgaggtttgagtctgacccaggacctctttgtggtcaaaaagtgaggggggaggaaacaggatgaaaggcttgagagtggcaaaagcttttcagcccagccaagggtgctccaggcaagcgctggggcacctctctgggagaggaccttcaccaaggtcagagatgaacagcagtgttggggacctgggtgttggcggctgcagcctctgggatgaccctgctcgcttcatcgtggtgcccgcggcctatgccttggcactgggcctggggctgccagccaacgtggcggccctggcaatgttcatccgcagcggcgggcgcctgggccaggccctgcttctctacctgttcaacctggctctggttgatgagttcttcacgctcacgctgcagctgtggctcacctactacctgggcctggcccggaggccgcctgccacgcggccggggccacctactacgtgtccacctatgcggcggtggtcttcgccgcgctcatcagcgtgtgccgctgcggcttcgtacgcggtcccgggcccagggcggctgcccgcctggcccggtgcctacggcgccccgcgcgcgctgcctgcgccttcgcctggctggcgggcctggcccctccctgcctggagcaccgctgggcaagctcggggctggcctccgccacggtggccttcgcggccgccttcctgctggtgctcgcggccaacgtgagcctggcgcgggcgctcaaggcgccctctggcccgggcccgggccctgcaaccgccggcgcgcaccggcgcgcggccaagaccatggtcctggggttcctgctggtcttcgccctcagtctggcgcccaaccacctgctgctggcgccctaggtggctgggggggaagacaacggagaccggtgtcgcgccgcctccacgctcgacatcctgcacaccctcagcctggcgctgctgagcctcaacagctgcctggacccactcatctgctgcttcttcgtgcgcctcttccaccaggactgctgctgggcactgagctgccgcctggtgaagggggcgcccagggcgcatggggcctccttggcctcctcttggagagtctcctggcctcccctcctgtctcacccccctgtcaccctcccagtggcatccagggtggagaaagctctttggaaagacctagattctaatcctgacgcaaccacatactacccctgtagctgtgaacctccgggctcatctgtaccaaggacatagaacattctttgtaacccgaatgttccctggatgttgccagcttttggatacaaataatataccactgtgttttttttaaacctcttgggataaaacccaaagtccttatcatggcctacaaggccctgtctgatttggctcccctttctctccctaacccaccacccctgcgtctccctgcaggcagtcaccttcttaggcccgggaaaatgccggtctcctactcttcatggcctttgtacctgacttggccaggaatgatctctgttcctctctttcactaagttagttcttcttcaccctcacttcctctaaagtaactccttatagggaagcctttcttggctggcaacacacacacacacacacacacacacatacacacacgactgaatcagatcggattgctctttgatagctcttttcataattgtaatcaagcaattaattgggtaatgcgttgttgttgttttctttctctcttgccagaatgtattcatgttgacccataagacattatcatttttataagtccccaaaagttgaatattggaaattttatttccacccaattcaacttaataaattctgtgtttacct

SEQ ID NO: 4285 - protein, 218 aa, Homo sapiens
MKGLRVAKAFQPSQGCSRQALGHLSGRGPSPRSEMNSSVGDLGVGGCSLWDDPARFIVVPAAYALALGLGLPANVAALAMFIRSGGRLGQALLLYLFNLALVDEFFTLTLQLWLTYYLGLARRPPATRPGPPTTCPPMRRWSSPRSSACAAAASYAVPGPGRLPAWPGAYGAPRALPAPSPGWRAWPLPAWSTAGQARGWPPPRWPSRPPSCWCSRPT

SEQ ID NO: 4286 - DNA, 540 bp, Homo sapiens
atggtcctcggcctggcagccagccgcccccggccacctaccggggctcagggccacatagcggggccccggctctcggcggcctccgcctcctcctggtccatgggctcggggacccccaaccttcgctcccctcacccggaggaggaggaggaagaggaagaaggtagtgcgggctccccacccggacagctacctctcgcctcagcctccctggacagcgacggcggccggaaacaccgcctcctcccacctccccgggaccgacccggaaacacactctccatgctaaccaagccctcccgcccctcccccgggaagggcaatgccggccgcgagaccaagggggaggaggggcagtgctgggcgggtaaaactacgcacaagcgaaggaatctgggcccccagcctctcgccgcccgctctccagaggcagtctgcaccttgcctccttcgctcgagccccagcccccagactcgggcaatacccacaagcaagatggcggcaacggcggcaccccctactgcttagcaccctga

SEQ ID NO: 4287 - protein, 179 aa, Homo sapiens [sequence omitted]

SEQ ID NO: 4288 - DNA, 540 bp, Homo sapiens; identical to SEQ ID NO: 4286

SEQ ID NO: 4289 - protein, 179 aa, Homo sapiens [sequence omitted]

SEQ ID NO: 4290 - DNA, 1898 bp, Homo sapiens
gacatttgacattttattgtagcagctttctgggttaatatctctttgtgattgatagaagtggttggaagaggaagagtagggaaaagtgtgacattacagattaaacagtgaaaatcagtaccataatgactcctttacacccatgagatacgtaccatgatgaccagggctcggtgaaagaaagatttctttttttttttttgagatagtctcactttgttgcccagtctggagtgcagtggcgcaatctcggctcacggcaacctctgcctcccgggttcaagtgattctcctgtctcagcctcccaagtagctgggactacaggtgcatgccaccacacctggctaatttttgtatttttagtggagacagggagtcaccatgttggccaggctggtctcgatctcctgacctcaagtgatccagctgcctcagcctcccaaagtgctgagattacaggcgtgagccactgtgcccagccaaaagaacgatttcttagatggaggacctaggaaccaacagatgggctgctgtattactcttacccctttcattttcctgtatgcttcttcccaaggcagcatcaaattttgaattaatttttgctgcttaataaggacttaaactggtacccaagtcagaaagactctgcctctaattttctggggcttggggatgaagataaagtgttacacccagtgtttgtccaccacagtctgtggggcagagagacccttcctgggactgaattctcaatttgaagcactgttgttcaaagatctcccttctgggtctgacaagaagaaacataacccttatttattgcattcttctggcttacatacattgccctcactaatcaatggacatttcagcatttcattactaattttgagagaaggccaccatggaatttaataaaaatattattgaagagaattgccatcattctccattttccctgaactaccacaagcttctcagaattttagacaaatgtttttcccctcagaactgagcatcagtgctgctttggaaaaacattccatgtgaatactgtggtttcagtgtcaggacctgtacttgggcagttggaagagagtgtgccagttttttactgggagatgggaacaccaatttaattgatgcaattaggttgtaggttttttacagtttttcttttcttttctttttctttttcttttcttttcttttctttttttttttttgagacataggctggctctgtcacctaggctggaatacaatggcatgatctcggcttactgcaacctccgcctcctaggttcaagcaattctgcctcggcctcccaaatagcagggattacaggcacctgccaccactcccagctaattttttgtatttttattagagatgaggtttcgccatgttggccaggctggtcttgaactcctgacctgaggtgatccacccgtctcggcctcccaaagtgctgggattataggcatgagccaccgcacccggccggttttctacagttttctaatactcaagatgttgactttgacaatacttatgtttgtatacttgtaatcttataatggggaaaatgtgtataaagatgttttaatatgtatgtagtttttcaataaatcttaatgccttgaagggaagatttgctgtccagcttgaatgctcattcttgggtcagtgcctgtctaaccttgaggagcatttcattttcaggttatctccatcccagggaaaccctctgggtctaaactgagaagctgctgcaattgtcccctcactggcttctcagtcctagtgaattgatcaagttaacttaccaagtggtttgggttcagctcaggtgaagaggataattgagtttacataaatggtaccttc

SEQ ID NO: 4291 - protein, 80 aa, Homo sapiens
MKIKCYTQCLSTTVCGAERPFLGLNSQFEALLFKDLPSGSDKKKHNPYLLHSSGLHTLPSLINGHFSISLLILREGHHGI

SEQ ID NO: 4292 - DNA, 1900 bp, Homo sapiens
gacatttgacattttattgtagcagctttctgggttaatatctctttgtgattgatagaagtggttggaagaggaagagtagggaaaagtgtgacattacagattaaacagtgaaaatcagtaccataatgactcctttacacccatgagatacgtaccatgatgaccagggctcggtgaaagaaagatttctttttttttttttgagatagtctcactttgttgcccagtctggagtgcagtggcgcaatctcggctcacggcaacctctgcctcccgggttcaagtgattctcctgtctcagcctcccaagtagctgggactacaggtgcatgccaccacacctggctaatttttgtatttttagtggagacagggagtcaccatgttggccaggctggtctcgatctcctgacctcaagtgatccagctgcctcagcctcccaaagtgctgagattacaggcgtgagccactgtgcccagccaaaagaacgatttcttagatggaggacctaggaaccaacagatgggctgctgtattactcttacccctttcattttcctgtatgcttcttcccaaggcagcatcaaattttgaattaatttttgctgcttaataaggacttaaactggtacccaagtcagaaagactctgcctctaattttctggggcttggggatgaagataaagtgttacacccagtgtttgtccaccacagtctgtggggcagagagacccttcctgggactgaattctcaatttgaagcactgttgttcaaagatctcccttctgggtctgacaagaagaaacataacccttatttattgcattcttctggcttacatacattgccctcactaatcaatggacatttcagcatttcattactaattttgagagaaggccaccatggaatttaataaaaatattattgaagagaattgccatcattctccattttccctgaactaccacaagcttctcagaattttagacaaatgtttttcccctcagaactgagcatcagtgctgctttggaaaaacattccatgtgaatactgtggtttcagtgtcaggacctgtacttgggcagttggaagagagtgtgccagttttttactgggagatgggaacaccaatttaattgatgcaattaggttgtaggttttttacagtttttcttttcttttctttttctttttcttttcttttcttttctttttttttttttttgagacataggctggctctgtcacctaggctggaatacaatggcacgatctcggcttactgcaacctccgcctcctaggttcaagcaattctgcctcggcctcccaaatagcagggattacaggcacctgccaccactcccagctaattttttgtatttttattagagatgaggtttcgccatgttggccaggctggtcttgaactcctgacctgaggtgatccacccgtctcggcctcccaaagtgctgggattataggcatgagccaccgcacccggccggttttctacagttttctaatactcaagatgttgactttgacaatacttatgtttgtatacttgtaatcttataatggggaaaatgtgtataaagatgttttaatatgtatgtagtttttcaataaatcttaatgccttgaagggaagatttgctgtccagcttgaatgctcattcttgggtcagtgcctgtctaaccttgaggagcatttcattttcaggttatctccatcccagggaaaccctctgggtctaaactgagaagctgctgcaattgtcccctcactggcttctcagtcctagtgaattgatcaagttaacttaccaagtggtttgggttcagctcaggtgaagaggataattgagtttacataaatggtaccttc

SEQ ID NO: 4293 - protein, 80 aa, Homo sapiens; identical to SEQ ID NO: 4291

SEQ ID NO: 4294 - DNA, 2203 bp, Homo sapiens
ttccaagcccacggccccggtcgcggcctcgccgccctcccgcgccccgcaccgggagcgggcctagagcactcgcctcgcccctccgcgagcagggctctggcgcccgcccctgtccgcaccgctggcagcctgaagagagtcgctggccatggtcgctgctaggtaggatatatctgcatcttgaaaggaagataaaacaaaagccttctttggaatagatggatttttgtcactttctgtgtgaactaaagtgattcaatgtctcttttggattgcttctgcacttcaagaacacaagatgaatcactcagacctgaaaaacagtctgaaaccagtatccatcaatacttggttgatgagccaaccctttcctggtcacctccatccactagagccagtgaagtactatgttccaccaacgtttctcactacgagctccaagtagaaacaggaagaggatttgacaacttgacttctgtccatcttgcatggcatactcccacgggaacactggtaactataaaaattacaaatctggaaaactgcaatgaagaacgcctgaaagctttacagaaagccgtgattctatcccactttttccggcatcccaatattacaacttactggacagttttcactgttggcagctggctttgggttatttctccatttatggcctatggttcagcaagtcaactcttgaggacctgttttcctgaaggaatgagtgaaactttaataagaaacattatctttggagctgtgagagggttgaactatctgtaccaaaatggctgtattcacaggagtattaaagccagccatatcctcatttctggtgatggcctagtgaccctctctggcctgtcccatctgcatagtttggttaagcatggacagaggcatagggctgtgtatgatttcccacagttcagcacatcagtgcagccgtggctgagtccagaactactgagacaggatttacatgggtataatgtgaagtcagatatttacagtgttgggattacagcatgtgaattagccagtgggcaggtgcctttccaggacatgcatagaactcagatgctgttacagaaactgaaaggtcctccttatagcccattggatatcagtattttccctcaatcagaatccagaatgaaaaattcccggtcaggtgtagactctggaattggagaaagtgtgcttgtctccagtggaactcacacagtaaatagtgaccgattacacacaccatcctcaaaaactttctctcctgccttctttagcttggtacagctctgtttgcaacaagatcctgagaaaaggccatcagcaagcagtttattgtcccatgttttcttcaaacagatgaaagaagaaagccaggattcaatactttcacggttgcctcctgcttataacaagccatcaataccattgcctccagtgttaccttggactgagccagaatgtgattttcctgatgaaaaagactcatacttggaattctagggctgccaaatcatttcatgtcctatatacttgacactttctccttgctgctttttcttctgtatttctaggtacaaatacgagaattatacttgaaaatacagttggtgcactggagaatctattatttaaaaccactctgttcaaaggggcaccagtttgtagtccctctgttttgcacagagtactatgacaaggaaacatcagaattaccaatctagctagtgtcatttattctggaatttttttctaagctgtgactaactctttttatctctcaatataatttttgagccagttaatttttttcagtattttgctgttccttgggaatgagccctcagaggacagtgcttccaagtacatcttcttctcccagattctctggcctttttaatgagctattgttaaaccaacaggctagtttatcttacatcagacccttttctggtagagggaaaatgtttgtgctttccttttttcttctgttaatacttatggtaacacctaactgagcctcactcacattaaatgattcacttgaaatatatacagaaattgtaatttgcttttttttaaaaaagggggctaaagtaacactttcctactttgtaaattatagatcttaaattcatgcaccccgtgggagctcaataaagatatactgaattgagaaaaaaaaaaa

SEQ ID NO: 4295 - protein, 418 aa, Homo sapiens [sequence omitted]

SEQ ID NO: 4296 - DNA, 1302 bp, Homo sapiens
atggagctcagtgatgggcacaaagcaagactcatggaggaggatgtgtttggcagctctggattttgtgggagaatatatgtggctttcaggctggactcggtcacttgtagctgcgtagccagcagtcaaggaaggaaatatggttatactttccttgctaaggaaatccaaccctccacaaggcagctttcttcccatccccttgaccttttaggaaaaagcaccctgagagcacaactgaacaaaactgtagcccagggcattgaaaacctctcggagagggccaggtgtgaccagaaaaggctgtccatcttcaccccaagcccactggctcctgagatacgacatccagacccagtgcagctggacctggcccaggaagatcatgcggtttctgggaagcactggagaaggaaaaggctgaagaaaggaagaccggaaaagaaatacaagtccttccgccttggcaaagatgatagtaccgttcccttcagtgttccggttctgctctattggataagttccggtttgactatgactacgtgaaaatgtggaaccagaccttcaccccacattccagctccagctctaccacagaggaagtgcaatatcaccttagttattcaacacattatgctcctcgtgatacaaccagagttcacatcagcaatcttggcagctctcaccacgctgctgactcacgactctctcatgtcccaatttcctgtccattgttctttcctctacttggcctgatttctaaaggcctctcttggttgcattaagcgggattcctgagggattcccttggcagttaccttgggggagctcttaggtttggggctgatccatgtcctctaaatgtaggacttcaaagctcccaaagataggcaggcccagtgggaagctgggaaatgctctctgacccctctgggagggctggcagtcagagggccttttggaaagagtcagacctgatccataagtccctggaaaacaccctgcccagggagcaaatgccactgtggccttgactgaggcttcagaagagtttgggagctgcaattcatccacacacgcattcattttcaagtagtggtttgcagttcaggctttggagccacataagcctggcttcaaagccactttccagctttgtaggaagtctctacatttttaaacctccatttttttttcctgtaaaactggggtcttcatggtacttaacttcatcgtgatgttgagagaatgaaaagaaaaaggataaataaatggcttagcctcgtgccttggcacata

SEQ ID NO: 4297 - protein, 182 aa, Homo sapiens
MELSDGHKARLMEEDVFGSSGFCGRIYVAFRLDSVTCSCVASSQGRKYGYTFLAKEIQPSTRQLSSHPLDLLGKSTLRAQLNKTVAQGIENLSERARCDQKRLSIFTPSPLAPEIRHPDPVQLDLAQEDHAVSGKHWRRKRLKKGRPEKKYKSFRLGKDDSTVPFSVPVLLYWISSGLTMTT

SEQ ID NO: 4298 - DNA, 304 bp, Homo sapiens
tgggaaaatgactgagtgcccatagatgaagtgctttcaagactgtctggcacctagaggtatcatcgcagaagccttggatatgaacagaagcaggcagaggatgaagctgatggtgtgcatggtcactgtgctcctgcccatttttgagcttctggaatacaagctgtgcctttgcctggaatgtccctcccagtctgactaggcatcttctgatggggtttgacctggttgcttctaacactaggatggacctcttggcaatctctggatatctttctgtggtttgttataatggtaatta

SEQ ID NO: 4299 - protein, 59 aa, Homo sapiens
MKCFQDCLAPRGIIAEALDMNRSRQRMKLMVCMVTVLLPIFELLEYKLCLCLECPSQSD

SEQ ID NO: 4300 - DNA, 672 bp, Homo sapiens
atggcttccaaactcctgcgcgcggtcatcctcgggccgcccggctcgggcaagggcaccgtgtgccagaggatcgcccagaactttggtctccagcatctctccagcggccacttcttgcgggagaacatcaaggccagcaccgaagttggtgagatggcaaagcagtatatagagaaaagtcttttggttccagaccatgtgatcacacgcctaatgatgtccgagttggagaacaggcgtggccagcactggctccttgatggttttcctaggacattaggacaagccgaagccctggacaaaatctgtgaagtggatctagtgatcagtttgaatattccatttgaaacacttaaagatcgtctcagccgccgttggattcaccctcctagcggaagggtatataacctggacttcaatccacctcatgtacatggtattgatgacgtcactggtgaaccgttagtccagcaggaggatgataaacccgaagcagttgctgccaggctaagacagtacaaagacgtggcaaagccagtcattgaattatacaagagccgaggagtgctccaccaattttccggaacggagacgaacaaaatctggccctacgtttacacacttttctcaaacaagatcacacctattcagtccaaagaagcatattaa

SEQ ID NO: 4301 - protein, 223 aa, Homo sapiens; identical to SEQ ID NO: 254

SEQ ID NO: 4302 - DNA, 1694 bp, Homo sapiens
gcggcggcggcggcgagcggtggcgctcggctcgggcgaccgcggcgggggagggcgcggcgcaccgatgggcgccactgagaagggaggccagaagagccggaagctgttttccttgcggcggccgtggaaggcgacccggcggctgtggaggccacgctcagctcgccaggcggcgcagggtgagtgtgggcgcggccggtcgggacctgttaccctgaggcaggggcgcagcggcggcggggccgtccccggcggtctctcgggtcgcgttcccggccctgggagcctggatgcctaggcgacgcccgaacccgaccctcggtcgcgggtaccgggaccgctggggaagcgcaggggctgatgtcggcacagtctcctttcctctagcccctgctcgttgctttggctctggacacagggaagccacggtggcgcggcgacacagcctcactgaggttagcttgtccccggcccccagcacctggcctggcgcctgcaatgcagtgcctactgggggaatgaatcagaacccgaggctcccttcaaggtcctcccgccctgtacccacctcctctctacctgcctgcggtgatttcgaagctctcgccacgataaactatttccaagcacactcagtcctgtcctcgccagggcctcaactcacagccaatcactgactcactccattcattcattccacaatttttatcgagcccctccatctgccttggccggagaacacgatgggcaaagcccggatcttggaactacttctagagaggaagacagacattacacacgcaaaacagagaaagcccggtacacattgctatgtgcgcttagagggaatcagtctgctgacagaggaaaaaaggcaggtccccgagcttccatggcaggcggactgggaaggcctctccgaggcattgcaagtcagcggagacccgaggactgactaggagttactctagcgtgaagccgagtaatagagaatagcaagtggaaaggttcccagagtgcctgaattgagcaaggggaaagagagggatgcagggcctggatcgaggtctgggcagaacatgaagaggagttcggattttattctacgtgagctgggaaaacactgaagtgtgctaagcagggaagtgacctgatctgggggctcccggcttttctctgtctgcagtgtccatgctcgcatctcagcctgccggattcctaccctcctgccaagactagcacaaatgcagtctcctcgctgaaatctctgtggttcctgccacctgtaacccctcctttagcatttcgtcacctgtagagcgtttgtcactgttcatctggtattaaagattccacattctcatccatttcatctttgcatcccccacgaggctaagtgcagggcttggtactgtgtagatactgcttatgaatgtgtcttgtcttgtcctttttgtctgtttccatcatctgaggatccttcctctggggggttgacatgccttatttctaaaatggccgaccggatgcagggcagagccagattgcaccaggaccctgccatcgatatagtccccctcacccacccccggtgttttgaggattaaataaattaatgaattaaacgagttagtagttataaagtgttagcacctattaagcattataaaaataaatttgaaaatgaccag

SEQ ID NO: 4303 - protein, 128 aa, Homo sapiens [sequence omitted]

SEQ ID NO: 4304 - DNA, 1694 bp, Homo sapiens; identical to SEQ ID NO: 4302

SEQ ID NO: 4305 - protein, 128 aa, Homo sapiens [sequence omitted]

SEQ ID NO: 4306 - DNA, 1449 bp, Homo sapiens
cgttcaaagtgtttgttaattatttattaagataaacaatttcttagcccacatattcatgtttcacagatagttcaggaacacaggtacagtgacaaacttctatgtaattcaacccaaagaaatactttatgttccaaaatcactttgtactctgagagatattagccttcctcatctcaaattctttaattcaattataatttctgtagaaatctgcatatgccttctttcttggtcaggccacagcaaacttacagagagctgcaaccccagggttataaggaatgctccaacaatatgaaatgacagatgcttggccagaaggccacacatcccaggttacaccaaggcactgagagccatggtagttattgtccttgacagggatgtcagcatcaacactaatgtctttcccggatgatggagaaatggaccaacttgataagtattgatgctgagtgatacatacaaagaagtccattatatgattttccctacttttgaatatgtttgaaaatttccctaatagaaagtaaaaagatagaataataaaataaaaatacccccacttattacctaagttttcttttagcacaaatggaaaataagtcagactctctcatttggccatattgaagctaatagtctcagaaccactgtgtcataacactgacattttgcttaaagctctgtatcacctttaatggcttaaaatattctagactgtattgagatcatgcaagtagatcaaagaaagagaattacacgcaaaggaagggatagctgtactagggagttcactggtaacagagtcaggggtccacagctctgggctgggtctgtcctgaaaggcagtctctggatagcaggatgagatggagtgatcactggctttggagtcagacacaatagactgagctatgttgaaggacaatgacaaataacacaatagatagcattcattgaaccctcactatatgccaggccttatgctaagctctttatgtactttatgttatgcaattttaataactaccctgtttttattagtattttatggatgagaaaacacaggtttagaggttatcaaatttgtccatgaccacatgaacttgtaattcccagtaaatatttttgtaaataaatatctgaaagtgtccaggcacggtggctcatgcctgcaatcccagcactttgggaggccgaggtaggcggatcacctgaggtcaagagtttgagaccagcctggccaacatgctgaaaccccgtctctactaaaaacacaaaagaattagctgggcatggtggtgtgtgcttgtaatcccagccacttgggaggctgaggcaggagaattgcttgaacccgggaggtgagtcaagattgcgccactgcactccagcctgggcaacaagagtgtgaaaactccatctcaaaaaaaaaaaaaa

SEQ ID NO: 4307 - protein, 45 aa, Homo sapiens
MQVDQRKRITRKGRDSCTREFTGNRVRGPQLWAGSVLKGSLWIAG

SEQ ID NO: 4308 - DNA, 1449 bp, Homo sapiens
cgttcaaagtgtttgttaattatttattaagataaacaatttcttagcccacatattcatgtttcacagatagttcaggaacacaggtacagtgacaaacttctatgtaattcaacccaaagaaatactttatgttccaaaatcactttgtactctgagagatattagccttcctcacctcaaattctttaattcaattataatttctgtagaaatctgcatatgccttctttcttggtcaggccacagcaaacttacagagagctgcaaccccagggttataaggaatgctccaacaatatgaaatgacagatgcttggccagaaggccacacatcccaggttacaccaaggcactgagagccatggtagttattgtccttgacagggatgtcagcatcaacactaatgtctttcccggatgatggagaaatggaccaacttgataagtattgatgctgagtgatacatacaaagaagtccattatatgattttccctacttttgaatatgtttgaaaatttccctaatagaaagtaaaaagatagaataataaaataaaaatacccccacttattacctaagttttcttttagcacaaatggaaaataagtcagactctctcatttggccatattgaagctaatagtctcagaaccactgtgtcataacactgacattttgcttaaagctctgtatcacctttaatggcttaaaatattctagactgtattgagatcatgcaagtagatcaaagaaagagaattacacgcaaaggaagggatagctgtactagggagttcactggtaacagagtcaggggtccacagctctgggctgggtctgtcctgaaaggcagtctctggatagcaggatgagatggagtgatcactggctttggagtcagacacaatagactgagctatgttgaaggacaatgacaaataacacaatagatagcattcattgaaccctcactatatgccaggccttatgctaagctctttatgtactttatgttatgcaattttaataactaccctgtttttattagtattttatggatgagaaaacacaggtttagaggttatcaaatttgtccatgaccacatgaacttgtaattcccagtaaatatttttgtaaataaatatctgaaagtgtccaggcacggtggctcatgcctgcaatcccagcactttgggaggccgaggtaggcggatcacctgaggtcaagagtttgagaccagcctggccaacatgctgaaaccccgtctctactaaaaacacaaaagaattagctgggcatggtggtgtgtgcttgtaatcccagccacttgggaggctgaggcaggagaattgcttgaacccgggaggtgagtcaagattgcgccactgcactccagcctgggcaacaagagtgtgaaaactccatctcaaaaaaaaaaaaaa

SEQ ID NO: 4309 - protein, 45 aa, Homo sapiens; identical to SEQ ID NO: 4307

SEQ ID NO: 4310 - DNA, 1789 bp, Homo sapiens
tccagacgagcaaggagactcatggtctggttcttggacttccctaacagcatggcccctaaacgccagtctccactcccacttcaaaagaagaaaccaagaccacctcctgctctgggactggaggagacatcggcctctgcaggcttgccgaagaagggagaaaaagaacagcaagaagcaattgaacacattgatgaagtacaaaatgaaatagacagacttaatgaacaagacagtgaggagattttgaaagtagaacagaaatataacaaactccgccaaccattttttcagaagaggtcagaattgatcgccaaaatcccaaattttggggtaacaacatttgtcaaccatccacaagtgtcttcactgcttggggaggaggacgaagaggcactgcattatttgactaaagttgaagtgacagaatttgaagatattaaatcaggttacagaatagatttttattttgatgaaaatccttactttgaaaataaagttttctccaaagaatttcatctgaatgagagtggtgatccatcttcaaagtccaccaaaatcaaatggaaatctggaaaggatgtgacgaaacgttcaagtcaaacgcagaataaagccagcaggaagaggcagcatgaggaaccagagagcttctttacctggtttactgatcattctgatgcaggtgctgatgagttagaagaggtcatcaaagatgatatttggccaaacccattacagtattacttggttcctgatatggatgatgaagaaggaggagaagatgatgatgatgatgatgatgatggtgatgaaggggaggaagaattagaagatattgatgaaggggatgaggatgaaggtgaagaagatgaagatgatgatgaaggggaggaaggagaggaggatgaaggagaagatgactaatagaacactgatggactccaaccttccttttttaaaattttctccagccctgggagcaagttgcagtctttttttttttctcttgtgctcagtcaccctgttcttcagctctcttttctctactccatggttctcaacttatttggggggaaataccttgagcagaatacaatgggaaaagagtctctacccttttctgttcgaagttcatttttatcccttcctgtctgaacaaaaactgtatggaatcaacaccaccgagctctgtggggaaaaagaaaaacctgctcccttcgctctgctggaagctggaggatgctaggcccctgtatagtagtgcatagaattctagcttttttcctcctttctctgtatattgggttcagagagtacactgtgtctctatgtaggtcaaagggacaatatggacagttagcatttaccaacacatatctgtctactttctcgtgtttaaaaaaagaaaaaaaacttaaaaaaatggggttatagaaggtcagcaaagtgtggatttgagatgtttgggtgggttaagtgggcattttgacaacatggcttctcctttggcatgtttaattgtgatatttgacagacatccttgcagtttaagatgacacttttaaaataaattccctcctaatgatgacttgagccctgccactcaatgggagaatcagcagaacctgtaggatcttatttggaattgacattctctattgtaattttgttcctgtttatttttaaattttctttttgtttcgctggaaagggaagatgatgctcagttttaaacattaaaagtgtacaagttgctttgttacaataaaagtaaatgtataca

SEQ ID NO: 4311 - protein, 292 aa, Homo sapiens
MAPKRQSPLPLQKKKPRPPPALGLEETSASAGLPKKGEKEQQEAIEHIDEVQNEIDRLNEQDSEEILKVEQKYNKLRQPFFQKRSELIAKIPNFGVTTFVNHPQVSSLLGEEDEEALHYLTKVEVTEFEDIKSGYRIDFYFDENPYFENKVFSKEFHLNESGDPSSKSTKIKWKSGKDVTKRSSQTQNKASRKRQHEEPESFFTWFTDHSDAGADELEEVIKDDIWPNPLQYYLVPDMDDEEGGEDDDDDDDDGDEGEEELEDIDEGDEDEGEEDEDDDEGEEGEEDEGEDD

SEQ ID NO: 4312 - DNA, 1789 bp, Homo sapiens; identical to SEQ ID NO: 4310

SEQ ID NO: 4313 - protein, 292 aa, Homo sapiens; identical to SEQ ID NO: 4311

SEQ ID NO: 4314 - DNA, 459 bp, Homo sapiens
atggtacaaagaacagctacagctgatgacaaaaagctggagaagagctacaagctgcccgacggccaggtcatcaccatcggcaacgaacggttccggtgtccggaggtgctgttccagtcttccttcctgggcatggaatcctgtggcacccacaagaccaccttcaactgcatcatgaagtgtgatgtggacatcttcaaagacctgtacgccaacacagtgctgtccagcggcaccaccatgtacccagacatcaccaacaggatgcagaaggcaatcactgccctggcacctagcaccatgaagatcaagatcattgcaccccgagagcgaaagtactcggtgtggatcggcggctccatcctgacctcactgtccaccttccagcagatgtgcactagcaagcaggagtatgacaagttgggcccctccactgttcaccacaaatgcttctaa

SEQ ID NO: 4315 - protein, 152 aa, Homo sapiens [sequence omitted]

SEQ ID NO: 4316 - DNA, 459 bp, Homo sapiens; identical to SEQ ID NO: 4314

SEQ ID NO: 4317 - protein, 152 aa, Homo sapiens [sequence omitted]

SEQ ID NO: 4318 - DNA, 2523 bp, Homo sapiens
agcctgaaggactgcttgcctgtgaggagggtcactcttgactggctgcatcaggaccatgtgtgaccagcagcagatccagtgccgcctgccgctccaacagtgctgcgtcaagggtccctccttctgctcctctcaatccccctttgcccagagccaagtggtggttcaagccccttgtgagatgcaaattgtggactgccctgcatcatgcccagttcaagtttgccaggtgtcagaccaggctccatgccagtctcagaccacacaggtgaagtgccagtctaagaccaagcaggtgaagggccaggctcaatgtcagtctaagaccacccaggtgaagggccaggctgcatcccaatctcaaacttcctctgttcaaagccaggctccatgccaatctgaggtgtcctacgtgcagtgcgaagcgtcacaacctgttcagacttgcttcgtagaatgtgctccagtttgttatacagaaacttgttatgtagaatgcccagtccagaactatgtaccctgtccagctcctcagcctgtccagatgtatagagggcgtcctgcagtgtgccagcctcagggaagattctccacccagtgccagtatcaaggctcctatagcagttgtggcccccagtttcagtcaagggctacctgcaacaactacaccccccagttccagttgaggccttcctacagcagctgtttccctcagtatcggtcccggacttcatttagtccctgtgtgccccagtgccagacccagggctcctatgggagcttcactgaacagcaccgctctcggagcaccagcagatgccttcctcctcctcggcggctgcagcttttcccccgcagctgttccccaccaagacgttttgagccctgctccagcagctacctgccactaagaccctctgaaggtttccctaactactgcaccccaccccgccgctctgaacccatatataacagtcgctgtcctcgccgccccatttcaagctgctctcagagacgtggccccaagtgccgaatcgagatttcctccccgtgctgccccaggcaggttcccccacagaggtgtcctgttgagattcctcccatcagacgccgctcccagagctgtggcccgcagccctcctggggcgcctcctgccctgagctgaggccacacgtagagccacgtccactcccaagcttctgtccaccacggcgtcttgaccagtgtccagagtcaccactgcagcgatgtccacctcctgctccacgtccacgtctgcgcccagaaccatgcataagtctagaaccacgcccgcgtcctctaccacgacaactttcagaaccttgtttgtatccagaaccacttccagcactacgtccaacaccgcggccagttccccttcctcgcccagggcagtgtgagattccagagccacgtccatgcctgcagccctgtgagcacccagagccttgtccacgaccagagccaattcccctgccggcgccctgcccaagcccggagccctgcagggagacttggcgcagccccagcccatgctggggcccaaatccagttccatacccaggagacctaggctgtcatgagtctagtccacaccgcctagacaccgaagctccctactgtggcccatccagttacaaccaggggcaagagagtggtgctggctgtgggcctggtgatgtgtttccagagcggaggggtcaggatggccatggagaccaaggcaatgcctttgctggagtgaaaggggaagcaaagagtgcttatttttaaaggaaaggtgactgagataaccctctctcctgctctgaaaatgttgttcctcctattccacaatttccagtacgctcttgtttgaatctctccaaagatattcagagactccctattacgaaggtgatgtccaaactcctttgcctatcatccaaagatccacacctgggtctcagatgcctctccagcctcacgtgtcactcctcgcccgtacgcatcctcggctctagccagaccagtctggccactgggcacagcttgggtgttccccaggccatactttagatgtccctgcctccaagcctctgctcactcttccccactctgcctggaccacttctctcctcctccccagcttctgaaatccaccccatctttcagtgcctctcccttggagccttctttgcttgttcccactcacaagaacctgtgccgacttcctagaactcactgcatcccccgcactacttggtaactgcctggtgacatctcttgaattgttatttcactttgcaggcatgtcttccttatctgcccaactaggttgtaaactcccaactgagtggagtcggagaatctctaaatctcagtgtctatcctggggctggctgttgcttagcaaggcttgtgggttggcagcttgaaccatgttctgtcctgatgctcaactgcaggaactgaggtgagaggaggccatgtgacaataaagatcattatgtactcac

SEQ ID NO: 4319 - protein, 579 aa, Homo sapiens
MCDQQQIQCRLPLQQCCVKGPSFCSSQSPFAQSQVVVQAPCEMQIVDCPASCPVQVCQVSDQAPCQSQTTQVKCQSKTKQVKGQAQCQSKTTQVKGQAASQSQTSSVQSQAPCQSEVSYVQCEASQPVQTCFVECAPVCYTETCYVECPVQNYVPCPAPQPVQMYRGRPAVCQPQGRFSTQCQYQGSYSSCGPQFQSRATCNNYTPQFQLRPSYSSCFPQYRSRTSFSPCVPQCQTQGSYGSFTEQHRSRSTSRCLPPPRRLQLFPRSCSPPRRFEPCSSSYLPLRPSEGFPNYCTPPRRSEPIYNSRCPRRPISSCSQRRGPKCRIEISSPCCPRQVPPQRCPVEIPPIRRRSQSCGPQPSWGASCPELRPHVEPRPLPSFCPPRRLDQCPESPLQRCPPPAPRPRLRPEPCISLEPRPRPLPRQLSEPCLYPEPLPALRPTPRPVPLPRPGQCEIPEPRPCLQPCEHPEPCPRPEPIPLPAPCPSPEPCRETWRSPSPCWGPNPVPYPGDLGCHESSPHRLDTEAPYCGPSSYNQGQESGAGCGPGDVFPERRGQDGHGDQGNAFAGVKGEAKSAYF

SEQ ID NO: 4320 - DNA, 790 bp, Homo sapiens
ctgtagtacacatccttgatggcaccaagtagcaaacgtgctgtggagactagatctcactctcaaatctgtcctgggatgcaagtgcctctacgaatgtggtgcagaagctacaaatgtggtgcagaagacagcttcaaagaggaaaggaatatagatcctgagactccagcaggatgtcttatcaacagcagcagtgcaagcagccctgccagccacctcctgtgtgccccacgccaaagtgcccagagccatgtccacccccgaagtgccctgagccctgcccatcaccaaagtgtccacagccctgcccacctcagcagtgccagcagaaatatcctcctgtgacaccttccccaccctgccagccaaagtgtccacccaagagcaagtaacagcttcaggattcatcaggagcatgagaggataaggataattggctcacctcgttccacagctccacttgcatcttctcaccaaagccttccatggatgcacagggagcttctttctccttaacctgtggcctgcctgtgatgatctgtgacagcaaaagattccctttctgaggctgccatactgccactgtccaggtggagctaagaaaaggaagtcctcagctgtgccagctcccagagcttcggaagaaagagcagcagctctctccctgggaaccatcagacaattctgttgatgtgttctgtgtctgtctgtcacctggtcatgagcttctaccacctttgcaattgtcatttatctttcactccctgaataaagtatctatgcatat

SEQ ID NO: 4321 - protein, 72 aa, Homo sapiens
MSYQQQQCKQPCQPPPVCPTPKCPEPCPPPKCPEPCPSPKCPQPCPPQQCQQKYPPVTPSPPCQPKCPPKSK

SEQ ID NO: 4322 - DNA, 762 bp, Homo sapiens
aaactcctggtacttgagcactgatctgctttggagaacctgattctgagactccagcaggatgtcttatcaacagcagcagtgcaagcagccctgccagccacctcctgtgtgccccacgccaaagtgcccagagccatgtccacccccgaagtgccctgagccctgcccaccaccaaagtgtccacagccctgcccacctcagcagtgccagcaaaaatgtcctcctgtgacaccttccccaccctgccagccaaagtgtccacccaagagcaagtaacagcttcagaattcatcaggagcatgaaaggataaggataattggctcaccttgttccacagcttcacctgcatcttctcatcaaagcctaccatggatacacagttagcttctttcctcttagccagtgatctgcccatgatgatccctgatagcaaaaggtttcctttctgaggctgccatattgccactgtccaggtggagactgagaaaggaagtcctcagcagtgtcagttcccagagctttggaagaaggaccagcagctctgtccctgggaaccatcaaaaaatgctgttgatgttttctgtgtctgtctgtcacctgggcatgggcttctaacacctgtgcaattgtcacttttctttcactccctgaataaaatatctttgcatacgtaaaaaaaaaaaaaaaaaaaaaaaaaaaaaaaaaaaaaaaaaaaaaaaaaaaaaaaaaaaaaaaaaaaaaaaaaaaaaaaaaaaaa

SEQ ID NO: 4323 - protein, 72 aa, Homo sapiens
MSYQQQQCKQPCQPPPVCPTPKCPEPCPPPKCPEPCPPPKCPQPCPPQQCQQKCPPVTPSPPCQPKCPPKSK

SEQ ID NO: 4324 - DNA, 657 bp, Homo sapiens
actcctggtacctaagcaccgatctgccttggagaacctgattctgagactccagcaggatgtcttatcaacagcagcagtgcaagcagccctgccagccacctcctgtgtgccccgcgccaaagtgcccagagccatgtccacccccgaagtgccctgagccctgcccaccatcaaagtgtccacagtcctgcccacctcagcagtgccagcagaaatgtcctcctgtgacaccttccccaccctgccagccaaagtgtccacccaagagcaagtaacagcttcaggattcatcaggagcatgaaaggataaggataattggctcacctcgttccacagctccacctgcatcttctcatcaaagccatccagggatacacagggagcttctttcctcttagcctgtgatcggcctgtgatgatctctgatagcaaaaggttttctttttgaggctgccatactgccactgtcgaggtggagactgagcaaaggaagtcctgggctgtgccagctcccagagcttcagaagaaagagcagctctctccctgggaaccattagagaattctgttgatgttttctgtgtctgtctgtcccctgggcatgagcttccaccacctgtgcagttgtcactttcctttcactccctgaataaa

SEQ ID NO: 4325 - protein, 72 aa, Homo sapiens
MSYQQQQCKQPCQPPPVCPAPKCPEPCPPPKCPEPCPPSKCPQSCPPQQCQQKCPPVTPSPPCQPKCPPKSK

SEQ ID NO: 4326 - DNA, 678 bp, Homo sapiens
agaggttctcagcctcatgactcctaaactcctggtacttgagcaccgatctgcttcggagaacctgattctgagactccagcaggatgtcttatcaacagtagcaatgtaagcagccctgccagccacctcctgtgtgccgcctgccaaagcgtccagagccatgtccacccctgaagtgccctgagccctgcccaccaccaaagtgtccacagccctgcccacctcagcagtgccagcagaaatatcctctggtgacaccttccccaccctgccagccaaagtgtccacccaagagcaagtaacagcttcggaattcatcaggaccacgaaaggatagggataattggctcacctcgttccacagctccacctgcatcttctcatcaaagccatccagggatacacagggagcttctttccccttagcctgtgatctgcccatgatgatccccgacagcaaaatgtttcctttctgaggctgccatgctgccactgtccaggtggagactgagcaaaggaagtcctcagctgtaccggcctttcagagcttctctttgggtgccatcaaagaattattttgatgtcttctgtctctgtctgtcacctggcatgagcttctactatctgtgcaattgtcacttttctttcactccctgaataaagtagctatgccta

SEQ ID NO: 4327 - DNA, 580 bp, Homo sapiens
gaagactctgattctctgagactgaggagagatgtcttaccagcagcagcagtgcaagcagccctgccagccacctcctgtgtgccccacgccaaagtgcccagagccatgtccacccccgaagtgccctgagccttacctgcctcctccttgtccacctgagcattgcccacctccaccatgccaggataaatgccctcctgtgcaaccatacccaccctgccagcagaagtatccacccaagagcaagtaacatcactagaattcatcaggaccatgaaacaacaagatccagtggctcttcttactcccaggactccatcatcttcccttcagctgtagtgggaggctgcatcttccctaacctctgtctggcttgagcgttgacagagaaaaggcttagttctgaaaaccgatatgttgttggaagatgagcagccagatcactgcctaatctcgctttgctgtctgtgatgtagatggtggttcctatcctgagagcaagtgtgtttattcttttgcttctccccaataaagcacatgtttcatggtcaagcccaaaaaaaaaaaaaaaaaaaaa

SEQ ID NO: 4328 - protein, 73 aa, Homo sapiens
MSYQQQQCKQPCQPPPVCPTPKCPEPCPPPKCPEPYLPPPCPPEHCPPPPCQDKCPPVQPYPPCQQKYPPKSK

SEQ ID NO: 4329 - DNA, 1175 bp, Homo sapiens
atggaactattttacttaatccttagtaaccttgtacagaggcagcagcgggaaacgctgggcggaggagaggggagggggccacaggctgcccggacggcgcaagcgcatcgcggcgaggcgcgcacgcaacccgcaatccggggacccgcgggcggctcgtcccttcccccacccccagccgccgccgccgcccgcgcttcgcaacaaagccggctgcggagccatggtccacggcgcccgcccgcgaccccgccgccccgcatggtagccggaacgtctctcccttaccagccttcgcttcctggtgcccagctcttaggaccgtgtgtgactctggccttctaccgagacaacagagaaacgcacagcaactcgcatggaggaatcggcgaaatggctccgaccgcggcgctagggggcggggccagcgagcggtgttgaaagcagcaggggcctagaagacattaaaccgataccacagaaatacaaaggatcattagagactattatgaacaactatatgccaacaaattggaaaccaaatggaaatggataaattcctgaacagatacaacttaccaaaattggaccaagaagaaatagaaaacctgaaaagaccaactatgagtaatgagattaaatcagtaatatagagtctcccatcaaagaaaagtccaggccctgatggcttcactgctgaattctactgaacagttaaagaagaactcataccagttctcaaactcatcctgtgagggcagcattaccctgataccaaaactagatatggacacaagaaaaaaaatctataggccagtatccctgatgaacatagatgcaagaatcctcaacaagaccaggtgtggtggttcatgcctgtaatcccagcactttgggaggccaaggcaggtggatcacctgaggtcaggaatttgagaccagcctggccaacatggcaaaaccctgtctgtactaaaaatacaaaaattagccgggcaaggtggcgtgtgcctgtaatcctagctacttgggaggctgaggcaggagaattgcttgaacctggagggaggaggggcagaagttgcagcgagctcagatcgtcccactgcactccagcctgggtgacagagtgagactccatctcaaaataagtaaataaataaagagactca

SEQ ID NO: 4330 - protein, 147 aa, Homo sapiens
MELFYLILSNLVQRQQRETLGGGEGRGPQAARTAQAHRGEARTQPAIRGPAGGSSLPPPPAAAAARASQQSRLRSHGPRRPPATPPPRMVAGTSLPYQPSLPGAQLLGPCVTLAFYRDNRETHSNSHGGIGEMAPTAALGGGASERC

SEQ ID NO: 4331 - DNA, 1175 bp, Homo sapiens
atggaactattttacttaatccttagtaaccttgtacagaggcagcagcgggaaacgctgggcggaggagaggggagggggccacaggctgcccggacggcgcaagcgcatcgcggcgaggcgcgcacgcaacccgcaatccggggacccgcgggcggctcgtcccttcccccacccccagccgccgccgccgcccgcgcttcgcaacaaagccggctgcggagccatggtccacgccgcccgcccgcgaccccgccgccccgcatggtagccggaacgtctctcccttaccagccttcgcttcctggtgcccagctcttaggaccgtgtgtgactctggccttctaccgagacaacagagaaacgcacagcaactcgcatggaggaatcggcgaaatggctccgaccgcggcgctagggggcggggccagcgagcggtgttgaaagcagcaggggcctagaagacattaaaccgataccacagaaatacaaaggatcattagagactattatgaacaactatatgccaacaaattggaaaccaaatggaaatggataaattcctgaacagatacaacttaccaaaattggaccaagaagaaatagaaaacctgaaaagaccaactatgagtaatgagattaaatcagtaatatagagtctcccatcaaagaaaagtccaggccctgatggcttcactgctgaattctactgaacagttaaagaagaactcataccagttctcaaactcatcctgtgagggcagcattaccctgataccaaaactagatatggacacaagaaaaaaaatctataggccagtatccctgatgaacatagatgcaagaatcctcaacaagaccaggtgtggtggttcatgcctgtaatcccagcactttgggaggccaaggcaggtggatcacctgaggtcaggaatttgagaccagcctggccaacatggcaaaaccctgtctgtactaaaaatacaaaaattagccgggcaaggtggcgtgtgcctgtaatcctagctacttgggaggctgaggcaggagaattgcttgaacctggagggaggaggggcagaagttgcagcgagctcagatcgtcccactgcactccagcctgggtgacagagtgagactccatctcaaaataagtaaataaataaagagactca

SEQ ID NO: 4332 - protein, 147 aa, Homo sapiens; identical to SEQ ID NO: 4330

SEQ ID NO: 4333 - DNA, 279 bp, Homo sapiens
atgaaaaaaggtttaatggtctggaaagaagatcaaaccagccacaacattcccttaagtgaagctgcaaacgctgatgcaggagatatagcaagttatccagaagatttggctaaggttgttgatgaatgtggctacactgaacaacagattttcagtgtagatgaaacagcgttacactggaaaaagatgccatctaaaactttcatagctagagaggagaaggcaatgtctggattcaaagctccaaaggacaacctgactcttgataggggataa

SEQ ID NO: 4334 - protein, 92 aa, Homo sapiens
MKKGLMVWKEDQTSHNIPLSEAANADAGDIASYPEDLAKVVDECGYTEQQIFSVDETALHWKKMPSKTFIAREEKAMSGFKAPKDNLTLDRG

SEQ ID NO: 4335 - DNA, 339 bp, Homo sapiens
atggagtgggaaggtagttttcccttggagtgggctgccccgcggctaggttctcctccgtccgaccggccccagctaaactccgcatcattcagctggtggatggcctgctggcgtctgccggtgccggtcggtgtgcccttccaccggtatgttcctctcgacgtccagccgcttgtgtgttcctctggtgtgtttcactcaatgtccacccactcgtgtttctacccactagggcaccggggatttataggcacaggatgggggcgtggagggccagagtcgtcttggaaaatggaagatttgggcacgagaacagaaatgcccgtcctcacctag

SEQ ID NO: 4336 - protein, 112 aa, Homo sapiens [sequence omitted]

SEQ ID NO: 4337 - DNA, 583 bp, Homo sapiens
ttcgggaggcgggggaggaaagcggccggcgagcgctggctgacattttcctgcccggaaggatgcatggcccggggtctcctgcacctgagggtgggcgggaggcggccccgcgggttgtgttgctggaaaaaggggtctcgatccagaccccaagagagggttcttgggtctacttcagggaagaattggaggcgagtcacagagcgcagtgaaggaagcaagtttattggaatctactccgttagagagtgcaagtcctcagactgcaggaggaggaactcccgtccttcggtagtgtcactacttagaggcagctgtgaggagctgtgattaatcgtggaatgtgctgatgtgcccactaaaggtaggggctgttggtgcactaatgaccattaatccttcaacctaagcctgcgcattgacgttatctctgagtagagggctgggccgggctcggtggccacgtctgtaatcccagcactgtgggaggccggacaggagtctcccttgagcccaggagttcgagaccagcctgggcaacatactgagatgccatctatttaaaaaaaaaaaaaaaaaa

SEQ ID NO: 4338 - protein, 88 aa, Homo sapiens
MARGLLHLRVGGRRPRGLCCWKKGSRSRPQERVLGSTSGKNWRRVTERSEGSKFIGIYSVRECKSSDCRRRNSRPSVVSLLRGSCEEL

SEQ ID NO: 4339 - DNA, 1379 bp, Homo sapiens
gcgagcgctggctgacattttcctgcccggaaggatgcatggcccggggtctcctgcacctgagggtgggcgggaggcggccccgcgggttgtgttgctggaaaaaggggtctcgatccagaccccaagagagggttcttgggtctacttcagggaagaattggaggcgagtcacagagcgcagtgaaggaagcaagtttattggaatctactccgttagagagtgcaagtcctcagactgcaggaggaggaactcccgtccttcggtagtgtcactacttagaggcagctgtgaggagctgtgattaatcgtggaatgtgctgatgtgcccactaaagatgcctggtaagcagtggctcctctaacaagtgggcagcttggaactgggaacgagagagccaccgaaacagaatgagggagacaaagaagtgggcatcacccttaactccacaagggcttcccaagggcgctgtaccgtacgcaggcccaggacgaactttatttctcgccccagcatcgctgtccttgtcggtgagaccctggctttagggcagacaggaccacgtttcataagttcatgctgtcccagcagaggaataacgccagaaagtgttccagtacaaccagagaaagagagtccatgagaaatctgcccttgtgaagttggaatcccctcaacctcaccccgctgacttgaatgaagcgactgagacgggctatgatggagcagatccggttgctcgaccttctcccttgcaccaacacatgtagttaatagttactggacatgcatattcagtgggttccaggtaccaaacttgtattgaatggtatgtgccagacaccgtcttgagatctggagaataaaaaaataaaaaaataaaaacgagacatccagagcacagtagccttgcggtcttcctggaactagagaaaattcagcccttctgctccttgggaagctatgtttgggaaaaaaaaaaaaagagagagagagagactccaaagagtttgttattaaatttaagttcaaactaggtgtatatagtacaaaagttcttaccatgcatttaatcttaaaatgtgctgatatctagaaccctaaaaccctgcacttttttattgcctcttacattattattttggtcatgtatgaaatatatcaggcatctctcggtacaggtgaaatgctacatgttctaaactaaggaataagtgcattattataatgtcttccttggccaaactgtataaatccccccctccgcccgccccggccaacatcccttccctgcttttttttttctttctttcctagtgcttaccttcacctaaaatgtcctatatttttactttttttttctggttattttctttc

SEQ ID NO: 4340 - protein, 88 aa, Homo sapiens; identical to SEQ ID NO: 4338

SEQ ID NO: 4341 - DNA, 1580 bp, Homo sapiens
tttggggtcaagtttgaggcagttgtaactgtactgagtttagttttgctaataatggtattctacgtgtgtcagcctcgtgtggacttctgtaatgactaatggatatgtttatatcctgagcatttgctgtaggaattttaaatgcaatcccaaaactcaagattaccttatttggagaaatattcgtgttactatgtttaaaatttaatagaaccatattttacctttcactttgggactcgcacaggatgtttgcagctcttgatatacaggaactagaacgtgtcttttaagagcatgcggttttataattacgtggaagtatgctacgcaagggaaaaaagcctcttgctagtgttaagggtcttcataaacagaaaccgcaaggaacctgggatctgacagctgttggaggaatgcctgtgaggaaggaggaggaacagaagaatgctttgatgtcttaaatggtacatccaaacttaagtgaaatagagctgtgaggacattttggggagaagtgacctagataagcactgactgttgcattcatctctcttcttgctgattgtgatgatttcctgtgccatagccattcaaagtctgccaaaaaaggccttgcctcctggatggcatttttgaacccaccctgggccagaggggagcccacttctttgaagacagaaacacaggactggcaacatttaccataagctgactgagcagccattgggccttgagtgaacattggtggtagccaggcagtacttgtctcagtacttgcctcaggcctggggtgtcggtgaccacagggagagcatccatctgcttgaggaaaggagaacaaagaaaataaagggcttaatcttgcacttgattgccagctcagccatagtagaatacagcaccaagtaaattcctaaggatcctgattccaggtcctggctcccagatgacattttaggacttgtcttgggcttagggggagctcgtcatactgaagggaaaaacacaagcctggctggatttgccaccagctgaataaagagtgcttgggccttgagtgaacattggcaatagccaaggagtggtcaccatggaccttaggcaagaaacccggtgccgtgctggctttggatctgacccagcataatctcactggtattttacttcttgtccatttactttttagtttatcatacacaccatgtttactagtactaaaactgtcttaaaatattgcaattttgaccctttttctaattgacctttatgtttttacaagcacattttattacatatgaatgagactttactatgttatatgtaactcttaattctgtaaataatagattgcttatctgaaatatagctgatatttgtttcttaattatttggctattccctatatgttatactctactaaagatcatgggatttagattcagaaaacttacttcctagctcttattatttctgtgatcttgcaaaagaaaacaaaaatgaaccattgtttttttatctgtaacaggaaatgtacttcacaggattgtaatgagaattaaattagataatataca

SEQ ID NO: 4342 - protein, 46 aa, Homo sapiens [sequence omitted]

SEQ ID NO: 4343 - DNA, 1580 bp, Homo sapiens; identical to SEQ ID NO: 4341

SEQ ID NO: 4344 - protein, 46 aa, Homo sapiens [sequence omitted]

SEQ ID NO: 4345 - DNA, 4581 bp, Homo sapiens
gcacttttaccggccgggccttagagcgcagcctgtagccgggcgccatctttgacgctggcagtcttggttttctgctagtgctgctgctgctgggaggacgacggacggcagcggccaagcaagaagaaagacgtggcagcaagcgggagtcggggatagtgtcatcggttcggtgatgctttttaggatttggggatattccctgcccaaaaaattcctggaaaattgactagtattaagtgcataatagattggaactcagtgaagacacagacgttcctgttgagagcaaccagctaatgattacagtttaaagacaatttctgtgatcaagttgtcatttggaagattaaacccatttcacgaggacttggagcctggtccttgctttgaggaagcagtggcttgtttcaagaagccacttctgatctaagaatctacccagcatgcctaatcaaggagaagactgctatttttttttctattctacatgtaccaaaggtgacagctgcccattccgtcactgtgaagctgcactaggcaatgaaactgtttgcacattatggcaagaagggcgctgttttcgacgggtgtgcaggtttcggcacatggagattgataaaaaacgcagtgaaattccttgttattgggaaaatcagccaacaggatgtcaaaaattaaactgcgttttccatcacaatagaggacgatatgttgatggccttttcctacctccgagcaaaagtgtgttgcccactgtgcctgagtcaccagaagaggaagtgaaggctagccaactttcagttcagcagaacaaattgtctgtccagtccaatacttcccctcagctgcggagcgttatgaaagtagaaagttccgaaaatgttcctagccccaagcatccaccagttgtaattaatgctgcagatgatgatgaagatgatgatgatcagttttctgaggaaggtgatgaaaccaaaacacctaccctgcaaccaactcctgaagttcacaatggattacgagtgacttctgtccggaaacctgcagtcaatataaagcaaggtgaatgtttgcattttggaataaaaactcttgaggaaattaagtcaaagaaaatgaaggaaaaatctgaggagcaaggtgagggttcttcaggagtttccagtcttttactccaccctgagcctgttccaggtcctgaaaaagaaaatgtcaggactgtggtgaggacagtaactctctccaccaaacaaggagaagaacccttggttagattgggccttactgagacactggggaaacgaaaattttcgacaggcggtgacagtgatcctccattaaagcgtagcctggcacagaggctagggaagaaagttgaagctccagaaactaacactgacgaaacaccaaagaaagctcaagtttccaagtctcttaaggagcgattaggcatgtcagctgatccaaataatgaggacgcaacagataaagttaataaagttggtgagatccatgtgaagacattagaagaaatgcttcttgaaagagccagtcagaaacatggggaatcgcaaactaaactcaagacagaaggaccttcaaaaactgatgattctacttcaggagcaagaagctcctccactatccgtatcaaaaccttctctgaggtcctggctgaagaagaacataggcagcaggaagcagagagacaaaaaagcaaaaaggatacaacttgcatcaagctaaagactgatagtgaaattaaaaaaacagtagttttgccacccattgttgccagcaaaggacaatcagaggagcctgcaggtaaaacaaagtccatgcaggaggtgcacatgaagacggtggaagaaattaaactggagaaggcactgagggtgcagcagagctctgagagcagcaccagctccccgtctcaacatgaggccactccaggggcaaggttgctgctgcgaatcaccaaaagaacatggaggaaagaagagaagaaacttcaggaaggaaatgaagttgattttctgagccgtgttagaatggaagctacagaggcttcagttgagaccacaggagttgacatcactaaaattcaagtcaagagatgtgagatcatgagagagacgcgcatgcagaaacagcaggagagggaaaaatcagtcttgacacctcttcagggagatgtagcctcttgcaatacccaagtggcagagaaaccagtgctcactgctgtgccaggaatcacatggcacctgaccaagcagcttcccacaaagtcatcccagaaggtggaggtagaaacctcagggattgcagactcattattgaatgtgaaatggtcagcacagaccttggaaaaaaggggtgaagctaaacccacagtgaacgtgaagcaatctgtggttaaagttgtgtcatcccccaaattggccccaaaacgtaaggcagtggagatgcaccctgctgtcactgccgctgtgaagccactcagctccagcagcgtcctacaggaacccccagccaaaaaggcagctgtggatgctgttgtcctgcttgactctgaggacaaatcagtcactgtgcctgaagcagaaaatcctagagacagtcttgtgctgcctccaacccagtcctcttcagattcctcacccccggaggtgtctggcccttcctcatcccaaatgagcatgaaaactcgccgactcagctctgcctcaacaggaaagcccccactctctgtggaggatgattttgagaaactaacatgggagatttcaggaggcaaattggaagctgagattgacctggatcctgggaaagatgaagatgaccttccgcttgagctatgagaaatgattgatagctgaaggtggtagtgaggacactttaaaaaaaaatcgccaaaaaactggacttagtttcatctattgtaacatttacctgagatgatcatttctttagtctagaatttgccccaaatcagaagtatacctctgaattatctgtatgtgtcctggattccttggggtcagatttttaaagttactttataaccattttgtccatttgatgccattgtttatcatcttttgagaaaaaagttctgtcatacccttctctccacaaaaaagagactgagggggagatcaagtgaaagggtgcaagcaaacttagtgactccttgaggtgtttgtcagttttggcttttttctcctttgttgtattctttatgtattgtcttaatgtacttaatattacctgagtttgaaatggatgaagacagctgctaccattaagggccaaattttatgctaccactaaacaaaaatacccactcagtctgtgttaaattgtatgtctttttaaaggtatttagagattcaactaagctttaaagagggctgagcaactcaggaagcctgtaatgtgggcataactctttggacctgatcttgatgcttctgctgctctgttggcctctgaagagcaatatctaatttattattactgtaattttttaaaaggctttaaagtgcctcaggggtcccctgaaactaattttctatttctgggattccctggattcattatatgagatggtgacatgattagaggaattcttttttagtatgaaaattgttccttttcttcttcagtacttgcctccttgctggcattgaattaacacagggacaaaatttggttaattttttatttctaattctcccaacaaacccctgttgcccagtatttatgtggtggcctttaaccacctgagggaaaaaatgagcttattcaagctgccaatatttatctatgggctgtagcagtacactgaattgtactgtgccagggatattgagatgctctgggggtgtattgtatacctgccagttttcttcatttctgaattgggttttctcttcttgatgttggtttccttcatatcacctcaaggtttagatttgtgaaggaataagcatgatggaaataatagtcttgaaaggagatatgttgtatataatcaggaggaagaggaaggcaggacttactcattttgatattttgctgtaggtggccagttttgtttctcatagggaaatctgacccacctgtcatgttggctcctaaggaactgctgttgtaagcggctcatcaagagttgaacttcaagtagccttgttgggaatatggaaaaggaagaaagccacaggactgcccattcagtcttgttaagattgggatgattctgcacaagcaaaaatgactcgaaatttatgtatcgacacacctctaccaatccatcttcagctgactgaatgttgtatgatagcccttctccaaagcaggggtagaatgttcaggtttcaccacggattttctacttatttcgcttttggaatcagcttacagattccaggtcccttttgtatatattctttattcttttgcttttttaaaaaataaacttgtattagtcaatgtttcgtgttccgcattatttgaaccatttgcccttacagaaagagaaatacttgtttgtgttttaaataaaactgatgt

SEQ ID NO: 4346 - protein, 805 aa, Homo sapiens
MPNQGEDCYFFFYSTCTKGDSCPFRHCEAALGNETVCTLWQEGRCFRRVCRFRHMEIDKKRSEIPCYWENQPTGCQKLNCVFHHNRGRYVDGLFLPPSKSVLPTVPESPEEEVKASQLSVQQNKLSVQSNTSPQLRSVMKVESSENVPSPKHPPVVINAADDDEDDDDQFSEEGDETKTPTLQPTPEVHNGLRVTSVRKPAVNIKQGECLHFGIKTLEEIKSKKMKEKSEEQGEGSSGVSSLLLHPEPVPGPEKENVRTVVRTVTLSTKQGEEPLVRLGLTETLGKRKFSTGGDSDPPLKRSLAQRLGKKVEAPETNTDETPKKAQVSKSLKERLGMSADPNNEDATDKVNKVGEIHVKTLEEMLLERASQKHGESQTKLKTEGPSKTDDSTSGARSSSTIRIKTFSEVLAEEEHRQQEAERQKSKKDTTCIKLKTDSEIKKTVVLPPIVASKGQSEEPAGKTKSMQEVHMKTVEEIKLEKALRVQQSSESSTSSPSQHEATPGARLLLRITKRTWRKEEKKLQEGNEVDFLSRVRMEATEASVETTGVDITKIQVKRCEIMRETRMQKQQEREKSVLTPLQGDVASCNTQVAEKPVLTAVPGITWHLTKQLPTKSSQKVEVETSGIADSLLNVKWSAQTLEKRGEAKPTVNVKQSVVKVVSSPKLAPKRKAVEMHPAVTAAVKPLSSSSVLQEPPAKKAAVDAVVLLDSEDKSVTVPEAENPRDSLVLPPTQSSSDSSPPEVSGPSSSQMSMKTRRLSSASTGKPPLSVEDDFEKLTWEISGGKLEAEIDLDPGKDEDDLPLEL

SEQ ID NO: 4347 - DNA, 1442 bp, Homo sapiens
ttgttttgtttttgaggagataactaacccttgctgtctccagtctgacaaaggttatttgaatggacttaatctcccagtagttgggagatgttttaaaaacacatgctgtgtttgaattgtggctgagaggttttcttggcaatgtgaggaggaaaattttttctgcctcattattattaattcatggattgagtgttggttcgacctacaggcataatagattggaactcagtgaagacacagacgttcctgttgagagcaaccagctaatgattacagtttaaagacaatttctgtgatcaagttgtcatttggaagattaaacccatttcacgaggacttggagcctggtccttgctttgaggaagcagtggcttgtttcaagaagccacttctgatctaagaatctacccagcatgcctaatcaaggagaagactgctatttttttttctattctacatgtaccaaaggtgacagctgcccattccgtcactgtgaagctgcactaggcaatgaaactgtttgcacattatggcaagaagggcgctgttttcgacgggtgtgcaggtttcggcacatggagattgataaaaaacgcagtgaaattccttgttattgggaaaatcagccaacaggatgtcaaaaattaaactgcgttttccatcacaatagaggacgatatgttgatggccttttcctacctccgagcaaaagtgtgttgcccactgtgcctgagtcaccagaagaggaagtgaaggctagccaactttcagttcagcagaacaaattgtctgtccagtccaatacttcccctcagctgcggagcgttatgaaagtagaaagttccgaaaatgttcctagccccaagcatccaccagttgtaattaatgctgcagatgatgatgaagatgatgatgatcagttttctgaggaaggtgatgaaaccaaaacacctaccctgcaaccaactcctgaagttcacaatggattacgagtgacttctgtccggaaacctgcagtcaatataaagcaaggtgaatgtttgcattttggaataaaaactcttgaggaaattaagtcaaagaaaatgaaggaaaaatctgaggagcaaggaactgctgttgtaagcggctcatcaagagttgaacttcaagtagccttgttgggaatatggaaaaggaagaaagccacaggactgcccattcagtcttgttaagattgggatgattctgcacaagcaaaaatgactcgaaatttatgtatcgacacacctctaccaatccatcttcagctgactgaatgttgtatgatagcccttctccaaagcaggggtagaatgttcaggtttcaccacggattttctacttatttcgcttttggaatcagcttacagattccaggtcccttttgtatatattctttattcttttgctttttt

SEQ ID NO: 4348 - protein, 266 aa, Homo sapiens
MPNQGEDCYFFFYSTCTKGDSCPFRHCEAALGNETVCTLWQEGRCFRRVCRFRHMEIDKKRSEIPCYWENQPTGCQKLNCVFHHNRGRYVDGLFLPPSKSVLPTVPESPEEEVKASQLSVQQNKLSVQSNTSPQLRSVMKVESSENVPSPKHPPVVINAADDDEDDDDQFSEEGDETKTPTLQPTPEVHNGLRVTSVRKPAVNIKQGECLHFGIKTLEEIKSKKMKEKSEEQGTAVVSGSSRVELQVALLGIWKRKKATGLPIQSC

SEQ ID NO: 4349 - DNA, 5086 bp, Homo sapiens
gctagtgctgctgctgctgggaggacgacggacggcagcggccaagcaagaagaaagacgtggcagcaagcgggagtcggggatagtgtcatcggttcgggtcccactactttggagcttgtctcaaactccacatacagaaagccaccaaccttattccggtatcctacacccattccccaccctcattacactcccacccctggccctcagcatgggagtcaagagcaacagggacacttccgtactccttgtaggattggtgaaaccgtaatgaagaacacccctaaactcccataattggtgcggattcctgtggggaaggcctatactgttgacatcttccaggccatctcaaggttctggaccttgagaaggaggctgtggaactagagatagtgatgctttttaggatttggggatattccctgcccaaaaaattcctggaaaattgactagtattaagtctatggaagatggattttttttcatgatcctttgactctcaagttcatctttaaatgaactcttttttttgttttgtttttgaggagataactaacccttgctgtctccagtctgacaaaggttatttgaatggacttaatctcccagtagttgggagatgttttaaaaacacatgctgtgtttgaattgtggctgagaggttttcttggcaatgtgaggaggaaaattttttctgcctcattattattaattcatggattgagtgttggttcgacctacaggcataatagattggaactcagtgaagacacagacgttcctgttgagagcaaccagctaatgattacagtttaaagacaatttctgtgatcaagttgtcatttggaagattaaacccatttcacgaggacttggagcctggtccttgctttgaggaagcagtggcttgtttcaagaagccacttctgatctaagaatctacccagcatgcctaatcaaggagaagactgctatttttttttctattctacatgtaccaaaggtgacagctgcccattccgtcactgtgaagctgcactaggcaatgaaactgtttgcacattatggcaagaagggcgctgttttcgacgggtgtgcaggtttcggcacatggagattgataaaaaacgcagtgaaattccttgttattgggaaaatcagccaacaggatgtcaaaaattaaactgcgttttccatcacaatagaggacgatatgttgatggccttttcctacctccgagcaaaagtgtgttgcccactgtgcctgagtcaccagaagaggaagtgaaggctagccaactttcagttcagcagaacaaattgtctgtccagtccaatacttcccctcagctgcggagcgttatgaaagtagaaagttccgaaaatgttcctagccccaagcatccaccagttgtaattaatgctgcagatgatgatgaagatgatgatgatcagttttctgaggaaggtgatgaaaccaaaacacctaccctgcaaccaactcctgaagttcacaatggattacgagtgacttctgtccggaaacctgcagtcaatataaagcaaggtgaatgtttgcattttggaataaaaactcttgaggaaattaagtcaaagaaaatgaaggaaaaatctgaggagcaaggtgagggttcttcaggagtttccagtcttttactccaccctgagcctgttccaggtcctgaaaaagaaaatgtcaggactgtggtgaggacagtaactctctccaccaaacaaggagaagaacccttggttagattgggccttactgagacactggggaaacgaaaattttcgacaggcggtgacagtgatcctccattaaagcgtagcctggcacagaggctagggaagaaagttgaagctccagaaactaacactgacgaaacaccaaagaaagctcaagtttccaagtctcttaaggagcgattaggcatgtcagctgatccaaataatgaggacgcaacagataaagttaataaagttggtgagatccatgtgaagacattagaagaaatgcttcttgaaagagccagtcagaaacatggggaatcgcaaactaaactcaagacagaaggaccttcaaaaactgatgattctacttcaggagcaagaagctcctccactatccgtatcaaaaccttctctgaggtcctggctgaagaagaacataggcagcaggaagcagagagacaaaaaagcaaaaaggatacaacttgcatcaagctaaagactgatagtgaaattaaaaaaacagtagttttgccacccattgttgccagcaaaggacaatcagaggagcctgcaggtaaaacaaagtccatgcaggaggtgcacatgaagacggtggaagaaattaaactggagaaggcactgagggtgcagcagagctctgagagcagcaccagctccccgtctcaacatgaggccactccaggggcaaggttgctgctgcgaatcaccaaaagaacatggaggaaagaagagaagaaacttcaggaaggaaatgaagttgattttctgagccgtgttagaatggaagctacagaggcttcagttgagaccacaggagttgacatcactaaaattcaagtcaagagatgtgagatcatgagagagacgcgcatgcagaaacagcaggagagggaaaaatcagtcttgacacctcttcagggagatgtagcctcttgcaatacccaagtggcagagaaaccagtgctcactgctgtgccaggaatcacatggcacctgaccaagcagcttcccacaaagtcatcccagaaggtggaggtagaaacctcagggattgcagactcattattgaatgtgaaatggtcagcacagaccttggaaaaaaggggtgaagctaaacccacagtgaacgtgaagcaatctgtggttaaagttgtgtcatcccccaaattggccccaaaacgtaaggcagtggagatgcaccctgctgtcactgccgctgtgaagccactcagctccagcagcgtcctacaggaacccccagccaaaaaggcagctgtggatgctgttgtcctgcttgactctgaggacaaatcagtcactgtgcctgaagcagaaaatcctagagacagtcttgtgctgcctccaacccagtcctcttcagattcctcacccccggaggtgtctggcccttcctcatcccaaatgagcatgaaaactcgccgactcagctctgcctcaacaggaaagcccccactctctgtggaggatgattttgagaaactaacatgggagatttcaggaggcaaattggaagctgagattgacctggatcctgggaaagatgaagatgaccttccgcttgagctatgagaaatgattgatagctgaaggtggtagtgaggacactttaaaaaaaaatcgccaaaaaactggacttagtttcatctattgtaacatttacctgagatgatcatttctttagtctagaatttgccccaaatcagaagtatacctctgaattatctgtatgtgtcctggattccttggggtcagatttttaaagttactttataaccattttgtccatttgatgccattgtttatcatcttttgagaaaaaagttctgtcatacccttctctccacaaaaaagagactgagggggagatcaagtgaaagggtgcaagcaaacttagtgactccttgaggtgtttgtcagttttggcttttttctcctttgttgtattctttatgtattgtcttaatgtacttaatattacctgagtttgaaatggatgaagacagctgctaccattaagggccaaattttatgctaccactaaacaaaaatacccactcagtctgtgttaaattgtatgtctttttaaaggtatttagagattcaactaagctttaaagagggctgagcaactcaggaagcctgtaatgtgggcataactctttggacctgatcttgatgcttctgctgctctgttggcctctgaagagcaatatctaatttattattactgtaattttttaaaaggctttaaagtgcctcaggggtcccctgaaactaattttctatttctgggattccctggattcattatatgagatggtgacatgattagaggaattcttttttagtatgaaaattgttccttttcttcttcagtacttgcctccttgctggcattgaattaacacagggacaaaatttggttaattttttatttctaattctcccaacaaacccctgttgcccagtatttatgtggtggcctttaaccacctgagggaaaaaatgagcttattcaagctgccaatatttatctatgggctgtagcagtacactgaattgtactgtgccagggatattgagatgctctgggggtgtattgtatacctgccagttttcttcatttctgaattgggttttctcttcttgatgttggtttccttcatatcacctcaaggtttagatttgtgaaggaataagcatgatggaaataatagtcttgaaaggagatatgttgtatataatcaggaggaagaggaaggcaggacttactcattttgatattttgctgtaggtggccagttttgtttctcatagggaaatctgacccacctgtcatgttggctcctaaggaactgctgttgtaagcggctcatcaagagttgaacttcaagtagccttgttgggaatatggaaaaggaagaaagccacaggactgcccattcagtcttgttaagattgggatgattctgcacaagcaaaaatgactcgaaatttatgtatcgacacacctctaccaatccatcttcagctgactgaatgttgtatgatagcccttctccaaagcaggggtagaatgttcaggtttcaccacggattttctacttatttcgcttttggaatcagcttacagattccaggtcccttttgtatatattctttattcttttgcttttttaaaaaataaacttgtattagtcaatgtttcgtgttccgcattatttgaaccatttgcccttacagaaagagaaatacttgtttgtgttttaaataaaactgatgt

SEQ ID NO: 4350 - protein, 805 aa, Homo sapiens; identical to SEQ ID NO: 4346

SEQ ID NO: 4351 - DNA, 4338 bp, Homo sapiens
ctccacctcccagattcaagcaattctcctgcctcagcctcctgagtagctgggattacaggattacagtttaaagacaatttctgtgatcaagttgtcatttggaagattaaacccatttcacgaggacttggagcctggtccttgctttgaggaagcagtggcttgtttcaagaagccacttctgatctaagaatctacccagcatgcctaatcaaggagaagactgctatttttttttctattctacatgtaccaaaggtgacagctgcccattccgtcactgtgaagctgcactaggcaatgaaactgtttgcacattatggcaagaagggcgctgttttcgacgggtgtgcaggtttcggcacatggagattgataaaaaacgcagtgaaattccttgttattgggaaaatcagccaacaggatgtcaaaaattaaactgcgttttccatcacaatagaggacgatatgttgatggccttttcctacctccgagcaaaagtgtgttgcccactgtgcctgagtcaccagaagaggaagtgaaggctagccaactttcagttcagcagaacaaattgtctgtccagtccaatacttcccctcagctgcggagcgttatgaaagtagaaagttccgaaaatgttcctagccccaagcatccaccagttgtaattaatgctgcagatgatgatgaagatgatgatgatcagttttctgaggaaggtgatgaaaccaaaacacctaccctgcaaccaactcctgaagttcacaatggattacgagtgacttctgtccggaaacctgcagtcaatataaagcaaggtgaatgtttgcattttggaataaaaactcttgaggaaattaagtcaaagaaaatgaaggaaaaatctgaggagcaaggtgagggttcttcaggagtttccagtcttttactccaccctgagcctgttccaggtcctgaaaaagaaaatgtcaggactgtggtgaggacagtaactctctccaccaaacaaggagaagaacccttggttagattgggccttactgagacactggggaaacgaaaattttcgacaggcggtgacagtgatcctccattaaagcgtagcctggcacagaggctagggaagaaagttgaagctccagaaactaacactgacgaaacaccaaagaaagctcaagtttccaagtctcttaaggagcgattaggcatgtcagctgatccaaataatgaggacgcaacagataaagttaataaagttggtgagatccatgtgaagacattagaagaaatgcttcttgaaagagccagtcagaaacatggggaatcgcaaactaaactcaagacagaaggaccttcaaaaactgatgattctacttcaggagcaagaagctcctccactatccgtatcaaaaccttctctgaggtcctggctgaagaagaacataggcagcaggaagcagagagacaaaaaagcaaaaaggatacaacttgcatcaagctaaagactgatagtgaaattaaaaaaacagtagttttgccacccattgttgccagcaaaggacaatcagaggagcctgcaggtaaaacaaagtccatgcaggaggtgcacatgaagacggtggaagaaattaaactggagaaggcactgagggtgcagcagagctctgagagcagcaccagctccccgtctcaacatgaggccactccaggggcaaggttgctgctgcgaatcaccaaaagaacatggaggaaagaagagaagaaacttcaggaaggaaatgaagttgattttctgagccgtgttagaatggaagctacagaggcttcagttgagaccacaggagttgacatcactaaaattcaagtcaagagatgtgagatcatgagagagacgcgcatgcagaaacagcaggagagggaaaaatcagtcttgacacctcttcagggagatgtagcctcttgcaatacccaagtggcagagaaaccagtgctcactgctgtgccaggaatcacatggcacctgaccaagcagcttcccacaaagtcatcccagaaggtggaggtagaaacctcagggattgcagactcattattgaatgtgaaatggtcagcacagaccttggaaaaaaggggtgaagctaaacccacagtgaacgtgaagcaatctgtggttaaagttgtgtcatcccccaaattggccccaaaacgtaaggcagtggagatgcaccctgctgtcactgccgctgtgaagccactcagctccagcagcgtcctacaggaacccccagccaaaaaggcagctgtggatgctgttgtcctgcttgactctgaggacaaatcagtcactgtgcctgaagcagaaaatcctagagacagtcttgtgctgcctccaacccagtcctcttcagattcctcacccccggaggtgtctggcccttcctcatcccaaatgagcatgaaaactcgccgactcagctctgcctcaacaggaaagcccccactctctgtggaggatgattttgagaaactaacatgggagatttcaggaggcaaattggaagctgagattgacctggatcctgggaaagatgaagatgaccttccgcttgagctatgagaaatgattgatagctgaaggtggtagtgaggacactttaaaaaaaaatcgccaaaaaactggacttagtttcatctattgtaacatttacctgagatgatcatttctttagtctagaatttgccccaaatcagaagtatacctctgaattatctgtatgtgtcctggattccttggggtcagatttttaaagttactttataaccattttgtccatttgatgccattgtttatcatcttttgagaaaaaagttctgtcatacccttctctccacaaaaaagagactgagggggagatcaagtgaaagggtgcaagcaaacttagtgactccttgaggtgtttgtcagttttggcttttttctcctttgttgtattctttatgtattgtcttaatgtacttaatattacctgagtttgaaatggatgaagacagctgctaccattaagggccaaattttatgctaccactaaacaaaaatacccactcagtctgtgttaaattgtatgtctttttaaaggtatttagagattcaactaagctttaaagagggctgagcaactcaggaagcctgtaatgtgggcataactctttggacctgatcttgatgcttctgctgctctgttggcctctgaagagcaatatctaatttattattactgtaattttttaaaaggctttaaagtgcctcaggggtcccctgaaactaattttctatttctgggattccctggattcattatatgagatggtgacatgattagaggaattcttttttagtatgaaaattgttccttttcttcttcagtacttgcctccttgctggcattgaattaacacagggacaaaatttggttaattttttatttctaattctcccaacaaacccctgttgcccagtatttatgtggtggcctttaaccacctgagggaaaaaatgagcttattcaagctgccaatatttatctatgggctgtagcagtacactgaattgtactgtgccagggatattgagatgctctgggggtgtattgtatacctgccagttttcttcatttctgaattgggttttctcttcttgatgttggtttccttcatatcacctcaaggtttagatttgtgaaggaataagcatgatggaaataatagtcttgaaaggagatatgttgtatataatcaggaggaagaggaaggcaggacttactcattttgatattttgctgtaggtggccagttttgtttctcatagggaaatctgacccacctgtcatgttggctcctaaggaactgctgttgtaagcggctcatcaagagttgaacttcaagtagccttgttgggaatatggaaaaggaagaaagccacaggactgcccattcagtcttgttaagattgggatgattctgcacaagcaaaaatgactcgaaatttatgtatcgacacacctctaccaatccatcttcagctgactgaatgttgtatgatagcccttctccaaagcaggggtagaatgttcaggtttcaccacggattttctacttatttcgcttttggaatcagcttacagattccaggtcccttttgtatatattctttattcttttgcttttttaaaaaataaacttgtattagtcaatgtttcgtgttccgcattatttgaaccatttgcccttacagaaagagaaatacttgtttgtgttttaaataaaactgatgt

SEQ ID NO: 4352 - protein, 805 aa, Homo sapiens; identical to SEQ ID NO: 4346

SEQ ID NO: 4353 - DNA, 4368 bp, Homo sapiens
gcaacctccacctcccagattcaagcaattctcctgcctcagcctcctgagtagctgggattacaggcgcgtactaccatgcctggctaatgattacagtttaaagacaatttctgtgatcaagttgtcatttggaagattaaacccatttcacgaggacttggagcctggtccttgctttgaggaagcagtggcttgtttcaagaagccacttctgatctaagaatctacccagcatgcctaatcaaggagaagactgctatttttttttctattctacatgtaccaaaggtgacagctgcccattccgtcactgtgaagctgcactaggcaatgaaactgtttgcacattatggcaagaagggcgctgttttcgacgggtgtgcaggtttcggcacatggagattgataaaaaacgcagtgaaattccttgttattgggaaaatcagccaacaggatgtcaaaaattaaactgcgttttccatcacaatagaggacgatatgttgatggccttttcctacctccgagcaaaagtgtgttgcccactgtgcctgagtcaccagaagaggaagtgaaggctagccaactttcagttcagcagaacaaattgtctgtccagtccaatacttcccctcagctgcggagcgttatgaaagtagaaagttccgaaaatgttcctagccccaagcatccaccagttgtaattaatgctgcagatgatgatgaagatgatgatgatcagttttctgaggaaggtgatgaaaccaaaacacctaccctgcaaccaactcctgaagttcacaatggattacgagtgacttctgtccggaaacctgcagtcaatataaagcaaggtgaatgtttgcattttggaataaaaactcttgaggaaattaagtcaaagaaaatgaaggaaaaatctgaggagcaaggtgagggttcttcaggagtttccagtcttttactccaccctgagcctgttccaggtcctgaaaaagaaaatgtcaggactgtggtgaggacagtaactctctccaccaaacaaggagaagaacccttggttagattgggccttactgagacactggggaaacgaaaattttcgacaggcggtgacagtgatcctccattaaagcgtagcctggcacagaggctagggaagaaagttgaagctccagaaactaacactgacgaaacaccaaagaaagctcaagtttccaagtctcttaaggagcgattaggcatgtcagctgatccaaataatgaggacgcaacagataaagttaataaagttggtgagatccatgtgaagacattagaagaaatgcttcttgaaagagccagtcagaaacatggggaatcgcaaactaaactcaagacagaaggaccttcaaaaactgatgattctacttcaggagcaagaagctcctccactatccgtatcaaaaccttctctgaggtcctggctgaagaagaacataggcagcaggaagcagagagacaaaaaagcaaaaaggatacaacttgcatcaagctaaagactgatagtgaaattaaaaaaacagtagttttgccacccattgttgccagcaaaggacaatcagaggagcctgcaggtaaaacaaagtccatgcaggaggtgcacatgaagacggtggaagaaattaaactggagaaggcactgagggtgcagcagagctctgagagcagcaccagctccccgtctcaacatgaggccactccaggggcaaggttgctgctgcgaatcaccaaaagaacatggaggaaagaagagaagaaacttcaggaaggaaatgaagttgattttctgagccgtgttagaatggaagctacagaggcttcagttgagaccacaggagttgacatcactaaaattcaagtcaagagatgtgagatcatgagagagacgcgcatgcagaaacagcaggagagggaaaaatcagtcttgacacctcttcagggagatgtagcctcttgcaatacccaagtggcagagaaaccagtgctcactgctgtgccaggaatcacatggcacctgaccaagcagcttcccacaaagtcatcccagaaggtggaggtagaaacctcagggattgcagactcattattgaatgtgaaatggtcagcacagaccttggaaaaaaggggtgaagctaaacccacagtgaacgtgaagcaatctgtggttaaagttgtgtcatcccccaaattggccccaaaacgtaaggcagtggagatgcaccctgctgtcactgccgctgtgaagccactcagctccagcagcgtcctacaggaacccccagccaaaaaggcagctgtggatgctgttgtcctgcttgactctgaggacaaatcagtcactgtgcctgaagcagaaaatcctagagacagtcttgtgctgcctccaacccagtcctcttcagattcctcacccccggaggtgtctggcccttcctcatcccaaatgagcatgaaaactcgccgactcagctctgcctcaacaggaaagcccccactctctgtggaggatgattttgagaaactaacatgggagatttcaggaggcaaattggaagctgagattgacctggatcctgggaaagatgaagatgaccttccgcttgagctatgagaaatgattgatagctgaaggtggtagtgaggacactttaaaaaaaaatcgccaaaaaactggacttagtttcatctattgtaacatttacctgagatgatcatttctttagtctagaatttgccccaaatcagaagtatacctctgaattatctgtatgtgtcctggattccttggggtcagatttttaaagttactttataaccattttgtccatttgatgccattgtttatcatcttttgagaaaaaagttctgtcatacccttctctccacaaaaaagagactgagggggagatcaagtgaaagggtgcaagcaaacttagtgactccttgaggtgtttgtcagttttggcttttttctcctttgttgtattctttatgtattgtcttaatgtacttaatattacctgagtttgaaatggatgaagacagctgctaccattaagggccaaattttatgctaccactaaacaaaaatacccactcagtctgtgttaaattgtatgtctttttaaaggtatttagagattcaactaagctttaaagagggctgagcaactcaggaagcctgtaatgtgggcataactctttggacctgatcttgatgcttctgctgctctgttggcctctgaagagcaatatctaatttattattactgtaattttttaaaaggctttaaagtgcctcaggggtcccctgaaactaattttctatttctgggattccctggattcattatatgagatggtgacatgattagaggaattcttttttagtatgaaaattgttccttttcttcttcagtacttgcctccttgctggcattgaattaacacagggacaaaatttggttaattttttatttctaattctcccaacaaacccctgttgcccagtatttatgtggtggcctttaaccacctgagggaaaaaatgagcttattcaagctgccaatatttatctatgggctgtagcagtacactgaattgtactgtgccagggatattgagatgctctgggggtgtattgtatacctgccagttttcttcatttctgaattgggttttctcttcttgatgttggtttccttcatatcacctcaaggtttagatttgtgaaggaataagcatgatggaaataatagtcttgaaaggagatatgttgtatataatcaggaggaagaggaaggcaggacttactcattttgatattttgctgtaggtggccagttttgtttctcatagggaaatctgacccacctgtcatgttggctcctaaggaactgctgttgtaagcggctcatcaagagttgaacttcaagtagccttgttgggaatatggaaaaggaagaaagccacaggactgcccattcagtcttgttaagattgggatgattctgcacaagcaaaaatgactcgaaatttatgtatcgacacacctctaccaatccatcttcagctgactgaatgttgtatgatagcccttctccaaagcaggggtagaatgttcaggtttcaccacggattttctacttatttcgcttttggaatcagcttacagattccaggtcccttttgtatatattctttattcttttgcttttttaaaaaataaacttgtattagtcaatgtttcgtgttccgcattatttgaaccatttgcccttacagaaagagaaatacttgtttgtgttttaaataaaactgatgt

SEQ ID NO: 4354 - protein, 805 aa, Homo sapiens; identical to SEQ ID NO: 4346

SEQ ID NO: 4355 - DNA, 4667 bp, Homo sapiens
cggacggcagcggccaagcaagaagaaagacgtggcagcaagcgggagtcggggatagtgtcatcggttcgggtcccactactttggagcttgtctcaaactccacatacagaaagccaccaaccttattccggtatcctacacccattccccaccctcattacactcccacccctggccctcagcatgggagtcaagagcaacagggacacttccgtactccttgtaggattggtgaaaccgtaatgaagaacacccctaaactcccataattggatttggggatattccctgcccaaaaaattcctggaaaattgactagtattaagtgcataatagattggaactcagtgaagacacagacgttcctgttgagagcaaccagctaatgattacagtttaaagacaatttctgtgatcaagttgtcatttggaagattaaacccatttcacgaggacttggagcctggtccttgctttgaggaagcagtggcttgtttcaagaagccacttctgatctaagaatctacccagcatgcctaatcaaggagaagactgctatttttttttctattctacatgtaccaaaggtgacagctgcccattccgtcactgtgaagctgcactaggcaatgaaactgtttgcacattatggcaagaagggcgctgttttcgacgggtgtgcaggtttcggcacatggagattgataaaaaacgcagtgaaattccttgttattgggaaaatcagccaacaggatgtcaaaaattaaactgcgttttccatcacaatagaggacgatatgttgatggccttttcctacctccgagcaaaagtgtgttgcccactgtgcctgagtcaccagaagaggaagtgaaggctagccaactttcagttcagcagaacaaattgtctgtccagtccaatacttcccctcagctgcggagcgttatgaaagtagaaagttccgaaaatgttcctagccccaagcatccaccagttgtaattaatgctgcagatgatgatgaagatgatgatgatcagttttctgaggaaggtgatgaaaccaaaacacctaccctgcaaccaactcctgaagttcacaatggattacgagtgacttctgtccggaaacctgcagtcaatataaagcaaggtgaatgtttgcattttggaataaaaactcttgaggaaattaagtcaaagaaaatgaaggaaaaatctgaggagcaaggtgagggttcttcaggagtttccagtcttttactccaccctgagcctgttccaggtcctgaaaaagaaaatgtcaggactgtggtgaggacagtaactctctccaccaaacaaggagaagaacccttggttagattgggccttactgagacactggggaaacgaaaattttcgacaggcggtgacagtgatcctccattaaagcgtagcctggcacagaggctagggaagaaagttgaagctccagaaactaacactgacgaaacaccaaagaaagctcaagtttccaagtctcttaaggagcgattaggcatgtcagctgatccaaataatgaggacgcaacagataaagttaataaagttggtgagatccatgtgaagacattagaagaaatgcttcttgaaagagccagtcagaaacatggggaatcgcaaactaaactcaagacagaaggaccttcaaaaactgatgattctacttcaggagcaagaagctcctccactatccgtatcaaaaccttctctgaggtcctggctgaagaagaacataggcagcaggaagcagagagacaaaaaagcaaaaaggatacaacttgcatcaagctaaagactgatagtgaaattaaaaaaacagtagttttgccacccattgttgccagcaaaggacaatcagaggagcctgcaggtaaaacaaagtccatgcaggaggtgcacatgaagacggtggaagaaattaaactggagaaggcactgagggtgcagcagagctctgagagcagcaccagctccccgtctcaacatgaggccactccaggggcaaggttgctgctgcgaatcaccaaaagaacatggaggaaagaagagaagaaacttcaggaaggaaatgaagttgattttctgagccgtgttagaatggaagctacagaggcttcagttgagaccacaggagttgacatcactaaaattcaagtcaagagatgtgagatcatgagagagacgcgcatgcagaaacagcaggagagggaaaaatcagtcttgacacctcttcagggagatgtagcctcttgcaatacccaagtggcagagaaaccagtgctcactgctgtgccaggaatcacatggcacctgaccaagcagcttcccacaaagtcatcccagaaggtggaggtagaaacctcagggattgcagactcattattgaatgtgaaatggtcagcacagaccttggaaaaaaggggtgaagctaaacccacagtgaacgtgaagcaatctgtggttaaagttgtgtcatcccccaaattggccccaaaacgtaaggcagtggagatgcaccctgctgtcactgccgctgtgaagccactcagctccagcagcgtcctacaggaacccccagccaaaaaggcagctgtggatgctgttgtcctgcttgactctgaggacaaatcagtcactgtgcctgaagcagaaaatcctagagacagtcttgtgctgcctccaacccagtcctcttcagattcctcacccccggaggtgtctggcccttcctcatcccaaatgagcatgaaaactcgccgactcagctctgcctcaacaggaaagcccccactctctgtggaggatgattttgagaaactaacatgggagatttcaggaggcaaattggaagctgagattgacctggatcctgggaaagatgaagatgaccttccgcttgagctatgagaaatgattgatagctgaaggtggtagtgaggacactttaaaaaaaaatcgccaaaaaactggacttagtttcatctattgtaacatttacctgagatgatcatttctttagtctagaatttgccccaaatcagaagtatacctctgaattatctgtatgtgtcctggattccttggggtcagatttttaaagttactttataaccattttgtccatttgatgccattgtttatcatcttttgagaaaaaagttctgtcatacccttctctccacaaaaaagagactgagggggagatcaagtgaaagggtgcaagcaaacttagtgactccttgaggtgtttgtcagttttggcttttttctcctttgttgtattctttatgtattgtcttaatgtacttaatattacctgagtttgaaatggatgaagacagctgctaccattaagggccaaattttatgctaccactaaacaaaaatacccactcagtctgtgttaaattgtatgtctttttaaaggtatttagagattcaactaagctttaaagagggctgagcaactcaggaagcctgtaatgtgggcataactctttggacctgatcttgatgcttctgctgctctgttggcctctgaagagcaatatctaatttattattactgtaattttttaaaaggctttaaagtgcctcaggggtcccctgaaactaattttctatttctgggattccctggattcattatatgagatggtgacatgattagaggaattcttttttagtatgaaaattgttccttttcttcttcagtacttgcctccttgctggcattgaattaacacagggacaaaatttggttaattttttatttctaattctcccaacaaacccctgttgcccagtatttatgtggtggcctttaaccacctgagggaaaaaatgagcttattcaagctgccaatatttatctatgggctgtagcagtacactgaattgtactgtgccagggatattgagatgctctgggggtgtattgtatacctgccagttttcttcatttctgaattgggttttctcttcttgatgttggtttccttcatatcacctcaaggtttagatttgtgaaggaataagcatgatggaaataatagtcttgaaaggagatatgttgtatataatcaggaggaagaggaaggcaggacttactcattttgatattttgctgtaggtggccagttttgtttctcatagggaaatctgacccacctgtcatgttggctcctaaggaactgctgttgtaagcggctcatcaagagttgaacttcaagtagccttgttgggaatatggaaaaggaagaaagccacaggactgcccattcagtcttgttaagattgggatgattctgcacaagcaaaaatgactcgaaatttatgtatcgacacacctctaccaatccatcttcagctgactgaatgttgtatgatagcccttctccaaagcaggggtagaatgttcaggtttcaccacggattttctacttatttcgcttttggaatcagcttacagattccaggtcccttttgtatatattctttattcttttgcttttttaaaaaataaacttgtattagtcaatgtttcgtgttccgcattatttgaaccatttgcccttacagaaagagaaatacttgtttgtgttttaaataaaactgatgt

SEQ ID NO: 4356 - protein, 805 aa, Homo sapiens; identical to SEQ ID NO: 4346

SEQ ID NO: 4357 - DNA, 4949 bp, Homo sapiens
cagcggccaagcaagaagaaagacgtggcagcaagcgggagtcggggatagtgtcatcggttcgggtcccactactttggagcttgtctcaaactccacatacagaaagccaccaaccttattccggtatcctacacccattccccaccctcattacactcccacccctggccctcagcatgggagtcaagagcaacagggacacttccgtactccttgtaggattggtgaaaccgtaatgaagaacacccctaaactcccataattggatttggggatattccctgcccaaaaaattcctggaaaattgactagtattaagtctatggaagatggattttttttcatgatcctttgactctcaagttcatctttaaatgaactcttttttttgttttgtttttgaggagataactaacccttgctgtctccagtctgacaaaggttatttgaatggacttaatctcccagtagttgggagatgttttaaaaacacatgctgtgtttgaattgtggctgagaggttttcttggcaatgtgaggaggaaaattttttctgcctcattattattaattcatggattgagtgttggttcgacctacaggcataatagattggaactcagtgaagacacagacgttcctgttgagagcaaccagctaatgattacagtttaaagacaatttctgtgatcaagttgtcatttggaagattaaacccatttcacgaggacttggagcctggtccttgctttgaggaagcagtggcttgtttcaagaagccacttctgatctaagaatctacccagcatgcctaatcaaggagaagactgctatttttttttctattctacatgtaccaaaggtgacagctgcccattccgtcactgtgaagctgcactaggcaatgaaactgtttgcacattatggcaagaagggcgctgttttcgacgggtgtgcaggtttcggcacatggagattgataaaaaacgcagtgaaattccttgttattgggaaaatcagccaacaggatgtcaaaaattaaactgcgttttccatcacaatagaggacgatatgttgatggccttttcctacctccgagcaaaagtgtgttgcccactgtgcctgagtcaccagaagaggaagtgaaggctagccaactttcagttcagcagaacaaattgtctgtccagtccaatacttcccctcagctgcggagcgttatgaaagtagaaagttccgaaaatgttcctagccccaagcatccaccagttgtaattaatgctgcagatgatgatgaagatgatgatgatcagttttctgaggaaggtgatgaaaccaaaacacctaccctgcaaccaactcctgaagttcacaatggattacgagtgacttctgtccggaaacctgcagtcaatataaagcaaggtgaatgtttgcattttggaataaaaactcttgaggaaattaagtcaaagaaaatgaaggaaaaatctgaggagcaaggtgagggttcttcaggagtttccagtcttttactccaccctgagcctgttccaggtcctgaaaaagaaaatgtcaggactgtggtgaggacagtaactctctccaccaaacaaggagaagaacccttggttagattgggccttactgagacactggggaaacgaaaattttcgacaggcggtgacagtgatcctccattaaagcgtagcctggcacagaggctagggaagaaagttgaagctccagaaactaacactgacgaaacaccaaagaaagctcaagtttccaagtctcttaaggagcgattaggcatgtcagctgatccaaataatgaggacgcaacagataaagttaataaagttggtgagatccatgtgaagacattagaagaaatgcttcttgaaagagccagtcagaaacatggggaatcgcaaactaaactcaagacagaaggaccttcaaaaactgatgattctacttcaggagcaagaagctcctccactatccgtatcaaaaccttctctgaggtcctggctgaagaagaacataggcagcaggaagcagagagacaaaaaagcaaaaaggatacaacttgcatcaagctaaagactgatagtgaaattaaaaaaacagtagttttgccacccattgttgccagcaaaggacaatcagaggagcctgcaggtaaaacaaagtccatgcaggaggtgcacatgaagacggtggaagaaattaaactggagaaggcactgagggtgcagcagagctctgagagcagcaccagctccccgtctcaacatgaggccactccaggggcaaggttgctgctgcgaatcaccaaaagaacatggaggaaagaagagaagaaacttcaggaaggaaatgaagttgattttctgagccgtgttagaatggaagctacagaggcttcagttgagaccacaggagttgacatcactaaaattcaagtcaagagatgtgagatcatgagagagacgcgcatgcagaaacagcaggagagggaaaaatcagtcttgacacctcttcagggagatgtagcctcttgcaatacccaagtggcagagaaaccagtgctcactgctgtgccaggaatcacatggcacctgaccaagcagcttcccacaaagtcatcccagaaggtggaggtagaaacctcagggattgcagactcattattgaatgtgaaatggtcagcacagaccttggaaaaaaggggtgaagctaaacccacagtgaacgtgaagcaatctgtggttaaagttgtgtcatcccccaaattggccccaaaacgtaaggcagtggagatgcaccctgctgtcactgccgctgtgaagccactcagctccagcagcgtcctacaggaacccccagccaaaaaggcagctgtggatgctgttgtcctgcttgactctgaggacaaatcagtcactgtgcctgaagcagaaaatcctagagacagtcttgtgctgcctccaacccagtcctcttcagattcctcacccccggaggtgtctggcccttcctcatcccaaatgagcatgaaaactcgccgactcagctctgcctcaacaggaaagcccccactctctgtggaggatgattttgagaaactaacatgggagatttcaggaggcaaattggaagctgagattgacctggatcctgggaaagatgaagatgaccttccgcttgagctatgagaaatgattgatagctgaaggtggtagtgaggacactttaaaaaaaaatcgccaaaaaactggacttagtttcatctattgtaacatttacctgagatgatcatttctttagtctagaatttgccccaaatcagaagtatacctctgaattatctgtatgtgtcctggattccttggggtcagatttttaaagttactttataaccattttgtccatttgatgccattgtttatcatcttttgagaaaaaagttctgtcatacccttctctccacaaaaaagagactgagggggagatcaagtgaaagggtgcaagcaaacttagtgactccttgaggtgtttgtcagttttggcttttttctcctttgttgtattctttatgtattgtcttaatgtacttaatattacctgagtttgaaatggatgaagacagctgctaccattaagggccaaattttatgctaccactaaacaaaaatacccactcagtctgtgttaaattgtatgtctttttaaaggtatttagagattcaactaagctttaaagagggctgagcaactcaggaagcctgtaatgtgggcataactctttggacctgatcttgatgcttctgctgctctgttggcctctgaagagcaatatctaatttattattactgtaattttttaaaaggctttaaagtgcctcaggggtcccctgaaactaattttctatttctgggattccctggattcattatatgagatggtgacatgattagaggaattcttttttagtatgaaaattgttccttttcttcttcagtacttgcctccttgctggcattgaattaacacagggacaaaatttggttaattttttatttctaattctcccaacaaacccctgttgcccagtatttatgtggtggcctttaaccacctgagggaaaaaatgagcttattcaagctgccaatatttatctatgggctgtagcagtacactgaattgtactgtgccagggatattgagatgctctgggggtgtattgtatacctgccagttttcttcatttctgaattgggttttctcttcttgatgttggtttccttcatatcacctcaaggtttagatttgtgaaggaataagcatgatggaaataatagtcttgaaaggagatatgttgtatataatcaggaggaagaggaaggcaggacttactcattttgatattttgctgtaggtggccagttttgtttctcatagggaaatctgacccacctgtcatgttggctcctaaggaactgctgttgtaagcggctcatcaagagttgaacttcaagtagccttgttgggaatatggaaaaggaagaaagccacaggactgcccattcagtcttgttaagattgggatgattctgcacaagcaaaaatgactcgaaatttatgtatcgacacacctctaccaatccatcttcagctgactgaatgttgtatgatagcccttctccaaagcaggggtagaatgttcaggtttcaccacggattttctacttatttcgcttttggaatcagcttacagattccaggtcccttttgtatatattctttattcttttgcttttttaaaaaataaacttgtattagtcaatgtttcgtgttccgcattatttgaaccatttgcccttacagaaagagaaatacttgtttgtgttttaaataaaactgatgtaggataa

SEQ ID NO: 4358 - protein, 805 aa, Homo sapiens; identical to SEQ ID NO: 4346

SEQ ID NO: 4359 - DNA, 4163 bp, Homo sapiens
gcacttttaccggccgggccttagagcgcagcctgtagccgggcgccatctttgacgctggcagtcttggttttctgctagtgctgctgctgctgggaggacgacggacggcagcggccaagcaagaagaaagacgtggcagcaagcgggagtcggggatagtgtcatcggttcggtgatgctttttaggatttggggatattccctgcccaaaaaattcctggaaaattgactagtattaagtgcgtaatagattggaactcagtgaagacacagacgttcctgttgagagcaatcagctaatgattacagtttaaagacaatttctgtgatcaagttgtcatttggaagattaaacccatttcacgaggacttggagcctggtccttgctttgaggaagcagtggcttgtttcaagaagccacttctgatctaagaatctacccagcatgcctaatcaaggagaagactgctatttttttttctattctacatgtaccaaaggtgacagctgcccattccgtcactgtgaagctgcactaggcaatgaaactgtttgcacattatggcaagaagggcgctgttttcgacgggtgtgcaggtttcggcacatggagattgataaaaaacgcagtgaaattccttgttattgggaaaatcagccaacaggatgtcaaaaattaaactgcgctttccatcacaatagaggacgatatgttgatggccttttcctacctccgagcaaaagtgtgttgcccactgtgcctgagtcaccagaagaggaagtgaaggctagccaactttcagttcagcagaacaaattgtctgtccagtccaatacttcccctcagctgcggagcgttatgaaagtagaaagttccgaaaatgttcctagccccaagcatccaccagttgtaattaatgctgcagatgatgatgaagatgatgatgatcagttttctgaggaaggtgatgaaaccaaaacacctaccctgcaaccaactcctgaagttcacaatggattacgagtgacttctgtccggaaacctgcagtcaatataaagcaaggtgaatgtttgcattttggaataaaaactcttgaggaaattaagtcaaagaaaatgaaggaaaaatctgaggagcaaggtgagggttcttcaggagtttccagtcttttactccaccctgagcctgttccaggtcctgaaaaagaaaatgtcaggactgtggtgaggacagtaactctctccaccaaacaaggagaagaacccttggttagattgggccttactgagacactggggaaacgaaaattttcgacaggcggtgacagtgatcctccattaaagcgcagcctggcacagaggctagggaagaaagttgaagctccagaaactaacactgacgaaacaccaaagaaagctcaagtttccaagtctcttaaggagcgattaggcatgtcagctgatccaaataatgaggacgcaacagataaagttaataaagttggtgagatccatgtgaagacattagaagaaatgcttcttgaaagagccagtcagaaacatggggaatcgcaaactaaactcaagacagaaggaccttcaaaaactgatgattctacttcaggagcaagaagctcctccactatccgtatcaaaaccttctctgaggtcctggctgaagaagaacataggcagcaggaagcagagagacaaaaaagcaaaaaggatacaacttgcatcaagctaaagactgatagtgaaattaaaaaaacagtagttttgccacccattgttgccagcaaaggacaatcagaggagcctgcaggtaaaacaaagtccatgcaggaggtgcacatgaagacggtggaagaaattaaactggagaaggcactgagggtgcagcagagctctgagagcagcaccagctccccgtctcaacatgaggccactccaggggcaaggttgctactgcgaatcaccaaaagaacatggaggaaagaagagaagaaacttcaggaaggaaatgaagttgattttctgagccgtgttagaatggaagctacagaggcttcagttgagaccacaggagttgacatcactaaaattcaagtcaagagatgtgagatcatgagagagacgcgcatgcagaaacagcaggagagggaaaaatcagtcttgacacctcttcagggagatgtagcctcttgcaatacccaagtggcagagaaaccagtgctcactgctgtgccaggaatcacatggcacctgaccaagcagcttcccacaaagtcatcccagaaggtggaggtagaaacctcagggattgcagactcattattgaatgtgaaatggtcagcacagaccttggaaaaaaggggtgaagctaaacccacagtgaacgtgaagcaatctgtggttaaagttgtgtcatcccccaaattggccccaaaacgtaaggcagtggagatgcaccctgctgtcactgccgctgtgaagccactcagctccagcagcgtcctacaggaacccccagccaaaaaggcagctgtggatgctgttgtcctgcttgtctctgaggacaaatcagtcactgtgcctgaagcagaaaatcctagagacagtcttgtgctgcctccaacccagtcctcttcagattcctcacccccggaggtgtctggcccttcctcatcccaaatgagcatgaaaactcgccgactcagctctgcctcaacaggaaagcccccactctctgtggaggatgattttgagaaactaacatgggagatttcaggaggcaaattggaagctgagattgacctggatcctgggaaagatgaagatgaccttccgcttgagctatgagaaatgattgatagctgaaggtggtagtgaggacactttaaaaaaaaaatcgccaaaaaactggacttagtttcatctattgtaacatttacctgagatgatcatttctttagtctagaatttgccccaaatcagaagtatacctctgaattatctgtatgtgtcctggattccttggggtcagatttttaaagttactttataaccattttgtccatttgatgccattgtttatcatcttttgagaaaaaagttctgtcatacccttctctccacaaaaaagagactgagagggagatcaagtgaaagggtgcaagcaaacttagtgactccttgaggtgtttgtcagttttggcttttttctcctttgttgtattctttatgtattgtcttgatgtacttaatattacctgagtttgaaatggatgaagacagctgctaccattaaggaccaaattttatgctaccactaaacaaaaatacccactcagtctgtgttaaattgtatgtctttttaaaggtatttagagattcaactaagctttaaagagggctgagcagctcaggaagcctgtaatgtgggcataactctttggacctgatcttgatgcttctgctgctctgttggcctctgaagagcaatatctaatttattattactgtaattttttaaaaggctttaaagtgcctcaggggtcccctgaaactaattttctatttctgggattccctggattcattatatgagatggtgacatgattagaggaattcttttttagtatgaaaattgtcccttttcttcttcagtacttgcctccttgctggcattgaattaacacagggacaaaatttggttaattttttatttctaattctcccaacaaacccctgttgcccagtatttatgtggtggcctttaaccacctgagggaaaaaatgagcttattcaagctgccaatatttatctatgggctgtagcagtacactgaattgtactgtgccagggatattgagatgctctgggggtgtattgtatacctgccagttttcttcatttctgaattgagttttcttttcttgatgttggtttccttcatatcacctcaaggtttagatttgtgaaggaataagcatgatggaaataatagtcttgaaaggagatatgttgtatataatcaggaggaagaggaaggaaggacttacccattttgatattttgctgtaggtggccagttttgtttctcatagggaaatctgacccacctgtcatgttggctcctaaggaactgctgttg

SEQ ID NO: 4360 - protein, 805 aa, Homo sapiens [sequence omitted]

SEQ ID NO: 4361 - DNA, 4668 bp, Homo sapiens
gctagtgctgctgctgctgggaggacgacggacggcagcggccaagcaagaagaaagacgtggcagcaagcgggagtcggggatagtgtcatcggttcgggtcccactactttggagcttgtctcaaactccacatacagaaagccaccgaccttattccggtatcctacacccattccccaccctcattacactcccacccctggccctcagcgtgggagtcaagagcaacagggacacttccgtactccttgtaggattggtgaaaccgtaatgacgaacacccctaaactcccataattggtgcggattcctgtggggaaggcctatactgttgacatcttccaggccatctcaaggttctggaccttgagaaggaggctgtggaactagagatagtgatgctttttaggatttggggatattccctgcccaaaaaattcctggaaaattgactagtattaagtctatggaagatggattttttttcatgatcctttgactctcaagttcatctttaaatgaactcttttttttgttttgtttttgaggagataactaaccctagctgtctccagtctgacaaaggttatttgaatggacttaatctcccagtagttgggagatgttttaaaaacacatgctgtgtttgaattgtggctgagaggttttcttggcaatgtgaggaggaaaattttttctgcttcattattattaattcatggattgagtgttggttcgacctacaggcgtaatagattggaactcagtgaagacacagacgttcctgttgagagcaatcagctaatgattacagtttaaagacaatttctgtgatcaagttgtcatttggaagattaaacccatttcacgaggacttggagcctggtccttgctttgaggaagcagtggcttgtttcaagaagccacttctgatctaagaatctacccagcatgcctaatcaaggagaagactgctatttttttttctattctacatgtaccaaaggtgacagctgcccattccgtcactgtgaagctgcactaggcaatgaaactgtttgcacattatggcaagaagggcgctgttttcgacgggtgtgcaggtttcggcacatggagattgataaaaaacgcagtgaaattccttgttattgggaaaatcagccaacaggatgtcaaaaattaaactgcgctttccatcacaatagaggacgatatgttgatggccttttcctacctccgagcaaaagtgtgttgcccactgtgcctgagtcaccagaagaggaagtgaaggctagccaactttcagttcagcagaacaaattgtctgtccagtccaatacttcccctcagctgcggagcgttatgaaagtagaaagttccgaaaatgttcctagccccaagcatccaccagttgtaattaatgctgcagatgatgatgaagatgatgatgatcagttttctgaggaaggtgatgaaaccaaaacacctaccctgcaaccaactcctgaagttcacaatggattacgagtgacttctgtccggaaacctgcagtcaatataaagcaaggtgaatgtttgcattttggaataaaaactcttgaggaaattaagtcaaagaaaatgaaggaaaaatctgaggagcaaggtgagggttcttcaggagtttccagtcttttactccaccctgagcctgttccaggtcctgaaaaagaaaatgtcaggactgtggtgaggacagtaactctctccaccaaacaaggagaagaacccttggttagattgggccttactgagacactggggaaacgaaaattttcgacaggcggtgacagtgatcctccattaaagcgcagcctggcacagaggctagggaagaaagttgaagctccagaaactaacactgacgaaacaccaaagaaagctcaagtttccaagtctcttaaggagcgattaggcatgtcagctgatccaaataatgaggacgcaacagataaagttaataaagttggtgagatccatgtgaagacattagaagaaatgcttcttgaaagagccagtcagaaacatggggaatcgcaaactaaactcaagacagaaggaccttcaaaaactgatgattctacttcaggagcaagaagctcctccactatccgtatcaaaaccttctctgaggtcctggctgaagaagaacataggcagcaggaagcagagagacaaaaaagcaaaaaggatacaacttgcatcaagctaaagactgatagtgaaattaaaaaaacagtagttttgccacccattgttgccagcaaaggacaatcagaggagcctgcaggtaaaacaaagtccatgcaggaggtgcacatgaagacggtggaagaaattaaactggagaaggcactgagggtgcagcagagctctgagagcagcaccagctccccgtctcaacatgaggccactccaggggcaaggttgctactgcgaatcaccaaaagaacatggaggaaagaagagaagaaacttcaggaaggaaatgaagttgattttctgagccgtgttagaatggaagctacagaggcttcagttgagaccacaggagttgacatcactaaaattcaagtcaagagatgtgagatcatgagagagacgcgcatgcagaaacagcaggagagggaaaaatcagtcttgacacctcttcagggagatgtagcctcttgcaatacccaagtggcagagaaaccagtgctcactgctgtgccaggaatcacatggcacctgaccaagcagcttcccacaaagtcatcccagaaggtggaggtagaaacctcagggattgcagactcattattgaatgtgaaatggtcagcacagaccttggaaaaaaggggtgaagctaaacccacagtgaacgtgaagcaatctgtggttaaagttgtgtcatcccccaaattggccccaaaacgtaaggcagtggagatgcaccctgctgtcactgccgctgtgaagccactcagctccagcagcgtcctacaggaacccccagccaaaaaggcagctgtggatgctgttgtcctgcttgtctctgaggacaaatcagtcactgtgcctgaagcagaaaatcctagagacagtcttgtgctgcctccaacccagtcctcttcagattcctcacccccggaggtgtctggcccttcctcatcccaaatgagcatgaaaactcgccgactcagctctgcctcaacaggaaagcccccactctctgtggaggatgattttgagaaactaacatgggagatttcaggaggcaaattggaagctgagattgacctggatcctgggaaagatgaagatgaccttccgcttgagctatgagaaatgattgatagctgaaggtggtagtgaggacactttaaaaaaaaaatcgccaaaaaactggacttagtttcatctattgtaacatttacctgagatgatcatttctttagtctagaatttgccccaaatcagaagtatacctctgaattatctgtatgtgtcctggattccttggggtcagatttttaaagttactttataaccattttgtccatttgatgccattgtttatcatcttttgagaaaaaagttctgtcatacccttctctccacaaaaaagagactgagagggagatcaagtgaaagggtgcaagcaaacttagtgactccttgaggtgtttgtcagttttggcttttttctcctttgttgtattctttatgtattgtcttgatgtacttaatattacctgagtttgaaatggatgaagacagctgctaccattaaggaccaaattttatgctaccactaaacaaaaatacccactcagtctgtgttaaattgtatgtctttttaaaggtatttagagattcaactaagctttaaagagggctgagcagctcaggaagcctgtaatgtgggcataactctttggacctgatcttgatgcttctgctgctctgttggcctctgaagagcaatatctaatttattattactgtaattttttaaaaggctttaaagtgcctcaggggtcccctgaaactaattttctatttctgggattccctggattcattatatgagatggtgacatgattagaggaattcttttttagtatgaaaattgtcccttttcttcttcagtacttgcctccttgctggcattgaattaacacagggacaaaatttggttaattttttatttctaattctcccaacaaacccctgttgcccagtatttatgtggtggcctttaaccacctgagggaaaaaatgagcttattcaagctgccaatatttatctatgggctgtagcagtacactgaattgtactgtgccagggatattgagatgctctgggggtgtattgtatacctgccagttttcttcatttctgaattgagttttcttttcttgatgttggtttccttcatatcacctcaaggtttagatttgtgaaggaataagcatgatggaaataatagtcttgaaaggagatatgttgtatataatcaggaggaagaggaaggaaggacttacccattttgatattttgctgtaggtggccagttttgtttctcatagggaaatctgacccacctgtcatgttggctcctaaggaactgctgttg

SEQ ID NO: 4362 - protein, 805 aa, Homo sapiens [sequence omitted]

SEQ ID NO: 4363 - DNA, 3950 bp, Homo sapiens
gcaacctccacctcccagattcaagcaattctcctgcctcagcctcctgagtagctgggattacaggcgcgtactaccatgcctggctaatgattacagtttaaagacaatttctgtgatcaagttgtcatttggaagattaaacccatttcacgaggacttggagcctggtccttgctttgaggaagcagtggcttgtttcaagaagccacttctgatctaagaatctacccagcatgcctaatcaaggagaagactgctatttttttttctattctacatgtaccaaaggtgacagctgcccattccgtcactgtgaagctgcactaggcaatgaaactgtttgcacattatggcaagaagggcgctgttttcgacgggtgtgcaggtttcggcacatggagattgataaaaaacgcagtgaaattccttgttattgggaaaatcagccaacaggatgtcaaaaattaaactgcgctttccatcacaatagaggacgatatgttgatggccttttcctacctccgagcaaaagtgtgttgcccactgtgcctgagtcaccagaagaggaagtgaaggctagccaactttcagttcagcagaacaaattgtctgtccagtccaatacttcccctcagctgcggagcgttatgaaagtagaaagttccgaaaatgttcctagccccaagcatccaccagttgtaattaatgctgcagatgatgatgaagatgatgatgatcagttttctgaggaaggtgatgaaaccaaaacacctaccctgcaaccaactcctgaagttcacaatggattacgagtgacttctgtccggaaacctgcagtcaatataaagcaaggtgaatgtttgcattttggaataaaaactcttgaggaaattaagtcaaagaaaatgaaggaaaaatctgaggagcaaggtgagggttcttcaggagtttccagtcttttactccaccctgagcctgttccaggtcctgaaaaagaaaatgtcaggactgtggtgaggacagtaactctctccaccaaacaaggagaagaacccttggttagattgggccttactgagacactggggaaacgaaaattttcgacaggcggtgacagtgatcctccattaaagcgcagcctggcacagaggctagggaagaaagttgaagctccagaaactaacactgacgaaacaccaaagaaagctcaagtttccaagtctcttaaggagcgattaggcatgtcagctgatccaaataatgaggacgcaacagataaagttaataaagttggtgagatccatgtgaagacattagaagaaatgcttcttgaaagagccagtcagaaacatggggaatcgcaaactaaactcaagacagaaggaccttcaaaaactgatgattctacttcaggagcaagaagctcctccactatccgtatcaaaaccttctctgaggtcctggctgaagaagaacataggcagcaggaagcagagagacaaaaaagcaaaaaggatacaacttgcatcaagctaaagactgatagtgaaattaaaaaaacagtagttttgccacccattgttgccagcaaaggacaatcagaggagcctgcaggtaaaacaaagtccatgcaggaggtgcacatgaagacggtggaagaaattaaactggagaaggcactgagggtgcagcagagctctgagagcagcaccagctccccgtctcaacatgaggccactccaggggcaaggttgctactgcgaatcaccaaaagaacatggaggaaagaagagaagaaacttcaggaaggaaatgaagttgattttctgagccgtgttagaatggaagctacagaggcttcagttgagaccacaggagttgacatcactaaaattcaagtcaagagatgtgagatcatgagagagacgcgcatgcagaaacagcaggagagggaaaaatcagtcttgacacctcttcagggagatgtagcctcttgcaatacccaagtggcagagaaaccagtgctcactgctgtgccaggaatcacatggcacctgaccaagcagcttcccacaaagtcatcccagaaggtggaggtagaaacctcagggattgcagactcattattgaatgtgaaatggtcagcacagaccttggaaaaaaggggtgaagctaaacccacagtgaacgtgaagcaatctgtggttaaagttgtgtcatcccccaaattggccccaaaacgtaaggcagtggagatgcaccctgctgtcactgccgctgtgaagccactcagctccagcagcgtcctacaggaacccccagccaaaaaggcagctgtggatgctgttgtcctgcttgtctctgaggacaaatcagtcactgtgcctgaagcagaaaatcctagagacagtcttgtgctgcctccaacccagtcctcttcagattcctcacccccggaggtgtctggcccttcctcatcccaaatgagcatgaaaactcgccgactcagctctgcctcaacaggaaagcccccactctctgtggaggatgattttgagaaactaacatgggagatttcaggaggcaaattggaagctgagattgacctggatcctgggaaagatgaagatgaccttccgcttgagctatgagaaatgattgatagctgaaggtggtagtgaggacactttaaaaaaaaaatcgccaaaaaactggacttagtttcatctattgtaacatttacctgagatgatcatttctttagtctagaatttgccccaaatcagaagtatacctctgaattatctgtatgtgtcctggattccttggggtcagatttttaaagttactttataaccattttgtccatttgatgccattgtttatcatcttttgagaaaaaagttctgtcatacccttctctccacaaaaaagagactgagagggagatcaagtgaaagggtgcaagcaaacttagtgactccttgaggtgtttgtcagttttggcttttttctcctttgttgtattctttatgtattgtcttgatgtacttaatattacctgagtttgaaatggatgaagacagctgctaccattaaggaccaaattttatgctaccactaaacaaaaatacccactcagtctgtgttaaattgtatgtctttttaaaggtatttagagattcaactaagctttaaagagggctgagcagctcaggaagcctgtaatgtgggcataactctttggacctgatcttgatgcttctgctgctctgttggcctctgaagagcaatatctaatttattattactgtaattttttaaaaggctttaaagtgcctcaggggtcccctgaaactaattttctatttctgggattccctggattcattatatgagatggtgacatgattagaggaattcttttttagtatgaaaattgtcccttttcttcttcagtacttgcctccttgctggcattgaattaacacagggacaaaatttggttaattttttatttctaattctcccaacaaacccctgttgcccagtatttatgtggtggcctttaaccacctgagggaaaaaatgagcttattcaagctgccaatatttatctatgggctgtagcagtacactgaattgtactgtgccagggatattgagatgctctgggggtgtattgtatacctgccagttttcttcatttctgaattgagttttcttttcttgatgttggtttccttcatatcacctcaaggtttagatttgtgaaggaataagcatgatggaaataatagtcttgaaaggagatatgttgtatataatcaggaggaagaggaaggaaggacttacccattttgatattttgctgtaggtggccagttttgtttctcatagggaaatctgacccacctgtcatgttggctcctaaggaactgctgttg

SEQ ID NO: 4364 - protein, 805 aa, Homo sapiens [sequence omitted]

SEQ ID NO: 4365 - DNA, 4249 bp, Homo sapiens
cggacggcagcggccaagcaagaagaaagacgtggcagcaagcgggagtcggggatagtgtcatcggttcgggtcccactactttggagcttgtctcaaactccacatacagaaagccaccgaccttattccggtatcctacacccattccccaccctcattacactcccacccctggccctcagcgtgggagtcaagagcaacagggacacttccgtactccttgtaggattggtgaaaccgtaatgacgaacacccctaaactcccataattggatttggggatattccctgcccaaaaaattcctggaaaattgactagtattaagtgcgtaatagattggaactcagtgaagacacagacgttcctgttgagagcaatcagctaatgattacagtttaaagacaatttctgtgatcaagttgtcatttggaagattaaacccatttcacgaggacttggagcctggtccttgctttgaggaagcagtggcttgtttcaagaagccacttctgatctaagaatctacccagcatgcctaatcaaggagaagactgctatttttttttctattctacatgtaccaaaggtgacagctgcccattccgtcactgtgaagctgcactaggcaatgaaactgtttgcacattatggcaagaagggcgctgttttcgacgggtgtgcaggtttcggcacatggagattgataaaaaacgcagtgaaattccttgttattgggaaaatcagccaacaggatgtcaaaaattaaactgcgctttccatcacaatagaggacgatatgttgatggccttttcctacctccgagcaaaagtgtgttgcccactgtgcctgagtcaccagaagaggaagtgaaggctagccaactttcagttcagcagaacaaattgtctgtccagtccaatacttcccctcagctgcggagcgttatgaaagtagaaagttccgaaaatgttcctagccccaagcatccaccagttgtaattaatgctgcagatgatgatgaagatgatgatgatcagttttctgaggaaggtgatgaaaccaaaacacctaccctgcaaccaactcctgaagttcacaatggattacgagtgacttctgtccggaaacctgcagtcaatataaagcaaggtgaatgtttgcattttggaataaaaactcttgaggaaattaagtcaaagaaaatgaaggaaaaatctgaggagcaaggtgagggttcttcaggagtttccagtcttttactccaccctgagcctgttccaggtcctgaaaaagaaaatgtcaggactgtggtgaggacagtaactctctccaccaaacaaggagaagaacccttggttagattgggccttactgagacactggggaaacgaaaattttcgacaggcggtgacagtgatcctccattaaagcgcagcctggcacagaggctagggaagaaagttgaagctccagaaactaacactgacgaaacaccaaagaaagctcaagtttccaagtctcttaaggagcgattaggcatgtcagctgatccaaataatgaggacgcaacagataaagttaataaagttggtgagatccatgtgaagacattagaagaaatgcttcttgaaagagccagtcagaaacatggggaatcgcaaactaaactcaagacagaaggaccttcaaaaactgatgattctacttcaggagcaagaagctcctccactatccgtatcaaaaccttctctgaggtcctggctgaagaagaacataggcagcaggaagcagagagacaaaaaagcaaaaaggatacaacttgcatcaagctaaagactgatagtgaaattaaaaaaacagtagttttgccacccattgttgccagcaaaggacaatcagaggagcctgcaggtaaaacaaagtccatgcaggaggtgcacatgaagacggtggaagaaattaaactggagaaggcactgagggtgcagcagagctctgagagcagcaccagctccccgtctcaacatgaggccactccaggggcaaggttgctactgcgaatcaccaaaagaacatggaggaaagaagagaagaaacttcaggaaggaaatgaagttgattttctgagccgtgttagaatggaagctacagaggcttcagttgagaccacaggagttgacatcactaaaattcaagtcaagagatgtgagatcatgagagagacgcgcatgcagaaacagcaggagagggaaaaatcagtcttgacacctcttcagggagatgtagcctcttgcaatacccaagtggcagagaaaccagtgctcactgctgtgccaggaatcacatggcacctgaccaagcagcttcccacaaagtcatcccagaaggtggaggtagaaacctcagggattgcagactcattattgaatgtgaaatggtcagcacagaccttggaaaaaaggggtgaagctaaacccacagtgaacgtgaagcaatctgtggttaaagttgtgtcatcccccaaattggccccaaaacgtaaggcagtggagatgcaccctgctgtcactgccgctgtgaagccactcagctccagcagcgtcctacaggaacccccagccaaaaaggcagctgtggatgctgttgtcctgcttgtctctgaggacaaatcagtcactgtgcctgaagcagaaaatcctagagacagtcttgtgctgcctccaacccagtcctcttcagattcctcacccccggaggtgtctggcccttcctcatcccaaatgagcatgaaaactcgccgactcagctctgcctcaacaggaaagcccccactctctgtggaggatgattttgagaaactaacatgggagatttcaggaggcaaattggaagctgagattgacctggatcctgggaaagatgaagatgaccttccgcttgagctatgagaaatgattgatagctgaaggtggtagtgaggacactttaaaaaaaaaatcgccaaaaaactggacttagtttcatctattgtaacatttacctgagatgatcatttctttagtctagaatttgccccaaatcagaagtatacctctgaattatctgtatgtgtcctggattccttggggtcagatttttaaagttactttataaccattttgtccatttgatgccattgtttatcatcttttgagaaaaaagttctgtcatacccttctctccacaaaaaagagactgagagggagatcaagtgaaagggtgcaagcaaacttagtgactccttgaggtgtttgtcagttttggcttttttctcctttgttgtattctttatgtattgtcttgatgtacttaatattacctgagtttgaaatggatgaagacagctgctaccattaaggaccaaattttatgctaccactaaacaaaaatacccactcagtctgtgttaaattgtatgtctttttaaaggtatttagagattcaactaagctttaaagagggctgagcagctcaggaagcctgtaatgtgggcataactctttggacctgatcttgatgcttctgctgctctgttggcctctgaagagcaatatctaatttattattactgtaattttttaaaaggctttaaagtgcctcaggggtcccctgaaactaattttctatttctgggattccctggattcattatatgagatggtgacatgattagaggaattcttttttagtatgaaaattgtcccttttcttcttcagtacttgcctccttgctggcattgaattaacacagggacaaaatttggttaattttttatttctaattctcccaacaaacccctgttgcccagtatttatgtggtggcctttaaccacctgagggaaaaaatgagcttattcaagctgccaatatttatctatgggctgtagcagtacactgaattgtactgtgccagggatattgagatgctctgggggtgtattgtatacctgccagttttcttcatttctgaattgagttttcttttcttgatgttggtttccttcatatcacctcaaggtttagatttgtgaaggaataagcatgatggaaataatagtcttgaaaggagatatgttgtatataatcaggaggaagaggaaggaaggacttacccattttgatattttgctgtaggtggccagttttgtttctcatagggaaatctgacccacctgtcatgttggctcctaaggaactgctgttg

SEQ ID NO: 4366 - protein, 805 aa, Homo sapiens [sequence omitted]

SEQ ID NO: 4367 - DNA, 926 bp, Homo sapiens
atgcacacatcttctccaaggtttgtgtgcagaacatcctgcccatgctgccccagcagcttcagttggcacctgccccagtccagcctctgggaaccacgcagcagctcccagcggccctgcacccaccaccagcatccgtttcacctgcagttgaagatccgtgaggtgcccagaagatcatgcagtcatcagtcccacggagcagcccgtgaggctgaggctcctcccactggaccgccccccgactggcaccactgctgcccctgcccctactctcagcctcacgtgactctcgggcagaggcagtggtggggcagccagggcagcgtcaagagtctgagccagctgcaggacaaattcgagcatcttaaaatgattcaacaggaggagataaggaagctcgaggaagagaaaaaacaactggaaggagaaatcatagatttttataaaatgaaagctgcctctgaagcactgcagactcagctgagcactgatacaaagaaagacaaacatcctgatccatatgaattcctcttattaagaaaaataaagcatccaggattcagtgaagaactgactatcaccttgttaatcattcagaaacatgttgcagacttaagccatttttgatatagatactgaaacaattacttgctaagagcaaacttgaaggtatggataaggccctgagtcatcttgctgagctgaatgatagttaagctgaatgtacgtataaaatatgattttctaaccacttgctcgccaacaaggaaaacttttaagtagagcagaacctgaatagacaagacatttctttcttttggtagaaaatgatttaccatcactgtctagttaattgtagactaggtaattttaactttgtgatttattgccggagacattttcttctgtactataaagtg

SEQ ID NO: 4368 - protein, 210 aa, Homo sapiens
MHTSSPRFVCRTSCPCCPSSFSWHLPQSSLWEPRSSSQRPCTHHQHPFHLQLKIREVPRRSCSHQSHGAAREAEAPPTGPPPDWHHCCPCPYSQPHVTLGQRQWWGSQGSVKSLSQLQDKFEHLKMIQQEEIRKLEEEKKQLEGEIIDFYKMKAASEALQTQLSTDTKKDKHPDPYEFLLLRKIKHPGFSEELTITLLIIQKHVADLSHF

SEQ ID NO: 4369 - DNA, 2868 bp, Homo sapiens
gcacaacctctgctcactgcagcctccacctgccaggctcaagcaatgctcctgcctcagcctcccgagtagctgggattacaggtaagtgccaccacacccagctgatttttgtgttttttgtagagacgaggtttcgccatgtttcccagactgttctcaaactcctgagctcaaagcagtccacccaccttggcctcccagagtgctgggattacaggtgtgagccatcttgctcattctagtttaaacttttgagtagtttgtgtctcctgattggactcctacaaatacagaattgatgctaggaagggtaccaggagatagacgcacacagatgggatttgggaataggtttggttatccaaggagcagtgctgagctccttgctaatgggatatgggatgctggtgatttccaggaagtgagctcacaatgactcaagctgccacatagtgttgattgtgaaatgccagttgaagcatatgtcctgcgagcttgggggtgctacaagttgaccactgcagcagtaaagatgactctgaagaatggcgtgggatggatcctttcaaatgcacttgagcagcagtctccaaccacagggccacagagctggagctggatctaccatgaaagacttctgaatccaggaagagagactgactgggcaacatgttattcaggtgggaccatccagttgcaggaaaacaagcttaacacgcccactgattctacattatgctcctacctcccggcagcctctccaggcccagaactttctccagtcagcctctacagaccaagctcatgactcacaatggcctatttaggcccataccctacctcacggcagtctccgcagatgagcctactgcctcacaacagcctccacaggcacagctccatcgttacaatggcctctttagacccagctcctgcctcccagccttctctccaggccctgaactttctcaagtcgacctcaccaggcccagctcatgcttctttgcagcctctccaggcccaactcctgcatcttggtggcccctccaggcccagcctgtgcctcccgtcggcctctacaatcccaacatctgcctcacagcagattcttcacgcccagcctctgcctcacagtggaccctccagacccagatggtgtctcactgtggcatcctcaggcgaagctcctgcctttcagcagcctctccaggcccagctcctcctgcctcccagtggcctctttcggcccagcccagctcatgcctcccggcggccttcccaagccccgcttttgacttttggtggcctctgcaggcctcgacaaggcccagcctcctgcctcccgaaggcctgcacaggcccagcctctgcctcacagcggactctccacgcccagctagctctcgcctcactgcggcctccccagtccaaagctcctgcctttcggccacttcggcaggtccagctactgcctgccagtggcctctttaggcccagctcattcctcacaacggcctttccaggccccgtttttcccttccggcagcctcttggcttctaatttgtttatcttttgtgtataaatcccaaaatatggaattttggaatatttccaccattatatattttggtcggtaatttatttggagtgagtttctgcaccatgcccgaattttttattttattttccttattatttggtgttaaacaggtttaatgacagtcatggcaactttttggcacaatgaaaaatatcgcccatgatcaacgtgttctgttctggggaagggggcaaaggcagggtgaatcactttcttaaaaagtatagctcaagttgggagtgcagagggaatggggagaaaaccctcccgctgcctgtgtcgaagtgcaggagcccccacccccatactcacctgagtccagcccctctggggaaagaaggggtgcatgaactccccctagtccacaggcgcctccctgtggcccaaggccctcttcacactccatcttgtagccccagcaggagctattttctgaaaagtgaaaagctctgaaggtcccacaattcatggtatgtacaggggctcggaggagggaaactgcccagctttcccccggcacagctgcaggggtagggggtatagataagaggagcaggccttggccaggcgtggtggctcacgcctgtaatcccagcactttgggagggggaggcaggcagatcacgatgtcaggagatcgaaatcagcctggccaagatgatgaagccccgtctgtactaaaaatacaaaaattagccggacgtggtagtgtgcacctgtaatcctagctacccggaaggctgaggcaggagaatggcgtgaacccagcgggaagaggttgcagtgagccaagattgcaccactgcactccagcctgggcaacagagcaagactcggtctcaaaaaaaaaaaaaaaaaaaaaaaaagaggcaggccttactccgtcccaaactgaaaggattaaatggctttacctgggagaagataaccatcctgccctccgttgctaccctcacatactgtccatgttctcaaggggtactgtgagtcctgggatctttggggttgcccacctgcctgtggtagttatggagacccccaggtgttgaggcagggctggggtgtccccttccaaccaggctgtcaaggccccaactctggggcagaggcagtggcagggcagccagggttgcgccagagcctgagcagattgaggtggggtcaggcagggctgggagtcagggcaggggcagcagcagtggacccgctatgcacacatcttctccaaggtttgtgtgcagaacatcctgcccatgctgcccca

SEQ ID NO: 4370 - protein, 113 aa, Homo sapiens
MPVEAYVLRAWGCYKLTTAAVKMTLKNGVGWILSNALEQQSPTTGPQSWSWIYHERLLNPGRETDWATCYSGGTIQLQENKLNTPTDSTLCSYLPAASPGPELSPVSLYRPSS

SEQ ID NO: 4371 - DNA, 749 bp, Homo sapiens
tggggactggtaagagcgacctccccgccaggtcctgtgtgttgccggctgaagaagggtagctgaaaaattcagacccagcacagtgtttatgttggtcaaaaatagaaaactatgtctggcgcggccgaggcgggaggacccttcaggccaagagcagcgtagcaacatggcgcaaccccatctctgtagtcctacctcagccccccagctacttgaacccaaaggttcaaggctccagtgagctatgatcccaccacagcattccagcctgcgagattgagatgatgattattccccaccttctaagagacaaagaccaacgagccaccacagccaccagtcccagaacccgccaatgctggggaacggaaaatgagggagttcaactctgagaaatggaatcatcgtatcgctgatctacgtaaacaaactgaagaattgtctgaaagaaaatatgacatgaacttatgaattcaacaggtgaagatttacaacttgataaatcaactttgtgagctcgagctgtaaaagccaaaggtctggtgatgatcccatacccttttttccagtctcatgttgaagatttttatgtagaaggccttcccaaaggaatttttttttttttttttttttgagatggagttttcactcttatcgcccaggctggggtgcaatggcgcaaccttgctggtcactgcaacctctgcctcctgggttcaagaaattctcctgccttagcctcccaa

SEQ ID NO: 4372 - protein, 32 aa, Homo sapiens
MREFNSEKWNHRIADLRKQTEELSERKYDMNL

SEQ ID NO: 4373 - DNA, 1431 bp, Homo sapiens
agctgcagtctgggagtctttggagtaagaatggccttggaagggatgagcaaacggaagagaaagagaagtgtccaggagggagagaatcctgacgacggcgttcgcgggagtccgccggaagactacaggcttggacaggtcgccagtagcttatttcgcggcgaacaccattccagaggtggcaccggtcggctggcgtccctcttcagttctctggagccccagattcaacccgtgtacgtgcctgtgcctaaacaaaccatcaaaaaaacgaaacggaatgaggaggaagaaagtacatcccagattgaaagaccactttcgcaagaacctgccaaaaaagtgaaagcgaagaagaaacacactaacgcagaaaaaaagttggcagacagggaaagcgctctagcgagtgctgatttagaagaagaaattcaccagaaacaagggcagaaaaggaaaaattctcaacctggtgttaaagtagcagatagaaaaatacttgatgacacagaagacacagttgtcagtcaaagaaagaaaattcaaatcaaccaagaagaagagagattaaagaatgagagaactgtgtttgttgggaatttgcctgttacatgtaataagaagaagctgaagtcgttttttaaagagtatggacaaatagaatctgtacgatttcgttctctgattccagcagagggaacgctatccaaaaagttggcagcaataaaacgtaaaattcatcctgatcagaaaaatattaatgcctatgttgtgtttaaggaggagagtgctgccacgcaagcattgaaaagaaatggggcccagattgcagatggatttcgtattagagttgatctcgcatctgagacctcatctagagacaagagatcggtttttgtggggaatctcccttataaagttgaagaatctgccattgagaagcactttctggactgtggaagtatcatggccgtgaggattgtgagagacaaaatgacaggcatcggcaaagggtttggctatgtgctctttgagaatacagattctgttcatcttgctctgaaattaaataattctgaactcatggggagaaaactcagagtcatgcgttctgttaataaagaaaaatttaaacaacaaaattcaaatccacgattgaagaatgtcagtaaacctaagcagggacttaattttacttccaaaactgcagaaggacatcctaaaagcttatttattggagaaaaagctgttctccttaaaacgaagaagaaaggacagaagaaaagtggacgccctaagaaacagagaaaacagaaataacaaccaggaactgctttttcttttcctgctgagtactgctaataaaagtgctattatctgctgatagcatcgtctgctaaaaaaaaaaaaaaaaaaaaaaaaaaaaaa

SEQ ID NO: 4374 - protein, 425 aa, Homo sapiens
MSKRKRKRSVQEGENPDDGVRGSPPEDYRLGQVASSLFRGEHHSRGGTGRLASLFSSLEPQIQPVYVPVPKQTIKKTKRNEEEESTSQIERPLSQEPAKKVKAKKKHTNAEKKLADRESALASADLEEEIHQKQGQKRKNSQPGVKVADRKILDDTEDTVVSQRKKIQINQEEERLKNERTVFVGNLPVTCNKKKLKSFFKEYGQIESVRFRSLIPAEGTLSKKLAAIKRKIHPDQKNINAYVVFKEESAATQALKRNGAQIADGFRIRVDLASETSSRDKRSVFVGNLPYKVEESAIEKHFLDCGSIMAVRIVRDKMTGIGKGFGYVLFENTDSVHLALKLNNSELMGRKLRVMRSVNKEKFKQQNSNPRLKNVSKPKQGLNFTSKTAEGHPKSLFIGEKAVLLKTKKKGQKKSGRPKKQRKQK

SEQ ID NO: 4375 - DNA, 2757 bp, Homo sapiens
gggcaatggcgggcgcccctcccccagcctcgttgccgccttgcagtttgatctcagactgctgtgctagcaatcagcgagactccgtgggcgtaggaccctccgagccaggtgtgggatatagtctcgtggtgcgccgtttcttaagctggtctgaaaagcgcaatattcgggtgggagtgacccgattttccaggtgcttccgtcacccctttctttgactcggaaagggaactccctgaccccttgcgcttcccaggtgaggcaatgcctcgccctgcttcggctcgcgcacggtgcgcgcacacactggcctgcgcccactgtctagcactccctagtgagatgaacccggtacctcagatggaaatgcagaaatcacccgtcttctgcgtcgctcacgctgggagctgtagaccggagctgttcctattcggccatcttggctcctagtatttttaattaagcacttgtgttctgattagtggccaaataaatgacagtcagaacttcagctaaggtacaataaggttttgctgtggcgtggcacctggtctctttctagaaggaaagttcaacatacagcacaattctggacacattgtattggtttgatgctcctacctggaacaggtggagctggtctcttgggcagcctgacatctggtccactcctctgtcctatgccgggatcatcatgaccgtagagattatgtcactgttttgcatccttgttacataactcagttcctggtagattactatgtcagagagtcacaatgaccttgcacaataacagtacaacctcgcctttgtttccaaacatcagctcctcctggatacacagcccctccgatgcagggctgcccccgggaaccgtcactcatttcggcagctacaatgtttctcgagcagctggcaatttctcctctccagacggtaccaccgatgaccctctgggaggtcataccgtctggcaagtggtcttcatcgctttcttaacgggcatcctggccttggtgaccatcatcggcaacatcctggtaattgtgtcatttaaggtcaacaagcagctgaagacggtcaacaactacttcctcttaagcctggcctgtgccgatctgattatcggggtcatttcaatgaatctgtttacgacctacatcatcatgaatcgatgggccttagggaacttggcctgtgacctctggcttgccattgactacgtagccagcaatgcctctgttatgaatcttctggtcatcagctttgacagatacttttccatcacgaggccgctcacgtaccgagccaaacgaacaacaaagagagccggtgtgatgatcggtctggcttgggtcatctcctttgtcctttgggctcctgccatcttgttctggcaatactttgttggaaagagaactgtgcctccgggagagtgcttcattcagttcctcagtgagcccaccattacttttggcacagccatcgctgctttttatatgcctgtcaccattatgactattttatactggaggatctataaggaaactgaaaagcgtaccaaagagcttgctggcctgcaagcctctgggacagaggcagagacagaaaactttgtccaccccacgggcagttctcgaagctgcagcagttacgaacttcaacagcaaagcatgaaacgctccaacaggaggaagtatggccgctgccacttctggttcacaaccaagagctggaaacccagctccgagcagatggaccaagaccacagcagcagtgacagttggaacaacaatgatgctgctgcctccctggagaactccgcctcctccgacgaggaggacattggctccgagacgagagccatctactccatcgtgctcaagcttccgggtcacagcaccatcctcaactccaccaagttaccctcatcggacaacctgcaggtgcctgaggaggagctggggatggtggacttggagaggaaagccgacaagctgcaggcccagaagagcgtggacgatggaggcagttttccaaaaagcttctccaagcttcccatccagctagagtcagccgtggacacagctaagacttctgacgtcaactcctcagtgggtaagagcacggccactctacctctgtccttcaaggaagccactctggccaagaggtttgctctgaagaccagaagtcagatcactaagcggaaaaggatgtccctggtcaaggagaagaaagcggcccagaccctcagtgcgatcttgcttgccttcatcatcacttggaccccatacaacatcatggttctggtgaacaccttttgtgacagctgcatacccaaaaccttttggaatctgggctactggctgtgctacatcaacagcaccgtgaaccccgtgtgctatgctctgtgcaacaaaacattcagaaccactttcaagatgctgctgctgtgccagtgtgacaaaaaaaagaggcgcaagcagcagtaccagcagagacagtcggtcatttttcacaagcgcgcacccgagcaggccttgtagaatgaggttgtatcaatagcagtgacaaaacgcacacatcaacccacagaccttaggaggaggaaggcgagggcggggtgacttctggtgatgataaaaatggttttatcacccagatgtgaaagaagctgcctgtttactgatccattgaataaacccattttaatagaaaaagtcaataccaattcagcaaaaaaaaaaaaaa

SEQ ID NO: 4376 - protein, 590 aa, Homo sapiens
MTLHNNSTTSPLFPNISSSWIHSPSDAGLPPGTVTHFGSYNVSRAAGNFSSPDGTTDDPLGGHTVWQVVFIAFLTGILALVTIIGNILVIVSFKVNKQLKTVNNYFLLSLACADLIIGVISMNLFTTYIIMNRWALGNLACDLWLAIDYVASNASVMNLLVISFDRYFSITRPLTYRAKRTTKRAGVMIGLAWVISFVLWAPAILFWQYFVGKRTVPPGECFIQFLSEPTITFGTAIAAFYMPVTIMTILYWRIYKETEKRTKELAGLQASGTEAETENFVHPTGSSRSCSSYELQQQSMKRSNRRKYGRCHFWFTTKSWKPSSEQMDQDHSSSDSWNNNDAAASLENSASSDEEDIGSETRAIYSIVLKLPGHSTILNSTKLPSSDNLQVPEEELGMVDLERKADKLQAQKSVDDGGSFPKSFSKLPIQLESAVDTAKTSDVNSSVGKSTATLPLSFKEATLAKRFALKTRSQITKRKRMSLVKEKKAAQTLSAILLAFIITWTPYNIMVLVNTFCDSCIPKTFWNLGYWLCYINSTVNPVCYALCNKTFRTTFKMLLLCQCDKKKRRKQQYQQRQSVIFHKRAPEQAL

SEQ ID NO: 4377 - DNA, 939 bp, Homo sapiens
atggaaaattacaatcaaacatcaactgatttcatcttattggggctgtttccaccatcaagaattgaccttttcttcttcattctcattgttttcattttcctgatggctctaattggaaacctgtccatgattcttctcatcttcttggacacccatctccacacacccatgtatttcctactgagtcagctctccctcattgacctaaattacatctccaccattgttcctaagatggcatctgattttctgcatggaaacaagtctatctccttcactgggtgtgggattcagagtttcttcttcttggcattaggaggtgcagaagcactacttttggcatctatggcctatgatcgttacattgctatttgctttcctctccactatctcatccgcatgagcaaaagagtgtgtgtgctgatgataacagggtcttggatcataggctcgatcaatgcttgtgctcacactgtatatgtactccatattccttattgccgatccagggccatcaatcatttcttctgtgatgtcccagcaatggtgactctggcctgcatggacacctgggtctatgagggcacagtgtttttgagtgccaccatctttctcgtgtttcccttcattggtatttcatgttcctatggccaggttctctttgctgtctaccacatgaaatctgcagaagggaggaagaaagcctatttgacctgcagcacccacctcactgtagtaactttctactatgcaccttttgtctacacttatctacgtccaagatccctgcgatctccaacagaggacaaggttctggctgtcttctacaccatcctcaccccaatgctcaaccccatcatctatagcctgaggaacaaggaggtgatgggggccctgacacgagtgagtcagagaatctgctctgtgaaaatgtag

SEQ ID NO: 4378 - protein, 312 aa, Homo sapiens
MENYNQTSTDFILLGLFPPSRIDLFFFILIVFIFLMALIGNLSMILLIFLDTHLHTPMYFLLSQLSLIDLNYISTIVPKMASDFLHGNKSISFTGCGIQSFFFLALGGAEALLLASMAYDRYIAICFPLHYLIRMSKRVCVLMITGSWIIGSINACAHTVYVLHIPYCRSRAINHFFCDVPAMVTLACMDTWVYEGTVFLSATIFLVFPFIGISCSYGQVLFAVYHMKSAEGRKKAYLTCSTHLTVVTFYYAPFVYTYLRPRSLRSPTEDKVLAVFYTILTPMLNPIIYSLRNKEVMGALTRVSQRICSVKM

SEQ ID NO: 4379 - DNA, 312 bp, Homo sapiens
atgaaaatatcaacaataacgggagtttggaggaagttgatttccaccttcatgaattactttgagaggttcaagacttccttggaggaagtagctgaagatgtggatgaaatagcaacagaactagaattagaagtggagcctgaagatgtgactgaattgcttcaatctcatgatgaaactttaaccgataaggagttagtttttgtaggtgagcaaaggaagaggtttatggagataaaatttactcctcccgaagatgttgtgaacgttcttgaaatgacaacaaagatattacatcaacttagttga

SEQ ID NO: 4380 - protein, 103 aa, Homo sapiens [sequence omitted]

SEQ ID NO: 4381 - DNA, 528 bp, Homo sapiens
gatacccatcctgagctgtttatgtccttgtgcctctcttcacaaacctgctggtctccctctgccacctgggatgcagtgcagtggcctgaccacaggttcaaggaaaagttagtggaagccgttatccatgtcaacattgaaccagaaggttctgggatacatgtgcagaatgtgcagagcatgatttgcaagaggaactgctacacattttacacttatttactccaacctttcctgctaattccaggtttattgtaaaaccactgatcccttcatttgagctcgacttccctgcacttagttttgaatttttcccctgtccaatagtaagacacacacacagagaagaacaacaagaacaagaagagaattgcaatgatgtgaagtaatgtatatgttaattagcttgaattagcttgattgtggtgattatttcacaatgtacatgtatatcagatcataaacttgtatatcttaaatgaatacaacttttatttgtcaattatacctcattcgagctggaaa

SEQ ID NO: 4382 - protein, 79 aa, Homo sapiens
MSLCLSSQTCWSPSATWDAVQWPDHRFKEKLVEAVIHVNIEPEGSGIHVQNVQSMICKRNCYTFYTYLLQPFLLIPGLL

SEQ ID NO: 4383 - DNA, 1312 bp, Homo sapiens
agccggctgcagggcggtgattcgcccccgggatggtggcggcgattccgtgcgccttcctgcagttggacatcagttatatttcaggctttcaaagtaaacgacgaactcagcactttggcagagtccaaaatccgccagcgaacttgggtgctagagttcggcgggaagaaaagcgcccgggctgcgccgaccgccggccccgagccgccgcgggctccgaggagtcggccgagctgctcccgcgccctggccggacgtttgaaactattgctttgctgaaaacatctgactgccaggctaggatgtgacacttaagggacttaccaatttgggattcttccaggagctgaaaactgattgcaaatatgaaacagatttcactacaggacttgaaccctacattaaaaaacaacaagctccccaaaataattgaaaaagatcttcaccaaagagtagctgcaatgtgaatggcaggatatgaagcaagtaagagatggtgaaaagattatcttaagcttggaattaagtgatgaaagggaccttcgaaattatcaactctaaatacttctttacaggaaaattgaaagcagttaagaacctgccccctaccgtggagttcttggtgccgtgagttggagttcttggtgcctgggtgcgtccccaaggccactggtcttcagatctttcttacttgagaagaacgcctccgcctcctggctctcccaccagtggtattgccaccaccacacaccagcataaagcacagattgctgcccagctccttggagaggggccagtgcatttgtcaggaattgaaaagttttggagccagttcgaggactttctcctgcacaaagtgttggctggaagcatgaagcaataacacatggtttgccaaagaatctgcattgaataatactggtggtgaccacaagaacatgcctctctgactgcaaggaacaagagtgacccagggtttcagctgctgccttggaaattcatcacagtgcaagtctatgcttcccacgggctgctcccagcctgtgaataagcctggcatctttgttgaggcaggcctatttctggagatgcaggatcctccgatgggcgaatttggctctaggactgcttgatggccttgacagactttccttagaaatgcatggcaatttagggttcctccacccttccctctttctctccttcacctagggtcggacttgcatcatggcctgaaagctccaccagcctctcctgccctcctcctcattttctttcacaggcatatcctctaataaatttcttgcac

SEQ ID NO: 4384 - protein, 92 aa, Homo sapiens
MVAAIPCAFLQLDISYISGFQSKRRTQHFGRVQNPPANLGARVRREEKRPGCADRRPRAAAGSEESAELLPRPGRTFETIALLKTSDCQARM

SEQ ID NO: 4385 - DNA, 249 bp, Homo sapiens
atgatatttttgcatgaggttttccagcttctgggtggaaacatcttggtggccaccgatgcagctggagggctcaaccccaagtctgaggttggaaggatcatgcttctctgtgatcacatcaagctacttggtttctgtgatcagaactctcccaaagggcccaatgatgaaaggtttggagttcattttcctgccacgtctgatgcctacaactggacaatgaagcaaaaggcgctcaattcttag

SEQ ID NO: 4386 - protein, 82 aa, Homo sapiens
MIFLHEVFQLLGGNILVATDAAGGLNPKSEVGRIMLLCDHIKLLGFCDQNSPKGPNDERFGVHFPATSDAYNWTMKQKALNS

SEQ ID NO: 4387 - DNA, 249 bp, Homo sapiens; identical to SEQ ID NO: 4385

SEQ ID NO: 4388 - protein, 82 aa, Homo sapiens; identical to SEQ ID NO: 4386

SEQ ID NO: 4389 - DNA, 724 bp, Homo sapiens
tgcttgtgattaaataaccccaactgacgtggaaatcaaataaagcaacaaagaactgctttttcaactaacaaaatatacagctggatgtttgtcacaattctaatgtccctgcaaagatgagatgcatgaatcacacagcaatctcatcaaaaaggaatttctggaaggcataggagaagagaatcctggaaaaagcaagaagcaggaagataagaggcaaagaagaagagagccccacccactggggcaagctggggccccagatgatgaaactgtggcccagaaagtttaagggatgtgtcaaatgtcacacagctcacagatccagggacatggcttaaatccagatatcttgattctaacttcagttgaggaagagaaagagtgctgccccacgctgcctgatttacaacgtgaagtgaaatctttgaaaagaaaaataagacaatgtcactcaagctcttatctgaggatttcctgggtttgaagacagagctcaaactcatacaaggggtcatctgagtctgcagataggcttgctttatgctgctccgtcagatctcttctaaagattagtgcgcaattctggacattacattttaatggtaacatggattcaactaaagggtaagcaaaggacaccgacaggaatagggagggtgccatttatagagaaaagactgagaggtccatattgttattttacctgaaagatataata

SEQ ID NO: 4390 - protein, 56 aa, Homo sapiens
MHESHSNLIKKEFLEGIGEENPGKSKKQEDKRQRRREPHPLGQAGAPDDETVAQKV

SEQ ID NO: 4391 - DNA, 724 bp, Homo sapiens; identical to SEQ ID NO: 4389

SEQ ID NO: 4392 - protein, 56 aa, Homo sapiens; identical to SEQ ID NO: 4390

SEQ ID NO: 4393 - DNA, 1257 bp, Homo sapiens
atgatacgagtcattggacttaggtcccaccctaaacccagactaatctcattaggagattaccaagacatcaaagtggctttgcctagaagccaaggccattggtccaacgcagacatcttgaggttactggaatgcatggagaataatctcccatatgatgacaacggcacgttcagctcaactcagtcacacatggactggggaaaagtagcttttaaaaacttttctggtgaaatgtgcagactcaaatggttagagatttcttgcagcttgagaaaattcagcactttgaaaaaattagtcctggaagctaagaaatgtgttaaaaatacaaacaaaagccaaaaaggcaggaaccatccagactttccaaagaggctccttactgcttatatccgcttcttcaaggagaattggccccagtactcccaaatgtaccctgggatgagaagccaggaagtgaccaaaatcctgtcaaagaaatacaaggagctcccagagcagatgaaacagaaacatattcaggatttccggaaggaaaagcaagaatttgaggaaaaacttgctcgattcagggaagaacaccctgatttagaccagaagggcaagaaatctgatatctgcaagagggttcaaaccaaagtgcaaaagaaggttcagaaaaatattgaagaagtgaggtctcttccaaaaacggatcaatttttcaagaaggtaaaatttcatggagagcctcagaaaccccccatgaatggataccagaagtttcaccaagattcctggtcaagtaaggagctgcaacatttgtccctgagggagcgcatggtagagattggcagacgctggcagcgcatcccgcagagccagaaggatcattacaagagccaggctgagttgctgcagaaggaatacaaagtggaattggatctctggctcaagactttgtcacctgaagattatgctgcatacaaagaatcgacctatgctaagggtaagaatatggcgatgatgggaggcccggcccccagcttgaaacaaacagatccgcagtcctcatcagcaaagggtctgcaagaagggtttggggaggggcaggggctccaggctgcaggaacagaggcatcacagactatttgggtaaactgtcaggtctctatggaaccagaagacaacaggaagaaagatggcgaagaggaagaaagcagtaactctttagactgcagcagtggggaagacatggaagttgatgtctga

SEQ ID NO: 4394 - protein, 418 aa, Homo sapiens
MIRVIGLRSHPKPRLISLGDYQDIKVALPRSQGHWSNADILRLLECMENNLPYDDNGTFSSTQSHMDWGKVAFKNFSGEMCRLKWLEISCSLRKFSTLKKLVLEAKKCVKNTNKSQKGRNHPDFPKRLLTAYIRFFKENWPQYSQMYPGMRSQEVTKILSKKYKELPEQMKQKHIQDFRKEKQEFEEKLARFREEHPDLDQKGKKSDICKRVQTKVQKKVQKNIEEVRSLPKTDQFFKKVKFHGEPQKPPMNGYQKFHQDSWSSKELQHLSLRERMVEIGRRWQRIPQSQKDHYKSQAELLQKEYKVELDLWLKTLSPEDYAAYKESTYAKGKNMAMMGGPAPSLKQTDPQSSSAKGLQEGFGEGQGLQAAGTEASQTIWVNCQVSMEPEDNRKKDGEEEESSNSLDCSSGEDMEVDV

SEQ ID NO: 4395 - DNA, 1244 bp, Homo sapiens
atgaagagaagacagctccagaactctgttcagcaaactgaaaaaggtctttttggttcatcacgggtacaatatgttgtagatcatgcaatgaaaattgttttcctcaatactgacccctctattgtaacgacttatgatgctgttcaaaatgtgcattctgtgtggactctccggagagtcaaatcagaggaagagaatgttgttttaaagttctctgaacaggggggaaccccacagaatgtggccactagcagctccctcacagcacatctcagaagcctctccaaaggagattcccctgtgatttcacctttccggaattactcctccattcacagccagagtcgctcaacctcatcacccagtctacattctcgctcaccttctatttccaacatggcagctctaagtcgtgctcattctcctgcgttaggagtgcactctttttcaggggtgcaaaggttcaacatttcaagccataatcagtctccaaagagacatagtatttctcattctccaaatagtaattctaatgactcctttcttgcaccagaaacggagccaattgttcctgaactgtgtattgaccatttgtggacagaaatgattactaatataagagagaaaaattcacaagcctcaaaagtgtttattacatctgacctatgtgggcaaaattcctgtgctttttagtagagtcccagctccacttacgctgtgtaaagtttcaagagagtaatgataaaacccagctcatctttgattcagtgaccaacataccagcaaaggatgcagcaccagtggagaaaatagacaccatgctggtcttggaaggcagtggaaacctggtgctatacacaggagtggttcgggtaagcaataagtagcacttcatgcctttagtaggacttcaggctgcctgcatgaatattcgtaatgttactttagattgatattttaaatttgttatgttcctgtctgcacaatttggcagaagaattttgttaataattctcagtgaagcttcccatttaggtgggtcctaatttggagggctatggctcactgctattaaatgcattggtactctaaacctgtcacagatgggaaaccttcaatgagtataggtagattttttttaaagttaaactagttttgaaattgaagcatgggtccctttggtaagtactaaagttttggtaaagtttcactatattaaatgtggtatatgttagctgtat

SEQ ID NO: 4396 - protein, 231 aa, Homo sapiens
MKRRQLQNSVQQTEKGLFGSSRVQYVVDHAMKIVFLNTDPSIVTTYDAVQNVHSVWTLRRVKSEEENVVLKFSEQGGTPQNVATSSSLTAHLRSLSKGDSPVISPFRNYSSIHSQSRSTSSPSLHSRSPSISNMAALSRAHSPALGVHSFSGVQRFNISSHNQSPKRHSISHSPNSNSNDSFLAPETEPIVPELCIDHLWTEMITNIREKNSQASKVFITSDLCGQNSCAF

SEQ ID NO: 4397 - DNA, 7170 bp, Homo sapiens
tcttggaattggcgactgctgcggggctgagcgctggtctcacgcatctcgggagccaggttggtggcgcgatgagttgcagcaaggcctacggggagcggtacgtcgcctcggtgcagggctccgccccgtcgcctcgaaagaagtcaacgagaggattctattttgcaaagctgtattatgaagctaaagaatatgatcttgctaaaaaatacatatgtacttacattaatgtgcgagagatggatcccagagctcacagatttctgggtcttctttatgaattggaagaaaacacagagaaagccgttgaatgttacaggcgttcagtggaattaaacccaacacaaaaagatcttgtgttgaagattgcagaattgctttgtaaaaatgatgttactgatggaagagcagaatactgggtggaaagagcagcaaaacttttcccaggaagtcctgcaatttataaactaaaggaacagcttctagattgtgaaggtgaagatggatggaataaactttttgacttgattcagtcagaactttatgtaagacctgatgacgtccatgtgaacatccggctagtggagttgtatcgctcaactaaaagattgaaggatgctgtggcccgctgccatgaggcagagaggaacatagctttgcgttcaagtttagagtggaattcgtgtgttgtacagacccttaaggaatatctggagtctttacagtgtttggagtctgataaaagtgactggcgagcaaccaatacagacttactgctggcctatgctaatcttatgcttcttacgctttccactagagatgtgcaggaaagtagagaattactggaaagttttgatagtgctcttcagtctgcgaaatcttctttgggtggaaatgatgaactgtcagctactttcttagaaatgaaaggacatttctacatgcatgctggttctctgctcttgaagatgggtcagcatggtaataatgttcaatggcgagctctttctgagctggctgcattgtgctatctcatagcatttcaggttccaagaccaaagattaaattaataaaaggtgaagctggacaaaatctgctggaaatgatggcctgtgaccgactgagccaatcagggcacatgttgctaaacttaagtcgtggcaagcaagattttttaaaagtggttgttgaaacttttgccaacaaaagcgggcagtctgcattatatgatgctctgttttctagtcagtcacctaaggatacatcttttcttggtagcgatgatattggaaacattgatgtacaagaaccagagcttgaagatttggctagatacgatgttggtgctattcgagcacataatggtagtcttcagcaccttacttggcttggcttacagtggaattcattgcctgctttacctggaatccgaaaatggctaaaacagcttttccatcatttgccccaggaaacctcaaggcttgaaacaaatgcacctgaatcaatatgtattttagatcttgaagtatttctccttggagtagtatataccagccacttacaattaaaggagaaatgtaattctcaccacagctcctatcagccgttatgcctgccccttcctgtgtgtaaacagctttgtacagaaagacaaaaatcttggtgggatgcggtttgtactctgattcacagaaaagcagtacctggaaactcagcaaaattgagacttctagttcagcatgaaataaacactctaagagcccaggaaaaacatggccttcaacctgctctgcttgtacattgggcaaaatgccttcagaaaatgggcagcggtcttaattctttttatgatcaacgagaatacatagggagaagtgttcattattggaagaaagttttgccattgttgaagataataaaaaagaagaacagtattcctgaacctattgatcctctgtttaaacattttcatagtgtagacattcaggcatcagaaattgttgaatatgaagaagacgcacacgtaacttttgctatattggatgcagtaaatggaaatatagaagatgctatgactgcttttgaatctataaaaagtgttgtttcttattggaatcttgcactgatttttcacaggaaggcagaagacattgcaaatgatgccctttctcctgaagaacaagaagaatgcaaaaattatctgagaaagaccaggggctacctaataaagattttagatgacagtgattcaaatctttcagtggtcaagaaattgcctgtgcccctggagtctgtaaaagagatgcttaagtcagtcatgcaggaactcgaaaactatagtgaaggaggtcctctctataaaaatggttctttgcgaaatgcggattcagaaataaaacattctacaccatctcctaccaaatattcactatcaccaagtaaaagttacaagtattctcccaaaacaccacctcgatgggcagaagatcagaattctttactgaaaatgattcgccaagaagtaaaggccattaaggaagaaatgcaggagttgaaactaaatagcagtaagtcagcatcccatcatcgttggcccacagagaattatggaccagactcggtgcctgatggatatcaggggtcacagacatttcatggggctccactaacagttgcaactactggcccttcagtatattatagtcagtcaccagcatataattcccagtatcttctcagaccagcagctaatgttactcccacaaagggttcttctaatacagaatttaagtcaaccaaagaaggattttccatccctgtgtctgctgatggatttaaatttggcatttcggaaccaggaaatcaagaaaagaaaagtgaaaagcctcttgaaaatgatactggcttacaggctcaggatattagtggccggaagaagggccgtggtgtgatttttggccaaacaagtagcacttttacatttgcagatgttgcaaaatcaacttcaggagaaggatttcagtttggcaaaaaagacctcaatttcaagggattttcaggtgctggagaaaaattattctcatcacaatacggtaaaatggccaataaagcaaacacttccggtgactttgagaaagatgatgatgcctataagactgaggacagcgatgacatccattttgaaccagtagttcaaatgcctgaaaaagtagaacttgtaacaggagaagaaggtgaaaaagttctgtattcacagggggtaaaactatttagatttgatgctgaggtaagtcagtggaaagaaaggggcttggggaacttaaaaattctcaaaaacgaggtcaatggcaaagtaagaatgctgatgcaaagagaacaagtactaaaagtgtgtgctaatcattggataacgactacaatgaacctgaagcccctctctggatcagatagagcatggatgtggtcagccagtgatttctctgatggtgatgccaaactagagcgattggcagcaaaatttaaaacaccagagctggctgaagaattcaagcagaaatttgaggaatgccagcggcttctgttagacataccacttcaaactccccataaacttgtagatactggcagagctgccaagttaatacagagagctgaagaaatgaagagtggactgaaagatttcaaaacatttttgacaaatgatcaaacaaaagtcgctgaggaagaaaataagggttcaggtacaggtgcggccggtgcctcagacacaacaataaaacccaatgctgaaaacactgggcccacattagaatgggataactatgatttaagggaagatgctttggatgatagtgtcagtagtagctcagtacatgcttctccattggcaagtagccctgtgagaaaaaatcttttccactttgatgagtcaacaacaggatctaacttcagttttaaatctgctttgagtctatctaagtctcctgccaagttgaatcagagtgggacttcagttggcactgatgaagaatctgatgttactcaagaagaagagagagatggacagtactttgaacctgttgttcctttacctgatctagttgaagtatccagtggtgaggaaaatgaacaagttgtttttagtcacagggcagaattctacagatatgataaagatgttggtcaatggaaagaaaggggcattggtgatataaagattttacagaattatgataataagcacgttcgtatactgatgagaagggaccaagtattaaaactttgtgccaatcacagaataactccagacatgagtttgcaaaatatgaaagggacagaaagagtatgggtgtggactgcatgtgattttgcagatggagaaagaaaagtagagcatttagctgttcgttttaaactacaggatgttgcagactcgtttaagaaaatttttgatgaagcaaaaacagcccaggaaaaagattctttgataacacctcatgtttctcggtcaagcactcccagagagtcaccatgtggcaaaattgctgtagctgtattagaagaaaccacaagagagaggacagatgttattcagggtgatgatgtagcagatgcagcttcagaagttgaagtgtctagcacatctgaaacaacaacaaaagcagtggtttctcctccaaagtttgtatttggttcagagtctgttaaaagaatttttagtagtgaaaaatcaaaaccatttgcatttggcaacagttctgccactgggtctttgtttggatttagttttaatgcacctttgaaaagtaacaatagtgaaactagttcagtagcccagagtggatctgaaagcaaagtggaacctaaaaaatgtgaactgtcaaagaactctgatatcgaacagtcttcagatagcaaagtcaaaaatctctctgcttcctttccaacggaagaatcttcaatcaactacacatttaaaacaccagaaaaggagcctccattatggtatgctgaatttactaaagaagaattggttcagaagctcagttccaccacaaaaagtgcagatcacttaaacggcctgcttcgggaaatagaggcaaccaatgcagtccttatggagcaaattaagcttctcaaaagtgaaataagaagattggaaaggaatcaagagcaagaggtgtctgcagctaacgtggaacacttgaagaacgtcttgctgcagttcattttcttgaagccaggtagtgaaagagagagacttcttcctgttataaatacgatgttgcagctcagccttgaagaaaagggaaaacttgctgcggttgctcaaggtgaggaataaaatgcttcccgttcttctggatgggcatcctatcttcgtagttggtttggacttcgataggttgatggaaggaatgtttttattaaccaaataaaatctatttacaaaaatggttcatgtgtattaccatcattcttttgtcaaaaagtgtgtatatgtttgcatttacatatatttgtacatctatatgacagatgtattttaaaagtttcaacttgaagtaaaagtacaacagcttgaagtgttgataccaggccacagccctctaactcatgtgatctcccatgcatgctgccagaataaaaccaccaggaatgaattcactccccacttctctggaacctcaggacccgcccatttctcggcagtactgtgaattttgaagttaaactaaattttggtaccataccaactggaatttaggctttaaaaataatgtttcaaggccaggtgtggtgattcatgcctgaaatcccactacttggggaggctgaggctggagaatcgtttgaggctagtgagctgtgattgtatcactgcactccagctcggggaacagagcgagaccttgtctctaaaaataataatagtaataaaaataacattttatgactatttattgcaaggtcagatttacagattgttataaattgttgagaaatttttgtgattagaatatgaaggaaaaagctttgttggtaaaagtgacatgttaaggggctatgaagtaaatatgctgcagttaattgtgctaagttaaaatacagtttagttatttgctttaaaataaactcttctttttttctttaaagtatactatctcaaaactcattatgttgtcagagccctagagctggctagtgtaacactgactatgaataggtgggcccaccacttgagttgaggtgatttcatggtgtctttccaggctcttgatagggtgtcactgcatgcaagccatgaatctgttttgagaatcctctccattttcccaaataaaaacctatcccaacagtgactatatcactcagcattgaatctaaatataaaagtggtgctttcagtgtttttggcagatagtgttccataagctttccatcagaagggattttagacaccttagaggtccgtgctacatcttcacagttcctctgaataaccttaggtggtagtgttacttgcctttgacaccgctgcatatgttttaatgactagatccaaactgtgttgttcttaaatcaaaaattggataatttttaatatttatgtattaatcacatagtatgctctctgaagttctcttaagccttcagtttatactcttaattttctttctgagctggggaactgactttgcactttggttacacagaacattggtttccaatttagtttaactgaaatttgctgctgatatgttgagtttgttctttaaaaaatatctcatatatctcgtctttcctccttagaagaacagacctaactagcgaatgtatgaatgaaaatgcatctatttcagagccgacatgaagagtttagtttttttactttataaactgtgaatatgagtatgccagctgcatacgatgtaactaatcatatttaaatatatttcactttctctttgacttgagaccttttgaagtctgtataaacttgttttgaaatatagtctccacttacaaatgtcataacaaaatacttttttgcatgataaaaaattgattacaaaaggcatattctttcatggtttctgcaatgagaggaagtgtaatgattattttaatatttctattaaatatgtttaactgtatatttttat

SEQ ID NO: 4398 - protein, 1758 aa, Homo sapiens
MSCSKAYGERYVASVQGSAPSPRKKSTRGFYFAKLYYEAKEYDLAKKYICTYINVREMDPRAHRFLGLLYELEENTEKAVECYRRSVELNPTQKDLVLKIAELLCKNDVTDGRAEYWVERAAKLFPGSPAIYKLKEQLLDCEGEDGWNKLFDLIQSELYVRPDDVHVNIRLVELYRSTKRLKDAVARCHEAERNIALRSSLEWNSCVVQTLKEYLESLQCLESDKSDWRATNTDLLLAYANLMLLTLSTRDVQESRELLESFDSALQSAKSSLGGNDELSATFLEMKGHFYMHAGSLLLKMGQHGNNVQWRALSELAALCYLIAFQVPRPKIKLIKGEAGQNLLEMMACDRLSQSGHMLLNLSRGKQDFLKVVVETFANKSGQSALYDALFSSQSPKDTSFLGSDDIGNIDVQEPELEDLARYDVGAIRAHNGSLQHLTWLGLQWNSLPALPGIRKWLKQLFHHLPQETSRLETNAPESICILDLEVFLLGVVYTSHLQLKEKCNSHHSSYQPLCLPLPVCKQLCTERQKSWWDAVCTLIHRKAVPGNSAKLRLLVQHEINTLRAQEKHGLQPALLVHWAKCLQKMGSGLNSFYDQREYIGRSVHYWKKVLPLLKIIKKKNSIPEPIDPLFKHFHSVDIQASEIVEYEEDAHVTFAILDAVNGNIEDAMTAFESIKSVVSYWNLALIFHRKAEDIANDALSPEEQEECKNYLRKTRGYLIKILDDSDSNLSVVKKLPVPLESVKEMLKSVMQELENYSEGGPLYKNGSLRNADSEIKHSTPSPTKYSLSPSKSYKYSPKTPPRWAEDQNSLLKMIRQEVKAIKEEMQELKLNSSKSASHHRWPTENYGPDSVPDGYQGSQTFHGAPLTVATTGPSVYYSQSPAYNSQYLLRPAANVTPTKGSSNTEFKSTKEGFSIPVSADGFKFGISEPGNQEKKSEKPLENDTGLQAQDISGRKKGRGVIFGQTSSTFTFADVAKSTSGEGFQFGKKDLNFKGFSGAGEKLFSSQYGKMANKANTSGDFEKDDDAYKTEDSDDIHFEPVVQMPEKVELVTGEEGEKVLYSQGVKLFRFDAEVSQWKERGLGNLKILKNEVNGKVRMLMQREQVLKVCANHWITTTMNLKPLSGSDRAWMWSASDFSDGDAKLERLAAKFKTPELAEEFKQKFEECQRLLLDIPLQTPHKLVDTGRAAKLIQRAEEMKSGLKDFKTFLTNDQTKVAEEENKGSGTGAAGASDTTIKPNAENTGPTLEWDNYDLREDALDDSVSSSSVHASPLASSPVRKNLFHFDESTTGSNFSFKSALSLSKSPAKLNQSGTSVGTDEESDVTQEEERDGQYFEPVVPLPDLVEVSSGEENEQVVFSHRAEFYRYDKDVGQWKERGIGDIKILQNYDNKHVRILMRRDQVLKLCANHRITPDMSLQNMKGTERVWVWTACDFADGERKVEHLAVRFKLQDVADSFKKIFDEAKTAQEKDSLITPHVSRSSTPRESPCGKIAVAVLEETTRERTDVIQGDDVADAASEVEVSSTSETTTKAVVSPPKFVFGSESVKRIFSSEKSKPFAFGNSSATGSLFGFSFNAPLKSNNSETSSVAQSGSESKVEPKKCELSKNSDIEQSSDSKVKNLSASFPTEESSINYTFKTPEKEPPLWYAEFTKEELVQKLSSTTKSADHLNGLLREIEATNAVLMEQIKLLKSEIRRLERNQEQEVSAANVEHLKNVLLQFIFLKPGSERERLLPVINTMLQLSLEEKGKLAAVAQGEE

SEQ ID NO: 4399 - DNA, 1586 bp, Homo sapiens
ggcgcgatgagttgcagcaaggcctacggggagcggtacgtcgcctcggtgcagggctccgccccgtcgcctcgaaagaagtcaacgagaggattctattttgcaaagctgtattatgaagctaaagaatatgatcttgctaaaaaatacatatgtacttacattaatgtgcgagagatggatcccagagctcacagatttctgggtcttctttatgaattggaagaaaacacagagaaagccgttgaatgttacaggcgttcagtggaattaaacccaacacaaaaagatcttgtgttgaagattgcagaattgctttgtaaaaatgatgttactgatggaagagcagaatactgggtggaaagagcagcaaaacttttcccaggaagtcctgcaatttataaactaaaggaacagcttctagattgtgaaggtgaagatggatggaataaactttttgacttgattcagtcagaactttatgtaagacctgatgacgtccatgtgaacatccggctagtggagttgtatcgctcaactaaaagattgaaggatgctgtggcccgctgccatgaggcagagaggaacatagctttgcgttcaagtttagagtggaattcgtgtgttgtacagacccttaaggaatatctggagtctttacagtgtttggagtctgataaaagtgactggcgagcaaccaatacagacttactgctggcctatgctaatcttatgcttcttacgctttccactagagatgtgcaggaaagtagagaattactggaaagttttgatagtgctcttcagtctgcgaaatcttctttgggtggaaatgatgaactgtcagctactttcttagaaatgaaaggacatttctacatgcatgctggttctctgctcttgaagatgggtcagcatggtaataatgttcaatggcgagctctttctgagctggctgcattgtgctatctcatagcatttcaggttccaagaccaaagattaaattaataaaaggtgaagctggacaaaatctgctggaaatgatggcctgtgaccgactgagccaatcagggcacatgttgctaaacttaagtcgtggcaagcaagattttttaaaagtggttgttgaaacttttgccaacaaaagcgggcagtctgcattatatgatgctctgttttctagtcagtcacctaaggatacatcttttcttggtagcgatgatattggaaacattgatgtacaagaaccagagcttgaagatttggctagatacgatgttggtgctattcgagcacataatggtagtcttcagcaccttacttggcttggcttacagtggaattcattgcctgctttacctggaatccgaaaatggctaaaacagcttttccatcatttgccccaggaaacctcaaggcttgaaacaaatgcacctgaatcaatatgtattttagatcttgaagtaagcaaagattttaacaaattaaatattctgaattttgtttaatttttttttctaacttaacttttccttaaatgaaacaggtatttctccttggagtagtatataccagccacttacaa

SEQ ID NO: 4400 - protein, 500 aa, Homo sapiens
MSCSKAYGERYVASVQGSAPSPRKKSTRGFYFAKLYYEAKEYDLAKKYICTYINVREMDPRAHRFLGLLYELEENTEKAVECYRRSVELNPTQKDLVLKIAELLCKNDVTDGRAEYWVERAAKLFPGSPAIYKLKEQLLDCEGEDGWNKLFDLIQSELYVRPDDVHVNIRLVELYRSTKRLKDAVARCHEAERNIALRSSLEWNSCVVQTLKEYLESLQCLESDKSDWRATNTDLLLAYANLMLLTLSTRDVQESRELLESFDSALQSAKSSLGGNDELSATFLEMKGHFYMHAGSLLLKMGQHGNNVQWRALSELAALCYLIAFQVPRPKIKLIKGEAGQNLLEMMACDRLSQSGHMLLNLSRGKQDFLKVVVETFANKSGQSALYDALFSSQSPKDTSFLGSDDIGNIDVQEPELEDLARYDVGAIRAHNGSLQHLTWLGLQWNSLPALPGIRKWLKQLFHHLPQETSRLETNAPESICILDLEVSKDFNKLNILNFV

SEQ ID NO: 4401 - DNA, 6899 bp, Homo sapiens
aaagtaactttatcgatagatttgatttaactcattatgtccagaatatcattttaacttctaattaatataaaaattaatgatattttacattattgtttttcaccaagtcttcaaaatccagtgtgtgtgtttacacttactgttagcatgtcttgatttggactagccaccttgtgaggttttaatagaatgtggctaggctaccatattggacaccatagctctcagaatgtttccctgtcaccagttgctatacatggcatgcttcatgactggcttactttattaaactcctttagccagaagttcttctttacattagtagatcagaacaggttgcatatagaagttttttctgtttctaattttttgccctttgcattaatggtggctggggatgggttgttttcagccatatgaatggtcttagattttatagtgttagctacccatagagtaacagtttttatttaattttatctagtatcattcttgaacacaggcaaactagatgcaactctagtcaccttccattcttggcaattgttaactttccttacaggaactaatcacagttggctttggattagtttcatatgtatactaatacttgcttatgttttaagatttttttcagttgctgcaaatgcatggatattttggtaaactattgtatgctaagtatagttaggcaacactttaaaatttttaacctttttaaattctagaaatttgtagtaattcttttcaatgactattaagtaaacacaagatttttttgttttctttggttttaaatagattctgtgttcacttagggtttttggtagaacactaaatcaggatgctaattctaattcatgattatcgtacatctctgcatcaaagtatatgtgttttttatcagtatgctgttttaacctatagataggttccatggtttttattttcaggtagagtattaacgtcaatacttaataccttatctttgtcaatttttttgactggtgttacagcaaaagagaagaaaaaacctgaagattctccctcagatagtctcggtctcctgacctcgtgatccacccgcctcggcctcccaaagtgctgggattacaggcatgagccactgcgcctggctgacacatgtcctaattctggtattcaccagatttgtttcgtgttctccgttgttagtcatcaaatttgtctactttttaaatagaaacattagctagagcaaggaacttagaaacactcaagcggcactgaatgtgtagaactgcataaccaatatagcttctttgctttcacatttacaattagttggagttttagttcagccgtacccagtatcttccattctgcttccaggaagaaatggaaaaatgtcagccatgatgatgcagtattttagtagcaagttgatggtgttttggtttcccatgggaaatattgtcactggagcattagcagctatcggtcacttattagggtaaaaaagcaacttcagaagaatttaatatatgccaaagaatcaacaaaggaagtaatcagccagggcaaaggtcgcacaagagattgtaatctagcaatcagcagtggaataagcagtcagcttaccagaaacccaggaaaatgcttcagaaaggtcagtcaggactaaggcaatttaatgaaatgcaaaataaatgaaatctgaagtttaaaaatctagattacaattctggtttctaactcagttatgagaccttgggcaaagtcattaaatttctctgaacttcagatttttgggagtcaataaaccaatacatgtcaaagggcctggtaaactttacagtttagaccaggcgtggtgtctcacccctgcaatctcagcactttgggaggccaaggcgggtggatcacatgaggccaggagtttgagaccagtctgaacaacatggtgaaatcccatctctattaaaagtacaaaaattatctgggcgggatggcatgcacctggaagtcccagctacttgtggggctgaggtgggaggatggcttgagcctgggaggcagaggttgctgtgagccaagatcgtgccactgcactccaacctgtgtgacagagtgagaccctgtctcagaaaaaataacactttacagtttatcagcaaacagcaaagtcttgctaggcaatgtaattgattagttccgtgccctggattctgggctcttaactgtatgagcactgtaggtgtgagcagcaacaattacgaagctgcagaggtaaaggtataagggcagtgattgaggatgtctaccaagcagatttcagcaagtgtgtttcaagaagtatgcagcaatctgaaatacctaatcctgaaaaattgctagaatctagtcttttaattttggccagtatttagcagtagtttggccctctactctaaattaataaaaaataagtagtactatattatgagctgtgttatctaacagtttgtcttagctagtagcaattaatttatagctgctattaaaatgactaacgtagttaaaagtttgatgactaagtttttttttgtttgtttttttgttttgagctggagtcttgctctgtcaccaggctgaagtgcagtggcgtgatcttggctcactacaacctccgcctcctggcttccagcagttctctgcctcagcctccccagcagctgggattacaggcacctgccactgtgcctggctaatttttgcatttttagtagagatagggtttcaccatcttggccaggctggtcttgaacttgctgacctcgtgatccacccaccttagcctcccaaactgctaggattacagatttgagccaccacgcccggccttgatgactaaattttaagaaatgttttagcaattcttcatacacctttcacttatcttatagttacttaattcctctactcttatcatttgatattttcattttgtgtacctctgtaaggccgaatcaatagattttgaacaatctcatacttaacctttaaaaaaaatctaataggcccagtttcctctcaacaatctttgaagaaccttcgagaaaggagaaacacagacctcccgcttctagacatgcacactgtaacccgggaagagggagaaggcatggagacaactgatacggagtctgtgtcttccgccagcacatacacacagtctttagagcagctgcttaattctcccgaaactaaacttggtctgttactctgtctaaatatgttcttcttctttaatttcactgtcttatttaattactattactctaaggtacatatgcttttttgggctgctccaataaaatttctttcaatattccactacctgtttgcattagggttctctagagggacagagctaattggatggttggatggatggatgagatggatggatggatgcttattaagtattaccttacacgatcactaggccatctgcagactgaggagcaacgagagccagtccaagttccaaaactgaagaactaggagtctgatgttcaagggcaggaagcatccagcacaggagaaagatgtaggttgggaggctaggccagtctcgccttttcaggtttttctgcctgctttatattcactggcagctgattagatggcacctaccaggttaagggtgggtctgccttccccagcccactgactcaaatgttaatctcctttggcaacaccctcacagacaacactcaggattaatactttgcatcctttaatccaatcaagttgacacccagtattaaccatcacactgtccaaatggaaaaattattaaacaaatcttttttaaaataaaatgctagctcttgccctaggcttgaaccataaataagtggtgggaagtttatagtcacaaataggtggtgggtattagaaagcaggataaactatcctctcacccttccaagaaactgacagtttcagtttattcctcttgatgaagtaatgctaaatttttgtagtgatgttttggtatattttattacctgtaattaatattactgttcaaaatttagggggaaatctgtcatcttcctgaaacttcagaatcacctggagtaagggtcatttgtattcatggtcactgaccacgtggggtagaaactgcaagtcatggttccttcaggcaaagttaatagtggtgacatggaggcatcatgatagagcagcagactccagaagccaatttgactttgtgatttctgcaaaaattacctgtcaactgtgagcctgtttcatcgtctgtaaagtttgaataatgatacctaccccgcctgatagaagattcttatgagggaacatgatacgtgaccagtaaatgttaatgctttccttatacgtgaaatgacataaaatcttggaatattaatagatgggaagaagatgtgtaataaaactgtctataaacacaattctgacaaatttcagaactgggactcatagggcttgtattcagttagatgacatgctttacaacagagatactgttttatttgtgtcacctacaacatataatctgttgattgaggtatgccgaatagatgaatggcaaagaaagcagagctataaaatatcacatagtaagatatttatatttagatttttcttatttagaatcttcatctgtaatgtatgattttgaaaattaattcttggaacaacatgttgcagagcctccattatggtatgctgaatttactaaagaagaattggttcagaagctcagttccaccacaaaaagtgcagatcacttaaacggcctgcttcgggaaatagaggcaaccaatgcagtccttatggagcaaattaagcttctcaaaagtgaaataagaagattggaaaggaatcaagagcaagaggtgtctgcagctaacgtggaacacttgaagaacgtcttgctgcagttcattttcttgaagccaggtagtgaaagagagagacttcttcctgttataaatacgatgttgcagctcagccttgaagaaaagggaaaacttgctgcggttgctcaaggtgaggaataaaatgcttcccgttcttctggatgggcatcctatcttcgtagttggtttggacttcgataggttgatggaaggaatgtttttattaaccaaataaaatctatttacaaaaatggttcatgtgtattaccatcattcttttgtcaaaaagtgtgtatatgtttgcatttacatatatttgtacatctatatgacagatgtattttaaaagtttcaacttgaagtaaaagtacaacagcttgaagtgttgataccaggccacagccctctaactcatgtgatctcccatgcatgctgccagaataaaaccaccaggaatgaattcactccccacttctctggaacctcaggacccgcccatttctcggcagtactgtgaattttgaagttaaactaaattttggtaccataccaactggaatttaggctttaaaaataatgtttcaaggccaggtgtggtgattcatgcctgaaatcccactacttggggaggctgaggctggagaatcgtttgaggctagtgagctgtgattgtatcactgcactccagctcggggaacagagcgagaccttgtctctaaaaataataatagtaataaaaataacattttatgactatttattgcaaggtcagatttacagattgttataaattgttgagaaatttttgtgattagaatatgaaggaaaaagctttgttggtaaaagtgacatgttaaggggctatgaagtaaatatgctgcagttaattgtgctaagttaaaatacagtttagttatttgctttaaaataaactcttctttttttctttaaagtatactatctcaaaactcattatgttgtcagagccctagagctggctagtgtaacactgactatgaataggtgggcccaccacttgagttgaggtgatttcatggtgtctttccaggctcttgatagggtgtcactgcatgcaagccatgaatctgttttgagaatcctctccattttcccaaataaaaacctatcccaacagtgactatatcactcagcattgaatctaaatataaaagtggtgctttcagtgtttttggcagatagtgttccataagctttccatcagaagggattttagacaccttagaggtccgtgctacatcttcacagttcctctgaataaccttaggtggtagtgttacttgcctttgacaccgctgcatatgttttaatgactagatccaaactgtgttgttcttaaatcaaaaattggataatttttaatatttatgtattaatcacatagtatgctctctgaagttctcttaagccttcagtttatactcttaattttctttctgagctggggaactgactttgcactttggttacacagaacattggtttccaatttagtttaactgaaatttgctgctgatatgttgagtttgttctttaaaaaatatctcatatatctcgtctttcctccttagaagaacagacctaactagcgaatgtatgaatgaaaatgcatctatttcagagccgacatgaagagtttagtttttttactttataaactgtgaatatgagtatgccagctgcatacgatgtaactaatcatatttaaatatatttcactttctctttgacttgagaccttttgaagtctgtataaacttgttttgaaatatagtctccacttacaaatgtcataacaaaatacttttttgcatgataaaaaattgattacaaaaggcatattctttcatggtttctgcaatgagaggaagtgtaatgattattttaatatttctattaaatatgtttaactgtatatttttatgg

SEQ ID NO: 4402 - protein, 75 aa, Homo sapiens
MEQIKLLKSEIRRLERNQEQEVSAANVEHLKNVLLQFIFLKPGSERERLLPVINTMLQLSLEEKGKLAAVAQGEE

SEQ ID NO: 4403 - DNA, 6479 bp, Homo sapiens
ggtgtgtgccaccacgcctggctctttgttttttttttttatttttagtagagactgtgtttcaccatgttggccaggctggtctcgaactcctgacctcaagtgatcagcccaccttggcctcccagacagagtgttgggattacaggtgtgagccaccacgcctgtacctggcctatctttcataggttatacaaattccttggttcccagtttttgcagtcttttccaattcagtttaattaatggttaactgttcattcattatcaaaaaaagtacagtgtaatagataagaccatgttactattagaagtatgggtatcatcaaattaagatttttgattctaaaattattaggttccaagaccaaagattaaattaataaaaggtgaagctggacaaaatctgctggaaatgatggcctgtgaccgactgagccaatcagggcacatgttgctaaacttaagtcgtggcaagcaagattttttaaaagtggttgttgaaacttttgccaacaaaagcgggcagtctgcattatatgatgctctgttttctagtcagtcacctaaggatacatcttttcttggtagcgatgatattggaaacattgatgtacaagaaccagagcttgaagatttggctagatacgatgttggtgctattcgagcacataatggtagtcttcagcaccttacttggcttggcttacagtggaattcattgcctgctttacctggaatccgaaaatggctaaaacagcttttccatcatttgccccaggaaacctcaaggcttgaaacaaatgcacctgaatcaatatgtattttagatcttgaagtatttctccttggagtagtatataccagccacttacaattaaaggagaaatgtaattctcaccacagctcctatcagccgttatgcctgccccttcctgtgtgtaaacagctttgtacagaaagacaaaaatcttggtgggatgcggtttgtactctgattcacagaaaagcagtacctggaaactcagcaaaattgagacttctagttcagcatgaaataaacactctaagagcccaggaaaaacatggccttcaacctgctctgcttgtacattgggcaaaatgccttcagaaaatgggcagcggtcttaattctttttatgatcaacgagaatacatagggagaagtgttcattattggaagaaagttttgccattgttgaagataataaaaaagaagaacagtattcctgaacctattgatcctctgtttaaacattttcatagtgtagacattcaggcatcagaaattgttgaatatgaagaagacgcacacgtaacttttgctatattggatgcagtaaatggaaatatagaagatgctatgactgcttttgaatctataaaaagtgttgtttcttattggaatcttgcactgatttttcacaggaaggcagaagacattgcaaatgatgccctttctcctgaagaacaagaagaatgcaaaaattatctgagaaagaccaggggctacctaataaagattttagatgacagtgattcaaatctttcagtggtcaagaaattgcctgtgcccctggagtctgtaaaagagatgcttaagtcagtcatgcaggaactcgaaaactatagtgaaggaggtcctctctataaaaatggttctttgcgaaatgcggattcagaaataaaacattctacaccatctcctaccaaatattcactatcaccaagtaaaagttacaagtattctcccaaaacaccacctcgatgggcagaagatcagaattctttactgaaaatgattcgccaagaagtaaaggccattaaggaagaaatgcaggagttgaaactaaatagcagtaagtcagcatcccatcatcgttggcccacagagaattatggaccagactcggtgcctgatggatatcaggggtcacagacatttcatggggctccactaacagttgcaactactggcccttcagtatattatagtcagtcaccagcatataattcccagtatcttctcagaccagcagctaatgttactcccacaaagggttcttctaatacagaatttaagtcaaccaaagaaggattttccatccctgtgtctgctgatggatttaaatttggcatttcggaaccaggaaatcaagaaaagaaaagtgaaaagcctcttgaaaatgatactggcttacaggctcaggatattagtggccggaagaagggccgtggtgtgatttttggccaaacaagtagcacttttacatttgcagatgttgcaaaatcaacttcaggagaaggatttcagtttggcaaaaaagacctcaatttcaagggattttcaggtgctggagaaaaattattctcatcacaatacggtaaaatggccaataaagcaaacacttccggtgactttgagaaagatgatgatgcctataagactgaggacagcgatgacatccattttgaaccagtagttcaaatgcctgaaaaagtagaacttgtaacaggagaagaaggtgaaaaagttctgtattcacagggggtaaaactatttagatttgatgctgaggtaagtcagtggaaagaaaggggcttggggaacttaaaaattctcaaaaacgaggtcaatggcaaagtaagaatgctgatgcaaagagaacaagtactaaaagtgtgtgctaatcattggataacgactacaatgaacctgaagcccctctctggatcagatagagcatggatgtggtcagccagtgatttctctgatggtgatgccaaactagagcgattggcagcaaaatttaaaacaccagagctggctgaagaattcaagcagaaatttgaggaatgccagcggcttctgttagacataccacttcaaactccccataaacttgtagatactggcagagctgccaagttaatacagagagctgaagaaatgaagagtggactgaaagatttcaaaacatttttgacaaatgatcaaacaaaagtcgctgaggaagaaaataagggttcaggtacaggtgcggccggtgcctcagacacaacaataaaacccaatgctgaaaacactgggcccacattagaatgggataactatgatttaagggaagatgctttggatgatagtgtcagtagtagctcagtacatgcttctccattggcaagtagccctgtgagaaaaaatcttttccactttgatgagtcaacaacaggatctaacttcagttttaaatctgctttgagtctatctaagtctcctgccaagttgaatcagagtgggacttcagttggcactgatgaagaatctgatgttactcaagaagaagagagagatggacagtactttgaacctgttgttcctttacctgatctagttgaagtatccagtggtgaggaaaatgaacaagttgtttttagtcacagggcagaattctacagatatgataaagatgttggtcaatggaaagaaaggggcattggtgatataaagattttacagaattatgataataagcacgttcgtatactgatgagaagggaccaagtattaaaactttgtgccaatcacagaataactccagacatgagtttgcaaaatatgaaagggacagaaagagtatgggtgtggactgcatgtgattttgcagatggagaaagaaaagtagagcatttagctgttcgttttaaactacaggatgttgcagactcgtttaagaaaatttttgatgaagcaaaaacagcccaggaaaaagattctttgataacacctcatgtttctcggtcaagcactcccagagagtcaccatgtggcaaaattgctgtagctgtattagaagaaaccacaagagagaggacagatgttattcagggtgatgatgtagcagatgcagcttcagaagttgaagtgtctagcacatctgaaacaacaacaaaagcagtggtttctcctccaaagtttgtatttggttcagagtctgttaaaagaatttttagtagtgaaaaatcaaaaccatttgcatttggcaacagttctgccactgggtctttgtttggatttagttttaatgcacctttgaaaagtaacaatagtgaaactagttcagtagcccagagtggatctgaaagcaaagtggaacctaaaaaatgtgaactgtcaaagaactctgatatcgaacagtcttcagatagcaaagtcaaaaatctctctgcttcctttccaacggaagaatcttcaatcaactacacatttaaaacaccagaaaaggagcctccattatggtatgctgaatttactaaagaagaattggttcagaagctcagttccaccacaaaaagtgcagatcacttaaacggcctgcttcgggaaatagaggcaaccaatgcagtccttatggagcaaattaagcttctcaaaagtgaaataagaagattggaaaggaatcaagagcaagaggtgtctgcagctaacgtggaacacttgaagaacgtcttgctgcagttcattttcttgaagccaggtagtgaaagagagagacttcttcctgttataaatacgatgttgcagctcagccttgaagaaaagggaaaacttgctgcggttgctcaaggtgaggaataaaatgcttcccgttcttctggatgggcatcctatcttcgtagttggtttggacttcgataggttgatggaaggaatgtttttattaaccaaataaaatctatttacaaaaatggttcatgtgtattaccatcattcttttgtcaaaaagtgtgtatatgtttgcatttacatatatttgtacatctatatgacagatgtattttaaaagtttcaacttgaagtaaaagtacaacagcttgaagtgttgataccaggccacagccctctaactcatgtgatctcccatgcatgctgccagaataaaaccaccaggaatgaattcactccccacttctctggaacctcaggacccgcccatttctcggcagtactgtgaattttgaagttaaactaaattttggtaccataccaactggaatttaggctttaaaaataatgtttcaaggccaggtgtggtgattcatgcctgaaatcccactacttggggaggctgaggctggagaatcgtttgaggctagtgagctgtgattgtatcactgcactccagctcggggaacagagcgagaccttgtctctaaaaataataatagtaataaaaataacattttatgactatttattgcaaggtcagatttacagattgttataaattgttgagaaatttttgtgattagaatatgaaggaaaaagctttgttggtaaaagtgacatgttaaggggctatgaagtaaatatgctgcagttaattgtgctaagttaaaatacagtttagttatttgctttaaaataaactcttctttttttctttaaagtatactatctcaaaactcattatgttgtcagagccctagagctggctagtgtaacactgactatgaataggtgggcccaccacttgagttgaggtgatttcatggtgtctttccaggctcttgatagggtgtcactgcatgcaagccatgaatctgttttgagaatcctctccattttcccaaataaaaacctatcccaacagtgactatatcactcagcattgaatctaaatataaaagtggtgctttcagtgtttttggcagatagtgttccataagctttccatcagaagggattttagacaccttagaggtccgtgctacatcttcacagttcctctgaataaccttaggtggtagtgttacttgcctttgacaccgctgcatatgttttaatgactagatccaaactgtgttgttcttaaatcaaaaattggataatttttaatatttatgtattaatcacatagtatgctctctgaagttctcttaagccttcagtttatactcttaattttctttctgagctggggaactgactttgcactttggttacacagaacattggtttccaatttagtttaactgaaatttgctgctgatatgttgagtttgttctttaaaaaatatctcatatatctcgtctttcctccttagaagaacagacctaactagcgaatgtatgaatgaaaatgcatctatttcagagccgacatgaagagtttagtttttttactttataaactgtgaatatgagtatgccagctgcatacgatgtaactaatcatatttaaatatatttcactttctctttgacttgagaccttttgaagtctgtataaacttgttttgaaatatagtctccacttacaaatgtcataacaaaatacttttttgcatgataaaaaattgattacaaaaggcatattctttcatggtttctgcaatgagaggaagtgtaatgattattttaatatttctattaaatatgtttaactgtatatttttat

SEQ ID NO: 4404 - protein, 1412 aa, Homo sapiens
MACDRLSQSGHMLLNLSRGKQDFLKVVVETFANKSGQSALYDALFSSQSPKDTSFLGSDDIGNIDVQEPELEDLARYDVGAIRAHNGSLQHLTWLGLQWNSLPALPGIRKWLKQLFHHLPQETSRLETNAPESICILDLEVFLLGVVYTSHLQLKEKCNSHHSSYQPLCLPLPVCKQLCTERQKSWWDAVCTLIHRKAVPGNSAKLRLLVQHEINTLRAQEKHGLQPALLVHWAKCLQKMGSGLNSFYDQREYIGRSVHYWKKVLPLLKIIKKKNSIPEPIDPLFKHFHSVDIQASEIVEYEEDAHVTFAILDAVNGNIEDAMTAFESIKSVVSYWNLALIFHRKAEDIANDALSPEEQEECKNYLRKTRGYLIKILDDSDSNLSVVKKLPVPLESVKEMLKSVMQELENYSEGGPLYKNGSLRNADSEIKHSTPSPTKYSLSPSKSYKYSPKTPPRWAEDQNSLLKMIRQEVKAIKEEMQELKLNSSKSASHHRWPTENYGPDSVPDGYQGSQTFHGAPLTVATTGPSVYYSQSPAYNSQYLLRPAANVTPTKGSSNTEFKSTKEGFSIPVSADGFKFGISEPGNQEKKSEKPLENDTGLQAQDISGRKKGRGVIFGQTSSTFTFADVAKSTSGEGFQFGKKDLNFKGFSGAGEKLFSSQYGKMANKANTSGDFEKDDDAYKTEDSDDIHFEPVVQMPEKVELVTGEEGEKVLYSQGVKLFRFDAEVSQWKERGLGNLKILKNEVNGKVRMLMQREQVLKVCANHWITTTMNLKPLSGSDRAWMWSASDFSDGDAKLERLAAKFKTPELAEEFKQKFEECQRLLLDIPLQTPHKLVDTGRAAKLIQRAEEMKSGLKDFKTFLTNDQTKVAEEENKGSGTGAAGASDTTIKPNAENTGPTLEWDNYDLREDALDDSVSSSSVHASPLASSPVRKNLFHFDESTTGSNFSFKSALSLSKSPAKLNQSGTSVGTDEESDVTQEEERDGQYFEPVVPLPDLVEVSSGEENEQVVFSHRAEFYRYDKDVGQWKERGIGDIKILQNYDNKHVRILMRRDQVLKLCANHRITPDMSLQNMKGTERVWVWTACDFADGERKVEHLAVRFKLQDVADSFKKIFDEAKTAQEKDSLITPHVSRSSTPRESPCGKIAVAVLEETTRERTDVIQGDDVADAASEVEVSSTSETTTKAVVSPPKFVFGSESVKRIFSSEKSKPFAFGNSSATGSLFGFSFNAPLKSNNSETSSVAQSGSESKVEPKKCELSKNSDIEQSSDSKVKNLSASFPTEESSINYTFKTPEKEPPLWYAEFTKEELVQKLSSTTKSADHLNGLLREIEATNAVLMEQIKLLKSEIRRLERNQEQEVSAANVEHLKNVLLQFIFLKPGSERERLLPVINTMLQLSLEEKGKLAAVAQGEE

SEQ ID NO: 4405 - DNA, 8074 bp, Homo sapiens
ccatagtgttgagactacaggtgtgtgttactgctcccagctgggaggcaggcttttaaaggcatccaaaggaagatggaaatgctgatacatatgtacttacattaatgtgcgagagatggatcccagagctcacagatttctgggtcttctttatgaattggaagaaaacacagagaaagccgttgaatgttacaggcgttcagtggaattaaacccaacacaaaaagatcttgtgttgaagattgcagaattgctttgtaaaaatgatgttactgatggaagagcagaatactgggtggaaagagcagcaaaacttttcccaggaagtcctgcaatttataaactaaaggaacagcttctagattgtgaaggtgaagatggatggaataaactttttgacttgattcagtcagaactttatgtaagacctgatgacgtccatgtgaacatccggctagtggagttgtatcgctcaactaaaagattgaaggatgctgtggcccgctgccatgaggcagagaggaacatagctttgcgttcaagtttagagtggaattcgtgtgttgtacagacccttaagttttgatagtgctcttcagtctgcgaaatcttctttgggtggaaatgatgaactgtcagctactttcttagaaatgaaaggacatttctacatgcatgctggttctctgctcttgaagatgggtcagcatggtaataatgttcaatggcgagctctttctgagctggctgcattgtgctatctcatagcatttcaggttccaagaccaaagattaaattaataaaaggtgaagctggacaaaatctgctggaaatgatggcctgtgaccgactgagccaatcagggcacatgttgctaaacttaagtcgtggcaagcaagattttttaaaagtggttgttgaaacttttgccaacaaaagcgggcagtctgcattatatgatgctctgttttctagtcagtcacctaaggatacatcttttcttggtagcgatgatattggaaacattgatgtacaagaaccagagcttgaagatttggctagatacgatgttggtgctattcgagcacataatggtagtcttcagcaccttacttggcttggcttacagtggaattcattgcctgctttacctggaatccgaaaatggctaaaacagcttttccatcatttgccccaggaaacctcaaggcttgaaacaaatgcacctgaatcaatatgtattttagatcttgaagtatttctccttggagtagtatataccagccacttacaattaaaggagaaatgtaattctcaccacagctcctatcagccgttatgcctgccccttcctgtgtgtaaacagctttgtacagaaagacaaaaatcttggtgggatgcggtttgtactctgattcacagaaaagcagtgtaagtagtaaaacaaaaatattgctttcacttagtgcgtaggttttaccggggatttaatcctcgtgtgaagatttaatttgtcatgtgacccattaacatatatgtatgtaagcgctgaactgtgtatttagaaagcaattttagtaaattgaactattttttagacctggaaactcagcaaaattgagacttctagttcagcatgaaataaacactctaagagcccaggaaaaacatggccttcaacctgctctgcttgtacattgggcaaaatgccttcagaaaatggtgagttttaaagtataagcattttaaaagaacattaccttaattttttaaaatcatgaactttttattgaaagtttttttgttctgaaaacagcagctttgtcatattatgacagatgtgttttttattgctgcaaaatagttaatgtagttaaatataagcacttagaggagcaatgcctggcacacagtgaatgttacatattagctgagctgttactgttattccttaataattaagttctgataattattcagcctgaaaattaaaaaaaaattagcacaaggctttgtaggtaagaccattatagatctttctaaatatttaaggtgtgttttgtgtcaccattaggtgtagatggtcagccttttgaacaaactgacactacagaagaggcaggtttcagctatctaaaaatggcaactgttaaaaagcagttgggattgctacgttagggtggtatcattagaagcatttaaaagttgagtgtagaggccgggtgcggtggctcacacctgtaatcccagcacgttaggaggccgaggcgggcagatcacaaggtcaggagatcgagatcattcctggctaacacggtgaaaccccgtctctactaaaaatacaaaaaaaactctactaaaactacaaaattagccagacatggtggcaggtgcctgtaatcccagctacttgggaagctgaggcaggagaattgcttgaacctgcacggcagaggttgcagtgagttcactggtattaaggtggtttagttattacagtatttggaagttgaacaaatgactattgaggtaccatttggttttgacttgaaattttagccagttcttacaacttgtaaatgaactttagatctaatcatgcgtgttccttaaagttgtgtgcttttaactttcttttttagggcagcggtcttaattctttttatgatcaacgagaatacatagggagaagtgttcattattggaagaaagttttgccattgttgaagataataaaaaagaagaacagtattcctgaacctattgatcctctgtttaaacattttcatagtgtagacattcaggcatcagaaattgttgaatatgaagaagacgcacacgtaacttttgctatattggatgcagtaaatggaaatatagaagatgctatgactgcttttgaatctataaaaagtgttgtttcttattggaatcttgcactgatttttcacaggaaggcagaagacattgcaaatgatgccctttctcctgaagaacaagaagaatgcaaaaattatctgagaaagaccaggggctacctaataaagattttagatgacagtgattcaaatctttcagtggtcaagaaattgcctgtgcccctggagtctgtaaaagagatgcttaagtcagtcatgcaggaactcgaaaactatagtgaaggaggtcctctctataaaaatggttctttgcgaaatgcggattcagaaataaaacattctacaccatctcctaccaaatattcactatcaccaagtaaaagttacaaggtaaacaggaaagaatggaatcatttcattgtgaaattgtttctaagtgttttaaatgctcttttgttatttttattttttttttagtattctcccaaaacaccacctcgatgggcagaagatcagaattctttactgaaaatgattcgccaagaagtaaaggccattaaggaagaaatgcaggagttgaaactaaatagcagtaagtcagcatcccatcatcgttggcccacagagaattatggaccagactcggtgcctgatggatatcaggggtcacagacatttcatggggctccactaacagttgcaactactggcccttcagtatattatagtcagtcaccagcatataattcccagtatcttctcagaccagcagctaatgttactcccacaaagggttcttctaatacagaatttaagtcaaccaaagaaggattttccatccctgtgtctgctgatggatttaaatttggcatttcggaaccaggaaatcaagaaaagaaaagtgaaaagcctcttgaaaatgatactggcttacaggctcaggatattagtggccggaagaagggccgtggtgtgatttttggccaaacaagtagcacttttacatttgcagatgttgcaaaatcaacttcaggagaaggatttcagtttggcaaaaaagacctcaatttcaagggattttcaggtgctggagaaaaattattctcatcacaatacggtaaaatggccaataaagcaaacacttccggtgactttgagaaagatgatgatgcctataagactgaggacagcgatgacatccattttgaaccagtagttcaaatgcctgaaaaagtagaacttgtaacaggagaagaaggtgaaaaagttctgtattcacagggggtaaaactatttagatttgatgctgaggtaagtcagtggaaagaaaggggcttggggaacttaaaaattctcaaaaacgaggtcaatggcaaagtaagaatgctgatgcaaagagaacaagtactaaaagtgtgtgctaatcattggataacgactacaatgaacctgaagcccctctctggatcagatagagcatggatgtggtcagccagtgatttctctgatggtgatgccaaactagagcgattggcagcaaaatttaaaacaccagagctggctgaagaattcaagcagaaatttgaggaatgccagcggcttctgttagacataccacttcaaactccccataaacttgtagatactggcagagctgccaagttaatacagagagctgaagaaatgaagagtggactgaaagatttcaaaacatttttgacaaatgatcaaacaaaagtcgctgaggaagaaaataagggttcaggtacaggtgcggccggtgcctcagacacaacaataaaacccaatgctgaaaacactgggcccacattagaatgggataactatgatttaagggaagatgctttggatgatagtgtcagtagtagctcagtacatgcttctccattggcaagtagccctgtgagaaaaaatcttttccactttgatgagtcaacaacaggatctaacttcagttttaaatctgctttgagtctatctaagtctcctgccaagttgaatcagagtgggacttcagttggcactgatgaagaatctgatgttactcaagaagaagagagagatggacagtactttgaacctgttgttcctttacctgatctagttgaagtatccagtggtgaggaaaatgaacaagttgtttttagtcacagggcagaattctacagatatgataaagatgttggtcaatggaaagaaaggggcattggtgatataaagattttacagaattatgataataagcacgttcgtatactgatgagaagggaccaagtattaaaactttgtgccaatcacagaataactccagacatgagtttgcaaaatatgaaagggacagaaagagtatgggtgtggactgcatgtgattttgcagatggagaaagaaaagtagagcatttagctgttcgttttaaactacaggatgttgcagactcgtttaagaaaatttttgatgaagcaaaaacagcccaggaaaaagattctttgataacacctcatgtttctcggtcaagcactcccagagagtcaccatgtggcaaaattgctgtagctgtattagaagaaaccacaagagagaggacagatgttattcagggtgatgatgtagcagatgcagcttcagaagttgaagtgtctagcacatctgaaacaacaacaaaagcagtggtttctcctccaaagtttgtatttggttcagagtctgttaaaagaatttttagtagtgaaaaatcaaaaccatttgcatttggcaacagttctgccactgggtctttgtttggatttagttttaatgcacctttgaaaagtaacaatagtgaaactagttcagtagcccagagtggatctgaaagcaaagtggaacctaaaaaatgtgaactgtcaaagaactctgatatcgaacagtcttcagatagcaaagtcaaaaatctctctgcttcctttccaacggaagaatcttcaatcaactacacatttaaaacaccagaaaaggagcctccattatggtatgctgaatttactaaagaagaattggttcagaagctcagttccaccacaaaaagtgcagatcacttaaacggcctgcttcgggaaatagaggcaaccaatgcagtccttatggagcaaattaagcttctcaaaagtgaaataagaagattggaaaggaatcaagagcaagaggtgtctgcagctaacgtggaacacttgaagaacgtcttgctgcagttcattttcttgaagccaggtagtgaaagagagagacttcttcctgttataaatacgatgttgcagctcagccttgaagaaaagggaaaacttgctgcggttgctcaaggtgaggaataaaatgcttcccgttcttctggatgggcatcctatcttcgtagttggtttggacttcgataggttgatggaaggaatgtttttattaaccaaataaaatctatttacaaaaatggttcatgtgtattaccatcattcttttgtcaaaaagtgtgtatatgtttgcatttacatatatttgtacatctatatgacagatgtattttaaaagtttcaacttgaagtaaaagtacaacagcttgaagtgttgataccaggccacagccctctaactcatgtgatctcccatgcatgctgccagaataaaaccaccaggaatgaattcactccccacttctctggaacctcaggacccgcccatttctcggcagtactgtgaattttgaagttaaactaaattttggtaccataccaactggaatttaggctttaaaaataatgtttcaaggccaggtgtggtgattcatgcctgaaatcccactacttggggaggctgaggctggagaatcgtttgaggctagtgagctgtgattgtatcactgcactccagctcggggaacagagcgagaccttgtctctaaaaataataatagtaataaaaataacattttatgactatttattgcaaggtcagatttacagattgttataaattgttgagaaatttttgtgattagaatatgaaggaaaaagctttgttggtaaaagtgacatgttaaggggctatgaagtaaatatgctgcagttaattgtgctaagttaaaatacagtttagttatttgctttaaaataaactcttctttttttctttaaagtatactatctcaaaactcattatgttgtcagagccctagagctggctagtgtaacactgactatgaataggtgggcccaccacttgagttgaggtgatttcatggtgtctttccaggctcttgatagggtgtcactgcatgcaagccatgaatctgttttgagaatcctctccattttcccaaataaaaacctatcccaacagtgactatatcactcagcattgaatctaaatataaaagtggtgctttcagtgtttttggcagatagtgttccataagctttccatcagaagggattttagacaccttagaggtccgtgctacatcttcacagttcctctgaataaccttaggtggtagtgttacttgcctttgacaccgctgcatatgttttaatgactagatccaaactgtgttgttcttaaatcaaaaattggataatttttaatatttatgtattaatcacatagtatgctctctgaagttctcttaagccttcagtttatactcttaattttctttctgagctggggaactgactttgcactttggttacacagaacattggtttccaatttagtttaactgaaatttgctgctgatatgttgagtttgttctttaaaaaatatctcatatatctcgtctttcctccttagaagaacagacctaactagcgaatgtatgaatgaaaatgcatctatttcagagccgacatgaagagtttagtttttttactttataaactgtgaatatgagtatgccagctgcatacgatgtaactaatcatatttaaatatatttcactttctctttgacttgagaccttttgaagtctgtataaacttgttttgaaatatagtctccacttacaaatgtcataacaaaatacttttttgcatgataaaaaattgattacaaaaggcatattctttcatggtttctgcaatgagaggaagtgtaatgattattttaatatttctattaaatatgtttaactgtatatttttat

SEQ ID NO: 4406 - protein, 945 aa, Homo sapiens
MIRQEVKAIKEEMQELKLNSSKSASHHRWPTENYGPDSVPDGYQGSQTFHGAPLTVATTGPSVYYSQSPAYNSQYLLRPAANVTPTKGSSNTEFKSTKEGFSIPVSADGFKFGISEPGNQEKKSEKPLENDTGLQAQDISGRKKGRGVIFGQTSSTFTFADVAKSTSGEGFQFGKKDLNFKGFSGAGEKLFSSQYGKMANKANTSGDFEKDDDAYKTEDSDDIHFEPVVQMPEKVELVTGEEGEKVLYSQGVKLFRFDAEVSQWKERGLGNLKILKNEVNGKVRMLMQREQVLKVCANHWITTTMNLKPLSGSDRAWMWSASDFSDGDAKLERLAAKFKTPELAEEFKQKFEECQRLLLDIPLQTPHKLVDTGRAAKLIQRAEEMKSGLKDFKTFLTNDQTKVAEEENKGSGTGAAGASDTTIKPNAENTGPTLEWDNYDLREDALDDSVSSSSVHASPLASSPVRKNLFHFDESTTGSNFSFKSALSLSKSPAKLNQSGTSVGTDEESDVTQEEERDGQYFEPVVPLPDLVEVSSGEENEQVVFSHRAEFYRYDKDVGQWKERGIGDIKILQNYDNKHVRILMRRDQVLKLCANHRITPDMSLQNMKGTERVWVWTACDFADGERKVEHLAVRFKLQDVADSFKKIFDEAKTAQEKDSLITPHVSRSSTPRESPCGKIAVAVLEETTRERTDVIQGDDVADAASEVEVSSTSETTTKAVVSPPKFVFGSESVKRIFSSEKSKPFAFGNSSATGSLFGFSFNAPLKSNNSETSSVAQSGSESKVEPKKCELSKNSDIEQSSDSKVKNLSASFPTEESSINYTFKTPEKEPPLWYAEFTKEELVQKLSSTTKSADHLNGLLREIEATNAVLMEQIKLLKSEIRRLERNQEQEVSAANVEHLKNVLLQFIFLKPGSERERLLPVINTMLQLSLEEKGKLAAVAQGEE

SEQ ID NO: 4407 - DNA, 2556 bp, Homo sapiens
ggcgcgatgagttgcagcaaggcctacggggagcggtacgtcgcctcggtgcagggctccgccccgtcgcctcgaaagaagtcaacgagaggattctattttgcaaagctgtattatgaagctaaagaatatgatcttgctaaaaaatacatatgtacttacattaatgtgcgagagatggatcccagagctcacagatttctgggtcttctttatgaattggaagaaaacacagagaaagccgttgaatgttacaggcgttcagtggaattaaacccaacacaaaaagatcttgtgttgaagattgcagaattgctttgtaaaaatgatgttactgatggaagagcagaatactgggtggaaagagcagcaaaacttttcccaggaagtcctgcaatttataaactaaaggaacagcttctagattgtgaaggtgaagatggatggaataaactttttgacttgattcagtcagaactttatgtaagacctgatgacgtccatgtgaacatccggctagtggagttgtatcgctcaactaaaagattgaaggatgctgtggcccgctgccatgaggcagagaggaacatagctttgcgttcaagtttagagtggaattcgtgtgttgtacagacccttaaggaatatctggagtctttacagtgtttggagtctgataaaagtgactggcgagcaaccaatacagacttactgctggcctatgctaatcttatgcttcttacgctttccactagagatgtgcaggaaagtagagaattactggaaagttttgatagtgctcttcagtctgcgaaatcttctttgggtggaaatgatgaactgtcagctactttcttagaaatgaaaggacatttctacatgcatgctggttctctgctcttgaagatgggtcagcatggtaataatgttcaatggcgagctctttctgagctggctgcattgtgctatctcatagcatttcaggttccaagaccaaagattaaattaataaaaggtgaagctggacaaaatctgctggaaatgatggcctgtgaccgactgagccaatcagggcacatgttgctaaacttaagtcgtggcaagcaagattttttaaaagtggttgttgaaacttttgccaacaaaagcgggcagtctgcattatatgatgctctgttttctagtcagtcacctaaggatacatcttttcttggtagcgatgatattggaaacattgatgtacaagaaccagagcttgaagatttggctagatacgatgttggtgctattcgagcacataatggtagtcttcagcaccttacttggcttggcttacagtggaattcattgcctgctttacctggaatccgaaaatggctaaaacagcttttccatcatttgccccaggaaacctcaaggcttgaaacaaatgcacctgaatcaatatgtattttagatcttgaagtatttctccttggagtagtatataccagccacttacaattaaaggagaaatgtaattctcaccacagctcctatcagccgttatgcctgccccttcctgtgtgtaaacagctttgtacagaaagacaaaaatcttggtgggatgcggtttgtactctgattcacagaaaagcagtacctggaaactcagcaaaattgagacttctagttcagcatgaaataaacactctaagagcccaggaaaaacatggccttcaacctgctctgcttgtacattgggcaaaatgccttcagaaaatgggcagcggtcttaattctttttatgatcaacgagaatacatagggagaagtgttcattattggaagaaagttttgccattgttgaagataataaaaaagaagaacagtattcctgaacctattgatcctctgtttaaacattttcatagtgtagacattcaggcatcagaaattgttgaatatgaagaagacgcacacgtaacttttgctatattggatgcagtaaatggaaatatagaagatgctatgactgcttttgaatctataaaaagtgttgtttcttattggaatcttgcactgatttttcacaggaaggcagaagacattgcaaatgatgccctttctcctgaagaacaagaagaatgcaaaaattatctgagaaagaccaggggctacctaataaagattttagatgacagtgattcaaatctttcagtggtcaagaaattgcctgtgcccctggagtctgtaaaagagatgcttaagtcagtcatgcaggaactcgaaaactatagtgaaggaggtcctctctataaaaatggttctttgcgaaatgcggattcagaaataaaacattctacaccatctcctaccaaatattcactatcaccaagtaaaagttacaaggtaaacaggaaagaatggaatcatttcattgtgaaattgtttctaagtgttttaaatgctcttttgttatttttattttttttttagtattctcccaaaacaccacctcgatgggcagaagatcagaattctttactgaaaatgattcgccaagaagtaaaggcc

SEQ ID NO: 4408 - protein, 823 aa, Homo sapiens
MSCSKAYGERYVASVQGSAPSPRKKSTRGFYFAKLYYEAKEYDLAKKYICTYINVREMDPRAHRFLGLLYELEENTEKAVECYRRSVELNPTQKDLVLKIAELLCKNDVTDGRAEYWVERAAKLFPGSPAIYKLKEQLLDCEGEDGWNKLFDLIQSELYVRPDDVHVNIRLVELYRSTKRLKDAVARCHEAERNIALRSSLEWNSCVVQTLKEYLESLQCLESDKSDWRATNTDLLLAYANLMLLTLSTRDVQESRELLESFDSALQSAKSSLGGNDELSATFLEMKGHFYMHAGSLLLKMGQHGNNVQWRALSELAALCYLIAFQVPRPKIKLIKGEAGQNLLEMMACDRLSQSGHMLLNLSRGKQDFLKVVVETFANKSGQSALYDALFSSQSPKDTSFLGSDDIGNIDVQEPELEDLARYDVGAIRAHNGSLQHLTWLGLQWNSLPALPGIRKWLKQLFHHLPQETSRLETNAPESICILDLEVFLLGVVYTSHLQLKEKCNSHHSSYQPLCLPLPVCKQLCTERQKSWWDAVCTLIHRKAVPGNSAKLRLLVQHEINTLRAQEKHGLQPALLVHWAKCLQKMGSGLNSFYDQREYIGRSVHYWKKVLPLLKIIKKKNSIPEPIDPLFKHFHSVDIQASEIVEYEEDAHVTFAILDAVNGNIEDAMTAFESIKSVVSYWNLALIFHRKAEDIANDALSPEEQEECKNYLRKTRGYLIKILDDSDSNLSVVKKLPVPLESVKEMLKSVMQELENYSEGGPLYKNGSLRNADSEIKHSTPSPTKYSLSPSKSYKVNRKEWNHFIVKLFLSVLNALLLFLFFF

SEQ ID NO: 4409 - DNA, 6024 bp, Homo sapiens
ggcgcgatgagttgcagcaaggcctacggggagcggtacgtcgcctcggtgcagggctccgccccgtcgcctcgaaagaagtcaacgagaggattctattttgcaaagctgtattatgaagctaaagaatatgatcttgctaaaaaatacatatgtacttacattaatgtgcgagagatggatcccagagctcacagatttctgggtcttctttatgaattggaagaaaacacagagaaagccgttgaatgttacaggcgttcagtggaattaaacccaacacaaaaagatcttgtgttgaagattgcagaattgctttgtaaaaatgatgttactgatggaagagcagaatactgggtggaaagagcagcaaaacttttcccaggaagtcctgcaatttataaactaaaggaacagcttctagattgtgaaggtgaagatggatggaataaactttttgacttgattcagtcagaactttatgtaagacctgatgacgtccatgtgaacatccggctagtggagttgtatcgctcaactaaaagattgaaggatgctgtggcccgctgccatgaggcagagaggaacatagctttgcgttcaagtttagagtggaattcgtgtgttgtacagacccttaaggaatatctggagtctttacagtgtttggagtctgataaaagtgactggcgagcaaccaatacagacttactgctggcctatgctaatcttatgcttcttacgctttccactagagatgtgcaggaaagtagagaattactggaaagttttgatagtgctcttcagtctgcgaaatcttctttgggtggaaatgatgaactgtcagctactttcttagaaatgaaaggacatttctacatgcatgctggttctctgctcttgaagatgggtcagcatggtaataatgttcaatggcgagctctttctgagctggctgcattgtgctatctcatagcatttcaggttccaagaccaaagattaaattaataaaaggtgaagctggacaaaatctgctggaaatgatggcctgtgaccgactgagccaatcagggcacatgttgctaaacttaagtcgtggcaagcaagattttttaaaagtggttgttgaaacttttgccaacaaaagcgggcagtctgcattatatgatgctctgttttctagtcagtcacctaaggatacatcttttcttggtagcgatgatattggaaacattgatgtacaagaaccagagcttgaagatttggctagatacgatgttggtgctattcgagcacataatggtagtcttcagcaccttacttggcttggcttacagtggaattcattgcctgctttacctggaatccgaaaatggctaaaacagcttttccatcatttgccccaggaaacctcaaggcttgaaacaaatgcacctgaatcaatatgtattttagatcttgaagtatttctccttggagtagtatataccagccacttacaattaaaggagaaatgtaattctcaccacagctcctatcagccgttatgcctgccccttcctgtgtgtaaacagctttgtacagaaagacaaaaatcttggtgggatgcggtttgtactctgattcacagaaaagcagtacctggaaactcagcaaaattgagacttctagttcagcatgaaataaacactctaagagcccaggaaaaacatggccttcaacctgctctgcttgtacattgggcaaaatgccttcagaaaatgggcagcggtcttaattctttttatgatcaacgagaatacatagggagaagtgttcattattggaagaaagttttgccattgttgaagataataaaaaagaagaacagtattcctgaacctattgatcctctgtttaaacattttcatagtgtagacattcaggcatcagaaattgttgaatatgaagaagacgcacacgtaacttttgctatattggatgcagtaaatggaaatatagaagatgctatgactgcttttgaatctataaaaagtgttgtttcttattggaatcttgcactgatttttcacaggaaggcagaagacattgcaaatgatgccctttctcctgaagaacaagaagaatgcaaaaattatctgagaaagaccaggggctacctaataaagattttagatgacagtgattcaaatctttcagtggtcaagaaattgcctgtgcccctggagtctgtaaaagagatgcttaagtcagtcatgcaggaactcgaaaactatagtgaaggaggtcctctctataaaaatggttctttgcgaaatgcggattcagaaataaaacattctacaccatctcctaccaaatattcactatcaccaagtaaaagttacaagtattctcccaaaacaccacctcgatgggcagaagatcagaattctttactgaaaatgattcgccaagaagtaaaggccattaaggaagaaatgcaggagttgaaactaaatagcagtaagtcagcatcccatcatcgttggcccacagagaattatggaccagactcggtgcctgatggatatcaggggtcacagacatttcatggggctccactaacagttgcaactactggcccttcagtatattatagtcagtcaccagcatataattcccagtatcttctcagaccagcagctaatgttactcccacaaagggttcttctaatacagaatttaagtcaaccaaagaaggattttccatccctgtgtctgctgatggatttaaatttggcatttcggaaccaggaaatcaagaaaagaaaagtgaaaagcctcttgaaaatgatactggcttacaggctcaggatattagtggccggaagaagggccgtggtgtgatttttggccaaacaagtagcacttttacatttgcagatgttgcaaaatcaacttcaggagaaggatttcagtttggcaaaaaagacctcaatttcaagggattttcaggtgctggagaaaaattattctcatcacaatacggtaaaatggccaataaagcaaacacttccggtgactttgagaaagatgatgatgcctataagactgaggacagcgatgacatccattttgaaccagtagttcaaatgcctgaaaaagtagaacttgtaacaggagaagaaggtgaaaaagttctgtattcacagggggtaaaactatttagatttgatgctgaggtaagtcagtggaaagaaaggggcttggggaacttaaaaattctcaaaaacgaggtcaatggcaaagtaagaatgctgatgcaaagagaacaagtactaaaagtgtgtgctaatcattggataacgactacaatgaacctgaagcccctctctggatcagatagagcatggatgtggtcagccagtgatttctctgatggtgatgccaaactagagcgattggcagcaaaatttaaaacaccagagctggctgaagaattcaagcagaaatttgaggaatgccagcggcttctgttagacataccacttcaaactccccataaacttgtagatactggcagagctgccaagttaatacagagagctgaagaaatgaagagtggactgaaagatttcaaaacatttttgacaaatgatcaaacaaaagtcgctgaggaagaaaataagggttcaggtacaggtgcggccggtgcctcagacacaacaataaaacccaatgctgaaaacactgggcccacattagaatgggataactatgatttaagggaagatgctttggatgatagtgtcagtagtagctcagtacatgcttctccattggcaagtagccctgtgagaaaaaatcttttccactttgatgagtcaacaacaggatctaacttcagttttaaatctgctttgagtctatctaagtctcctgccaagttgaatcagagtgggacttcagttggcactgatgaagaatctgatgttactcaagaagaagagagagatggacagtactttgaacctgttgttcctttacctgatctagttgaagtatccagtggtgaggaaaatgaacaagttgtttttagtcacagggcagaattctacagatatgataaagatgttggtcaatggaaagaaaggggcattggtgatataaagattttacagaattatgataataagcacgttcgtatactgatgagaagggaccaagtattaaaactttgtgccaatcacagaataactccagacatgagtttgcaaaatatgaaagggacagaaagagtatgggtgtggactgcatgtgattttgcagatggagaaagaaaagtagagcatttagctgttcgttttaaactacaggatgttgcagactcgtttaagaaaatttttgatgaagcaaaaacagcccaggaaaaagattctttgataacacctcatgtttctcggtcaagcactcccagagagtcaccatgtggcaaaattgctgtagctgtattagaagaaaccacaagagagaggacagatgttattcagggtgatgatgtagcagatgcagcttcagaagttgaagtgtctagcacatctgaaacaacaacaaaagcagtggtttctcctccaaagtttgtatttggttcagagtctgttaaaagaatttttagtagtgaaaaatcaaaaccatttgcatttggcaacagttctgccactgggtctttgtttggatttagttttaatgcacctttgaaaagtaacaatagtgaaactagttcagtagcccagagtggatctgaaagcaaagtggaacctaaaaaatgtgaactgtcaaagaactctgatatcgaacagtcttcagatagcaaagtcaaaaatctctctgcttcctttccaacggaagaatcttcaatcaactacacatttaaaacaccagaaaaggagcctccattatggtatgctgaatttactaaagaagaattggttcagaagctcagttccaccacaaaaagtgcagatcacttaaacggcctgcttcgggaaatagaggcaaccaatgcagtccttatggagcaaattaagcttctcaaaagtgaaataagaagattggaaaggaatcaagagcaagaggtgtctgcagctaacgtggaacacttgaagaacgtcttgctgcagttcattttcttgaagccaggtagtgaaagagagagacttcttcctgttataaatacgatgttgcagctcagccttgaagaaaagggaaaacttgctgcggttgctcaaggtgggtaaaaggagagtctcagaacttctgacttctaacttaaactaaacagcctggtggttgagaagttgtctgtatgtgtaacttttcaattttgctcatttgaattgggtctgtcatatgagtaggccgtgactagatttgaaaagctgactttttaacatcttgaggcaaatgtagtacatttatataattttaacgttcagcaaaatacaataagtgcttagcttgatcttctagctctttgaaaattggatttttatcctggtgttgcgttctggtgttcagctgaacgtggttttgttttaaattctactttttaaaaaacatttattagcttgttccttttctacttcacccctcttccttcctccaaccccaaatagcttaagacaatggagccatagagcccaacacttggtctatatacagcagtccactttctaggcaaatgcagttttaaaactgtgccataggccaggcgccggtggttcacacctataatcccaccactttgggaggccgaggcaggcggatcacaagatcaagataccgagaccatcctggccaacatggtgaaatctcgtctctactaaaaatacaaaaattagctggacgtggtggcatgcgcctgtagtcccagctactcaggaggctgaggcaggagagtcacttgaactcacgaggcggaggttgcagtgatctgtcacaccactgtactccagcctgacggcagagcgagactccatctc

SEQ ID NO: 4410 - protein, 1757 aa, Homo sapiens
MSCSKAYGERYVASVQGSAPSPRKKSTRGFYFAKLYYEAKEYDLAKKYICTYINVREMDPRAHRFLGLLYELEENTEKAVECYRRSVELNPTQKDLVLKIAELLCKNDVTDGRAEYWVERAAKLFPGSPAIYKLKEQLLDCEGEDGWNKLFDLIQSELYVRPDDVHVNIRLVELYRSTKRLKDAVARCHEAERNIALRSSLEWNSCVVQTLKEYLESLQCLESDKSDWRATNTDLLLAYANLMLLTLSTRDVQESRELLESFDSALQSAKSSLGGNDELSATFLEMKGHFYMHAGSLLLKMGQHGNNVQWRALSELAALCYLIAFQVPRPKIKLIKGEAGQNLLEMMACDRLSQSGHMLLNLSRGKQDFLKVVVETFANKSGQSALYDALFSSQSPKDTSFLGSDDIGNIDVQEPELEDLARYDVGAIRAHNGSLQHLTWLGLQWNSLPALPGIRKWLKQLFHHLPQETSRLETNAPESICILDLEVFLLGVVYTSHLQLKEKCNSHHSSYQPLCLPLPVCKQLCTERQKSWWDAVCTLIHRKAVPGNSAKLRLLVQHEINTLRAQEKHGLQPALLVHWAKCLQKMGSGLNSFYDQREYIGRSVHYWKKVLPLLKIIKKKNSIPEPIDPLFKHFHSVDIQASEIVEYEEDAHVTFAILDAVNGNIEDAMTAFESIKSVVSYWNLALIFHRKAEDIANDALSPEEQEECKNYLRKTRGYLIKILDDSDSNLSVVKKLPVPLESVKEMLKSVMQELENYSEGGPLYKNGSLRNADSEIKHSTPSPTKYSLSPSKSYKYSPKTPPRWAEDQNSLLKMIRQEVKAIKEEMQELKLNSSKSASHHRWPTENYGPDSVPDGYQGSQTFHGAPLTVATTGPSVYYSQSPAYNSQYLLRPAANVTPTKGSSNTEFKSTKEGFSIPVSADGFKFGISEPGNQEKKSEKPLENDTGLQAQDISGRKKGRGVIFGQTSSTFTFADVAKSTSGEGFQFGKKDLNFKGFSGAGEKLFSSQYGKMANKANTSGDFEKDDDAYKTEDSDDIHFEPVVQMPEKVELVTGEEGEKVLYSQGVKLFRFDAEVSQWKERGLGNLKILKNEVNGKVRMLMQREQVLKVCANHWITTTMNLKPLSGSDRAWMWSASDFSDGDAKLERLAAKFKTPELAEEFKQKFEECQRLLLDIPLQTPHKLVDTGRAAKLIQRAEEMKSGLKDFKTFLTNDQTKVAEEENKGSGTGAAGASDTTIKPNAENTGPTLEWDNYDLREDALDDSVSSSSVHASPLASSPVRKNLFHFDESTTGSNFSFKSALSLSKSPAKLNQSGTSVGTDEESDVTQEEERDGQYFEPVVPLPDLVEVSSGEENEQVVFSHRAEFYRYDKDVGQWKERGIGDIKILQNYDNKHVRILMRRDQVLKLCANHRITPDMSLQNMKGTERVWVWTACDFADGERKVEHLAVRFKLQDVADSFKKIFDEAKTAQEKDSLITPHVSRSSTPRESPCGKIAVAVLEETTRERTDVIQGDDVADAASEVEVSSTSETTTKAVVSPPKFVFGSESVKRIFSSEKSKPFAFGNSSATGSLFGFSFNAPLKSNNSETSSVAQSGSESKVEPKKCELSKNSDIEQSSDSKVKNLSASFPTEESSINYTFKTPEKEPPLWYAEFTKEELVQKLSSTTKSADHLNGLLREIEATNAVLMEQIKLLKSEIRRLERNQEQEVSAANVEHLKNVLLQFIFLKPGSERERLLPVINTMLQLSLEEKGKLAAVAQGG

SEQ ID NO: 4411 - DNA, 7156 bp, Homo sapiens
ggcgcgatgagttgcagcaaggcctacggggagcggtacgtcgcctcggtgcagggctccgccccgtcgcctcgaaagaagtcaacgagaggattctattttgcaaagctgtattatgaagctaaagaatatgatcttgctaaaaaatacatatgtacttacattaatgtgcgagagatggatcccagagctcacagatttctgggtcttctttatgaattggaagaaaacacagagaaagccgttgaatgttacaggcgttcagtggaattaaacccaacacaaaaagatcttgtgttgaagattgcagaattgctttgtaaaaatgatgttactgatggaagagcagaatactgggtggaaagagcagcaaaacttttcccaggaagtcctgcaatttataaactaaaggaacagcttctagattgtgaaggtgaagatggatggaataaactttttgacttgattcagtcagaactttatgtaagacctgatgacgtccatgtgaacatccggctagtggagttgtatcgctcaactaaaagattgaaggatgctgtggcccgctgccatgaggcagagaggaacatagctttgcgttcaagtttagagtggaattcgtgtgttgtacagacccttaaggaatatctggagtctttacagtgtttggagtctgataaaagtgactggcgagcaaccaatacagacttactgctggcctatgctaatcttatgcttcttacgctttccactagagatgtgcaggaaagtagagaattactggaaagttttgatagtgctcttcagtctgcgaaatcttctttgggtggaaatgatgaactgtcagctactttcttagaaatgaaaggacatttctacatgcatgctggttctctgctcttgaagatgggtcagcatggtaataatgttcaatggcgagctctttctgagctggctgcattgtgctatctcatagcatttcaggttccaagaccaaagattaaattaataaaaggtgaagctggacaaaatctgctggaaatgatggcctgtgaccgactgagccaatcagggcacatgttgctaaacttaagtcgtggcaagcaagattttttaaaagtggttgttgaaacttttgccaacaaaagcgggcagtctgcattatatgatgctctgttttctagtcagtcacctaaggatacatcttttcttggtagcgatgatattggaaacattgatgtacaagaaccagagcttgaagatttggctagatacgatgttggtgctattcgagcacataatggtagtcttcagcaccttacttggcttggcttacagtggaattcattgcctgctttacctggaatccgaaaatggctaaaacagcttttccatcatttgccccaggaaacctcaaggcttgaaacaaatgcacctgaatcaatatgtattttagatcttgaagtatttctccttggagtagtatataccagccacttacaattaaaggagaaatgtaattctcaccacagctcctatcagccgttatgcctgccccttcctgtgtgtaaacagctttgtacagaaagacaaaaatcttggtgggatgcggtttgtactctgattcacagaaaagcagtacctggaaactcagcaaaattgagacttctagttcagcatgaaataaacactctaagagcccaggaaaaacatggccttcaacctgctctgcttgtacattgggcaaaatgccttcagaaaatgggcagcggtcttaattctttttatgatcaacgagaatacatagggagaagtgttcattattggaagaaagttttgccattgttgaagataataaaaaagaagaacagtattcctgaacctattgatcctctgtttaaacattttcatagtgtagacattcaggcatcagaaattgttgaatatgaagaagacgcacacgtaacttttgctatattggatgcagtaaatggaaatatagaagatgctatgactgcttttgaatctataaaaagtgttgtttcttattggaatcttgcactgatttttcacaggaaggcagaagacattgcaaatgatgccctttctcctgaagaacaagaagaatgcaaaaattatctgagaaagaccaggggctacctaataaagattttagatgacagtgattcaaatctttcagtggtcaagaaattgcctgtgcccctggagtctgtaaaagagatgcttaagtcagtcatgcaggaactcgaaaactatagtgaaggaggtcctctctataaaaatggttctttgcgaaatgcggattcagaaataaaacattctacaccatctcctaccaaatattcactatcaccaagtaaaagttacaagtattctcccaaaacaccacctcgatgggcagaagatcagaattctttactgaaaatgattcgccaagaagtaaaggccattaaggaagaaatgcaggagttgaaactaaatagcagtaagtcagcatcccatcatcgttggcccacagagaattatggaccagactcggtgcctgatggatatcaggggtcacagacatttcatggggctccactaacagttgcaactactggcccttcagtatattatagtcagtcaccagcatataattcccagtatcttctcagaccagcagctaatgttactcccacaaagggttcttctaatacagaatttaagtcaaccaaagaaggattttccatccctgtgtctgctgatggatttaaatttggcatttcggaaccaggaaatcaagaaaagaaaagtgaaaagcctcttgaaaatgatactggcttacaggctcaggatattagtggccggaagaagggccgtggtgtgatttttggccaaacaagtagcacttttacatttgcagatgttgcaaaatcaacttcaggagaaggatttcagtttggcaaaaaagacctcaatttcaagggattttcaggtgctggagaaaaattattctcatcacaatacggtaaaatggccaataaagcaaacacttccggtgactttgagaaagatgatgatgcctataagactgaggacagcgatgacatccattttgaaccagtagttcaaatgcctgaaaaagtagaacttgtaacaggagaagaaggtgaaaaagttctgtattcacagggggtaaaactatttagatttgatgctgaggtaagtcagtggaaagaaaggggcttggggaacttaaaaattctcaaaaacgaggtcaatggcaaagtaagaatgctgatgcaaagagaacaagtactaaaagtgtgtgctaatcattggataacgactacaatgaacctgaagcccctctctggatcagatagagcatggatgtggtcagccagtgatttctctgatggtgatgccaaactagagcgattggcagcaaaatttaaaacaccagagctggctgaagaattcaagcagaaatttgaggaatgccagcggcttctgttagacataccacttcaaactccccataaacttgtagatactggcagagctgccaagttaatacagagagctgaagaaatgaagagtggactgaaagatttcaaaacatttttgacaaatgatcaaacaaaagtcgctgaggaagaaaataagggttcaggtacaggtgcggccggtgcctcagacacaacaataaaacccaatgctgaaaacactgggcccacattagaatgggataactatgatttaagggaagatgctttggatgatagtgtcagtagtagctcagtacatgcttctccattggcaagtagccctgtgagaaaaaatcttttccactttgatgagtcaacaacaggatctaacttcagttttaaatctgctttgagtctatctaagtctcctgccaagttgaatcagagtgggacttcagttggcactgatgaagaatctgatgttactcaagaagaagagagagatggacagtactttgaacctgttgttcctttacctgatctagttgaagtatccagtggtgaggaaaatgaacaagttgtttttagtcacagggcagaattctacagatatgataaagatgttggtcaatggaaagaaaggggcattggtgatataaagattttacagaattatgataataagcacgttcgtatactgatgagaagggaccaagtattaaaactttgtgccaatcacagaataactccagacatgagtttgcaaaatatgaaagggacagaaagagtatgggtgtggactgcatgtgattttgcagatggagaaagaaaagtagagcatttagctgttcgttttaaactacaggatgttgcagactcgtttaagaaaatttttgatgaagcaaaaacagcccaggaaaaagattctttgataacacctcatgtttctcggtcaagcactcccagagagtcaccatgtggcaaaattgctgtagctgtattagaagaaaccacaagagagaggacagatgttattcagggtgatgatgtagcagatgcagcttcagaagttgaagtgtctagcacatctgaaacaacaacaaaagcagtggtttctcctccaaagtttgtatttggttcagagtctgttaaaagaatttttagtagtgaaaaatcaaaaccatttgcatttggcaacagttctgccactgggtctttgtttggatttagttttaatgcacctttgaaaagtaacaatagtgaaactagttcagtagcccagagtggatctgaaagcaaagtggaacctaaaaaatgtgaactgtcaaagaactctgatatcgaacagtcttcagatagcaaagtcaaaaatctctctgcttcctttccaacggaagaatcttcaatcaactacacatttaaaacaccagaaaaggagcctccattatggtatgctgaatttactaaagaagaattggttcagaagctcagttccaccacaaaaagtgcagatcacttaaacggcctgcttcgggaaatagaggcaaccaatgcagtccttatggagcaaattaagcttctcaaaagtgaaataagaagattggaaaggaatcaagagcaagaggtgtctgcagctaacgtggaacacttgaagaacgtcttgctgcagttcattttcttgaagccaggtagtgaaagagagagacttcttcctgttataaatacgatgttgcagctcagccttgaagaaaagggaaaacttgctgcggttgctcaaggtcttcaagaaacctccatacccaagaaaaaatagaaagcaacgatgttctactatggtgccaaaaatagttgaacatcgacatcaaaaagattctttctgtctgcttattcacatattctggtttgaattaaaagtgatgaaattatcctaaatacagttggccctctgtatccatgggttccacatccacaaattcaaccaactgtggatggaaaagacttgaaaaagatgagagaaaataacaatatgacaataaaacataatacaaataaaaacaatacagcataacaacgattacatagcatttacattatattagggattgcacaagagaaggtatgtaggttatatgcaaatactgcaccattttacataagggacttgagaagcatggattttggtagccacaggggtcctggaaccaatccctcacagacacagagggacaactttacagtagatgaacacaaagatgaaagggaaagtcttacctaggtctgcggggagaagtggaactccatttttgacaggtgatgccattttttgttttggacatcgtccctctgtagttctttccattcccagtcttgcactctgaaagatacactgaaggaaagtccacacagcggtcaaagtctttcacaagacaccacgtgaaggtctgcacagcatagtcacgttgagaaaaagatctcatgcaccagaccccctgtttctgctttctaaaagatcatcttttgcatctgcaaaaaggctgcagtaaactgggccattccatactttgattcatgtattcaaatgctacttatgagctctctgtgtattgagccccaccaggatgctggggacacacggggcacagtgcagccagaggcttggccgtcatagagctcacattctagtggaatcaggcaggggggttacaggaaatattcaaggaaacaatataaaatgagatcacttaatgatgatacatgttacatacatgatgagacagagtaagagaatggggaaagggtttttagatgggggaatggcaggcttttccgaggctgaaagagatccaacccacttctatttcttcaggctcccagtgatatgaaaaagtgccaaacagggctataaaattgtggtctactgtaaatggtttgcagtaaaagttctcaaccagcttccactcaaccaactcaccagttagacaatgggccctctcctgtgtttaaaacagtctggtgcccacctgggtccacatgcagctggcaggtgtttgctagtgtgcccacccatgtctgttccccccacgtgagttatgtgcttacaacgagtcatttctttgcattttccaactttcttacatttatatttaattaaagatgatctaaactgagaaatgaatgtgaaaaggaacaaagctcttttttgtttggtttttaactaaattaaatgtttttaacaagttgaaacgtgaatcatttaaaaaattgctatcagatccacagagggcaatccactcatatagttgactgtaaagcttgaggaggaattcataaaaatctaaaggttttacacatgcagattgattaataaatgtcgagatatggtccacttcaaaaataaggaaagtaattattgtagatgttgcactagagcatagtttatgcaggaaatgcaccagagaccttctactggtgaccccatattcgaagaaaaaaagcctctgctctacatcaaaaggtgtcaagtacacttgtgttttcaatgaaaatataaaatgtttaaggtatatttgcaccatcatttaaggttacccactttagccatttttaaattcactgatcaatcacatggggaaagtactcctaacatacctgcagcaaactaa

SEQ ID NO: 4412 - protein, 1766 aa, Homo sapiens
MSCSKAYGERYVASVQGSAPSPRKKSTRGFYFAKLYYEAKEYDLAKKYICTYINVREMDPRAHRFLGLLYELEENTEKAVECYRRSVELNPTQKDLVLKIAELLCKNDVTDGRAEYWVERAAKLFPGSPAIYKLKEQLLDCEGEDGWNKLFDLIQSELYVRPDDVHVNIRLVELYRSTKRLKDAVARCHEAERNIALRSSLEWNSCVVQTLKEYLESLQCLESDKSDWRATNTDLLLAYANLMLLTLSTRDVQESRELLESFDSALQSAKSSLGGNDELSATFLEMKGHFYMHAGSLLLKMGQHGNNVQWRALSELAALCYLIAFQVPRPKIKLIKGEAGQNLLEMMACDRLSQSGHMLLNLSRGKQDFLKVVVETFANKSGQSALYDALFSSQSPKDTSFLGSDDIGNIDVQEPELEDLARYDVGAIRAHNGSLQHLTWLGLQWNSLPALPGIRKWLKQLFHHLPQETSRLETNAPESICILDLEVFLLGVVYTSHLQLKEKCNSHHSSYQPLCLPLPVCKQLCTERQKSWWDAVCTLIHRKAVPGNSAKLRLLVQHEINTLRAQEKHGLQPALLVHWAKCLQKMGSGLNSFYDQREYIGRSVHYWKKVLPLLKIIKKKNSIPEPIDPLFKHFHSVDIQASEIVEYEEDAHVTFAILDAVNGNIEDAMTAFESIKSVVSYWNLALIFHRKAEDIANDALSPEEQEECKNYLRKTRGYLIKILDDSDSNLSVVKKLPVPLESVKEMLKSVMQELENYSEGGPLYKNGSLRNADSEIKHSTPSPTKYSLSPSKSYKYSPKTPPRWAEDQNSLLKMIRQEVKAIKEEMQELKLNSSKSASHHRWPTENYGPDSVPDGYQGSQTFHGAPLTVATTGPSVYYSQSPAYNSQYLLRPAANVTPTKGSSNTEFKSTKEGFSIPVSADGFKFGISEPGNQEKKSEKPLENDTGLQAQDISGRKKGRGVIFGQTSSTFTFADVAKSTSGEGFQFGKKDLNFKGFSGAGEKLFSSQYGKMANKANTSGDFEKDDDAYKTEDSDDIHFEPVVQMPEKVELVTGEEGEKVLYSQGVKLFRFDAEVSQWKERGLGNLKILKNEVNGKVRMLMQREQVLKVCANHWITTTMNLKPLSGSDRAWMWSASDFSDGDAKLERLAAKFKTPELAEEFKQKFEECQRLLLDIPLQTPHKLVDTGRAAKLIQRAEEMKSGLKDFKTFLTNDQTKVAEEENKGSGTGAAGASDTTIKPNAENTGPTLEWDNYDLREDALDDSVSSSSVHASPLASSPVRKNLFHFDESTTGSNFSFKSALSLSKSPAKLNQSGTSVGTDEESDVTQEEERDGQYFEPVVPLPDLVEVSSGEENEQVVFSHRAEFYRYDKDVGQWKERGIGDIKILQNYDNKHVRILMRRDQVLKLCANHRITPDMSLQNMKGTERVWVWTACDFADGERKVEHLAVRFKLQDVADSFKKIFDEAKTAQEKDSLITPHVSRSSTPRESPCGKIAVAVLEETTRERTDVIQGDDVADAASEVEVSSTSETTTKAVVSPPKFVFGSESVKRIFSSEKSKPFAFGNSSATGSLFGFSFNAPLKSNNSETSSVAQSGSESKVEPKKCELSKNSDIEQSSDSKVKNLSASFPTEESSINYTFKTPEKEPPLWYAEFTKEELVQKLSSTTKSADHLNGLLREIEATNAVLMEQIKLLKSEIRRLERNQEQEVSAANVEHLKNVLLQFIFLKPGSERERLLPVINTMLQLSLEEKGKLAAVAQGLQETSIPKKK

SEQ ID NO: 4413 - DNA, 7138 bp, Homo sapiens
ggcgcgatgagttgcagcaaggcctacggggagcggtacgtcgcctcggtgcagggctccgccccgtcgcctcgaaagaagtcaacgagaggattctattttgcaaagctgtattatgaagctaaagaatatgatcttgctaaaaaatacatatgtacttacattaatgtgcgagagatggatcccagagctcacagatttctgggtcttctttatgaattggaagaaaacacagagaaagccgttgaatgttacaggcgttcagtggaattaaacccaacacaaaaagatcttgtgttgaagattgcagaattgctttgtaaaaatgatgttactgatggaagagcagaatactgggtggaaagagcagcaaaacttttcccaggaagtcctgcaatttataaactaaaggaacagcttctagattgtgaaggtgaagatggatggaataaactttttgacttgattcagtcagaactttatgtaagacctgatgacgtccatgtgaacatccggctagtggagttgtatcgctcaactaaaagattgaaggatgctgtggcccgctgccatgaggcagagaggaacatagctttgcgttcaagtttagagtggaattcgtgtgttgtacagacccttaaggaatatctggagtctttacagtgtttggagtctgataaaagtgactggcgagcaaccaatacagacttactgctggcctatgctaatcttatgcttcttacgctttccactagagatgtgcaggaaagtagagaattactggaaagttttgatagtgctcttcagtctgcgaaatcttctttgggtggaaatgatgaactgtcagctactttcttagaaatgaaaggacatttctacatgcatgctggttctctgctcttgaagatgggtcagcatggtaataatgttcaatggcgagctctttctgagctggctgcattgtgctatctcatagcatttcaggttccaagaccaaagattaaattaataaaaggtgaagctggacaaaatctgctggaaatgatggcctgtgaccgactgagccaatcagggcacatgttgctaaacttaagtcgtggcaagcaagattttttaaaagtggttgttgaaacttttgccaacaaaagcgggcagtctgcattatatgatgctctgttttctagtcagtcacctaaggatacatcttttcttggtagcgatgatattggaaacattgatgtacaagaaccagagcttgaagatttggctagatacgatgttggtgctattcgagcacataatggtagtcttcagcaccttacttggcttggcttacagtggaattcattgcctgctttacctggaatccgaaaatggctaaaacagcttttccatcatttgccccaggaaacctcaaggcttgaaacaaatgcacctgaatcaatatgtattttagatcttgaagtatttctccttggagtagtatataccagccacttacaattaaaggagaaatgtaattctcaccacagctcctatcagccgttatgcctgccccttcctgtgtgtaaacagctttgtacagaaagacaaaaatcttggtgggatgcggtttgtactctgattcacagaaaagcagtacctggaaactcagcaaaattgagacttctagttcagcatgaaataaacactctaagagcccaggaaaaacatggccttcaacctgctctgcttgtacattgggcaaaatgccttcagaaaatgggcagcggtcttaattctttttatgatcaacgagaatacatagggagaagtgttcattattggaagaaagttttgccattgttgaagataataaaaaagaagaacagtattcctgaacctattgatcctctgtttaaacattttcatagtgtagacattcaggcatcagaaattgttgaatatgaagaagacgcacacgtaacttttgctatattggatgcagtaaatggaaatatagaagatgctatgactgcttttgaatctataaaaagtgttgtttcttattggaatcttgcactgatttttcacaggaaggcagaagacattgcaaatgatgccctttctcctgaagaacaagaagaatgcaaaaattatctgagaaagaccaggggctacctaataaagattttagatgacagtgattcaaatctttcagtggtcaagaaattgcctgtgcccctggagtctgtaaaagagatgcttaagtcagtcatgcaggaactcgaaaactatagtgaaggaggtcctctctataaaaatggttctttgcgaaatgcggattcagaaataaaacattctacaccatctcctaccaaatattcactatcaccaagtaaaagttacaagtattctcccaaaacaccacctcgatgggcagaagatcagaattctttactgaaaatgattcgccaagaagtaaaggccattatgaaactaaatagcagtaagtcagcatcccatcatcgttggcccacagagaattatggaccagactcggtgcctgatggatatcaggggtcacagacatttcatggggctccactaacagttgcaactactggcccttcagtatattatagtcagtcaccagcatataattcccagtatcttctcagaccagcagctaatgttactcccacaaagggttcttctaatacagaatttaagtcaaccaaagaaggattttccatccctgtgtctgctgatggatttaaatttggcatttcggaaccaggaaatcaagaaaagaaaagtgaaaagcctcttgaaaatgatactggcttacaggctcaggatattagtggccggaagaagggccgtggtgtgatttttggccaaacaagtagcacttttacatttgcagatgttgcaaaatcaacttcaggagaaggatttcagtttggcaaaaaagacctcaatttcaagggattttcaggtgctggagaaaaattattctcatcacaatacggtaaaatggccaataaagcaaacacttccggtgactttgagaaagatgatgatgcctataagactgaggacagcgatgacatccattttgaaccagtagttcaaatgcctgaaaaagtagaacttgtaacaggagaagaaggtgaaaaagttctgtattcacagggggtaaaactatttagatttgatgctgaggtaagtcagtggaaagaaaggggcttggggaacttaaaaattctcaaaaacgaggtcaatggcaaagtaagaatgctgatgcaaagagaacaagtactaaaagtgtgtgctaatcattggataacgactacaatgaacctgaagcccctctctggatcagatagagcatggatgtggtcagccagtgatttctctgatggtgatgccaaactagagcgattggcagcaaaatttaaaacaccagagctggctgaagaattcaagcagaaatttgaggaatgccagcggcttctgttagacataccacttcaaactccccataaacttgtagatactggcagagctgccaagttaatacagagagctgaagaaatgaagagtggactgaaagatttcaaaacatttttgacaaatgatcaaacaaaagtcgctgaggaagaaaataagggttcaggtacaggtgcggccggtgcctcagacacaacaataaaacccaatgctgaaaacactgggcccacattagaatgggataactatgatttaagggaagatgctttggatgatagtgtcagtagtagctcagtacatgcttctccattggcaagtagccctgtgagaaaaaatcttttccactttgatgagtcaacaacaggatctaacttcagttttaaatctgctttgagtctatctaagtctcctgccaagttgaatcagagtgggacttcagttggcactgatgaagaatctgatgttactcaagaagaagagagagatggacagtactttgaacctgttgttcctttacctgatctagttgaagtatccagtggtgaggaaaatgaacaagttgtttttagtcacagggcagaattctacagatatgataaagatgttggtcaatggaaagaaaggggcattggtgatataaagattttacagaattatgataataagcacgttcgtatactgatgagaagggaccaagtattaaaactttgtgccaatcacagaataactccagacatgagtttgcaaaatatgaaagggacagaaagagtatgggtgtggactgcatgtgattttgcagatggagaaagaaaagtagagcatttagctgttcgttttaaactacaggatgttgcagactcgtttaagaaaatttttgatgaagcaaaaacagcccaggaaaaagattctttgataacacctcatgtttctcggtcaagcactcccagagagtcaccatgtggcaaaattgctgtagctgtattagaagaaaccacaagagagaggacagatgttattcagggtgatgatgtagcagatgcagcttcagaagttgaagtgtctagcacatctgaaacaacaacaaaagcagtggtttctcctccaaagtttgtatttggttcagagtctgttaaaagaatttttagtagtgaaaaatcaaaaccatttgcatttggcaacagttctgccactgggtctttgtttggatttagttttaatgcacctttgaaaagtaacaatagtgaaactagttcagtagcccagagtggatctgaaagcaaagtggaacctaaaaaatgtgaactgtcaaagaactctgatatcgaacagtcttcagatagcaaagtcaaaaatctctctgcttcctttccaacggaagaatcttcaatcaactacacatttaaaacaccagaaaaggagcctccattatggtatgctgaatttactaaagaagaattggttcagaagctcagttccaccacaaaaagtgcagatcacttaaacggcctgcttcgggaaatagaggcaaccaatgcagtccttatggagcaaattaagcttctcaaaagtgaaataagaagattggaaaggaatcaagagcaagaggtgtctgcagctaacgtggaacacttgaagaacgtcttgctgcagttcattttcttgaagccaggtagtgaaagagagagacttcttcctgttataaatacgatgttgcagctcagccttgaagaaaagggaaaacttgctgcggttgctcaaggtcttcaagaaacctccatacccaagaaaaaatagaaagcaacgatgttctactatggtgccaaaaatagttgaacatcgacatcaaaaagattctttctgtctgcttattcacatattctggtttgaattaaaagtgatgaaattatcctaaatacagttggccctctgtatccatgggttccacatccacaaattcaaccaactgtggatggaaaagacttgaaaaagatgagagaaaataacaatatgacaataaaacataatacaaataaaaacaatacagcataacaacgattacatagcatttacattatattagggattgcacaagagaaggtatgtaggttatatgcaaatactgcaccattttacataagggacttgagaagcatggattttggtagccacaggggtcctggaaccaatccctcacagacacagagggacaactttacagtagatgaacacaaagatgaaagggaaagtcttacctaggtctgcggggagaagtggaactccatttttgacaggtgatgccattttttgttttggacatcgtccctctgtagttctttccattcccagtcttgcactctgaaagatacactgaaggaaagtccacacagcggtcaaagtctttcacaagacaccacgtgaaggtctgcacagcatagtcacgttgagaaaaagatctcatgcaccagaccccctgtttctgctttctaaaagatcatcttttgcatctgcaaaaaggctgcagtaaactgggccattccatactttgattcatgtattcaaatgctacttatgagctctctgtgtattgagccccaccaggatgctggggacacacggggcacagtgcagccagaggcttggccgtcatagagctcacattctagtggaatcaggcaggggggttacaggaaatattcaaggaaacaatataaaatgagatcacttaatgatgatacatgttacatacatgatgagacagagtaagagaatggggaaagggtttttagatgggggaatggcaggcttttccgaggctgaaagagatccaacccacttctatttcttcaggctcccagtgatatgaaaaagtgccaaacagggctataaaattgtggtctactgtaaatggtttgcagtaaaagttctcaaccagcttccactcaaccaactcaccagttagacaatgggccctctcctgtgtttaaaacagtctggtgcccacctgggtccacatgcagctggcaggtgtttgctagtgtgcccacccatgtctgttccccccacgtgagttatgtgcttacaacgagtcatttctttgcattttccaactttcttacatttatatttaattaaagatgatctaaactgagaaatgaatgtgaaaaggaacaaagctcttttttgtttggtttttaactaaattaaatgtttttaacaagttgaaacgtgaatcatttaaaaaattgctatcagatccacagagggcaatccactcatatagttgactgtaaagcttgaggaggaattcataaaaatctaaaggttttacacatgcagattgattaataaatgtcgagatatggtccacttcaaaaataaggaaagtaattattgtagatgttgcactagagcatagtttatgcaggaaatgcaccagagaccttctactggtgaccccatattcgaagaaaaaaagcctctgctctacatcaaaaggtgtcaagtacacttgtgttttcaatgaaaatataaaatgtttaaggtatatttgcaccatcatttaaggttacccactttagccatttttaaattcactgatcaatcacatggggaaagtactcctaacatacctgcagcaaactaa

SEQ ID NO: 4414 - protein, 1760 aa, Homo sapiens
MSCSKAYGERYVASVQGSAPSPRKKSTRGFYFAKLYYEAKEYDLAKKYICTYINVREMDPRAHRFLGLLYELEENTEKAVECYRRSVELNPTQKDLVLKIAELLCKNDVTDGRAEYWVERAAKLFPGSPAIYKLKEQLLDCEGEDGWNKLFDLIQSELYVRPDDVHVNIRLVELYRSTKRLKDAVARCHEAERNIALRSSLEWNSCVVQTLKEYLESLQCLESDKSDWRATNTDLLLAYANLMLLTLSTRDVQESRELLESFDSALQSAKSSLGGNDELSATFLEMKGHFYMHAGSLLLKMGQHGNNVQWRALSELAALCYLIAFQVPRPKIKLIKGEAGQNLLEMMACDRLSQSGHMLLNLSRGKQDFLKVVVETFANKSGQSALYDALFSSQSPKDTSFLGSDDIGNIDVQEPELEDLARYDVGAIRAHNGSLQHLTWLGLQWNSLPALPGIRKWLKQLFHHLPQETSRLETNAPESICILDLEVFLLGVVYTSHLQLKEKCNSHHSSYQPLCLPLPVCKQLCTERQKSWWDAVCTLIHRKAVPGNSAKLRLLVQHEINTLRAQEKHGLQPALLVHWAKCLQKMGSGLNSFYDQREYIGRSVHYWKKVLPLLKIIKKKNSIPEPIDPLFKHFHSVDIQASEIVEYEEDAHVTFAILDAVNGNIEDAMTAFESIKSVVSYWNLALIFHRKAEDIANDALSPEEQEECKNYLRKTRGYLIKILDDSDSNLSVVKKLPVPLESVKEMLKSVMQELENYSEGGPLYKNGSLRNADSEIKHSTPSPTKYSLSPSKSYKYSPKTPPRWAEDQNSLLKMIRQEVKAIMKLNSSKSASHHRWPTENYGPDSVPDGYQGSQTFHGAPLTVATTGPSVYYSQSPAYNSQYLLRPAANVTPTKGSSNTEFKSTKEGFSIPVSADGFKFGISEPGNQEKKSEKPLENDTGLQAQDISGRKKGRGVIFGQTSSTFTFADVAKSTSGEGFQFGKKDLNFKGFSGAGEKLFSSQYGKMANKANTSGDFEKDDDAYKTEDSDDIHFEPVVQMPEKVELVTGEEGEKVLYSQGVKLFRFDAEVSQWKERGLGNLKILKNEVNGKVRMLMQREQVLKVCANHWITTTMNLKPLSGSDRAWMWSASDFSDGDAKLERLAAKFKTPELAEEFKQKFEECQRLLLDIPLQTPHKLVDTGRAAKLIQRAEEMKSGLKDFKTFLTNDQTKVAEEENKGSGTGAAGASDTTIKPNAENTGPTLEWDNYDLREDALDDSVSSSSVHASPLASSPVRKNLFHFDESTTGSNFSFKSALSLSKSPAKLNQSGTSVGTDEESDVTQEEERDGQYFEPVVPLPDLVEVSSGEENEQVVFSHRAEFYRYDKDVGQWKERGIGDIKILQNYDNKHVRILMRRDQVLKLCANHRITPDMSLQNMKGTERVWVWTACDFADGERKVEHLAVRFKLQDVADSFKKIFDEAKTAQEKDSLITPHVSRSSTPRESPCGKIAVAVLEETTRERTDVIQGDDVADAASEVEVSSTSETTTKAVVSPPKFVFGSESVKRIFSSEKSKPFAFGNSSATGSLFGFSFNAPLKSNNSETSSVAQSGSESKVEPKKCELSKNSDIEQSSDSKVKNLSASFPTEESSINYTFKTPEKEPPLWYAEFTKEELVQKLSSTTKSADHLNGLLREIEATNAVLMEQIKLLKSEIRRLERNQEQEVSAANVEHLKNVLLQFIFLKPGSERERLLPVINTMLQLSLEEKGKLAAVAQGLQETSIPKKK

SEQ ID NO: 4415 - DNA, 6691 bp, Homo sapiens
cagatacatatgtacttacattaatgtgcgagagatggatcccagagctcacagatttctgggtcttctttatgaattggaagaaaacacagagaaagccgttgaatgttacaggcgttcagtggaattaaacccaacacaaaaagatcttgtgttgaagattgcagaattgctttgtaaaaatgatgttactgatggaagagcagaatactgggtggaaagagcagcaaaacttttcccaggaagtcctgcaatttataaactaaaggaacagcttctagattgtgaaggtgaagatggatggaataaactttttgacttgattcagtcagaactttatgtaagacctgatgacgtccatgtgaacatccggctagtggagttgtatcgctcaactaaaagattgaaggatgctgtggcccgctgccatgaggcagagaggaacatagctttgcgttcaagtttagagtggaattcgtgtgttgtacagacccttaagttttgatagtgctcttcagtctgcgaaatcttctttgggtggaaatgatgaactgtcagctactttcttagaaatgaaaggacatttctacatgcatgctggttctctgctcttgaagatgggtcagcatggtaataatgttcaatggcgagctctttctgagctggctgcattgtgctatctcatagcatttcaggttccaagaccaaagattaaattaataaaaggtgaagctggacaaaatctgctggaaatgatggcctgtgaccgactgagccaatcagcgatgatattggaaacattgatgtacaagaaccagagcttgaagatttggctagatacgatgttggtgctattcgagcacataatggtagtcttcagcaccttacttggcttggcttacagtggaattcattgcctgctttacctggaatccgaaaatggctaaaacagcttttccatcatttgccccaggaaacctcaaggcttgaaacaaatgcacctgaatcaatatgtattttagatcttgaagtatttctccttggagtagtatataccagccacttacaattaaaggagaaatgtaattctcaccacagctcctatcagccgttatgcctgccccttcctgtgtgtaaacagctttgtacagaaagacaaaaatcttggtgggatgcggtttgtactctgattcacagaaaagcagttaaattgaactattttttagacctggaaactcagcaaaattgagacttctagttcagcatgaaataaacactctaagagcccaggaaaaacatggccttcaacctgctctgcttgtacattgggcaaaatgccttcagaaaatgggcagcggtcttaattctttttatgatcaacgagaatacatagggagaagtgttcattattggaagaaagttttgccattgttgaagataataaaaaagaagaacagtattcctgaacctattgatcctctgtttaaacattttcatagtgtagacattcaggcatcagaaattgttgaatatgaagaagacgcacacgtaacttttgctatattggatgcagtaaatggaaatatagaagatgctatgactgcttttgaatctataaaaagtgttgtttcttattggaatcttgcactgatttttcacaggaaggcagaagacattgcaaatgatgccctttctcctgaagaacaagaagaatgcaaaaattatctgagaaagaccaggggctacctaataaagattttagatgacagtgattcaaatctttcagtggtcaagaaattgcctgtgcccctggagtctgtaaaagagatgcttaagtcagtcatgcaggaactcgaaaactatagtgaaggaggtcctctctataaaaatggttctttgcgaaatgcggattcagaaataaaacattctacaccatctcctaccaaatattcactatcaccaagtaaaagttacaagtattctcccaaaacaccacctcgatgggcagaagatcagaattctttactgaaaatgattcgccaagaagtaaaggccattaaggaagaaatgcaggagttgaaactaaatagcagtaagtcagcatcccatcatcgttggcccacagagaattatggaccagactcggtgcctgatggatatcaggggtcacagacatttcatggggctccactaacagttgcaactactggcccttcagtatattatagtcagtcaccagcatataattcccagtatcttctcagaccagcagctaatgttactcccacaaagggttcttctaatacagaatttaagtcaaccaaagaaggattttccatccctgtgtctgctgatggatttaaatttggcatttcggaaccaggaaatcaagaaaagaaaagtgaaaagcctcttgaaaatgatactggcttacaggctcaggatattagtggccggaagaagggccgtggtgtgatttttggccaaacaagtagcacttttacatttgcagatgttgcaaaatcaacttcaggagaaggatttcagtttggcaaaaaagacctcaatttcaagggattttcaggtgctggagaaaaattattctcatcacaatacggtaaaatggccaataaagcaaacacttccggtgactttgagaaagatgatgatgcctataagactgaggacagcgatgacatccattttgaaccagtagttcaaatgcctgaaaaagtagaacttgtaacaggagaagaaggtgaaaaagttctgtattcacagggggtaaaactatttagatttgatgctgaggtaagtcagtggaaagaaaggggcttggggaacttaaaaattctcaaaaacgaggtcaatggcaaagtaagaatgctgatgcaaagagaacaagtactaaaagtgtgtgctaatcattggataacgactacaatgaacctgaagcccctctctggatcagatagagcatggatgtggtcagccagtgatttctctgatggtgatgccaaactagagcgattggcagcaaaatttaaaacaccagagctggctgaagaattcaagcagaaatttgaggaatgccagcggcttctgttagacataccacttcaaactccccataaacttgtagatactggcagagctgccaagttaatacagagagctgaagaaatgaagagtggactgaaagatttcaaaacatttttgacaaatgatcaaacaaaagtcgctgaggaagaaaataagggttcaggtacaggtgcggccggtgcctcagacacaacaataaaacccaatgctgaaaacactgggcccacattagaatgggataactatgatttaagggaagatgctttggatgatagtgtcagtagtagctcagtacatgcttctccattggcaagtagccctgtgagaaaaaatcttttccactttgatgagtcaacaacaggatctaacttcagttttaaatctgctttgagtctatctaagtctcctgccaagttgaatcagagtgggacttcagttggcactgatgaagaatctgatgttactcaagaagaagagagagatggacagtactttgaacctgttgttcctttacctgatctagttgaagtatccagtggtgaggaaaatgaacaagttgtttttagtcacagggcagaattctacagatatgataaagatgttggtcaatggaaagaaaggggcattggtgatataaagattttacagaattatgataataagcacgttcgtatactgatgagaagggaccaagtattaaaactttgtgccaatcacagaataactccagacatgagtttgcaaaatatgaaagggacagaaagagtatgggtgtggactgcatgtgattttgcagatggagaaagaaaagtagagcatttagctgttcgttttaaactacaggatgttgcagactcgtttaagaaaatttttgatgaagcaaaaacagcccaggaaaaagattctttgataacacctcatgtttctcggtcaagcactcccagagagtcaccatgtggcaaaattgctgtagctgtattagaagaaaccacaagagagaggacagatgttattcagggtgatgatgtagcagatgcagcttcagaagttgaagtgtctagcacatctgaaacaacaacaaaagcagtggtttctcctccaaagtttgtatttggttcagagtctgttaaaagaatttttagtagtgaaaaatcaaaaccatttgcatttggcaacagttctgccactgggtctttgtttggatttagttttaatgcacctttgaaaagtaacaatagtgaaactagttcagtagcccagagtggatctgaaagcaaagtggaacctaaaaaatgtgaactgtcaaagaactctgatatcgaacagtcttcagatagcaaagtcaaaaatctctctgcttcctttccaacggaagaatcttcaatcaactacacatttaaaacaccagaaaaggagcctccattatggtatgctgaatttactaaagaagaattggttcagaagctcagttccaccacaaaaagtgcagatcacttaaacggcctgcttcgggaaatagaggcaaccaatgcagtccttatggagcaaattaagcttctcaaaagtgaaataagaagattggaaaggaatcaagagcaagaggtgtctgcagctaacgtggaacacttgaagaacgtcttgctgcagttcattttcttgaagccaggtagtgaaagagagagacttcttcctgttataaatacgatgttgcagctcagccttgaagaaaagggaaaacttgctgcggttgctcaaggtgaggaataaaatgcttcccgttcttctggatgggcatcctatcttcgtagttggtttggacttcgataggttgatggaaggaatgtttttattaaccaaataaaatctatttacaaaaatggttcatgtgtattaccatcattcttttgtcaaaaagtgtgtatatgtttgcatttacatatatttgtacatctatatgacagatgtattttaaaagtttcaacttgaagtaaaagtacaacagcttgaagtgttgataccaggccacagccctctaactcatgtgatctcccatgcatgctgccagaataaaaccaccaggaatgaattcactccccacttctctggaacctcaggacccgcccatttctcggcagtactgtgaattttgaagttaaactaaattttggtaccataccaactggaatttaggctttaaaaataatgtttcaaggccaggtgtggtgattcatgcctgaaatcccactacttggggaggctgaggctggagaatcgtttgaggctagtgagctgtgattgtatcactgcactccagctcggggaacagagcgagaccttgtctctaaaaataataatagtaataaaaataacattttatgactatttattgcaaggtcagatttacagattgttataaattgttgagaaatttttgtgattagaatatgaaggaaaaagctttgttggtaaaagtgacatgttaaggggctatgaagtaaatatgctgcagttaattgtgctaagttaaaatacagtttagttatttgctttaaaataaactcttctttttttctttaaagtatactatctcaaaactcattatgttgtcagagccctagagctggctagtgtaacactgactatgaataggtgggcccaccacttgagttgaggtgatttcatggtgtctttccaggctcttgatagggtgtcactgcatgcaagccatgaatctgttttgagaatcctctccattttcccaaataaaaacctatcccaacagtgactatatcactcagcattgaatctaaatataaaagtggtgctttcagtgtttttggcagatagtgttccataagctttccatcagaagggattttagacaccttagaggtccgtgctacatcttcacagttcctctgaataaccttaggtggtagtgttacttgcctttgacaccgctgcatatgttttaatgactagatccaaactgtgttgttcttaaatcaaaaattggataatttttaatatttatgtattaatcacatagtatgctctctgaagttctcttaagccttcagtttatactcttaattttctttctgagctggggaactgactttgcactttggttacacagaacattggtttccaatttagtttaactgaaatttgctgctgatatgttgagtttgttctttaaaaaatatctcatatatctcgtctttcctccttagaagaacagacctaactagcgaatgtatgaatgaaaatgcatctatttcagagccgacatgaagagtttagtttttttactttataaactgtgaatatgagtatgccagctgcatacgatgtaactaatcatatttaaatatatttcactttctctttgacttgagaccttttgaagtctgtataaacttgttttgaaatatagtctccacttacaaatgtcataacaaaatacttttttgcatgataaaaaattgattacaaaaggcatattctttcatggtttctgcaatgagaggaagtgtaatgattattttaatatttctattaaatatgtttaactgtatatttttat

SEQ ID NO: 4416 - protein, 1173 aa, Homo sapiens
MGSGLNSFYDQREYIGRSVHYWKKVLPLLKIIKKKNSIPEPIDPLFKHFHSVDIQASEIVEYEEDAHVTFAILDAVNGNIEDAMTAFESIKSVVSYWNLALIFHRKAEDIANDALSPEEQEECKNYLRKTRGYLIKILDDSDSNLSVVKKLPVPLESVKEMLKSVMQELENYSEGGPLYKNGSLRNADSEIKHSTPSPTKYSLSPSKSYKYSPKTPPRWAEDQNSLLKMIRQEVKAIKEEMQELKLNSSKSASHHRWPTENYGPDSVPDGYQGSQTFHGAPLTVATTGPSVYYSQSPAYNSQYLLRPAANVTPTKGSSNTEFKSTKEGFSIPVSADGFKFGISEPGNQEKKSEKPLENDTGLQAQDISGRKKGRGVIFGQTSSTFTFADVAKSTSGEGFQFGKKDLNFKGFSGAGEKLFSSQYGKMANKANTSGDFEKDDDAYKTEDSDDIHFEPVVQMPEKVELVTGEEGEKVLYSQGVKLFRFDAEVSQWKERGLGNLKILKNEVNGKVRMLMQREQVLKVCANHWITTTMNLKPLSGSDRAWMWSASDFSDGDAKLERLAAKFKTPELAEEFKQKFEECQRLLLDIPLQTPHKLVDTGRAAKLIQRAEEMKSGLKDFKTFLTNDQTKVAEEENKGSGTGAAGASDTTIKPNAENTGPTLEWDNYDLREDALDDSVSSSSVHASPLASSPVRKNLFHFDESTTGSNFSFKSALSLSKSPAKLNQSGTSVGTDEESDVTQEEERDGQYFEPVVPLPDLVEVSSGEENEQVVFSHRAEFYRYDKDVGQWKERGIGDIKILQNYDNKHVRILMRRDQVLKLCANHRITPDMSLQNMKGTERVWVWTACDFADGERKVEHLAVRFKLQDVADSFKKIFDEAKTAQEKDSLITPHVSRSSTPRESPCGKIAVAVLEETTRERTDVIQGDDVADAASEVEVSSTSETTTKAVVSPPKFVFGSESVKRIFSSEKSKPFAFGNSSATGSLFGFSFNAPLKSNNSETSSVAQSGSESKVEPKKCELSKNSDIEQSSDSKVKNLSASFPTEESSINYTFKTPEKEPPLWYAEFTKEELVQKLSSTTKSADHLNGLLREIEATNAVLMEQIKLLKSEIRRLERNQEQEVSAANVEHLKNVLLQFIFLKPGSERERLLPVINTMLQLSLEEKGKLAAVAQGEE

SEQ ID NO: 4417 - DNA, 498 bp, Homo sapiens
atgacgaacttctatgaagaaaggacaacgatgattgcagccagggatttgcaggaatttgttccttttggtggagaccactgcaagcaccaccctaatgctttgaaccttcaacttcgccagctgcagccagcttcagaattatggtcttctgatggtgctgctggcttggtgggatcccttcaggaggttacaatccacgagaaacagaaggaaaactggcagttaaggaaaggagtaagtgaaattggagaagatgtggactatgatgaggaactctatgttgctggaaatatggtgatatggagcaaaggaagtaaaagccaggcattggcagtttataaagcatttacagttgacagtcctgttcagcaggaccctctaatggcctctaagttttcaaatgaagggaagaatcacaagtttctcactttacatcaaaaactagaaatgattaagcttcgtgaggaaggcgtgttgaaagctgagataggttga

SEQ ID NO: 4418 - protein, 165 aa, Homo sapiens
MTNFYEERTTMIAARDLQEFVPFGGDHCKHHPNALNLQLRQLQPASELWSSDGAAGLVGSLQEVTIHEKQKENWQLRKGVSEIGEDVDYDEELYVAGNMVIWSKGSKSQALAVYKAFTVDSPVQQDPLMASKFSNEGKNHKFLTLHQKLEMIKLREEGVLKAEIG

SEQ ID NO: 4419 - DNA, 1028 bp, Homo sapiens
catgccttggaaccatgctgcttgaggctctggactgcatcctaccaccaactcgtccaactgacaagcccttgcacctgcctctccaggatgtctacaaaattggtggtattggtagtgttcctgttggccgagtggagactggtgttctcaaacctggtatggtggtcacctttgctccagtcaacgttacaacagaagtaaaatctgtcgaaatgcaccatgaagctttgagtgaagctcttcctggggacaatgtgggcttcaatgtcaagaatgtgtctgtcaaggatgttcgtcatggcaacgttgctggtgacagcaaaaatgacccaccaatggaagcagctggtttcactgctcaggtgattatcctgaaccatccaggccaaataagcactggctatgcccctgtattggattgccacacggctcatattgcatgcaagtttgctgagctgaaggaaaagattgatcaccgttctggtaaaaagctggaagatggccctaaattcttgaagtctgttgatgctgccattgttgatatggttcctggcaagcccatgtgtgttgagagcttctcggactatccatctttgggttgctttgctgttcgtgatatgagacagatagttacagtgggtgtcatcaaagcagtggacaagaagactgctggagctggcaaggtcaccaagtctgcccagaaagctcagaaggctaaatgaatattatccctaatacctgccaccccactcttaatcagtgatggaagaacagtctcagaactctgtttcaattggccatttaagtttagtagtaaaagactggttaatgataacaatgcatcgtaaaaccttcagaaggaaaggagaatgttctgtggaccactttggttttcttttttgcgtgtggcagttttaagttactagcttttaaaatcagccctttttaatggaaacaacttgaccaaaaatttgtcacagaattttgagacccatttaaaaagtttaatgaggaaaaaaaaggtt

SEQ ID NO: 4420 - protein, 236 aa, Homo sapiens [sequence omitted]

SEQ ID NO: 4421 - DNA, 1366 bp, Homo sapiens
gctttttttttcacaatgggtttgccgccagaacacaggtgtcatgaaaactacccccaaaagccaaaatgggaaaggaaaagactcataccaacattgtcgtcattggacacatagattcgggcaagtccaccactactggccatctgatctacaaaggcggtggcatcgacaaaagaaccattgaaaaatttgagaaggaggctgctgagatgggaaagggctccttcaagtatgcctgggtcttggataaactgaaagctgagtgtgaacatggtatcaccattgatacctccttgtggaaatttgagaccagcaagtactatgtgactatcgttgatgccccaggacacagagacttcatcaaaaacatgattacagagacatctcaggctgactgtgctgtcctgattgttgctgctggtgttggtgaatttgaagctggtatctccaagaatgggcaaacccaagagcatgcccttctggcttacacactgggtgtgaaacaactaattgttggtgttaacaaaatggattctactgagccaccctacagccagaagagatatgaggaaaattgttaaggaagtcagcacttacattaagaaaattggctacaaccctgacacagtagcatttgtgccaatttctggttggaatgtggagactggtgttctcaaacctggtatggtggtcacctttgctccagtcaacgttacaacagaagtaaaatctgtcgaaatgcaccatgaagctttgagtgaagctcttcctggggacaatgtgggcttcaatgtcaagaatgtgtctgtcaaggatgttcgtcatggcaacgttgctggtgacagcaaaaatgacccaccaatggaagcagctggtttcactgctcaggtgattatcctgaaccatccaggccaaataagcactggctatgcccctgtattggattgccacacggctcatattgcatgcaagtttgctgagctgaaggaaaagattgatcaccgttctggtaaaaagctggaagatggccctaaattcttgaagtctgttgatgctgccattgttgatatggttcctggcaagcccatgtgtgttgagagcttctcggactatccatctttgggttgctttgctgttcgtgatatgagacagatagttacagtgggtgtcatcaaagcagtggacaagaagactgctggagctggcaaggtcaccaagtctgcccagaaagctcagaaggctaaatgaatattatccctaatacctgccaccccactcttaatcagtgatggaagaacagtctcagaactctgtttcaattggccatttaagtttagtaaatgttctgtggaccactttggtt

SEQ ID NO: 4422 - protein, 227 aa, Homo sapiens
MRKIVKEVSTYIKKIGYNPDTVAFVPISGWNVETGVLKPGMVVTFAPVNVTTEVKSVEMHHEALSEALPGDNVGFNVKNVSVKDVRHGNVAGDSKNDPPMEAAGFTAQVIILNHPGQISTGYAPVLDCHTAHIACKFAELKEKIDHRSGKKLEDGPKFLKSVDAAIVDMVPGKPMCVESFSDYPSLGCFAVRDMRQIVTVGVIKAVDKKTAGAGKVTKSAQKAQKAK

SEQ ID NO: 4423 - DNA, 1550 bp, Homo sapiens
gctttttttttcacaatgggtttgccgccagaacacaggtgtcatgaaaactacccccaaaagccaaaatgggaaaggaaaagactcataccaacattgtcgtcattggacacatagattcgggcaagtccaccactactggccatctgatctacaaaggcggtggcatcgacaaaagaaccattgaaaaatttgagaaggaggctgctgagatgggaaagggctccttcaagtatgcctgggtcttggataaactgaaagctgagtgtgaacatggtatcaccattgatacctccttgtggaaatttgagaccagcaagtactatgtgactatcgttgatgccccaggacacagagacttcatcaaaaacatgattacagagacatctcaggctgactgtgctgtcctgattgttgctgctggtgttggtgaatttgaagctggtatctccaagaatgggcaaacccaagagcatgcccttctggcttacacactgggtgtgaaacaactaattgttggtgttaacaaaatggattctactgagccaccctacagccagaagagatatgaggaaaattgttaaggaagtcagcacttacattaagaaaattggctacaaccctgacacagtagcatttgtgccaatttctggttggaatgtggagactggtgttctcaaacctggtatggtggtcacctttgctccagtcaacgttacaacagaagtaaaatctgtcgaaatgcaccatgaagctttgagtgaagctcttcctggggacaatgtgggcttcaatgtcaagaatgtgtctgtcaaggatgttcgtcatggcaacgttgctggtgacagcaaaaatgacccaccaatggaagcagctggtttcactgctcaggtgattatcctgaaccatccaggccaaataagcactggctatgcccctgtattggattgccacacggctcatattgcatgcaagtttgctgagctgaaggaaaagattgatcaccgttctggtaaaaagctggaagatggccctaaattcttgaagtctgttgatgctgccattgttgatatggttcctggcaagcccatgtgtgttgagagcttctcggactatccatctttgggttgctttgctgttcgtgatatgagacagatagttacagtgggtgtcatcaaagcagtggacaagaagactgctggagctggcaaggtcaccaagtctgcccagaaagctcagaaggctaaatgaatattatccctaatacctgccaccccactcttaatcagtgatggaagaacagtctcagaactctgtttcaattggccatttaagtttagtagtaaaagactggttaatgataacaatgcatcgtaaaaccttcagaaggaaaggagaatgttctgtggaccactttggttttcttttttgcgtgtggcagttttaagttactagcttttaaaatcagccctttttaatggaaacaacttgaccaaaaatttgtcacagaattttgagacccatttaaaaaattacatgcagaaaacagc

SEQ ID NO: 4424 - protein, 227 aa, Homo sapiens; identical to SEQ ID NO: 4422

SEQ ID NO: 4425 - DNA, 1554 bp, Homo sapiens
gctttttttttcacaatgggtttgccgccagaacacaggtgtcatgaaaactacccccaaaagccaaaatgggaaaggaaaagactcataccaacattgtcgtcattggacacatagattcgggcaagtccaccactactggccatctgatctacaaaggcggtggcatcgacaaaagaaccattgaaaaatttgagaaggaggctgctgagatgggaaagggctccttcaagtatgcctgggtcttggataaactgaaagctgagtgtgaacatggtatcaccattgatacctccttgtggaaatttgagaccagcaagtactatgtgactatcgttgatgccccaggacacagagacttcatcaaaaacatgattacagagacatctcaggctgactgtgctgtcctgattgttgctgctggtgttggtgaatttgaagctggtatctccaagaatgggcaaacccaagagcatgcccttctggcttacacactgggtgtgaaacaactaattgttggtgttaacaaaatggattctactgagccaccctacagccagaagagatatgaggaaaattgttaaggaagtcagcacttacattaagaaaattggctacaaccctgacacagtagcatttgtgccaatttctggttggaatgtggagactggtgttctcaaacctggtatggtggtcacctttgctccagtcaacgttacaacagaagtaaaatctgtcgaaatgcaccatgaagctttgagtgaagctcttcctggggacaatgtgggcttcaatgtcaagaatgtgtctgtcaaggatgttcgtcatggcaacgttgctggtgacagcaaaaatgacccaccaatggaagcagctggtttcactgctcaggtgattatcctgaaccatccaggccaaataagcactggctatgcccctgtattggattgccacacggctcatattgcatgcaagtttgctgagctgaaggaaaagattgatcaccgttctggtaaaaagctggaagatggccctaaattcttgaagtctgttgatgctgccattgttgatatggttcctggcaagcccatgtgtgttgagagcttctcggactatccatctttgggttgctttgctgttcgtgatatgagacagatagttacagtgggtgtcatcaaagcagtggacaagaagactgctggagctggcaaggtcaccaagtctgcccagaaagctcagaaggctaaatgaatattatccctaatacctgccaccccactcttaatcagtgatggaagaacagtctcagaactctgtttcaattggccatttaagtttagtagtaaaagactggttaatgataacaatgcatcgtaaaaccttcagaaggaaaggagaatgttctgtggaccactttggttttcttttttgcgtgtggcagttttaagttactagcttttaaaatcagccctttttaatggaaacaacttgaccaaaaatttgtcacagaattttgagacccatttaaaaagtttaatgaggaaaaaaaaggtt

SEQ ID NO: 4426 - protein, 227 aa, Homo sapiens; identical to SEQ ID NO: 4422

SEQ ID NO: 4427 - DNA, 1863 bp, Homo sapiens
tactttcccctgctggtgcccaagaccaccgtggaaggaatggctaaaggataaggtggaggagacaagtgagttagaatggggcttgttacccccagaagaattttcccaagtgaatggaatcattcttcaaaagaaaatgtgcgatttctgggataagatctggaacttccaagccaagcctgatgacctgctcattgcttcttaccccaaagcaggaaccacttggacacaggaaattgtagatctgatacaaaatgatggcgatattgagaaaagcaggcgcgcttccattcaacttcaacaccctttcctggagtggataagaatgacacactgtgggattgaccaggctaacacaatgccttccccaaggaccctgaaaactcatcttcctgtacaactactgcctccatccttctgggaggaaaactgtaagtgtccaagagggagaatctgagacccactttcctgaggtcatccaatcccctcccatcttatcaggggtatggtatggcagctgtggcagagggatggaggagaggagacaccagagggaaaaaaaaaacgcaaatcctgttcacccaggaggtcaacaatggaaggaatacagaggagaaagcaccaggagggtgtagcaggcataccccgagatgaagaggggtttgggcgaagttggatgtgcaaacaactcaaccccaccatgacatgaaggaggccaccgtgtgagcacagggcctggaacaatgggtgtaatgagttactgccacgtcagagaaattggttgctcctgttgatatggtttgactgtgtccccacccaaatctcatcttgaattgtacttcccataatccccacatgttgtgggacgcacccggtggcaggtaatggaatcatgggtggttgcctccatgctgttctcatcatagtgagttctcatgggatctgatggttttctaaggggcttttcccctttttctcagcacttccttttgctgccatcatgtgaagaaggatatgtttgcttccctttccaccatgattgtaaatttgctgaggcctccccagccatgcggaactgtgagtcagttaaacctcttttctttataaatcacccagtctcaggtatgtccttataggagcctgagaacagactaatacacctgtcaatgccaaaatgatatattttggtggatttaaaattagcaaagccagcctgcccaaccacaaacacctccatctcaggcacatggtactgctttaaataaatatcagtaggacatgaaaggttgggtctgaaaagtcatcacctacctaacttcctcagattcctacctttttttatattaatcttgaagcttgctctccctatctaattttgtatagatttaggaatgttaaagtgtgtggataggctgatgctataggttgcttctaggggaggaatctgccaagagatactgacccctgaccctagtcatagactgttctcacttcacggtaagtcaataaaatgatagctttcctgtttgagggatgcccaaattctttgcaaaatctaattacaagtctgaataggcagtaaaatttgttcttgctatttatataattgtaaactttaactcagaaatggacattataagctgttctcagagtatccaaagatcaggttggcaccaacaggtcccgagtaagtcaggttttcttcacccctccctgtgtccctctggggaccgagcacgtccagggagcaaggagcagaccagtcagcaaaatgtaaaacctgtcttaacctggaaggtggggctgtcttatccacatttggctccacctctgagctaacttctgattaaagctgatcta

SEQ ID NO: 4428 - protein, 106 aa, Homo sapiens
MCDFWDKIWNFQAKPDDLLIASYPKAGTTWTQEIVDLIQNDGDIEKSRRASIQLQHPFLEWIRMTHCGIDQANTMPSPRTLKTHLPVQLLPPSFWEENCKCPRGRI

SEQ ID NO: 4429 - DNA, 2525 bp, Homo sapiens
atttcagcaccccaggctagtctgggaggctggcgcaaacgcagcgggtggctggggtaggggctcattgggagcccacggagcgcggcggcggctcgggggccgagttccctacaacaaggatggcggtgacgggcgcagggagcggggcccggctctccttgcctcgaggctcctctgattccactcgcgtggctgcgcggccctggcagcggccttcgtcccgggggtgggagctacacagggatccgccccgtcctggcgaggacgcctgagggggctctgtggtaaggctctgtcgggcaggccgggcttccgggaggacctggtctggatcggtcaccgctgggtgcctgagctccgcatggagcctgcagcctttgtttaacttataaagaaatgggggctccgagcagtcaagaagaacatgccccaagttattcgtcagtgaggcggaaattgtggtgtacttgtgtaagtttacattttatactttaccattatactgtgctccaaattatctgatatttactttcaaagtatgtgtaggaagtttactatgacgatgcagagacattgtacagaatccagtcccttgattctcaggtccccagaacactcacttcacaattttgttgaccttttctgtcaacttaaacctggcactctcttggctggctttctctgctctttctgggcactccaaagcttctgtacttacatgctacaactccagtcacaggaagatgctgagttctttagtcccagatccatattcctgagaaaacctaattgcctaggctcatgtcataactctgtatctgtttcagttgattatggctgggcctactgcccctctgtatggtggtggggcaaaagttcccagagagaggcaggggtgacagggactgttgtctcaaatgctaggcagacatctggagtggtaaccactacatctgttcacagtgagcacatccttgcagggaaactgggttaatcatctctattattgaaactcagaggtatagtgtttcttcataggaattttctttccttatttgagatgggggtctcactttgttgcccaggctggagtgcagtggtgtgtgatcttggctcactgcagcctcccctcccgagttcaagtgattctcctacctcagcctgctgagtagctgggactacaggcatgggccaacatgcctggctaatttttgtatttttcgtagagacaagttttcaccatattggccaggctggtcttggactcctgacctcaggtgatctgcccaccctggcctccctaagtgccgggatgacaggtgtgagccatcgcgcccagcctatttataggaattttctgtaggtatataagtaataatttgaaggtcccaactagatgccttttcgtgtaaccgtatcttgaatggaacattttctttctacgtaattatacataaataacccaatgctttttaatacccacgaaaaaccattagctcaaagacacttgcaaacttgtatcaggttgttctccttggtgtgtattaagtttgaaaaggggattttcagataccaagacgaagcagaagtcttccaccaagttgaaatcatcacgttgcaatttaatcatatgatacaaccaattttttgatgtgttatgccattcgccaaataccaaaaattttttaggggaaactttacatcctcaatactatacacttccagctacaccaccacctaacagagactttaaaaagaatacaaagtacggtatgccttctcagtgccttgttagtaattcagttacagttctgccgaactttctttaaaggaatacaattctcaatcttacaccgttcagagcacaagcatagcttattgtatacaagagatgtgcatcagttcccactcctcagggactgtatgaatttggctttttttttgacggagtctcactctgtcaccgggctggagtgcagtagtgtgatcttggctcactggactctgcctcccgggttcaagtgattctcctgcctcagcctcccgagtagctgggactacaggtgcacaccactatgcccagctgattttttgtgtgtttttagtagagatggggtttcaccatgttggccaggatggtcttgatctcttgacctcatgatctacccgctttggcctcccaaggtgctgggattacaggcatgaggcactgtgctgggccaaatttggttcttgtggcatctgtgtttctctttctgctctgtctctccccatatcctagtccaaacatccaaagaaattaattacctccaggagatcgagaccatcctggctaacacggtgaaaccccgtctctactaaaaatacaaaaaattagccgggcatggtggcgggcgcctgtggtcccagctacttgggaggctggggcgggagaatggcgtgaacccgggaggcagagcttgcagtgagccgagatcgcgccattgcactccagcctgggcgacagagcaagactctgtctc

SEQ ID NO: 4430 - protein, 151 aa, Homo sapiens
MCRKFTMTMQRHCTESSPLILRSPEHSLHNFVDLFCQLKPGTLLAGFLCSFWALQSFCTYMLQLQSQEDAEFFSPRSIFLRKPNCLGSCHNSVSVSVDYGWAYCPSVWWWGKSSQREAGVTGTVVSNARQTSGVVTTTSVHSEHILAGKLG

SEQ ID NO: 4431 - DNA, 3371 bp, Homo sapiens
atgaggaaagagggtccggggcgctggggagttggggagacgatggagcgacggcgagcgagcctgcttcctggagggagtgcagacaaggaccaggagcgggagccgagcctcgcggcccggggcacggcgccgcccgcccctccccggcagtgcctcccgaccccctgccctccgctgggacatggcctgaggccccgcccgccgcccgggactcctcccccccgctgcccccggaccctcgccccaggaccgcggggtctcttcccggccccgccgcccgccccggcgagaacaggcccggcgggcaaggcggcggcggaccgagggaggcctggcccggcagcggggagaagggtgcggcgcagcccgagtttcccaccttttctcctggcccagacgcggctggggcggacgggacctctcgcgctctgcctcctcctcttgcttcatggagccatgcgcctgggtgggggctcccgagagaagctggcctgcgggcgggccggacgcgctgcgcggacggggcggggcgaaggaggccggcgggcggaggaggaagcggcggggcggcggcggcggcggcggccgggaagaactagaggtattccccgggcggctggaggactgagtcgagccgggacccgagtcctccggtatcccagcagccaccggaggcagtgaggtaatggaggaagaatgtagggagtcctccagtggaccacactccttctagcgagccgcggaaaccatagagatcagggctcagccggagggccggcccactgctgtcacgtggcctccatccgtgcgctttattggctggtgctggctttacggggttgaattttggacgctgcctgccattcgtgggaccgagtttcaggcagctggaataaagagagacatcgggggaaagccgcgagaaggccagcgtccctggctgggagcagagctagccgagtagggcgcccggctgtcaaaactggccggcgcagtgcacgctgggccgccccggagcggtcgcagagcccgtcgggagtcgtagtccgggacgggcccgcagcattgtccgcgacgcagctcgggatccgcgtcgggttgtcggccgggttgctgccaggcaccgtcgagcgttagccacccagcattgagctgccagcggctgttctccctaagcaccctcgctcacgtcgcctcgcctcgcctcgcctgaccggccgcagccttggataccagccttaaatcgagccgactacggcccagccccgcccgcggcgaagtgcgcggggttcggtgccagccgctcgcccctggccgggccagcctcttgatgcaccggggacgggcgcgcccatccgactcttcgaggggcggcagggccccatctgtgtctttcgctctcgagcccccagctagagttggcttcagcggaatacctactgtgcaggattattcaacaagccgattgatcacattcttcagctctagcagtgcaaaggcttcactgaaaaagaacattacaaattttttttgaaagaaatttgggggtaaatttaattttaaatactgatttttgataacatttgatcttatgacagcatttgtatttttaattacagataggattacactaaaagtcatttctgacctgctcccttacccttatggctaaaataaactgctaggccctgaagcaaaggcgagccatgttctagagcaatgtctttcttgtattaaaatacggccccatgctcacatataggctgttttgtgttttgcttttctgttgatgcacaaaggaatccttgatatgtttgtcctcaaagaccaaagacaagtatctagtaaaaaatgcaaatcatatctaacagtgaagctttccagcaaaaaccttctgctctagaatgcataattatgcgagcataagatctactactctagacttttagcataattacctataggcagcaaaaccctagtcaattgagtgtctggtgcctcttggacctggacttctccaagagaatgggcaaggaggacgaaaaggaagagacagctatgctttgtgaaacaggaggtgacttaaaaaaaaaattctatagcagtcttcttaattcctgttacagacttgatacgcttatctgctgttgaggacacggttgccagtttctaaccttctctgtctgcctgaaaaactagaaattagatgatcatatggcctagagccagaagtgcaggaggcagaaagccaggggccagtttttttctttttgtttctgaataagaaggccaaatcctgacttaaaataatcaaaataaattttacggagtgacggtctttccagctgaaaaccttaaaacatggcatctggaagaaggccttagtctattgctcccaggatggtactatatagtcattaaatagcccacagataagggagttattgccccctcgttattgggctgccaggaattaaatgatggaactaagtttcacttgaaacattcccaaattaaaacaaaaacaagccttgctttgagctgttgaaaaggcattttactgagaagatccagatgctattgctgttcttaaatgatgttgaaaggcaaagggtcaggactttcaaaaagtcactttgaggtcacctcacataagcaagcaacagtttgaactgatgcaaaaacaaacaatgaaattatgaacaggaggaagaaactaaaatgagggcagtatatgccataaatatggaagaggctgtctcttatttatcttctcatttcctgtacataatacagaaacctggtatgtaataggcatacaattatttgtggctcaactgaataaacgaagatggaaaccagcaagcagcgggcagataatatacttgggaaaggagaactgcagagacgctgggtggttcaaggcttctgcatgatcctcaaatgtcaccccaatctgctgtgacatagctataccactcatcagaataccccaaaacaaattgtctgcctcccttatgtacaacttttattatttcttatctcggttggttaagaatatgtagtaatggccgggcgcggtggctcacgcctgtaatcccagcactttgggaggccgaggcaggaggatcacctgaggtcaggagttcgagaccagcctcaacatggagaaaccccgtctctactaaaaatacaaaattagccgggcgtggtggtgcatacctgtaattccagctactcgggaggctgaggcaggagaattgcttgaacctgggaggcagagtttgcggtgagctgagatcgcgccattgcactccatccagcctgggcaacaagagcgaaactccatctcaaaaaaaaaaaaaaaa

SEQ ID NO: 4432 - protein, 227 aa, Homo sapiens
MRKEGPGRWGVGETMERRRASLLPGGSADKDQEREPSLAARGTAPPAPPRQCLPTPCPPLGHGLRPRPPPGTPPPRCPRTLAPGPRGLFPAPPPAPARTGPAGKAAADRGRPGPAAGRRVRRSPSFPPFLLAQTRLGRTGPLALCLLLLLHGAMRLGGGSREKLACGRAGRAARTGRGEGGRRAEEEAAGRRRRRRPGRTRGIPRAAGGLSRAGTRVLRYPSSHRRQ

SEQ ID NO: 4433 - DNA, 4060 bp, Homo sapiens
atgaggaaagagggtccggggcgctggggagttggggagacgatggagcgacgggtagagcagcttgggccgagccgcggggcgagcgagcctgcttcctggagggagtgcagacaaggaccaggagcgggagccgagcctcgcggcccggggcacggcgccgcccgcccctccccggcagtgcctcccgaccccctgccctccgctgggacatggcctgaggccccgcccgccgcccgggacccctcccccacgctgcccccggaccctcgccccaggaccgcggggtctcttcccggccccgccgcccgccccggcgagaacaggcccggcgggcaaggcggcggcggaccgagggaggcctggcccggcagcggggagaagggtgcggcgcagcccgagtttcccaccttttctcctggcccagacgcggctggggcggacgggacctctcgcgctctgcctcctcctcttgcttcatggagccatgcgcctgggtgggggctcccgagagaagctggcctgcgggcgggccggacgcgctgcgcggacggggcggggcgaaggaggccggcgggcggaggaggaagcggcggggcggcggcggcggcggcggccgggaagaactagaggtattccccgggcggctggaggactgagtcgagccgggacccgagtcctccggtatcccagcagccaccggaggcagtgaggtaatggaggaagaatgtagggagtcctccagtggaccacactccttctagcgagccgcggaaaccatagagatcagggctcagccggagggccggcccactgctgtcacgtggcctccatccgtgcgctttattggctggtgctggctttacggggttgaattttggacgctgcctgccattcgtgggaccgagtttcaggcagctggaataaagagagacatcgggggaaagccgcgagaaggccagcgtccctggctgggagcagagctagccgagtagggcgcccggctgtcaaactggccggcgcagtgcacgctgggccgccccggagcggtcgcagagcccgtcgggagtcgtagtccgggacgggcccgcggcattgtccgcgacgcagctcgggatccgggtcggggtgtcggccgggttgctgccgggcaccgtcgagcgttagccacccagcattgagctgccagcggctgttctccctaagcaccctcgctcacgtcgcctcgcctcgcctcgcctgaccggccgcagccttggataccagccttaaatcgagccgactacggcccagccccgcccgcggcgaggtgcgcggggttcggtgccagccgctcgcccctggcggggccagcctcttgatgcaccggggacgggcgcccccatccgactcttcgaggggcggcagggccccatctgtgtctttcgctctcgagcccccagctagagttggcttcagcggaatacctactgtgcaggattattcaacaagccgattgatcacattcttcagctctagcagtgcaaaggcttcactgaaaaagaacattacaaattttttttgaaagaaatttgggggtaaatttaattttaaatactgatttttgataacatttgatcttatgacagcatttgtatttttaattacagataggattacactaaaagtcatttctgacctgctcccttacccttatggctaaaataaactgctaggccctgaagcaaaggcgagccatgttctagagcaatgtctttcttgtattaaaatacggccccatgctcacatataggctgttttgtgttttgcttttctgttgatgcacaaaggaatccttgatatgtttgtcctcaaagaccaaagacaagtatctagtaaaaaatgcaaatcatatctaacagtgaagctttccagcaaaaaccttctgctctagaatgcataattatgcgagcataagatctactactctagacttttagcataattacctataggcagcaaaaccctagtcaattgagtgtctggtgcctcttggacctggacttctccaagagaatgggcaaggaggacgaaaaggaagagacagctatgctttgtgaaacaggaggtgacttaaaaaaaaaattctatagcagtcttcttaattcctgttacagacttgatacgcttatctgctgttgaggacacggttgccagtttctaaccttctctgtctgcctgaaaaactagaaattagatgatcatatggcctagagccagaagtgcaggaggcagaaagccaggggccagtttttttctttttgtttctgaataagaaggccaaatcctgacttaaaataatcaaaataaattttacggagtgacggtctttccagctgaaaaccttaaaacatggcatctggaagaaggccttagtctattgctcccaggatggtactatatagtcattaaatagcccacagataagggagttattgccccctcgttattgggctgccaggaattaaatgatggaactaagtttcacttgaaacattcccaaattaaaacaaaaacaagccttgctttgagctgttgaaaaggcattttactgagaagatccagatgctattgctgttcttaaatgatgttgaaaggcaaagggtcaggactttcaaaaagtcactttgaggtcacctcacataagcaagcaacagtttgaactgatgcaaaaacaaacaatgaaattatgaacaggaggaagaaactaaaatgagggcagtatatgccataaatatggaagaggctgtctcttatttatcttctcatttcctgtacataatacagaaacctggtatgtaataggcatacaattatttgtggctcaactgaataaacgaagatggaaaccagcaagcagcgggcagataatatacttgggaaaggagaactgcagagacgctgggtggttcaaggcttctgcatgatcctcaaatgtcaccccaatctgctgtgacatagctataccactcatcagaataccccaaaacaaattgtctgcctcccttatgtacaacttttattatttcttatctcggttggttaagaatatgtagtaatggccgggcgcggtggctcacgcctgtaatcccagcactttgggaggccgaggcaggaggatcacctgaggtcaggagttcgagaccagcctcaacatggagaaaccccgtctctactaaaaatacaaaattagccgggcgtggtggtgcatacctgtaattccagctactcgggaggctgaggcaggagaattgcttgaacctgggaggcagagtttgcggtgagctgagatcgcgccattgcactccatccagcctgggcaacaagagcgaaactccatctcaaaaaaaaaaaaaaaaaaaaaagaatatgtagtaatggttaagagtccactgtggaatcagcctgcataggtccaaatcccagccctgactgaatacctgtgaacaagttatatcagtgactcaggcttattatctgtaaaatggggattatagcattcctgcctcatagggatgttatgagatttaaataccaataagtctgtacattataaaccttatcagattggtgtggtgaaaatgctcagtaactgagcctcgtgagcattagaatgttgagatcagcatgaagttagcctgtatactgggcatacacattcttctggatttgctccttttgtgagcaatcaatgatgagctaaaggcatttgctaactagtaggaatgaaataaggtttcagacaggatcttggtgggtgatgtagattttatctgtcccatttgtcccatttctcaactggaagtgagtctggccttggtctgcatctgtgctctccccttcacaaaaggcaggcccagagagactccagagatggcccctgtctcctgtgtgtcctccgccgctgtgtccacttgggcacgtcaaaggtatgatcggtacttatctgatgaaaacaaatctttgtatatacagttgtctacctgggttgaatatttcagaggtataaagtagtttaaat

SEQ ID NO: 4434 - protein, 209 aa, Homo sapiens
MRKEGPGRWGVGETMERRVEQLGPSRGASEPASWRECRQGPGAGAEPRGPGHGAARPSPAVPPDPLPSAGTWPEAPPAARDPSPTLPPDPRPRTAGSLPGPAARPGENRPGGQGGGGPREAWPGSGEKGAAQPEFPTFSPGPDAAGADGTSRALPPPLASWSHAPGWGLPREAGLRAGRTRCADGAGRRRPAGGGGSGGAAAAAAAGKN

SEQ ID NO: 4435 - DNA, 1668 bp, Homo sapiens
cctatgcggacagcatgatgccaggtctgtgtcaggcatcggaaatgcagctgggtaggaaactagggctccttttgggaatgttgagttcaccatctaccggaggagaatgactgaaagtattggttgcgctcatgtcttttttgaccctcaacttgtagatgcattcaccctagtccaagaaaacctattggctttgcctgaccttttggccttagaaatgaccttcaaacactatagccatctcaggatagggatagcaatgatgtacaggaactggcacagaaggaattttctcctgtcacaaggcagaagttgtatggctcctgtgctacttgtcacagcaaacttaagcagatccagaaactgcctgaccctttactgtaccttcccactccaaaatggggaggggaactcctgtgcgggagtgctcagctctcaagggaagacagtcattaacctgtctaaactctatgttaatagaaccttctcgataattgctttcattaagtgtggttaatgtgaacagtacaagttatagcaagatttgcagaagaacaaagtaaatatttaagactttatttcaggatgcagttgggtcgaggcaaggagaagattagtagaagctgtatctgatggtatctgaggttgaaacacagtgaacctcttggcagaagtgccagtcatttctcatcagtggttcacagaatcctaactctggggaggcagatgggtgtctcctggagatggttgtgtgttcaggttttctcctttcgcttctggcctctgtcagacatgaatgacatggtgatgaagataaactgccttccctgtactgcccaggaatgcaatgaggattaagaaggtggcttttagcctgtgtctatgccacatggggaggatggttgctccctgagggcagaaggccattattagcaactgagttggccaggagtgtgtgccatgccgggctgggtgtacggagctgtcaagccaggcacctggggattaatttagcatgggttttcatgcccccgggctaccagtgaccatacagccatcatctctacctttgagttgatgtgtataactgaataatagtgctgtgttttcaaaaggaaaggcttaaaaaacagtgcttctgtagtacaaggagggatgctctgctgaaaatctggaaattacagctaagcaaaaagatgaaaatacaaagtagctgttattctaccacccagagatcgatttgtttctttactaacagatacggcaagtgcctgttctgtgccaggcactgtctaggcactggagatagtgatgagcaaaaccatctcttctttctggagatgacactccagcagtgaaggcagataggaaacaaatacataaacacatctggtgaaaaatgcttgaggaacagcaaagtagggtaagaaattagcgaaggaagtgggtgctgtttcaggtttgaggcttgtcaagaaagcctctctgaagaagagagattgagcagagacccatattattgagtgagggaggcctggggttctccagctagctgccagcaggatcagtctgtacaacagcccagggcacattcttcctgggtgcatttaagaaccactgttgggcccttttaattctaatacagaaggtggcctattaaaacca

SEQ ID NO: 4436 - protein, 136 aa, Homo sapiens
MTESIGCAHVFFDPQLVDAFTLVQENLLALPDLLALEMTFKHYSHLRIGIAMMYRNWHRRNFLLSQGRSCMAPVLLVTANLSRSRNCLTLYCTFPLQNGEGNSCAGVLSSQGKTVINLSKLYVNRTFSIIAFIKCG

SEQ ID NO: 4437 - DNA, 1668 bp, Homo sapiens
cctatgcggacagcatgatgccaggtctgtgtcaggcatcggaaatgcagctgggtaggaaactagggctccttttgggaatgttgagttcaccatctaccggaggagaatgactgaaagtattggttgcgctcatgtcttttttgaccctcaacttgtagatgcattcaccctagtccaagaaaacctattggctttgcctgaccttttggccttagaaatgaccttcaaacactatagccatctcaggatagggatagcaatgatgtacaggaactggcacagaaggaattttctcctgtcacaaggcagaagttgtatggctcctgtgctacttgtcacagcaaacttaagcagatccagaaactgcctgaccctttactgtaccttcccactccaaaatggggaggggaactcctgtgcgggagtgctcagctctcaagggaagacagtcattaacctgtctaaactctatgttaatagaaccttctcgataattgctttcattaagtgtggttaatgtgaacagtacaagttatagcaagatttgcagaagaacaaagtaaatatttaagactttatttcaggatgcagttgggtcgaggcaaggagaagattagtagaagctgtatctgatggtatctgaggttgaaacacagtgaacctcttggcagaagtgccagtcatttctcatcagtggttcacagaatcctaactctggggaggcagatgggtgtctcctggagatggttgtgtgttcaggttttctcctttcgcttctggcctctgtcagacatgaatgacatggtgatgaagataaactgccttccctgtactgcccaggaatgcaatgaggattaagaaggtggcttttagcctgtgtctatgccacatggggaggatggttgctccctgagggcagaaggccattattagcaactgagttggccaggagtgtgtgccatgccgggctgggtgtacggagctgtcaagccaggcacctggggattaatttagcatgggttttcatgcccccgggctaccagtgaccatacagccatcatctctacctttgagttgatgtgtataactgaataatagtgctgtgttttcaaaaggaaaggcttaaaaaacagtgcttctgtagtacaaggagggatgctctgctgaaaatctggaaattacagctaagcaaaaagatgaaaatacaaagtagctgttattctaccacccagagatcgatttgtttctttactaacagatacggcaagtgcctgttctgtgccaggcactgtctaggcactggagatagtgatgagcaaaaccatctcttctttctggagatgacactccagcagtgaaggcagataggaaacaaatacataaacacatctggtgaaaaatgcttgaggaacagcaaagtagggtaagaaattagcgaaggaagtgggtgctgtttcaggtttgaggcttgtcaagaaagcctctctgaagaagagagattgagcagagacccatattattgagtgagggaggcctggggctctccagctagctgccagcaggatcagtctgtacaacagcccagggcacattcttcctgggtgcatttaagaaccactgttgggcccttttaattctaatacagaaggtggcctattaaaacca

SEQ ID NO: 4438 - protein, 136 aa, Homo sapiens; identical to SEQ ID NO: 4436

SEQ ID NO: 4439 - DNA, 8192 bp, Homo sapiens
ggtctaggagggagcgcgccgcacgcgtgagtaaacagccggagctgggaaagtcgagctctggcagcgtctgggtgctgaggggcagaggcggagagaaccctgtcctgatcttcctagggtggccgacatgacggccaggggtcagagccccctcgcgccgctgttggagactttggaagacccttctgcctcccatggagggcagactgacgcttacctgactctgaccagtcgtatgactggagaagaaggaaaagaagtaattacagaaattgagaaaaaacttcctcggctgtacaaagttttaaagactcacatttccagtcaaaactcggagctgagtagtgctgctctacaagccctggggttttgcttatataatcccaaaattacctcagaattatcagaggcaaatgctctagaattgctttcaaaattgaatgataccattaagaattcagacaaaaatgtacgtactagagcactttgggtgatatctaagcagacatttccctctgaagtggttggcaaaatggtatccagtataattgattcattagaaatactgtttaacaaaggagagacgcattctgctgttgttgattttgaagcattaaatgttatcgtaaggctaattgaacaagccccaattcaaatgggagaagaggcagtgaggtgggcaaaactggtcatacctttagtggttcattcagcacaaaaggtacatttgcggggagcaactgctctggagatgggaatgccattattgcttcagaaacagcaagaaatagcatctattacggagcagcttatgactactaaattaatctcagaacttcagaagctatttatgagtaaaaatgagacttacgtgttaaaattatggcctttgtttgtcaaactacttggaaggaccttgcatcgaagtgggagtttcatcaattctctcttgcaactagaagaacttggatttcgtagtggagcacccatgattaaaaagatagcttttattgcttggaagagtttaatagataattttgctttaaatccagatatactatgtagtgcaaaaagactcaagttgttaatgcagcctttgagttccatccatgtgagaacagaaactctagcattaacaaaactagaagtctggtggtatttactgatgagacttggacctcatcttcctgctaattttgaacaggtttgtgtgcctctgattcaaagtacaataagcattgattctaatgcctcacctcagggcaattcgtgtcatgtagctacatctccaggtttaaatcctatgactcctgtacacaaaggtgcttcctccccgtacggagccccgggaactccccgaatgaacctgagttcgaatttaggtggaatggccacaatcccatccattcaacttttgggacttgaaatgttgcttcatttcttgttgggtccagaagccttgagttttgctaagcaaaataaacttgtgctgagcttagagccattggaacatccgttaatcagcagcccttcctttttttccaaacatgcaaatacacttatcactgctgttcatgatagctttgttgcagttggaaaagatgcccccgatgtggttgtcagtgctatctggaaggagctaattagcttggtgaagtcagttactgaatcaggtaacaaaaaagagaaaccaggttctgaagttttgactctcttattaaagtctttggaaagcatagtaaagtctgaagtatttcctgtatcaaaaacgctggtcctcatggaaattacaattaaaggacttcctcagaaagtattaggttcaccagcatatcaggttgctaatatggatattcttaatggaactccagctttgttcttaattcaattaattttcaacaatttcttggaatgtggtgtatcagatgaaaggttctttctcagtttggaatcacttgtaggctgtgttctttctggtccaacttcaccactagctttcagtgactcagttttaaatgttattaatcaaaatgcaaagcagttggaaaataaggagcatctctggaaaatgtggagtgttatagtcaccccattaactgaattgattaatcagaccaatgaagtaaatcaaggtgatgccttagaacataattttagtgccatctatggtgcattgactttaccagtaaaccacattttttcagaacagagatttccagtggccaccatgaagactttgcttagaacttggtcagaattatatagagcatttgctcgttgtgctgctttggtggcaacagcagaagagaacttgtgctgtgaggaactttcttccaagataatgtccagtttggaagatgaaggcttttctaatttgttgttcgtggatagaattatttatattattactgtaatggttgattgcattgacttctcaccatataatattaaatatcagcccaaagttaaatcaccacagagaccttcagattggtccaaaaagaagaatgagcccctagggaaattgacttctttatttaaacttattgtgaaagtgatctattctttccacacactgagcttcaaggaagcacattctgataccctcttcactattggcaactcaatcaccggcattatttccagtgtacttgggcatatttctttgccttctatgatccgaaaaatatttgcaactttaacaagacctctggcattattttatgaaaactcaaagcttgatgaagttcctaaagtatatagttgtctgaacaacaagttagaaaagctactgggagaaattattgcttgtctgcaattcagctacaccggaacttatgatagtgaacttcttgaacaactctccccactattatgcataatatttctgcacaagaataaacagattcgaaaacagagtgctcagttctggaatgccacttttgccaaagtgatgatgttggtttatcctgaagagttaaaaccagtactaacacaagccaaacaaaaatttctgctcctgttgcctggtttggaaactgttgaaatgatggaggaatccagtggaccatattctgatggaacagaaaattcacaactaaatgtgaagataagtggcatggagagaaaatcaaatggaaaaagagattcatttttggcacaaacaaagaataaaaaagaaaatatgaaaccagcagccaaactgaaacttgaatcttcgtctttaaaagtaaagggtgaaattcttttggaagaggaaaagtctactgactttgtgtttatacctccagaaggaaaagatgcaaaggaaagaatattaactgatcatcaaaaagaagttctcaaaacaaagcggtgtgatattcctgccatgtataataatctggatgtttcccaagataccttatttactcagtatagtcaggaagagcctatggaaattcctactttaaccagaaaaccaaaggaggattctaagatgatgattacggaggagcaaatggacagtgacattgtcattcctcaagatgtcacggaagactgtggtatggctgaacatcttgaaaagtcctccctttcgaataatgagtgtggttctcttgacaaaaccagtccagaaatgtcaaacagtaataatgatgaaagaaaaaaagctttaatttcatcaaggaaaacatcaactgaatgtgcatctagtacagaaaattctttcgttgtcagcagtagttcagtttctaataccactgttgctggaactcccccataccctacaagtcggaggcaaacctttattactttggagaagtttgatggttcagaaaatagaccttttagtccatcccccttgaataatatttcatcaactgttacagtgaaaaataaccaggaaaccatgattaaaacagattttctaccaaaagcaaagcaaagagaagggactttttcaaaatctgattctgaaaaaatagtgaatggaactaagagatcaagccggagagctggtaaagctgaacaaacagggaataaaaggtctaagcccttaatgagatctgagccggagaaaaatactgaggaatctgttgaaggcattgtagtcttagaaaataacccacctggtttgcttaatcaaacagaatgtgtgtcagataatcaggttcatctttctgaatctacaatggagcatgacaatacaaagcttaaagcagcaacagtggaaaatgctgtattattggaaactaatactgtagaggagaaaaatgtagaaattaatttggaatccaaagagaatacacccccagtagtaatatcagcagatcaaatggtaaatgaggatagtcaggttcagataactccaaatcagaaaacccttagacggtcttcaaggcgacgttcagaagtagtagagtctaccactgaaagccaagataaggaaaatagtcatcaaaaaaaggaacgacgtaaggaagaagaaaaacctcttcagaagagtccattgcatataaaagatgatgtgttacctaaacaaaaactgattgctgaacaaactctacaggagaatttaattgagaaaggaagtaatttacatgagaagactcttggggaaactagtgctaatgcagaaactgaacaaaataaaaaaaaggcagaccctgagaacattaagtctgagggggatggtacccaggacattgtagataagtcctctgagaaactagtcagaggccgaacacggtatcaaactagaagagcatctcagggtttgctttccagcattgaaaactcagaatctgatagttcggaggcaaaagaagaaggttctaggaagaagagatctggaaaatggaaaaacaaaagcaatgaaagtgttgacattcaagatcaagaagagaaagtggtgaaacaggaatgtataaaagctgaaaatcagtcacatgattataaagcaacttctgaagaagatgtaagcataaaatctccgatttgcgaaaaacaagatgaaagtaatactgtaatatgtcaggattctacagtaacttcagatttgttgcaagttcctgatgatttaccaaatgtgtgtgaggaaaaaaatgaaactagcaaatatgcagaatattcctttacaagtctacctgtgccagaatcaaatctaaggactagaaatgccattaagagattacataagcgagactcttttgataattgtagtttgggagaatcctcaaaaatagggatatcagatatttcttcgctttcagaaaaaacttttcaaacacttgaatgccaacacaagagaagtaggagggtgaggagatctaaaggttgtgattgctgtggggaaaaatcacaacctcaggaaaagtcactcattgggttaaagaatacagaaaataatgacgtagagattagtgaaacaaaaaaggcagatgtgcaagcacctgtaagcccatcagaaacttctcaagctaatccatattctgaaggacaatttttagatgaacatcatagtgtgaattttcatttgggtctcaaagaggataatgatactattaatgattcattaattgtttctgaaaccaaatcaaaagaaaacactatgcaagaatctcttccttctggaatagtaaactttagagaggaaatttgtgatatggattctagtgaagcaatgtctcttgaaagccaggagtcacctaatgaaaattttaaaactgttggcccgtgtttaggagactcgaaaaatgtttcacaggaatctttggagacaaaagaagaaaaaccagaagaaaccccaaaaatggaactgagtctagagaatgttactgttgaaggaaatgcatgtaaagtaacagaatccaatctagagaaagcaaaaactatggaattgaatgtaggaaatgaagctagctttcatggacaagagagaaccaaaactggtatttctgaagaagcagcaatagaagaaaataaaagaaatgatgactctgaagcagacacagctaaactgaatgccaaagaagtagcaactgaggaatttaattcagatattagtctttctgataatactacacctgtaaaattgaatgctcaaactgagatttctgaacaaacagcagctggggaactagatggaggaaatgatgtatctgatctacactcatctgaagaaacgaataccaaaatgaaaaataatgaagaaatgatgatcggcgaggcaatggctgaaactggccatgatggtgaaacagagaatgagggcataactaccaaaacctcaaagcctgatgaagctgaaacaaacatgttgactgcagaaatggacaactttgtttgtgacacagttgaaatgagcactgaagaaggaatcattgacgctaataaaactgaaacaaatactgagtatagtaaatctgaagaaaaattagataacaatcaaatggtaatggaaagtgatattttacaggaagatcaccatacttcacagaaagtggaggaaccatcacagtgtctggcatctggaacagctatctctgagctaataatagaagacaataatgcatctcctcaaaaactaagggaacttgatccttcacttgtgtcagcaaatgacagtcctagtggcatgcagacacgctgtgtctggtctcctttggcttctccgtctacgagcattttaaagagaggactaaaaagatcccaagaagatgaaatctcatcacctgttaataaggttcgccgtgtctcctttgcagatccaatataccaagcaggattggcagatgacattgatagacggtgctctattgttaggtcccattcttccaatagttctcccataggaaaaagtgttaaaacttctcctactacacaatctaagcataataccacttcagccaaaggatttctgtccccaggatcacgtagccctaaatttaagagctcaaagaagtgtttaatttcagaaatggccaaagaatccataccatgcccaacagaaagtgtttacccaccattggtgaactgtgtggcaccagttgacatcattttacctcagattacatcaaacatgtgggcaagaggcctgggacaactcattagagctaagaatataaaaactattggtgatttgagtactcttacagcatctgaaataaaaactcttcctatccgttctccaaaagtgtccaatgtaaaaaaggctctcagaatatatcatgagcagcaggtgaagactcgtggactagaagagattccagtttttgatatttctgaaaaaacagtaaatggaatagaaaataaatctttgtcacctgatgaagaaagacttgtctcagatataattgatcctgttgctttagaaattccattatccaaaaaccttctggcacagattagtgctcttgctcttcagctggattcagaagatcttcataattattcaggaagccaactatttgaaatgcacgagaaactaagttgtatggcaaactctgtaataaaaaatctacagtcacgttggagatcaccatcccatgaaaattctatttagtattttcagagaaaattgaaggtttttttaaacatcactggatttcttgattgaggaaacaagttctgaaataatagcacaatttcaaagaagagactctttgcaaagttgataacatttcaaaccctgaaggacagtgacttattatgtaagttcaattttgtaagttcattatgtaagatccttttttttttcataatatgtattcttggctgctatgcgtggtttttcaggaaatttaattatcttactgagatgtgaaagcaaaactagtaacagaacttacattttatttcatgctttcttaaacccgtgcatattctggtgaaacatgtaaaatactttaagtaaaattgaacatttttatttgaatttttgctgaactgataaaggtgtttatatttttgtttgtttgtttgtttaattcatgtttgttgggactgaggtttaggaagtttgttactggttaaaaacctcaaatgaaatgcgaaagaatttgaatttttcctgcatatgtcaactttggacagctttcaagaaaaatgagaaaagtttcaacttctggcggttaaaatattaatgcagaatttactaagattttattcatttgcattagcaaatattcatgcagcagcagttgact

SEQ ID NO: 4440 - protein, 2472 aa, Homo sapiens
MTARGQSPLAPLLETLEDPSASHGGQTDAYLTLTSRMTGEEGKEVITEIEKKLPRLYKVLKTHISSQNSELSSAALQALGFCLYNPKITSELSEANALELLSKLNDTIKNSDKNVRTRALWVISKQTFPSEVVGKMVSSIIDSLEILFNKGETHSAVVDFEALNVIVRLIEQAPIQMGEEAVRWAKLVIPLVVHSAQKVHLRGATALEMGMPLLLQKQQEIASITEQLMTTKLISELQKLFMSKNETYVLKLWPLFVKLLGRTLHRSGSFINSLLQLEELGFRSGAPMIKKIAFIAWKSLIDNFALNPDILCSAKRLKLLMQPLSSIHVRTETLALTKLEVWWYLLMRLGPHLPANFEQVCVPLIQSTISIDSNASPQGNSCHVATSPGLNPMTPVHKGASSPYGAPGTPRMNLSSNLGGMATIPSIQLLGLEMLLHFLLGPEALSFAKQNKLVLSLEPLEHPLISSPSFFSKHANTLITAVHDSFVAVGKDAPDVVVSAIWKELISLVKSVTESGNKKEKPGSEVLTLLLKSLESIVKSEVFPVSKTLVLMEITIKGLPQKVLGSPAYQVANMDILNGTPALFLIQLIFNNFLECGVSDERFFLSLESLVGCVLSGPTSPLAFSDSVLNVINQNAKQLENKEHLWKMWSVIVTPLTELINQTNEVNQGDALEHNFSAIYGALTLPVNHIFSEQRFPVATMKTLLRTWSELYRAFARCAALVATAEENLCCEELSSKIMSSLEDEGFSNLLFVDRIIYIITVMVDCIDFSPYNIKYQPKVKSPQRPSDWSKKKNEPLGKLTSLFKLIVKVIYSFHTLSFKEAHSDTLFTIGNSITGIISSVLGHISLPSMIRKIFATLTRPLALFYENSKLDEVPKVYSCLNNKLEKLLGEIIACLQFSYTGTYDSELLEQLSPLLCIIFLHKNKQIRKQSAQFWNATFAKVMMLVYPEELKPVLTQAKQKFLLLLPGLETVEMMEESSGPYSDGTENSQLNVKISGMERKSNGKRDSFLAQTKNKKENMKPAAKLKLESSSLKVKGEILLEEEKSTDFVFIPPEGKDAKERILTDHQKEVLKTKRCDIPAMYNNLDVSQDTLFTQYSQEEPMEIPTLTRKPKEDSKMMITEEQMDSDIVIPQDVTEDCGMAEHLEKSSLSNNECGSLDKTSPEMSNSNNDERKKALISSRKTSTECASSTENSFVVSSSSVSNTTVAGTPPYPTSRRQTFITLEKFDGSENRPFSPSPLNNISSTVTVKNNQETMIKTDFLPKAKQREGTFSKSDSEKIVNGTKRSSRRAGKAEQTGNKRSKPLMRSEPEKNTEESVEGIVVLENNPPGLLNQTECVSDNQVHLSESTMEHDNTKLKAATVENAVLLETNTVEEKNVEINLESKENTPPVVISADQMVNEDSQVQITPNQKTLRRSSRRRSEVVESTTESQDKENSHQKKERRKEEEKPLQKSPLHIKDDVLPKQKLIAEQTLQENLIEKGSNLHEKTLGETSANAETEQNKKKADPENIKSEGDGTQDIVDKSSEKLVRGRTRYQTRRASQGLLSSIENSESDSSEAKEEGSRKKRSGKWKNKSNESVDIQDQEEKVVKQECIKAENQSHDYKATSEEDVSIKSPICEKQDESNTVICQDSTVTSDLLQVPDDLPNVCEEKNETSKYAEYSFTSLPVPESNLRTRNAIKRLHKRDSFDNCSLGESSKIGISDISSLSEKTFQTLECQHKRSRRVRRSKGCDCCGEKSQPQEKSLIGLKNTENNDVEISETKKADVQAPVSPSETSQANPYSEGQFLDEHHSVNFHLGLKEDNDTINDSLIVSETKSKENTMQESLPSGIVNFREEICDMDSSEAMSLESQESPNENFKTVGPCLGDSKNVSQESLETKEEKPEETPKMELSLENVTVEGNACKVTESNLEKAKTMELNVGNEASFHGQERTKTGISEEAAIEENKRNDDSEADTAKLNAKEVATEEFNSDISLSDNTTPVKLNAQTEISEQTAAGELDGGNDVSDLHSSEETNTKMKNNEEMMIGEAMAETGHDGETENEGITTKTSKPDEAETNMLTAEMDNFVCDTVEMSTEEGIIDANKTETNTEYSKSEEKLDNNQMVMESDILQEDHHTSQKVEEPSQCLASGTAISELIIEDNNASPQKLRELDPSLVSANDSPSGMQTRCVWSPLASPSTSILKRGLKRSQEDEISSPVNKVRRVSFADPIYQAGLADDIDRRCSIVRSHSSNSSPIGKSVKTSPTTQSKHNTTSAKGFLSPGSRSPKFKSSKKCLISEMAKESIPCPTESVYPPLVNCVAPVDIILPQITSNMWARGLGQLIRAKNIKTIGDLSTLTASEIKTLPIRSPKVSNVKKALRIYHEQQVKTRGLEEIPVFDISEKTVNGIENKSLSPDEERLVSDIIDPVALEIPLSKNLLAQISALALQLDSEDLHNYSGSQLFEMHEKLSCMANSVIKNLQSRWRSPSHENSI

SEQ ID NO: 4441 - DNA, 1744 bp, Homo sapiens
atgcaggaaactattatagctggcctaacttaccaataccacctaaatactgggagggagccgcgaaagagaacgggggctggggggaggggtagcgacaagaagattaaaagagggaagcagaggagttgggagctggcggtcgttcccggggaagaactgctaaaacatgagaccaaggcacagaccttactgtatgagaagcaatgctcctcaaaccttctgcgtgctgacatagaccttcccagaagcaaaactgttggcggcgacctgagcgctggaagccgaaggggaagaggaaggagacgcgaagccagggcggccggcacaaaggcggcggactcgcggcggcagcgcctgcccggccgggagcacaacccacggccctactccagcgaagtcccgcaccggcttctaggaataaagtttacgttctcctgaggccgcaccccccacctcccacccaggacggcacatctccgtgtcctcctcccccaaactccactcgggaccccgagaaccaccccagccttccggccaccacaacaaagagccgcaccgaccggcgaggataaacagcggcggagggcgagagggcggcggggcgagcgcctccacgcagcaactccggagtcccccgcttgcccgagcgcagtttctccgctgctgtttccaccggctttgtaacactgggaatttacatcctcacccgcacccctcacgcccgaggattttaaactcacctttactctcgaactgagagttgcggtagatgggatttttgccttttccccagatggttgaaggttaagatttttggaaaccccaccacctccttatttctattattatttctgcaagaaaagtataaagagagttgtagtggaggtgagatttgtgatcgggaaagccttcgactccctccttctccgtcttccgcctctctctctctgattagttcctatccagcagcagattgaagcaggagatgattcttctcaaggtttgttcagcagcttcacttctaggcgaaggcttcatgaaccaagtgacgtcaaccaacaaggcttctctctctctcctctctctaacaatgaaagttgctgttaacaagggaaaaaaagagagagaattgtttataccatttcagttccaataataaatgacctatcagctcctaaaggagccaagggagggggttgcttcttctttccaagaatactgtagctttgagtttgcaccgttccttgtcccaggaaaaagttaagaaacttaaaatgttttgttttgcttttaaagaagacaggacagaaaacgggatttaaaacttagtttttaaaaaaacaaaagctacagagtagggagcataggtcaaccatctccacctaaattttttttgttcctaaactcagaattctacaacccaactaaattaatatgccaagattttgcggatgttaaaactcaaaaaaagcagtatgcaagacggtcccggggtaaaattctactgcctttccacggacaagttaaactggctgtaatgtttatgcactaagttaaaataaaatttaaataaaagacgttaaaatagtcgttttaaagttatatgcacacactgtaaaaggtaatctcgatagctttttttcaagtttctgagagattagaaaaaaagcatagcaaattgtaggcactgaacactttttaaaaatcaagttatgagtaagactggtagccctttgctcct

SEQ ID NO: 4442 - protein, 146 aa, Homo sapiens
MQETIIAGLTYQYHLNTGREPRKRTGAGGRGSDKKIKRGKQRSWELAVVPGEELLKHETKAQTLLYEKQCSSNLLRADIDLPRSKTVGGDLSAGSRRGRGRRREARAAGTKAADSRRQRLPGREHNPRPYSSEVPHRLLGIKFTFS

SEQ ID NO: 4443 - DNA, 1744 bp, Homo sapiens
atgcaggaaactattatagctggcctaacttaccaataccacctaaatactgggagggagccgcgaaagagaacgggggcgggggggaggggtagcgacaagaagattaaaagagggaagcagaggagttgggagctggcggtcgttcccggggaagaactgctaaaacatgagaccaaggcacagaccttactgtatgagaagcaatgctcctcaaaccttctgcgtgctgacatagaccttcccagaagcaaaactgttggcggcgacctgagcgctggaagccgaaggggaagaggaaggagacgcgaagccagggcggccggcacaaaggcggcggactcgcggcggcagcgcctgcccggccgggagcacaacccacggccctactccagcgaagtcccgcaccggcttctaggaataaagtttacgttctcctgaggccgcaccccccacctcccacccaggacggcacatctccgtgtcctcctcccccaaactccactcgggaccccgagaaccaccccagccttccggccaccacaacaaagagccgcaccgaccggcgaggataaacagcggcggagggcgagagggcggcggggcgagcgcctccacgcagcaactccggagtcccccgcttgcccgagcgcagtttctccgctgctgtttccaccggctttgtaacactgggaatttacatcctcacccgcacccctcacgcccgaggattttaaactcacctttactctcgaactgagagttgcggtagatgggatttttgccttttccccagatggttgaaggttaagatttttggaaaccccaccacctccttatttctattattatttctgcaagaaaagtataaagagagttgtagtggaggtgagatttgtgatcgggaaagccttcgactccctccttctccgtcttccgcctctctctctctgattagttcctatccagcagcagattgaagcaggagatgattcttctcaaggtttgttcagcagcttcacttctaggcgaaggcttcatgaaccaagtgacgtcaaccaacaaggcttctctctctctcctctctctaacaatgaaagttgctgttaacaagggaaaaaaagagagagaattgtttataccatttcagttccaataataaatgacctatcagctcctaaaggagccaagggagggggttgcttcttctttccaagaatactgtagctttgagtttgcaccgttccttgtcccaggaaaaagttaagaaacttaaaatgttttgttttgcttttaaagaagacaggacagaaaacgggatttaaaacttagtttttaaaaaaacaaaagctacagagtagggagcataggtcaaccatctccacctaaattttttttgttcctaaactcagaattctacaacccaactaaattaatatgccaagattttgcggatgttaaaactcaaaaaaagcagtatgcaagacggtcccggggtaaaattctactgcctttccacggacaagttaaactggctgtaatgtttatgcactaagttaaaataaaatttaaataaaagacgttaaaatagtcgttttaaagttatatgcacacactgtaaaaggtaatctcgatagctttttttcaagtttctgagagattagaaaaaaagcatagcaaattgtaggcactgaacactttttaaaaatcaagttatgagtaagactggtagccctttgctcct

SEQ ID NO: 4444 - protein, 146 aa, Homo sapiens; identical to SEQ ID NO: 4442

SEQ ID NO: 4445 - DNA, 381 bp, Homo sapiens
atggtcctggggatgctggtgtctgagatcatgactatgcctgtgctgagtatgtactgtgggatgctgaagttttatgtgtatgtaagcctggatccagccatggccaacgatttcctcatattttcctatgaccttaggaacatcagatatgggtacatccagcaaaaccaaccagagaacatggagatactcatctctaccgctggtgctgggttcccctctcatcggtctggctgccactgttgggaggtggaagtgggaggcccagctgaacgggctctgggtgtgtgcagagaatctgcatattgcaaagggactttccctgtatctttagactttgggttctggattgtgggctcaggggaggacatgaagtag

SEQ ID NO: 4446 - protein, 126 aa, Homo sapiens [sequence omitted]

SEQ ID NO: 4447 - DNA, 381 bp, Homo sapiens; identical to SEQ ID NO: 4445

SEQ ID NO: 4448 - protein, 126 aa, Homo sapiens [sequence omitted]

SEQ ID NO: 4449 - DNA, 640 bp, Homo sapiens
atggtcaaccccaccgtgttcttccacatctctgtcgacggtgagtccttgggccgcatctcttttgagctgtttgcagacaagtttccaaagacagcagaaaacttttgtgctctgaatactggagagaaaggatttggttacaagggttgctgctttcacagaattattccagggtttatgtgtcatggtggtgacttcacacaccataatggcactggtggcaagtcaatctacggggagaaagttgatgatgacaacttcatcctgaagcatacaggtcctggcatattgtccatggcaaatgctggacccaacacaaatggttcccagtttttcatctgcactgccaagtctgagtggttggatagcaagcatgtggtcattggcaaggtgaaagaaggcatgaatattgtggaggccatggagcactttgggtccaggaatggcaagaccagcaagaaggtcaccattcctgactttggacaactcgaataagtttgacttgtgttttatcttaaccactggaccattccttctgcagctcaggagagcagccctccaccccatctgctcgcagtattctagaatctttgtgctctcgctgcagttccctttgggttccatgttttccttgttc

SEQ ID NO: 4450 - protein, 165 aa, Homo sapiens [sequence omitted]

SEQ ID NO: 4451 - DNA, 1077 bp, Homo sapiens
atggtgcggatcgtggctgggtgggcgcagggccgaggaaaacttgcttttcgttcctctgttgcgctggaagctatgggacaggaaatgccagggaaaccgggggactcgaaatcgcactgcccttaccgggcccgggcgagactctgggcccccaggccgcgtcccccgcccccaccgacctccaggccgctacccgcctctgagcttgggcccctgaccaccgcctccagctccttctggcccctgagccggaaaggcacaggcctctggggccccgaggtggccctggggaggcgaggccccaccgcaattggggaccgaactcgtgttgtaactggcgggatctcgcctcccacgcgcgctgtctccaatttggtcatcaccggccggccggtcgccacccgctcaggtcaaggttccccgcgcccccaggggcgcctagggcttgggggaggccgggcagggggcctaggccctgttttcgcctgttggcttcggccggggccccggggccccgctgcctctgggctcaggttccgcggactgctgtctcccggctggacgctcggtccggggccgccgcccgccgctcccgggagcctgggtgatggacgtccgctgacccgcggggcagaggcagcgcacacaggccttgatcactggcctgcggagggagccgcgcggccagcgggacctgcacgaccgggccctttgatctgcctttattatcaacgagaaacaaagctccctgggcccgacgcccgggcgcccgcgttcctggggagacccaccacaccctctactccgcgccgccagcccgcggcccccaaacgcgccaggcaccctctgggcctccagtgccccggcccgaagcccctccggaaaacgcgtccctgccagccggctctccggaagaccatcccccgaccagaggcgcttagggagtggggggctcccggttatgaacagcttgatcggggagagaaaatggccaaagtgaagaaaaactcgagtaagaagagcggggcagcctggccgcggggagctcaagaaggagaaggaagaagccattga

SEQ ID NO: 4452 - protein, 358 aa, Homo sapiens [sequence omitted]

SEQ ID NO: 4453 - DNA, 1077 bp, Homo sapiens; identical to SEQ ID NO: 4451

SEQ ID NO: 4454 - protein, 358 aa, Homo sapiens [sequence omitted]

SEQ ID NO: 4455 - DNA, 483 bp, Homo sapiens
atgggatccctgccccctacagagttggcagggtgggggtcccatgctcccaggcatacctgcagctgcctagctgtggctctggatccaggcatccctgaactctcaggggcccaggaagcccctgccctcatagccccagacgtccctgctcccactccttggactctccctgctcctagtgcctgctccgatttcagagcaaagttgtggccaatcctgggcgctgttgtgacccagccaggtgtgcatgtactcggtgcagtactcacacaccagccccctgctgtcttggccgcttctggattttgtgtgccaatgagcatgagggggaggccagggggccctgaggcagcttggcatcggcctgcaggcacctctcaacacaaacagcctggatgccatggacagcatgttgatggcaggggggaagacaggttcctgggtggaaagggccaggtccccagtaaaacctcacattga

SEQ ID NO: 4456 - protein, 160 aa, Homo sapiens [sequence omitted]

SEQ ID NO: 4457 - DNA, 483 bp, Homo sapiens; identical to SEQ ID NO: 4455

SEQ ID NO: 4458 - protein, 160 aa, Homo sapiens [sequence omitted]

SEQ ID NO: 4459 - DNA, 795 bp, Homo sapiens
atgaccacactgcctccttctcagagtcctgtgactgccacagccagattcaaggacctcagcctgtactccgtgatggtgggagtccaccagcgcccagaaaatagcactcagctcccgctcactcgcatggtgattcataaggatttcagcaatctcatgtctcaggacattgccctcctaaagctcagggactccatctcgtggtcccccttcgtccagcctgtctgcctccctaacatcaaattcaagccatccattggaagcatgtgctgggtaatcggctggggaactacagggaaaaaaggggatagggatgagcaggctgggggtgcccgttccacactgcaagtctactgggagtggtacccgcaggatcactcagaaagcctgatgcgtacccctcaagacatggataacactgggcttaagaaaggtctgggcccggggaacaaatggtaccacgtggcacagtccacacagcacaatgcacacaacctttttactttttcctccagggacgctgggctccactttaaggttgactctggaagctcccttgtctgccaaatggacaagacctggattcagataggagtggtaagctggagctttagttgtggccagcgccacttcccaggtatctacaccagcactgcccacttcaaccagtggatcaggactgaggttgctaacataaggttcatcagtagggctggccctgccttcctgagcccagttttcctcactggctacattctactgggctccttgagctccctgtggctcctgtga

SEQ ID NO: 4460 - protein, 264 aa, Homo sapiens
MTTLPPSQSPVTATARFKDLSLYSVMVGVHQRPENSTQLPLTRMVIHKDFSNLMSQDIALLKLRDSISWSPFVQPVCLPNIKFKPSIGSMCWVIGWGTTGKKGDRDEQAGGARSTLQVYWEWYPQDHSESLMRTPQDMDNTGLKKGLGPGNKWYHVAQSTQHNAHNLFTFSSRDAGLHFKVDSGSSLVCQMDKTWIQIGVVSWSFSCGQRHFPGIYTSTAHFNQWIRTEVANIRFISRAGPAFLSPVFLTGYILLGSLSSLWLL

SEQ ID NO: 4461 - DNA, 207 bp, Homo sapiens
atgacatgctggatactgatgtgggatttcatccctaaaggcactgttggggcatttcaatacagccacaactggtattacaagtatgtcaaagtgaagaaagggagcactctcagggtttctatgctgttggcagcttacatgtttttcaactactgcctttcttacaaggagctcaaacttgaaaggttatacaagtactactga

SEQ ID NO: 4462 - protein, 68 aa, Homo sapiens [sequence omitted]

SEQ ID NO: 4463 - DNA, 935 bp, Homo sapiens
atggcgtcccagagcggcagctccctggggctcctggcctggttcttgcttcttcagccatggctcgaagaggcccgggcaggcagggtgggtgcgcagggaggcgtagcactgctcttcccctccgcgctcccctcagggccaggcggccaggaccccggagcgagcggatgggagccgccacctgtaggggctccaggatccccagcggccccccagtccagggggaacgcagtgcgccccgcttcggtgttacttccctcagcctgtggccagcggacttcaaggataactggaggattgccggctccagacaggaagtggccctggcaggtgagcctgcagaccagcaacagacacatctgcggaggctcccttatcgccagacactgggtactcactgccgctcactgcatctctgggtgagggtttggggctcagagcttgggccctgatcaggctgtgggacctggagccagtctgtccccctccctgaacttcctcttcctcatctgtaaaagggggtgacagccccatagtttttatccagtctgggtgagacctgaggatttgcatttctaacaagtttctgggtgttgcctccgccgctgatctggggactactggctaaagtggtcaggggtcctggagggatgtggcttggagagagggaggtagctgctggctggcataggaagatggtaccaggcgggaagcacctcgaaggtgtggaagcagagtgtagaccctggaggatcttcctgcagccatctggaatacacagtgaagctgggagacacaaatgtgcatcatcgctccaaaacagcacttgtggtcccagttcgtgacgtcgttatccaccgatattttacgtctcctggaataattgaaaatgacattgcccttgccctgcttgacttccctgtgaattactc

SEQ ID NO: 4464 - protein, 141 aa, Homo sapiens
MASQSGSSLGLLAWFLLLQPWLEEARAGRVGAQGGVALLFPSALPSGPGGQDPGASGWEPPPVGAPGSPAAPQSRGNAVRPASVLLPSACGQRTSRITGGLPAPDRKWPWQVSLQTSNRHICGGSLIARHWVLTAAHCISG

SEQ ID NO: 4465 - DNA, 1095 bp, Homo sapiens
tccccgctctgctctgtccggtcacaggactttttgccctctgttcccgggtccctcaggcggccacccagtgggcacactcccaggcggcgctccggccccgcgctccctccctctgcctttcattcccagctgtcaacatcctggaagctttgaagctcaggaaagaagagaaatccactgagaacagtctgtaaaggtccgtagtgctatctacatccagacggtggaagggagagaaagagaaagaaggtatcctaggaatacctgcctgcttagaccctctataaaagctctgtgcatcctgccactgaggactccgaagaggtagcagtcttctgaaagacttcaactgtgaggacatgtcgttcagatttggccaacatctcatcaagccctctgtagtgtttctcaaaacagaactgtccttcgctcttgtgaataggaaacctgtggtaccaggacatgtccttgtgtgcccgctgcggccagtggagcgcttccatgacctgcgtcctgatgaagtggccgatttgtttcagacgacccagagagtcgggacagtggtggaaaaacatttccatgggacctctctcaccttttccatgcaggatggccccgaagccggacagactgtgaagcacgttcacgtccatgttcttcccaggaaggctggagactttcacaggaatgacagcatctatgaggagctccagaaacatgacaaggaggactttcctgcctcttggagatcagaggaggaaatggcagcagaagccgcagctctgcgggtctactttcagtgacacagatgtttttcagatcctgaattccagcaaaagagctattgccaaccagtttgaagaccgcccccccgcctctccccaagaggaactgaatcagcatgaaaatgcagtttcttcatctcaccatcctgtattcttcaaccagtgatcccccacctcggtcactccaactcccttaaaatacctagacctaaacggctcagacaggcagatttgaggtttccccctgtctccttattcggcagccttatgattaaacttccttctctgctgcaaaaaaaaaaaaaaa

SEQ ID NO: 4466 - protein, 147 aa, Homo sapiens
MSFRFGQHLIKPSVVFLKTELSFALVNRKPVVPGHVLVCPLRPVERFHDLRPDEVADLFQTTQRVGTVVEKHFHGTSLTFSMQDGPEAGQTVKHVHVHVLPRKAGDFHRNDSIYEELQKHDKEDFPASWRSEEEMAAEAAALRVYFQ

SEQ ID NO: 4467 - DNA, 432 bp, Homo sapiens
atggcagcccgcgcggggaagcccgagccgcaccccaggacctccagctgcccacccttcggccgcttgcatccccgggcccggcccggctgccccgctccttccttccgtccgcgcgtccgtccgagcggcggcacccggccggctcccttaagcggagacgcctcccgccgcctcctcccacttgccggtccctccctctcagctcgctccggcgaagtttgcacgtcaagcccccggactggagccagggcgaagtcggaaatgcagccacctatggaggagccggccggccggccccagggcagcgcgggagaggctggtgcagggggcactttgccctcggcttgcgggcggccgcagagttgtcaaaagcatgaatgggaagccgccgcagagcggactccgggcgtgcagggaaccttgggctag

SEQ ID NO: 4468 - protein, 143 aa, Homo sapiens
MAARAGKPEPHPRTSSCPPFGRLHPRARPGCPAPSFRPRVRPSGGTRPAPLSGDASRRLLPLAGPSLSARSGEVCTSSPRTGARAKSEMQPPMEEPAGRPQGSAGEAGAGGTLPSACGRPQSCQKHEWEAAAERTPGVQGTLG

SEQ ID NO: 4469 - DNA, 432 bp, Homo sapiens; identical to SEQ ID NO: 4467

SEQ ID NO: 4470 - protein, 143 aa, Homo sapiens; identical to SEQ ID NO: 4468

SEQ ID NO: 4471 - DNA, 3067 bp, Homo sapiens
actggggggagcaaagagtggggaactgggcaggcagacacccccacagagcactcatggcccccacagaaatacacccacactcatcacagcaaaccaaaacaatcacacgccggtacacaaacacacacacccccgcaccaatccaggcagacacaaagctcacggcgacaggcagatctgattcacacagacacaggcacaggtgcttcctgatgccaccctctcttggtcacgtgccagcacttggagggaggaaagtgcctcaccaggctgagatgcccaagggaccccccagggagggaaagcaggacacactgggacagttgcttccagccctgtccacacccttgtgcccatcaggtatgccgctcacccccaccccacctggaccttggtgtcacctaggattgcagaggccgccttcagcccagagcctggggccttgcccactgcctcacctcccaggatagggcatgctgttcctttctccttccctttctttgctcttgtgtgcctgcctttagcaaacgcccactgggtgtgtgggtacactgcggcctttaaagagaagagaaacacatgaggcttacagcaggaggccctgcctaggttccaagggacatggagcagggtggctgtgtagagctggggagcatcccaagcctgtgccaaggttccaaggacaaaaagggcaaggaggcccagtgcggggtggtgggggagcagctagccagggccaacagtgagcctcgcgcctgggcaggtgtagcctttaaacgcggtgggggaaccatggacagcatctaagcagggacgtgccgtgagtcctgggggtgcaggggtgtctagaggggaagctgggaagcaggggtcacagctttccgactggtggctgagtgtggggaagacaggaggggcaggtgtgagatgtacagcagacacagctgtgtgctggggcatggtgggctgtggtgagagagaggagcaggtcttctccccgcgtgttcagagcagatccaaactcttctcccattccttcctccaccgtgcatcctcagcacccctcagcactggcctgtgtgggcagcgtgagcacagagagcaggagcttgccctcagaggcttcagggggtcgcttgtacccagtggtatggtcagcatcatgtttgaccaaagggaggaaggtggctgtgaccagagcgagggggggtcctgatgcagctggggagtcaggctcgagtgcatgctgtgcatgttctctgcctctcttcctggggggcaggcgagtctccagagcctggaggacaagttagccttgcgaaggatagcagaggacccagcccaggggtccccaaaatggagcaccaaccctccatgcaggccaagccactggtgaatatgctgcaaaaaatatgctggaacttctatgaataccacagggtgtgagaagaaaacattagaacttctattttgtacctgtgttactccacaacaagaaagcaatcagcttgatcaatgcctactgtaaagacggcaccgccctccggaggtcctttctcagccctggtgttcggacagccacatcccctcgcagcagggggaggcctgaagcatagaggggcccatgcaggtctattctgtttcagcgaattgcctgggaaataatccaggatccatttcgtgtggtcatcttgtctccctggtcccctccagcctttcctcatcttttgtgacctggtcactctggaagggcgctggccagttagtccacaggatgggcctcccctggggcttttctgatgcttccttatgatggcactggcatcctgagggggaggaccacagagaggaggtgctcctcatcacaccacatgggggtccatgcaccagtgccactgctttccagggctcttcaccttcatcactggtggaggtggcgtctgccaagaagcagaaagttgaggcttagaaggtgcacggccctacctcttccgaggtgcccctgcgggctgtctacagaccaggcagcacatgcctgatagcagctgcataaggaaaagcaggagccagctcgtgcacagtggcctcaagtgtgcactgggcatgttctctgcctcaccatccctgtgtgacagatgaagcatgacagccctcaacagaagccaaggccaagtcctcgaacttcctagtctgcacaatgacacttctgatgaaactgaaaatgccaccagggagaagcagctgaacttcaaggaccacagagggccaagtgcaggagtaagaggctggcgtgctgacagtggccaagggcattggagggaaggacctgtcatcactgggccaaggaaggaactccagactgcctacttccagagggcctgctgaggaattttagcttgaacttgcctgccttgactagggctttctgagcagcagatgattctgcaatggtgttagtccaggcctggttctgcatgacattgaccatactgtgcaccctggggtcattatgtcttgggcttcaaggggctccatgggctccagggggctccatgtgacactgcacagagctctctctaggtcacctggatgtgtctcttcctaggaaccccaaagagctctctcaacaaacacacccacgagttccaggagtgaggctgcagggaacagcctcactctcagaggggatacagaattgttccactggacaagggctgggatcgtcataggatgccgttggcctgtggtttccaacagaggtgcagttcattgaactgtggtctacagtccattctctaacttggggacccttgaagaagtgtggaatcatgacaacaaccctgttgggagacactattattcccatcacatggatgagcacacggaggcaaaaggaagttatatgattgtctgagatcacccagtgaagactgtgtggctgggagttgtccccagtgttatctgcacgctgcttccttttgatgcctggcccttctttatcaaaagaagcattggcagaatctgggtgtttatgggtcagctcaaaataaattactttatatgt

SEQ ID NO: 4472 - protein, 80 aa, Homo sapiens
MTALNRSQGQVLELPSLHNDTSDETENATREKQLNFKDHRGPSAGVRGWRADSGQGHWREGPVITGPRKELQTAYFQRAC

SEQ ID NO: 4473 - DNA, 3067 bp, Homo sapiens
actggggggagcaaagagtggggaactgggcaggcagacacccccacagagcactcatggcccccacagaaatacacccacactcatcacagcaaaccaaaacaatcacacgccggtacacaaacacacacacccccgcaccaatccaggcagacacaaagctcacggcgacaggcagatctgattcacacagacacaggcacaggtgcttcctgatgccaccctctcttggtcacgtgccagcacttggagggaggaaagtgcctcaccaggctgagatgcccaagggaccccccagggagggaaagcaggacacactgggacagttgcttccagccctgtccacacccttgtgcccatcaggtatgccgctcacccccaccccacctggaccttggtgtcacctaggattgcagaggccgccttcagcccagagcctggggccttgcccactgcctcacctcccaggatagggcatgctgttcctttctccttccctttctttgctcttgtgtgcctgcctttagcaaacgcccactgggtgtgtgggtacactgcggcctttaaagagaagagaaacacatgaggcttacagcaggaggccctgcctaggttccaagggacatggagcagggtggctgtgtagagctggggagcatcccaagcctgtgccaaggttccaaggacaaaaagggcaaggaggcccagtgcggggtggtgggggagcagctagccagggccaacagtgagcctcgcgcctgggcaggtgtagcctttaaacgcggtgggggaaccatggacagcatctaagcagggacgtgccgtgagtcctgggggtgcaggggtgtctagaggggaagctgggaagcaggggtcacagctttccgactggtggctgagtgtggggaagacaggaggggcaggtgtgagatgtacagcagacacagctgtgtgctggggcatggtgggctgtggtgagagagaggagcaggtcttctccccgcgtgttcagagcagatccaaactcttctcccattccttcctccaccgtgcatcctcagcacccctcagcactggcctgtgtgggcagcgtgagcacagagagcaggagcttgccctcagaggcttcagggggtcgcttgtacccagtggtatggtcagcatcatgtttgaccaaagggaggaaggtggctgtgaccagagcgagggggggtcctgatgcagctggggagtcaggctcgagtgcatgctgtgcatgttctctgcctctcttcctggggggcaggcgagtctccagagcctggaggacaagttagccttgcgaaggatagcagaggacccagcccaggggtccccaaaatggagcaccaaccctccatgcaggccaagccactggtgaatatgctgcaaaaaatatgctggaacttctatgaataccacagggtgtgagaagaaaacattagaacttctattttgtacctgtgttactccacaacaagaaagcaatcagcttgatcaatgcctactgtaaagacggcaccgccctccggaggtcctttctcagccctggtgttcggacagccacatcccctcgcagcagggggaggcctgaagcatagaggggcccacgcaggtctattctgtttcagcgaattgcctgggaaataatccaggatccatttcgtgtggtcatcttgtctccctggtcccctccagcctttcctcatcttttgtgacctggtcactctggaagggcgctggccagttagtccacaggatgggcctcccctggggcttttctgatgcttccttatgatggcactggcatcctgagggggaggaccacagagaggaggtgctcctcatcacaccacatgggggtccatgcaccagtgccactgctttccagggctcttcaccttcatcactggtggaggtggcgtctgccaagaagcagaaagttgatgcttagaaggtgcatggccctacctcttctaaggtgcccctgcgggctgtctacagaccaggcagcacatgcctgatagcagctgcataaggaaaagcaggagccagctcgtgcacagtggcctcaagtgtgcgctgggcatgttatctgcctcaccatccctgtgtgacagatgaagcatgacagccctcaacagaagccaaggccaagtcctcgaacttcctagtctgcacaatgacacttctgatgaaactgaaaatgccaccagggagaagcagctgaacttcaaggaccacagagggccaagtgcaggagtaagaggctggcgtgctgacagtggccaagggcattggagggaaggacctgtcatcactgggccaaggaaggaactccagactgcctacttccagagggcctgctgaggaattttagcttgaacttgcctgccttgactagggctttctgagcagcagatgattctgcaatggtgttagtccaggcctggttctgcatgacattgaccatactgtgcaccctggggtcattatgtcttgggcttcaaggggctccatgggctccagggggctccatgtgacactgcacagagctctctctaggtcacctggatgtgtctcttcctaggaaccccaaagagctctctcaacaaacacacccacgagttccaggagtgaggctgcagggaacagcctcactctcagaggggatacagaattgttccactggacaagggctgggatcgtcataggatgccgttggcctgtggtttccaacagaggtgcagttcattgaactgtggtctacagtccattctctaacttggggacccttgaagaagtgtggaatcatgacaacaaccctgttgggagacactattattcccatcacatggatgagcacacggaggcaaaaggaagttatatgattgtctgagatcacccagtgaagactgtgtggctgggagttgtccccagtgttatctgcacgctgcttccttttgatgcctggcccttctttatcaaaagaagcattggcagaatctgggtgtttatgggtcagctcaaaataaattactttatatgt

SEQ ID NO: 4474 - protein, 80 aa, Homo sapiens; identical to SEQ ID NO: 4472

SEQ ID NO: 4475 - DNA, 363 bp, Homo sapiens
atgtccctgagaaggctgtgtgggccccagcaggcaggtgggttgacctgggagcagcgcctgcaaggctggcacttgcacaccatcccgttacacagagccttcctgcggttcctgagtgtggtggggatcctcccgccacagctggcagccccatgtctcctctggctgcacacaggatcactagggaactttaaaaaggcactgatgccagggctccacttcggccaatacaatcagtctctcagggcagcactgggaggaggtgtttgtggtgtttcatggacacacacactgccagcatcagggagtagtgacagggtactgagaacagcagaatatctagaagtgagttcttcataa

SEQ ID NO: 4476 - protein, 120 aa, Homo sapiens
MSLRRLCGPQQAGGLTWEQRLQGWHLHTIPLHRAFLRFLSVVGILPPQLAAPCLLWLHTGSLGNFKKALMPGLHFGQYNQSLRAALGGGVCGVSWTHTLPASGSSDRVLRTAEYLEVSSS

SEQ ID NO: 4477 - DNA, 976 bp, Homo sapiens
atgtatacacctgccacaggctctaagtgcctaagaagtgtaaaccaattccatcttcatgctgacgggacccgagtgaattcgggttcttcagcccctcagtgccctcccggagccctttacctgaacgggagcctgagagaacggacgacaggagccgagtggaaagcagtgcccgcgccggagatcagcgccgagggcgggagccgacgtctagggaccacagagccgcgacgcggcgagccgcgcacgggccattccgccgccgcgaacgcagaaagcctcgaccgcgctccgagtccagccagctcgcctgtcacctcgatctctgctttaagtggcttccggtcgcctcctcccgacggcccgtcgcggaggcggagcctgggcggccggagttcggtggggtggggtgaggaggccgggcgctcagtgggtgtcgggaagaagacccgccccctgcgcgcgcgtgcgcgttcgttcgaggggaggcgcgcgagttctgtgcggtggacttatgctcccgcgagggggcgtgtcctttctcgcgtccgcagtgtccctgagggtccgcgtctacacgcggctgtgaggaaggaaggcgcgtgccgcgtgggacgggctccacctgcctgcggacagatggagggtcactttgttccgagaagacccagacacccgagggaggatgtgaaacggaacgacccgtttcgagtaataacaggatggagatggagtttcatgacaaaaatgaaggtgaatatgatgtggaaaatacaaagatggaagcaacaagctaaggatgctggggcagaaagatggaacctgggttactcatgacatcttgaaactgctgcagccatcctagactggctgcctctagacttaatatgtttagaaagtaaatcccaattttattaaactgttatctgttatgtatatatgaacacattcttagctaataaactatcatgtc

SEQ ID NO: 4478 - protein, 279 aa, Homo sapiens
MYTPATGSKCLRSVNQFHLHADGTRVNSGSSAPQCPPGALYLNGSLRERTTGAEWKAVPAPEISAEGGSRRLGTTEPRRGEPRTGHSAAANAESLDRAPSPASSPVTSISALSGFRSPPPDGPSRRRSLGGRSSVGWGEEAGRSVGVGKKTRPLRARARSFEGRRASSVRWTYAPARGRVLSRVRSVPEGPRLHAAVRKEGACRVGRAPPACGQMEGHFVPRRPRHPREDVKRNDPFRVITGWRWSFMTKMKVNMMWKIQRWKQQAKDAGAERWNLGYS

SEQ ID NO: 4479 - DNA, 976 bp, Homo sapiens
atgtatacacctgccacaggctctaagtgcctaagaagtgtaaaccaattccatcttcatgctgacgggacccgagtgaattcgggttcttcagcccctcagtgccctcccggagccctttacctgaacgggagcctgagagaacggacgacaggagccgagtggaaagcagtgcccgcgccggagatcagcgccgagggcgggagccgacgtctagggaccacagagccgcgacgcggcgagccgcgcacgggccattccgccgccgcgaacgcagaaagcctcgaccgcgctccgagtccagccagctcgcctgtcacctcgatctctgctttaagtggcttccggtcgcctcctcccgacggcccgtcgcggaggcggagcctgggcggccggagttcggtggggtggggtgaggaggccgggcgctcagtgggtgtcgggaagaagacccgccccctgcgcgcgcgtgcgcgttcgttcgaggggaggcgcgcgagttctgtgcggtggacttgtgctcccgcgagggggcgtgtcctttctcgcgtccgcagtgtccctgagggtccgcgtctacacgcggctgtgaggaaggaaggcgcgtgccgcgtgggacgggctccacctgcctgcggacagatggagggtcactttgttccgagaagacccagacacccgagggaggatgtgaaacggaacgacccgtttcgagtaataacaggatggagatggagtttcatgacaaaaatgaaggtgaatatgatgtggaaaatacaaagatggaagcaacaagctaaggatgctggggcagaaagatggaacctgggttactcatgacatcttgaaactgctgcagccatcctagactggctgcctctagacttaatatgtttagaaagtaaatcccaattttattaaactgttatctgttatgtatatatgaacacattcttagctaataaactatcatgtc

SEQ ID NO: 4480 - protein, 279 aa, Homo sapiens
MYTPATGSKCLRSVNQFHLHADGTRVNSGSSAPQCPPGALYLNGSLRERTTGAEWKAVPAPEISAEGGSRRLGTTEPRRGEPRTGHSAAANAESLDRAPSPASSPVTSISALSGFRSPPPDGPSRRRSLGGRSSVGWGEEAGRSVGVGKKTRPLRARARSFEGRRASSVRWTCAPARGRVLSRVRSVPEGPRLHAAVRKEGACRVGRAPPACGQMEGHFVPRRPRHPREDVKRNDPFRVITGWRWSFMTKMKVNMMWKIQRWKQQAKDAGAERWNLGYS

SEQ ID NO: 4481 - DNA, 857 bp, Homo sapiens
cgcggtcgcccgggagaccgggaaagccgtttcacacccgtcctagtcgaagtcgagatttcctttggcttcaaagctctctcaccatattttgggaagttatggatcatcacattcccatgcatgcgttgcctgaagaaatccaaaagatgttgcctgaagaaaaagtttgtaagtactgtggagtcagctatctaattcttcatgaatttaaggctatggaagaaaaagtgaaagcaatggaaaaagagatgaaattttatcaaggaagtgtagatcgtgaaaagagacttcaagaaaagctgcattctcttagccaagaacttgaacagtacaaaattgacaacaaatccaaaacagaaagaatttacgatgtaggcatgcagttaaaaagtcaacaaaatgaatttcagaaagtaaagaaacaactgagtcatttgcaagatgagctaaaaattaaatatagacaatcatacatcttcagattgtgcttttgctgatgtctgtaagaactctgtctaagccggtcagaaggattttctcctgtattttcttctaagtgttttatagttttagctcttctttagatctatgatctatttcagctaacttctgtgtatgatatgaggtaagaatctaaattcatcctgtttcacgtggatattcaattgttccagtgctgtttgttagaggccaatttttccttattgaattgcctcagcatctttgcctaaaataaattcaccataaatgtaaaggattatttttggattttctattctattccattaatctatatgtcttatgtcagtgccacactctcttaagtactacagtttttaataaattttaaaatc

SEQ ID NO: 4482 - protein, 132 aa, Homo sapiens
MDHHIPMHALPEEIQKMLPEEKVCKYCGVSYLILHEFKAMEEKVKAMEKEMKFYQGSVDREKRLQEKLHSLSQELEQYKIDNKSKTERIYDVGMQLKSQQNEFQKVKKQLSHLQDELKIKYRQSYIFRLCFC

SEQ ID NO: 4483 - DNA, 1060 bp, Homo sapiens
atggagtggtactggtctgtggcctgttgggcagtgggccccacagcagtaggtgagtggcaggttgcagatgtcttagaaacacattcctgcaccacagcttcaagaaatccaaataatgacctgatctgctggtttccaagctaccctaccaggagcaagtcagaggccctgcagggctcctcggtaagccctcgaaatccctctcccctcaatgaccccaccacagcagctccacttttgaatattttaccagtgcgtgttccagagttgccttggaatcctgcctactgcagattacagtgctgcaggtctggagtggggctgagacttcgcgtcttaacaagctgctctcagttgatgctgatcctcatggtccaatgtatgacaatgctgttgaatgtgcctcttcatttcagcacactgccttcaggcagggaatgggccactcctggcaccctgcacattttagcatttgtttcctgtctctccccactagaatgcaagctgcagaggaattgtatccgtagcacctggcttcgcagaccaagagcaagtcggcacaccaggacaggcactcgcatgggtgcccagaagtttcaagatctgaccttggagagaccaggtccgggaggctgccgggaagtctccatcacaccggcctcagccgagtcacaggaacgcaggctctgccatgcccagaagcctgagatgcaacttcaaggacaacgggagccagaacgcttgacctcacacggaaggtgactcctaaccaccaccacacttgacgtagcaccagcacacggagattaggcctacaccaatggctaattgagaccatgcatcactattaaggcatcttcagcaaaaggaactatggaagttctgcatgaaacatagacacctgttagaaaaggaactaaatttcaaaccgggaatgtggtgttgaatcacagcaaagtgtccagaaggaactcccaaagtactgttttccaaaatatagaatgatatagaagattgttttaggtggaattcctggaaataaatttttaaatgtttc

SEQ ID NO: 4484 - protein, 254 aa, Homo sapiens
MEWYWSVACWAVGPTAVGEWQVADVLETHSCTTASRNPNNDLICWFPSYPTRSKSEALQGSSVSPRNPSPLNDPTTAAPLLNILPVRVPELPWNPAYCRLQCCRSGVGLRLRVLTSCSQLMLILMVQCMTMLLNVPLHFSTLPSGREWATPGTLHILAFVSCLSPLECKLQRNCIRSTWLRRPRASRHTRTGTRMGAQKFQDLTLERPGPGGCREVSITPASAESQERRLCHAQKPEMQLQGQREPERLTSHGR

SEQ ID NO: 4485 - DNA, 631 bp, Homo sapiens
atccatgtaagatgtgacttgctcctccttgccttctgccatgattgtgaggcctccccagccacttggaactgaagcaaacactgctattgccacctttttgcagaggaaggtactgaggtgaagcgacttgcccaaaccctacaaaaagcactgtgccaggtgctggatttataaccacaaaaacagaggggcagaatgtctgcatttccagtgggcaagacagacaatgtgcctatctgtgcatttccttgtaaaatccagctttcgcaagagcatgaacaaatcagtttggcaagacctccccaccctcaacatctgatcacgtgtctcatcctccatgatgccacaggtggtcttcagggctgtctccatgaagtcatcaccagccttcccaggccaggactctccatgccatccttagcaaggagaagaaaacaaatacccggcatccatttccaggtcctgcatgatgtgatgtcagaagagaagacaggaatatatgaaacaggagcaatcacaagaacgtaacagaggacacaggtgtcatgttcatggcacagaacagaagccccatagagttcaaaagacgggatgactggagatatccttgacacattgagctaaaaaa

SEQ ID NO: 4486 - protein, 110 aa, Homo sapiens
MSAFPVGKTDNVPICAFPCKIQLSQEHEQISLARPPHPQHLITCLILHDATGGLQGCLHEVITSLPRPGLSMPSLARRRKQIPGIHFQVLHDVMSEEKTGIYETGAITRT

SEQ ID NO: 4487 - DNA, 2865 bp, Homo sapiens
tgccgccaggagtggcaggaggcgagctgagtgaaatgagctgctccagttcccgcccacgaagggggttaagatgaagggaacaatcctgtctcatctgggggcctgtccaggatatgaaaaacaagtatcactccatcacccaggctggagcacagtggtgcaacctcagctcactgcaagctctgcctcctgggttcgagtgattcatgtgcctcagcctcccaagaagctggaattacagactctacccaacaacagcagaatacacattttcttcaggttgaccaagagcattaaccaagagtaatcaaaaagaggagccgactagacacagccaggaagagcttctcccaccggaagaccagaccagcaagaaagttggcaccctccaagcaggttgttgaaaggaaggccttgaatgtggacagaggacgatgcagatgaggaaagactagaaggttctgtacctgttaacagtggctgatcctagaagagtgaaatttaggcaggtagttggaaagaacacagcacagaaaactttaggatgaattttcctagcagccattctgtatcgtcaaagccttcaatccctgaggagagagttaatggcacacaggagtggggtgatttgggcaatgagtgcttcttcctttcaacctgttgctgcctaacacaaggacaattggtcttccaccctcttcacagttcattcagtcattgtccctgtctcccaggtgagttgagtgaaaataatggtgacaagaagcccactgcctgattcacataagcaaggcatgctgcagggaagacagggttcttattaatatttcctttcatgtgcttacatatgagttacagttgctaatcctttcccacagtttagcacctagttaaaagaaagggcttcggaatcaggtaagtgtagattaaagttataacggcaaattgctgaacctttggaagcctcggtttttccacctggaaaatggatttttatcttacaggactgtcgtgaggattgatgagctaacattcctaaatcagggagtttgaagtctggcccaggatcgtctagattttgacgttctccttgtctttgctgtgtacccctgggagaaacaaagggtgagaagaaacaagggaaaggagaaacatttgtgttttccaacttttcagtgttgatcagccagcgggaataaagagaagatgtgtaagatggagggcaaaagagattcccagaagctgctgcagatctcttccagttgcatttcgaaagccattacttaagtgtatattcacacctagctgcaagaaaggctgggattgtattctgtattctgggcagtgatgtgtccagctgagcactggagttttattaataaggaagaaggtattttcctcctttcctgaaataatgtgtagttctgaccaagtgagaagaatcataagaatatgggattttgaaaaacatgaaaacatcctaagaaataccaggaaggagtcccacagtgaagcacaaatgaaactcaagatgactgcctaaaataagaaatcatggatcttaggagaaagggggcaaggaagtaaatcaaaggacaaagctgaagaccaagtggaccgaaaagaagatggaatacattttcccaaacactggtgttctctggagttggcttatcaacatcttgtgtaatagtcatataattgtccctcatttctatctcctcctaaaactagagaaatggcctattaattttagaaggtgtataattatcacaaagccctcagattaaggtccaggacacagaatggaatatatgagcacgcagaaatgtatacctttagattgaacttggatgatttaccttttgactgtcaccaccagcaaatcctgaaattggatctcttgaaacttatggttttctttcagcagcataggagttaagttttcttctaacttgccctaggttctctcaggaactgggaaagcagttctcccaaatcccaagtaaggtattcaagacaacataaggcagagctaaattcttctgttgaagaatttaacatgactcaaaccataaggaaatctaaagaaggctgccaaactatttcgctgctgccctcccccaccaaaaaagagataaaaatgttagatttacaaagcaaactacagtgtatggaatatatatatctatatatagagagatatatatacacacacacaatttttttaacctaccactttgtcttatttgcatgagcacaaatcgctttcaacttaatgccagagaaaaaggcaacattccccgtgatgacttgctgaaaagctcactgtatttgtttgataatggattttagttcattgtcatgtacttcactcttcatcagcaggagcacttcagggtaaagaaacaggcttttaccacactggaacaaaagctatataaggaaaaaaaaatcctgagcagatggaatattatttgcatttgcacaaatagtgctttttagcacaattcatattactccattgtgagctaaagtaagccacatgtgtctacagcatgctgcagacgcagaatcggctttttgtttgtcagactcagaggtcccaaccttatgatatctttgtacttgtatatccattagttttatttcagttacttatcagaagggaaaagaaaaaaatggcactatgcagttaagaggaccattgcatggagggctaaattaactattttttattttcatgaatgaggatcaaataggtttcagatgtctcgacatctatctggagatctagatgatgatataaaattaaaatgcagaatgtaagtgtaataaaatttgtttctccatgattacatt

SEQ ID NO: 4488 - protein, 78 aa, Homo sapiens
MKGTILSHLGACPGYEKQVSLHHPGWSTVVQPQLTASSASWVRVIHVPQPPKKLELQTLPNNSRIHIFFRLTKSINQE

SEQ ID NO: 4489 - DNA, 2865 bp, Homo sapiens
tgccgccaggagtggcaggaggcgagctgagtgaaatgagctgctccagttcccgcccacgaagggggttaagatgaagggaacaatcctgtctcatctgggggcctgtccaggatatgaaaaacaagtatcactccatcacccaggctggagcacagtggtgcaacctcagctcactgcaagctctgcctcctgggttcgagtgattcatgtgcctcagcctcccaagaagctggaattacagactctacccaacaacagcagaatacacattttcttcaggttgaccaagagcattaaccaagagtaatcaaaaagaggagccgactagacacagccaggaagagcttctcccaccggaagaccagaccagcaagaaagttggcaccctccaagcaggttgttgaaaggaaggccttgaatgtggacagagggcgatgcagatgaggaaagactagaaggttctgtacctgttaacagtggctgatcctagaagagtgaaatttaggcaggtagttggaaagaacacagcacagaaaactttaggatgaattttcctagcagccattctgtatcgtcaaagccttcaatccctgaggagagagttaatggcacacaggagtggggtgatttgggcaatgagtgcttcttcctttcaacctgttgctgcctaacacaaggacaattggtcttccaccctcttcacagttcattcagtcattgtccctgtctcccaggtgagttgagtgaaaataatggtgacaagaagcccactgcctgattcacataagcaaggcatgctgcagggaagacagggttcttattaatatttcctttcatgtgcttacatatgagttacagttgctaatcctttcccacagtttagcacctagttaaaagaaagggcttcggaatcaggtaagtgtagattaaagttataacggcaaattgctgaacctttggaagcctcggtttttccacctggaaaatggatttttatcttacaggactgtcgtgaggattgatgagctaacattcctaaatcagggagtttgaagtctggcccaggatcgtctagattttgacgttctccttgtctttgctgtgtacccctgggagaaacaaagggtgagaagaaacaagggaaaggagaaacatttgtgttttccaacttttcagtgttgatcagccagcgggaataaagagaagatgtgtaagatggagggcaaaagagattcccagaagctgctgcagatctcttccagttgcatttcgaaagccattacttaagtgtatattcacacctagctgcaagaaaggctgggattgtattctgtattctgggcagtgatgtgtccagctgagcactggagttttattaataaggaagaaggtattttcctcctttcctgaaataatgtgtagttctgaccaagtgagaagaatcataagaatatgggattttgaaaaacatgaaaacatcctaagaaataccaggaaggagtcccacagtgaagcacaaatgaaactcaagatgactgcctaaaataagaaatcatggatcttaggagaaagggggcaaggaagtaaatcaaaggacaaagctgaagaccaagtggaccgaaaagaagatggaatacattttcccaaacactggtgttctctggagttggcttatcaacatcttgtgtaatagtcatataattgtccctcatttctatctcctcctaaaactagagaaatggcctattaattttagaaggtgtataattatcacaaagccctcagattaaggtccaggacacagaatggaatatatgagcacgcagaaatgtatacctttagattgaacttggatgatttaccttttgactgtcaccaccagcaaatcctgaaattggatctcttgaaacttatggttttctttcagcagcataggagttaagttttcttctaacttgccctaggttctctcaggaactgggaaagcagttctcccaaatcccaagtaaggtattcaagacaacataaggcagagctaaattcttctgttgaagaatttaacatgactcaaaccataaggaaatctaaagaaggctgccaaactatttcgctgctgccctcccccaccaaaaaagagataaaaatgttagatttacaaagcaaactacagtgtatggaatatatatatctatatatagagagatatatatacacacacacaatttttttaacctaccactttgtcttatttgcatgagcacaaatcgctttcaacttaatgccagagaaaaaggcaacattccccgtgatgacttgctgaaaagctcactgtatttgtttgataatggattttagttcattgtcatgtacttcactcttcatcagcaggagcacttcagggtaaagaaacaggcttttaccacactggaacaaaagctatataaggaaaaaaaaatcctgagcagatggaatattatttgcatttgcacaaatagtgctttttagcacaattcatattactccattgtgagctaaagtaagccacatgtgtctacagcatgctgcagacgcagaatcggctttttgtttgtcagactcagaggtcccaaccttatgatatctttgtacttgtatatccattagttttatttcagttacttatcagaagggaaaagaaaaaaatggcactatgcagttaagaggaccattgcatggagggctaaattaactattttttattttcatgaatgaggatcaaataggtttcagatgtctcgacatctatctggagatctagatgatgatataaaattaaaatgcagaatgtaagtgtaataaaatttgtttctccatgattacatt

SEQ ID NO: 4490 - protein, 78 aa, Homo sapiens; identical to SEQ ID NO: 4488

SEQ ID NO: 4491 - DNA, 3204 bp, Homo sapiens
aagtgagaaatgctgcttggtgagctgggctggctgggctgctggccctcggtcagccgcctgcaacaggcagggccacgggaacctcatcagcagagcttcctggaggcagcgtgggtggaattgtggaattgtcatcagacaggcctgggatggagcttccccactggaacgcagctggctgtggacagggagtcagctgctgcctgaagggacaaggaggcctgcgaccacagcaggttcccacctggcctgggcctggaggccagcaggcacctttcagggcttcccagctcagcccccacagctggatggagctgtgttccctgcagaagtgtggccggctccgagcaggcacagggggctctttccctccacctcagccctggcctatgtgggcacagcagaggacgtgctcacaccatgggggcccccgaccaggcgaggccagggcgtgtccacattggggaagtgaacgaagaaggacaagtctatttgaggggctggctgatagtttagaagcccagaatcgcctggcagtgaattattctgctgagtaacactgtacccagagggatgtggctgaaaaccccgggagggaaggctgcgtgcgggaagcactcccatcctcccccagcgcctgctctgggcgttccggagctcagcgtgcatccttgcctatgctcacctgtgaagagggagaacgtcgctgtccgagcaaatgtctcttctgtgtccttggctgccttcctcctcctcctcccgccgcctactttggggccccttcctcttctcagcagtgccactgaccagcccagcctcatgcaccatcccggccgttgccctggagggctggcagctggcaggactcagagagggcccagccatcacccctctcttgagcagatgacagagtaacactgggagttactatggacactggaaaagagaacacagatgcgtcggagattttgtagttgcaactcttctctggtaaccaaaaaacatcaggacattcattgcaagtgcaacgctgaggctttgaaggaaccaaagagatcctttgcagccctgaggacggagggagggagggaaaagggagtggggtgggagggagggagggagtccactgcagaaagtggcactgatccctctgagcctctccggcctcatgtgtaagatgccagctgccccggagtggcagtggcgagtgagtggctgtgtaaggtgcccaggcaggagcttgcgggcagccctgtgtgaagtgggcagccttgggccgggttccctagaagcagagctgagatggggattcttgttcatgcgattggaggtgcttcctaagaagttgctccctgccccaactccgagccagggcggcactgaccatgggcaactttcccttgcagggggcactcccagctgccggggaggggcagtggccctgaaggggcctggtcaggaccaacagttttcttggcagtggtgtgtttgtccccatttcgcagatgaggaaactgaggcttggaaagacccaggtccttgcccaggccccacaccacacccaggaggggcggcgctggagtcctgcgccacgtcgctgttctcaccaggaggaggcccttgtttgctgcgtccagcgaccccatctccatgctgcaggcaggaggacacagccggggctcctggaagcctctcgcgttcctgggctagggaaccttcctccatctcagagccggccatggggtgtcccctgaccttccgcagccatgtcccccttcgatggagctctgcttctggccctccctccacactgaaggcccctgtgatcacatggcccacccgccaatccaggtggcctccctccaaggtcagccggtgagctgccttcatgcctgcatggtgtctctgacccttggccacgcaacctaacatagtcacagctcctggagatttgcactgggatatcttgggtgaggggaattattctgctgacccccgatggcaactgcagtggtgggaggggaagagaacaccaggatgtgttcagagagagaggcgtggacctcagggggtgtcaggggaagagggcccgggagggagaaagcatttggtttagacgtgttgggtgtgaggtgcccatggaatagcagggtggagctggtgggggaagctggggggctgccctggggctctagcacatggaggccaaggagggagtcgtggggtggagggggcacagggctccccaaggtcctgggtctgcctcagggccgctgctactccacacccctcctcccatgcctgagcacccatggcagtgaccagcagtgaccatcatcacccaatgaggatggagggaaactgaggctggcctgagatgtcctgaggaatgagctggcaccggagtcccacaggtgaaggctgatgaaattctaggagagtccatgtcctaaaggataagaagcaactattcgttgagatgagagacttcaaagatagtcaatgatcgtgaaagtcggccagcctttctggaccatctcgtgcaattgctctaatctatccctgcaatagatccctttaatacactttgtcatatgttgaattttctttttagtttttagttttcttttgttgttgttgttgttttcccattttttaaaattattattattgtggagacagagtctcactctgtcacccaggctggagtgcgggggtgcgatctcggttcactgcaccctctgcctcccaggttcaagcaattctcctgcctcagcctcctgagtagctggggctacaggcacccgccattatgtctggctaatttttgtatttttagtagagacagggtttcaccatgttggccaggctcgtctcaaactcctgacctcaagtgatccgcccacctcggcctcccaaagtgttgggattacaggcgtgagccaccacacccaggcccattgtttttaattatcaacgttatttttgttattctatgtatttcatctttgcatgatttccagtatgggaggtataaattgtgtaaagacgttgagagttctaatttgttgtatgcattttttacaaatgtgactccgtgaaaatgattatcacaacattgactttatgtgtaagcgttgtgtgtgtgcgtacataaaatcgtcgaaacttcctcaataaatgaagagatgtcctttttgt

SEQ ID NO: 4492 - protein, 236 aa, Homo sapiens
MCKMPAAPEWQWRVSGCVRCPGRSLRAALCEVGSLGPGSLEAELRWGFLFMRLEVLPKKLLPAPTPSQGGTDHGQLSLAGGTPSCRGGAVALKGPGQDQQFSWQWCVCPHFADEETEAWKDPGPCPGPTPHPGGAALESCATSLFSPGGGPCLLRPATPSPCCRQEDTAGAPGSLSRSWAREPSSISEPAMGCPLTFRSHVPLRWSSASGPPSTLKAPVITWPTRQSRWPPSKVSR

SEQ ID NO: 4493 - DNA, 855 bp, Homo sapiens
atgcctggatggttcaaaaaggcgtggtatgggctggcgtctttactcagcttctcctccttcatcctgatcatcgttgccctggtagtgccccactggctgagtgggaaaatcctttgtcagactggagtggatctggtcaacgccacagacagagagctggtcaagttcattggggacatttactacgggctcttccgagggtgtaaagtgcggcagtgtgggcttgggggccgccaatcccaattcacgagaacagaggcttgttggtcaactgacaagcatgaatctgggggccatgagttcatctcagaaagtctcccgctgtttgaaatccccacgcttgctgtcttgccctcacccctgtctgtcgaagccttcgtggtaagcaagcttggacttcatgaaatcttcccacacctggtgaaggagctcaacgcaggccttcatgtgatgattctgctgctcctcttcctggccttggccctggctctggtcagcatgggctttgccattcttaacatgatccaggtcccgtaccgggcagtcagcggtcctgggggcatctgcctatggaatgtcctggcaggcggcgtcgtggcgttagccatcgccagcttcgtggctgcggtgaaatttcacgacctgacggaacgaatcgccaactttcaggagaagctcttccagtttgtggtggtggaagaacagtatgaagagtcgttttggatctgcgtggccagcgcttcggcccatgctgcaaacttggtcgtggtggcgatcagtcaaattcccctccctgagattaagaccaaaatcgaagaggccacggtcacagctgaggatatcttgtattaa

SEQ ID NO: 4494 - protein, 284 aa, Homo sapiens [sequence omitted]

SEQ ID NO: 4495 - DNA, 855 bp, Homo sapiens
atgcctggatggttcaaaaaggcgtggtatgggctggcgtctttactcagcttctcctccttcatcctgatcatcgttgccctggtagtgccccactggctgagtgggaaaatcctttgtcagactggagtggatctggtcaacgccacagacagagagctggtcaagttcattggggacatttactacgggctcttccgagggtgtaaggtgcggcagtgtgggcttgggggccgccaatcccaattcacgagaacagaggcttgttggtcaactgacaagcatgaatctgggggccatgagttcatctcagaaagtctcccgctgtttgaaatccccacgcttgctgtcttgccctcacccctgtctgtcgaagccttcgtggtaagcaagcttggacttcatgaaatcttcccacacctggtgaaggagctcaacgcaggccttcatgtgatgattctgctgctcctcttcctggccttggccctggctctggtcagcatgggctttgccattcttaacatgatccaggtcccgtaccgggcagtcagcggtcctgggggcatctgcctatggaatgtcctggcaggcggcgtcgtggcgttagccatcgccagcttcgtggctgcggtgaaatttcacgacctgacggaacgaatcgccaactttcaggagaagctcttccagtttgtggtggtggaagaacagtatgaagagtcgttttggatctgcgtggccagcgcttcggcccatgctgcaaacttggtcgtggtggcgatcagtcaaattcccctccctgagattaagaccaaaatcgaagaggccacggtcacagctgaggatatcttgtattaa

SEQ ID NO: 4496 - protein, 284 aa, Homo sapiens [sequence omitted]

SEQ ID NO: 4497 - DNA, 309 bp, Homo sapiens
atgaactctgtattctctcgaagtctcatcccagtctgtgggccgtatactcggcactctgagactgagctatgggacatgtgggcagggatccgcaacaacgatgggaacttagtcattgacagtctgttacagtacatcaatcggaggaagaagtttagaaggcactgggtgggagctcttgcctctgtaactatccccattcattttatctatgggccattggatcctgtgaacccctatccagggtttttggagctgtacaggaaaatgctgctgtggtccacattagccacgatctacagctag

SEQ ID NO: 4498 - protein, 102 aa, Homo sapiens
MNSVFSRSLIPVCGPYTRHSETELWDMWAGIRNNDGNLVIDSLLQYINRRKKFRRHWVGALASVTIPIHFIYGPLDPVNPYPGFLELYRKMLLWSTLATIYS

SEQ ID NO: 4499 - DNA, 1882 bp, Homo sapiens
atgtcgacaaagatctggagcaactggaatcttcacacattgctgacaggaatctctcctccacccaatctccggtttgcaactttaccgtcgggtgttgacgggaagggggtgtgggagcggggtgggtgggaagagtccccgcgcccctccccgcccggtctgacccggcctggcctcacttcctcccgcggccgcgcggcctcccggcagtgcccgagcccggcccgcgggtaccgcccagaaggcgaaggcgccaccaccgccgcagctggccctctggctcccacatccggactcaccggcagctccagccgccgttgcctccgcctccagccgcattgccctcaggcctcgagtcccccactagctccttccgtccaggcacgggctccggcgctagagcagtttgaaaatggcgcggagggacgatcggggccgacacggaggaggcgccgcggttgccccggtaacgggagcggcggacgattagcggctcgcggcggggacgcgcttggcgacgatggcggagccccagtgcccggaaatgcaacggcccggacagcgcgaggccacggcgccccctggaggtcggcgcccgcggccagcaaatgccaaacctcagctggtgcctgagctggcatcctcttcctcctgtcggcgggaggtgtggatcacctactgcgtgcggggaacaaacgccgccccagtaccggtccctgcagcggagtagccttcacctgcaaggtgaacgcctgctcaccacgtaatccccaaacgcagatatcacgttgtctctgcaactttccctgacaaccacccaatgcaattaattatcccacaatagtatctcccgcaggctctctgtagaaccatagaattcatccatcaaaatacaatcatttgttgatccgtctctctctgccgcccccaaatgtgaattccttgagtcagagactattctactcagcaaaacatttgtgagtggaattaaattgaaataaaccgttatagtccactcacagatggaaaacacatagtaaaatcctagaattccatttctcccctgaaaatttcccagacagtcagagggagtttcattctttcctgtttacttttctcccaaataggccttctgaggcagcagaatagggaaggaagtcagaagactgaccagctcatacctatggaatgcctatcatacatacacttaaaattatggcaagctcacgcaggcgcactaagagagaaaaaacaagaaaacagatatgacaattataggaaatcccctccctagagttaaagaagtgtaggaagtgggtataaaagaacaaaggctatattaatccagggctgacaccacttgaagataagcccgttcctctctctggtatattctttgcttaataaatcttgtggggtggttatttgtgtgtctcatccaattctttgttcataacaccaagaacctggaactcccaacttccaatctggtaacatattttggtgagccagccaggagggtcaagcctgcaatacctaaagctccagacctggaacccaaagctcccatcagtcgctaccctgtgaacctgtggaggatctgaagtacctgtttaaaaggcatccaaaagatagaatctatcaagctacaaatggctatgttgcctgaagccccagacatcatcctacaagaaataagtccagacttcttaatttccccctggatagagcagggtgatactgtggcctgggtgaagacatcgtatcctctgtgtgtaacagtgataagaaggcttacctcgcagggttattacaagacaaatgaaataactttggcacactattaaaggcttcgtggataattaaagcttcacaaaaa

SEQ ID NO: 4500 - protein, 211 aa, Homo sapiens [sequence omitted]

SEQ ID NO: 4501 - DNA, 1882 bp, Homo sapiens
atgtcgacaaagatctggagcaactggaatcttcacacattgctgacaggaatctctcctccacccaatctccggtttgcaactttaccgtcgggtgttgacgggaagggggtgtgggagcggggtgggtgggaagagtccccgcgcccctccccgcccggtctgacccggcctggcctcacttcctcccgcggccgcgcggcctcccggcagtgcccgagcccggcccgcgggtaccgcccagaaggcgaaggcgccaccaccgccgcagctggccctctggctcccacatccggactcaccggcagctccagccgccgttgcctccgcctccagccgcattgccctcaggcctcgagtcccccactagctccttccgtccaggcacgggctccggcgctagagcagtttgaaaatggcgcggagggacgatcggggccgacacggaggaggcgccgcggttgccccggtaacgggagcggcggacgattagcggctcgcggcggggacgcgcttggcgacgatggcggagccccagtgcccggaaatgcaacggcccggacagcgcgaggccacggcgccccctggaggtcggcgcccgcggccagcaaatgccaaacctcagctggtgcctgagctggcatcctcttcctcctgtcggcgggaggtgtggatcacctactgcgtgcggggaacaaacgccgccccagtaccggtccctgcagcggagtagccttcacctgcaaggtgaacgcctgctcaccacgtaatccccaaacgcagatatcacgttgtctctgcaactttccctgacaaccacccaatgcaattaattatcccacaatagtatctcccgcaggctctctgtagaaccatagaattcatccatcaaaatacaatcatttgttgatccgtctctctctgccgcccccaaatgtgaattccttgagtcagagactattctactcagcaaaacatttgtgagtggaattaaattgaaataaaccgttatagtccactcacagatggaaaacacatagtaaaatcctagaattccatttctcccctgaaaatttcccagacagtcagagggagtttcattctttcctgtttacttttctcccaaataggccttctgaggcagcagaatagggaaggaagtcagaagactgaccagctcatacctatggaatgcctatcatacatacacttaaaattatggcaagctcacgcaggcgcactaagagagaaaaaacaagaaaacagatatgacaattataggaaatcccctccctagagttaaagaagtgtaggaagtgggtataaaagaacaaaggctatattaatccagggctgacaccacttgaagataagcccgttcctctctctggtatattctttgcttaataaattttgtggggtggttatttgtgtgtctcatccaattctttgttcataacaccaagaacctggaactcccaacttccaatctggtaacatattttggtgagccagccaggagggtcaagcctgcaatacctaaagctccagacctggaacccaaagctcccatcagtcgctaccctgtgaacctgtggaggatctgaagtacctgtttaaaaggcatccaaaagatagaatctatcaagctacaaatggctatgttgcctgaagccccagacatcatcctacaagaaataagtccagacttcttaatttccccctggatagagcagggtgatactgtggcctgggtgaagacatcgtatcctctgtgtgtaacagtgataagaaggcttacctcgcagggttattacaagacaaatgaaataactttggcacactattaaaggcttcgtggataattaaagcttcacaaaaa

SEQ ID NO: 4502 - protein, 211 aa, Homo sapiens [sequence omitted]

SEQ ID NO: 4503 - DNA, 483 bp, Homo sapiens
atggggacaggggcgggcttctctcctccactcgcgcccctccgggccgggcccccgcagcgccccgggactccaggggacctggccccgggggcgtgggctcggcgcggcgggcggtgggcttcggggcggtgtccccatgtgggaggcgcggaccctcccggaggaacctgcgcgcggcttgcgcgctttggatccccgcaggggaacctgccgccgggctgcaccccgggaacttgcggagaatatgggacctcgcctgccttctcctcttcccgcgcctcgccatcctgtccccaggtccctggctcggtcccgaccgcggcaagggccagaaccagacctcaccgtccgggatcgcggacgccgtccgggctcagccctctccccaccgcccccggagctgcattgctttgtttaacctctgccagaccgtttcgcacaaactcttgttgccccaattctgatgagccaccagtttga

SEQ ID NO: 4504 - protein, 160 aa, Homo sapiens [sequence omitted]

SEQ ID NO: 4505 - DNA, 457 bp, Homo sapiens
gggagcctgggaatggtggggttcagtttgggactggcaatccagtgcataaaggacaccctagaagtctcgtgttgcacctcgggggaccctgctggggcccaaaagccagggcttggatcttcctctgatagttctacttcattctgtcaaagatccaattcccgaaagagtttttttcatcatcttcaaacatccagaattggctcacacaattacagaggctgagaggccatactatctgtcatgtgcatgcaggagaaccaggaatgctggtggtgtaattcagtacaagtcagaagacctgggaaccagggagctgatggtgccctcagtgtattggatgatacctgccaatactggaaaggccatgtgaccacacaccaagaagctagctgtctgccagccaggaagagagccctgaccagtaatcaaattggctgaagacttgatcttg

SEQ ID NO: 4506 - protein, 65 aa, Homo sapiens
MCMQENQECWWCNSVQVRRPGNQGADGALSVLDDTCQYWKGHVTTHQEASCLPARKRALTSNQIG

SEQ ID NO: 4507 - DNA, 534 bp, Homo sapiens
atgaaaacccctgcggctgcgacgcagacgcccactttgcccaggccttcacagagccccaaaccggaaccgccgggaaaacgactgccaaccggccacacgacccaggcagagacgcggggagaggctgaccagaagaaaggccgacgtgcaagaaacccaccctccggcgcacagggcacacgtgtcccaaggcacacgaacacacagacggacagagagagaaagagagggcagctcctgaagttgccgggttctgatctccgcgactacgagccaccggagagagagcagcccacgggcacacaggcagacctgtcctcgacatcacaagggcgccacttttggggagactcacccgcacaccgtccgcgcaagcctgaggctgggatcccgcgctgcgtccccggcgatctgtctcaggtttcttcctcctggcgtttcttcctgctggtggagcctccgcgcatcccggcctccggagaccgtcctggtaactgccctggccaggactggtctcagccccgactctga

SEQ ID NO: 4508 - protein, 177 aa, Homo sapiens
MKTPAAATQTPTLPRPSQSPKPEPPGKRLPTGHTTQAETRGEADQKKGRRARNPPSGAQGTRVPRHTNTQTDRERKRGQLLKLPGSDLRDYEPPEREQPTGTQADLSSTSQGRHFWGDSPAHRPRKPEAGIPRCVPGDLSQVSSSWRFFLLVEPPRIPASGDRPGNCPGQDWSQPRL

SEQ ID NO: 4509 - DNA, 796 bp, Homo sapiens
gtgagaagaagcaatcagaagattggcaggatttaggaatctatttgaaatattcattacctattttgaattggtcttaaaaatttaaagaaatataaagctggataattaaagataaataataaaggaagaatacaaggtttctatgctgtgaagcaactgagattattatgattttggggcagtgaatttgtttctagaagttttgttggaactaaggcagaaaggaagaagaacaaatgaccttggaatgaaaaactttaagttactccacctaaccactatgaatgatagtcttgtctcaccaaccccagcccatcatctgttggacttggagctcacactttaaaaaagaagatcattctaactgcccctcatgactactgaagaggctatgcctgaaaaagcaaaatgtcctacattagagatcaccaagcaagacttttttcaagaagcaaaaactctcattgcccaacattatgagaaaataaatgagaataaagttcaaggtacttctataaatgtttttagaaagaaacaccaaaaaccgaaatctggcaaatacatacctttggagattgacaaaaaggtaacacgtgatgtggtgcaagaacatcgggccgcactcagaaggatttgctttcccaaggagctttccaaaagcgagcatcttcaggaacccccacaacgaatctccttcaaggaaccacacatttttagtagaagagaaagatgcaggcccatagatctaattacaaaagttatggaagcgggaaatccaagatcaaggtactaa

SEQ ID NO: 4510 - protein, 139 aa, Homo sapiens
MTTEEAMPEKAKCPTLEITKQDFFQEAKTLIAQHYEKINENKVQGTSINVFRKKHQKPKSGKYIPLEIDKKVTRDVVQEHRAALRRICFPKELSKSEHLQEPPQRISFKEPHIFSRRERCRPIDLITKVMEAGNPRSRY

SEQ ID NO: 4511 - DNA, 595 bp, Homo sapiens
atggcatgggctgatctacccagtcagcaaggccagattgcagagaaactcagagtctaggaaaatgaatgtctaggaacattcctcaaatagtcctaccagaagacacaaagatgatgcatccggatgaagaatatatcactgagattaatggccctgggttgcagccaaaagcatctcagaggtagaacactgttgcagatggtgatgttaccatttgaaaggtatgatgcatttcctgactgtggtcggctttccatgggtgaaacagaaaagtcttcaaatatcctcaccaactgctttcctagatttttcagccagttacttgaccatattaggaaaagaaaggtgagcttgggcttcaggacatagaaaacaacattagttatgctggaaagtatcaccaaagaagtgcagctcagacaagctgtattctattttgttcttttgaacataaacacctataaagggaccaaaagaaatctaaatgatcaacgggagcaatcctgaataggcaacaacaatcattattgccaagtgattgtcttatcatttgtcatcagtttttttttcagagtaattacatttaaatgta

SEQ ID NO: 4512 - protein, 81 aa, Homo sapiens
MKNISLRLMALGCSQKHLRGRTLLQMVMLPFERYDAFPDCGRLSMGETEKSSNILTNCFPRFFSQLLDHIRKRKVSLGFRT

SEQ ID NO: 4513 - DNA, 2094 bp, Homo sapiens
catgatccgcccaccttggcctcccaaagtgctgggattacaggcatgagccaccactcctggcctcaacttctatctaattctattcagagggaaaatttctagaagcgacattcctgttgcagagaagagatattcacttgagaaccttgatatatatttgccaaatttctgtccaagtatcatttttaaaaagttaaaaatatgactttcatagaaacacatacagagcatatgtcaaagatgtatttctctaatgcaatgagacagccagcaagacagtgaggctgcagcagcatggggacagagtgcagaaagaggtcgcagaagccttggaagaaggtcattcagtcatacaaggacaccctgatgcttgcgctgcggtcctttccaagtccacggggcattgttcctttgtgtcaacaccagataagattcatgggcattgctgtcagtgttgtgtgtgttataataccagggaccctcacatggctgtgttagattctaaccaatagacaataataagtcaaagcaaagaccgttactgattccttccattgtttctttagagactttggtttagcgctctgaactttctgattatcagatcttatgtgtttgctaatatataaaataacaaattagacataatgccctataattttctcagtttgattaattgcctgaaatttgatgtgtcagtcagtgtttgattagaatagagaaatcacatgtaatttgaacaaggaaagattaatacgaagaattgctagctataacagggttttggagcaataaggattggctagtaaaaagtaaagagaactctaaggaatataagaataacagataaaaggagcatcaacccctggggttgagatacaacgtccagggcctctgggattaagatccagactctgtttgagggggcatggctgtcgctcactgaatgaagagaagttgctgtggtagaaatctgtctcatcagaatcactctgctataatactgccttgtggaggtactggtggaagatactcggtgctgctgactgctgtgcacttcaggggcctgacaatggagcaaactgcatgggttctggatctggacactggagaagctgtgttgcagtacagaagcctgccaagaggagcacacaagactcttggaaagaagaggaaaatctcctcttacaatgtcaatctaacatcatgccagctagcaaaggaaaaatgtttaaagggtccaagttcatttctgcagagcagacatgaaaggttgaattcggagctgagagacaataagtggacaactggcacatttggtcaaacttgtaattttatatcttagatggacaaattaaacacaagtccataggtgttttccttacaagcttacatttaaatttgggatcctggtcagaattttgctgaggacttcaatttttcccagtgtttcaggaaggataccgtggggccagagccacttttctttattgtaaggtcctgggctgtggccccttttgcttttctgggctcctttctcatgggcatctgttttgggagcttcatttcctcatctgctttgacactttaatcttggacattgtagtgaaatgcttcacattgtcacacattctaatctcagagaccactccaaatcttttagaattttcttggccattggaattagtactctggaatcagtacattaggaatggttttttaaaaactatcagctagaatttcaatattttagaagaaatggtcagtataaatttggagaagcggtttctagctagtagtagctgtgcagaaaaacagttttattgataagtatctgatttggatttaggaaccagctaggatgaaaaattcaattgaggtctggccagatagacataaattttatttttcctttatattctgtgtccaaaagacaaattgtcatgagttatttattttcttttctgaagtatccatttgtttctcagctttggaattagaggtgtagaaaataaacgggactcaacagcctaagattttgtttaaaaagatgttcttatttatttatattaaaaaaatttataaaaattt

SEQ ID NO: 4514 - protein, 132 aa, Homo sapiens [sequence omitted]

SEQ ID NO: 4515 - DNA, 3014 bp, Homo sapiens
ttatatggtttggctctgtccccacccaaatctcatcttgaattgtaacaattcccatgtgtcaagggtggggccaggtggagataactgaatcatggaggcagtttcccccatgctgttctcatggtagtgaataagtctcatgaggtctgatggttttataaatggatgttcccctgcacatgctctctcctgcccaccatgtctgactaaattttgtatttttactagagacggggtttcactatgttggccaggctggcctccaactcctgatctcgtgatccgtccaccccgacctcccaaagtgctaggattataggcataagccaccacacccggcctcttttttttctttttcttttttttatctggagactgagttttgcactcgttgcccaggctggagtgcaatggtgcgatctcagctcactgcagtctccacctcagcaggagagcaggaatcttcagtgatccacgggcagatctgcagccattgtgggcacctgttcctcccgcgacctttgtgcccacgtctctccctccagtacctattgcacgaccccccccacgtccgcctcctgccattgccagcaagtgccttgcgcgggtacctggctgcgcttattaatccattatggtcgctctgtcactggtgccattatgtgctcacatgcccactccctcaggtttagaagtcgcgtcgcccggcaacagaacaatctgctggcttagcctttggccaagttggcagctggacgaggacgctcagagcccagctctcgagagttcaagtatccgacagttccccactgctcccaggagcggttacccgggcactctgtgcccctcattcctgtttgggccaaggccgaggacctgcgagtagggctcagttgcctagagccccttcagcccatcgcccagttcactttgcttgtgggatctccccgttgctcctgcccctggactgagtggcaggccatcctacaaacacccggacactcaacatcagtggtgtcaagacaactctaagaaggttttccgtgatcctgcaagacctgtgttccatcctggtgattctgtctccaatttcactgcacaggtaccacagtaagccagtgctgtgtgctccgaattccagggcatcccccagctcagccactacactgagcacaaggactctgtggggcccaggagcaggtagtcacccctttggggtcctcaacacccggctgtccccagacttgtgtccagggaagatagtgttgagggccctcaaggagagcagggcagggatgcctgagcaggacaaggaccccagagtccaagaaaatcctgctgatcagagaacggtccccgaggtcaccggggatgcacggtctgcattttggcccctgcgggacaatggaggcctctctccctttgtgcccaggcccgggcctctgcagacagacctcgatgcccagagctcagaaatcagatataaccagacatcccagacatcctggacgagctcgagcacaaaacgaaatgccatctccagctcctacagctccacgggaggcttgccggggctaaagcagaggaggggaccagcctcatcccgctgccagctgaccctcagttactcaaagacagtgagtgaggacaggcctcaggctgtctcttcgggtcacacacggtgtgaaaaggcggcagatacagcaccagggcagacactcgccccaaggggtggctcccccagatcccaggcctctaggccccgtagacgcaagattcccctgctgccaagcaggcgaggggagcctttgatgctgccacctcccttagagctggggtaccgggtcacggcggaagacctgcacctggaaaaacaggcagcattccagcgcatcaacagtgcactgcacgttgaggacaaggccatctcggactgcagaccctcacggccttcccacactttgtcctcacttgcaacaggggcttcgggtgggcctcccctttctaaagcacccactatggatgcacagcaggacagacccaagtcccaagactgcctgggcctagtggcccccctagcatctgctgcagaggtcccctctacagctcccgtgtctgggaagaagcacagaccaccaggacccctgttctcctcctcagatccccttcctgccacctcttcccactcccgggactcagcccaggtcacctcgctgattcctgcccccttcacagctgcaagcagggatgccagcatgagaagaacaaggcctggcacctccgctcctgcagctgcagcagcagcccctcccccctccacattgaaccccacgtcggggtcactactcaatgcagtgaatggaggcccctcacatttcttggcctcagccacagctgcagcacgtgcccagaggtcagaagtgagatataaccagagatcccagacctcccggaccagatcctgcctccaaggaaatgccagctccagctcccacagttctacggaaggcctcccggaactaaagcggaggagggggccagcctcatgccactgccagctggccctcagttcctcaaacacagtgagtgaggacggacctcaggctgtctcttcgggtcacacccgctgtcaaaaggcagatacagcaccagggcagacactcgcccccaggggtggctcccccagatcccaggcctctaggccccacatcaacagtgcactgcacgttgagggcaaggccatctcggactgcagaccctcacggccttcccacactttgtcctcacttgcaacgggggcttcgcgtgggcctcccctttctaaagcacccactatggatgcacagcaggacagacccaagtcccaagactgcctaggcctagtggcccccctagcatctgctgcagaggctcgagaacaacaggatgctttggtcctgtatcagcaggacgcttttcgggtagatcctactgccaccctagctatgggcacatgtcagagtcccatgtaa

SEQ ID NO: 4516 - protein, 571 aa, Homo sapiens
MPEQDKDPRVQENPADQRTVPEVTGDARSAFWPLRDNGGLSPFVPRPGPLQTDLDAQSSEIRYNQTSQTSWTSSSTKRNAISSSYSSTGGLPGLKQRRGPASSRCQLTLSYSKTVSEDRPQAVSSGHTRCEKAADTAPGQTLAPRGGSPRSQASRPRRRKIPLLPSRRGEPLMLPPPLELGYRVTAEDLHLEKQAAFQRINSALHVEDKAISDCRPSRPSHTLSSLATGASGGPPLSKAPTMDAQQDRPKSQDCLGLVAPLASAAEVPSTAPVSGKKHRPPGPLFSSSDPLPATSSHSRDSAQVTSLIPAPFTAASRDASMRRTRPGTSAPAAAAAAPPPSTLNPTSGSLLNAVNGGPSHFLASATAAARAQRSEVRYNQRSQTSRTRSCLQGNASSSSHSSTEGLPELKRRRGPASCHCQLALSSSNTVSEDGPQAVSSGHTRCQKADTAPGQTLAPRGGSPRSQASRPHINSALHVEGKAISDCRPSRPSHTLSSLATGASRGPPLSKAPTMDAQQDRPKSQDCLGLVAPLASAAEAREQQDALVLYQQDAFRVDPTATLAMGTCQSPM

SEQ ID NO: 4517 - DNA, 1568 bp, Homo sapiens
gagggcgtgcaaagagcggcgagccaactttcacacagcgacgcgagcggaaaaaccactatgcgacttttcaactgtgcggcgggcccgagtcccagtccaggagcccggctctagcggatggcgagggggtggcgagcgcgcttgggtgcccgccccgcagaggagcgtctggtccacagccggatctcctcggtccccaacccggagccgcggccccacgcccgccccgcctgccgagccttctgcacggcacttgaagtgaatgaatcagccgcggccgggtgcgcggccaccacgtttcctgttttctttctcaactcctcgggcggcaggcgcagcgcggctccaacgccgcagctttccgggaacactccccctcacgcccctctcggccctcggcgctgcctggctcctcctcaacccccttacgaaaagattccgaattgcaaaagcctgtccctgtccgtgccacccgccgcgtccttcccctcgagctctgccccgggggccccgccacctcgcagtgccatccccccggcgcagccgggcgccactcgctttgaagtgcagacgaggaggcgcgggcgcgagcgtgtgtgtctgtggggctgctgtgggactgtctgtgctaggagagcggcggaaaacccggcgtggagcgcctgcagtccgccgtccggggtcgcgcccgccgcggggctcaggagggaccggcacgcaggcgcgcacggccgcgcacctgtctcgctagaaccccgcgcgccccgccgagccactgccctccaggttgcccagaccgctggagcctctgcgactccacgaccggctgcttcctgcgaagtttcacaaacaaggttatttaggaccctcaaggtttctgagggtttaagttttagggtttctgggggttcgtttctaaaggcttaggattcacctacttcaaggaggcagggttgtgggaattaagaccgcattctttttctacccagcccagtccctactaagtaccagacttctaaatgttggggcggacagaaacaagcaaacaaaatatacaatgttgtggggtcggaacgctttataattcacaaatttgacaataggctgcattttcatatgccgaattgcctaagagttctcttaaaggaacagcaatgtgaaagaaccacatggtaaggagaatttacgcatgtcctgcatactactcctttcccctgtgaattgcataagacctagatgatcttgggccaaggaagaaaatctggaagggtgtttctacccaccatgtgcagagtacactacaattttgagaaaacggaaagaccatattcaaaggcatacagaaaagcctgttctgtttacaaaggctgacccagggcaccagggacactgtccctaagcagatcagttgtgggagaacttttctacattagcatgcaataagcaaaccattcatagtgaggagaagtcaaactcccaagggtccatttgataaaactttgtcattgtcgagtggaaagaagatactgagaaacttacactaagtggtgggatcccttgtcttt

SEQ ID NO: 4518 - protein, 269 aa, Homo sapiens [sequence omitted]

SEQ ID NO: 4519 - DNA, 1568 bp, Homo sapiens; identical to SEQ ID NO: 4517

SEQ ID NO: 4520 - protein, 269 aa, Homo sapiens [sequence omitted]

SEQ ID NO: 4521 - DNA, 2094 bp, Homo sapiens
tctagcggcgccggtgagtccgcgtgtggaagtctgtgaggcgcagaggtggggcaggccgtctgactagctaggcggctgggagcgttttcgtggcggggaacggaggttgaattgccctgcctgggctcatagggaaggaggatgtgaaggagcttgtgaaggcagaggaagattattgaataataaaatacagttttgaaaaaaatggatgaagaacctgaaagaactaagcgatgggaaggaggctatgaaagaacatgggagattcttaaagaagatgaatctggatcacttaaagctacaatagaagacattctattcaaggcaaagagaaaaagagtatttgagcaccatggacaagttcgacttggaatgatgcgccacctttatgtggtagtagatggatcaagaacaatggaagaccaagatttaaagcctaatagactgacgtgtactttaaagttgttggaatactttgtagaggaatattttgatcaaaatcctattagtcagattggaataattgtaactaagagtaaaagagctgaaaaattgactgaactttcaggaaacccaagaaaacatataacgtctttgaaggaagctgtggatatgacctgccatggagagccatctctttataattccctaagcatggctatgcagactctaaaacacatgcctggacatacaagtcgagaagtactaatcatctttagcagccttacaacttgcgatccatctaatatttatgatctaatcaagaccctaaaggcagctaaaattagagtatctgttattggattgtctgcagaagttcgcgtttgcactgtacttgctcgtgaaactggtggcacgtaccatgttattttagatgaaagccattacaaagagttgctcacacatcatcttagtcctcctcctgctagctcaagttctgaatgctcacttattcgtatgggatttcctcagcacaccattgcttctttatctgaccaggatgcaaaaccctctttcagcatggcgcatttggatggcaatactgagccagggcttacattaggaggctatttctgcccacagtgtcgggcaaagtactgtgagctacctgttgaatgtaaaatctgtggtcttactttggtgtctgctccccacttggcacggtcttaccatcatttgtttcctttggatgcttttcaagaaattcccctagaagaatataatggagaaagattttgttatggatgtcagggggaattgaaagaccaacatgtttatgtttgtgctgtgtgccaaaatgttttctgtgtggactgtgatgtttttgttcatgattctctacactgttgccctggctgtattcataagattccagctccttcaggtgtttgattccagcatgtagtatacattgtatgtgttaaaaagaaatttgcaactgtgaataaaaggacttctttagaagaagcttcatttaaaacatgaaaggataatctgacttaagaaactttttgctaagaaaaggtaatattttattaaattttaaatttgtgttgtcacagaaatacctgaaattcagtagtacttcattcaattaattttgttttctattattttgagttatactgttttcaaagtcattatgcagtatgtataaacttataagaattaaattgatgtgataattttatgtttttataattaaatatagaatctttatgatttatgttaattcattaatttagtgtaagaagaaagttaagtctgaatgtaaattcagtgtaagatgaaaatttatcaatacttatgaaattaggctgggcgctgtggctcacacctgtaatcccaacactttgggaggctgaggtgggcagatcacttgaggtcaggagttcgagaccagcctggccaacatggtgaaaccccgtcactactaaaaatacaaaaaataattagccgggcatggtggttcacgcctggagtcccagctacttgggaggctgaggcaggagaatcgcttgaacccaggaggcggaggttgcagtgagccgagattgtgccactgcactccaccctagagtaagactccct

SEQ ID NO: 4522 - protein, 395 aa, Homo sapiens
MDEEPERTKRWEGGYERTWEILKEDESGSLKATIEDILFKAKRKRVFEHHGQVRLGMMRHLYVVVDGSRTMEDQDLKPNRLTCTLKLLEYFVEEYFDQNPISQIGIIVTKSKRAEKLTELSGNPRKHITSLKEAVDMTCHGEPSLYNSLSMAMQTLKHMPGHTSREVLIIFSSLTTCDPSNIYDLIKTLKAAKIRVSVIGLSAEVRVCTVLARETGGTYHVILDESHYKELLTHHLSPPPASSSSECSLIRMGFPQHTIASLSDQDAKPSFSMAHLDGNTEPGLTLGGYFCPQCRAKYCELPVECKICGLTLVSAPHLARSYHHLFPLDAFQEIPLEEYNGERFCYGCQGELKDQHVYVCAVCQNVFCVDCDVFVHDSLHCCPGCIHKIPAPSGV

SEQ ID NO: 4523 - DNA, 2339 bp, Homo sapiens
ttctagcggcgccgattattgaataataaaatacagttttgaaaaaaatggatgaagaacctgaaagaactaagcgatgggaaggaggctatgaaagaacatgggagattcttaaagaagatgaatctggatcacttaaagctacaatagaagacattctattcaaggcaaagagaaaaagatgcgccacctttatgtggtagtagatggatcaagaacaatggaagaccaagatttaaagcctaatagactgacgtgtactttaaagttgttggaatactttgtagaggaatattttgatcaaaatcctattagtcagattggaataattgtaactaagagtaaaagagctgaaaaattgactgaactttcagatggagtcttgctctgtcgccaggctagagtgcagtggcacaatttcggatcactgcaaagtccgcctcacgggttcaagcgattccctgcctcagcctcctgagtagctggaactacagatgcccgccaccacgccctgctaattttttgtattttagtagatacggggtttcaccatgttggccagtatggtctcaatctcttgaccttgtgatcagcccgcctcagcctctcaaagtgctgggattacaggcttgagccaccgcatccggccttatcctgaagatattaaaatacagttattgtaatcatttataaaatccagttaatcttaaaattaaattcttaaaaagttaagcatctaatttaaaagggaaaaagtataaaaattaaactgtagctattgctaatgaatcaatttttctgcttccatgacatacctaactgaattttagtttcaaaacgtagtaatggcattttttatttgctttgatatatatgctgttacaaatttgcatcactgattctattttattttctgtgaaatacactctcccttaaatctggttttcaaccttttatccttgccggcacacataagggaaatgacatactttcttcattagtagtttttcattaaatgcagtgaggagtgaaatgtacattggcctggagtgattcaagaaactcagttgtgagtaaccaaaagaatgtcacactagcttaagtgcagaaggaaaattttgggctatgttcaaaggtgggccaattccatatatagttgctgcatatgttggggtcctggctttgtctggcttcattctctgatagattttctggaagttgaaaagatgtctcttaattgtcccagttctacattgtacccgtagcctatagcttcagcacacgtctagggagaactctgattggcctgagttacgatctgcccatccatgaacaaagtggccaggaaatgaagtattttgtttgtacgcttcgattgcctgctgatgcccagagcaggatagaagtagggtcagcaccacatgaactaagcaggattattatatagtggaagaaggatggttcctccaaggtaggaatataaggtcaatattttcctctcactttacccaccccgagttaccagcagttttctattgcttcttttttttttttttgagaaggagtctctcactctgtcgcccaggcggtgctgtcttggctcactgcaacctccgcctcccgggttcaagagattctcctgcctccccctcccgagtagctgggattacaggtgtgcgctgccacacctggctaattttatttttagtagagacaggatttcaccatgctggccaggctgatctcgaactcctgacctcaggtgatctacccacctcagcctcccaaagtgttgggattacaggcatcagccaccatgcccggccccagcagttttctatggatgttagtgaagtcatgtataaagatgaaaaatattctggagattctgacaggcctcttgaagccacctttttttccctccaatcagaccactgctgtaaaccacactgacactattgtagtatgcttttttcctatacccataacacagtgggagattaaaaataattttgtagggtaggaagagaagtggatagagagccaggagatctaggtttgggtgctgctggtcctgcagttaagcaggcatatgtctttgggcaagtcatttcacttgtttagattaattttctcacttatgaagtgagggatttggactgcttagcgaggtacttttcatctctaaaatttatgaatctaaaatacttgcagtaaatattaaatattacaaatggttaatattttaaaacttactcagatgagtaaaaactcaagggagctccaagttgatgaatagacaaagaagacatgattcacacagaaaaaacccagaaatt

SEQ ID NO: 4524 - protein, 98 aa, Homo sapiens
MRHLYVVVDGSRTMEDQDLKPNRLTCTLKLLEYFVEEYFDQNPISQIGIIVTKSKRAEKLTELSDGVLLCRQARVQWHNFGSLQSPPHGFKRFPASAS

SEQ ID NO: 4525 - DNA, 2056 bp, Homo sapiens
tgacttccggggcgcccctaaagcggcggagaggagtgtcgggctgagtttccggctgagagtccttctagcggcgccgattattgaataataaaatacagttttgaaaaaaatggatgaagaacctgaaagaactaagcgatgggaaggaggctatgaaagaacatgggagattcttaaagaagatgaatctggatcacttaaagctacaatagaagacattctattcaaggcaaagagaaaaagagtatttgagcaccatggacaagttcgacttggaatgatgcgccacctttatgtggtagtagatggatcaagaacaatggaagaccaagatttaaagcctaatagactgacgtgtactttaaagttgttggaatactttgtagaggaatattttgatcaaaatcctattagtcagattggaataattgtaactaagagtaaaagagctgaaaaattgactgaactttcaggaaacccaagaaaacatataacgtctttgaaggaagctgtggatatgacctgccatggagagccatctctttataattccctaagcatggctatgcagactctaaatatctccaagacacatgcctggacatacaagtcgagaagtactaatcatctttagcagccttacaacttgcgatccatctaatatttatgatctaatcaagaccctaaaggcagctaaaattagagtatctgttattggattgtctgcagaagttcgcgtttgcactgtacttgctcgtgaaactggtggtatatatataatttatttaatatttgcttataattactgtgtaggaaataatttattaattaaattaggatgttttaatctgttctgagctactaaacttaaagtagtctaaaatatgggcagtcatcttaaatatatcattgattccataagaaatcatctccaaatgcaaagagttttcagtacttatgtcagtatttagaggaggtattataactcttggaaagctggaaattttactgtatgtaattctttataaagattttataacttgtctttaattaaattgtaattacaggccaggcatgatagctcatgcctgtaatctcaacattttggtaggccaaggcaggagaatcacttgaggccagaagtttgagatcagtctggttaacatagtgagacctgtctctatttatatgttaaaataataataatagtaataataatcaattgtaattatagttattcctagagaagttgatttagatatattacttaaataaggttttaaaagtgataatttagctaaaatcattattttaaaaatgtacattttcagatgatacaacttttacagaattacatagaacgtacagttcgttatgtctatgaaggtgtttttttttcccttttcatcttgttaggcacgtaccatgttattttagatgaaagccattacaaagagttgctcacacatcatcttagtcctcctcctgctagctcaagttctgaatgctcacttattcgtatgggtaagtgtttttatgtttttaaaaaatacatatctaggctctctattttcatttgcacaagttattttaatatttaagaatttttaaagaaaaaatatgcttgttgaagcaattttggaaagtacagagaagtggaaaaaaaaaattaaaactaccagtagtcctgtcacccagaaaatactgttggctttctttatttttaaggctagaaaggtataaactgtgtttatagaaaaatacttatattaagccgggctcggtggctcacacctgtaatcccagcactttgggaggccgaggtgggcggatcttgaggtcaggagatcgagaccatcctggctaacacggtgaaaccccatctctactaaaaatacaaaaaattagccaggcgtggtggcgggcgcctgtaatcccagctcctcgggaggctgaggcaggagaatggcatgaacccgggaggcagagctggcaatgagccgagatcacaccactgcactctagcctgggcgacagagcgagactctgtctc

SEQ ID NO: 4526 - protein, 174 aa, Homo sapiens
MDEEPERTKRWEGGYERTWEILKEDESGSLKATIEDILFKAKRKRVFEHHGQVRLGMMRHLYVVVDGSRTMEDQDLKPNRLTCTLKLLEYFVEEYFDQNPISQIGIIVTKSKRAEKLTELSGNPRKHITSLKEAVDMTCHGEPSLYNSLSMAMQTLNISKTHAWTYKSRSTNHL

SEQ ID NO: 4527 - DNA, 558 bp, Homo sapiens
tctagcggcgccggctggagtgcagtggcacaaccttggctcgctccagtgtctacctcccaggttcaagtgattctcctgcctcagcctcccgagtagctgggattacagattattgaataataaaatacagttttgaaaaaaatggatgaagaacctgaaagaactaagcgatgggaaggaggctatgaaagaacatgggagattcttaaagaagatgaatctggatcacttaaagctacaatagaagacattctattcaaggcaaagagaaaaagagtatttgagcaccatggacaagttcgacttggaatgatgcgccacctttatgtggtagtagatggatcaagaacaatggaagaccaagatttaaagcctaatagactgacgtgtactttaaaggtaaaatttaagtttatactaaatcatttaaatttgtaccaaaatcacttaaacttttactaaaaaagtggggaagaacactggattctaaaggatatttttaaagaatgcaatattttttattttttgccttgtatttttagttaatgctaatga

SEQ ID NO: 4528 - protein, 106 aa, Homo sapiens
MDEEPERTKRWEGGYERTWEILKEDESGSLKATIEDILFKAKRKRVFEHHGQVRLGMMRHLYVVVDGSRTMEDQDLKPNRLTCTLKVKFKFILNHLNLYQNHLNFY

SEQ ID NO: 4529 - DNA, 1128 bp, Homo sapiens
tctagcggcgccggtgagtccgcgtgtggaagtctgtgaggcgcagaggtggggcaggccgtctgactagctaggcggctgggagcgttttcgtggcggggaacggaggttgaattgccctgcctgggctcatagggaaggaggatgtgaaggagcttgtgaaggcagaggaagattattgaataataaaatacagttttgaaaaaaatggatgaagaacctgaaagaactaagcgatgggaaggaggctatgaaagaacatgggagattcttaaagaagatgaatctggatcacttaaagctacaatagaagacattctattcaaggcaaagagaaaaagagtatttgagcaccatggacaagttcgacttggaatgatgcgccacctttatgtggtagtagatggatcaagaacaatggaagaccaagatttaaagcctaatagactgacgtgtactttaaagttgttggaatactttgtagaggaatattttgatcaaaatcctattagtcagattggaataattgtaactaagagtaaaagagctgaaaaattgactgaactttcaggaaacccaagaaaacatataacgtctttgaaggaagctgtggatatgacctgccatggagagccatctctttataattccctaagcatggctatgcagactctaaagttagtattatacattatgtataattgaattagaagttttttaaatgagttaagttgaagtgatgtgttaatatggggcccataaacccagctataacaaaattgttaagtacgagaattatgtagtgttatttatgatgtttagtgtggtgttggttagtaatttttattttacattttagtaagatattgttaaaggttttataaaaatataatttaaaactgtcggcagtatcaatagtacaaaaataggttgatgaaaaaatattttattaaaatgagatttaatatagtataataattgtaagttggttgtacctttattaacatttattattttattttgaaagtaatggccaaaaccacaattccttttgcaccaatgtcatatatctgtaaattaatagatatggcaagttcagctatatggaatagagctaagaccccaaag

SEQ ID NO: 4530 - protein, 165 aa, Homo sapiens
MDEEPERTKRWEGGYERTWEILKEDESGSLKATIEDILFKAKRKRVFEHHGQVRLGMMRHLYVVVDGSRTMEDQDLKPNRLTCTLKLLEYFVEEYFDQNPISQIGIIVTKSKRAEKLTELSGNPRKHITSLKEAVDMTCHGEPSLYNSLSMAMQTLKLVLYIMYN

SEQ ID NO: 4531 - DNA, 806 bp, Homo sapiens
cggctgagagtccttctagcggcgccgattattgaataataaaatacagttttgaaaaaaatggatgaagaacctgaaagaactaagcgatgggaaggaggctatgaaagaacatgggagattcttaaagaagatgaatctggatcacttaaagctacaatagaagacattctattcaaggcaaagagaaaaagagtatttgagcaccatggacaagttcgacttggaatgatgcgccacctttatgtggtagtagatggatcaagaacaatggaagaccaagatttaaagcctaatagactgacgtgtactttaaaggaaacccaagaaaacatataacgtctttgaaggaagctgtggatatgacctgccatggagagccatctctttataattccctaagcatggctatgcagactctaaaacacatgcctggacatacaagtcgagaagtactaatcatctttagcagccttacaacttgcgatccatctaatatttatgatctaatcaagaccctaaaggcagctaaaattagagtatctgttattggattgtctgcagaagttcgcgtttgcactgtacttgctcgtgaaactggtggcacgtaccatgttattttagatgaaagccattacaaagagttgctcacacatcatcttagtcctcctcctgctagctcaagttctgaatgctcacttattcgtatgggatttcctcagcacaccattgcttctttatctgaccaggatgcaaaaccctctttcagcatggcgcatttggatggcaatactgagccagggctt

SEQ ID NO: 4532 - protein, 92 aa, Homo sapiens
MDEEPERTKRWEGGYERTWEILKEDESGSLKATIEDILFKAKRKRVFEHHGQVRLGMMRHLYVVVDGSRTMEDQDLKPNRLTCTLKETQENI

SEQ ID NO: 4533 - DNA, 799 bp, Homo sapiens
ccttctagcggcgccggtgagtccgcgtgtggaagtctgtgaggcgcagaggtggggcaggccgtctgactagctaggcggctgggagcgttttcgtggcggggaacggaggttgaattgccctgcctgggctcatagggaaggaggatgtgaaggagcttgtgaaggcagaggaagattattgaataataaaatacagttttgaaaaaaatggatgaagaacctgaaagaactaagcgatgggaaggaggctatgaaagaacatgggagattcttaaagaagatgaatctggatcacttaaagctacaatagaagacattctattcaaggcaaagagaaaaagagtatttgagcaccatggacaagttcgacttggaatgatgcgccacctttatgtggtagtagatggatcaagaacaatggaagaccaagatttaaagcctaatagactgacgtgtactttaaaggtaaaatttaagtttatactaaatcatttaaatttgtaccaaaatcacttaaacttttactaaaaaagtggggaagaacactggattctaaaggatatttttaaagaatgcaatattttttattttttgccttgtatttttagttaatgctaatgatagctaagtagaagtactgccaggttatttagggaaattttaaaccaacatagctaattatttgtgtttttaatttctatcctcccaccccacatcaggatcttggtttatcagttatcccttttctttcttgaatcttcattctcctttgccttacttaactctgtctcctcag

SEQ ID NO: 4534 - protein, 106 aa, Homo sapiens; identical to SEQ ID NO: 4528

SEQ ID NO: 4535 - DNA, 621 bp, Homo sapiens
tctagcggcgccggtgagtccgcgtgtggaagtctgtgaggcgcagaggtggggcaggccgtctgactagctaggcggctgggagcgttttcgtggcggggaacggaggttgaattgccctgcctgggctcatagggaaggaggatgtgaaggagcttgtgaaggcagaggaagattattgaataataaaatacagttttgaaaaaaatggatgaagaacctgaaagaactaagcgatgggaaggaggctatgaaagaacatgggagattcttaaagaagatgaatctggatcacttaaagctacaatagaagacattctattcaaggcaaagagaaaaagagtatttgagcaccatggacaagttcgacttggaatgatgcgccacctttatgtggtagtagatggatcaagaacaatggaagaccaagatttaaagcctaatagactgacgtgtactttaaagttgttggaatactttgtagaggaatattttgatcaaaatcctattagtcagattggaataattgtaactaagagtaaaagagctgaaaaattgactgaactttcaggtgtttgattccagcatgtagtatacattgtatgtgttaaaaagaaattt

SEQ ID NO: 4536 - protein, 123 aa, Homo sapiens
MDEEPERTKRWEGGYERTWEILKEDESGSLKATIEDILFKAKRKRVFEHHGQVRLGMMRHLYVVVDGSRTMEDQDLKPNRLTCTLKLLEYFVEEYFDQNPISQIGIIVTKSKRAEKLTELSGV

SEQ ID NO: 4537 - DNA, 1080 bp, Homo sapiens
ccggctgagagtccttctagcggcgccggctggagtgcagtggcacaaccttggctcgctccagtgtctacctcccaggttcaagtgattctcctgcctcagcctcccgagtagctgggattacagattattgaataataaaatacagttttgaaaaaaatggatgaagaacctgaaagaactaagcgatgggaaggaggctatgaaagaacatgggagattcttaaagaagatgaatctggatcacttaaagctacaatagaagacattctattcaaggcaaagagaaaaagagtatttgagcaccatggacaagttcgacttggaatgatgcgccacctttatgtggtagtagatggatcaagaacaatggaagaccaagatttaaagcctaatagactgacgtgtactttaaagttgttggaatactttgtagaggaatattttgatcaaaatcctattagtcagattggaataattgtaactaagagtaaaagagctgaaaaattgactgaactttcaggaaacccaagaaaacatataacgtctttgaaggaagctgtggatatgacctgccatggagagccatctctttataattccctaagcatggctatgcagactctaaagttagtattatacattatgtataattgaattagaagttttttaaatgagttaagttgaagtgatgtgttaatatggggcccataaacccagctataacaaaattgttaagtacgagaattatgtagtgttatttatgatgtttagtgtggtgttggttagtaatttttattttacattttagtaagatattgttaaaggttttataaaaatataatttaaaactgtcggcagtatcaatagtacaaaaataggttgatgaaaaaatattttattaaaatgagatttaatatagtataataattgtaagttggttgtacctttattaacatttattattttattttgaaagtaatggccaaaaccacaattccttttgcaccaatgtcatatatctgtaaattaatagatatggcaagttcagctatatggaatagagctaagaccccaaag

SEQ ID NO: 4538 - protein, 165 aa, Homo sapiens; identical to SEQ ID NO: 4530

SEQ ID NO: 4539 - DNA, 1393 bp, Homo sapiens
tctagcggcgccggtgagtccgcgtgtggaagtctgtgaggcgcagaggtggggcaggccgtctgactagctaggcggctgggagcgttttcgtggcggggaacggaggttgaattgccctgcctgggctcatagggaaggaggatgtgaaggagcttgtgaaggcagaggaagattattgaataataaaatacagttttgaaaaaaatggatgaagaacctgaaagaactaagcgatgggaaggaggctatgaaagaacatgggagattcttaaagaagatgaatctggatcacttaaagctacaatagaagacattctattcaaggcaaagagaaaaagagtatttgagcaccatggacaagttcgacttggaatgatgcgccacctttatgtggtagtagatggatcaagaacaatggaagaccaagatttaaagcctaatagactgacgtgtactttaaagttgttggaatactttgtagaggaatattttgatcaaaatcctattagtcagattggaataattgtaactaagagtaaaagagctgaaaaattgactgaactttcaggaaacccaagaaaacatataacgtctttgaaggaagctgtggatatgacctgccatggagagccatctctttataattccctaagcatggctatgcagactctaaaacacatgcctggacatacaagtcgagaagtactaatcatctttagcagccttacaacttgcgatccatctaatatttatgatctaatcaaggtagaccaaaaaatcaaaaccaaagttataactgtaaagagaattctgtagcaaattgatttatatatatatgtatttttgtatgtgtgattcatctttgtgttagatgtattgaatttattactagttttcagagcattctttatttttcaaatacattaaatcttaaatgtttttcttctttcctaaaactatctatctacttggattttatgaagaccctaaaggcagctaaaattagagtatctgttattggattgtctgcagaagttcgcgtttgcactgtacttgctcgtgaaactggtggtatatatataatttatttaatatttgcttataattactgtgtaggaaataatttattaattaaattaggatgttttaatctgttctgagctactaaacttaaagtagtctaaaatatgggcagtcatcttaaatatatcattgattccataagaaatcatctccaaatgcaaagagttttcagtacttatgtcagtatttagaggaggtattataactcttggaaagctggaaattttactgtatgtaattctttataaagattttataacttgtctttaattaaattgtaattacaggccaggcatgatagctcatg

SEQ ID NO: 4540 - protein, 203 aa, Homo sapiens [sequence omitted]

SEQ ID NO: 4541 - DNA, 1033 bp, Homo sapiens
tgacttccggggcgcccctaaagcggcggagaggagtgtcgggctgagtttccggctgagagtccttctagcggcgccgattattgaataataaaatacagttttgaaaaaaatggatgaagaacctgaaagaactaagcgatgggaaggaggctatgaaagaacatgggagattcttaaagaagatgaatctggatcacttaaagctacaatagaagacattctattcaaggcaaagagaaaaagagtatttgagcaccatggacaagttcgacttggaatgatgcgccacctttatgtggtagtagatggatcaagaacaatggaagaccaagatttaaagcctaatagactgacgtgtactttaaagttgttggaatactttgtagaggaatattttgatcaaaatcctattagtcagattggaataattgtaactaagagtaaaagagctgaaaaattgactgaactttcaggaaacccaagaaaacatataacgtctttgaaggaagctgtggatatgacctgccatggagagccatctctttataattccctaagcatggctatgcagactctaaagttagtattatacattatgtataattgaattagaagttttttaaatgagttaagttgaagtgatgtgttaatatggggcccataaacccagctataacaaaattgttaagtacgagaattatgtagtgttatttatgatgtttagtgtggtgttggttagtaatttttattttacattttagtaagatattgttaaaggttttataaaaatataatttaaaactgtcggcagtatcaatagtacaaaaataggttgatgaaaaaatattttattaaaatgagatttaatatagtataataattgtaagttggttgtacctttattaacatttattattttattttgaaagtaatggccaaaaccacaattccttttgcaccaatgtcatatatctgtaaattaatagatatggcaagttcagctatatggaatagagctaagaccccaaag

SEQ ID NO: 4542 - protein, 165 aa, Homo sapiens; identical to SEQ ID NO: 4530

SEQ ID NO: 4543 - DNA, 1830 bp, Homo sapiens
tctagcggcgccggtgagtccgcgtgtggaagtctgtgaggcgcagaggtggggcaggccgtctgactagctaggcggctgggagcgttttcgtggcggggaacggaggttgaattgccctgcctgggctcatagggaaggaggatgtgaaggagcttgtgaaggcagaggaagattattgaataataaaatacagttttgaaaaaaatggatgaagaacctgaaagaactaagcgatgggaaggaggctatgaaagaacatgggagattcttaaagaagatgaatctggatcacttaaagctacaatagaagacattctattcaaggcaaagagaaaaagagtatttgagcaccatggacaagttcgacttggaatgatgcgccacctttatgtggtagtagatggatcaagaacaatggaagaccaagatttaaagcctaatagactgacgtgtactttaaagttgttggaatactttgtagaggaatattttgatcaaaatcctattagtcagattggaataattgtaactaagagtaaaagagctgaaaaattgactgaactttcaggaaacccaagaaaacatataacgtctttgaaggaagctgtggatatgacctgccatggagagccatctctttataattccctaagcatggctatgcagactctaaaacacatgcctggacatacaagtcgagaagtactaatcatctttagcagccttacaacttgcgatccatctaatatttatgatctaatcaagaccctaaaggcagctaaaattagagtatctgttattggattgtctgcagaagttcgcgtttgcactgtacttgctcgtgaaactggtggcacgtaccatgttattttagatgaaagccattacaaagagttgctcacacatcatcttagtcctcctcctgctagctcaagttctgaatgctcacttattcgtatgggatttcctcagcacaccattgcttctttatctgaccaggatgcaaaaccctctttcagcatggcgcatttggatggcaatactgagccagggcttacattaggaggctatttctgcccacagtgtcgggcaaagtactgtgagctacctgttgaatgtaaaatctgtggtcttactttggtgtctgctccccacttggcacggtcttaccatcatttgtttcctttggatgcttttcaagaaattcccctagaagaatataatggagaaaggtatttcagtttggactaatttatatctgttataagtggtaagctaatgtttgaatagattgttactaccttaaaaaataatctgattaacttggacaagagtacttctaatatggaagatgagataaagaatgccatagttatgattgaaatgactcgttgctaaatagatctgaatctccagaaaccaaataatttcactaaacccacctatgtataaataggggtgatgattgtactactaaatcagttttccagaaggaaaagaaaaaaagccctgattggtagtatttgctgatttccatggtttgaatactcccaccatggccaatttttagctacaattaacaaccagctttcttgaatacatatttaacaatatatccttttgatccagtacaatccagtcctagcacactactgaaaataagaggctcattcagcactttgggaggctgaggtgggaggatcacttgaggccaggagttgaagactagctggggcaacatagtgagacactgtctcttaaaaaagaaaaaaaaagctggacatggtggctcatacctgtaatcccagcacttttggaggccaaggc

SEQ ID NO: 4544 - protein, 348 aa, Homo sapiens
MDEEPERTKRWEGGYERTWEILKEDESGSLKATIEDILFKAKRKRVFEHHGQVRLGMMRHLYVVVDGSRTMEDQDLKPNRLTCTLKLLEYFVEEYFDQNPISQIGIIVTKSKRAEKLTELSGNPRKHITSLKEAVDMTCHGEPSLYNSLSMAMQTLKHMPGHTSREVLIIFSSLTTCDPSNIYDLIKTLKAAKIRVSVIGLSAEVRVCTVLARETGGTYHVILDESHYKELLTHHLSPPPASSSSECSLIRMGFPQHTIASLSDQDAKPSFSMAHLDGNTEPGLTLGGYFCPQCRAKYCELPVECKICGLTLVSAPHLARSYHHLFPLDAFQEIPLEEYNGERYFSLD

SEQ ID NO: 4545 - DNA, 1510 bp, Homo sapiens
tctagcggcgccggtgagtccgcgtgtggaagtctgtgaggcgcagaggtggggcaggccgtctgactagctaggcggctgggagcgttttcgtggcggggaacggaggttgaattgccctgcctgggctcatagggaaggaggatgtgaaggagcttgtgaaggcagaggaagattattgaataataaaatacagttttgaaaaaaatggatgaagaacctgaaagaactaagcgatgggaaggaggctatgaaagaacatgggagattcttaaagaagatgaatctggatcacttaaagctacaatagaagacattctattcaaggcaaagagaaaaagagtatttgagcaccatggacaagttcgacttggaatgatgcgccacctttatgtggtagtagatggatcaagaacaatggaagaccaagatttaaagcctaatagactgacgtgtactttaaagttgttggaatactttgtagaggaatattttgatcaaaatcctattagtcagattggaataattgtaactaagagtaaaagagctgaaaaattgactgaactttcaggaaacccaagaaaacatataacgtctttttcctttggatgcttttcaagaaattcccctagaagaatataatggagaaagattttgttatggatgtcagggggaattgaaagaccaacatgtttatgtttgtgctgtgtgccaaaatgttttctgtgtggactgtgatgtttttgttcatgattctctacactgttgccctggctgtattcataagattccagctccttcaggtgtttgattccagcatgtagtatacattgtatgtgttaaaaagaaatttgcaactgtgaataaaaggacttctttagaagaagcttcatttaaaacatgaaaggataatctgacttaagaaactttttgctaagaaaaggtaatattttattaaattttaaatttgtgttgtcacagaaatacctgaaattcagtagtacttcattcaattaattttgttttctattattttgagttatactgttttcaaagtcattatgcagtatgtataaacttataagaattaaattgatgtgataattttatgtttttataattaaatatagaatctttatgatttatgttaattcattaatttagtgtaagaagaaagttaagtctgaatgtaaattcagtgtaagatgaaaatttatcaatacttatgaaattaggctgggcgctgtggctcacacctgtaatcccaacactttgggaggctgaggtgggcagatcacttgaggtcaggagttcgagaccagcctggccaacatggtgaaaccccgtcactactaaaaatacaaaaaataattagccgggcatggtggttcacgcctggagtcccagctacttgggaggctgaggcaggagaatcgcttgaacccaggaggcggaggttgcagtgagccgagattgtgccactgcactccaccctagagtaagactccct

SEQ ID NO: 4546 - protein, 144 aa, Homo sapiens
MDEEPERTKRWEGGYERTWEILKEDESGSLKATIEDILFKAKRKRVFEHHGQVRLGMMRHLYVVVDGSRTMEDQDLKPNRLTCTLKLLEYFVEEYFDQNPISQIGIIVTKSKRAEKLTELSGNPRKHITSFSFGCFSRNSPRRI

SEQ ID NO: 4547 - DNA, 2118 bp, Homo sapiens
tctagcggcgccggtgagtccgcgtgtggaagtctgtgaggcgcagaggtggggcaggccgtctgactagctaggcggctgggagcgttttcgtggcggggaacggaggttgaattgccctgcctgggctcatagggaaggaggatgtgaaggagcttgtgaaggcagaggaagattattgaataataaaatacagttttgaaaaaaatggatgaagaacctgaaagaactaagcgatgggaaggaggctatgaaagaacatgggagattcttaaagaagatgaatctggatcacttaaagctacaatagaagacattctattcaaggcaaagagaaaaagagtatttgagcaccatggacaagttcgacttggaatgatgcgccacctttatgtggtagtagatggatcaagaacaatggaagaccaagatttaaagcctaatagactgacgtgtactttaaagttgttggaatactttgtagaggaatattttgatcaaaatcctattagtcagattggaataattgtaactaagagtaaaagagctgaaaaattgactgaactttcaggaaacccaagaaaacatataacgtctttgaaggaagctgtggatatgacctgccatggagagccatctctttataattccctaagcatggctatgcagactctaaaacacatgcctggacatacaagtcgagaagtactaatcatctttagcagccttacaacttgcgatccatctaatatttatgatctaatcaagaccctaaaggcagctaaaattagagtatctgttattggattgtctgcagaagttcgcgtttgcactgtacttgctcgtgaaactggtggcacgtaccatgttattttagatgaaagccattacaaagagttgctcacacatcatcttagtcctcctcctgctagctcaagttctgaatgctcacttattcgtatgggatttcctcagcacaccattgcttctttatctgaccaggatgcaaaaccctctttcagcatggcgcatttggatggcaatactgagccagggcttacattaggaggctatttctgcccacagtgtcgggcaaagtactgtgagctacctgttgaatgtaaaatctgtggtcttactttggtgtctgctccccacttggcacggtcttaccatcatttgtttcctttggatgcttttcaagaaattcccctagaagaatataatggagaaaggctgaagaacggcctaggatgatgattttgttatggatgtcagggggaattgaaagaccaacatgtttatgtttgtgctgtgtgccaaaatgttttctgtgtggactgtgatgtttttgttcatgattctctacactgttgccctggctgtattcataagattccagctccttcaggtgtttgattccagcatgtagtatacattgtatgtgttaaaaagaaatttgcaactgtgaataaaaggacttctttagaagaagcttcatttaaaacatgaaaggataatctgacttaagaaactttttgctaagaaaaggtaatattttattaaattttaaatttgtgttgtcacagaaatacctgaaattcagtagtacttcattcaattaattttgttttctattattttgagttatactgttttcaaagtcattatgcagtatgtataaacttataagaattaaattgatgtgataattttatgtttttataattaaatatagaatctttatgatttatgttaattcattaatttagtgtaagaagaaagttaagtctgaatgtaaattcagtgtaagatgaaaatttatcaatacttatgaaattaggctgggcgctgtggctcacacctgtaatcccaacactttgggaggctgaggtgggcagatcacttgaggtcaggagttcgagaccagcctggccaacatggtgaaaccccgtcactactaaaaatacaaaaaataattagccgggcatggtggttcacgcctggagtcccagctacttgggaggctgaggcaggagaatcgcttgaacccaggaggcggaggttgcagtgagccgagattgtgccactgcactccaccctagagtaagactccct

SEQ ID NO: 4548 - protein, 349 aa, Homo sapiens
MDEEPERTKRWEGGYERTWEILKEDESGSLKATIEDILFKAKRKRVFEHHGQVRLGMMRHLYVVVDGSRTMEDQDLKPNRLTCTLKLLEYFVEEYFDQNPISQIGIIVTKSKRAEKLTELSGNPRKHITSLKEAVDMTCHGEPSLYNSLSMAMQTLKHMPGHTSREVLIIFSSLTTCDPSNIYDLIKTLKAAKIRVSVIGLSAEVRVCTVLARETGGTYHVILDESHYKELLTHHLSPPPASSSSECSLIRMGFPQHTIASLSDQDAKPSFSMAHLDGNTEPGLTLGGYFCPQCRAKYCELPVECKICGLTLVSAPHLARSYHHLFPLDAFQEIPLEEYNGERLKNGLG

SEQ ID NO: 4549 - DNA, 2313 bp, Homo sapiens
tgcccggccttggatcacttttttaaaatgttattttcttctattttacaaaaatgttacaatgaaaatttattacatttagattgaaaaaagtataacttttaatagaaaaataatctccttatttaatatgtatgtttttaaatgttaatgaaataaaatgcttttctacttttggccttttatattaccagtcgacctctcttttccacggtcttctcatgtgtttaatgatgtcagtaactatcaaccttattgtgtgtttcaaggattgagttaatacagatgatgcgtttagaataatgcttgatgtaaacattcaatatattttagatcttatgtttggctaatctttttgatttactgatatattttcttatttcattttaaagttatttaaatttataatttatttattagagtcctttaggaatgttaacccttctcagtcacccgatgcaaatatttttcttgttggttatttgcctttacttttatttatttgttttgatatgtagatacatttacattttttatgtaatatatctttttaaaaatggtttctgcttttcctgaacatgttttcagaatttaaaattgtatatggaaaacaaattacatgaaagatttgagcatttcaaaattttaaacataaaagcataaacgtagataaaatgaaggtgtactatgatatcttcagttttatcagaaatgatgtaaaaattacaacctctttaaaaagtagtgttaatcattaagttagaaaatatatagctgggcatggtggcagatgcctgtaatcccagctacatgggaaggtgaggtgggagaatcgcttgaacccaggcagtggaggatgcagtgagccaagatcatgccactgcaccccagcctgggtgacagaacaagactccatctcaagaaaaaaaaaaaagaaaaatatatatatgaacttcagaatctgaggtcatatatagacaggtctttcccccgtttcctctactttttcttgtagcttggaattagtcagtttcatcatgctataataagcttatctgaaaggcagtaaagtgatattttgtacaacttcattggctttttgagaagaacatttttaggttcttagtcctagaattctgctgtttgcttggaaaaagaaagtaatacattttcttctatgaaggatttcctcagcacaccattgcttctttatctgaccaggatgcaaaaccctctttcagcatggcgcatttggatggcaatactgagccagggcttacattaggaggctatttctgcccacagtgtcgggcaaagtactgtgagctacctgttgaatgtaaaatctgtggtcttactttggtgtctgctccccacttggcacggtcttaccatcatttgtttcctttggatgcttttcaagaaattcccctagaagaatataatggagaaagattttgttatggatgtcagggggaattgaaagaccaacatgtttatgtttgtgctgtgtgccaaaatgttttctgtgtggactgtgatgtttttgttcatgattctctacactgttgccctggctgtattcataagattccagctccttcaggtgtttgattccagcatgtagtatacattgtatgtgttaaaaagaaatttgcaactgtgaataaaaggacttctttagaagaagcttcatttaaaacatgaaaggataatctgacttaagaaactttttgctaagaaaaggtaatattttattaaattttaaatttgtgttgtcacagaaatacctgaaattcagtagtacttcattcaattaattttgttttctattattttgagttatactgttttcaaagtcattatgcagtatgtataaacttataagaattaaattgatgtgataattttatgtttttataattaaatatagaatctttatgatttatgttaattcattaatttagtgtaagaagaaagttaagtctgaatgtaaattcagtgtaagatgaaaatttatcaatacttatgaaattaggctgggcgctgtggctcacacctgtaatcccaacactttgggaggctgaggtgggcagatcacttgaggtcaggagttcgagaccagcctggccaacatggtgaaaccccgtcactactaaaaatacaaaaaataattagccgggcatggtggttcacgcctggagtcccagctacttgggaggctgaggcaggagaatcgcttgaacccaggaggcggaggttgcagtgagccgagattgtgccactgcactccaccctagagtaagactccct

SEQ ID NO: 4550 - protein, 123 aa, Homo sapiens [sequence omitted]

SEQ ID NO: 4551 - DNA, 2181 bp, Homo sapiens
tagggttcagtactatccttgatttcaggtatccactgggggtcttggaatgtatcctctgcagataagaggggactactatagtctttgagaaagaagtgtgtgttactgttttgaagccacatctctgcactttaaagctgatccatatgatattgccacattttagtttaaagtttatccatatattgttgtattttttattgtatactctagactttgtatgaaacaaacctactagaatgtaagcttaatgatgtcgggaacattgtcagtcttgtttatcactctacccccagaacttgagagtacttggtaaatattaaatgaatcaattaacaattttttgaagtgcatagctcattttagaaaaatttgcattaaagtgtttaaaatatactcacaacctttctttgcattgttgaaacaaatgagatattctatagtctaaatgtgtaatcctatgtttactgttctttctgggtaaattttttggtagtataatttgttgtacctaattggagtgtattttatctttcttttaagacacatgcctggacatacaagtcgagaagtactaatcatctttagcagccttacaacttgcgatccatctaatatttatgatctaatcaaggtagaccaaaaaatcaaaaccaaagttataactgtaaagagaattctgtagcaaattgatttatatatatatgtatttttgtatgtgtgattcatctttgtgttagatgtattgaatttattactagttttcagagcattctttatttttcaaatacattaaatcttaaatgtttttcttctttcctaaaactatctatctacttggattttatgaagaccctaaaggcagctaaaattagagtatctgttattggattgtctgcagaagttcgcgtttgcactgtacttgctcgtgaaactggtggcacgtaccatgttattttagatgaaagccattacaaagagttgctcacacatcatcttagtcctcctcctgctagctcaagttctgaatgctcacttattcgtatgggatttcctcagcacaccattgcttctttatctgaccaggatgcaaaaccctctttcagcatggcgcatttggatggcaatactgagccagggcttacattaggaggctatttctgcccacagtgtcgggcaaagtactgtgagctacctgttgaatgtaaaatctgtggtcttactttggtgtctgctccccacttggcacggtcttaccatcatttgtttcctttggatgcttttcaagaaattcccctagaagaatataatggagaaagattttgttatggatgtcagggggaattgaaagaccaacatgtttatgtttgtgctgtgtgccaaaatgttttctgtgtggactgtgatgtttttgttcatgattctctacactgttgccctggctgtattcataagattccagctccttcaggtgtttgattccagcatgtagtatacattgtatgtgttaaaaagaaatttgcaactgtgaataaaaggacttctttagaagaagcttcatttaaaacatgaaaggataatctgacttaagaaactttttgctaagaaaaggtaatattttattaaattttaaatttgtgttgtcacagaaatacctgaaattcagtagtacttcattcaattaattttgttttctattattttgagttatactgttttcaaagtcattatgcagtatgtataaacttataagaattaaattgatgtgataattttatgtttttataattaaatatagaatctttatgatttatgttaattcattaatttagtgtaagaagaaagttaagtctgaatgtaaattcagtgtaagatgaaaatttatcaatacttatgaaattaggctgggcgctgtggctcacacctgtaatcccaacactttgggaggctgaggtgggcagatcacttgaggtcaggagttcgagaccagcctggccaacatggtgaaaccccgtcactactaaaaatacaaaaaataattagccgggcatggtggttcacgcctggagtcccagctacttgggaggctgaggcaggagaatcgcttgaacccaggaggcggaggttgcagtgagccgagattgtgccactgcactccaccctagagtaagactccct

SEQ ID NO: 4552 - protein, 210 aa, Homo sapiens
MKTLKAAKIRVSVIGLSAEVRVCTVLARETGGTYHVILDESHYKELLTHHLSPPPASSSSECSLIRMGFPQHTIASLSDQDAKPSFSMAHLDGNTEPGLTLGGYFCPQCRAKYCELPVECKICGLTLVSAPHLARSYHHLFPLDAFQEIPLEEYNGERFCYGCQGELKDQHVYVCAVCQNVFCVDCDVFVHDSLHCCPGCIHKIPAPSGV

SEQ ID NO: 4553 - DNA, 2056 bp, Homo sapiens
tctagcggcgccggtgagtccgcgtgtggaagtctgtgaggcgcagaggtggggcaggccgtctgactagctaggcggctgggagcgttttcgtggcggggaacggaggttgaattgccctgcctgggctcatagggaaggaggatgtgaaggagcttgtgaaggcagaggaagattattgaataataaaatacagttttgaaaaaaatggatgaagaacctgaaagaactaagcgatgggaaggaggctatgaaagaacatgggagattcttaaagaagatgaatctggatcacttaaagctacaatagaagacattctattcaaggcaaagagaaaaagagtatttgagcaccatggacaagttcgacttggaatgatgcgccacctttatgtggtagtagatggatcaagaacaatggaagaccaagatttaaagcctaatagactgacgtgtactttaaagttgttggaatactttgtagaggaatattttgatcaaaatcctattagtcagattggaataattgtaactaagagtaaaagagctgaaaaattgactgaactttcaggaaacccaagaaaacatataacgtctttgaaggaagctgtggatatgacctgccatggagagccatctctttataattccctaagcatggctatgcagactctaaaacacatgcctggacatacaagtcgagaagtactaatcatctttagcagccttacaacttgcgatccatctaatatttatgatctaatcaagaccctaaaggcagctaaaattagagtatctgttattggattgtctgcagaagttcgcgtttgcactgtacttgctcgtgaaactggtggcacgtaccatgttattttagatgaaagccattacaaagagttgctcacacatcatcttagtcctcctcctgctagctcaagttctgaatgctcacttattcgtatgggatgcaaaaccctctttcagcatggcgcatttggatggcaatactgagccagggcttacattaggaggctatttctgcccacagtgtcgggcaaagtactgtgagctacctgttgaatgtaaaatctgtggtcttactttggtgtctgctccccacttggcacggtcttaccatcatttgtttcctttggatgcttttcaagaaattcccctagaagaatataatggagaaagattttgttatggatgtcagggggaattgaaagaccaacatgtttatgtttgtgctgtgtgccaaaatgttttctgtgtggactgtgatgtttttgttcatgattctctacactgttgccctggctgtattcataagattccagctccttcaggtgtttgattccagcatgtagtatacattgtatgtgttaaaaagaaatttgcaactgtgaataaaaggacttctttagaagaagcttcatttaaaacatgaaaggataatctgacttaagaaactttttgctaagaaaaggtaatattttattaaattttaaatttgtgttgtcacagaaatacctgaaattcagtagtacttcattcaattaattttgttttctattattttgagttatactgttttcaaagtcattatgcagtatgtataaacttataagaattaaattgatgtgataattttatgtttttataattaaatatagaatctttatgatttatgttaattcattaatttagtgtaagaagaaagttaagtctgaatgtaaattcagtgtaagatgaaaatttatcaatacttatgaaattaggctgggcgctgtggctcacacctgtaatcccaacactttgggaggctgaggtgggcagatcacttgaggtcaggagttcgagaccagcctggccaacatggtgaaaccccgtcactactaaaaatacaaaaaataattagccgggcatggtggttcacgcctggagtcccagctacttgggaggctgaggcaggagaatcgcttgaacccaggaggcggaggttgcagtgagccgagattgtgccactgcactccaccctagagtaagactccct

SEQ ID NO: 4554 - protein, 267 aa, Homo sapiens
MDEEPERTKRWEGGYERTWEILKEDESGSLKATIEDILFKAKRKRVFEHHGQVRLGMMRHLYVVVDGSRTMEDQDLKPNRLTCTLKLLEYFVEEYFDQNPISQIGIIVTKSKRAEKLTELSGNPRKHITSLKEAVDMTCHGEPSLYNSLSMAMQTLKHMPGHTSREVLIIFSSLTTCDPSNIYDLIKTLKAAKIRVSVIGLSAEVRVCTVLARETGGTYHVILDESHYKELLTHHLSPPPASSSSECSLIRMGCKTLFQHGAFGWQY

SEQ ID NO: 4555 - DNA, 1958 bp, Homo sapiens
ccggctgagagtccttctagcggcgccggctggagtgcagtggcacaaccttggctcgctccagtgtctacctcccaggttcaagtgattctcctgcctcagcctcccgagtagctgggattacagattattgaataataaaatacagttttgaaaaaaatggatgaagaacctgaaagaactaagcgatgggaaggaggctatgaaagaacatgggagattcttaaagaagatgaatctggatcacttaaagctacaatagaagacattctattcaaggcaaagagaaaaagatgcgccacctttatgtggtagtagatggatcaagaacaatggaagaccaagatttaaagcctaatagactgacgtgtactttaaagattggaataattgtaactaagagtaaaagagctgaaaaattgactgaactttcaggaaacccaagaaaacatataacgtctttgaaggaagctgtggatatgacctgccatggagagccatctctttataattccctaagcatggctatgcagactctaaaacacatgcctggacatacaagtcgagaagtactaatcatctttagcagccttacaacttgcgatccatctaatatttatgatctaatcaagaccctaaaggcagctaaaattagagtatctgttattggattgtctgcagaagttcgcgtttgcactgtacttgctcgtgaaactggtggcacgtaccatgttattttagatgaaagccattacaaagagttgctcacacatcatcttagtcctcctcctgctagctcaagttctgaatgctcacttattcgtatgggatttcctcagcacaccattgcttctttatctgaccaggatgcaaaaccctctttcagcatggcgcatttggatggcaatactgagccagggcttacattaggaggctatttctgcccacagtgtcgggcaaagtactgtgagctacctgttgaatgtaaaatctgtggtcttactttggtgtctgctccccacttggcacggtcttaccatcatttgtttcctttggatgcttttcaagaaattcccctagaagaatataatggagaaagattttgttatggatgtcagggggaattgaaagaccaacatgtttatgtttgtgctgtgtgccaaaatgttttctgtgtggactgtgatgtttttgttcatgattctctacactgttgccctggctgtattcataagattccagctccttcaggtgtttgattccagcatgtagtatacattgtatgtgttaaaaagaaatttgcaactgtgaataaaaggacttctttagaagaagcttcatttaaaacatgaaaggataatctgacttaagaaactttttgctaagaaaaggtaatattttattaaattttaaatttgtgttgtcacagaaatacctgaaattcagtagtacttcattcaattaattttgttttctattattttgagttatactgttttcaaagtcattatgcagtatgtataaacttataagaattaaattgatgtgataattttatgtttttataattaaatatagaatctttatgatttatgttaattcattaatttagtgtaagaagaaagttaagtctgaatgtaaattcagtgtaagatgaaaatttatcaatacttatgaaattaggctgggcgctgtggctcacacctgtaatcccaacactttgggaggctgaggtgggcagatcacttgaggtcaggagttcgagaccagcctggccaacatggtgaaaccccgtcactactaaaaatacaaaaaataattagccgggcatggtggttcacgcctggagtcccagctacttgggaggctgaggcaggagaatcgcttgaacccaggaggcggaggttgcagtgagccgagattgtgccactgcactccaccctagagtaagactccct

SEQ ID NO: 4556 - protein, 321 aa, Homo sapiens
MRHLYVVVDGSRTMEDQDLKPNRLTCTLKIGIIVTKSKRAEKLTELSGNPRKHITSLKEAVDMTCHGEPSLYNSLSMAMQTLKHMPGHTSREVLIIFSSLTTCDPSNIYDLIKTLKAAKIRVSVIGLSAEVRVCTVLARETGGTYHVILDESHYKELLTHHLSPPPASSSSECSLIRMGFPQHTIASLSDQDAKPSFSMAHLDGNTEPGLTLGGYFCPQCRAKYCELPVECKICGLTLVSAPHLARSYHHLFPLDAFQEIPLEEYNGERFCYGCQGELKDQHVYVCAVCQNVFCVDCDVFVHDSLHCCPGCIHKIPAPSGV

SEQ ID NO: 4557 - DNA, 1978 bp, Homo sapiens
tgggagcgttttcgtggcggggaacggaggttgaattgccctgcctgggctcatagggaaggaggatgtgaaggagcttgtgaaggcagaggaagattattgaataataaaatacagttttgaaaaaaatggatgaagaacctgaaagaactaagcgatgggaaggaggctatgaaagaacatgggagattcttaaagaagatgaatctggatcacttaaagctacaatagaagacattctattcaaggcaaagagaaaaagatgcgccacctttatgtggtagtagatggatcaagaacaatggaagaccaagatttaaagcctaatagactgacgtgtactttaaagttgttggaatactttgtagaggaatattttgatcaaaatcctattagtcagattggaataattgtaactaagagtaaaagagctgaaaaattgactgaactttcaggaaacccaagaaaacatataacgtctttgaaggaagctgtggatatgacctgccatggagagccatctctttataattccctaagcatggctatgcagactctaaaacacatgcctggacatacaagtcgagaagtactaatcatctttagcagccttacaacttgcgatccatctaatatttatgatctaatcaagaccctaaaggcagctaaaattagagtatctgttattggattgtctgcagaagttcgcgtttgcactgtacttgctcgtgaaactggtggcacgtaccatgttattttagatgaaagccattacaaagagttgctcacacatcatcttagtcctcctcctgctagctcaagttctgaatgctcacttattcgtatgggatttcctcagcacaccattgcttctttatctgaccaggatgcaaaaccctctttcagcatggcgcatttggatggcaatactgagccagggcttacattaggaggctatttctgcccacagtgtcgggcaaagtactgtgagctacctgttgaatgtaaaatctgtggtcttactttggtgtctgctccccacttggcacggtcttaccatcatttgtttcctttggatgcttttcaagaaattcccctagaagaatataatggagaaagattttgttatggatgtcagggggaattgaaagaccaacatgtttatgtttgtgctgtgtgccaaaatgttttctgtgtggactgtgatgtttttgttcatgattctctacactgttgccctggctgtattcataagattccagctccttcaggtgtttgattccagcatgtagtatacattgtatgtgttaaaaagaaatttgcaactgtgaataaaaggacttctttagaagaagcttcatttaaaacatgaaaggataatctgacttaagaaactttttgctaagaaaaggtaatattttattaaattttaaatttgtgttgtcacagaaatacctgaaattcagtagtacttcattcaattaattttgttttctattattttgagttatactgttttcaaagtcattatgcagtatgtataaacttataagaattaaattgatgtgataattttatgtttttataattaaatatagaatctttatgatttatgttaattcattaatttagtgtaagaagaaagttaagtctgaatgtaaattcagtgtaagatgaaaatttatcaatacttatgaaattaggctgggcgctgtggctcacacctgtaatcccaacactttgggaggctgaggtgggcagatcacttgaggtcaggagttcgagaccagcctggccaacatggtgaaaccccgtcactactaaaaatacaaaaaataattagccgggcatggtggttcacgcctggagtcccagctacttgggaggctgaggcaggagaatcgcttgaacccaggaggcggaggttgcagtgagccgagattgtgccactgcactccaccctagagtaagactccct

SEQ ID NO: 4558 - protein, 338 aa, Homo sapiens
MRHLYVVVDGSRTMEDQDLKPNRLTCTLKLLEYFVEEYFDQNPISQIGIIVTKSKRAEKLTELSGNPRKHITSLKEAVDMTCHGEPSLYNSLSMAMQTLKHMPGHTSREVLIIFSSLTTCDPSNIYDLIKTLKAAKIRVSVIGLSAEVRVCTVLARETGGTYHVILDESHYKELLTHHLSPPPASSSSECSLIRMGFPQHTIASLSDQDAKPSFSMAHLDGNTEPGLTLGGYFCPQCRAKYCELPVECKICGLTLVSAPHLARSYHHLFPLDAFQEIPLEEYNGERFCYGCQGELKDQHVYVCAVCQNVFCVDCDVFVHDSLHCCPGCIHKIPAPSGV

SEQ ID NO: 4559 - DNA, 2043 bp, Homo sapiens
tctagcggcgccggtgagtccgcgtgtggaagtctgtgaggcgcagaggtggggcaggccgtctgactagctaggcggctgggagcgttttcgtggcggggaacggaggttgaattgccctgcctgggctcatagggaaggaggatgtgaaggagcttgtgaaggcagaggaagattattgaataataaaatacagttttgaaaaaaatggatgaagaacctgaaagaactaagcgatgggaaggaggctatgaaagaacatgggagattcttaaagaagatgaatctggatcacttaaagctacaatagaagacattctattcaaggcaaagagaaaaagagtatttgagcaccatggacaagttcgacttggaatgatgcgccacctttatgtggtagtagatggatcaagaacaatggaagaccaagatttaaagcctaatagactgacgtgtactttaaagattggaataattgtaactaagagtaaaagagctgaaaaattgactgaactttcaggaaacccaagaaaacatataacgtctttgaaggaagctgtggatatgacctgccatggagagccatctctttataattccctaagcatggctatgcagactctaaaacacatgcctggacatacaagtcgagaagtactaatcatctttagcagccttacaacttgcgatccatctaatatttatgatctaatcaagaccctaaaggcagctaaaattagagtatctgttattggattgtctgcagaagttcgcgtttgcactgtacttgctcgtgaaactggtggcacgtaccatgttattttagatgaaagccattacaaagagttgctcacacatcatcttagtcctcctcctgctagctcaagttctgaatgctcacttattcgtatgggatttcctcagcacaccattgcttctttatctgaccaggatgcaaaaccctctttcagcatggcgcatttggatggcaatactgagccagggcttacattaggaggctatttctgcccacagtgtcgggcaaagtactgtgagctacctgttgaatgtaaaatctgtggtcttactttggtgtctgctccccacttggcacggtcttaccatcatttgtttcctttggatgcttttcaagaaattcccctagaagaatataatggagaaagattttgttatggatgtcagggggaattgaaagaccaacatgtttatgtttgtgctgtgtgccaaaatgttttctgtgtggactgtgatgtttttgttcatgattctctacactgttgccctggctgtattcataagattccagctccttcaggtgtttgattccagcatgtagtatacattgtatgtgttaaaaagaaatttgcaactgtgaataaaaggacttctttagaagaagcttcatttaaaacatgaaaggataatctgacttaagaaactttttgctaagaaaaggtaatattttattaaattttaaatttgtgttgtcacagaaatacctgaaattcagtagtacttcattcaattaattttgttttctattattttgagttatactgttttcaaagtcattatgcagtatgtataaacttataagaattaaattgatgtgataattttatgtttttataattaaatatagaatctttatgatttatgttaattcattaatttagtgtaagaagaaagttaagtctgaatgtaaattcagtgtaagatgaaaatttatcaatacttatgaaattaggctgggcgctgtggctcacacctgtaatcccaacactttgggaggctgaggtgggcagatcacttgaggtcaggagttcgagaccagcctggccaacatggtgaaaccccgtcactactaaaaatacaaaaaataattagccgggcatggtggttcacgcctggagtcccagctacttgggaggctgaggcaggagaatcgcttgaacccaggaggcggaggttgcagtgagccgagattgtgccactgcactccaccctagagtaagactccct

SEQ ID NO: 4560 - protein, 378 aa, Homo sapiens
MDEEPERTKRWEGGYERTWEILKEDESGSLKATIEDILFKAKRKRVFEHHGQVRLGMMRHLYVVVDGSRTMEDQDLKPNRLTCTLKIGIIVTKSKRAEKLTELSGNPRKHITSLKEAVDMTCHGEPSLYNSLSMAMQTLKHMPGHTSREVLIIFSSLTTCDPSNIYDLIKTLKAAKIRVSVIGLSAEVRVCTVLARETGGTYHVILDESHYKELLTHHLSPPPASSSSECSLIRMGFPQHTIASLSDQDAKPSFSMAHLDGNTEPGLTLGGYFCPQCRAKYCELPVECKICGLTLVSAPHLARSYHHLFPLDAFQEIPLEEYNGERFCYGCQGELKDQHVYVCAVCQNVFCVDCDVFVHDSLHCCPGCIHKIPAPSGV

SEQ ID NO: 4561 - DNA, 2032 bp, Homo sapiens
ttctagcggcgccggctggagtgcagtggcacaaccttggctcgctccagtgtctacctcccaggttcaagtgattctcctgcctcagcctcccgagtagctgggattacagattattgaataataaaatacagttttgaaaaaaatggatgaagaacctgaaagaactaagcgatgggaaggaggctatgaaagaacatgggagattcttaaagaagatgaatctggatcacttaaagctacaatagaagacattctattcaaggcaaagagaaaaagagtatttgagcaccatggacaagttcgacttggaatgatgcgccacctttatgtggtagtagatggatcaagaacaatggaagaccaagatttaaagcctaatagactgacgtgtactttaaagttgttggaatactttgtagaggaatattttgatcaaaatcctattagtcagattggaataattgtaactaagagtaaaagagctgaaaaattgactgaactttcaggaaacccaagaaaacatataacgtctttgaaggaagctgtggatatgacctgccatggagagccatctctttataattccctaagcatggctatgcagactctaaaacacatgcctggacatacaagtcgagaagtactaatcatctttagcagccttacaacttgcgatccatctaatatttatgatctaatcaagaccctaaaggcagctaaaattagagtatctgttattggattgtctgcagaagttcgcgtttgcactgtacttgctcgtgaaactggtggcacgtaccatgttattttagatgaaagccattacaaagagttgctcacacatcatcttagtcctcctcctgctagctcaagttctgaatgctcacttattcgtatgggatttcctcagcacaccattgcttctttatctgaccaggatgcaaaaccctctttcagcatggcgcatttggatggcaatactgagccagggcttacattaggaggctatttctgcccacagtgtcgggcaaagtactgtgagctacctgttgaatgtaaaatctgtggtcttactttggtgtctgctccccacttggcacggtcttaccatcatttgtttcctttggatgcttttcaagaaattcccctagaagaatataatggagaaagattttgttatggatgtcagggggaattgaaagaccaacatgtttatgtttgtgctgtgtgccaaaatgttttctgtgtggactgtgatgtttttgttcatgattctctacactgttgccctggctgtattcataagattccagctccttcaggtgtttgattccagcatgtagtatacattgtatgtgttaaaaagaaatttgcaactgtgaataaaaggacttctttagaagaagcttcatttaaaacatgaaaggataatctgacttaagaaactttttgctaagaaaaggtaatattttattaaattttaaatttgtgttgtcacagaaatacctgaaattcagtagtacttcattcaattaattttgttttctattattttgagttatactgttttcaaagtcattatgcagtatgtataaacttataagaattaaattgatgtgataattttatgtttttataattaaatatagaatctttatgatttatgttaattcattaatttagtgtaagaagaaagttaagtctgaatgtaaattcagtgtaagatgaaaatttatcaatacttatgaaattaggctgggcgctgtggctcacacctgtaatcccaacactttgggaggctgaggtgggcagatcacttgaggtcaggagttcgagaccagcctggccaacatggtgaaaccccgtcactactaaaaatacaaaaaataattagccgggcatggtggttcacgcctggagtcccagctacttgggaggctgaggcaggagaatcgcttgaacccaggaggcggaggttgcagtgagccgagattgtgccactgcactccaccctagagtaagactccct

SEQ ID NO: 4562 - protein, 395 aa, Homo sapiens; identical to SEQ ID NO: 4522

SEQ ID NO: 4563 - DNA, 1999 bp, Homo sapiens
tgacttccggggcgcccctaaagcggcggagaggagtgtcgggctgagtttccggctgagagtccttctagcggcgccgattattgaataataaaatacagttttgaaaaaaatggatgaagaacctgaaagaactaagcgatgggaaggaggctatgaaagaacatgggagattcttaaagaagatgaatctggatcacttaaagctacaatagaagacattctattcaaggcaaagagaaaaagagtatttgagcaccatggacaagttcgacttggaatgatgcgccacctttatgtggtagtagatggatcaagaacaatggaagaccaagatttaaagcctaatagactgacgtgtactttaaagttgttggaatactttgtagaggaatattttgatcaaaatcctattagtcagattggaataattgtaactaagagtaaaagagctgaaaaattgactgaactttcaggaaacccaagaaaacatataacgtctttgaaggaagctgtggatatgacctgccatggagagccatctctttataattccctaagcatggctatgcagactctaaaacacatgcctggacatacaagtcgagaagtactaatcatctttagcagccttacaacttgcgatccatctaatatttatgatctaatcaagaccctaaaggcagctaaaattagagtatctgttattggattgtctgcagaagttcgcgtttgcactgtacttgctcgtgaaactggtggcacgtaccatgttattttagatgaaagccattacaaagagttgctcacacatcatcttagtcctcctcctgctagctcaagttctgaatgctcacttattcgtatgggatttcctcagcacaccattgcttctttatctgaccaggatgcaaaaccctctttcagcatggcgcatttggatggcaatactgagccagggcttacattaggaggctatttctgcccacagtgtcgggcaaagtactgtgagctacctgttgaatgtaaaatctgtggtcttactttggtgtctgctccccacttggcacggtcttaccatcatttgtttcctttggatgcttttcaagaaattcccctagaagaatataatggagaaagattttgttatggatgtcagggggaattgaaagaccaacatgtttatgtttgtgctgtgtgccaaaatgttttctgtgtggactgtgatgtttttgttcatgattctctacactgttgccctggctgtattcataagattccagctccttcaggtgtttgattccagcatgtagtatacattgtatgtgttaaaaagaaatttgcaactgtgaataaaaggacttctttagaagaagcttcatttaaaacatgaaaggataatctgacttaagaaactttttgctaagaaaaggtaatattttattaaattttaaatttgtgttgtcacagaaatacctgaaattcagtagtacttcattcaattaattttgttttctattattttgagttatactgttttcaaagtcattatgcagtatgtataaacttataagaattaaattgatgtgataattttatgtttttataattaaatatagaatctttatgatttatgttaattcattaatttagtgtaagaagaaagttaagtctgaatgtaaattcagtgtaagatgaaaatttatcaatacttatgaaattaggctgggcgctgtggctcacacctgtaatcccaacactttgggaggctgaggtgggcagatcacttgaggtcaggagttcgagaccagcctggccaacatggtgaaaccccgtcactactaaaaatacaaaaaataattagccgggcatggtggttcacgcctggagtcccagctacttgggaggctgaggcaggagaatcgcttgaacccaggaggcggaggttgcagtgagccgagattgtgccactgcactccaccctagagtaagactccct

SEQ ID NO: 4564 - protein, 395 aa, Homo sapiens; identical to SEQ ID NO: 4522

SEQ ID NO: 4565 - DNA, 2181 bp, Homo sapiens
cggtgagtccgcgtgtggaagtctgtgaggcgcagaggtggggcaggccgtctgactagctaggcggctgggagcgttttcgtggcggggaacggaggttgaattgccctgcctgggctcatagggaaggaggatgtgaaggagcttgtgaaggcagaggaaggctggagtgcagtggcacaaccttggctcgctccagtgtctacctcccaggttcaagtgattctcctgcctcagcctcccgagtagctgggattacagattattgaataataaaatacagttttgaaaaaaatggatgaagaacctgaaagaactaagcgatgggaaggaggctatgaaagaacatgggagattcttaaagaagatgaatctggatcacttaaagctacaatagaagacattctattcaaggcaaagagaaaaagagtatttgagcaccatggacaagttcgacttggaatgatgcgccacctttatgtggtagtagatggatcaagaacaatggaagaccaagatttaaagcctaatagactgacgtgtactttaaagttgttggaatactttgtagaggaatattttgatcaaaatcctattagtcagattggaataattgtaactaagagtaaaagagctgaaaaattgactgaactttcaggaaacccaagaaaacatataacgtctttgaaggaagctgtggatatgacctgccatggagagccatctctttataattccctaagcatggctatgcagactctaaaacacatgcctggacatacaagtcgagaagtactaatcatctttagcagccttacaacttgcgatccatctaatatttatgatctaatcaagaccctaaaggcagctaaaattagagtatctgttattggattgtctgcagaagttcgcgtttgcactgtacttgctcgtgaaactggtggcacgtaccatgttattttagatgaaagccattacaaagagttgctcacacatcatcttagtcctcctcctgctagctcaagttctgaatgctcacttattcgtatgggatttcctcagcacaccattgcttctttatctgaccaggatgcaaaaccctctttcagcatggcgcatttggatggcaatactgagccagggcttacattaggaggctatttctgcccacagtgtcgggcaaagtactgtgagctacctgttgaatgtaaaatctgtggtcttactttggtgtctgctccccacttggcacggtcttaccatcatttgtttcctttggatgcttttcaagaaattcccctagaagaatataatggagaaagattttgttatggatgtcagggggaattgaaagaccaacatgtttatgtttgtgctgtgtgccaaaatgttttctgtgtggactgtgatgtttttgttcatgattctctacactgttgccctggctgtattcataagattccagctccttcaggtgtttgattccagcatgtagtatacattgtatgtgttaaaaagaaatttgcaactgtgaataaaaggacttctttagaagaagcttcatttaaaacatgaaaggataatctgacttaagaaactttttgctaagaaaaggtaatattttattaaattttaaatttgtgttgtcacagaaatacctgaaattcagtagtacttcattcaattaattttgttttctattattttgagttatactgttttcaaagtcattatgcagtatgtataaacttataagaattaaattgatgtgataattttatgtttttataattaaatatagaatctttatgatttatgttaattcattaatttagtgtaagaagaaagttaagtctgaatgtaaattcagtgtaagatgaaaatttatcaatacttatgaaattaggctgggcgctgtggctcacacctgtaatcccaacactttgggaggctgaggtgggcagatcacttgaggtcaggagttcgagaccagcctggccaacatggtgaaaccccgtcactactaaaaatacaaaaaataattagccgggcatggtggttcacgcctggagtcccagctacttgggaggctgaggcaggagaatcgcttgaacccaggaggcggaggttgcagtgagccgagattgtgccactgcactccaccctagagtaagactccct

SEQ ID NO: 4566 - protein, 395 aa, Homo sapiens; identical to SEQ ID NO: 4522

SEQ ID NO: 4567 - DNA, 1793 bp, Homo sapiens
gcaaagccagctgggctcctgagtccggtgggtacttggagaacttactacgtctagctggaggattgtaaatgcaccaatcagcatgctgtgtctagctcaagattttctccatccccttattttgggccagtggctgtcattacatatgagatgagtctcttgaagactacagatgaactcaagctccatgaggagatgtttcattgtcgagagcagtcatgatggcctgcactccacacaatgcaacagagtgaaagagcaggttctgcttctttggtgtagtcctgaagcttcctaagaaacttcacatcaggtgatggataggagcaaccctgtaaaaccagccttagactatttttcaaacaggctggtgaattaccagatctccgtcaagtgcagtaaccagttcaagttggaagtgtgtcttttgaatgcagagaacaaagtcgtggacaaccaggctgggacccagggccagctgaaggtgctgggtgccaacctctggtggccgtacctgatgcacgaacaccccgcctacctgtactcctgggaggatggtgattgctcacaccaaagccttggacccctcccagcctgtgacctttgggaccaactccacctacgcagcagacaagggggctctgtatgtggatgtgatccgtgtgaacagctactactcttggtatcgcaactacgggcacctggagttgattcggctgcagctggccgcccagtttgagaattggtgtgagacatcacaatcccattattcagagcgcgtatggagtggaaacgcttgtagggtttcaccagggctggtgaattaccagatctccgtcaagtgcagtaaccagttcaagttggaagtatgtcttttgaatgcagaaaacaaagtcgtggacaaccaggctgggacccagggccagctgaaggtgctggtgccaacctctggtggccgtacctgatgcacgaacaccccgcctacctgtactcgtgggaggatggtgattgctcacaccaaagccttggacccctcccagcctgtgacctttgggaccaactccacctacgcagcagacaagggggctctgtatgtggatgtgatccgtgtgaacagctactactcttggtatcgcaactacgggcacctggagttgattcggctgcaggccctgcagctggccgcccagtttgtgaattggtgtaagacatcacaatcccattattcagagcgcgtatggagtggaaacgcttgtagggtttcaccagtctttcccagggaactccgatgaagtgttccaacaaaatgagcgagtgaaccaagaagaggatgacattagatccaggagatacaacagaggagataatctccaggatgcctgtgaagaaagatccctggatcccaggatgattataggacaagttgttcataatccagcaggccagaagacttccagggaaactcatttcaagatgaaaatggaccagccgcagtggctcacgcctgtaataccagcactttgggaggctgaggcgggcggatcacttgaggtcaagagtttgaaactagcctggccaacgtggcaaaactccatctctattaaagatacaaaaattagccaggcatagtggtgcatgcctgtagtcccagctacttgggatgctgaggcaggaagaattgcttgaacctgggaggcagagtctgcggtgaccgagatcatgccactgcactccagcctgggtgacagagccagactccgtctctactaaaaaaaaaaaaaaaaaaaaaa

SEQ ID NO: 4568 - protein, 140 aa, Homo sapiens
MDRSNPVKPALDYFSNRLVNYQISVKCSNQFKLEVCLLNAENKVVDNQAGTQGQLKVLGANLWWPYLMHEHPAYLYSWEDGDCSHQSLGPLPACDLWDQLHLRSRQGGSVCGCDPCEQLLLLVSQLRAPGVDSAAAGRPV

SEQ ID NO: 4569 - DNA, 1843 bp, Homo sapiens
cagcattctcctctattagactagaactgtggataaacctcagatgtgaatttcttcggagtaagaaatcctcagaggaaattacccagtatattcaaagctacaagggatttgttgacataacgggagaacattttgtgaattcctgggtccagagagaattacctatggcatcagcttattgcaatgacagcatctttgcttacgaagaactacggctggactcttttaaggactggccccgggaatcagctgtgggagttgcagcactggccaaagcaggtcttttctacacaggtataaaggacatcgtccagtgcttttcctgtggagggtgtttagagaaatggcaggaaggtgatgacccattagacgatcacaccagatgttttcccaaatggagtctcactgtgttgcccaggctggagtgcagtggcatgatctcggctcactgtagactctgcctcccaggttcaagcaattcttcctgcctcagcatcccaagtagctgggactacaggcatgcaccactatgcttggctaatttttgtatttttaatagagatggagttttgccacgttggccaggctagtttcaaactcctgacctcaagtgatccgcctgcctcagcctcccaaagtgctggtattacaggcgtgagccactgcggctggtccattttcatcttggaggagtcatccatcattttcacctccttgaatgagtttccctggaagtcttctggcctgctggattatgaacaacttgtcctataatcatcctgggatccagggatctttcttcacaggcatcctggagattatctcctctgttgtatctcctggatctaatgtcatcctcttcttggttcactcgctcattttgttggaacacttcatcggagttccctgggaaagactgcataagaaatacacacttttagttgcatataatgcatatacagacatatagatctatctagatatatgtttttcctgtattctcacacttatttgatagtttagctaggtgtagaattataggttggaagtcattttaattctaaattgtagaggcactgctacatttctactggttcctaatgtgctgtcgagaagttccatgcctttctgcttgtcaatccttttactgcaaacaaaatttttttttttcctgtgctggaagctttcagaaaaatatctgttctaaaattttacgaagaaatatttcttttctatgaatctttaaacttaattttttttacccatcaaactctttagaaatgtttaattgcaagaagaaatttgtgttttcactatgtaattagtaagagtttttttttttagaaatgaatatgaacacatacagattttaaaatgaatgcttcctgctcatttgtatagtggtaaaaacaaaaataaaacaaaatgaatacttctatctaattttattgccttgaaggtattttgatagcagtagttacctcatttttctttcttatttgggcttagtgtataataaattattgagaacaatggggacattctacttaattcttggaaggataagctaggatgcagtctagtcttatttagaacttactctggaatcgatcaactcccttttatactattattattattattagttttagtgttttgttgttgttgtttttgagatggagtctcactctgtcacccaggctggagtgcagtggcgtgatctcggctcactgcaacctccgcctcccgggttcaagcgattctcctgcctcagcctcccaagtagctgggattacaggtacctccccaccatgcctggctaattttttgtacttttagt

SEQ ID NO: 4570 - protein, 141 aa, Homo sapiens
MASAYCNDSIFAYEELRLDSFKDWPRESAVGVAALAKAGLFYTGIKDIVQCFSCGGCLEKWQEGDDPLDDHTRCFPKWSLTVLPRLECSGMISAHCRLCLPGSSNSSCLSIPSSWDYRHAPLCLANFCIFNRDGVLPRWPG

SEQ ID NO: 4571 - DNA, 4787 bp, Homo sapiens
aatggccatcttctctcggtatcctcacatggtagggagaaaagcagctctagtgtctcttataaaggaagtaatgccaccataggggctctattctcatgacctcatctaaacctaattctctcctaaaggccacgcctcccagtatcctcaccttgggggttagggctttatcatatgaatttttttttttttttttttttttttgagacagagtctcgctctgtctgtcacccaggctggagtgcagtggcacaatctcggctctctacaagctccgcctcctgggttcacgccattctcctgcgtcagcctcctcagtagctgggactaaggcgcccgccactgcgcccggctaattttttgtattttcagtagagacggggttttaccatgttagccaggatgatctcgatctcctgacctcatgatccacccgcctcggcctcccaaagtgctgggattacaggcatgagccaccgcgccgggcctatcatatgaattttgagggaacacaaacatgcagtctgtagcagatggtaataggctgacatattacacttgttgatgtaaatctgataggtttctttctctccaaggacagctttttaaatatttaacagtatcaataatttttcaggttctgtgagaattttataatttataatttgcagacttaatgtataatctattttgtcctaacaattacaaatatattttttatttcagattgtatatattcctaccagatggagataattacagctttaaaaatttttattttttcattttatttcacacattgacattaaatttttatggacacataataactgtacatatatatggggtagaatgtgatgttttaatacatgtactcaatgtgtaatgatcaaatcagggtaatttgcataatgatttttctgtagggagaaaattcaaaatctactcttctggctattttcaaatatataatatgttattgttaactatactcatcctactatgcaataggacaccagaacttattcctgggttctacatccgttaaggcaaccaaggattggaaatattggaaaaaaaaattgcgtctgtactgaacatgtacagacttttttcttgtccttattccttacacaatatagtacaataactatttgcatgacatttacatcggatattatgagtgatctagagttgatatgaagtatatgggaggatgtgcaaaggtgatgtgcaaatactatgtcattttatatcagggacttgagtatcctttgttaccctcaggagatcctgaaaccagtcccccatggatactgagggctgactgtatagtcctatcctcacggaactttcattctaatgggggaagactgactataaacaaaatatatgtaataggtggtggtaagtaccgtggagaagtaacaaacggggcaaagtgagttatacagctccattcttagaaaccttggagtacttttcttagtttatacttgtggtggtttccttttgtctcctttattacatgggactctgacatgtgcccatagctagggtgacagtaggatctacccgatagtagggtggcagtaggatctacccaaaaagcgtcctgctgatacaggaccaaagcatcctgttgttctcgagcctataaaaagagctaatggtcttgcttctcttaactgtggcctcctacactgtgttttggatgattggtgatgtcttggatattctgtttctttggaactttgaatatacaacactttactagggaattagcaatggaagcagagcaaagatgtacagaggaaacaatgcgtaactctgatggaattgaagtcatgaggcagcagagagcttaaattacagctttaaaaatttttattttttagagggaatttacttgggagtaacagcagtaatagttaacggagccagaatgcttgagtcatataattgcaaagcagagttgggagcaacagatgctaaagagtagttgctgtagttcctctttgggtcgtaggagcagttgtcatattcctatatagctactgcatgaagaagagttcttagtgaggcctgggtgaacagctcttcttagtattctgtgtgaccccatttgaccttttaacaaatccctaagtaaataaatagcccctcaggtaaactaagtttttctctgctgtttttttgcttgagagagctataactgtaatagacttatatttctgaacatttcagtgcttgccaatatttggtaatatttatgtttcctatatttgtaatgaacattcttcttccggtacattttttgttaaattattgtttgatggataaaagttcaccctttattgtataaaattgactgagattaatttatacacattgacaatgggtaaatagaatttttcagattattaaaagctgaaggatgcccacgtaagcaaaaaaaaaaaagaaaaaaccaacaaaaataaacccaaacccctcaaacaatttcgaacacgaaacattcttctgatgccggcatccctgcttgcaggtgtgaagggggcaggaatcagcgaggtgtcctgggctgagtccccggagtgggaagaggtggcaggaaggggatctgaggaggagaacaggggtcctggtggtctgtgcttcttcccagacacgggagctgtagaggagacctctgcagcagatgctaggggggccagtaggcccaggcagtcttgggacttgggtctgtcctgctgtgcatccatagtgggtgctttagaaacgggaggcccacccgaagtccctgttgcaagtgaggacaaagtgtgggaaggccgtgagggtctgcagtccgggatggccttgtcctcaacgtgcagtgcactgttgatgcgctggaatgccgtctctttttccaggtgcaggtcttcagccgtgacccggtaccccagctctaagggaggtggcagcatcaaaggctcccctcgcctgcgtggcagcaggggaatcttgcgtctacggggcctagagtcctgggatctgggggagccacccgttggggcgattgtctgccctggtgctgtatctgcccccttttcacaccgtgtgtgacccgaagagacagcctgaggcctgtcctcactcactgtctttgagtaactgagggtcagctggcagcgggatgaggctggccccctcctctgctttagccccggcaagcctcccgtggagctgtaggagctggagatggcatttcgtttggtgctcgagctcgtccaggatgtctgggatgtgtggttatatctgatttctgagctctgggcgtggaggtctgtctgcagaggcccgggcctgggcacaaagggagaggggcctccattgtcccgcaggggccaaaatgcagaccgtgcatccccggtgacctcggggaccgttctctgatcatcaggattttcttggactctggggtccttgtcctgctcaggcatccctgccccgctctccttgagggccctcaacactatcttccctggacacaagtctggggacagccgggtgttgtggaccccaaaggggtgactacctgctcctgggccccacagagtccttgtgctcagtgtagtggctgagctgggggatgccctggaactcggagcacacagcactggcttactgtggtacctgtgcagtgaaattgaagacagaatcaccaggatggaacacaggtcttgcaggatcacggaaaaccttcttagagttgtcttgacaccactgatgtcgagtgtgcgggtgtttgtaggatggcctgccactcagtccaggggcaggagcaacggggagatcccacaagcaaagtgaactgggggatgggctgaaggggctccaggcaactgagccctactcgcaggtcctcggccttggcccaaacaggaatgaggggcacagagtgcccgggtaaccgctcctgggagcagtggggaactgtcggatacttgaactctcaagagctgggctctgagcgtcctcgtccagctgccaacttggccaaaggctaagccagcagattgttctgttgccgggcaacgcgacttctaaacctgagggagtgggcatgtgagcacataatggcaccagtgacagagcgaccataatggatgaataagcgcagccaggtaccggcgcaaggcacctgctggcaatggcaggaggcggacgtggggggtcgtgcagtaggtactggagggagagacgtgggcacaaaggtcgcgggaggaacaggtgcccacaatggctgcatatttgcccgtggatcactgaagattcctgctctcctgctgaggtggagactgcagtgagctgagatcgcaccattgcactccagcctgggcaacgagtgcaaaactcagtctccagataaaaaaaagaaaaagaaaaaaaagaggccgggtgtggtggcttatgcctatgatcctagcactttgggaggtcggggtggacggatcacgagatcaggagttggaggccagcctggccaacatagtgaaagcccgtctctagtaaaaatacaaaatttagtcagacatggtgggcaggagagagcatgtgcaggggaacatccatttataaaaccatcagacctcatgagacttattcactaccatgagaacagcatgggggaaactgcctccatgattcagttatctccacctggccccacccttgacacatgggaattgttacaattcaagatgagatttgggtgcggacagagccaaaccatataa

SEQ ID NO: 4572 - protein, 194 aa, Homo sapiens
MPASLLAGVKGAGISEVSWAESPEWEEVAGRGSEEENRGPGGLCFFPDTGAVEETSAADARGASRPRQSWDLGLSCCASIVGALETGGPPEVPVASEDKVWEGREGLQSGMALSSTCSALLMRWNAVSFSRCRSSAVTRYPSSKGGGSIKGSPRLRGSRGILRLRGLESWDLGEPPVGAIVCPGAVSAPFSHRV

SEQ ID NO: 4573 - DNA, 4871 bp, Homo sapiens
gccaccgcgccgggcctatcatatgaattttgagggaacacaaacatgcagtctgtagcagatggtaataggctgacatattacacttgttgatgtaaatctgataggtttctttctctccaaggacagctttttaaatatttaacagtatcaataatttttcaggttctgtgagaattttataatttataatttgcagacttaatgtataatctattttgtcctaacaattacaaatatattttttatttcagattgtatatattcctaccagatggagataattacagctttaaaaatttttattttttcattttatttcacacattgacattaaatttttatggacacataataactgtacatatatatggggtagaatgtgatgttttaatacatgtactcaatgtgtaatgatcaaatcagggtaatttgcataatgatttttctgtagggagaaaattcaaaatctactcttctggctattttcaaatatataatatgttattgttaactatactcatcctactatgcaataggacaccagaacttattcctgggttctacatccgttaaggcaaccaaggattggaaatattggaaaaaaaaattgcgtctgtactgaacatgtacagacttttttcttgtccttattccttacacaatatagtacaataactatttgcatgacatttacatcggatattatgagtgatctagagttgatatgaagtatatgggaggatgtgcaaaggtgatgtgcaaatactatgtcattttatatcagggacttgagtatcctttgttaccctcaggagatcctgaaaccagtcccccatggatactgagggctgactgtatagtcctatcctcacggaactttcattctaatgggggaagactgactataaacaaaatatatgtaataggtggtggtaagtaccgtggagaagtaacaaacggggcaaagtgagttatacagctccattcttagaaaccttggagtacttttcttagtttatacttgtggtggtttccttttgtctcctttattacatgggactctgacatgtgcccatagctagggtgacagtaggatctacccgatagtagggtggcagtaggatctacccaaaaagcgtcctgctgatacaggaccaaagcatcctgttgttctcgagcctataaaaagagctaatggtcttgcttctcttaactgtggcctcctacactgtgttttggatgattggtgatgtcttggatattctgtttctttggaactttgaatatacaacactttactagggaattagcaatggaagcagagcaaagatgtacagaggaaacaatgcgtaactctgatggaattgaagtcatgaggcagcagagagcttaaattacagctttaaaaatttttattttttagagggaatttacttgggagtaacagcagtaatagttaacggagccagaatgcttgagtcatataattgcaaagcagagttgggagcaacagatgctaaagagtagttgctgtagttcctctttgggtcgtaggagcagttgtcatattcctatatagctactgcatgaagaagagttcttagtgaggcctgggtgaacagctcttcttagtattctgtgtgaccccatttgaccttttaacaaatccctaagtaaataaatagcccctcaggtaaactaagtttttctctgctgtttttttgcttgagagagctataactgtaatagacttatatttctgaacatttcagtgcttgccaatatttggtaatatttatgtttcctatatttgtaatgaacattcttcttccggtacattttttgttaaattattgtttgatggataaaagttcaccctttattgtataaaattgactgagattaatttatacacattgacaatgggtaaatagaatttttcagattattaaaagctgaaggatgcccacgtaagcaaaaaaaaaaaagaaaaaaccaacaaaaataaacccaaacccctcaaacaatttcgaacacgaaacattcttctgatgccggcatccctgcttgcaggtgtgaagggggcaggaatcagcgaggtgtcctgggctgagtccccggagtgggaagaggtggcaggaaggggatctgaggaggagaacaggggtcctggtggtctgtgcttcttcccagacacgggagctgtagaggagacctctgcagcagatgctaggggggccagtaggcccaggcagtcttgggacttgggtctgtcctgctgtgcatccatagtgggtgctttagaaacgggaggcccacccgaagtccctgttgcaagtgaggacaaagtgtgggaaggccgtgagggtctgcagtccgggatggccttgtcctcaacgtgcagtgcactgttgatgcgctggaatgccgtctctttttccaggtgcaggtcttcagccgtgacccggtaccccagctctaagggaggtggcagcatcaaaggctcccctcgcctgcgtggcagcaggggaatcttgcgtctacggggcctagagtcctgggatctgggggagccacccgttggggcgattgtctgccctggtgctgtatctgcccccttttcacaccgtgtgtgacccgaagagacagcctgaggcctgtcctcactcactgtctttgagtaactgagggtcagctggcagcgggatgaggctggccccctcctctgctttagccccggcaagcctcccgtggagctgtaggagctggagatggcatttcgtttggtgctcgagctcgtccaggatgtctgggatgtgtggttatatctgatttctgagctctgggcgtggaggtctgtctgcagaggcccgggcctgggcacaaagggagaggggcctccattgtcccgcaggggccaaaatgcagaccgtgcatccccggtgacctcggggaccgttctctgatcatcaggattttcttggactctggggtccttgtcctgctcaggcatccctgccccgctctccttgagggccctcaacactatcttccctggacacaagtctggggacagccgggtgttgtggaccccaaaggggtgactacctgctcctgggccccacagagtccttgtgctcagtgtagtggctgagctgggggatgccctggaactcggagcacacagcactggcttactgtggtacctgtgcagtgaaattgaagacagaatcaccaggatggaacacaggtcttgcaggatcacggaaaaccttcttagagttgtcttgacaccactgatgtcgagtgtgcgggtgtttgtaggatggcctgccactcagtccaggggcaggagcaacggggagatcccacaagcaaagtgaactgggggatgggctgaaggggctccaggcaactgagccctactcgcaggtcctcggccttggcccaaacaggaatgaggggcacagagtgcccgggtaaccgctcctgggagcagtggggaactgtcggatacttgaactctcaagagctgggctctgagcgtcctcgtccagctgccaacttggccaaaggctaagccagcagattgttctgttgccgggcaacgcgacttctaaacctgagggagtgggcatgtgagcacataatggcaccagtgacagagcgaccataatggatgaataagcgcagccagggctggtgaattaccagatctccgtcaagtgcagtaaccagttcaagttggaagtgtgtcttttgaatgcagaaaacaaagtcgtggacaaccaggctgggacccagggccagctgaaggtgctgggtgccaacctctggtggccgtacctgatgcacgaacaccccgcctacctgtactcgtgggaggatggtgattgctcacaccaaagccttggacccctcccagcctgtgacctttgtgaccaactccacctacgcagcagacaagggggctctgtatgtggatgtgatccgtgtgaacagctactactcttggtatcgcaactacgggcacctggagttgattcagctgcagctggccgcccagtttgagaattggtgtaagacatcacaatcccattattcagagcgcgtatggagtggaaacgcttgtagggcttcaccaggtaagcggtgttgaactttctgcttgtgtattctctctgggcagagatgccacttgcctcccccaccatgccatctctgaagaatattacagaccattttggagcatggtgaataagaaattttcaccttaggagttcagttgaatagtcatttttatatttgtgactgcaagtcactcttaggggctgtacttccttagtactggtagcattattatccaatggacttttatagctttcattaggttttcttttgtttttgttctttaaagaacgttttacttatcttagtatttcatttttcatctatattatgaggcagtaagagtcttctgtttttccaaagttgagactgctttatatttatttcgtattgtctacagctgtagtgttcaatacattagccactagccacatgtggttatttaaataagataaaataaaaattggccgggcgtggtggctcacgccggtaatcccagcactttgggaggccgaggcgggcagatcattaggtcaggagatcgagaccatccttactaagacggtgaacccccatctctattaaaaatacaaaaaattagccgggcgtggtggcgggcgcctgcagtcccagctactcaggaggctgaggcaggagaatggcgtgaacctgggaggcagagtttgcagtgagccgagatggcgccactgcactccagcctgggggacagagcgagactc

SEQ ID NO: 4574 - protein, 194 aa, Homo sapiens; identical to SEQ ID NO: 4572

SEQ ID NO: 4575 - DNA, 3489 bp, Homo sapiens
gagtatcctttgttaccctcaggagatcctgaaaccagtcccccatggatactgagggctgactgtatagtcctatcctcacggaactttcattctaatgggggaagactgactataaacaaaatatatgtaataggtggtggtaagtaccgtggagaagtaacaaacggggcaaagtgagttatacagctccattcttagaaaccttggagtacttttcttagtttatacttgtggtggtttccttttgtctcctttattacatgggactctgacatgtgcccatagctagggtgacagtaggatctacccgatacgtcctgctgatacaggaccaaagcatcctgttgttctcgagcctataaaaagagctaatggtcttgcttctcttaactgtggcctcctacactgtgttttggatgattggtgatgtcttggatattctgtttctttggaactttgaatatacaacactttactagggaattagcaatggaagcagagcaaagatgtacagaggaaacaatgcgtaactctgatggaattgaagtcatgaggcagcagagagcttaaattacagctttaaaaatttttattttttagagggaatttacttgggagtaacagcagtaatagttaacggagccagaatgcttgagtcatataattgcaaagcagagttgggagcaacagatgctaaagagtagttgctgtagttcctctttgggtcgtaggagcagttgtcatattcctatatagctactgcatgaagaagagttcttagtgaggcctgggtgaacagctcttcttagtattctgtgtgaccccatttgaccttttaacaaatccctaagtaaataaatagcccctcaggtaaactaagtttttctctgctgtttttttgcttgagagagctataactgtaatagacttatatttctgaacatttcagtgcttgccaatatttggtaatatttatgtttcctatatttgtaatgaacattcttcttccggtacattttttgttaaattattgtttgatggataaaagttcaccctttattgtataaaattgactgagattaatttatacacattgacaatgggtaaatagaatttttcagattattaaaagctgaaggatgcccacgtaagcaaaaaaaaaaaagaaaaaaccaacaaaaataaacccaaacccctcaaacaatttcgaacacgaaacattcttctgatgccggcatccctgcttgcaggtgtgaagggggcaggaatcagcgaggtgtcctgggctgagtccccggagtgggaagaggtggcaggaaggggatctgaggaggagaacaggggtcctggtggtctgtgcttcttcccagacacgggagctgtagaggagacctctgcagcagatgctaggggggccagtaggcccaggcagtcttgggacttgggtctgtcctgctgtgcatccatagtgggtgctttagaaacgggaggcccacccgaagtccctgttgcaagtgaggacaaagtgtgggaaggccgtgagggtctgcagtccgggatggccttgtcctcaacgtgcagtgcactgttgatgcgctggaatgccgtctctttttccaggtgcaggtcttcagccgtgacccggtaccccagctctaagggaggtggcagcatcaaaggctcccctcgcctgcgtggcagcaggggaatcttgcgtctacggggcctagagtcctgggatctgggggagccacccgttggggcgattgtctgccctggtgctgtatctgcccccttttcacaccgtgtgtgacccgaagagacagcctgaggcctgtcctcactcactgtctttgagtaactgagggtcagctggcagcgggatgaggctggccccctcctctgctttagccccggcaagcctcccgtggagctgtaggagctggagatggcatttcgtttggtgctcgagctcgtccaggatgtctgggatgtgtggttatatctgatttctgagctctgggcgtggaggtctgtctgcagaggcccgggcctgggcacaaagggagaggggcctccattgtcccgcaggggccaaaatgcagaccgtgcatccccggtgacctcggggaccgttctctgatcatcaggattttcttggactctggggtccttgtcctgctcaggcatccctgccccgctctccttgagggccctcaacactatcttccctggacacaagtctggggacagccgggtgttgtggaccccaaaggggtgactacctgctcctgggccccacagagtccttgtgctcagtgtagtggctgagctgggggatgccctggaactcggagcacacagcactggcttactgtggtacctgtgcagtgaaattgaagacagaatcaccaggatggaacacaggtcttgcaggatcacggaaaaccttcttagagttgtcttgacaccactgatgtcgagtgtgcgggtgtttgtaggatggcctgccactcagtccaggggcaggagcaacggggagatcccacaagcaaagtgaactgggggatgggctgaaggggctccaggcaactgagccctactcgcaggtcctcggccttggcccaaacaggaatgaggggcacagagtgcccgggtaaccgctcctgggagcagtggggaactgtcggatacttgaactctcaagagctgggctctgagcgtcctcgtccagctgccaacttggccaaaggctaagccagcagattgttctgttgccgggcaacgcgacttctaaacctgagggagtgggcatgtgagcacataatggcaccagtgacagagcgaccataatggatgaataagcgcagccaggtaccggcgcaaggcacctgctggcaatggcaggaggcggacgtggggggtcgtgcagtaggtactggagggagagacgtgggcacaaaggtcgcgggaggaacaggtgcccacaatggctgcatatttgcccgtggatcactgaagattcctgctctcctgctgaggtggagactgcagtgagctgagatcgcaccattgcactccagcctgggcaacgagtgcaaaactcagtctccagataaaaaaaagaaaaagaaaaaaaagaggccgggtgtggtggcttatgcctatgatcctagcactttgggaggtcggggtggacggatcacgagatcaggagttggaggccagcctggccaacatagtgaaagcccgtctctagtaaaaatacaaaatttagtcagacatggtgggcaggagagagcatgtgcaggggaacatccatttataaaaccatcagacctcatgagacttattcactaccatgagaacagcatgggggaaactgcctccatgattcagttatctccacctggccccacccttgacacatgggaattgttacaattcaagatgagatttgggtgcggacagagccaaaccatataa

SEQ ID NO: 4576 - protein, 194 aa, Homo sapiens; identical to SEQ ID NO: 4572

SEQ ID NO: 4577 - DNA, 1378 bp, Homo sapiens
tgctacgcggcacccggtcccgtcaaccgcccaacggctgaggagtgcggcagcgcgccagagactggcgggcagctccgcccgcggccgggatgcactaggcaaagccagctgggctcctgagtccggtgggtacttggagaacttactacgtctagctggaggattgtaaatgcaccaatcagcatgctgtgtctagctcaagaactcaagctccatgaggagatgtttcattgtcgagagcagtcatgatggcctgcactccacacaatgcaacagagtgaaagagcaggttctgcttctttggtgtagtcctgaagcttcctaagaaacttcacatcaggtgatggataggagcaaccctgtaaaaccagccttagactatttttcaaacagatggtgattgctcacaccaaagccttggacccctcccagcctgtgacctttgtgaccaactccacctacgcagcagacaagggggctctgtatgtggatgtgatccgtgtgaacagctactactcttggtatcgcaactacgggcacctggagttgattcagctgcagctggccgcccagtttgagaattggtgtaagacatcacaatcccattattcagagcgcgtatggagtggaaacgcttgtagggcttcaccaggtaagcggtgttgaactttctgcttgtgtattctctctgggcagagatgccacttgcctcccccaccatgccatctctgaagaatattacagaccattttggagcatggtgaataagaaattttcaccttaggagttcagttgaatagtcatttttatatttgtgactgcaagtcactcttaggggctgtacttccttagtactggtagcattattatccaatggacttttatagctttcattaggttttcttttgtttttgttctttaaagaacgttttacttatcttagtatttcatttttcatctatattatgaggcagtaagagtcttctgtttttccaaagttgagactgctttatatttatttcgtattgtctacagctgtagtgttcaatacattagccactagccacatgtggttatttaaataagataaaataaaaattggccgggcgtggtggctcacgccggtaatcccagcactttgggaggccgaggcgggcagatcattaggtcaggagatcgagaccatccttactaagacggtgaacccccatctctattaaaaatacaaaaaattagccgggcgtggtggcgggcgcctgcagtcccagctactcaggaggctgaggcaggagaatggcgtgaacctgggaggcagagtttgcagtgagccgagatggcgccactgcactccagcctgggggacagagcgagactc

SEQ ID NO: 4578 - protein, 21 aa, Homo sapiens
MLCLAQELKLHEEMFHCREQS

SEQ ID NO: 4579 - DNA, 301 bp, Homo sapiens
aaagctccattccgacttagacaagggagagggcactgcgaaatacaccctctcaggagatggcgctggcaccgtttttaccattgatgaaaccacaggggacattcatgcaataaggagcctagatagagaagaaaaacctttctacactcttcgtgctcaggctgtggacatagaaaccagaaagcccctggagcctgaatcagaattcatcatcaaagtgcaggatattaatgataatgagccaaagttttgggatggaccttatgttgctactgtcccagaaatgtctcctgtgggt

SEQ ID NO: 4580 - DNA, 5196 bp, Homo sapiens
atggtaatattgtgggaactgagtgaaaattcagaatgtgaatttcttcggagtaagaaatcctcagaggaaattacccagtatattcaaagctacaagggatttgttgacataacgggagaacattttgtgaattcctgggtccagagagaattacctatggcatcagcttattgcaatgacagcatctttgcttacgaagaactacggctggactcttttaaggactggccccgggaatcagctgtgggagttgcagcactggccaaagcaggtcttttctacacaggtataaaggacatcgtccagtgcttttcctgtggagggtgtttagagaaatggcaggaaggtgatgacccattagacgatcacaccagatgttttcccaattgtccatttctccaaaatatgaagtcctctgcggaagtgactccagaccttcagagccgtggtgaactttgtgaattactggaaaccacaagtgaaagcaatcttgaagattcaatagcagttggtcctatagtgccagaaatggcacagggtgaagcccagtggtttcaagaggcaaagaatctgaatgagcagctgagagcagcttataccagcgccagtttccgccacatgtctttgcttgatatctcttccgatctggccacggaccacttgctgggctgtgatctgtctattgcttcaaaacacatcagcaaacctgtgcaagaacctctggtgctgcctgaggtctttggcaacttgaactctgtcatgtgtgtggagggtgaagctggaagtggaaagacggtcctcctgaagaaaatagcttttctgtgggcatctggatgctgtcccctgttaaacaggttccagctggttttctacctctcccttagttccaccagaccagacgaggggctggccagtatcatctgtgaccagctcctagagaaagaaggatctgttactgaaatgtgcatgaggaacattatccagcagttaaagaatcaggtcttattccttttagatgactacaaagaaatatgttcaatccctcaagtcataggaaaactgattcaaaaaaaccacttatcccggacctgcctattgattgctgtccgtacaaacagggccagggacatccgccgatacctagagaccattctagagatcaaagcatttcccttttataatactgtctgtatattacggaagctcttttcacataatatgactcgtctgcgaaagtttatggtttactttggaaagaaccaaagtttgcagaagatacagaaaactcctctctttgtggcggcgatctgtgctcattggtttcagtatccttttgacccatcctttgatgatgtggctgttttcaagtcctatatggaacgcctttccttaaggaacaaagcgacagctgaaattctcaaagcaactgtgtcctcctgtggtgagctggccttgaaagggtttttttcatgttgctttgagtttaatgatgatgatctcgcagaagcaggggttgatgaagatgaagatctaaccatgtgcttgatgagcaaatttacagcccagagactaagaccattctaccggtttttaagtcctgccttccaagaatttcttgcggggatgaggctgattgaactcctggattcagataggcaggaacatcaagatttgggactgtatcatttgaaacaaatcaactcacccatgatgactgtaagcgcctacaacaattttttgaactatgtctccagcctcccttcaacaaaagcagggcccaaaattgtgtctcatttgctccatttagtggataacaaagagtcattggagaatatatctgaaaatgatgactacttaaagcaccagccagaaatttcactgcagatgcagttacttaggggattgtggcaaatttgtccacaagcttacttttcaatggtttcagaacatttactggttcttgccctgaaaactgcttatcaaagcaacactgttgctgcgtgttctccatttgttttgcaattccttcaagggagaacactgactttgggtgcgcttaacttacagtactttttcgaccacccagaaagcttgtcattgttgaggagcatccacttcccaatacgaggaaataagacatcacccagagcacatttttcagttctggaaacatgttttgacaaatcacaggtgccaactatagatcaggactatgcttctgcctttgaacctatgaatgaatgggagcgaaatttagctgaaaaagaggataatgtaaagagctatatggatatgcagcgcagggcatcaccagaccttagtactggctattggaaactttctccaaagcagtacaagattccctgtctagaagtcgatgtgaatgatattgatgttgtaggccaggatatgcttgagattctaatgacagttttctcagcttcacagcgcatcgaactccatttaaaccacagcagaggctttatagaaagcatccgcccagctcttgagctgtctaaggcctctgtcaccaagtgctccataagcaagttggaactcagcgcagccgaacaggaactgcttctcaccctgccttccctggaatctcttgaagtctcagggacaatccagtcacaagaccaaatctttcctaatctggataagttcctgtgcctgaaagaactgtctgtggatctggagggcaatataaatgttttttcagtcattcctgaagaatttccaaacttccaccatatggagaaattattgatccaaatttcagctgagtatgatccttccaaactagtaaaattaattcaaaattctccaaaccttcatgttttccatctgaagtgtaacttcttttcggattttgggtctctcatgactatgcttgtttcctgtaagaaactcacagaaattaagttttcggattcattttttcaagccgtcccatttgttgccagtttgccaaattttatttctctgaagatattaaatcttgaaggccagcaatttcctgatgaggaaacatcagaaaaatttgcctacattttaggttctcttagtaacctggaagaattgatccttcctactggggatggaatttatcgagtggccaaactgatcatccagcagtgtcagcagcttcattgtctccgagtcctctcatttttcaagactttgaatgatgacagcgtggtggaaattgccaaagtagcaatcagtggaggtttccagaaacttgagaacctaaagctttcaatcaatcacaagattacagaggaaggatacagaaatttctttcaagcactggacaacatgccaaacttgcaggagttggacatctccaggcatttcacagagtgtatcaaagctcaggccacaacagtcaagtctttgagtcaatgtgtgttacgactaccaaggctcattagactgaacatgttaagttggctcttggatgcagatgatattgcattgcttaatgtcatgaaagaaagacatcctcaatctaagtacttaactattctccagaaatggatactgccgttctctccaatcattcagaaataaaagattcagctaaaaactgctgaatcaataatttgtcttggggcatattgaggatgtaaaaaaagttgttgattaatgctaaaaaccaaattatccaaaattattttattaaatattgcatacaaaagaaaatgtgtaaggcttgctaaaaaacaaaacaaaacaaaacacagtcctgcatactcaccaccaagctcaagaaataaatcatcaccaatacctttgaggtccctgagtaatccaccccagctaaaggcaaacccttcaatcaggtttatacagcaaaccctccattgtccatggtcaacagggaaggggttggggacaggtctgccaatctatctaaaagccacaatatggaagaagtattcaatttatataataaatggctaacttaacggttgaatcactttcatacatggatgaaacgggtttaacacaggatccacatgaatcttctgtgggccaagagatgttccttaatccttgtagaacctgttttctatattgaactagctttggtacagtagagttaacttactttccatttatccactgccaatataaagaggaaacaggggttagggaaaaatgacttcattccagaggcttctcagagttcaacatatgctataatttagaattttcttatgaatccactctacttgggtagaaaatattttatctctagtgattgcatattatttccatatcatagtatttcatagtattatatttgatatgagtgtctatatcaatgtcagtgtccagaatttcgttcctaccagttaagtagttttctgaacggccagaagaccattcgaaattcatgatactactataagttggtaaacaaccatacttttatcctcatttttattctcactaagaaaaaagtcaactcccctccccttgcccaagtatgaaatatagggacagtatgtatggtgtggtctcatttgtttagaaaaccacttatgactgggtgcggtggctcacacctgtaatcccagcactttgggaggctgaggcgggcgaatcatttgaggtgaggaattcgagaccagcctggccagcatggtgaaaccccatctctactaaaaatacaaaaattagccaggtgtggtggcacatgcctgtagtcccagccactagggcggctgagacgcaagacttgcttgaacccgggaggcagaggttgcagtgagccaagatggcgccactgcattccagcctgggcaacagagcaagaccctgtctgtctcaaaacaaaaaacaaaaccacttatattgctagctacattaagaatttctgaatatgttactgagcttgcttgtggtaaccatttataatatcagaaagtatatgtacaccaaaacatgttgaacatccatgttgtacaactgaaatataaataattttgtcaattatacctaaataaaactggaaaaaaatttctggaagtttatatctaaaaatgttaatagtgcgtacctctaggaagtgggcctggaagccattcttacttttcagtctctcccattctgtactgttttttgttttactttcgtgcctgcattatttttctatttaaaacaaaaataaatctagtttag

SEQ ID NO: 4581 - protein, 1192 aa, Homo sapiens
MVILWELSENSECEFLRSKKSSEEITQYIQSYKGFVDITGEHFVNSWVQRELPMASAYCNDSIFAYEELRLDSFKDWPRESAVGVAALAKAGLFYTGIKDIVQCFSCGGCLEKWQEGDDPLDDHTRCFPNCPFLQNMKSSAEVTPDLQSRGELCELLETTSESNLEDSIAVGPIVPEMAQGEAQWFQEAKNLNEQLRAAYTSASFRHMSLLDISSDLATDHLLGCDLSIASKHISKPVQEPLVLPEVFGNLNSVMCVEGEAGSGKTVLLKKIAFLWASGCCPLLNRFQLVFYLSLSSTRPDEGLASIICDQLLEKEGSVTEMCMRNIIQQLKNQVLFLLDDYKEICSIPQVIGKLIQKNHLSRTCLLIAVRTNRARDIRRYLETILEIKAFPFYNTVCILRKLFSHNMTRLRKFMVYFGKNQSLQKIQKTPLFVAAICAHWFQYPFDPSFDDVAVFKSYMERLSLRNKATAEILKATVSSCGELALKGFFSCCFEFNDDDLAEAGVDEDEDLTMCLMSKFTAQRLRPFYRFLSPAFQEFLAGMRLIELLDSDRQEHQDLGLYHLKQINSPMMTVSAYNNFLNYVSSLPSTKAGPKIVSHLLHLVDNKESLENISENDDYLKHQPEISLQMQLLRGLWQICPQAYFSMVSEHLLVLALKTAYQSNTVAACSPFVLQFLQGRTLTLGALNLQYFFDHPESLSLLRSIHFPIRGNKTSPRAHFSVLETCFDKSQVPTIDQDYASAFEPMNEWERNLAEKEDNVKSYMDMQRRASPDLSTGYWKLSPKQYKIPCLEVDVNDIDVVGQDMLEILMTVFSASQRIELHLNHSRGFIESIRPALELSKASVTKCSISKLELSAAEQELLLTLPSLESLEVSGTIQSQDQIFPNLDKFLCLKELSVDLEGNINVFSVIPEEFPNFHHMEKLLIQISAEYDPSKLVKLIQNSPNLHVFHLKCNFFSDFGSLMTMLVSCKKLTEIKFSDSFFQAVPFVASLPNFISLKILNLEGQQFPDEETSEKFAYILGSLSNLEELILPTGDGIYRVAKLIIQQCQQLHCLRVLSFFKTLNDDSVVEIAKVAISGGFQKLENLKLSINHKITEEGYRNFFQALDNMPNLQELDISRHFTECIKAQATTVKSLSQCVLRLPRLIRLNMLSWLLDADDIALLNVMKERHPQSKYLTILQKWILPFSPIIQK

SEQ ID NO: 4582 - DNA, 4540 bp, Homo sapiens
atggttgaaatttataatttgaaattcctccattccgacttagacaagggagagggcactgcgaaatacaccctctcaggagatggcgctggcaccgtttttaccattgatgaaaccacaggggacattcatgcaataaggagcctagatagagaagaaaaacctttctacactcttcgtgctcaggctgtggacatagaaaccagaaagcccctggagcctgaatcagaattcatcatcaaagtgcaggatattaatgataatgagccaaagttttgggatggaccttatgttgctactgtcccagaaatgtctcctgtgggtgagtaggcaaatcaaaattctgtgagatacaatgagacctcttcaacattgactttttgcaggttgatgtaaacatcttatctatcatctaaaagaattatttttcaattctagaaaatacagttcttttcatttatttttgtaacttttttgtttttctttctgcttcattatgaagataactacaggaatatataacattagttcctgttttccaccctgtgaatttacctgaattcatagaatccttgcgtgctttaagcaaaaaatgtattttgtattgaaattgattcttatctcaattccagacacctatacagtgctggagacacctaccctacaccacgaaatgccagacagtaattcctagatcaaagtaaatgatctaaagcatgcatcacatctgatctggaagtggtccagaaacaggtgtgttgcatcttctgtagctgtaaatagagattctggaagggtgatactgtttccttttcagggtaaataacccatacttgttatgccatcaagccaagcagcaaatgaataatgtcatgaaaatattattagaacaaattaacaaattacaattacaattatcaaattaacaattagaatatagtagcaccatcattctaaaaatttaaatttgatataaatatacatttccatatcagcctaaatttacaaagtcctataatatgtaggatataaggtcaataagttaagaattccagccttaaggacaattttaaattataatttttattcctcagtcaccactgctaatccttcaatttatttcaaagtaacttctggtttttattacatttggaagataaagcaacttatcacatgtaggttacaacttaaaattcgtgtatgagccattgcttatattttctaaatctgacatgacccagggggtttctactgctcctaccaccacccaggacatgcgatgaagattgtgcacgctaccgtgagggcagaagcaggttagtagctgtaggagctgtcacatggatttactataatgcacttgaaattgtgtatgtgaccttatcaggcatttaaggaccataatctctccttgacctaagaaatcagcttgaagtaattcacttagatttcaaattttaatgtggatacccaaggctgcaaatctgttattcagtacctgctacacttttggggttgcctcttttatgcactgttagaattgctagaaatttagaagtccaattggaaagaagcatatcttgttagaaagtattcccagaaaatgaggaaggctacattttaactgtgtcttgattttacagggagaaaaataaagttaatattttgaggaaaaaataaggcttttaagatgacatgctatatagtagacaaatagtttaactcggtgcctacttcatgtacactggatgtgttaacatgaatttatgaccctcagtgactttttattaccaaaacagcttccttaaagcaaacacacacacatgcctctacagtattggaaaattccgtctccttagataaaacaattaggatttttcttgggccaactagaataattagggctgcagagttggagcctttatataaggagtttgcagctcatatccgaagagagaaatgtatttggaaagtcaaaagtgtaggtaagtgagaaagcagagtagtttcagcttttgcagttggagtgggtataatttactgtgttgtcataagatactggaaagatctttggaagaataggttcttaaagtgttttctcatgtgcccttactgacatttcccattgggccttcaagacaactccagtaaatacttaaattgattttcagtgcactgctttctttcatttttatttatttattttgagactgggtcttggtctgttgccctggctggagtgcaatggcccaatcttagctcactgaagccttaaattcctgggctgaagagatccctccacctgagcctccttaatagccagtcatgtgccaccctgcctagctattttttttttttttttttttttttttttactttttgtagagaagggatctagctatgttgcccaggctgttctcaagtagtcctggcctcaaatgatccctccaccttggcttcccagagcactgggattacagtcatgagccaccctcctggctccttttttttttatttttaataacagaagggtatttcttttgaatgtgaaattttaccacatggtatgaattagtccaagtgtttttatactaaatttacataatatacacttttcaagtaagtacaaagaggtataaacactgcttatgaattgaatgttaaaaaataaatctctatgcattacttttgtctttccccataatctcacgtatacacataaaacaaaaaacaaggagacccagttatagttgtggtatctgctgtttctgccttgaaatttccagcttacagctaagcaacaactactgtgcatccagaacttacatctatgttcctagagtacttgaaccccattctcaagtgcacccttcttaccaggtggaaatagttcactgctgtaataatctaagaaaacattatgtttctctctacttttttttctctcatataatctaggcaattctccctctgtatcattttcctgagaaaactaaaataatttttaatcaagaccagatggaactttgtatggtatattgacagtataccaattgttgtgacgaatcttactgcctgttgtagatatcagtgtttgaagtattccctatgaaataacttttctgtcccaataattgagagggctgtttcatttccaaaaaagggaagaattaatcaattaaaaatacatatagtgaaataacctgttttgtaacataaaacataagatgaagaaatatcggaacattgatatgaagtttaacagtaatggattatatatccagaaatatgaacaaataaacctgcaatgaaaatttactaatgttactaattttcacttgtgtaacgtgaacattacaaagaacatagtgtacaaagggagaatgttggtgggtaggatgagtcaagatttcagaggaaaatcaatatttaagacttacagcactgtggaatatatttaattttcctaaagttgaagaaaatttcagtgaatctatgaattgtttaagacaaaggtcactccgttactgacttctgctacatctaattttccagggaagtaatatttagagataaaaagcttttactctgacctccggaaattacttaatgatccagatactcccaaagtcaaagcaaatccttggagacaagtttggactttatgaatgtggacttaattctttaagatcactagagcaacaataaattacaggaatgtaccctctttatatctgatgattatgcataagtggggtgtgcagttttaagttacttttcctacagtgctgacaggtttagagtgttaaatccatactcaacttgtattatcttcctctgcttgagctatgccaccttgagtcagctgatttgactatttataattagatacctaacctatgatatgatatagtagatgtcaatagtgactcatgatttatgtagtaagtcttaccattttctaagcagtagtcaggtgccatgtgatctaactaaagatttgtatttcttattttacttaacaattacagtaaccccaatgcagtattattcactgttggattttttttaatgtgaaaacttaataacccctgtggataagaaagtaagaatgattcttaggtgctttaggaccaaattaatcagaatttaatataccactttgtctaggtgtcatggcggctaaaatatctttgagaaagttaaacttagctttcaatctcagatgatctacttaagaatttggaaagtttatattatattatttgagaatggggattcttgcttaaacgaaacctgaaggatgggcatctttcattcaatatcttaaaaagaaagtttagctgacatttaaataagaaaagatacacctaaaataaagtagaacactggtttaataaaaatagtgaacaggtactcccttgcctttctatttttctctcaactctattttattttacatgaagtttggggagaaatgctaagatgaaatttttggtggagtctttcagaggttatttaaccagagactattttcttt

SEQ ID NO: 4583 - protein, 109 aa, Homo sapiens
MVEIYNLKFLHSDLDKGEGTAKYTLSGDGAGTVFTIDETTGDIHAIRSLDREEKPFYTLRAQAVDIETRKPLEPESEFIIKVQDINDNEPKFWDGPYVATVPEMSPVGE

SEQ ID NO: 4584 - DNA, 2076 bp, Homo sapiens
tccgcgtgtggaagtctgtgaggcgcagaggtggggcaggccgtctggctagctaggcggctgggagcgttttcgtggcggggaacggaggttgaattgccctgcctgggctcatagggaaggaggatgtgaaggagcttgtgaaggcagaggaagattattgaataataaaatacagttttgaaaaaaatggatgaagaacctgaaagaactaagcgatgggaaggaggctatgaaagaacatgggagattcttaaagaagatgaatctggatcacttaaagctacaatagaagacattctattcaaggcaaagagaaaaagagtatttgagcaccatggacaagttcgacttggaatgatgcgccacctttatgtggtagtagatggatcaagaacaatggaagaccaagatttaaagcctaatagactgacgtgtactttaaagttgttggaatactttgtagaggaatattttgatcaaaatcctattagtcagattggaataattgtaactaagagtaaaagagctgaaaaattgactgaactttcaggaaacccaagaaaacatataacgtctttgaagaaagctgtggatatgacctgccatggagagccatctctttataattccctaagcatggctatgcagactctaaaacacatgcctggacatacaagtcgagaagtactaatcatctttagcagccttacaacttgcgatccatctaatatttatgatctaatcaagaccctaaaggcagctaaaattagagtatctgttactggattgtctgcagaagttcgcgtttgcactgtacttgctcgtgaaactggtggcacgtaccatgttattttagatgaaagccattacaaagagttgctcacacatcatgttagtcctcctcctgctagctcaagttctgaatgctcacttattcgtatgggatttcctcagcacaccattgcttctttatctgaccaggatgcaaaaccctctttcagcatggcgcatttggatggcaatactgagccagggcttacattaggaggctatttctgcccacagtgtcgggcaaagtactgtgagctacctgttgaatgtaaaatctgtggtcttactttggtgtctgctccccacttggcacggtcttaccatcatttgtttcctttggatgcttttcaagaaattcccctagaagaatataatggagaaagattttgttatggatgtcagggggaattgaaagaccaacatgtttatgtttgtgctgtgtgccaaaatgttttctgtgtggactgtgatgtttttgttcatgattctctacactgttgccctggctgtattcataagattccagctccttcaggtgtttgattccagcatgtagtatacattgtatgtgttaaaaagaaatttgcaactgtgaataaaaggacttctttagaagaagcttcatttaaaacatgaaaggataatctgacttaagaaactttttgctaagaaaaggtaatattttattaaattttaaatttgtgttgtcacagaaatacctgaaattcagtagtacttcattcaattaattttgttttctattattttgagttatactgttttcaaagtcattatgcagtatgtataaacttataagaattaaattgatgtgataattttatgtttttataattaaatatagaatctttatgatttatgttaattcattaatttagtgtaagaagaaagttaagtctgaatgtaaattcagtgtaagatgaaaatttatcaatacttatgaaattaggctgggcgctgtggctcacacctgtaatcccaacactttgggaggctgaggtgggcagatcacttgaggtcaggagttcgagaccagcctggccaacatggtgaaaccccgtcactactaaaaatacaaaaaataattagccgggcatggtggttcacgcctggagtcccagctacttgggaggctgaggcaggagaatcgcttgaacccaggaggcggaggttgcagggagccgagattgtgccactgcactccaccctagagtgagactccct

SEQ ID NO: 4585 - protein, 395 aa, Homo sapiens [sequence omitted]

SEQ ID NO: 4586 - DNA, 1991 bp, Homo sapiens
ttctagcggcgccgattattgaataataaaatacagttttgaaaaaaatggatgaagaacctgaaagaactaagcgatgggaaggaggctatgaaagaacatgggagattcttaaagaagatgaatctggatcacttaaagctacaatagaagacattctattcaaggcaaagagaaaaagagtatttgagcaccatggacaagttcgacttggaatgatgcgccacctttatgtggtagtagatggatcaagaacaatggaagaccaagatttaaagcctaatagactgacgtgtactttaaagttgttggaatactttgtagaggaatattttgatcaaaatcctattagtcagattggaataattgtaactaagagtaaaagagctgaaaaattgactgaactttcaggaaacccaagaaaacatataacgtctttgaagaaagctgtggatatgacctgccatggagagccatctctttataattccctaagcatggctatgcagactctaaatatctccaagacacatgcctggacatacaagtcgagaagtactaatcatctttagcagccttacaacttgcgatccatctaatatttatgatctaatcaagaccctaaaggcagctaaaattagagtatctgttactggattgtctgcagaagttcgcgtttgcactgtacttgctcgtgaaactggtggtatatatataatttatttaatatttgcttataattactgtgtaggaaataatttattaattaaattaggatgttttaatctgttctgagctactaaacttaaagtagtctaaaatatgggcagtcatcttaaatatatcattgattccataagaaatcatctccaaatgcaaagagttttcagtacttatgtcagtatttagaggaggtattataactcttggaaagctggaaattttactgtatgtaattctttataaagattttataacttgtctttaattaaattgtaattacaggccaggcatgatagctcatgcctgtaatctcaacattttggtaggccaaggcaggagaatcacttgaggccagaagtttgagatcagtctggttaacatagtgagacctgtctctatttatatgttaaaataataatagtagtaataataatcaattgtaattatagttattcctagagaagttgatttagatatattacttaaataaggttttaaaagtgataatttagctaaaatcattattttaaaaatgtacattttcagatgatacaacttttacagaattacgtagaacgtacagttcgttatgtctatgaaggtgtttttttttcccttttcatcttgttaggcacgtaccatgttattttagatgaaagccattacaaagagttgctcacacatcatgttagtcctcctcctgctagctcaagttctgaatgctcacttattcgtatgggtaagtgtttttatgtttttaaaaaatacatatctaggctctctattttcatttgcacaagttattttaatatttaagaatttttaaagaaaaaatatgcttgttgaagcaattttggaaagtacagagaagtggaaaaaaaaaattaaaactaccagtagtcctgtcacccagaaaatactgttggctttctttatttttaaggctagaaaggtataaactgtgtttatagaaaaatacttatattaagccgggctcggtggctcacgcctgtaatcccagcactttgggaggccgaggtgggcggatcttgaggtcaggagatcgagaccatcctggctaacacggtgaaaccccatctctactaaaaatacaaaaaattagccaggcgtggtggcgggcgcctgtaatcccagctcctcgggaggctgaggcaggagaatggcatgaacccgggaggcagagctggcaatgagccgagatcacaccactgcactctagcctgggcgacagagcgagactctgtctc

SEQ ID NO: 4587 - protein, 174 aa, Homo sapiens
MDEEPERTKRWEGGYERTWEILKEDESGSLKATIEDILFKAKRKRVFEHHGQVRLGMMRHLYVVVDGSRTMEDQDLKPNRLTCTLKLLEYFVEEYFDQNPISQIGIIVTKSKRAEKLTELSGNPRKHITSLKKAVDMTCHGEPSLYNSLSMAMQTLNISKTHAWTYKSRSTNHL

SEQ ID NO: 4588 - DNA, 2342 bp, Homo sapiens
ttctagcggcgccgattattgaataataaaatacagttttgaaaaaaatggatgaagaacctgaaagaactaagcgatgggaaggaggctatgaaagaacatgggagattcttaaagaagatgaatctggatcacttaaagctacaatagaagacattctattcaaggcaaagagaaaaagatgcgccacctttatgtggtagtagatggatcaagaacaatggaagaccaagatttaaagcctaatagactgacgtgtactttaaagttgttggaatactttgtagaggaatattttgatcaaaatcctattagtcagattggaataattgtaactaagagtaaaagagctgaaaaattgactgaactttcagatgggagtcttgctctgtcgccaggctagagtgcagtggcacaatttcggatcactgcaaagtccgcctcacgggttcaagcgattccctgcctcagcctcctgagtagctggaactacagatgcccgccaccacgccctgctaattttttgtattttagtagatacggggtttcaccatgttggccagtatggtctcaatctcttgaccttgtgatcagcccgcctcagcctctcaaagtgctgggattacaggcttgagccaccgcatccggccttatcctgaaaatattaaaatacagttattgtaatcatttataaaatccagttaatcttaaaattaaattcttataaagttaagcatctaatttaaaagggaaaaagtataaaaattaaactgtagctattgctaatgaatcaatttttctgcttccatgacatacctaactgaattttagtttcaaaacgtagtaatggcattttttatttgctttggtatatatgctgttacaaatttgcatcactgattctattttattttctgtgaaatacactctcccttaaatctggttttcaaccttttatccttgccggcacacataagggaaatgacatactttcttcattagtagtttttcattaaatgcagtgaggagtgaaatgtacattggcctggagtgattcaagaaactcagttgtgagtaaccaaaagaatgtcacactagcttaagtgcagaaggaaaattttgggctatgttcaaaggtgggccaattccatatatagttgctgcatatgttggggtcctggctttgtctggcttcattctctgatagattttctggaagttgaaaagatgtctcttaattgtcccagttctacattgtacccgtagcctatagcttcagcacacgtctagggagaactctgattggcctgagttacgatctgcccatccatgaacaaagtggccaggaaatgaagtattttgtttgtacgcttcgattgcctgctgatgcccagagcaggatagaagtagggtcagcaccacatgaactaagcaggattattatatagtggaagaaggatggttcctccaaggtaggaatataaggtcaatattttcctctcactttacccaccccgagttaccagcagttttctattgcttctttttttttttttttgagaaggagtctctcactctgtcgcccaggcggtgctgtcttggctcactgcaacctccgcctcccgggttcaagagattctcctgcctccccctcccgagtagctgggattacaggtgtgcgctgccacacctggctaattttatttttagtagagacaggatttcaccatgctggccaggctgatctcgaactcctgacctcaggtgatctacccacctcagcctcccaaagtgttgggattacaggcatcagccaccatgcccggccccagcagttttctatggatgttagtgaagtcatgtataaagatgaaaaatattctggagattctgacaggcctcttgaagccaccattttttccctccaatcagaccactgctgtaaaccacactgacactattgtagtatgcttttttcctatacccataacacagtgggagattaaaaataattttgtagggtaggaagagaagtggatagagagccaggagatctaggtttgggtgctgctggtcctgcagttaagcaggcatatgtctttgggcaagtcatttcacttgttttagattaattttctcacttatgaagtgagggatttggactgcttagcgaggtacttttcatctctaaaatttatgaatctaaaatacttgcagtaaatattaaatattacaaatggttaatattttaaaacttactcagatgagtaaaaactcaagggagctccaagttgatgaatagacaaagaagacatgattcacacagaaaaaacccagaaatt

SEQ ID NO: 4589 - protein, 73 aa, Homo sapiens
MRHLYVVVDGSRTMEDQDLKPNRLTCTLKLLEYFVEEYFDQNPISQIGIIVTKSKRAEKLTELSDGSLALSPG

SEQ ID NO: 4590 - DNA, 1071 bp, Homo sapiens
gccgtctggctagctaggcggctgggagcgttttcgtggcggggaacggaggttgaattgccctgcctgggctcatagggaaggaggatgtgaaggagcttgtgaaggcagaggaagattattgaataataaaatacagttttgaaaaaaatggatgaagaacctgaaagaactaagcgatgggaaggaggctatgaaagaacatgggagattcttaaagaagatgaatctggatcacttaaagctacaatagaagacattctattcaaggcaaagagaaaaagagtatttgagcaccatggacaagttcgacttggaatgatgcgccacctttatgtggtagtagatggatcaagaacaatggaagaccaagatttaaagcctaatagactgacgtgtactttaaagttgttggaatactttgtagaggaatattttgatcaaaatcctattagtcagattggaataattgtaactaagagtaaaagagctgaaaaattgactgaactttcaggaaacccaagaaaacatataacgtctttgaagaaagctgtggatatgacctgccatggagagccatctctttataattccctaagcatggctatgcagactctaaagttagtattatacattatgtataattgaattagaagttttttaaatgagttaagttgaagtgatgtgttaatatggggcccataaacccagctataacaaaattgttaagtacgagaattatgtagtgttatttatgatgtttagtgtggtgttggttagtaatttttattttacattttagtaagatattgttaaaggttttataaaaatataatttaaaactgtcggcagtatcaatagtacaaaaataggttgatgaaaaaatattttattaaaatgagatttaatatagtataataattgtaagttggttgtacctttattaacatttattaatttattttgaaagtaatggccaaaaccacaattccttttgcaccaatgtcatatatctgtaaattaatagatatggcaagttcagctatatggaatagagctaagaccccaaag

SEQ ID NO: 4591 - protein, 165 aa, Homo sapiens
MDEEPERTKRWEGGYERTWEILKEDESGSLKATIEDILFKAKRKRVFEHHGQVRLGMMRHLYVVVDGSRTMEDQDLKPNRLTCTLKLLEYFVEEYFDQNPISQIGIIVTKSKRAEKLTELSGNPRKHITSLKKAVDMTCHGEPSLYNSLSMAMQTLKLVLYIMYN

SEQ ID NO: 4592 - DNA, 983 bp, Homo sapiens
tccggctgagagtccttctagcggcgccgattattgaataataaaatacagttttgaaaaaaatggatgaagaacctgaaagaactaagcgatgggaaggaggctatgaaagaacatgggagattcttaaagaagatgaatctggatcacttaaagctacaatagaagacattctattcaaggcaaagagaaaaagagtatttgagcaccatggacaagttcgacttggaatgatgcgccacctttatgtggtagtagatggatcaagaacaatggaagaccaagatttaaagcctaatagactgacgtgtactttaaagttgttggaatactttgtagaggaatattttgatcaaaatcctattagtcagattggaataattgtaactaagagtaaaagagctgaaaaattgactgaactttcaggaaacccaagaaaacatataacgtctttgaagaaagctgtggatatgacctgccatggagagccatctctttataattccctaagcatggctatgcagactctaaagttagtattatacattatgtataattgaattagaagttttttaaatgagttaagttgaagtgatgtgttaatatggggcccataaacccagctataacaaaattgttaagtacgagaattatgtagtgttatttatgatgtttagtgtggtgttggttagtaatttttattttacattttagtaagatattgttaaaggttttataaaaatataatttaaaactgtcggcagtatcaatagtacaaaaataggttgatgaaaaaatattttattaaaatgagatttaatatagtataataattgtaagttggttgtacctttattaacatttattaatttattttgaaagtaatggccaaaaccacaattccttttgcaccaatgtcatatatctgtaaattaatagatatggcaagttcagctatatggaatagagctaagaccccaaag

SEQ ID NO: 4593 - protein, 165 aa, Homo sapiens; identical to SEQ ID NO: 4591

SEQ ID NO: 4594 - DNA, 2061 bp, Homo sapiens
gccgtctggctagctaggcggctgggagcgttttcgtggcggggaacggaggttgaattgccctgcctgggctcatagggaaggaggatgtgaaggagcttgtgaaggcagaggaagattattgaataataaaatacagttttgaaaaaaatggatgaagaacctgaaagaactaagcgatgggaaggaggctatgaaagaacatgggagattcttaaagaagatgaatctggatcacttaaagctacaatagaagacattctattcaaggcaaagagaaaaagagtatttgagcaccatggacaagttcgacttggaatgatgcgccacctttatgtggtagtagatggatcaagaacaatggaagaccaagatttaaagcctaatagactgacgtgtactttaaagttgttggaatactttgtagaggaatattttgatcaaaatcctattagtcagattggaataattgtaactaagagtaaaagagctgaaaaattgactgaactttcaggaaacccaagaaaacatataacgtctttgaagaaagctgtggatatgacctgccatggagagccatctctttataattccctaagcatggctatgcagactctaaaacacatgcctggacatacaagtcgagaagtactaatcatctttagcagccttacaacttgcgatccatctaatatttatgatctaatcaagaccctaaaggcagctaaaattagagtatctgttactggattgtctgcagaagttcgcgtttgcactgtacttgctcgtgaaactggtggcacgtaccatgttattttagatgaaagccattacaaagagttgctcacacatcatgttagtcctcctcctgctagctcaagttctgaatgctcacttattcgtatgggatttcctcagcacaccattgcttctttatctgaccaggatgcaaaaccctctttcagcatggcgcatttggatggcaatactgagccagggcttacattaggaggctatttctgcccacagtgtcgggcaaagtactgtgagctacctgttgaatgtaaaatctgtggtcttactttggtgtctgctccccacttggcacggtcttaccatcatttgtttcctttggatgcttttcaagaaattcccctagaagaatataatggagaaaggctgaagaacggcctaggatgatgattttgttatggatgtcagggggaattgaaagaccaacatgtttatgtttgtgctgtgtgccaaaatgttttctgtgtggactgtgatgtttttgttcatgattctctacactgttgccctggctgtattcataagattccagctccttcaggtgtttgattccagcatgtagtatacattgtatgtgttaaaaagaaatttgcaactgtgaataaaaggacttctttagaagaagcttcatttaaaacatgaaaggataatctgacttaagaaactttttgctaagaaaaggtaatattttattaaattttaaatttgtgttgtcacagaaatacctgaaattcagtagtacttcattcaattaattttgttttctattattttgagttatactgttttcaaagtcattatgcagtatgtataaacttataagaattaaattgatgtgataattttatgtttttataattaaatatagaatctttatgatttatgttaattcattaatttagtgtaagaagaaagttaagtctgaatgtaaattcagtgtaagatgaaaatttatcaatacttatgaaattaggctgggcgctgtggctcacacctgtaatcccaacactttgggaggctgaggtgggcagatcacttgaggtcaggagttcgagaccagcctggccaacatggtgaaaccccgtcactactaaaaatacaaaaaataattagccgggcatggtggttcacgcctggagtcccagctacttgggaggctgaggcaggagaatcgcttgaacccaggaggcggaggttgcagggagccgagattgtgccactgcactccaccctagagtgagactccct

SEQ ID NO: 4595 - protein, 349 aa, Homo sapiens
MDEEPERTKRWEGGYERTWEILKEDESGSLKATIEDILFKAKRKRVFEHHGQVRLGMMRHLYVVVDGSRTMEDQDLKPNRLTCTLKLLEYFVEEYFDQNPISQIGIIVTKSKRAEKLTELSGNPRKHITSLKKAVDMTCHGEPSLYNSLSMAMQTLKHMPGHTSREVLIIFSSLTTCDPSNIYDLIKTLKAAKIRVSVTGLSAEVRVCTVLARETGGTYHVILDESHYKELLTHHVSPPPASSSSECSLIRMGFPQHTIASLSDQDAKPSFSMAHLDGNTEPGLTLGGYFCPQCRAKYCELPVECKICGLTLVSAPHLARSYHHLFPLDAFQEIPLEEYNGERLKNGLG

SEQ ID NO: 4596 - DNA, 2205 bp, Homo sapiens
tagggttcagtactatccttgatttcaggtatccactgggggtcttggaatgtatcctctgcagataagaggggactactatagtctttgagaaagaagtgtgtgttactgttttgaagccacatctctgcactttaaagctgatccatatgatattgccacattttagtttaaagtttatccatatattgttgtattttttattgtatactctagactttgtatgaaacaaacctactagaatgtaagcttaatgatgtcgggaacattgtcagtcttgtttatcactctacccccagaacttgagagtacttggtaaatattaaatgaatcaattaacaattttttgaagtgcatagctcattttagaaaaatttgcattaaagtgtttaaaatatactcacaacctttctttgcattgttgaaacaaatgagatattctatagtctaaatgtgtaatcctatgtttactgttctttctgggtaaattttttggtagtataatttgttgtacctaattggagtgtattttatctttcttttaagacacatgcctggacatacaagtcgagaagtactaatcatctttagcagccttacaacttgcgatccatctaatatttatgatctaatcaaggtagaccaaaaaatcaaaaccaaagttataactgtaaagagaattctgtagcaaattgatttatatatatatgtatttttgtatgtgtgattcatctttgtggtagatgtattgaatttattactagttttcagagcattctttatttttcaaatacattaaatcttaaatgtttttcttctttcctaaaactatctatctacttggattttatgaagaccctaaaggcagctaaaattagagtatctgttactggattgtctgcagaagttcgcgtttgcactgtacttgctcgtgaaactggtggcacgtaccatgttattttagatgaaagccattacaaagagttgctcacacatcatgttagtcctcctcctgctagctcaagttctgaatgctcacttattcgtatgggatttcctcagcacaccattgcttctttatctgaccaggatgcaaaaccctctttcagcatggcgcatttggatggcaatactgagccagggcttacattaggaggctatttctgcccacagtgtcgggcaaagtactgtgagctacctgttgaatgtaaaatctgtggtcttactttggtgtctgctccccacttggcacggtcttaccatcatttgtttcctttggatgcttttcaagaaattcccctagaagaatataatggagaaaggctgaagaacggcctaggatgatgattttgttatggatgtcagggggaattgaaagaccaacatgtttatgtttgtgctgtgtgccaaaatgttttctgtgtggactgtgatgtttttgttcatgattctctacactgttgccctggctgtattcataagattccagctccttcaggtgtttgattccagcatgtagtatacattgtatgtgttaaaaagaaatttgcaactgtgaataaaaggacttctttagaagaagcttcatttaaaacatgaaaggataatctgacttaagaaactttttgctaagaaaaggtaatattttattaaattttaaatttgtgttgtcacagaaatacctgaaattcagtagtacttcattcaattaattttgttttctattattttgagttatactgttttcaaagtcattatgcagtatgtataaacttataagaattaaattgatgtgataattttatgtttttataattaaatatagaatctttatgatttatgttaattcattaatttagtgtaagaagaaagttaagtctgaatgtaaattcagtgtaagatgaaaatttatcaatacttatgaaattaggctgggcgctgtggctcacacctgtaatcccaacactttgggaggctgaggtgggcagatcacttgaggtcaggagttcgagaccagcctggccaacatggtgaaaccccgtcactactaaaaatacaaaaaataattagccgggcatggtggttcacgcctggagtcccagctacttgggaggctgaggcaggagaatcgcttgaacccaggaggcggaggttgcagggagccgagattgtgccactgcactccaccctagagtgagactccct

SEQ ID NO: 4597 - protein, 164 aa, Homo sapiens
MKTLKAAKIRVSVTGLSAEVRVCTVLARETGGTYHVILDESHYKELLTHHVSPPPASSSSECSLIRMGFPQHTIASLSDQDAKPSFSMAHLDGNTEPGLTLGGYFCPQCRAKYCELPVECKICGLTLVSAPHLARSYHHLFPLDAFQEIPLEEYNGERLKNGLG

SEQ ID NO: 4598 - DNA, 1453 bp, Homo sapiens
gccgtctggctagctaggcggctgggagcgttttcgtggcggggaacggaggttgaattgccctgcctgggctcatagggaaggaggatgtgaaggagcttgtgaaggcagaggaagattattgaataataaaatacagttttgaaaaaaatggatgaagaacctgaaagaactaagcgatgggaaggaggctatgaaagaacatgggagattcttaaagaagatgaatctggatcacttaaagctacaatagaagacattctattcaaggcaaagagaaaaagagtatttgagcaccatggacaagttcgacttggaatgatgcgccacctttatgtggtagtagatggatcaagaacaatggaagaccaagatttaaagcctaatagactgacgtgtactttaaagttgttggaatactttgtagaggaatattttgatcaaaatcctattagtcagattggaataattgtaactaagagtaaaagagctgaaaaattgactgaactttcaggaaacccaagaaaacatataacgtctttttcctttggatgcttttcaagaaattcccctagaagaatataatggagaaagattttgttatggatgtcagggggaattgaaagaccaacatgtttatgtttgtgctgtgtgccaaaatgttttctgtgtggactgtgatgtttttgttcatgattctctacactgttgccctggctgtattcataagattccagctccttcaggtgtttgattccagcatgtagtatacattgtatgtgttaaaaagaaatttgcaactgtgaataaaaggacttctttagaagaagcttcatttaaaacatgaaaggataatctgacttaagaaactttttgctaagaaaaggtaatattttattaaattttaaatttgtgttgtcacagaaatacctgaaattcagtagtacttcattcaattaattttgttttctattattttgagttatactgttttcaaagtcattatgcagtatgtataaacttataagaattaaattgatgtgataattttatgtttttataattaaatatagaatctttatgatttatgttaattcattaatttagtgtaagaagaaagttaagtctgaatgtaaattcagtgtaagatgaaaatttatcaatacttatgaaattaggctgggcgctgtggctcacacctgtaatcccaacactttgggaggctgaggtgggcagatcacttgaggtcaggagttcgagaccagcctggccaacatggtgaaaccccgtcactactaaaaatacaaaaaataattagccgggcatggtggttcacgcctggagtcccagctacttgggaggctgaggcaggagaatcgcttgaacccaggaggcggaggttgcagggagccgagattgtgccactgcactccaccctagagtgagactccct

SEQ ID NO: 4599 - protein, 144 aa, Homo sapiens; identical to SEQ ID NO: 4546

SEQ ID NO: 4600 - DNA, 1999 bp, Homo sapiens
gccgtctggctagctaggcggctgggagcgttttcgtggcggggaacggaggttgaattgccctgcctgggctcatagggaaggaggatgtgaaggagcttgtgaaggcagaggaagattattgaataataaaatacagttttgaaaaaaatggatgaagaacctgaaagaactaagcgatgggaaggaggctatgaaagaacatgggagattcttaaagaagatgaatctggatcacttaaagctacaatagaagacattctattcaaggcaaagagaaaaagagtatttgagcaccatggacaagttcgacttggaatgatgcgccacctttatgtggtagtagatggatcaagaacaatggaagaccaagatttaaagcctaatagactgacgtgtactttaaagttgttggaatactttgtagaggaatattttgatcaaaatcctattagtcagattggaataattgtaactaagagtaaaagagctgaaaaattgactgaactttcaggaaacccaagaaaacatataacgtctttgaagaaagctgtggatatgacctgccatggagagccatctctttataattccctaagcatggctatgcagactctaaaacacatgcctggacatacaagtcgagaagtactaatcatctttagcagccttacaacttgcgatccatctaatatttatgatctaatcaagaccctaaaggcagctaaaattagagtatctgttactggattgtctgcagaagttcgcgtttgcactgtacttgctcgtgaaactggtggcacgtaccatgttattttagatgaaagccattacaaagagttgctcacacatcatgttagtcctcctcctgctagctcaagttctgaatgctcacttattcgtatgggatgcaaaaccctctttcagcatggcgcatttggatggcaatactgagccagggcttacattaggaggctatttctgcccacagtgtcgggcaaagtactgtgagctacctgttgaatgtaaaatctgtggtcttactttggtgtctgctccccacttggcacggtcttaccatcatttgtttcctttggatgcttttcaagaaattcccctagaagaatataatggagaaagattttgttatggatgtcagggggaattgaaagaccaacatgtttatgtttgtgctgtgtgccaaaatgttttctgtgtggactgtgatgtttttgttcatgattctctacactgttgccctggctgtattcataagattccagctccttcaggtgtttgattccagcatgtagtatacattgtatgtgttaaaaagaaatttgcaactgtgaataaaaggacttctttagaagaagcttcatttaaaacatgaaaggataatctgacttaagaaactttttgctaagaaaaggtaatattttattaaattttaaatttgtgttgtcacagaaatacctgaaattcagtagtacttcattcaattaattttgttttctattattttgagttatactgttttcaaagtcattatgcagtatgtataaacttataagaattaaattgatgtgataattttatgtttttataattaaatatagaatctttatgatttatgttaattcattaatttagtgtaagaagaaagttaagtctgaatgtaaattcagtgtaagatgaaaatttatcaatacttatgaaattaggctgggcgctgtggctcacacctgtaatcccaacactttgggaggctgaggtgggcagatcacttgaggtcaggagttcgagaccagcctggccaacatggtgaaaccccgtcactactaaaaatacaaaaaataattagccgggcatggtggttcacgcctggagtcccagctacttgggaggctgaggcaggagaatcgcttgaacccaggaggcggaggttgcagggagccgagattgtgccactgcactccaccctagagtgagactccct

SEQ ID NO: 4601 - protein, 267 aa, Homo sapiens
MDEEPERTKRWEGGYERTWEILKEDESGSLKATIEDILFKAKRKRVFEHHGQVRLGMMRHLYVVVDGSRTMEDQDLKPNRLTCTLKLLEYFVEEYFDQNPISQIGIIVTKSKRAEKLTELSGNPRKHITSLKKAVDMTCHGEPSLYNSLSMAMQTLKHMPGHTSREVLIIFSSLTTCDPSNIYDLIKTLKAAKIRVSVTGLSAEVRVCTVLARETGGTYHVILDESHYKELLTHHVSPPPASSSSECSLIRMGCKTLFQHGAFGWQY

SEQ ID NO: 4602 - DNA, 2320 bp, Homo sapiens
tgcccggccttggatcacttttttaaaatgttattttcttctattttacaaaaatgttaaatgttacaatgaaaatttattacatttatattgaaaaaagtataacttttaatagaaaaataatctccttatttaatatgtatgtttttaaatgttaatgaaataaaatgcttttctacttttggccttttatattaccagtcgacctctcttttccacggtcttctcatgtgtttaatgatgtcagtaactatcaaccttattgtgtgtttcaaggattgagttaatacagatgatgcgtttagaataatgcttgatgtaaacattcaatacattttagatcttatgtttggctaatctttttgatttactgatatattttcttatttcattttaaagttatttaaatttataatttatttattagagtcctttaggaatgttaacccttctcagtcacccgatgcaaatatttttcttgttggttatttgcctttacttttatttatttgttttgatatgtagatacatttacattttttatgtaatatatctttttaaaaatggtttctgcttttcctgaacatgttttcagaatttaaaattgtatatggaaaacaaattacatgaaagatttgagcatttcaaaattttaaacataaaagcataaacgtagataaaatgaaggtgtactatgatatcttcagttttatcagaaatgatgtaaaaattacaacctctttaaaaagtagtgttaatcattaagttagaaaatatatagctgggcatggtggcagatgcctgtaatcccagctacatgggaaggtgaggtgggagaatcgcttgaacccaggcagtggaggatgcagtgagccaagatcatgccactgcaccccagcctgggtgacagaacaagactccatctcaagaaaaaaaaaaaagaaaaatatatatatgaacttcagaatctgaggtcatatatagacaggtctttcccccgtttcctctactttttcttgtagcttggaattagtcagtttcatcatgctataataagcttatctgaaaggcagtaaagtgatattttgtacaacttcattggctttttgagaagaacatttttaggttcttagtcctagaattttgctgtttgcttggaaaaagaaagtaatacattttcttctatgaaggatttcctcagcacaccattgcttctttatctgaccaggatgcaaaaccctctttcagcatggcgcatttggatggcaatactgagccagggcttacattaggaggctatttctgcccacagtgtcgggcaaagtactgtgagctacctgttgaatgtaaaatctgtggtcttactttggtgtctgctccccacttggcacggtcttaccatcatttgtttcctttggatgcttttcaagaaattcccctagaagaatataatggagaaagattttgttatggatgtcagggggaattgaaagaccaacatgtttatgtttgtgctgtgtgccaaaatgttttctgtgtggactgtgatgtttttgttcatgattctctacactgttgccctggctgtattcataagattccagctccttcaggtgtttgattccagcatgtagtatacattgtatgtgttaaaaagaaatttgcaactgtgaataaaaggacttctttagaagaagcttcatttaaaacatgaaaggataatctgacttaagaaactttttgctaagaaaaggtaatattttattaaattttaaatttgtgttgtcacagaaatacctgaaattcagtagtacttcattcaattaattttgttttctattattttgagttatactgttttcaaagtcattatgcagtatgtataaacttataagaattaaattgatgtgataattttatgtttttataattaaatatagaatctttatgatttatgttaattcattaatttagtgtaagaagaaagttaagtctgaatgtaaattcagtgtaagatgaaaatttatcaatacttatgaaattaggctgggcgctgtggctcacacctgtaatcccaacactttgggaggctgaggtgggcagatcacttgaggtcaggagttcgagaccagcctggccaacatggtgaaaccccgtcactactaaaaatacaaaaaataattagccgggcatggtggttcacgcctggagtcccagctacttgggaggctgaggcaggagaatcgcttgaacccaggaggcggaggttgcagggagccgagattgtgccactgcactccaccctagagtgagactccct

SEQ ID NO: 4603 - protein, 123 aa, Homo sapiens [sequence omitted]

SEQ ID NO: 4604 - DNA, 1958 bp, Homo sapiens
ccggctgagagtccttctagcggcgccggctggagtgcagtggcacaaccttggctcgctccagtgtctacctgccaggttcaagtgattctcctgcctcagcctcccgagtagctgggattacagattattgaataataaaatacagttttgaaaaaaatggatgaagaacctgaaagaactaagcgatgggaaggaggctatgaaagaacatgggagattcttaaagaagatgaatctggatcacttaaagctacaatagaagacattctattcaaggcaaagagaaaaagatgcgccacctttatgtggtagtagatggatcaagaacaatggaagaccaagatttaaagcctaatagactgacgtgtactttaaagattggaataattgtaactaagagtaaaagagctgaaaaattgactgaactttcaggaaacccaagaaaacatataacgtctttgaagaaagctgtggatatgacctgccatggagagccatctctttataattccctaagcatggctatgcagactctaaaacacatgcctggacatacaagtcgagaagtactaatcatctttagcagccttacaacttgcgatccatctaatatttatgatctaatcaagaccctaaaggcagctaaaattagagtatctgttactggattgtctgcagaagttcgcgtttgcactgtacttgctcgtgaaactggtggcacgtaccatgttattttagatgaaagccattacaaagagttgctcacacatcatgttagtcctcctcctgctagctcaagttctgaatgctcacttattcgtatgggatttcctcagcacaccattgcttctttatctgaccaggatgcaaaaccctctttcagcatggcgcatttggatggcaatactgagccagggcttacattaggaggctatttctgcccacagtgtcgggcaaagtactgtgagctacctgttgaatgtaaaatctgtggtcttactttggtgtctgctccccacttggcacggtcttaccatcatttgtttcctttggatgcttttcaagaaattcccctagaagaatataatggagaaagattttgttatggatgtcagggggaattgaaagaccaacatgtttatgtttgtgctgtgtgccaaaatgttttctgtgtggactgtgatgtttttgttcatgattctctacactgttgccctggctgtattcataagattccagctccttcaggtgtttgattccagcatgtagtatacattgtatgtgttaaaaagaaatttgcaactgtgaataaaaggacttctttagaagaagcttcatttaaaacatgaaaggataatctgacttaagaaactttttgctaagaaaaggtaatattttattaaattttaaatttgtgttgtcacagaaatacctgaaattcagtagtacttcattcaattaattttgttttctattattttgagttatactgttttcaaagtcattatgcagtatgtataaacttataagaattaaattgatgtgataattttatgtttttataattaaatatagaatctttatgatttatgttaattcattaatttagtgtaagaagaaagttaagtctgaatgtaaattcagtgtaagatgaaaatttatcaatacttatgaaattaggctgggcgctgtggctcacacctgtaatcccaacactttgggaggctgaggtgggcagatcacttgaggtcaggagttcgagaccagcctggccaacatggtgaaaccccgtcactactaaaaatacaaaaaataattagccgggcatggtggttcacgcctggagtcccagctacttgggaggctgaggcaggagaatcgcttgaacccaggaggcggaggttgcagggagccgagattgtgccactgcactccaccctagagtgagactccct

SEQ ID NO: 4605 - protein, 321 aa, Homo sapiens [sequence omitted]

SEQ ID NO: 4606 - DNA, 1978 bp, Homo sapiens
tgggagcgttttcgtggcggggaacggaggttgaattgccctgcctgggctcatagggaaggaggatgtgaaggagcttgtgaaggcagaggaagattattgaataataaaatacagttttgaaaaaaatggatgaagaacctgaaagaactaagcgatgggaaggaggctatgaaagaacatgggagattcttaaagaagatgaatctggatcacttaaagctacaatagaagacattctattcaaggcaaagagaaaaagatgcgccacctttatgtggtagtagatggatcaagaacaatggaagaccaagatttaaagcctaatagactgacgtgtactttaaagttgttggaatactttgtagaggaatattttgatcaaaatcctattagtcagattggaataattgtaactaagagtaaaagagctgaaaaattgactgaactttcaggaaacccaagaaaacatataacgtctttgaagaaagctgtggatatgacctgccatggagagccatctctttataattccctaagcatggctatgcagactctaaaacacatgcctggacatacaagtcgagaagtactaatcatctttagcagccttacaacttgcgatccatctaatatttatgatctaatcaagaccctaaaggcagctaaaattagagtatctgttactggattgtctgcagaagttcgcgtttgcactgtacttgctcgtgaaactggtggcacgtaccatgttattttagatgaaagccattacaaagagttgctcacacatcatgttagtcctcctcctgctagctcaagttctgaatgctcacttattcgtatgggatttcctcagcacaccattgcttctttatctgaccaggatgcaaaaccctctttcagcatggcgcatttggatggcaatactgagccagggcttacattaggaggctatttctgcccacagtgtcgggcaaagtactgtgagctacctgttgaatgtaaaatctgtggtcttactttggtgtctgctccccacttggcacggtcttaccatcatttgtttcctttggatgcttttcaagaaattcccctagaagaatataatggagaaagattttgttatggatgtcagggggaattgaaagaccaacatgtttatgtttgtgctgtgtgccaaaatgttttctgtgtggactgtgatgtttttgttcatgattctctacactgttgccctggctgtattcataagattccagctccttcaggtgtttgattccagcatgtagtatacattgtatgtgttaaaaagaaatttgcaactgtgaataaaaggacttctttagaagaagcttcatttaaaacatgaaaggataatctgacttaagaaactttttgctaagaaaaggtaatattttattaaattttaaatttgtgttgtcacagaaatacctgaaattcagtagtacttcattcaattaattttgttttctattattttgagttatactgttttcaaagtcattatgcagtatgtataaacttataagaattaaattgatgtgataattttatgtttttataattaaatatagaatctttatgatttatgttaattcattaatttagtgtaagaagaaagttaagtctgaatgtaaattcagtgtaagatgaaaatttatcaatacttatgaaattaggctgggcgctgtggctcacacctgtaatcccaacactttgggaggctgaggtgggcagatcacttgaggtcaggagttcgagaccagcctggccaacatggtgaaaccccgtcactactaaaaatacaaaaaataattagccgggcatggtggttcacgcctggagtcccagctacttgggaggctgaggcaggagaatcgcttgaacccaggaggcggaggttgcagggagccgagattgtgccactgcactccaccctagagtgagactccct

SEQ ID NO: 4607 - protein, 338 aa, Homo sapiens
MRHLYVVVDGSRTMEDQDLKPNRLTCTLKLLEYFVEEYFDQNPISQIGIIVTKSKRAEKLTELSGNPRKHITSLKKAVDMTCHGEPSLYNSLSMAMQTLKHMPGHTSREVLIIFSSLTTCDPSNIYDLIKTLKAAKIRVSVTGLSAEVRVCTVLARETGGTYHVILDESHYKELLTHHVSPPPASSSSECSLIRMGFPQHTIASLSDQDAKPSFSMAHLDGNTEPGLTLGGYFCPQCRAKYCELPVECKICGLTLVSAPHLARSYHHLFPLDAFQEIPLEEYNGERFCYGCQGELKDQHVYVCAVCQNVFCVDCDVFVHDSLHCCPGCIHKIPAPSGV

SEQ ID NO: 4608 - DNA, 1952 bp, Homo sapiens
gtttccggctgagagtccttctagcggcgccgattattgaataataaaatacagttttgaaaaaaatggatgaagaacctgaaagaactaagcgatgggaaggaggctatgaaagaacatgggagattcttaaagaagatgaatctggatcacttaaagctacaatagaagacattctattcaaggcaaagagaaaaagagtatttgagcaccatggacaagttcgacttggaatgatgcgccacctttatgtggtagtagatggatcaagaacaatggaagaccaagatttaaagcctaatagactgacgtgtactttaaagttgttggaatactttgtagaggaatattttgatcaaaatcctattagtcagattggaataattgtaactaagagtaaaagagctgaaaaattgactgaactttcaggaaacccaagaaaacatataacgtctttgaagaaagctgtggatatgacctgccatggagagccatctctttataattccctaagcatggctatgcagactctaaaacacatgcctggacatacaagtcgagaagtactaatcatctttagcagccttacaacttgcgatccatctaatatttatgatctaatcaagaccctaaaggcagctaaaattagagtatctgttactggattgtctgcagaagttcgcgtttgcactgtacttgctcgtgaaactggtggcacgtaccatgttattttagatgaaagccattacaaagagttgctcacacatcatgttagtcctcctcctgctagctcaagttctgaatgctcacttattcgtatgggatttcctcagcacaccattgcttctttatctgaccaggatgcaaaaccctctttcagcatggcgcatttggatggcaatactgagccagggcttacattaggaggctatttctgcccacagtgtcgggcaaagtactgtgagctacctgttgaatgtaaaatctgtggtcttactttggtgtctgctccccacttggcacggtcttaccatcatttgtttcctttggatgcttttcaagaaattcccctagaagaatataatggagaaagattttgttatggatgtcagggggaattgaaagaccaacatgtttatgtttgtgctgtgtgccaaaatgttttctgtgtggactgtgatgtttttgttcatgattctctacactgttgccctggctgtattcataagattccagctccttcaggtgtttgattccagcatgtagtatacattgtatgtgttaaaaagaaatttgcaactgtgaataaaaggacttctttagaagaagcttcatttaaaacatgaaaggataatctgacttaagaaactttttgctaagaaaaggtaatattttattaaattttaaatttgtgttgtcacagaaatacctgaaattcagtagtacttcattcaattaattttgttttctattattttgagttatactgttttcaaagtcattatgcagtatgtataaacttataagaattaaattgatgtgataattttatgtttttataattaaatatagaatctttatgatttatgttaattcattaatttagtgtaagaagaaagttaagtctgaatgtaaattcagtgtaagatgaaaatttatcaatacttatgaaattaggctgggcgctgtggctcacacctgtaatcccaacactttgggaggctgaggtgggcagatcacttgaggtcaggagttcgagaccagcctggccaacatggtgaaaccccgtcactactaaaaatacaaaaaataattagccgggcatggtggttcacgcctggagtcccagctacttgggaggctgaggcaggagaatcgcttgaacccaggaggcggaggttgcagggagccgagattgtgccactgcactccaccctagagtgagactccct

SEQ ID NO: 4609 - protein, 395 aa, Homo sapiens [sequence omitted]

SEQ ID NO: 4610 - DNA, 2169 bp, Homo sapiens
gtgtggaagtctgtgaggcgcagaggtggggcaggccgtctggctagctaggcggctgggagcgttttcgtggcggggaacggaggttgaattgccctgcctgggctcatagggaaggaggatgtgaaggagcttgtgaaggcagaggaaggctggagtgcagtggcacaaccttggctcgctccagtgtctacctgccaggttcaagtgattctcctgcctcagcctcccgagtagctgggattacagattattgaataataaaatacagttttgaaaaaaatggatgaagaacctgaaagaactaagcgatgggaaggaggctatgaaagaacatgggagattcttaaagaagatgaatctggatcacttaaagctacaatagaagacattctattcaaggcaaagagaaaaagagtatttgagcaccatggacaagttcgacttggaatgatgcgccacctttatgtggtagtagatggatcaagaacaatggaagaccaagatttaaagcctaatagactgacgtgtactttaaagttgttggaatactttgtagaggaatattttgatcaaaatcctattagtcagattggaataattgtaactaagagtaaaagagctgaaaaattgactgaactttcaggaaacccaagaaaacatataacgtctttgaagaaagctgtggatatgacctgccatggagagccatctctttataattccctaagcatggctatgcagactctaaaacacatgcctggacatacaagtcgagaagtactaatcatctttagcagccttacaacttgcgatccatctaatatttatgatctaatcaagaccctaaaggcagctaaaattagagtatctgttactggattgtctgcagaagttcgcgtttgcactgtacttgctcgtgaaactggtggcacgtaccatgttattttagatgaaagccattacaaagagttgctcacacatcatgttagtcctcctcctgctagctcaagttctgaatgctcacttattcgtatgggatttcctcagcacaccattgcttctttatctgaccaggatgcaaaaccctctttcagcatggcgcatttggatggcaatactgagccagggcttacattaggaggctatttctgcccacagtgtcgggcaaagtactgtgagctacctgttgaatgtaaaatctgtggtcttactttggtgtctgctccccacttggcacggtcttaccatcatttgtttcctttggatgcttttcaagaaattcccctagaagaatataatggagaaagattttgttatggatgtcagggggaattgaaagaccaacatgtttatgtttgtgctgtgtgccaaaatgttttctgtgtggactgtgatgtttttgttcatgattctctacactgttgccctggctgtattcataagattccagctccttcaggtgtttgattccagcatgtagtatacattgtatgtgttaaaaagaaatttgcaactgtgaataaaaggacttctttagaagaagcttcatttaaaacatgaaaggataatctgacttaagaaactttttgctaagaaaaggtaatattttattaaattttaaatttgtgttgtcacagaaatacctgaaattcagtagtacttcattcaattaattttgttttctattattttgagttatactgttttcaaagtcattatgcagtatgtataaacttataagaattaaattgatgtgataattttatgtttttataattaaatatagaatctttatgatttatgttaattcattaatttagtgtaagaagaaagttaagtctgaatgtaaattcagtgtaagatgaaaatttatcaatacttatgaaattaggctgggcgctgtggctcacacctgtaatcccaacactttgggaggctgaggtgggcagatcacttgaggtcaggagttcgagaccagcctggccaacatggtgaaaccccgtcactactaaaaatacaaaaaataattagccgggcatggtggttcacgcctggagtcccagctacttgggaggctgaggcaggagaatcgcttgaacccaggaggcggaggttgcagggagccgagattgtgccactgcactccaccctagagtgagactccct

SEQ ID NO: 4611 - protein, 395 aa, Homo sapiens [sequence omitted]

SEQ ID NO: 4612 - DNA, 1902 bp, Homo sapiens
atggatgaagaacctgaaagaactaagcgatgggaaggaggctatgaaagaacatgggagattcttaaagaagatgaatctggatcacttaaagctacaatagaagacattctattcaaggcaaagagaaaaaggtatgtaaccttcctattatttgagcaccatggacaagttcgacttggaatgatgcgccacctttatgtggtagtagatggatcaagaacaatggaagaccaagatttaaagcctaatagactgacgtgtactttaaagttgttggaatactttgtagaggaatattttgatcaaaatcctattagtcagattggaataattgtaactaagagtaaaagagctgaaaaattgactgaactttcaggaaacccaagaaaacatataacgtctttgaagaaagctgtggatatgacctgccatggagagccatctctttataattccctaagcatggctatgcagactctaaaacacatgcctggacatacaagtcgagaagtactaatcatctttagcagccttacaacttgcgatccatctaatatttatgatctaatcaagaccctaaaggcagctaaaattagagtatctgttactggattgtctgcagaagttcgcgtttgcactgtacttgctcgtgaaactggtggcacgtaccatgttattttagatgaaagccattacaaagagttgctcacacatcatgttagtcctcctcctgctagctcaagttctgaatgctcacttattcgtatgggatttcctcagcacaccattgcttctttatctgaccaggatgcaaaaccctctttcagcatggcgcatttggatggcaatactgagccagggcttacattaggaggctatttctgcccacagtgtcgggcaaagtactgtgagctacctgttgaatgtaaaatctgtggtcttactttggtgtctgctccccacttggcacggtcttaccatcatttgtttcctttggatgcttttcaagaaattcccctagaagaatataatggagaaagattttgttatggatgtcagggggaattgaaagaccaacatgtttatgtttgtgctgtgtgccaaaatgttttctgtgtggactgtgatgtttttgttcatgattctctacactgttgccctggctgtattcataagattccagctccttcaggtgtttgattccagcatgtagtatacattgtatgtgttaaaaagaaatttgcaactgtgaataaaaggacttctttagaagaagcttcatttaaaacatgaaaggataatctgacttaagaaactttttgctaagaaaaggtaatattttattaaattttaaatttgtgttgtcacagaaatacctgaaattcagtagtacttcattcaattaattttgttttctattattttgagttatactgttttcaaagtcattatgcagtatgtataaacttataagaattaaattgatgtgataattttatgtttttataattaaatatagaatctttatgatttatgttaattcattaatttagtgtaagaagaaagttaagtctgaatgtaaattcagtgtaagatgaaaatttatcaatacttatgaaattaggctgggcgctgtggctcacacctgtaatcccaacactttgggaggctgaggtgggcagatcacttgaggtcaggagttcgagaccagcctggccaacatggtgaaaccccgtcactactaaaaatacaaaaaataattagccgggcatggtggttcacgcctggagtcccagctacttgggaggctgaggcaggagaatcgcttgaacccaggaggcggaggttgcagggagccgagattgtgccactgcactccaccctagagtgagactccct

SEQ ID NO: 4613 - protein, 400 aa, Homo sapiens
MDEEPERTKRWEGGYERTWEILKEDESGSLKATIEDILFKAKRKRYVTFLLFEHHGQVRLGMMRHLYVVVDGSRTMEDQDLKPNRLTCTLKLLEYFVEEYFDQNPISQIGIIVTKSKRAEKLTELSGNPRKHITSLKKAVDMTCHGEPSLYNSLSMAMQTLKHMPGHTSREVLIIFSSLTTCDPSNIYDLIKTLKAAKIRVSVTGLSAEVRVCTVLARETGGTYHVILDESHYKELLTHHVSPPPASSSSECSLIRMGFPQHTIASLSDQDAKPSFSMAHLDGNTEPGLTLGGYFCPQCRAKYCELPVECKICGLTLVSAPHLARSYHHLFPLDAFQEIPLEEYNGERFCYGCQGELKDQHVYVCAVCQNVFCVDCDVFVHDSLHCCPGCIHKIPAPSGV

SEQ ID NO: 4614 - DNA, 6742 bp, Homo sapiens
ttatatggtttggctctgtccgcacccaaatctcatcttgaattgtaacaattcccatgtgtcaagggtggggccaggtggagataactgaatcatggaggcagtttcccccatgctgttctcatggtagtgaataagtctcatgaggtctgatggttttataaatggatgttcccctgcacatgctctctcctgcccaccatgtctgactaaattttgtatttttactagagacgggctttcactatgttggccaggctggcctccaactcctgatctcgtgatccgtccaccccgacctcccaaagtgctaggatcataggcataagccaccacacccggcctcttttttttctttttcttttttttatctggagactgagttttgcactcgttgcccaggctggagtgcaatggtgcgatctcagctcactgcagtctccacctcagcaggagagcaggaatcttcagtgatccacgggcaaatatgcagccattgtgggcacctgttcctcccgcgacctttgtgcccacgtctctccctccagtacctactgcacggccccccacgtccgcctcctgccattgccagcaggtgccttgcgcgggtacctggctgcgcttattcatccattatggtcgctctgtcactggtgccattatgtgctcacatgcccactccctcaggtttagaagtcgcgttgcccggcaacagaacaatctgctggcttagcctttggccaagttggcagctggacgaggacgctcagagcccagctcttgagagttcaagtatccgacagttccccactgctcccaggagcggttacccgggcactctgtgcccctcattcctgtttgggccaaggccgaggacctgcgagtagggctcagttgcctggagccccttcagcccatcccccagttcactttgcttgtgggatctccccgttgctcctgcccctggactgagtggcaggccatcctacaaacacccgcacactcgacatcagtggtgtcaagacaactctaagaaggttttccgtgatcctgcaagacctgtgttccatcctggtgattctgtcttcaatttcactgcacaggtaccacagtaagccagtgctgtgtgctccgagttccagggcatcccccagcccagccactacactgagcacaaggactctgtggggcccaggagcaggtagtcacccctttggggtccacaacacccggctgtccccagacttgtgtccagggaagatagtgttgagggccctcaaggagagcagggcagggatgcctgagcaggacaaggaccccagagtccaagaaaatcctgatgatcagagaacggtccccgaggtcaccggggatgcacggtctgcattttggcccctgcgggacaatggaggcccctctccctttgtgcccaggcccgggcctctgcagacagacctccacgcccagagctcagaaatcagatataaccacacatcccagacatcctggacgagctcgagcaccaaacgaaatgccatctccagctcctacagctccacgggaggcttgccggggctaaagcagaggagggggccagcctcatcccgctgccagctgaccctcagttactcaaagacagtgagtgaggacaggcctcaggctgtctcttcgggtcacacacggtgtgaaaagggggcagatacatcaccagggcagacaatcgccccaacgggtggctcccccagatcccaggattctaggccccgtagacgcaagattcccctgctgccacgcaggcgaggggagcctttgatgctgccacctcccttagagctggggtaccgggtcacggctgaagacctgcacctggaaaaagagacggcattccagcgcatcaacagtgcactgcacgttgaggacaaggccatcccggactgcagaccctcacagccttcccacactttgtcctcacttgcaacaggggcttcgggtgggcctcccgtttctaaagcacacactatggatgcacagcaggacagacccaagtcccaagactgcctggacctagtggcccccctagcatctgctgcagaggtccccgctacagctcccgtgtctgggaagaagcacagaccaccaggacccctgttctcctcctcagatccccttccggccaactcttcccactcccgggactcagcccaggtcacctcgatgattcctgcccccttgacagctgcaagcagggatgccggcatgagaagaacaagttcggctcctgcacctgccgcagcagcccctcccccctccacattgaaccccacgtcggggtcactactcaatgcagtggatggaggcccctcacatttcttgtcctcagccacagctgcagcacgtgtccagaggtcagaagtgagatataaccagagatcccagacctcccggaccagatcgtgcctcaaacgaaatgccagctccagctcccacagctctacggaaggcctccaagaagtaaagcggaggagggggccagcctcatcccactgccagctggcccacagttcctcaaacacagtgagtgaggatggacctcaggctgtctcttcgggtcaccgctgtgaaaacaaggcaggtacagcaccagggcagacactcgcccccaggggtggctcccccagatcccaggcctctaggccccacatcaacagtgcactgcacgttgaggacaaggccatctcggactgcagaccctcacggccttcccacactttgtcctcacttgcaacaggggcttcgggtgggcctcccgtttctaaagcacccactatggatgcacagcaggacagacccaagtcccaagactgcctgggcctagtggcccccctagcatctgctgcagaggtccctgctacagctcccgtgtctgggaagaagcacagaccaccaggacccctgttctcctcctcagatccccttcctgccacctcttcccactcccgggactcagcccaggtcacctcgctgattcctgccaccttcacagctgcaagcagggatgccggcatgagaagaacaaggtcggctcctgcagctaccgcagcagcccctcccccatccacattgaacaacacgtcggggtcactactcaatgcagtggatggaggcccctcacatttcttggcctcagccacagctgcagcacgtgcccagaggtcagaagtgagatataaccagagatcccagacctcccggaccagatcctgcctcaaacgaaatgccagctccagctccagctcccacagctctacggaaggcctccaggaactaaagcggaggagggggccagcctcatcctactgccagctggcccacagttccccaaacacagtgagtgaggacggacctcaggctgtctcttcgggtcaccgctgtgaaaacaaggcaggtacagcaccagggcacacactcgcccccaggggaggctcccccagatcccaggcctctaggccccacatcaacagtgcactgcacgttgaggacaaggccatctcggactgcagaccctcacggccttcccacactttgtcctcacttgcaacaggggcttccggtgggcctcccgtttctaaagcacccactatggacgcacagcaggacagacccaagtcccaagactgcctgggcctagtggcccccctagcatctgctgcagaggtcccctctacagctcccgtgtctgggaagaagcacagaccaccaggacccctgttctcctcctcagatccccttcctgccacctcttcccactcccgggactcagcccaggtcacctcgctgattcctgccaccttcacagctgcaagcagggatgccggcatgagaagaacaaggcctggcacctcggctcctgcagctgccgcagcagcccctcccccctccacattgaaccccacgtcggggtcgctactcaatgcagtggatggaggccccgcacatttcttgggctcagccacagctgcagcacgtgcccagaggtcagaagtgagatataaccagagatcccagacctcccggaccagatcgtgcctcaaacgaaatgccagctccagctcccacagctctacggaaggcctccacgaagtaaagcggaggagggggccagcctcatcccactgccagctggcccacagttcctcagtgagtgaggacggacctcaggctgtctcttcgggtcaccgctgtgaaaacaaggcaggtacagcaccagggcagacacttgcccccaggggtggctcccccagatcccaggcctctaggccccgcatcaacactgcactgcacgttgaggacaaggccatctcggactgcagaccctcacggccttcccacactttgtcctcacttgcaacaggggcttcgggtgggcctcccgtttctaaagcacccactatggatgcacagcaggacagacccaagtcccaagactgcctgggcctactggcccccctagcatctgctgcagaggtctcctctacagctcccgtgtctgggaagaagcacagaccaccaggacccctgttctcctcctcagatccccttcctgccacctcttcccactccggggactcagcccaggacacctcgctgattcctgcccccttcacacctgcaagcagggatgccggcatcagaagaatgtttcgtgttcgaaattgtttgaggggtttgggtttatttttgttggttttttcttttttttttttgcttacgtgggcatccttcagcttttaataatctgaaaaattctatttacccattgtcaatgtgtataaattaatctcagtcaattttatacaataaaaggtgaacttttatccatcaaacaataatttaacaaaaaatgtaccggaagaagaatgttcattacaaatataggaaacataaatattaccaaatattggcaagcactaaaatgttcagaaatataagtctattacagttatagctctctcaagcaaaaaaacagcagagaaaaacttagtttacctgaggggctatttatttacttagggatttgttaaaaggtcaaatggggtcacacagaatactaagaagagctgttcatccaggcctcactaagaactcttcttcatgcagtagctatatggtaatatgacaactgctcctacgacccaaagaggaactacagcaactactctttagcatctgttgctcccaactctgctttgcaattatatgactcaagcattctggctccgttaactattactgctgttactcccaagtaaattccctctaaaaaataaaaatttttaaagctgtaatttaagctctctgctgcctcatgacttcaattccatcagagttacgcattgtttcctctgtacatctttgctctgcttccattgctaattccctagaaaagtgttgtatattcaaagttccaaagaaacagaatatccaagacatcaccaatcatccaaaacatagtgtaggaggccacagttaagagaagcaagaccattagctctttttataggctcgagaacaacaggatgctttggtcctgtatcagcaggacgctttttgggtagatcctactgccaccctactatcgggtagatcctactgtcaccctagctatgggcacatgtcagagtcccatgtaataaaggagacaaaaggaaaccaccacgagtataaactaagaaaagtactccaaggtttctaagaatggagctgtataactcactttgccccgtttgttacttctccacggtacttaccaccacctattacatacattttgtttatagtcagtcttcccccattagaatgaaagttccgtgaggataggactatacagtcagccctcagtatccatgggggactggtttcaggatctcctgagggtaacaaaggatactcaagtccctgatataaaatgacatagtatttgcacatcacctttgcacatcctcccatatacttcatatcaactctagatcactcataatatccgatgtaaatgtcatgcaaatagttattgtactatattgtgtaaggaataaggacaagaaaaaagtctgtacatgttcagtacagacgcaatttttttttccaatatttccaatccttggttgccttaacggatgtagaacccaggaataagttctggtgtcctattgcatagtaggatgagtatagttaacaataacatattatatatttgaaaatagccagaagagtagattttgaattttctccctacagaaaaatcattatgcaaattaccctgatttgatcattacacattgagtacatgtattaaaacatcacattctaccccatatatatgtacagttattatgtgtccataaaaatttaatgtcaatgtgtgaaataaaatgaaaaaataaaaatttttaaagctgtaattatctccatctggtaggaatatatacaatctgaaataaaaaatatatttgtaattgttaggacaaaatagattatacattaagtctgcaaattataaattataaaattctcacagaacctgaaaaattattgatactgttaaatatttaaaaagctgtccttggagagaaagaaacctatcagatttacatcaacaagtgtaatatgtcagcctattaccatctgctacagactgcatgtttgtgttccctcaaaattcatatgataggcccggcgcggtggc

SEQ ID NO: 4615 - protein, 1164 aa, Homo sapiens
MPEQDKDPRVQENPDDQRTVPEVTGDARSAFWPLRDNGGPSPFVPRPGPLQTDLHAQSSEIRYNHTSQTSWTSSSTKRNAISSSYSSTGGLPGLKQRRGPASSRCQLTLSYSKTVSEDRPQAVSSGHTRCEKGADTSPGQTIAPTGGSPRSQDSRPRRRKIPLLPRRRGEPLMLPPPLELGYRVTAEDLHLEKETAFQRINSALHVEDKAIPDCRPSQPSHTLSSLATGASGGPPVSKAHTMDAQQDRPKSQDCLDLVAPLASAAEVPATAPVSGKKHRPPGPLFSSSDPLPANSSHSRDSAQVTSMIPAPLTAASRDAGMRRTSSAPAPAAAAPPPSTLNPTSGSLLNAVDGGPSHFLSSATAAARVQRSEVRYNQRSQTSRTRSCLKRNASSSSHSSTEGLQEVKRRRGPASSHCQLAHSSSNTVSEDGPQAVSSGHRCENKAGTAPGQTLAPRGGSPRSQASRPHINSALHVEDKAISDCRPSRPSHTLSSLATGASGGPPVSKAPTMDAQQDRPKSQDCLGLVAPLASAAEVPATAPVSGKKHRPPGPLFSSSDPLPATSSHSRDSAQVTSLIPATFTAASRDAGMRRTRSAPAATAAAPPPSTLNNTSGSLLNAVDGGPSHFLASATAAARAQRSEVRYNQRSQTSRTRSCLKRNASSSSSSHSSTEGLQELKRRRGPASSYCQLAHSSPNTVSEDGPQAVSSGHRCENKAGTAPGHTLAPRGGSPRSQASRPHINSALHVEDKAISDCRPSRPSHTLSSLATGASGGPPVSKAPTMDAQQDRPKSQDCLGLVAPLASAAEVPSTAPVSGKKHRPPGPLFSSSDPLPATSSHSRDSAQVTSLIPATFTAASRDAGMRRTRPGTSAPAAAAAAPPPSTLNPTSGSLLNAVDGGPAHFLGSATAAARAQRSEVRYNQRSQTSRTRSCLKRNASSSSHSSTEGLHEVKRRRGPASSHCQLAHSSSVSEDGPQAVSSGHRCENKAGTAPGQTLAPRGGSPRSQASRPRINTALHVEDKAISDCRPSRPSHTLSSLATGASGGPPVSKAPTMDAQQDRPKSQDCLGLLAPLASAAEVSSTAPVSGKKHRPPGPLFSSSDPLPATSSHSGDSAQDTSLIPAPFTPASRDAGIRRMFRVRNCLRGLGLFLLVFSFFFLLTWASFSF

SEQ ID NO: 4616 - DNA, 4873 bp, Homo sapiens
gccaccgcgccgggcctatcatatgaattttgagggaacacaaacatgcagtctgtagcagatggtaataggctgacatattacacttgttgatgtaaatctgataggtttctttctctccaaggacagctttttaaatatttaacagtatcaataatttttcaggttctgtgagaattttataatttataatttgcagacttaatgtataatctattttgtcctaacaattacaaatatattttttatttcagattgtatatattcctaccagatggagataattacagctttaaaaatttttattttttcattttatttcacacattgacattaaatttttatggacacataataactgtacatatatatggggtagaatgtgatgttttaatacatgtactcaatgtgtaatgatcaaatcagggtaatttgcataatgatttttctgtagggagaaaattcaaaatctactcttctggctattttcaaatatataatatgttattgttaactatactcatcctactatgcaataggacaccagaacttattcctgggttctacatccgttaaggcaaccaaggattggaaatattggaaaaaaaaattgcgtctgtactgaacatgtacagacttttttcttgtccttattccttacacaatatagtacaataactatttgcatgacatttacatcggatattatgagtgatctagagttgatatgaagtatatgggaggatgtgcaaaggtgatgtgcaaatactatgtcattttatatcagggacttgagtatcctttgttaccctcaggagatcctgaaaccagtcccccatggatactgagggctgactgtatagtcctatcctcacggaactttcattctaatgggggaagactgactataaacaaaatgtatgtaataggtggtggtaagtaccgtggagaagtaacaaacggggcaaagtgagttatacagctccattcttagaaaccttggagtacttttcttagtttatactcgtggtggtttccttttgtctcctttattacatgggactctgacatgtgcccatagctagggtgacagtaggatctacccgatagtagggtggcagtaggatctacccaaaaagcatcctgctgatacaggaccaaagcatcctgttgttctcgagcctataaaaagagctaatggtcttgcttctcttaactgtggcctcctacactgtgttttggatgattggtgatgtcttggatattctgtttctttggaactttgaatatacaacactttactagggaattagcaatggaagcagagcaaagatgtacagaggaaacaatgcgtaactctgatggaattgaagtcatgaggcagcagagagcttaaattacagctttaaaaatttttattttttagagggaatttacttgggagtaacagcagtaatagttaacggagccagaatgcttgagtcatataattgcaaagcagagttgggagcaacagatgctaaagagtagttgctgtagttcctctgtgggtcgtaggagcagttgtcatattactatatagctactgcatgaagaagagttcttagtgaggcctgggtgaacagctcttcttagtattctgtgtgaccccatttgaccttttaacaaatccctaagtaaataaatagcccctcaggaaaactaagtttttctctgctgtttttttgcttgagagagctataactgtaatagacttatatttctgaacattttagtgcttgccaatatttggtaatatttatgtttcctatatttgtaatgaacattcttcttccggtacattttttgttaaattattgtttgatggataaaagttcaccttttattgtataaaattgactgagattaatttatacacattgacaatgggtaaatagaatttttcagattattaaaagctgaaggatgcccacgtaagcaaaaaaaaaaaaagaaaaaaccaacaaaaataaacccaaacccctcaaacaatttcgaacacgaaacattcttctgatgccggcatccctgcttgcaggtgtgaagggggcaggaatcagcgaggtgtcctgggctgagtccccggagtgggaagaggtggcaggaaggggatctgaggaggagaacaggggtcctggtggtctgtgcttcttcccagacacgggagctgtagaggagacctctgcagcagatgctaggggggccagtaggcccaggcagtcttgggacttgggtctgtcctgctgtgcatccatagtgggtgctttagaaacgggaggcccacccgaagcccctgttgcaagtgaggacaaagtgtgggaaggccgtgagggtctgcagtccgggatggccttgtcctcaacgtgcagtgcactgttgatgcgctggaatgccgtctctttttccaggtgcaggtcttcagccgtgacccggtaccccagctctaagggaggtggcagcatcaaaggctcccctcgcctgcgtggcagcaggggaatcttgcgtctacggggcctagagtcctgggatctgggggagccacccgttggggcgattgtctgccctggtgctgtatctgcccccttttcacaccgtgtgtgacccgaagagacagcctgaggcctgtcctcactcactgtctttgagtaactgagggtcagctggcagcgggatgaggctggccccctcctctgctttagccccggcaagcctcccgtggagctgtaggagctggagatggcatttcgtttggtgttcgagctcgtccaggatgtctgggatgtgtggttatatctgatttctgagctctgggcgtggaggtctgtctgcagaggcccgggcctgggcacaaagggagaggggcctccattgtcccgcaggggccaaaatgcagaccgtgcatccccggtgacctcggggaccgttctctgatcatcaggattttcttggactctggggtccttgtcctgctcaggcatccctgccccgctctccttgagggccctcaacactatcttccctggacacaagtctggggacagccgggtgttgtggaccccaaaggggtgactacctgctcctgggccccacagagtccttgtgctcagtgtagtggctgagctgggggatgccctggaactcggagcacacagcactggcttactgtggtacctgtgcagtgaaattgaagacagaatcaccaggatggaacacaggtcttgcaggatcacttgaaaccttcttagagttgtcttgacaccagtgatgtcgagtgtccgggtgtttgtaggatggcctgccactcagtccaggggcaggagcaacggggagatcccacaagcaaagtgaactgggggatgggctgaaggggctccaggcaactgagccctactcgcaggtcctcggccttggcccaaacaggaatgaggggcacagagtgcccgggtaaccgctcctgggagcagtggggaactgtcggatacttgaactctcaagagctgggctctgagcgtcctcgtccagctgccaacttggccaaaggctaagccagcagattgttctgttgccgggcaacgcgacttctaaacctgagggagtgggcatgtgagcacataatggcaccagtgacagagcgaccataatggatgaataagcgcagccagggctggtgaattaccagatctccgtcaagtgcagtaaccagttcaagttggaagtgtgtcttttgaatgcagaaaacaaagtcgtggacaaccaggctgggacccagggccagctgaaggtgctgggtgccaacctctggtggccgtacctgatgcacgaacaccccgcctacctgtactcgtgggaggatggtgattgctcacaccaaagccttggacccctcccagcctgtgacctttgggaccaactccacctacgcagcagacaagggggctctgtatgtggatgtgatccgtgtgaacagctactactcttggtatcgcaactacgggcacctggagttgattcggctgcagctggccgcccagtttgagaattggtgtaagacatcacaatcccattattcagagcgcgtatggagtggaaacgcttgtagggtttcaccaggtaagcggtgttgaactttctgcttgtgtattctctctgggcagagatgccacttgcctcccccaccatgccatctctgaagaatattacagaccattttggagcatggtgaataagaaattttcaccttaggagttcagttgaatagtcatttttatatttgtgactgcaagtcactcttaggggctgtacttccttagtactggtagcattattatccaatggacttttatagctttcattaggttttcttttgtttttgttctttaaagaacgttttacttatcttagtatttcatttttcatctatattatgaggcagtaagagtcttctgtttttccaaagttgagactgctttatatttatttcgtattgtctacagctgtagtgttcaatacattagccactagccacatgtggttatttaaataagataaaataaaaattggccgggcgtggtggctcacgccggtaatcccagcactttgggaggccgaggcgggcagatcattaggtcaggagatcgagaccatccttactaagacggtgaacccccatctctattaaaaatacaaaaaaattagccgggcgtggtggcgggcgcctgcagtcccagctactcaggaggctgaggcaggagaatggcgtgaacctgggaggcagagtttgcagtgagccgagatggcgccactgcactccagcctgggggacagagcgagactc

SEQ ID NO: 4617 - protein, 194 aa, Homo sapiens
MPASLLAGVKGAGISEVSWAESPEWEEVAGRGSEEENRGPGGLCFFPDTGAVEETSAADARGASRPRQSWDLGLSCCASIVGALETGGPPEAPVASEDKVWEGREGLQSGMALSSTCSALLMRWNAVSFSRCRSSAVTRYPSSKGGGSIKGSPRLRGSRGILRLRGLESWDLGEPPVGAIVCPGAVSAPFSHRV

SEQ ID NO: 4618 - DNA, 1379 bp, Homo sapiens
tgctacgcggcacccggtcccgtcaaccgcccaacggctgaggagtgcggcagcgcgccagagactggcgggcagctccgcccgcggccgggatgcactaggcaaagccagctgggctcctgagtccggtgggtacttggagaacttactacgtctagctggaggattgtaaatgcaccaatcagcatgctgtgtctagctcaagaactcaagctccatgaggagatgtttcattgtcgagagcagtcatgatggcctgcactccacacaatgcaacagagtgaaagagcaggttctgcttctttggtgtagtcctgaagcttcctaagaaacttcacatcaggtgatggataggagcaaccctgtaaaaccagccttagactatttttcaaacagatggtgattgctcacaccaaagccttggacccctcccagcctgtgacctttgggaccaactccacctacgcagcagacaagggggctctgtatgtggatgtgatccgtgtgaacagctactactcttggtatcgcaactacgggcacctggagttgattcggctgcagctggccgcccagtttgagaattggtgtaagacatcacaatcccattattcagagcgcgtatggagtggaaacgcttgtagggtttcaccaggtaagcggtgttgaactttctgcttgtgtattctctctgggcagagatgccacttgcctcccccaccatgccatctctgaagaatattacagaccattttggagcatggtgaataagaaattttcaccttaggagttcagttgaatagtcatttttatatttgtgactgcaagtcactcttaggggctgtacttccttagtactggtagcattattatccaatggacttttatagctttcattaggttttcttttgtttttgttctttaaagaacgttttacttatcttagtatttcatttttcatctatattatgaggcagtaagagtcttctgtttttccaaagttgagactgctttatatttatttcgtattgtctacagctgtagtgttcaatacattagccactagccacatgtggttatttaaataagataaaataaaaattggccgggcgtggtggctcacgccggtaatcccagcactttgggaggccgaggcgggcagatcattaggtcaggagatcgagaccatccttactaagacggtgaacccccatctctattaaaaatacaaaaaaattagccgggcgtggtggcgggcgcctgcagtcccagctactcaggaggctgaggcaggagaatggcgtgaacctgggaggcagagtttgcagtgagccgagatggcgccactgcactccagcctgggggacagagcgagactc

SEQ ID NO: 4619 - protein, 21 aa, Homo sapiens
MLCLAQELKLHEEMFHCREQS

SEQ ID NO: 4620 - DNA, 3490 bp, Homo sapiens
gagtatcctttgttaccctcaggagatcctgaaaccagtcccccatggatactgagggctgactgtatagtcctatcctcacggaactttcattctaatgggggaagactgactataaacaaaatgtatgtaataggtggtggtaagtaccgtggagaagtaacaaacggggcaaagtgagttatacagctccattcttagaaaccttggagtacttttcttagtttatactcgtggtggtttccttttgtctcctttattacatgggactctgacatgtgcccatagctagggtgacagtaggatctacccgatacatcctgctgatacaggaccaaagcatcctgttgttctcgagcctataaaaagagctaatggtcttgcttctcttaactgtggcctcctacactgtgttttggatgattggtgatgtcttggatattctgtttctttggaactttgaatatacaacactttactagggaattagcaatggaagcagagcaaagatgtacagaggaaacaatgcgtaactctgatggaattgaagtcatgaggcagcagagagcttaaattacagctttaaaaatttttattttttagagggaatttacttgggagtaacagcagtaatagttaacggagccagaatgcttgagtcatataattgcaaagcagagttgggagcaacagatgctaaagagtagttgctgtagttcctctgtgggtcgtaggagcagttgtcatattactatatagctactgcatgaagaagagttcttagtgaggcctgggtgaacagctcttcttagtattctgtgtgaccccatttgaccttttaacaaatccctaagtaaataaatagcccctcaggaaaactaagtttttctctgctgtttttttgcttgagagagctataactgtaatagacttatatttctgaacattttagtgcttgccaatatttggtaatatttatgtttcctatatttgtaatgaacattcttcttccggtacattttttgttaaattattgtttgatggataaaagttcaccttttattgtataaaattgactgagattaatttatacacattgacaatgggtaaatagaatttttcagattattaaaagctgaaggatgcccacgtaagcaaaaaaaaaaaaagaaaaaaccaacaaaaataaacccaaacccctcaaacaatttcgaacacgaaacattcttctgatgccggcatccctgcttgcaggtgtgaagggggcaggaatcagcgaggtgtcctgggctgagtccccggagtgggaagaggtggcaggaaggggatctgaggaggagaacaggggtcctggtggtctgtgcttcttcccagacacgggagctgtagaggagacctctgcagcagatgctaggggggccagtaggcccaggcagtcttgggacttgggtctgtcctgctgtgcatccatagtgggtgctttagaaacgggaggcccacccgaagcccctgttgcaagtgaggacaaagtgtgggaaggccgtgagggtctgcagtccgggatggccttgtcctcaacgtgcagtgcactgttgatgcgctggaatgccgtctctttttccaggtgcaggtcttcagccgtgacccggtaccccagctctaagggaggtggcagcatcaaaggctcccctcgcctgcgtggcagcaggggaatcttgcgtctacggggcctagagtcctgggatctgggggagccacccgttggggcgattgtctgccctggtgctgtatctgcccccttttcacaccgtgtgtgacccgaagagacagcctgaggcctgtcctcactcactgtctttgagtaactgagggtcagctggcagcgggatgaggctggccccctcctctgctttagccccggcaagcctcccgtggagctgtaggagctggagatggcatttcgtttggtgttcgagctcgtccaggatgtctgggatgtgtggttatatctgatttctgagctctgggcgtggaggtctgtctgcagaggcccgggcctgggcacaaagggagaggggcctccattgtcccgcaggggccaaaatgcagaccgtgcatccccggtgacctcggggaccgttctctgatcatcaggattttcttggactctggggtccttgtcctgctcaggcatccctgccccgctctccttgagggccctcaacactatcttccctggacacaagtctggggacagccgggtgttgtggaccccaaaggggtgactacctgctcctgggccccacagagtccttgtgctcagtgtagtggctgagctgggggatgccctggaactcggagcacacagcactggcttactgtggtacctgtgcagtgaaattgaagacagaatcaccaggatggaacacaggtcttgcaggatcacttgaaaccttcttagagttgtcttgacaccagtgatgtcgagtgtccgggtgtttgtaggatggcctgccactcagtccaggggcaggagcaacggggagatcccacaagcaaagtgaactgggggatgggctgaaggggctccaggcaactgagccctactcgcaggtcctcggccttggcccaaacaggaatgaggggcacagagtgcccgggtaaccgctcctgggagcagtggggaactgtcggatacttgaactctcaagagctgggctctgagcgtcctcgtccagctgccaacttggccaaaggctaagccagcagattgttctgttgccgggcaacgcgacttctaaacctgagggagtgggcatgtgagcacataatggcaccagtgacagagcgaccataatggatgaataagcgcagccaggtacccgcgcaaggcacctgctggcaatggcaggaggcggacgtggggggtcgtgcagtaggtactggagggagagacgtgggcacaaaggtcgcgggaggaacaggtgcccacaatggctgcatatttgcccgtggatcactgaagattcctgctctcctgctgaggtggagactgcagtgagctgagatcgcaccattgcactccagcctgggcaacgagtgcaaaactcagtctccagataaaaaaaagaaaaagaaaaaaaagaggccgggtgtggtggcttatgcctatgatcctagcactttgggaggtcggggtggacggatcacgagatcaggagttggaggccagcctggccaacatagtgaaagcccgtctctagtaaaaatacaaaatttagtcagacatggtgggcaggagagagcatgtgcaggggaacatccatttataaaaccatcagacctcatgagacttattcactaccatgagaacagcatgggggaaactgcctccatgattcagttatctccacctggccccacccttgacacatgggaattgttacaattcaagatgagatttgggtgcggacagagccaaaccatataa

SEQ ID NO: 4621 - protein, 194 aa, Homo sapiens; identical to SEQ ID NO: 4617

SEQ ID NO: 4622 - DNA, 4313 bp, Homo sapiens
gccaccgcgccgggcctatcatatgaattttgagggaacacaaacatgcagtctgtagcagatggtaataggctgacatattacacttgttgatgtaaatctgataggtttctttctctccaaggacagctttttaaatatttaacagtatcaataatttttcaggttctgtgagaattttataatttataatttgcagacttaatgtataatctattttgtcctaacaattacaaatatattttttatttcagattgtatatattcctaccagatggagataattacagctttaaaaatttttattttttcattttatttcacacattgacattaaatttttatggacacataataactgtacatatatatggggtagaatgtgatgttttaatacatgtactcaatgtgtaatgatcaaatcagggtaatttgcataatgatttttctgtagggagaaaattcaaaatctactcttctggctattttcaaatatataatatgttattgttaactatactcatcctactatgcaataggacaccagaacttattcctgggttctacatccgttaaggcaaccaaggattggaaatattggaaaaaaaaattgcgtctgtactgaacatgtacagacttttttcttgtccttattccttacacaatatagtacaataactatttgcatgacatttacatcggatattatgagtgatctagagttgatatgaagtatatgggaggatgtgcaaaggtgatgtgcaaatactatgtcattttatatcagggacttgagtatcctttgttaccctcaggagatcctgaaaccagtcccccatggatactgagggctgactgtatagtcctatcctcacggaactttcattctaatgggggaagactgactataaacaaaatgtatgtaataggtggtggtaagtaccgtggagaagtaacaaacggggcaaagtgagttatacagctccattcttagaaaccttggagtacttttcttagtttatactcgtggtggtttccttttgtctcctttattacatgggactctgacatgtgcccatagctagggtgacagtaggatctacccgatagtagggtggcagtaggatctacccaaaaagcatcctgctgatacaggaccaaagcatcctgttgttctcgagcctataaaaagagctaatggtcttgcttctcttaactgtggcctcctacactgtgttttggatgattggtgatgtcttggatattctgtttctttggaactttgaatatacaacactttactagggaattagcaatggaagcagagcaaagatgtacagaggaaacaatgcgtaactctgatggaattgaagtcatgaggcagcagagagcttaaattacagctttaaaaatttttattttttagagggaatttacttgggagtaacagcagtaatagttaacggagccagaatgcttgagtcatataattgcaaagcagagttgggagcaacagatgctaaagagtagttgctgtagttcctctgtgggtcgtaggagcagttgtcatattactatatagctactgcatgaagaagagttcttagtgaggcctgggtgaacagctcttcttagtattctgtgtgaccccatttgaccttttaacaaatccctaagtaaataaatagcccctcaggaaaactaagtttttctctgctgtttttttgcttgagagagctataactgtaatagacttatatttctgaacattttagtgcttgccaatatttggtaatatttatgtttcctatatttgtaatgaacattcttcttccggtacattttttgttaaattattgtttgatggataaaagttcaccttttattgtataaaattgactgagattaatttatacacattgacaatgggtaaatagaatttttcagattattaaaagctgaaggatgcccacgtaagcaaaaaaaaaaaaagaaaaaaccaacaaaaataaacccaaacccctcaaacaatttcgaacacgaaacattcttctgatgccggcatccctgcttgcaggtgtgaagggggcaggaatcagcgaggtgtcctgggctgagtccccggagtgggaagaggtggcaggaaggggatctgaggaggagaacaggggtcctggtggtctgtgcttcttcccagacacgggagctgtagaggagacctctgcagcagatgctaggggggccagtaggcccaggcagtcttgggacttgggtctgtcctgctgtgcatccatagtgggtgctttagaaacgggaggcccacccgaagcccctgttgcaagtgaggacaaagtgtgggaaggccgtgagggtctgcagtccgggatggccttgtcctcaacgtgcagtgcactgttgatgcgctggaatgccgtctctttttccaggtgcaggtcttcagccgtgacccggtaccccagctctaagggaggtggcagcatcaaaggctcccctcgcctgcgtggcagcaggggaatcttgcgtctacggggcctagagtcctgggatctgggggagccacccgttggggcgattgtctgccctggtgctgtatctgcccccttttcacaccgtgtgtgacccgaagagacagcctgaggcctgtcctcactcactgtctttgagtaactgagggtcagctggcagcgggatgaggctggccccctcctctgctttagccccggcaagcctcccgtggagctgtaggagctggagatggcatttcgtttggtgttcgagctcgtccaggatgtctgggatgtgtggttatatctgatttctgagctctgggcgtggaggtctgtctgcagaggcccgggcctgggcacaaagggagaggggcctccattgtcccgcaggggccaaaatgcagaccgtgcatccccggtgacctcggggaccgttctctgatcatcaggattttcttggactctggggtccttgtcctgctcaggcatccctgccccgctctccttgagggccctcaacactatcttccctggacacaagtctggggacagccgggtgttgtggaccccaaaggggtgactacctgctcctgggccccacagagtccttgtgctcagtgtagtggctgagctgggggatgccctggaactcggagcacacagcactggcttactgtggtacctgtgcagtgaaattgaagacagaatcaccaggatggaacacaggtcttgcaggatcacttgaaaccttcttagagttgtcttgacaccagtgatgtcgagtgtccgggtgtttgtaggatggcctgccactcagtccaggggcaggagcaacggggagatcccacaagcaaagtgaactgggggatgggctgaaggggctccaggcaactgagccctactcgcaggtcctcggccttggcccaaacaggaatgaggggcacagagtgcccgggtaaccgctcctgggagcagtggggaactgtcggatacttgaactctcaagagctgggctctgagcgtcctcgtccagctgccaacttggccaaaggctaagccagcagattgttctgttgccgggcaacgcgacttctaaacctgagggagtgggcatgtgagcacataatggcaccagtgacagagcgaccataatggatgaataagcgcagccaggtacccgcgcaaggcacctgctggcaatggcaggaggcggacgtggggggtcgtgcagtaggtactggagggagagacgtgggcacaaaggtcgcgggaggaacaggtgcccacaatggctgcatatttgcccgtggatcactgaagattcctgctctcctgctgaggtggagactgcagtgagctgagatcgcaccattgcactccagcctgggcaacgagtgcaaaactcagtctccagataaaaaaaagaaaaagaaaaaaaagaggccgggtgtggtggcttatgcctatgatcctagcactttgggaggtcggggtggacggatcacgagatcaggagttggaggccagcctggccaacatagtgaaagcccgtctctagtaaaaatacaaaatttagtcagacatggtgggcaggagagagcatgtgcaggggaacatccatttataaaaccatcagacctcatgagacttattcactaccatgagaacagcatgggggaaactgcctccatgattcagttatctccacctggccccacccttgacacatgggaattgttacaattcaagatgagatttgggtgcggacagagccaaaccatataa

SEQ ID NO: 4623 - protein, 194 aa, Homo sapiens; identical to SEQ ID NO: 4617

SEQ ID NO: 4624 - DNA, 3616 bp, Homo sapiens
tgctacgcggcacccggtcccgtcaaccgcccaacggctgaggagtgcggcagcgcgccagagactggcgggcagctccgcccgcggccgggatgcactaggcaaagccagctgggctcctgagtccggtgggtacttggagaacttactacgtctagctggaggattgtaaatgcaccaatcagcatgctgtgtctagctcaagaactcaagctccatgaggagatgtttcattgtcgagagcagtcatgatggcctgcactccacacaatgcaacagagtgaaagagcaggttctgcttctttggtgtagtcctgaagcttcctaagaaacttcacatcaggtgatggataggagcaaccctgtaaaaccagccttagactatttttcaaacagatggtgattgctcacaccaaagccttggacccctcccagcctgtgacctttgtgaccaactccacctacgcagcagacaagggggctctgtatgtggatgtgatccgtgtgaacagctactactcttggtatcgcaactacgggcacctggagttgattcagctgcagctggccgcccagtttgagaattggtgtaagacatcacaatcccattattcagagcgcgtatggagtggaaacgcttgtaaggcttcaccaggatccacctctgatgttcagtgaagaggaccggaaaagtctgctagagcagtaccatctgggtctggatcaaaaacgcagaaaatacgtggttggagagctcatctggaattttgccgatttcatgactaaccagtccaaggatgaaggaaaaactggacctcattatggatttacttttgggatacactcattattccagaggagggtaaaaggctgagaagcttaagatggagctggcttgaaatcctcttgtttatggcagtacatatcggttatgattcaaaaaatatagcccatttccaaaaacctgcaacaaagagatactttctcaggtgtcagtttcttggtcgggaatgaaaatagtgccaacctgtgataccttcactctaattttactttctgaggaagttttctgtaatagttatttggtgataattattaatactggtgagaaaatcaatgtaaaagaggagaaataacccacacaaccacatacaactaggaaatgatagatggatctgaaaaaaaggatatgcactcttaacaagttcaacacccaagtactattgcaagtaccagctgtatttcatggaaaaaaaaaaaagaataactcaaaaggcagaacgaagagcctagaggtcagagatgagaggcatgaataattattcacaggcgttgaatataatcaaatgacttgcaacatttaccactgggattttaaaatgtggtggaccaatcattcttttagtctgtgcattttcccatttttttcaacaggaatgtctagagacattattcctgttttgccactgtatttttggtgaatgtgtagtaagtaactggcctctttagtatcacaaagctggatgaagaaaatgtggtacatatacaccatgaaatactatgccgccacaaaaaggaaatgagatcatgtcctctgcagggacatggatgaagctggaagccattatccttagcaaagtaacgcaggaacagaaaaccaaacaccacatgttgtctcttagaagtgggagctgaacggtaagaacacatggacacagggtggagaacaatacacactggggcttgatggggggtggaggggagggatggggagcattagaaaaaataactaatgcatgctgggcttaatacctatgtgatgggttgataggtgcagcaaaccaccctggcacatgtttatcaatgtaacaaacctgcacatcctgcacaggtactccaaaactaaaagtaaaaaaatctaaaagaaaaaaaaaaagaattaaacccaaaatcactaccccatctggacttgatttagatgaaaagcttctggactttgagctgatgctatagtgggttgaaaattttggggtcctcagaaggggatgaggatatattgcatgagagagcaacatgaatcattgagagccagagtatagagagtggtaggtagactgtaggagagccctcaatgatcccggctttcttgtattcgcgttgcacttacttgtataatatggcagatgggatgtgatgtcactttcaagattaggttataaatagactatggcttcaatcagagggttttctctctgtctagctctcttttgggtagttcattctgaggaaagccagctgccacgttatgatgtaggcctgtgaggtccacgtagcaaagaacatatggaagatttctaccaccccctaactaagcctttagatcagactgcaaccccagccaacaaggtagctacaaactcttgagaagccttgagacagaggtactcaatagagccattcctatgagaaacgtaagtatctgctgttttacaccgctaaggttttagctaatgtattatgccataatagataagttatatacaacctttatcaaataataaaagtaaccatcatcagtaatgagacaaatcaaaaaccatggcccacccaatagaacataatgaggagagtacagaattgcttctgggatatttctgacaaagatgtatatgcttcattcatacatgaggaaacatcacacatactcaagatgggagagccattctaaaaaataactaggcagaaatcttcaaaaatattaaagtcacggaaaccaagaaaaaatatgaacctgtttcagattaaaggaaactaaacagacctaacattttaatacaatgtttgattttgaacttgaactttttgttatataagacactattgagacaagtgctaatgcttgaatagggctgaaggattagattataataatacattaatgcaaatttcctgattttaaacattgtagtttgattgcacaaggagaatgtctttatgtgtggaaaataaatagtcaacattctgtcttcaagcttctgaaaaaactctgcttttagggcatagatagaagtggatgataattcacctgttcctctgctactaattgagctgctctctgtttccatggctggctcatgggatgagagaatatatctagttttttatgtttcaatttgtctctctatggcatttttgtgaaaataaggaagtgtggagacttatatatgtttctaaattataatagttcattaatgtaaagtacagacacagtcttcacttttccttcttagaccgtttaaatatggccacgaaacaagtagtctctggttggctgggcactgtggctcatgtccttaacaccaacactttgggaggccgaggcaggcaaatcacttgagatcaggagttcgagaccagcctggccaatgtggcaaaaccccatctcttctaaaaatacaaaaattagttgagtgcggtggtgcacaccggtaatcccagttactcgagaagctgaggcaggagaatcacttgaacctggaaggcagaggttgcagtgagccaagaccgcaccactacactccagcctgggcaatagagcaagactccatctcaaaaa

SEQ ID NO: 4625 - protein, 21 aa, Homo sapiens
MLCLAQELKLHEEMFHCREQS

SEQ ID NO: 4626 - DNA, 6748 bp, Homo sapiens
ttatatggtttggctctgtccgcacccaaatctcatcttgaattgtaacaattcccatgtgtcaagggtggggccaggtggagataactgaatcatggaggcagtttcccccatgctgttctcatggtagtgaataagtctcatgaggtctgatggttttataaatggatgttcccctgcacatgctctctcctgcccaccatgtctgactaaattttgtatttttactagagacgggctttcactatgttggccaggctggcctccaactcctgatctcgtgatccgtccaccccgacctcccaaagtgctaggatcataggcataagccaccacacccggcctcttttttttctttttcttttttttatctggagactgagttttgcactcgttgcccaggctggagtgcaatggtgcgatctcagctcactgcagtctccacctcagcaggagagcaggaatcttcagtgatccacgggcaaatatgcagccattgtgggcacctgttcctcccgcgacctttgtgcccacgtctctccctccagtacctactgcacgaccccccacgtccgcctcctgccattgccagcaggtgccttgcgcgggtacctggctgcgcttattcatccattatggtcgctctgtcactggtgccattatgtgctcacatgcccactccctcaggtttagaagtcgcgttgcccggcaacagaacaatctgctggcttagcctttggccaagttggcagctggacgaggacgctcagagcccagctcttgagagttcaagtatccgacagttccccactgctcccaggagcggttacccgggcactctgtgcccctcattcctgtttgggccaaggccgaggacctgcgagtagggctcagttgcctggagccccttcagcccatcccccagttcactttgcttgtgggatctccccgttgctcctgcccctggactgagtggcaggccatcctacaaacacccgcacactcgacatcactggtgtcaagacaactctaagaaggttttccgtgatcctgcaagacctgtgttccatcctggtgattctgtcttcaatttcactgcacaggtaccacagtaagccagtgctgtgtgctccgagttccagggcatcccccagctcagccactacactgagcacaaggactctgtggggcccaggagcaggtagtcacccctttggggtccacaacacccggctgtccccagacttgtgtccagggaagatagtgttgagggccctcaaggagagcggggcagggatgcctgagcaggacaaggaccccagagtccaagaaaatcctgatgatcagagaacggtccccgaggtcaccggggatgcacggtctgcattttggcccctgcgggacaatggaggcccctctccctttgtgcccaggcccgggcctctgcagacagacctccacgcccagagctcagaaatcagatataaccacacatcccagacatcctggacgagctcgagcaccaaacgaaatgccatctccagctcctacagctccacgggaggcttgccggggctaaagcagaggagggggccagcctcatcccgctgccagctgaccctcagttactcaaagacagtgagtgaggacaggcctcaggctgtctcttcgggtcacacacggtgtgaaaagggggcagatacagcaccagggcagacaatcgccccaacgggtggctcccccagatcccaggactctaggccccgtagacgcaagattcccctgctgccacgcaggcgaggggagcctttgatgctgccacctcccttagagctggggtaccgggtcacggctgaagacctgcacctggaaaaagagacggcattccagcgcatcaacagtgcactgcacgttgaggacaaggccatcccggactgcagaccctcacggccttcccacactttgtcctcacttgcaacaggggcttcgggtgggcctcccgtttctaaagcacccactatggatgcacagcaggacagacccaagtcccaagactgcctgggcctagtggcccccctagcatctgctgcagaggtccccgctacagctcccgtgtctgggaagaagcacagaccaccaggacccctgttctcctcctcagatccccttcctgccaactcttcccactcccgggactcagcccaggtcacctcgatgattcctgcccccttcacagctgcaagcagggatgccggcatgagaagaacaaggtcggctcctgcagctgccgcagcagcccctcccccctccacattgaaccccacgtcggggtcactactcaatgcagtggatggaggcccctcacatttcttggcctcagccacagctgcagcacgtgcccagaggtcagaagtgagatataaccagagatcccagacctcccggaccagatcctgcctcaaacgaaatgccagctccagctcccacagctctacggaaggcctccaggaagtaaagcggaggagggggccagcctcatcccactgccagctggccctcagttcctcaaacacagtgagtgaggacggacctcaggctgtctcttcgggtcaccgctgtgaaaacaaggcaggtacagcaccagggcagacacttgcccccaggggtggctcccccagatcccaggcctctaggccccacatcaacactgcactgcacgttgaggacaaggccatctcggactgcagaccctcacggccttcccacactttgtcctcacttgcaacaggggcttcgggtgggcctcccgtttctaaagcacccactatggatgcacagcaggacagacccaagtcccaagactccctgggcctactggcccccctagcatctgctgcagaggtcccctctacagctcccgtgtctgggaagaagcacagaccaccaggacccctgttctcctcctcagatccccttcctgccacctcttaccactcccgggacacagcacaggtcacctcgctgattcctgccaccttcacagctgcaagcagggatgccggcatgagaagaacaaggtcggctcctgcagctgccacagcagcccctcccccctccacattgaacaacacgtcggggtcactactcaatgcagtggatggaggcccctcacatttcttggcctcagccacagctgcagcacgtgcccagaggtcagaagtgagatataaccagagatcccagacctcccggaccagatcctgcctcaaacgaaatgccagctccagctccagctcccacagctctacggaaggcctccaggaactaaagcggaggagggggccagcctcatcccactgccagctggcccacagttcctcaaacacagtgagtgaggacggacctcaggctgtctcttcgggtcaccgctgtgaaaacaaggcaggtacagcaccagggcagacactcgcccccaggggaggctcccccagatcccaggcctctaggccccacatcaacagtgcactgtacgttgaggacaaggccatctcggactgcagaccctcacggccttcccacactttgtcctcacttgcaacaggggcttcgggtgggcctcccgtttctaaagcacccactatggacgcacagcaggacagacccaagtcccaagactgcctgggcctagtggcccccctagcatctgctgcagaggtcccctctacagctcccgtgtctgggaagaagcacagaccaccaggacccctgttctcctcctcagatccccttcctgccacctcttcccactcccgggactcagcccaggtcacctcgctgattcctgccaccttcacagctgcaagcagggatgccggcatgagaagaacaaggcctggcacctcggctcctgcagctgccgcagcagcccttcccccctccacattgaaccccacgtcggggtcgctactcaatgcagtggatggaggcccctcacatttcttggcctcagccacagctgcagcacgtgcccagaggtcagaagtgagatataaccagagatcccagacctcccggaccagatcctgcctcaaacgaaatgccagctccagctcccacagctctacggaaggcctccaggaactaaagcggaggagggggccagcctcatcccactgccagctggcccacagttcctcaaacacagtgagtgaggacggacctcaggctgtctcttcgggtcaccgctgtgaaaacaaggcaggtacagcaccagggcagacactcgcccccaggggtggctaccccagatcccaggcctctaggccccgcatcaacagtgcactgcacgttgaggacaaggccatctcggactgcagaccctcacggccttcccacactttgtcctcacttgcaacaggggcttcgggtgggcctcccgtttctaaagcacccactatggatgcacagcaggacagacccaagtcccaagactgcctgggcctactggcccccctagcatctgctgcagaggtctcctctacagctcccgtgtctgggaagaagcacagaccaccaggacccctgttctcctcctcagatccccttcctgccacctcttcccactccggggactcagcccaggacacctcgctgattcctgcccccttcacacctgcaagcagggatgccggcatcagaagaatgtttcgtgttcgaaactgtttgaggggtttgggtttatttttgttggttttttcttttttttttttgcttacgtgggcatccttcagcttttaataatctgaaaaattctatttacccattgtcaatgtgtataaattaatctcagtcaattttatacaataaaaggtgaacttttatccatcaaacaataatttaacaaaaaatgtaccggaagaagaatgttcattacaaatataggaaacataaatattaccaaatattggcaagcactaaaatgttcagaaatataagtctattacagttatagctctctcaagcaaaaaaacagcagagaaaaacttagttttcctgaggggctatttatttacttagggatttgttaaaaggtcaaatggggtcacacagaatactaagaagagctgttcacccaggcctcactaagaactcttcttcatgcagtagctatatagtaatatgacaactgctcctacgacccaaagaggaactacagcaactactctttagcatctgttgctcccaactctgctttgcaattatatgactcaagcattctggctccgttaactattactgctgttactcccaagtaaattccctctaaaaaataaaaatttttaaagctgtaatttaagctctctgctgcctcatgacttcaattccatcagagttacgcattgtttcctctgtacatctttgctctgcttccattgctaattccctagtaaagtgttgtatattcaaagttccaaagaaacagaatatccaagacatcaccaatcatccaaaacacagtgtaggaggccacagttaagagaagcaacaccattagctctttttataggctcgagaacaacaggatgctttggtcctgtatcagcaggacgctttttgggtagatcctactgccaccctactatcgggtagatcctactgtcaccctagctatgggcacatgtcagagtcccatgtaataaaggagacaaaaggaaaccaccacgagtataaactaagaaaagtactccaaggtttctaagaatggagctgtataactcactttgccccatttgttacttctccacggtacttaccaccacctattacatatattttgtttatagtcagtcttcccccattagaatgaaagttccgtgaggataggactatacagtcagccctcagtatccatgggggactggtttcaggatctcctgagggtaacaaaggatactcaagtccctgatataaaatgacatagtatttgcacatcacctttgcacatcctcccatatacttcatatcaactctagatcactcataatatccgatgtaaatgtcatgcaaatagttattgtactatattgtgtaaggaataaggacaagaaaaaagtctgtacatgttcagtacagacgcaatttttttttccaatatttccaatccttggttgccttaacggatgtagaacccaggaataagttctggtgtcctattgcatagtaggatgagtatagttaacaataacatattatatatttgaaaatagccagaagagtagattttgaattttctccctacagaaaaatcattatgcaaattaccctgatttgatcattacacattgagtacatgtattaaaacatcacattctaccccatatatatgtacagttattatgtgtccataaaaatttaatgtcaatgtgtgaaataaaatgaaaaaataaaaatttttaaagctgtaattatctccatctggtaggaatatatacaatctgaaataaaaaatatatttgtaattgttaggacaaaatagattatacgttaagtctgcaaattataaattataaaattctcacagaacctgaaaaattattgatactgttaaatatttaaaaagctgtccttggagagaaagaaacctatcagatttacatcaacaagtgtaatatgtcagcctattaccatctgctacagactgcatgtttgtgttccctcaaaattcatatgataggccgggcgcggtggc

SEQ ID NO: 4627 - protein, 1166 aa, Homo sapiens
MPEQDKDPRVQENPDDQRTVPEVTGDARSAFWPLRDNGGPSPFVPRPGPLQTDLHAQSSEIRYNHTSQTSWTSSSTKRNAISSSYSSTGGLPGLKQRRGPASSRCQLTLSYSKTVSEDRPQAVSSGHTRCEKGADTAPGQTIAPTGGSPRSQDSRPRRRKIPLLPRRRGEPLMLPPPLELGYRVTAEDLHLEKETAFQRINSALHVEDKAIPDCRPSRPSHTLSSLATGASGGPPVSKAPTMDAQQDRPKSQDCLGLVAPLASAAEVPATAPVSGKKHRPPGPLFSSSDPLPANSSHSRDSAQVTSMIPAPFTAASRDAGMRRTRSAPAAAAAAPPPSTLNPTSGSLLNAVDGGPSHFLASATAAARAQRSEVRYNQRSQTSRTRSCLKRNASSSSHSSTEGLQEVKRRRGPASSHCQLALSSSNTVSEDGPQAVSSGHRCENKAGTAPGQTLAPRGGSPRSQASRPHINTALHVEDKAISDCRPSRPSHTLSSLATGASGGPPVSKAPTMDAQQDRPKSQDSLGLLAPLASAAEVPSTAPVSGKKHRPPGPLFSSSDPLPATSYHSRDTAQVTSLIPATFTAASRDAGMRRTRSAPAAATAAPPPSTLNNTSGSLLNAVDGGPSHFLASATAAARAQRSEVRYNQRSQTSRTRSCLKRNASSSSSSHSSTEGLQELKRRRGPASSHCQLAHSSSNTVSEDGPQAVSSGHRCENKAGTAPGQTLAPRGGSPRSQASRPHINSALYVEDKAISDCRPSRPSHTLSSLATGASGGPPVSKAPTMDAQQDRPKSQDCLGLVAPLASAAEVPSTAPVSGKKHRPPGPLFSSSDPLPATSSHSRDSAQVTSLIPATFTAASRDAGMRRTRPGTSAPAAAAAALPPSTLNPTSGSLLNAVDGGPSHFLASATAAARAQRSEVRYNQRSQTSRTRSCLKRNASSSSHSSTEGLQELKRRRGPASSHCQLAHSSSNTVSEDGPQAVSSGHRCENKAGTAPGQTLAPRGGYPRSQASRPRINSALHVEDKAISDCRPSRPSHTLSSLATGASGGPPVSKAPTMDAQQDRPKSQDCLGLLAPLASAAEVSSTAPVSGKKHRPPGPLFSSSDPLPATSSHSGDSAQDTSLIPAPFTPASRDAGIRRMFRVRNCLRGLGLFLLVFSFFFLLTWASFSF

SEQ ID NO: 4628 - DNA, 4519 bp, Homo sapiens
atggcgctccattccgacttagacaagggagagggcactgcgaaatacaccctctcaggagatggcgctggcaccgtttttaccattgatgaaaccacaggggacattcatgcaataaggagcctagatagagaagaaaaacctttctacactcttcgtgctcaggctgtggacatagaaaccagaaagcccctggagcctgaatcagaattcatcatcaaagtgcaggatattaatgataatgagccaaagttttgggatggaccttatgttgctactgtcccagaaatgtctcctgtgggtgagtaggcaaatcaaaattctgtgagatacaatgagacctcttcaacattgactttttgcaggttgatgtaaacatcttatctatcatctaaaagaattatttttcaattctagaaaatacagttcttttcatttatttttgtaacttttttgtttttctttctgcttcattatgaagataactacaggaatatataacattagttcctgttttccaccctgtgaatttacctgaattcatagaatccttgcgtgctttaagcaaaaaatgtattttgtattgaaattgattcttatctcaattccagacacctatacagtgctggagacacctaccctacaccacgaaatgccagacagtaattcctagatcaaagtaaatgatctaaagcatgcatcacatctgatctggaagtggtccagaaacaggtgtgttgcatcttctgtagctgtaaatagagattctggaagggtgatactgtttccttttcagggtaaataacccatacttgttatgccatcaagccaagcagcaaatgaataatgtcatgaaaatattattagaacaaattaacaaattacaattacaattatcaaattaacaattagaatatagtagcaccatcattctaaaaatttaaatttgatataaatatacatttccatatcagcctaaatttacaaagtcctataatatgtaggatataaggtcaataagttaagaattccagccttaaggacaattttaaattataatttttattcctcagtcaccactgctaatccttcaatttatttcaaagtaacttctggtttttattacatttggaagataaagcaacttatcacatgtaggttacaacttaaaattcgtgtatgagccattgcttatattttctaaatctgacatgacccagggggtttctactgctcctaccaccacccaggacatgcgatgaagattgtgcacgctaccgtgagggcagaagcaggttagtagctgtaggagctgtcacatggatttactataatgcacttgaaattgtgtatgtgaccttatcaggcatttaaggaccataatctctccttgacctaagaaatcagcttgaagtaattcacttagatttcaaattttaatgtggatacccaaggctgcaaatctgttattcagtacctgctacacttttggggttgcctcttttatgcactgttagaattgctagaaatttagaagtccaattggaaagaagcatatcttgttagaaagtattcccagaaaatgaggaaggctacattttaactgtgtcttgattttacagggagaaaaataaagttaatattttgaggaaaaaataaggcttttaagatgacatgctatatagtagacaaatagtttaactcggtgcctacttcatgtacactggatgtgttaacatgaatttatgaccctcagtgactttttattaccaaaacagcttccttaaagcaaacacacacacatgcctctacagtattggaaaattccgtctccttagataaaacaattaggatttttcttgggccaactagaataattagggctgcagagttggagcctttatataaggagtttgcagctcatatccgaagagagaaatgtatttcgaaagtcaaaagtgtagttaagtgagaaagcagagtagtttcagcttttgcatttggagtgggtataatttactgtgttgtcataagatactggaaagatctttggaagaataggttcttaaagtgttttctcatgtgcccttactgacatttcccattgggccttcaagacaactccagtaaatacttaaattgattttcagtgcactgctttctttcatttttatttatttattttgagactgggtcttggtctgttgccctggctggagtgcaatggcccaatcttagctcactgaagccttaaattcctgggctgaagagatccctccacctgagcctccttaatagccagtcatgtgccaccctgcctagctattttttttttttttttttttttttttactttttgtagagaagggatctagctatgttgcccaggctgttctcaagtagtcctggcctcaaatgatccctccaccttggcttcccagagcactgggattacagtcatgagccaccctcctggctcctttttttttttatttttaataacagaagggtatttcttttgaatgtgaaattttaccacatggtatgaattagtccaagtgtttttatactaaatttacataatatacacttttcaagtaagtacaaagaggtataaacactgcttatgaattgaatgttaaaaaataaatctctatgcattacttttgtctttccccataatctcacgtatacacataaaacaaaaaacaaggagacccagttatagttgtggtatctgctgtttctgccttgaaatttccagcttacagctaagcaacaactactgtgcatccagaacttacatctatgttcctagagtacttgaaccccattctcaagtgcacccttcttaccaggtggaaatagttcactgctgtaataatctaagaaaacattatgtttctctctacttttttttctctcatataatctaggcaattctccctctgtatcattttcctgagaaaactaaaataatttttaatcaagaccagatggaactttgtatggtatattgacagtataccaattgttgtgacgaatcttactgcctgttgtagatatcagtgtttgaagtattccctatgaaataacttttctgtcccaataattgagagtgctgtttcatttccaaaaaaagggaagaattaatcaattaaacatacatatagtgaaataacctgttttgtaacataaaacataagatgaagaaatatcggaacattgatatgaagtttaacagtaatggattatatatccagaaatatgaacaaataaacctgcaatgaaaatttactaatgttactaattttcacttgtgtaacatgaacattacaaagaacatagtgtacaaagggagaatgttggtgggtaggatgagtcaagatttcagaggaaaatcaatatttaagacttacagcactgtggaatatatttaattttcctaaagttgaagaaaatttcagtgaatctatgaattgtttaagagaaaggtcactccgttactgacttctgctacatctaatattccagggaagtaatatttagagataaaaagcttttactctgacctccggaaattacttaatgatccagatactcccaaagtcaaagcaaatccttggagacaagtttggactttatgaatgtggacttaattctttaagatcactagagcaacaataaattacaggaatgtaccctctttatatctgatgattatgcataagtggggtgtgcagttttaagttacttttcctacagtgctgacaggtttagagtgttaaatccatactcaacttgtattatcttcctctgcttgagctatgccaccttgagtcagctgatttgactatttataattagatacctaacctatgatatgatatagtagatgtcaatagtgactcatgatttatgtagtaagtcttaccattttctaagcagtagtcaggtgccatgtgatctaactaaagatttgtatttcttattttacttaacaattacagtaaccccaatgcagtattattcactgttggattttttttaatgtgaaaacttaataaccgctgtggataagaaagtaagaatgattcttaggtgctttaggaccaaattaatcagaatttaatataccactttgtctaggtgtcatggcggctaaaatatctttgagaaagttaaacttagctttcaatctcagatgatctacttaagaatttggaaagtttatattatattatttgagaatggggattcttgcttaaacgaaacctgaaggacgggcatctttcattcaatatcttaaaaagaaagtttagctgacatttaaataagaaaagatacacctaaaataaagtagaacactggtttaataaaaatagtgaacaggtactcccttgcctttctatttttctctcaactctattttattttacctgaagtttggggagaaatgctaagatgaaatttttggtggagtctttcagaggttatttaaccagagactattttcttt

SEQ ID NO: 4629 - protein, 102 aa, Homo sapiens
MALHSDLDKGEGTAKYTLSGDGAGTVFTIDETTGDIHAIRSLDREEKPFYTLRAQAVDIETRKPLEPESEFIIKVQDINDNEPKFWDGPYVATVPEMSPVGE

SEQ ID NO: 4630 - DNA, 1889 bp, Homo sapiens
ccggcggctgttgtcgggcctccagcgggcggggccgttggcggagcagagcggaggcgcagccgggcggagggcccacgagggctcagccttcccggtcagcggtggtgacggtatcccagagtgccagagaaccgttgcttttccgagttgctcttcttccaggctccgttggtggtcggcatggcccgtggaaatcaacgagaacttgcccgccagaaaaacatgaagaaaacccaggaaattagcaagggaaagaggaaagaggatagcttgactgcctctcagagaaagcagagttctggaggccagaaatctgagagcaagatgtcagctgggccacacctccctctgaaggctccaagggagaatccttgctttcctcttccagctgctggtggctccaggtattacttggcttatggcagcataactcctatctctgcctttgtctttgtggtcttcttttctgtcttcttcccttctttttatgaggacttttgctgttggatttaggttccattctaacctaggatgatctcatttggaaatccttaatttcatctacaaaaactgttttcccaaataggtcacattcacgcatatcagatggacagatgtatcattttggggtccaccattcaacccactacaaggagttttttaaacaaaaataggaaacttagatgtaacttagcactttttttttttttttttgagatggagtctcactctgtcaccagactggagtgcagtggcgccatctcagctccatgcaacctctgcctcctgggttcaagcagttctcttgcctcagcctcctgggtagctgggattacaggcacgcgctgccacacccaggtaatttatttattttttttttgagacagagtctcgcactgttgcccaggctggactgcagtggcgtgatctctgctcactgcaacctccgcctcccgggttcaagcgattctccagcctcagcttcctgagtagatgggattacaggcgcctgccaccacgcccagctaattttttgtattcttagtagagatggggtttcaccatgttggccaggctggtctccatctcctgacctcgtgattcacccgcctcggcctcccaaagtgctgggattacaggcgtgagtcacagcccccggccataatttagcactttaaaaaataatagccatgttgggccaggcgtggtggctcatgcctgtaatctgagcactttgggagaccaaggcgggtagatcccttgtgcccaggagttcaagaccagcctgggcaacatggcgaaaccccatttctactaaaaatacaaaaattagctggggcgaggggataggccgagttccgggtgtaagggggccattagggagagcagagcgaggcagctgatcttccggattgggggccttgcccggaagctggacctcacggagatgaaacggaagatgcacgaggatatgatctccatacagaactttctcatctacgtggccctgctgcgagtcactccatttatcttaaagaaattggacagcatatgaagattggacatcacatgtgaatgcatgatatgaagagcctggttacagtttctactgttctctgcaagtaaataggcccagaaaggtataagagactctttgaatggacataaaaattctgcttgttaagaacaagttgagctctggtaactgatcttaatagctaaaatataaaaatatttgggaagtctgaaatgaggtctcctggccctggtgtgcccttaatgcctgtgacagttggcctctgtgaatattggtataattgtaaataatgtcaaactccattttctagcaagtattaataattaagggaagtatgtctgaaatggca

SEQ ID NO: 4631 - protein, 110 aa, Homo sapiens; identical to SEQ ID NO: 1014

SEQ ID NO: 4632 - DNA, 1917 bp, Homo sapiens
atgtcaagggaagccattcatgtgggggtactgtgcgctgctgaccattgggtgctgctgaagttaggcaccgcccaagaagtgtgcagccagaacgaggtgctgcagaggcagagtgtatgtgctacaggagctggtattgcagatggcacaggtgttgcaggtgtctgcctagaggagcacaatggaaccaggaaaagcagcccttgccccttcagtgtgtcagcagcaccctcgattgacaaagtttcactctgtgcttactgtcatgggagaggattttacctcctccattccaccaaaacagctcttatgagggtcaccaatgagctccacattgctaaattggttaaaaatgtgtctgcaggcacacaggacgtgccttcacccccatctgactatgtggaaagagttgacagtcccatggcatactcttccaatggcaaagtgaatgacaagcggttttatccagagtcttcctataaatccacgccggttcctgaagtggttcaggagcttccattaacttcgcctgtggatgacttcaggcagcctcgttacagcagcggtggtaactttgagacaccttcaaaaagagcacctgcaaagggaagagcaggaaggtcaaagagaacagagcaagatcactatgagacagactacacaactggtggcgagtcctgtgatgagctggaggaggactggatcagggaatatccacctatcacttcagatcaacaaagacaactgtacaagaggaattttgacactggcctacaggaatacaagagcttacaatcagaacttgatgagatcaataaagaactctcccgtttggataaagaattggatgactatagagaagaaagtgaagagtacatggctgctgctgatgaatacaatagactgaagcaagtgaagggatctgcagattacaaaagtaagaagaatcattgcaagcagttaaacagcaaattgtcacacatcaagaagatggttggagactatgatagacagaaaacatagaaggctgatgccaagttgtttgagaaattaagtatctgacatctctgcaatcttctcagaaggcaaatgactttggaccataaccccggaagccaaacctctgtgagcatcacagttttggttgctttaatatcatcagtattgaagcattttataaatcgcttttgataatcaactgggctgaacactccaattaaggattttatgctttaaacattggttcttgtattaagaatgaaatactgtttgaggtttttaagccttaaaggaaggttctggtgtgaactaaactttcacaccccagacgatgtcttcatacctacatgtatttgtttgcataggtgatctcatttaatcctctcaaccacctttcagataactgttatttataatcacttttttccacataaggaaactgggttcctgcaatgaagtctctgaagtgaaactgcttgtttcctagcacacacttttggttaagtctgttttatgacttcattaataataaattccctggcctttcatattttagctactatatatgtgatgatctaccagcctccctattttttttctgttatataaatggttaaaagaggtttttcttaaataataaagatcatgtaaaagtaacaaatgtgtgaaatttaaagattgtaaatatatatttacttttttaagatcaaagtttaaacccggtggttagaattttgtgtgtttttaaatactttttatctttttgcatgcctttttttaaaaaccaactagaacttttcattatatcagaatatctgattacatttataattcaattgtgacttgaactgtatcttacaggaatgttcaatttctatacatattttataaggtattaaacctggtgttttcttt

SEQ ID NO: 4633 - protein, 341 aa, Homo sapiens
MSREAIHVGVLCAADHWVLLKLGTAQEVCSQNEVLQRQSVCATGAGIADGTGVAGVCLEEHNGTRKSSPCPFSVSAAPSIDKVSLCAYCHGRGFYLLHSTKTALMRVTNELHIAKLVKNVSAGTQDVPSPPSDYVERVDSPMAYSSNGKVNDKRFYPESSYKSTPVPEVVQELPLTSPVDDFRQPRYSSGGNFETPSKRAPAKGRAGRSKRTEQDHYETDYTTGGESCDELEEDWIREYPPITSDQQRQLYKRNFDTGLQEYKSLQSELDEINKELSRLDKELDDYREESEEYMAAADEYNRLKQVKGSADYKSKKNHCKQLNSKLSHIKKMVGDYDRQKT

SEQ ID NO: 4634 - DNA, 1919 bp, Homo sapiens
atgtcaagggaagccattcatgtgggggtactgtgcgctgctgaccattgggtgctgctgaagttaggcaccgcccaagaagtgtgcagccagaacgaggtgctgcagaggcagagtgtatgtgctacaggagctggtattgcagatggcacaggtgttgcaggtgtctgcctagaggagcacaatggaaccaggaaaagcagcccttgccccttcagtgtgtcagcagcaccctcgattgacaaagtttcactctgtgcttactgtcatgggagaggattttacctcctccattccaccaaaacagctcttatgagggtcaccaatgagctccacattgctaaattggttaaaaatgtgtctgcaggcacacaggacgtgccttcacccccatctgactatgtggaaagagttgacagtcccatggcatactcttccaatggcaaagtgaatgacaagcggttttatccagagtcttcctataaatccacgccggttcctgaagtggttcaggagcttccattaacttcgcctgtggatgacttcaggcagcctcgttacagcagcggtggtaactttgagacaccttcaaaaagagcacctgcaaagggaagagcaggaaggtcaaagagaacagagcaagatcactatgagacagactacacaactggcggcgagtcctgtgatgagctggaggaggactggatcagggaatatccacctatcacttcagatcaacaaagacaactgtacaagaggaattttgacactggcctacaggaatacaagagcttacaatcagaacttgatgagatcaataaagaactctcccgtttggataaagaattggatgactatagagaagaaagtgaagagtacatggctgctgctgatgaatacaatagactgaagcaagtgaagggatctgcagattacaaaagtaagaagaatcattgcaagcagttaaagagcaaattgtcacacatcaagaagatggttggagactatgatagacagaaaacatagaaggctgatgccaagttgtttgagaaattaagtatctgacatctctgcaatcttctcagaaggcaaatgactttggaccataaccccggaagccaaacctctgtgagcatcacaaagttttggttgctttaacatcatcagtattgaagcattttataaatcgcttttgataatcaactgggctgaacactccaattaaggattttatgctttaaacattggttcttgtattaagaatgaaatactgtttgaggtttttaagccttaaaggaaggttctggtgtgaactaaactttcacaccccagacgatgtcttcatacctacatgtatttgtttgcataggtgatctcatttaatcctctcaaccacctttcagataactgttatttataatcacttttttccacataaggaaactgggttcctgcaatgaagtctctgaagtgaaactgcttgtttcctagcacacacttttggttaagtctgttttatgacttcattaataataaattccctggcctttcatattttagctactatatatgtgatgatctaccagcctccctattttttttctgttatataaatggttaaaagaggtttttcttaaataataaagatcatgtaaaagtaacaaatgtgtgaaatttaaagattgtaaatatatatttacttttttaagatcaaagtttaaaccccgtggttagaattttgtgtgtttttaaatactttttatctttttgcatgccttttttaaaaaaccaactagaacttttcattatatcagaatatctgattacatttataattcaattgtgacttgaactgtatcttacaggaatgttcaatttctatacatattttataaggtattaaacctggtgttttcttt

SEQ ID NO: 4635 - protein, 341 aa, Homo sapiens
MSREAIHVGVLCAADHWVLLKLGTAQEVCSQNEVLQRQSVCATGAGIADGTGVAGVCLEEHNGTRKSSPCPFSVSAAPSIDKVSLCAYCHGRGFYLLHSTKTALMRVTNELHIAKLVKNVSAGTQDVPSPPSDYVERVDSPMAYSSNGKVNDKRFYPESSYKSTPVPEVVQELPLTSPVDDFRQPRYSSGGNFETPSKRAPAKGRAGRSKRTEQDHYETDYTTGGESCDELEEDWIREYPPITSDQQRQLYKRNFDTGLQEYKSLQSELDEINKELSRLDKELDDYREESEEYMAAADEYNRLKQVKGSADYKSKKNHCKQLKSKLSHIKKMVGDYDRQKT

SEQ ID NO: 4636 - DNA, 2874 bp, Homo sapiens
atggtaatattgtgggaactgagtgaaaattcagaatgtgaatttcttcggagtaagaaatcctcagaggaaattacccagtatattcaaagctacaagggatttgttgacataacgggagaacattttgtgaattcctgggtccagagagaattacctatggcatcagcttattgcaatgacagcatctttgcttacgaagaactacggctggactcttttaaggactggccccgggaatcagctgtgggagttgcagcactggccaaagcaggtcttttctacacaggtataaaggacatcgtccagtgcttttcctgtggagggtgtttagagaaatggcaggaaggtgatgacccattagacgatcacaccagatgttttcccaattgtccatttctccaaaatatgaagtcctctgcggaagtgactccagaccttcagagccgtggtgaactttgtgaattactggaaaccacaagtgaaagcaatcttgaagattcaatagcagttggtcctatagtgccagaaatggcacagggtgaagcccagtggtttcaagaggcaaagaatctgaatgagcagctgagagcagcttataccagcgccagtttccgccacatgtctttgcttgatatctcttccgatctggccacggaccacttgctgggctgtgatctgtctattgcttcaaaacacatcagcaaacctgtgcaagaacctctggtgctgcctgaggtctttggcaacttgaactctgtcatgtgtgtggagggtgaagctggaagtggaaagacggtcctcctgaagaaaatagcttttctgtgggcatctggatgctgtcccctgttaaacaggttccagctggttttctacctctcccttagttccaccagaccagacgaggggctggccagtatcatctgtgaccagctcctagagaaagaaggatctgttactgaaatgtgcgtgaggaacattatccagcagttaaagaatcaggtcttattccttttagatgactacaaagaaatatgttcaatccctcaagtcataggaaaactgattcaaaaaaaccacttatcccggacctgcctattgattgctgtccgtacaaacagggccagggacatccgccgatacctagagaccattctagagatcaaagcatttcccttttataatactgtctgtatattacggaagctcttttcacataatatgactcgtctgcgaaagtttatggtttactttggaaagaaccaaagtttgcagaagatacagaaaactcctctctttgtggcggcgatctgtgctcattggtttcagtatccttttgacccatcctttgatgatgtggctgttttcaagtcctatatggaacgcctttccttaaggaacaaagcgacagctgaaattctcaaagcaactgtgtcctcctgtggtgagctggccttgaaagggtttttttcatgttgctttgagtttaatgatgatgatctcgcagaagcaggggttgatgaagatgaagatctaaccatgtgcttgatgagcaaatttacagcccagagactaagaccattctaccggtttttaagtcctgccttccaagaatttcttgcggggatgaggctgattgaactcctggattcagataggcaggaacatcaagatttgggactgtatcatttgaaacaaatcaactcacccatgatgactgtaagcgcctacaacaattttttgaactatgtctccagcctcccttcaacaaaagcagggcccaaaattgtgtctcatttgctccatttagtggataacaaagagtcattggagaatatatctgaaaatgatgactacttaaagcaccagccagaaatttcactgcagatgcagttacttaggggattgtggcaaatttgtccacaagcttacttttcaatggtttcagaacatttactggttcttgccctgaaaactgcttatcaaagcaacactgttgctgcgtgttctccatttgttttgcaattccttcaagggagaacactgactttgggtgcgcttaacttacagtactttttcgaccacccagaaagcttgtcattgttgaggagcatccacttctcaatacgaggaaataagacatcacccagagcacatttttcagttctggaaacatgttttgacaaatcacaggtgccaactatagatcaggactatgcttctgcctttgaacctatgaatgaatgggagcgaaatttagctgaaaaagaggataatgtaaagagctatatggatatgcagcgcagggcatcaccagaccttagtactggctattggaaactttctccaaagcagtacaagattccctgtctagaagtcgatgtgaatgatattgatgttgtaggccaggatatgcttgagattctaatgacagttttctcagcttcacagcgcatcgaactccatttaaaccacagcagaggctttatagaaagcatccgcccagctcttgagctgtctaaggcctctgtcaccaagtgctccataagcaagttggaactcagcgcagccgaacaggaactgcttctcaccctgccttccctggaatctcttgaagtctcagggacaatccagtcacaagaccaaatctttcctaatctggataagttcctgtgcctgaaagaactgtctgtggatctggagggcaatataaatgttttttcagtcattcctgaagaatttccaaacttccaccatatggagaaattattgatccaaatttcagctgagtatgatccttccaaactaggctggtcttacattgcaacttacagatctggcagctcagcaggaaggaaatctgctaatccgtag

SEQ ID NO: 4637 - protein, 957 aa, Homo sapiens
MVILWELSENSECEFLRSKKSSEEITQYIQSYKGFVDITGEHFVNSWVQRELPMASAYCNDSIFAYEELRLDSFKDWPRESAVGVAALAKAGLFYTGIKDIVQCFSCGGCLEKWQEGDDPLDDHTRCFPNCPFLQNMKSSAEVTPDLQSRGELCELLETTSESNLEDSIAVGPIVPEMAQGEAQWFQEAKNLNEQLRAAYTSASFRHMSLLDISSDLATDHLLGCDLSIASKHISKPVQEPLVLPEVFGNLNSVMCVEGEAGSGKTVLLKKIAFLWASGCCPLLNRFQLVFYLSLSSTRPDEGLASIICDQLLEKEGSVTEMCVRNIIQQLKNQVLFLLDDYKEICSIPQVIGKLIQKNHLSRTCLLIAVRTNRARDIRRYLETILEIKAFPFYNTVCILRKLFSHNMTRLRKFMVYFGKNQSLQKIQKTPLFVAAICAHWFQYPFDPSFDDVAVFKSYMERLSLRNKATAEILKATVSSCGELALKGFFSCCFEFNDDDLAEAGVDEDEDLTMCLMSKFTAQRLRPFYRFLSPAFQEFLAGMRLIELLDSDRQEHQDLGLYHLKQINSPMMTVSAYNNFLNYVSSLPSTKAGPKIVSHLLHLVDNKESLENISENDDYLKHQPEISLQMQLLRGLWQICPQAYFSMVSEHLLVLALKTAYQSNTVAACSPFVLQFLQGRTLTLGALNLQYFFDHPESLSLLRSIHFSIRGNKTSPRAHFSVLETCFDKSQVPTIDQDYASAFEPMNEWERNLAEKEDNVKSYMDMQRRASPDLSTGYWKLSPKQYKIPCLEVDVNDIDVVGQDMLEILMTVFSASQRIELHLNHSRGFIESIRPALELSKASVTKCSISKLELSAAEQELLLTLPSLESLEVSGTIQSQDQIFPNLDKFLCLKELSVDLEGNINVFSVIPEEFPNFHHMEKLLIQISAEYDPSKLGWSYIATYRSGSSAGRKSANP

SEQ ID NO: 4638 - DNA, 4540 bp, Homo sapiens
atggttgaaatttataatttgaaattcctccattccgacttagacaagggagagggcactgcgaaatacaccctctcaggagatggcgctggcaccgtttttaccattgatgaaaccacaggggacattcacgcaataaggagcctagatagagaagaaaaacctttctacactcttcgtgctcaggctgtggacatagaaaccagaaagcccctggagcctgaatcagaattcatcatcaaagtgcaggatattaatgataatgagccaaagttttgggatggaccttatgttgctactgtcccagaaatgtctcctgtgggtgagtaggcaaatcaaaattctgtgagatacaatgagacctcttcaacattgactttttgcaggttgatgtaaacatcttatctatcatctaaaagaattatttttcaattctagaaaatacagttcttttcatttatttttgtaacttttttgtttttctttctgcttcattatgaagataactacaggaatatataacattagttcctgttttccaccctgtgaatttacctgaattcatagaatccttgcgtgctttaagcaaaaaatgtattttgtattgaaattgattcttatctcaattccagacacctatacagtgctggagacacctaccctacaccacgaaatgccagacagtaattcctagatcaaagtaaatgatctaaagcatgcatcacatctgatctggaagtggtccagaaacaggtgtgttgcatcttttgtagctgtaaatagagattctggaagggtgatactgtttccttttcagggtaaataacccatacttgttatgccatcaagccaagcagcaaatgaataatgtcatgaaaacattattagaacaaattaacaaattacaattacaattatcaaattaacaattagaatatagtagcaccatcattctaaaaatttaaatttgatataaatatacatttccatatcagcctaaatttacaaagtcctataatatgtaggatataaggtcaataagttaagaattccagccttaaggacaattttaaattataatttttattcctcagtcaccactgctaatccttcaatttatttcaaagtaacttctggtttttattacatttggaagataaagcaacttatcacatgtaggttacaacttaaaattcgtgtatgagccattgcttatattttctaaatctgacatgacccagggggtttctactgctcctaccaccacccaggacatgcgatgaagattgtgcacgctaccgtgagggcagaagcaggttagtagctgtaggagctgtcacatggatttactataatgcacttgaaattgtgtatgtgaccttatcaggcatttaaggaccataatctctccttgacctaagaaatcagcttgaagtaattcacttagatttcaaattttaatgtggatacccaaggctgcaaatctgttattcagtacctgctacacttttggggttgcctcttttatgcactgttagaattgctagaaatttagaagtccaattggaaagaagcatatcttgttagaaagtattcccagaaaatgaggaaggctacattttaactgtgtcttgattttacagggagaaaaataaagttaatattttgaggaaaaaataaggcttttaagatgacatgctatatagtagacaaatagtttaactcggtgcctacttcatgtacactggatgtgttaacatgaatttatgaccttcagtgactttttattaccaaaacagcttccttaaagcaaacacacacacatgcctctacagtattggaaaattccgtctccttagataaaacaattaggatttttcttgggccaactagaataattagggctgcagagttggagcctttatataaggagtttgcagctcatatccgaagagagaaatgtatttggaaagtcaaaagtgtaggtaagtgagaaagcagagtagtttcagcttttgcagttggagtgggtataatttactgtgttgtcataagatactggaaagatctttggaagaataggttcttaaagtgttttctcatgtgcccttactgacatttcccattgggccttcaagacaactccagtaaatacttaaattgattttcagtgcactgctttctttcatttttatttatttattttgagactgggtcttggtctgttgccctggctggagtgcaatggcccaatcttagctcactgaagccttaaattcctgggctgaagagatccctccacctgagcctccttaatagccagtcatgtgccaccctgcctagctatttgtttttgttttttttttttttttttactttttgtagagaagggatctagctatgttgcccaggctgttctcaagtagtcctggcctcaaatgatccctccaccttggcttcccagagcactgggattacagtcatgagccaccctcctggctccttttttttttatttttaataacagaagggtatttcttttgaatgtgaaattttaccacatggtatgaattagtccaagtgtttttatactaaatttacataatatacacttttcaagtaagtacaaagaggtataaacactgcttatgaattgaatgttaaaaaataaatctctatgcattacttttgtctttccccataatctcacgtatacacataaaacaaaaaacaagaagacccagttatagttgtggtatctgctgtttctgccttgaaatttccagcttacagctaagcaacaactactgtgcatccagaacttacatctatgttcctagagtacttgtaccccattctcaagtgcacccttcttaccaggtggaaatagttcactgctgtaataatctaagaaaacattatgtttctctctacttttttttctctcatataatctaggcaattctccctctgtatcattttcctgagaaaactaaaataatttttaatcaagaccagatggaactttgtatggtatattgacagtataccaattgttgtgacgaatcttactgcctgttgtagatatcagtgtttgaagtattccctatgaaataacttttctgtcccaataattgagagggctgtttcatttccaaaaaagggaagaattaatcaattaaaaatacatatagtgaaataacctgttttgtaacataaaacataagatgaagaaatatcggaacattgatatgaagtttaacagtaatggattatatatccagaaatatgaacaaataaacctgcaatgaaaatttactaatgttactaattttcacttgtgtaacgtgaacattacaaagaacatagtgtacaaagggagaatgttggtgggtaggatgagtcaagatttcagaggaaaatcaatatttaagacttacagcactgtggaatatatttaattttcctaaagttgaagaaaatttcagtgaatctatgaattgtttaagacaaaggtcactccgttactgacttctgctacatctaattttccagggaagtaatatttagagataaaaagcttttactctgacctccggaaattacttaatgatccagatactcccaaagtcaaagcaaatccttggagacaagtttggactttatgaatgtggacttaattctttaagatcactagagcaacaataaattacaggaatgtaccctctttatatctgatgattatgcataagtggggtgtgcagttttaagttacttttcctacagtgctgacaggtttagagtgttaaatccatactcaacttgtattatcttcctctgcttgagctatgccaccttgagtcagctgatttgactatttataattagatacctaacctatgatatgatatagtagatgtcaatagtgactcatcatttatgtagtaagtcttaccattttctaagcagtagtcaggtgccatgtgatctaactaaagatttgtatttcttattttacttaacaattacagtaaccccaatgcagtattattcactgttggattttttttaatgtgaaaacttaataacccctgtggataagaaagtaagaatgattcttaggtgctttaggaccaaattaatcagaatttaatataccactttgtctaggtgtcatggcggctaaaatatctttgagaaagttaaacttagctttcaatctcagatgatctacttaagaatttggaaagtttatattatattatttgagaatggggattcttgcttaaacgaaacctgaaggatgggcatctttcattcaatatcttaaaaagaaagtttagctgacatttaaataagaaaagatacacctaaaataaagtagaacactggtttaataaaaatagtgaacaggtactcccttgcctttctatttttctctcaactctattttattttacatgaagtttggggagaaatgctaagatgaaatttttggtggagtctttcagaggttatttaaccagagactattttcttt

SEQ ID NO: 4639 - protein, 109 aa, Homo sapiens; identical to SEQ ID NO: 4583

SEQ ID NO: 4640 - DNA, 4312 bp, Homo sapiens
gccaccgcgccgggcctatcatatgaattttgagggaacacaaacatgcagtctgtagcagatggtaataggctgacatattacacttgttgatgtaaatctgataggtttctttctctccaaggacagctttttaaatatttaacagtatcaataatttttcaggttctgtgagaattttataatttataatttgcagacttaatgtataatctattttgtcctaacaattacaaatatattttttatttcagattgtatatattcctaccagatggagataattacagctttaaaaatttttattttttcattttatttcacacattgacattaaatttttatggacacataataactgtacatatatatggggtagaatgtgatgttttaatacatgtactcaatgtgtaatgatcaaatcagggtaatttgcataatgatttttctgtagggagaaaattcaaaatctactcttctggctattttcaaatatataatatgttattgttaactatactcatcctactatgcaataggacaccagaacttattcctgggttctacatccgttaaggcaaccaaggattggaaatattggaaaaaaaaattgcgtctgtactgaacatgtacagacttttttcttgtccttattccttacacaatatagtacaataactatttgcatgacatttacatcggatattatgagtgatctagagttgatatgaagtatatgggaggatgtgcaaaggtgatgtgcaaatactatgtcattttatatcagggacttgagtatcctttgttaccctcaggagatcctgaaaccagtcccccatggatactgagggctgactgtatagtcctatcctcacggaactttcattctaatgggggaagactgactataaacaaaatatatgtaataggtggtggtaagtaccgtggagaagtaacaaacggggcaaagtgagttatacagctccattcttagaaaccttggagtacttttcttagtttatactcgtggtggtttccttttgtctcctttattacatgggactctgacatgtgcccatagctagggtgacagtaggatctacccgatagtagggtggcagtaggatctacccaaaaagcgtcctgctgatacaggaccaaagcatcctgttgttctcgagcctataaaaagagctaatggtcttgcttctcttaactgtggcctcctacactgtgttttggatgattggtgatgtcttggatattctgtttctttggaactttgaatatacaacactttactagggaattagcaatggaagcagagcaaagatgtacagaggaaacaatgcgtaactctgatggaattgaagtcatgaggcagcagagagcttaaattacagctttaaaaatttttattttttagagggaatttacttgggagtaacagcagtaatagttaacggagccagaatgcttgagtcatataattgcaaagcagagttgggagcaacagatgctaaagagtagttgctgtagttcctctttgggtcgtaggagcagttgtcatattactatatagctactgcatgaagaagagttcttagtgaggcctgggtgaacagctcttcttagtattctgtgtgaccccatttgaccttttaacaaatccctaagtaaataaatagcccctcaggaaaactaagtttttctctgctgtttttttgcttgagagagctataactgtaatagacttatatttctgaacattttagtgcttgccaatatttggtaatatttatgtttcctatatttgtaatgaacattcttcttccggtacattttttgttaaattattgtttgatggataaaagttcaccttttattgtataaaattgactgagattaatttatacacattgacaatgggtaaatagaatttttcagattattaaaagctgaaggatgcccacgtaagcaaaaaaaaaaaagaaaaaaccaacaaaaataaacccaaacccctcaaacaatttcgaacacgaaacattcttctgatgccggcatccctgcttgcaggtgtgaagggggcaggaatcagcgaggtgtcctgggctgagtccccggagtgggaagaggtggcaggaaggggatctgaggaggagaacaggggtcctggtggtctgtgcttcttcccagacacgggagctgtagaggagacctctgcagcagatgctaggggggccagtaggcccaggcagtcttgggacttgggtctgtcctgctgtgcatccatagtgggtgctttagaaacgggaggcccacccgaagcccctgttgcaagtgaggacaaagtgtgggaaggccgtgagggtctgcagtccgggatggccttgtcctcaacgtgcagtgcactgttgatgcgctggaatgccgtctctttttccaggtgcaggtcttcagccgtgacccggtaccccagctctaagggaggtggcagcatcaaaggctcccctcgcctgcgtggcagcaggggaatcttgcgtctacggggcctagagtcctgggatctgggggagccacccgttggggcgattgtctgccctggtgctgtatctgcccccttttcacaccgtgtgtgacccgaagagacagcctgaggcctgtcctcactcactgtctttgagtaactgagggtcagctggcagcgggatgaggctggccccctcctctgctttagccccggcaagcctcccgtggagctgtaggagctggagatggcatttcgtttggtgctcgagctcgtccaggatgtctgggatgtgtggttatatctgatttctgagctctgggcatggaggtctgtctgcagaggcccgggcctgggcacaaagggagaggggcctccattgtcccgcaggggccaaaatgcagaccgtgcatccccggtgacctcggggaccgttctctgatcatcaggattttcttggactctggggtccttgtcctgctcaggcatccctgccccgctctccttgagggccctcaacactatcttccctggacacaagtctggggacagccgggtgttgtggaccccaaaggggtgactacctgctcctgggccccacagagtccttgtgctcagtgtagtggctgagctgggggatgccctggaactcggagcacacagcactggcttactgtggtacctgtgcagtgaaattgaagacagaatcaccaggatggaacacaggtcttgcaggatcacttgaaaccttcttagagttgtcttgacaccagtgatgtcgagtgtccgggtgtttgtaggatggcctgccactcagtccaggggcaggagcaacggggagatcccacaagcaaagtgaactgggggatgggctgaaggggctccaggcaactgagccctactcgcaggtcctcggccttggcccaaacaggaatgaggggcacagagtgcccgggtaaccgctcctgggagcagtggggaactgtcggatacttgaactctcaagagctgggctctgagcgtcctcgtccagctgccaacttggccaaaggctaagccagcagattgttctgttgccgggcaacgcgacttctaaacctgagggagtgggcatgtgagcacataatggcaccagtgacagagcgaccataatggatgaataagcgcagccaggtacccgcgcaaggcacctgctggcaatggcaggaggcggacgtggggggtcgtgcagtaggtactggagggagagacgtgggcacaaaggtcgcgggaggaacaggtgcccacaatggctgcatatttgcccgtggatcactgaagattcctgctctcctgctgaggtggagactgcagtgagctgagatcgcaccattgcactccagcctgggcaacgagtgcaaaactcagtctccagataaaaaaaagaaaaagaaaaaaaagaggccgggtgtggtggcttatgcctatgatcctagcactttgggaggtcggggtggacggatcacgagatcaggagttggaggccagcctggccaacatagtgaaagcccgtctctagtaaaaatacaaaatttagtcagacatggtgggcaggagagagcatgtgcaggggaacatccatttataaaaccatcagacctcatgagacttattcactaccatgagaacagcatgggggaaactgcctccatgattcagttatctccacctggccccacccttgacacatgggaattgttacaattcaagatgagatttgggtgcggacagagccaaaccatataa

SEQ ID NO: 4641 - protein, 194 aa, Homo sapiens; identical to SEQ ID NO: 4617

SEQ ID NO: 4642 - DNA, 1584 bp, Homo sapiens
ttttctgcccatggacaccgccgaagaagcattgttaaagtctctcttcaccctgccgtcatgtctaagtcagagtctcctgaagagcccgaacagctgaggaagctcttcattggagggctgagctttgaaacaactgatgagagccttgaggagccattttgagcaatggggaatgctcacggactgtgtggtcatgagagatccaaacaccaagcaccccaggggctttgggtttgtcacatatgctactgtggaggaggtggatgcagccatgaatgcaaggccacacaaggtggatggaagagttgtggaaccaaagagagctgtctcgagagaagattctgaaagaccaggtgcccacttaactgtgaaaaagatatttgttggtggcattaaagaagacactgaagaacatcacctaagagatgattttgaacagtatggaaaaattgaagtgattgaaatcatgactgaccgaggcagtggcaagaaaaggggctttgcctttgtaaattttgacgaccatgactccatggataagattgtcattcagaaataccatactgtgaatggccacaactgtgaagttaggaaagccccgtcacagcaagagatggatagtgcttcatccagccaaagaggtcgaagtggttctggaaactttggtggtggaagctacaatgattttggcaattacaacaatcagtcttcaaattttggacccatgaagggaggaaattttggaggcagaagctctggcccttatggtggtggaggccaatactttgcaaaaccacaaaaccaaggtggctatggcggttccagtagcagcggtagctatggcagtggcagaagattttaattaggaaacaaagcttagcaggagcggagagccagagaagtgacagggaagctacaggttacaacagatttgtgaactcagccaagcacagtggtggcagggcctagctgctacaaagaagacatgttttagacaaatactcatgtgtatgggcaaaaaactcgaggactgtatttgtgactaattgtataacaggttattttagtttctgttctgtggaaagtgtaaagcattccaacaaagggttttaatgtagattttttttttgcacctatgctgttgattgctaatgtaatagtctgatcgtgatgctgaataaatgtcttttctttttaatgtgctgtgtaaagttagtctactctgaagccatcttggtaaatttccccaacagtgtgaagttagaattccttcagggtgatgccaggttctatttggaatttatatacaacctgcttggagggagaagccattgtcttcagaaaccttggtgtagttgaactgatagttaccgttgtgacctgaagttcaccattaaaagggattacccaagcaaaatcatggaattattggttataaaagtgattgttggcacatcctatgcaatatatctaaattgaataatggtactagataaaattatagatgggaatgaagcttgtgtatcatccattatcatgtgtaatcaataaatgatttaattctcttgaaaaaaacaagga

SEQ ID NO: 4643 - protein, 229 aa, Homo sapiens
MLTDCVVMRDPNTKHPRGFGFVTYATVEEVDAAMNARPHKVDGRVVEPKRAVSREDSERPGAHLTVKKIFVGGIKEDTEEHHLRDDFEQYGKIEVIEIMTDRGSGKKRGFAFVNFDDHDSMDKIVIQKYHTVNGHNCEVRKAPSQQEMDSASSSQRGRSGSGNFGGGSYNDFGNYNNQSSNFGPMKGGNFGGRSSGPYGGGGQYFAKPQNQGGYGGSSSSGSYGSGRRF

SEQ ID NO: 4644 - DNA, 1351 bp, Homo sapiens
ttttctgcccatggacaccgccgaagaagcattgttaaagtctctcttcaccctgccgtcatgtctaagtcagagtctcctgaagagcccgaacagctgaggaagctcttcattggagggctgagctttgaaacaactgatgagagccttgaggagccattttgagcaatggggaatgctcacggactgtgtggtcatgagagatccaaacaccaagcaccccaggggctttgggtttgtcacatatgctactgtggaggaggtggatgcagccatgaatgcaaggccacacaaggtggatggaagagttgtggaaccaaagagagctgtctcgagagaagattctgaaagaccaggtgcccacttaactgtgaaaaagatatttgttggtggcattaaagaagacactgaagaacatcacctaagagatgattttgaacagtatggaaaaattgaagtgattgaaatcatgactgaccgaggcagtggcaagaaaaggggctttgcctttgtaaattttgacgaccatgactccatggataagattgtcattcagaaataccatactgtgaatggccacaactgtgaagttaggaaagccccgtcacagcaagagatggatagtgcttcatccagccaaagaggtcgaagtggttctggaaactttggtggtggtcgtggaggtggtttcggtgggaatgacaactttggtcatggaggaaacttcagtggttgtggtggctttggtggcagtcatggtggtggtggatatggtggcagtggggatggctataatggatttggtaatgatggaagcgattttggaggtggtggaagctacaatgattttggcaattacaacaatcagtcttcaaattttggacccatgaagggaggaaattttggaggcagaagctctggcccttatggtggtggaggccaatactttgcaaaaccacaaaaccaaggtggctatggcggttccagtagcagcggtagctatggcagtggcagaagattttaattaggaaacaaagcttagcaggagcggagagccagagaagtgacagggaagctacaggttacaacagatttgtgaactcagccaagcacagtggtggcagggcctagctgctacaaagaagacatgttttagacaaatactcatgtgtatgggcaaaaaactcgaggactgtatttgtgactaattgtataacaggttattttagtttctgttctgtggaaagtgtaaagcattccaacaaagggttttaatgtagattttttttttgcacctatgctgttgattgctaatgtaatagtctgatcgtgatgctgaataaatgtcttt

SEQ ID NO: 4645 - protein, 282 aa, Homo sapiens [sequence omitted]

SEQ ID NO: 4646 - DNA, 1588 bp, Homo sapiens
cccatggacaccgccgaagaagcattgttaaagtctctcttcaccctgccgtcatgtctaagtcagagtctcctgaagagcccgaacagctgaggaagctcttcattggagggctgagctttgaaacaactgatgagagccttgaggagccattttgagcaatggggaatgctcacggactgtgtgattctgaaagaccaggtgcccacttaactgtgaaaaagatatttgttggtggcattaaagaagacactgaagaacatcacctaagagatgattttgaacagtatggaaaaattgaagtgattgaaatcatgactgaccgaggcagtggcaagaaaaggggctttgcctttgtaaattttgacgaccatgactccatggataagattgtcattcagaaataccatactgtgaatggccacaactgtgaagttaggaaagccccgtcacagcaagagatggatagtgcttcatccagccaaagaggtcgaagtggttctggaaactttggtggtggtcgtggaggtggtttcggtgggaatgacaactttggtcatggaggaaacttcagtggttgtggtggctttggtggcagtcatggtggtggtggatatggtggcagtggggatggctataatggatttggtaatgatggaagcgattttggaggtggtggaagctacaatgattttggcaattacaacaatcagtcttcaaattttggacccatgaagggaggaaattttggaggcagaagctctggcccttatggtggtggaggccaatactttgcaaaaccacaaaaccaaggtggctatggcggttccagtagcagcggtagctatggcagtggcagaagattttaattaggaaacaaagcttagcaggagcggagagccagagaagtgacagggaagctacaggttacaacagatttgtgaactcagccaagcacagtggtggcagggcctagctgctacaaagaagacatgttttagacaaatactcatgtgtatgggcaaaaaactcgaggactgtatttgtgactaattgtataacaggttattttagtttctgttctgtggaaagtgtaaagcattccaacaaagggttttaatgtagattttttttttgcacctatgctgttgattgctaatgtaatagtctgatcgtgatgctgaataaatgtcttttctttttaatgtgctgtgtaaagttagtctactctgaagccatcttggtaaatttccccaacagtgtgaagttagaattccttcagggtgatgccaggttctatttggaatttatatacaacctgcttggagggagaagccattgtcttcagaaaccttggtgtagttgaactgatagttaccgttgtgacctgaagttcaccattaaaagggattacccaagcaaaatcatggaattattggttataaaagtgattgttggcacatcctatgcaatatatctaaattgaataatggtactagataaaattatagatgggaatgaagcttgtgtatcatccattatcatgtgtaatcaataaatgatttaattctcttgaaaaaaacaagga

SEQ ID NO: 4647 - protein, 235 aa, Homo sapiens
MGNAHGLCDSERPGAHLTVKKIFVGGIKEDTEEHHLRDDFEQYGKIEVIEIMTDRGSGKKRGFAFVNFDDHDSMDKIVIQKYHTVNGHNCEVRKAPSQQEMDSASSSQRGRSGSGNFGGGRGGGFGGNDNFGHGGNFSGCGGFGGSHGGGGYGGSGDGYNGFGNDGSDFGGGGSYNDFGNYNNQSSNFGPMKGGNFGGRSSGPYGGGGQYFAKPQNQGGYGGSSSSGSYGSGRRF

SEQ ID NO: 4648 - DNA, 1743 bp, Homo sapiens
ttttctgcccatggacaccgccgaagaagcattgttaaagtctctcttcaccctgccgtcatgtctaagtcagagtctcctgaagagcccgaacagctgaggaagctcttcattggagggctgagctttgaaacaactgatgagagccttgaggagccattttgagcaatggggaatgctcacggactgtgtggtcatgagagatccaaacaccaagcaccccaggggctttgggtttgtcacatatgctactgtggaggaggtggatgcagccatgaatgcaaggccacacaaggtggatggaagagttgtggaaccaaagagagctgtctcgagagaagattctgaaagaccaggtgcccacttaactgtgaaaaagatatttgttggtggcattaaagaagacactgaagaacatcacctaagagatgattttgaacagtatggaaaaattgaagtgattgaaatcatgactgaccgaggcagtggcaagaaaaggggctttgcctttgtaaattttgacgaccatgactccatggataagattgtcattcagaaataccatactgtgaatggccacaactgtgaagttaggaaagccccgtcacagcaagagatggatagtgcttcatccagccaaagaggtcgaagtggttctggaaactttggtggtggtcgtggaggtggtttcggtgggaatgacaactttggtcatggaggaaacttcagtggttgtggtggctttggtggcagtcatggtggtggtggatatggtggcagtggggatggctataatggatttggtaatgatggaagcgattttggaggtggtggaagctacaatgattttggcaattacaacaatcagtcttcaaattttggacccatgaagggaggaaattttggaggcagaagctctggcccttatggtggtggaggccaatactttgcaaaaccacaaaaccaaggtggctatggcggttccagtagcagcggtagctatggcagtggcagaagattttaattaggaaacaaagcttagcaggagcggagagccagagaagtgacagggaagctacaggttacaacagatttgtgaactcagccaagcacagtggtggcagggcctagctgctacaaagaagacatgttttagacaaatactcatgtgtatgggcaaaaaactcgaggactgtatttgtgactaattgtataacaggttattttagtttctgttctgtggaaagtgtaaagcattccaacaaagggttttaatgtagattttttttttgcacctatgctgttgattgctaatgtaatagtctgatcgtgatgctgaataaatgtcttttctttttaatgtgctgtgtaaagttagtctactctgaagccatcttggtaaatttccccaacagtgtgaagttagaattccttcagggtgatgccaggttctatttggaatttatatacaacctgcttggagggagaagccattgtcttcagaaaccttggtgtagttgaactgatagttaccgttgtgacctgaagttcaccattaaaagggattacccaagcaaaatcatggaattattggttataaaagtgattgttggcacatcctatgcaatatatctaaattgaataatggtactagataaaattatagatgggaatgaagcttgtgtatcatccattatcatgtgtaatcaataaatgatttaattctcttgaaaaaaacaagga

SEQ ID NO: 4649 - protein, 282 aa, Homo sapiens [sequence omitted]

SEQ ID NO: 4650 - DNA, 1704 bp, Homo sapiens
ttttctgcccatggacaccgccgaagaagcattgttaaagtctctcttcaccctgccgtcatgtctaagtcagagtctcctgaagagcccgaacagctgaggaagctcttcattggagggctgagctttgaaacaactgatgagagccttgaggagccattttgagcaatggggaatgctcacggactgtgtggtcatgagagatccaaacaccaagcaccccaggggctttgggtttgtcacatatgctactgtggaggaggtggatgcagccatgaatgcaaggccacacaaggtggatggaagagttgtggaaccaaagagagctgtctcgagagaagattctgaaagaccaggtgcccacttaactgtgaaaaagatatttgttggtggcattaaagaagacactgaagaacatcacctaagagatgattttgaacagtatggaaaaattgaagtgattgaaatcatgactgaccgaggcagtggcaagaaaaggggctttgcctttgtaaattttgacgaccatgactccatggataagattgtcattcagaaataccatactgtgaatggccacaactgtgaagttaggaaagccccgtcacagcaagagatggatagtgcttcatccagccaaagaggtcgaagtggttctggaaactttggtggtggtcgtggaggtggtttcggtgggaatgacaactttggtcatggaggaaacttcagtggttgtggtagtggggatggctataatggatttggtaatgatggaagcgattttggaggtggtggaagctacaatgattttggcaattacaacaatcagtcttcaaattttggacccatgaagggaggaaattttggaggcagaagctctggcccttatggtggtggaggccaatactttgcaaaaccacaaaaccaaggtggctatggcggttccagtagcagcggtagctatggcagtggcagaagattttaattaggaaacaaagcttagcaggagcggagagccagagaagtgacagggaagctacaggttacaacagatttgtgaactcagccaagcacagtggtggcagggcctagctgctacaaagaagacatgttttagacaaatactcatgtgtatgggcaaaaaactcgaggactgtatttgtgactaattgtataacaggttattttagtttctgttctgtggaaagtgtaaagcattccaacaaagggttttaatgtagattttttttttgcacctatgctgttgattgctaatgtaatagtctgatcgtgatgctgaataaatgtcttttctttttaatgtgctgtgtaaagttagtctactctgaagccatcttggtaaatttccccaacagtgtgaagttagaattccttcagggtgatgccaggttctatttggaatttatatacaacctgcttggagggagaagccattgtcttcagaaaccttggtgtagttgaactgatagttaccgttgtgacctgaagttcaccattaaaagggattacccaagcaaaatcatggaattattggttataaaagtgattgttggcacatcctatgcaatatatctaaattgaataatggtactagataaaattatagatgggaatgaagcttgtgtatcatccattatcatgtgtaatcaataaatgatttaattctcttgaaaaaaacaagga

SEQ ID NO: 4651 - protein, 269 aa, Homo sapiens
MLTDCVVMRDPNTKHPRGFGFVTYATVEEVDAAMNARPHKVDGRVVEPKRAVSREDSERPGAHLTVKKIFVGGIKEDTEEHHLRDDFEQYGKIEVIEIMTDRGSGKKRGFAFVNFDDHDSMDKIVIQKYHTVNGHNCEVRKAPSQQEMDSASSSQRGRSGSGNFGGGRGGGFGGNDNFGHGGNFSGCGSGDGYNGFGNDGSDFGGGGSYNDFGNYNNQSSNFGPMKGGNFGGRSSGPYGGGGQYFAKPQNQGGYGGSSSSGSYGSGRRF

SEQ ID NO: 4652 - DNA, 1666 bp, Homo sapiens
ttttctgcccatggacaccgccgaagaagcattgttaaagtctctcttcaccctgccgtcatgtctaagtcagagtctcctgaagagcccgaacagctgaggaagctcttcattggagggctgagctttgaaacaactgatgagagccttgaggagccattttgagcaatggggaatgctcacggactgtgtggtcatgagagatccaaacaccaagcaccccaggggctttgggtttgtcacatatgctactgtggaggaggtggatgcagccatgaatgcaaggccacacaaggtggatggaagagttgtggaaccaaagagagctgtctcgagagaagattctgaaagaccaggtgcccacttaactgtgaaaaagatatttgttggtggcattaaagaagacactgaagaacatcacctaagagatgattttgaacagtatggaaaaattgaagtgattgaaatcatgactgaccgaggcagtggcaagaaaaggggctttgcctttgtaaattttgacgaccatgactccatggataagattgtcattcagaaataccatactgtgaatggccacaactgtgaagttaggaaagccccgtcacagcaagagatggatagtgcttcatccagccaaagaggtcgaagtggttctggaaactttggtggtggtcgtggaggtggtttcggtgggaatgacaactttggtcatggaggaaacttcagtggttgtggtggctttggtggcagtcatggtggtggtggatatggtggcagtggggatggctataatggatttggtaatgatggaagcgattttggaggtggtggaagctacaatgattttggcaattacaacaatcagtcttcaaattttggacccatgaagggaggaaattttggaggcagaagctctggcccttatggtggtggaggccaatactttgcaaaaccacaaaaccaaggagcggagagccagagaagtgacagggaagctacaggttacaacagatttgtgaactcagccaagcacagtggtggcagggcctagctgctacaaagaagacatgttttagacaaatactcatgtgtatgggcaaaaaactcgaggactgtatttgtgactaattgtataacaggttattttagtttctgttctgtggaaagtgtaaagcattccaacaaagggttttaatgtagattttttttttgcacctatgctgttgattgctaatgtaatagtctgatcgtgatgctgaataaatgtcttttctttttaatgtgctgtgtaaagttagtctactctgaagccatcttggtaaatttccccaacagtgtgaagttagaattccttcagggtgatgccaggttctatttggaatttatatacaacctgcttggagggagaagccattgtcttcagaaaccttggtgtagttgaactgatagttaccgttgtgacctgaagttcaccattaaaagggattacccaagcaaaatcatggaattattggttataaaagtgattgttggcacatcctatgcaatatatctaaattgaataatggtactagataaaattatagatgggaatgaagcttgtgtatcatccattatcatgtgtaatcaataaatgatttaattctcttgaaaaaaacaagga

SEQ ID NO: 4653 - protein, 292 aa, Homo sapiens
MLTDCVVMRDPNTKHPRGFGFVTYATVEEVDAAMNARPHKVDGRVVEPKRAVSREDSERPGAHLTVKKIFVGGIKEDTEEHHLRDDFEQYGKIEVIEIMTDRGSGKKRGFAFVNFDDHDSMDKIVIQKYHTVNGHNCEVRKAPSQQEMDSASSSQRGRSGSGNFGGGRGGGFGGNDNFGHGGNFSGCGGFGGSHGGGGYGGSGDGYNGFGNDGSDFGGGGSYNDFGNYNNQSSNFGPMKGGNFGGRSSGPYGGGGQYFAKPQNQGAESQRSDREATGYNRFVNSAKHSGGRA

SEQ ID NO: 4654 - DNA, 1683 bp, Homo sapiens
ttttctgcccatggacaccgccgaagaagcattgttaaagtctctcttcaccctgccgtcatgtctaagtcagagtctcctgaagagcccgaacagctgaggaagctcttcattggagggctgagctttgaaacaactgatgagagccttgaggagccattttgagcaatggggaatgctcacggactgtgtggtcatgagagatccaaacaccaagcaccccaggggctttgggtttgtcacatatgctactgtggaggaggtggatgcagccatgaatgcaaggccacacaaggtggatggaagagttgtggaaccaaagagagctgtctcgagagaagattctgaaagaccaggtgcccacttaactgtgaaaaagatatttgttggtggcattaaagaagacactgaagaacatcacctaagagatgattttgaacagtatggaaaaattgaagtgattgaaatcatgactgaccgaggcagtggcaagaaaaggggctttgcctttgtaaattttgacgaccatgactccatggataagattgtcattcagaaataccatactgtgaatggccacaactgtgaagttaggaaagccccgtcacagcaagagatggatagtgcttcatccagccaaagaggtcgaagtggttctggaaactttggtggtggtcgtggaggtggtttcggtgggaatgacaactttggtcatggaggaaacttcagtggttgtggtggctttggtggcagtcatggtggtggtggatatggtggcagtggggatggctataatggatttggtaatgatggaagcgattttggaggtggtggaagctacaatgattttggcaattacaacaatcagtcttcaaattttggacccatgaagggaggaaattttggaggcagaagctctggcccttatggtggtggaggccaatactttgcaaaaccacaaaaccaaggaaacaaagcttagcaggagcggagagccagagaagtgacagggaagctacaggttacaacagatttgtgaactcagccaagcacagtggtggcagggcctagctgctacaaagaagacatgttttagacaaatactcatgtgtatgggcaaaaaactcgaggactgtatttgtgactaattgtataacaggttattttagtttctgttctgtggaaagtgtaaagcattccaacaaagggttttaatgtagattttttttttgcacctatgctgttgattgctaatgtaatagtctgatcgtgatgctgaataaatgtcttttctttttaatgtgctgtgtaaagttagtctactctgaagccatcttggtaaatttccccaacagtgtgaagttagaattccttcagggtgatgccaggttctatttggaatttatatacaacctgcttggagggagaagccattgtcttcagaaaccttggtgtagttgaactgatagttaccgttgtgacctgaagttcaccattaaaagggattacccaagcaaaatcatggaattattggttataaaagtgattgttggcacatcctatgcaatatatctaaattgaataatggtactagataaaattatagatgggaatgaagcttgtgtatcatccattatcatgtgtaatcaataaatgatttaattctcttgaaaaaaacaagga

SEQ ID NO: 4655 - protein, 268 aa, Homo sapiens
MLTDCVVMRDPNTKHPRGFGFVTYATVEEVDAAMNARPHKVDGRVVEPKRAVSREDSERPGAHLTVKKIFVGGIKEDTEEHHLRDDFEQYGKIEVIEIMTDRGSGKKRGFAFVNFDDHDSMDKIVIQKYHTVNGHNCEVRKAPSQQEMDSASSSQRGRSGSGNFGGGRGGGFGGNDNFGHGGNFSGCGGFGGSHGGGGYGGSGDGYNGFGNDGSDFGGGGSYNDFGNYNNQSSNFGPMKGGNFGGRSSGPYGGGGQYFAKPQNQGNKA

SEQ ID NO: 4656 - DNA, 513 bp, Homo sapiens
atggaaggccctacccctgtctcagccctactccactcaagcaccatagttgtagctggggtctttctactcatccgcttccaccccctagcagaaaatagcccgccaacccaaaccctcacactatgtttaggcgctataactaccctactcgcagcagtctgcgccctcacacaaaatgatatcaaaaaaatcgtggccttctctacttcaagccaattgggactcataatagtcacaatcggcatcaaccagccatacctagcattcctacacatctgtacccacgccttcttcaaagccatgctatttgtatgctccggatccattatccataacctcaacaatgaacaagacattcgaaaaataggaggactactcaaaactatacccctcacttcaacctccctcaccattggcagcctagcacttgcaggaataccctttctcacaggtttctactccaaagacctcatcatcgaaaccacaaacatatcatacaccaacgcctga

SEQ ID NO: 4657 - protein, 170 aa, Homo sapiens
MEGPTPVSALLHSSTIVVAGVFLLIRFHPLAENSPPTQTLTLCLGAITTLLAAVCALTQNDIKKIVAFSTSSQLGLIIVTIGINQPYLAFLHICTHAFFKAMLFVCSGSIIHNLNNEQDIRKIGGLLKTIPLTSTSLTIGSLALAGIPFLTGFYSKDLIIETTNISYTNA

SEQ ID NO: 4658 - DNA, 706 bp, Homo sapiens
atgtccctccctaagccctggtctctcttgcctcctgcagggctggtgaattaccagatctccgtcaagtgcagtaaccagttcaagttggaagtgtgtcttttgaatgcagaaaacaaggtcgtggacaaccaggctgggacccagggccagctgaaggtgctgggtgccaacctctggtggccatacctgatgcacgaacaccccgcctacctgtactcgtgggaggtgtggctgactgcacagaagtcactggggcctttgacttctacacactccctgtggggctccgcactgtggccgtcaccgagagccagttcctcatcagcgggaaacctttctatttccacggcgtcaagcatgaggatgcggacatccaagggaagggcttcgactgtccgctgctggtgaaggacttcaacctgctttgctggcttggcgccaacaccttctgcaccagccactatccctacacggaggagatgctgcagatatgttaccggtatgggattgtggtcatcgatgagtgtcctgctgtgggcctgatgctgccatgagtccctgctgcgcacccgctctgcctggccagccctcgggccacactgtgaccctctgtcccttcccttctggcccgctggcaactcttcaacaacgtgtctatgcatcaccatatgtgggtggtggaggaaccggtgctcagagacaa

SEQ ID NO: 4659 - protein, 136 aa, Homo sapiens
MSLPKPWSLLPPAGLVNYQISVKCSNQFKLEVCLLNAENKVVDNQAGTQGQLKVLGANLWWPYLMHEHPAYLYSWEVWLTAQKSLGPLTSTHSLWGSALWPSPRASSSSAGNLSISTASSMRMRTSKGRASTVRCW

SEQ ID NO: 4660 - DNA, 4924 bp, Homo sapiens
ttatatggtttggctctgtccccacccaaatctcatctggaattgtaacaattcccatgtgtcaagggtggggccaggtggagataattgaatcatggaggcagtttcccccatgctgttctcatggtagtgaataagtctcatgagatctgacggttttatcaatgggagttcccctgcacatgctctctcctgcccaccatgtctgactaaattttgtatttttactagagacggggtttcactatgttggccaggctggtctccaactcctgatctcgtgatccatccacctcgacctcccaaagtgctaggattataggcataagccaccacacccggcctcttttttttctttttcttttttttatctggagactgagttttgcacttgttgcccaggctggagtgcaatggtgcgatctcagctcactgcagtctccgcctcagcaggagagcaggaatcttcagtgatccacgggcagatctgcagccactgtgggcacctgctcctcccgcgacctttgtgcccgcgtctctccctccagtacctattgcacgacaccccacgtccgcctcctgccattgccagcaagtgccttgtgcgagtacctggctgtgcttattaatccattatggtcgctctgtcactggtgccattatgtgctcacgtgcccactccctcaggtttagaaggcgcgttgcccggcaacagaagagtctgctggcttagcctttggccgagttggcagctggatgaggacgctcagagcccagctctcgagagttcaagcatccgacggttccccactgctcccaggagcggttacccgggcactctgtgcccctcattcctgtttgggccaaggctgaggacctgcgagtagggctcagttgcctggagccccttcaacccatcccccagttcactttgcttgtgggatctccccgttgctcctgcccctggactgagtggcaggtcatcctacaagcacccagacactcgacatcagtggtgtcaagacaactccaagaaggttttccgtgatcctgcaagacctgtgttccatcctggtgattctgccttcaatttcactgcacaggtaccatagcaagtcagtgctgtgtgctccgagttccagggcatcctccagctcggccactacactgagcacaaggactctgtggggccccaggagcaggtagtcaccccattggggttcacaacacccggctgtccccagacttgtgtccagggaagatagtgttgagggccctcaaggagagcggggcagggatgcctgagcaggacaaggaccctagagtccaagagaatcctgatgatcagagaagggtccccaaggtcaccggggatgcacggtctgcatttcggcccctgcgggacaatggagtcctctctccctttgtgcccaggcccgggcctctgcagacatacctccatgcccagagctcagaaatcagatataaccagacatcccagacctcctgggcgagctcgtgcaccaaaagaaatgccatctccagctcctacagctccacgggagacttgccggggctaaagcagaggagggagccagcctcatcccactgccagctgaccctcagttacgcaatgacagtgagtgaggacaggcttcaggctgtctcttcgggtcacacacggtgtgaaaaggcggcagatacagcaccagggcagacactcgccccaaggggtggctcccccagatctcaggcctctaggccccatagacacaagattcccctgctgccacgcaggcgaggggagcctttgatgctgccacctcccttagagcgggggtaccgggtcactgctgaagacctgcacctggaaaaagaggcggcattacagcggatcaacagtgcactgcaggttgaggacaaggccatctcggattgcagaccctcacggccttcccacactttgtcctcacttgcaacaggggcttctggtgggtctcccgtttctaaagcacccactatggatgcacagcaggacagacccaagtcccaagactgcctgggcctagtggcccccctagcatctgctgcagaggtcccctctacagctcctgtgtctgggaagaagcacagaccaccaggacccctgttctcctcctcagatccccttcctgccacatgttcccactcccgggactcagcccagtacacctcgctgattcctgcccccttcacagctgaaagcatggatgccggcatgagaagaaggaggcctggcacatcggctcctgcagctgccgcagcagcccctcccccctccacattgaaccccatgttggggttactactcaatgcaatggatgcaggcccctcatatttctgggcctcagccacagctgcagcaggtgcccagaggtcagaagtgagatataaccagagatcccagacctcccggaccagatcgtgcaccaaacgaaatgccagctcgagctcctacagctctacggaaggcctcccggaactaaagcggaggagggggccagcctcatcccactgccagctgaccctcagttcctcaaacacagtgagtgaggacggacctcaggctgtctcttcgggtaacagccactgtgaaaacaacgcggatacagcaccagggcagacactcgcccccaggggtggctcccccagatcccaggcctctaggccccgcatcaacagtgcactgcaggttgaggacaaggccatctcacactgcagaccctcacggccttcccacactttgtcctcacttgcaacaggggcttctggtgggtctagcgtttctaaagcacccactatggatgcacagcaggacagacccaagtcccaagactgcctgggcctagtggcccccctagcatctgctgcacaggtcccctctacagctcccgtgtctgggaagaagcacagaccaccaggacccctgttctcctcctcagatccccttcctgccaccttttcccactcccgggactcagcccaggtcacctcgctgattcctgcccccttcactgctgaaagcatggatgccggcatgagaagaacaaggcctggcacgtcggctgctgcaggtgccgcagcagcccctctccccttcacattgaaccccatgttggggttactactcaatgcaatggatgcaggcccctcatgtttctgggcctcagccacagctgcagcaggtgcccagaggtcagaagtgagatataaccagagatcccagacctcccggaccagatcgtgcaccaaacgaaatgccagctcgagctcctacagctctacggaaggcctcccggaactaaagcggaggagggggccagcctcatcccactgccagctggccctcagttcctcaaacacagtgagtgaggacggacctcaggctgtctcttcgggtcacagccactgtgaaaacaacgcagatacagcaccagggcagacactcgcccccaggggtggctcccccagatcccaggcctctaggccccgcatcaacagtgcactgcaagttgaggacaaggccatctcgcactgcagaccctcatggccttcccacactttgtcctcacttgcaacaggggcttctggtgggtctagcgtttctaaagcacccactatggatgcacagcaggacagacccaagtcccaagactgcctgggcctagtggcccccctagcatctgctgcacaggtcccctctacagctcccgtgtctgggaagaagcacagaccaccaggacccctgttctcctcctcagatccccttcctgccacatcttcccactcccgggactcagcccagtatacctcgctgattcctgcccccttcacagctgcaagcatggatgccggcatgagaagaaggaggcctggcacgttggctcctgcagctgccgcagcagcccctcccccctccacattgaaccccatgttggggttactactcaatgcaatggatgtaggcccctcatatttctgggcctcagccacagctgcagcaggtgcccagaggtcagaagtgagatataaccagagatcccagacctcccggaccagatcgtgcaccaaacgaaatgccagctcgagctcctacagctctacggaaggcctcccggaactaaagcggaggagggggccagcctcatcccactgccagctggccctcagttcctcaaacacagtgagtgaggacggacctcaggctgtctcttcgggtcatagccactgtgaaaacaacgcagatacagcaccagggcagacactcgcccccaggagtggctccgccagatcccaggcctctaggccccgcatcaacagtgcactgcagcttgaggacaaggccatctcacactgcagaccctcacggccttcccacactttgtcctcacttgcaacaggggcttctggtgggtctagcgtttctaaagcacccactatggatgcacagcaggacagacccaagtcccaagactgcctgggcctagtggcccccctagcatctgctgcacaggtcccctctacagctcccgtgtctgggaagaagcacagaccaccaggacccctgttctcctcctcagatccccttcctgccacctcttcccactcccgggactcagcccaggtcacctcgctgattcctgcccccttcacagctgcaagcatggatgccggcttgagaatgaatgccggcatgcgaagaatgttttgtgttcgaaattgtttgagggttggcatgatgttagatcgacattgtaagaggagattttcctcttctttccaagagtcttgtgtgctcctcttggcaggcttctgtactgcaacacagcttctccagtgtccagatccagaacccgtgcagtttgctccattgtcaggctcctga

SEQ ID NO: 4661 - protein, 1208 aa, Homo sapiens
MPEQDKDPRVQENPDDQRRVPKVTGDARSAFRPLRDNGVLSPFVPRPGPLQTYLHAQSSEIRYNQTSQTSWASSCTKRNAISSSYSSTGDLPGLKQRREPASSHCQLTLSYAMTVSEDRLQAVSSGHTRCEKAADTAPGQTLAPRGGSPRSQASRPHRHKIPLLPRRRGEPLMLPPPLERGYRVTAEDLHLEKEAALQRINSALQVEDKAISDCRPSRPSHTLSSLATGASGGSPVSKAPTMDAQQDRPKSQDCLGLVAPLASAAEVPSTAPVSGKKHRPPGPLFSSSDPLPATCSHSRDSAQYTSLIPAPFTAESMDAGMRRRRPGTSAPAAAAAAPPPSTLNPMLGLLLNAMDAGPSYFWASATAAAGAQRSEVRYNQRSQTSRTRSCTKRNASSSSYSSTEGLPELKRRRGPASSHCQLTLSSSNTVSEDGPQAVSSGNSHCENNADTAPGQTLAPRGGSPRSQASRPRINSALQVEDKAISHCRPSRPSHTLSSLATGASGGSSVSKAPTMDAQQDRPKSQDCLGLVAPLASAAQVPSTAPVSGKKHRPPGPLFSSSDPLPATFSHSRDSAQVTSLIPAPFTAESMDAGMRRTRPGTSAAAGAAAAPLPFTLNPMLGLLLNAMDAGPSCFWASATAAAGAQRSEVRYNQRSQTSRTRSCTKRNASSSSYSSTEGLPELKRRRGPASSHCQLALSSSNTVSEDGPQAVSSGHSHCENNADTAPGQTLAPRGGSPRSQASRPRINSALQVEDKAISHCRPSWPSHTLSSLATGASGGSSVSKAPTMDAQQDRPKSQDCLGLVAPLASAAQVPSTAPVSGKKHRPPGPLFSSSDPLPATSSHSRDSAQYTSLIPAPFTAASMDAGMRRRRPGTLAPAAAAAAPPPSTLNPMLGLLLNAMDVGPSYFWASATAAAGAQRSEVRYNQRSQTSRTRSCTKRNASSSSYSSTEGLPELKRRRGPASSHCQLALSSSNTVSEDGPQAVSSGHSHCENNADTAPGQTLAPRSGSARSQASRPRINSALQLEDKAISHCRPSRPSHTLSSLATGASGGSSVSKAPTMDAQQDRPKSQDCLGLVAPLASAAQVPSTAPVSGKKHRPPGPLFSSSDPLPATSSHSRDSAQVTSLIPAPFTAASMDAGLRMNAGMRRMFCVRNCLRVGMMLDRHCKRRFSSSFQESCVLLLAGFCTATQLLQCPDPEPVQFAPLSGS

SEQ ID NO: 4662 - DNA, 1599 bp, Homo sapiens
caaggatgcgtattaagaaaataactagaagtggccgcatgatgtacctctcaccaatgagatgcctgtcaagggtatacgtgggtcttttgaatctactggtaattgctttatgaatctgggagctccagacctaggatcttattcactgatttgaagagttcatgcatcgagccagtaggctgtgcacatgggtaaaaactggctgcggctaaacaggtattgtaaatgaagtggacttcgtggtttctttatccaccaataaattaaaagaaaacttacaggaaatggacacagccctggataaatgcaactactaagattcaaccaagaagtaaaaatcctgaacacaccaatacaactaatggatttaatcagtaataaaaagtctctcaccaagaaacagcccaggactaaatagtttcactgctgaattctacttaactcttaaagaagaattaatattacctcttctaaaactattccaaaacactgaagcagagagaattctttctaactcattctgtgaggtcaacataaccatgattccaaaactagataaaaacaccaccaaaaaaggaaaactacaggccaacatccctaataaacatacaggcaaaaattctcaacaaaatattaccaaactgaatccaacagcatatcaaaaagataatacatcatgattaagtgggatttatcccagggttgtaaggatgtttcaacatatgcaaataagtaaatgtgatacatcacatcaaccagatgaaggacaaaaagtatatgatcatttcaacaggtgtggaaaaacaattgatacaatttaacaatgatatatgataaaagctctaaataaattgggtttagaaggaaagtagctcagggctatgaatgtcacatatgacaaacccacagctaacctagcaaacgggggaaagctgaaagcttttcctatgagaactggaagaagataagaatccccactgtcaccacttctattcaacatagtactggcagtcctacccagagaaagaaataaagggaatccgtgctagaaagaaagaagtcaatttatctctgtttgcagatgatataaacttgtgtatacaaaaacctaaagactctatcaaaaactcttagacctgacaagaaattcagcaaagtttaaggatacaaaatcaacatatgataattggtactatttctatacatgaacaacaagctagctgaaaaagaattattttttctgaatctggttcctgctgttgcatttcttgttaaagtattattcatgctctcttattctacttagatgatcattgtttacatttattcaatttatcatttcctttctgttatttagcactgcttatttaaaattataaatttgagtcaactatttcacaagataatattcaactatatttattacagtgcagaacatggaaaggttcagaattttaaaaggcatatgtcttaaaggagcaaaatttaattatactctgaatattaagtacatttgagagatgtatcttcaagtttaaagttctttttctggattctacatctggaagaaataaaatgcagagttttaaaaaattt

SEQ ID NO: 4663 - protein, 36 aa, Homo sapiens
MRIKKITRSGRMMYLSPMRCLSRVYVGLLNLLVIAL

SEQ ID NO: 4664 - DNA, 1854 bp, Homo sapiens
ataaaacactgatttgaatatatgcttttataaagtaaggaaaactgagtcccaggtccttttcttgacctaactagctgtatgatcttgagagaatcatttcatccatctggagtttgaactctacatctgtaaaataatgtaattataattgacttcagaaattcttggagctttaatatcctaattttattatattttatctgagggtctgcagcattagggtaaaagataacatccgtacagtggtccaggtcaataccttgcttagtagatgttcaataaatcctagttaaaggtacatttttagggaaaatgcagaatggagaggcgtgttagggttattgaactagttctctcccagctgctctgtccaagtcatcattatctgtggtctctaccagtgcagcaagctcctgttttccccactcatggcactgacagagcagtgcctcacagcctcagagctctgtcacagccctccagtgacttcctgtctcacccagacaaaagtccacagtctctaacctggccagcaaggtcctccatggttgaactcctttccctgattccctcggcctctgacttctgctaccaccgtctgcctgattctggctactcagctgccagccctcctccctctcctatccagtacactcctacatcgggacctggggactttattgtccctctacctgggcttcccattgccccaggcattcacgtgccttgctctcactttctttaggtctgtgttcaaacaatgtctttatccaagaggcagcgactctgacctctctatataaaaataacaccttgttctctgcattctctatacttttactgtgctttatttttcctcaggcacttatcatccctgacattatatatttatggtaggttgttcacagctgttcctgctttctgccctgtattacattgcttggcacatgcagatgtttaataagtaaggataactagaatttatatagcatgtactgtgttccaggcgccatctgaaaacagcactacgaagaactattctttttccctatttacaggtgaagaaactgaggcccagaaaagttaggtaacttgaaaaaggttcacacagatgagaactagctgatctgggaggaagttaagtgagtaagcaactaaaagaagagggccgggcgcagtggctcatgcctgtaatcccagcactttgggaggccaaggcaagtggatcacctgaggctgtgagttcaagaccagcctgaccaacatggagaaaccccatctctactaaaaatgcaaaattagacgggcgtggtagctcatgcctgtaaccccagctactcaggaagctgaggcaggagaattgcttgaacctgggaggcggaggttgcagtgagctgggatcgctccattgcactccagcctgggcaacaagagcgaaactctgtctaaaaaaaaaaaaagaaagaaagaaatgaggagataaagtcctggggtctattatacttgaaaaaatacactttatattttttaaaaacagattagaaacaaatagcactcactctgacatcatctactgtttagagaattctactttataaacacttcctaggaaccccgaatcagatggtagaaagataaattttaaacatatttctgcattttttcctctccaaaggatacttttccatctccagaagatatttcaactgtatcttcccaaagcgttgacctttttaactcagataacttcagaaaccagaaaagttgcattttctaagaaattctccttaaatgtcctgaatattcaccatccagactgaattacgattgcacacttgattcaggaattag

SEQ ID NO: 4665 - protein, 141 aa, Homo sapiens
MERRVRVIELVLSQLLCPSHHYLWSLPVQQAPVFPTHGTDRAVPHSLRALSQPSSDFLSHPDKSPQSLTWPARSSMVELLSLIPSASDFCYHRLPDSGYSAASPPPSPIQYTPTSGPGDFIVPLPGLPIAPGIHVPCSHFL

SEQ ID NO: 4666 - DNA, 1854 bp, Homo sapiens
ataaaacactgatttgaatatatgcttttataaagtaaggaaaactgagtcccaggtccttttcttgacctaactagctgtatgatcttgagagaatcatttcatccatctggagtttgaactctacatctgtaaaataatgtaattataattgacttcagaaattcttggagctttaatatcctaattttattatattttatctgagggtctgcagcattagggtaaaagataacatccgtacagtggtccaggtcaataccttgcttagtagatgttcaataaatcctagttaaaggtacatttttagggaaaatgcagaatggagaggcgtgttagggttattgaactagttctctcccagctgctctgtccaagtcatcattatctgtggtctctaccagtgcagcaagctcctgttttccccactcatggcactgacagagcagtgcctcacagcctcagagctctgtcacagccctccagtgacttcctgtctcacccagacaaaagtccacagtctctaacctggccagcaaggtcctccatggttgaactcctttccctgattccctcggcctctgacttctgctaccaccgtctgcctgattctggctactcagctgccagccctcctccctctcctatccagtacactcctacatcgggacctggggactttattgtccctctacctgggcttcccattgccccaggcattcacgtgccttgctctcactttctttaggtctgtgttcaaacaatgtctttatccaagaggcagcgactctgacctctctatataaaaataacaccttgttctctgcattctctatacttttactgtgctttatttttcctcaggcacttatcatccctgacattatatatttatggtaggttgttcacagctgttcctgctttctgccctgtattacattgcttggcacatgcagatgtttaataagtaaggataactagaatttatatagcatgtactgtgttccaggcgccatctgaaaacagcactacgaagaactattctttttccctatttacaggtgaagaaactgaggcccagaaaagttaggtaacttgaaaaaggttcacacagatgagaactagctgatctgggaggaagttaagtgagtaagcaactaaaagaagagggccgggcgcagtggctcatgcctgtaatcccagcactttgggaggccaaggcaagtggatcacctgaggctgtgagttcaagaccagcctgaccaacatggagaaaccccatctctactaaaaatgcaaaattagacgggcgtggtagctcatgcctgtaaccccagctactcaggaagctgaggcaggagaattgcttgaacctgggaggcggaggttgcagtgagctgggatcgctccattgcactccagcctgggcaacaagagcgaaactctgtctaaaaaaaaaaaaagaaagaaagaaatgaggagataaagtcctggggtctattatacttgaaaaaatacactttatattttttaaaaacagattagaaacaaatagcactcattctgacatcatctactgtttagagaattctactttataaacacttcctaggaaccccgaatcagatggtagaaagataaattttaaacatatttctgcattttttcctctccaaaggatacttttccatctccagaagatatttcaactgtatcttcccaaagcgttgacctttttaactcagataacttcagaaaccagaaaagttgcattttctaagaaattctccttaaatgtcctgaatattcaccatccagactgaattacgattgcacacttgattcaggaattag

SEQ ID NO: 4667 - protein, 141 aa, Homo sapiens; identical to SEQ ID NO: 4665

SEQ ID NO: 4668 - DNA, 309 bp, Homo sapiens
atggctggaataacatgcatagaattcagaatccggatggcaaagaagatcatagacattcaggagaaagttgaaacccacttcaagaaatctaacaaattaactaaagtgatacaagagctgaaagatgaaatagacatattaagaaagagccaaactgatctgatcaagctgaaaaactcactacaagaatttcataacacaattggaagtattaacagtgtaataaaccaaatggagaaaagaacctcagagcttgaagactggatatctgaactaagtcagagaaaaatcaagaaaaaagaatga

SEQ ID NO: 4669 - protein, 102 aa, Homo sapiens [sequence omitted]

SEQ ID NO: 4670 - DNA, 1023 bp, Homo sapiens
tagggcaactggaaggctgggagctgaaatcacctgaagtctcattcactcacatgtctgatggttgatattgtctatcagattcttttttgtctccttctctgcaagaggctggcaccagatcacctcctgagtagagcagacattccaaaggatgtcctgccaacaataatggaaagctggatacaactgaatatgtaaaatgatgttaatgaagaattgaagagcactgtatctagttttctgctctccccttattttgaatcaaacccaggcatcctatcatttcatctataaagactttagttcctaaaagtggaattgctggatcaaagggtaaaggcataggcaattctagagcatttagatttaatgtgatggacaggaatgaaccatgaagccacgagtgtttgatttttaaattgtgatattccactaaatgagaaatgaccaggacttcacagagatttcatgaaaggagggccacaaaggaagaacccagagcaggccggtgagaggcactctaagagctttccaatatccgtcttcggagcgcacgggaatccgccgagctctgcgtgcaggcccttttttcttttgaggttcacattttttgaaattttacgccagggcttttgtaatttcctcccccgcccgctgacggtcctggagtcgctcggggctttaggccggttatgcaacgtgtaccgctcggggctgccggctgcacctccgccgcgcctcgccgctcactgcgctagacccggcgccccgcgtctcgcttcgcgggcagtcagggggccggcgctctgtcgaggtctccagctagagcagggagcccgagcccgagggagtccccggagccgacgaagggcttattagaccctgactcttttctgaggcgcgcagattttgtctttgatcactccctctccgcgggtctacggccgcgcgctttcggcgccggcgatggggagaagacggaggctgtgtctccagctctacttcctgtggctgggctgt

SEQ ID NO: 4671 - protein, 136 aa, Homo sapiens
MKGGPQRKNPEQAGERHSKSFPISVFGAHGNPPSSACRPFFLLRFTFFEILRQGFCNFLPRPLTVLESLGALGRLCNVYRSGLPAAPPPRLAAHCARPGAPRLASRAVRGPALCRGLQLEQGARARGSPRSRRRAY

SEQ ID NO: 4672 - DNA, 1023 bp, Homo sapiens
tagggcaactggaaggctgggagctgaaatcacctgaagtctcattcactcacatgtctgatggttgatattgtctatcagattcttttttgtctccttctctgcaagaggctggcaccagatcacctcctgagtagagcagacattccaaaggatgtcctgccaacaataatggaaagctggatacaactgaatatgtaaaatgatgttaatgaagaattgaagagcactgtatctagttttctgctctccccttattttgaatcaaacccaggcatcctatcatttcatctataaagactttagttcctaaaagtggaattgctggatcaaagggtaaaggcataggcaattctagagcatttagatttaatgtgatggacaggaatgaaccatgaagccacgagtgtttgatttttaaattgtgatattccactaaatgagaaatgaccaggacttcacagagatttcatgaaaggagggccacaaaggaagaacccagagcaggccggtgagaggcactctaagagctttccaatatccgtcttcggagcgcacgggaatccgccgagctctgcgtgcaggcccttttttcttttgaggttcacattttttgaaattttacgccagggcttttgtaatttcctcccccgcccgctggcggtcctggagtcgctcggggctttaggccggttatgcaacgtgtaccgctcggggctgccggctgcacctccgccgcgcctcgccgctcactgcgctagacccggcgccccgcgtctcgcttcgcgggcagtcagggggccggcgctctgtcgaggtctccagctagagcagggagcccgagcccgagggagtccccggagccgacgaagggcttattagaccctgactcttttctgaggcgcgcagattttgtctttgatcactccctctccgcgggtctacggccgcgcgctttcggcgccggcgatggggagaagacggaggctgtgtctccagctctacttcctgtggctgggctgt

SEQ ID NO: 4673 - protein, 136 aa, Homo sapiens [sequence omitted]

SEQ ID NO: 4674 - DNA, 198 bp, Homo sapiens
atgtatgccatcgacctcatgctgaagtgggacaaccgtccagatggaaagcgggtgatgcagctgcagatcctggaggtgaacttcaaccctgactgcaagcgagcctgcaggtaccatctctccttcttcaacaacgtcttcagcaccttgtttctggaccagcccagtgactgtcatgtcgcctgccttgtctag

SEQ ID NO: 4675 - protein, 65 aa, Homo sapiens [sequence omitted]

SEQ ID NO: 4676 - DNA, 198 bp, Homo sapiens; identical to SEQ ID NO: 4674

SEQ ID NO: 4677 - protein, 65 aa, Homo sapiens [sequence omitted]

SEQ ID NO: 4678 - DNA, 5572 bp, Homo sapiens
ctcggaaaagcttttcagtaaatgcactcatgctgctccaggagctcttctctgcaacaagccacccatctgccatcaacaagttaagaccaagagaactaacggctgcggaaatgagactgaagctttgattaaccagctgagcagttagaggtggagaaatttaataacttatattcaaaactgatttagggatcagagcaatcacagaaaatgaaaccaatgctttccagagggatatcctaaggaaaaaacaactcgtcctggtggattcaattttacttggaaagcctgggacacagaaaacaggaaactggtcaaaggctcctacatgttagagccttttacagactcactgcgttgagtctaacaaccgcgactgaatgcagcctccaatgtgctcagaagaatgggcttacatttcaagtggccattaggggcccctatgctggcagcaatatatgcaatgagtatggttttaaaaatgctgcctgccctgggtatggcgtgtccacccaaatgccgctgcgagaagctgctcttctactgcgactctcagggcttccactcagtgccaaacgccacagacaagggctctctgggcctgtccctgaggcacaatcacatcacagagctcgaaagagatcaatttgccagcttcagtcaacttacttggctccacttagatcacaatcaaatttcaacagtaaaagaagatgcttttcaaggactatataaacttaaggaattaatcttaagttccaacaaaatattttacttgccaaacacaacttttacccaactgattaacctgcaaaatttggacctgtcttttaatcagctgtcatctctgcacccagagctcttctatggccttcggaagctgcagaccttgcatttacgttccaactccctgcggactatcccagtacgcctgttctgggactgtcgtagtctggagtttctggatttgagcacaaatcgtttgcgaagtttggctcgcaatggatttgcaggattaattaaactgagagagcttcacctagagcacaaccagctgacgaagattaattttgctcatttcctacggctaagcagtctgcacacgctcttcttacaatggaacaaaatcagcaacttgacatgtgggatggagtggacctggggcactttagaaaagctagacctgactggaaatgaaatcaaagccatcgacttgacagtgtttgaaacgatgcccaatcttaaaatactactcatggataacaacaagttaaacagccttgattccaagatcttaaactccctgagatccctcacaaccgttggtctctctggcaatctgtgggaatgcagcgcccgaatatgtgctctggcctcctggctgggcagtttccaaggtcggtgggaacactccatcctatgccacagtcctgaccacacccaaggagaggatattctagatgcagtccatggatttcagctctgctggaatttgtcaaccactgtcactgtcatggctacaacttatagagatccaaccactgaatatacaaaaagaataagctcatcaagttaccatgtgggagacaaagaaatcccaactactgcaggcatagcagttactaccgaggaacactttcctgaaccagacaatgccatcttcactcagcgggtaattacgggaacaatggctttattgttttctttcttttttattatttttatagtgttcatctccaggaagtgctgccctcccactttaagaagaattaggcagtgctcaatggttcagaaccacaggcagctccgatcccaaacacgactccatatgtcaaacatgtcagaccaaggaccgtataatgaatatgaacccacccatgaaggacccttcatcatcattaatggttatggacagtgcaagtgtcagcagctgccatacaaagaatgtgaagtataatatctacccatcatcaaaaatcacatcagataagtaacctattttacatagtagaggctaaatacatatctaatttttaccaatggtgacattaagcctaattttccaaactaagtggagacttagtttttgaagtgttgaagtatttttaatttttttaaatgaaaccatattttaagtgttaaatgaatcaatgctcacattaatttgcactcctgttggaaagtctaaaatgcttacttcaaaataagaaatgtacgtaattatatacaatcgtgtgtaaacctttacactaaggtctccatatactatttttttctactgaaaacaatttagaaagaagctattgggcagaaacagatatagatcaatacctgtttgatcactgctctccatcccatgtaccacaactatcttgctgcttaaaaggagacttagtaaagttctcttgtatgataatttggtatttactcaaatcttcaatttcttgccagggtgggaagtagaatttcatgtatgctgaagactggtaaatattaaacattctccttccagagtttctgcctgggttagtagatattatcaaagtccatatcatgaattcagaaccctttaatgtaattctaataagctgagtgactctttaatatatttacacaatgaatccaagtgactgtgaaaaggtctcattacaatgaaaccaatcctaaataattacaccaacttcttatacatttctcgtttgacttataatggacatgatttttgtggcatttagacaactgttttaaactagcattaaactgtcattgtactaattaatgtactaaatcctatgtttacattaatatgtgaaaaaagatttagaagatattttggagataaacaagacaaactgagtcaatttaacaatcctgacatgctccctccaatttaaaagcacacacacacacacacacacacacacacacactctcgcgctctctctctcaactatcatgatcaaagatgccttgacaaaggggtttaaacctctttcttctgctttttcctgatcttcaaacctcaaagagccaagttaaaaataattggctagcaacaggcttaacactgattcttattgtattacaaaggaaccatgaaaaaaaacactttctaactattatataatacatttcgatctttcaataaagatacgcattcacgctgtaagtgtagttcagtgtaggtgaagaaaacagcaccactgagatgaatctcatggcagaacaactcgacatgcctatgcagccacacagtggtaacttgaaggcagcacagaggtgagggattaaaaggaaaggcagattttgaaatctgactctcaggttagctggagttacaaggcagccaacaatgattatacacaatctgcaccaaacagggaaaggacctgctgctgaaaagggaagaggggtagatcctccaatgtaaatataaacatgccatagttaacaaatgataaggatgccacatttttcatgcagaaaagaaccacaggtattcagtttcttgtattatgatttctaaagaaaacctattaaatatttggaatttagatgcaagctactcattcacacagaacttttccataaacattgttccacatattgaaaaaactgtaaaattatagcactaacttgattttagaaaatgagcattttttacaactgccatttactgtatgtagaaaaaagacataaaaccttagagaaagccactaccatttttcaagttatcttttccccaacatcaacatcaacatgatatccttcattcagggcatattttttcttcccaggatcaaactgaaaacatgttaaggctatagtttagccagtaagatttaatcacaatttttcttctttaatactaagagatgggtaccttagtacccttcacctaacatctctcggtaaaaagcagacaagatcacaaattacagtaaaaatgtgctcttttttaaggtgggcagattagtttgtcaaagtctcagcccagttcaattcagttgatctcgagtggtgagtattttgtctcttgttaaaccagaccctgggcttgtctgggcagagacagaagctgatttaacagcatagagcacagcgccctacttccccacagacaggctgaattagaagcccctattacaaataagagcaccacgagctaaaatttaccaacccatttatcaggatgaccattgccatttgtcaggtgacagacagcttggtcacaacacaactgtgtcctgagcacacaagattccatcagccctgaaggacagcagaggagtattttccatcatttcaaaccacaaacaaaattaagatttaaactgtgggatgggtaagaaatccccttctttggctgggaatctccaccttaatccttaaaggaccataactggcaaaatccttagtgtacggacaaaagcaaattggaaaagcaagccatttactaattcagaggaacagcatagccaaggctagcgaggcatactttccagttgaaaaaaaatcaaaattttttgccttccatttttctgggtaatgtcctttaagaaaagtgaatgacagtagtaccaaaaaggtattttcctttctcatttaaaagcaaaaacctccctttttaattgcctgtagaaggcaagattttctttcatttttgtccatttgtgtttcagaatcagcacaggtttgaagattagactgttagtcatctgtgctttctttaccaactggctagaacggaacagcatcacagcaacgctgcggatcttggttacacagtgtcagagcttttgttttttgatggggttttatcctcttcaccaccactacccactccattttttttctatttttaagattagaggaaaatgaccattaagaaccagaaaaataattaatctctctggaaaaaggaaagctaaagaagactatgataccatacccatctagaaaccaagaactagtttgaaatcgtttatattcatttctgtagcatgacagggatttcaatcacctttctgaaaagagtgggctgataaacttgtaaatccacacacaactctgagaatacccactgccagcatcaaaaagcaaagatactaattttttaagccaaaaatctgtactaacacatgtaatttcttaatgtgcctaagttaatttctgtatcaattcaataaatggaattgactgaacttcccaacgccactaattattaaaatccatctgcttattctaatgctagtcaccaagagctagactccatctttccaataaaaatgagccctatgtagcactaggtttgaattctaaaattcaaaacaggcatttcattttcttaaggcacacttcctacacacagctatcaggggaaaaagctataaatgtcctgttctttttctgaagtgtggatatcaatataaaatttgttaaagaatatttttaacagctgacttacatgatcgttttcctaatacaggaatacagcgacagacctatctgaaaagtctgtttgggggcatacttttcatatcttattgactaaagcccttgagccagg

SEQ ID NO: 4679 - protein, 516 aa, Homo sapiens
MGLHFKWPLGAPMLAAIYAMSMVLKMLPALGMACPPKCRCEKLLFYCDSQGFHSVPNATDKGSLGLSLRHNHITELERDQFASFSQLTWLHLDHNQISTVKEDAFQGLYKLKELILSSNKIFYLPNTTFTQLINLQNLDLSFNQLSSLHPELFYGLRKLQTLHLRSNSLRTIPVRLFWDCRSLEFLDLSTNRLRSLARNGFAGLIKLRELHLEHNQLTKINFAHFLRLSSLHTLFLQWNKISNLTCGMEWTWGTLEKLDLTGNEIKAIDLTVFETMPNLKILLMDNNKLNSLDSKILNSLRSLTTVGLSGNLWECSARICALASWLGSFQGRWEHSILCHSPDHTQGEDILDAVHGFQLCWNLSTTVTVMATTYRDPTTEYTKRISSSSYHVGDKEIPTTAGIAVTTEEHFPEPDNAIFTQRVITGTMALLFSFFFIIFIVFISRKCCPPTLRRIRQCSMVQNHRQLRSQTRLHMSNMSDQGPYNEYEPTHEGPFIIINGYGQCKCQQLPYKECEV

SEQ ID NO: 4680 - DNA, 4558 bp, Homo sapiens
ccgcggccgcccgcgctcccgcccccggcccttgcctgccacgccctcccctttttggccgggtcttggctgctccgcgggtctcgggcgggatgtgggagtaagcgtgccccctccccgcacatgtctcagtgggtgcgtttctggggagcggaggggagggaagacctcgggcaggcagaggggtgcagggcgcgcccctggaacagactgggctctgtgtgggccacaactgcgacgtttgaacggaccagcgtcatgttaggtctgctcaacgttccgagaagggccagggccccgctccggtgttcctcaactattcatccctgttttggatgggaggggatccctaaaaattagcgcttcaaaatacccaccatttcgtgctccctctgcagttaagtttggtactctaggacttgagagtgattgcgagggcagagagacctctaggggtgatctgattcgaccttcttcccctccgctccaccccaccacctttttttcttttttttttttggtcggtgagtgatgatgataagctcccgctgcaggtgtgaatagagaccccggaggtgcgtcctagccctcatctggggaagcgcacctgcatacagacgggtgcaccggggaggaggcgacctgccgcgtgttcctgcaagcagaaaaggagttaactagtgtcacatttgaagacgagcactgaggatgaggaaccaactgaagaatatgaaaatgttggaaatgcagcatctaagtggccaaaagtggaggatcctatgcctgaatctaaggttggtgacacatgtgtttgggatagcaaggtagagaatcaacagaaaaagcctgtggaaaacaggatgaaggaggacaaaagcagcatcagggaagcaatcagcaaagccaagagtacagcaaatataaagacagaacaggaaggtgaggcatctgagaagagcttgcatctgagcccacagcatatcacacaccagactatgcctataggacagagaggcagtgagcaaggcaaacgtgtggagaacattaatggaacctcctaccctagtctacagcagaaaaccaatgctgttaagaaattacataaatgtgatgaatgtgggaaatccttcaaatataattcccgccttgttcaacataaaattatgcacactggggaaaagcgctatgaatgtgatgactgtggagggactttccggagcagctcgagccttcgggtccacaaacggatccacactggggagaagccgtacaagtgtgaggaatgtgggaaagcctacatgtcctactccagccttataaaccacaaaagcacccattctggggagaagaactgtaaatgtgatgaatgtggaaaatccttcaattatagctctgttctggaccagcataaaaggatccacactggggagaagccctatgaatgtggtgagtgtgggaaggccttcaggaacagctctgggctcagagtccacaaaaggatccacacgggggagaagccctatgaatgcgacatctgtgggaaaaccttcagtaacagctctggccttagggtccataaaaggatccacacaggtgagaaaccttacgaatgtgatgagtgtgggaaggccttcattacttgtagaacacttctcaaccataaaagcatccactttggagataaaccctataaatgtgatgagtgtgagaaatcttttaattatagctctcttctcattcagcataaagtcatccacactggagagaaaccttatgaatgtgatgaatgtgggaaggctttcaggaacagctcaggcctcatagtgcataaaaggatccacacaggagagaaaccttacaagtgtgatgtctgtggcaaagcattcagctatagctcaggcctcgcagtccataaaagcattcaccctgggaagaaagcccatgaatgtaaggagtgtgggaaatcctttagttataactcactacttcttcaacacagaactattcataccggagagagaccttatgtatgtgatgtgtgtgggaaaacgttcagaaacaatgcaggcctcaaagtccacaggaggctccatactggggaaaaaccatataagtgtgatgtgtgtgggaaagcctatatctcacgctctagccttaaaaatcacaaaggaatccaccttggggagaagccctataaatgtagctattgtgagaaatccttcaactacagctctgcccttgaacagcataaaaggattcataccagggaaaaaccctttgggtgtgatgagtgtggtaaagctttcagaaataattctggccttaaagtacataaacgaatccacactggggaacgaccttacaaatgtgaagaatgtgggaaagcatacatctctctctcgagccttataaatcataaaagtgtacaccctggggagaagccctttaagtgtgacgagtgtgagaaggccttcatcacataccgaacccttacaaaccacaaaaaagttcatcttggggagaagccctacaaatgtgatgtgtgtgagaaatcttttaattacacatcgctcctttctcagcacagaagggtccacactagagagaaaccctatgaatgtgacaggtgtgagaaggtcttcagaaacaactcaagccttaaagttcataaaagaatccatactggggagaggccctatgaatgtgatgtgtgtggaaaagcctacatctcacactcaagccttattaaccataagagtacccaccctggcaggacaccccatacatgtgatgaatgtggaaaagcttttttctcaagcagaactcttataagccataaaagagtccatcttggggagaaacccttcaagtgtgttgagtgtgggaaatctttcagttacagctctctcctttctcagcacaagaggatccacacaggggagaaaccctatgtgtgtgataggtgtgggaaggccttcaggaacagctcaggcctcacagtgcataaaaggatccacacaggtgagaaaccctatgaatgtgatgagtgtgggaaggcatacatctcacactcaagtcttatcaatcataaaagtgtccaccaggggaagcagccctataattgtgagtgtgggaaatccttcaattatagatcagtccttgaccagcacaaaaggatccacactggaaagaagccataccgatgtaatgagtgtggtaaggcttttaatatcagatcaaatctcaccaagcataaaagaacccatactggagaggaatctttaaatgtgatatatgtgggaagttatagtggcacatcccagaagagaacctatgagggagggaatgccctggatgggggcaggatgaggatgcctctgtagcaggcagagcttaccaagtctctccgaactcaaatggaagaaataccttatgaatgtaagaatgtagggggtcatggcttgtaatttacacagtgtaaatgaaaccatcctagaggattatgaggaatcctttctatgtgattttcaatcatagcaagcaagaaaggctccagtgtcaaggtagttcagctcttacaggatataaaacagtccatacttgagagaaaaacttagatctgagtgatggaatgtgaagcaaatcttcaaaatcagtagacatttctggacataaaacacagatgaggaaagggcttcaattagaagttacgtaatcaccatcagaaagttcatgtttggtaaattctgttactagaaatgtaggaaattcaggtatagctttgaatcccaattacacattggtcagtgggaaaactaagggcctccaacaggcaaattcagggaggataggtttcagggaatataaatttatttaatattagtggtctttaagtataaacttgatgtaattggtttgggagggggcagtgatgatgacttctgaaacaaaatttggatttccttttaggaaaagtagaaagcatagacttacaagtctaacaggagataggagagagtcactcataaaaaatgcaaattgatgaacgtactattgtgatacattagttgaatggatgaaacttttttaaagtttcagatgaactcccataatgaatgatgaatttgtgatgagggataacctggaagtggtattcacacattatgctacaataaaaggttctaccgtggagaggattttgacacattcagtaactaatggaacacaccgtcaacatgaattcgcaccttacatgacagaagtgattcagggattcctatgaatagaaatgctgagaaggaacgcattttattgcagaagctaaaaagctaaagtaccagtcatctagagagaaggaaattaatgtttcttaataatcctgttaaatgtttgattgtttttggaatgtgttattgtaaagatgtcatgcaggacatgtatatgttgtctgttgtaaaatgttaacgaatactttgttcagggctcactctctctttgtcatgaaagccagctccttgtggcgaggtaaagtggaattccaataaagaaattccttaaa

SEQ ID NO: 4681 - protein, 867 aa, Homo sapiens
MPESKVGDTCVWDSKVENQQKKPVENRMKEDKSSIREAISKAKSTANIKTEQEGEASEKSLHLSPQHITHQTMPIGQRGSEQGKRVENINGTSYPSLQQKTNAVKKLHKCDECGKSFKYNSRLVQHKIMHTGEKRYECDDCGGTFRSSSSLRVHKRIHTGEKPYKCEECGKAYMSYSSLINHKSTHSGEKNCKCDECGKSFNYSSVLDQHKRIHTGEKPYECGECGKAFRNSSGLRVHKRIHTGEKPYECDICGKTFSNSSGLRVHKRIHTGEKPYECDECGKAFITCRTLLNHKSIHFGDKPYKCDECEKSFNYSSLLIQHKVIHTGEKPYECDECGKAFRNSSGLIVHKRIHTGEKPYKCDVCGKAFSYSSGLAVHKSIHPGKKAHECKECGKSFSYNSLLLQHRTIHTGERPYVCDVCGKTFRNNAGLKVHRRLHTGEKPYKCDVCGKAYISRSSLKNHKGIHLGEKPYKCSYCEKSFNYSSALEQHKRIHTREKPFGCDECGKAFRNNSGLKVHKRIHTGERPYKCEECGKAYISLSSLINHKSVHPGEKPFKCDECEKAFITYRTLTNHKKVHLGEKPYKCDVCEKSFNYTSLLSQHRRVHTREKPYECDRCEKVFRNNSSLKVHKRIHTGERPYECDVCGKAYISHSSLINHKSTHPGRTPHTCDECGKAFFSSRTLISHKRVHLGEKPFKCVECGKSFSYSSLLSQHKRIHTGEKPYVCDRCGKAFRNSSGLTVHKRIHTGEKPYECDECGKAYISHSSLINHKSVHQGKQPYNCECGKSFNYRSVLDQHKRIHTGKKPYRCNECGKAFNIRSNLTKHKRTHTGEESLNVIYVGSYSGTSQKRTYEGGNALDGGRMRMPL

SEQ ID NO: 4682 - DNA, 2938 bp, Homo sapiens
tgcaggtgtgaatagagaccccggaggtgcgtcctagccctcatctggggaagcgcacctgcatacagacgggtgcaccggggaggaggcgacctgccgcgtgttcctgcaagcagaaaaggagttaactagtgtcacatttgaagacgagcactgaggatgaggaaccaactgaagaatatgaaaatgttggaaatgcagcatctaagtggccaaaagtggaggatcctatgcctgaatctaaggttggtgacacatgtgtttgggatagcaaggtagagaatcaacagaaaaagcctgtggaaaacaggatgaaggaggacaaaagcagcatcagggaagcaatcagcaaagccaagagtacagcaaatataaagacagaacaggaaggtgaggcatctgagaagagcttgcatctgagcccacagcatatcacacaccagactatgcctataggacagagaggcagtgagcaaggcaaacgtgtggagaacattaatggaacctcctaccctagtctacagcagaaaaccaatgctgttaagaaattacataaatgtgatgaatgtgggaaatccttcaaatataattcccgccttgttcaacataaaattatgcacactggggaaaagcgctatgaatgtgatgactgtggagggactttccggagcagctcgagccttcgggtccacaaacggatccacactggggagaagccgtacaagtgtgaggaatgtgggaaagcctacatgtcctactccagccttataaaccacaaaagcacccattctggggagaagaactgtaaatgtgatgaatgtggaaaatccttcaattatagctctgttctggaccagcataaaaggatccacactggggagaagccctatgaatgtggtgagtgtgggaaggccttcaggaacagctctgggctcagagtccacaaaaggatccacacgggggagaagccctatgaatgcgacatctgtgggaaaaccttcagtaacagctctggccttagggtccataaaaggatccacacaggtgagaaaccttacgaatgtgatgagtgtgggaaggccttcattacttgtagaacacttctcaaccataaaagcatccactttggagataaaccctataaatgtgatgagtgtgagaaatcttttaattatagctctcttctcattcagcataaagtcatccacactggagagaaaccttatgaatgtgatgaatgtgggaaggctttcaggaacagctcaggcctcatagtgcataaaaggatccacacaggagagaaaccttacaagtgtgatgtctgtggcaaagcattcagctatagctcaggcctcgcagtccataaaagcattcaccctgggaagaaagcccatgaatgtaaggagtgtgggaaatcctttagttataactcactacttcttcaacacagaactattcataccggagagagaccttatgtatgtgatgtgtgtgggaaaacgttcagaaacaatgcaggcctcaaagtccacaggaggctccatactggggaaaaaccatataagtgtgatgtgtgtgggaaagcctatatctcacgctctagccttaaaaatcacaaaggaatccaccttggggagaagccctataaatgtagctattgtgagaaatccttcaactacagctctgcccttgaacagcataaaaggattcataccagggaaaaaccctttgggtgtgatgagtgtggtaaagctttcagaaataattctggccttaaagtacataaacgaatccacactggggaacgaccttacaaatgtgaagaatgtgggaaagcatacatctctctctcgagccttataaatcataaaagtgtacaccctggggagaagccctttaagtgtgacgagtgtgagaaggccttcatcacataccgaacccttacaaaccacaaaaaagttcatcttggggagaagccctacaaatgtgatgtgtgtgagaaatcttttaattacacatcgctcctttctcagcacagaagggtccacactagagagaaaccctatgaatgtgacaggtgtgagaaggtcttcagaaacaactcaagccttaaagttcataaaagaatccatactggggagaggccctatgaatgtgatgtgtgtggaaaagcctacatctcacactcaagccttattaaccataagagtacccaccctggcaggacaccccatacatgtgatgaatgtggaaaagcttttttctcaagcagaactcttataagccataaaagagtccatcttggggagaaacccttcaagtgtgttgagtgtgggaaatctttcagttacagctctctcctttctcagcacaagaggatccacacaggggagaaaccctatgtgtgtgataggtgtgggaaggccttcaggaacagctcaggcctcacagtgcataaaaggatccacacagtttcagatgaactcccataatgaatgatgaatttgtgatgagggataacctggaagtggtattcacacattatgctacaataaaaggttctaccgtggagaggattttgacacattcagtaactaatggaacacaccgtcaacatgaattcgcaccttacatgacagaagtgattcagggattcctatgaatagaaatgctgagaaggaacgcattttattgcagaagctaaaaagctaaagtaccagtcatctagagagaaggaaattaatgtttcttaataatcctgttaaatgtttgattgtttttggaatgtgttattgtaaagatgtcatgcaggacatgtatatgttgtctgttgtaaaatgttaacgaatactttgttcagggctcactctctctttgtcatgaaagccagctccttgtggcgaggtaaagtggaattccaataaagaaattccttaaa

SEQ ID NO: 4683 - protein, 753 aa, Homo sapiens
MPESKVGDTCVWDSKVENQQKKPVENRMKEDKSSIREAISKAKSTANIKTEQEGEASEKSLHLSPQHITHQTMPIGQRGSEQGKRVENINGTSYPSLQQKTNAVKKLHKCDECGKSFKYNSRLVQHKIMHTGEKRYECDDCGGTFRSSSSLRVHKRIHTGEKPYKCEECGKAYMSYSSLINHKSTHSGEKNCKCDECGKSFNYSSVLDQHKRIHTGEKPYECGECGKAFRNSSGLRVHKRIHTGEKPYECDICGKTFSNSSGLRVHKRIHTGEKPYECDECGKAFITCRTLLNHKSIHFGDKPYKCDECEKSFNYSSLLIQHKVIHTGEKPYECDECGKAFRNSSGLIVHKRIHTGEKPYKCDVCGKAFSYSSGLAVHKSIHPGKKAHECKECGKSFSYNSLLLQHRTIHTGERPYVCDVCGKTFRNNAGLKVHRRLHTGEKPYKCDVCGKAYISRSSLKNHKGIHLGEKPYKCSYCEKSFNYSSALEQHKRIHTREKPFGCDECGKAFRNNSGLKVHKRIHTGERPYKCEECGKAYISLSSLINHKSVHPGEKPFKCDECEKAFITYRTLTNHKKVHLGEKPYKCDVCEKSFNYTSLLSQHRRVHTREKPYECDRCEKVFRNNSSLKVHKRIHTGERPYECDVCGKAYISHSSLINHKSTHPGRTPHTCDECGKAFFSSRTLISHKRVHLGEKPFKCVECGKSFSYSSLLSQHKRIHTGEKPYVCDRCGKAFRNSSGLTVHKRIHTVSDELP

SEQ ID NO: 4684 - DNA, 2456 bp, Homo sapiens
ggccgtgcggtccgcgcttttgtcccgctggcggccgggttcccgcggcgccgccacagccagtacgtgagtccgcggccgcccgcgctcccgcccccggcccttgcctgccacgccctcccctttttggccgggtcttggctgctccgcgggtctcgggcgggatgtgggagtaagcgtgccccctccccgcacatgtctcagtgggtgcgtttctggggagcggaggggagggaagacctcgggcaggcagaggggtgcagggcgcgcccctggaacagactgggctctgtgtgggccacaactgcgacgtttgaacggaccagcgtcatgttaggtctgctcaacgttccgagaagggccagggccccgctccggtgttcctcaactattcatccctgttttggatgggaggggatccctaaaaattagcgcttcaaaatacccaccatttcgtgctccctctgcagttaagtttggtactctaggacttgagagtgattgcgagggcagagagacctctaggggtgatctgattcgaccttcttcccctccgctccaccccaccacctttttttcttttttttttttggtcggtgagtgatgatgataagctcccgctgcaggtgtgaatagagaccccggaggtgcgtcctagccctcatctggggaagcgcacctgcatacagacgggtgcaccggggaggaggcgacctgccgcgtgttcctgcaagcagaaaaggagttaactaggttgccttcttcctcatctctgcagtaactgtcttcatggtttcatagccttctccctgatacccctccccagtgtcacatttgaagacgagcactgaggatgaggaaccaactgaagaatatgaaaatgttggaaatgcagcatctaagtggccaaaagtggaggatcctatgcctgaatctaaggttggtgacacatgtgtttgggatagcaaggtagagaatcaacagaaaaagcctgtggaaaacaggatgaaggaggacaaaagcagcatcagggaagcaatcagcaaagccaagagtacagcaaatataaagacagaacaggaaggtgaggcatctgagaagagcttgcatctgagcccacagcatatcacacaccagactatgcctataggacagagaggcagtgagcaaggcaaacgtgtggagaacattaatggaacctcctaccctagtctacagcagaaaaccaatgctgttaagaaattacataaatgtgatgaatgtgggaaatccttcaaatataattcccgccttgttcaacataaaattatgcacactggggaaaagcgctatgaatgtgatgactgtggagggactttccggagcagctcgagccttcgggtccacaaacggatccacactggggagaagccgtacaagtgtgaggaatgtgggaaagcctacatgtcctactccagccttataaaccacaaaagcacccattctggggagaagaactgtaaatgtgatgaatgtggaaaatccttcaattatagctctgttctggaccagcataaaaggatccacactggggagaagccctatgaatgtggtgagtgtgggaaggccttcaggaacagctctgggctcagagtccacaaaaggatccacacgggggagaagccctatgaatgcgacatctgtgggaaaaccttcagtaacagctctggccttagggtccataaaaggatccacacaggtgagaaaccttacgaatgtgatgagtgtgggaaggccttcattacttgtagaacacttctcaaccataaaagcatccactttggagataaaccctataaatgtgatgagtgtgagaaatcttttaattatagctctcttctcattcagcataaagtcatccacactggagagaaaccctatgtgtgtgataggtgtgggaaggccttcaggaacagctcaggcctcacagtgcataaaaggatccacacagtttcagatgaactcccataatgaatgatgaatttgtgatgagggataacctggaagtggtattcacacattatgctacaataaaaggttctaccgtggagaggattttgacacattcagtaactaatggaacacaccgtcaacatgaattcgcaccttacatgacagaagtgattcagggattcctatgaatagaaatgctgagaaggaacgcattttattgcagaagctaaaaagctaaagtaccagtcatctagagagaaggaaattaatgtttcttaataatcctgttaaatgtttgattgtttttggaatgtgttattgtaaagatgtcatgcaggacatgtatatgttgtctgttgtaaaatgttaacgaatactttgttcagggctcactctctctttgtcatgaaagccagctccttgtggcgaggtaaagtggaattccaataaagaaattccttaaa

SEQ ID NO: 4685 - protein, 361 aa, Homo sapiens
MPESKVGDTCVWDSKVENQQKKPVENRMKEDKSSIREAISKAKSTANIKTEQEGEASEKSLHLSPQHITHQTMPIGQRGSEQGKRVENINGTSYPSLQQKTNAVKKLHKCDECGKSFKYNSRLVQHKIMHTGEKRYECDDCGGTFRSSSSLRVHKRIHTGEKPYKCEECGKAYMSYSSLINHKSTHSGEKNCKCDECGKSFNYSSVLDQHKRIHTGEKPYECGECGKAFRNSSGLRVHKRIHTGEKPYECDICGKTFSNSSGLRVHKRIHTGEKPYECDECGKAFITCRTLLNHKSIHFGDKPYKCDECEKSFNYSSLLIQHKVIHTGEKPYVCDRCGKAFRNSSGLTVHKRIHTVSDELP

SEQ ID NO: 4686 - DNA, 2770 bp, Homo sapiens
tggagggactttccggagcagctcgagccttcgggtccacaaacggatccacactggggagaagccgtacaagtgtgaggaatgtgggaaagcctacatgtcctactccagccttataaaccacaaaagcacccattctggggagaagaactgtaaatgtgatgaatgtggaaaatccttcaattatagctctgttctggaccagcataaaaggatccacactggggagaagccctatgaatgtggtgagtgtgggaaggccttcaggaacagctctgggctcagagtccacaaaaggatccacacgggggagaagccctatgaatgcgacatctgtgggaaaaccttcagtaacagctctggccttagggtccataaaaggatccacacaggtgagaaaccttacgaatgtgatgagtgtgggaaggccttcattacttgtagaacacttctcaaccataaaagcatccactttggagataaaccctataaatgtgatgagttgtggtaaagctttcagaaataattctggccttaaagtacataaacgaatccacactggggaacgaccttacaaatgtgaagaatgtgggaaagcatacatctctctctcgagccttataaatcataaaagtgtacaccctggggagaagccctttaagtgtgacgagtgtgagaaggccttcatcacataccgaacccttacaaaccacaaaaaagttcatcttggggagaagccctacaaatgtgatgtgtgtgagaaatcttttaattacacatcgctcctttctcagcacagaagggtccacactagagagaaaccctatgaatgtgacaggtgtgagaaggtcttcagaaacaactcaagccttaaagttcataaaagaatccatactggggagaggccctatgaatgtgatgtgtgtggaaaagcctacatctcacactcaagccttattaaccataagagtacccaccctggcaggacaccccatacatgtgatgaatgtggaaaagcttttttctcaagcagaactcttataagccataaaagagtccatcttggggagaaacccttcaagtgtgttgagtgtgggaaatctttcagttacagctctctcctttctcagcacaagaggatccacacaggggagaaaccctatgtgtgtgataggtgtgggaaggccttcaggaacagctcaggcctcacagtgcataaaaggatccacacaggtgagaaaccctatgaatgtgatgagtgtgggaaggcatacatctcacactcaagtcttatcaatcataaaagtgtccaccaggggaagcagccctataattgtgagtgtgggaaatccttcaattatagatcagtccttgaccagcacaaaaggatccacactggaaagaagccataccgatgtaatgagtgtggtaaggcttttaatatcagatcaaatctcaccaagcataaaagaacccatactggagaggaatctttaaatgtgatatatgtgggaagttatagtggcacatcccagaagagaacctatgagggagggaatgccctggatgggggcaggatgaggatgcctctgtagcaggcagagcttaccaagtctctccgaactcaaatggaagaaataccttatgaatgtaagaatgtagggggtcatggcttgtaatttacacagtgtaaatgaaaccatcctagaggattatgaggaatcctttctatgtgattttcaatcatagcaagcaagaaaggctccagtgtcaaggtagttcagctcttacaggatataaaacagtccatacttgagagaaaaacttagatctgagtgatggaatgtgaagcaaatcttcaaaatcagtagacatttctggacataaaacacagatgaggaaagggcttcaattagaagttacgtaatcaccatcagaaagttcatgtttggtaaattctgttactagaaatgtaggaaattcaggtatagctttgaatcccaattacacattggtcagtgggaaaactaagggcctccaacaggcaaattcagggaggataggtttcagggaatataaatttatttaatattagtggtctttaagtataaacttgatgtaattggtttgggagggggcagtgatgatgacttctgaaacaaaatttggatttccttttaggaaaagtagaaagcatagacttacaagtctaacaggagataggagagagtcactcataaaaaatgcaaattgatgaacgtactattgtgatacattagttgaatggatgaaacttttttaaagtttcagatgaactcccataatgaatgatgaatttgtgatgagggataacctggaagtggtattcacacattatgctacaataaaaggttctaccgtggagaggattttgacacattcagtaactaatggaacacaccgtcaacatgaattcgcaccttacatgacagaagtgattcagggattcctatgaatagaaatgctgagaaggaacgcattttattgcagaagctaaaaagctaaagtaccagtcatctagagagaaggaaattaatgtttcttaataatcctgttaaatgtttgattgtttttggaatgtgttattgtaaagatgtcatgcaggacatgtatatgttgtctgttgtaaaatgttaacgaatactttgttcagggctcactctctctttgtcatgaaagccagctccttgtggcgaggtaaagtggaattccaataaagaaattccttaaa

SEQ ID NO: 4687 - protein, 477 aa, Homo sapiens
MNVENPSIIALFWTSIKGSTLGRSPMNVVSVGRPSGTALGSESTKGSTRGRSPMNATSVGKPSVTALALGSIKGSTQVRNLTNVMSVGRPSLLVEHFSTIKASTLEINPINVMSCGKAFRNNSGLKVHKRIHTGERPYKCEECGKAYISLSSLINHKSVHPGEKPFKCDECEKAFITYRTLTNHKKVHLGEKPYKCDVCEKSFNYTSLLSQHRRVHTREKPYECDRCEKVFRNNSSLKVHKRIHTGERPYECDVCGKAYISHSSLINHKSTHPGRTPHTCDECGKAFFSSRTLISHKRVHLGEKPFKCVECGKSFSYSSLLSQHKRIHTGEKPYVCDRCGKAFRNSSGLTVHKRIHTGEKPYECDECGKAYISHSSLINHKSVHQGKQPYNCECGKSFNYRSVLDQHKRIHTGKKPYRCNECGKAFNIRSNLTKHKRTHTGEESLNVIYVGSYSGTSQKRTYEGGNALDGGRMRMPL

SEQ ID NO: 4688 - DNA, 1487 bp, Homo sapiens
atgttgcccaaagatctggcccatcaggttgacaccaaattaaccgtcacacccgtctcctactccgccctcatcagccagccgcctttagggcctcctgggtgtggcttcatggtgacaagactggaggaggcccaggcatcacataggaggacgcaggaagaggcatccagtcacaaccagaccatcatgcttcagaagagctattgttcggagaataacctgccacaggctaccttccacacccacagaccctgggcagtcccatgtaagtgtcagtcagaactcctgacacagacatctccctttccacaggacccagaaatgataacaggtagactcgtagaggagaattgctgcggcaaagagtacgtgcacgtccatccacaccgcacgctgccttccctggaggccctgggtttggaagccgacaccggcggtggggtgggcagggggcgaggtcgctgccaagctggcgccccgggtgggagcgtggcccggtcccagggacggctccaggggcgcgctcccactccgcatccccagtgcctaaccgggggcgcttctggtgctgacgaccaggaagggctggcccccacttccgggaacgtccccgcacccacacctggcaatgaatcacgtgttcaggaaccagccgaggaggcgctcccctccctccctcccgccggcgccgtcggcccggaccatcgagtcagtcctccagcgtcccagagagggcgcggaagtgccccagggccggcgcgggttcttccggccgtgcggtccgcgcttttgtcccgctggcggccgggttcccgcggcgccgccacagccagttgccttcttcctcatctctgcagtaactgtcttcatggtttcatagccttctccctgatacccctccccagtgtcacatttgaagacgagcactgaggatgaggaaccaactgaagaatatgaaaatgttggaaatgcagcatctaagtggccaaaagtggaggatcctatgcctgaatctaagtttcagatgaactcccataatgaatgatgaatttgtgatgagggataacctggaagtggtattcacacattatgctacaataaaaggttctaccgtggagaggattttgacacattcagtaactaatggaacacaccgtcaacatgaattcgcaccttacatgacagaagtgattcagggattcctatgaatagaaatgctgagaaggaacgcattttattgcagaagctaaaaagctaaagtaccagtcatctagagagaaggaaattaatgtttcttaataatcctgttaaatgtttgattgtttttggaatgtgttattgtaaagatgtcatgcaggacatgtatatgttgtctgttgtaaaatgttaacgaatactttgttcagggctcactctctctttgtcatgaaagccagctccttgtggcgaggtaaagtggaattccaataaagaaattccttaaa

SEQ ID NO: 4689 - protein, 310 aa, Homo sapiens
MLPKDLAHQVDTKLTVTPVSYSALISQPPLGPPGCGFMVTRLEEAQASHRRTQEEASSHNQTIMLQKSYCSENNLPQATFHTHRPWAVPCKCQSELLTQTSPFPQDPEMITGRLVEENCCGKEYVHVHPHRTLPSLEALGLEADTGGGVGRGRGRCQAGAPGGSVARSQGRLQGRAPTPHPQCLTGGASGADDQEGLAPTSGNVPAPTPGNESRVQEPAEEALPSLPPAGAVGPDHRVSPPASQRGRGSAPGPARVLPAVRSALLSRWRPGSRGAATASCLLPHLCSNCLHGFIAFSLIPLPSVTFEDEH

SEQ ID NO: 4690 - DNA, 1487 bp, Homo sapiens
atgttgcccaaagatctggcccatcaggttgacaccaaattaaccgtcacacccgtctcctactccgccctcatcagccagccgcctttagggcctcctgggtgtggcttcatggtgacaagactggaggaggcccaggcatcacataggaggacgcaggaagaggcatccagtcacaaccagaccatcatgcttcagaagagctattgttcggagaataacctgccacaggctaccttccacacccacagaccctgggcagtcccatgtaagtgtcagtcagaactcctgacacagacatctccctttccacaggacccagaaatgataacaggtagactcgtagaggagaattgctgcggcaaagagtacgtgcacgtccatccacaccgcacgctgccttccctggaggccctgggtttggaagccgacaccggcggtggggtgggcagggggcgaggtcgctgccaagctggcgccccgggtgggagcgtggcccggtcccagggacggctccaggggcgcgctcccactccgcatccccagtgcctaaccgggggcgcttctggtgctgacgaccaggaagggctggcccccacttccgggaacgtccccgcacccacacctggcaatgaatcacgtgttcaggaaccagccgaggaggcgctcccctccctccctcccgccggcgccgtcggcccggaccatcgagtcagtcctccagcgtcccagagagggcgcggaagtgccccagggccggcgcgggttcttccggccgtgcggtccgcgcttttgtcccgctggcggccgggtttccgcggcgccgccacagccagttgccttcttcctcatctctgcagtaactgtcttcatggtttcatagccttctccctgatacccctccccagtgtcacatttgaagacgagcactgaggatgaggaaccaactgaagaatatgaaaatgttggaaatgcagcatctaagtggccaaaagtggaggatcctatgcctgaatctaagtttcagatgaactcccataatgaatgatgaatttgtgatgagggataacctggaagtggtattcacacattatgctacaataaaaggttctaccgtggagaggattttgacacattcagtaactaatggaacacaccgtcaacatgaattcgcaccttacatgacagaagtgattcagggattcctatgaatagaaatgctgagaaggaacgcattttattgcagaagctaaaaagctaaagtaccagtcatctagagagaaggaaattaatgtttcttaataatcctgttaaatgtttgattgtttttggaatgtgttattgtaaagatgtcatgcaggacatgtatatgttgtctgttgtaaaatgttaacgaatactttgttcagggctcactctctctttgtcatgaaagccagctccttgtggcgaggtaaagtggaattccaataaagaaattccttaaa

SEQ ID NO: 4691 - protein, 310 aa, Homo sapiens
MLPKDLAHQVDTKLTVTPVSYSALISQPPLGPPGCGFMVTRLEEAQASHRRTQEEASSHNQTIMLQKSYCSENNLPQATFHTHRPWAVPCKCQSELLTQTSPFPQDPEMITGRLVEENCCGKEYVHVHPHRTLPSLEALGLEADTGGGVGRGRGRCQAGAPGGSVARSQGRLQGRAPTPHPQCLTGGASGADDQEGLAPTSGNVPAPTPGNESRVQEPAEEALPSLPPAGAVGPDHRVSPPASQRGRGSAPGPARVLPAVRSALLSRWRPGFRGAATASCLLPHLCSNCLHGFIAFSLIPLPSVTFEDEH

SEQ ID NO: 4692 - DNA, 381 bp, Homo sapiens
atggcggaggaggtttcactggttggagcagagggagcaactatggctgcggaagtcctggaggcagcctccgcggaggagcagaaggaaaaggaagataaagtgactagtccagagaaagctgaagaagcaaaattaaaagcaaggtatcctcatctgggacaaaagcctggaggttcagatttcttaaggaaacgattgcagaaagggcaaaaatattttgattctgggcattacaacagggctaaagcaaaaacgaagagcaagcaacttcctactgcagctccagataagacggaggtcactggtgaccacattcctactccacaggaccttcctcaacggaaaccatcccttgttgctaacaagctggctggctga

SEQ ID NO: 4693 - protein, 126 aa, Homo sapiens
MAEEVSLVGAEGATMAAEVLEAASAEEQKEKEDKVTSPEKAEEAKLKARYPHLGQKPGGSDFLRKRLQKGQKYFDSGHYNRAKAKTKSKQLPTAAPDKTEVTGDHIPTPQDLPQRKPSLVANKLAG

SEQ ID NO: 4694 - DNA, 381 bp, Homo sapiens; identical to SEQ ID NO: 4692

SEQ ID NO: 4695 - protein, 126 aa, Homo sapiens; identical to SEQ ID NO: 4693

SEQ ID NO: 4696 - DNA, 159 bp, Homo sapiens
atgtggatcaccagtctcatcaccatgaaggatgaagatatatttgatttggcaggggatccccaagacagcctcattcctgggccttctcccacccccaagcaaaacccagtttgtaatgaggctttctttggacaccagactttctccttaaggtaa

SEQ ID NO: 4697 - protein, 52 aa, Homo sapiens [sequence omitted]

SEQ ID NO: 4698 - DNA, 279 bp, Homo sapiens
atggacaggactgtcattcagaaataccacactgtgaatggccacagctgtgaagttaggaaagccctgtcaaagcaagagatggttagtgcttcatccagccaaagaggtcgaagtggttctggaaactttgctggtggtcttagaagtggtttcagtgggaataacaactttggtcgtggaggaaacttccgtggtcgtggggcctttggtggcagccgtggtggtggtggatatgatggcagtggggatggctataatggatatggtaacgattga

SEQ ID NO: 4699 - protein, 92 aa, Homo sapiens [sequence omitted]

SEQ ID NO: 4700 - DNA, 216 bp, Homo sapiens
atgcctcgcctacccgggctctgtcctcaactctgccaccaccgctgcgtggccctgctcgccctgcagcccgacccctgccttgcccactctgagcctccgcgccagcccatgtatgccatggaaatatggctgttggaattctggtgttttacgaccttcttaacaccgtctgcgtatgtgctaagcagtctgagccagttcagaaaggagtaa

SEQ ID NO: 4701 - protein, 71 aa, Homo sapiens
MPRLPGLCPQLCHHRCVALLALQPDPCLAHSEPPRQPMYAMEIWLLEFWCFTTFLTPSAYVLSSLSQFRKE

SEQ ID NO: 4702 - DNA, 681 bp, Homo sapiens
atgagccctctcacctatcgtggacaccgaggaaacgcagcagagatgggcacccaggctgcccagatcctctggcagcctcgggtgctcgtccacttcgctcctcctccgcctttgctgccgcagccgcaggtgcgcaccccaccgcgtccctgcttccctcctcgagctcttgtggtcgagctcagactgggcgacagagcgtgtgaggagacgattgaaaaacccaaaaagaagaaaaagcaaaagccccaggagattcatcaggagaatggaatggaagacccatctatctctttctccaaacccaagaaaaagaaatctttttccaaggaggagttgatgagtagcgatcttgaagagaccgctggcagcaccagtcttcccaagaggaagaagtcttcacccaaggaggaaacagttaatgacaccgaagagtcaggccacagaagtggctccaagaaaacgaggaaattctccaaagaggagctggtcagcagtgggcctgaagaggcggctggcaagagcagctccaagaagaagaaaaagttccataaagcatcccaggaagattagaatgcaaatggacattctctgggaggtggggcataccatagcccaaggcgacatttcccaccctgtgccgtcttccccaataagaacaaattcacaaaaaagaga

SEQ ID NO: 4703 - protein, 191 aa, Homo sapiens
MSPLTYRGHRGNAAEMGTQAAQILWQPRVLVHFAPPPPLLPQPQVRTPPRPCFPPRALVVELRLGDRACEETIEKPKKKKKQKPQEIHQENGMEDPSISFSKPKKKKSFSKEELMSSDLEETAGSTSLPKRKKSSPKEETVNDTEESGHRSGSKKTRKFSKEELVSSGPEEAAGKSSSKKKKKFHKASQED

SEQ ID NO: 4704 - DNA, 879 bp, Homo sapiens
atgatcaatgatagttactttggttggcttatgctccttgggttccctgggaagcctcagctggagatgatcatctctggggttgtctttttcttctatgcaatttctttgatgggaaatatggtccttatcctgctgccattactggataaacatctccaaacccccatatatttctttcttagaaatctggctatcttggatctttgttacaccacaaatatagtcccacagatgttggtcaatgcctggggtaaagacaagaaaatcacttttggtggctgtgcttttcaacttttcactaatgtgacgctatgcacggttgaatgtatgcttctggctgtgatgtcatatgacccattcaatgctgtctgcaagcctctggactatatgaccataatgaacccccaactctgtcaaggcctggtggccatgacctggttaattggtgtcactaattgcatgatactttccccctgtcctgtgagtcttcctcgatgcggagaccaccacctggatcactatttttgtgaaatatctgcaatggtcaaaattgcatgtggggctaccacagtcatggaggaaactaaaccttatttgcattgtgttgttgttgttgttttcattttccttgcatcacttcttctcattcttgtgtcatatggcttcattgctatggctgtactcaagatcaagtctgcagcaggaagacaaaaagcatttgggacctgtttctcccatctcattgtggtatccatcttctatgggactgttagatataggtatatagagccaggaaacagtccatctcaggatgagggcaaacttctccatatattttactccattgttactcccaccttgaacccatcccactaa

SEQ ID NO: 4705 - protein, 292 aa, Homo sapiens
MINDSYFGWLMLLGFPGKPQLEMIISGVVFFFYAISLMGNMVLILLPLLDKHLQTPIYFFLRNLAILDLCYTTNIVPQMLVNAWGKDKKITFGGCAFQLFTNVTLCTVECMLLAVMSYDPFNAVCKPLDYMTIMNPQLCQGLVAMTWLIGVTNCMILSPCPVSLPRCGDHHLDHYFCEISAMVKIACGATTVMEETKPYLHCVVVVVFIFLASLLLILVSYGFIAMAVLKIKSAAGRQKAFGTCFSHLIVVSIFYGTVRYRYIEPGNSPSQDEGKLLHIFYSIVTPTLNPSH

SEQ ID NO: 4706 - DNA, 486 bp, Homo sapiens
atgagccatacgggaggtgagtggttggtggacaggcaggtggtcttctccctgacagtgctggtggccctctgtggactggtaggcaatgatgtgatctgctggcttctctactcacaggtctggagcagcccctatgtgacctacatccttaacctggccactgttgatatggtcaacctctcctgtgtaactgtgatcctgctggagaaaatcctcatgctgtatcaccaggcggcattgcaggtggctgtgtttctggatcctgtctcctatttctccgacacagtgggtctctgtctcctggtggccatgagtattgagagctttctctgtgccctctgtcccacctggtgctgccaccgcccagagcacacctctgccatggtgaggtgggccctggccctttctttgtatgcagttagccaggtctgtgagtactgggagaagtgcttggcatgtgaccaatttcatgaggctttatga

SEQ ID NO: 4707 - protein, 161 aa, Homo sapiens [sequence omitted]

SEQ ID NO: 4708 - DNA, 576 bp, Homo sapiens
atgagccatacgggaggtgagtggttggtggacaggcaggtggtcttctccctgacagtgctggtggccctctgtggactggtaggcaatgatgtgatctgctggcttctctactcacaggtctggagcagcccctatgtgacctacatccttaacctggccactgttgatatggtcaacctctcctgtgtaactgtgatcctgctggagaaaatcctcatgctgtatcaccaggcggcattgcaggtggctgtgtttctggatcctgtctcctatttctccgacacagtgggtctctgtctcctggtggccatgagtattgagagctttctctgtgccctctgtcccacctggtgctgccaccgcccagagcacacctctgccatgtggtgttcccccatcaggacctatcatgttgtctgctttgtgatcatcagcttcttcctttgggtcctgcccttagttgtccttgtgtgcctgccaggaaagtttctgacccttgcctttgacctcctgttgctactgtccattgtggtcagcatgcctcacctagtcatctacttcttggctgagtaa

SEQ ID NO: 4709 - protein, 191 aa, Homo sapiens
MSHTGGEWLVDRQVVFSLTVLVALCGLVGNDVICWLLYSQVWSSPYVTYILNLATVDMVNLSCVTVILLEKILMLYHQAALQVAVFLDPVSYFSDTVGLCLLVAMSIESFLCALCPTWCCHRPEHTSAMWCSPIRTYHVVCFVIISFFLWVLPLVVLVCLPGKFLTLAFDLLLLLSIVVSMPHLVIYFLAE

SEQ ID NO: 4710 - DNA, 2965 bp, Homo sapiens
cggacgcgtgggtgcgaggaaagcaaagtctgggccatggagatgagcctagtcctgctgttcctgatccgcactgccctttttgcaccccagggagctgctgctgagccccacagtctttgttacaacctcacggtgctgtcccgggatggatctgtgcagtcagggtttctcgctgagggacatctggatggtcagctcttcctgctctgtgacaggcagaaaggcagggcagggccccggggacagtgggcagaagcagtcctgggagctgagacctgggacacagagactgaagacttgacagagaatgggcaggagctcaggaggaccctggatcatatcaagggccagaaaggaggaagaggagataaatatatgaaggtgctgtttggcacagaatttaatagggaagaaagagacagtataactcaccagtgctgggtctcatcatcctgcaatttcagaacaactatgaatacaaaaagaattttaaaatcccagtcctgcctagaaaggggaagtcatctctaaatatggtggccctggggcagctggcctccctgccaggcctcttccatgggggccctttctgcagtgactgtggtttcttcccattttactctgtcctgtgtcctgactgaagcgacaaggtgtgtctgcagctgtgctcacacctggaggaaacctcaatggtgacatgatgaccctagcagcacatcctctttcctgtgtcaagaagcatcgtccggggaggtgagaagaagacagtcctccctagaattgaagaaccagggagaagcagatgggctgggcagatcaagcacaaacctgagatccaactgtccctcttatgcgcctgggtttcttcactggacaccagtatgagtcaactttcctgtaaagcagaacaagcacgagattggaccatgttagaggaggaatggtgtcatctccacttctggagagatccctgtccccgtgttcgggggaaggaccaagcctcactcccatgcagagaagaggctctgactgtaactgcacctgtggagagtggagagacaagaagtgtgagctatttataaagctgagcacctgactgccgcgggagtgaatagtgaccacacacagcaagacctgggacatggcagtgactgtgtccagaactgacagaactaatctatcatattagaaatcaagaaagtgtctgctctagggttggggagggtgatttatgaccaagtagaacccagtggtgtttcctggaggctggcaatgctattccttgatgtggctgctatttacctgagtgttcactttgtgaaaatccacggcccacttatggtttgtccacctttctccatgcatgttgtccttcattcaagtatacattactgatgttttgaaacaattctctctaagctaatatagaatctccattactgaaagtccttagaaatgctgcattggaaaaaattagtccaattattaaaaatctatgaaataaatgctgtgactcagacattaagaggagaatctacaacaagagcagtaggcttgggagctaacacaagaacagctttggaaatggctgttgagccaggaactaggaatcaaaacccaaaaaggcccatgcaaggtggagggtgtgaaatgatgccccagtagtgcatgaatgaatgagtcatgggcagtggctcatgggttgcttggtcagtcaggaacttgagcaaaataaagttggaaaactgggggatggaagagagaggtatgcacagacctcttgacatgggcagagcttcagaagatggtggttgcaggtttccccaaatagagaacatcaataaaaaggtagaaattttacaaagagaccagataaaaagtttggagctgaaaagtgcaataactgaaatgaaaaattcactagaggggctccagagcaaatttcaccatgcagaatggagaatcagcaagcttgaagataagacaattgaaattctctagttcagtagcagaaagaaaaaaaattatgaagaaaaataaacagaactttaaagatctgtgagacaacatcaagcacatgcactttgggagtcctcaaagaaaggagagagagaaaggagaagaatgactatttaaagaataactccaaaccttccaaatttgatgaaaaacattattcatccaacaaacttgacaaattttaagcagcaaaaaaatttaaatttaaagaggtccacaccaagagaacattataatcaacctgtcaaaagccaatgacaaacagagcatattgaaatgaataacagagaaggaacttttcaggttcaatggatcctcaataagattgcagcccagttttcttcagaaaccatagagttcagaaggcactggaatgttgacaaatttagaggtcagaaaaaaaaagactgtcatgcaggaattgtgtgtctggaaaaactctccttcagaaataatggattttatatatatataaatatatatatatatatatatatacacacatatatatacatatatatgactatacatagtaccacatatatataactatatatagtactactatgaaattatatatatagtactatatatagtagtcatactataaaagctagtagtaatatgtatatttttggtgtttatatgtgtgtgtgtgtgtgtgtgcatatatatatagtactatatatagtagtcctataaaagctagtagtaacatgtatatttttggtgtttaattcttcctttgtttttcctatttggtttaaaagaaaatgcccattgactaatgaatgaataaacaacatgtagtgtatttctaaaaaaaaaaaaaaaaaaaaaaaaaaaaaaaaaaaaaaaaaaaaaaaaaaaaaaaaaaaaaaaaaaaaaaaaaaaaaaaaaaaaaaaaaaaaaaaaaaaaaaaaaataaaaaaaaaaaaaaaaa

SEQ ID NO: 4711 - protein, 165 aa, Homo sapiens
MEMSLVLLFLIRTALFAPQGAAAEPHSLCYNLTVLSRDGSVQSGFLAEGHLDGQLFLLCDRQKGRAGPRGQWAEAVLGAETWDTETEDLTENGQELRRTLDHIKGQKGGRGDKYMKVLFGTEFNREERDSITHQCWVSSSCNFRTTMNTKRILKSQSCLERGSHL

SEQ ID NO: 4712 - DNA, 4556 bp, Homo sapiens
ctgaggtaggcggatcacctgaggtcggcagtttgagaccagcctgaccaacatggagagaccccatctctactaaaaatacaaaattagccaggtgtggtggctcatgcctgtaatcccagctacttgggaggccaaggcaggagaattgcttgaacccaggaggcagaggttgcagtgagccgagatcacaccattgcactctagcctggtgaaggagcaagactccatctcaaaaaaaaaaaaaaaaaagaaagaaagaaaaatacacattcagaggagacaaaaaataaaaaacaatgatgcatgcccacaggatctagaaaataacttcttaagggcaaatctaggagttattggccttaaagaagagatagagaaagagataggaatagaaagtttgttgaaagggataataacatagaacttcctaaacctacagaaagatatttatatccaagtacaagaaggttatagaacaccaggccaatttaacccaaagattacctcaaggcatttaataatcaaactcccacaggacaagggtaaagaaaggatcctaaaagcagcaagagaaaagaaacagataacatacaatggagctccaatacatctggcagtatatttttcagtggaaaccttacaagccaggagagagtgacatgacatatgttaaagtgctgaagggaaaaaaccttttaccctagaatagtatatccagcaaaaatatccttcaaacatgaagaataaacaaagacttccccagacaaacaaaagctgagggatttcatcaacactagactggtcccataagaaacgcttaagggagtactttggtcagaaagaaacagacattaatgagcaacaaagaatcatctaaaggtaaaaaactcactgttaagagtaagtacacagaaaaacccaaagtgtgataacattgtaactgtggtgtgtaagtagaaagaataaatgataaaccaatcaaaaatagtaactacaacttttcaagaccagtcagaaaaataagataaaattagaaacaacaaaaagttaaaaagtggggggatgaagttaagatgtagagtttttattagttttttgtttgttaatgcaaacagtgttaccaggttaaaataatgggttacaaaatagtatttgtaatccttatggtaacctcaaacctaaaaacatacactggatacataaaaaataaaaagcaaaaacctaaatcatatcaccagagcaaactaccttccctaaaggaagacaggaagaaaagaaagaagaagaccacaaaacaaccagaaaacaaataaataacaaggcaggagtaagtctttacttatcgataatacattgaatggaaatatggactaaactctccaatcaaaagacatagactggctgaatgaatggagaaaacaagacccattgatctgttgcctacaagaaacacacttaaactataaagacacacataggctgaaagtaaagagttggaaagagttattccatgccaatggaaaccaggaaaaagagaaggagtattgattttgatacaaaaactatgagacaaataaagtcactatacaatgataaaggggttaatatggtttccatttgtgccccacccaaatttcgtgttctattgtaatcctcaatgttggaggtggggcctggtgggacgtgattagatcatgggggtggatctttcatgactaattcagcaccatcttcttagtgctgttctcatgatagtgagttcttctgaaatctggttgcttaaaagtgtgtagcacctctccacaccacccgcttgccttggtctactcctgctatgtagatgcttgctcccactttgcattattccatgagtaaaagctccctcaggccttcccagaatcagatgccgctatgcttcctgaacagcctgtggaactatgagccaattcaacctcttttcttcataaattaacaagtcttgggtatttctttatagcagtgtgagaacagaataatacagaaaattggtaaagaggagtgaggcattgctagaaagatacctgaaaatgtggaaacagcagtggaactgggaaatagacagaggttggaagagtgtggagggctccgaagataggaagatgaggggaagtttggaatttcttagagatttgttaaattgttttgaccaaaatactgatggtgatatggacaatgaagtccaggctgaggaggtctcagatggagatgagggacttattgggacctggagtgaaggtcacttttgttaggacattgtggttggagacattgtgcccctgccctaggaatctgtggaactttgaacttgagagcgaagatttagggtatctggcagaagaaatttctaagcagcaaagcgttcaagacgtggcctggctgcttctggtagtctgtgctcatatttgtgagcaaagacatgacaagaaactggaacttatatttaaaaaggaagcagagtgtaaaagtttggagaatttgcagcctggccatgttgtagaaaagaaaaaaaccattttctggagaggaattcaagctagctgcagaaaattgcaagtaacaaggagcaaaatgttgatagccaagatagtgggaaaaacaccttgaaggcatttcagataccttgggggcagcctctcccatcacaggcccaaaggcctaggagggaaggatggtttcctgggccaggctcagggtcctgctgccctgcacaacctcaggaaactgctctccaaatcccagctgctccagctccagcttcagctcaaagggccccaggtatagctcaggctgctgctccataggatgcaagttataagccttagtggctcccgtgtggtgttaaattaagcctgtaggtgcacagagtgcaagaattgaggcttgggagcctccaactagatttcagagtatgtgtgggaaagcctggatgtccaggcagaagccagctgcagggacagagccctcatggagaacctctactagggtagtgtggaggggaaatttggggttggagttcccacacagcttcccctctggtgtactgcctagtggagctgtgagaagacagccactgtcctccagattccaggatgatagatctgccaatgacagcttgcactgtacaactggaaaagccacaggcagtcaatgccagcccgtgaaagcagtgacagtggcttaccctgcaaagtcccaggggctgagctgcccaaggccttgggagcccaccccttgcaccagtgtgccctggatgtgagatatggagtcaaaggagagtattttggagctttaagatttaatgactacctgctgggtttcagacttgcatgggtccagtagcccctttcttttggccaatttctcacttttggaatgggagtgtttacccaattcctgtacccccactgtatgttggaagtaactaactgtttttttattttgtaagctcacaggtgggagagacttgccttgtctcaggttgagactctggactttggacttttgaattaatgctggaatgagttaagactttgagggactgttgggaagatataactgtattttgcagtatgagaaggacatgagatttgggagacaccagaggtggaataatatgatttggatctgcatccccaccaaaatctcatgttcaattgtaatcctaaattttggaggttgagcctggtggaagaggattggataatgggggtggtttctcatggtttaacaccatccccctgggtgctgttctcatgacagtgagtgagttattgtgagatctgattgtttaaaagtgtgtgccacctcctcccactttcctcctgctccagccatgtaagacaggcttgcctccccttcaccttttgtcatgattgtaagtgttctgaggcctccccagccatgcttcctgtacagcctgcagaactgtgagccaattaaacctcttttctctatatattacccagtctcgggtatttctttatagcagtgcaagaatagactaatacagggttcaattcagcaagaggatataacaaatataaatatatatgcactcaacactgcagcacccagatatataaagcaaatacgattagagctaaagagagagagtgaccccaatacaataatagctggagacttcaacaccacattttcagcactggacagatcttccagacagaaaataaaaaagaaacatcagacttaatctgcactgtagatcaaatggatctaatacatacttgcagaacattttatccaatggctgcagaatacacattcttttttagcacatgtatcattctcaaggatagaccatatgttaggtcacaagtcttaaaacattaaaaaagttgaataccatcaagcatcttctctgaccacagtggaatacaactagaaactaataacaagaggaatttttgaaactacaaatacatgaaaattaaacaatatgctcctgaatgaccattgagtcaatgaagaaattaagaaggaaattgaacaatttc

SEQ ID NO: 4713 - protein, 143 aa, Homo sapiens
MKSRLRRSQMEMRDLLGPGVKVTFVRTLWLETLCPCPRNLWNFELESEDLGYLAEEISKQQSVQDVAWLLLVVCAHICEQRHDKKLELIFKKEAECKSLENLQPGHVVEKKKTIFWRGIQASCRKLQVTRSKMLIAKIVGKTP

SEQ ID NO: 4714 - DNA, 4481 bp, Homo sapiens
atgcgcgtaagttctccccgcggtagacttcaaatactctttgtcctgcccctgcttggcgaaatttaccgaaattatctacctatcccgctggagtgggagccgggggagagctggaaccgcgtctctgctgctcacctttgtgtccttagctccttcgcatggggtccgaccgcaacacgtgcgctggataaacgcttgttaactggagctccctctttgcccactagcagggcattagctggtgctgaagacagtggctgcttggcgagcctggatctccaagtgaccccctcagcaactcctgatgaacaggactgaagccaatattaaagcaagtcaaccaaaggttctctggtgtagacaagacagcaaaaggacagactaccttgtggaacctagcattgttctccttctgcagcactaagtaacatttgttctccgttaagatctttgcaaaccacacacaagaattgctggtcatcctgccaatagatgctgctcacagaaccaaatttcctgtgctgaattgtcactcatgggcttgagagtaggagactggagaccaaggtggctagaatccagttgggcctgatgtctccctgttgaaagggctccttgtggaatgaatagcacatggctcctgtggtggatctgatagtggcatagcaccaagtgatgcaggcctgccaggggccacagacacagaagatgctcccggggtcccccatgtactccagacacactgcaggccacctctcccagcaggttgccagtcatgggccccatcatcatgacttctgtccaaggtgtgctcggaaatctcttccttaactgtgactttctgacaggtggaggatgtggtcaggagtgggaaaaggattcgagacgggaagagggaggggttcaggatgaagagagataatctgtgccacagatgctggccctgcagttagctcccacctagtccgtgcacacacattctaatcccctcccattcctttacatgctgcggccagagaggcctttctcaaagtggaagtctcatcctcacttctctggttacagtgctgggccatggtaacttacaaggcttagcaggaactgtctgcgcactcccccttcctgcccactaccttgtttccctccagttgcgagagaaaacattgattgagcattaactatgtgccaggcttgtcctaagtcctttgcatgtattcactcaaacaatcctcacaacattcctatcacatctcccatttcacagtgagggttctaaagcacgtagtgggtgaggaacttgtccagggtcacacaactaagtgggggtggagaaacatcaaatctaggtggtccaggtggtggccagaacccatcagcacctcactacagctgcctccagtttctcgctctaggaaatactcttccctgtcaactcctgttgtcctctgggctcagttgacatgtcatctccttgaggaggacatcctgagatgctccccgactagggtgggcacccacttccacactccaaatgcctatttgacctgtgtatcgctgcatccccactgcctggcagatagcaggcccctaataaatatgatttgagcaaataaatatagttcttcaaaaaatagggaggacttcttgcttcaggtaatggtaggctaggacatttggaccaaccctcctgcagaaaatagccatttattttgatgcaatatatctggctatgactagagatttcaaatatttggagggctattatgtgaagaactaaacttactctttgtgacatagaggtcagaaattggtcgtttccatagagtatgagagagacagaattgtgctcatcataagtatcttttttaaaagttagacttaataaaatgggctgccttggtaggtggtgagttctctgtcacgaaagagattcagccacttgctctgagaaagcatggagaatatcaacattgtaagggtcgaccacctcatctctgaggccccctcctcacttaggttgccattgcaggtggaacactgggctgagtgtcaaagaacctgggttccacaagctgtgcgaccatggctggttgttttggatctcattcctaatatctgttagttaagctgacccgtcaatactgacccacttcacagagttatgaagggattaaattaggtattacatgtaaatctgttttgtttgctttttgttgttcttttttgttttgcttttttctttgcattatgaaatcccaagtcaactttttccattcttttatttttttaaaaattgacatcatcattataaccacaaaataatttttaaaatggaaaaaaaaaactcacctgcaaccccacaatctaatacaataatcatacttttttccctttattctcctttattgtgaccaaggatgactttgggcattgctgtgaggaactatttcgtttaacaccctactacctgaacatgatgcgtactcagcctttcaccaccccccaagtagctacacatgatgtgataatagtattggtggtggttttagagagttggagagaaaactgaagttggatttgggtaaaagaaaaaagagtgggaattattttttctccattctaaagcccataaagcaatgttaattgttcccacccctctgctattctgtctcctcaggtactgtgtgcagaaatgtgattgagattcaagtcagggcctctctgcccttttccctccagaaacaaaaccaagataatttatcctgaacacggtgaaaaaaggaagggagggaggagaaaaagtccgggtctcacctgggattctctgtctcctgcaacatgaaggatttagcctgggaggaggtggtgagaactctgggagagaaaaaagaaggaaagaatagttttacccatgctgaagttaatttaaaccttcacctagagaagcaaaaaaaaaaaacccacactttcccattttgtgcctcccttcctagagttttagccaaaggtttagctaagtaattggttttaccagcgcactcactcctcctatcccaagtctgtttgactccctccccatcatcctcctcacctcttttcaggcagggtggggatagcagcaggaggagattttgggagcctggcaactcctgcaaggaccgcaggacagcccctctgtggggatgcgtggtgccccatctgccgcccttctgaagaatgcactgccttcactttttactgtgttagagtccatccagactgttctatccaaaaaagtttctttttcccccacaggcaatcaggaaatgattcctttcccgactgcttctgtctagtgcctgggaatcttgagtcaatccctcagtaagtcagtgactagggaaatccctctctgagcctcccagttcatgttgcttagggaacctgatattttcgtgaaacctgcctacacatgggcagcccaacagcagaacaaatggtggtgaccaaagtgaacaaagaagtatagttgtgccagcttcgtagttgcccatgtggacaagtcagcaggatcaggacacgaggaagagtaaatgtgagacagtcaatgtgacttctgcgataaacagatttttaaaccccgaaattttgcaaaattttggtgaaacctgaactttcttcgttgcatatactggcactatctgtaccatcatacaactgtctcacattaaagctatttttcttgggcactgatgagtaaggttggtataagttcctcagatcaacaaaaacccattttcctgtaagtcttacatttagtatttaaggaactaaaacttaaatacattttgtgaaatggttgacacttcactgataatgatttattgcttggattaataaattttccaaaagttgtcttatgtagaatatggtttgcaaccagcagaaccattaatctatactgcaatgatatgcactatgtataattgtttaaaagcctctacttaatgatgtaaaatgctctatttaattacacatttgggtaaactgtatactaacatctgatggcatttttccactgtttgttgcttttttcaaatactttattgtacaaagctgttcttaatatttttcaagtttttttctttgaattttgctaatgttttccttgaattatgagcactgacagaatgtgcttagcacttttggctattcacacagcttttgagcatgatttgcatccaatatttacattgctagcaataataagccatctgtgagttttgtcaaaagttattggggattttttaaattttagaaatgcaaattattgtttctttgaactaactcttatgcagttgcaaaggcatttccagttgttatagtttgtgtacaatatcaggtgttccagattatgattcattattaatatcattgcttccttgttccctctgaggtccagaagattcatgtttacaatatttagaaacaatgttaaa

SEQ ID NO: 4715 - protein, 106 aa, Homo sapiens [sequence omitted]

SEQ ID NO: 4716 - DNA, 165 bp, Homo sapiens
atgccgaaggcgcccaagcagcagctgccggagcccgagtggatcggggacggagagaacacgagcccatcaggtgaggctggtaggcaaggaagacacgagaggaaggggaagagagaggagactgcgcgtgttttaggagagggtcatggggcgcgagactga

SEQ ID NO: 4717 - protein, 54 aa, Homo sapiens [sequence omitted]

SEQ ID NO: 4718 - DNA, 165 bp, Homo sapiens; identical to SEQ ID NO: 4716

SEQ ID NO: 4719 - protein, 54 aa, Homo sapiens [sequence omitted]

SEQ ID NO: 4720 - DNA, 2841 bp, Homo sapiens
tccagtctccggatctccctcggtccctctctcctcctcttcctctctctggacgcccggctcctccgcaccccctcccccgggggtcccgcggccttgctccctaccctcacctcaagacgaccatggccaccatcccagactggaagctacagctgctagcccggcgccggcaggaggaggcgtccgttcgaggccgagagaaagcagaacgggagcgcctgtcccagatgccagcctggaaacgagggctcctggagcgccgccgggccaagcttgggctgtcccctggggagcctagccctgtgctagggactgtagaggctggacctccagacccggatgagtctgcggtccttctggaggccatcgggccagtgcaccagaaccgattcatccggcaggagcggcagcagcagcagcagcaacaacaacggagtgaagagctgctagcagagagaaagcctgggcctctggaggcccgggagcggagacccagccctggggagatgcgggatcagagccccaagggaagagagtcaagagaagagagactaagtccgagggagaccagagagaggaggctggggatagggggagcccaagagttgagcctgaggcctctggaggctcgggactggaggcaaagcccaggagaggtgggagacaggagctcccgactgtcagaggcatggaaatggaggctgagtcctggagaaactccagagcggagtctgagactagcagagtctcgagagcaaagccccaggagaaaagaggtggaaagtagactgagcccaggggaatctgcctaccagaagttgggcctgacagaggcccataaatggagacctgactccagagagtctcaggaacagagtttggtacaactggaggcaacagagtggaggctgaggtcaggagaagaaagacaagactactcggaagaatgtgggagaaaagaagagtggccagttccaggggtagctccaaaagagactgcagagctgtccgagaccctgacaagggaggcccaaggcaacagttccgcaggagtggaggcagcagagcagaggcctgtggaagatggcgagaggggcatgaagccaacagaagggtggaaatggaccctgaactccgggaaggctcgagaatggacacccagggacatagaggctcaaactcagaaaccagaacctccagagtcagcagagaagcttctggaatctcccggtgtggaggctggagaaggggaggctgagaaggaggaggcgggggctcagggcaggcctctgagagccctgcagaactgctgctctgtgccctcccccctcccaccagaggacgctgggactggaggcctgagacagcaggaagaggaagcagtggagctccagcccccaccaccagcccctctgtctcccccacccccagccccaactgccccccaacctcctggggatcccctcatgagccgcctgttctatggggtgaaggcagggccaggggtgggggccccccgccgcagtggacacaccttcaccgtcaacccccggcggtctgtgccccctgcgaccccagccaccccaacctctccagccacagttgatgctgcagtcccgggggctgggaagaagcggtacccaactgccgaggagatcttggttctggggggctacctccgtctcagccgcagctgccttgccaaggggtcccccgaaagacaccacaaacagcttaagatctccttcagcgagacagccctggagaccacgtaccaatacccctccgagagttcggtactggaggagctgggcccggagcctgaggtccccagtgcccccaaccctccagcagcccaacccgacgacgaagaggatgaggaagagctgctgctgctgcagccagagctccagggcgggctgcgcaccaaggccctgattgtggatgagtcctgccggcggtgaccatcttccaacatagggatatacctccctccttcttataactgaagatcctggagcccggaagattcagggcagacagaccctgataatgagcctggcagggaagggcaaccaacatcttgtaacttgctttccccaccctgtttctgggggcagagccaattgcccaatttctaccctaatccaaagtccctggtgtgggtggggttaaacgtgctggtgcatcctaggtcatccaagagtgagcgccaagtcctgagaaggggcacagaactccctggagggtggagatggagcacctgccccccatggcagggtacactctccccacagccttcctccccaccatcccgtggggactctcgggatttaagcactcgtctctctgggaggcccagaccccactccatttataggcacatctccttcatttcctaggtcactgcccctttgtttacagctcctgcctcctcccttgaccacagcctggtttacaaattccatcagctcccagccccacctgccaaagtcccaggtttacaagccacgcttacttgctgtgtctgcgtggaattctctcctctgtcccctccagtctcctcattggagtgacctgaaggtgtggcttcctccactttttctcagtattactttgccttagttttccccaagagggaaggctggaactcttaactctgtaccccttgatagttatttaattctgtttctcctagtggttcacaattgaactgaattgagatggtgtcgggtggctaaggagacacctcacctctccttccccattgtgccgcctttatcaattgcctgttttgttttgtttgttttttaactttccataataaaatggagttct

SEQ ID NO: 4721 - protein, 613 aa, Homo sapiens
MATIPDWKLQLLARRRQEEASVRGREKAERERLSQMPAWKRGLLERRRAKLGLSPGEPSPVLGTVEAGPPDPDESAVLLEAIGPVHQNRFIRQERQQQQQQQQRSEELLAERKPGPLEARERRPSPGEMRDQSPKGRESREERLSPRETRERRLGIGGAQELSLRPLEARDWRQSPGEVGDRSSRLSEAWKWRLSPGETPERSLRLAESREQSPRRKEVESRLSPGESAYQKLGLTEAHKWRPDSRESQEQSLVQLEATEWRLRSGEERQDYSEECGRKEEWPVPGVAPKETAELSETLTREAQGNSSAGVEAAEQRPVEDGERGMKPTEGWKWTLNSGKAREWTPRDIEAQTQKPEPPESAEKLLESPGVEAGEGEAEKEEAGAQGRPLRALQNCCSVPSPLPPEDAGTGGLRQQEEEAVELQPPPPAPLSPPPPAPTAPQPPGDPLMSRLFYGVKAGPGVGAPRRSGHTFTVNPRRSVPPATPATPTSPATVDAAVPGAGKKRYPTAEEILVLGGYLRLSRSCLAKGSPERHHKQLKISFSETALETTYQYPSESSVLEELGPEPEVPSAPNPPAAQPDDEEDEEELLLLQPELQGGLRTKALIVDESCRR

SEQ ID NO: 4722 - DNA, 3039 bp, Homo sapiens
gcggtgctggaagcggagccgggacctttggggcccgcgctgagacgcgcccggctgctgccgccgccctcctttcccctcttccctggtttcccttctcctctagacctgttcgctctccgcccctccttgcctccccaacaccccctcaggtcccgttgcctcctggtcctttcagggattcctggtccttccttcccacactagcctccctggggtatcgctgaggcagcctggcctgcacccaggttcccctcacccctgccacatttctctcttctccctcacgccaactttccttttcgcccttctctctctttctcacatcctagagacggtctttaatacgcattaaccctgtgctgccacatctggctcctgccctcattgcctccaatccggactcttcctctcacatcacccccaccacccccaacttgggctcacaacttctcttcactttttccatttccccagttctctgccttccgtctttccctctgtcctcatccttagcccctctgccctgctttgtgtcccacctctccccctccacttcctctcctcccaccctcagtctcacccccgggctgtctcactctctggagcctctccttcctgttctctgtccccagtgctccctaccctcacctcaagacgaccatggccaccatcccagactggaagctacagctgctagcccggcgccggcaggaggaggcgtccgttcgaggccgagagaaagcagaacgggagcgcctgtcccagatgccagcctggaaacgagggctcctggagcgccgccgggccaagcttgggctgtcccctggggagcctagccctgtgctagggactgtagaggctggacctccagacccggatgagtctgcggtccttctggaggccatcgggccagtgcaccagaaccgattcatccggcaggagcggcagcagcagcagcagcaacaacaacggagtgaagagctgctagcagagagaaagcctgggcctctggaggcccgggagcggagacccagccctggggagatgcgggatcagagccccaagggaagagagtcaagagaagagagactaagtccgagggagaccagagagaggaggctggggatagggggagcccaagagttgagcctgaggcctctggaggctcgggactggaggcaaagcccaggagaggtgggagacaggagctcccgactgtcagaggcatggaaatggaggctgagtcctggagaaactccagagcggagtctgagactagcagagtctcgagagcaaagccccaggagaaaagaggtggaaagtagactgagcccaggggaatctgcctaccagaagttgggcctgacagaggcccataaatggagacctgactccagagagtctcaggaacagagtttggtacaactggaggcaacagagtggaggctgaggtcaggagaagaaagacaagactactcggaagaatgtgggagaaaagaagagtggccagttccaggggtagctccaaaagagactgcagagctgtccgagaccctgacaagggaggcccaaggcaacagttccgcaggagtggaggcagcagagcagaggcctgtggaagatggcgagaggggcatgaagccaacagaagggtggaaatggaccctgaactccgggaaggctcgagaatggacacccagggacatagaggctcaaactcagaaaccagaacctccagagtcagcagagaagcttctggaatctcccggtgtggaggctggagaaggggaggctgagaaggaggaggcgggggctcagggcaggcctctgagagccctgcagaactgctgctctgtgccctcccccctcccaccagaggacgctgggactggaggcctgagacagcaggaagaggaagcagtggagctccagcccccaccaccagcccctctgtctcccccacccccagccccaactgccccccaacctcctggggatcccctcatgagccgcctgttctatggggtgaaggcagggccaggggtgggggccccccgccgcagtggacacaccttcaccgtcaacccccggcggtctgtgccccctgcgaccccagccaccccaacctctccagccacagttgatgctgcagtcccgggggctgggaagaagcggtacccaactgccgaggagatcttggttctggggggctacctccgtctcagccgcagctgccttgccaaggggtcccccgaaagacaccacaaacagcttaagatctccttcagcgagacagccctggagaccacgtaccaatacccctccgagagttcggtactggaggagctgggcccggagcctgaggtccccagtgcccccaaccctccagcagcccaacccgacgacgaagaggatgaggaagagctgctgctgctgcagccagagctccagggcgggctgcgcaccaaggccctgattgtggatgagtcctgccggcggtgaccatcttccaacatagggatatacctccctccttcttataactgaagatcctggagcccggaagattcagggcagacagaccctgataatgagcctggcagggaagggcaaccaacatcttgtaacttgctttccccaccctgtttctgggggcagagccaattgcccaatttctaccctaatccaaagtccctggtttacaagccacgcttacttgctgtgtctgcgtggaattctctcctctgtcccctccagtctcctcattggagtgacctgaaggtgtggcttcctccactttttctcagtattactttgccttagttttccccaagagggaaggctggaactcttaactctgtaccccttgatagttatttaattctgtttctcctagtggttcacaattgaactgaattgagatggtgtcgggtggctaaggagacacctcacctctccttccccattgtgccgcctttatcaattgcctgttttgttttgtttgttttttaactttccataataaaatggagttct

SEQ ID NO: 4723 - protein, 613 aa, Homo sapiens; identical to SEQ ID NO: 4721

SEQ ID NO: 4724 - DNA, 4587 bp, Homo sapiens
ccagagcggccgggtccccattcccattccttcaaatcccctttttcccggcagccgacctgtagacccaagggagacaggttgaagctagaaagagtcggggcagcagctctggtaggggagggagcatccaaaacctctggcttctgagcgcctctcctgccgcccatccacaaagccccccacagcctggcggctgccctcgaccccgcaaaacaaaggacttcagaggctggacctacagacccagatgagaaggcaaaagcgtagggaggagcggcaggagatgggaagggcgggccccgctcggagcagctgccgcttcctcccaaagtcccacgaggggcctgagtcacgggccaccgccctgggtcggcgagctgggggaagggatctggacacctggcgtgtccgggcgggaagctggtgagggcccctggggacagagcggaggaccagtggttggggcgagaagagggcagtcccgcagcgagtcccacgcggggtgggagggatctaggccccgccctctcctcggctccgccctgcgcccccttccctctcctcattgtccttagacaaagcggtcgccgcccccgcccggccccctggtctctgtctccgtccctcctcctttgctgcctctttccctcctcctctccctccctcctcccctccctccagtctccggatctccctcggtccctctctcctcctcttcctctctctggacgcccggctcctccgcaccccctcccccgggggtcccgcggcctgtgagttgactgaggggctcagacttggggagtgggtgtctcctcgcccctgtccttgctcccgtccctggcccggaccttggctgtctcctctttgtgccgagattgtcagtctgtgcggctacagcggggtggagacggccggctctgtcacggcttcatgagagcggggacggggcgcaggacttgcaggcgccggggagaagagacatggagccggcccttggcactctggggtcgcgtggggcagtcggtgggggaggcaggcggtggtgacaggacagggtgggggtggacgccagggttctgggaacgcgctggcagccctgacgcccgggttccgaaagtctcgggggtggctatttcccccgacccgcctcgggggcggagtgcggggcagaggggtgggggctggggagaggcgtggcccgagcggtgctggaagcggagccgggacctttggggcccgcgctgagacgcgcccggctgctgccgccgccctcctttcccctcttccctggtttcccttctcctctagacctgttcgctctccgcccctccttgcctccccaacaccccctcaggtcccgttgcctcctggtcctttcagggattcctggtccttccttcccacactagcctccctggggtatcgctgaggcagcctggcctgcacccaggttcccctcacccctgccacatttctctcttctccctcacgccaactttccttttcgcccttctctctctttctcacatcctagagacggtctttaatacgcattaaccctgtgctgccacatctggctcctgccctcattgcctccaatccggactcttcctctcacatcacccccaccacccccaacttgggctcacaacttctcttcactttttccatttccccagttctctgccttccgtctttccctctgtcctcatccttagcccctctgccctgctttgtgtcccacctctccccctccacttcctctcctcccaccctcagtctcacccccgggctgtctcactctctggagcctctccttcctgttctctgtccccagtgctccctaccctcacctcaagacgaccatggccaccatcccagactggaagctacagctgctagcccggcgccggcaggaggaggcgtccgttcgaggccgagagaaagcagaacgggagcgcctgtcccagatgccagcctggaaacgagggctcctggagcgccgccgggccaagcttgggctgtcccctggggagcctagccctgtgctagggactgtagaggctggacctccagacccggatgagtctgcggtccttctggaggccatcgggccagtgcaccagaaccgattcatccggcaggagcggcagcagcagcagcagcaacaacaacggagtgaagagctgctagcagagagaaagcctgggcctctggaggcccgggagcggagacccagccctggggagatgcgggatcagagccccaagggaagagagtcaagagaagagagactaagtccgagggagaccagagagaggaggctggggatagggggagcccaagagttgagcctgaggcctctggaggctcgggactggaggcaaagcccaggagaggtgggagacaggagctcccgactgtcagaggcatggaaatggaggctgagtcctggagaaactccagagcggagtctgagactagcagagtctcgagagcaaagccccaggagaaaagaggtggaaagtagactgagcccaggggaatctgcctaccagaagttgggcctgacagaggcccataaatggagacctgactccagagagtctcaggaacagagtttggtacaactggaggcaacagagtggaggctgaggtcaggagaagaaagacaagactactcggaagaatgtgggagaaaagaagagtggccagttccaggggtagctccaaaagagactgcagagctgtccgagaccctgacaagggaggcccaaggcaacagttccgcaggagtggaggcagcagagcagaggcctgtggaagatggcgagaggggcatgaagccaacagaagggtggaaatggaccctgaactccgggaaggctcgagaatggacacccagggacatagaggctcaaactcagaaaccagaacctccagagtcagcagagaagcttctggaatctcccggtgtggaggctggagaaggggaggctgagaaggaggaggcgggggctcagggcaggcctctgagagccctgcagaactgctgctctgtgccctcccccctcccaccagaggacgctgggactggaggcctgagacagcaggaagaggaagcagtggagctccagcccccaccaccagcccctctgtctcccccacccccagccccaactgccccccaacctcctggggatcccctcatgagccgcctgttctatggggtgaaggcagggccaggggtgggggccccccgccgcagtggacacaccttcaccgtcaacccccggcggtctgtgccccctgcgaccccagccaccccaacctctccagccacagttgatgctgcagtcccgggggctgggaagaagcggtacccaactgccgaggagatcttggttctggggggctacctccgtctcagccgcagctgccttgccaaggggtcccccgaaagacaccacaaacagcttaagatctccttcagcgagacagccctggagaccacgtaccaatacccctccgagagttcggtactggaggagctgggcccggagcctgaggtccccagtgcccccaaccctccagcagcccaacccgacgacgaagaggatgaggaagagctgctgctgctgcagccagagctccagggcgggctgcgcaccaaggccctgattgtggatgagtcctgccggcggtgaccatcttccaacatagggatatacctccctccttcttataactgaagatcctggagcccggaagattcagggcagacagaccctgataatgagcctggcagggaagggcaaccaacatcttgtaacttgctttccccaccctgtttctgggggcagagccaattgcccaatttctaccctaatccaaagtccctggtgtgggtggggttaaacgtgctggtgcatcctaggtcatccaagagtgagcgccaagtcctgagaaggggcacagaactccctggagggtggagatggagcacctgccccccatggcagggtacactctccccacagccttcctccccaccatcccgtggggactctcgggatttaagcactcgtctctctgggaggcccagaccccactccatttataggcacatctccttcatttcctaggtcactgcccctttgtttacagctcctgcctcctcccttgaccacagcctggtttacaaattccatcagctcccagccccacctgccaaagtcccaggtttacaagccacgcttacttgctgtgtctgcgtggaattctctcctctgtcccctccagtctcctcattggagtgacctgaaggtgtggcttcctccactttttctcagtattactttgccttagttttccccaagagggaaggctggaactcttaactctgtaccccttgatagttatttaattctgtttctcctagtggttcacaattgaactgaattgagatggtgtcgggtggctaaggagacacctcacctctccttccccattgtgccgcctttatcaattgcctgttttgttttgtttgttttttaactttccataataaaatggagttct

SEQ ID NO: 4725 - protein, 613 aa, Homo sapiens; identical to SEQ ID NO: 4721

SEQ ID NO: 4726 - DNA, 486 bp, Homo sapiens
atgtcttcacatctacctttctatgtcacatgtgcaagatggttgctctgccttcagacatcacatttacattccaggcagaaaggagaaggaaagagcaaaagatgtgttccgaacaaatccatcttaaaaacaaacaaggggaggggtagcaggagaaaatttaaaaagaagaagaagaaaaacaaaaacaggaaagccgttgtttccctaaaagccccatcaagccgacttctaccggtgactcattacccagtcatgtggccacccctggattcaaggcagtctgaggaggtgagtgtttcaaagaggcacatggatgccacagacaaaatcaagtttccatggttgaaggagaagaggacgatagagtttggggaggcagcaggctacgtctgccacagaagatataaagatatggagccacacgagaagatgggggaggctgccaaaaaagtccactgggtacaggtgaggagcaggtga

SEQ ID NO: 4727 - protein, 161 aa, Homo sapiens
MSSHLPFYVTCARWLLCLQTSHLHSRQKGEGKSKRCVPNKSILKTNKGRGSRRKFKKKKKKNKNRKAVVSLKAPSSRLLPVTHYPVMWPPLDSRQSEEVSVSKRHMDATDKIKFPWLKEKRTIEFGEAAGYVCHRRYKDMEPHEKMGEAAKKVHWVQVRSR

SEQ ID NO: 4728 - DNA, 486 bp, Homo sapiens
atgtcttcacatctacctttctatgtcacatgtgcaagatggttgctctgccttcagacatcacatctacattccaggcagaaaggagaaggaaagagcaaaagatgtgttccgaacaaatccatcttaaaaacaaacaaggggaggggtagcaggagaaaatttaaaaagaagaagaagaaaaacaaaaacaggaaagccgttgtttccctaaaagccccatcaagccgacttctaccggtgactcattacccagtcatgtggccacccctggattcaaggcagtctgaggaggtgagtgtttcaaagaggcacatggatgccacagacaaaatcaagtttccatggttgaaggagaagaggacgatagagtttggggaggcagcaggctacgtctgccacagaagatataaagatatggagccacacgagaagatgggggaggctgccaaaaaagtccactgggtacaggtgaggagcaggtga

SEQ ID NO: 4729 - protein, 161 aa, Homo sapiens; identical to SEQ ID NO: 4727

SEQ ID NO: 4730 - DNA, 471 bp, Homo sapiens
atgggcatcagcgcgcccaagagccagcaaggagtcccgccagggccgcggcgatctccacctgcacaggggcctcctgcagtgcccacagcccggcgcggccaagccttcccgcccatcccaaggcctgggcccaggacccgcagcgtctcccacttcccggaggccgccccggcgcgcgctcaccaggaggccccgccgctatcccagggcgccccgcggcggcagggactgaggaatccaccaaacccgaccctggaacgtggccctggagccgcgcggcgcatgggggcggggccccggccggcgcatgcgcagcagctggctttggccccaccctctccctaccggtccaaaggctgtagaccagaggagcgagtccgccgcgaaggcaaaccccacggggaggcgcccgggaccgcactgctagctatcataactttattaaacaagaaaagccctgacgcgtaa

SEQ ID NO: 4731 - protein, 156 aa, Homo sapiens [sequence omitted]

SEQ ID NO: 4732 - DNA, 471 bp, Homo sapiens
atgggcatcagcgcgcccaagagccagcaaggagtcccgccagggccgcggcgatctccacctgcacaggggcctcctgcagtgcccacagcccggcgcggccaggccttcccgcccatcccaaggcctgggcccaggacccgcagcgtctcccacttcccggaggccgccccggcgcgcgctcaccaggaggccccgccgctatcccagggcgccccgcggcggcagggactgaggaatccaccaaacccgaccctggaacgtggccctggagccgcgcggcgcatgggggcggggccccggccggcgcatgcgcagcagctggctttggccccaccctctccctaccggtccaaaggctgtagaccagaggagcgagtccgccgcgaaggcaaaccccacggggaggcgcccgggaccgcactgctagctatcataactttattaaacaagaaaagccctgacgcgtaa

SEQ ID NO: 4733 - protein, 156 aa, Homo sapiens [sequence omitted]

SEQ ID NO: 4734 - DNA, 1218 bp, Homo sapiens
atgtctgtgtcagccacagcctccagcacagcctccagcacagcctctgagatcaccatgagctctgcagccatcccagtctcctccacagcttatgagaccatcaggttctccactgcagtgtctgagccagtgacagcctctatcctggcccttgagtccaccctggccttcaccacggtctctaacaccaccacatcttccacagtaacacctgtgcccaccacagcttccacctcaggctctaagaacacaacagcctgtgaggccaccatgtctgaaactaccattgctgccatcacagcctccgaggacaccacagtctccactcaaacctctgtgatagctgcagagtctgtgccccacacagccaccaaaacacctactgacaccaccacagcatctgtgtccgccacagtccccaagaacaacacaccctctgtgataacatctacaccttccacagctcccaacacagcctctaaaaccatgaccacagcttccaagaccgccacgacctctacgataacatctctgcccaccacagtcttcaccacaacctctaaaatcaccgcaggctctgagatccccacagcctccaccacagactctgcgaccactgcaatctccacaaaagcctctgggacaactgtagagtctgcgccctctacagcccctccaacacctgctgagaccaccacagcatctgtgcccaccacaacctctaccacaggctctgagaacaccggacaccacacagtatcatctgtgcccaccacagtcttcgctacagcctctgaaagcagcacaggctctgagaccaccagagcttccacctctgccactgaagtgactacagccatgaccacagccatgaccacaggttctgagactgctgtggtctccaccaaagctcctgtgacaaccacacagtctgggttctccacagccaccgtaatgcctgctaagaccactacagcgtctgtgtccaccacagcctccaccacactctatcagaatactatagactccgtgaccaagtctgtgcccaccatggactctaccatagcctccaagagcaccactctctccaagatagtatctgtgcctactgcagtctttatcaaagcgcctgaaaccaccacaggctctgagatcactctggcttccatcataacctcaggaaccactgcagtctgtgactacattggcctctag

SEQ ID NO: 4735 - protein, 405 aa, Homo sapiens
MSVSATASSTASSTASEITMSSAAIPVSSTAYETIRFSTAVSEPVTASILALESTLAFTTVSNTTTSSTVTPVPTTASTSGSKNTTACEATMSETTIAAITASEDTTVSTQTSVIAAESVPHTATKTPTDTTTASVSATVPKNNTPSVITSTPSTAPNTASKTMTTASKTATTSTITSLPTTVFTTTSKITAGSEIPTASTTDSATTAISTKASGTTVESAPSTAPPTPAETTTASVPTTTSTTGSENTGHHTVSSVPTTVFATASESSTGSETTRASTSATEVTTAMTTAMTTGSETAVVSTKAPVTTTQSGFSTATVMPAKTTTASVSTTASTTLYQNTIDSVTKSVPTMDSTIASKSTTLSKIVSVPTAVFIKAPETTTGSEITLASIITSGTTAVCDYIGL

SEQ ID NO: 4736 - DNA, 898 bp, Homo sapiens
atggcagtcttattcctcctcctgttcctatgtggaactccccaggctgcagacaacatgcaggccatctatgtggccttgggggaggcagtagagctgccatgtccctcaccacctactctacatggggacgaacacctgtcatggttctgcagccctgcagcaggctccttcaccaccctggtagcccaagtccaagtgggcaggccagccccagaccctggaaaaccaggaagggaatccaggctcagactgctggggaactattctttgtggttggagggatccaaagaggaagatgccgggcggtactggtgcgctgtgctaggtcagcaccacaactaccagaactggagggtgtacgacgtcttggtgctcaaaggatcccagttatctgcaagggctgcagatggatccccctgcaatgtcctcctgtgctctgtggtccccagcagacgcatggactctgtgacctggcaggaagggaagggtcccgtgaggggccgtgttcagtccttctggggcagtgaggctgccctgctcttggtgtgtcctggggaggggctttctgagcccaggagccgaagaccaagaatcatccgctgcctcatgactcacaacaaaggggtcagctttagcctggcagcctccatcgatgcttctcctgccctctgtgccccttccacgggctgggacatgccttggattctgatgctgctgctcacaatgggccagggagttgtcatcctggccctcagcatcgtgctctggaggcagagggtccgtggggctccaggcagagatgcctcgattcctcagttcaaacccgaaatccaggtctatgagaacatccatttggcccgtcttggcccacctgcccacaagcccaggtgatttt

SEQ ID NO: 4737 - protein, 297 aa, Homo sapiens
MAVLFLLLFLCGTPQAADNMQAIYVALGEAVELPCPSPPTLHGDEHLSWFCSPAAGSFTTLVAQVQVGRPAPDPGKPGRESRLRLLGNYSLWLEGSKEEDAGRYWCAVLGQHHNYQNWRVYDVLVLKGSQLSARAADGSPCNVLLCSVVPSRRMDSVTWQEGKGPVRGRVQSFWGSEAALLLVCPGEGLSEPRSRRPRIIRCLMTHNKGVSFSLAASIDASPALCAPSTGWDMPWILMLLLTMGQGVVILALSIVLWRQRVRGAPGRDASIPQFKPEIQVYENIHLARLGPPAHKPR

SEQ ID NO: 4738 - DNA, 5426 bp, Homo sapiens
agaaggtagcagacagacagacggatctaacctctcttggatcctccagccatgaggctgctctgggggctgatctgggcatccagcttcttcaccttatctctgcagaagcccaggttgctcttgttctctccttctgtggttcatctgggggtccccctatcggtgggggtgcagctccaggatgtgccccgaggacaggtagtgaaaggatcagtgttcctgagaaacccatctcgtaataatgtcccctgctccccaaaggtggacttcacccttagctcagaaagagacttcgcactcctcagtctccaggtgcccttgaaagatgcgaagagctgtggcctccatcaactcctcagaggccctgaggtccagctggtggcccattcgccatggctaaaggactctctgtccagaacgacaaacatccagggtatcaacctgctcttctcctctcgccgggggcacctctttttgcagacggaccagcccatttacaaccctggccagcgggttcggtaccgggtctttgctctggatcagaagatgcgcccgagcactgacaccatcacagtcatggtggagaactctcacggcctccgcgtgcggaagaaggaggtgtacatgccctcgtccatcttccaggatgactttgtgatcccagacatctcagagccagggacctggaagatctcagcccgattctcagatggcctggaatccaacagcagcacccagtttgaggtgaagaaatatgtccttcccaactttgaggtgaagatcacccctggaaagccctacatcctgacggtgccaggccatcttgatgaaatgcagttagacatccaggccaggtacatctatgggaagccagtgcagggggtggcatatgtgcgctttgggctcctagatgaggatggtaagaagactttctttcgggggctggagagtcagaccaagctggtgaatggacagagccacatttccctctcaaaggcagagttccaggacgccctggagaagctgaatatgggcattactgacctccaggggctgcgcctctacgttgctgcagccatcattgagtctccaggtggggagatggaggaggcagagctcacatcctggtattttgtgtcatctcccttctccttggatcttagcaagaccaagcgacaccttgtgcctggggcccccttcctgctgcaggccttggtccgtgagatgtcaggctccccagcttctggcattcctgtcaaagtttctgccacggtgtcttctcctgggtctgttcctgaagtccaggacattcagcaaaacacagacgggagcggccaagtcagcattccaataattatccctcagaccatctcagagctgcagctctcagtatctgcaggctccccacatccagcgatagccaggctcactgtggcagccccaccttcaggaggccccgggtttctgtctattgagcggccggattctcgacctcctcgtgttggggacactctgaacctgaacttgcgagccgtgggcagtggggccaccttttctcattactactacatgatcctatcccgagggcagatcgtgttcatgaatcgagagcccaagaggaccctgacctcggtctcggtgtttgtggaccatcacctggcaccctccttctactttgtggccttctactaccatggagaccacccagtggccaactccctgcgagtggatgtccaggctggggcctgcgagggcaagctggagctcagcgtggacggtgccaagcagtaccggaacggggagtccgtgaagctccacttagaaaccgactccctagccctggtggcgctgggagccttggacacagctctgtatgctgcaggcagcaagtcccacaagcccctcaacatgggcaaggtctttgaagctatgaacagctatgacctcggctgtggtcctgggggtggggacagtgcccttcaggtgttccaggcagcgggcctggccttttctgatggagaccagtggaccttatccagaaagagactaagctgtcccaaggagaagacaacccggaaaaagagaaacgtgaacttccaaaaggcgattaatgagaaattgggtcagtatgcttccccgacagccaagcgctgctgccaggatggggtgacacgtctgcccatgatgcgttcctgcgagcagcgggcagcccgcgtgcagcagccggactgccgggagcccttcctgtcctgctgccaatttgctgagagtctgcgcaagaagagcagggacaagggccaggcgggcctccaacgagccctggagatcctgcaggaggaggacctgattgatgaggatgacattcccgtgcgcagcttcttcccagagaactggctctggagagtggaaacagtggaccgctttcaaatattgacactgtggctccccgactctctgaccacgtgggagatccatggcctgagcctgtccaaaaccaaaggcctatgtgtggccaccccagtccagctccgggtgttccgcgagttccacctgcacctccgcctgcccatgtctgtccgccgctttgagcagctggagctgcggcctgtcctctataactacctggataaaaacctgactgtgagcgtccacgtgtccccagtggaggggctgtgcctggctgggggcggagggctggcccagcaggtgctggtgcctgcgggctctgcccggcctgttgccttctctgtggtgcccacggcagccgccgctgtgtctctgaaggtggtggctcgagggtccttcgaattccctgtgggagatgcggtgtccaaggttctgcagattgagaaggaaggggccatccatagagaggagctggtctatgaactcaaccccttggaccaccgaggccggaccttggaaatacctggcaactctgatcccaatatgatccctgatggggactttaacagctacgtcagggttacagcctcagatccattggacactttaggctctgagggggccttgtcaccaggaggcgtggcctccctcttgaggcttcctcgaggctgtggggagcaaaccatgatctacttggctccgacactggctgcttcccgctacctggacaagacagagcagtggagcacactgcctcccgagaccaaggaccacgccgtggatctgatccagaaaggctacatgcggatccagcagtttcggaaggcggatggttcctatgcggcttggttgtcacgggacagcagcacctggctcacagcctttgtgttgaaggtcctgagtttggcccaggagcaggtaggaggctcgcctgagaaactgcaggagacatctaactggcttctgtcccagcagcaggctgacggctcgttccaggacccctgtccagtgttagacaggagcatgcaggggggtttggtgggcaatgatgagactgtggcactcacagcctttgtgaccatcgcccttcatcatgggctggccgtcttccaggatgagggtgcagagccattgaagcagagagtggaagcctccatctcaaaggcaaactcatttttgggggagaaagcaagtgctgggctcctgggtgcccacgcagctgccatcacggcctatgccctgacactgaccaaggcgcctgtggacctgctcggtgttgcccacaacaacctcatggcaatggcccaggagactggagataacctgtactggggctcagtcactggttctcagagcaatgccgtgtcgcccaccccggctcctcgcaacccatccgaccccatgccccaggccccagccctgtggattgaaaccacagcctacgccctgctgcacctcctgcttcacgagggcaaagcagagatggcagaccaggcttcggcctggctcacccgtcagggcagcttccaagggggattccgcagtacccaagacacggtgattgccctggatgccctgtctgcctactggattgcctcccacaccactgaggagaggggtctcaatgtgactctcagctccacaggccggaatgggttcaagtcccacgcgctgcagctgaacaaccgccagattcgcggcctggaggaggagctgcagttttccttgggcagcaagatcaatgtgaaggtgggaggaaacagcaaaggaaccctgaaggtccttcgtacctacaatgtcctggacatgaagaacacgacctgccaggacctacagatagaagtgacagtcaaaggccacgtcgagtacacgatggaagcaaacgaggactatgaggactatgagtacgatgagcttccagccaaggatgacccagatgcccctctgcagcccgtgacacccctgcagctgtttgagggtcggaggaaccgccgcaggagggaggcgcccaaggtggtggaggagcaggagtccagggtgcactacaccgtgtgcatctggcggaacggcaaggtggggctgtctggcatggccatcgcggacgtcaccctcctgagtggattccacgccctgcgtgctgacctggagaagctgacctccctctctgaccgttacgtgagtcactttgagaccgaggggccccacgtcctgctgtattttgactcggtccccacctcccgggagtgcgtgggctttgaggctgtgcaggaagtgccggtggggctggtgcagccggccagcgcaaccctgtacgactactacaaccccgagcgcagatgttctgtgttttacggggcaccaagtaagagcagactcttggccaccttgtgttctgctgaagtctgccagtgtgctgaggggaagtgccctcgccagcgtcgcgccctggagcggggtctgcaggacgaggatggctacaggatgaagtttgcctgctactacccccgtgtggagtacggcttccaggttaaggttctccgagaagacagcagagctgctttccgcctctttgagaccaagatcacccaagtcctgcacttcaccaaggatgtcaaggccgctgctaatcagatgcgcaacttcctggttcgagcctcctgccgccttcgcttggaacctgggaaagaatatttgatcatgggtctggatggggccacctatgacctcgagggacacccccagtacctgctggactcgaatagctggatcgaggagatgccctctgaacgcctgtgccggagcacccgccagcgggcagcctgtgcccagctcaacgacttcctccaggagtatggcactcaggggtgccaggtgtgagggctgccctcccacctccgctgggaggaacctgaacctgggaaccatgaagctggaagcactgctgtgtccgctttcatgaacacagcctgggaccagggcatattaaaggcttttggcagcaaagtgtcagtgttggc

SEQ ID NO: 4739 - protein, 1744 aa, Homo sapiens
MRLLWGLIWASSFFTLSLQKPRLLLFSPSVVHLGVPLSVGVQLQDVPRGQVVKGSVFLRNPSRNNVPCSPKVDFTLSSERDFALLSLQVPLKDAKSCGLHQLLRGPEVQLVAHSPWLKDSLSRTTNIQGINLLFSSRRGHLFLQTDQPIYNPGQRVRYRVFALDQKMRPSTDTITVMVENSHGLRVRKKEVYMPSSIFQDDFVIPDISEPGTWKISARFSDGLESNSSTQFEVKKYVLPNFEVKITPGKPYILTVPGHLDEMQLDIQARYIYGKPVQGVAYVRFGLLDEDGKKTFFRGLESQTKLVNGQSHISLSKAEFQDALEKLNMGITDLQGLRLYVAAAIIESPGGEMEEAELTSWYFVSSPFSLDLSKTKRHLVPGAPFLLQALVREMSGSPASGIPVKVSATVSSPGSVPEVQDIQQNTDGSGQVSIPIIIPQTISELQLSVSAGSPHPAIARLTVAAPPSGGPGFLSIERPDSRPPRVGDTLNLNLRAVGSGATFSHYYYMILSRGQIVFMNREPKRTLTSVSVFVDHHLAPSFYFVAFYYHGDHPVANSLRVDVQAGACEGKLELSVDGAKQYRNGESVKLHLETDSLALVALGALDTALYAAGSKSHKPLNMGKVFEAMNSYDLGCGPGGGDSALQVFQAAGLAFSDGDQWTLSRKRLSCPKEKTTRKKRNVNFQKAINEKLGQYASPTAKRCCQDGVTRLPMMRSCEQRAARVQQPDCREPFLSCCQFAESLRKKSRDKGQAGLQRALEILQEEDLIDEDDIPVRSFFPENWLWRVETVDRFQILTLWLPDSLTTWEIHGLSLSKTKGLCVATPVQLRVFREFHLHLRLPMSVRRFEQLELRPVLYNYLDKNLTVSVHVSPVEGLCLAGGGGLAQQVLVPAGSARPVAFSVVPTAAAAVSLKVVARGSFEFPVGDAVSKVLQIEKEGAIHREELVYELNPLDHRGRTLEIPGNSDPNMIPDGDFNSYVRVTASDPLDTLGSEGALSPGGVASLLRLPRGCGEQTMIYLAPTLAASRYLDKTEQWSTLPPETKDHAVDLIQKGYMRIQQFRKADGSYAAWLSRDSSTWLTAFVLKVLSLAQEQVGGSPEKLQETSNWLLSQQQADGSFQDPCPVLDRSMQGGLVGNDETVALTAFVTIALHHGLAVFQDEGAEPLKQRVEASISKANSFLGEKASAGLLGAHAAAITAYALTLTKAPVDLLGVAHNNLMAMAQETGDNLYWGSVTGSQSNAVSPTPAPRNPSDPMPQAPALWIETTAYALLHLLLHEGKAEMADQASAWLTRQGSFQGGFRSTQDTVIALDALSAYWIASHTTEERGLNVTLSSTGRNGFKSHALQLNNRQIRGLEEELQFSLGSKINVKVGGNSKGTLKVLRTYNVLDMKNTTCQDLQIEVTVKGHVEYTMEANEDYEDYEYDELPAKDDPDAPLQPVTPLQLFEGRRNRRRREAPKVVEEQESRVHYTVCIWRNGKVGLSGMAIADVTLLSGFHALRADLEKLTSLSDRYVSHFETEGPHVLLYFDSVPTSRECVGFEAVQEVPVGLVQPASATLYDYYNPERRCSVFYGAPSKSRLLATLCSAEVCQCAEGKCPRQRRALERGLQDEDGYRMKFACYYPRVEYGFQVKVLREDSRAAFRLFETKITQVLHFTKDVKAAANQMRNFLVRASCRLRLEPGKEYLIMGLDGATYDLEGHPQYLLDSNSWIEEMPSERLCRSTRQRAACAQLNDFLQEYGTQGCQV

SEQ ID NO: 4740 - DNA, 336 bp, Homo sapiens
atggatcaaggaattatagcagcttttaaggtttactatctgaagagggcctttgcccatgttattatggtaactcaggaagacactgagaagacagtgatgcaattctggaaggataacaacagctatggctacatcaagaaccttgcttgggatggggatgatgtcaccgaggagtgtgtgaatggcatctggaagaagacactcaggaggtttgtctgtgagttcaaagggtttgccaaggatgaggagattgcaaaaatctacaaggctttggttgagatggcaaacaactttaaactgagtacggatgaggatggcattaggagctcctag

SEQ ID NO: 4741 - protein, 111 aa, Homo sapiens [sequence omitted]

SEQ ID NO: 4742 - DNA, 336 bp, Homo sapiens; identical to SEQ ID NO: 4740

SEQ ID NO: 4743 - protein, 111 aa, Homo sapiens [sequence omitted]

SEQ ID NO: 4744 - DNA, 198 bp, Homo sapiens
atgcacacctctcaaacacattgtcctgtgcacgggatgctgacagccagcattgtgtccatcgctcttattaggaaggaggactggattttccagatccttgtggtcctggaaatgacttccagtgtgcagatgtctacaccagtcatgtggagcacttcagcctccagagcctgtcctcacagtggaggggtgtaa

SEQ ID NO: 4745 - protein, 65 aa, Homo sapiens
MHTSQTHCPVHGMLTASIVSIALIRKEDWIFQILVVLEMTSSVQMSTPVMWSTSASRACPHSGGV

SEQ ID NO: 4746 - DNA, 518 bp, Homo sapiens
atggcagaggaaggtgatgtggacgaggcggatgtgttcctggcatttgcccagggtccctcccctcccaggggtcccgtgcgacgtgccttggacaaggctttctttatcttcctggccctcttcctgacactgctgatgctggaggctgcttataagctgctaaggaggaggagctggaattgtgaccacctttcctataaacatcttctttccccaccaaggagctcacctctggacccagccttgcctccacgagtccctccagcctccctaaacacaacgagcagccctcgcagcggcaatttgcacaaactctcctccaagccccaccccatcatcgcccatccgcagaccctaggcctcccacgacaaagcacggccacctggtcagcacagacggcccttcgaggaccccctctggagaagaaccattcaggtcccaacggtctggctggtcattagttctgtggtgaagcttgaaaagcaaatcagcaacaatagtaataacaataaca

SEQ ID NO: 4747 - protein, 154 aa, Homo sapiens
MAEEGDVDEADVFLAFAQGPSPPRGPVRRALDKAFFIFLALFLTLLMLEAAYKLLRRRSWNCDHLSYKHLLSPPRSSPLDPALPPRVPPASLNTTSSPRSGNLHKLSSKPHPIIAHPQTLGLPRQSTATWSAQTALRGPPLEKNHSGPNGLAGH

SEQ ID NO: 4748 - DNA, 1385 bp, Homo sapiens
cgggggcggccgagggggaagagtgtgtgtctgcgggagaaagaggagaatcacccaagcggcctcagaagtcccagggagtggaggcccctgccatggagccgtgtggtgtatgtgtggtaacaccatgtctgtgcccctgctcaacgatgctgccaccgtgtctggagctgagcgggaaacggccgtggttatttttttacatggacttggagacacagggcacagctgggctgacgccctctccaccattcggctccctcacgtcaagtacatctgttcccatgagcctaggatccctgtgaccctcaacatgaagatggtgatgccctcctggtttgacctgatggggctgagtccagatgccccagaggacgaggctggcatcaagaaggcagcagagaacatcaaggccttgattgagcatgaaatgaagaacgggatccctgccaatcaaatcatcctgggaggcttttcacagggccgggccctgtccctctacatggccctcacctgcccccaccctctggctggcatcctggctttgagctgctggccgcctctgcaccgggccttcccccaggcagctaatggcagtgccaaggacctggccatcctccagtgccatggggagctggaccccatggtgcccgtacggtttggggccctgatggctgagaagctccggtctgttgtcacacctgccagggtccagttccagacatacctgggtgtcatgcacagctcctgtcctcaggagatggcagctgtgaaggaatttcttgagaagctgctgcctcctgtctaactagtcgctggccccagtgcagtaccccagctcatgggggactcagcaagtaagcatggcaccatcttgggtctgagctggtcgagcccctgtccccacccttcctgacctgtccttttcccacaggcctctaggggcaggtggcaaggcctggctgggccttccttcctggcctcagccacctgcctccactcagctgcttctcagtcatgaacgtggccatggccccgggggtccccttgctgctgtgggctccctgtccctgggcaggagtgctggtgaggaggtggagccttttgaggggggccttccctcagctgtttccccacactggggggctgggccctgcctccccgttaccctccttccctgcaggcctggagcctgtagggctggactgaggttcaggtctccccccagctgtctcacccccactttgtccccactctagagcagggaggcagtgggggaggagttgtgtcttgtcttctgtctccatgtggtttttgggtgtttttcttcttgtgtcctggattctgataaaattaaagaaattgcttcctcaaaaaaaaaaaaa

SEQ ID NO: 4749 - protein, 226 aa, Homo sapiens
MSVPLLNDAATVSGAERETAVVIFLHGLGDTGHSWADALSTIRLPHVKYICSHEPRIPVTLNMKMVMPSWFDLMGLSPDAPEDEAGIKKAAENIKALIEHEMKNGIPANQIILGGFSQGRALSLYMALTCPHPLAGILALSCWPPLHRAFPQAANGSAKDLAILQCHGELDPMVPVRFGALMAEKLRSVVTPARVQFQTYLGVMHSSCPQEMAAVKEFLEKLLPPV

SEQ ID NO: 4750 - DNA, 1601 bp, Homo sapiens
ggcgggggcggccgagggggaagagtgtgtgtctgcgggagaaagaggagaatcacccaagcggcctcagaagtcccagggagtggaggcccctgccatggagccgtgtggtgtatgtgtggtaacaccatgtctgtgcccctgctcaacgatgctgccaccgtgtctggagctgagcgggaaacggccgtgggcacagctgggctgacgccctctccaccattcggctccctcacgtcaagtacatctgttcccatgagcctaggatccctgtgaccctcaacatgaagatggtgatgccctcctggtttgacctgatggggctgagtccagatgccccagaggacgaggctggcatcaagaaggcagcagagaacatcaaggccttgattgagcatgaaatgaagaacgggatccctgccaatcaaatcatcctgggaggcttttcacagggccgggccctgtccctctacatggccctcacctgcccccaccctctggctggcatcctggctttgagctgctggccgcctctgcaccgggccttcccccaggcagctaatggcagtgccaaggacctggccatcctccagtgccatggggagctggaccccatggtgcccgtacggtttggggccctgatggctgagaagctccggtctgttgtcacacctgccagggtccagttccagacatacctgggtgtcatgcacagctcctgtcctcaggagatggcagctgtgaaggaatttcttgagaagctgctgcctcctgtctaactagtcgctggccccagtgcagtaccccagctcatgggggactcagcaagtaagcatggcaccatcttgggtctgagctggtcgagcccctgtccccacccttcctgacctgtccttttcccacaggcctctaggggcaggtggcaaggcctggctgggccttccttcctggcctcagccacctggctctgtctgcagtaggggcaggctgctttcttatcccatttccctggaggcgggcccccctggcagcagtattggaggggctacaggcagctggagaaagaggcccagccactgacccactcactcaggacctcactcactagccccactttgggccccctcctgtaaccttagggtttggcccatggggccctcccaggcccctgccccaactgattctgcccagataatcttgtgtctcctgcctccactcagctgcttctcagtcatgaacgtggccatggccccgggggtccccttgctgctgtgggctccctgtccctgggcaggagtgctggtgaggaggtggagccttttgaggggggccttccctcagctgtttccccacactggggggctgggccctgcctccccgttaccctccttccctgcaggcctggagcctgtagggctggactgaggttcaggtctccccccagctgtctcacccccactttgtccccactctagagcagggaggcagtgggggaggagttgtgtcttgtcttctgtctccatgtggtttttgggtgtttttcttcttgtgtcctggattctgataaaattaaagaaattgcttcctcaaaaaaaaaaaaa

SEQ ID NO: 4751 - protein, 164 aa, Homo sapiens
MKMVMPSWFDLMGLSPDAPEDEAGIKKAAENIKALIEHEMKNGIPANQIILGGFSQGRALSLYMALTCPHPLAGILALSCWPPLHRAFPQAANGSAKDLAILQCHGELDPMVPVRFGALMAEKLRSVVTPARVQFQTYLGVMHSSCPQEMAAVKEFLEKLLPPV

SEQ ID NO: 4752 - DNA, 1632 bp, Homo sapiens
ggcgggggcggccgagggggaagagtgtgtgtctgcgggagaaagaggagaatcacccaagcggcctcagaagtcccagggagtggaggcccctgccatggagccgtgtggtgtatgtgtggtaacaccatgtctgtgcccctgctcaacgatgctgccaccgtgtctggagctgagcgggaaacggccgtggttatttttttacatggacttggagacacagggcacagctgggctgacgccctctccaccattcggctccctcacgtcaagtacatctgttcccatgagcctaggatccctgtgaccctcaacatgaagatggtgatgccctcctggtttgacctgatggggctgagtccagatgccccagaggacgaggctggcatcaagaaggcagcagagaacatcaaggccttgattgagcatgaaatgaagaacgggatccctgccaatcaaatcatcctgggaggcttttcacagggccgggccctgtccctctacatggccctcacctgcccccaccctctggctggcatcctggctttgagctgctggccgcctctgcaccgggccttcccccaggcagctaatggcagtgccaaggacctggccatcctccagtgccatggggagctggaccccatggtgcccgtacggtttggggccctgatggctgagaagctccggtctgttgtcacacctgccagggtccagttccagacatacctgggtgtcatgcacagctcctgtcctcaggagatggcagctgtgaaggaatttcttgagaagctgctgcctcctgtctaactagtcgctggccccagtgcagtaccccagctcatgggggactcagcaagtaagcatggcaccatcttgggtctgagctggtcgagcccctgtccccacccttcctgacctgtccttttcccacaggcctctaggggcaggtggcaaggcctggctgggccttccttcctggcctcagccacctggctctgtctgcagtaggggcaggctgctttcttatcccatttccctggaggcgggcccccctggcagcagtattggaggggctacaggcagctggagaaagaggcccagccactgacccactcactcaggacctcactcactagccccactttgggccccctcctgtaaccttagggtttggcccatggggccctcccaggcccctgccccaactgattctgcccagataatcttgtgtctcctgcctccactcagctgcttctcagtcatgaacgtggccatggccccgggggtccccttgctgctgtgggctccctgtccctgggcaggagtgctggtgaggaggtggagccttttgaggggggccttccctcagctgtttccccacactggggggctgggccctgcctccccgttaccctccttccctgcaggcctggagcctgtagggctggactgaggttcaggtctccccccagctgtctcacccccactttgtccccactctagagcagggaggcagtgggggaggagttgtgtcttgtcttctgtctccatgtggtttttgggtgtttttcttcttgtgtcctggattctgataaaattaaagaaattgcttcctcaaaaaaaaaaaaa

SEQ ID NO: 4753 - protein, 226 aa, Homo sapiens; identical to SEQ ID NO: 4749

SEQ ID NO: 4754 - DNA, 6010 bp, Homo sapiens
tctcggctgccgctgctgccgttggctcttattctcctcctcctcctcctctctcctcctctctgcttctctctgctcctctctcctcctctctcctcctcctcctcctccacctcctcctccttctccccctctttctccccctctttctctcttctttctcccccgtccccccgccccctccccccaggcctgatgagcaggtctcgagcctccatccatcgggggagcatccccgcgatgtcctatgcccccttcagagatgtacggggaccctctatgcaccgaacccaatacgttcattccccgtatgatcgtcctggttggaaccctcggttctgcatcatctcggggaaccagctgctcatgctggatgaggatgagatacaccccctactgatccgggaccggaggagcgagtccagtcgcaacaaactgctgagacgcacagtctccgtgccggtggaggggcggccccacggcgagcatgaataccacttgggtcgctcgaggaggaagagtgtcccaggggggaagcagtacagcatggagggtgcccctgctgcgcccttccggccctcgcaaggcttcctgagccgacggctaaaaagctccatcaaacgaacgaagtcacaacccaaacttgaccggaccagcagctttcgccagatcctgcctcgcttccgaagtgctgaccatgaccgggcccggctgatgcaaagctttaaggagtcacactctcatgagtccttgctgagtcctagcagtgcagctgaggcattggagctcaacttggatgaagattccattatcaagccagtgcacagctccatcctgggccaggagttctgttttgaggtaacaacttcatcaggaacaaaatgctttgcctgtcggtctgcggccgaaagagacaaatggattgagaatctgcagcgggcagtaaagcccaacaaggacaacagccgccgggtagacaatgtgctaaagctgtggatcatagaggcccgggagctgccccccaagaagcggtactactgtgagctctgcctggatgacatgctgtatgcacgcaccacctccaagccccgctctgcctctggggacaccgtcttctggggcgagcacttcgagtttaacaacctgccggctgtccgtgccctgcggctgcatctgtaccgtgactcagacaaaaagcgcaagaaggacaaggcaggctatgtcggcctggtgactgtgccagtggccaccctggctgggcgccacttcacagagcagtggtaccctgtaaccctgccaacaggcagtgggggatctgggggcatgggttcgggagggggagggggctcggggggtggctcagggggcaagggcaaaggaggttgcccggctgtgcggctgaaagcacgttaccagacaatgagcatcttgcccatggagctatataaagagtttgcagagtatgtcaccaaccattatcggatgctgtgtgcagtcttggagcccgccctgaatgtcaaaggcaaggaggaggttgccagtgcactagttcacatcctgcagagtacaggcaaggccaaggacttcctttcagacatggccatgtctgaggtagaccggttcatggaacgggagcacctcatattccgcgagaacacgcttgccactaaagccatagaagagtatatgagactgattggtcagaaatacctcaaggatgccattggagaattcatccgtgctctgtatgaatctgaggaaaactgcgaggtagaccctatcaagtgcacagcatccagtttggcagagcaccaggccaacctgcgaatgtgctgtgagttggccctgtgcaaggtggtcaactcccactgcgtgttcccgagggagctgaaggaggtgtttgcttcgtggcggctgcgctgcgcagagcgaggccgggaggacatcgcagacaggcttatcagcgcctcactcttcctgcgcttcctctgcccagcgattatgtcgcccagtctctttgggcttatgcaggagtacccagatgagcagacctcacgaaccctcaccctcattgccaaggtcatccagaacctggccaacttttccaagtttacctcaaaggaggactttctgggcttcatgaatgagtttctggagctggaatggggttccatgcagcagtttttgtatgagatctccaatctggacacgctaaccaacagcagtagctttgagggttacatcgacttgggccgagagctctccacactgcatgccctactctgggaggtgctgccccagctcagcaaggaagccctcctgaagctgggtccactgccccggctcctcaacgacatcagcacagctctgaggaaccccaacatccaaaggcagccaagccgccagagtgagcggccccggcctcagcctgtggtactgcgggggccatcggctgagatgcagggctacatgatgcgggacctcaacagctccatcgaccttcagtccttcatggctcgaggcctcaacagctctatggacatggctcgcctcccctccccaaccaaggaaaagccacccccaccaccgcctggtggtggtaaagacctgttctatgtaagccgtccacccctggcccgttcctcaccagcatactgcacgagcagctcggacatcacagagccagagcagaagatgctgagtgtcaacaagagtgtgtccatgctggacttacagggtgatgggcctggtggccgcctcaacagcagcagtgtttcgaacctggcggccgtaggggacctgctgcactcaagccaggcctcgctgacagcagccttggggctacggcctgcgcctgccggacgcctctcccaggggagtggctcatccatcacggcggctggcatgcgcctcagccagatgggtgtcaccacagacggtgtccctgcccagcaactgcgaatccccctctccttccagaaccctctcttccacatggctgctgatgggccaggtcccccaggcggccatggagggggcggtggccatggcccaccttcctcccatcaccaccaccaccaccatcaccaccaccgaggtggagagccccctggggacacctttgccccattccatggctatagcaagagtgaggacctctcttccggggtccccaagccccctgctgcctccatccttcatagccacagctacagtgatgagtttggaccctctggcactgacttcacccgtcggcagctttcactccaggacaacctgcagcacatgctgtcccctccccagatcaccattggtccccagaggccagccccctcagggcctggaggtgggagcggtgggggcagcggtgggggtggcgggggccagccgcctccattgcagaggggcaagtctcagcagttgacagtcagcgcagcccagaaaccccggccatccagcgggaatctattgcagtccccagagccaagttatggccccgcccgtccacggcaacagagcctcagcaaggagggcagcattgggggcagcgggggcagcggtggcggagggggtggggggctgaagccctccatcaccaagcagcattctcagacaccatccacattgaaccccacaatgccagcctctgagcggacagtggcctgggtctccaacatgcctcacctgtcggctgacatcgagagtgcccacatcgagcgggaagagtacaagctcaaggagtactcaaaatcgatggatgagagccggctggatagggtgaaggagtacgaggaggagattcactcactgaaagagcggctgcacatgtccaaccggaagctggaagagtatgagcggaggctgctgtcccaggaagaacaaaccagcaaaatcctgatgcagtatcaggcccgactggagcagagtgagaagaggctaaggcagcagcaggcagagaaggattcccagatcaagagcatcattggcaggctgatgctggtggaggaggagctgcgccgggaccaccccgccatggctgagccgctgccagaacccaagaagaggctgctcgacgctcaggagaggcagcttccccccttgggtccaacaaacccgcgtgtgacgctggccccaccgtggaatggcctggcccccccagccccaccacccccaccccggctgcagattacggagaacggcgagttccgaaacaccgcagaccactagcccacccagcatcagagaccttctcttcctttcctgtgcaccccaccctgtaacagcaccaaccaccaggattggacatcaccgaggaacagcgggattgcctccccgaatgcctccctgggaggcacactgattgcccacccccaccactgcaccatttccaggagggagagtggggaccctcagccgcccccttttccttcccattggggtgctgccctctctttgacccccagggacccttgccccaggacaccgcctaccccgtacagaccccttcactccggggtgctatccccatcctctgcctcatcgttcccctgagcactgggggacagaccctcacccccaccctgggggtgtggcacctccaaactttcaacttcagggtgatttttttagcagtaaccagagctgacaatctaactcccctccaccgccccattttggcctcccctgccccccttgttatggggaggggaccccgggtgagggggccctattaccccttgatttctcaggagcgtctgggggggctcagcacgcacaaactccttctccttctaccactcttaaatttactccctccccacccagaacccagatggggtggagggggccaccggggcagggagggggcggcaaggggggaatgggagttgtctccccttctccccacacctgatctgctctcggctggtcccagagcggggtgagggggcttatgcccccccctcccccagtgtgttgggtggggtggaattgaggttagggtgaggggtcagggtttaggagggtgtgtatgttgggaggacaggctagttgatctgtcctactctgacacacagtcccctctgccccttccttctctcttcttggtctctactcccagggggaggggggaacttactctaggaaaagccatgtctctctcccccagggtggggggacctgtgttggaggaggggtgttggggggcccccttccatgactctgtcccctgggggaggtaggacagggctgggcttccctctcatcctccccctcccaatctccttccacctccctccctcccgccagctccacgatttttcggtgtttctctgtacatagttttctggcgggataggggaggtaggatggatggggtttggggtgggtaggccatgggaggggagaagcccctccttggcaccccctcttccctgactgctgtcccctacccagccttgcccccttcatccttttgcgtttggtattgagactctcctagactctactcctctttcttttgtatggacagttccccttcagtcccatccccctacacatacacccagccggggccaaatttatacttatataaaagttgtaaatatgtgaaattttatccctgtgccctttccccacctcaggccctacccctggaccctccccaaccttccttctctcttctttggctgttgtaattatctggggtttgtactgtacatatccggggtgtgtgtgtgtgggctgggggcaacccttctgtacagagcttcctggccccctccccccccgcccctctgcttccctccccacccaccacctcaagggtagggagttgctcttcctacctgttttattttgttttctcgttctccctccccaccccactcccagccttatctatcccccctcactgtccccttttctccactcccagccccatttcctttttttctggagtgtgtggtgaaacagaaaaaaacatgtttaataaacggagattgttctttta

SEQ ID NO: 4755 - protein, 1328 aa, Homo sapiens
MSYAPFRDVRGPSMHRTQYVHSPYDRPGWNPRFCIISGNQLLMLDEDEIHPLLIRDRRSESSRNKLLRRTVSVPVEGRPHGEHEYHLGRSRRKSVPGGKQYSMEGAPAAPFRPSQGFLSRRLKSSIKRTKSQPKLDRTSSFRQILPRFRSADHDRARLMQSFKESHSHESLLSPSSAAEALELNLDEDSIIKPVHSSILGQEFCFEVTTSSGTKCFACRSAAERDKWIENLQRAVKPNKDNSRRVDNVLKLWIIEARELPPKKRYYCELCLDDMLYARTTSKPRSASGDTVFWGEHFEFNNLPAVRALRLHLYRDSDKKRKKDKAGYVGLVTVPVATLAGRHFTEQWYPVTLPTGSGGSGGMGSGGGGGSGGGSGGKGKGGCPAVRLKARYQTMSILPMELYKEFAEYVTNHYRMLCAVLEPALNVKGKEEVASALVHILQSTGKAKDFLSDMAMSEVDRFMEREHLIFRENTLATKAIEEYMRLIGQKYLKDAIGEFIRALYESEENCEVDPIKCTASSLAEHQANLRMCCELALCKVVNSHCVFPRELKEVFASWRLRCAERGREDIADRLISASLFLRFLCPAIMSPSLFGLMQEYPDEQTSRTLTLIAKVIQNLANFSKFTSKEDFLGFMNEFLELEWGSMQQFLYEISNLDTLTNSSSFEGYIDLGRELSTLHALLWEVLPQLSKEALLKLGPLPRLLNDISTALRNPNIQRQPSRQSERPRPQPVVLRGPSAEMQGYMMRDLNSSIDLQSFMARGLNSSMDMARLPSPTKEKPPPPPPGGGKDLFYVSRPPLARSSPAYCTSSSDITEPEQKMLSVNKSVSMLDLQGDGPGGRLNSSSVSNLAAVGDLLHSSQASLTAALGLRPAPAGRLSQGSGSSITAAGMRLSQMGVTTDGVPAQQLRIPLSFQNPLFHMAADGPGPPGGHGGGGGHGPPSSHHHHHHHHHHRGGEPPGDTFAPFHGYSKSEDLSSGVPKPPAASILHSHSYSDEFGPSGTDFTRRQLSLQDNLQHMLSPPQITIGPQRPAPSGPGGGSGGGSGGGGGGQPPPLQRGKSQQLTVSAAQKPRPSSGNLLQSPEPSYGPARPRQQSLSKEGSIGGSGGSGGGGGGGLKPSITKQHSQTPSTLNPTMPASERTVAWVSNMPHLSADIESAHIEREEYKLKEYSKSMDESRLDRVKEYEEEIHSLKERLHMSNRKLEEYERRLLSQEEQTSKILMQYQARLEQSEKRLRQQQAEKDSQIKSIIGRLMLVEEELRRDHPAMAEPLPEPKKRLLDAQERQLPPLGPTNPRVTLAPPWNGLAPPAPPPPPRLQITENGEFRNTADH

SEQ ID NO: 4756 - DNA, 1925 bp, Homo sapiens
gaatcaataggcaggagtcattttcaaatcaagaaagatcagaatttggtaacagactggatgagactgataaaggagagcgcccacaatgactctcagggttccctggaagggacgggggcgggcatactgcggtgctacagaaggtggcagcagcaggtcccagggctccagttacagcagctcagacctgcactcatgccaaggactctcacagaccctttccctgcaatgatttcactgagtgcagactccagcaggtgcgcccacagcgcagctcctgccctcaggacctctcaggcagttgggggcagaggcacctctgtgcaggggcctgtgttcactcttctgcaaatggcgagtggcaggctgggaatgaacctcagggctgtgccttccttaagcctggactgttccactgtatcaacatacctgcctcacacaaacaattctaccagcacgggatcagtaatatttcatacatcagaggtgtgtgagaaactaattttgcctggaagaggggtcagggcaggctacagagaggaaggtgtgcacaggtgaggccttgaggggttgggaggcagggaggggagctgctttccaggcaaagggaacgaggagaagatttccacataaagatctgggccttggcacctcactcctggcagcctgtctgtaattcactctggtcacccctctgtggagcagtgtgcctgcctcagtcatctctgttgatgatttaagcctagcagccttcagccaaatgtggcaactgtgtaagccaatacccagctagctcctggaccactcggatgcccatcaacatgtacgaggctggggttacttctcctgggatcccagaaatcctcagatttgcacgcaatgcaaatgggcattcgggggggcctgtgggtggtcccgattctgttcttgggagcgggagtgaaaagcaagcctgtcgtggggaaactggcaccttcactggtggccacgctgctggggctgggcgtgaagctgcctccggcccttggagaggagtgtgagggaagggaggcggcagtgctttttatacacaggagctggaggagggtgatggcagcttggaggaagtcatcactgccatggtaggggggaaatctggaaatattgggcatgtggccctccccttcccaccgtaaccccaagctcctcagcccacttctttccaccaggcacctttgggcttccctctaggtggaacagccaagtcctgagtctctttgctcagaagctcaagtgattcaatttcttttctccaaactttcccaagactgcaatacctcttggaaaggacgtgaccaaatgtggctgagacacactgggcagagccgcactactcatttatgcaaaaccattactctggccgccgcatcagtctcccttccccttttcagcaatcatgtatcccattagcctgtttgattgccgctgctcacaaaggggcgccttcgctgaaccgtcttcaatggcctctggatctctcccctgagagaagccggctaatttggaatgtggtcgtgtgtatgaatccgacacagcctcagtcacaatcgggtgtccttttctgtagctgctgtttatgatcactttgccttgcctctctgggagccataattcaccacatactggagataggctgggtgttcttttccccgtgaatcctggacaggatgtacacaaatgtgctagccccttcttggtgaccaggctaattcctcagtggcttggtggctgctgcctctcattagagggattccctaagcactatttgcttgacaaattttcaaggtttttaaaagcagaagcctttgctaattttcccaagttggcctaagagtccactgtgaactgcagcagaaattggggaaatttaataaatgttgatc

SEQ ID NO: 4757 - protein, 166 aa, Homo sapiens [sequence omitted]

SEQ ID NO: 4758 - DNA, 1925 bp, Homo sapiens
gaatcaataggcaggagtcattttcaaatcaagaaagatcagaatttggtaacagactggatgagactgataaaggagagcgcccacaatgactctcagggttccctggaagggacgggggcgggcatactgcggtgctacagaaggtggcagcagcaggtcccagggctccagttacagcagctcagacctgcactcatgccaaggactctcacagaccctttccctgcaatgatttcactgagtgcagactccagcaggtgcgcccacagcgcggctcctgccctcaggacctctcaggcagttgggggcagaggcacctctgtgcaggggcctgtgttcactcttctgcaaatggcgagtggcaggctgggaatgaacctcagggctgtgccttccttaagcctggactgttccactgtatcaacatacctgcctcacacaaacaattctaccagcacgggatcagtaatatttcatacatcagaggtgtgtgagaaactaattttgcctggaagaggggtcagggcaggctacagagaggaaggtgtgcacaggtgaggccttgaggggttgggaggcagggaggggagctgctttccaggcaaagggaacgaggagaagatttccacataaagatctgggccttggcacctcactcctggtagcctgtctgtaattcactctggtcacccctctgtggagcagtgtgcctgcctcagtcatctctgttgatgatttaagcctagcagccttcagccaaatgtggcaactgtgtaagccaatacccagctagctcctggaccactcggatgcccatcaacatgtacgaggctggggttacttctcctgggatcccagaaatcctcagatttgcacgcaatgcaaatgggcattcgggggggcctgtgggtggtcccgattctgttcttgggagcgggagtgaaaagcaagcctgtcgtggggaaactggcaccttcactggtggccacgctgctggggctgggcgtgaagctgcctccggcccttggagaggagtgtgagggaagggaggcggcagtgctttttatacacaggagctggaggagggtgatggcagcttggaggaagtcatcactgccatggtaggggggaaatctggaaatattgggcatgtggccctccccttcccaccgtaaccccaagctcctcagcccacttctttccaccaggcacctttgggcttccctctaggtggaacagccaagtcctgagtctctttgctcagaagctcaagtgattcaatttcttttctccaaactttcccaagactgcaatacctcttggaaaggacgtgaccaaatgtggctgagacacactgggcagagccgcactactcatttatgcaaaaccattactctggccgccgcatcagtctcccttccccttttcagcaatcatgtatcccattagcctgtttgattgccgctgctcacaaaggggcgccttcgctgaaccgtcttcaatggcctctggatctctcccctgagagaagccggctaatttggaatgtggtcgtgtgtatgaatccgacacagcctcagtcacaatcgggtgtccttttctgtagctgctgtttatgatcactttgccttgcctctctgggagccataattcaccacatactggagataggctgggtgttcttttccccgtgaatcctggacaggatgtacacaaatgtgctagccccttcttggtgaccaggctaattcctcagtggcttggtggctgctgcctctcattagagggattccctaagcactatttgcttgacaaattttcaaggtttttaaaagcagaagcctttgctaattttcccaagttggcctaagagtccactgtgaactgcagcagaaattggggaaatttaataaatgttgatc

SEQ ID NO: 4759 - protein, 166 aa, Homo sapiens [sequence omitted]

SEQ ID NO: 4760 - DNA, 827 bp, Homo sapiens
gtggcgtgctcgctttggccatccatgtccctcgtgttggacactagagctgtccccgatgtacccatactgacctggtcacgaatcgccttgagaggctggaaactcacccgcctcctttcccggactagggggaagtggggtgaaggaggcgtgcagggaggaacctgggggagggggtggcccgtctcccaggctgggcgtgggccgggcgaggtccccagcccaccgggccgtgccaacaatggcctgttgtagaaggaggcgggaaggaatgcggcctggggagctgggcggcggcggggcggggcccggccaagcggctgccttttacctggccaggtagctcgcatttcccggcaagcggcggcgcccgcagcacctgttgcccggtgcgcgggcggggaggacggcgggggacatggcctggtagagtcccctggggaaaccgtgctgagttcagtccggggcagggcagggcgagggagggaaggtccttccctggcgcccgcgcgggctgcggcagcatgaaaaagaagcagacggtgcagggcaccttcagcaaactcttcgggaagaagcacaccacgacccccagcacctccctctacgccaccaatccgccctggatcttcacccaggaggccccggaggaggggaccgggggcttcgatggcatctattatggagacaatcggtttaacacagtgagcgagtcaggaacagccacgctgaaagctcggccaagagtccggcccctgctgaccttccttccgctgactgagtttcattcttgttgcccaggctggagtggtacaatggcgtga

SEQ ID NO: 4761 - protein, 99 aa, Homo sapiens
MKKKQTVQGTFSKLFGKKHTTTPSTSLYATNPPWIFTQEAPEEGTGGFDGIYYGDNRFNTVSESGTATLKARPRVRPLLTFLPLTEFHSCCPGWSGTMA

SEQ ID NO: 4762 - DNA, 399 bp, Homo sapiens
tctcaccccccaagcggatactggtcttctcgtcggattgcccatgcacttgttgcagaaacagccaaggccctggctgtggagaatgctgaaggaagaagacgcagaagcaggacgaccctgaaagattcagcctcttcatcctcaaacaggtcgcttctcgggagttcttggtgttggaatattttacagcaaagcagtcgaccaggcctcctcttcccacctgtccagcagcatgaaagcagcatgattggccgaccgcaggagaagcccccagaaccaggcccccaactcagccatctgcggaggtcaagacctttcagctggatcatctgtcaacctcaccgccaccaggtgtgagcgacgtctcctcaccacagtgctgtgtggtctatacct

SEQ ID NO: 4763 - protein, 37 aa, Homo sapiens
MIGRPQEKPPEPGPQLSHLRRSRPFSWIICQPHRHQV

SEQ ID NO: 4764 - DNA, 399 bp, Homo sapiens; identical to SEQ ID NO: 4762

SEQ ID NO: 4765 - protein, 37 aa, Homo sapiens; identical to SEQ ID NO: 4763

SEQ ID NO: 4766 - DNA, 704 bp, Homo sapiens
ggggcagccgtgagcagcgggcacacgggcagccacgaaagcagcagcgagggtggtgcaaacacctcaaaactacaccgaatccagtagcgcctggcgcccccggcgcgcaaggccgcctctactccgcctcatctttgtcccaagtcctttcacagtctgccttcctcaaacggcccgatgcgcccccgtctttgccggagtaagcagaccgccagcagccggcccgcaggtcagtcgaccctctctggatgcaggtcgccgggaaaacccggagcggagcatccctcgggccgggaaacgccctcggcgcgcacccactggcgcgcatgctcagtccgcgcggcggctgcgagtaggaagctccgcgcggcggcgggggcggcgacggcgactggcgggtgggagtggaggcaccggctggcgggcgggggtacagggacggggcaggggctcccgctccaggttccttgaagcacttccgaccgcgaagcccggcgcgagaagcgagctaacccaagagccaacaacgagcgcggagagggcagcggactgagcggagccgccggccagagcgggctcggagcccgggtctccgccgctcgggacccggctaggcggcggcgggggcggcgatgttccactgcatccccctgtggcggtgcaaccgtcatgtggagagcatcgacaagcgccactgctcg

SEQ ID NO: 4767 - protein, 97 aa, Homo sapiens
MRPRLCRSKQTASSRPAGQSTLSGCRSPGKPGAEHPSGRETPSARTHWRACSVRAAAASRKLRAAAGAATATGGWEWRHRLAGGGTGTGQGLPLQVP

SEQ ID NO: 4768 - DNA, 704 bp, Homo sapiens; identical to SEQ ID NO: 4766

SEQ ID NO: 4769 - protein, 97 aa, Homo sapiens; identical to SEQ ID NO: 4767

SEQ ID NO: 4770 - DNA, 3092 bp, Homo sapiens
tgtcaggctgtggctctctttctcacagagaatgccagaggcactcgggaaggcatttgccagggctctgacagatgtaaagtaagccttatccatgttgtgttctcacctggacacctggaaggtgctcagtatagaaaagtcacgagctagatgagataccagcttgatgtcgactccctccccaacaatggctgcctgtcttcgtcttgatgcctgccagcaggaaagcactgtcttagaacctggctcacctgattttgccgatgagtcaactttgaagtgtgcctcattctggaaagtgaatcacgtaatcacaatggagtctccctcttgttgcccaggctggagtgcaatggtgtgatcttggctcactgcaacctccacctcccagtagatacggggtttcatcatgttggccaggctgatttcgaactcctgacctcaagagagctgcccgcctcgacttcccaaagtgctaggattacaggcatgagccatcacacccagcctcatatattgtattctgtatataattaagacctttccttttcaaggcaatatatataacaataaaaagatgaattaagtaagccctctgaattaatatattaagtggtccctcagaagggagaaattttgaaattaaatattatctaaagattttgatattcacttaatgggagtatctgaattaagtgtcacaactaaaatagtagagtggtcacattccctagcaccagttctcaaactttgttaaaaatgcagattcctgagctctatcattaaacatttttatttagaagtggggagtgtggccttcgtatttcagctgcttaactagtagcacagcgaagacggtataagggtctttggatcactttttgaaaagcatggtcttagagagaaggaacagcccacactcgttcacagtgtagcaacacgcgggaaagagaacagtcaaattgttttgatgatgacgaaaggaaatgcaggctttctagtatatacaaaacatattcaaaaatctagaagtttatcactaaggtttttggaagtaaatctacatttagcaactcaattttttagattttattctcaattatctggacatgagatttaggtctgtgattctcaggtcttcttagttatacatatcactcaaggagctatggactccaaatgacttatgtttgtgataaagcctcatttaccccacaataataggaaagctgctctgattttctgaagttagaaatgaaagattaagtaagtacatttgttatagtttaatattacacattgtatgatgaaaacattgtctcctacactgcctcctattatctggaaaattagtaatactaaagtgttctttcaaaaccagagacctaaatggctggaagcaataattgctagagctctccaccaagctttgactataaatatttggccatattgtgtgttagaaaatataagacacacttgctttcattttctgagcctgactcactgaattttcttgtccagattggttttcatctgtttattcctttagagcatagattagagtccattgtggttctcatctctgttatgcatgtttttttatgaataaaatgccaggcacacagagcatacatatgcacattttactacgagatagtaaaagctcaatgtgctgggactgcattcccaatgtgaccttattttcccactctttgcagttttaaaatgttacgttaatctggcgttctggacggggattttctcttctttacagtgagtcccagcagtatatagcggccatagaatagctaaacttgaagaggctttttggcaaagatttgaatatatgtcctttggccttttctggttcttgtctgtatttcataatacaaaactaatgaggatttcactttggtgaaatctgccttactaaatgatgcttgcaaataacacattcatttgttagcatttgggattctgattaaatcattttgctttagtagctgttaaagattatagtttgaaagaaaaaagtgttttggcattgagtactttgagacccctgtacagtgtaccaaaatctatgcaaattgttacgaggccttttaattacaggtgaaccccagcacttattatcatctgatgcacagattatgcacatgtcatatattggtaataaaatatcaaagttagactgacactcttaaagtgcttaacactgttttattggcttactagccctaactggattcattgcatccatttttttcattctgccacttaaaacatttgccacgttgttttattcatgcttttatcacagctttgtctgtaactacattgacttgattactcatattctatggcaattcctgacatttggcttatttttccactagcctccttacttttaaaaaccactccatctcatttttcaacaacctctgattatctcaaagttacctcggattatcctgacacgtccttcggcttctgaggatattgactcagtatttcaagactgaggtgactctgagacagaagacggagccagtggtgatgtgctcccttattcagactctttgaataatgctttttactcagctatggactctgctagaaagacactttaatatttttgccatttatatttttctgttgttgaaaaataatagaaaccagtgccttagttggtttaacaattcaacaaagttgttttcaaaagaagaaagaaaatgtaactccatttaggttgtctttcatttgcaaacactaactgaaacttgagttagggattgtataacttggaaacagtattaataaaatgaagtcattgtcatattaaaaatgtcctaatgttcactttaagtgtatttttaaaaacctcacaggcaatggtgtgaaagaaaccaaggagatgtttacattcattagttccactggaaaaaactggttaatgtaattgtatagatttttcccttcttgttttgtgtgctgtataacccagtctttgctttatgtacaaataccctggtttctaaatgctacttattttcttcagaaataaagtatgctttcaatttagt

SEQ ID NO: 4771 - protein, 64 aa, Homo sapiens
MSTPSPTMAACLRLDACQQESTVLEPGSPDFADESTLKCASFWKVNHVITMESPSCCPGWSAMV

SEQ ID NO: 4772 - DNA, 3092 bp, Homo sapiens
tgtcaggctgtggctctctttctcacagagaatgccagaggcactcgggaaggcatttgccagggctctgacagatgtaaagtaagccttatccatgttgtgttctcacctggacacctggaaggtgctcagtatagaaaagtcacgagctagatgagataccagcttgatgtcgactccctccccaacaatggctgcctgtcttcgtcttgatgcctgccagcaggaaagcactgtcttagaacctggctcacctgattttgccgatgagtcaactttgaagtgtgcctcattctggaaagtgaatcacgtaatcacaatggagtctccctcttgttgcccaggctggagtgcaatggtgtgatcttggctcactgcaacctccacctcccagtagatacggggtttcatcatgttggccaggctgatttcgaactcctgacctcaagagagctgcccgcctcgacttcccaaagtgctaggattacaggcatgagccatcacacccagcctcatatattgtattctgtatataattaagacctttccttttcaaggcaatatatataacaataaaaagatgaattaagtaagccctctgaattaatatattaagtggtccctcagaagggagaaattttgaaattaaatattatctaaagattttgatattcacttaatgggagtatctgaattaagtgtcacaactaaaatagtagagtggtcacattccctagcaccagttctcaaactttgttaaaaatgcagattcctgagctctatcattaaacatttttatttagaagtggggagtgtggccttcgtatttcagctgcttaactagtagcacagcgaagacggtataagggtctttggatcactttttgaaaagcatggtcttagagagaaggaacagcccacactcgttcacagtgtagcaacacgcgggaaagagaacagtcaaattgttttgatgatgacgaaaggaaatgcaggctttctagtatatacaaaacatattcaaaaatctagaagtttatcactaaggtttttggaagtaaatctacatttagcaactcaattttttagattttattctcaattatctggacatgagatttaggtctgtgattctcaggtcttcttagttatacatatcactcaaggagctatggactccaaatgacttatgtttgtgataaagcctcatttaccccacaataataggaaagctgctctgattttctgaagttagaaatgaaagattaagtaagtacatttgttatagtttaatattacacattgtatgatgaaaacattgtctcctacactgcctcctattatctggaaaattagtaatactaaagtgttctttcaaaaccagagacctaaatggctggaagcaataattgctagagctctccaccaagctttgactataaatatttggccatattgtgtgttagaaaatataagacacacttgctttcattttctgagcctgactcactgaattttcttgtccagattggttttcatctgtttattcctttagagcatagattagagtccattgtggttctcatctctgttatgcatgtttttttatgaataaaatgccaggcacacagagcatacatatgcacattttactacgagatagtaaaagctcaatgtgctgggactgcattcccaatgtgaccttattttcccactctttgcagttttaaaatgttacgttaatctggcgttctggacggggattttctcttctttacagtgagtcccagcagtatatagcggccatagaatagctaaacttgaagaggctttttggcaaagatttgaatatatgtcctttggccttttctggttcttgtctgtatttcataatacaaaactaatgaggatttcactttggtgaaatctgccttactaaatgatgcttgcaaataacacattcatttgttagcatttgggattctgattaaatcattttgctttagtagctgttaaagattatagtttgaaagaaaaaagtgttttggcattgagtactttgagacccctgtacagtgtaccaaaatctatgcaaattgttacgaggccttttaattacaggtgaaccccagcacttattatcatctgatgcacagattatgcacatgtcatatattggtaataaaatatcaaagttagactgacactcttaaagtgcttaacactgttttattggcttactagccctaactggattcattgcatccatttttttcattctgccacttaaaacatttgccacgttgttttattcatgcttttatcacagctttgtctgtaactacattgacttgattactcatattctatggcaattcctgacatttggcttatttttccactagcctccttacttttaaaaaccactccatctcatttttcaacaacctctgattatctcaaagttacctcggattatcctgacacgtccttcggcttctgaggatattgacccagtatttcaagactgaggtgactctgagacagaagacggagccagtggtgatgtgctcccttattcagactctttgaataatgctttttactcagctatggactctgctagaaagacactttaatatttttgccatttatatttttctgttgttgaaaaataatagaaaccagtgccttagttggtttaacaattcaacaaagttgttttcaaaagaagaaagaaaatgtaactccatttaggttgtctttcatttgcaaacactaactgaaacttgagttagggattgtataacttggaaacagtattaataaaatgaagtcattgtcatattaaaaatgtcctaatgttcactttaagtgtatttttaaaaacctcacaggcaatggtgtgaaagaaaccaaggagatgtttacattcattagttccactggaaaaaactggttaatgtaattgtatagatttttcccttcttgttttgtgtgctgtataacccagtctttgctttatgtacaaataccctggtttctaaatgctacttattttcttcagaaataaagtatgctttcaatttagt

SEQ ID NO: 4773 - protein, 64 aa, Homo sapiens; identical to SEQ ID NO: 4771

SEQ ID NO: 4774 - DNA, 324 bp, Homo sapiens
atgtgggtcctcagtaaggccccacctttgggccagggaggccctgaaggctgggggacaggctgccagtcccgtggaccagaatggggactcgtggtgcctgttctgggcacacccatggcagcccatggaccaattagcatgtacttcctcccctctgaggtccgtaaaagccctgggctcagtcagagcagggcaaaggacggccagaggacaaagggagacatgggacctgatgaccagctgcagaaaggagtaccctctctgctgagagttggagacaatgccatgaccagctgcagagaagagtacactctctgctaa

SEQ ID NO: 4775 - protein, 107 aa, Homo sapiens [sequence omitted]

SEQ ID NO: 4776 - DNA, 769 bp, Homo sapiens
atgaggactaatctcagtcatgactatgataatctcaacggtactatggggggcattttcaatgaattggctctcagtattttggctttaagcttctgtttccatctttatattatcaagaattgttcagttggtggtttccgcttttccgtcttcctcattctctctttgccagctgccatccacatcaaccctgaggattgggaaggaattatacataccaggaggcaaggagcactgggggccctcctgggactgcctatcacagcgtccttaaaggttttcactctcctaggatgacccaggtatagaatctgcccctatggttcagctccaccctctcacctgtctcttgagagcattgtgaagttctgagacacagcaaggacagaaacagagggcatggaagatgctttcaaagatcagatccagagcctgacaagtttatttacttggagaagcagattctaggttctagaaaagaaggctgaaaatacaactttaagggaaaggataatctgatgactaattctcatttatcaaaaagccactttgccttagatctatctctataaactccatgcttcaccataaaatccttctaactttattgaaaaaagggggccacctggcaaataacaccaagagtattatttctgggttcatttaacccaacgacaattatttatcttactaaaatccatttctaggtctacaaacctattgtgtagttcatgaatacataggctttagtcctagatagttggag

SEQ ID NO: 4777 - protein, 99 aa, Homo sapiens
MRTNLSHDYDNLNGTMGGIFNELALSILALSFCFHLYIIKNCSVGGFRFSVFLILSLPAAIHINPEDWEGIIHTRRQGALGALLGLPITASLKVFTLLG

SEQ ID NO: 4778 - DNA, 513 bp, Homo sapiens
atggaggtaggaggctggaaaaaggactttatggtccatactggtgtggagcactcggtagtaaatcaagcaatttggctattgtctaaaaattatgtcaatataattggagctacaggaataacagaaaagaggccttatttcaaatctaaaatatgtgtccaacatgaatttttatatttgccaaattgtctggtgcccttgttaggaagagatttgctccagaaattgcaagcacaaatctcctttacactagaaggggacatgactctaaacctaggtcaaagaaaagccatcataatgacgcttactgtcccaacaacagaggaatggagactctatgagagatgcaaaatttgtaaagatgcattttgccagtgggaaaatgaggcaatgtataaggaattatttctcaagctgccaggggtcttggtggaagacaatcccccggggctagccataaatcaggcacccgtagtggtggaactgctgtggggcacttacccagtgtga

SEQ ID NO: 4779 - protein, 170 aa, Homo sapiens [sequence omitted]

SEQ ID NO: 4780 - DNA, 429 bp, Homo sapiens
tgccttgggtctcatgtcccactgcattgtcatcttgaagatttgtcacactttgagagaaaaacttgttgccatgacaatgggctcagaggctgaaaagaagacttcaaccactgtcagcagcatcattgtggtggccaagtggatcatccccagagtagatgatgttgtgaaatcagtgtaccatctgttaagcaccaagctcctggatgctccatcagcagagagcagagaagagaagcaactggatatccaagagaagcagcttgacttcaaagagacaacttgacaacgtggcttcagagaggagtctggccaaggactgctgaactccaggggaggattgccctcccactccatctgctttccagctcccctccccacagagagccattttcatcagcaataaaatcctccacattcaccacc

SEQ ID NO: 4781 - protein, 71 aa, Homo sapiens
MTMGSEAEKKTSTTVSSIIVVAKWIIPRVDDVVKSVYHLLSTKLLDAPSAESREEKQLDIQEKQLDFKETT

SEQ ID NO: 4782 - DNA, 551 bp, Homo sapiens
gaaaggaacgatgtggacctgacctcaaagaaatccattggagaatatgacagatttagatttaatgatcaactttacttttcctatacagatgggaaaacagcctgcaaaaatgttaagtagcttcctcaggatcaagtactattggagccagcattggtggtcaatcctgtatagaaatgacttcagttgtagatctgtgaccttccttacttaccttcctctaccaaagtgggtcaaccaaaaccgcatggcgtactactctctgaagcctctactaccctgctcctccgtgttgacatgtggtcaggcaagccaggacttactcacatcagctacatcagttactgggatggagaaaattgaagcctagaaagatcaagaaactttctccaggccataaatagaggaatcaggattcaaatcagatagaccccagggcttgttctcttcaacaccacattaccctacattattattcaattattaaataaaaccttgcattagtggcatttccaaatgcataacaaaaaaataaaaaaaagtaacac

SEQ ID NO: 4783 - protein, 108 aa, Homo sapiens
MTDLDLMINFTFPIQMGKQPAKMLSSFLRIKYYWSQHWWSILYRNDFSCRSVTFLTYLPLPKWVNQNRMAYYSLKPLLPCSSVLTCGQASQDLLTSATSVTGMEKIEA

SEQ ID NO: 4784 - DNA, 551 bp, Homo sapiens; identical to SEQ ID NO: 4782

SEQ ID NO: 4785 - protein, 108 aa, Homo sapiens; identical to SEQ ID NO: 4783

SEQ ID NO: 4786 - DNA, 471 bp, Homo sapiens
atggctgagtttgtctttggtcaaaaggggaggatgataagtgaaaaaaccctgcctgaaaactttcatgatccaatggtgtttcacatggaagaggaccaggaggagctcatctttgggcatggtgacacataccttcactgcattgaggtgcacagccacacccttattcagctggagagttggttcacagctacaggccagactcatgtgactgtagttggaccacatagggcaaggcagtggctgctgcacatgttctattatgtggggagccaggactcctgtcgtcacaatcaaggcctcaagatgctggagcgtgtccggagccagcccctgaccaaccatgatctggtcgcctccattagtgtgccaccgtacaccagagacctgtctttggcctccaggataagtggaaccgtctgtcttagcgtacctcagcctttcccttaccaagtgattggtcgttag

SEQ ID NO: 4787 - protein, 156 aa, Homo sapiens
MAEFVFGQKGRMISEKTLPENFHDPMVFHMEEDQEELIFGHGDTYLHCIEVHSHTLIQLESWFTATGQTHVTVVGPHRARQWLLHMFYYVGSQDSCRHNQGLKMLERVRSQPLTNHDLVASISVPPYTRDLSLASRISGTVCLSVPQPFPYQVIGR

SEQ ID NO: 4788 - DNA, 3304 bp, Homo sapiens
ctataattttaattatagctgtaaagtcccttttcctatataatatattcaaaggttgcaggcatttgggtgttgacatctttgatgggcacattgtgtctaccacaggctatagaaagaacagagaaatttgtccaagataagatgattaggttttgtctagataggggcccttgctatgggccctcagtttttaccttaatgtaacagaacatgagaggagctttgacacccaccccaaaagagtcaacttcattatgctggcaaaggcatgggtacaacctgctctgtgatctaccttctgaaccacacaagcttgtcctgaacgaggttggggctgagtctgttgataacagacccccatttttgggcagaaaaaacagattctgtatgatctacagtatttaacattgtggcaaataaattataaaggaaaaatggaatctcaagtagttacagtctcttggtgtctttcaacattggttttattttgaagtcattttcacccagcattgcaagtttagcagacctcaaaacagaatgccaaagtgatcttaaaattcaaaaatgagtttactttctttgttaaagttctcttttgatgcatatcccccattcatggaatggaagcattatcttgggtgcagcattacacgtagagttaaaatgtggaaacaacccaaacatcctgatatggtttggctctgtgtcaccacccaaatctcatcttgaattgtactctcataattcccatgtgttgtgggaggaacccagtgggagataatttgaatcatgggggcagtttccctcatactgttctcatggtagtgaataactctcacaagacctggtggttttatcaggggtttccgcttttgcatcttactcattttctcttgcggccgccatgtaagaagtgcctttcacctcctgccatgattctgaggcctccccagccatgtggaactgtaagtccaattaaacccctttttttccccagtctcaggtacgtcttttatcagcagcgtgaaaatggactaatacagtaaattggtaccagtagagcaggtgttgctgcaaagataccgggaaatgtggaagcaactttggaacttggtaacaggcagagattggaacagtttggagggctcagaagaagacaggaaaatgggaaagtttggaacttccttgagacttgttgaatggctttgacaaaaatactgataatgatatggacaatgaaatctagactgaggtggtctcaggtggagatgaggaacctgttgagaactggagcaaaggtgactcttgttatgatttagcaaagagactggcggcattttgcccctgccctggagatttgtggaactctgaacttgagagagatgattaagggtatctggtggaagaaatttctaagcagcaaagcattcaagaggtgactcaagtgttgttaaaggcattcagttttaaaagggaagcagagcattaaaattcagaaaattagcagcttgacaatgcgatagaaaagaaaatcctattttctgaggagaaattcaagctggctgtagatatttgcataagtaacaaggaactgaatgttaatttccaagacaatggggaaaatgtctccagggcatgtcagagacatttgtggcagcctcttctatcacagacctggaggtctaggaagaaaaaatggtaaaaatggttttgtgggcaaggcctagggtccttgtgctgtgtgcagtctaaggacttggtgccctgtttcctagccactccggccatggctgaaaggggccaacatgaagctcaggccatggcttcagagggtgaaagccttaagccttggcaacttccatgtgatgttgagcatgtgggtgcacagaagtcaagaaatggggtttgggaacctctgtctagatttcagaagatgtatggaaatgcctggatgcccaggcagaagtttgctgcaggggcggggctctcatggagaacctcggctagggcagtgcagaagggaaatgtggggttggagccccctcacagagtccctactgggacaccgcctagtggagctgtgagaagaggaccactgtcctccagaccccagaatggtagatcgacttacagcttgtaccaggtgcctggaaaagctgcagatactcaacaccagcccatgaaagcagccaggatggaggctgtaccctgaaagccacagggccagagctgcccaagaccatgggaagccacctcttgcatcagcgtgacctggatgtgagacctggagtaaaaggagatcattttggagctttaaaatttgactgccccactggattttggacttccatgggccctgtaacccctttgttttggccaatttctcccatttggaatggctgtatttacccaatacctgtaccctcattgtatctaggaagtaactagcttgcttttgattttacaggctcataagtggaagggacttgccttgtctcagatgagacttttgaactgtggacttttgggttaatgctgaaatgatttaagactttggggtactgttgggaatgcatgattggttttgaaatgtgaggacataagatttggaggagccaggggtgggatgatatggtttggctctgtgtccccacccaaatttcatcttgaattatactcccataattcccatgtgttatacgtgggacctggtgggagataatttgaatcatgggggtggtttcccccatactgttctcatggtagagaataagtctcatgagatctgatggtttcatcagggggttccgcttttgcatcttactcatttctcttgctgccaccctgtaagaagtatttttaacctaccgccatgattctgaggcctccccagccatgtggaactataagtccaattaaacctctttttcttggcttaatttcttgggtatgtctttatcagcagtgattctattcctatgaaatgtctagaacaggaaaatctatgagacataaagtaattaagtggctgttcaggggatacaggaataggggataataactaaagggttgggagggtgtttttgaaatgctaaaatattctgaagtttactgtggttatggttgcacatacttatgaatatacctaaaaatgttgaattgtacattttaagtagatgaattgtatctaatttgaaccatatctcagtaaagatataaaaatgtttttgggtactaagactaaactagaaagaacataagaggaaatacatattatataagaagaaaagagtaaaaataa

SEQ ID NO: 4789 - protein, 141 aa, Homo sapiens
MAERGQHEAQAMASEGESLKPWQLPCDVEHVGAQKSRNGVWEPLSRFQKMYGNAWMPRQKFAAGAGLSWRTSARAVQKGNVGLEPPHRVPTGTPPSGAVRRGPLSSRPQNGRSTYSLYQVPGKAADTQHQPMKAARMEAVP

SEQ ID NO: 4790 - DNA, 3304 bp, Homo sapiens; identical to SEQ ID NO: 4788

SEQ ID NO: 4791 - protein, 141 aa, Homo sapiens; identical to SEQ ID NO: 4789

SEQ ID NO: 4792 - DNA, 1423 bp, Homo sapiens
atgccagaatctcctaaagctaagataagtgcggtcaaagagagggaatccgaacccaagaaaatgagcacccccacccccaccgggccatgcctaaaactgagctgtcttccagcaaacccggcgccgtcctttcgggaagccgcgatggcaaacgtcgccctgggccttcggaggatcaagaaaaaacgtcggcgagaaagggctggacgcaaggctgggggcgattttcgggatctctctctgcccctggcaagatctctcccgcctgaaagccgccgacccgcccgtcgggcaaactgtcctgattccttccgccgcgttttggtaaaccacttggcgcaaaaacgatccccgacgcctgcccggtacaaagcagttcggcttgcggagcgcgaaagggaggtgcgcacgccctctggcggcgcggcccccggcagcaccggggcaataaatcagggccggcgaaggaaagacgcggcgcgccggcttccgaaccgcaacttgctgcgagacctgtcacttccccgcggtgcccagtcctcgcccctccctggcgctcgcgcctcctcttttcttcctgctcctcagcacggagctcccctcgacgttgctcacgtgccagactcgggaccgcgagcggcgtccgcacccgcacgcacacccggccacgctcgcactcgcgcggccgcggggccggctgcttacctccggggcctcatggtcgcgtcgctagcctgggtccggcggcacgcgcacacctgcccgccgccgctaccggccgcgtcattggctgccggcgccgagcgcgcgagattgaaccttccattcattccagggccgggcgggcgagcgcggccgcggtggagctttaccgcgggcgcccccgaacccccgaagcgcgtccccgcgcaggccgtgggcgcgcacggccgctgccgccgtttgttctggtggaggctgcgagtgcctgggcctgtgactcccggctctccgcgcgcagcatgccctggacatcattccgaacagcacaattcaagggtggctgaaacaacaaaaatgtaacgtcttacagatctgaaggcttccgggtcgattctggactgtgatgagaatctgtgccaagcctctctcctggcttctggtagactcgggcattccttagcttgtaaatggctgctgcttgtgtcatcacattgtcttccctttctacttatctgtccccatgccccaatttttccttttcaggacaccagtcagattaggacccaccctaatgatctcatcttaacttgattaactacaaggaccctatttttaagtacacatttacagagactggggggtaggacttcaacatctttttggagggatgcagttcaacccataacaagaatcattgttagaaatgattttgcttctt

SEQ ID NO: 4793 - protein, 354 aa, Homo sapiens
MPESPKAKISAVKERESEPKKMSTPTPTGPCLKLSCLPANPAPSFREAAMANVALGLRRIKKKRRRERAGRKAGGDFRDLSLPLARSLPPESRRPARRANCPDSFRRVLVNHLAQKRSPTPARYKAVRLAEREREVRTPSGGAAPGSTGAINQGRRRKDAARRLPNRNLLRDLSLPRGAQSSPLPGARASSFLPAPQHGAPLDVAHVPDSGPRAASAPARTPGHARTRAAAGPAAYLRGLMVASLAWVRRHAHTCPPPLPAASLAAGAERARLNLPFIPGPGGRARPRWSFTAGAPEPPKRVPAQAVGAHGRCRRLFWWRLRVPGPVTPGSPRAACPGHHSEQHNSRVAETTKM

SEQ ID NO: 4794 - DNA, 1423 bp, Homo sapiens
atgccagaatctcctaaagctaagataagtgcggtcaaagagagggaatccgaacccaagaaaatgagcacccccacccccaccgggccatgcctaaaactgagctgtcttccagcaaacccggcgccgtcctttcgggaagccgcgatggcaaacgtcgccctgggccttcggaggatcaagaaaaaacgtcggcgagaaagggctggacgcaaggctgggggcgattttcgggatctctctctgcccctggcaagatctctcccgcctgaaagccgccgacccgcccgtcgggcaaactgtcctgattccttccgccgcgttttggtaaaccacttggcgcaaaaacgatccccgacgcctgcccggtacaaagcagttcggcttgcggagcgcgaaagggaggtgcgcacgccctctggcggcgcggcccccggcagcaccggggcaataaatcagggccggcgaaggaaagacgcggcgcgccggctcccgaaccgcaacttgctgcgagacctgtcacttccccgcggtgcccagtcctcgcccctccctggcgctcgcgcctcctcttttcttcctgctcctcagcacggagctcccctcgacgttgctcacgtgccagactcgggaccgcgagcggcgtccgcacccgcacgcacacccggccacgctcgcactcgcgcggccgcggggccggctgcttacctccggggcctcatggtcgcgtcgctagcctgggtccggcggcacgcgcacacctgcccgccgccgctaccggccgcgtcattggctgccggcgccgagcgcgcgagattgaaccttccattcattccagggccgggcgggcgcgcgcggccgcggtggagctttaccgcgggcgcccccgaacccccgaagcgcgtccccgcgcaggccgtgggcgcgcacggccgctgccgccgtttgttctggtggaggctgcgagtgcctgggcctgtgactcccggctctccgcgcgcagcatgccctggacatcattccgaacagcacaattcaagggtggctgaaacaacaaaaatgtaacgtcttacagatctgaaggcttccgggtcgattctggactgtgatgagaatctgtgccaagcctctctcctggcttctggtagactcgggcattccttagcttgtaaatggctgctgcttgtgtcatcacattgtcttccctttctacttatctgtccccatgccccaatttttccttttcaggacaccagtcagattaggacccaccctaatgatctcatcttaacttgattaactacaaggaccctatttttaagtacacatttacagagactggggggtaggacttcaacatctttttggagggatgcagttcaacccataacaagaatcattgttagaaatgattttgcttctt

SEQ ID NO: 4795 - protein, 354 aa, Homo sapiens; identical to SEQ ID NO: 4793

SEQ ID NO: 4796 - DNA, 135 bp, Homo sapiens
atggatgactttgaggggtttgagatttcagtggatgaagcaactgaagatgtggtagaaatagcaagacaactaaaattagaattggaatgtgaagatgtgactgaattactgcaatcctatgataaagcttga

SEQ ID NO: 4797 - protein, 44 aa, Homo sapiens [sequence omitted]

SEQ ID NO: 4798 - DNA, 531 bp, Homo sapiens
cggacgcgtgggttcgaacgttcggactgaggtttttctgcctgaagaagcgtcatacggaccggattgttttcgctggcccagtgtccccggagcttgtgtgcgatacagagagcacctcggaagctgaggcagctggtacttgacagagaggatggcgctgtcgaccatagtctcccagaggaagcagataaagcggaaggctccccgtggctttctaaagcgagtcttcaagcgaaagaagcctcaacttcgtctggagaaaagtggtgacttattggtccatctgaactgtttactgtttgttcatcgattagcagaagagtccaggacaaacgcttgtgcgagtaaatgtagagtcattaacaaggagcatgtactggccgcagcaaaggtaattctaaagaagagcagaggttagaagtcaaagaacatattcttgaaagttatgatgcattcttttgggtggtaacagatcataaagacattttttacacatcagttaatatgggattattaaatattggctat

SEQ ID NO: 4799 - protein, 88 aa, Homo sapiens
MALSTIVSQRKQIKRKAPRGFLKRVFKRKKPQLRLEKSGDLLVHLNCLLFVHRLAEESRTNACASKCRVINKEHVLAAAKVILKKSRG

SEQ ID NO: 4800 - DNA, 234 bp, Homo sapiens
atgaaacaagcaaagatctgtcatgatgaacttaaaattgaagggaactataaatatttaatagaatggttgaagaaatttcagaagggatgtggcattaaatttttcaggatttctggttataaaacgtctgttgatcatgaagtagtggagaaattcactgacgagtttgcaaaggtcattgctgatgaaaatctgatgccagaccaactctataatgctgacaaaacataa

SEQ ID NO: 4801 - protein, 77 aa, Homo sapiens [sequence omitted]

SEQ ID NO: 4802 - DNA, 489 bp, Homo sapiens
atggaggaaccactttctagagagattaacataactaaaattgctaacatccaaaacaatgggaaaagggccttgaaggcatctcagaaggcttggagacagccccttccatcccagacccagaggtcaaggaggaaagaatggtttcaggggccaggcccaggaccctgctgctgtgctcagtctctggacaccgctcccccaatcttggcctctctggctccagtcttggctcaaagggcctcagatgcagctcaggcagccacttcagagagtgcaaaccataaaccatggcagcttccatatggtgttaagcttgctggtatacagaatgcaagaatgaagaaggcttggcagcttccaccaagatttcagaggatatatgggaaagcacagatgttcagacagaagcctgcttcagggatagatcccatgcagagagcctctatgagggaagtgctgagaagaaatgtagggttggaaccctga

SEQ ID NO: 4803 - protein, 162 aa, Homo sapiens
MEEPLSREINITKIANIQNNGKRALKASQKAWRQPLPSQTQRSRRKEWFQGPGPGPCCCAQSLDTAPPILASLAPVLAQRASDAAQAATSESANHKPWQLPYGVKLAGIQNARMKKAWQLPPRFQRIYGKAQMFRQKPASGIDPMQRASMREVLRRNVGLEP

SEQ ID NO: 4804 - DNA, 801 bp, Homo sapiens
atggaaaaattctcctccatgaaactggttcctggtgccaaaaaggttggagactgccccacttcgggagcccccggtgctccgggcccacctgactgggcgtcctctgagtcagggaggtgccagtgctgtggtccccgcgagcccaactgtcccctgacccccgggcttttccgcaccgtggagtcccccgacacgctggggccagtgaacccgggccggggcgcgcgttctccctcccggaccagctcccggcgctgggcccgcggccgagaaactaggtctgggccggccctgcggcggccgccgggcgcggcgagccccactttctcccggcaggaaggggggaggccgagagcatttcctgttgtgcagctgagccctgcggagacgtcattgcattcatgctccctcgggtgtcagcggacggggggccaaagttcaagccgcgtccagggcaggcagcgcgcggcggcgcggcggcgcggggcgggcggccagggctcccctctcccgctggcgctcccggcgcctccgtccccggccggcccagcgctgctaccggaggccagccctggggctccgcggggaagagctgctcttcctcccggaggaaaccgagctcgcaagcccagcgctcccagccgcagactgcaggctgccctcctccaccgcctggatttcccacggggaggaaaaggcgtgcgtttccaggtgtttggaggacgcactggccgggcgcactttcctcagcgtaattttgaacgcagtttccctaaagatgactcttttttccactag

SEQ ID NO: 4805 - protein, 266 aa, Homo sapiens
MEKFSSMKLVPGAKKVGDCPTSGAPGAPGPPDWASSESGRCQCCGPREPNCPLTPGLFRTVESPDTLGPVNPGRGARSPSRTSSRRWARGRETRSGPALRRPPGAASPTFSRQEGGRPRAFPVVQLSPAETSLHSCSLGCQRTGGQSSSRVQGRQRAAARRRGAGGQGSPLPLALPAPPSPAGPALLPEASPGAPRGRAALPPGGNRARKPSAPSRRLQAALLHRLDFPRGGKGVRFQVFGGRTGRAHFPQRNFERSFPKDDSFFH

SEQ ID NO: 4806 - DNA, 801 bp, Homo sapiens; identical to SEQ ID NO: 4804

SEQ ID NO: 4807 - protein, 266 aa, Homo sapiens; identical to SEQ ID NO: 4805

SEQ ID NO: 4808 - DNA, 831 bp, Homo sapiens
atgggcccggggcaggggccgccgggctcaggcgggagccgcgaggcccgggccgcagctgtctgcgtgcgggagccgcagcggccgcctcccctcccgggctgtggacgcaccgggttattcctggcagcgcctccccgaacagaagttactaggaggaggtgcccccggcacccccagttcggggaccgcggcccgccctcgccaggggattcaaataggtgtgggcagcggcgcgaagagcagctgccggtttcctggtgggccgcgctggaacctcggggcgagctgccaccttcagcctgtgcgcttccctctccacggaagggaccggagttgaaatcacaaccaaccctgggagagcggggccgggaggcgggggaatcccaggcgagtgggagccgaagctctgggcttcctccccggccgggcgacacccgggggacaccggggctctctcgggccgttaccctgcctatgtggactggtgtgcaccctcgggggaggttcctagggtgccacggtgcccgagcgcgacgagtgactgctggggaggggggccgggtcccggagcgcctcctccgggtggtctcccccccagcggggaccgcgcgcagcacctcgcgggcgccccagcccccgcaccctgcggagcagagccgagcgcccaggacgccgcgggccccagcggtcctccccaccccctggccgcgccgccgccctgcccggggcggagtaaacaagagacgcgcaagatttgacctggcgcgacccggctttctggccggggttccccctgagcaggtgactccgtgggaggggtggaaatga

SEQ ID NO: 4809 - protein, 276 aa, Homo sapiens [sequence omitted]

SEQ ID NO: 4810 - DNA, 831 bp, Homo sapiens; identical to SEQ ID NO: 4808

SEQ ID NO: 4811 - protein, 276 aa, Homo sapiens [sequence omitted]

SEQ ID NO: 4812 - DNA, 1803 bp, Homo sapiens
cgcactccggacccttcttcagattgcacaggaggaggcggtagcggaacctttctcctccgcctggttctcgcttccacccgggcccagttggggacggacgcactagaggcgacctaaacatggagacagcgggcgctgcaactgggcagccggcctctgggctggaggctccggggtccacgaatgaccggcttttcctggttaaaggtggaattttccttggtaccgttgctgcagcgggaatgctagctggatttattacaacattatcattggctaaaaagaaaagccctgaatggttcaataagggaagtatggccacggctgcattaccggaaagcgggtcttcccttgccttgcgagctctgggctggggctccctgtatgcatggtgtggggttggtgtgattagcttcgcagtctggaaagctttaggagttcacagtatgaacgactttcgaagtaaaatgcaatcaatatttccaacaattcccaagaactccgaatcggctgttgagtgggaggaaacattgaaatccaaatgagatgagcatggatgaatttcaaaatgcttgttacagaaaggggtggctctggagacaccatgacagcaaaaggactgggactgatttctcccaggaacatgggcagattgctgactgaaccagtgcactggatagcattcagcctcatcacaggagagtatgtgtgtgcgtgctgggggagggtaaagttttcccacagttaagaagactatttaaaaatagtaattacaggaataacttccttatgtggaggggaccccataggaaatgattctgtttgtaacagttgaagcaaatttcatactaaaaaagtttataataaaagtatgataagaaaatatttataaaacagaccccctaatagcaatagtactgcaatgtgtctaattaaaggagtttcaagagcctttcttgtcaatatatgacagaacttggaagtcttattctgattagccagactacaaagtgacagtcacctggtaagtcctgtatggtaggaagtgggtgtggctctcgggtcctaaatgtggtctgtgctttacagccatcacacacatgctagttatttacctgatgcccttgcttgaaggccctataaattcttatacttaaaacaaaaagccagtaatgagttgtgatcaccccaaaaggcacagttgggctaaaataatgatgatatcaggggtaaacatatttttttgagaagttggtctggatctctgaacactgacaatttgtcattttgtctcagttgtcaaagtaaaaaaagcccagttgtcatccgtcttcaatatttttaaccagaaagtcacctgagtacggagtcccaatataaagtatttgggaccacctccctaacaaagctgttagggtaaattctgtgtgcacgcccaactccctcctgtcttccacagtctcctacaaaaaaaacagatggagaataatgtctacatgcaattgtttttactgcaattgtattttaaaatattttcaagaagagaaatactttaatatgtcaatatgtccagagaaaaaacctgtagttaaatatcagttgtgcaatttcttcctacttgcctaggctctaattagtcagcaatcaggtttaataaaggacatttgaaatttctgttatcatgaaaccttttattctaagggagatttttaaatgaaatgacaagaacttaatgtaatacttttctctagaccatgttaccctgttaaaattgctgtattgttaatgaaacaggtgtaa

SEQ ID NO: 4813 - protein, 141 aa, Homo sapiens
METAGAATGQPASGLEAPGSTNDRLFLVKGGIFLGTVAAAGMLAGFITTLSLAKKKSPEWFNKGSMATAALPESGSSLALRALGWGSLYAWCGVGVISFAVWKALGVHSMNDFRSKMQSIFPTIPKNSESAVEWEETLKSK

SEQ ID NO: 4814 - DNA, 1608 bp, Homo sapiens
tgcgcactcgccacagagggctgaaggtgctgctaatggctctcttggcgttgcgacgtcctggtcagcagttttcttccattctctccctccatttcttgagtgagcagccatgagttggactgtgtctgttgtgcaggccagccggagagtgagctcggcaggagcgaatttcctgtccctgtgtcccagtcaggcagcgcgcatgccgctcaagggcgcctggctcttcacccccgtgaagagtgagcttgttgagcgcttcacttccgaggagcccgctcatcacagtaaggtctccatcataggaactggatcggtgggcatggcctgcgctaccagcatcttattaaaaggcttgagtgatgaacttgcccttgtggatcttgatgaaggcaaactgaagggtgagacaatggatcttcaacatggcagccctttcatgaaaacgccaaatattgtttgtagcaaagattaccttgtcacagcaaactccagcctagtgattatcacagaaggtgcacgtcaagaaaagggagaaacgcgccttaatttagtccagcgaaatgtggccatcttcaagttaatgatttccggtattgtccagtacagccccctctgcaagctgattattgtttccaatccagtggataacttaacttatgtagcctggaagttgagtgcattttccaaaaaccgtgttattggaagcggctgtaatctggatactgctcgtttttgtttcttgtttggacaaaagcttggtatccactctgaaaactgccacggatggatcctaggagagcatggagactcaagtgttcctgtatggagtggagtgaacatagctggtgtcgctttgaagaatctgaactctgatacaggaactgataaagatcctgaacaatggaaaaatgtccacaagtgattgctagtgcctatgagattattaaaatgaaaggttatacttcatgggccattggcctatctgtagctgatttaacagaaagtattttgaagaatcttaggagaacacatccagtttccaccatcattaggggtctctgtggaatagatgaagaagtattcctcaatattccttgtgtcctgggaaagctgacccctgaagaggaggcccccctgaaagagagtgcaaaaacactttgagaaattcagaaggaactgaagctttaaagttgtctaaaactaccattctgaaattattgaagagatcatagatatagggttatatatcaaaattttgaataaacttaaattcctaaaatatggaaacaggaaagtggataaaatgacttacctatttatttagtcctccagctcttttatttagcatccaggtgctgggtgatacttatttacaattcctaaagaaagtgtttttggtacccctgatgtagcagcacttgccttgttatatatgtagttggcatttggttcccaaaaagtaggatgtaagtatttattgtgttctagatattctgattattttcattagatacatgctttcttcttgctggcttatacctatgttcatttatatgctgtaaaaaagtggtaacttcctctacaatgtaaaaataaaagtat

SEQ ID NO: 4815 - protein, 271 aa, Homo sapiens [sequence omitted]

SEQ ID NO: 4816 - DNA, 675 bp, Homo sapiens
atggattccactggccagccggactggaacaacttctccccttataagtatctagaaggcgcccccggcacaccagcccctctcagcgcccccagcgggcccggcgcctggagggttaaggcgggcgcgtcccgcgggtgggcggggggggggggacgggaccggtgccgggagctccgctgccctggcgtcccctgggtccaggcccagtcgctccttgggcctctctcgcggggccgcctccgcctcctccttgccgagacgggcgtggggcacggggtcgccgcccggcggggagctcatccggcggcgcagacgccccgcggctccggggagggacttggcctgggccccggccccgcgctcctctggggaggagccgagaggctgcagctggcggcggcggccccgggcgggagggggtcccaggaagcggccaggccggagccccccactcggccgcagctgctggcctggccagaaccgagcgcgccctcccgccgccccccgcgcgcccggctccgcggaccaggacccctgggctccccggctgagggcgcggccgctccggagaggccgagcggggacgggcccgagatggcgcggggacccagcgctccggcggcgggcgccctgcacgcggcccgggcccggggacagccccggagctggtag

SEQ ID NO: 4817 - protein, 224 aa, Homo sapiens
MDSTGQPDWNNFSPYKYLEGAPGTPAPLSAPSGPGAWRVKAGASRGWAGGGGRDRCRELRCPGVPWVQAQSLLGPLSRGRLRLLLAETGVGHGVAARRGAHPAAQTPRGSGEGLGLGPGPALLWGGAERLQLAAAAPGGRGSQEAARPEPPTRPQLLAWPEPSAPSRRPPRARLRGPGPLGSPAEGAAAPERPSGDGPEMARGPSAPAAGALHAARARGQPRSW

SEQ ID NO: 4818 - DNA, 1437 bp, Homo sapiens
atgcgaccccgtgacagtgccgttctgctccgtgagagaaggctcaggggacagccgccgtgcgaccccgtgacggtgccgttctgctccgtgagagaatgctcaggggacagccgctgtgagacccccctgcaggctgacccctctgcaggcaccaggtgccgtccccacggggctcggtgcagcagccgggacgccccacacacagacgagccggctgcagacgtcacttgcagggacatgcccctccctcccgggtgcccagatgctaagaacggctcctgcagccccctgccctgctggagacgaggctccgccctgtgcccagatgctaagaacggctcctgcagccccctgccctgctggagacgaggctccaccctgtgcccagatgctaagaacggctcctgcagccccctgccctgctggagacgaggctccgccctgtgcccagatgctaaggacggctcctgcagccccctgccctgctggagacgaggctccgccctgtgcccagatgctaaggacggctcctgcagccccctgccctgctggagacgaggctccgccctgtgcccagatgctaagaacggctcctgcagccccctgccctgctggagacgaggctccgccctgtgcccagatgctaagaacggctcctgcagccccctgccctgctggagacgaggctccgccctgtgcccagatgctaagaacggctcctgcagccccctgccctgctggagacgaggctccgccctgtgcccagatgctaagaacggctcctgcagccccctgccctgctggagacgaggctccgccctgtgcccagatgctaagaacggctcctgcagccccctgccctgctggagacgaggctccgccctgtgcccagatgctaagaacggctcctgcagccccctgccctgctggagacgagcctccgccctgtgcccagatgctaagaacggctcctgcagccccctgccctgctggagacgaggctccgccctgtgcccagatgctaaggacggctcctgcagccccctgccctgctggagacgaggctccgccctgtgcccagatgctaaggacggctcctgcagccccctgccctgctggagacgaggctccgccctgtgcccagatgctaagaacggctcctgcagccccctgccctgctggagacgaggctccgccctgtgcccagatgctaagaacggctcctgcagccccctgccctgctggagacgaggctccgccctgtgcccagatgctaagaacggctcctgcagccccctgccctgctggagacgaggctccgccctgtgcccagatgctaagaacggctcctgcagccccctgccctgctggagacgagcctccgccctgtgcccagatgctaagaacggctcctgcagccccctgccctgctag

SEQ ID NO: 4819 - protein, 478 aa, Homo sapiens
MRPRDSAVLLRERRLRGQPPCDPVTVPFCSVRECSGDSRCETPLQADPSAGTRCRPHGARCSSRDAPHTDEPAADVTCRDMPLPPGCPDAKNGSCSPLPCWRRGSALCPDAKNGSCSPLPCWRRGSTLCPDAKNGSCSPLPCWRRGSALCPDAKDGSCSPLPCWRRGSALCPDAKDGSCSPLPCWRRGSALCPDAKNGSCSPLPCWRRGSALCPDAKNGSCSPLPCWRRGSALCPDAKNGSCSPLPCWRRGSALCPDAKNGSCSPLPCWRRGSALCPDAKNGSCSPLPCWRRGSALCPDAKNGSCSPLPCWRRASALCPDAKNGSCSPLPCWRRGSALCPDAKDGSCSPLPCWRRGSALCPDAKDGSCSPLPCWRRGSALCPDAKNGSCSPLPCWRRGSALCPDAKNGSCSPLPCWRRGSALCPDAKNGSCSPLPCWRRGSALCPDAKNGSCSPLPCWRRASALCPDAKNGSCSPLPC

SEQ ID NO: 4820 - DNA, 2818 bp, Homo sapiens
acgcgcgccctgcggagcccgcccaactccggcgagccgggcctgcgcctactcctcctcctcctctcccggcggcggctgcggcggaggcgccgactcggccttgcgcccgccctcaggcccgcgcgggcggcgcagcgaggccccgggcggcgggtggtggctgccaggcggctcggccgcgggcgctgcccggccccggcgagcggagggcggagcgcggcgccggagccgagggcgcgccgcggagggggtgctgggccgcgctgtgcccggccgggcggcggctgcaagaggaggccggaggcgagcgcggggccggcggtgggcgcgcagggcggctcgcagctcgcagccggggccgggccaggcgttcaggcaggtgatcggtgtggcggcggcggcggcggcggccccagactccctccggagttcttcttggggctgatgtccgcaaatatgcagaattaccggccgggtcgctcctgaagccagcgcggggagcgagcgcggcggcggccagcaccgggaacgcaccgaggaagaagcccagcccccgccctccgccccttccgtccccaccccctacccggcggcccaggaggctccccgcgctgcgggcgcgcactccctgtttctcctcctcctggctggcgctgcctgcctctccgcactcactgctcgcgccgggcgcgctccgccagctccgtgctccccgcgccaccctcctccgggccgcgctccctaagggatggtactgaatttcgccgccacaggagaccggctggagcgcccgccccgcggcctcgcctctcctccgagcagccagcgcctcgggacgcgatgaggaccttggcttgcctgctgctcctcggctgcggatacctcgcccatgttctggccgaggaagccgagatcccccgcgaggtgatcgagaggctggcccgcagtcagatccacagcatccgggacctccagcgactcctggagatagactccgtagggagtgaggattctttggacaccagcctgagagctcacggggtccatgccactaagcatgtgcccgagaagcggcccctgcccattcggaggaagagaagcatcgaggaagctgtccccgctgtctgcaagaccaggacggtcatttacgagattcctcggagtcaggtcgaccccacgtccgccaacttcctgatctggcccccgtgcgtggaggtgaaacgctgcaccggctgctgcaacacgagcagtgtcaagtgccagccctcccgcgtccaccaccgcagcgtcaaggtggccaaggtggaatacgtcaggaagaagccaaaattaaaagaagtccaggtgaggttagaggagcatttggagtgcgcctgcgcgaccacaagcctgaatccggattatcgggaagaggacacgggaaggcctagggagtcaggtaaaaaacggaaaagaaaaaggttaaaacccacctaaagcagccaaccagatgtgaggtgaggatgagccgcagccctttcctgggacatggatgtacatggcgtgttacattcctgaacctactatgtacggtgctttattgccagtgtgcggtctttgttctcctccgtgaaaaactgtgtccgagaacactcgggagaacaaagagacagtgcacatttgtttaatgtgacatcaaagcaagtattgtagcactcggtgaagcagtaagaagcttccttgtcaaaaagagagagagagagagagagagagaaaacaaaaccacaaatgacaaaaacaaaacggactcacaaaaatatctaaactcgatgagatggagggtcgccccgtgggatggaagtgcagaggtctcagcagactggatttctgtccgggtggtcacaggtgcttttttgccgaggatgcagagcctgctttgggaacgactccagaggggtgctggtgggctctgcaggggcccgcaggaagcaggaatgtcttggaaaccgccacgcgaactttagaaaccacacctcctcgctgtagtatttaagcccatacagaaaccttcctgagagccttaagtggttttttttttttgtttttgttttgttttttttttttttgttttttttttttttttttttacaccataaagtgattattaagctttcctttttactctttggctagctttttttttttttttttttaattatctcttggatgacatttacaccgataacacacaggctgctgtaactgtcaggacagtgcgacggtatttttcctagcaagatgcaaactaatgagatgtattaaaataaacatggtatacctacctatgcatcatttcctaaatgtttctggctttgtgtttctcccttaccctgctttatttgttaatttaagccattttgaaagaactatgcgtcaaccaatcgtacgccgtccctgcggcacctgccccagagcccgtttgtggctgagtgacaacttgttccccgcagtgcacacctagaatgctgtgttcccacgcggcacgtgagatgcattgccgcttctgtctgtgttgttggtgtgccctggtgccgtggtggcggtcactccctctgctgccagtgtttggacagaacccaaattctttatttttggtaagatattgtgctttacctgtattaacagaaatgtgtgtgtgtggtttgtttttttgtaaaggtgaagtttgtatgtttacttaatattacctgttttgtatacctgagagcctgctatgttctttttttgttgatccaaaattaaaaaaaaaaataccaccaacaaaaaaaaaaaaaaa

SEQ ID NO: 4821 - protein, 211 aa, Homo sapiens [sequence omitted]

SEQ ID NO: 4822 - DNA, 2749 bp, Homo sapiens
acgcgcgccctgcggagcccgcccaactccggcgagccgggcctgcgcctactcctcctcctcctctcccggcggcggctgcggcggaggcgccgactcggccttgcgcccgccctcaggcccgcgcgggcggcgcagcgaggccccgggcggcgggtggtggctgccaggcggctcggccgcgggcgctgcccggccccggcgagcggagggcggagcgcggcgccggagccgagggcgcgccgcggagggggtgctgggccgcgctgtgcccggccgggcggcggctgcaagaggaggccggaggcgagcgcggggccggcggtgggcgcgcagggcggctcgcagctcgcagccggggccgggccaggcgttcaggcaggtgatcggtgtggcggcggcggcggcggcggccccagactccctccggagttcttcttggggctgatgtccgcaaatatgcagaattaccggccgggtcgctcctgaagccagcgcggggagcgagcgcggcggcggccagcaccgggaacgcaccgaggaagaagcccagcccccgccctccgccccttccgtccccaccccctacccggcggcccaggaggctccccgcgctgcgggcgcgcactccctgtttctcctcctcctggctggcgctgcctgcctctccgcactcactgctcgcgccgggcgcgctccgccagctccgtgctccccgcgccaccctcctccgggccgcgctccctaagggatggtactgaatttcgccgccacaggagaccggctggagcgcccgccccgcggcctcgcctctcctccgagcagccagcgcctcgggacgcgatgaggaccttggcttgcctgctgctcctcggctgcggatacctcgcccatgttctggccgaggaagccgagatcccccgcgaggtgatcgagaggctggcccgcagtcagatccacagcatccgggacctccagcgactcctggagatagactccgtagggagtgaggattctttggacaccagcctgagagctcacggggtccatgccactaagcatgtgcccgagaagcggcccctgcccattcggaggaagagaagcatcgaggaagctgtccccgctgtctgcaagaccaggacggtcatttacgagattcctcggagtcaggtcgaccccacgtccgccaacttcctgatctggcccccgtgcgtggaggtgaaacgctgcaccggctgctgcaacacgagcagtgtcaagtgccagccctcccgcgtccaccaccgcagcgtcaaggtggccaaggtggaatacgtcaggaagaagccaaaattaaaagaagtccaggtgaggttagaggagcatttggagtgcgcctgcgcgaccacaagcctgaatccggattatcgggaagaggacacggatgtgaggtgaggatgagccgcagccctttcctgggacatggatgtacatggcgtgttacattcctgaacctactatgtacggtgctttattgccagtgtgcggtctttgttctcctccgtgaaaaactgtgtccgagaacactcgggagaacaaagagacagtgcacatttgtttaatgtgacatcaaagcaagtattgtagcactcggtgaagcagtaagaagcttccttgtcaaaaagagagagagagagagagagagagaaaacaaaaccacaaatgacaaaaacaaaacggactcacaaaaatatctaaactcgatgagatggagggtcgccccgtgggatggaagtgcagaggtctcagcagactggatttctgtccgggtggtcacaggtgcttttttgccgaggatgcagagcctgctttgggaacgactccagaggggtgctggtgggctctgcaggggcccgcaggaagcaggaatgtcttggaaaccgccacgcgaactttagaaaccacacctcctcgctgtagtatttaagcccatacagaaaccttcctgagagccttaagtggttttttttttttgtttttgttttgttttttttttttttgttttttttttttttttttttacaccataaagtgattattaagctttcctttttactctttggctagctttttttttttttttttttaattatctcttggatgacatttacaccgataacacacaggctgctgtaactgtcaggacagtgcgacggtatttttcctagcaagatgcaaactaatgagatgtattaaaataaacatggtatacctacctatgcatcatttcctaaatgtttctggctttgtgtttctcccttaccctgctttatttgttaatttaagccattttgaaagaactatgcgtcaaccaatcgtacgccgtccctgcggcacctgccccagagcccgtttgtggctgagtgacaacttgttccccgcagtgcacacctagaatgctgtgttcccacgcggcacgtgagatgcattgccgcttctgtctgtgttgttggtgtgccctggtgccgtggtggcggtcactccctctgctgccagtgtttggacagaacccaaattctttatttttggtaagatattgtgctttacctgtattaacagaaatgtgtgtgtgtggtttgtttttttgtaaaggtgaagtttgtatgtttacttaatattacctgttttgtatacctgagagcctgctatgttctttttttgttgatccaaaattaaaaaaaaaaataccaccaacaaaaaaaaaaaaaaa

SEQ ID NO: 4823 - protein, 196 aa, Homo sapiens
MRTLACLLLLGCGYLAHVLAEEAEIPREVIERLARSQIHSIRDLQRLLEIDSVGSEDSLDTSLRAHGVHATKHVPEKRPLPIRRKRSIEEAVPAVCKTRTVIYEIPRSQVDPTSANFLIWPPCVEVKRCTGCCNTSSVKCQPSRVHHRSVKVAKVEYVRKKPKLKEVQVRLEEHLECACATTSLNPDYREEDTDVR

SEQ ID NO: 4824 - DNA, 588 bp, Homo sapiens
atgcgaactgttgtttcccataacccatggttctcagaagaaggcacgctagacttagagctctgggaacaagtgggaagaaatcttaaaagacatcatgcacaagggcaacgggtcctagtaacatctttaatgttatgggcgttaggtagggctgctttgtccctgctctatacagaagagcctaaaaagggaagggaagaggaaccatcacctaccttactgccccctcctcctccctcagccctgccgttatgggtcctctttggattccagcatgacacatcaaaccataccacggcatggctgggacccaacctggtaccagaaatgaaggaaatgatcctgcaggacccacatccccagatgatgcagcttccttggacaacacaggccctggacattatgctgatggagacaactcagaaggctgagcaaatcctgctccagacacaaacactgttcactccagataatctgttccttgctattctctctgatgcaaagccagaacacaactgtaaccactgtgcctgtcaagcctgtcactgtgcacatctgtgtgctacttcaatcaacaaaacctga

SEQ ID NO: 4825 - protein, 195 aa, Homo sapiens
MRTVVSHNPWFSEEGTLDLELWEQVGRNLKRHHAQGQRVLVTSLMLWALGRAALSLLYTEEPKKGREEEPSPTLLPPPPPSALPLWVLFGFQHDTSNHTTAWLGPNLVPEMKEMILQDPHPQMMQLPWTTQALDIMLMETTQKAEQILLQTQTLFTPDNLFLAILSDAKPEHNCNHCACQACHCAHLCATSINKT

SEQ ID NO: 4826 - DNA, 588 bp, Homo sapiens; identical to SEQ ID NO: 4824

SEQ ID NO: 4827 - protein, 195 aa, Homo sapiens; identical to SEQ ID NO: 4825

SEQ ID NO: 4828 - DNA, 548 bp, Homo sapiens
aagaaaaggctctcttcctcggcgctgcctacggaggtggcagccatctcctcctcggcatcatggccgccctcagaccccttgtgaagcccaagatcgtcaaaaagagaaccaagaagttcatccagcaccagtcagaccaatatgtcaaaattaagcgtaactggcggaaacccagaggcactgacaacagggttcgtagaagattcaagggccagatcttgatgcccaacattggttatgggagcaacaaaaaaacaaagcacatgctgcccagtggcttccggaagttcctggtccacaacatcaaggagctggaagtgctgctgatgtgcaacaaatcttactgtgccgagatcgctcacaatgtttcctccaagaaccgcaaagccatcgtggaaacagctgcccaactggccatcagagtcaccaaccccaatgccaggctgcgcagcgaagaaaatgagtagacagctcgtgtgcacgttttctgtttaaataaatgtaaaaactgcaaaaaaaaaaaaaaaaaaaaagaaaagaaaact

SEQ ID NO: 4829 - protein, 135 aa, Homo sapiens
MAALRPLVKPKIVKKRTKKFIQHQSDQYVKIKRNWRKPRGTDNRVRRRFKGQILMPNIGYGSNKKTKHMLPSGFRKFLVHNIKELEVLLMCNKSYCAEIAHNVSSKNRKAIVETAAQLAIRVTNPNARLRSEENE

SEQ ID NO: 4830 - DNA, 548 bp, Homo sapiens; identical to SEQ ID NO: 4828

SEQ ID NO: 4831 - protein, 135 aa, Homo sapiens; identical to SEQ ID NO: 4829

SEQ ID NO: 4832 - DNA, 552 bp, Homo sapiens
atggcgagcatgcagattggacctagacatctagattttgataatgctatttttgcaggagtgcatttcaaacatacattgtttgtgaaagtgtctaatgaaggaagtcctgtactatcaacaattattacagtcattgtaagggtgagtcgcataaatgaactgaatccaattggaagtgcgtcagcatttaccttcagtgtatttgaaaatagtccagttgatacactagttggaaaagttacatttaccgatgcagactggccatttaataatatggaatataccattgttggaggcaatttgggaacacctcccaaattttacattgaaccagatacaggagtgataaagctattagattcactaaacagagaaattgaatcacagtacaagatagctgtaaaagtaacagacttggacaacgatgccatccctgaccccctcagacagagaagtggtactgctcaggtgaccatcagtgttctggggccctctgatccatccagaaaaccaggcattaagaaagacaaatttgaaactgaagtttga

SEQ ID NO: 4833 - protein, 183 aa, Homo sapiens
MASMQIGPRHLDFDNAIFAGVHFKHTLFVKVSNEGSPVLSTIITVIVRVSRINELNPIGSASAFTFSVFENSPVDTLVGKVTFTDADWPFNNMEYTIVGGNLGTPPKFYIEPDTGVIKLLDSLNREIESQYKIAVKVTDLDNDAIPDPLRQRSGTAQVTISVLGPSDPSRKPGIKKDKFETEV

SEQ ID NO: 4834 - DNA, 552 bp, Homo sapiens
atggcgagcatgcagattggacctagacatctagattttgataatgctatttttgcaggagtgcatttcaaacatacattgtttgtgaaagtgtctaatgaaggaagtcctgtactatcaacaattattacagtcattgtaagggtgagtcgcataaatgaactgaatccaattggaagtgcgtcagcatttaccttcagtgtatttgaaaatagtccagttgatacactagttggaaaagttacatttaccgatgcagactggccatttaataatatggaatataccgttgttggaggcaatttgggaacacctcccaaattttacattgaaccagatacaggagtgataaagctattagattcactaaacagagaaattgaatcacagtacaagatagctgtaaaagtaacagacttggacaacgatgccatccctgaccccctcagacagagaagtggtactgctcaggtgaccatcagtgttctggggccctctgatccatccagaaaaccaggcattaagaaagacaaatttgaaactgaagtttga

SEQ ID NO: 4835 - protein, 183 aa, Homo sapiens
MASMQIGPRHLDFDNAIFAGVHFKHTLFVKVSNEGSPVLSTIITVIVRVSRINELNPIGSASAFTFSVFENSPVDTLVGKVTFTDADWPFNNMEYTVVGGNLGTPPKFYIEPDTGVIKLLDSLNREIESQYKIAVKVTDLDNDAIPDPLRQRSGTAQVTISVLGPSDPSRKPGIKKDKFETEV

SEQ ID NO: 4836 - DNA, 4351 bp, Homo sapiens
ctggagaggttttgcaacagggccaagatctcacagtgttcctctctttaagtggggtctaggagaaacccagatttccctcaacagataatcattgtaactatcaatggcacgcccggaagctatgctgtcattctgaatagatctgtttgacttatcacttaaaagtaagtgttttcacacattaaaacagaaattcagattttaattaacccagtgaatttgcctgaaaatatgctccctggaacacaactaagtcgtgcttatgataaagatgtggctggaaagggagatgtctaccgttttctgaataaaacataagattttgccatcgatgcaagttctggtgtaatcactgctaccaaaatttttaattatgaaacagatccaataaggtttcttctgattgttgatactgggaggctctatagacatgttttgaccattaatattattgatgttcccgaatctccaaactgtactgctgatcccaaattttcttcaggcacagttggagagaatgaagaaacaaaatcatatgggattgcaagagttgggtctgctggatttctttttaaagggagacatgagtaattttacaacatggagaatccatttgatgaggaggctgaagacaaataaagttttccaccttatactgaaagcaacagatacaacaggccatttcctttggattctattaatgtgactgagaagaaatctgttggagaaattatagcaagagtaaaagcaacagatcgagatgaagatagcagtatcatttattcctttaagactcagcagaaaatgttttgtttggaccccttcacaggaacaatcactcttcttcagcctttgaatcttgacaacccaagtaactccaaaatctactctttggaaactgaggcaacagataatgggaataataccagcagctatacgtttacagtttttgtggagaatgtagatgatcctatttcctgtgatccaagtttttcaacaggagcagtcttccaaaattatagtaaactttaaaaagatacacgtggatctcaagaaggtcattttgacccgatttctactacaagcttggctgaaccagcataaactgctagagcagtaccaagatcgggatgtcttcctcttccatcatctgggctgtgggccttgggacataagagaagcgaggacaagaagtcactttctgtttaaagtagggcaactctgtgggtctctgtgaccaagaattaccaaagacattgacatgattttcaagctgctgatttgacacacacatattcaattcatttactgggtttaattatccagttgctataattaaccagaacaaatcactaaattagagaatctgcctacacatgttcagtttgaaacaaaggttcaaaataagcaagtcctagtcgcaccaaagttgttctataacatccttagaaagtcctgtaaagagacccttacaggactacccagtctagattgtgatacaatattcactggatttgatatccaagattcagctgcacagtaaacattaagccttttttcttttaaaaaaaagtattcgtagaatcacataacaggtaaagaaactatcagtagtctaaatgtgcatttatgttatttgattttgggattacacagaatcatagttggtagcattggaaggaggatgaggggcgatggttggaaaaaggcaagtagcatttgttgagcatttgagagatgtgttatgtatagtattctatttaatctctaaaactactctaagattggagaagtactttatccccattgtacaggtgagaatagtgatggagcaggaattcaagtgcatttcttcctgtcttcacaggctgtgctctacttttttgtacatgattgtgaaaggagacaaaaagcttcaatatcctaatataaaagaataaaagtagaaatcatatcttagtggccattgactttgagcaattatatcccattctatacagtagcccaaagtttaaaggtaggaatatcaacctgaattatgatggctcttttaaatgttgatgttaatgggagtaagtatttgtaggggttttttgtttctctgaaacaaatatgaagaagatcattttaaggaaaatacagcatggtaatttacggtaccagcatgaagcaagaagtgaaagaaagacatttgaatttaaattattgttcatgattgtgtaattgtataggtgtttcagtgtctgttcctgaaaacattcctgcatctacttttatatatatgattctttcaagagatccagatctaggacaggaagttgaagtaagtttttttattttcatctatttatttttgcccaacttggatgagaaaaaaaacccaaaagagtgctcaatttttaatgcacaaaatattattttgccaggctgttaattaaagtattctttatgtgtatggtagtcactgaagtgagagaggagacttaaacctttgggactagtaacatagaattaaaatgctctggcttcaaaatgaaagaaacagatttcaaatggtctgaaagcattgtgaaaaactagagcttacatctattggcatttatctgatgacatttacgagcatgaatagaatgttctttcattgttcattgccttttattcatcccaatcaggcatattttctttattatacatacaatgtgagtaaaggatattttaggccttcatattaattctggttttagcaataattcataaagaggagagaataaattttaggtgacaaaatggttacagcttaagtgggggtaaagaagaaatttaagataattcatcactgtgtattttctcagaaatttttctggtatacatatgacctttaatctaattatatttgtaagaaaaaaattgttttcttgatgatgcaatatatcataaatctgattaatacactggaatactctgcccgaaatttagtgagtcaaattctccatagaagagactaacttttttttctgtttgttcatgcttgctataaagatacacataaatatcacttgggaatatggttgaaactaaagtttgggagaaagctctgtggagaatttagtctatatgtaatttttctggttacctgattataatgagatattgattaatccacttgattacattttttgctcatgtgaatttcagactgaggacagattacaacacaggaacaatgtaattcctggcatatcaggttcagctcatctatttgtgtgaatgtgttagtgtgtgtgttgggaggatagagttaggatattggggtacgtgggtgtgtgcatttaaactagaatatgtccatatgtgtgaaggatgggtgtctacaaaagtatccattataattatgtgcttacatgcatagtttccattaccaaaaattaatgtaatatctagattttattgtaaaagtcattaggaaagagaaaacaaacatttggaaaatgatgatgtttaacaaatctaaaaccataataatgggggaaaacaaagagattattttcataaggacatttaagaggattttagtctaatataagccaacttttgttgttcacttacaggcaaatgaaagatggttaatatgaccatcaaaatggctattatgcattctttggaaatggcattgggtatcagatcttccaggttttattgcagggtttttttgagctggaatctggatgtgagtgtttataatataatttctttatgaaatccttttcaaaatctttaatatttgtcttgataacaatggagagaaacatgccgatgcccataaaaataatagctttgtccaaggcaatattttatttttgccatgcagaaaatcaattcagagatggaatcaaacggcttcttccaaataattcagttcatgtgcctcctttagatatacttcctgagtattcaagagggaacagcttttttttaatattggaaaaatctgtaaatgcaacactagaaagtaaactaattatgaaattattgaaagctattcaccaaaaatgctctaatattttagtataaaatgcattggaaaaaaatacaactaaaacgtgaaagaatatatagattatttttgaagtctggaactgaaagtaagttcagattttaatttataggcagtcttcgcaaaatttattttggtttacatcttgccaaatcgttgcatcaaagctgtcagttcagaattcatgcttactcaataatgtattaaccatgtttgtgtgtgtatgtgtgtgttgcagtttttaatattaaattcttcaattaatgccactgcctactttgctttggattcgca

SEQ ID NO: 4837 - protein, 75 aa, Homo sapiens
MFCLDPFTGTITLLQPLNLDNPSNSKIYSLETEATDNGNNTSSYTFTVFVENVDDPISCDPSFSTGAVFQNYSKL

SEQ ID NO: 4838 - DNA, 4637 bp, Homo sapiens
ttgcccaaagctctttgagatgtcaactaaaggaacatggcctcctcatctctaaatacacctggctaacagtaactatcaatggcacgcccggaagctatgctgtcattctgaatagatctgtttgacttatcacttaaaagtaagactcagataactgaaatgacctgaagagatggtatttcagaatatttgggtgaccacatttatttgttatgtgttttcacacattaaaacagaaattcagattttaattaacccagtgaatttgcctgaaaatatgctccctggaacacaactaagtcgtgcttatgataaagatgtggctggaaagggagatgtctaccgttttctgaataaaacataagattttgccatcgatgcaagttctggtgtaatcactgctaccaaaatttttaattatgaaacagatccaataaggtttcttctgattgttgatactgggaggctctatagacatgttttgaccattaatattattgatgttcccgaatctccaaactgtactgctgatcccaaattttcttcaggcacagttggagagaatgaagaaacaaaatcatatgggattgcaagagttgggtctgctggatttctttttaaagggagacatgagtaattttacaacatggagaatccatttgatgaggaggctgaagacaaataaagtagtacaccattgagacacagttatctggaccaaagaaaggagcaaactcttttggaacggatcctataagtgatgttgttagattaagaggtgaagatcccctggatttggatactggatatcatgccatttcctttggattctattaatgtgactgagaagaaatctgttggagaaattatagcaagagtaaaagcaacagatcgagatgaagatagcagtatcatttattcctttaagactcagcagaaaatgttttgtttggacccctaagctgagcctttcatcacgtggctgagtatacagacctgttctaagagtcagagaagctgaaagaagatccagcagtaggtcaagcaatttcagatttagctgaagctagttcacaccaacagtaacacagcagatcaacaaaaacatggtcacaggaacaatcactcttcttcagcctttgaatcttgacaacccaagtaactccaaaatctactctttggaaactgaggcaacagataatgggaataataccagcagctatacgtttacagtttttgtggagaatgtagatgatcctatttcctgtgatccaagtttttcaacaggagcagtcttccaaaattatagtaaactttaaaaagatacacgtggatctcaagaaggtcattttgacccgatttctactacaagcttggctgaaccagcataaactgctagagcagtaccaagatcgggatgtcttcctcttccatcatctgggctgtgggccttgggacataagagaagcgaggacaagaagtcactttctgtttaaagtagggcaactctgtgggtctctgtgaccaagaattaccaaagacattgacatgattttcaagctgctgatttgacacacacatattcaattcatttactgggtttaattatccagttgctataattaaccagaacaaatcactaaattagagaatctgcctacacatgttcagtttgaaacaaaggttcaaaataagcaagtcctagtcgcaccaaagttgttctataacatccttagaaagtcctgtaaagagacccttacaggactacccagtctagattgtgatacaatattcactggatttgatatccaagattcagctgcacagtaaacattaagccttttttcttttaaaaaaaagtattcgtagaatcacataacaggtaaagaaactatcagtagtctaaatgtgcatttatgttatttgattttgggattacacagaatcatagttggtagcattggaaggaggatgaggggcgatggttggaaaaaggcaagtagcatttgttgagcatttgagagatgtgttatgtatagtattctatttaatctctaaaactactctaagattggagaagtactttatccccattgtacaggtgagaatagtgatggagcaggaattcaagtgcatttcttcctgtcttcacaggctgtgctctacttttttgtacatgattgtgaaaggagacaaaaagcttcaatatcctaatataaaagaataaaagtagaaatcatatcttagtggccattgactttgagcaattatatcccattctatacagtagcccaaagtttaaaggtaggaatatcaacctgaattatgatggctcttttaaatgttgatgttaatgggagtaagtatttgtaggggttttttgtttctctgaaacaaatatgaagaagatcattttaaggaaaatacagcatggtaatttacggtaccagcatgaagcaagaagtgaaagaaagacatttgaatttaaattattgttcatgattgtgtaattgtataggtgtttcagtgtctgttcctgaaaacattcctgcatctacttttatatatatgattctttcaagagatccagatctaggacaggaagttgaagtaagtttttttattttcatctatttatttttgcccaacttggatgagaaaaaaaacccaaaagagtgctcaatttttaatgcacaaaatattattttgccaggctgttaattaaagtattctttatgtgtatggtagtcactgaagtgagagaggagacttaaacctttgggactagtaacatagaattaaaatgctctggcttcaaaatgaaagaaacagatttcaaatggtctgaaagcattgtgaaaaactagagcttacatctattggcatttatctgatgacatttacgagcatgaatagaatgttctttcattgttcattgccttttattcatcccaatcaggcatattttctttattatacatacaatgtgagtaaaggatattttaggccttcatattaattctggttttagcaataattcataaagaggagagaataaattttaggtgacaaaatggttacagcttaagtgggggtaaagaagaaatttaagataattcatcactgtgtattttctcagaaatttttctggtatacatatgacctttaatctaattatatttgtaagaaaaaaattgttttcttgatgatgcaatatatcataaatctgattaatacactggaatactctgcccgaaatttagtgagtcaaattctccatagaagagactaacttttttttctgtttgttcatgcttgctataaagatacacataaatatcacttgggaatatggttgaaactaaagtttgggagaaagctctgtggagaatttagtctatatgtaatttttctggttacctgattataatgagatattgattaatccacttgattacattttttgctcatgtgaatttcagactgaggacagattacaacacaggaacaatgtaattcctggcatatcaggttcagctcatctatttgtgtgaatgtgttagtgtgtgtgttgggaggatagagttaggatattggggtacgtgggtgtgtgcatttaaactagaatatgtccatatgtgtgaaggatgggtgtctacaaaagtatccattataattatgtgcttacatgcatagtttccattaccaaaaattaatgtaatatctagattttattgtaaaagtcattaggaaagagaaaacaaacatttggaaaatgatgatgtttaacaaatctaaaaccataataatgggggaaaacaaagagattattttcataaggacatttaagaggattttagtctaatataagccaacttttgttgttcacttacaggcaaatgaaagatggttaatatgaccatcaaaatggctattatgcattctttggaaatggcattgggtatcagatcttccaggttttattgcagggtttttttgagctggaatctggatgtgagtgtttataatataatttctttatgaaatccttttcaaaatctttaatatttgtcttgataacaatggagagaaacatgccgatgcccataaaaataatagctttgtccaaggcaatattttatttttgccatgcagaaaatcaattcagagatggaatcaaacggcttcttccaaataattcagttcatgtgcctcctttagatatacttcctgagtattcaagagggaacagcttttttttaatattggaaaaatctgtaaatgcaacactagaaagtaaactaattatgaaattattgaaagctattcaccaaaaatgctctaatattttagtataaaatgcattggaaaaaaatacaactaaaacgtgaaagaatatatagattatttttgaagtctggaactgaaagtaagttcagattttaatttataggcagtcttcgcaaaatttattttggtttacatcttgccaaatcgttgcatcaaagctgtcagttcagaattcatgcttactcaataatgtattaaccatgtttgtgtgtgtatgtgtgtgttgcagtttttaatattaaattcttcaattaatgccactgcctactttgctttggattcgc

SEQ ID NO: 4839 - protein, 70 aa, Homo sapiens [sequence omitted]

SEQ ID NO: 4840 - DNA, 4351 bp, Homo sapiens
ctggagaggttttgcaacagggccaagatctcacagtgttcctctctttaagtggggtctaggagaaacccagatttccctcaacagataatcattgtaactatcaatggcacgcccggaagctatgctgtcattctgaatagatctgtttgacttatcacttaaaagtaagtgttttcacacattaaaacagaaattcagattttaattaacccagtgaatttgcctgaaaatatgctccctggaacacaactaagtcgtgcttatgataaagatgtggctggaaagggagatgtctaccgttttctgaataaaacataagattttgccatcgatgcaagttctggtgtaatcactgctaccaaaatttttaattatgaaacagatccaataaggtttcttctgattgttgatactgggaggctctatagacatgttttgaccattaatattattgatgttcccgaatctccaaactgtactgctgatcccaaattttcttcaggcacagttggagagaatgaagaaacaaaatcatatgggattgcaagagttgagtctgctggatttctttttaaagggagacatgagtaattttacaacatggagaatccatttgatgaggaggctgaagacaaataaagttttccaccttatactgaaagcaacagatacaacaggccatttcctttggattctattaatgtgactgagaagaaatctgttggagaaattatagcaagagtaaaagcaacagatcgagatgaagatagcagtatcatttattcctttaagactcagcagaaaatgttttgtttggaccccttcacaggaacaatcactcttcttcagcctttgaatcttgacaacccaagtaactccaaaatctactctttggaaactgaggcaacagataatgggaataataccagcagctatacgtttacagtttttgtggagaatgtagatgatcctatttcctgtgatccaagtttttcaacaggagcagtcttccaaaattatagtaaactttaaaaagatacacgtggatctcaagaaggtcattttgacccgatttctactacaagcttggctgaaccagcataaactgctagagcagtaccaagatcgggatgtcttcctcttccatcatctgggctgtgggccttgggacataagagaagcgaggacaagaagtcactttctgtttaaagtagggcaactctgtgggtctctgtgaccaagaattaccaaagacattgacatgattttcaagctgctgatttgacacacacatattcaattcatttactgggtttaattatccagttgctataattaaccagaacaaatcactaaattagagaatctgcctacacatgttcagtttgaaacaaaggttcaaaataagcaagtcctagtcgcaccaaagttgttctataacatccttagaaagtcctgtaaagagacccttacaggactacccagtctagattgtgatacaatattcactggatttgatatccaagattcagctgcacagtaaacattaagccttttttcttttaaaaaaaagtattcgtagaatcacataacaggtaaagaaactatcagtagtctaaatgtgcatttatgttatttgattttgggattacacagaatcatagttggtagcattggaaggaggatgaggggcgatggttggaaaaaggcaagtagcatttgttgagcatttgagagatgtgttatgtatagtattctatttaatctctaaaactactctaagattggagaagtactttatccccattgtacaggtgagaatagtgatggagcaggaattcaagtgcatttcttcctgtcttcacaggctgtgctctacttttttgtacatgattgtgaaaggagacaaaaagcttcaatatcctaatataaaagaataaaagtagaaatcatatcttagtggccattgactttgagcaattatatcccattctatacagtagcccaaagtttaaaggtaggaatatcaacctgaattatgatggctcttttaaatgttgatgttaatgggagtaagtatttgtaggggttttttgtttctctgaaacaaatatgaagaagatcattttaaggaaaatacagcatggtaatttacggtaccagcatgaagcaagaagtgaaagaaagacatttgaatttaaattattgttcatgattgtgtaattgtataggtgtttcagtgtctgttcctgaaaacattcctgcatctacttttatatatatgattctttcaagagatccagatctaggacaggaagttgaagtaagtttttttattttcatctatttatttttgcccaacttggatgagaaaaaaaacccaaaagagtgctcaatttttaatgcacaaaatattattttgccaggctgttaattaaagtattctttatgtgtatggtagtcactgaagtgagagaggagacttaaacctttgggactagtaacatagaattaaaatgctctggcttcaaaatgaaagaaacagatttcaaatggtctgaaagcattgtgaaaaactagagcttacatctattggcatttatctgatgacatttacgagcatgaatagaatgttctttcattgttcattgccttttattcatcccaatcaggcatattttctttattatacatacaatgtgagtaaaggatattttaggccttcatattaattctggttttagcaataattcataaagaggagagaataaattttaggtgacaaaatggttacagcttaagtgggggtaaagaagaaatttaagataattcatcactgtgtattttctcagaaatttttctggtatacatatgacctttaatctaattatatttgtaagaaaaaaattgttttcttgatgatgcaatatatcataaatctgattaatacactggaatactctgcccgaaatttagtgagtcaaattctccatagaagagactaacttttttttctgtttgttcatgcttgctataaagatacacataaatatcacttgggaatatggttgaaactaaagtttgggagaaagctctgtggagaatttagtctatatgtaatttttctggttacctgattataatgagatattgattaatccacttgattacattttttgctcatgtgaatttcagactgaggacagattacaacacaggaacaatgtaattcctggcatatcaggttcagctcatctatttgtgtgaatgtgttagtgtgtgtgttgggaggatagagttaggatattggggtacgtgggtgtgtgcatttaaactagaatatgtccatatgtgtgaaggatgggtgtctacaaaagtatccattataattatgtgcttacatgcatagtttccattaccaaaaattaatgtaatatctagattttattgtaaaagtcattaggaaagagaaaacaaacatttggaaaatgatgatgtttaacaaatctaaaaccataataatgggggaaaacaaagagattattttcataaggacatttaagaggattttagtctaatataagccaacttttgttgttcacttacaggcaaatgaaagatggttaatatgaccatcaaaatggctattatgcattctttggaaatggcattgggtatcagatcttccaggttttattgcagggtttttttgagctggaatctggatgtgagtgtttataatataatttctttatgaaatccttttcaaaatctttaatatttgtcttgataacaatggagagaaacatgccgatgcccataaaaataatagctttgtccaaggcaatattttatttttgccatgcagaaaatcaattcagagatggaatcaaacggcttcttccaaataattcagttcatgtgcctcctttagatatacttcctgagtattcaagagggaacagcttttttttaatattggaaaaatctgtaaatgcaacactagaaagtaaactaattatgaaattattgaaagctattcaccaaaaatgctctaatattttagtataaaatgcattggaaaaaaatacaactaaaacgtgaaagaatatatagattatttttgaagtctggaactgaaagtaagttcagattttaatttataggcagtcttcgcaaaatttattttggtttacatcttgccaaatcgttgcatcaaagctgtcagttcagaattcatgcttactcaataatgtattaaccatgtttgtgtgtgtatgtgtgtgttgcagtttttaatattaaattcttcaattaatgccactgcctactttgctttggattcgca

SEQ ID NO: 4841 - protein, 75 aa, Homo sapiens; identical to SEQ ID NO: 4837

SEQ ID NO: 4842 - DNA, 4637 bp, Homo sapiens
ttgcccaaagctctttgagatgtcaactaaaggaacatggcctcctcatctctaaatacacctggctaacagtaactatcaatggcacgcccggaagctatgctgtcattctgaatagatctgtttgacttatcacttaaaagtaagactcagataactgaaatgacctgaagagatggtatttcagaatatttgggtgaccacatttatttgttatgtgttttcacacattaaaacagaaattcagattttaattaacccagtgaatttgcctgaaaatatgctccctggaacacaactaagtcgtgcttatgataaagatgtggctggaaagggagatgtctaccgttttctgaataaaacataagattttgccatcgatgcaagttctggtgtaatcactgctaccaaaatttttaattatgaaacagatccaataaggtttcttctgattgttgatactgggaggctctatagacatgttttgaccattaatattattgatgttcccgaatctccaaactgtactgctgatcccaaattttcttcaggcacagttggagagaatgaagaaacaaaatcatatgggattgcaagagttgagtctgctggatttctttttaaagggagacatgagtaattttacaacatggagaatccatttgatgaggaggctgaagacaaataaagtagtacaccattgagacacagttatctggaccaaagaaaggagcaaactcttttggaacggatcctataagtgatgttgttagattaagaggtgaagatcccctggatttggatactggatatcatgccatttcctttggattctattaatgtgactgagaagaaatctgttggagaaattatagcaagagtaaaagcaacagatcgagatgaagatagcagtatcatttattcctttaagactcagcagaaaatgttttgtttggacccctaagctgagcctttcatcacgtggctgagtatacagacctgttctaagagtcagagaagctgaaagaagatccagcagtaggtcaagcaatttcagatttagctgaagctagttcacaccaacagtaacacagcagatcaacaaaaacatggtcacaggaacaatcactcttcttcagcctttgaatcttgacaacccaagtaactccaaaatctactctttggaaactgaggcaacagataatgggaataataccagcagctatacgtttacagtttttgtggagaatgtagatgatcctatttcctgtgatccaagtttttcaacaggagcagtcttccaaaattatagtaaactttaaaaagatacacgtggatctcaagaaggtcattttgacccgatttctactacaagcttggctgaaccagcataaactgctagagcagtaccaagatcgggatgtcttcctcttccatcatctgggctgtgggccttgggacataagagaagcgaggacaagaagtcactttctgtttaaagtagggcaactctgtgggtctctgtgaccaagaattaccaaagacattgacatgattttcaagctgctgatttgacacacacatattcaattcatttactgggtttaattatccagttgctataattaaccagaacaaatcactaaattagagaatctgcctacacatgttcagtttgaaacaaaggttcaaaataagcaagtcctagtcgcaccaaagttgttctataacatccttagaaagtcctgtaaagagacccttacaggactacccagtctagattgtgatacaatattcactggatttgatatccaagattcagctgcacagtaaacattaagccttttttcttttaaaaaaaagtattcgtagaatcacataacaggtaaagaaactatcagtagtctaaatgtgcatttatgttatttgattttgggattacacagaatcatagttggtagcattggaaggaggatgaggggcgatggttggaaaaaggcaagtagcatttgttgagcatttgagagatgtgttatgtatagtattctatttaatctctaaaactactctaagattggagaagtactttatccccattgtacaggtgagaatagtgatggagcaggaattcaagtgcatttcttcctgtcttcacaggctgtgctctacttttttgtacatgattgtgaaaggagacaaaaagcttcaatatcctaatataaaagaataaaagtagaaatcatatcttagtggccattgactttgagcaattatatcccattctatacagtagcccaaagtttaaaggtaggaatatcaacctgaattatgatggctcttttaaatgttgatgttaatgggagtaagtatttgtaggggttttttgtttctctgaaacaaatatgaagaagatcattttaaggaaaatacagcatggtaatttacggtaccagcatgaagcaagaagtgaaagaaagacatttgaatttaaattattgttcatgattgtgtaattgtataggtgtttcagtgtctgttcctgaaaacattcctgcatctacttttatatatatgattctttcaagagatccagatctaggacaggaagttgaagtaagtttttttattttcatctatttatttttgcccaacttggatgagaaaaaaaacccaaaagagtgctcaatttttaatgcacaaaatattattttgccaggctgttaattaaagtattctttatgtgtatggtagtcactgaagtgagagaggagacttaaacctttgggactagtaacatagaattaaaatgctctggcttcaaaatgaaagaaacagatttcaaatggtctgaaagcattgtgaaaaactagagcttacatctattggcatttatctgatgacatttacgagcatgaatagaatgttctttcattgttcattgccttttattcatcccaatcaggcatattttctttattatacatacaatgtgagtaaaggatattttaggccttcatattaattctggttttagcaataattcataaagaggagagaataaattttaggtgacaaaatggttacagcttaagtgggggtaaagaagaaatttaagataattcatcactgtgtattttctcagaaatttttctggtatacatatgacctttaatctaattatatttgtaagaaaaaaattgttttcttgatgatgcaatatatcataaatctgattaatacactggaatactctgcccgaaatttagtgagtcaaattctccatagaagagactaacttttttttctgtttgttcatgcttgctataaagatacacataaatatcacttgggaatatggttgaaactaaagtttgggagaaagctctgtggagaatttagtctatatgtaatttttctggttacctgattataatgagatattgattaatccacttgattacattttttgctcatgtgaatttcagactgaggacagattacaacacaggaacaatgtaattcctggcatatcaggttcagctcatctatttgtgtgaatgtgttagtgtgtgtgttgggaggatagagttaggatattggggtacgtgggtgtgtgcatttaaactagaatatgtccatatgtgtgaaggatgggtgtctacaaaagtatccattataattatgtgcttacatgcatagtttccattaccaaaaattaatgtaatatctagattttattgtaaaagtcattaggaaagagaaaacaaacatttggaaaatgatgatgtttaacaaatctaaaaccataataatgggggaaaacaaagagattattttcataaggacatttaagaggattttagtctaatataagccaacttttgttgttcacttacaggcaaatgaaagatggttaatatgaccatcaaaatggctattatgcattctttggaaatggcattgggtatcagatcttccaggttttattgcagggtttttttgagctggaatctggatgtgagtgtttataatataatttctttatgaaatccttttcaaaatctttaatatttgtcttgataacaatggagagaaacatgccgatgcccataaaaataatagctttgtccaaggcaatattttatttttgccatgcagaaaatcaattcagagatggaatcaaacggcttcttccaaataattcagttcatgtgcctcctttagatatacttcctgagtattcaagagggaacagcttttttttaatattggaaaaatctgtaaatgcaacactagaaagtaaactaattatgaaattattgaaagctattcaccaaaaatgctctaatattttagtataaaatgcattggaaaaaaatacaactaaaacgtgaaagaatatatagattatttttgaagtctggaactgaaagtaagttcagattttaatttataggcagtcttcgcaaaatttattttggtttacatcttgccaaatcgttgcatcaaagctgtcagttcagaattcatgcttactcaataatgtattaaccatgtttgtgtgtgtatgtgtgtgttgcagtttttaatattaaattcttcaattaatgccactgcctactttgctttggattcgc

SEQ ID NO: 4843 - protein, 70 aa, Homo sapiens [sequence omitted]

SEQ ID NO: 4844 - DNA, 4009 bp, Homo sapiens
ggaccagggaaggatatgaggaagtgttctgaggacagaaaaacgggagaatggggaggagaaggagcggcacatggagctcagcagaggagacagacagaaggaaagatggcttggagaagccagcagtctgcgaggctggggaggatggagagtggtttggggttttgggtcgggctctagtgtgatcaactgcagaagcattacaccgtggcctggtttctttactcagcccctggggtagatcccagccccccgcataggtccttttgctggaaaaggaagatggagtggtgggacgaatctgaggagtcgttggaggaggagccacggaaggtgctcgcccctgagcctgaggagatctgggtggcggagatgctgtgtggcctcaagatgaagctgaagcgacggcgagtgtcgctcgtgctccctgagcaccacgaggccttcaacaggctgcttgaggatcctgtcattaaaagattcttggcctgggacaaagatctgagggtgtcggacaagtatctcctggctatggtcatagcgtatttcagccgggctggcttcccctcctggcaataccaacgcattcatttcttcctggctctctacctggccaatgacatggaggaggacgacgaggactccaaacaaaacatcttccacttcctgtataggaagaaccgctctcgcatacccttgctccgtaagcgttggttccagttaggccattccatgaacccgagggccaggaagaaccgctctcgcatacccttgctccgtaagcgtcggttccagttataccgttccacgaacccgagggccaggaagaaccgctctcgcatacccttgctccgtaagcgtcggttccagttataccgttccatgaactcgagggccaggaagaaccgctctcagatagtcctgttccagaaacgacggttccacttcttctgttccatgagctgcagggcttgggtttccccagaggagttggaggaggtgagtggggcctggggaggtggaggaggtggggaggaattgggtgggctggaggctggatgaggggagagaggggtatcctggcgagtccccgtcttctcaaagggcgtttgtttttccagatccaggcttatgacccagagcactgggtgtgggcgcgagatcgcgctcacctttcctagagctccagggaccggggaggcctgaggtcatcggcctgagagaaggtacatctgcatcctctggggtaaaggcagaatattggggtctatttcggaaatccgaagaacccaattgcttgatctggcttcaagcctgggcaacgtggcgagatcccctctccacaaaaatacaaaaattagccaggcgatgtgggacgcatctctactcccaactactcaggaggctgaggcgggaggatcgctggagcctggaaggtcggggccgcacggagccctgatcctgccactgcactccagtctgggcgacagagtgagaccctgcctcaaaaataatcataaaaactgagtttggggaggttcattatgattgacgcacttgagttactgatttgggtcgagggttcagtgaagctttggtttacatcttgtgcagctaaccacgttgagcacagagcatgagacttcatcatgaggaggtaggattaaggattaggcttctggactcgtggttcgtgatgttgtcacattagaaacacatctagcatggttacaagtttagatcttaagtgacacaaaaggccccagctgtgataaagtccaaagccacattctctgagggtgccctactccctgggcagacccacccaaagtccttgctatgaagcagatcactggggctgaccttgggtgtattaagtgagttttggagtcgtggtcaccaaagtgtgagtttcacagttgaacacgatggttcagaagcagggtatagaatgaaaggcagcagataaaattgcatttctcaattgacatgggacgtgaataactttcctgtctagagagctgcctccttgaagtgtgacattgtctctctcgcctccagaacactggacccaggggagatgtggattttcagcaggaactttattccaatgctaatggcagacaccaggcaggaggagaggaaccatttgtgcagatcatctagaagaacctggaccattcttgatggagctgaatacagtgatcacgttgtcctcctaggagcaggggtggggggaggggggtggggtccttctaggagtccttggagaaaagtaagaaaccaggagcgtttccagttccaccctttcctgcggcaccaccaccctttttatattgctgaattccaacctccctggggcggaacctggaggtcctgtttcttacggacttgcagtccaggaggatttgaaggcacaatgcaggggctcagattgggacagaattcttttgtgaaatatcagtgccacagattgtaacagatagcttcatgcacactctgcattttattggtttgtttggaaaatgtcggccattgaattattcatagatttatttcaaatagtttggaaattgttgtacttttgaaaacatgctgttcctgtagttttttgatgagagttatagttgttatatatacataaagataattttcttttcatttttaagagacaattcttttatcctaaatattttattatctttaaatttgtttctgtattattatatgtgctcctgaagcgagcactctttttatctatgatacttccataataatctcttctatttatagctattggtagttccccaccagaaaaatacataattctggtgatagaaatttttatttgctgtttaggtttgtgactgaattgtgagaattcagttgtgatttttaacatgtctcagatatatatactaacacgtctaatatatactatctattttattggtttattttgaaaaacatgggtatagaattatttaaatattattttatttatttaaatatttattaaatatatttatttatttaaatattatttttacattaaatattattttaaatattttggaaatactggtatttttgaatagatgctgtttctacaaagctgtgtgatgggtattataactgttatatacacatacatataattttgttttcctttttaagagaggattcttttcatcctaaatcttttacctttcaatctttgtatctattattacacgtgctgctgaagggagcatggattttatctatgatacttagttaacatatatattacatttatagctatgtagtagttcccctaaattcttgtaaaaataaatttttatttgatatttcatatatgtttgaaatgtgagaattcagatgtaattttttaccttgttttggcatgtttgtatattactttaaagagaatgtgtgttctaaaggaggacatgagctgtgtgttttcaagagaacaatagagtgggtctcttggggaaacataataaaaatgaacttttctcaccttcacagcaattgtgatcatattggtctggattgattatttgctgcccagtgatatttttccttaatggggttgtggttatttgaacatatttattagctctggaagataatcctgtgctgttttttatgtagaaaaaaacataaggctgggtgcagtgctcacacctacaatccctgcggttttggaggtcatggtgggaggatcacctgaggccaggagtttgaggccagcctcagcaacatagcatctacatctatttttaatttttattttttaaagaaaaacaatagaagagaaggctgatcccaagctacagggtttttttgtttgtttgtttgttttggagacagagtcttgctctgtctcccaggctggagtgcagtggcacaacctcggctccctgcaactttcacctctgggttcaaacaaattctcctgcctcagcctcccaagtagctgggactacaggcacccgtc

SEQ ID NO: 4845 - protein, 259 aa, Homo sapiens
MEWWDESEESLEEEPRKVLAPEPEEIWVAEMLCGLKMKLKRRRVSLVLPEHHEAFNRLLEDPVIKRFLAWDKDLRVSDKYLLAMVIAYFSRAGFPSWQYQRIHFFLALYLANDMEEDDEDSKQNIFHFLYRKNRSRIPLLRKRWFQLGHSMNPRARKNRSRIPLLRKRRFQLYRSTNPRARKNRSRIPLLRKRRFQLYRSMNSRARKNRSQIVLFQKRRFHFFCSMSCRAWVSPEELEEVSGAWGGGGGGEELGGLEAG

SEQ ID NO: 4846 - DNA, 1272 bp, Homo sapiens
gcctgggtgacaaagcaagattctgtgtcaaaacaaaacaaaacaaaaaaggagggactcagagagccagggaccagggaaggacatgaagcagtgttcggaggacagagagagagaagaatggggaggggaaggagcggcacatggggttgagcagaggagaaaatcagaaagatggcttagagaagccagcagtctgcaagtctggggaggatggagagtggtttggggttttgggtcggggtctaaggtgatcagatgcagaagcattacacggtggcctggtttctttactcagcccctggggtagatcccagccccccatgtaggtcccttggctggaaaaggaagagggagtggtcagatgaatctgaggaggagccggagaaggagctcgcccctgagcctgaggagacctgggtagtggagatgctgtgtgggctcaagatgaagctgaagcaacagcgagtgtcatccatcctccctgagcaccacaaggacttcaacagtcagcttgcccctggggtagatcccagccccccgcataggtccttttgctggaaaaggaagatggagtggtgggacgaatctgaggagtcgttggaggaggagccacggaaggtgctcgcccctgagcctgaggagatctgggtggcggagatgctgtgtggcctcaagatgaagctgaagcgacggcgagtgtcgctcgtgctccctgagcaccacgaggccttcaacaggctgcttgaggatcctgtcattaaaagattcttggcctgggacaaagatctgagggtgtcggacaagtatctcctggctatggtcatagcgtatttcagccgggctggcttcccctcctggcaataccaacgcattcatttcttcctggctctctacctggccaatgacatggaggaggacgacgaggactccaaacaaaacatcttccacttcctggccaggaagaaccgctctcgcatacccttgctccgtaagcgtcggttccagttataccgttccacgaacccgagggccaggaagaaccgctctcgcatacccttgctccgtaagcgtcggttccagttataccgttccatgaactcgagggccaggaagaaccgctctcagatagtcctgttccagaaacgacggttccacttcttctgttccatgagctgcagggcttgggtttccccagaggagttggaggagatccaggcttatgacccagagcactgggtgtgggcgcgagatcgcgctcacctttcctag

SEQ ID NO: 4847 - protein, 337 aa, Homo sapiens
MQKHYTVAWFLYSAPGVDPSPPCRSLGWKRKREWSDESEEEPEKELAPEPEETWVVEMLCGLKMKLKQQRVSSILPEHHKDFNSQLAPGVDPSPPHRSFCWKRKMEWWDESEESLEEEPRKVLAPEPEEIWVAEMLCGLKMKLKRRRVSLVLPEHHEAFNRLLEDPVIKRFLAWDKDLRVSDKYLLAMVIAYFSRAGFPSWQYQRIHFFLALYLANDMEEDDEDSKQNIFHFLARKNRSRIPLLRKRRFQLYRSTNPRARKNRSRIPLLRKRRFQLYRSMNSRARKNRSQIVLFQKRRFHFFCSMSCRAWVSPEELEEIQAYDPEHWVWARDRAHLS

SEQ ID NO: 4848 - DNA, 2903 bp, Homo sapiens
ggaccagggaaggatatgaggaagtgttctgaggacagaaaaacgggagaatggggaggagaaggagcggcacatggagctcagcagaggagacagacagaaggaaagatggcttggagaagccagcagtctgcgaggctggggaggatggagagtggtttggggttttgggtcgggctctagtgtgatcaactgcagaagcattacaccgtggcctggtttctttactcagcccctggggtagatcccagccccccgcataggtccttttgctggaaaaggaagatggagtggtgggacgaatctgaggagtcgttggaggaggagccacggaaggtgctcgcccctgagcctgaggagatctgggtggcggagatgctgtgtggcctcaagatgaagctgaagcgacggcgagtgtcgctcgtgctccctgagcaccacgaggccttcaacaggctgcttgaggatcctgtcattaaaagattcttggcctgggacaaagatctgagggtgtcggacaagtatctcctggctatggtcatagcgtatttcagccgggctggcttcccctcctggcaataccaacgcattcatttcttcctggctctctacctggccaatgacatggaggaggacgacgaggactccaaacaaaacatcttccacttcctgtataggaagaaccgctctcgcatacccttgctccgtaagccgtcggttccagttataccgttccatgaactcgagggccaggaagaaccgctctcagatagtcctgttccagaaacgacggttccacttcttctgttccatgagctgcagggcttgggtttccccagaggagttggaggagatccaggcttatgacccagagcactgggtgtgggcgcgagatcgcgctcacctttcctagagctccagggaccggggaggcctgaggtcatcggcctgagagaagaacactggacccaggggagatgtggattttcagcaggaactttattccaatgctaatggcagacaccaggcaggaggagaggaaccatttgtgcagatcatctagaagaacctggaccattcttgatggagctgaatacagtgatcacgttgtcctcctaggagcaggggtggggggaggggggtggggtccttctaggagtccttggagaaaagtaagaaaccaggagcgtttccagttccaccctttcctgcggcaccaccaccctttttatattgctgaattccaacctccctggggcggaacctggaggtcctgtttcttacggacttgcagtccaggaggatttgaaggcacaatgcaggggctcagattgggacagaattcttttgtgaaatatcagtgccacagattgtaacagatagcttcatgcacactctgcattttattggtttgtttggaaaatgtcggccattgaattattcatagatttatttcaaatagtttggaaattgttgtacttttgaaaacatgctgttcctgtagttttttgatgagagttatagttgttatatatacataaagataattttcttttcatttttaagagacaattcttttatcctaaatattttattatctttaaatttgtttctgtattattatatgtgctcctgaagcgagcactctttttatctatgatacttccataataatctcttctatttatagctattggtagttccccaccagaaaaatacataattctggtgatagaaatttttatttgctgtttaggtttgtgactgaattgtgagaattcagttgtgatttttaacatgtctcagatatatatactaacacgtctaatatatactatctattttattggtttattttgaaaaacatgggtatagaattatttaaatattattttatttatttaaatatttattaaatatatttatttatttaaatattatttttacattaaatattattttaaatattttggaaatactggtatttttgaatagatgctgtttctacaaagctgtgtgatgggtattataactgttatatacacatacatataattttgttttcctttttaagagaggattcttttcatcctaaatcttttacctttcaatctttgtatctattattacacgtgctgctgaagggagcatggattttatctatgatacttagttaacatatatattacatttatagctatgtagtagttcccctaaattcttgtaaaaataaatttttatttgatatttcatatatgtttgaaatgtgagaattcagatgtaattttttaccttgttttggcatgtttgtatattactttaaagagaatgtgtgttctaaaggaggacatgagctgtgtgttttcaagagaacaatagagtgggtctcttggggaaacataataaaaatgaacttttctcaccttcacagcaattgtgatcatattggtctggattgattatttgctgcccagtgatatttttccttaatggggttgtggttatttgaacatatttattagctctggaagataatcctgtgctgttttttatgtagaaaaaaacataaggctgggtgcagtgctcacacctacaatccctgcggttttggaggtcatggtgggaggatcacctgaggccaggagtttgaggccagcctcagcaacatagcatctacatctatttttaatttttattttttaaagaaaaacaatagaagagaaggctgatcccaagctacagggtttttttgtttgtttgtttgttttggagacagagtcttgctctgtctcccaggctggagtgcagtggcacaacctcggctccctgcaactttcacctctgggttcaaacaaattctcctgcctcagcctcccaagtagctgggactacaggcacccgtc

SEQ ID NO: 4849 - protein, 193 aa, Homo sapiens
MEWWDESEESLEEEPRKVLAPEPEEIWVAEMLCGLKMKLKRRRVSLVLPEHHEAFNRLLEDPVIKRFLAWDKDLRVSDKYLLAMVIAYFSRAGFPSWQYQRIHFFLALYLANDMEEDDEDSKQNIFHFLYRKNRSRIPLLRKPSVPVIPFHELEGQEEPLSDSPVPETTVPLLLFHELQGLGFPRGVGGDPGL

SEQ ID NO: 4850 - DNA, 3263 bp, Homo sapiens
gcctgggtgacaaagcaagattctgtgtcaaaacaaaacaaaacaaaaaaggagggactcagagagccagggaccagggaaggacatgaagcagtgttcggaggacagagagagagaagaatggggaggggaaggagcggcacatggggttgagcagaggagaaaatcagaaagatggcttagagaagccagcagtctgcaagtctggggaggatggagagtggtttggggttttgggtcggggtctaaggtgatcagatgcagaagcattacacggtggcctggtttctttactcagcccctggggtagatcccagccccccatgtaggtcccttggctggaaaaggaagagggagtggtcagatgaatctgaggaggagccggagaaggagctcgcccctgagcctgaggagacctgggtagtggagatgctgtgtgggctcaagatgaagctgaagcaacagcgagtgtcatccatcctccctgagcaccacaaggacttcaacagtcagcttgcccctggggtagatcccagccccccgcataggtccttttgctggaaaaggaagatggagtggtgggacgaatctgaggagtcgttggaggaggagccacggaaggtgctcgcccctgagcctgaggagatctgggtggcggagatgctgtgtggcctcaagatgaagctgaagcgacggcgagtgtcgctcgtgctccctgagcaccacgaggccttcaacaggctgcttgaggatcctgtcattaaaagattcttggcctgggacaaagatctgagggtgtcggacaagtatctcctggctatggtcatagcgtatttcagccgggctggcttcccctcctggcaataccaacgcattcatttcttcctggctctctacctggccaatgacatggaggaggacgacgaggactccaaacaaaacatcttccacttcctgtataggaagaaccgctctcgcatacccttgctccgtaagccgtcggttccagttataccgttccacgaacccgagggccaggaagaaccgctctcgcatacccttgctccgtaagcgtcggttccagttataccgttccatgaactcgagggccaggaagaaccgctctcagatagtcctgttccagaaacgacggttccacttcttctgttccatgagctgcagggcttgggtttccccagaggagttggaggagatccaggcttatgacccagagcactgggtgtgggcgcgagatcgcgctcacctttcctagagctccagggaccggggaggcctgaggtcatcggcctgagagaagaacactggacccaggggagatgtggattttcagcaggaactttattccaatgctaatggcagacaccaggcaggaggagaggaaccatttgtgcagatcatctagaagaacctggaccattcttgatggagctgaatacagtgatcacgttgtcctcctaggagcaggggtggggggaggggggtggggtccttctaggagtccttggagaaaagtaagaaaccaggagcgtttccagttccaccctttcctgcggcaccaccaccctttttatattgctgaattccaacctccctggggcggaacctggaggtcctgtttcttacggacttgcagtccaggaggatttgaaggcacaatgcaggggctcagattgggacagaattcttttgtgaaatatcagtgccacagattgtaacagatagcttcatgcacactctgcattttattggtttgtttggaaaatgtcggccattgaattattcatagatttatttcaaatagtttggaaattgttgtacttttgaaaacatgctgttcctgtagttttttgatgagagttatagttgttatatatacataaagataattttcttttcatttttaagagacaattcttttatcctaaatattttattatctttaaatttgtttctgtattattatatgtgctcctgaagcgagcactctttttatctatgatacttccataataatctcttctatttatagctattggtagttccccaccagaaaaatacataattctggtgatagaaatttttatttgctgtttaggtttgtgactgaattgtgagaattcagttgtgatttttaacatgtctcagatatatatactaacacgtctaatatatactatctattttattggtttattttgaaaaacatgggtatagaattatttaaatattattttatttatttaaatatttattaaatatatttatttatttaaatattatttttacattaaatattattttaaatattttggaaatactggtatttttgaatagatgctgtttctacaaagctgtgtgatgggtattataactgttatatacacatacatataattttgttttcctttttaagagaggattcttttcatcctaaatcttttacctttcaatctttgtatctattattacacgtgctgctgaagggagcatggattttatctatgatacttagttaacatatatattacatttatagctatgtagtagttcccctaaattcttgtaaaaataaatttttatttgatatttcatatatgtttgaaatgtgagaattcagatgtaattttttaccttgttttggcatgtttgtatattactttaaagagaatgtgtgttctaaaggaggacatgagctgtgtgttttcaagagaacaatagagtgggtctcttggggaaacataataaaaatgaacttttctcaccttcacagcaattgtgatcatattggtctggattgattatttgctgcccagtgatatttttccttaatggggttgtggttatttgaacatatttattagctctggaagataatcctgtgctgttttttatgtagaaaaaaacataaggctgggtgcagtgctcacacctacaatccctgcggttttggaggtcatggtgggaggatcacctgaggccaggagtttgaggccagcctcagcaacatagcatctacatctatttttaatttttattttttaaagaaaaacaatagaagagaaggctgatcccaagctacagggtttttttgtttgtttgtttgttttggagacagagtcttgctctgtctcccaggctggagtgcagtggcacaacctcggctccctgcaactttcacctctgggttcaaacaaattctcctgcctcagcctcccaagtagctgggactacaggcacccgtc

SEQ ID NO: 4851 - protein, 270 aa, Homo sapiens
MQKHYTVAWFLYSAPGVDPSPPCRSLGWKRKREWSDESEEEPEKELAPEPEETWVVEMLCGLKMKLKQQRVSSILPEHHKDFNSQLAPGVDPSPPHRSFCWKRKMEWWDESEESLEEEPRKVLAPEPEEIWVAEMLCGLKMKLKRRRVSLVLPEHHEAFNRLLEDPVIKRFLAWDKDLRVSDKYLLAMVIAYFSRAGFPSWQYQRIHFFLALYLANDMEEDDEDSKQNIFHFLYRKNRSRIPLLRKPSVPVIPFHEPEGQEEPLSHTLAP

SEQ ID NO: 4852 - DNA, 2977 bp, Homo sapiens
tttttttttttttttttgcgatgactctgtctcaaaataaattaataaataaataaaaataaaaatcaaataaagaaaaacaaaatcaataaacaaagaaagtggtttcagctgtgccctctgaaacttaatgtctcttactgacttttctaaacctaagtgtctccatccatagtgggggataccaaggccatggtcacaccctgatgtgactgtctcatgaggaaatgatgggaattcctttatgactctgcagtggtccctccgtgtctgctggagggggtcctggctgattcccagctctacatcctgtagattctcacacccagggcctccttcggcctcttctcaggggagtctcagagcaggagcctctctcccttgcccagtgaaagtcattctcccctctcccatccacctcacccgcggccacaatcctgagacttccccccgggaggcacacttctcctccctgccctgctgctcccacggaaaccctgtcctgcttctcacactgacatctgctctctaatcacagaggatcctgtcattaaaagattcttggcctgggacaaagatctgagggtgtcggacaagtatctcctggctatggtcatagcgtatttcagccgggctggcttcccctcctggcaataccaacgcattcatttcttcctggctctctacctggccaatgacatggaggaggacgacgaggactccaaacaaaacatcttccacttcctggccaggaagaaccgctctcgcatacccttgctccgtaagcgtcggttccagttataccgttccatgaactcgagggccaggaagaaccgctctcagatagtcctgttccagaaacgacggttccacttcttctgttccatgagctgcagggcttgggtttccccagaggagttggaggagatccaggcttatgacccagagcactgggtgtgggcgcgagatcgcgctcacctttcctagagctccagggaccggggaggcctgaggtcatcggcctgagagaagaacactggacccaggggagatgtggattttcagcaggaactttattccaatgctaatggcagacaccaggcaggaggagaggaaccatttgtgcagatcatctagaagaacctggaccattcttgatggagctgaatacagtgatcacgttgtcctcctaggagcaggggtggggggaggggggtggggtccttctaggagtccttggagaaaagtaagaaaccaggagcgtttccagttccaccctttcctgcggcaccaccaccctttttatattgctgaattccaacctccctggggcggaacctggaggtcctgtttcttacggacttgcagtccaggaggatttgaaggcacaatgcaggggctcagattgggacagaattcttttgtgaaatatcagtgccacagattgtaacagatagcttcatgcacactctgcattttattggtttgtttggaaaatgtcggccattgaattattcatagatttatttcaaatagtttggaaattgttgtacttttgaaaacatgctgttcctgtagttttttgatgagagttatagttgttatatatacataaagataattttcttttcatttttaagagacaattcttttatcctaaatattttattatctttaaatttgtttctgtattattatatgtgctcctgaagcgagcactctttttatctatgatacttccataataatctcttctatttatagctattggtagttccccaccagaaaaatacataattctggtgatagaaatttttatttgctgtttaggtttgtgactgaattgtgagaattcagttgtgatttttaacatgtctcagatatatatactaacacgtctaatatatactatctattttattggtttattttgaaaaacatgggtatagaattatttaaatattattttatttatttaaatatttattaaatatatttatttatttaaatattatttttacattaaatattattttaaatattttggaaatactggtatttttgaatagatgctgtttctacaaagctgtgtgatgggtattataactgttatatacacatacatataattttgttttcctttttaagagaggattcttttcatcctaaatcttttacctttcaatctttgtatctattattacacgtgctgctgaagggagcatggattttatctatgatacttagttaacatatatattacatttatagctatgtagtagttcccctaaattcttgtaaaaataaatttttatttgatatttcatatatgtttgaaatgtgagaattcagatgtaattttttaccttgttttggcatgtttgtatattactttaaagagaatgtgtgttctaaaggaggacatgagctgtgtgttttcaagagaacaatagagtgggtctcttggggaaacataataaaaatgaacttttctcaccttcacagcaattgtgatcatattggtctggattgattatttgctgcccagtgatatttttccttaatggggttgtggttatttgaacatatttattagctctggaagataatcctgtgctgttttttatgtagaaaaaaacataaggctgggtgcagtgctcacacctacaatccctgcggttttggaggtcatggtgggaggatcacctgaggccaggagtttgaggccagcctcagcaacatagcatctacatctatttttaatttttattttttaaagaaaaacaatagaagagaaggctgatcccaagctacagggtttttttgtttgtttgtttgttttggagacagagtcttgctctgtctcccaggctggagtgcagtggcacaacctcggctccctgcaactttcacctctgggttcaaacaaattctcctgcctcagcctcccaagtagctgggactacaggcacccgtc

SEQ ID NO: 4853 - protein, 125 aa, Homo sapiens
MVIAYFSRAGFPSWQYQRIHFFLALYLANDMEEDDEDSKQNIFHFLARKNRSRIPLLRKRRFQLYRSMNSRARKNRSQIVLFQKRRFHFFCSMSCRAWVSPEELEEIQAYDPEHWVWARDRAHLS

SEQ ID NO: 4854 - DNA, 3052 bp, Homo sapiens
ggaccagggaaggatatgaggaagtgttctgaggacagaaaaacgggagaatggggaggagaaggagcggcacatggagctcagcagaggagacagacagaaggaaagatggcttggagaagccagcagtctgcgaggctggggaggatggagagtggtttggggttttgggtcgggctctagtgtgatcaactgcagaagcattacaccgtggcctggtttctttactcagcccctggggtagatcccagccccccgcataggtccttttgctggaaaaggaagatggagtggtgggacgaatctgaggagtcgttggaggaggagccacggaaggtgctcgcccctgagcctgaggagatctgggtggcggagatgctgtgtggcctcaagatgaagctgaagcgacggcgagtgtcgctcgtgctccctgagcaccacgaggccttcaacaggctgcttgaggatcctgtcattaaaagattcttggcctgggacaaagatctgagggtgtcggacaagtatctcctggctatggtcatagcgtatttcagccgggctggcttcccctcctggcaataccaacgcattcatttcttcctggctctctacctggccaatgacatggaggaggacgacgaggactccaaacaaaacatcttccacttcctgtataggaagaaccgctctcgcatacccttgctccgtaagcgttggttccagttaggccattccatgaacccgagggccaggaagaaccgctctcgcatacccttgctccgtaagcgtcggttccagttataccgttccacgaacccgagggccaggaagaaccgctctcgcatacccttgctccgtaagcgtcggttccagttataccgttccatgaactcgagggccaggaagaaccgctctcagatagtcctgttccagaaacgacggttccacttcttctgttccatgagctgcagggcttgggtttccccagaggagttggaggagatccaggcttatgacccagagcactgggtgtgggcgcgagatcgcgctcacctttcctagagctccagggaccggggaggcctgaggtcatcggcctgagagaagaacactggacccaggggagatgtggattttcagcaggaactttattccaatgctaatggcagacaccaggcaggaggagaggaaccatttgtgcagatcatctagaagaacctggaccattcttgatggagctgaatacagtgatcacgttgtcctcctaggagcaggggtggggggaggggggtggggtccttctaggagtccttggagaaaagtaagaaaccaggagcgtttccagttccaccctttcctgcggcaccaccaccctttttatattgctgaattccaacctccctggggcggaacctggaggtcctgtttcttacggacttgcagtccaggaggatttgaaggcacaatgcaggggctcagattgggacagaattcttttgtgaaatatcagtgccacagattgtaacagatagcttcatgcacactctgcattttattggtttgtttggaaaatgtcggccattgaattattcatagatttatttcaaatagtttggaaattgttgtacttttgaaaacatgctgttcctgtagttttttgatgagagttatagttgttatatatacataaagataattttcttttcatttttaagagacaattcttttatcctaaatattttattatctttaaatttgtttctgtattattatatgtgctcctgaagcgagcactctttttatctatgatacttccataataatctcttctatttatagctattggtagttccccaccagaaaaatacataattctggtgatagaaatttttatttgctgtttaggtttgtgactgaattgtgagaattcagttgtgatttttaacatgtctcagatatatatactaacacgtctaatatatactatctattttattggtttattttgaaaaacatgggtatagaattatttaaatattattttatttatttaaatatttattaaatatatttatttatttaaatattatttttacattaaatattattttaaatattttggaaatactggtatttttgaatagatgctgtttctacaaagctgtgtgatgggtattataactgttatatacacatacatataattttgttttcctttttaagagaggattcttttcatcctaaatcttttacctttcaatctttgtatctattattacacgtgctgctgaagggagcatggattttatctatgatacttagttaacatatatattacatttatagctatgtagtagttcccctaaattcttgtaaaaataaatttttatttgatatttcatatatgtttgaaatgtgagaattcagatgtaattttttaccttgttttggcatgtttgtatattactttaaagagaatgtgtgttctaaaggaggacatgagctgtgtgttttcaagagaacaatagagtgggtctcttggggaaacataataaaaatgaacttttctcaccttcacagcaattgtgatcatattggtctggattgattatttgctgcccagtgatatttttccttaatggggttgtggttatttgaacatatttattagctctggaagataatcctgtgctgttttttatgtagaaaaaaacataaggctgggtgcagtgctcacacctacaatccctgcggttttggaggtcatggtgggaggatcacctgaggccaggagtttgaggccagcctcagcaacatagcatctacatctatttttaatttttattttttaaagaaaaacaatagaagagaaggctgatcccaagctacagggtttttttgtttgtttgtttgttttggagacagagtcttgctctgtctcccaggctggagtgcagtggcacaacctcggctccctgcaactttcacctctgggttcaaacaaattctcctgcctcagcctcccaagtagctgggactacaggcacccgtc

SEQ ID NO: 4855 - protein, 258 aa, Homo sapiens; identical to SEQ ID NO: 2062

SEQ ID NO: 4856 - DNA, 4063 bp, Homo sapiens
gcctgggtgacaaagcaagattctgtgtcaaaacaaaacaaaacaaaaaaggagggactcagagagccagggaccagggaaggacatgaagcagtgttcggaggacagagagagagaagaatggggaggggaaggagcggcacatggggttgagcagaggagaaaatcagaaagatggcttagagaagccagcagtctgcaagtctggggaggatggagagtggtttggggttttgggtcggggtctaaggtgatcagatgcagaagcattacacggtggcctggtttctttactcagcccctggggtagatcccagccccccatgtaggtcccttggctggaaaaggaagagggagtggtcagatgaatctgaggaggagccggagaaggagctcgcccctgagcctgaggagacctgggtagtggagatgctgtgtgggctcaagatgaagctgaagcaacagcgagtgtcatccatcctccctgagcaccacaaggacttcaacagtcagcttgaggatcctgtcattaaaagattcttggcctgggacaaagatctgagggtgtcggacaagtatctcctggctatggtcatagcgtatttcagccgggctggcttcccctcctggcaataccaacgcattcatttcttcctggctctctacctggccaatgacatggaggaggacgacgaggactccaaacaaaacatcttccacttcctgtataggaagaaccgctctcgcatacccttgctccgtaagcgttggttccagttaggccattccatgaacccgagggccaggaagaaccgctctcgcatacccttgctccgtaagcgtcggttccagttataccgttccacgaacccgagggccaggaagaaccgctctcgcatacccttgctccgtaagcgtcggttccagttataccgttccatgaactcgagggccaggaagaaccgctctcagatagtcctgttccagaaacgacggttccacttcttctgttccatgagctgcagggcttgggtttccccagaggagttggaggaggtgagtggggcctggggaggtggaggaggtggggaggaattgggtgggctggaggctggatgaggggagagaggggtatcctggcgagtccccgtcttctcaaagggcgtttgtttttccagatccaggcttatgacccagagcactgggtgtgggcgcgagatcgcgctcacctttcctagagctccagggaccggggaggcctgaggtcatcggcctgagagaaggtacatctgcatcctctggggtaaaggcagaatattggggtctatttcggaaatccgaagaacccaattgcttgatctggcttcaagcctgggcaacgtggcgagatcccctctccacaaaaatacaaaaattagccaggcgatgtgggacgcatctctactcccaactactcaggaggctgaggcgggaggatcgctggagcctggaaggtcggggccgcacggagccctgatcctgccactgcactccagtctgggcgacagagtgagaccctgcctcaaaaataatcataaaaactgagtttggggaggttcattatgattgacgcacttgagttactgatttgggtcgagggttcagtgaagctttggtttacatcttgtgcagctaaccacgttgagcacagagcatgagacttcatcatgaggaggtaggattaaggattaggcttctggactcgtggttcgtgatgttgtcacattagaaacacatctagcatggttacaagtttagatcttaagtgacacaaaaggccccagctgtgataaagtccaaagccacattctctgagggtgccctactccctgggcagacccacccaaagtccttgctatgaagcagatcactggggctgaccttgggtgtattaagtgagttttggagtcgtggtcaccaaagtgtgagtttcacagttgaacacgatggttcagaagcagggtatagaatgaaaggcagcagataaaattgcatttctcaattgacatgggacgtgaataactttcctgtctagagagctgcctccttgaagtgtgacattgtctctctcgcctccagaacactggacccaggggagatgtggattttcagcaggaactttattccaatgctaatggcagacaccaggcaggaggagaggaaccatttgtgcagatcatctagaagaacctggaccattcttgatggagctgaatacagtgatcacgttgtcctcctaggagcaggggtggggggaggggggtggggtccttctaggagtccttggagaaaagtaagaaaccaggagcgtttccagttccaccctttcctgcggcaccaccaccctttttatattgctgaattccaacctccctggggcggaacctggaggtcctgtttcttacggacttgcagtccaggaggatttgaaggcacaatgcaggggctcagattgggacagaattcttttgtgaaatatcagtgccacagattgtaacagatagcttcatgcacactctgcattttattggtttgtttggaaaatgtcggccattgaattattcatagatttatttcaaatagtttggaaattgttgtacttttgaaaacatgctgttcctgtagttttttgatgagagttatagttgttatatatacataaagataattttcttttcatttttaagagacaattcttttatcctaaatattttattatctttaaatttgtttctgtattattatatgtgctcctgaagcgagcactctttttatctatgatacttccataataatctcttctatttatagctattggtagttccccaccagaaaaatacataattctggtgatagaaatttttatttgctgtttaggtttgtgactgaattgtgagaattcagttgtgatttttaacatgtctcagatatatatactaacacgtctaatatatactatctattttattggtttattttgaaaaacatgggtatagaattatttaaatattattttatttatttaaatatttattaaatatatttatttatttaaatattatttttacattaaatattattttaaatattttggaaatactggtatttttgaatagatgctgtttctacaaagctgtgtgatgggtattataactgttatatacacatacatataattttgttttcctttttaagagaggattcttttcatcctaaatcttttacctttcaatctttgtatctattattacacgtgctgctgaagggagcatggattttatctatgatacttagttaacatatatattacatttatagctatgtagtagttcccctaaattcttgtaaaaataaatttttatttgatatttcatatatgtttgaaatgtgagaattcagatgtaattttttaccttgttttggcatgtttgtatattactttaaagagaatgtgtgttctaaaggaggacatgagctgtgtgttttcaagagaacaatagagtgggtctcttggggaaacataataaaaatgaacttttctcaccttcacagcaattgtgatcatattggtctggattgattatttgctgcccagtgatatttttccttaatggggttgtggttatttgaacatatttattagctctggaagataatcctgtgctgttttttatgtagaaaaaaacataaggctgggtgcagtgctcacacctacaatccctgcggttttggaggtcatggtgggaggatcacctgaggccaggagtttgaggccagcctcagcaacatagcatctacatctatttttaatttttattttttaaagaaaaacaatagaagagaaggctgatcccaagctacagggtttttttgtttgtttgtttgttttggagacagagtcttgctctgtctcccaggctggagtgcagtggcacaacctcggctccctgcaactttcacctctgggttcaaacaaattctcctgcctcagcctcccaagtagctgggactacaggcacccgtc

SEQ ID NO: 4857 - protein, 286 aa, Homo sapiens
MQKHYTVAWFLYSAPGVDPSPPCRSLGWKRKREWSDESEEEPEKELAPEPEETWVVEMLCGLKMKLKQQRVSSILPEHHKDFNSQLEDPVIKRFLAWDKDLRVSDKYLLAMVIAYFSRAGFPSWQYQRIHFFLALYLANDMEEDDEDSKQNIFHFLYRKNRSRIPLLRKRWFQLGHSMNPRARKNRSRIPLLRKRRFQLYRSTNPRARKNRSRIPLLRKRRFQLYRSMNSRARKNRSQIVLFQKRRFHFFCSMSCRAWVSPEELEEVSGAWGGGGGGEELGGLEAG

SEQ ID NO: 4858 - DNA, 348 bp, Homo sapiens
atgaacgcccctccagccttcgagtcgttcttgctcttcgagggcgagaagatcaccattaacaaggacaccaaggtacccaatgcctgtttattcaccatgaacaaagaagaccacacactgggaaacatcattaaatcacaactcctaaaagacccgcaagtgctatttgctggctacaaagtcccccaccccttggagcacaagatcatcatccgagtgcagaccacgccggactacagcccccaggaagcctttaccaacgccatcaccgacctcatcagcgagctgtccctgctggaggagcgcttccggacgtgcctgcttccccttcgccttctgccgtga

SEQ ID NO: 4859 - protein, 115 aa, Homo sapiens
MNAPPAFESFLLFEGEKITINKDTKVPNACLFTMNKEDHTLGNIIKSQLLKDPQVLFAGYKVPHPLEHKIIIRVQTTPDYSPQEAFTNAITDLISELSLLEERFRTCLLPLRLLP

SEQ ID NO: 4860 - DNA, 3260 bp, Homo sapiens
gcctgggtgacaaagcaagattctgtgtcaaaacaaaacaaaacaaaaaaggagggactcagagagccagggaccagggaaggacaggaagcagtgttcggaggacagagagagagaagaatggggaggggaaggagcggcacatggggttgagcagaggagaaaatcagaaagatggcttagagaagccagcagtctgcaagtctggggaggatggagagtggtttggggttttgggtcggggtctaaggtgatcagatgcagaagcattacacggtggcctggtttctttactcagcccctggggtagatcccagccccccatgtaggtcccttggctggaaaaggaagagggagtggtcagatgaatctgaggaggagccggagaaggagctcgcccctgagcctgaggagacctgggtagtggagatgctgtgtgggctcaagatgaagctgaagcaacagcgagtgtcatccatcctccctgagcaccacaaggacttcaacagtcagcttgcccctggggtagatcccagccccccgcataggtccttttgctggaaaaggaagatggagtggtgggacgaatctgaggagtcgttggaggaggagccacggaaggtgctcgcccctgagcctgaggagatctgggtggcggagatgctgtgtggcctcaagatgaagctgaagcgacggcgagtgtcgctcgtgctccctgagcaccacgaggccttcaacaggctgcttgaggatcctgtcattaaaagattcttggcctgggacaaagatctgagggtgtcggacaagtatctcctggctatggtcatagcgtatttcagccgggccggcttcccctcctggcaataccaacgcattcatttcttcctggctctctacctggccaatgacatggaggaggacgacgaggactccaaacaaaacatcttccacttcctggccaggaagaaccgctctcgcatacccttgctccgtaagcgtcggttccagttataccgttccacgaacccgagggccaggaagaaccgctctcgcatacccttgctccgtaagcgtcggttccagttataccgttccatgaactcgagggccaggaagaaccgctctcagatagtcctgttccagaaacgacggttccacttcttctgttccatgagctgcagggcttgggtttccccagaggagttggaggagatccaggcttatgacccagagcactgggtgtgggcgcgagatcgcgctcacctttcctagagctccagggaccggggaggcctgaggtcatcggcctgagagaagaacaccggacccaggggagatgtggattttcagcgggaactttattccaatgctaatggcagacaccaggcaggaggagaggaaccatttgtgcagatcatctagaagaacctggaccattcttgatggagctgaatacagtgatcacgttgtcctcctaggagcaggggtggggggaggggggtggggtccttctaggagtccttggagaaaagtaagaaaccaggagcgtttccagttccaccctttcctgcggcaccaccaccctttttatattgctgaattccaacctccctggggcggaacctggaggtcctgtttcttacggacttgcagtccaggaggatttgaaggcacaatgcaggggctcagattgggacagaattcttttgtgaaatatcagtgccacagattgtaacagatagcttcatgcacactctgcattttattggtttgtatggaaaatgtcggccattgaattattcatagatttatttcaaatagtttggaaattgttgtacttttgaaaacatgctgttcctgtagttttttgatgagagttatagttgttatatatacataaagctaattttcttttcatttttaagagacaattctttttatcctaaatattttattatctttaaatttgtttctgtattattacatgtgctcctgaagcgagcactctttttatctatgatacttccataataatctcttctatttatagctattggtagttccccaccagaaaaaaacataattctggtgatagaaatttttatttgctgtttaggtttgtgactgaattgtgagaattcagttgtgatttttaacatgcctcagatatatatactaacacgtctaatatatactatctattttattggtttattttgaaaaacatgggtatagaattatttaaatattattttatttatttaaatatttattaaatatatttatttatttaaatattattactttaaatattattttaaatattttggaaatactggtatttttgaatagatgctgtttctataaagctgtgtgatggatattataactgttatatacacatacatataattttgttttcctttttaagagaggattcttttcatcctaaatcttttacctttcaatctttgtatctattattacacgtgctgctgaagggagcatggtttttatctatgatacttagttaacatatatattacatttatagctatgtagtagttcccctaaattcttgtaaaaataaatttttatttgatatttcatatatatttgaaatgtgagaattcagatgtaattttttaccttgttttggcatgtttgtatgttactttaaagaggatgtgtgttctaaaggaggacatgagctgtgtgttttcaagagaacaatagagtgcgtctcttggggaaacataataaaaatgaacttttctcaccttcacagcaattgtgatcatattggtctggattgattatttgctgcccagtgatatttttccttaatggggttgtggttatttgaacatatttattagctctggaagataatcctgtgctgttttttatgtagaaaaaaacataaggctgggtgcagtgctcacacctacaatccctgtggttttggaggtcatggcgggaggatcacctgaggccaggagtttgaggccagcctcagcaacatagcatctacatctatttttaatttttattttttaaagaaaaacaatagaagagaaggctgatcccaagctacagggtttttttgtttgtttgtttgttttggagacagagtcttgctctgtctcccaggctggagtgcagtggcacaacctcggctccctgcaactttcacctctgggttcaaacaaattctcctgcctcagcctcccaagtagctgggactacaggcacccgtc

SEQ ID NO: 4861 - protein, 337 aa, Homo sapiens; identical to SEQ ID NO: 4847

SEQ ID NO: 4862 - DNA, 2900 bp, Homo sapiens
ggaccagggaaggatatgaggaagtgttctgaggacagaaaaacgggagaatggggaggagaaggagcggcacatggagctcagcagaggagacagacagaaggaaagatggcttggagaagccagcagtctgcgaggctggggaggatggagagtggtttggggttttgggtcgggctctagtgtgatcaactgcagaagcattacaccgtggcctggtttctttactcagcccctggggtagatcccagccccccgcataggtccttttgctggaaaaggaagatggagtggtgggacgaatctgaggagtcgttggaggaggagccacggaaggtgctcgcccctgagcctgaggagatctgggtggcggagatgctgtgtggcctcaagatgaagctgaagcgacggcgagtgtcgctcgtgctccctgagcaccacgaggccttcaacaggctgcttgaggatcctgtcattaaaagattcttggcctgggacaaagatctgagggtgtcggacaagtatctcctggctatggtcatagcgtatttcagccgggccggcttcccctcctggcaataccaacgcattcatttcttcctggctctctacctggccaatgacatggaggaggacgacgaggactccaaacaaaacatcttccacttcctggccaggaagaaccgctctcgcatacccttgctccgtaagcgtcggttccagttataccgttccatgaactcgagggccaggaagaaccgctctcagatagtcctgttccagaaacgacggttccacttcttctgttccatgagctgcagggcttgggtttccccagaggagttggaggagatccaggcttatgacccagagcactgggtgtgggcgcgagatcgcgctcacctttcctagagctccagggaccggggaggcctgaggtcatcggcctgagagaagaacaccggacccaggggagatgtggattttcagcgggaactttattccaatgctaatggcagacaccaggcaggaggagaggaaccatttgtgcagatcatctagaagaacctggaccattcttgatggagctgaatacagtgatcacgttgtcctcctaggagcaggggtggggggaggggggtggggtccttctaggagtccttggagaaaagtaagaaaccaggagcgtttccagttccaccctttcctgcggcaccaccaccctttttatattgctgaattccaacctccctggggcggaacctggaggtcctgtttcttacggacttgcagtccaggaggatttgaaggcacaatgcaggggctcagattgggacagaattcttttgtgaaatatcagtgccacagattgtaacagatagcttcatgcacactctgcattttattggtttgtatggaaaatgtcggccattgaattattcatagatttatttcaaatagtttggaaattgttgtacttttgaaaacatgctgttcctgtagttttttgatgagagttatagttgttatatatacataaagctaattttcttttcatttttaagagacaattctttttatcctaaatattttattatctttaaatttgtttctgtattattacatgtgctcctgaagcgagcactctttttatctatgatacttccataataatctcttctatttatagctattggtagttccccaccagaaaaaaacataattctggtgatagaaatttttatttgctgtttaggtttgtgactgaattgtgagaattcagttgtgatttttaacatgcctcagatatatatactaacacgtctaatatatactatctattttattggtttattttgaaaaacatgggtatagaattatttaaatattattttatttatttaaatatttattaaatatatttatttatttaaatattattactttaaatattattttaaatattttggaaatactggtatttttgaatagatgctgtttctataaagctgtgtgatggatattataactgttatatacacatacatataattttgttttcctttttaagagaggattcttttcatcctaaatcttttacctttcaatctttgtatctattattacacgtgctgctgaagggagcatggtttttatctatgatacttagttaacatatatattacatttatagctatgtagtagttcccctaaattcttgtaaaaataaatttttatttgatatttcatatatatttgaaatgtgagaattcagatgtaattttttaccttgttttggcatgtttgtatgttactttaaagaggatgtgtgttctaaaggaggacatgagctgtgtgttttcaagagaacaatagagtgcgtctcttggggaaacataataaaaatgaacttttctcaccttcacagcaattgtgatcatattggtctggattgattatttgctgcccagtgatatttttccttaatggggttgtggttatttgaacatatttattagctctggaagataatcctgtgctgttttttatgtagaaaaaaacataaggctgggtgcagtgctcacacctacaatccctgtggttttggaggtcatggcgggaggatcacctgaggccaggagtttgaggccagcctcagcaacatagcatctacatctatttttaatttttattttttaaagaaaaacaatagaagagaaggctgatcccaagctacagggtttttttgtttgtttgtttgttttggagacagagtcttgctctgtctcccaggctggagtgcagtggcacaacctcggctccctgcaactttcacctctgggttcaaacaaattctcctgcctcagcctcccaagtagctgggactacaggcacccgtc

SEQ ID NO: 4863 - protein, 208 aa, Homo sapiens
MEWWDESEESLEEEPRKVLAPEPEEIWVAEMLCGLKMKLKRRRVSLVLPEHHEAFNRLLEDPVIKRFLAWDKDLRVSDKYLLAMVIAYFSRAGFPSWQYQRIHFFLALYLANDMEEDDEDSKQNIFHFLARKNRSRIPLLRKRRFQLYRSMNSRARKNRSQIVLFQKRRFHFFCSMSCRAWVSPEELEEIQAYDPEHWVWARDRAHLS

SEQ ID NO: 4864 - DNA, 2947 bp, Homo sapiens
gtctcaaaataaattaataaataaataaaaataaaaatccaataaagaaaaacaaaatcaataaacaaagaaagtggtttcagctgtgccctctgaaacttaatgtctcttactgacttttctaaacctaagtgtctccatccatagtgggggataccaaggccatggtcacaccctgatgtgactgtctcatgaggaaatgatgggaattcctttatgactctgcagtggtccctccgtgtctgctggagggggtcctggctgattcccagctctacatcctgtagattctcacacccagggcctccttcggcctcttctcaggggagtctcagagcaggagcctctctcccttgcccagtgaaagtcattctcccctctcccatccacctcacccgcggccacaatcctgagacttccccccgggaggcacacttctcctcactgccctgctgctcccacggaaaccctgtcctgcttctcacactgacatctgctctctaatcacagaggatcctgtcattaaaagattcttggcctgggacaaagatctgagggtgtcggacaagtatctcctggctatggtcatagcgtatttcagccgggccggcttcccctcctggcaataccaacgcattcatttcttcctggctctctacctggccaatgacatggaggaggacgacgaggactccaaacaaaacatcttccacttcctggccaggaagaaccgctctcgcatacccttgctccgtaagcgtcggttccagttataccgttccatgaactcgagggccaggaagaaccgctctcagatagtcctgttccagaaacgacggttccacttcttctgttccatgagctgcagggcttgggtttccccagaggagttggaggagatccaggcttatgacccagagcactgggtgtgggcgcgagatcgcgctcacctttcctagagctccagggaccggggaggcctgaggtcatcggcctgagagaagaacaccggacccaggggagatgtggattttcagcgggaactttattccaatgctaatggcagacaccaggcaggaggagaggaaccatttgtgcagatcatctagaagaacctggaccattcttgatggagctgaatacagtgatcacgttgtcctcctaggagcaggggtggggggaggggggtggggtccttctaggagtccttggagaaaagtaagaaaccaggagcgtttccagttccaccctttcctgcggcaccaccaccctttttatattgctgaattccaacctccctggggcggaacctggaggtcctgtttcttacggacttgcagtccaggaggatttgaaggcacaatgcaggggctcagattgggacagaattcttttgtgaaatatcagtgccacagattgtaacagatagcttcatgcacactctgcattttattggtttgtatggaaaatgtcggccattgaattattcatagatttatttcaaatagtttggaaattgttgtacttttgaaaacatgctgttcctgtagttttttgatgagagttatagttgttatatatacataaagctaattttcttttcatttttaagagacaattctttttatcctaaatattttattatctttaaatttgtttctgtattattacatgtgctcctgaagcgagcactctttttatctatgatacttccataataatctcttctatttatagctattggtagttccccaccagaaaaaaacataattctggtgatagaaatttttatttgctgtttaggtttgtgactgaattgtgagaattcagttgtgatttttaacatgcctcagatatatatactaacacgtctaatatatactatctattttattggtttattttgaaaaacatgggtatagaattatttaaatattattttatttatttaaatatttattaaatatatttatttatttaaatattattactttaaatattattttaaatattttggaaatactggtatttttgaatagatgctgtttctataaagctgtgtgatggatattataactgttatatacacatacatataattttgttttcctttttaagagaggattcttttcatcctaaatcttttacctttcaatctttgtatctattattacacgtgctgctgaagggagcatggtttttatctatgatacttagttaacatatatattacatttatagctatgtagtagttcccctaaattcttgtaaaaataaatttttatttgatatttcatatatatttgaaatgtgagaattcagatgtaattttttaccttgttttggcatgtttgtatgttactttaaagaggatgtgtgttctaaaggaggacatgagctgtgtgttttcaagagaacaatagagtgcgtctcttggggaaacataataaaaatgaacttttctcaccttcacagcaattgtgatcatattggtctggattgattatttgctgcccagtgatatttttccttaatggggttgtggttatttgaacatatttattagctctggaagataatcctgtgctgttttttatgtagaaaaaaacataaggctgggtgcagtgctcacacctacaatccctgtggttttggaggtcatggcgggaggatcacctgaggccaggagtttgaggccagcctcagcaacatagcatctacatctatttttaatttttattttttaaagaaaaacaatagaagagaaggctgatcccaagctacagggtttttttgtttgtttgtttgttttggagacagagtcttgctctgtctcccaggctggagtgcagtggcacaacctcggctccctgcaactttcacctctgggttcaaacaaattctcctgcctcagcctcccaagtagctgggactacaggcacccgtc

SEQ ID NO: 4865 - protein, 125 aa, Homo sapiens; identical to SEQ ID NO: 4853

SEQ ID NO: 4866 - DNA, 3050 bp, Homo sapiens
ggaccagggaaggatatgaggaagtgttctgaggacagaaaaacgggagaatggggaggagaaggagcggcacatggagctcagcagaggagacagacagaaggaaagatggcttggagaagccagcagtctgcgaggctggggaggatggagagtggtttggggttttgggtcgggctctagtgtgatcaactgcagaagcattacaccgtggcctggtttctttactcagcccctggggtagatcccagccccccgcataggtccttttgctggaaaaggaagatggagtggtgggacgaatctgaggagtcgttggaggaggagccacggaaggtgctcgcccctgagcctgaggagatctgggtggcggagatgctgtgtggcctcaagatgaagctgaagcgacggcgagtgtcgctcgtgctccctgagcaccacgaggccttcaacaggctgcttgaggatcctgtcattaaaagattcttggcctgggacaaagatctgagggtgtcggacaagtatctcctggctatggtcatagcgtatttcagccgggccggcttcccctcctggcaataccaacgcattcatttcttcctggctctctacctggccaatgacatggaggaggacgacgaggactccaaacaaaacatcttccacttcctgtataggaagaaccgctctcgcatacccttgctccgtaagccttggttccagttaggccattccatgaacccgagggccaggaagaaccgctctcgcatacccttgctccgtaagcgtcggttccagttataccgttccacgaacccgagggccaggaagaaccgctctcgcatacccttgctccgtaagcgtcggttccagttataccgttccatgaactcgagggccaggaagaaccgctctcagatagtcctgttccagaaacgacggttccacttcttctgttccatgagctgcagggcttgggtttccccagaggagttggaggagatccaggcttatgacccagagcactgggtgtgggcgcgagatcgcgctcacctttcctagagctccagggaccggggaggcctgaggtcatcggcctgagagaagaacaccggacccaggggagatgtggattttcagcgggaactttattccaatgctaatggcagacaccaggcaggaggagaggaaccatttgtgcagatcatctagaagaacctggaccattcttgatggagctgaatacagtgatcacgttgtcctcctaggagcaggggtggggggaggggggtggggtccttctaggagtccttggagaaaagtaagaaaccaggagcgtttccagttccaccctttcctgcggcaccaccaccctttttatattgctgaattccaacctccctggggcggaacctggaggtcctgtttcttacggacttgcagtccaggaggatttgaaggcacaatgcaggggctcagattgggacagaattcttttgtgaaatatcagtgccacagattgtaacagatagcttcatgcacactctgcattttattggtttgtatggaaaatgtcggccattgaattattcatagatttatttcaaatagtttggaaattgttgtacttttgaaaacatgctgttcctgtagttttttgatgagagttatagttgttatatatacataaagctaattttcttttcatttttaagagacaattctttttatcctaaatattttattatctttaaatttgtttctgtattattacatgtgctcctgaagcgagcactctttttatctatgatacttccataataatctcttctatttatagctattggtagttccccaccagaaaaaaacataattctggtgatagaaatttttatttgctgtttaggtttgtgactgaattgtgagaattcagttgtgatttttaacatgcctcagatatatatactaacacgtctaatatatactatctattttattggtttattttgaaaaacatgggtatagaattatttaaatattattttatttatttaaatatttattaaatatatttatttatttaaatattattactttaaatattattttaaatattttggaaatactggtatttttgaatagatgctgtttctataaagctgtgtgatggatattataactgttatatacacatacatataattttgttttcctttttaagagaggattcttttcatcctaaatcttttacctttcaatctttgtatctattattacacgtgctgctgaagggagcatggtttttatctatgatacttagttaacatatatattacatttatagctatgtagtagttcccctaaattcttgtaaaaataaatttttatttgatatttcatatatatttgaaatgtgagaattcagatgtaattttttaccttgttttggcatgtttgtatgttactttaaagaggatgtgtgttctaaaggaggacatgagctgtgtgttttcaagagaacaatagagtgcgtctcttggggaaacataataaaaatgaacttttctcaccttcacagcaattgtgatcatattggtctggattgattatttgctgcccagtgatatttttccttaatggggttgtggttatttgaacatatttattagctctggaagataatcctgtgctgttttttatgtagaaaaaaacataaggctgggtgcagtgctcacacctacaatccctgtggttttggaggtcatggcgggaggatcacctgaggccaggagtttgaggccagcctcagcaacatagcatctacatctatttttaatttttattttttaaagaaaaacaatagaagagaaggctgatcccaagctacagggtttttttgtttgtttgtttgttttggagacagagtcttgctctgtctcccaggctggagtgcagtggcacaacctcggctccctgcaactttcacctctgggttcaaacaaattctcctgcctcagcctcccaagtagctgggactacaggcacccgtc

SEQ ID NO: 4867 - protein, 258 aa, Homo sapiens
MEWWDESEESLEEEPRKVLAPEPEEIWVAEMLCGLKMKLKRRRVSLVLPEHHEAFNRLLEDPVIKRFLAWDKDLRVSDKYLLAMVIAYFSRAGFPSWQYQRIHFFLALYLANDMEEDDEDSKQNIFHFLYRKNRSRIPLLRKPWFQLGHSMNPRARKNRSRIPLLRKRRFQLYRSTNPRARKNRSRIPLLRKRRFQLYRSMNSRARKNRSQIVLFQKRRFHFFCSMSCRAWVSPEELEEIQAYDPEHWVWARDRAHLS

SEQ ID NO: 4868 - DNA, 4061 bp, Homo sapiens
gcctgggtgacaaagcaagattctgtgtcaaaacaaaacaaaacaaaaaaggagggactcagagagccagggaccagggaaggacaggaagcagtgttcggaggacagagagagagaagaatggggaggggaaggagcggcacatggggttgagcagaggagaaaatcagaaagatggcttagagaagccagcagtctgcaagtctggggaggatggagagtggtttggggttttgggtcggggtctaaggtgatcagatgcagaagcattacacggtggcctggtttctttactcagcccctggggtagatcccagccccccatgtaggtcccttggctggaaaaggaagagggagtggtcagatgaatctgaggaggagccggagaaggagctcgcccctgagcctgaggagacctgggtagtggagatgctgtgtgggctcaagatgaagctgaagcaacagcgagtgtcatccatcctccctgagcaccacaaggacttcaacagtcagcttgaggatcctgtcattaaaagattcttggcctgggacaaagatctgagggtgtcggacaagtatctcctggctatggtcatagcgtatttcagccgggccggcttcccctcctggcaataccaacgcattcatttcttcctggctctctacctggccaatgacatggaggaggacgacgaggactccaaacaaaacatcttccacttcctgtataggaagaaccgctctcgcatacccttgctccgtaagccttggttccagttaggccattccatgaacccgagggccaggaagaaccgctctcgcatacccttgctccgtaagcgtcggttccagttataccgttccacgaacccgagggccaggaagaaccgctctcgcatacccttgctccgtaagcgtcggttccagttataccgttccatgaactcgagggccaggaagaaccgctctcagatagtcctgttccagaaacgacggttccacttcttctgttccatgagctgcagggcttgggtttccccagaggagttggaggaggtgagtggggcctggggaggtggaggaggtggggaggaattgggtgggctggaggctggatgaggggagagaggggtatcctggcgagtccccgtcttctcaaagggcgtttgtttttccagatccaggcttatgacccagagcactgggtgtgggcgcgagatcgcgctcacctttcctagagctccagggaccggggaggcctgaggtcatcggcctgagagaaggtacatctgcatcctctggggtaaaggcagaatattggggtctatttcggaaatccgaagaacccaattgcttgatctggcttcaagcctgggcaacgtggcgagatcccctctccacaaaaatacaaaaattagccaggcgatgtgggacgcatctctactcccaactactcaggaggctgaggcgggaggatcgctggagcctggaaggtcggggccgcacggagccctgatcctgccactgcactccagtctgggcgacagagtgagaccctgcctcaaaaataatcataaaaactgagtttggggaggttcattatgattgacgcacttgagttactgatttgggtcgagggttcagtgaagctttggtttacatcttgtgcagctaaccacgttgagcacagagcatgagacttcatcatgaggaggtaggattaaggattaggcttctggactcgtggttcgtgatgttgtcacattagaaacacatctagcatggttacaagtttagatcttaagtgacacaaaaggccccagctgtgataaagtccaaagccacattctctgagggtgccctactccctgggcagacccacccaaagtccttgctatgaagcagatcactggggctgaccttgggtgtattaagtgagttttggagtcgtggtcaccaaagtgtgagtttcacagttgaacacgatggttcagaagcagggtatagaatgaaaggcagcagataaaattgcatttctcaattgacatgggacgtgaataactttcctgtctagagagctgcctccttgaagtgtgacattgtctctctcgcttccagaacaccggacccaggggagatgtggattttcagcgggaactttattccaatgctaatggcagacaccaggcaggaggagaggaaccatttgtgcagatcatctagaagaacctggaccattcttgatggagctgaatacagtgatcacgttgtcctcctaggagcaggggtggggggaggggggtggggtccttctaggagtccttggagaaaagtaagaaaccaggagcgtttccagttccaccctttcctgcggcaccaccaccctttttatattgctgaattccaacctccctggggcggaacctggaggtcctgtttcttacggacttgcagtccaggaggatttgaaggcacaatgcaggggctcagattgggacagaattcttttgtgaaatatcagtgccacagattgtaacagatagcttcatgcacactctgcattttattggtttgtatggaaaatgtcggccattgaattattcatagatttatttcaaatagtttggaaattgttgtacttttgaaaacatgctgttcctgtagttttttgatgagagttatagttgttatatatacataaagctaattttcttttcatttttaagagacaattctttttatcctaaatattttattatctttaaatttgtttctgtattattacatgtgctcctgaagcgagcactctttttatctatgatacttccataataatctcttctatttatagctattggtagttccccaccagaaaaaaacataattctggtgatagaaatttttatttgctgtttaggtttgtgactgaattgtgagaattcagttgtgatttttaacatgcctcagatatatatactaacacgtctaatatatactatctattttattggtttattttgaaaaacatgggtatagaattatttaaatattattttatttatttaaatatttattaaatatatttatttatttaaatattattactttaaatattattttaaatattttggaaatactggtatttttgaatagatgctgtttctataaagctgtgtgatggatattataactgttatatacacatacatataattttgttttcctttttaagagaggattcttttcatcctaaatcttttacctttcaatctttgtatctattattacacgtgctgctgaagggagcatggtttttatctatgatacttagttaacatatatattacatttatagctatgtagtagttcccctaaattcttgtaaaaataaatttttatttgatatttcatatatatttgaaatgtgagaattcagatgtaattttttaccttgttttggcatgtttgtatgttactttaaagaggatgtgtgttctaaaggaggacatgagctgtgtgttttcaagagaacaatagagtgcgtctcttggggaaacataataaaaatgaacttttctcaccttcacagcaattgtgatcatattggtctggattgattatttgctgcccagtgatatttttccttaatggggttgtggttatttgaacatatttattagctctggaagataatcctgtgctgttttttatgtagaaaaaaacataaggctgggtgcagtgctcacacctacaatccctgtggttttggaggtcatggcgggaggatcacctgaggccaggagtttgaggccagcctcagcaacatagcatctacatctatttttaatttttattttttaaagaaaaacaatagaagagaaggctgatcccaagctacagggtttttttgtttgtttgtttgttttggagacagagtcttgctctgtctcccaggctggagtgcagtggcacaacctcggctccctgcaactttcacctctgggttcaaacaaattctcctgcctcagcctcccaagtagctgggactacaggcacccgtc

SEQ ID NO: 4869 - protein, 286 aa, Homo sapiens
MQKHYTVAWFLYSAPGVDPSPPCRSLGWKRKREWSDESEEEPEKELAPEPEETWVVEMLCGLKMKLKQQRVSSILPEHHKDFNSQLEDPVIKRFLAWDKDLRVSDKYLLAMVIAYFSRAGFPSWQYQRIHFFLALYLANDMEEDDEDSKQNIFHFLYRKNRSRIPLLRKPWFQLGHSMNPRARKNRSRIPLLRKRRFQLYRSTNPRARKNRSRIPLLRKRRFQLYRSMNSRARKNRSQIVLFQKRRFHFFCSMSCRAWVSPEELEEVSGAWGGGGGGEELGGLEAG

SEQ ID NO: 4870 - DNA, 4007 bp, Homo sapiens
ggaccagggaaggatatgaggaagtgttctgaggacagaaaaacgggagaatggggaggagaaggagcggcacatggagctcagcagaggagacagacagaaggaaagatggcttggagaagccagcagtctgcgaggctggggaggatggagagtggtttggggttttgggtcgggctctagtgtgatcaactgcagaagcattacaccgtggcctggtttctttactcagcccctggggtagatcccagccccccgcataggtccttttgctggaaaaggaagatggagtggtgggacgaatctgaggagtcgttggaggaggagccacggaaggtgctcgcccctgagcctgaggagatctgggtggcggagatgctgtgtggcctcaagatgaagctgaagcgacggcgagtgtcgctcgtgctccctgagcaccacgaggccttcaacaggctgcttgaggatcctgtcattaaaagattcttggcctgggacaaagatctgagggtgtcggacaagtatctcctggctatggtcatagcgtatttcagccgggccggcttcccctcctggcaataccaacgcattcatttcttcctggctctctacctggccaatgacatggaggaggacgacgaggactccaaacaaaacatcttccacttcctgtataggaagaaccgctctcgcatacccttgctccgtaagccttggttccagttaggccattccatgaacccgagggccaggaagaaccgctctcgcatacccttgctccgtaagcgtcggttccagttataccgttccacgaacccgagggccaggaagaaccgctctcgcatacccttgctccgtaagcgtcggttccagttataccgttccatgaactcgagggccaggaagaaccgctctcagatagtcctgttccagaaacgacggttccacttcttctgttccatgagctgcagggcttgggtttccccagaggagttggaggaggtgagtggggcctggggaggtggaggaggtggggaggaattgggtgggctggaggctggatgaggggagagaggggtatcctggcgagtccccgtcttctcaaagggcgtttgtttttccagatccaggcttatgacccagagcactgggtgtgggcgcgagatcgcgctcacctttcctagagctccagggaccggggaggcctgaggtcatcggcctgagagaaggtacatctgcatcctctggggtaaaggcagaatattggggtctatttcggaaatccgaagaacccaattgcttgatctggcttcaagcctgggcaacgtggcgagatcccctctccacaaaaatacaaaaattagccaggcgatgtgggacgcatctctactcccaactactcaggaggctgaggcgggaggatcgctggagcctggaaggtcggggccgcacggagccctgatcctgccactgcactccagtctgggcgacagagtgagaccctgcctcaaaaataatcataaaaactgagtttggggaggttcattatgattgacgcacttgagttactgatttgggtcgagggttcagtgaagctttggtttacatcttgtgcagctaaccacgttgagcacagagcatgagacttcatcatgaggaggtaggattaaggattaggcttctggactcgtggttcgtgatgttgtcacattagaaacacatctagcatggttacaagtttagatcttaagtgacacaaaaggccccagctgtgataaagtccaaagccacattctctgagggtgccctactccctgggcagacccacccaaagtccttgctatgaagcagatcactggggctgaccttgggtgtattaagtgagttttggagtcgtggtcaccaaagtgtgagtttcacagttgaacacgatggttcagaagcagggtatagaatgaaaggcagcagataaaattgcatttctcaattgacatgggacgtgaataactttcctgtctagagagctgcctccttgaagtgtgacattgtctctctcgcttccagaacaccggacccaggggagatgtggattttcagcgggaactttattccaatgctaatggcagacaccaggcaggaggagaggaaccatttgtgcagatcatctagaagaacctggaccattcttgatggagctgaatacagtgatcacgttgtcctcctaggagcaggggtggggggaggggggtggggtccttctaggagtccttggagaaaagtaagaaaccaggagcgtttccagttccaccctttcctgcggcaccaccaccctttttatattgctgaattccaacctccctggggcggaacctggaggtcctgtttcttacggacttgcagtccaggaggatttgaaggcacaatgcaggggctcagattgggacagaattcttttgtgaaatatcagtgccacagattgtaacagatagcttcatgcacactctgcattttattggtttgtatggaaaatgtcggccattgaattattcatagatttatttcaaatagtttggaaattgttgtacttttgaaaacatgctgttcctgtagttttttgatgagagttatagttgttatatatacataaagctaattttcttttcatttttaagagacaattctttttatcctaaatattttattatctttaaatttgtttctgtattattacatgtgctcctgaagcgagcactctttttatctatgatacttccataataatctcttctatttatagctattggtagttccccaccagaaaaaaacataattctggtgatagaaatttttatttgctgtttaggtttgtgactgaattgtgagaattcagttgtgatttttaacatgcctcagatatatatactaacacgtctaatatatactatctattttattggtttattttgaaaaacatgggtatagaattatttaaatattattttatttatttaaatatttattaaatatatttatttatttaaatattattactttaaatattattttaaatattttggaaatactggtatttttgaatagatgctgtttctataaagctgtgtgatggatattataactgttatatacacatacatataattttgttttcctttttaagagaggattcttttcatcctaaatcttttacctttcaatctttgtatctattattacacgtgctgctgaagggagcatggtttttatctatgatacttagttaacatatatattacatttatagctatgtagtagttcccctaaattcttgtaaaaataaatttttatttgatatttcatatatatttgaaatgtgagaattcagatgtaattttttaccttgttttggcatgtttgtatgttactttaaagaggatgtgtgttctaaaggaggacatgagctgtgtgttttcaagagaacaatagagtgcgtctcttggggaaacataataaaaatgaacttttctcaccttcacagcaattgtgatcatattggtctggattgattatttgctgcccagtgatatttttccttaatggggttgtggttatttgaacatatttattagctctggaagataatcctgtgctgttttttatgtagaaaaaaacataaggctgggtgcagtgctcacacctacaatccctgtggttttggaggtcatggcgggaggatcacctgaggccaggagtttgaggccagcctcagcaacatagcatctacatctatttttaatttttattttttaaagaaaaacaatagaagagaaggctgatcccaagctacagggtttttttgtttgtttgtttgttttggagacagagtcttgctctgtctcccaggctggagtgcagtggcacaacctcggctccctgcaactttcacctctgggttcaaacaaattctcctgcctcagcctcccaagtagctgggactacaggcacccgtc

SEQ ID NO: 4871 - protein, 259 aa, Homo sapiens
MEWWDESEESLEEEPRKVLAPEPEEIWVAEMLCGLKMKLKRRRVSLVLPEHHEAFNRLLEDPVIKRFLAWDKDLRVSDKYLLAMVIAYFSRAGFPSWQYQRIHFFLALYLANDMEEDDEDSKQNIFHFLYRKNRSRIPLLRKPWFQLGHSMNPRARKNRSRIPLLRKRRFQLYRSTNPRARKNRSRIPLLRKRRFQLYRSMNSRARKNRSQIVLFQKRRFHFFCSMSCRAWVSPEELEEVSGAWGGGGGGEELGGLEAG

SEQ ID NO: 4872 - DNA, 438 bp, Homo sapiens
gagctctccggtccgtgcctccaagatgacaaagaaaagaaggaacaatggtcgtgccaaaaagggccgcggccacgtgcaacctgttcgctgtactaactgtgcccgatgcgtgcccaaggacaaggccattaagaaattcgtcattcgaaacatagtggaggccgtagcagtcagggacatttctgaagcaagcgtcttcgatgcctatgtgcttcccaagctgtatgtgaagctacattactgtgtgagttgtgcaattcacagcaaagtagtcaggaatcgatctcgtgaagcccgcaaggaccgaacacccccacccagatttagacctgcgggtgctgccccacgtcccccaccaaagcccatgtaaggagctgagttcttaaagactgaagacaggttattctctggagaaaaataaaatggaaattgttc

SEQ ID NO: 4873 - protein, 115 aa, Homo sapiens [sequence omitted]

SEQ ID NO: 4874 - DNA, 472 bp, Homo sapiens
aagagctctccggtccgtgcctccaagatgacaaagaaaagaaggaacaatggtcgtgccaaaaagggccgcggccacgtgcaacctgttcgctgtactaactgtgcccgatgcgtgcccaaggacaaggccattaagaaattcgtcattcgaaacatagtggaggccgtagcagtcagggacatttctgaagcaagcgtcttcgatgcctatgtgcttcccaagctgtatgtgaagctacattactgtgtgagttgtgcaattcacagcaaagtagtcaggaatcgatctcgtgaagcccgcaaggaccgaacacccccacccagatttagacctgcgggtgctgccccacgtcccccaccaaagcccatgtaaggagctgagttcttaaagactgaagacaggttattctctggagaaaaataaaatggaaattgtaaaaaaataataataataataaaagaaagaaaaa

SEQ ID NO: 4875 - protein, 115 aa, Homo sapiens [sequence omitted]

SEQ ID NO: 4876 - DNA, 438 bp, Homo sapiens; identical to SEQ ID NO: 4872

SEQ ID NO: 4877 - protein, 115 aa, Homo sapiens [sequence omitted]

SEQ ID NO: 4878 - DNA, 472 bp, Homo sapiens; identical to SEQ ID NO: 4874

SEQ ID NO: 4879 - protein, 115 aa, Homo sapiens [sequence omitted]

SEQ ID NO: 4880 - DNA, 1040 bp, Homo sapiens
atgcgcacatttgctcagaatgagaaaaaaatggaagaggtggtgccagggccgttgctaggatacgaccaacagctgagaacgcggcgagtatggaagctgcgtcttaggagcctgggaaagcacttcgacgagaatagtttggtttccactatttttaatagtaaaaaactagaggggtctgcatggcggggcctcggagccaagacgaggttgagtagactcgttttgaattttctcccctctgctccggcggacttcccatgtcgccttgtggggctatcggcggcggcaggactgggggagtcagaggtctggcagcgctgtctgcgcagacctaccggacgctacctcccaacccccctttcttcctcctgcctcctcctcctcccgtcacctcctgacccgccggagctccgagcaactgccggcctccgcccccagccgcagccggtcactggcggcgccttccgcgccaagcttgggggccttttcggggtcctacatggcacggcttccgacccccggcccgggacggggctcgcaggccccagaggggcaggctggagaaggaggaggttaggtgtcttcaggagggttgctgagcccaaggacgcgccatcgccgcggagaaggagccggaccccttgggcggagcgcccaatgtgtggtccctcacgccgtcccgcaccttgctttttagggttctttttccgctttctgagcccttttataccttacgtttagaaggggaaaatcatcctcccacaccttctccccgactttttgccttttttgtcttgaagttacccaaaggtctgtgtattgttctcagtggtcccaagaattactcgaatatagttgtttttctgagggaggatggatggagataactatcctgatcccagtgtcactttttaaggcattcgcttcaagagacaagcagtttagaatcaggcagaactggattgcaaaatttatgggcagaccggtatgtgtgaaggaaaatgtctaatcaacaggagaagtatgaagctcag

SEQ ID NO: 4881 - protein, 248 aa, Homo sapiens
MRTFAQNEKKMEEVVPGPLLGYDQQLRTRRVWKLRLRSLGKHFDENSLVSTIFNSKKLEGSAWRGLGAKTRLSRLVLNFLPSAPADFPCRLVGLSAAAGLGESEVWQRCLRRPTGRYLPTPLSSSCLLLLPSPPDPPELRATAGLRPQPQPVTGGAFRAKLGGLFGVLHGTASDPRPGTGLAGPRGAGWRRRRLGVFRRVAEPKDAPSPRRRSRTPWAERPMCGPSRRPAPCFLGFFFRFLSPFIPYV

SEQ ID NO: 4882 - DNA, 1040 bp, Homo sapiens; identical to SEQ ID NO: 4880

SEQ ID NO: 4883 - protein, 248 aa, Homo sapiens; identical to SEQ ID NO: 4881

SEQ ID NO: 4884 - DNA, 240 bp, Homo sapiens
atggtacacctgtatagggaacttacaataaatggagcttgcaggactggaagttgcctgggcgagttagtgaaatgtgagggcagggatgcagctgaaaagctggcggcccagacagaagtctgccccaagcagcctgagccctcaggcaccccccagctccctgggagctcccctccacctgccaacgtcagtgccacactcgtgtctgaaaggaataacaggaacaggacagactaa

SEQ ID NO: 4885 - protein, 79 aa, Homo sapiens
MVHLYRELTINGACRTGSCLGELVKCEGRDAAEKLAAQTEVCPKQPEPSGTPQLPGSSPPPANVSATLVSERNNRNRTD

SEQ ID NO: 4886 - DNA, 5330 bp, Homo sapiens
atgccatccactgttctaacagctttatatagaactgtacctctaataaagaatgcatgtgtcttttgcagttgtgaagatgacctctccgacgacagagaagagcttctgcatgggatttcagagctggacatcagcaactcggattgtttcccatcccagctgctagtgcatggggctttagcctttcctctagggttagattcctaccatggctgtgttatagcggctgcccgctatggccggggccgggtggttgtgactggccataaggtattattcactgttggtaaactgggcccctttctgctcaatgctgtccgctggctggatgggggccgcagaggcaagattgtggtgcagacagagctgagaaccctgagtggcctcctcgcagtggggggcatagacaccagcatcgagcccaatctgaccagtgatgcaagtgtctactgctttgaacccgtgagtgaagtgggggtcaaggaactgcaggagtttgtagcagagggtggcgggctatttgttggagcccaagcctggtggtgggccttcaagaaccccggagtgtcccctttggctcgattcccaggaaacctcctcctcaacccctttggcatcagcattacaagccaaagcctcaatccagggccctttcgtactcctaaagcagggataaggacctatcacttccgctccaccttggccgagttccaggttataatgggcaggaagagaggaaatgtggaaaagggctggttggcaaagctgggaccagatggtgcagctttcctgcagattcccgcagaagagatccctgcctacatgtctgtgcatcgactcctgaggaagctgctaagtcgatatcggcttccagtagcaacccgagagaaccctgttatcaatgactgctgcagaggtgctatgctttccctggccacagggctggcccactctggaagcgacctctctctgttagtcccagaaattgaagatatgtacagcagcccctatctgcgcccctcagaatctcctatcaccgtcgaggtcaactgcaccaatccaggcaccagatattgctggatgagtactgggctctacatacctggaaggcaaattatagaagtctcactgcctgaagctgctgcctctgccgacctgaagatacagattggctgccacacagatgacctgaccagggccagcaagcttttccgaggcccactcgtaattaaccggtgctgcttggacaaacccacaaaatcgatcacgtgcctctggggtggactcctctatataattgtgcctcagaacagcaaactgggttctgtgcctgtcaccgtgaagggggctgtgcatgctccatactacaagctgggggagaccaccctggaggagtggaagaggcgtatccaggagaatccagggccctggggagagctggccacggacaacatcattctgaccgtgccgaccgcaaatcttcgtactctggagaaccctgagccgctgctccgcctctgggatgaggtgatgcaggctgtggcgcgactgggagctgagcccttccctttgcgcctgcctcagaggattgttgccgacgtgcagatctcagtgggctggatgcatgcagggtaccccatcatgtgccatctggagtcagtgcaggagctcatcaacgagaagctcatcagaaccaaggggctgtggggccccgtccatgagctgggccgcaaccagcagcggcaggagtgggagttcccaccacacaccaccgaggccacctgcaacctgtggtgtgtgtatgtgcatgagacggtcttgggcattcctcgaagccgtgccaatattgctctgtggcccccagttcgggagaagagagtcagaatctacctgagcaagggtcccaatgtgaaaaactggaatgcatggaccgcactggaaacgtatttacagctccaggaagcctttggttgggagccattcatccgtctcttcaccgagtacaggaaccagaccaacttgcccacagaaaatgttgacaaaatgaatctgtgggtcaagatgttctcccaccaagtgcagaagaacctggctccgttctttgaggcctgggcctggcccatccagaaggaagtggctaccagcctggcctatctgcctgaatggaaggaaaatattatgaaattgtacctcctcacacagatgccccactgaaattgaagtcaagaaatgcaaaaaggaactgacacatctcagcaaagaaaactgaagggatttggttataagtggagaggatctcagcatatttctggaagatagaaagtggatgaagcatgataatgaaagagtgaagaacctttcagataaaatgtaagctgatctgaacaacataaccccaaagagacttgcgcacctgaaaagcttgtctactgaagaattactccagttgtaagattgagccctctcctactctcccccaactcttatgcacagaacacaggcagtctccactattgataccagttaaaaatttcttgttattgttgctgttgttgtttgtataaaggaattgaacaggctgcttgcagagagataagagttggtgctccagaaaaaaatttctcttctagtggaaataagtgcccctacccccagccggtcagctaattctctactgacagctgagacctcctactcaagtgcctgttgccttcaggtatagaagaggtttcctgaagaaacagacctaactgtacaacagcagaggaaacccatgccaactgttatacaagttaacagttatgttgattcttaaatgggaatggtgagttagaaattcccagacatgggcgatggggagggaagaggaataagaaaagtcacgaggtagaattaggggccttgaaaatatgacaaactctgagggaaacaaagacaatgtggaaagaataacttaattttaattccatctccagagagatttgaggtgtatttaagatgaaaaacaggatactacaaagaaacggaaaactcaggagttcgagaccagcctaggcaagatggcaacatcccgtctctacaaaataatttttaaaaattagccaagcatggtggcatgtgcctgtggtcctagctacttgggaggctgaagtgggaagatcacttgagcccaggagttcaaggcttcagtgggccatgatggtgccactgcactccagcctgggggacagagtgagaccctgtctcttaaaaagcaagaaaagaaagagaagactgagaataagaagatctctttgaaaataaaataagactgctaaaagtatttggtatacagtctggaaaataaagttgagggaatctctccagataaagagcaaaaagaaatagatagaaaaatataaagaaagaaaaaagacatagacaatcaatatgtaatgttaggagttcctggaagagagaacagagacagtgtaggtgaagaaataaaaagaaaaagaattgaagaacagagcaagctaagtctccagattgagagggcccaatacaatctacatctagacacaatattgtaaaattttggaatattaaggatagaaggaagatattaaagtggccagggagaaaacaaatgaggtcatcacgattagctcaacacaaaaatggatgagaaatagactgctaacagatttgtcatcagcaacactgaatgccagaagtcaatggatcaacatcttcagagcttatggaaaatttttgtacctagaatttcatagtaaggcagactgtcaagaagaacatcaaagtgaagacattttctgtcaggcaaattttcagaaagtctccctcctttgcacccttactgaggaagtatcttgaggaaattctccagcaaaatgaggatgaaaaccaggaaagaagaagaaatgggatccataaaacagtggaccttacttaggatgtctcattctagagtgacagccaaaagggtatctcaccctagagtgacagctatccagcagactaatttcagatgagagcatactgtctcgggctttctgggaagaatgtgcattcagtgccatagatagtatcattgaagagctgggatgcttgagaagattatttagtcaagaaaaaagaaagacaaatcaacaatatgtcaaaaaattcaggtccaattatagagcaaaataaaatgaggcatgattttgagttattcatgaagaataagaagaggcttcataggtacatttccttttctatggcacaggcatgatgatattgggtgtgtagggaagaaaatatcctagcttatactaggctcccagtaagaagtatttaaatagccaaaataatgtggatatcatttattagtattcagtgttcagatcagcctattaacaaagtgtgaaaggtttcattttttattcagaactgaagttgaaagtaattaatgctgacaaagggaaagaaagcagaaagagattgagaattagaggaagagaagtggaatcaaaggtagagatacttatatattcaaagtggggatgaaaagatcttcagttaatggaacaagaactagaggattagtgtattgttcaaagctataaaatcaaaccaatagatgtattaaaaagtgatgtaactatcagacatttggagagagatggacaaaggaaagtggcgatagtgtaagttaaatccttatcttttgtaatggggaattattaaagatgttgtaaagtcagtaagtcaagaaattattgctcaaacatattatttaaagttagaaagttagttaccagacgatctaaaataaatattgttaaaagcattacctctagggaatgggatttagatttaaaaagggtgggatgggaaactgtgtttttcattttaagtccttctgtactatttaattttttaccttgtgcatgtattactttgaaaaaatttttaataaacccaaataaaaatcttccagtgacttcccattgattaagatgcaacccagctaaagcctttaaaatggttttcaaggtcctcaagtatctaggtccacttgatgtgtccaggctcatgatatctccccacaagtctctatttccagccagattaagtatcttccagttattaaaacacacttcacattcttttgtttgtataggtgttccacaaaaaacaaagcctactgctgatctcaccatgtctgctgagtaagcttaccatctagtgggttttaatatttgttgaatgaaggaatgtccaatacagcattgaatgaagtttgccaacttcattcttttccaagaaggcctttgatgttt

SEQ ID NO: 4887 - protein, 738 aa, Homo sapiens [sequence omitted]

SEQ ID NO: 4888 - DNA, 5330 bp, Homo sapiens; identical to SEQ ID NO: 4886

SEQ ID NO: 4889 - protein, 738 aa, Homo sapiens [sequence omitted]

SEQ ID NO: 4890 - DNA, 240 bp, Homo sapiens
atggtacacctgtatagggaacttacaataaatggagcttgcaggactggaagttgcctgggcgagttagtgaaatgtgagggcagggatgcagctgaaaagctggcggcccagacagaagtctgccccaagcagcctgagccctcaggcaccccccagctccctgggagctcccctccacctgccaacgtcagtgccacactggtgtctgaaaggaaaaacaggaacaggacagactaa

SEQ ID NO: 4891 - protein, 79 aa, Homo sapiens
MVHLYRELTINGACRTGSCLGELVKCEGRDAAEKLAAQTEVCPKQPEPSGTPQLPGSSPPPANVSATLVSERKNRNRTD

SEQ ID NO: 4892 - DNA, 2681 bp, Homo sapiens
tgctcccaagatggggcccttcttgctcaatgcggtgcgctggctggccagaggccagacaggcaaagttggggtgaacacaaatctaaaagatctgtgtcctctcctatcggagcatggcctgcaatgcagcctggagccccatctgaacagcgacttgtgtgtctactgctgcaaggcatacagtgacaaggaggctaagcagctgcaggagtttgtggctgagggtggggggctgctgattgggggccaggcctggtggtgggcctcccagaaccctggccactgccccttggctggcttccctggtaacatcatcctcaactgctttggcctcagcatcctgcctcagactctcaaagcaggctgcttccccgttcccacccctgagatgagaagctaccacttccgcaaggcgctctctcaattccaggctatactgaaccacgagaatgggaacttggaaaagagctgtctggcaaagttgagagttgatggtgcagccttcctacagattcctgcggagggggtccctgcttacatatccctgcacaggctcctgaggaagatgctacgagggtctggcctcccagctgtgagccgggaaaatccagttgccagtgactcctatgaggctgcggtgctctccctggccactgggctggctcactctggaactgactgctcccagctggcccaggggcttggcacctggacctgctcctccagtttgtacccctcaaaacaccccatcaccgtggagatcaatggaatcaacccaggcaacaatgattgctgggtgagtaccgggctctacctcctggaaggacaaaatgcagaagtctcactgtctgaagctgctgcctctgctggcctgagggtacagattggctgccacaccgatgaccttaccaaggccaggaagctatctcgagcccccgtggtgactcaccaatgctggatggacaggactgagcggtcagtctcctgcctctggggcggcctcctctacgtcatcgtgcccaagggcagccaactaggccctgtgcctgtcactatcaggggagctgtgcctgccccatactacaagctgggtaagacatcgctggaggagtggaagaggcagatgcaggagaacctggctccctggggagagctggccacggacaacatcatcctgacagtgccaaccacaaaccttcaggccctgaaggaccccgagcctgtgctccgcctctgggatgagatgatgcaggctgtggccaggctggcggctgagcccttccctttccgccgtcctgagaggattgtggctgatgtgcagatctcagctggctggatgcattcaggataccccatcatgtgccacctggagtctgtgaaggagatcatcaatgagatggacatgaggagcaggggtgtgtggggccccatccatgagctgggccacaaccaacagtggcatggatgggagttccccccacacactactgaggccacctgtaacctttggtcagtctacgtgcatgaaacagtcctggggatccccagggctcaggcccatgaggctctgagccctccagagcgagagaggagaatcaaggcccacctgggaaagggagcccccctgtgtgactggaatgtatggacagccctggaaacatatctacagctccaacaggccttcgggtgggagccattcacccagctctttgctgagtaccagaccctctctcacctccccaaagacaacactggcaggatgaatctatgggtgaagaagttctctgaaaaagtgaagaagaatctggttcccttctttgaggcctggggctggcctatccagaaggaggtggctgacagcctggcctccctaccagagtggcaggaaaaccccatgcaagtgtacctccgtgccaggaagtaaaggatgccccacaaggcgggagagaaaaggcagggtcacgccatcaactccaccatggggctttggccgtgtgctcagtatctggagcctgaatcccgcttccaagcctgaccactagatggtggccacggtcataagaaaaaatggaacccctttctgtaaaaggtgccttgtgcttctttttattgtttttctgcctacgctattgctttccccaagagactcacttcacctcttagtcttccagagaggatctttcatcctgccatcctgaggcttctatttttgaccaatagctctaaagaccacgggttcccataacaacctgatatccctttctcatccctgccatccctgaataaggcttctaatttattatgctttaacaagttttcaaatagcaagcgagacacgctggaatagtggagagagccccaaacactaaataagccaaattttggggtaaaaaaaataaaaaaccaagaaaccagacatagaagcagaacctaaagcatatttatcaaaatatctttgtttaaaaaaaatgtcttcagtggtcgtcttggctggtgggattttaggtcattttaattatctttataaaactttattctctcgaattttaaaattaacatctatttctcttataattaaaaattaaatgttatattttttaaaaagtatagtttatttattccagtagtaaaacattattgaaaaataaaggaaaagcatgcagaatactagaaagagg

SEQ ID NO: 4893 - protein, 638 aa, Homo sapiens
MGPFLLNAVRWLARGQTGKVGVNTNLKDLCPLLSEHGLQCSLEPHLNSDLCVYCCKAYSDKEAKQLQEFVAEGGGLLIGGQAWWWASQNPGHCPLAGFPGNIILNCFGLSILPQTLKAGCFPVPTPEMRSYHFRKALSQFQAILNHENGNLEKSCLAKLRVDGAAFLQIPAEGVPAYISLHRLLRKMLRGSGLPAVSRENPVASDSYEAAVLSLATGLAHSGTDCSQLAQGLGTWTCSSSLYPSKHPITVEINGINPGNNDCWVSTGLYLLEGQNAEVSLSEAAASAGLRVQIGCHTDDLTKARKLSRAPVVTHQCWMDRTERSVSCLWGGLLYVIVPKGSQLGPVPVTIRGAVPAPYYKLGKTSLEEWKRQMQENLAPWGELATDNIILTVPTTNLQALKDPEPVLRLWDEMMQAVARLAAEPFPFRRPERIVADVQISAGWMHSGYPIMCHLESVKEIINEMDMRSRGVWGPIHELGHNQQWHGWEFPPHTTEATCNLWSVYVHETVLGIPRAQAHEALSPPERERRIKAHLGKGAPLCDWNVWTALETYLQLQQAFGWEPFTQLFAEYQTLSHLPKDNTGRMNLWVKKFSEKVKKNLVPFFEAWGWPIQKEVADSLASLPEWQENPMQVYLRARK

SEQ ID NO: 4894 - DNA, 1135 bp, Homo sapiens
tgctcccaagatggggcccttcttgctcaatgcggtgcgctggctggccagaggccagacaggcaaagttggggtgaacacaaatctaaaagatctgtgtcctctcctatcggagcatggcctgcaatgcagcctggagccccatctgaacagcgacttgtgtgtctactgctgcaaggcatacagtgacaaggaggctaagcagctgcaggagtttgtggctgagggtggggggctgctgattgggggccaggcctggtggtgggcctcccagaaccctggccactgccccttggctggcttccctggtaacatcatcctcaactgctttggcctcagcatcctgcctcagactctcaaagcaggctgcttccccgttcccacccctgagatgagaagctaccacttccgcaaggcgctctctcaattccaggctatactgaaccacgagaatgggaacttggaaaagagctgtctggcaaagttgagagttgatggtgcagccttcctacagattcctgcggagggggtccctgcttacatatccctgcacaggctcctgaggaagatgctacgagggtctggcctcccagctgtgagccgggaaaatccagttgccagtgactcctatgaggctgcggtgctctccctggccactgggctggctcactctggaactgactgctcccagctggcccaggggcttggcacctggacctgctcctccagtttgtacccctcaaaacaccccatcaccgtggagatcaatggaatcaacccaggcaacaatgattgctgggtgagtaccgggctctacctcctggaaggacaaaatgcagaagtctcactgtctgaagctgctgcctctgctggcctgagggtaaggtctgaacacccacatctgccacctctcaaaaccgtagagctgtgtcattctcatccactgtctagttccagctcatggcaatgctgccaggagtacagagatggattattctgcccattttacagattttacagatgaagcagctaaatttcagggcatctaagtgagtgactgaagtgcctagtgttatcaagcaagagaagctcactgcagaatggactagaagccaaaactatgacacttgagttt

SEQ ID NO: 4895 - protein, 337 aa, Homo sapiens [sequence omitted]

SEQ ID NO: 4896 - DNA, 2805 bp, Homo sapiens
aaaacaaaaacaaaagaaaacattttattgcaatttgattaacaaggagacaggagcccagctcaaatctgtcccattgtacttattttaaagagttattttagtagaaaaggtgtagggagtggattctgtgattagtaggtgattgatagaaagaaaaggaagggctggaaaatcctcgggcatgggcagttacctcttcatgcctcctcatgggtcccatgtgcaaactcagagggagttagtatgaaacatgcggtacaaatttaggctgtgtgtcagcaagctcattctgcacaaactctggttttatctctttatcttgacacctgaagggtgtgcataatcccatcactccccaaaatatgccctacatgcagaatttaaattcatcctgcctccttgactctgagggccacttcctaccacagctagggtcccttttctgtcagcattctttctggagcttgcttatatcaaacctaagaaaagcaactccaggactccagacaaaacagatctccacccatctggcggccagaaagggaagctctgggcaaagagggagagagaatcaacctcactcactctggatgggcctcctgtgtgttcacagaggacagagcagagtcccccagctcatcctcaatatcagcgtccccagactggcttaggtcctgctagaagaacccaggattttgcctggcagaaagacacaagacctttgccaggatcagcctggtctctcaccaattcatgtcaggtgaagacttatagtggagctgtttaaatccttagaaaaatgattttaaatgccttgaagtccaaatgactttggagtgctaaaatttcataagtttccatgcctagcacatagaaaagggaagctggggtttcatgggcatgtttgtctaataccttccatctacacaacctcacacgcacatcacaaagcatcacaaagactctaatttctccaacgcttggtggaatcacctgtccaggtacagattggctgccacaccgatgaccttaccaaggccaggaagctatctcgagcccccgtggtgactcaccaatgctggatggacaggactgagcggtcagtctcctgcctctggggcggcctcctctacgtcatcgtgcccaagggcagccaactaggccctgtgcctgtcactatcaggggagctgtgcctgccccatactacaagctgggtaagacatcgctggaggagtggaagaggcagatgcaggagaacctggctccctggggagagctggccacggacaacatcatcctgacagtgccaaccacaaaccttcaggccctgaaggaccccgagcctgtgctccgcctctgggatgagatgatgcaggctgtggccaggctggcggctgagcccttccctttccgccgtcctgagaggattgtggctgatgtgcagatctcagctggctggatgcattcaggataccccatcatgtgccacctggagtctgtgaaggagatcatcaatgagatggacatgaggagcaggggtgtgtggggccccatccatgagctgggccacaaccaacagtggcatggatgggagttccccccacacactactgaggccacctgtaacctttggtcagtctacgtgcatgaaacagtcctggggatccccagggctcaggcccatgaggctctgagccctccagagcgagagaggagaatcaaggcccacctgggaaagggagcccccctgtgtgactggaatgtatggacagccctggaaacatatctacagctccaacaggccttcgggtgggagccattcacccagctctttgctgagtaccagaccctctctcacctccccaaagacaacactggcaggatgaatctatgggtgaagaagttctctgaaaaagtgaagaagaatctggttcccttctttgaggcctggggctggcctatccagaaggaggtggctgacagcctggcctccctaccagagtggcaggaaaaccccatgcaagtgtacctccgtgccaggaagtaaaggatgccccacaaggcgggagagaaaaggcagggtcacgccatcaactccaccatggggctttggccgtgtgctcagtatctggagcctgaatcccgcttccaagcctgaccactagatggtggccacggtcataagaaaaaatggaacccctttctgtaaaaggtgccttgtgcttctttttattgtttttctgcctacgctattgctttccccaagagactcacttcacctcttagtcttccagagaggatctttcatcctgccatcctgaggcttctatttttgaccaatagctctaaagaccacgggttcccataacaacctgatatccctttctcatccctgccatccctgaataaggcttctaatttattatgctttaacaagttttcaaatagcaagcgagacacgctggaatagtggagagagccccaaacactaaataagccaaattttggggtaaaaaaaataaaaaaccaagaaaccagacatagaagcagaacctaaagcatatttatcaaaatatctttgtttaaaaaaaatgtcttcagtggtcgtcttggctggtgggattttaggtcattttaattatctttataaaactttattctctcgaattttaaaattaacatctatttctcttataattaaaaattaaatgttatattttttaaaaagtatagtttatttattccagtagtaaaacattattgaaaaataaaggaaaagcatgcagaatactagaaagagg

SEQ ID NO: 4897 - protein, 321 aa, Homo sapiens
MDRTERSVSCLWGGLLYVIVPKGSQLGPVPVTIRGAVPAPYYKLGKTSLEEWKRQMQENLAPWGELATDNIILTVPTTNLQALKDPEPVLRLWDEMMQAVARLAAEPFPFRRPERIVADVQISAGWMHSGYPIMCHLESVKEIINEMDMRSRGVWGPIHELGHNQQWHGWEFPPHTTEATCNLWSVYVHETVLGIPRAQAHEALSPPERERRIKAHLGKGAPLCDWNVWTALETYLQLQQAFGWEPFTQLFAEYQTLSHLPKDNTGRMNLWVKKFSEKVKKNLVPFFEAWGWPIQKEVADSLASLPEWQENPMQVYLRARK

SEQ ID NO: 4898 - DNA, 2127 bp, Homo sapiens
cagaccacctgagctcaggagctcaagaccagcctgggcaacatggcaaaaccctgtctctactaacactataaaaagttagctgggcgtgttggtgcatgctgtagtcccagctactcaggaggctgagccacgagaatcgcttgaacctgggagatggaggttgaagtgagccaagatcgcaccattgcactccagcctggggaaaaaaaaaagccaggcctcctaatgtactcatttaaacatcacttgtgtccacctgggttcagaattgcgctggacatgggatacacaaagcgggagtggaattttcaggaagcagctgtgctgtgggtgacggtcatactttattctctaaaactctccagtttcaattggcctcttggtgccaaagcaccatggcgtgttacacctatcagatcgggcacactgccccttcttcccaacctacgagctgaaatggccagcactgcgccttccagaacccagcgtagatgcacagctgccacggaggtaggaagaatgattcgtttgccaccaaaagcccagtttctccaacaggtgaatccctaggccagcccggccccttcccacacacccctaccccgagacgggtgcagaatcagcagcggggatcatccagagactctcgcagtccacggcaggtgtcggagtgggcctcattccagagttgtggtggccgctccacctggcgagcttcgaggggactccggcaggcgctcgctgtggggtcctcccaccagtcttctcagcacaggaacggtgccttcacattggtcttccggggcttaaaagcatatcattcctgcttgctcttcagatgcaaactccccctccaaggatacctccaggttccctgccagctcacttgactcacatggcaatggtcaccgggctgcctgagcccaaatcaagcaccgtttattagggggaagctccgttatccagaaagctcatctttgaagagctacccatttcctgccaaagttgtggcgggaaggccttaggtactagaaaaccttggggaatggcaattaaaggattatcattcttacttatttgtttggataagcagcaatcacccttcggatgcttattggtgagaatatttctaaaagtgtcctgcacatttccctgctttgatgaatggaacggcagggcaggatttaactgtctgatggctacggttttgggaaagtgccagaacctccacgtcagccaccccagagccacaggcagggtatgagccacagcaatgggccccaagaaagagccccacacccaccatggtccacggaagacgctgcttactggccccgggttacctggagtcatgtgcattctccttacatcaagtgaagataatattttgtttccttcccactttttctctaacacaagccaccccagttctcccttctgacaacaggcaagtggaccctagtagaccttccagaaaagccttagagagcacccccaaatgctcacatttgtcagctgtaattccaccctcagttaaaacctgattctcaatgtgacttggccaacgcagcttgcaaagcaagaacgtcttcatctaaggttgaaaacatcagttgtttgggttgtgagaaaagaaaagcccacaaggtttccgaggcttggtgctgtttctcactgtcctcagctcctgattctgcagctggttctctctccaagcactagcaaaaccctgccctaggagcccccagactctgagagcccatgaccaaaaagaaaaggaaagccaagttggggaagaacaggggcccccaactccacagccctccactctgcccagagggcccaccctgggctgcctggaaccccctaaagttgccacccccgcaacacagtagtggggcagttcctggcagcgcctgcagcccatgggctggctctgtacccgcagccccgccaagcgtctgttatcttatttactggaatctgcacagccaggctctagctcaccggtgactaaggagctgcagccattattaccaggcagatggcagactccctaaaagcagacattaaacaataaaatgccaccacataccttgcccacaaaataaaatcaaaacaaac

SEQ ID NO: 4899 - protein, 96 aa, Homo sapiens
MGYTKREWNFQEAAVLWVTVILYSLKLSSFNWPLGAKAPWRVTPIRSGTLPLLPNLRAEMASTAPSRTQRRCTAATEVGRMIRLPPKAQFLQQVNP

SEQ ID NO: 4900 - DNA, 2127 bp, Homo sapiens
cagaccacctgagctcaggagctcaagaccagcctgggcaacatggcgaaaccctgtctctactaacactataaaaagttagctgggcgtgttggtgcatgctgtagtcccagctactcaggaggctgagccacgagaatcgcttgaacctgggagatggaggttgaagtgagccaagatcgcaccattgcactccagcctggggaaaaaaaaaagccaggcctcctaatgtactcatttaaacatcacttgtgtccacctgggttcagaattgcgctggacatgggatacacaaagcgggagtggaattttcaggaagcagctgtgctgtgggtgacggtcatactttattctctaaaactctccagtttcaattggcctcttggtgccaaagcaccatggcgtgttacacctatcagatcgggcacactgccccttcttcccaacctacgagctgaaatggccagcactgcgccttccagaacccagcgtagatgcacagctgccacggaggtaggaagaatgattcgtttgccaccaaaagcccagtttctccaacaggtgaatccctaggccagcccggccccttcccacacacccctaccccgagacgggtgcagaatcagcagcggggatcatccagagactctcgcagtccacggcaggtgtcggagtgggcctcattccagagttgtggtggccgctccacctggcgagcttcgaggggactccggcaggcgctcgctgtggggtcctcccaccagtcttctcagcacaggaacggtgccttcacattggtcttccggggcttaaaagcatatcattcctgcttgctcttcagatgcaaactccccctccaaggatacctccaggttccctgccagctcacttgactcacatggcaatggtcaccgggctgcctgagcccaaatcaagcaccgtttattagggggaagctccgttatccagaaagctcatctttgaagagctacccatttcctgccaaagttgtggcgggaaggccttaggtactagaaaaccttggggaatggcaattaaaggattatcattcttacttatttgtttggataagcagcaatcacccttcggatgcttattggtgagaatatttctaaaagtgtcctgcacatttccctgctttgatgaatggaacggcagggcaggatttaactgtctgatggctacggtttcgggaaagtgccagaacctccacgtcagccaccccagagccacaggcagggtatgagccacagcaatgggccccaagaaagagccccacacccaccatggtccacggaagacgctgcttactggccccgggttacctggagtcatgtgcattctccttacatcaagtgaagataatattttgtttccttcccactttttctctaacacaagccaccccagttctcccttctgacaacaggcaagtggaccctagtagaccttccagaaaagccttagagagcacccccaaatgctcacatttgtcagctgtaattccaccctcagttaaaacctgattctcaatgtgacttggccaacgcagcttgcaaagcaagaacgtcttcatctaaggttgaaaacatcagttgtttgggttgtgagaaaagaaaagcccacaaggtttccgaggcttggtgctgtttctcactgtcctcagctcctgattctgcagctggttctctctccaagcactagcaaaaccctgccctaggagcccccagactctgagagcccatgaccaaaaagaaaaggaaagccaagttggggaagaacaggggcccccaactccacagccctccactctgcccagagggcccaccctgggctgcctggaaccccctaaagttgccacccccgcaacacagtagtggggcagttcctggcagcgcctgcagcccatgggctggctctgtacccgcagccccgccaagcgtctgttatcttatttactggaatctgcacagccaggctctagctcaccggtgactaaggagctgcagccattattaccaggcagatggcagactccctaaaagcagacattaaacaataaaatgccaccacataccttgcccacaaaataaaatcaaaacaaac

SEQ ID NO: 4901 - protein, 96 aa, Homo sapiens; identical to SEQ ID NO: 4899

SEQ ID NO: 4902 - DNA, 906 bp, Homo sapiens
ccctcctggtgagatcccatcacgtcccctggcctccagtgtcatctgctctgcatgatatctccagggggacctctctgctgggctccaggccgcatggctgtgggtgaccagcatcatgtcccaccgggtcccctgcagtcccagtgcacctgcctgctcatccagggacctgtcctcactgcctgctgcctgcactgtgtggaaggacagaggctaaacgacgaagcctcgagctctggtctcatggaaatggcagcctgcccaccacccacgcttgcccagcctttcttcacgcaggaagaatatttctcagccctccgttctcaagacagatgagtgctttagaaagaggactctgcagcggtgaggaggatggaatgacaggcaaagcacgcaggaccaggagatggcttcgttccctcaatcactcatccaaagacgtttaatgagcacctattgtgtgtcaggcattgtaccgggcaatggggatatcgtagtcagtaataagtgaggagagatgagttcatttgtgagaggctctgaccagtggaatcagaggaagggagttcccctgggtgggccaggttcaaagacattttggaagtagaatctgcagaacatgatgatcttttggaaacagggcagggacgtgaatgagcacgtaatgtccccatgggtttgtctttccgaaggtttaaaatcctcaagaataaggaacataggcatgtgtcgtaacggtctccacagtgggggagtattatgttagtgcacctgcatgttaactctgctcatgaaggggccacgtcttcaccaccacaaagcctcaagcatgcatatctggtccctccaaccccctccctattgaggtgcaataaaggcccatgtttctcctagtatgggaac

SEQ ID NO: 4903 - protein, 80 aa, Homo sapiens
MAVGDQHHVPPGPLQSQCTCLLIQGPVLTACCLHCVEGQRLNDEASSSGLMEMAACPPPTLAQPFFTQEEYFSALRSQDR

SEQ ID NO: 4904 - DNA, 984 bp, Homo sapiens
atgacactggaggccaggggacgtgatgggatctcaccaggagggcctgagaagggaaaggcaggtggaatggacagcgcctgcaaggtgaggcgcccctacaaggtgaggcacccctgcaaggggaccgcccagcccccaacacctgggcactgccccactcccctcacctgtcacctcatcacccagcccacggtaccctgcagcttggctccaggcccaccttccagggctcccctcgaagcctcctgtccgctcagccccaggtgcggcatccgcaggtcccgtgggttccaccttcccagcgcctctgaggcctcgcggccgcttctccccgcgcccacccgcgcccgagcgaagtcccgcagcgaaatctccgggaggccgcgcctctcctgtcccagccccggggtctcccgtctcaccccacgaaaaggcaatctgggccgtgacctccgaggcccccagatccgcccccgaacgaggcgggcagggagaggacgcgtggcccccacccactcagctcccagcgcggagtcccgggaccaccttgcggagaaaagtccgccccgcacctgccacggaggagaagctgggggtgggggacccaggaactgcggctcggcccaggcgggggacctggaaaaacctcgcgcggggcgactggggacggcggcgaggagggaggctccgcggacgcgcgtggggcggcccgggacagcgggagccaggcagaggaggcggcggcccggggcatccgagctcaagcgccgctccgccgacgtgcatccggccgggcgcctccccctttacttggcttgctcccccacgaccaccctcggcccaccctccaacaacaggggcaccccgcgctccccctgcgaggccacgcgagccccgaccccccgcgcaccgggctgcagacgggagacgggctccagcctcaagaggccccagacttgctggaaaggcagatgtgtttaa

SEQ ID NO: 4905 - protein, 327 aa, Homo sapiens
MTLEARGRDGISPGGPEKGKAGGMDSACKVRRPYKVRHPCKGTAQPPTPGHCPTPLTCHLITQPTVPCSLAPGPPSRAPLEASCPLSPRCGIRRSRGFHLPSASEASRPLLPAPTRARAKSRSEISGRPRLSCPSPGVSRLTPRKGNLGRDLRGPQIRPRTRRAGRGRVAPTHSAPSAESRDHLAEKSPPRTCHGGEAGGGGPRNCGSAQAGDLEKPRAGRLGTAARREAPRTRVGRPGTAGARQRRRRPGASELKRRSADVHPAGRLPLYLACSPTTTLGPPSNNRGTPRSPCEATRAPTPRAPGCRRETGSSLKRPQTCWKGRCV

SEQ ID NO: 4906 - DNA, 1383 bp, Homo sapiens
atggtcccggcgcctcctccgtgcgggccccgccccgggccgcgctcgcacaaactcccacgcgagtgcttccccgcgtccgggcccgggagcccggttctttgcgctgcagccctcaggcgaccgcgcggaggccgctgccgccgtggtggggacccgcgcccctccgcgcacttgaagctcagcgcggcttccgattggcgcgcgcagcgggggcccggggagggccgcgggctccgccattggccgaggggcgcacctgtcaccgctcaacctggggcctctgcccgccctcccctgggtgcggagccggacggcgggcactggcaacccccgggcccctggagagccccgcggcggcccaagacccgctcccgagacacgtgggcccctccggacttggttggtccctggagccagctgcgcgcgtcctctccggcctccttgtcggcgctggagtgggtccacgtctgccttgcggagcgcggtggttccacgctcctgagcgcccacgctgcgcagacctggccgctctgcgaggcgacggcagcgcactgaagaccgtggtgtttcccaagccctccctgctctcgggcctccagggcgcagcaggggagggttttgtccccgtggccaaagctctgcaggtcgaaccttatctgctatgggaaggccccgcattttcagattcacgcagggccctctgcagactgttggcagaaaaaaggtagccaccaaacacatgcataagctggacttttcccagaatgctgcagcagaactaccctccagatagacactagcctgcgggccacagtgctacgtgagtcttgcaaagaggagatctttatggcgaggctgagagcactgcctgcatgctttaccagagcccagcctccagcctccacggaaaatgtgttttggaatcaacactctttgcaaaggctccacactgctttctggtagcattggcctgggcgcccaggcactcctttagaacccacctgttccccccacccaccctagtgggaggaggagagggttacactgacagataccggcagctctgcaacccgggaacaacgcagacaacatacaactcgacagagtcacagaaggtggcgtccatcgcgcctggatggtgactactgccctgcgggctgctgggtgggtgaaacacacagggaagaagcacaaatacacacacagatgtggctcagggacatttgaatgcttcagtgtgtgaattttttagcgcattctgactcgaaattatggctgaatagtggcgcactaatgtccaagtccatgttcgataatggcaggaagtctgcactaattggtctatttagtagttgctgaggtggcaaaagctgcagctgc

SEQ ID NO: 4907 - protein, 185 aa, Homo sapiens
MVPAPPPCGPRPGPRSHKLPRECFPASGPGSPVLCAAALRRPRGGRCRRGGDPRPSAHLKLSAASDWRAQRGPGEGRGLRHWPRGAPVTAQPGASARPPLGAEPDGGHWQPPGPWRAPRRPKTRSRDTWAPPDLVGPWSQLRASSPASLSALEWVHVCLAERGGSTLLSAHAAQTWPLCEATAAH

SEQ ID NO: 4908 - DNA, 527 bp, Homo sapiens
ccgaatgagacatcctgtgttgatcgcagccgtctcccagcatgtggagcaacactaggaccgtggtagatgttcagtcatgttcgctgaaggaagaagggagtgaatgaatgtcttctctgaggatagctgagcatccgtgcatccgtctggccatgagaacttggttgcgctcacatgaggatcctgagcagagtcgcagtgcacgctctgcggggagccggaagggagagatggggagagatgatcccaacgtgtgactctaaaagccgaatactaaaggcttctgtatactcagggtcacagaagctcaaccgtgtccattggaaaggctcttactcgtaatttaaaacacaaaaatgaaaaaaagatacagacagcccaactaaatccttgaaatgcagcgtggcgtgaaaatggagcggcattttagttaacgagggtctggatgccattcacaggaatgcagtttctacagggttctgctttgcagagacctctcctgataataataataaatttactca

SEQ ID NO: 4909 - protein, 49 aa, Homo sapiens
MSSLRIAEHPCIRLAMRTWLRSHEDPEQSRSARSAGSRKGEMGRDDPNV

SEQ ID NO: 4910 - DNA, 2887 bp, Homo sapiens
aaaattttattaaccagcatgtttggtatatttaaagcagtgactgagtgtgtttgagtgagtggctgagtgcagtgtcttttgtttaaacacactgcctcgtgtctttgtagctgattcagagagtttgaattgtggggtgggagactaacttcagctccaggctgcagtaatgtgttggtagttacacttgaggcatttttttgttgttgttaattaactctatagtctcaaactatttttgcaaatatatcatttttcctaattggttcttgacgtgcagtggactggctctgtgaatgattggcagggtcttagttttgcgagagtatttccttctaagaattattgtgatctgcagaaacagccatttgattcaaaaatcatgtagaaaaggagtaggagaagcaaaacgtttcatttttgggccttaaccatttgaaatgtttggactttaaacataaagccatggagtttataaagccaagtaaccatttgatatggataataatatctactctagagagagtatatatatgcacattgatttttaatgctgttaagatacttttgtaaaactgtaggaacaagagtaattagaccaaattgaagcttaggggacagtaaagtggttgctttccatttagggtaaccatgcatgtggttagtcctctcctcctgagattcagaaccagttgactgtccccttaggtgtataaggagaaaagttgacatgtctgggacctctgacatgtgtacacatgcttgcacacatgcacacacagtgaatgttttaagttatacaaacataagaccttaagatgcaaagagccagaatattctaaagaggtgatgaacagagggggtggaaactgcatcacagatgttttccaagggccagggtggaatctgagctctagtgtctgactttgagatgcattatatttttaacacataaatgaggggatccatatcacattctttcttgtggaccaccaaattgaaggctttcttgtaattcacaagcagcagctctccagcatctctccgtagcctgggtgaagtcccagaagctggtgtgcatcattttccaaggtggcagagctgcttgctctgcagatcattcctttgagagaggagtacaagtgaagaaacaaggaggcacttcctgtaggagcactgatgtgccttgtccacactcccctctgagctttactggtaagagagctccgactgaacatgctgagcagttgagcacttttccatcagcaacaacagcgaggatggaaatggaaaggaaccgaactaaaatgcatttccctttgcagggcagagagctaagctcttaggaatagtgttatagaaataagcaccctaacttcaattcctgaaaatgttggttaatggagagaattttggagtttcacttaatattttcccatcggtcgccataaataagtcttcaggcgctcctagaagagtcccagcccaaggctcgattaaggaccacactgcaggtctgaggctcactgctctgagtcctgaacaccagagccctgcagagagtggtgataacacatcatctctgcaaagaggaacctctcccccggccgccacttcactcaggcttctactgagcagcaaggacagcctgggtttcaaatgccacttcccctgctttagggatccaggtgtcctgatagcgtgaccctgctgaggcaaggtatcaactccgagagtgactgagtcactgagcgtggcacatgaacaaacgtcatgacaaagattctctgagtgaagttaacaccacgtattttacctttgcaaaaaacaaactggcaccctgagttctaactacggacggacgatatctttgcctccacacccagattcctggaaatggctaacgtttcctttctaggggaagggtcgaggaatactcaagtgctagcttagcagctttgttcagtccagatcagagctgttaggtaaaggcctaaccacctccctgcagtctcttatatctcaagctttaggaacccatttctaaatgtacactagcggagaatttatattgtcagccttgattaccataggacaggcagaaaggcgataatttgtatcttttaatataaaagaagcttttaacttttccagcctattataataactgagttatattcactgtggctcaaactaattggcattgtggaacatttctttaccttcaaagttttctccaccaatcatttcagttctattgcagtcctggtgccatatgtcccctgcaaattgtgaaagtaattagtgacaaaatagcagcctgctccttttcaatggcgaaactgtcggcattagcagttttgggtaagctggcggtactataacacgtactggaaacctgttcctcatcaccacctaccagattctggaaatgccgtcttctagaaaacgatggcgtttgtggtggtcttcttttgaaaggaacagtaatttgtgtggatattgttaaagtgtttaaagaatattttgacaattaagtttacattttacaattgctttattttttattaaaatagttgtatataaatattaccctatttcactgttgttcaagtaaatctaaaccttgtagacaagtgagtcatctgatatgtatagaagctgtgatatatagagtacatttattgtgtaaatgtttatgaatataattgttcctgtgtttttataagttggggatattttgttgttttacggcaacaaaatttattgcatttaaatggtttttatgtaatagaaatcacgcaaaatagtgaaggatttaaaatatgtatatgatacatgtaaatgtacaaactttagaaagaaataaatccaacaaatttca

SEQ ID NO: 4911 - protein, 104 aa, Homo sapiens
MLVNGENFGVSLNIFPSVAINKSSGAPRRVPAQGSIKDHTAGLRLTALSPEHQSPAESGDNTSSLQRGTSPPAATSLRLLLSSKDSLGFKCHFPCFRDPGVLIA

SEQ ID NO: 4912 - DNA, 2887 bp, Homo sapiens; identical to SEQ ID NO: 4910

SEQ ID NO: 4913 - protein, 104 aa, Homo sapiens; identical to SEQ ID NO: 4911

SEQ ID NO: 4914 - DNA, 444 bp, Homo sapiens
atgactgggcaccggttggtccactgcggctgttccaagctgcccccacagcctcaccccaggactccaccaggagcacagggaaggggtccccgaaagtgggcgaggtcgctgcccggaggtctcactctctgcgccgcgccgcgcccctcgccccatcccgagcagctaccccgaagctcccaggggctccgccgaggcgaatcctcacattgcggcgtggtggccgacaaaacccgggaccctgatcttggcgcctccacgccaccgcccggaggccaagacccccgagcgccgcagcatagcgtagcccagaccagtcacctcatcctttttcgccctctcaacccagcttttcccgactccgggaagaaccgggaagagaaggcggaggggagcgaagcgccgcctgataaatactgtggcccagtcccgcccccctaa

SEQ ID NO: 4915 - protein, 147 aa, Homo sapiens
MTGHRLVHCGCSKLPPQPHPRTPPGAQGRGPRKWARSLPGGLTLCAAPRPSPHPEQLPRSSQGLRRGESSHCGVVADKTRDPDLGASTPPPGGQDPRAPQHSVAQTSHLILFRPLNPAFPDSGKNREEKAEGSEAPPDKYCGPVPPP

SEQ ID NO: 4916 - DNA, 444 bp, Homo sapiens; identical to SEQ ID NO: 4914

SEQ ID NO: 4917 - protein, 147 aa, Homo sapiens; identical to SEQ ID NO: 4915

SEQ ID NO: 4918 - DNA, 645 bp, Homo sapiens
atggagagctcactaggatcacctgtgctagaggaaacgctgaattcattttctatacattatgcagaagatgacatcactcttgccaaagccatcagcagagaactgtgtgcgtattatctgaaagaagattatgcagatccaaacctgactgccaagtggaaaagagacagttacaaggctttgtgctgcctgtggtgtgttcagactcaggataccaactttggaaccaactgcatctgccaggcttctgcctttttgctctcaggaattaccgctgctgaactggaagtagagattgtccctggcccttcctcatcaacattatctcagaagtccttccctcttgaaaactttccatgccagcttcatgctgccaagactgaattaactaccggaccttcaggataccctgggaccaactatccctctgggggcattacccaggctcttaaaatggaggcagctaaggcccagggagaaattgagtgcagcaccggtgggccagcacaggtggaagacccggcacaccctccgcagctgctggcctgggtgctaagcccgttagagcccgcggccagcggggctggtcggctgctccgaaaaaacagccaattcagtgaactggttgagctgcccacctaa

SEQ ID NO: 4919 - protein, 214 aa, Homo sapiens
MESSLGSPVLEETLNSFSIHYAEDDITLAKAISRELCAYYLKEDYADPNLTAKWKRDSYKALCCLWCVQTQDTNFGTNCICQASAFLLSGITAAELEVEIVPGPSSSTLSQKSFPLENFPCQLHAAKTELTTGPSGYPGTNYPSGGITQALKMEAAKAQGEIECSTGGPAQVEDPAHPPQLLAWVLSPLEPAASGAGRLLRKNSQFSELVELPT

SEQ ID NO: 4920 - DNA, 1907 bp, Homo sapiens
ctgtagtgtttgccaatgttggagccgtctgcaaagtgtccccggcaagaaggtaaataccctcatcgggggcgtccgggagaccccgacttccgcgccgccggcgaagaaggcagagggcgctggggagccctgcagttccgcagcacggggaacccggagaaaagcagcccccttcgcggcctcccctcccccgcgccttccctcccacatcgggctctcggggcagcagcggggaggggagaccggcgggggagggaggacagggaggcgaaggaattggggtggggggtgcgtgtgtggtggagggggtgggacgacacaggtgtcctgaggggaggagccgggaggaaggcgaggaggccgggccaagtgggggtgcggaggtcggggagacaggaacgcggctgcgggcgcgggaggctggggttctagggggccggggtggtagcggccggaagagaggacggcgagtgcagccacggtgtggctgcgagggagagggagcgcctagagtagggcaggggagggcggcccggggagggtctgcgggaaatgggcctgggggcgctggaggcggagcggcggggccggggcgcgccggagggtggcggcggcagctatttctgtagaatgggctagtggtaaagacgtaacttgccgaaatggggagggtaggtggggccgaggggacaaaatatatcctatgacaggcaagttctgctgtggctgttacgaactcctaccgtgatggctcggcttaaaggggtagttggcggtagtgaccttgccggggtgaagggagttgggcgaggagacaaagctcagttacggaatccgctgtgtgagagcaggaactctagtctcttcggggtcgagccgggggctgtggcttgggggctgggggtgctccgcagaggccattgagaagcacgccactctgggattcttagggaggcggtgggggtaatggccgtgggattctggaagtctttggaaatgtgtgtagaattttgcatttgtgaataattttctttggtaagggtccatatttgctgtgatgtccccttacccccatccccactccaaagggttaagaactgcttgagcagatagagagggaccattcaattagggtagacctgggaatttaccaaaggattttaaagtgggtggatcctgcagaaagaaaggctagagatgatcctttaaagatattttactgttaattgaaaacgttttttatttaatgtttgctttcacaattttggtgaacttttgctgagcattacttggcttctgatgcatcctgtgtttcagaccagcatcgtgaatacttgaaatcaaaattgtgatggacaggcagggtgatagtaaccttggaggagaaaagatttcaacatttctccaggatatttcttccccgtccttgctttctttagatgattcaagtacactgttgtgaactcagctgcggtggaaaaatcttatttaataaaactaccaaaaccaagacttactctccatctctgttttgtagtatggccagattttcattgttcagtttgtatcttactgcaaacaagagatatcacataacactttaattgtagattgctgcattttgcagcaggcctgtattaaatttgcgaagcagttatgccaaactatctggtgtgtttgtgttttcctgctatggtttcaagtcaagtcactattgccatattttattatatggtaggctagtctgaaatttattcctaagtgatgataagttggtaggatatggtacatacttgctcacaaattactgcatttttccccataaaaaccagtgttttgtatttgtaagaatgttgctgtgtaatccaagtatgtattgttaatttcaaataaaatgctgtgta

SEQ ID NO: 4921 - protein, 139 aa, Homo sapiens
MLEPSAKCPRQEGKYPHRGRPGDPDFRAAGEEGRGRWGALQFRSTGNPEKSSPLRGLPSPAPSLPHRALGAAAGRGDRRGREDREAKELGWGVRVWWRGWDDTGVLRGGAGRKARRPGQVGVRRSGRQERGCGRGRLGF

SEQ ID NO: 4922 - DNA, 1907 bp, Homo sapiens
ctgtagtgtttgccaatgttggagccgtctgcaaagtgtccccggcaagaaggtaaataccctcatcgggggcgtccgggagaccccgacttccgcgccgccggcgaagaaggcagagggcgctggggagccctgcagttccgcagcacggggaacccggagaaaagcagcccccttcgcggcctcccctcccccgcgccttccctcccacatcgggctctcggggcagcagcggggaggggagaccggcgggggagggaggacagggaggcgaaggaattggggtggggggtgcgtgtgtggtggagggggtgggacgacacaggtgtcctgaggggaggagccgggaggaaggcgaggaggccgggccaagtgggggtgcggaggtcggggagacaggaacgcggctgcgggcgcgggaggctggggttctagggggccggggtggtagcggccggaagagaggacggcgagtgcagccacggtgtggctgcgagggagagggagcgcctagagtagggcaggggagggcggcccggggagggtctgcgggaaatgggcctgggggcgctggaggcggagcggcggggccggggcgcgccggagggtggcggcggcagctatttctgtagaatgggctagtggtaaagacgtaacttgccgaaatggggagggtaggtggggccgaggggacaaaatatatcctatgacaggcaagttctgctgtggctgttacgaactcctaccgtgatggctcggcttaaaggggtagttggcggtagtgaccttgccggggtgaagggagttgggcgaggagacaaagctcagttacggaatccgctgtgtgagagcaggaactctagtctcttcggggtcgagccgggggctgtggcttgggggctgggggtgctccgcagaggccattgagaagcacgccactctgggattcttagggaggcggtgggggtaatggccgtgggattctggaagtctttggaaatgtgtgtagaattttgcatttgtgaataattttctttggtaagggtccatatttgctgtgatgtccccttacccccatccccactccaaagggttaagaactgcttgagcagatagagagggaccattcaattagggtagacctgggaatttaccaaaggattttaaagtgggtggatcctgcagaaagaaaggctagagatgatcctttaaagatattttactgttaattgaaaacgttttttatttaatgtttgctttcacaattttggtgaacttttgctgagcattacttggcttctgatgcatcctgtgtttcagaccagcatcgtgaatacttgaaatcaaaattgtgatggacaggcagggtgatagtaaccttggaggagaaaagatttcaacatttctccaggatatttcttccccgtccttgctttctttagatgattcaagtacactgttgtgaactgagctgcggtggaaaaatcttatttaataaaactaccaaaaccaagacttactctccatctctgttttgtagtatggccagattttcattgttcagtttgtatcttactgcaaacaagagatatcacataacactttaattgtagattgctgcattttgcagcaggcctatattaaatttgcgaagcagttatgccaaactatctggtgtgtttgtgttttcctgctatggtttcaagtcaagtcactattgccatattttattatatggtaggctagtctgaaatttattcctaagtgatgataagttggtaggatatggtacatacttgctcacaaattactgcatttttccccataaaaaccagtgttttgtatttgtaagaatgttgctgtgtaatccaagtatgtattgttaatttcaaataaaatgctgtgta

SEQ ID NO: 4923 - protein, 139 aa, Homo sapiens; identical to SEQ ID NO: 4921

SEQ ID NO: 4924 - DNA, 4289 bp, Homo sapiens
attaactaaacaagtcacagtctttatttttaatttctacagtcacctcgtgagacaggtattagaactccggagtggcatcaaaatgagggaaaggcctcagggccagcgcctttgcgtcctggaccggcgtacagacgggagaaaggccgaccaatccgagagcaggctgaggcctggtcccgcccctgggggcagagcctcgcctcttttccgcctcaccctttgggagtaggggtgtgcggctggcttgtcccgcccctgcccctgagtgacagaaccgtggacagcaacatttcccacaggacacgaagtttgtcggcccttgccttggcagagctgaggtgtgtgtccggcgagtgcgaggggattggggagaccctgcccgggaagctcggggtccgggaatgaaagcgggcgcacctctttagcgagccctaaagcgtttgggagacgatcgttccgtccctgggagcggcacttggtggggctgggcggagggaggctctgcaagagaaacccggagtccgggaaacccagtagtttctggaggctgctcacattccttggcttatggcctccttcttccaacgtcaaagccagcaacattgcagcaatctgacttattttgttgtcatgtctcctgaccacatctggaagggttatctacttttgaagacacatccagataattcaggacaatctgtccattttgaggttcttcattgaatcatgtctgcaaagtcccttctgcaatctaagtaagaaaaatcaccaagaatattatttttggtatttggaattgaatttgccaggaatgcaagcactgctacctaactaaagaccttggctttggaaacatcttaccccttggcagctctccagagtttagacttggcagcatcaaagacacaacgcaagcaggcattttggagatcaaagatgggtagaaaagatgctgctactataaaacttcctgttgatcagtacagaaaacaaattggtaaacaggattataaaaaaactaaacctattttacgagcaaccaaattaaaagcagaagcaaagaaaacagcaataggcataaaggaagttggccttgtacttgcagctatattggcactactactggctttctatgctttcttttatctcagactcaccacggatgttgaccctgatctggaccaagatgaagattagctaagcaacaatcaatgcatgaaagagaaataactttacgaaagcaccttttgggaccaaaactttcaatactgaaactgtaacatctttaattctttctgctaatattttcagtttgcagacatatgatttttgatagttgcataggatgtcaggaaaagaaccttacctagcaatgcagtatagtatgtgctactggatacttttatatatctttctgctttgacagccaccctatacatggtacatttagatgaaatgggaaccagatcctaaatttttcaaatgtcattgccaatttatgtgtataattccatcacttcctgatgagtaagtctatttttgttctatatacatcataagttagtatatattcttatttacagaaacatgctcaaatcacattcagaaagaacaaaaagtcatgggaaattttttattttacaacaaagccctgctttctttctggacgtattttacatcattagagagactatctgcacatacatctaccataatctttttccttctttgccaactgttcagtgcacatgtgctgcatcagaaatggcacctggatgacagaagctcaaagagtcacatatgtctctaaaatagagttcttttcctcttgggctgtctgaactggtgtaaatagaagctcagttgatcttggttttaattaacttattactctattaatataaccttggaattctattctaattatgttgttctggctgcttgtagtatcagttcgcccctcttgttagggagatatgtaacaatctgtcatttaattgagcagtctttttcacataacagtaatagcaaaaatcctacctactcagaatcatcttcttaggttgtctcctaaatctgaacaatacagttgttttataaaattacattttgtctcttgagatttaatcaattagaactctttagggagaaaataaataatagaagaaaatatatgcctcatatttcatatgtaattatctgttgatataatttttcaatgtattttgtatttgtgggagcataatgacctgtacattcaatatttttactggtaattcaatttttaaatatgtttttacaatgcttgaacacataaaccttagaaaactggaaaatacgtgtccacagaaagagttattagctactaccttatgtaaagatgcatagaaaatgaaattgttggaaacatgtgcacaaagtgttttatattatatacattgtatttatgaagaataaataaaatattaagattgttttcctgctagccaagagaagaaatccttgggaaatatctaaggagtatatggggctttataagcactgtttctaaaagatattctctggtacttttgcaaaaagtcgactgtgactgtgtagcattatgttctgtagaatttttttcaagtagcataatttatttcattggtgtgaaaacagccaaaggttccaatatcctcacaaatcatttatgccaaacatctgagggcaaaatttagccggtgttatttactagattcttccctttgaactcacagactcaagagacagaccaagagttcttatatactcaccacagcggaccaatccaagtggcatttttaggaaaggttgcagcatttaatgccatgtggtatgtctgttcgtcaagtgggtggcaagggaatatccaagctggcattttggatatgatgggccttttactttcctgagtgacatgccacatgtcaagaaatactgctccccacccccccactcccatcacatttacgtgaacaattttcatttagttatttcccgttccatatggtgttaaaacagtcgtattaaataaagattatttctagttttcagtggtaatttaaatgagaggatatgtaataattgcttattagatacttatccaaatgaaatataacagagtttacagtacttaaaatggctggttatggtcttggaaatgtttgaaaattcattatcctgaaaaaaactttaccattctgttttacccttgaggtattttttggggaaaaatgtttttgataactattaatctaaatatagtataattataggcaaatttcactgcctagttttattgatatcctgagtctacagctagtccattcgtatgactgattgatttatgatagctccagagaaccataaatttcaaaggctaaactctctgattttagtaaatagtaggtaaagtgacacaatatatgtttacacaacactgttttcatgaaatgcaaactttgcaaaactcacattaactgggaagcagccaaccctctgtagagaaatcccagattgggagtctggtttgaatctttgaagacagaaaggtgatatccggcctgctgttttaaagggaccacacttttgaatacctactggtgtttggcagaaatctgagactggcaccagacacaaattttagacatgggtatcttccctccagtaattcactgctcagagtaatttagaagacaaaaacagaaaaaattgtaatgattttttaagtgttagaatatgtttgttaacatactctgcaaaataaatttcaactaatgcaatagacttaaaatatagcctatggaatactgtgattgaagtttgaaggcttgctggttcttattttgcatgcaagtttagacagggtaaagaatgtataaatttatttgagatgagatacagtattgtaaaaatataacctcatctagaattgcttttaaaacaagcaaaagcctattttagtacaaatgtagggtgggtagttgttttaaggtagcaaaatacttcaagattttctatctttttaatttttcatgaagacagaagaaatactttcaccccaaccaatgactgtaagatcttgagagtatgttcttactcatttctgtaattgcagtagtgtagtcatctgcatataaatttaataaatgcatgttaaaatttaagttgatgccttttagtcctctcagagtctgtcacagtttctttgtgtaaatgataaaaaagtttgaatttaatcaataaaacttaaaaatcacaatatc

SEQ ID NO: 4925 - protein, 86 aa, Homo sapiens
MGRKDAATIKLPVDQYRKQIGKQDYKKTKPILRATKLKAEAKKTAIGIKEVGLVLAAILALLLAFYAFFYLRLTTDVDPDLDQDED

SEQ ID NO: 4926 - DNA, 3676 bp, Homo sapiens
gtggacagcaacatttcccacaggacacgaagtttgtcggcccttgccttggcagagctgagtaagaaaaatcaccaagaatattatttttggtatttggaattgaatttgccaggaatgcaagcactgctacctaactaaagaccttggctttggaaacatcttaccccttggcagctctccagagtttagacttggcagcatcaaagacacaacgcaagcaatatgaaacagaaaaacaagttggttggatagctgtcctccatgcagtcattcatgatccaggctgtcatcatcttcatcactcatgttcagagttaccctagaggtcatctccatttcatccagataaatgagtatgcaaggaacgtttttataggcattttggagatcaaagatgggtagaaaagatgctgctactataaaacttcctgttgatcagtacagaaaacaaattggtaaacaggattataaaaaaactaaacctattttacgagcaaccaaattaaaagcagaagcaaagaaaacagcaataggcataaagactcaccacggatgttgaccctgatctggaccaagatgaagattagctaagcaacaatcaatgcatgaaagagaaataactttacgaaagcaccttttgggaccaaaactttcaatactgaaactgtaacatctttaattctttctgctaatattttcagtttgcagacatatgatttttgatagttgcataggatgtcaggaaaagaaccttacctagcaatgcagtatagtatgtgctactggatacttttatatatctttctgctttgacagccaccctatacatggtacatttagatgaaatgggaaccagatcctaaatttttcaaatgtcattgccaatttatgtgtataattccatcacttcctgatgagtaagtctatttttgttctatatacatcataagttagtatatattcttatttacagaaacatgctcaaatcacattcagaaagaacaaaaagtcatgggaaattttttattttacaacaaagccctgctttctttctggacgtattttacatcattagagagactatctgcacatacatctaccataatctttttccttctttgccaactgttcagtgcacatgtgctgcatcagaaatggcacctggatgacagaagctcaaagagtcacatatgtctctaaaatagagttcttttcctcttgggctgtctgaactggtgtaaatagaagctcagttgatcttggttttaattaacttattactctattaatataaccttggaattctattctaattatgttgttctggctgcttgtagtatcagttcgcccctcttgttagggagatatgtaacaatctgtcatttaattgagcagtctttttcacataacagtaatagcaaaaatcctacctactcagaatcatcttcttaggttgtctcctaaatctgaacaatacagttgttttataaaattacattttgtctcttgagatttaatcaattagaactctttagggagaaaataaataatagaagaaaatatatgcctcatatttcatatgtaattatctgttgatataatttttcaatgtattttgtatttgtgggagcataatgacctgtacattcaatatttttactggtaattcaatttttaaatatgtttttacaatgcttgaacacataaaccttagaaaactggaaaatacgtgtccacagaaagagttattagctactaccttatgtaaagatgcatagaaaatgaaattgttggaaacatgtgcacaaagtgttttatattatatacattgtatttatgaagaataaataaaatattaagattgttttcctgctagccaagagaagaaatccttgggaaatatctaaggagtatatggggctttataagcactgtttctaaaagatattctctggtacttttgcaaaaagtcgactgtgactgtgtagcattatgttctgtagaatttttttcaagtagcataatttatttcattggtgtgaaaacagccaaaggttccaatatcctcacaaatcatttatgccaaacatctgagggcaaaatttagccggtgttatttactagattcttccctttgaactcacagactcaagagacagaccaagagttcttatatactcaccacagcggaccaatccaagtggcatttttaggaaaggttgcagcatttaatgccatgtggtatgtctgttcgtcaagtgggtggcaagggaatatccaagctggcattttggatatgatgggccttttactttcctgagtgacatgccacatgtcaagaaatactgctccccacccccccactcccatcacatttacgtgaacaattttcatttagttatttcccgttccatatggtgttaaaacagtcgtattaaataaagattatttctagttttcagtggtaatttaaatgagaggatatgtaataattgcttattagatacttatccaaatgaaatataacagagtttacagtacttaaaatggctggttatggtcttggaaatgtttgaaaattcattatcctgaaaaaaactttaccattctgttttacccttgaggtattttttggggaaaaatgtttttgataactattaatctaaatatagtataattataggcaaatttcactgcctagttttattgatatcctgagtctacagctagtccattcgtatgactgattgatttatgatagctccagagaaccataaatttcaaaggctaaactctctgattttagtaaatagtaggtaaagtgacacaatatatgtttacacaacactgttttcatgaaatgcaaactttgcaaaactcacattaactgggaagcagccaaccctctgtagagaaatcccagattgggagtctggtttgaatctttgaagacagaaaggtgatatccggcctgctgttttaaagggaccacacttttgaatacctactggtgtttggcagaaatctgagactggcaccagacacaaattttagacatgggtatcttccctccagtaattcactgctcagagtaatttagaagacaaaaacagaaaaaattgtaatgattttttaagtgttagaatatgtttgttaacatactctgcaaaataaatttcaactaatgcaatagacttaaaatatagcctatggaatactgtgattgaagtttgaaggcttgctggttcttattttgcatgcaagtttagacagggtaaagaatgtataaatttatttgagatgagatacagtattgtaaaaatataacctcatctagaattgcttttaaaacaagcaaaagcctattttagtacaaatgtagggtgggtagttgttttaaggtagcaaaatacttcaagattttctatctttttaatttttcatgaagacagaagaaatactttcaccccaaccaatgactgtaagatcttgagagtatgttcttactcatttctgtaattgcagtagtgtagtcatctgcatataaatttaataaatgcatgttaaaatttaagttgatgccttttagtcctctcagagtctgtcacagtttctttgtgtaaatgataaaaaagtttgaatttaatcaataaaacttaaaaatcacaatatc

SEQ ID NO: 4927 - protein, 54 aa, Homo sapiens
MGRKDAATIKLPVDQYRKQIGKQDYKKTKPILRATKLKAEAKKTAIGIKTHHGC

SEQ ID NO: 4928 - DNA, 3556 bp, Homo sapiens
ggcttgtcccgcccctgcccctgagtgacagaaccgtggacagcaacatttcccacaggacacgaagtttgtcggcccttgccttggcagagctgagtaagaaaaatcaccaagaatattatttttggtatttggaattgaatttgccaggaatgcaagcactgctacctaactaaagaccttggctttggaaacatcttaccccttggcagctctccagagtttagacttggcagcatcaaagacacaacgcaagcaggcattttggagatcaaagatgggtagaaaagatgctgctactataaaacttcctgttgatcagtacagaaaacaaattggtaaacaggattataaaaaaactaaacctattttacgagcaaccaaattaaaagcagaagcaaagaaaacagcaataggcataaagactcaccacggatgttgaccctgatctggaccaagatgaagattagctaagcaacaatcaatgcatgaaagagaaataactttacgaaagcaccttttgggaccaaaactttcaatactgaaactgtaacatctttaattctttctgctaatattttcagtttgcagacatatgatttttgatagttgcataggatgtcaggaaaagaaccttacctagcaatgcagtatagtatgtgctactggatacttttatatatctttctgctttgacagccaccctatacatggtacatttagatgaaatgggaaccagatcctaaatttttcaaatgtcattgccaatttatgtgtataattccatcacttcctgatgagtaagtctatttttgttctatatacatcataagttagtatatattcttatttacagaaacatgctcaaatcacattcagaaagaacaaaaagtcatgggaaattttttattttacaacaaagccctgctttctttctggacgtattttacatcattagagagactatctgcacatacatctaccataatctttttccttctttgccaactgttcagtgcacatgtgctgcatcagaaatggcacctggatgacagaagctcaaagagtcacatatgtctctaaaatagagttcttttcctcttgggctgtctgaactggtgtaaatagaagctcagttgatcttggttttaattaacttattactctattaatataaccttggaattctattctaattatgttgttctggctgcttgtagtatcagttcgcccctcttgttagggagatatgtaacaatctgtcatttaattgagcagtctttttcacataacagtaatagcaaaaatcctacctactcagaatcatcttcttaggttgtctcctaaatctgaacaatacagttgttttataaaattacattttgtctcttgagatttaatcaattagaactctttagggagaaaataaataatagaagaaaatatatgcctcatatttcatatgtaattatctgttgatataatttttcaatgtattttgtatttgtgggagcataatgacctgtacattcaatatttttactggtaattcaatttttaaatatgtttttacaatgcttgaacacataaaccttagaaaactggaaaatacgtgtccacagaaagagttattagctactaccttatgtaaagatgcatagaaaatgaaattgttggaaacatgtgcacaaagtgttttatattatatacattgtatttatgaagaataaataaaatattaagattgttttcctgctagccaagagaagaaatccttgggaaatatctaaggagtatatggggctttataagcactgtttctaaaagatattctctggtacttttgcaaaaagtcgactgtgactgtgtagcattatgttctgtagaatttttttcaagtagcataatttatttcattggtgtgaaaacagccaaaggttccaatatcctcacaaatcatttatgccaaacatctgagggcaaaatttagccggtgttatttactagattcttccctttgaactcacagactcaagagacagaccaagagttcttatatactcaccacagcggaccaatccaagtggcatttttaggaaaggttgcagcatttaatgccatgtggtatgtctgttcgtcaagtgggtggcaagggaatatccaagctggcattttggatatgatgggccttttactttcctgagtgacatgccacatgtcaagaaatactgctccccacccccccactcccatcacatttacgtgaacaattttcatttagttatttcccgttccatatggtgttaaaacagtcgtattaaataaagattatttctagttttcagtggtaatttaaatgagaggatatgtaataattgcttattagatacttatccaaatgaaatataacagagtttacagtacttaaaatggctggttatggtcttggaaatgtttgaaaattcattatcctgaaaaaaactttaccattctgttttacccttgaggtattttttggggaaaaatgtttttgataactattaatctaaatatagtataattataggcaaatttcactgcctagttttattgatatcctgagtctacagctagtccattcgtatgactgattgatttatgatagctccagagaaccataaatttcaaaggctaaactctctgattttagtaaatagtaggtaaagtgacacaatatatgtttacacaacactgttttcatgaaatgcaaactttgcaaaactcacattaactgggaagcagccaaccctctgtagagaaatcccagattgggagtctggtttgaatctttgaagacagaaaggtgatatccggcctgctgttttaaagggaccacacttttgaatacctactggtgtttggcagaaatctgagactggcaccagacacaaattttagacatgggtatcttccctccagtaattcactgctcagagtaatttagaagacaaaaacagaaaaaattgtaatgattttttaagtgttagaatatgtttgttaacatactctgcaaaataaatttcaactaatgcaatagacttaaaatatagcctatggaatactgtgattgaagtttgaaggcttgctggttcttattttgcatgcaagtttagacagggtaaagaatgtataaatttatttgagatgagatacagtattgtaaaaatataacctcatctagaattgcttttaaaacaagcaaaagcctattttagtacaaatgtagggtgggtagttgttttaaggtagcaaaatacttcaagattttctatctttttaatttttcatgaagacagaagaaatactttcaccccaaccaatgactgtaagatcttgagagtatgttcttactcatttctgtaattgcagtagtgtagtcatctgcatataaatttaataaatgcatgttaaaatttaagttgatgccttttagtcctctcagagtctgtcacagtttctttgtgtaaatgataaaaaagtttgaatttaatcaataaaacttaaaaatcacaatatc

SEQ ID NO: 4929 - protein, 54 aa, Homo sapiens; identical to SEQ ID NO: 4927

SEQ ID NO: 4930 - DNA, 3408 bp, Homo sapiens
aggggtgtgcggctggcttgtcccgcccctgcccctgagtgacagaaccgtggacagcaacatttcccacaggacacgaagtttgtcggcccttgccttggcagagctgaggcattttggagatcaaagatgggtagaaaagatgctgctactataaaacttcctgttgatcagtacagaaaacaaattggtaaacaggattataaaaaaactaaacctattttacgagcaaccaaattaaaagcagaagcaaagaaaacagcaataggcataaagactcaccacggatgttgaccctgatctggaccaagatgaagattagctaagcaacaatcaatgcatgaaagagaaataactttacgaaagcaccttttgggaccaaaactttcaatactgaaactgtaacatctttaattctttctgctaatattttcagtttgcagacatatgatttttgatagttgcataggatgtcaggaaaagaaccttacctagcaatgcagtatagtatgtgctactggatacttttatatatctttctgctttgacagccaccctatacatggtacatttagatgaaatgggaaccagatcctaaatttttcaaatgtcattgccaatttatgtgtataattccatcacttcctgatgagtaagtctatttttgttctatatacatcataagttagtatatattcttatttacagaaacatgctcaaatcacattcagaaagaacaaaaagtcatgggaaattttttattttacaacaaagccctgctttctttctggacgtattttacatcattagagagactatctgcacatacatctaccataatctttttccttctttgccaactgttcagtgcacatgtgctgcatcagaaatggcacctggatgacagaagctcaaagagtcacatatgtctctaaaatagagttcttttcctcttgggctgtctgaactggtgtaaatagaagctcagttgatcttggttttaattaacttattactctattaatataaccttggaattctattctaattatgttgttctggctgcttgtagtatcagttcgcccctcttgttagggagatatgtaacaatctgtcatttaattgagcagtctttttcacataacagtaatagcaaaaatcctacctactcagaatcatcttcttaggttgtctcctaaatctgaacaatacagttgttttataaaattacattttgtctcttgagatttaatcaattagaactctttagggagaaaataaataatagaagaaaatatatgcctcatatttcatatgtaattatctgttgatataatttttcaatgtattttgtatttgtgggagcataatgacctgtacattcaatatttttactggtaattcaatttttaaatatgtttttacaatgcttgaacacataaaccttagaaaactggaaaatacgtgtccacagaaagagttattagctactaccttatgtaaagatgcatagaaaatgaaattgttggaaacatgtgcacaaagtgttttatattatatacattgtatttatgaagaataaataaaatattaagattgttttcctgctagccaagagaagaaatccttgggaaatatctaaggagtatatggggctttataagcactgtttctaaaagatattctctggtacttttgcaaaaagtcgactgtgactgtgtagcattatgttctgtagaatttttttcaagtagcataatttatttcattggtgtgaaaacagccaaaggttccaatatcctcacaaatcatttatgccaaacatctgagggcaaaatttagccggtgttatttactagattcttccctttgaactcacagactcaagagacagaccaagagttcttatatactcaccacagcggaccaatccaagtggcatttttaggaaaggttgcagcatttaatgccatgtggtatgtctgttcgtcaagtgggtggcaagggaatatccaagctggcattttggatatgatgggccttttactttcctgagtgacatgccacatgtcaagaaatactgctccccacccccccactcccatcacatttacgtgaacaattttcatttagttatttcccgttccatatggtgttaaaacagtcgtattaaataaagattatttctagttttcagtggtaatttaaatgagaggatatgtaataattgcttattagatacttatccaaatgaaatataacagagtttacagtacttaaaatggctggttatggtcttggaaatgtttgaaaattcattatcctgaaaaaaactttaccattctgttttacccttgaggtattttttggggaaaaatgtttttgataactattaatctaaatatagtataattataggcaaatttcactgcctagttttattgatatcctgagtctacagctagtccattcgtatgactgattgatttatgatagctccagagaaccataaatttcaaaggctaaactctctgattttagtaaatagtaggtaaagtgacacaatatatgtttacacaacactgttttcatgaaatgcaaactttgcaaaactcacattaactgggaagcagccaaccctctgtagagaaatcccagattgggagtctggtttgaatctttgaagacagaaaggtgatatccggcctgctgttttaaagggaccacacttttgaatacctactggtgtttggcagaaatctgagactggcaccagacacaaattttagacatgggtatcttccctccagtaattcactgctcagagtaatttagaagacaaaaacagaaaaaattgtaatgattttttaagtgttagaatatgtttgttaacatactctgcaaaataaatttcaactaatgcaatagacttaaaatatagcctatggaatactgtgattgaagtttgaaggcttgctggttcttattttgcatgcaagtttagacagggtaaagaatgtataaatttatttgagatgagatacagtattgtaaaaatataacctcatctagaattgcttttaaaacaagcaaaagcctattttagtacaaatgtagggtgggtagttgttttaaggtagcaaaatacttcaagattttctatctttttaatttttcatgaagacagaagaaatactttcaccccaaccaatgactgtaagatcttgagagtatgttcttactcatttctgtaattgcagtagtgtagtcatctgcatataaatttaataaatgcatgttaaaatttaagttgatgccttttagtcctctcagagtctgtcacagtttctttgtgtaaatgataaaaaagtttgaatttaatcaataaaacttaaaaatcacaatatc

SEQ ID NO: 4931 - protein, 54 aa, Homo sapiens; identical to SEQ ID NO: 4927

SEQ ID NO: 4932 - DNA, 3622 bp, Homo sapiens
ctggcttgtcccgcccctgcccctgagtgacagaaccgtggacagcaacatttcccacaggacacgaagtttgtcggcccttgccttggcagagctgagcaatatgaaacagaaaaacaagttggttggatagctgtcctccatgcagtcattcatgatccaggctgtcatcatcttcatcactcatgttcagagttaccctagaggtcatctccatttcatccagataaatgagtatgcaaggaacgtttttataggcattttggagatcaaagatgggtagaaaagatgctgctactataaaacttcctgttgatcagtacagaaaacaaattggtaaacaggattataaaaaaactaaacctattttacgagcaaccaaattaaaagcagaagcaaagaaaacagcaataggcataaaggaagttggccttgtacttgcagctatattggcactactactggctttctatgctttcttttatctcagactcaccacggatgttgaccctgatctggaccaagatgaagattagctaagcaacaatcaatgcatgaaagagaaataactttacgaaagcaccttttgggaccaaaactttcaatactgaaactgtaacatctttaattctttctgctaatattttcagtttgcagacatatgatttttgatagttgcataggatgtcaggaaaagaaccttacctagcaatgcagtatagtatgtgctactggatacttttatatatctttctgctttgacagccaccctatacatggtacatttagatgaaatgggaaccagatcctaaatttttcaaatgtcattgccaatttatgtgtataattccatcacttcctgatgagtaagtctatttttgttctatatacatcataagttagtatatattcttatttacagaaacatgctcaaatcacattcagaaagaacaaaaagtcatgggaaattttttattttacaacaaagccctgctttctttctggacgtattttacatcattagagagactatctgcacatacatctaccataatctttttccttctttgccaactgttcagtgcacatgtgctgcatcagaaatggcacctggatgacagaagctcaaagagtcacatatgtctctaaaatagagttcttttcctcttgggctgtctgaactggtgtaaatagaagctcagttgatcttggttttaattaacttattactctattaatataaccttggaattctattctaattatgttgttctggctgcttgtagtatcagttcgcccctcttgttagggagatatgtaacaatctgtcatttaattgagcagtctttttcacataacagtaatagcaaaaatcctacctactcagaatcatcttcttaggttgtctcctaaatctgaacaatacagttgttttataaaattacattttgtctcttgagatttaatcaattagaactctttagggagaaaataaataatagaagaaaatatatgcctcatatttcatatgtaattatctgttgatataatttttcaatgtattttgtatttgtgggagcataatgacctgtacattcaatatttttactggtaattcaatttttaaatatgtttttacaatgcttgaacacataaaccttagaaaactggaaaatacgtgtccacagaaagagttattagctactaccttatgtaaagatgcatagaaaatgaaattgttggaaacatgtgcacaaagtgttttatattatatacattgtatttatgaagaataaataaaatattaagattgttttcctgctagccaagagaagaaatccttgggaaatatctaaggagtatatggggctttataagcactgtttctaaaagatattctctggtacttttgcaaaaagtcgactgtgactgtgtagcattatgttctgtagaatttttttcaagtagcataatttatttcattggtgtgaaaacagccaaaggttccaatatcctcacaaatcatttatgccaaacatctgagggcaaaatttagccggtgttatttactagattcttccctttgaactcacagactcaagagacagaccaagagttcttatatactcaccacagcggaccaatccaagtggcatttttaggaaaggttgcagcatttaatgccatgtggtatgtctgttcgtcaagtgggtggcaagggaatatccaagctggcattttggatatgatgggccttttactttcctgagtgacatgccacatgtcaagaaatactgctccccacccccccactcccatcacatttacgtgaacaattttcatttagttatttcccgttccatatggtgttaaaacagtcgtattaaataaagattatttctagttttcagtggtaatttaaatgagaggatatgtaataattgcttattagatacttatccaaatgaaatataacagagtttacagtacttaaaatggctggttatggtcttggaaatgtttgaaaattcattatcctgaaaaaaactttaccattctgttttacccttgaggtattttttggggaaaaatgtttttgataactattaatctaaatatagtataattataggcaaatttcactgcctagttttattgatatcctgagtctacagctagtccattcgtatgactgattgatttatgatagctccagagaaccataaatttcaaaggctaaactctctgattttagtaaatagtaggtaaagtgacacaatatatgtttacacaacactgttttcatgaaatgcaaactttgcaaaactcacattaactgggaagcagccaaccctctgtagagaaatcccagattgggagtctggtttgaatctttgaagacagaaaggtgatatccggcctgctgttttaaagggaccacacttttgaatacctactggtgtttggcagaaatctgagactggcaccagacacaaattttagacatgggtatcttccctccagtaattcactgctcagagtaatttagaagacaaaaacagaaaaaattgtaatgattttttaagtgttagaatatgtttgttaacatactctgcaaaataaatttcaactaatgcaatagacttaaaatatagcctatggaatactgtgattgaagtttgaaggcttgctggttcttattttgcatgcaagtttagacagggtaaagaatgtataaatttatttgagatgagatacagtattgtaaaaatataacctcatctagaattgcttttaaaacaagcaaaagcctattttagtacaaatgtagggtgggtagttgttttaaggtagcaaaatacttcaagattttctatctttttaatttttcatgaagacagaagaaatactttcaccccaaccaatgactgtaagatcttgagagtatgttcttactcatttctgtaattgcagtagtgtagtcatctgcatataaatttaataaatgcatgttaaaatttaagttgatgccttttagtcctctcagagtctgtcacagtttctttgtgtaaatgataaaaaagtttgaatttaatcaataaaacttaaaaatcacaatatc

SEQ ID NO: 4933 - protein, 86 aa, Homo sapiens; identical to SEQ ID NO: 4925

SEQ ID NO: 4934 - DNA, 3586 bp, Homo sapiens
gcaattctggcctctccagcctcttgcctttcttctgaggggagccttttatcctgctgtaagaaaaatcaccaagaatattatttttggtatttggaattgaatttgccaggaatgcaagcactgctacctaactaaagaccttggctttggaaacatcttaccccttggcagctctccagagtttagacttggcagcatcaaagacacaacgcaagcaggcattttggagatcaaagatgggtagaaaagatgctgctactataaaacttcctgttgatcagtacagaaaacaaattggtaaacaggattataaaaaaactaaacctattttacgagcaaccaaattaaaagcagaagcaaagaaaacagcaataggcataaaggaagttggccttgtacttgcagctatattggcactactactggctttctatgctttcttttatctcagactcaccacggatgttgaccctgatctggaccaagatgaagattagctaagcaacaatcaatgcatgaaagagaaataactttacgaaagcaccttttgggaccaaaactttcaatactgaaactgtaacatctttaattctttctgctaatattttcagtttgcagacatatgatttttgatagttgcataggatgtcaggaaaagaaccttacctagcaatgcagtatagtatgtgctactggatacttttatatatctttctgctttgacagccaccctatacatggtacatttagatgaaatgggaaccagatcctaaatttttcaaatgtcattgccaatttatgtgtataattccatcacttcctgatgagtaagtctatttttgttctatatacatcataagttagtatatattcttatttacagaaacatgctcaaatcacattcagaaagaacaaaaagtcatgggaaattttttattttacaacaaagccctgctttctttctggacgtattttacatcattagagagactatctgcacatacatctaccataatctttttccttctttgccaactgttcagtgcacatgtgctgcatcagaaatggcacctggatgacagaagctcaaagagtcacatatgtctctaaaatagagttcttttcctcttgggctgtctgaactggtgtaaatagaagctcagttgatcttggttttaattaacttattactctattaatataaccttggaattctattctaattatgttgttctggctgcttgtagtatcagttcgcccctcttgttagggagatatgtaacaatctgtcatttaattgagcagtctttttcacataacagtaatagcaaaaatcctacctactcagaatcatcttcttaggttgtctcctaaatctgaacaatacagttgttttataaaattacattttgtctcttgagatttaatcaattagaactctttagggagaaaataaataatagaagaaaatatatgcctcatatttcatatgtaattatctgttgatataatttttcaatgtattttgtatttgtgggagcataatgacctgtacattcaatatttttactggtaattcaatttttaaatatgtttttacaatgcttgaacacataaaccttagaaaactggaaaatacgtgtccacagaaagagttattagctactaccttatgtaaagatgcatagaaaatgaaattgttggaaacatgtgcacaaagtgttttatattatatacattgtatttatgaagaataaataaaatattaagattgttttcctgctagccaagagaagaaatccttgggaaatatctaaggagtatatggggctttataagcactgtttctaaaagatattctctggtacttttgcaaaaagtcgactgtgactgtgtagcattatgttctgtagaatttttttcaagtagcataatttatttcattggtgtgaaaacagccaaaggttccaatatcctcacaaatcatttatgccaaacatctgagggcaaaatttagccggtgttatttactagattcttccctttgaactcacagactcaagagacagaccaagagttcttatatactcaccacagcggaccaatccaagtggcatttttaggaaaggttgcagcatttaatgccatgtggtatgtctgttcgtcaagtgggtggcaagggaatatccaagctggcattttggatatgatgggccttttactttcctgagtgacatgccacatgtcaagaaatactgctccccacccccccactcccatcacatttacgtgaacaattttcatttagttatttcccgttccatatggtgttaaaacagtcgtattaaataaagattatttctagttttcagtggtaatttaaatgagaggatatgtaataattgcttattagatacttatccaaatgaaatataacagagtttacagtacttaaaatggctggttatggtcttggaaatgtttgaaaattcattatcctgaaaaaaactttaccattctgttttacccttgaggtattttttggggaaaaatgtttttgataactattaatctaaatatagtataattataggcaaatttcactgcctagttttattgatatcctgagtctacagctagtccattcgtatgactgattgatttatgatagctccagagaaccataaatttcaaaggctaaactctctgattttagtaaatagtaggtaaagtgacacaatatatgtttacacaacactgttttcatgaaatgcaaactttgcaaaactcacattaactgggaagcagccaaccctctgtagagaaatcccagattgggagtctggtttgaatctttgaagacagaaaggtgatatccggcctgctgttttaaagggaccacacttttgaatacctactggtgtttggcagaaatctgagactggcaccagacacaaattttagacatgggtatcttccctccagtaattcactgctcagagtaatttagaagacaaaaacagaaaaaattgtaatgattttttaagtgttagaatatgtttgttaacatactctgcaaaataaatttcaactaatgcaatagacttaaaatatagcctatggaatactgtgattgaagtttgaaggcttgctggttcttattttgcatgcaagtttagacagggtaaagaatgtataaatttatttgagatgagatacagtattgtaaaaatataacctcatctagaattgcttttaaaacaagcaaaagcctattttagtacaaatgtagggtgggtagttgttttaaggtagcaaaatacttcaagattttctatctttttaatttttcatgaagacagaagaaatactttcaccccaaccaatgactgtaagatcttgagagtatgttcttactcatttctgtaattgcagtagtgtagtcatctgcatataaatttaataaatgcatgttaaaatttaagttgatgccttttagtcctctcagagtctgtcacagtttctttgtgtaaatgataaaaaagtttgaatttaatcaataaaacttaaaaatcacaatatc

SEQ ID NO: 4935 - protein, 86 aa, Homo sapiens; identical to SEQ ID NO: 4925

SEQ ID NO: 4936 - DNA, 4070 bp, Homo sapiens
attaactaaacaagtcacagtctttatttttaatttctacagtcacctcgtgagacaggtattagaactccggagtggcatcaaaatgagggaaaggcctcagggccagcgcctttgcgtcctggaccggcgtacagacgggagaaaggccgaccaatccgagagcaggctgaggcctggtcccgcccctgggggcagagcctcgcctcttttccgcctcaccctttgggagtaggggtgtgcggctggcttgtcccgcccctgcccctgagtgacagaaccgtggacagcaacatttcccacaggacacgaagtttgtcggcccttgccttggcagagctgaggtgtgtgtccggcgagtgcgaggggattggggagaccctgcccgggaagctcggggtccgggaatgaaagcgggcgcacctctttagcgagccctaaagcgtttgggagacgatcgttccgtccctgggagcggcacttggtggggctgggcggagggaggctctgcaagagaaacccggagtccgggaaacccagtagtaagaaaaatcaccaagaatattatttttggtatttggaattgaatttgccaggaatgcaagcactgctacctaactaaagaccttggctttggaaacatcttaccccttggcagctctccagagtttagacttggcagcatcaaagacacaacgcaagcaggcattttggagatcaaagatgggtagaaaagatgctgctactataaaacttcctgttgatcagtacagaaaacaaattggtaaacaggattataaaaaaactaaacctattttacgagcaaccaaattaaaagcagaagcaaagaaaacagcaataggcataaaggaagttggccttgtacttgcagctatattggcactactactggctttctatgctttcttttatctcagactcaccacggatgttgaccctgatctggaccaagatgaagattagctaagcaacaatcaatgcatgaaagagaaataactttacgaaagcaccttttgggaccaaaactttcaatactgaaactgtaacatctttaattctttctgctaatattttcagtttgcagacatatgatttttgatagttgcataggatgtcaggaaaagaaccttacctagcaatgcagtatagtatgtgctactggatacttttatatatctttctgctttgacagccaccctatacatggtacatttagatgaaatgggaaccagatcctaaatttttcaaatgtcattgccaatttatgtgtataattccatcacttcctgatgagtaagtctatttttgttctatatacatcataagttagtatatattcttatttacagaaacatgctcaaatcacattcagaaagaacaaaaagtcatgggaaattttttattttacaacaaagccctgctttctttctggacgtattttacatcattagagagactatctgcacatacatctaccataatctttttccttctttgccaactgttcagtgcacatgtgctgcatcagaaatggcacctggatgacagaagctcaaagagtcacatatgtctctaaaatagagttcttttcctcttgggctgtctgaactggtgtaaatagaagctcagttgatcttggttttaattaacttattactctattaatataaccttggaattctattctaattatgttgttctggctgcttgtagtatcagttcgcccctcttgttagggagatatgtaacaatctgtcatttaattgagcagtctttttcacataacagtaatagcaaaaatcctacctactcagaatcatcttcttaggttgtctcctaaatctgaacaatacagttgttttataaaattacattttgtctcttgagatttaatcaattagaactctttagggagaaaataaataatagaagaaaatatatgcctcatatttcatatgtaattatctgttgatataatttttcaatgtattttgtatttgtgggagcataatgacctgtacattcaatatttttactggtaattcaatttttaaatatgtttttacaatgcttgaacacataaaccttagaaaactggaaaatacgtgtccacagaaagagttattagctactaccttatgtaaagatgcatagaaaatgaaattgttggaaacatgtgcacaaagtgttttatattatatacattgtatttatgaagaataaataaaatattaagattgttttcctgctagccaagagaagaaatccttgggaaatatctaaggagtatatggggctttataagcactgtttctaaaagatattctctggtacttttgcaaaaagtcgactgtgactgtgtagcattatgttctgtagaatttttttcaagtagcataatttatttcattggtgtgaaaacagccaaaggttccaatatcctcacaaatcatttatgccaaacatctgagggcaaaatttagccggtgttatttactagattcttccctttgaactcacagactcaagagacagaccaagagttcttatatactcaccacagcggaccaatccaagtggcatttttaggaaaggttgcagcatttaatgccatgtggtatgtctgttcgtcaagtgggtggcaagggaatatccaagctggcattttggatatgatgggccttttactttcctgagtgacatgccacatgtcaagaaatactgctccccacccccccactcccatcacatttacgtgaacaattttcatttagttatttcccgttccatatggtgttaaaacagtcgtattaaataaagattatttctagttttcagtggtaatttaaatgagaggatatgtaataattgcttattagatacttatccaaatgaaatataacagagtttacagtacttaaaatggctggttatggtcttggaaatgtttgaaaattcattatcctgaaaaaaactttaccattctgttttacccttgaggtattttttggggaaaaatgtttttgataactattaatctaaatatagtataattataggcaaatttcactgcctagttttattgatatcctgagtctacagctagtccattcgtatgactgattgatttatgatagctccagagaaccataaatttcaaaggctaaactctctgattttagtaaatagtaggtaaagtgacacaatatatgtttacacaacactgttttcatgaaatgcaaactttgcaaaactcacattaactgggaagcagccaaccctctgtagagaaatcccagattgggagtctggtttgaatctttgaagacagaaaggtgatatccggcctgctgttttaaagggaccacacttttgaatacctactggtgtttggcagaaatctgagactggcaccagacacaaattttagacatgggtatcttccctccagtaattcactgctcagagtaatttagaagacaaaaacagaaaaaattgtaatgattttttaagtgttagaatatgtttgttaacatactctgcaaaataaatttcaactaatgcaatagacttaaaatatagcctatggaatactgtgattgaagtttgaaggcttgctggttcttattttgcatgcaagtttagacagggtaaagaatgtataaatttatttgagatgagatacagtattgtaaaaatataacctcatctagaattgcttttaaaacaagcaaaagcctattttagtacaaatgtagggtgggtagttgttttaaggtagcaaaatacttcaagattttctatctttttaatttttcatgaagacagaagaaatactttcaccccaaccaatgactgtaagatcttgagagtatgttcttactcatttctgtaattgcagtagtgtagtcatctgcatataaatttaataaatgcatgttaaaatttaagttgatgccttttagtcctctcagagtctgtcacagtttctttgtgtaaatgataaaaaagtttgaatttaatcaataaaacttaaaaatcacaatatc

SEQ ID NO: 4937 - protein, 86 aa, Homo sapiens; identical to SEQ ID NO: 4925

SEQ ID NO: 4938 - DNA, 3768 bp, Homo sapiens
cccctgcccctgagtgacagaaccgtggacagcaacatttcccacaggacacgaagtttgtcggcccttgccttggcagagctgagtaagaaaaatcaccaagaatattatttttggtatttggaattgaatttgccaggaatgcaagcactgctacctaactaaagaccttggctttggaaacatcttaccccttggcagctctccagagtttagacttggcagcatcaaagacacaacgcaagcaatatgaaacagaaaaacaagttggttggatagctgtcctccatgcagtcattcatgatccaggctgtcatcatcttcatcactcatgttcagagttaccctagaggtcatctccatttcatccagataaatgagtatgcaaggaacgtttttataggcattttggagatcaaagatgggtagaaaagatgctgctactataaaacttcctgttgatcagtacagaaaacaaattggtaaacaggattataaaaaaactaaacctattttacgagcaaccaaattaaaagcagaagcaaagaaaacagcaataggcataaaggaagttggccttgtacttgcagctatattggcactactactggctttctatgctttcttttatctcagactcaccacggatgttgaccctgatctggaccaagatgaagattagctaagcaacaatcaatgcatgaaagagaaataactttacgaaagcaccttttgggaccaaaactttcaatactgaaactgtaacatctttaattctttctgctaatattttcagtttgcagacatatgatttttgatagttgcataggatgtcaggaaaagaaccttacctagcaatgcagtatagtatgtgctactggatacttttatatatctttctgctttgacagccaccctatacatggtacatttagatgaaatgggaaccagatcctaaatttttcaaatgtcattgccaatttatgtgtataattccatcacttcctgatgagtaagtctatttttgttctatatacatcataagttagtatatattcttatttacagaaacatgctcaaatcacattcagaaagaacaaaaagtcatgggaaattttttattttacaacaaagccctgctttctttctggacgtattttacatcattagagagactatctgcacatacatctaccataatctttttccttctttgccaactgttcagtgcacatgtgctgcatcagaaatggcacctggatgacagaagctcaaagagtcacatatgtctctaaaatagagttcttttcctcttgggctgtctgaactggtgtaaatagaagctcagttgatcttggttttaattaacttattactctattaatataaccttggaattctattctaattatgttgttctggctgcttgtagtatcagttcgcccctcttgttagggagatatgtaacaatctgtcatttaattgagcagtctttttcacataacagtaatagcaaaaatcctacctactcagaatcatcttcttaggttgtctcctaaatctgaacaatacagttgttttataaaattacattttgtctcttgagatttaatcaattagaactctttagggagaaaataaataatagaagaaaatatatgcctcatatttcatatgtaattatctgttgatataatttttcaatgtattttgtatttgtgggagcataatgacctgtacattcaatatttttactggtaattcaatttttaaatatgtttttacaatgcttgaacacataaaccttagaaaactggaaaatacgtgtccacagaaagagttattagctactaccttatgtaaagatgcatagaaaatgaaattgttggaaacatgtgcacaaagtgttttatattatatacattgtatttatgaagaataaataaaatattaagattgttttcctgctagccaagagaagaaatccttgggaaatatctaaggagtatatggggctttataagcactgtttctaaaagatattctctggtacttttgcaaaaagtcgactgtgactgtgtagcattatgttctgtagaatttttttcaagtagcataatttatttcattggtgtgaaaacagccaaaggttccaatatcctcacaaatcatttatgccaaacatctgagggcaaaatttagccggtgttatttactagattcttccctttgaactcacagactcaagagacagaccaagagttcttatatactcaccacagcggaccaatccaagtggcatttttaggaaaggttgcagcatttaatgccatgtggtatgtctgttcgtcaagtgggtggcaagggaatatccaagctggcattttggatatgatgggccttttactttcctgagtgacatgccacatgtcaagaaatactgctccccacccccccactcccatcacatttacgtgaacaattttcatttagttatttcccgttccatatggtgttaaaacagtcgtattaaataaagattatttctagttttcagtggtaatttaaatgagaggatatgtaataattgcttattagatacttatccaaatgaaatataacagagtttacagtacttaaaatggctggttatggtcttggaaatgtttgaaaattcattatcctgaaaaaaactttaccattctgttttacccttgaggtattttttggggaaaaatgtttttgataactattaatctaaatatagtataattataggcaaatttcactgcctagttttattgatatcctgagtctacagctagtccattcgtatgactgattgatttatgatagctccagagaaccataaatttcaaaggctaaactctctgattttagtaaatagtaggtaaagtgacacaatatatgtttacacaacactgttttcatgaaatgcaaactttgcaaaactcacattaactgggaagcagccaaccctctgtagagaaatcccagattgggagtctggtttgaatctttgaagacagaaaggtgatatccggcctgctgttttaaagggaccacacttttgaatacctactggtgtttggcagaaatctgagactggcaccagacacaaattttagacatgggtatcttccctccagtaattcactgctcagagtaatttagaagacaaaaacagaaaaaattgtaatgattttttaagtgttagaatatgtttgttaacatactctgcaaaataaatttcaactaatgcaatagacttaaaatatagcctatggaatactgtgattgaagtttgaaggcttgctggttcttattttgcatgcaagtttagacagggtaaagaatgtataaatttatttgagatgagatacagtattgtaaaaatataacctcatctagaattgcttttaaaacaagcaaaagcctattttagtacaaatgtagggtgggtagttgttttaaggtagcaaaatacttcaagattttctatctttttaatttttcatgaagacagaagaaatactttcaccccaaccaatgactgtaagatcttgagagtatgttcttactcatttctgtaattgcagtagtgtagtcatctgcatataaatttaataaatgcatgttaaaatttaagttgatgccttttagtcctctcagagtctgtcacagtttctttgtgtaaatgataaaaaagtttgaatttaatcaataaaacttaaaaatcacaatatc

SEQ ID NO: 4939 - protein, 86 aa, Homo sapiens; identical to SEQ ID NO: 4925

SEQ ID NO: 4940 - DNA, 3656 bp, Homo sapiens
tccgcctcaccctttgggagtaggggtgtgcggctggcttgtcccgcccctgcccctgagtgacagaaccgtggacagcaacatttcccacaggacacgaagtttgtcggcccttgccttggcagagctgagtaagaaaaatcaccaagaatattatttttggtatttggaattgaatttgccaggaatgcaagcactgctacctaactaaagaccttggctttggaaacatcttaccccttggcagctctccagagtttagacttggcagcatcaaagacacaacgcaaggcattttggagatcaaagatgggtagaaaagatgctgctactataaaacttcctgttgatcagtacagaaaacaaattggtaaacaggattataaaaaaactaaacctattttacgagcaaccaaattaaaagcagaagcaaagaaaacagcaataggcataaaggaagttggccttgtacttgcagctatattggcactactactggctttctatgctttcttttatctcagactcaccacggatgttgaccctgatctggaccaagatgaagattagctaagcaacaatcaatgcatgaaagagaaataactttacgaaagcaccttttgggaccaaaactttcaatactgaaactgtaacatctttaattctttctgctaatattttcagtttgcagacatatgatttttgatagttgcataggatgtcaggaaaagaaccttacctagcaatgcagtatagtatgtgctactggatacttttatatatctttctgctttgacagccaccctatacatggtacatttagatgaaatgggaaccagatcctaaatttttcaaatgtcattgccaatttatgtgtataattccatcacttcctgatgagtaagtctatttttgttctatatacatcataagttagtatatattcttatttacagaaacatgctcaaatcacattcagaaagaacaaaaagtcatgggaaattttttattttacaacaaagccctgctttctttctggacgtattttacatcattagagagactatctgcacatacatctaccataatctttttccttctttgccaactgttcagtgcacatgtgctgcatcagaaatggcacctggatgacagaagctcaaagagtcacatatgtctctaaaatagagttcttttcctcttgggctgtctgaactggtgtaaatagaagctcagttgatcttggttttaattaacttattactctattaatataaccttggaattctattctaattatgttgttctggctgcttgtagtatcagttcgcccctcttgttagggagatatgtaacaatctgtcatttaattgagcagtctttttcacataacagtaatagcaaaaatcctacctactcagaatcatcttcttaggttgtctcctaaatctgaacaatacagttgttttataaaattacattttgtctcttgagatttaatcaattagaactctttagggagaaaataaataatagaagaaaatatatgcctcatatttcatatgtaattatctgttgatataatttttcaatgtattttgtatttgtgggagcataatgacctgtacattcaatatttttactggtaattcaatttttaaatatgtttttacaatgcttgaacacataaaccttagaaaactggaaaatacgtgtccacagaaagagttattagctactaccttatgtaaagatgcatagaaaatgaaattgttggaaacatgtgcacaaagtgttttatattatatacattgtatttatgaagaataaataaaatattaagattgttttcctgctagccaagagaagaaatccttgggaaatatctaaggagtatatggggctttataagcactgtttctaaaagatattctctggtacttttgcaaaaagtcgactgtgactgtgtagcattatgttctgtagaatttttttcaagtagcataatttatttcattggtgtgaaaacagccaaaggttccaatatcctcacaaatcatttatgccaaacatctgagggcaaaatttagccggtgttatttactagattcttccctttgaactcacagactcaagagacagaccaagagttcttatatactcaccacagcggaccaatccaagtggcatttttaggaaaggttgcagcatttaatgccatgtggtatgtctgttcgtcaagtgggtggcaagggaatatccaagctggcattttggatatgatgggccttttactttcctgagtgacatgccacatgtcaagaaatactgctccccacccccccactcccatcacatttacgtgaacaattttcatttagttatttcccgttccatatggtgttaaaacagtcgtattaaataaagattatttctagttttcagtggtaatttaaatgagaggatatgtaataattgcttattagatacttatccaaatgaaatataacagagtttacagtacttaaaatggctggttatggtcttggaaatgtttgaaaattcattatcctgaaaaaaactttaccattctgttttacccttgaggtattttttggggaaaaatgtttttgataactattaatctaaatatagtataattataggcaaatttcactgcctagttttattgatatcctgagtctacagctagtccattcgtatgactgattgatttatgatagctccagagaaccataaatttcaaaggctaaactctctgattttagtaaatagtaggtaaagtgacacaatatatgtttacacaacactgttttcatgaaatgcaaactttgcaaaactcacattaactgggaagcagccaaccctctgtagagaaatcccagattgggagtctggtttgaatctttgaagacagaaaggtgatatccggcctgctgttttaaagggaccacacttttgaatacctactggtgtttggcagaaatctgagactggcaccagacacaaattttagacatgggtatcttccctccagtaattcactgctcagagtaatttagaagacaaaaacagaaaaaattgtaatgattttttaagtgttagaatatgtttgttaacatactctgcaaaataaatttcaactaatgcaatagacttaaaatatagcctatggaatactgtgattgaagtttgaaggcttgctggttcttattttgcatgcaagtttagacagggtaaagaatgtataaatttatttgagatgagatacagtattgtaaaaatataacctcatctagaattgcttttaaaacaagcaaaagcctattttagtacaaatgtagggtgggtagttgttttaaggtagcaaaatacttcaagattttctatctttttaatttttcatgaagacagaagaaatactttcaccccaaccaatgactgtaagatcttgagagtatgttcttactcatttctgtaattgcagtagtgtagtcatctgcatataaatttaataaatgcatgttaaaatttaagttgatgccttttagtcctctcagagtctgtcacagtttctttgtgtaaatgataaaaaagtttgaatttaatcaataaaacttaaaaatcacaatatc

SEQ ID NO: 4941 - protein, 86 aa, Homo sapiens; identical to SEQ ID NO: 4925

SEQ ID NO: 4942 - DNA, 4289 bp, Homo sapiens; identical to SEQ ID NO: 4924

SEQ ID NO: 4943 - protein, 86 aa, Homo sapiens; identical to SEQ ID NO: 4925

SEQ ID NO: 4944 - DNA, 3676 bp, Homo sapiens; identical to SEQ ID NO: 4926

SEQ ID NO: 4945 - protein, 54 aa, Homo sapiens; identical to SEQ ID NO: 4927

SEQ ID NO: 4946 - DNA, 3556 bp, Homo sapiens; identical to SEQ ID NO: 4928

SEQ ID NO: 4947 - protein, 54 aa, Homo sapiens; identical to SEQ ID NO: 4927

SEQ ID NO: 4948 - DNA, 3408 bp, Homo sapiens; identical to SEQ ID NO: 4930

SEQ ID NO: 4949 - protein, 54 aa, Homo sapiens; identical to SEQ ID NO: 4927

SEQ ID NO: 4950 - DNA, 3622 bp, Homo sapiens; identical to SEQ ID NO: 4932

SEQ ID NO: 4951 - protein, 86 aa, Homo sapiens; identical to SEQ ID NO: 4925

SEQ ID NO: 4952 - DNA, 3586 bp, Homo sapiens; identical to SEQ ID NO: 4934

SEQ ID NO: 4953 - protein, 86 aa, Homo sapiens; identical to SEQ ID NO: 4925

SEQ ID NO: 4954 - DNA, 4070 bp, Homo sapiens; identical to SEQ ID NO: 4936

SEQ ID NO: 4955 - protein, 86 aa, Homo sapiens; identical to SEQ ID NO: 4925

SEQ ID NO: 4956 - DNA, 3768 bp, Homo sapiens; identical to SEQ ID NO: 4938

SEQ ID NO: 4957 - protein, 86 aa, Homo sapiens; identical to SEQ ID NO: 4925

SEQ ID NO: 4958 - DNA, 3656 bp, Homo sapiens; identical to SEQ ID NO: 4940

SEQ ID NO: 4959 - protein, 86 aa, Homo sapiens; identical to SEQ ID NO: 4925

SEQ ID NO: 4960 - DNA, 371 bp, Homo sapiens
taaatcaccatggatatattcctgaaaagagtgataccttctcaaggagagcctcaggaaggtccttcagaagggattccacaggaaggcactgttgtcacaggagatgacaactccaggcatgttactctccctgaagactttccagtgggacaagatgtggaggtggaagacaatgataccgatgatcctgaccctttttttgctaaggtgtgtatttatgtcttggtttttaacaaaaaagtattaaaagtaggaaaaatgttaaaaactttaaaaatagaaaaaagcttatagagtatggatataaagaaaggaaatattttgtacagctgtacaatgtgatgtgtttgtgtttgtttgtttgtttg

SEQ ID NO: 4961 - protein, 95 aa, Homo sapiens [sequence omitted]

SEQ ID NO: 4962 - DNA, 371 bp, Homo sapiens; identical to SEQ ID NO: 4960

SEQ ID NO: 4963 - protein, 95 aa, Homo sapiens [sequence omitted]

SEQ ID NO: 4964 - DNA, 1224 bp, Homo sapiens
atgggcaactcattaagcatattttgttcctggttccgccacaggtcctggccatgccattggcaacctgctcgtcttgtccatgaggccttcccagctggccgggctaaccccgcggctcctgcacctgtgcctgcccggggaatcgtgggccgtttcccactcctcttcaaccctcagcgacatcttgggccttcttttccagtcagttgggacggcgcccctatgaggctgtgtcttatccctcggaacatgggcaccccacagagggtcctgtctcctgtggtctggagccccgcctcaaggaagaaacccatgctgtctgctcacaactccaggatgtttggacacctcagccccgtgaggattcctcatctcagaggcaagtttaaccttcaacttccttcattagatgagcaggtgatcccagccaggctcccgaagatggaggtgagggcagaagagcccagagaagcaacggaggtgacagaccaggtagagacccaggggcaggaggacaataaaaggggcccctgtagcaatggggaagcagcttccacctctaggcccctggagactcagggaaacttcacttcctcctggtacaatcccaggcccttggagggaaatgtccacctcaagagcttgacagaaaacaaccagactgacaaggcccaggtgcctgcagtgagtttctactccaacggccatggagtcgccagttcacacagccctgctggaggcatccttccctttgggaagcctgacccacttccaacagtgctccctgccccagttccaggctgctccctgtggccagagaaggcggccttgaaggtgctgggtaaagaccacctgcccagctctccaggcttgctgatggtgggggaggacatgcagcccaaggatcctgcagctcttgggtcaagtaggtcttctccacacagagctgccggccacagttcccacaaaagaaaactgtcggggccaccgctgcagctgcaaccgacccctcccctgcaactgaggtgggatagagacgaggggcccccaccggctaagcttccatgtctatctcctgaggcactgttggtgggtcaggcttcccaaagagaaggacgcctccagcagggcaacatgtgtaagaacatgagggtgttaagtagaacatcaaaattcaggagagtaagagagctgcttaggaggagaaagaagagatggtag

SEQ ID NO: 4965 - protein, 407 aa, Homo sapiens [sequence omitted]

SEQ ID NO: 4966 - DNA, 1133 bp, Homo sapiens
atggccagactcaacaatgggcttcttaatgaaactgggaaactgcagagttcaagtgggggttgggtgctgaaccgtggctcattccctcagggatcaaatatcagcagagtcatcagagaagaacataagaagaaaaacccagaagtccctgtcaattttgcagaattttccaagaaatgctctgggaggtggaagacaatgtccagtaaagagaaatttaaatttggtgaaatggcaaaggcggatgaagtgtgctatgatcgggaaatgaaggattatggaccagctaagggaggcaagaagaaggatcctaatgcccccaaaaggccaccatctggattcttcctgttctgttcagaattccgccccaagatcaaatccacaaaccccggcatctctattggagacgtggcaaaaaagttgggtgagatgtggaataacttaaatgacagtgaaaagcagccttacgtcactaaggcggcaaagctgaaggagaagtatgagaaggatgttgttgactgtaagttgaaaggaaagttttatggcgcaaagcgtcctgctaaagttgcccggaaaaaggtggaagaggaagatgaagaagacgaggaggaagaagagaaggagaaggacgaggaggatgaacaaagaaactgtttatctgtctccttgtgaatacatagagtaggggagcgccgtaactgacacatctcttatttaatgtctgttgccctcattaggtttaattacaaaatttgatcacgatcgtattgtagtctctcaaagtgctctagaaattgtcagtggtttacatgaagtggccatgggtgtctggagcaccctgaaactgcaccaaagttgtacatatttccaaacatttttaaaatgaaaaggcactctcgtgttctcctcactctgtgcactttgccgttggtgtgacaaggcatttaaagatgtttctggcgttttctttttatttgtaaggtggtgttaactatatggttattggctagaaatcctgagttatcaactgtatatctctatagtttgtaaaaagaacaaaacaaccgagacaaactcttgatgctccttgctcggcgttgaggctgtggggaagatgccttttggagggg

SEQ ID NO: 4967 - protein, 224 aa, Homo sapiens
MARLNNGLLNETGKLQSSSGGWVLNRGSFPQGSNISRVIREEHKKKNPEVPVNFAEFSKKCSGRWKTMSSKEKFKFGEMAKADEVCYDREMKDYGPAKGGKKKDPNAPKRPPSGFFLFCSEFRPKIKSTNPGISIGDVAKKLGEMWNNLNDSEKQPYVTKAAKLKEKYEKDVVDCKLKGKFYGAKRPAKVARKKVEEEDEEDEEEEEKEKDEEDEQRNCLSVSL

SEQ ID NO: 4968 - DNA, 1133 bp, Homo sapiens
atggccagactcaacaatgggcttcttaatgaaactgggaaactgcagagttcaagtgggggttgggtgctgaaccgtggctcattccctcagggatcaaatatcagcagagtcatcagagaagaacataagaagaaaaacccagaagtccctgtcaattttgcagaattttccaagaaatgctctgggaggtggaagacaatgtccagtaaagagaaatttaaatttggtgaaatggcaaaggcggatgaagtgtgctatgatcgggaaatgaaggattatggaccagctaagggaggcaagaagaaggatcctaatgcccccaaaaggccaccatctggattcttcctgttctgttcagaattccgccccaagatcaaatccacaaaccccggcatctctattggagacgtggcaaaaaagttgggtgagatgtggaataacttaaatgacagtgaaaagcagccttacgtcactaaggcggcaaagctgaaggagaagtatgagaaggatgttgttgactgtaagttgaaaggaaagttttatggcgcaaagcgtcctgctaaagttgcccggaaaaaggtggaagaggaagatgaagaagacgaggaggaagaagagaaggagaaggatgaggaggatgaacaaagaaactgtttatctgtctccttgtgaatacatagagtaggggagcgccgtaactgacacatctcttatttaatgtctgttgccctcattaggtttaattacaaaatttgatcacgatcgtattgtagtctctcaaagtgctctagaaattgtcagtggtttacatgaagtggccatgggtgtctggagcaccctgaaactgcaccaaagttgtacatatttccaaacatttttaaaatgaaaaggcactctcgtgttctcctcactctgtgcactttgccgttggtgtgacaaggcatttaaagatgtttctggcgttttctttttatttgtaaggtggtgttaactatatggttattggctagaaatcctgagttatcaactgtatatctctatagtttgtaaaaagaacaaaacaaccgagacaaactcttgatgctccttgctcggcgttgaggctgtggggaagatgccttttggagggg

SEQ ID NO: 4969 - protein, 224 aa, Homo sapiens; identical to SEQ ID NO: 4967

SEQ ID NO: 4970 - DNA, 2960 bp, Homo sapiens
cactctaggtggcaggagcagcttcctgagggagccaggggcccagggcgtcctgtgtttgtccacaccctcctcatgctccacgctgagaagccaccacggccaccgggcctctgtcattcactctcaccccgccacacgggccctgcccccaggaccccagactcactttgccgccatctcgtagaaaatcatccggtcaaagttgctcgtgtgctgccattcccgcatggcccgccacagtccctcctccagcgtcatggtgggcttccgccgggccagggatcggagaactgggctgtaaaccagtgcagtcagtcccagtctgtaagcccaccctccatcccgggcccacctggtcccaacacctggctcctgtcctccccacacctgtcctgccatctgtccctgtcctgttctcccccatgtgggctcctcagcctccaggacacacccccaagatccaacatcaacagaagccactgagtggcctctccgactgcccctcaagtcctcggtgttatgatgttgacaagtgaactcagtgctatgggtggaacatgtgtgtccccaacattcctgtgttgaagccctcagtgccagtgtgtcagtatttggaggcaatcagggttagagcaggtcatgagcgtgggtcccagtcatggaatccgagctctgataagggcaggaggagacaccagggctcttgctctcagccacaagagcacacagccagaggcagctctctccagccaggaagagggccctgaccagacacccaatccgctgtcaccttgatctgggacttctggcctctggaactgggagacatgaatgtgtcttgataaagcacccagtctatgggattcgttacggcagagcctgagctgactgagacaccatgcacacagaatgacctgggagcgagggttaaagtgcaggttcctgggccacaggactgagcatttaaccagcttcctggggactctggagcaaggcagcccctggggacacagcctcagggtcctggagcttgaggagcaggagcacatgtccagaaccaaagcagagcggtgtccaagccactgcaagcagccaggcacagcttcccacattcccacaggagccaaggcaaaggcctgtgagcccggggcggctacactccaagaatcagggtccccagtgcaccgggactccgctccaaggggggatgcaaccagttccagggtgtgggggcagcgagactgttggggaggaagacgggaccgccttcacctacaccccaggcaggggactcccctaggggaacggccagtgtgttgcacggtggatatgctcaagctcctgtttgctcatcagcgggaaacaaagggtcacagaggtgccgtggggtggagagaggcagggactgggaatgaaaccacaaactctcccagatgctgatgttgctgcctcacagtcaccacagtccacggctctgggctgctgggctcgtggtgcactcagagctatcactggagcccgtggctttggggagcactctcctagatggcctagtcctgataatggtagtaatggggacagtaatcctaattgctgtcatgtaatgtgtcatagtatgtgccaggcactgtgctacgtatgtcatatgtgagttcaagtcatctctttgccatcctctgaatgaagcaccattgtccttttttctaggggggattgacggtgaagatgctaatacctgcccagcatcgaccctagtgcgggtcccaagaccatccccctgtgcaggctccaccaccgctgtgctaactggaccgcggcagaagagtgggtgtgtgccaggtttctgctgggccctgcagctcctccccccagccccatgtgatgtgcccctggccattgacactcagttcgagggaaggcactggggtgtacactcaaagacctaaacccagggtgggtgcggtggctcacgtctgcaatcccagcactttgggaggctgaggcgggtggatcacaaggccaggagttcaagaccagcctgcttaacatagtgaaaccccgtctctactaaaaaatacaaaaaaattagccgggcatggtggcgggcacctgtaatcccaggtacttgggaggctgaggcaggagaattgcttgaacccaggaggcagaggttgcggtgagccaagatcgcaccattgcactccagcctgggtgacagtgcgagactccatctcaaacaaacaaacaaaaaagacctaaacccaaaccgtggctcacgtcacaccaagaaccctctctgacctgggtcttctgtaaacatggttgtgaaaattattgaaagtaaaagccgggcacggtgggtcatgcctgcaatcgcagcactttgggaggccgaggcgggagaatcaccagggcaggagattgagagcatcctggctaacatggtgaaaccccgtctctactaaaaatacaaaaaaattagccgggcatggtggcgggcacctgtagtcccagctactcgggagcctgaggcaggagaatgacgtgaacctgggaggtagagcttgcagtgagccgagatcacgccactgctctccaccctgggcgacagagtgagactccatctcaaaaaaaaaaaaaaaaagaaaagaaaagaaaagaaagtaagtattggggcggggcatgatggctcatgcctgtaatctcagcactttgagaggctgaggcgggcagatcaactgaggtcgggagttcaagaccagcctgaccaacatggagaaaccccatctctacgaatacaaaattagccaggcatggtggcacatgcctgtaatcccaactactcaggaagctgaggcagcagaatcacttgaacccaggaggcggaggttgtgatgagctgagatcgcgccattgcactccagcctgggcaacaagagtgaaagtccatctcaaaa

SEQ ID NO: 4971 - protein, 176 aa, Homo sapiens [sequence omitted]

SEQ ID NO: 4972 - DNA, 802 bp, Homo sapiens
gcggtttgctaagtggtcggttcctggagctgcggtcttctgctagcctgatccgcagcttcagcctccgccgcctcctcagccctcggcgccgccgcctgacccgcaggccgccgcgggccgcagagcccatgagggcgcgggcaccgccgccgcctccgcggcgtcgccgtcgtcccggagcgccccgagctggcgcgggcatggccgcggcatgagcgtggagccgccgccggagctggaggagaaggcggcgtcggagcccgaggcgggagccatgccggagaagcgcgcgggcgcgcaggccgcggggagcacctggctacaaggctttggcccaccaagtgtgtaccatgctgctattgtcatcttccttgaattctttgcgtggggccttttgacaactccaatgttgactgttctacatgaaacattttctcaacacacattcctcatgaatggtctcattcaaggtgtaaagggcctgctctcttttttgagtgccccactcattggtgccctgtctgatgtgtgggggaggaagccctttctcctcggcactgtattctttacctgcttcccaatcccactgatgaggatcagcccatgccgggtgtggtggcgtgcacctgtagtcccagctacctgtggcaggagaatggcttgaacccaggaagcggaggttgcagtgagccaagatcacaccattgcactccagcctaggcatggtgagactccatctcaaaaaaaaaaaaaaattaaattgtattgattttctcttttcaaaaaaaaaaaaaaaaaa

SEQ ID NO: 4973 - DNA, 171 bp, Homo sapiens
atgggtcgtaaagcagcagggacaaattgcaacatggacaatgcatttggcccaggatctgctaatgaacatatagtgcagtggtggttcaagaagttttacaaggaagacgagagccttgaagatgaggagtgtagtggctgccattggaagttgacaacaaccagttga

SEQ ID NO: 4974 - protein, 56 aa, Homo sapiens [sequence omitted]

SEQ ID NO: 4975 - DNA, 7522 bp, Homo sapiens
cccgggcgagcccgccgtgcgcacagctctgcccgccgcccctggagcggatccccagccgtccctgggcgttctcccgggttctagcaaagccccccggggtgcccatcagtttccttgggtgactacagcgtgtgttttttctttcctctttcccctgcctgtgtgcccttctccaggatggcagaggcggaattgcacaaggaaaggctgcaagccatagcagaaaaaagaaagaggcagactgaaatagaaggcaagcgacaacagcttgacgagcagatacttctgctgcagcattccaagtccaaagtgcttcgggagaaatggctgctgcagggcatacccgctggaactgccgaagaggaggaagccaggaggcggcagtctgaagaggatgagttcagagtcaagcaacttgaagataacattcagaggctggagcaagaaatacaaacgctagaaagtgaagagtcccagatatctgccaaagagcaaatcatcctagagaaactgaaggaaacagaaaaatccttcaaggactttcagaagggtttctccagtacggatggagatgcagtaaattacatttcctcccagcttcccgacctgccaatcctctgttcacgaacagcagaaccatcacctgggcaggacgggaccagcagagcggctggagtcgggtgggagaatgtgctgctaaaggaaggtgagtcagcctcgaacgccacagaaacatccggcccagacatgactatcaagaagcctccccagctttctgaggatgatatctggctaaaaagcgagggagacaactatagtgccaccctcctggagcctgctgccagctctctttccccagatcacaaaaacatggaaattgaggtgtctgttgcagaatgtaaaagtgttcctggaatcacctctaccccacatcccatggaccatccctccgctttctattcacccccgcataatggcctccttactgatcaccacgaatccctggataatgatgttgccagagagatccgctatctagatgaggtgctagaggccaactgctgtgattctgctgtggatggaacgtacaatggaacatcctccccagagcctggtgcagtggttctggtgggcggcctaagcccccctgtccacgaggcgacccagccagaacccactgaaagaacagctagccggcaggcacctcctcacatcgagctcagtaatagcagccctgaccccatggcagaggcagaaagaacaaatggccattcccccagccagcctagagatgcgctgggggacagcctgcaggtgcctgtcagccccagctccacaaccagctcacggtgttcttcccgagatggagagttcactctcaccacactgaaaaaggaggccaagtttgagctgcgtgccttccatgaggacaagaagccctccaagctctttgaggatgacgagcatgagaaagaacaatactgcattagaaaagtgaggccttcagaggagatgctggagctggaaaaggagaggagagagctcatccgcagccaggccgtcaagaagaatcctggcattgcagcaaaatggtggaatcccccgcaggaaaaaaccatcgaggagcagctggacgaggaacatctggagtcgcacaaaaagtacaaggagcgcaaagagagaagggcacagcaggaacagttgctgctgcagaagcagttacagcagcagcagcagcagcccccatcgcagctctgcacagcccctgcctcttctcatgaacgcgcaagcatgattgacaaagcaaaggaggacattgtcacagagcagatagatttctctgctgctcgcaaacaatttcagctgatggagaattccaggcaagcggtggccaagggccagagtacacccaggctgttctccatcaagcctttctacaggcctctggggtcagtcaactcagacaagccactgactaatccgagaccaccttctgtcgggggacctccagaagacagtggtgcctcagccgccaagggacagaaatcccccggtgccctggagaccccatcggcagcaggaagccagggcaacacagcctctcaggggaaggaagggccctacagcgagccttctaaacgtgggcccttatctaaactgtgggctgaggatggagaatttacgagcgcccgggctgtcctcactgtggtcaaggatgatgaccatgggattttggatcagttctcaagatctgtcaatgtctccttgacccaagaggagcttgactctggtctggacgaattgtcggtgaggtctcaggataccacagtcctggagaccctatccaatgatttcagcatggacaacatcagtgacagcggggcatccaatgagacaaccaatgccctccaggaaaattcactggctgatttttctctgccccagacaccacaaactgacaacccctcagagggccgaggagaaggcgtctccaagtcatttagtgatcatggtttctattccccttcctccacgctgggggactctccgttggttgatgaccccttggagtatcaggctggcctcctggtgcagaatgccattcaacaagccatagccgagcaggtggataaagctgtgtccaaaaccagcagggatggagcagagcaacagggacctgaagcgactgtagaggaagctgaagctgcggctttcggctcagaaaagcctcagagcatgtttgagccacctcaggtgtcttctcctgttcaagagaaaagggatgtattaccaaagattctgcctgctgaagacagggcgctcagggaaagggggcccccccagccactgccagctgtgcagcccagtggcccgattaacatggaggagaccaggcccgaaggaagctatttcagcaagtactcggaggcagctgagctgagaagcacagcctccctcctggccactcaagaatctgacgtgatggttgggcctttcaagctgaggtccaggaaacagcggactttgtccatgattgaggaagagatccgagcagctcaggaaagggaagaggagctgaagaggcagagacaagtcttgcagagtacgcagagccccaggacaaagaatgccccatcactgccctccagaacatgctacaaaactgctccagggaaaatagagaaagtcaaacctcctccatcccccaccactgaaggccccagcttgcagcctgacttagcccctgaagaggctgccggaacccagcggcccaagaatctgatgcagaccctcatggaagactatgagacacacaaatctaaaaggcgcgagagaatggatgatagtagttacacttctaagttactgtcttgcaaggtgacttccgaggtcctcgaggccacacgggttaatcgaagaaagagcgcactggctttgcgctgggaagcagggatctatgccaaccaggaggaagaagacaacgaataaacttccttcaacccaggaagcgtctttggtgcttgggagaccaagaaaccaagaaattaacaactgaaagcattttaatggactatttattaaagtgcaaacaaactcagcaatccttatgtagaccagaagctgcaatatacaatgatgaaaatgaaacgaaaaggaagtccccccatcagactctggacacccaggaatcaaaagagaaaggacttttttggtgactcaatcccagtgtctggtttggggccaatctacaatggatccaaaaggacaaaacatgttacaagcaaatcaacatagttgctgcaggcggaactgagaccagcctctctgggcgatgaaggacaatggtggtagggccacttagagagcagtagggcccaggctggtgcagcctacatggcacaggatatttccctgcaccagtttcccacctgtcacttgcagcatcagagggtgttgcattaactccattttctccagcagccataaaatgaatggcgtttctctccatatttgcccagaagaggcagttatgattccacttctcctacatttaattatttttaattgagaacaactcatgatcacaattcataaaatccatattttaagacaatagttcttcatgtcacaaacacaatctattctacatgaggaggctgagaaaggggaagagaaaaacaaaccaaatggatgatgttagctttaggatcgtgtctgcttataatattcactgatctgcagtttatgagaacacattttcacagttatgtttcttcataggaaaactatatttagtgggcaacaactatttttatgatgggatgggggagtatatacacgtatagaatctgtacgcgttgaacaacttggttcaagatggtgggggcatttttagagcggcaataattgaaaaaaaaggcgaactctgccttggagaggtagatgataagaaataaaaaggtgtttataactattttgtattataaagtgggccttagagataggaagaagaatgatggattccttttggatcaatcagaaaggaaacacgaaagaaaagtcaggaaggtagagagagaaaaagggagggaaggagaaagaatgggaataaaataaggaggtaagagatactatttttgctgagcaaccagtgtgtttcaggatgatacaaagaaaaatatagaatagaaataagtgcaggcttggaatcagctacaaatcctaaagatggggtgtgtgtggatgtgtgtgtgtgtgtgtgtacaccattgtgtgtttgtaaaatgtgtatgttcatgagtaagggtgtgtgtgtgtgtgtattaaaattccagagtgaccgtggcacttgggtgtacaggtaattcctccagagctgtttgctggcttcaggagtggagtgagaatttcttttttatgaaaagggatataaaggcaccgagctgatgcagtatttgtaatattaagttgacctaacaaggtatttgcatgagtcacaattacaaagttttgagcggttttgtaatttgacatttaggagagtctcctatttattctcatactttacattcatgcttagtatactatagaggatgccagctttaatctttctgtcatttaaagcaatatgataagggtattcaataattgggtgccctaaatttctggatgagaaaattttcaattctggccatgagaaagaaaaaaaaataaacagccttctttttttttcctttgttttaaaactgtggttttttaaaaaagcaataattaactcagacctcactaaaaatcatttttgtttttatattgttatgtcataagctctattatgttattctaacaagtagcaatttcacaaaatttgtatgtagatgttaacgcacatttcctttgcttcttttattagactagtgttgactttggggggggacatttattcacaaatgagaagtaggcacaaagtaaaaaatggaaccatctactaacaaggatcctttaaaactgccaagggagctctaacttgaagccacatcctacagatggcagcccaaatagcacatgggcaattggcaccatctttatatggttgagtctcctgaatattttgaatgaattctcaacaaaatgtgctagccactggggacgcaaaacaagtaagatccctgttgcaagaaattcattttatagtgagggaggttggcatggagactaaaattctcaggaaaatgagatccgtgttagattagaagtcctgatgtgaaatgggaggactcaggaaggaggatcgtctttacctgaggatttctagccagaggtcccagatgcctgggctgagaacccagcgataagggggcgttcccaaagcagacacagggataagaacagaggaggcagcagcattgcacagccccaggcacagtggcagttaggatggctggagagtaggatagttctatgggttgcccaaaaaatgtgatgcgcttcatgttttctctgactcatggatctggtagagaccatagacatgatatagactaacttccccatttttcacaagaggaaaccatccttatgacttaccttaaagttttttgttctgttttgaaggaaaccatgtgcttcatgaaacctacagttgacaagagaatgtacagctaagagaaaagcttaagaggccacactattcgcggaatggctttagaggcagatgaagtggtctttgaccacagttgattgaaccagagcacttattgcttaaagaataacagagttctagagctgggggttcttgggccatgctccgtgtgtggataaggaaagaaatactgtttctgggactctcccacagtcacaaagctgttttcactgtggcccctacatctcttaacttttgctattactcctatgctgccttccggattactgctgtctatcttcttgctccactcactgaagatcctattataatcccatgaaaatgtaaattacagtttacttgggagagccagattttctctgtgctcttgagttttttattcattcaagaaaccttgggccaccgctttgtacatagcaccgtgctaggctctgggatcccaaatggacccttttaactttctgaagatgggaccgtcccctggaggaaagtcattcctgcctaatccatcgagagaaagaggcttacgaaaaactttgcctctgatgctcagccccacccccaaatagcacacaagcttgttaaccccacctcttacaaaatgtttagattctgtaggtgttaaaagcctttctggaagtattgcattctgccgtgtttataggtgttcactttcctccagagctgattaactactgacatgacttggctttctcatccagaaattatggaaacagggtctgtcagtggcaggaggccgtgctgtgttttacttggatgacacaatgcagtttacttgcctcttcatacccatgcatgctgctcaccctagacaatgacatataagccgtatatagatcaatgtccacatatatatacacacacacatatatatatataaagtgtaacaaggaacactaaaacagtgttgattcttgtctctgaagacaaataattaaaccttttttttcccaactaaagaatggatttaattaaactatgtattgaaaaaaaagtagcctaagtgttagagatggtgaatatattccattttagttaaagaacaaatttcctgaattttaagcattcagtgagctgccaattttgattttgtgttgctctttacccaaattattttttctttgtttttctttttttgggggaggaggggaaaaaagcagcaatactgtgtttggaaattatactctgtatctggttttcctgtgtatgttaaccacttaaatgttattatcctgctttggttttagagtgattgtgaggcattcaatgcaagtatacagttattttctcattaaaatccaatgtgtgttgagtttttataaaaaaaaaaaaaaaaaa

SEQ ID NO: 4976 - protein, 1103 aa, Homo sapiens
MAEAELHKERLQAIAEKRKRQTEIEGKRQQLDEQILLLQHSKSKVLREKWLLQGIPAGTAEEEEARRRQSEEDEFRVKQLEDNIQRLEQEIQTLESEESQISAKEQIILEKLKETEKSFKDFQKGFSSTDGDAVNYISSQLPDLPILCSRTAEPSPGQDGTSRAAGVGWENVLLKEGESASNATETSGPDMTIKKPPQLSEDDIWLKSEGDNYSATLLEPAASSLSPDHKNMEIEVSVAECKSVPGITSTPHPMDHPSAFYSPPHNGLLTDHHESLDNDVAREIRYLDEVLEANCCDSAVDGTYNGTSSPEPGAVVLVGGLSPPVHEATQPEPTERTASRQAPPHIELSNSSPDPMAEAERTNGHSPSQPRDALGDSLQVPVSPSSTTSSRCSSRDGEFTLTTLKKEAKFELRAFHEDKKPSKLFEDDEHEKEQYCIRKVRPSEEMLELEKERRELIRSQAVKKNPGIAAKWWNPPQEKTIEEQLDEEHLESHKKYKERKERRAQQEQLLLQKQLQQQQQQPPSQLCTAPASSHERASMIDKAKEDIVTEQIDFSAARKQFQLMENSRQAVAKGQSTPRLFSIKPFYRPLGSVNSDKPLTNPRPPSVGGPPEDSGASAAKGQKSPGALETPSAAGSQGNTASQGKEGPYSEPSKRGPLSKLWAEDGEFTSARAVLTVVKDDDHGILDQFSRSVNVSLTQEELDSGLDELSVRSQDTTVLETLSNDFSMDNISDSGASNETTNALQENSLADFSLPQTPQTDNPSEGRGEGVSKSFSDHGFYSPSSTLGDSPLVDDPLEYQAGLLVQNAIQQAIAEQVDKAVSKTSRDGAEQQGPEATVEEAEAAAFGSEKPQSMFEPPQVSSPVQEKRDVLPKILPAEDRALRERGPPQPLPAVQPSGPINMEETRPEGSYFSKYSEAAELRSTASLLATQESDVMVGPFKLRSRKQRTLSMIEEEIRAAQEREEELKRQRQVLQSTQSPRTKNAPSLPSRTCYKTAPGKIEKVKPPPSPTTEGPSLQPDLAPEEAAGTQRPKNLMQTLMEDYETHKSKRRERMDDSSYTSKLLSCKVTSEVLEATRVNRRKSALALRWEAGIYANQEEEDNE

SEQ ID NO: 4977 - DNA, 5180 bp, Homo sapiens
cccgggcgagcccgccgtgcgcacagctctgcccgccgcccctggagcggatccccagccgtccctgggcgttctcccgggttctagcaaagccccccggggtgcccatcagtttccttgggtgactacagcgtgtgttttttctttcctctttcccctgcctgtgtgcccttctccaggatggcagaggcggaattgcacaaggaaaggctgcaagccatagcagaaaaaagaaagaggcagactgaaatagaaggcaagcgacaacagcttgacgagcagatacttctgctgcagcattccaagtccaaagtgcttcgggagaaatggctgctgcagggcatacccgctggaactgccgaagaggaggaagccaggaggcggcagtctgaagaggatgagttcagagtcaagcaacttgaagataacattcagaggctggagcaagaaatacaaacgctagaaagtgaagagtcccagatatctgccaaagagcaaatcatcctagagaaactgaaggaaacagaaaaatccttcaaggactttcagaagggtttctccagtacggatggagatgcagtaaattacatttcctcccagcttcccgacctgccaatcctctgttcacgaacagcagaaccatcacctgggcaggacgggaccagcagagcggctggagtcgggtgggagaatgtgctgctaaaggaaggtgagtcagcctcgaacgccacagaaacatccggcccagacatgactatcaagaagcctccccagctttctgaggatgatatctggctaaaaagcgagggagacaactatagtgccaccctcctggagcctgctgccagctctctttccccagatcacaaaaacatggaaattgaggtgtctgttgcagaatgtaaaagtgttcctggaatcacctctaccccacatcccatggaccatccctccgctttctattcacccccgcataatggcctccttactgatcaccacgaatccctggataatgatgttgccagagagatccgctatctagatgaggtgctagaggccaactgctgtgattctgctgtggatggaacgtacaatggaacatcctccccagagcctggtgcagtggttctggtgggcggcctaagcccccctgtccacgaggcgacccagccagaacccactgaaagaacagctagccggcaggcacctcctcacatcgagctcagtaatagcagccctgaccccatggcagaggcagaaagaacaaatggccattcccccagccagcctagagatgcgctgggggacagcctgcaggtgcctgtcagccccagctccacaaccagctcacggtgttcttcccgagatggagagttcactctcaccacactgaaaaaggaggccaagtttgagctgcgtgccttccatgaggacaagaagccctccaagctctttgaggatgacgagcatgagaaagaacaatactgcattagaaaagtgaggccttcagaggagatgctggagctggaaaaggagaggagagagctcatccgcagccaggccgtcaagaagaatcctggcattgcagcaaaatggtggaatcccccgcaggaaaaaaccatcgaggagcagctggacgaggaacatctggagtcgcacaaaaagtacaaggagcgcaaagagagaagggcacagcaggaacagttgctgctgcagaagcagttacagcagcagcagcagcagcccccatcgcagctctgcacagcccctgcctcttctcatgaacgcgcaagcatgattgacaaagcaaaggaggacattgtcacagagcagatagatttctctgctgctcgcaaacaatttcagctgatggagaattccaggcaagcggtggccaagggccagagtacacccaggctgttctccatcaagcctttctacaggcctctggggtcagtcaactcagacaagccactgactaatccgagaccaccttctgtcgggggacctccagaagacagtggtgcctcagccgccaagggacagaaatcccccggtgccctggagaccccatcggcagcaggaagccagggcaacacagcctctcaggggaaggaagggccctacagcgagccttctaaacgtgggcccttatctaaactgtgggctgaggatggagaatttacgagcgcccgggctgtcctcactgtggtcaaggatgatgaccatgggattttggatcagttctcaagatctgtcaatgtctccttgacccaagaggagcttgactctggtctggacgaattgtcggtgaggtctcaggataccacagtcctggagaccctatccaatgatttcagcatggacaacatcagtgacagcggggcatccaatgagacaaccaatgccctccaggaaaattcactggctgatttttctctgccccagacaccacaaactgacaacccctcagagggccgaggagaaggcgtctccaagtcatttagtgatcatggtttctattccccttcctccacgctgggggactctccgttggttgatgaccccttggagtatcaggctggcctcctggtgcagaatgccattcaacaagccatagccgagcaggtggataaagctgtgtccaaaaccagcagggatggagcagagcaacagggacctgaagcgactgtagaggaagctgaagctgcggctttcggctcagaaaagcctcagagcatgtttgagccacctcaggtgtcttctcctgttcaagagaaaagggatgtattaccaaagattctgcctgctgaagacagggcgctcagggaaagggggcccccccagccactgccagctgtgcagcccagtggcccgattaacatggaggagaccaggcccgaaggaagctatttcagcaagtactcggaggcagctgagctgagaagcacagcctccctcctggccactcaagaatctgacgtgatggttgggcctttcaagctgaggtccaggaaacagcggactttgtccatgattgaggaagagatccgagcagctcaggaaagggaagaggagctgaagaggcagagacaagtcttgcagagtacgcagagccccaggacaaagaatgccccatcactgccctccagaacatgctacaaaactgctccagggaaaatagagaaagtcaaacctcctccatcccccaccactgaaggccccagcttgcagcctgacttagcccctgaagaggctgccggaacccagcggcccaagaatctgatgcagaccctcatggaagactatgagacacacaaatctaaaaggcgcgagagaatggatgatagtagtgtcctcgaggccacacgggttaatcgaagaaagagcgcactggctttgcgctgggaagcagggatctatgccaaccaggaggaagaagacaacgaataaacttccttcaacccaggaagcgtctttggtgcttgggagaccaagaaaccaagaaattaacaactgaaagcattttaatggactatttattaaagtgcaaacaaactcagcaatccttatgtagaccagaagctgcaatatacaatgatgaaaatgaaacgaaaaggaagtccccccatcagactctggacacccaggaatcaaaagagaaaggacttttttggtgactcaatcccagtgtctggtttggggccaatctacaatggatccaaaaggacaaaacatgttacaagcaaatcaacatagttgctgcaggcggaactgagaccagcctctctgggcgatgaaggacaatggtggtagggccacttagagagcagtagggcccaggctggtgcagcctacatggcacaggatatttccctgcaccagtttcccacctgtcacttgcagcatcagagggtgttgcattaactccattttctccagcagccataaaatgaatggcgtttctctccatatttgcccagaagaggcagttatgattccacttctcctacatttaattatttttaattgagaacaactcatgatcacaattcataaaatccatattttaagacaatagttcttcatgtcacaaacacaatctattctacatgaggaggctgagaaaggggaagagaaaaacaaaccaaatggatgatgttagctttaggatcgtgtctgcttataatattcactgatctgcagtttatgagaacacattttcacagttatgtttcttcataggaaaactatatttagtgggcaacaactatttttatgatgggatgggggagtatatacacgtatagaatctgtacgcgttgaacaacttggttcaagatggtgggggcatttttagagcggcaataattgaaaaaaaaggcgaactctgccttggagaggtagatgataagaaataaaaaggtgtttataactattttgtattataaagtgggccttagagataggaagaagaatgatggattccttttggatcaatcagaaaggaaacacgaaagaaaagtcaggaaggtagagagagaaaaagggagggaaggagaaagaatgggaataaaataaggaggtaagagatactatttttgctgagcaaccagtgtgtttcaggatgatacaaagaaaaatatagaatagaaataagtgcaggcttggaatcagctacaaatcctaaagatggggtgtgtgtggatgtgtgtgtgtgtgtgtgtacaccattgtgtgtttgtaaaatgtgtatgttcatgagtaagggtgtgtgtgtgtgtgtattaaaattccagagtgaccgtggcacttgggtgtacaggtaattcctccagagctgtttgctggcttcaggagtggagtgagaatttcttttttatgaaaagggatataaaggcaccgagctgatgcagtatttgtaatattaagttgacctaacaaggtatttgcatgagtcacaattacaaagttttgagcggttttgtaatttgacatttaggagagtctcctatttattctcatactttacattcatgcttagtatactatagaggatgccagctttaatctttctgtcatttaaagcaatatgataagggtattcaataattgggtgccctaaatttctggatgagaaaattttcaattctggccatgagaaaaaaaaaaaaaaaaaa

SEQ ID NO: 4978 - protein, 1090 aa, Homo sapiens
MAEAELHKERLQAIAEKRKRQTEIEGKRQQLDEQILLLQHSKSKVLREKWLLQGIPAGTAEEEEARRRQSEEDEFRVKQLEDNIQRLEQEIQTLESEESQISAKEQIILEKLKETEKSFKDFQKGFSSTDGDAVNYISSQLPDLPILCSRTAEPSPGQDGTSRAAGVGWENVLLKEGESASNATETSGPDMTIKKPPQLSEDDIWLKSEGDNYSATLLEPAASSLSPDHKNMEIEVSVAECKSVPGITSTPHPMDHPSAFYSPPHNGLLTDHHESLDNDVAREIRYLDEVLEANCCDSAVDGTYNGTSSPEPGAVVLVGGLSPPVHEATQPEPTERTASRQAPPHIELSNSSPDPMAEAERTNGHSPSQPRDALGDSLQVPVSPSSTTSSRCSSRDGEFTLTTLKKEAKFELRAFHEDKKPSKLFEDDEHEKEQYCIRKVRPSEEMLELEKERRELIRSQAVKKNPGIAAKWWNPPQEKTIEEQLDEEHLESHKKYKERKERRAQQEQLLLQKQLQQQQQQPPSQLCTAPASSHERASMIDKAKEDIVTEQIDFSAARKQFQLMENSRQAVAKGQSTPRLFSIKPFYRPLGSVNSDKPLTNPRPPSVGGPPEDSGASAAKGQKSPGALETPSAAGSQGNTASQGKEGPYSEPSKRGPLSKLWAEDGEFTSARAVLTVVKDDDHGILDQFSRSVNVSLTQEELDSGLDELSVRSQDTTVLETLSNDFSMDNISDSGASNETTNALQENSLADFSLPQTPQTDNPSEGRGEGVSKSFSDHGFYSPSSTLGDSPLVDDPLEYQAGLLVQNAIQQAIAEQVDKAVSKTSRDGAEQQGPEATVEEAEAAAFGSEKPQSMFEPPQVSSPVQEKRDVLPKILPAEDRALRERGPPQPLPAVQPSGPINMEETRPEGSYFSKYSEAAELRSTASLLATQESDVMVGPFKLRSRKQRTLSMIEEEIRAAQEREEELKRQRQVLQSTQSPRTKNAPSLPSRTCYKTAPGKIEKVKPPPSPTTEGPSLQPDLAPEEAAGTQRPKNLMQTLMEDYETHKSKRRERMDDSSVLEATRVNRRKSALALRWEAGIYANQEEEDNE

SEQ ID NO: 4979 - DNA, 8192 bp, Homo sapiens
actcggctccgggagaggcgagcagcgccggtgagccccgcagcagcgcacccggccgcggagccccgcgatggagatggcagaggcggaattgcacaaggaaaggctgcaagccatagcagaaaaaagaaagaggcagactgaaatagaaggcaagcgacaacagcttgacgagcagatacttctgctgcagcattccaagtccaaagtgcttcgggagaaatggctgctgcagggcatacccgctggaactgccgaagaggaggaagccaggaggcggcagtctgaagaggatgagttcagagtcaagcaacttgaagataacattcagaggctggagcaagaaatacaaacgctagaaagtgaagagtcccagatatctgccaaagagcaaatcatcctagagaaactgaaggaaacagaaaaatccttcaaggactttcagaagggtttctccagtacggatggagctgtgtacgccatggaaattaatgtggagaaagacaaacaaacaggagagaccaagattctctctacatctaccattggcccagagggggtccatcagaaaggagtcaaagtctatgatgatggtaccaaagtagtgtatgaggtgcgctcaggaggcaccgtagtagaaaatggagtgcacaaattaagcacaaaggatgtagaagagcttattcagaaggctggacaatcaagcttaggaggagggcacgtgtctgaaaggactgtgattgcagatgggagcctcagccatcccaaggaacacatgctctgcaaagaagctaagttagaaatggtacataagtctaggaaagaccattcttccgggaacccagggcagcaggcccaagcccccagcgctgcagggccggaggcaaacttggatcagcccgtcaccatgatttttatgggctaccaaaatatcgaggatgaagaggagacgaaaaaggtgctaggctatgatgaaaccatcaaggctgaattggtcctcattgatgaagatgatgagaagtcattgagggagaagacagtgacggacgtgtccactattgacgggaacgcggctgagcttgtgtccgggaggccggtctcagacaccacagagccctcatccccagaagggaaggaagagagcctagctacagagccagccccaggtacccaaaagaaaaagcgctgtcaatgctgtgttgtcatgtgaccacttctttcttctcctttcttctgggcagcctgtactctccaccactcacgtagacctcactgtaccactaactgcaatactgtgaactggaagcaaacacctgccttgccttgcagttgaattgctttgatctctctcattttttttccttttcctcacctgagagacaacgtgcatgtgtgtgcttcattctctccaagaacttgcttttcctctaaacctttccttgtgtcttcaagagtgaatcacttccttcctgctcgattggaatggactcttcgtatcagccagtgatatggtagccttaactcacttgactggaattgaacccattggcactgggggtttcattttgtagtgtgttcctgtaacgtagtcacacactgccatgtctctggtttctcacttgcctcctttgctgtggatctttgtttttatatcttgtgtggcaaaatgctgttggctctagccggttgctagtgtagccaaaagtggaccttacttagtctgtccgatctagggtgatgctttttgctgccttacataagcttccagattacagtattgtgcattcatggctttctttctgttaaaactgaaatgaagtcaatgtagaagaacccagagcttgtcacagctgaaatgtagggactgattccataacctgcccatcagcggttgtctctctttctatggtttaaccgatgaaccctttatataagaagcaccattttaaaatttctaaggacatgaaacaaacattgtttgaagcatcagtagcaattgatctccaaacttaggcaaattcacaagccttgtttctattctcttaaaaaaatgtaaatttttatattgtttcttttttctggatattttctggtcatgttaatctattttcaatgaggagatcatcttgagaagtatctttgcagtgaccatatttctaaaacagtctgtccaacctacaatggttgccatgatgctcccacttcatcatggatggtgctgtaatgcattaactgttcatctcctccccagttgattacaaagccttgcatccatactcttttctttctggccccatgagaaagagaatgttttaggtaacttcaacttgtaggtttatctgcccttcaaaaaaaaaaactttaaaaaacttttaaaaattaagaaagacctatcttctcaatgttaagcacttaatttcataacaaatattaagtggcacatagctgagcttcttagggcattgttttgtttttagcttctggagattccagaagagcaaagaatattttttatctagaacacaatgaacagtttttgaaataccttctcagcactcccccaaagcaaaaagccacatatgtagtaaaaccaaagggaaacaatttaataaaataacaatagtatagtaatgaaataaagatataacatgattactggttttaataagagttatcttaactttaagttatttgcccatttatagcattgttatgaattattcataaaattatgtcccacagtatatagttttgaaaaaacatatgatatactacatccagtctaacttctgtggaaagtagatcagaaaaaataagatagtcttgagagaattttattatagaagctgtctaatttgacctattttgcttgctcagtgctaaatctattgcttttttttaatctcctggcttgaaattatatttacttcaataggaaaggtaaaaacatcagtttttacttttcaaagttaattttctgaaataattgcattttaatgagcacaaaatgggtcattttatttttattatactcatcttgtttacacctatacataaacagaaaacgttaaagaagagaaaaataaaggagctaagttctgctgttgaagattatttcatccaaggcttggttttgaataactgagggaaatatctctaaatctcaagttcatcaaagcagctgcaatggaataaaattgctattttatcgagaaacctggtttggatgcttataaattccactactctcagcttcattttcctgagtacgtggtcactgaagcatcatttagacattacataaactggcatgcagataaacctatttacatagagggagaaaacagtttcaatgtcttggacaatctgttattttaatgatttacttaagaaagaaacaatctgaaagcttaccatagcttatcttttctactcacttggagattcaagctattcaatgtgagttttaaaaagttaagcacagttagtgagtgaaatggtagaatgtagaacctttaagcttgctggttgataaacagaatcaatcttccaggacagataattccctgaagggacctatccttgcataagtgaactagttactcatacagaaaatgatctgcacatcttactacaacactacacacaagaactaaaagattaatgattatctgtattctcttcactaattactattatgggggaataatgattagcaaattatatgaattcgagttctctctatacttttattagtaaagcttatcatttaatggactgaagtaagatgtgttacctttattcgagctatttgtagccacactaaatgaaggtgtgtttgaatatggcgcatatatttgcatatgtcccatcattttcttgtcataatggggaattcaggcttagccagtacttctatgggatgagacctataatcccacctatagcagcaagtaactacccttcatgatgatagtgtacatggagctgtgattatgaacatgctgcctttcctgctgccattggcattctctctgtaaattttattatgtgtggtatcacactctccaaaaatgcagggtatttggttacataaccaaactaattaaagaatcagtaatgaaattgcaaaaccatgatcttttttgagctaatgattagttgggctttcctttaaaataatataatcaggccgagtgcagcggctcacacctgtaatctcggcactttggaagtccgcggcgggtggttcacctgaggtcgggagttcaagaccagcctgaccaacatggagaaacccccatctctactaaaaaaaaaatacaaaattagccaggcgtgatggcgcatgcctgtaatcccagctactcgggagactgaggcaggagaatcgcttgaacctgggaggcaggggttgcaatgagccgagatgtgcactccagcctgggcaacaaagagcgaaactccatctcaaaaaaaaaaaaaaaaaaaaaaaaatcatataatcagttcccttttaaatagaaagaggaggaaaaaaaaaaggaaaagggggggtatctcatttgtatacaaatagattttcaatggcatttaataaaagattctttaatggttaaaatgataaagattaattctacatatcttgaaaaatcttaatgacttctgtattcttgacttcttaaaaatattttctttcttttagtgtgcaataagacaaactaaggggaattttttcagcttgtatctcttttacccatattattttccttgcataagcaaaaaaataataattgcctctaaaactgatttgacagtgttcagtgacatcatttaatattggtgatggggtggaagagaaggtagggaatgcccttatggccaaacctaaaacacagtttccttgagccttctgagcaatcttagaattattcagaagctttcaggaaactcaaattctattaatttgatttggttcctttccaaaatgttaatagacatgtatttgcttaaaacgtctacctattccatttaatttcctgctgataaatgtattttatctacaagcaagtagaatattttgttttggttaaagtcaagtttttataaaaggaggggaagtataagagagagtttcctagagatacaatatcatctctggagcaaaatgttgaggccaagtgtaaaaacagactatttctctttacttcctgcagaatttcatttcaagggaccacagcacacccttgaaaattaccatttatttaatgccagttgaaccaatgggtagcaaaagaggagggagggaacatggtcatagagacaaaatctaactactataccaggtcttcctttgtaagaaatattagccctgccaatataaaacgcagatggacatagacagaataagcatcgaggactttttcttatttacttgaaatctagaagctcagtcatctctgctcatccctggacccactggagagttttactcactaacaggtcctttcctggaagaaataacctcatctcctgccatattagtttacaataaaaatcattccaaagtgagccatttcacattgcatttttgccacatgcacatttgctattgaaaccacagattctcagcataagtaagacataggtgtttcagaaacttcataaatacacgatctttcaggtgctcctcaatttcttaatcaaggtatattgaactccagtgattaggatagaacctgaaaacatcctttgttctattggatagtacaacacagcaagagcacacagttatttgtataataaaacaacttaattaatgaggaagatgggatgtttgattcctgctaccaccagttcacttcacaaaggccttcttctggtattaccaggaaaactttcctgcattttctagggaaaaagaaaagtcgtttattaggagcacaatgcagatatgtatctgtgttttcatagcttcagcaaacttcttagtaaaattcccatttcaacaaaaaccaaaatactgattgtttgaatgtagaaaggtatagaataaagactacaaaggggaattttaccagggctccttagaccagcttccccagcataatttttatataactcaagtaagcctctgcttcccctctcctttccagtataatataagaaggtcggaactgtcgcacaaaagaacttgatttcaatatgaaaatataatatgtaattttggggactgcagactttctgcatcaaagatctggacagccttaacttttataaaaataatttttcaatgttctcttttactaaccaggaaaacaagatgttttctgaaattaatgactttttctattttgggtctgttttctaagtttttacaggttgaggtataaagggtcgtcttctcctcatattgcctcttcataatcacctggggctattttttgcaagtcactgcatttttacaaaaaataaaaataaaaagtacatctcacaaatcataaaattctccctagacttcagacagtccttctggagtgaaagaatagaaatacagaaagaaaagaattacagggtggctttctttttattttcctatggttaatgtactgtatggtatatatgtttacagaatgtatctgccttgtgatgttaacaaaatgaatgacaaaaaatagtactgatgtgccatttgacagtttgccttagcatcactgtttatgttcttcttttctgtcctttttggtaaaaaaaaacgcaggttgtattccaaagctgtattaacacaacattctcttccccactcctacccagccttcttcagagctgtgaatttcattacaggagcattgaggcagaaccttgcaggtgtggcccaaaggggctaaagtgggcataggttgggatttacttctgcccgtctaccaaccaaacacgtatctgtgttctcatataagcctgcaaaattttacaccctgcctttcagggagacaggccacatggagcgcatgacctcttgtagtcgtctcctcacagtccttcccactgtgagagaaggaaacttgcagacccccaactggatctgggagcatatttttaagcacagttggcattgcttgaaaaagcaagagagatggactcaaattctatgattgagccatgactgaggaatgtgcccattcgttatagtcgaagatgagtaggatgatatgggtgagaataggagtggctgtagaaatggaatattttacagttatgtatttttttaaggaatagtatttttataatgaaatctatatacattatggagcttgagttggaaaacacccttgactgagctatttcttcattccattaaaggtaactttctggggagtcctatagcactaggccaagccttgggggcatgaacaaagggcctgtcacttggccttgcactgccattacatgagatccagtgtttccaaataggccttggttggaagattgagctttctatacctgccattaggtagattagatagatggcttgatagctctctgggctatacttttaataatatataataatctttgggaaggagatagctattttaaatgcaagcaaagcccagaaactatcaaagtccaaatctttcacatatttaaggagtaattgccacatttgaggttaagggaccacttactatggtgcatttgagaaatatatatgaaacggtgagtcagagccctctgaccatcttcagtctacacataagcagataaaccaccaatataaatcttataggggccagacgaggtggcttatgcctgtaatcccagcactttggggggccaaggcaggaggatagtgtgagcccagaagttcaagaccaggctaggcaacatgttgagaccatgttgtttagtctctactaaaaaatataaaaattagccagcatggtggcacacacctgtagtcccagctacttgggagactgaggcaggaggatcacttgagcccaggaggtggaggctgcagggggctgagatctcaccactccattccagcctgggcaacagagcaagactctgtctcaaaaaaaaaaacaaaaaaacaattatcagttggccttctacataacacagggctacactgtatttttagagttaagtagatacaggaaaagattgtctttatccataaaggagat

SEQ ID NO: 4980 - protein, 379 aa, Homo sapiens
MEMAEAELHKERLQAIAEKRKRQTEIEGKRQQLDEQILLLQHSKSKVLREKWLLQGIPAGTAEEEEARRRQSEEDEFRVKQLEDNIQRLEQEIQTLESEESQISAKEQIILEKLKETEKSFKDFQKGFSSTDGAVYAMEINVEKDKQTGETKILSTSTIGPEGVHQKGVKVYDDGTKVVYEVRSGGTVVENGVHKLSTKDVEELIQKAGQSSLGGGHVSERTVIADGSLSHPKEHMLCKEAKLEMVHKSRKDHSSGNPGQQAQAPSAAGPEANLDQPVTMIFMGYQNIEDEEETKKVLGYDETIKAELVLIDEDDEKSLREKTVTDVSTIDGNAAELVSGRPVSDTTEPSSPEGKEESLATEPAPGTQKKKRCQCCVVM

SEQ ID NO: 4981 - DNA, 8192 bp, Homo sapiens
actcggctccgggagaggcgagcagcgccggtgagccccgcagcagcgcacccggccgcggagccccgcgatggagatggcagaggcggaattgcacaaggaaaggctgcaagccatagcagaaaaaagaaagaggcagactgaaatagaaggcaagcgacaacagcttgacgagcagatacttctgctgcagcattccaagtccaaagtgcttcgggagaaatggctgctgcagggcatacccgctggaactgccgaagaggaggaagccaggaggcggcagtctgaagaggatgagttcagagtcaagcaacttgaagataacattcagaggctggagcaagaaatacaaacgctagaaagtgaagagtcccagatatctgccaaagagcaaatcatcctagagaaactgaaggaaacagaaaaatccttcaaggactttcagaagggtttctccagtacggatggagatgcagtaaattacatttcctcccagcttcccgacctgccaatcctctgttcacgaacagcagaaccatcacctgggcaggacgggaccagcagagcggctgctgtgtacgccatggaaattaatgtggagaaagacaaacaaacaggagagaccaagattctctctacatctaccattggcccagagggggtccatcagaaaggagtcaaagtctatgatgatggtaccaaagtagtgtatgaggtgcgctcaggaggcaccgtagtagaaaatggagtgcacaaattaagcacaaaggatgtagaagagcttattcagaaggctggacaatcaagcttaggaggagggcacgtgtctgaaaggactgtgattgcagatgggagcctcagccatcccaaggaacacatgctctgcaaagaagctaagttagaaatggtacataagtctaggaaagaccattcttccgggaacccagggcagcaggcccaagcccccagcgctgcagggccggaggcaaacttggatcagcccgtcaccatgatttttatgggctaccaaaatatcgaggatgaagaggagacgaaaaaggtgctaggctatgatgaaaccatcaaggctgaattggtcctcattgatgaagatgatgagaagtcattgagggagaagacagtgacggacgtgtccactattgacgggaacgcggctgagcttgtgtccgggaggccggtctcagacaccacagagccctcatccccagaagggaaggaagagagcctagctacagagccagccccaggtacccaaaagaaaaagcgctgtcaatgctgtgttgtcatgtgaccacttctttcttctcctttcttctgggcagcctgtactctccaccactcacgtagacctcactgtaccactaactgcaatactgtgaactggaagcaaacacctgccttgccttgcagttgaattgctttgatctctctcattttttttccttttcctcacctgagagacaacgtgcatgtgtgtgcttcattctctccaagaacttgcttttcctctaaacctttccttgtgtcttcaagagtgaatcacttccttcctgctcgattggaatggactcttcgtatcagccagtgatatggtagccttaactcacttgactggaattgaacccattggcactgggggtttcattttgtagtgtgttcctgtaacgtagtcacacactgccatgtctctggtttctcacttgcctcctttgctgtggatctttgtttttatatcttgtgtggcaaaatgctgttggctctagccggttgctagtgtagccaaaagtggaccttacttagtctgtccgatctagggtgatgctttttgctgccttacataagcttccagattacagtattgtgcattcatggctttctttctgttaaaactgaaatgaagtcaatgtagaagaacccagagcttgtcacagctgaaatgtagggactgattccataacctgcccatcagcggttgtctctctttctatggtttaaccgatgaaccctttatataagaagcaccattttaaaatttctaaggacatgaaacaaacattgtttgaagcatcagtagcaattgatctccaaacttaggcaaattcacaagccttgtttctattctcttaaaaaaatgtaaatttttatattgtttcttttttctggatattttctggtcatgttaatctattttcaatgaggagatcatcttgagaagtatctttgcagtgaccatatttctaaaacagtctgtccaacctacaatggttgccatgatgctcccacttcatcatggatggtgctgtaatgcattaactgttcatctcctccccagttgattacaaagccttgcatccatactcttttctttctggccccatgagaaagagaatgttttaggtaacttcaacttgtaggtttatctgcccttcaaaaaaaaaaactttaaaaaacttttaaaaattaagaaagacctatcttctcaatgttaagcacttaatttcataacaaatattaagtggcacatagctgagcttcttagggcattgttttgtttttagcttctggagattccagaagagcaaagaatattttttatctagaacacaatgaacagtttttgaaataccttctcagcactcccccaaagcaaaaagccacatatgtagtaaaaccaaagggaaacaatttaataaaataacaatagtatagtaatgaaataaagatataacatgattactggttttaataagagttatcttaactttaagttatttgcccatttatagcattgttatgaattattcataaaattatgtcccacagtatatagttttgaaaaaacatatgatatactacatccagtctaacttctgtggaaagtagatcagaaaaaataagatagtcttgagagaattttattatagaagctgtctaatttgacctattttgcttgctcagtgctaaatctattgcttttttttaatctcctggcttgaaattatatttacttcaataggaaaggtaaaaacatcagtttttacttttcaaagttaattttctgaaataattgcattttaatgagcacaaaatgggtcattttatttttattatactcatcttgtttacacctatacataaacagaaaacgttaaagaagagaaaaataaaggagctaagttctgctgttgaagattatttcatccaaggcttggttttgaataactgagggaaatatctctaaatctcaagttcatcaaagcagctgcaatggaataaaattgctattttatcgagaaacctggtttggatgcttataaattccactactctcagcttcattttcctgagtacgtggtcactgaagcatcatttagacattacataaactggcatgcagataaacctatttacatagagggagaaaacagtttcaatgtcttggacaatctgttattttaatgatttacttaagaaagaaacaatctgaaagcttaccatagcttatcttttctactcacttggagattcaagctattcaatgtgagttttaaaaagttaagcacagttagtgagtgaaatggtagaatgtagaacctttaagcttgctggttgataaacagaatcaatcttccaggacagataattccctgaagggacctatccttgcataagtgaactagttactcatacagaaaatgatctgcacatcttactacaacactacacacaagaactaaaagattaatgattatctgtattctcttcactaattactattatgggggaataatgattagcaaattatatgaattcgagttctctctatacttttattagtaaagcttatcatttaatggactgaagtaagatgtgttacctttattcgagctatttgtagccacactaaatgaaggtgtgtttgaatatggcgcatatatttgcatatgtcccatcattttcttgtcataatggggaattcaggcttagccagtacttctatgggatgagacctataatcccacctatagcagcaagtaactacccttcatgatgatagtgtacatggagctgtgattatgaacatgctgcctttcctgctgccattggcattctctctgtaaattttattatgtgtggtatcacactctccaaaaatgcagggtatttggttacataaccaaactaattaaagaatcagtaatgaaattgcaaaaccatgatcttttttgagctaatgattagttgggctttcctttaaaataatataatcaggccgagtgcagcggctcacacctgtaatctcggcactttggaagtccgcggcgggtggttcacctgaggtcgggagttcaagaccagcctgaccaacatggagaaacccccatctctactaaaaaaaaaatacaaaattagccaggcgtgatggcgcatgcctgtaatcccagctactcgggagactgaggcaggagaatcgcttgaacctgggaggcaggggttgcaatgagccgagatgtgcactccagcctgggcaacaaagagcgaaactccatctcaaaaaaaaaaaaaaaaaaaaaaaaatcatataatcagttcccttttaaatagaaagaggaggaaaaaaaaaaggaaaagggggggtatctcatttgtatacaaatagattttcaatggcatttaataaaagattctttaatggttaaaatgataaagattaattctacatatcttgaaaaatcttaatgacttctgtattcttgacttcttaaaaatattttctttcttttagtgtgcaataagacaaactaaggggaattttttcagcttgtatctcttttacccatattattttccttgcataagcaaaaaaataataattgcctctaaaactgatttgacagtgttcagtgacatcatttaatattggtgatggggtggaagagaaggtagggaatgcccttatggccaaacctaaaacacagtttccttgagccttctgagcaatcttagaattattcagaagctttcaggaaactcaaattctattaatttgatttggttcctttccaaaatgttaatagacatgtatttgcttaaaacgtctacctattccatttaatttcctgctgataaatgtattttatctacaagcaagtagaatattttgttttggttaaagtcaagtttttataaaaggaggggaagtataagagagagtttcctagagatacaatatcatctctggagcaaaatgttgaggccaagtgtaaaaacagactatttctctttacttcctgcagaatttcatttcaagggaccacagcacacccttgaaaattaccatttatttaatgccagttgaaccaatgggtagcaaaagaggagggagggaacatggtcatagagacaaaatctaactactataccaggtcttcctttgtaagaaatattagccctgccaatataaaacgcagatggacatagacagaataagcatcgaggactttttcttatttacttgaaatctagaagctcagtcatctctgctcatccctggacccactggagagttttactcactaacaggtcctttcctggaagaaataacctcatctcctgccatattagtttacaataaaaatcattccaaagtgagccatttcacattgcatttttgccacatgcacatttgctattgaaaccacagattctcagcataagtaagacataggtgtttcagaaacttcataaatacacgatctttcaggtgctcctcaatttcttaatcaaggtatattgaactccagtgattaggatagaacctgaaaacatcctttgttctattggatagtacaacacagcaagagcacacagttatttgtataataaaacaacttaattaatgaggaagatgggatgtttgattcctgctaccaccagttcacttcacaaaggccttcttctggtattaccaggaaaactttcctgcattttctagggaaaaagaaaagtcgtttattaggagcacaatgcagatatgtatctgtgttttcatagcttcagcaaacttcttagtaaaattcccatttcaacaaaaaccaaaatactgattgtttgaatgtagaaaggtatagaataaagactacaaaggggaattttaccagggctccttagaccagcttccccagcataatttttatataactcaagtaagcctctgcttcccctctcctttccagtataatataagaaggtcggaactgtcgcacaaaagaacttgatttcaatatgaaaatataatatgtaattttggggactgcagactttctgcatcaaagatctggacagccttaacttttataaaaataatttttcaatgttctcttttactaaccaggaaaacaagatgttttctgaaattaatgactttttctattttgggtctgttttctaagtttttacaggttgaggtataaagggtcgtcttctcctcatattgcctcttcataatcacctggggctattttttgcaagtcactgcatttttacaaaaaataaaaataaaaagtacatctcacaaatcataaaattctccctagacttcagacagtccttctggagtgaaagaatagaaatacagaaagaaaagaattacagggtggctttctttttattttcctatggttaatgtactgtatggtatatatgtttacagaatgtatctgccttgtgatgttaacaaaatgaatgacaaaaaatagtactgatgtgccatttgacagtttgccttagcatcactgtttatgttcttcttttctgtcctttttggtaaaaaaaaacgcaggttgtattccaaagctgtattaacacaacattctcttccccactcctacccagccttcttcagagctgtgaatttcattacaggagcattgaggcagaaccttgcaggtgtggcccaaaggggctaaagtgggcataggttgggatttacttctgcccgtctaccaaccaaacacgtatctgtgttctcatataagcctgcaaaattttacaccctgcctttcagggagacaggccacatggagcgcatgacctcttgtagtcgtctcctcacagtccttcccactgtgagagaaggaaacttgcagacccccaactggatctgggagcatatttttaagcacagttggcattgcttgaaaaagcaagagagatggactcaaattctatgattgagccatgactgaggaatgtgcccattcgttatagtcgaagatgagtaggatgatatgggtgagaataggagtggctgtagaaatggaatattttacagttatgtatttttttaaggaatagtatttttataatgaaatctatatacattatggagcttgagttggaaaacacccttgactgagctatttcttcattccattaaaggtaactttctggggagtcctatagcactaggccaagccttgggggcatgaacaaagggcctgtcacttggccttgcactgccattacatgagatccagtgtttccaaataggccttggttggaagattgagctttctatacctgccattaggtagattagatagatggcttgatagctctctgggctatacttttaataatatataataatctttgggaaggagatagctattttaaatgcaagcaaagcccagaaactatcaaagtccaaatctttcacatatttaaggagtaattgccacatttgaggttaagggaccacttactatggtgcatttgagaaatatatatgaaacggtgagtcagagccctctgaccatcttcagtctacacataagcagataaaccaccaatataaatcttataggggccagacgaggtggcttatgcctgtaatcccagcactttggggggccaaggcaggaggatagtgtgagcccagaagttcaagaccaggctaggcaacatgttgagaccatgttgtttagtctctactaaaaaatataaaaattagccagcatggtggcacacacctgtagtcccagctacttgggagactgaggcaggaggatcacttgagcccaggaggtggaggctgcagggggctgagatctcaccactccattccagcctgggcaacagagcaagactctgtctcaaaaaaaaaaaca

SEQ ID NO: 4982 - protein, 413 aa, Homo sapiens
MEMAEAELHKERLQAIAEKRKRQTEIEGKRQQLDEQILLLQHSKSKVLREKWLLQGIPAGTAEEEEARRRQSEEDEFRVKQLEDNIQRLEQEIQTLESEESQISAKEQIILEKLKETEKSFKDFQKGFSSTDGDAVNYISSQLPDLPILCSRTAEPSPGQDGTSRAAAVYAMEINVEKDKQTGETKILSTSTIGPEGVHQKGVKVYDDGTKVVYEVRSGGTVVENGVHKLSTKDVEELIQKAGQSSLGGGHVSERTVIADGSLSHPKEHMLCKEAKLEMVHKSRKDHSSGNPGQQAQAPSAAGPEANLDQPVTMIFMGYQNIEDEEETKKVLGYDETIKAELVLIDEDDEKSLREKTVTDVSTIDGNAAELVSGRPVSDTTEPSSPEGKEESLATEPAPGTQKKKRCQCCVVM

SEQ ID NO: 4983 - DNA, 6305 bp, Homo sapiens
cccacatggctttctagctcacagcagatctagccttctctgagcagtgaagatgggatgttttgtggtccttttccctggtgtgcagagcccaagtggagttcttcagcacaccctagtccatcccctcactaacacacccacctgtccagtcttacctgccttcatatcaaaagcacacagttaacccagagggcttctgccctgccctgcctgactttctgggaaacccccctctccacccaccctaatcaggacactgtctgaaggttccccctcatcattttaaaaggaagagaaattttctgccacagaggttctggtgaagtggcctgctcccacatcacagggtgatggcggtttgggctggaccaggatcagacagtgctgtcctgaggctggccgtctgataaggggctccagaaagggcagtggtggagccctgggaggctttctgctctcctgatcgcaggtttttggtgagaggacctattggccactagggtgtctgtgtgtgtgtgtgtgtgtgtgtgtgtgtgtgtgatgtgtgtttacttggattgacttctttcagcatgaagcccactgttttgctgaatgtatctcactgtttcctgaaactcagtacattcagctggcttaagggtcctggggcctcgctgcgtcatatttgcacaagcctagtgtctgtgcagactgtacactggagttcagttgtaagacccttttgatcccttattctgttcctgtaatagaaaagccatttcactcaatggaatagaaacccagatccgatggagagatgttctaatctgccatacactggggcagtggccagtgatttggactttgtggcatagatggaaatttccaggttgtctaggtggtagacagaggcctcacttcttaacaaactcccccactccacccctgccaatgaggatgttgcttagaggtatttctatcagtgttgagtagaagagatcatttcttgatgttgaacttcaggtaaggatgccagcttctgcatatcagggtggtgatgcttgggctgagacaggtctagacagcactgtctgaaagggggctcaaggaagtagctgtgaaaggcccctgggatgttttctgctcccctttctgcaaattccctggagggagatcctgttagtcactacagggtgtgtgtgtgggtgtgtgtgtgtgtgtgtgtgtgtgtgtgtgtgttcatcacttgttgcttgggggtgggaagagacaacaaaagcctacagaatctatagttctcagttcatctcccatcctagtccaatcatggcctaacatccttagctactgatcgcagaggagactctgcgcatttgtgttcatgtggccttggatgttggcagattcagattggtgccccaggcatctgtgcctgtaactgcagtttcagcgggctcaggaccaggctgaagggcctccaagcttcctccagtttcctggtgcatgcatgtgcaatatactcccctggccttggtctttcctaacgcttcttgccagttgggtcagaactagcttattaaccagttttttctgagctttaatcgaactggctccaaccagttggagacttgaaaagggctacgtgatagttatagatttttaaagatatattattattttagagtagttttgagtgcacagcaaaatggagtgcagagtccagagatctcatatggcctcgattcctgtacactctcaggtcactccaccaacaacctcctacaccagagccactttgaaacattagaaaatatatttgagcattcagaaatgtataaactaggcagctccagactgcaagcagctcagagttccaacagagaggcttagggagggtgggggaagaattttatatggtgaatgtggaagaaaaaatacttgattgggtaaagtggagcagtggcctcatttggaacattacagtggaaagtctctagttagatattagttggtggtttctgactggttaagcttaagtttccttttattatttacactgagtcaagttttggtttatttaaggaggaattgagtgcactgcagccacctcagcctcatggccacctgtttatttgattatttttaaaagagaagagccttttaaaaatatctgttgccctggctggagtgcagtgacgtgatcatggctcactgcagccacaaccttccagctcaggtgatcctcccacctcagtgctccccaccctgagtagctgggactacaagcatgtgccagcacaccaccatgctaggctaatggtttgtatttttttgagagatgcagtttccctaagttgcttaggcttcttttgaactcttagactcaaataatctgcctgcattggcctccccaagtgctggaattacaggccatctaaatcttttatctcagatttgccttgtgacaaatggaggggtactttttctgacatgatgaggcagagaaaggtgaggtgggcgcatcctgtgcatatgattttctcaggtgatgggaatatggtcggctcttgcctaatgggatatattttctctttgaatgatttggcaagatatcagatgagagaagttgaataaatgttagaagaacatagaaaaaataggttatacacgttgggtttctgaagaaatgatgtctttggagaaacaaaacttttattgatttctggaaacatttagggccaattttttatgtaaataatttgaatttatgatgatatctctgaccactttttgatatttttttctggttcaggtgagtggtgtcattgagcaaacacgaagtcgggctcatccaaggatgagattttgccagagaaaggacgagcagcaagtcagggagcttaaggtaattatgggaaagtgactatctacaattgcttaggtagaaggagacagattggatttttgtgtgtttggtatttgggataagagggatgtgggtgtgtacttgacatgggttgttctctctctctcttttttttttttttttttttgagagggagtctcactctgtcacccaggctggagttctgtggcacagtcttggctcactgcaacctccgcctgccgggttcaagggattctcctgcctcagcctcccaagtagctggggttacaggtgcctgccaccacgccctgctaatttttgtgattttttttttagtagagacgaggtttcactatgtaggcaaagctggtctcgaactcctgacctcagatgatccacccgcctcagcctcccaaagtgctgggattacaggcgtgagccaccgcacctggcctgtttattctcttaagagagaaaatgaggggattaatggactgtagttctggacaaggtggaaaactcttaaagtggaagtattggggcaagtgctctgacaggctaggatggtgcagtcagtcccttcacccagaaatcagtagaatgttaacagttcagactcaaaccttgtgaaaaacaggtggtggaaaggaaatccctcacagcaactggcaccataatcaagacagaatgtttgcagaataaatggagttacctgctttcagccccaggttgtagctattgtctgccctgatgatatgtgataataatttgtgatcctattgtcttaaaatggggtcactcatctccagtagaattaagtccacagtgaagttgtccccccatccccaaagagataaacatatatgaatgaactcacatgataacaactactgctgcctgggatcatgagagacctgaactgaactgataggaagtgaaaggtggctgagataatgagaatagacccatctgcagaggatcataaaaccagcaaagacaagatcttgtctaagatgccttcacaaactttgtccatgagaactctaaggacttctccagacctgttggctgctgctgtgatctctgcccaagaggagcctctgaccaacatccaaagggcttctggacccactggactcctctggagcgtcagcctcgagtttgaccagcaacaggggtcggtgtgtccctctgaatctgagatctatgaggcaggagctggggacaggatggcaggagcgcccatggctgctgctgtgcagcctgctgaggtgaccgttgaagttggtgaggacctccacatgcaccacattcgtgaccaggagatgcctgaagctttggagtttagcctttctgccaatccagaggcaagcacaatattccagaggaactctcaaacagatgctttggagtttaacccttctgccaatccagaggcaagcacaatattccagaggaactctcaaacagatgttgtagaaataagaagaagcaactgtacaaaccatgtatctactgagcgtttcagtcaacaatacagctcgtgttcgacaatattccttgatgacagcacagccagccagcattatcttacaatgacaataatatctgtgaccttggagatacctcatcatatcacacaaagagatgcagatagatctttgagcatacctgatgaacagttacactcatttgcggtttccaccgtgcacattacgaagaacagaaatggaggtgggagtttaaataactattcctcctccattccatcgactcccagcaccagccaggaggaccctcagttcagtgttcctcccactgccaacacacccacccccgtttgcaagcggtccatgcgctggtccaacctgtttacatctgagaaagggagtcacccagacaaagagaggaaagccccggagaatcatgctgacaccatcgggagcggcagagccatccccattaaacagggcatgctcttaaagcgaagtgggaaatggctgaagacatggaaaaagaaatacgtcaccctgtgttccaatggcgtgctcacctattattcaagcttaggtgattatatgaagaatattcataaaaaagagattgaccttcggacatctaccatcaaagtcccaggaaagtggccatccctagccacatcggcctgtgcacccatctccagctctaaaagcaatggcctatccaaggacatggacaccgggctgggtgactccatatgcttcagccccagtatctccagcaccaccagccccaagctcaacccgcccccctctcctcatgccaataaaaagaaacacctaaagaagaaaagcaccaacaactttatgattgtgtctgccactggccaaacatggcactttgaagccacgacgtatgaggagcgggatgcctgggtccaagccatccagagccagagcgaggccatggccctgcagtcgatccaaaacatgcgtgggaacgcccactgtgtggactatgagacccagaatcctaagtgggccagtttgaacttgggagtcctcatgtgtattgaatgctcaggaatccaccgcagtcttggcacccgcctttcccgtgtgcgatctctggagctggatgactggccagttgagctcaggaaggttatgtcatctattggcaatgacctagccaacagcatctgggaagggagcagccaggggcagacaaaaccctcagtaaagtccacgagggaagagaaggaacggtggatccgttccaaatatgaggagaagctctttctggccccactaccctgcactgagctgtccctgggccagcacctgctgcgggccaccgctgatgaggacctgcagacagccatcctgctgctggcacatggctcccgtgaggaggtgaacgagacctgtggggagggagacggctgcacggcgctccatctggcctgccgcaaggggaatgtggtcctggcacagctcctgatctggtacggggtggacgtcatggcccgagatgcccacgggaacacagcgctgacctacgcccggcaggcctccagccaggagtgcatcaacgtgcttctgcagtacggctgccccgacgagtgcgtgtagtatctgttttatttgactgcagtctccttggtgcaaaaacaaaatgggaaaaataaggataactcagaatttcaaaaggaaatcacaaattcagctagtaatagcattttcagtacttttcataaactaagtaaatacacaaaatgttgatttttctgaccataagacatattttatgtccttttgccaaggtggatgtgttagtctcaggccctcctggccacattgcccaagtcacacaggcttctgtattatgtatttagataaaatgtgtgaaaatatatttgaaaaaaaagttcataaatatgcattgatttttg

SEQ ID NO: 4984 - protein, 699 aa, Homo sapiens
MPSQTLSMRTLRTSPDLLAAAVISAQEEPLTNIQRASGPTGLLWSVSLEFDQQQGSVCPSESEIYEAGAGDRMAGAPMAAAVQPAEVTVEVGEDLHMHHIRDQEMPEALEFSLSANPEASTIFQRNSQTDALEFNPSANPEASTIFQRNSQTDVVEIRRSNCTNHVSTERFSQQYSSCSTIFLDDSTASQHYLTMTIISVTLEIPHHITQRDADRSLSIPDEQLHSFAVSTVHITKNRNGGGSLNNYSSSIPSTPSTSQEDPQFSVPPTANTPTPVCKRSMRWSNLFTSEKGSHPDKERKAPENHADTIGSGRAIPIKQGMLLKRSGKWLKTWKKKYVTLCSNGVLTYYSSLGDYMKNIHKKEIDLRTSTIKVPGKWPSLATSACAPISSSKSNGLSKDMDTGLGDSICFSPSISSTTSPKLNPPPSPHANKKKHLKKKSTNNFMIVSATGQTWHFEATTYEERDAWVQAIQSQSEAMALQSIQNMRGNAHCVDYETQNPKWASLNLGVLMCIECSGIHRSLGTRLSRVRSLELDDWPVELRKVMSSIGNDLANSIWEGSSQGQTKPSVKSTREEKERWIRSKYEEKLFLAPLPCTELSLGQHLLRATADEDLQTAILLLAHGSREEVNETCGEGDGCTALHLACRKGNVVLAQLLIWYGVDVMARDAHGNTALTYARQASSQECINVLLQYGCPDECV

SEQ ID NO: 4985 - DNA, 4474 bp, Homo sapiens
aaataataataataataataataatctacaatgtcatttcccatccaagcttgacttctacctttactttctgatgtggttttgccatgtccccacccaaatctcatcatgaattataatccccataatcctgatgtgttgagggaggggcctagggggaggtgatcagatcacgggggcagttatcctcatgctgttcttgtgatattcagtaagtcctcatgagatcttatagggttttgttttgttttgttttttaggatggagtcttgctctgttgtccaggcaggagtgccatggcacgatcttggctcactgcagtctctgcctcttgagttccagtaattctcctgcctcagcctcctgagtagctgggattacaggcatgcaccaccacacccagctaatttttgtatttttagtagagacaggatttcactacattagctaggctggtctcaaactcctgacctcagttgatccacctgccttggcctcccaaagtactagggttacaagtgtgagccaccatgcccagctgagatctgatggttttatacatgtttgacagttgctccttcacatgttgccactctctgtgcggccaccatgtaagtcggacctgcccttctgccatgattgtaagtttcctgaggcctccccagccatgtgaaactgagtcaattaaacctcttccctttaaaaattacccaacctcaggtatttctttatatcagtgtgaaaacagattgctatactttctgataatcatgcttaagcaattggggaattcagactacctgggatcaaaccagggccccacccttagcagtcatgtgaccttggggaggttacttaccttctccgtctcaacaacttctgtaaaatctgtaacatgagattgtttctgagggttaaatgagcatagcacagtggggacactgtcaggcacacactacttgccagatgtcaagtattcatctttattgaaataggactgtggtaagccactttatggctctcgattctgtatgagaaaatcatgcttagtgccttgttagtaaaagaaagaaaatctgaaagtccctgccatggaaggaagaaatagcggggagaaaagggagttggtaagtttcagcatttcagagcttggagggacaagttaggtttctattttatggagaaggaggtggaggcaggatgggtcctaaggtgtcattcaaaacacacagccataactctttattgagagtagagctagggccgcagggattgctgtggtcacgttgcggacaaaaatgaccactcgttggaagacaggagaggagtgtttagttacaaaagcagtcaacaattcaggtgtatctatattcagtcagcaaataaaagttgttcaacttggttgctaatgggacccactctactgaggctttgtatagaactcatagaggaagatggcttcaagcaatgaactaccctgtgcttttcttaggactaaaatctcaggaagttggtgatgaatgaaaaccttagtcccactggcactgcacgaggggccaggagagcagcagcatcataagccacagggtggggcagccaaggcaggggcattctgagctgttggggaggggtggcaggcagggtggggcactgtgaggtgtcggggagggcattgtgaagtgtggggtggggcattctgtgccacatgcctgggctcccacctggggccagtgggcttcagtctgtaggtgactacagaaggaggaggagctccgtctgttctctcttcaggcagttgttgtgtctctcagcgcttgttgggttcacaacctattaaataagccagctggtcttcaccctcccagacaagtcaactcaggggaggcagcagggtgtgggccttgacccgcagccctagccggggccggggccggggccagggatggtgcccggggccgcgctgtgaggtgggcaggcgaggagcgggaagaccatctctgcaagtgcagcatagcctcggcctaggacagtgggagtgtgtggccaaagctgtgagcagaggcacaggtggtggcagacagtagaggcgccccatggggaacatactgacctgttgtgtgcaccctagcgtcagcctcgagtttgaccagcaacaggggtcggtgtgtccctctgaatctgagatctatgaggcaggagctggggacaggatggcaggagcgcccatggctgctgctgtgcagcctgctgaggtgaccgttgaagttggtgaggacctccacatgcaccacattcgtgaccaggagatgcctgaagctttggagtttagcctttctgccaatccagaggcaagcacaatattccagaggaactctcaaacagatgctttggagtttaacccttctgccaatccagaggcaagcacaatattccagaggaactctcaaacagatgttgtagaaataagaagaagcaactgtacaaaccatgtatctactgagcgtttcagtcaacaatacagctcgtgttcgacaatattccttgatgacagcacagccagccagcattatcttacaatgacaataatatctgtgaccttggagatacctcatcatatcacacaaagagatgcagatagatctttgagcatacctgatgaacagttacactcatttgcggtttccaccgtgcacattacgaagaacagaaatggaggtgggagtttaaataactattcctcctccattccatcgactcccagcaccagccaggaggaccctcagttcagtgttcctcccactgccaacacacccacccccgtttgcaagcggtccatgcgctggtccaacctgtttacatctgagaaagggagtcacccagacaaagagaggaaagccccggagaatcatgctgacaccatcgggagcggcagagccatccccattaaacagggcatgctcttaaagcgaagtgggaaatggctgaagacatggaaaaagaaatacgtcaccctgtgttccaatggcgtgctcacctattattcaagcttaggtgattatatgaagaatattcataaaaaagagattgaccttcggacatctaccatcaaagtcccaggaaagtggccatccctagccacatcggcctgtgcacccatctccagctctaaaagcaatggcctatccaaggacatggacaccgggctgggtgactccatatgcttcagccccagtatctccagcaccaccagccccaagctcaacccgcccccctctcctcatgccaataaaaagaaacacctaaagaagaaaagcaccaacaactttatgattgtgtctgccactggccaaacatggcactttgaagccacgacgtatgaggagcgggatgcctgggtccaagccatccagagccagatcctggccagcctgcagtcatgcgagagcagtaaaagcaagtcccagctgaccagccagagcgaggccatggccctgcagtcgatccaaaacatgcgtgggaacgcccactgtgtggactatgagacccagaatcctaagtgggccagtttgaacttgggagtcctcatgtgtattgaatgctcaggaatccaccgcagtcttggcacccgcctttcccgtgtgcgatctctggagctggatgactggccagttgagctcaggaaggttatgtcatctattggcaatgacctagccaacagcatctgggaagggagcagccaggggcagacaaaaccctcagtaaagtccacgagggaagagaaggaacggtggatccgttccaaatatgaggagaagctctttctggccccactaccctgcactgagctgtccctgggccagcacctgctgcgggccaccgctgatgaggacctgcagacagccatcctgctgctggcacatggctcccgtgaggaggtgaacgagacctgtggggagggagacggctgcacggcgctccatctggcctgccgcaaggggaatgtggtcctggcacagctcctgatctggtacggggtggacgtcatggcccgagatgcccacgggaacacagcgctgacctacgcccggcaggcctccagccaggagtgcatcaacgtgcttctgcagtacggctgccccgacgagtgcgtgtagtatctgttttatttgactgcagtctccttggtgcaaaaacaaaatgggaaaaataaggataactcagaatttcaaaaggaaatcacaaattcagctagtaatagcattttcagtacttttcataaactaagtaaatacacaaaatgttgatttttctgaccataagacatattttatgtccttttgccaaggtggatgtgttagtctcaggccctcctggccacattgcccaagtcacacaggcttctgtattatgtatttagataaaatgtgtgaaaatatatttgaaaaaaaagttcataaatatgcattgatttttg

SEQ ID NO: 4986 - protein, 686 aa, Homo sapiens
MGNILTCCVHPSVSLEFDQQQGSVCPSESEIYEAGAGDRMAGAPMAAAVQPAEVTVEVGEDLHMHHIRDQEMPEALEFSLSANPEASTIFQRNSQTDALEFNPSANPEASTIFQRNSQTDVVEIRRSNCTNHVSTERFSQQYSSCSTIFLDDSTASQHYLTMTIISVTLEIPHHITQRDADRSLSIPDEQLHSFAVSTVHITKNRNGGGSLNNYSSSIPSTPSTSQEDPQFSVPPTANTPTPVCKRSMRWSNLFTSEKGSHPDKERKAPENHADTIGSGRAIPIKQGMLLKRSGKWLKTWKKKYVTLCSNGVLTYYSSLGDYMKNIHKKEIDLRTSTIKVPGKWPSLATSACAPISSSKSNGLSKDMDTGLGDSICFSPSISSTTSPKLNPPPSPHANKKKHLKKKSTNNFMIVSATGQTWHFEATTYEERDAWVQAIQSQILASLQSCESSKSKSQLTSQSEAMALQSIQNMRGNAHCVDYETQNPKWASLNLGVLMCIECSGIHRSLGTRLSRVRSLELDDWPVELRKVMSSIGNDLANSIWEGSSQGQTKPSVKSTREEKERWIRSKYEEKLFLAPLPCTELSLGQHLLRATADEDLQTAILLLAHGSREEVNETCGEGDGCTALHLACRKGNVVLAQLLIWYGVDVMARDAHGNTALTYARQASSQECINVLLQYGCPDECV

SEQ ID NO: 4987 - DNA, 3766 bp, Homo sapiens
ttcggtgccgcgggctggggtaggcggcagtggggtccctggctttggggcactgggaagatcgcgagtgggaaggtcctcccgcggtcctccgggtcatctttcctcctgaggagcagcatatttcgcatctgccggagattagaattacttgttattggtaaatagccactatggagactaaggaccagaagaaacaaagaaagaaaaatagtggacccaaagctgcaaagaaaaagaagcggcatctgcaggatctccagctaggagacgaagaagatgcctggaagagaaatcccaaagcttttgcatttcagtctgctgtgtggatggctcgatcctttcacaggactcaggatttgaagacaaaaaagcatcatattccagtggttgatcgaactccactagagcccccaccaatagtggtagtggtgatggggcctccaaagttggaaagagcactttgatacaatgcctcattcggaacttcacccggcagaagttgaccgagatcagaggccctgtgatgatcgtgtcaggtaaaaagctccgactcaccattattgaatgtgggtgtgacattaacatgatgattgatctggctgaagtagcagatctggtactgatgcttatagatgccagctttgggtttgaaatggaaacgtttgagtttctaaacatctgtcaagtacatggctttcctaaaattatgggagttctcacccacctcgacttcttcaaacacaataagcaactgaagaagacaaagaagcgattaaaacacaggttctggacagaagtttacctggttgccaagctgttctgcctttctggaatggtgcatggagaatatcaaaaccaagaaatgcacaatctgggccattttattacagttatgaagtttaggcctctcacatggcagacttctcatccttatatcctggcagacagggtggaagatttgacaaacccagaggatatccaaacaaacatcagatgtgaccagcagatgttactttacggttatttaagaggagcgcacttgaaaaataaaagccaaattcacatgccaggacgaggtggggcccacccatgagctggtccagagtctcatctccacccactccaccattgatgccaagatggcttcaagtcgagtgatgttgttttctgattccaagccacttgggtcagaggctatagataatcaaggcgtcagcctcgagtttgaccagcaacaggggtcggtgtgtccctctgaatctgagatctatgaggcaggagctggggacaggatggcaggagcgcccatggctgctgctgtgcagcctgctgaggtgaccgttgaagttggtgaggacctccacatgcaccacattcgtgaccaggagatgcctgaagctttggagtttagcctttctgccaatccagaggcaagcacaatattccagaggaactctcaaacagatgctttggagtttaacccttctgccaatccagaggcaagcacaatattccagaggaactctcaaacagatgttgtagaaataagaagaagcaactgtacaaaccatgtatctactgagcgtttcagtcaacaatacagctcgtgttcgacaatattccttgatgacagcacagccagccagcattatcttacaatgacaataatatctgtgaccttggagatacctcatcatatcacacaaagagatgcagatagatctttgagcatacctgatgaacagttacactcatttgcgggtttcaccatgttggccaggatggtcttgaactcctgacctcgtgatccacccaccttggcctcccaaagtgctgtgattacaggtgtgagccaccatgcctggcccagaaaatgtatctttttaaaaggtaattgtaagctgtctataggaccctgcaagccactacccaatttttgaagccattcctccttctgttccacacaggtttccaccgtgcacattacgaagaacagaaatggaggtgggagtttaaataactattcctcctccattccatcgactcccagcaccagccaggaggaccctcagttcagtgttcctcccactgccaacacacccacccccgtttgcaagcggtccatgcgctggtccaacctgtttacatctgagaaagggagtcacccagacaaagagaggaaagccccggagaatcatgctgacaccatcgggagcggcagagccatccccattaaacagggcatgctcttaaagcgaagtgggaaatggctgaagacatggaaaaagaaatacgtcaccctgtgttccaatggcgtgctcacctattattcaagcttaggtgattatatgaagaatattcataaaaaagagattgaccttcggacatctaccatcaaagtcccaggaaagtggccatccctagccacatcggcctgtgcacccatctccagctctaaaagcaatggcctatccaaggacatggacaccgggctgggtgactccatatgcttcagccccagtatctccagcaccaccagccccaagctcaacccgcccccctctcctcatgccaataaaaagaaacacctaaagaagaaaagcaccaacaactttatgattgtgtctgccactggccaaacatggcactttgaagccacgacgtatgaggagcgggatgcctgggtccaagccatccagagccagatcctggccagcctgcagtcatgcgagagcagtaaaagcaagtcccagctgaccagccagagcgaggccatggccctgcagtcgatccaaaacatgcgtgggaacgcccactgtgtggactatgagacccagaatcctaagtgggccagtttgaacttgggagtcctcatgtgtattgaatgctcaggaatccaccgcagtcttggcacccgcctttcccgtgtgcgatctctggagctggatgactggccagttgagctcaggaaggttatgtcatctattggcaatgacctagccaacagcatctgggaagggagcagccaggggcagacaaaaccctcagtaaagtccacgagggaagagaaggaacggtggatccgttccaaatatgaggagaagctctttctggccccactaccctgcactgagctgtccctgggccagcacctgctgcgggccaccgctgatgaggacctgcagacagccatcctgctgctggcacatggctcccgtgaggaggtgaacgagacctgtggggagggagacggctgcacggcgctccatctggcctgccgcaaggggaatgtggtcctggcacagctcctgatctggtacggggtggacgtcatggcccgagatgcccacgggaacacagcgctgacctacgcccggcaggcctccagccaggagtgcatcaacgtgcttctgcagtacggctgccccgacgagtgcgtgtagtatctgttttatttgactgcagtctccttggtgcaaaaacaaaatgggaaaaataaggataactcagaatttcaaaaggaaatcacaaattcagctagtaatagcattttcagtacttttcataaactaagtaaatacacaaaatgttgatttttctgaccataagacatattttatgtccttttgccaaggtggatgtgttagtctcaggccctcctggccacattgcccaagtcacacaggcttctgtattatgtatttagataaaatgtgtgaaaatatatttgaaaaaaaagttcataaatatgcattgatttttg

SEQ ID NO: 4988 - protein, 439 aa, Homo sapiens [sequence omitted]

SEQ ID NO: 4989 - DNA, 3842 bp, Homo sapiens
tccgacctgaggagtcacagttgtgagcaagttcggtgccgcgggctgggattagaattacttgttattggtaaatagccactatggagactaaggaccagaagaaacaaagaaagaaaaatagtggacccaaagctgcaaagaaaaagaagcggcatctgcaggatctccagctaggagacgaagaagatgcctggaagagaaatcccaaagcttttgcatttcagtctgctgtgtggatggctcgatcctttcacaggactcaggatttgaagacaaaaaagcatcatattccagtggttgatcgaactccactagagcccccaccaatagtggtagtggtgatggggcctccaaagttggaaagagcactttgatacaatgcctcattcggaacttcacccggcagaagttgaccgagatcagaggccctgtgatgatcgtgtcaggtaaaaagctccgactcaccattattgaatgtgggtgtgacattaacatgatgattgatctggctgaagtagcagatctggtactgatgcttatagatgccagctttgggtttgaaatggaaacgtttgagtttctaaacatctgtcaagtacatggctttcctaaaattatgggagttctcacccacctcgacttcttcaaacacaataagcaactgaagaagacaaagaagcgattaaaacacaggttctggacagaagtttacctggttgccaagctgttctgcctttctggaatggtgcatggagaatatcaaaaccaagaaatgcacaatctgggccattttattacagttatgaagtttaggcctctcacatggcagacttctcatccttatatcctggcagacagggtggaagatttgacaaacccagaggatatccaaacaaacatcagatgtgaccagcagatgttactttacggttatttaagaggagcgcacttgaaaaataaaagccaaattcacatgccaggacgaggtggggcccacccatgagctggtccagagtctcatctccacccactccaccattgatgccaagatggcttcaagtcgagtgatgttgttttctgattccaagccacttgggtcagaggctatagataatcaaggggacgagttctcactatgttgcccaggctggcctcgaactcctgggctcaagcaatcctcctgcgttggcctcccaaagtcctgggattacaggtgtaagccactacggctggcctattattgctgtattctaacttattcatctcctatgtgtcagagatggctttggattccccgttctgtgtgctgctgtctggctcctgaacccagctgtagaggtgtgtcaatcccaactggtgaagtactgagaggaagctacacaaaaggcagcaaagtattagtgagtggtgtcattgagcaaacacgaagtcgggctcatccaaggatgagattttgccagagaaaggacgagcagcaagtcagggagcttaagcgtcagcctcgagtttgaccagcaacaggggtcggtgtgtccctctgaatctgagatctatgaggcaggagctggggacaggatggcaggagcgcccatggctgctgctgtgcagcctgctgaggtgaccgttgaagttggtgaggacctccacatgcaccacattcgtgaccaggagatgcctgaagctttggagtttagcctttctgccaatccagaggcaagcacaatattccagaggaactctcaaacagatgctttggagtttaacccttctgccaatccagaggcaagcacaatattccagaggaactctcaaacagatgttgtagaaataagaagaagcaactgtacaaaccatgtatctactgagcgtttcagtcaacaatacagctcgtgttcgacaatattccttgatgacagcacagccagccagcattatcttacaatgacaataatatctgtgaccttggagatacctcatcatatcacacaaagagatgcagatagatctttgagcatacctgatgaacagttacactcatttgcggtttccaccgtgcacattacgaagaacagaaatggaggtgggagtttaaataactattcctcctccattccatcgactcccagcaccagccaggaggaccctcagttcagtgttcctcccactgccaacacacccacccccgtttgcaagcggtccatgcgctggtccaacctgtttacatctgagaaagggagtcacccagacaaagagaggaaagccccggagaatcatgctgacaccatcgggagcggcagagccatccccattaaacagggcatgctcttaaagcgaagtgggaaatggctgaagacatggaaaaagaaatacgtcaccctgtgttccaatggcgtgctcacctattattcaagcttaggtgattatatgaagaatattcataaaaaagagattgaccttcggacatctaccatcaaagtcccaggaaagtggccatccctagccacatcggcctgtgcacccatctccagctctaaaagcaatggcctatccaaggacatggacaccgggctgggtgactccatatgcttcagccccagtatctccagcaccaccagccccaagctcaacccgcccccctctcctcatgccaataaaaagaaacacctaaagaagaaaagcaccaacaactttatgattgtgtctgccactggccaaacatggcactttgaagccacgacgtatgaggagcgggatgcctgggtccaagccatccagagccagatcctggccagcctgcagtcatgcgagagcagtaaaagcaagtcccagctgaccagccagagcgaggccatggccctgcagtcgatccaaaacatgcgtgggaacgcccactgtgtggactatgagacccagaatcctaagtgggccagtttgaacttgggagtcctcatgtgtattgaatgctcaggaatccaccgcagtcttggcacccgcctttcccgtgtgcgatctctggagctggatgactggccagttgagctcaggaaggttatgtcatctattggcaatgacctagccaacagcatctgggaagggagcagccaggggcagacaaaaccctcagtaaagtccacgagggaagagaaggaacggtggatccgttccaaatatgaggagaagctctttctggccccactaccctgcactgagctgtccctgggccagcacctgctgcgggccaccgctgatgaggacctgcagacagccatcctgctgctggcacatggctcccgtgaggaggtgaacgagacctgtggggagggagacggctgcacggcgctccatctggcctgccgcaaggggaatgtggtcctggcacagctcctgatctggtacggggtggacgtcatggcccgagatgcccacgggaacacagcgctgacctacgcccggcaggcctccagccaggagtgcatcaacgtgcttctgcagtacggctgccccgacgagtgcgtgtagtatctgttttatttgactgcagtctccttggtgcaaaaacaaaatgggaaaaataaggataactcagaatttcaaaaggaaatcacaaattcagctagtaatagcattttcagtacttttcataaactaagtaaatacacaaaatgttgatttttctgaccataagacatattttatgtccttttgccaaggtggatgtgttagtctcaggccctcctggccacattgcccaagtcacacaggcttctgtattatgtatttagataaaatgtgtgaaaatatatttgaaaaaaaagttcataaatatgcattgatttttg

SEQ ID NO: 4990 - protein, 642 aa, Homo sapiens
MAAAVQPAEVTVEVGEDLHMHHIRDQEMPEALEFSLSANPEASTIFQRNSQTDALEFNPSANPEASTIFQRNSQTDVVEIRRSNCTNHVSTERFSQQYSSCSTIFLDDSTASQHYLTMTIISVTLEIPHHITQRDADRSLSIPDEQLHSFAVSTVHITKNRNGGGSLNNYSSSIPSTPSTSQEDPQFSVPPTANTPTPVCKRSMRWSNLFTSEKGSHPDKERKAPENHADTIGSGRAIPIKQGMLLKRSGKWLKTWKKKYVTLCSNGVLTYYSSLGDYMKNIHKKEIDLRTSTIKVPGKWPSLATSACAPISSSKSNGLSKDMDTGLGDSICFSPSISSTTSPKLNPPPSPHANKKKHLKKKSTNNFMIVSATGQTWHFEATTYEERDAWVQAIQSQILASLQSCESSKSKSQLTSQSEAMALQSIQNMRGNAHCVDYETQNPKWASLNLGVLMCIECSGIHRSLGTRLSRVRSLELDDWPVELRKVMSSIGNDLANSIWEGSSQGQTKPSVKSTREEKERWIRSKYEEKLFLAPLPCTELSLGQHLLRATADEDLQTAILLLAHGSREEVNETCGEGDGCTALHLACRKGNVVLAQLLIWYGVDVMARDAHGNTALTYARQASSQECINVLLQYGCPDECV

SEQ ID NO: 4991 - DNA, 1867 bp, Homo sapiens
gcactttcttattttatagagatgcagatagatctttgagcatacctgatgaacagttacactcatttgcggtttccaccgtgcacattacgaagaacagaaatggaggtgggagtttaaataactattcctcctccattccatcgactcccagcaccagccaggaggaccctcagttcagtgttcctcccactgccaacacacccacccccgtttgcaagcggtccatgcgctggtccaacctgtttacatctgagaaagggagtcacccagacaaagagaggaaagccccggagaatcatgctgacaccatcgggagcggcagagccatccccattaaacagggcatgctcttaaagcgaagtgggaaatggctgaagacatggaaaaagaaatacgtcaccctgtgttccaatggcgtgctcacctattattcaagcttaggtgattatatgaagaatattcataaaaaagagattgaccttcggacatctaccatcaaagtcccaggaaagtggccatccctagccacatcggcctgtgcacccatctccagctctaaaagcaatggcctatccaaggacatggacaccgggctgggtgactccatatgcttcagccccagtatctccagcaccaccagccccaagctcaacccgcccccctctcctcatgccaataaaaagaaacacctaaagaagaaaagcaccaacaactttatgattgtgtctgccactggccaaacatggcactttgaagccacgacgtatgaggagcgggatgcctgggtccaagccatccagagccagatcctggccagcctgcagtcatgcgagagcagtaaaagcaagtcccagctgaccagccagagcgaggccatggccctgcagtcgatccaaaacatgcgtgggaacgcccactgtgtggactatgagacccagaatcctaagtgggccagtttgaacttgggagtcctcatgtgtattgaatgctcaggaatccaccgcagtcttggcacccgcctttcccgtgtgcgatctctggagctggatgactggccagttgagctcaggaaggttatgtcatctattggcaatgacctagccaacagcatctgggaagggagcagccaggggcagacaaaaccctcagtaaagtccacgagggaagagaaggaacggtggatccgttccaaatatgaggagaagctctttctggccccactaccctgcactgagctgtccctgggccagcacctgctgcgggccaccgctgatgaggacctgcagacagccatcctgctgctggcacatggctcccgtgaggaggtgaacgagacctgtggggagggagacggctgcacggcgctccatctggcctgccgcaaggggaatgtggtcctggcacagctcctgatctggtacggggtggacgtcatggcccgagatgcccacgggaacacagcgctgacctacgcccggcaggcctccagccaggagtgcatcaacgtgcttctgcagtacggctgccccgacgagtgcgtgtagtatctgttttatttgactgcagtctccttggtgcaaaaacaaaatgggaaaaataaggataactcagaatttcaaaaggaaatcacaaattcagctagtaatagcattttcagtacttttcataaactaagtaaatacacaaaatgttgatttttctgaccataagacatattttatgtccttttgccaaggtggatgtgttagtctcaggccctcctggccacattgcccaagtcacacaggcttctgtattatgtatttagataaaatgtgtgaaaatatatttgaaaaaaaagttcataaatatgcattgatttttg

SEQ ID NO: 4992 - protein, 439 aa, Homo sapiens [sequence omitted]

SEQ ID NO: 4993 - DNA, 2288 bp, Homo sapiens
gctcgtgttcgacaatattccttgatgacagcacagccagccagcattatcttacaatgacaataatatcgcactgagaagccttttaggaaaatcaggatggatgtgaggcatctttctgtgaagaaaagcatcccagaagattctgattttcaccccagctcaatcattccaaactttgctgctgattgaaatcacctgggaaacgtttaccaagaaccttgatgcccaaagccatacccaatactaattaaattaaaatgtctcatgtggaagatgaggcagatattaaagcttctcaggcgattttaatgtgcagcaaagtttgagagccactgcttaatttgagtttaggacgagaaactgctcctatttggtgggaccttgggcaagtcagttttaagtgtgaccttggagatacctcatcatatcacacaaagagatgcagatagatctttgagcatacctgatgaacagttacactcatttgcggtttccaccgtgcacattacgaagaacagaaatggaggtgggagtttaaataactattcctcctccattccatcgactcccagcaccagccaggaggaccctcagttcagtgttcctcccactgccaacacacccacccccgtttgcaagcggtccatgcgctggtccaacctgtttacatctgagaaagggagtcacccagacaaagagaggaaagccccggagaatcatgctgacaccatcgggagcggcagagccatccccattaaacagggcatgctcttaaagcgaagtgggaaatggctgaagacatggaaaaagaaatacgtcaccctgtgttccaatggcgtgctcacctattattcaagcttaggtgattatatgaagaatattcataaaaaagagattgaccttcggacatctaccatcaaagtcccaggaaagtggccatccctagccacatcggcctgtgcacccatctccagctctaaaagcaatggcctatccaaggacatggacaccgggctgggtgactccatatgcttcagccccagtatctccagcaccaccagccccaagctcaacccgcccccctctcctcatgccaataaaaagaaacacctaaagaagaaaagcaccaacaactttatgattgtgtctgccactggccaaacatggcactttgaagccacgacgtatgaggagcgggatgcctgggtccaagccatccagagccagatcctggccagcctgcagtcatgcgagagcagtaaaagcaagtcccagctgaccagccagagcgaggccatggccctgcagtcgatccaaaacatgcgtgggaacgcccactgtgtggactatgagacccagaatcctaagtgggccagtttgaacttgggagtcctcatgtgtattgaatgctcaggaatccaccgcagtcttggcacccgcctttcccgtgtgcgatctctggagctggatgactggccagttgagctcaggaaggttatgtcatctattggcaatgacctagccaacagcatctgggaagggagcagccaggggcagacaaaaccctcagtaaagtccacgagggaagagaaggaacggtggatccgttccaaatatgaggagaagctctttctggccccactaccctgcactgagctgtccctgggccagcacctgctgcgggccaccgctgatgaggacctgcagacagccatcctgctgctggcacatggctcccgtgaggaggtgaacgagacctgtggggagggagacggctgcacggcgctccatctggcctgccgcaaggggaatgtggtcctggcacagctcctgatctggtacggggtggacgtcatggcccgagatgcccacgggaacacagcgctgacctacgcccggcaggcctccagccaggagtgcatcaacgtgcttctgcagtacggctgccccgacgagtgcgtgtagtatctgttttatttgactgcagtctccttggtgcaaaaacaaaatgggaaaaataaggataactcagaatttcaaaaggaaatcacaaattcagctagtaatagcattttcagtacttttcataaactaagtaaatacacaaaatgttgatttttctgaccataagacatattttatgtccttttgccaaggtggatgtgttagtctcaggccctcctggccacattgcccaagtcacacaggcttctgtattatgtatttagataaaatgtgtgaaaatatatttgaaaaaaaagttcataaatatgcattgatttttg

SEQ ID NO: 4994 - protein, 439 aa, Homo sapiens [sequence omitted]

SEQ ID NO: 4995 - DNA, 2234 bp, Homo sapiens
aagagagacagactctgggtcaaaaaataaataaatacataaaataaatcgcatgggacgaaaggtttcatcggtagaaaagcatataacagggaaatctgttattatttatatattgtaatcaccaacagaaacgcgtcttctaacggcatatttccttgcattttggttctcatatttttgtaaaaaacaaagaaatgaaaacaaagtgcccttatggtactgttctgaactagaagatttgaatttcagggccgctaggagagtttcctctgccccccttttaaaaaatgtcttcaggcctaacaaatgataacatctattgttatgaattttttttccttccacagtgtgaccttggagatacctcatcatatcacacaaagagatgcagatagatctttgagcatacctgatgaacagttacactcatttgcggtttccaccgtgcacattacgaagaacagaaatggaggtgggagtttaaataactattcctcctccattccatcgactcccagcaccagccaggaggaccctcagttcagtgttcctcccactgccaacacacccacccccgtttgcaagcggtccatgcgctggtccaacctgtttacatctgagaaagggagtcacccagacaaagagaggaaagccccggagaatcatgctgacaccatcgggagcggcagagccatccccattaaacagggcatgctcttaaagcgaagtgggaaatggctgaagacatggaaaaagaaatacgtcaccctgtgttccaatggcgtgctcacctattattcaagcttaggtgattatatgaagaatattcataaaaaagagattgaccttcggacatctaccatcaaagtcccaggaaagtggccatccctagccacatcggcctgtgcacccatctccagctctaaaagcaatggcctatccaaggacatggacaccgggctgggtgactccatatgcttcagccccagtatctccagcaccaccagccccaagctcaacccgcccccctctcctcatgccaataaaaagaaacacctaaagaagaaaagcaccaacaactttatgattgtgtctgccactggccaaacatggcactttgaagccacgacgtatgaggagcgggatgcctgggtccaagccatccagagccagatcctggccagcctgcagtcatgcgagagcagtaaaagcaagtcccagctgaccagccagagcgaggccatggccctgcagtcgatccaaaacatgcgtgggaacgcccactgtgtggactatgagacccagaatcctaagtgggccagtttgaacttgggagtcctcatgtgtattgaatgctcaggaatccaccgcagtcttggcacccgcctttcccgtgtgcgatctctggagctggatgactggccagttgagctcaggaaggttatgtcatctattggcaatgacctagccaacagcatctgggaagggagcagccaggggcagacaaaaccctcagtaaagtccacgagggaagagaaggaacggtggatccgttccaaatatgaggagaagctctttctggccccactaccctgcactgagctgtccctgggccagcacctgctgcgggccaccgctgatgaggacctgcagacagccatcctgctgctggcacatggctcccgtgaggaggtgaacgagacctgtggggagggagacggctgcacggcgctccatctggcctgccgcaaggggaatgtggtcctggcacagctcctgatctggtacggggtggacgtcatggcccgagatgcccacgggaacacagcgctgacctacgcccggcaggcctccagccaggagtgcatcaacgtgcttctgcagtacggctgccccgacgagtgcgtgtagtatctgttttatttgactgcagtctccttggtgcaaaaacaaaatgggaaaaataaggataactcagaatttcaaaaggaaatcacaaattcagctagtaatagcattttcagtacttttcataaactaagtaaatacacaaaatgttgatttttctgaccataagacatattttatgtccttttgccaaggtggatgtgttagtctcaggccctcctggccacattgcccaagtcacacaggcttctgtattatgtatttagataaaatgtgtgaaaatatatttgaaaaaaaagttcataaatatgcattgatttttg

SEQ ID NO: 4996 - protein, 528 aa, Homo sapiens
MNFFSFHSVTLEIPHHITQRDADRSLSIPDEQLHSFAVSTVHITKNRNGGGSLNNYSSSIPSTPSTSQEDPQFSVPPTANTPTPVCKRSMRWSNLFTSEKGSHPDKERKAPENHADTIGSGRAIPIKQGMLLKRSGKWLKTWKKKYVTLCSNGVLTYYSSLGDYMKNIHKKEIDLRTSTIKVPGKWPSLATSACAPISSSKSNGLSKDMDTGLGDSICFSPSISSTTSPKLNPPPSPHANKKKHLKKKSTNNFMIVSATGQTWHFEATTYEERDAWVQAIQSQILASLQSCESSKSKSQLTSQSEAMALQSIQNMRGNAHCVDYETQNPKWASLNLGVLMCIECSGIHRSLGTRLSRVRSLELDDWPVELRKVMSSIGNDLANSIWEGSSQGQTKPSVKSTREEKERWIRSKYEEKLFLAPLPCTELSLGQHLLRATADEDLQTAILLLAHGSREEVNETCGEGDGCTALHLACRKGNVVLAQLLIWYGVDVMARDAHGNTALTYARQASSQECINVLLQYGCPDECV

SEQ ID NO: 4997 - DNA, 4164 bp, Homo sapiens
aaataataataataataataataatctacaatgtcatttcccatccaagcttgacttctacctttactttctgatgtggttttgccatgtccccacccaaatctcatcatgaattataatccccataatcctgatgtgttgagggaggggcctagggggaggtgatcagatcacgggggcagttatcctcatgctgttcttgtgatattcagtaagtcctcatgagatcttatagggttttgttttgttttgttttttaggatggagtcttgctctgttgtccaggcaggagtgccatggcacgatcttggctcactgcagtctctgcctcttgagttccagtaattctcctgcctcagcctcctgagtagctgggattacaggcatgcaccaccacacccagctaatttttgtatttttagtagagacaggatttcactacattagctaggctggtctcaaactcctgacctcagttgatccacctgccttggcctcccaaagtactagggttacaagtgtgagccaccatgcccagctgagatctgatggttttatacatgtttgacagttgctccttcacatgttgccactctctgtgcggccaccatgtaagtcggacctgcccttctgccatgattgtaagtttcctgaggcctccccagccatgtgaaactgagtcaattaaacctcttccctttaaaaattacccaacctcaggtatttctttatatcagtgtgaaaacagattgctatactttctgataatcatgcttaagcaattggggaattcagactacctgggatcaaaccagggccccacccttagcagtcatgtgaccttggggaggttacttaccttctccgtctcaacaacttctgtaaaatctgtaacatgagattgtttctgagggttaaatgagcatagcacagtggggacactgtcaggcacacactacttgccagatgtcaagtattcatctttattgaaataggactgtggtaagccactttatggctctcgattctgtatgagaaaatcatgcttagtgccttgttagtaaaagaaagaaaatctgaaagtccctgccatggaaggaagaaatagcggggagaaaagggagttggtaagtttcagcatttcagagcttggagggacaagttaggtttctattttatggagaaggaggtggaggcaggatgggtcctaaggtgtcattcaaaacacacagccataactctttattgagagtagagctagggccgcagggattgctgtggtcacgttgcggacaaaaatgaccactcgttggaagacaggagaggagtgtttagttacaaaagcagtcaacaattcaggtgtatctatattcagtcagcaaataaaagttgttcaacttggttgctaatgggacccactctactgaggctttgtatagaactcatagaggaagatggcttcaagcaatgaactaccctgtgcttttcttaggactaaaatctcaggaagttggtgatgaatgaaaaccttagtcccactggcactgcacgaggggccaggagagcagcagcatcataagccacagggtggggcagccaaggcaggggcattctgagctgttggggaggggtggcaggcagggtggggcactgtgaggtgtcggggagggcattgtgaagtgtggggtggggcattctgtgccacatgcctgggctcccacctggggccagtgggcttcagtctgtaggtgactacagaaggaggaggagctccgtctgttctctcttcaggcagttgttgtgtctctcagcgcttgttgggttcacaacctattaaataagccagctggtcttcaccctcccagacaagtcaactcaggggaggcagcagggtgtgggccttgacccgcagccctagccggggccggggccggggccagggatggtgcccggggccgcgctgtgaggtgggcaggcgaggagcgggaagaccatctctgcaagtgcagcatagcctcggcctaggacagtgggagtgtgtggccaaagctgtgagcagaggcacaggtggtggcagacagtagaggcgccccatggggaacatactgacctgttgtgtgcaccctagcgtcagcctcgagtttgaccagcaacaggggtcggtgtgtccctctgaatctgagatctatgaggcaggagctggggacaggatggcaggagcgcccatggctgctgctgtgcagcctgctgaggtgaccgttgaagttggtgaggacctccacatgcaccacattcgtgaccaggagatgcctgaagctttggagtttagcctttctgccaatccagaggcaagcacaatattccagaggaactctcaaacagatgctttggagtttaacccttctgccaatccagaggcaagcacaatattccagaggaactctcaaacagatgttgtagaaataagaagaagcaactgtacaaaccatgtatctactgagcgtttcagtcaacaatacagctcgtgttcgacaatattccttgatgacagcacagccagccagcattatcttacaatgacaataatatctgtgaccttggagatacctcatcatatcacacaaagagatgcagatagatctttgagcatacctgatgaacagttacactcatttgcgacagggtttcaccatgttggccaggatggtcttgaactcctgacctcgtgatccacccaccttggcctcccaaagtgctgtgattacaggtgtgagccaccatgcctggcccagaaaatgtatctttttaaaaggtaattgtaagctgtctataggaccctgcaagccactacccaatttttgaagccattcctccttctgttccacacaggtttccaccgtgcacattacgaagaacagaaatggaggtgggagtttaaataactattcctcctccattccatcgactcccagcaccagccaggaggaccctcagttcagtgttcctcccactgccaacacacccacccccgtttgcaagcggtccatgcgctggtccaacctgtttacatctgagaaagggagtcacccagacaaagagaggaaagccccggagaatcatgctgacaccatcgggagcggcagagccatccccattaaacagggcatgctcttaaagcgaagtgggaaatggctgaagacatggaaaaagaaatacgtcaccctgtgttccaatggcgtgctcacctattattcaagcttaggtgattatatgaagaatattcataaaaaagagattgaccttcggacatctaccatcaaagtcccaggaaagtggccatccctagccacatcggcctgtgcacccatctccagctctaaaagcaatggcctatccaaggacatggacaccgggctgggtgactccatatgcttcagccccagtatctccagcaccaccagccccaagctcaacccgcccccctctcctcatgccaataaaaagaaacacctaaagaagaaaagcaccaacaactttatgattgtgtctgccactggccaaacatggcactttgaagccacgacgtatgaggagcgggatgcctgggtccaagccatccagagccagatcctggccagcctgcagtcatgcgagagcagtaaaagcaagtcccagctgaccagccagagcgaggccatggccctgcagtcgatccaaaacatgcgtgggaacgcccactgtgtggactatgagacccagaatcctaagtgggccagtttgaacttgggagtcctcatgtgtattgaatgctcaggaatccaccgcagtcttggcacccgcctttcccgtgtgcgatctctggagctggatgactggccagttgagctcaggaaggttatgtcatctattggcaatgacctagccaacagcatctgggaagggagcagccaggggcagacaaaaccctcagtaaagtccacgagggaagagaaggaacggtggatccgttccaaatatgaggagaagctctttctggccccactaccctgcactgagctgtccctgggccagcacctgctgcgggccaccgctgatgaggacctgcagacagccatcctgctgctggcacatggctcccgtgaggaggtgaacgagacctgtggg

SEQ ID NO: 4998 - protein, 211 aa, Homo sapiens
MGNILTCCVHPSVSLEFDQQQGSVCPSESEIYEAGAGDRMAGAPMAAAVQPAEVTVEVGEDLHMHHIRDQEMPEALEFSLSANPEASTIFQRNSQTDALEFNPSANPEASTIFQRNSQTDVVEIRRSNCTNHVSTERFSQQYSSCSTIFLDDSTASQHYLTMTIISVTLEIPHHITQRDADRSLSIPDEQLHSFATGFHHVGQDGLELLTS

SEQ ID NO: 4999 - DNA, 3852 bp, Homo sapiens
aaataataataataataataataatctacaatgtcatttcccatccaagcttgacttctacctttactttctgatgtggttttgccatgtccccacccaaatctcatcatgaattataatccccataatcctgatgtgttgagggaggggcctagggggaggtgatcagatcacgggggcagttatcctcatgctgttcttgtgatattcagtaagtcctcatgagatcttatagggttttgttttgttttgttttttaggatggagtcttgctctgttgtccaggcaggagtgccatggcacgatcttggctcactgcagtctctgcctcttgagttccagtaattctcctgcctcagcctcctgagtagctgggattacaggcatgcaccaccacacccagctaatttttgtatttttagtagagacaggatttcactacattagctaggctggtctcaaactcctgacctcagttgatccacctgccttggcctcccaaagtactagggttacaagtgtgagccaccatgcccagctgagatctgatggttttatacatgtttgacagttgctccttcacatgttgccactctctgtgcggccaccatgtaagtcggacctgcccttctgccatgattgtaagtttcctgaggcctccccagccatgtgaaactgagtcaattaaacctcttccctttaaaaattacccaacctcaggtatttctttatatcagtgtgaaaacagattgctatactttctgataatcatgcttaagcaattggggaattcagactacctgggatcaaaccagggccccacccttagcagtcatgtgaccttggggaggttacttaccttctccgtctcaacaacttctgtaaaatctgtaacatgagattgtttctgagggttaaatgagcatagcacagtggggacactgtcaggcacacactacttgccagatgtcaagtattcatctttattgaaataggactgtggtaagccactttatggctctcgattctgtatgagaaaatcatgcttagtgccttgttagtaaaagaaagaaaatctgaaagtccctgccatggaaggaagaaatagcggggagaaaagggagttggtaagtttcagcatttcagagcttggagggacaagttaggtttctattttatggagaaggaggtggaggcaggatgggtcctaaggtgtcattcaaaacacacagccataactctttattgagagtagagctagggccgcagggattgctgtggtcacgttgcggacaaaaatgaccactcgttggaagacaggagaggagtgtttagttacaaaagcagtcaacaattcaggtgtatctatattcagtcagcaaataaaagttgttcaacttggttgctaatgggacccactctactgaggctttgtatagaactcatagaggaagatggcttcaagcaatgaactaccctgtgcttttcttaggactaaaatctcaggaagttggtgatgaatgaaaaccttagtcccactggcactgcacgaggggccaggagagcagcagcatcataagccacagggtggggcagccaaggcaggggcattctgagctgttggggaggggtggcaggcagggtggggcactgtgaggtgtcggggagggcattgtgaagtgtggggtggggcattctgtgccacatgcctgggctcccacctggggccagtgggcttcagtctgtaggtgactacagaaggaggaggagctccgtctgttctctcttcaggcagttgttgtgtctctcagcgcttgttgggttcacaacctattaaataagccagctggtcttcaccctcccagacaagtcaactcaggggaggcagcagggtgtgggccttgacccgcagccctagccggggccggggccggggccagggatggtgcccggggccgcgctgtgaggtgggcaggcgaggagcgggaagaccatctctgcaagtgcagcatagcctcggcctaggacagtgggagtgtgtggccaaagctgtgagcagaggcacaggtggtggcagacagtagaggcgccccatggggaacatactgacctgttgtgtgcaccctagcgtcagcctcgagtttgaccagcaacaggggtcggtgtgtccctctgaatctgagatctatgaggcaggagctggggacaggatggcaggagcgcccatggctgctgctgtgcagcctgctgaggtgaccgttgaagttggtgaggacctccacatgcaccacattcgtgaccaggagatgcctgaagctttggagtttagcctttctgccaatccagaggcaagcacaatattccagaggaactctcaaacagatgctttggagtttaacccttctgccaatccagaggcaagcacaatattccagaggaactctcaaacagatgttgtagaaataagaagaagcaactgtacaaaccattgtgaccttggagatacctcatcatatcacacaaagagatgcagatagatctttgagcatacctgatgaacagttacactcatttgcggtttccaccgtgcacattacgaagaacagaaatggaggtgggagtttaaataactattcctcctccattccatcgactcccagcaccagccaggaggaccctcagttcagtgttcctcccactgccaacacacccacccccgtttgcaagcggtccatgcgctggtccaacctgtttacatctgagaaagggagtcacccagacaaagagaggaaagccccggagaatcatgctgacaccatcgggagcggcagagccatccccattaaacagggcatgctcttaaagcgaagtgggaaatggctgaagacatggaaaaagaaatacgtcaccctgtgttccaatggcgtgctcacctattattcaagcttaggtgattatatgaagaatattcataaaaaagagattgaccttcggacatctaccatcaaagtcccaggaaagtggccatccctagccacatcggcctgtgcacccatctccagctctaaaagcaatggcctatccaaggacatggacaccgggctgggtgactccatatgcttcagccccagtatctccagcaccaccagccccaagctcaacccgcccccctctcctcatgccaataaaaagaaacacctaaagaagaaaagcaccaacaactttatgattgtgtctgccactggccaaacatggcactttgaagccacgacgtatgaggagcgggatgcctgggtccaagccatccagagccagatcctggccagcctgcagtcatgcgagagcagtaaaagcaagtcccagctgaccagccagagcgaggccatggccctgcagtcgatccaaaacatgcgtgggaacgcccactgtgtggactatgagacccagaatcctaagtgggccagtttgaacttgggagtcctcatgtgtattgaatgctcaggaatccaccgcagtcttggcacccgcctttcccgtgtgcgatctctggagctggatgactggccagttgagctcaggaaggttatgtcatctattggcaatgacctagccaacagcatctgggaagggagcagccaggggcagacaaaaccctcagtaaagtccacgagggaagagaaggaacggtggatccgttccaaatatgaggagaagctctttctggccccactaccctgcactgagctgtccctgggccagcacctgctgcgggccaccgctgatgaggacctgcagacagccatcctgctgctggcacatggctcccgtgaggaggtgaacgagacctgtggg

SEQ ID NO: 5000 - protein, 147 aa, Homo sapiens
MGNILTCCVHPSVSLEFDQQQGSVCPSESEIYEAGAGDRMAGAPMAAAVQPAEVTVEVGEDLHMHHIRDQEMPEALEFSLSANPEASTIFQRNSQTDALEFNPSANPEASTIFQRNSQTDVVEIRRSNCTNHCDLGDTSSYHTKRCR

SEQ ID NO: 5001 - DNA, 4420 bp, Homo sapiens
aaataataataataataataataatctacaatgtcatttcccatccaagcttgacttctacctttactttctgatgtggttttgccatgtccccacccaaatctcatcatgaattataatccccataatcctgatgtgttgagggaggggcctagggggaggtgatcagatcacgggggcagttatcctcatgctgttcttgtgatattcagtaagtcctcatgagatcttatagggttttgttttgttttgttttttaggatggagtcttgctctgttgtccaggcaggagtgccatggcacgatcttggctcactgcagtctctgcctcttgagttccagtaattctcctgcctcagcctcctgagtagctgggattacaggcatgcaccaccacacccagctaatttttgtatttttagtagagacaggatttcactacattagctaggctggtctcaaactcctgacctcagttgatccacctgccttggcctcccaaagtactagggttacaagtgtgagccaccatgcccagctgagatctgatggttttatacatgtttgacagttgctccttcacatgttgccactctctgtgcggccaccatgtaagtcggacctgcccttctgccatgattgtaagtttcctgaggcctccccagccatgtgaaactgagtcaattaaacctcttccctttaaaaattacccaacctcaggtatttctttatatcagtgtgaaaacagattgctatactttctgataatcatgcttaagcaattggggaattcagactacctgggatcaaaccagggccccacccttagcagtcatgtgaccttggggaggttacttaccttctccgtctcaacaacttctgtaaaatctgtaacatgagattgtttctgagggttaaatgagcatagcacagtggggacactgtcaggcacacactacttgccagatgtcaagtattcatctttattgaaataggactgtggtaagccactttatggctctcgattctgtatgagaaaatcatgcttagtgccttgttagtaaaagaaagaaaatctgaaagtccctgccatggaaggaagaaatagcggggagaaaagggagttggtaagtttcagcatttcagagcttggagggacaagttaggtttctattttatggagaaggaggtggaggcaggatgggtcctaaggtgtcattcaaaacacacagccataactctttattgagagtagagctagggccgcagggattgctgtggtcacgttgcggacaaaaatgaccactcgttggaagacaggagaggagtgtttagttacaaaagcagtcaacaattcaggtgtatctatattcagtcagcaaataaaagttgttcaacttggttgctaatgggacccactctactgaggctttgtatagaactcatagaggaagatggcttcaagcaatgaactaccctgtgcttttcttaggactaaaatctcaggaagttggtgatgaatgaaaaccttagtcccactggcactgcacgaggggccaggagagcagcagcatcataagccacagggtggggcagccaaggcaggggcattctgagctgttggggaggggtggcaggcagggtggggcactgtgaggtgtcggggagggcattgtgaagtgtggggtggggcattctgtgccacatgcctgggctcccacctggggccagtgggcttcagtctgtaggtgactacagaaggaggaggagctccgtctgttctctcttcaggcagttgttgtgtctctcagcgcttgttgggttcacaacctattaaataagccagctggtcttcaccctcccagacaagtcaactcaggggaggcagcagggtgtgggccttgacccgcagccctagccggggccggggccggggccagggatggtgcccggggccgcgctgtgaggtgggcaggcgaggagcgggaagaccatctctgcaagtgcagcatagcctcggcctaggacagtgggagtgtgtggccaaagctgtgagcagaggcacaggtggtggcagacagtagaggcgccccatggggaacatactgacctgttgtgtgcaccctagcgtcagcctcgagtttgaccagcaacaggggtcggtgtgtccctctgaatctgagatctatgaggcaggagctggggacaggatggcaggagcgcccatggctgctgctgtgcagcctgctgaggtgaccgttgaagttggtgaggacctccacatgcaccacattcgtgaccaggagatgcctgaagctttggagtttagcctttctgccaatccagaggcaagcacaatattccagaggaactctcaaacagatgctttggagtttaacccttctgccaatccagaggcaagcacaatattccagaggaactctcaaacagatgttgtagaaataagaagaagcaactgtacaaaccatgtatctactgagcgtttcagtcaacaatacagctcgtgttcgacaatattccttgatgacagcacagccagccagcattatcttacaatgacaataatatctgtgaccttggagatacctcatcatatcacacaaagagatgcagatagatctttgagcatacctgatgaacagttacactcatttgcggtttccaccgtgcacattacgaagaacagaaatggaggtgggagtttaaataactattcctcctccattccatcgactcccagcaccagccaggaggaccctcagttcagtgttcctcccactgccaacacacccacccccgtttgcaagcggtccatgcgctggtccaacctgtttacatctgagaaagggagtcacccagacaaagagaggaaagccccggagaatcatgctgacaccatcgggagcggcagagccatccccattaaacagggcatgctcttaaagcgaagtgggaaatggctgaagacatggaaaaagaaatacgtcaccctgtgttccaatggcgtgctcacctattattcaagcttaggtgattatatgaagaatattcataaaaaagagattgaccttcggacatctaccatcaaagtcccaggaaagtggccatccctagccacatcggcctgtgcacccatctccagctctaaaagcaatggcctatccaaggacatggacaccgggctgggtgactccatatgcttcagccccagtatctccagcaccaccagccccaagctcaacccgcccccctctcctcatgccaataaaaagaaacacctaaagaagaaaagcaccaacaactttatgattgtgtctgccactggccaaacatggcactttgaagccacgacgtatgaggagcgggatgcctgggtccaagccatccagagccagatcctggccagcctgcagtcatgcgagagcagtaaaagcaagtcccagctgaccagccagagcgaggccatggccctgcagtcgatccaaaacatgcgtgggaacgcccactgtgtggactatgagacccagaatcctaagtgggccagtttgaacttgggagtcctcatgtgtattgaatgctcaggaatccaccgcagtcttggcacccgcctttcccgtgtgcgatctctggagctggatgactggccagttgagctcaggaaggttatgtcatctattggcaatgacctagccaacagcatctgggaagggagcagccaggggcagacaaaaccctcaaagctctttctggccccactaccctgcactgagctgtccctgggccagcacctgctgcgggccaccgctgatgaggacctgcagacagccatcctgctgctggcacatggctcccgtgaggaggtgaacgagacctgtggggagggagacggctgcacggcgctccatctggcctgccgcaaggggaatgtggtcctggcacagctcctgatctggtacggggtggacgtcatggcccgagatgcccacgggaacacagcgctgacctacgcccggcaggcctccagccaggagtgcatcaacgtgcttctgcagtacggctgccccgacgagtgcgtgtagtatctgttttatttgactgcagtctccttggtgcaaaaacaaaatgggaaaaataaggataactcagaatttcaaaaggaaatcacaaattcagctagtaatagcattttcagtacttttcataaactaagtaaatacacaaaatgttgatttttctgaccataagacatattttatgtccttttgccaaggtggatgtgttagtctcaggccctcctggccacattgcccaagtcacacaggcttctgtattatgtatttagataaaatgtgtgaaaatatatttgaaaaaaaagttcataaatatgcattgatttttg

SEQ ID NO: 5002 - protein, 668 aa, Homo sapiens
MGNILTCCVHPSVSLEFDQQQGSVCPSESEIYEAGAGDRMAGAPMAAAVQPAEVTVEVGEDLHMHHIRDQEMPEALEFSLSANPEASTIFQRNSQTDALEFNPSANPEASTIFQRNSQTDVVEIRRSNCTNHVSTERFSQQYSSCSTIFLDDSTASQHYLTMTIISVTLEIPHHITQRDADRSLSIPDEQLHSFAVSTVHITKNRNGGGSLNNYSSSIPSTPSTSQEDPQFSVPPTANTPTPVCKRSMRWSNLFTSEKGSHPDKERKAPENHADTIGSGRAIPIKQGMLLKRSGKWLKTWKKKYVTLCSNGVLTYYSSLGDYMKNIHKKEIDLRTSTIKVPGKWPSLATSACAPISSSKSNGLSKDMDTGLGDSICFSPSISSTTSPKLNPPPSPHANKKKHLKKKSTNNFMIVSATGQTWHFEATTYEERDAWVQAIQSQILASLQSCESSKSKSQLTSQSEAMALQSIQNMRGNAHCVDYETQNPKWASLNLGVLMCIECSGIHRSLGTRLSRVRSLELDDWPVELRKVMSSIGNDLANSIWEGSSQGQTKPSKLFLAPLPCTELSLGQHLLRATADEDLQTAILLLAHGSREEVNETCGEGDGCTALHLACRKGNVVLAQLLIWYGVDVMARDAHGNTALTYARQASSQECINVLLQYGCPDECV

SEQ ID NO: 5003 - DNA, 3355 bp, Homo sapiens
gagtctcactctgtcacccaggctggagttctgtggcacagtcttggctcactgcaacctccgcctgccggagacgaggtttcactatgtaggcaaagctggtctcgaactcctgacctcagatgatccacccgcctcagcctcccaaagtgctgggattacaggcgtgagccaccgcacctggcctgtttattctcttaagagagaaaatgaggggattaatggactgtagttctggacaaggtggaaaactcttaaagtggaagtattggggcaagtgctctgacaggctaggatggtgcagtcagtcccttcacccagaaatcagtagaatgttaacagttcagactcaaaccttgtgaaaaacaggtggtggaaaggaaatccctcacagcaactggcaccataatcaagacagaatgtttgcagaataaatggagttacctgctttcagccccaggttgtagctattgtctgccctgatgatatgtgataataatttgtgatcctattgtcttaaaatggggtcactcatctccagtagaattaagtccacagtgaagttgtccccccatccccaaagagataaacatatatgaatgaactcacatgataacaactactgctgcctgggatcatgagagacctgaactgaactgataggaagtgaaaggtggctgagataatgagaatagacccatctgcagaggatcataaaaccagcaaagacaagatcttgtctaagatgccttcacaaactttgtccatgagaactctaaggacttctccagacctgttggctgctgctgtgatctctgcccaagaggagcctctgaccaacatccaaagggcttctggacccactggactcctctggagttgctccttcacatgttgccactctctgtgcggccaccatgtaagtcggacctgcccttctgccatgattgactaaaatctcaggaagttggtgatgaatgaaaaccttagtcccactggcactgcacgaggggccaggagagcagcagcatcataagccacaggcgtcagcctcgagtttgaccagcaacaggggtcggtgtgtccctctgaatctgagatctatgaggcaggagctggggacaggatggcaggagcgcccatggctgctgctgtgcagcctgctgaggtgaccgttgaagttggtgaggacctccacatgcaccacattcgtgaccaggagatgcctgaagctttggagtttagcctttctgccaatccagaggcaagcacaatattccagaggaactctcaaacagatgctttggagtttaacccttctgccaatccagaggcaagcacaatattccagaggaactctcaaacagatggtatctactgagcgtttcagtcaacaatacagctcgtgttcgacaatattccttgatgacagcacagccagccagcattatcttacaatgacaataatatctgtgaccttggagatacctcatcatatcacacaaagagatgcagatagatctttgagcatacctgatgaacagttacactcatttgcggtttccaccgtgcacattacgaagaacagaaatggaggtgggagtttaaataactattcctcctccattccatcgactcccagcaccagccaggaggaccctcagttcagtgttcctcccactgccaacacacccacccccgtttgcaagcggtccatgcgctggtccaacctgtttacatctgagaaagggagtcacccagacaaagagaggaaagccccggagaatcatgctgacaccatcgggagcggcagagccatccccattaaacagggcatgctcttaaagcgaagtgggaaatggctgaagacatggaaaaagaaatacgtcaccctgtgttccaatggcgtgctcacctattattcaagcttaggtgattatatgaagaatattcataaaaaagagattgaccttcggacatctaccatcaaagtcccaggaaagtggccatccctagccacatcggcctgtgcacccatctccagctctaaaagcaatggcctatccaaggacatggacaccgggctgggtgactccatatgcttcagccccagtatctccagcaccaccagccccaagctcaacccgcccccctctcctcatgccaataaaaagaaacacctaaagaagaaaagcaccaacaactttatgattgtgtctgccactggccaaacatggcactttgaagccacgacgtatgaggagcgggatgcctgggtccaagccatccagagccagatcctggccagcctgcagtcatgcgagagcagtaaaagcaagtcccagctgaccagccagagcgaggccatggccctgcagtcgatccaaaacatgcgtgggaacgcccactgtgtggactatgagacccagaatcctaagtgggccagtttgaacttgggagtcctcatgtgtattgaatgctcaggaatccaccgcagtcttggcacccgcctttcccgtgtgcgatctctggagctggatgactggccagttgagctcaggaaggttatgtcatctattggcaatgacctagccaacagcatctgggaagggagcagccaggggcagacaaaaccctcagtaaagtccacgagggaagagaaggaacggtggatccgttccaaatatgaggagaagctctttctggccccactaccctgcactgagctgtccctgggccagcacctgctgcgggccaccgctgatgaggacctgcagacagccatcctgctgctggcacatggctcccgtgaggaggtgaacgagacctgtggggagggagacggctgcacggcgctccatctggcctgccgcaaggggaatgtggtcctggcacagctcctgatctggtacggggtggacgtcatggcccgagatgcccacgggaacacagcgctgacctacgcccggcaggcctccagccaggagtgcatcaacgtgcttctgcagtacggctgccccgacgagtgcgtgtagtatctgttttatttgactgcagtctccttggtgcaaaaacaaaatgggaaaaataaggataactcagaatttcaaaaggaaatcacaaattcagctagtaatagcattttcagtacttttcataaactaagtaaatacacaaaatgttgatttttctgaccataagacatattttatgtccttttgccaaggtggatgtgttagtctcaggccctcctggccacattgcccaagtcacacaggcttctgtattatgtatttagataaaatgtgtgaaaatatatttgaaaaaaaagttcataaatatgcattgatttttg

SEQ ID NO: 5004 - protein, 578 aa, Homo sapiens
MLWSLTLLPIQRQAQYSRGTLKQMVSTERFSQQYSSCSTIFLDDSTASQHYLTMTIISVTLEIPHHITQRDADRSLSIPDEQLHSFAVSTVHITKNRNGGGSLNNYSSSIPSTPSTSQEDPQFSVPPTANTPTPVCKRSMRWSNLFTSEKGSHPDKERKAPENHADTIGSGRAIPIKQGMLLKRSGKWLKTWKKKYVTLCSNGVLTYYSSLGDYMKNIHKKEIDLRTSTIKVPGKWPSLATSACAPISSSKSNGLSKDMDTGLGDSICFSPSISSTTSPKLNPPPSPHANKKKHLKKKSTNNFMIVSATGQTWHFEATTYEERDAWVQAIQSQILASLQSCESSKSKSQLTSQSEAMALQSIQNMRGNAHCVDYETQNPKWASLNLGVLMCIECSGIHRSLGTRLSRVRSLELDDWPVELRKVMSSIGNDLANSIWEGSSQGQTKPSVKSTREEKERWIRSKYEEKLFLAPLPCTELSLGQHLLRATADEDLQTAILLLAHGSREEVNETCGEGDGCTALHLACRKGNVVLAQLLIWYGVDVMARDAHGNTALTYARQASSQECINVLLQYGCPDECV

SEQ ID NO: 5005 - DNA, 4405 bp, Homo sapiens
aaataataataataataataataatctacaatgtcatttcccatccaagcttgacttctacctttactttctgatgtggttttgccatgtccccacccaaatctcatcatgaattataatccccataatcctgatgtgttgagggaggggcctagggggaggtgatcagatcacgggggcagttatcctcatgctgttcttgtgatattcagtaagtcctcatgagatcttatagggttttgttttgttttgttttttaggatggagtcttgctctgttgtccaggcaggagtgccatggcacgatcttggctcactgcagtctctgcctcttgagttccagtaattctcctgcctcagcctcctgagtagctgggattacaggcatgcaccaccacacccagctaatttttgtatttttagtagagacaggatttcactacattagctaggctggtctcaaactcctgacctcagttgatccacctgccttggcctcccaaagtactagggttacaagtgtgagccaccatgcccagctgagatctgatggttttatacatgtttgacagttgctccttcacatgttgccactctctgtgcggccaccatgtaagtcggacctgcccttctgccatgattgtaagtttcctgaggcctccccagccatgtgaaactgagtcaattaaacctcttccctttaaaaattacccaacctcaggtatttctttatatcagtgtgaaaacagattgctatactttctgataatcatgcttaagcaattggggaattcagactacctgggatcaaaccagggccccacccttagcagtcatgtgaccttggggaggttacttaccttctccgtctcaacaacttctgtaaaatctgtaacatgagattgtttctgagggttaaatgagcatagcacagtggggacactgtcaggcacacactacttgccagatgtcaagtattcatctttattgaaataggactgtggtaagccactttatggctctcgattctgtatgagaaaatcatgcttagtgccttgttagtaaaagaaagaaaatctgaaagtccctgccatggaaggaagaaatagcggggagaaaagggagttggtaagtttcagcatttcagagcttggagggacaagttaggtttctattttatggagaaggaggtggaggcaggatgggtcctaaggtgtcattcaaaacacacagccataactctttattgagagtagagctagggccgcagggattgctgtggtcacgttgcggacaaaaatgaccactcgttggaagacaggagaggagtgtttagttacaaaagcagtcaacaattcaggtgtatctatattcagtcagcaaataaaagttgttcaacttggttgctaatgggacccactctactgaggctttgtatagaactcatagaggaagatggcttcaagcaatgaactaccctgtgcttttcttaggactaaaatctcaggaagttggtgatgaatgaaaaccttagtcccactggcactgcacgaggggccaggagagcagcagcatcataagccacagggtggggcagccaaggcaggggcattctgagctgttggggaggggtggcaggcagggtggggcactgtgaggtgtcggggagggcattgtgaagtgtggggtggggcattctgtgccacatgcctgggctcccacctggggccagtgggcttcagtctgtaggtgactacagaaggaggaggagctccgtctgttctctcttcaggcagttgttgtgtctctcagcgcttgttgggttcacaacctattaaataagccagctggtcttcaccctcccagacaagtcaactcaggggaggcagcagggtgtgggccttgacccgcagccctagccggggccggggccggggccagggatggtgcccggggccgcgctgtgaggtgggcaggcgaggagcgggaagaccatctctgcaagtgcagcatagcctcggcctaggacagtgggagtgtgtggccaaagctgtgagcagaggcacaggtggtggcagacagtagaggcgccccatggggaacatactgacctgttgtgtgcaccctagcgtcagcctcgagtttgaccagcaacaggggtcggtgtgtccctctgaatctgagatctatgaggcaggagctggggacaggatggcaggagcgcccatggctgctgctgtgcagcctgctgaggtgaccgttgaagttggtgaggacctccacatgcaccacattcgtgaccaggagatgcctgaagctttggagtttaacccttctgccaatccagaggcaagcacaatattccagaggaactctcaaacagatgttgtagaaataagaagaagcaactgtacaaaccatgtatctactgagcgtttcagtcaacaatacagctcgtgttcgacaatattccttgatgacagcacagccagccagcattatcttacaatgacaataatatctgtgaccttggagatacctcatcatatcacacaaagagatgcagatagatctttgagcatacctgatgaacagttacactcatttgcggtttccaccgtgcacattacgaagaacagaaatggaggtgggagtttaaataactattcctcctccattccatcgactcccagcaccagccaggaggaccctcagttcagtgttcctcccactgccaacacacccacccccgtttgcaagcggtccatgcgctggtccaacctgtttacatctgagaaagggagtcacccagacaaagagaggaaagccccggagaatcatgctgacaccatcgggagcggcagagccatccccattaaacagggcatgctcttaaagcgaagtgggaaatggctgaagacatggaaaaagaaatacgtcaccctgtgttccaatggcgtgctcacctattattcaagcttaggtgattatatgaagaatattcataaaaaagagattgaccttcggacatctaccatcaaagtcccaggaaagtggccatccctagccacatcggcctgtgcacccatctccagctctaaaagcaatggcctatccaaggacatggacaccgggctgggtgactccatatgcttcagccccagtatctccagcaccaccagccccaagctcaacccgcccccctctcctcatgccaataaaaagaaacacctaaagaagaaaagcaccaacaactttatgattgtgtctgccactggccaaacatggcactttgaagccacgacgtatgaggagcgggatgcctgggtccaagccatccagagccagatcctggccagcctgcagtcatgcgagagcagtaaaagcaagtcccagctgaccagccagagcgaggccatggccctgcagtcgatccaaaacatgcgtgggaacgcccactgtgtggactatgagacccagaatcctaagtgggccagtttgaacttgggagtcctcatgtgtattgaatgctcaggaatccaccgcagtcttggcacccgcctttcccgtgtgcgatctctggagctggatgactggccagttgagctcaggaaggttatgtcatctattggcaatgacctagccaacagcatctgggaagggagcagccaggggcagacaaaaccctcagtaaagtccacgagggaagagaaggaacggtggatccgttccaaatatgaggagaagctctttctggccccactaccctgcactgagctgtccctgggccagcacctgctgcgggccaccgctgatgaggacctgcagacagccatcctgctgctggcacatggctcccgtgaggaggtgaacgagacctgtggggagggagacggctgcacggcgctccatctggcctgccgcaaggggaatgtggtcctggcacagctcctgatctggtacggggtggacgtcatggcccgagatgcccacgggaacacagcgctgacctacgcccggcaggcctccagccaggagtgcatcaacgtgcttctgcagtacggctgccccgacgagtgcgtgtagtatctgttttatttgactgcagtctccttggtgcaaaaacaaaatgggaaaaataaggataactcagaatttcaaaaggaaatcacaaattcagctagtaatagcattttcagtacttttcataaactaagtaaatacacaaaatgttgatttttctgaccataagacatattttatgtccttttgccaaggtggatgtgttagtctcaggccctcctggccacattgcccaagtcacacaggcttctgtattatgtatttagataaaatgtgtgaaaatatatttgaaaaaaaagttcataaatatgcattgatttttg

SEQ ID NO: 5006 - protein, 663 aa, Homo sapiens
MGNILTCCVHPSVSLEFDQQQGSVCPSESEIYEAGAGDRMAGAPMAAAVQPAEVTVEVGEDLHMHHIRDQEMPEALEFNPSANPEASTIFQRNSQTDVVEIRRSNCTNHVSTERFSQQYSSCSTIFLDDSTASQHYLTMTIISVTLEIPHHITQRDADRSLSIPDEQLHSFAVSTVHITKNRNGGGSLNNYSSSIPSTPSTSQEDPQFSVPPTANTPTPVCKRSMRWSNLFTSEKGSHPDKERKAPENHADTIGSGRAIPIKQGMLLKRSGKWLKTWKKKYVTLCSNGVLTYYSSLGDYMKNIHKKEIDLRTSTIKVPGKWPSLATSACAPISSSKSNGLSKDMDTGLGDSICFSPSISSTTSPKLNPPPSPHANKKKHLKKKSTNNFMIVSATGQTWHFEATTYEERDAWVQAIQSQILASLQSCESSKSKSQLTSQSEAMALQSIQNMRGNAHCVDYETQNPKWASLNLGVLMCIECSGIHRSLGTRLSRVRSLELDDWPVELRKVMSSIGNDLANSIWEGSSQGQTKPSVKSTREEKERWIRSKYEEKLFLAPLPCTELSLGQHLLRATADEDLQTAILLLAHGSREEVNETCGEGDGCTALHLACRKGNVVLAQLLIWYGVDVMARDAHGNTALTYARQASSQECINVLLQYGCPDECV

SEQ ID NO: 5007 - DNA, 1704 bp, Homo sapiens
agcaagttcggtgccgcgggctggggtaggcggcagtggggtccctggctttggggcactgggaagatcgcgagtgggaaggtcctcccgcggtcctccgggtcatctttcctcctgaggagcagcatatttcgcatctgccggaggtattagaattacttgttattggtaaatagccactatggagactaaggaccagaagaaacaaagaaagaaaaatagtggacccaaagctgcaaagaaaaagaagcggcatctgcaggatctccagctaggagacgaagaagatgcctggaagagaaatcccaaagcttttgcatttcagtctgctgtgtggatggctcgatcctttcacaggactcaggatttgaagacaaaaaagcatcatattccagtggttgatcgaactccactagagcccccaccaatagtggtagtggtgatggggcctccaaagttggaaagagcactttgatacaatgcctcattcggaacttcacccggcagaagttgaccgagatcagaggccctgtgatgatcgtgtcaggtaaaaagctccgactcaccattattgaatgtgggtgtgacattaacatgatgattgatctggctgaagtagcagatctggtactgatgcttatagatgccagctttgggtttgaaatggaaacgtttgagtttctaaacatctgtcaagtacatggctttcctaaaattatgggagttctcacccacctcgacttcttcaaacacaataagcaactgaagaagacaaagaagcgattaaaacacaggttctggacagaagtttacctggttgccaagctgttctgcctttctggaatggtgcatggagaatatcaaaaccaagaaatgcacaatctgggccattttattacagttatgaagtttaggcctctcacatggcagacttctcatccttatatcctggcagacagggtggaagatttgacaaacccagaggatatccaaacaaacatcagatgtgaccagcagatgttactttacggttatttaagaggagcgcacttgaaaaataaaagccaaattcacatgccaggacgaggtggggcccacccatgagctggtccagagtctcatctccacccactccaccattgatgccaagatggcttcaagtcgagtgatgttgttttctgattccaagccacttgggtcagaggctatagataatcaaggggacgagttctcactatgttgcccaggctggcctcgaactcctgggctcaagcaatcctcctgcgttggcctcccaaagtcctgggattacaggtgtaagccactacggctggcctattattgctgtattctaacttattcatctcctatgctaggctagcctccaagctggaagctgaattgacagttgaaaaataatgacatgtatacaaggtatgtttgaaggattgcagatgcaggggcaccatatgctaaaggagtgttggaagctcactgcagaagatgacaaaagcagactgatatgtattatttgctgaaatataagctggaggcacaggtgaagattgccaaacctaatgaacagtttggcaaataagacaggctgtcaggccatggcagttcagcagtgggcgtgctgcctgtgaaccaagtcatttgttccagaggactacacttaaataccacaaataaaatcttccttgt

SEQ ID NO: 5008 - protein, 189 aa, Homo sapiens
MIVSGKKLRLTIIECGCDINMMIDLAEVADLVLMLIDASFGFEMETFEFLNICQVHGFPKIMGVLTHLDFFKHNKQLKKTKKRLKHRFWTEVYLVAKLFCLSGMVHGEYQNQEMHNLGHFITVMKFRPLTWQTSHPYILADRVEDLTNPEDIQTNIRCDQQMLLYGYLRGAHLKNKSQIHMPGRGGAHP

SEQ ID NO: 5009 - DNA, 2508 bp, Homo sapiens
aaataataataataataataataatctacaatgtcatttcccatccaagcttgacttctacctttactttctgatgtggttttgccatgtccccacccaaatctcatcatgaattataatccccataatcctgatgtgttgagggaggggcctagggggaggtgatcagatcacgggggcagttatcctcatgctgttcttgtgatattcagtaagtcctcatgagatcttatagggttttgttttgttttgttttttaggatggagtcttgctctgttgtccaggcaggagtgccatggcacgatcttggctcactgcagtctctgcctcttgagttccagtaattctcctgcctcagcctcctgagtagctgggattacaggcatgcaccaccacacccagctaatttttgtatttttagtagagacaggatttcactacattagctaggctggtctcaaactcctgacctcagttgatccacctgccttggcctcccaaagtactagggttacaagtgtgagccaccatgcccagctgagatctgatggttttatacatgtttgacagttgctccttcacatgttgccactctctgtgcggccaccatgtaagtcggacctgcccttctgccatgattgtaagtttcctgaggcctccccagccatgtgaaactgagtcaattaaacctcttccctttaaaaattacccaacctcaggtatttctttatatcagtgtgaaaacagattgctatactttctgataatcatgcttaagcaattggggaattcagactacctgggatcaaaccagggccccacccttagcagtcatgtgaccttggggaggttacttaccttctccgtctcaacaacttctgtaaaatctgtaacatgagattgtttctgagggttaaatgagcatagcacagtggggacactgtcaggcacacactacttgccagatgtcaagtattcatctttattgaaataggactgtggtaagccactttatggctctcgattctgtatgagaaaatcatgcttagtgccttgttagtaaaagaaagaaaatctgaaagtccctgccatggaaggaagaaatagcggggagaaaagggagttggtaagtttcagcatttcagagcttggagggacaagttaggtttctattttatggagaaggaggtggaggcaggatgggtcctaaggtgtcattcaaaacacacagccataactctttattgagagtagagctagggccgcagggattgctgtggtcacgttgcggacaaaaatgaccactcgttggaagacaggagaggagtgtttagttacaaaagcagtcaacaattcaggtgtatctatattcagtcagcaaataaaagttgttcaacttggttgctaatgggacccactctactgaggctttgtatagaactcatagaggaagatggcttcaagcaatgaactaccctgtgcttttcttaggactaaaatctcaggaagttggtgatgaatgaaaaccttagtcccactggcactgcacgaggggccaggagagcagcagcatcataagccacagggtggggcagccaaggcaggggcattctgagctgttggggaggggtggcaggcagggtggggcactgtgaggtgtcggggagggcattgtgaagtgtggggtggggcattctgtgccacatgcctgggctcccacctggggccagtgggcttcagtctgtaggtgactacagaaggaggaggagctccgtctgttctctcttcaggcagttgttgtgtctctcagcgcttgttgggttcacaacctattaaataagccagctggtcttcaccctcccagacaagtcaactcaggggaggcagcagggtgtgggccttgacccgcagccctagccggggccggggccggggccagggatggtgcccggggccgcgctgtgaggtgggcaggcgaggagcgggaagaccatctctgcaagtgcagcatagcctcggcctaggacagtgggagtgtgtggccaaagctgtgagcagaggcacaggtggtggcagacagtagaggcgccccatggggaacatactgacctgttgtgtgcaccctagcgtcagcctcgagtttgaccagcaacaggggtcggtgtgtccctctgaatctgagatctatgaggcaggagctggggacaggatggcaggagcgcccatggctgctgctgtgcagcctgctgaggtgaccgttgaagttggtgaggacctccacatgcaccacattcgtgaccaggagatgcctgaagctttggagtttagcctttctgccaatccagaggcaagcacaatattccagaggaactctcaaacagatgctttggagtttaacccttctgccaatccagaggcaagcacaatattccagaggaactctcaaacagatggtgagacaacattgttttttccgccaagagaaagaataaaagctcttgtttgat

SEQ ID NO: 5010 - protein, 137 aa, Homo sapiens
MGNILTCCVHPSVSLEFDQQQGSVCPSESEIYEAGAGDRMAGAPMAAAVQPAEVTVEVGEDLHMHHIRDQEMPEALEFSLSANPEASTIFQRNSQTDALEFNPSANPEASTIFQRNSQTDGETTLFFPPRERIKALV

SEQ ID NO: 5011 - DNA, 4658 bp, Homo sapiens
gtgaatttccgtttccggtggtgtccaatccgacctgaggagtcacagttgtgagcaaattagaattacttgttattggtaaatagccactatggagactaaggaccagaagaaacaaagaaagaaaaatagtggacccaaagctgcaaagaaaaagaagcggcatctgcaggatctccagctaggagacgaagaagatgcctggaagagaaatcccaaagcttttgcatttcagtctgctgtgtggatggctcgatcctttcacaggactcaggatttgaagacaaaaaagcatcatattccagtggttgatcgaactccactagagcccccaccaatagtggtagtggtgatggggcctccaaagttggaaagagcactttgatacaatgcctcattcggaacttcacccggcagaagttgaccgagatcagaggccctgtgatgatcgtgtcaggtaaaaagctccgactcaccattattgaatgtgggtgtgacattaacatgatgattgatctggctgaagtagcagatctggtactgatgcttatagatgccagctttgggtttgaaatggaaacgtttgagtttctaaacatctgtcaagtacatggctttcctaaaattatgggagttctcacccacctcgacttcttcaaacacaataagcaactgaagaagacaaagaagcgattaaaacacaggttctggacagaagtttacctggttgccaagctgttctgcctttctggaatggtgcatggagaatatcaaaaccaagaaatgcacaatctgggccattttattacagttatgaagtttaggcctctcacatggcagacttctcatccttatatcctggcagacaggtaaaaaggtggaagatttgacaaacccagaggatatccaaacaaacatcagatgtgaccagcagatgttactttacggttatttaagaggagcgcacttgaaaaataaaagccaaattcacatgccaggacgaggtggggcccacccatgagctggtccagagtctcatctccacccactccaccattgatgccaagatggcttcaagtcgagtgatgttgttttctgattccaagccacttgggtcagaggctatagataatcaagggtgagtggtgtcattgagcaaacacgaagtcgggctcatccaaggatgagattttgccagagaaaggacgagcagcaagtcagggagcttaaggtaattatgggaaagtgactatctacaattgcttaggtagaaggagacagattggatttttgtgtgtttggtatttgggataagagggatgtgggtgtgtacttgacatgggttgttctctctctctcttttttttttttttttttttgagagggagtctcactctgtcacccaggctggagttctgtggcacagtcttggctcactgcaacctccgcctgccgggttcaagggattctcctgcctcagcctcccaagtagctggggttacaggtgcctgccaccacgccctgctaatttttgtgattttttttttagtagagacgaggtttcactatgtaggcaaagctggtctcgaactcctgacctcagatgatccacccgcctcagcctcccaaagtgctgggattacaggcgtgagccaccgcacctggcctgtttattctcttaagagagaaaatgaggggattaatggactgtagttctggacaaggtggaaaactcttaaagtggaagtattggggcaagtgctctgacaggctaggatggtgcagtcagtcccttcacccagaaatcagtagaatgttaacagttcagactcaaaccttgtgaaaaacaggtggtggaaaggaaatccctcacagcaactggcaccataatcaagacagaatgtttgcagaataaatggagttacctgctttcagccccaggttgtagctattgtctgccctgatgatatgtgataataatttgtgatcctattgtcttaaaatggggtcactcatctccagtagaattaagtccacagtgaagttgtccccccatccccaaagagataaacatatatgaatgaactcacatgataacaactactgctgcctgggatcatgagagacctgaactgaactgataggaagtgaaaggtggctgagataatgagaatagacccatctgcagaggatcataaaaccagcaaagacaagatcttgtctaagatgccttcacaaactttgtccatgagaactctaaggacttctccagacctgttggctgctgctgtgatctctgcccaagaggagcctctgaccaacatccaaagggcttctggacccactggactcctctggaggtaccttggtctcccgatccatggctgtggttttttactccgtttatcactcctgtgtgtagaatgataattgcacaattgatagtgtgaacacctcttgataaatggtaaatctgagcatatgtatttggctgacatgtcattgtgaaacctcacagcttcagtcagtgtcagcacagctagggagcatgtacctaatgcacatatcactgggcatagtctacaggcacctaataactcaggtaccttaacagtcactaatgagtgtctctccaaggtcaaaacaatggaagactgtagaagatgctattcattaagatatctcaagaatgtggaagactattattcgcttctcatgggacaggactttatagggcacctgaaaaaactcccatgaaaaatcacttttacaaaatgtcaagttatgatatccaagatgaaaccaatgagtcacaacattcacataatacactgtacaaccctgatctcttgactgtcatcaaatgtttcttacctctaaaccaaagtttcattttataatttaatttttctcattttttctgttctcttagcttaagaaaagatcattacaaactttttgtatgtttttcatatatgcttgcaaagggttgtaaaactttattgtgattattcttgctttaagctgaaacttccctaatctttctttagagattgtggcatagcatgttagtttcttttccatatccaattgttttctgtaatgaatacagaaatatgggcactattttgtaactttaaatagacatcatctcaagtctacaagaattatccaaaatggtatttaatgacatttctaggtcttcagacactattaatgtagattgtagcctctaggtcctgaggatttttactggatactggttactgaaactgagctttcttgaattctttttccttccactgtggtttcccgcatttcaacacatcacctatttttgtcctcaaacgttacttaaattttttccacagaattaaattaaatatgaatcatccctcctctgatttttgaaatgaccctttgcttcctatgataatgattcttctggtccgttttgtagttatatgttagagtttgtaaatattcacacattttgcaactgcatataattttctcattttttcctcttcctctaaagctgctgttatttcttttaactttttgtgggaaaaattaaacccatctttcactttgttgatatttataattgaactccttgatttttgcttgaattgcttttcaagttacccacttttagggaagacattatttgggttttgtttagtgtatcaggctttttttagttagttgtatcaagaagtgtagacttttctatacataatatcctttttcccacagtagtttttttttttttaaagtctagccgggtgcagtggctcacgcctgtaatcccagactttgggaggccgaggtgggcagatcacgaagtcaagagaccgagaacatcctggctaacacagtgaaaccccgtctctactaaaaatacaaaaaattagccggacatggtaacgggtgcctgtagtcccagctaatcaggaggctgaggcaggagaatgacatgaactcaggaggcagaggttgcagtgagccgagatcgtgccactgcactccagcctgggtgacagagcaagactccatctcaaaaaaaaaaaaaaaaaaaaagtctgttaaaataaaggtcatcaaaagatcttttcctaaacctttcctttaccagaaatatctctagagtcacatggtcctttctcccttcttgcttttgtaggagtccaaagctaatctgtccctgatccggattgcatgcacctgtgccttttggggcccttctgcattagttcttccttctcttctaacctcaaaaatgtgttttctctgttggctctttccctttaacatagaagtatactcacgcttttgttgaatcttggaataaaagtcttcctttaccacatatctccctttaatactacatctctcttctcagccaaatacttgggaagacaagccctgagtttgtgtgattgttttctcacctccagttcactactttgaacaggcactgtgctaggtgctgctgttatagatatgaaaagaaggcatcatctcctttctaacaactcataggagcagccattcctgattcatacgcaggtctcttgattctcagtgctcacttttgcaagcttcacttaatgccgtgtaaatcaccctattctccaggtcttctttcttcccag

SEQ ID NO: 5012 - protein, 142 aa, Homo sapiens
MIVSGKKLRLTIIECGCDINMMIDLAEVADLVLMLIDASFGFEMETFEFLNICQVHGFPKIMGVLTHLDFFKHNKQLKKTKKRLKHRFWTEVYLVAKLFCLSGMVHGEYQNQEMHNLGHFITVMKFRPLTWQTSHPYILADR

SEQ ID NO: 5013 - DNA, 3479 bp, Homo sapiens
gtggtgtccaatccgacctgaggagtcacagttgtgagcaagttcggtgccgcgggctgggattagaattacttgttattggtaaatagccactatggagactaaggaccagaagaaacaaagaaagaaaaatagtggacccaaagctgcaaagaaaaagaagcggcatctgcaggatctccagctaggagacgaagaagatgcctggaagagaaatcccaaagcttttgcatttcagtctgctgtgtggatggctcgatcctttcacaggactcaggatttgaagacaaaaaagcatcatattccagtggttgatcgaactccactagagcccccaccaatagtggtagtggtgatggggcctccaaagttggaaagagcactttgatacaatgcctcattcggaacttcacccggcagaagttgaccgagatcagaggccctgtgatgatcgtgtcaggtaaaaagctccgactcaccattattgaatgtgggtgtgacattaacatgatgattgatctggctgaagtagcagatctggtactgatgcttatagatgccagctttgggtttgaaatggaaacgtttgagtttctaaacatctgtcaagtacatggctttcctaaaattatgggagttctcacccacctcgacttcttcaaacacaataagcaactgaagaagacaaagaagcgattaaaacacaggttctggacagaagtttacctggttgccaagctgttctgcctttctggaatggtgcatggagaatatcaaaaccaagaaatgcacaatctgggccattttattacagttatgaagtttaggcctctcacatggcagacttctcatccttatatcctggcagacagggtggaagatttgacaaacccagaggatatccaaacaaacatcagatgtgaccagcagatgttactttacggttatttaagaggagcgcacttgaaaaataaaagccaaattcacatgccaggacgaggtggggcccacccatgagctggtccagagtctcatctccacccactccaccattgatgccaagatggcttcaagtcgagtgatgttgttttctgattccaagccacttgggtcagaggctatagataatcaaggggacgagttctcactatgttgcccaggctggcctcgaactcctgggctcaagcaatcctcctgcgttggcctcccaaagtcctgggattacaggtgtaagccactacggctggcctattattgctgtattctaacttattcatctcctatgtgtcagagatggctttggattccccgttctgtgtgctgctgtctggctcctgaacccagctgtagaggtgtgtcaatcccaactggtgaagtactgagaggaagctacacaaaaggcagcaaagtattagtgagtggtgtcattgagcaaacacgaagtcgggctcatccaaggatgagattttgccagagaaaggacgagcagcaagtcagggagcttaaggtaattatgggaaagtgactatctacaattgcttaggtagaaggagacagattggatttttgtgtgtttggtatttgggataagagggatcctgggtgacagagcaagactccatctcaaaaaaaaaaaaaaaaaaaaagtctgttaaaataaaggtcatcaaaagatcttttcctaaacctttcctttaccagaaatatctctagagtcacatggtcctttctcccttcttgcttttgtaggagtccaaagctaatctgtccctgatccggattgcatgcacctgtgccttttggggcccttctgcattagttcttccttctcttctaacctcaaaaatgtgttttctctgttggctctttccctttaacatagaagtatactcacgcttttgttgaatcttggaataaaagtcttcctttaccacatatctccctttaatactacatctctcttctcagccaaatacttgggaagacaagccctgagtttgtgtgattgttttctcacctccagttcactactttgaacaggcactgtgctaggtgctgctgttatagatatgaaaagaaggcatcatctcctttctaacaactcataggagcagccattcctgattcatacgcaggtctcttgattctcagtgctcacttttgcaagcttcacttaatgccgtgtaaatcaccctattctccaggtcttctttcttcccagttctccttactatacacaacttctcaaggcagtcacctccacgcccatggcttcaattgctttctccattctctgagaacaatagaattttaaatgtttttttttcatgtattagttttattttatacaaggtgtctcacttgctgtaaccatagattcaaagttgctccatgaaactaataaatgaaaaatggtgattttttagcatgtaaattttaggaaatttccccagttacacttaatggcttgatttagtatgttatttttgaaaacatatgttgggatgtcacaaatggacttagcctacagagatttatattcaacttttgaccagagagttccattttaatgtgacactgagagtaaaaaactatcttttcctccttacctatttctcttcctacattctcggccaggaggaaggcactgctacatacccagtcttccccagcagagcctgagcagctctgttttccttctacttcccctcttctttcacatctcatgaccaagcacttcctattctgtctcccaaatgatcacagattttttcctccacttttgtcactgccactgcccttagcattactctgcctttagagaaagtctcttaattggtttggttgcttccttcagtccttattatacagaccactacacacacatctgacagagacttttcacctttttatggttcaatgactgaaattcccagaataaaattaaaaccaccccagcatcaaatttgaggtcaaatagaggtggatttgtatcccaggttcatatactatccagcagtatggtctcagaaaactgacctccttaagcctttgtttgtgtatctgcctacactcattgagagttgggactatttcacacatacagtgcctggcatgtagaagggacttaatcaatgttgaaagaaggggaggcattttaaaatccacatcaaaaaaatgttgttctgttcgggagtggtggctcatgcctgcaatcccagcactttgggaggccaaggcaggtggatcacctgaggtcaggagttcgagatcaacctgagcaacatggtgaaaccccatctctactaaaaatacaaacattagctgagcatgggggcgggatcctgtaatctcagctacttgggaggcttaggcacttgaatgagaatcacttggacccaggaggtggaggttgcagtgggcaatgattgtgccactgcctgggcaacagagtgagactctgtctcaaaaaaaaaaaa

SEQ ID NO: 5014 - protein, 189 aa, Homo sapiens; identical to SEQ ID NO: 5008

SEQ ID NO: 5015 - DNA, 3752 bp, Homo sapiens
gtgaatttccgtttccggtggtgtccaatccgacctgaggagtcacagttgtgagcaaattagaattacttgttattggtaaatagccactatggagactaaggaccagaagaaacaaagaaagaaaaatagtggacccaaagctgcaaagaaaaagaagcggcatctgcaggatctccagctaggagacgaagaagatgcctggaagagaaatcccaaagcttttgcatttcagtctgctgtgtggatggctcgatcctttcacaggactcaggatttgaagacaaaaaagcatcatattccagtggttgatcgaactccactagagcccccaccaatagtggtagtggtgatggggcctccaaagttggaaagagcactttgatacaatgcctcattcggaacttcacccggcagaagttgaccgagatcagaggccctgtgatgatcgtgtcaggtaaaaagctccgactcaccattattgaatgtgggtgtgacattaacatgatgattgatctggctgaagtagcagatctggtactgatgcttatagatgccagctttgggtttgaaatggaaacgtttgagtttctaaacatctgtcaagtacatggctttcctaaaattatgggagttctcacccacctcgacttcttcaaacacaataagcaactgaagaagacaaagaagcgattaaaacacaggttctggacagaagtttacctggttgccaagctgttctgcctttctggaatggtgcatggagaatatcaaaaccaagaaatgcacaatctgggccattttattacagttatgaagtttaggcctctcacatggcagacttctcatccttatatcctggcagacagggtggaagatttgacaaacccagaggatatccaaacaaacatcagatgtgaccagcagatgttactttacggttatttaagaggagcgcacttgaaaaataaaagccaaattcacatgccaggacgaggtggggcccacccatgagctggtccagagtctcatctccacccactccaccattgatgccaagatggcttcaagtcgagtgatgttgttttctgattccaagccacttgggtcagaggctatagataatcaaggggacgagttctcactatgttgcccaggctggcctcgaactcctgggctcaagcaatcctcctgcgttggcctcccaaagtcctgggattacaggtgtaagccactacggctggcctattattgctgtattctaacttattcatctcctatgtgtcagagatggctttggattccccgttctgtgtgctgctgtctggctcctgaacccagctgtagaggtgtgtcaatcccaactggtgaagtactgagaggaagctacacaaaaggcagcaaagtattagtgagtggtgtcattgagcaaacacgaagtcgggctcatccaaggatgagattttgccagagaaaggacgagcagcaagtcagggagcttaaggatggagtcttgctctgttgtccaggcaggagtgccatggcacgatcttggctcactgcagtctctgcctcttgagttccagtaattctcctgcctcagcctcctgagtagctgggattacaggcatgcaccaccacacccagctaatttttgtatttttagtagagacaggatttcactacattagctaggctggtctcaaactcctgacctcagttgatccacctgccttggcctcccaaagtactagggttacaagtgtgagccaccatgcccagctgagatctgatggttttatacatgtttgacagttgctccttcacatgttgccactctctgtgcggccaccatgtaagtcggacctgcccttctgccatgattgtaagtttcctgaggcctccccagccatgtgaaactgagtcaattaaacctcttccctttaaaaattacccaacctcaggtatttctttatatcagtgtgaaaacagattgctatactttctgataatcatgcttaagcaattggggaattcagactacctgggatcaaaccagggccccacccttagcagtcatgtgaccttggggaggttacttaccttctccgtctcaacaacttctgtaaaatctgtaacatgagattgtttctgagggttaaatgagcatagcacagtggggacactgtcaggcacacactacttgccagatgtcaagtattcatctttattgaaataggactgtggtaagccactttatggctctcgattctgtatgagaaaatcatgcttagtgccttgttagtaaaagaaagaaaatctgaaagtccctgccatggaaggaagaaatagcggggagaaaagggagttggtaagtttcagcatttcagagcttggagggacaagttaggtttctattttatggagaaggaggtggaggcaggatgggtcctaaggtgtcattcaaaacacacagccataactctttattgagagtagagctagggccgcagggattgctgtggtcacgttgcggacaaaaatgaccactcgttggaagacaggagaggagtgtttagttacaaaagcagtcaacaattcaggtgtatctatattcagtcagcaaataaaagttgttcaacttggttgctaatgggacccactctactgaggctttgtatagaactcatagaggaagatggcttcaagcaatgaactaccctgtgcttttcttaggactaaaatctcaggaagttggtgatgaatgaaaaccttagtcccactggcactgcacgaggggccaggagagcagcagcatcataagccacagggtggggcagccaaggcaggggcattctgagctgttggggaggggtggcaggcagggtggggcactgtgaggtgtcggggagggcattgtgaagtgtggggtggggcattctgtgccacatgcctgggctcccacctggggccagtgggcttcagtctgtaggtgactacagaaggaggaggagctccgtctgttctctcttcaggcagttgttgtgtctctcagcgcttgttgggttcacaacctattaaataagccagctggtcttcaccctcccagacaagtcaactcaggggaggcagcagggtgtgggccttgacccgcagccctagccggggccggggccggggccagggatggtgcccggggccgcgctgtgaggtgggcaggcgaggagcgggaagaccatctctgcaagtgcagcatagcctcggcctaggacagtgggagtgtgtggccaaagctgtgagcagaggcacaggtggtggcagacagtagaggcgccccatggggaacatactgacctgttgtgtgcaccctagcgtcagcctcgagtttgaccagcaacaggggtcggtgtgtccctctgaatctgagatctatgaggcaggagctggggacaggatggcaggagcgcccatggctgctgctgtgcagcctgctgaggtgaccgttgaagttggtgaggacctccacatgcaccacattcgtgaccaggagatgcctgaagctttggagtttagcctttctgccaatccagaggcaagcacaatattccagaggaactctcaaacagatgctttggagtttaacccttctgccaatccagaggcaagcacaatattccagaggaactctcaaacagatggtgagacaacattgttttttccgccaagagaaagaataaaagctcttgtttgat

SEQ ID NO: 5016 - protein, 189 aa, Homo sapiens; identical to SEQ ID NO: 5008

SEQ ID NO: 5017 - DNA, 4221 bp, Homo sapiens
aggagtcacagttgtgagcaagttcggtgccgcgggctggggtaggcggcagtggggtccctggctttggggcactgggaagatcgcgagtgggaaggtcctcccgcggtcctccgggtcatctttcctcctgaggagcagcatatttcgcatctgccggagattagaattacttgttattggtaaatagccactatggagactaaggaccagaagaaacaaagaaagaaaaatagtggacccaaagctgcaaagaaaaagaagcggcatctgcaggatctccagctaggagacgaagaagatgcctggaagagaaatcccaaagcttttgcatttcagtctgctgtgtggatggctcgatcctttcacaggactcaggatttgaagacaaaaaagcatcatattccagtggttgatcgaactccactagagcccccaccaatagtggtagtggtgatggggcctccaaagttggaaagagcactttgatacaatgcctcattcggaacttcacccggcagaagttgaccgagatcagaggccctgtgatgatcgtgtcaggtaaaaagctccgactcaccattattgaatgtgggtgtgacattaacatgatgattgatctggctgaagtagcagatctggtactgatgcttatagatgccagctttgggtttgaaatggaaacgtttgagtttctaaacatctgtcaagtacatggctttcctaaaattatgggagttctcacccacctcgacttcttcaaacacaataagcaactgaagaagacaaagaagcgattaaaacacaggttctggacagaagtttacctggttgccaagctgttctgcctttctggaatggtgcatggagaatatcaaaaccaagaaatgcacaatctgggccattttattacagttatgaagtttaggcctctcacatggcagacttctcatccttatatcctggcagacaggtaaaaaggtggaagatttgacaaacccagaggatatccaaacaaacatcagatgtgaccagcagatgttactttacggttatttaagaggagcgcacttgaaaaataaaagccaaattcacatgccaggacgaggtggggcccacccatgagctggtccagagtctcatctccacccactccaccattgatgccaagatggcttcaagtcgagtgatgttgttttctgattccaagccacttgggtcagaggctatagataatcaagggtgagtggtgtcattgagcaaacacgaagtcgggctcatccaaggatgagattttgccagagaaaggacgagcagcaagtcagggagcttaaggtaattatgggaaagtgactatctacaattgcttaggtagaaggagacagattggatttttgtgtgtttggtatttgggataagagggatgtgggtgtgtacttgacatgggttgttctctctctctcttttttttttttttttttttgagagggagtctcactctgtcacccaggctggagttctgtggcacagtcttggctcactgcaacctccgcctgccgggttcaagggattctcctgcctcagcctcccaagtagctggggttacaggtgcctgccaccacgccctgctaatttttgtgattttttttttagtagagacgaggtttcactatgtaggcaaagctggtctcgaactcctgacctcagatgatccacccgcctcagcctcccaaagtgctgggattacaggcgtgagccaccgcacctggcctgtttattctcttaagagagaaaatgaggggattaatggactgtagttctggacaaggtggaaaactcttaaagtggaagtattggggcaagtgctctgacaggctaggatggtgcagtcagtcccttcacccagaaatcagtagaatgttaacagttcagactcaaaccttgtgaaaaacaggtggtggaaaggaaatccctcacagcaactggcaccataatcaagacagaatgtttgcagaataaatggagttacctgctttcagccccaggttgtagctattgtctgccctgatgatatgtgataataatttgtgatcctattgtcttaaaatggggtcactcatctccagtagaattaagtccacagtgaagttgtccccccatccccaaagagataaacatatatgaatgaactcacatgataacaactactgctgcctgggatcatgagagacctgaactgaactgataggaagtgaaaggtggctgagataatgagaatagacccatctgcagaggatcataaaaccagcaaagacaagatcttgtctaagatgccttcacaaactttgtccatgagaactctaaggacttctccagacctgttggctgctgctgtgatctctgcccaagaggagcctctgaccaacatccaaagggcttctggacccactggactcctctggaggtaccttggtctcccgatccatggctgtggttttttactccgtttatcactcctgtgtgtagaatgataattgcacaattgatagtgtgaacacctcttgataaatggtaaatctgagcatatgtatttggctgacatgtcattgtgaaacctcacagcttcagtcagtgtcagcacagctagggagcatgtacctaatgcacatatcactgggcatagtctacaggcacctaataactcaggtaccttaacagtcactaatgagtgtctctccaaggtcaaaacaatggaagactgtagaagatgctattcattaagatatctcaagaatgtggaagactattattcgcttctcatgggacaggactttatagggcacctgaaaaaactcccatgaaaaatcacttttacaaaatgtcaagttatgatatccaagatgaaaccaatgagtcacaacattcacataatacactgtacaaccctgatctcttgactgtcatcaaatgtttcttacctctaaaccaaagtttcattttataatttaatttttctcattttttctgttctcttagcttaagaaaagatcattacaaactttttgtatgtttttcatatatgcttgcaaagggttgtaaaactttattgtgattattcttgctttaagctgaaacttccctaatctttctttagagattgtggcatagcatgttagtttcttttccatatccaattgttttctgtaatgaatacagaaatatgggcactattttgtaactttaaatagacatcatctcaagtctacaagaattatccaaaatggtatttaatgacatttctaggtcttcagacactattaatgtagattgtagcctctaggtcctgaggatttttactggatactggttactgaaactgagctttcttgaattctttttccttccactgtggtttcccgcatttcaacacatcacctatttttgtcctcaaacgttacttaaattttttccacagaattaaattaaatatgaatcatccctcctctgatttttgaaatgaccctttgcttcctatgataatgattcttctggtccgttttgtagttatatgttagagtttgtaaatattcacacattttgcaactgcatataattttctcattttttcctcttcctctaaagctgctgttatttcttttaactttttgtgggaaaaattaaacccatctttcactttgttgatatttataattgaactccttgatttttgcttgaattgcttttcaagttacccacttttagggaagacattatttgggttttgtttagtgtatcaggctttttttagttagttgtatcaagaagtgtagacttttctatacataatatcctttttcccacagtagtttttttttttttaaagtctagccgggtgcagtggctcacgcctgtaatcccagactttgggaggccgaggtgggcagatcacgaagtcaagagaccgagaacatcctggctaacacagtgaaaccccgtctctactaaaaatacaaaaaattagccggacatggtaacgggtgcctgtagtcccagctaatcaggaggctgaggcaggagaatgacatgaactcaggaggcagaggttgcagtgagccgagatcgtgccactgcactccagcctgggtgacagagcaagactccatctcaaaaaaaaaaaaaaaaaaaaagtctgttaaaataaaggtcatcaaaagatctttt

SEQ ID NO: 5018 - protein, 142 aa, Homo sapiens; identical to SEQ ID NO: 5012

SEQ ID NO: 5019 - DNA, 5520 bp, Homo sapiens
gtgaatttccgtttccggtggtgtccaatccgacctgaggagtcacagttgtgagcaaattagaattacttgttattggtaaatagccactatggagactaaggaccagaagaaacaaagaaagaaaaatagtggacccaaagctgcaaagaaaaagaagcggcatctgcaggatctccagctaggagacgaagaagatgcctggaagagaaatcccaaagcttttgcatttcagtctgctgtgtggatggctcgatcctttcacaggactcaggatttgaagacaaaaaagcatcatattccagtggttgatcgaactccactagagcccccaccaatagtggtagtggtgatggggcctccaaagttggaaagagcactttgatacaatgcctcattcggaacttcacccggcagaagttgaccgagatcagaggccctgtgatgatcgtgtcaggtaaaaagctccgactcaccattattgaatgtgggtgtgacattaacatgatgattgatctggctgaagtagcagatctggtactgatgcttatagatgccagctttgggtttgaaatggaaacgtttgagtttctaaacatctgtcaagtacatggctttcctaaaattatgggagttctcacccacctcgacttcttcaaacacaataagcaactgaagaagacaaagaagcgattaaaacacaggttctggacagaagtttacctggttgccaagctgttctgcctttctggaatggtgcatggagaatatcaaaaccaagaaatgcacaatctgggccattttattacagttatgaagtttaggcctctcacatggcagacttctcatccttatatcctggcagacagggtggaagatttgacaaacccagaggatatccaaacaaacatcagatgtgaccagcagatgttactttacggttatttaagaggagcgcacttgaaaaataaaagccaaattcacatgccaggacgaggtggggcccacccatgagctggtccagagtctcatctccacccactccaccattgatgccaagatggcttcaagtcgagtgatgttgttttctgattccaagccacttgggtcagaggctatagataatcaaggggacgagttctcactatgttgcccaggctggcctcgaactcctgggctcaagcaatcctcctgcgttggcctcccaaagtcctgggattacaggtgtaagccactacggctggcctattattgctgtattctaacttattcatctcctatgtgtcagagatggctttggattccccgttctgtgtgctgctgtctggctcctgaacccagctgtagaggtgtgtcaatcccaactggtgaagtactgagaggaagctacacaaaaggcagcaaagtattagtgagtggtgtcattgagcaaacacgaagtcgggctcatccaaggatgagattttgccagagaaaggacgagcagcaagtcagggagcttaaggatggagtcttgctctgttgtccaggcaggagtgccatggcacgatcttggctcactgcagtctctgcctcttgagttccagtaattctcctgcctcagcctcctgagtagctgggattacaggcatgcaccaccacacccagctaatttttgtatttttagtagagacaggatttcactacattagctaggctggtctcaaactcctgacctcagttgatccacctgccttggcctcccaaagtactagggttacaagtgtgagccaccatgcccagctgagatctgatggttttatacatgtttgacagttgctccttcacatgttgccactctctgtgcggccaccatgtaagtcggacctgcccttctgccatgattgtaagtttcctgaggcctccccagccatgtgaaactgagtcaattaaacctcttccctttaaaaattacccaacctcaggtatttctttatatcagtgtgaaaacagattgctatactttctgataatcatgcttaagcaattggggaattcagactacctgggatcaaaccagggccccacccttagcagtcatgtgaccttggggaggttacttaccttctccgtctcaacaacttctgtaaaatctgtaacatgagattgtttctgagggttaaatgagcatagcacagtggggacactgtcaggcacacactacttgccagatgtcaagtattcatctttattgaaataggactgtggtaagccactttatggctctcgattctgtatgagaaaatcatgcttagtgccttgttagtaaaagaaagaaaatctgaaagtccctgccatggaaggaagaaatagcggggagaaaagggagttggtaagtttcagcatttcagagcttggagggacaagttaggtttctattttatggagaaggaggtggaggcaggatgggtcctaaggtgtcattcaaaacacacagccataactctttattgagagtagagctagggccgcagggattgctgtggtcacgttgcggacaaaaatgaccactcgttggaagacaggagaggagtgtttagttacaaaagcagtcaacaattcaggtgtatctatattcagtcagcaaataaaagttgttcaacttggttgctaatgggacccactctactgaggctttgtatagaactcatagaggaagatggcttcaagcaatgaactaccctgtgcttttcttaggactaaaatctcaggaagttggtgatgaatgaaaaccttagtcccactggcactgcacgaggggccaggagagcagcagcatcataagccacagggtggggcagccaaggcaggggcattctgagctgttggggaggggtggcaggcagggtggggcactgtgaggtgtcggggagggcattgtgaagtgtggggtggggcattctgtgccacatgcctgggctcccacctggggccagtgggcttcagtctgtaggtgactacagaaggaggaggagctccgtctgttctctcttcaggcagttgttgtgtctctcagcgcttgttgggttcacaacctattaaataagccagctggtcttcaccctcccagacaagtcaactcaggggaggcagcagggtgtgggccttgacccgcagccctagccggggccggggccggggccagggatggtgcccggggccgcgctgtgaggtgggcaggcgaggagcgggaagaccatctctgcaagtgcagcatagcctcggcctaggacagtgggagtgtgtggccaaagctgtgagcagaggcacaggtggtggcagacagtagaggcgccccatggggaacatactgacctgttgtgtgcaccctagcgtcagcctcgagtttgaccagcaacaggggtcggtgtgtccctctgaatctgagatctatgaggcaggagctggggacaggatggcaggagcgcccatggctgctgctgtgcagcctgctgaggtgaccgttgaagttggtgaggacctccacatgcaccacattcgtgaccaggagatgcctgaaggtaaggaggtgataggtgccatctaccctcggtttgcctctggctgctgctgtccccaaggttccctttacggcatcccccactttgagctcctttctgcttgtagccagctttcccgggggctggccaggaacaaaagctggctctgccttgaattcccaccccttagtctttcctcaccgagtccagtcagtttcttttcgcctcccctcccaatcgcccagttcttgctctctcatctcattctcccaggctggcatgggaccatttatttatggctcttgtcaaataagcagcagttgaataaatgagttgataaatttttataaatgattacatcttttttcttttctccctctatacatatagctttggagtttagcctttctgccaatccagaggcaagcacaatattccagaggaactctcaaacagatggtgagacaacagtgtctgtagctctgtttattatcctgtgggactttgtttaggcttctttgagctattctcttccttttctcaataaaaactcaaatatcccaacttttcagtacccatcttattttttctttgtacctatccagatggtacctaagtgaaggaaccaggtaagtgcctaattgtttcctttgttaaagtagccaaatctcaggacagttcctattcaaatatttgggggtttcttatttaaaatcagaatggaggttgccacgggagaggctatatggtattcttaatgggctgctttaagtcaccttgatagaagctgcttagtttcttctaactgtaatttgaacacagaaggaaaaagaaaaaagagtgcttaaaataattgtgaaaggtgtgaaatgtcacagccggggctgcagaaaaatggttgtgtgtgtgtgtttggggtttctcaaaggagtttacctatgaggctctgattactttaaaattcttactttaacagaaaatgtgtctccagatttatgctggtgacttaacagactttatttacctccttgttctaaaagagaggtggggattggttcatggtcaacactttcaaaagacatgaaatgtcaatgtagacttttaatatgtaatataaagattgcaggttaaaatgtcagaccttccctgtaagagtgtttgttgccgtggctccccctttgtcccttcccctcctgacaatagcatcttgttcaaagataagaaagttacagttttggctgggcttggtggctcacgcctgtaatcccagcactttgggaggccgtggcaggcagatcacctgaggtcaggagttcgagaccagcctggccaacatggtgaaacgctgtctctactaaaaaaaaaatacaaaaattagctgggtgtagtggcgcatgactgtagttccacctactcacaaggctgaggcaggagaattgcctggacctgggaggtggaggttgcagtgagcagagatcacgccaatgcactccagcctgggtgacagagcgagactccgtctcacaaaaaaaaaaaaggaaagaaagttggagttttttagtctctacactgctggcagaggcaggggatgggagctggtagaaaagagaaaacaattagttggtttgcctctaaaattttgcaaagagatgaatctaagtaaaagtaattctgggtaataatatggttcttgaataaaaactgaaattttcaaaatagaaaacattgcatcataaacatattaaatccagttggcttattggtttcatttaaatgccagagatttcattactgtagaggaaatgtcttatagctcttctatttaaactttggttgggctcttaatttttaaagaggtaggataattaagactcattatgagtgtgactttgtaacttggaagtactatcttcacatttcaagatatttaaggattgctttagaataaacaaatgtattatgtgaattaattgattgtacc

SEQ ID NO: 5020 - protein, 189 aa, Homo sapiens; identical to SEQ ID NO: 5008

SEQ ID NO: 5021 - DNA, 4120 bp, Homo sapiens
gtggtgtccaatccgacctgaggagtcacagttgtgagcaagttcggtgccgcgggctgggattagaattacttgttattggtaaatagccactatggagactaaggaccagaagaaacaaagaaagaaaaatagtggacccaaagctgcaaagaaaaagaagcggcatctgcaggatctccagctaggagacgaagaagatgcctggaagagaaatcccaaagcttttgcatttcagtctgctgtgtggatggctcgatcctttcacaggactcaggatttgaagacaaaaaagcatcatattccagtggttgatcgaactccactagagcccccaccaatagtggtagtggtgatggggcctccaaagttggaaagagcactttgatacaatgcctcattcggaacttcacccggcagaagttgaccgagatcagaggccctgtgatgatcgtgtcaggtaaaaagctccgactcaccattattgaatgtgggtgtgacattaacatgatgattgatctggctgaagtagcagatctggtactgatgcttatagatgccagctttgggtttgaaatggaaacgtttgagtttctaaacatctgtcaagtacatggctttcctaaaattatgggagttctcacccacctcgacttcttcaaacacaataagcaactgaagaagacaaagaagcgattaaaacacaggttctggacagaagtttacctggttgccaagctgttctgcctttctggaatggtgcatggagaatatcaaaaccaagaaatgcacaatctgggccattttattacagttatgaagtttaggcctctcacatggcagacttctcatccttatatcctggcagacaggtaaaaaggtggaagatttgacaaacccagaggatatccaaacaaacatcagatgtgaccagcagatgttactttacggttatttaagaggagcgcacttgaaaaataaaagccaaattcacatgccaggacgaggtggggcccacccatgagctggtccagagtctcatctccacccactccaccattgatgccaagatggcttcaagtcgagtgatgttgttttctgattccaagccacttgggtcagaggctatagataatcaagggtgagtggtgtcattgagcaaacacgaagtcgggctcatccaaggatgagattttgccagagaaaggacgagcagcaagtcagggagcttaaggtaattatgggaaagtgactatctacaattgcttaggtagaaggagacagattggatttttgtgtgtttggtatttgggataagagggatgtgggtgtgtacttgacatgggttgttctctctctctcttttttttttttttttttttgagagggagtctcactctgtcacccaggctggagttctgtggcacagtcttggctcactgcaacctccgcctgccgggttcaagggattctcctgcctcagcctcccaagtagctggggttacaggtgcctgccaccacgccctgctaatttttgtgattttttttttagtagagacgaggtttcactatgtaggcaaagctggtctcgaactcctgacctcagatgatccacccgcctcagcctcccaaagtgctgggattacaggcgtgagccaccgcacctggcctgtttattctcttaagagagaaaatgaggggattaatggactgtagttctggacaaggtggaaaactcttaaagtggaagtattggggcaagtgctctgacaggctaggatggtgcagtcagtcccttcacccagaaatcagtagaatgttaacagttcagactcaaaccttgtgaaaaacaggtggtggaaaggaaatccctcacagcaactggcaccataatcaagacagaatgtttgcagaataaatggagttacctgctttcagccccaggttgtagctattgtctgccctgatgatatgtgataataatttgtgatcctattgtcttaaaatggggtcactcatctccagtagaattaagtccacagtgaagttgtccccccatccccaaagagataaacatatatgaatgaactcacatgataacaactactgctgcctgggatcatgagagacctgaactgaactgataggaagtgaaaggtggctgagataatgagaatagacccatctgcagaggatcataaaaccagcaaagacaagatcttgtctaagatgccttcacaaactttgtccatgagaactctaaggacttctccagacctgttggctgctgctgtgatctctgcccaagaggagcctctgaccaacatccaaagggcttctggacccactggactcctctggaggtaccttggtctcccgatccatggctgtggttttttactccgtttatcactcctgtgtgtagaatgataattgcacaattgatagtgtgaacacctcttgataaatggtaaatctgagcatatgtatttggctgacatgtcattgtgaaacctcacagcttcagtcagtgtcagcacagctagggagcatgtacctaatgcacatatcactgggcatagtctacaggcacctaataactcaggtaccttaacagtcactaatgagtgtctctccaaggtcaaaacaatggaagactgtagaagatgctattcattaagatatctcaagaatgtggaagactattattcgcttctcatgggacaggactttatagggcacctgaaaaaactcccatgaaaaatcacttttacaaaatgtcaagttatgatatccaagatgaaaccaatgagtcacaacattcacataatacactgtacaaccctgatctcttgactgtcatcaaatgtttcttacctctaaaccaaagtttcattttataatttaatttttctcattttttctgttctcttagcttaagaaaagatcattacaaactttttgtatgtttttcatatatgcttgcaaagggttgtaaaactttattgtgattattcttgctttaagctgaaacttccctaatctttctttagagattgtggcatagcatgttagtttcttttccatatccaattgttttctgtaatgaatacagaaatatgggcactattttgtaactttaaatagacatcatctcaagtctacaagaattatccaaaatggtatttaatgacatttctaggtcttcagacactattaatgtagattgtagcctctaggtcctgaggatttttactggatactggttactgaaactgagctttcttgaattctttttccttccactgtggtttcccgcatttcaacacatcacctatttttgtcctcaaacgttacttaaattttttccacagaattaaattaaatatgaatcatccctcctctgatttttgaaatgaccctttgcttcctatgataatgattcttctggtccgttttgtagttatatgttagagtttgtaaatattcacacattttgcaactgcatataattttctcattttttcctcttcctctaaagctgctgttatttcttttaactttttgtgggaaaaattaaacccatctttcactttgttgatatttataattgaactccttgatttttgcttgaattgcttttcaagttacccacttttagggaagacattatttgggttttgtttagtgtatcaggctttttttagttagttgtatcaagaagtgtagacttttctatacataatatcctttttcccacagtagtttttttttttttaaagtctagccgggtgcagtggctcacgcctgtaatcccagactttgggaggccgaggtgggcagatcacgaagtcaagagaccgagaacatcctggctaacacagtgaaaccccgtctctactaaaaatacaaaaaattagccggacatggtaacgggtgcctgtagtcccagctaatcaggaggctgaggcaggagaatgacatgaactcaggaggcagaggttgcagtgagccgagatcgtgccactgcactccagcctgggtgacagagcaagactccatctcaaaaaaaaaaaaaaaaaaaaagtctgttaaaataaaggtcatcaaaagatctttt

SEQ ID NO: 5022 - protein, 142 aa, Homo sapiens; identical to SEQ ID NO: 5012

SEQ ID NO: 5023 - DNA, 1444 bp, Homo sapiens
atgcggattaaatatccactatccgtgtttttccgagtcttacagcagaaaggtctgcctgcattttttggctttgggctcttctccactgtcaccattagcaaccttgcatcccatggacctgtcttctatggccacatgtctctgtggctctttccttcccccttctcttccactgttaaggactcatgtgcttacttagtcctgaatggagacaccgtcatcatccacatagcccactgtcgtaatccatacaggctgctacaaggaaatgcattagaccaggtagcttataaacaatagaactttgtttctcacagtcctggaggctgagaagtgcaagatcaaggtgccggcagtcttggtgtctggtgaaggcctgctttctcatagaggcttccttcttgctgtgtcttcacatggggagaggaacaaacaagctcccttgtgcctttaataaggtgctaatcccagtcatgagggcagagtctcatgtaaggcttaacctcctaatacatcaccttgagggttaggattttaacacatgaacattgacggaacacaacgttcattccatagcaccagggtagtctcctcatgtgaaggtctttacctgagtcacatgcatgatgtaccattttcatgtaaggttctaggaatctgtggacatctttggggggggccgttattttgctgatcacatattacatatattttaatattctagactagtatgaaaacaatgccacttccattgctttatatatgtatatatatatatacacattgtctaatgctataattaaaaaaaagttgtagacacaaatatacccatttaaaaaaaaacccattttttgctattttactttatactgccaactcctttttcctgaaactgcttcaactctggaattcttttttgctgttagttttattttattgaaatattcatgaacgagcatacacttgtatatggatttaaaattcacagtaaagttctcatgaattcatctgtgaataacattttatagacaaaatgtctgcactaggacaagagaaagatgtataattcccttgttctaaggtaccgccattcattgttattattttaaaatacgagtgttgactgatgttaaaacacaaaatggggccgggagtggtggctcccgcctgtaatcccaacactttgggagatcgaggtgggtggatcacctgaggtcaggagtttgagaccagcttggccaacatggtgaaaccccgtctctactaaaaatacaaaaattagctgggcatgtgttgcacgcccgtaatcttagctacccgggaaactgagtcaggagaattgctggaacctgggaggcggaggctgcagtgagccgagatcacaccagtgcactccagcctgggtgacagagcgagactctgttcttccccccacccccaa

SEQ ID NO: 5024 - protein, 100 aa, Homo sapiens
MRIKYPLSVFFRVLQQKGLPAFFGFGLFSTVTISNLASHGPVFYGHMSLWLFPSPFSSTVKDSCAYLVLNGDTVIIHIAHCRNPYRLLQGNALDQVAYKQ

SEQ ID NO: 5025 - DNA, 1414 bp, Homo sapiens
atggcttcaagtcgagtgatgttgttttctgattccaagccacttgggtcagaggctatagataatcaaggcaaccttgcatcccatggacctgtcttctatggccacatgtctctgtggctctttccttcccccttctcttccactgttaaggactcatgtgcttacttagtcctgaatggagacaccgtcatcatccacatagcccactgtcgtaatccatacaggctgctacaaggaaatgcattagaccaggtagcttataaacaatagaactttgtttctcacagtcctggaggctgagaagtgcaagatcaaggtgccggcagtcttggtgtctggtgaaggcctgctttctcatagaggcttccttcttgctgtgtcttcacatggggagaggaacaaacaagctcccttgtgcctttaataaggtgctaatcccagtcatgagggcagagtctcatgtaaggcttaacctcctaatacatcaccttgagggttaggattttaacacatgaacattgacggaacacaacgttcattccatagcaccagggtagtctcctcatgtgaaggtctttacctgagtcacatgcatgatgtaccattttcatgtaaggttctaggaatctgtggacatctttggggggcgccgttattttgctgatcacatattacatatattttaatattctagactagtatgaaaacaatgccacttccattgctttatatatgtatatatatatatacacattgtctaatgctataattaaaaaaaagttgtagacacaaatatacccatttaaaaaaaaacccattttttgctattttactttatactgccaactcctttttcctgaaactgcttcaactctggaattcttttttgctgttagttttattttattgaaatattcatgaacgagcatacacttgtatatggatttaaaattcacagtaaagttctcatgaattcatctgtgaataacattttatagacaaaatgtctgcactaggacaagagaaagatgtataattcccttgttctaaggtaccgccattcattgttattattttaaaatacgagtgttgactgatgttaaaacacaaaatggggccgggagtggtggctcccgcctgtaatcccaacactttgggagatcgaggtgggtggatcacctgaggtcaggagtttgagaccagcttggccaacatggtgaaaccccgtctctactaaaaatacaaaaattagctgggcatgtgttgcacgcccgtaatcttagctacccgggaaactgagtcaggagaattgctggaacctgggaggcggaggctgcagtgagccgagatcacaccagtgcactccagcctgggtgacagagcgagactctgttcttccccccacccccca

SEQ ID NO: 5026 - protein, 90 aa, Homo sapiens
MASSRVMLFSDSKPLGSEAIDNQGNLASHGPVFYGHMSLWLFPSPFSSTVKDSCAYLVLNGDTVIIHIAHCRNPYRLLQGNALDQVAYKQ

SEQ ID NO: 5027 - DNA, 2356 bp, Homo sapiens
tccaatatggctgagatccttatcaaaaggagaaattcagtcacagggacagacaggtacagagagaagatgatgtcaagagacaacgggagaatgccacatgaaggtggaggattggagtaatgcatctacaagccaagaaaaccttgttgggagtttgattagacggctgagaaagacagcaaatctacagggtttgtcaaagataagatcgttgtcatggcatgaaaaggatgacctttccagtctgcaatacctgcttgaccactaagaccaaacagctcaaattaaaggtaacaaattccgcagaggcaattgttcaacacaggaaaaagaaaccactttaaggattttaaactggaagagattttacataagctgttttaaacaaaaccattggatgacctggagtaacagtgtcggaaactcagctgagctggatagagaactgagctgcccgttgttggagaagttgattaaagcagcagccgaagatcgaagtaacagtcaagactgtaatcacttactgcaatagtataagcaagaggccaaaaccaaagaaactgccaactcacccaggtcttctaaattccccagaaaggtgcactagtggagggtcagtgaatcaggacagacatgggggtcagctcacgattgaggaagccccaaacaaaaatctccagtagtattatgaaccctggagcaggaggttggagtgagacaaggagagctaggagtagaagagtatggagtcggaggagggaacggtttcttaaggtctcctcccactctactcttaagaaagcttcagtagaagcacctgaagaaaactccagcaggaagccctcagataaagaaacttctgaatgaagacacctaggctaggaatgcaaatatgtttaagagcatgggccattaggggaatctgagttccagaatgcaattctctttaaagattgcaatgcactgggtatgccccaagtctggggagggcaactttcctcggaggggtttgccagataaagcctttgtcattgcctgtggttgggcctgaaatatcaaacatagatttttggccaggactcctcagcaggatctagtcagggccttcacaaagtacattcagaatgacaattgacccaccagaaagccatcatgccaccacttgatattttaaatgaaaagacccaccaacatatctgatatccatatctgatacccagtagaattggaatgctgctatcaccactgtcactattgtcactaccacacctgcctctagaaacccagcaatctggaggatggaccctggataatgttgcaggcaaacctcatttctctacaactgtgctttccaccaacagtcgattaaaggaagacgaagatcgagtgtgtgtggatgatacagcaaataaaccttcttctagttcttaaagattatggttttcagtgtttagtgagcatccgtgttcatctttaaaggatagaaaaatgcaggaggcatcttgtatccatgaagatactaaaacacggatttcctcaggaaattgatcactcaagcatccataatcttagtagactgcccttatagtcgtattgcagaatgtgtgatctgccatctactgagggctcatttttccctctcctctctcatccaagattggtgatagtttcaaatttttctcccactattatgtagaataatttccaaacttgacactcaattgaatcatggtgtccaggaaaatagataaaataaatatgacttcatataccagaagtcatattcctttgaatacaatcagggccataaatggcacttgcttctataacacaaagtgctattataattatatacatgattttttaaataattaagtaacttggaaccagtttctattgcaataattataagaaacaaagacctccaactgaatgaacccctctgaaatattttaataaactctgaggagtactatttgtcaagcaaagaaatactgaattaaggtaaatgccagcttaggatgaaaagaacagcaacagtgcctaccttcattacctcagcctctccctggctaagataatcacttaatcttttatgcctttgctaaaacctcattagtaaaaaggagacctgcctactaagcataaggttaaggctttaatggactttagaaatcatttacttttatgactcaaagcactgaagtgcaaattctttttatttgaatatttgagggcattaaatgagcatttttaatggatttcaattgtcaggataaaataaaatttctcaaggggaatctgaattttaacaaacattaaaatcaaagaagtaaaaagatgaataaatgga

SEQ ID NO: 5028 - protein, 56 aa, Homo sapiens
MKVEDWSNASTSQENLVGSLIRRLRKTANLQGLSKIRSLSWHEKDDLSSLQYLLDH

SEQ ID NO: 5029 - DNA, 2356 bp, Homo sapiens; identical to SEQ ID NO: 5027

SEQ ID NO: 5030 - protein, 56 aa, Homo sapiens; identical to SEQ ID NO: 5028

SEQ ID NO: 5031 - DNA, 633 bp, Homo sapiens
atggactcacgaattgttatattcaaagtggagggcgtcaatcaagaaaatgcccccttgccccggaggcgagtggagccgcacagagccgaggccatacgggccagcagtacggactgcttcaatagaaaacacgtgcaaaaccagagagccagactgcgcacagctgcgaccctcaagagccagcagaaaagacacggagcggcccccactggattgaagactgcacagcctctgcccggcgctgtaggacccgggcctccccttgattgctgctcgcagcggcttctgccagcatcctcgcggaagtggcttgaggagcgcacccaccgaggaggcgtcttaggccagcggcctctgctcccgccgagtcccgctgctccccgcctggaaacagctgctgccaccccgggcccaggcctggacggcgcccccgaatttcggcagaggtgcctcggggccgcggacagggccgctggagcccgcactccagaaggcggtcttcctcgcgcctcccccgacggacgcggcccagggcttccctcgagggcgtcctcggccggggtgcctggagtccccaggggcgacagccgcggcggggcaccagggcgccagttccccggagcctggtag

SEQ ID NO: 5032 - protein, 210 aa, Homo sapiens [sequence omitted]

SEQ ID NO: 5033 - DNA, 981 bp, Homo sapiens
atgactaaggacgtcagcaactggacctcaccagctgacgtggccggccctggacttgccatggagaaggcagagcctgcctcccagtgggtccctagtgaccgtccctatcactggagccgatcccagagtgaccgtccctatcactggcgccgatcccagagtgaccgtccctatcactggagccgatcccagagtgaccgtccctatcactggcgccgatcccagagtgaccgtccctatcactggcgccgatcccagagtgaccgtccctatcactggcgccgatcccagagtgaccgtccctatcactggcgccgatcccagagtgaccgtccctatcactggcgccgatcccagagtgaccgtccctatcactggcgccgatcccagagtgaccgtccctatcactggcgccgatcccagagtgaccgtccctatcactggcgccgatcccagagtgaccgtccctatcactggcgccgatcccagagtgaccgtccctatcactggcgccgatcccagagtgaccgtccctatcactggagccgatcccagagtgaccgtccctatcactggagccgatcccagagtgaccgtccctatcactggcgccgatcccagagtgaccgtccctatcactggagccgatcccagagtgaccgtccctatcactggagccgatcccagagtgaccgtccctatcactggcgccgatcccagagtgaccgtccctatcactggagccgatcccagagtgaccgtccctatcactggagccgatcccagagtgaccgtccctatcactggagccgatcccagagtgaccgtccctatcactggcgccgatcccagagtgaccgtccctatcactggagccgatcccagagtgaccgtccctatcactggagccgatcccagagtgaccgtccctatcactggcgccgatcccagagtgaccgtccctatcactggagctga

SEQ ID NO: 5034 - protein, 326 aa, Homo sapiens
MTKDVSNWTSPADVAGPGLAMEKAEPASQWVPSDRPYHWSRSQSDRPYHWRRSQSDRPYHWSRSQSDRPYHWRRSQSDRPYHWRRSQSDRPYHWRRSQSDRPYHWRRSQSDRPYHWRRSQSDRPYHWRRSQSDRPYHWRRSQSDRPYHWRRSQSDRPYHWRRSQSDRPYHWRRSQSDRPYHWSRSQSDRPYHWSRSQSDRPYHWRRSQSDRPYHWSRSQSDRPYHWSRSQSDRPYHWRRSQSDRPYHWSRSQSDRPYHWSRSQSDRPYHWSRSQSDRPYHWRRSQSDRPYHWSRSQSDRPYHWSRSQSDRPYHWRRSQSDRPYHWS

SEQ ID NO: 5035 - DNA, 358 bp, Homo sapiens
atgtgcagaccacaggaatacctaatgccttttttctcttcctgtctttgtccctcacactacagcaggcccctcccttccctcttcaacctcatcctccctccccacaggcccagagaaccagttgggctttgttctcctgcaggctatggttcatcatgcaaatagctcctgtgtcagaaatgctttttggcttcaaataacagaaaagctaacaccagctttatcaataataatatcggtggtttacttaaggtgtccagagatggtggagaacaggattggtttcctcctcaatgtcaaggactcaaagactctttctgtggtagggccacatcctaaaccctgtatcctgtga

SEQ ID NO: 5036 - protein, 119 aa, Homo sapiens
  misc_feature (56)..(56): Xaa can be any naturally occurring amino acid
  misc_feature (114)..(114): Xaa can be any naturally occurring amino acid
MCRPQEYLMPFFSSCLCPSHYSRPLPSLFNLILPPHRPREPVGLCSPAGYGSSCKXLLCQKCFLASNNRKANTSFINNNIGGLLKVSRDGGEQDWFPPQCQGLKDSFCGRATSXTLYPV

SEQ ID NO: 5037 - DNA, 328 bp, Homo sapiens
agggcaaaagagattttgcagatgcaattaaggttaaggaccttgacgtgggaagattgtgattatttacctgacagggcaaaagagattttgcagatgcaattaaggttaaggaccttgacgtgggaagattattctggattatctaggtgggcgcaatttgatcacatgggtccccagaagtggagaacctttcccacctgtagaaagccagagagctggcacctgagaaggacagaactgtcattgcaggatttgaagatgaaggggcccatgagccaaggaatgccagtgacctatagaggctaaaaaacagcaaggaaatgga

SEQ ID NO: 5038 - protein, 95 aa, Homo sapiens
MQLRLRTLTWEDCDYLPDRAKEILQMQLRLRTLTWEDYSGLSRWAQFDHMGPQKWRTFPTCRKPESWHLRRTELSLQDLKMKGPMSQGMPVTYRG

SEQ ID NO: 5039 - DNA, 837 bp, Homo sapiens
atggaactgaaactggaggcagaaggtggagagcattatgacatttttcttttgatttaccgcttttgtaagaagtggcgcatatacccagagaagtatgaagataagagccattgcagtacattgagctccatagagacagcaccggggaaagtgagagtttcagtcaacttctcagagttttctaagaagtgctcagagaggtggaagaacatgtctgctaaagagaaaggaaaatttggccgggcgcgaggaaaatttgaagatatggcaaaggcggacaaggcccattataagagagaaatgaaaacctatatccctcccaaaggggagacaaaaaagaagttcaaggatcccaatgcgcccaagaggcctccttcagccttcttcctgtacttctctgagtatggcccaaaaatcaaaggagaacgtcctggcctgtcctttggtgatgttgcgaagaagctgggagagatgtggaataacactgctgcagatgacaagcagccttatgaaaagaggtcggcgaagctgaaagaaaaatacgaaaaggatattgctgcatatcgagctaaaggaaagcatgatgctgcaaacaatggagttgtcaaggctgcaaaaaattttagagtatcctatttgtttgaagagacacctggaagtttaacttcatttttcggaggaaaattcagtagtcaagaaagaatgttgctgaaatataatactcgtgatcaaaaggtggactattaccaaaagagaattggaaagaaactactacagaatttaaatatgccagccttctaccactctttgcctgagctttgcaaggcagggtaa

SEQ ID NO: 5040 - protein, 278 aa, Homo sapiens [sequence omitted]

SEQ ID NO: 5041 - DNA, 837 bp, Homo sapiens; identical to SEQ ID NO: 5039

SEQ ID NO: 5042 - protein, 278 aa, Homo sapiens [sequence omitted]

SEQ ID NO: 5043 - DNA, 522 bp, Homo sapiens
atgggcagttatgtgggactgttccccaccacccttgccagggccccaagtttctgccgaatatggattcccaggtacgatgaaatagccagaccattatacacactaattaaggaaactcagaaagccaatactcatttagtaaaatggacacctgaagcagaagtggctttccaggccctaaagaaggccgtaacccaagccccagtgttaagcttgccaacaggacaagacttttctttatatgtcacagaaaaaacaggaatagctctaggagtccttacacagatccgagggatgagcttgcaatcagtggcatacctaagtaaggaaattgatgtagtggcaaagggttggcctctttgtctacaggtagtggtggcagtagcagtcttagtatctgaagcagttaaaataatacagggaagagatcttactgtgtggacatctcatgatgtgaatggcatattcactgctaaaggagacttgtggctgtcagagaactgtgaggaaagtaactaa

SEQ ID NO: 5044 - protein, 173 aa, Homo sapiens
MGSYVGLFPTTLARAPSFCRIWIPRYDEIARPLYTLIKETQKANTHLVKWTPEAEVAFQALKKAVTQAPVLSLPTGQDFSLYVTEKTGIALGVLTQIRGMSLQSVAYLSKEIDVVAKGWPLCLQVVVAVAVLVSEAVKIIQGRDLTVWTSHDVNGIFTAKGDLWLSENCEESN

SEQ ID NO: 5045 - DNA, 522 bp, Homo sapiens; identical to SEQ ID NO: 5043

SEQ ID NO: 5046 - protein, 173 aa, Homo sapiens; identical to SEQ ID NO: 5044

SEQ ID NO: 5047 - DNA, 2712 bp, Homo sapiens
tgagttgcttcagcatcctggtgttgctgtgccgtgggtcctgtgcggtcacttagccaagatgcctgaggaaacccagacccaagaccaaccgatggaggaggaggaggttgagacattcgcctttcaggcagaaattgcccagttgatgtcattgatcatcaatactttctactcgaacaaagagatctttctgagagagctcatttcaaattcatcagatgcattggacaaaatctggtatgaaagcttgacagatcccagtaaattagactctgggaaagagctgcatattaaccttataccaaacaaacaagatcaaactctcactattgtggatactggaattggaatgaccaaggctgacttgatcaataaccttggtactatcgccaagtctgggaccaaagcgttcatggaagctttgcaggctggtgcagatatctctatgattggccagttcggtgttagtttttattctgcttatttggttgctgagaaagtaactgtgatcaccaaacataatgatgatgagcaactgaagaaaaggaagacaaagaagaagaaaaagaaaaagaagagaaagagtccaaagacaaacctgaaattgaagatgttggttctgatgaggaagaagaaaagaaggatggtgacaagaagaagaagaagactaaggaaaagtacatcgaccaagaagaactcaacaaaacaaagcccatctggaccagaaatcccgacgatattactaatgaggagtacggagaattctgcaagaacttgaccaatgactgggaagatcacttggcagtgaagcatttttcagttgaaggacagttggaattcagagcccttctatttgtcccatgacgtgctccttttgacctgtttgaaaacagaaagaaaaagaacaacatcaaattgtatgtacgcagagatttcatcatggataactgtgaggagctaatccctgaatatctgaacttcattagaggggtggtagactcggaggatctccctctaaacatttcccgtgagatgttgcaacaaagtaaaattttgaaagttatcaggaaaaatttggtcaaaaaatgcttagaactctttacagaactggcggaagataaagagaactgcaagaaattctatgagcagttctctaaaaacataaagcttggaatacaagaagactctcaaaatcggaagaagctttcagagctgttaaggtactacacgtctgcctctggtgatgagatggtttctctcaaggactactgcaccagaatgaaggaaaaacagaaacatatctattatatcacaggtgagaccaaggaccaggtagctaactcagcctttgtggaacgtcttgggaaacatggcttagaagtgatctatatgattgagcccattgatgagtactgtgtccaacagctgaaggaatttgaggggaagactttagtgccagtcaccaaagaaggcctggaacttccagaggatgaagaaaagaaaaagaaataggaagagaaaaaacaatgtttgagaacctctgcaaaaccatgaaagacatattggagaaaaaagttgaaaaggtggttgtgtcaaaccgattggtgacgtctccatgctgtattgtcacaagcacatatggctggacagaaaacatggagagaatcatgaaagctcaagccctaagagacaactcaacaatgggttatatggcagccaagaaacacctggagataaatcctgatgattccattattgagaccttaaggcaaaaggcagaggctgataagaatgacaagtctgtgaaggatctgctcatcttgctttacgaaactgcactcctgtcttctggcttcagtctggaagatccccagacacatgctaacaggacctacaggatgatcaaacttggtctgggtattgatgaagatgatcctgctgctgatgataccagtgctgctgtaactgaagaaatgccgcccctcgaaggagatgacgacacatcatgcatggaagaagtagactaacctctggctaagggatgacttaactgttcaatactctacaattcctccgataatatatattcaaggatgtttttctttatttttgttaatattaaaaagtctgtacggcatgacaacaactactttaaggggaagataagatttctgtctactaagtgatgctgtgataccttaggcactaaagcagagctagtaatgctttttgagtttcacgtcggtttattttcacagattggggtaacgtgcgttgtaagatgtatgtaacatgatgttaactttgtggtctaaagtgtttagctgtcaagccggattcctaagtagaccaaatcttgttatcgaagtgttcctgagctataccttgatgtttagaaaagtatttgttacatcttgtaggatctactttttgaacttttcatcccctatagttgacaattctgcatgtactagtcctctagaaataggttaaactgaagcaacttgatggaaggatctctccacagggcttgttttccaaagaaaagtattgtttggaggagcaaagttataagcctacctaagcatatcataaagctgtttaaaaataactcagacccggtcttgtggatggaaatgtagtgctcgagtcacattcttcttatagttgtaacaaatacagatgagttaaaagaaaaaaaaagaaaaa

SEQ ID NO: 5048 - protein, 190 aa, Homo sapiens [sequence omitted]

SEQ ID NO: 5049 - DNA, 2723 bp, Homo sapiens
ttcagcatcctggtgttgctgtgccgtgggtcctgtgcggtcacttagccaagatgcctgaggaaacccagacccaagaccaaccgatggaggaggaggaggttgagacattcgcctttcaggcagaaattgcccagttgatgtcattgatcatcaatactttctactcgaacaaagagatctttctgagagagctcatttcaaattcatcagatgcattggacaaaatctggtatgaaagcttgacagatcccagtaaattagactctgggaaagagctgcatattaaccttataccaaacaaacaagatcaaactctcactattgtggatactggaattggaatgaccaaggctgacttgatcaataaccttggtgaacgtatgggtcgtggaacaaaggttatcctacacctgaaagaagaccaaactgagtacttggaggaacaaagaataaaggagattgtgaagaaacattctcagcttattggatatcccattactctttttgtggagaaggaatgtgataaagaagtcagcgacgatgagactgaagaaaaggaagacaaagaagaagaaaaagaaaaagaagagaaagagtccaaagacaaacctgaaattgaagatgttggttctgatgaggaagaagaaaagaaggatggtgacaagaagaagaagaagactaaggaaaagtacatcgaccaagaagaactcaacaaaacaaagcccatctggaccagaaatcccgacgatattactaatgaggagtacggagaattctgcaagaacttgaccaatgactgggaagatcacttggcagtgaagcatttttcagttgaaggacagttggaattcagagcccttctatttgtcccatgacgtgctccttttgacctgtttgaaaacagaaagaaaaagaacaacatcaaattgtatgtacgcagagatttcatcatggataactgtgaggagctaatccctgaatatctgaacttcattagaggggtggtagactcggaggatctccctctaaacatttcccgtgagatgttgcaacaaagtaaaattttgaaagttatcaggaaaaatttggtcaaaaaatgcttagaactctttacagaactggcggaagataaagagaactgcaagaaattctatgagcagttctctaaaaacataaagcttggaatacaagaagactctcaaaatcggaagaagctttcagagctgttaaggtactacacgtctgcctctggtgatgagatggtttctctcaaggactactgcaccagaatgaaggaaaaacagaaacatatctattatatcacaggtgagaccaaggaccaggtagctaactcagcctttgtggaacgtcttgggaaacatggcttagaagtgatctatatgattgagcccattgatgagtactgtgtccaacagctgaaggaatttgaggggaagactttagtgccagtcaccaaagaaggcctggaacttccagaggatgaagaaaagaaaaagaaataggaagagaaaaaacaatgtttgagaacctctgcaaaaccatgaaagacatattggagaaaaaagttgaaaaggtggttgtgtcaaaccgattggtgacgtctccatgctgtattgtcacaagcacatatggctggacagaaaacatggagagaatcatgaaagctcaagccctaagagacaactcaacaatgggttatatggcagccaagaaacacctggagataaatcctgatgattccattattgagaccttaaggcaaaaggcagaggctgataagaatgacaagtctgtgaaggatctgctcatcttgctttacgaaactgcactcctgtcttctggcttcagtctggaagatccccagacacatgctaacaggacctacaggatgatcaaacttggtctgggtattgatgaagatgatcctgctgctgatgataccagtgctgctgtaactgaagaaatgccgcccctcgaaggagatgacgacacatcatgcatggaagaagtagactaacctctggctaagggatgacttaactgttcaatactctacaattcctccgataatatatattcaaggatgtttttctttatttttgttaatattaaaaagtctgtacggcatgacaacaactactttaaggggaagataagatttctgtctactaagtgatgctgtgataccttaggcactaaagcagagctagtaatgctttttgagtttcacgtcggtttattttcacagattggggtaacgtgcgttgtaagatgtatgtaacatgatgttaactttgtggtctaaagtgtttagctgtcaagccggattcctaagtagaccaaatcttgttatcgaagtgttcctgagctataccttgatgtttagaaaagtatttgttacatcttgtaggatctactttttgaacttttcatcccctatagttgacaattctgcatgtactagtcctctagaaataggttaaactgaagcaacttgatggaaggatctctccacagggcttgttttccaaagaaaagtattgtttggaggagcaaagttataagcctacctaagcatatcataaagctgtttaaaaataactcagacccggtcttgtggatggaaatgtagtgctcgagtcacattcttcttatagttgtaacaaatacagatgagttaaaagaaaaaaaaagaaaaa

SEQ ID NO: 5050 - protein, 274 aa, Homo sapiens
MPEETQTQDQPMEEEEVETFAFQAEIAQLMSLIINTFYSNKEIFLRELISNSSDALDKIWYESLTDPSKLDSGKELHINLIPNKQDQTLTIVDTGIGMTKADLINNLGERMGRGTKVILHLKEDQTEYLEEQRIKEIVKKHSQLIGYPITLFVEKECDKEVSDDETEEKEDKEEEKEKEEKESKDKPEIEDVGSDEEEEKKDGDKKKKKTKEKYIDQEELNKTKPIWTRNPDDITNEEYGEFCKNLTNDWEDHLAVKHFSVEGQLEFRALLFVP

SEQ ID NO: 5051 - DNA, 2723 bp, Homo sapiens; identical to SEQ ID NO: 5049

SEQ ID NO: 5052 - protein, 158 aa, Homo sapiens [sequence omitted]

SEQ ID NO: 5053 - DNA, 2712 bp, Homo sapiens; identical to SEQ ID NO: 5047

SEQ ID NO: 5054 - protein, 158 aa, Homo sapiens [sequence omitted]

SEQ ID NO: 5055 - DNA, 2938 bp, Homo sapiens
tgagttgcttcagcatcctggtgttgctgtgccgtgggtcctgtgcggtcacttagccaagatgcctgaggaaacccagacccaagaccaaccgatggaggaggaggaggttgagacattcgcctttcaggcagaaattgcccagttgatgtcattgatcatcaatactttctactcgaacaaagagatctttctgagagagctcatttcaaattcatcagatgcattggacaaaatctggtatgaaagcttgacagatcccagtaaattagactctgggaaagagctgcatattaaccttataccaaacaaacaagatcaaactctcactattgtggatactggaattggaatgaccaaggctgacttgatcaataaccttggtactatcgccaagtctgggaccaaagcgttcatggaagctttgcaggctggtgcagatatctctatgattggccagttcggtgttagtttttattctgcttatttggttgctgagaaagtaactgtgatcaccaaacataatgatgatgagcagtacgcctgggagtcctcagcagggggatcattcacagtgaggacagacacaggtgaacgtatgggtcgtggaacaaaggttatcctacacctgaaagaagaccaaactgagtacttggaggaacaaagaataaaggagattgtgaagaaacattctcagcttattggatatcccattactctttttgtggagaaggaatgtgataaagaagtcagcgacgatgagactgaagaaaaggaagacaaagaagaagaaaaagaaaaagaagagaaagagtccaaagacaaacctgaaattgaagatgttggttctgatgaggaagaagaaaagaaggatggtgacaagaagaagaagaagactaaggaaaagtacatcgaccaagaagaactcaacaaaacaaagcccatctggaccagaaatcccgacgatattactaatgaggagtacggagaattctgcaagaacttgaccaatgactgggaagatcacttggcagtgaagcatttttcagttgaaggacagttggaattcagagcccttctatttgtcccatgacgtgctccttttgacctgtttgaaaacagaaagaaaaagaacaacatcaaattgtatgtacgcagagatttcatcatggataactgtgaggagctaatccctgaatatctgaacttcattagaggggtggtagactcggaggatctccctctaaacatttcccgtgagatgttgcaacaaagtaaaattttgaaagttatcaggaaaaatttggtcaaaaaatgcttagaactctttacagaactggcggaagataaagagaactgcaagaaattctatgagcagttctctaaaaacataaagcttggaatacaagaagactctcaaaatcggaagaagctttcagagctgttaaggtactacacgtctgcctctggtgatgagatggtttctctcaaggactactgcaccagaatgaaggaaaaacagaaacatatctattatatcacaggtgagaccaaggaccaggtagctaactcagcctttgtggaacgtcttgggaaacatggcttagaagtgatctatatgattgagcccattgatgagtactgtgtccaacagctgaaggaatttgaggggaagactttagtgccagtcaccaaagaaggcctggaacttccagaggatgaagaaaagaaaaagaaataggaagagaaaaaacaatgtttgagaacctctgcaaaaccatgaaagacatattggagaaaaaagttgaaaaggtggttgtgtcaaaccgattggtgacgtctccatgctgtattgtcacaagcacatatggctggacagaaaacatggagagaatcatgaaagctcaagccctaagagacaactcaacaatgggttatatggcagccaagaaacacctggagataaatcctgatgattccattattgagaccttaaggcaaaaggcagaggctgataagaatgacaagtctgtgaaggatctgctcatcttgctttacgaaactgcactcctgtcttctggcttcagtctggaagatccccagacacatgctaacaggacctacaggatgatcaaacttggtctgggtattgatgaagatgatcctgctgctgatgataccagtgctgctgtaactgaagaaatgccgcccctcgaaggagatgacgacacatcatgcatggaagaagtagactaacctctggctaagggatgacttaactgttcaatactctacaattcctccgataatatatattcaaggatgtttttctttatttttgttaatattaaaaagtctgtacggcatgacaacaactactttaaggggaagataagatttctgtctactaagtgatgctgtgataccttaggcactaaagcagagctagtaatgctttttgagtttcacgtcggtttattttcacagattggggtaacgtgcgttgtaagatgtatgtaacatgatgttaactttgtggtctaaagtgtttagctgtcaagccggattcctaagtagaccaaatcttgttatcgaagtgttcctgagctataccttgatgtttagaaaagtatttgttacatcttgtaggatctactttttgaacttttcatcccctatagttgacaattctgcatgtactagtcctctagaaataggttaaactgaagcaacttgatggaaggatctctccacagggcttgttttccaaagaaaagtattgtttggaggagcaaagttataagcctacctaagcatatcataaagctgtttaaaaataactcagacccggtcttgtggatggaaatgtagtgctcgagtcacattcttcttatagttgtaacaaatacagatgagttaaaagaaaaaaaaagaaaaa

SEQ ID NO: 5056 - protein, 158 aa, Homo sapiens [sequence omitted]

SEQ ID NO: 5057 - DNA, 2717 bp, Homo sapiens
tgagttgcttcagcatcctggtgttgctgtgccgtgggtcctgtgcggtcacttagccaagatgcctgaggaaacccagacccaagaccaaccgatggaggaggaggaggttgagacattcgcctttcaggcagaaattgcccagttgatgtcattgatcatcaatactttctactcgaacaaagagatctttctgagagagctcatttcaaattcatcagatgcattggacaaaatctggtatgaaagcttgacagatcccagtaaattagactctgggaaagagctgcatattaaccttataccaaacaaacaagatcaaactctcactattgtggatactggaattggaatgaccaaggctgacttgatcaataaccttggtactatcgccaagtctgggaccaaagcgttcatggaagctttgcaggctggtgcagatatctctatgattggccagttcggtgttagtttttattctgcttatttggttgctgagaaagtaactgtgatcaccaaacataatgatgatgagcagtacgcctgggagtcctcagcagggggatcattcacagtgaggacagacacaggtgaacgtatgggtcgtggaacaagaagatgttggttctgatgaggaagaagaaaagaaggatggtgacaagaagaagaagaagactaaggaaaagtacatcgaccaagaagaactcaacaaaacaaagcccatctggaccagaaatcccgacgatattactaatgaggagtacggagaattctgcaagaacttgaccaatgactgggaagatcacttggcagtgaagcatttttcagttgaaggacagttggaattcagagcccttctatttgtcccatgacgtgctccttttgacctgtttgaaaacagaaagaaaaagaacaacatcaaattgtatgtacgcagagatttcatcatggataactgtgaggagctaatccctgaatatctgaacttcattagaggggtggtagactcggaggatctccctctaaacatttcccgtgagatgttgcaacaaagtaaaattttgaaagttatcaggaaaaatttggtcaaaaaatgcttagaactctttacagaactggcggaagataaagagaactgcaagaaattctatgagcagttctctaaaaacataaagcttggaatacaagaagactctcaaaatcggaagaagctttcagagctgttaaggtactacacgtctgcctctggtgatgagatggtttctctcaaggactactgcaccagaatgaaggaaaaacagaaacatatctattatatcacaggtgagaccaaggaccaggtagctaactcagcctttgtggaacgtcttgggaaacatggcttagaagtgatctatatgattgagcccattgatgagtactgtgtccaacagctgaaggaatttgaggggaagactttagtgccagtcaccaaagaaggcctggaacttccagaggatgaagaaaagaaaaagaaataggaagagaaaaaacaatgtttgagaacctctgcaaaaccatgaaagacatattggagaaaaaagttgaaaaggtggttgtgtcaaaccgattggtgacgtctccatgctgtattgtcacaagcacatatggctggacagaaaacatggagagaatcatgaaagctcaagccctaagagacaactcaacaatgggttatatggcagccaagaaacacctggagataaatcctgatgattccattattgagaccttaaggcaaaaggcagaggctgataagaatgacaagtctgtgaaggatctgctcatcttgctttacgaaactgcactcctgtcttctggcttcagtctggaagatccccagacacatgctaacaggacctacaggatgatcaaacttggtctgggtattgatgaagatgatcctgctgctgatgataccagtgctgctgtaactgaagaaatgccgcccctcgaaggagatgacgacacatcatgcatggaagaagtagactaacctctggctaagggatgacttaactgttcaatactctacaattcctccgataatatatattcaaggatgtttttctttatttttgttaatattaaaaagtctgtacggcatgacaacaactactttaaggggaagataagatttctgtctactaagtgatgctgtgataccttaggcactaaagcagagctagtaatgctttttgagtttcacgtcggtttattttcacagattggggtaacgtgcgttgtaagatgtatgtaacatgatgttaactttgtggtctaaagtgtttagctgtcaagccggattcctaagtagaccaaatcttgttatcgaagtgttcctgagctataccttgatgtttagaaaagtatttgttacatcttgtaggatctactttttgaacttttcatcccctatagttgacaattctgcatgtactagtcctctagaaataggttaaactgaagcaacttgatggaaggatctctccacagggcttgttttccaaagaaaagtattgtttggaggagcaaagttataagcctacctaagcatatcataaagctgtttaaaaataactcagacccggtcttgtggatggaaatgtagtgctcgagtcacattcttcttatagttgtaacaaatacagatgagttaaaagaaaaaaaaagaaaaa

SEQ ID NO: 5058 - protein, 190 aa, Homo sapiens [sequence omitted]

SEQ ID NO: 5059 - DNA, 2938 bp, Homo sapiens; identical to SEQ ID NO: 5055

SEQ ID NO: 5060 - protein, 190 aa, Homo sapiens [sequence omitted]

SEQ ID NO: 5061 - DNA, 806 bp, Homo sapiens
ttcaattttaggtaaaagaaacctttttaccagatagtgacgagtggctaccatgattaataagtgactagacctcatggtcctcctcatactaaaaggtgaacagtgcaagctgtcggtggatctaccattctggggtcttggggacagtggccctcttctcacagctcccggtgaatgctgcaatgatcattggtaggactgttaggctttgtttctcaagaggataatctgattgggaaaagaataagagtgcagctgcagcccatccttgtgaagaaggtaccagtgcgctctcaaagccaagtcttgaaaataatagcgaatgctgtattggataacagccatgccagatacagagaagccacagatggcattgtcaccagaaaatggaagcacaaagcgctttgggtaacagcaattcaagaatgactgcagagaaaatctattaagaaattcaaatgcagatttcaatatttactccttttcattctcttcctctctctctcgctcacttgctctttttctctctcccaccttgtttttctcgctctccttttttttgcatacagtttctcagtaaaatacatttgattaaattttataacaaacaagcttatgaaatgcagatatacaaaaaggaaaacataagaagcatgcataattctaccactgaaaaatactactaaaatttggtatttaaacttttgaatgtttgtcactgcacttgcatgtgtgtgtaaatataatctccaactctgcagagaaatacaagaattgttatgaaccttaataaactcccaaaa

SEQ ID NO: 5062 - protein, 40 aa, Homo sapiens
MVLLILKGEQCKLSVDLPFWGLGDSGPLLTAPGECCNDHW

SEQ ID NO: 5063 - DNA, 513 bp, Homo sapiens
atgaggccaataaagagcctagaactcagaactgaatttggagaaaagacgttagaaaagacaggctccagtgtgactcagcacagtgttcacagcccatgctctcaagaatctcagcttaggaggaggcaaagagccgctctacagtaaggtaaataagtcatttagtcaggaactctgcacatttacctctgcatttatcaaatatttgttgaaggaaataataaaagaagtgaggaggaagaagaggtttcctgggagaaagcactcgaggagcaataggtgtcctctttcatttccactaaatatgctgctcaatgccttgtggcataacagaatcaaaacttttcagatgccctgccgctttaacaagacccaggatatgtcaaaatggctcccacagaactttcatttgatcttatctttcgctgtcacacacatcgacctgcattttcttttttctttttgattctttatgtctgcaaatgaactgatgtaattaaaaaggtgaag

SEQ ID NO: 5064 - protein, 49 aa, Homo sapiens [sequence omitted]

SEQ ID NO: 5065 - DNA, 1271 bp, Homo sapiens
tttgcagagttggcagctgcaaacagttcgatccctctagtcccggctgagaaggagaaacagcgcctgcaagcttggcactgcacacctggggttggggacaggacatgactaagcacagagctttcttcttttgaggccacgcatgtggtgcggagcgggaccacctgcatccacacagcccggcgcacctgctcctacttctgcttagcgtgtgagcagtgtggtgaccagggtctccaccagggggcaggccaggaccgcctcacagcactttctaggcgttctctggtcccgggctgggacacatacagggcttagtaaagttcatagatggtagctaggcagccccaggccccaggtgacacctctcccctgcctgccctgtactgcctgcctgcagcactcctgggaatcttgtacgaagacaaggagagacaggacttcatcttcaccatctaccactggtggcaggctgtggccatcttcaccgtgtacctgggctcgagcctgcacatgaaggctaagctggcgatgctgctggtgacgctggtggcggccgcggtctcctacctgcggatggagcagaagctgcggcggggcgtggccccgcctcagccccgcatcccgcggccccagcacaaggtgcgcggttaccgctacttggaggacaactcggaggagagcgacgctgaggacgagcatggggacggcgcggaggaggaggcgccgcccgcggggcccaggcctggccccgagcccgctggactcggccgccggccctgcccgtacgaacaggcgcagaggggagacggaccggaggagcagtgaggggccgcctggtccccggactcagcctccctcctcgccggcctcagtttaccacgtcttaggtcggggggaccccctctgagtcccgcgctgtattcaaaggcccctgtctcccctcccccacattggggacgcccctcccagagcccgggtcacctccgggcttccgcagccccctccaaggcggagtggagccttgggaacccctcggccaagcacaggggttcgaaaatacagctgaaaccctgcgggcccttagcacgcgccccagcgcgggagcagggtcagggtcttcttgcgacccggccccgctccagatcctcccagctgtcggccgcggacccgggccgcgtgtgaccgcgctttgcacctcctatccccagggtccgccgagagccacgatttttttacagaaaatgagcaataaagagattttgtac

SEQ ID NO: 5066 - protein, 165 aa, Homo sapiens
MVARQPQAPGDTSPLPALYCLPAALLGILYEDKERQDFIFTIYHWWQAVAIFTVYLGSSLHMKAKLAMLLVTLVAAAVSYLRMEQKLRRGVAPPQPRIPRPQHKVRGYRYLEDNSEESDAEDEHGDGAEEEAPPAGPRPGPEPAGLGRRPCPYEQAQRGDGPEEQ

SEQ ID NO: 5067 - DNA, 1233 bp, Homo sapiens
gggggtgaggcaccccccgcaatgcggggagggctgagactggggtctgggctgttccggacttcaacactcaccccttgtccccccgcagggctatggcgtgtgcttggtggggctggagcggctggcttacctcctcgtggcttacagcctgggcacctcagccgcctcactcctgggcctgctgggcctgtggctgccacgcccggtgcccctcatggctggagcaggggtgcacctgctcctcaccttcatcctctttttctgggcccctgtgcctcgggtcctgcaacacatctggatcctctgtgtggcagctgccctttggggtgtgggcagcgccctgaacaatactggactcagcacactcctgggaatcttgtacgaagacaaggagagacaggacttcatcttcaccatctaccactggtggcaggctgtggccatcttcaccgtgtacctgggctcgagcctgcacatgaaggctaagctggcgatgctgctggtgacgctggtggcggccgcggtctcctacctgcggatggagcagaagctgcggcggggcgtggccccgcctcagccccgcatcccgcggccccagcacaaggtgcgcggttaccgctacttggaggacaactcggaggagagcgacgctgaggacgagcatggggacggcgcggaggaggaggcgccgcccgcggggcccaggcctggccccgagcccgctggactcggccgccggccctgcccgtacgaacaggcgcagaggggagacggaccggaggagcagtgaggggccgcctggtccccggactcagcctccctcctcgccggcctcagtttaccacgtcttaggtcggggggaccccctctgagtcccgcgctgtattcaaaggcccctgtctcccctcccccacattggggacgcccctcccagagcccgggtcacctccgggcttccgcagccccctccaaggcggagtggagccttgggaacccctcggccaagcacaggggttcgaaaatacagctgaaaccctgcgggcccttagcacgcgccccagcgcgggagcagggtcagggtcttcttgcgacccggccccgctccagatcctcccagctgtcggccgcggacccgggccgcgtgtgaccgcgctttgcacctcctatccccagggtccgccgagagccacgatttttttacagaaaatgagcaataaagagattttgtac

SEQ ID NO: 5068 - protein, 191 aa, Homo sapiens
MAGAGVHLLLTFILFFWAPVPRVLQHIWILCVAAALWGVGSALNNTGLSTLLGILYEDKERQDFIFTIYHWWQAVAIFTVYLGSSLHMKAKLAMLLVTLVAAAVSYLRMEQKLRRGVAPPQPRIPRPQHKVRGYRYLEDNSEESDAEDEHGDGAEEEAPPAGPRPGPEPAGLGRRPCPYEQAQRGDGPEEQ

SEQ ID NO: 5069 - DNA, 327 bp, Homo sapiens
atgggggtcctaagagccaggggggcaagaggggctggagaggcgggtgctattagtccccgcatcgcggggggcgcctcgcccccctgcgatttggatcgtaatatccggggaggagaggtgggtgctattagtccccgcatcgcggggggcgcctcgccccactgcgatttggatcgtaatatccggggaggagaggcgggtgctattagtcccagcatcgcggggggcgcctcgccccccttcgatttggatcgtaacatccggggaggagaggcgggtgctattagttcccgcatcgcgcggggcgccctcacccccctgtga

SEQ ID NO: 5070 - protein, 108 aa, Homo sapiens
MGVLRARGARGAGEAGAISPRIAGGASPPCDLDRNIRGGEVGAISPRIAGGASPHCDLDRNIRGGEAGAISPSIAGGASPPFDLDRNIRGGEAGAISSRIARGALTPL

SEQ ID NO: 5071 - DNA, 1631 bp, Homo sapiens
atggcccagcctgatgtccgcatgcacctctgcggcacactggcctgcagacccccgagcatatgctgcatgcttctcacctctagagtggccacccagacagcgatacagacataccaagaaaacccacagcggctgaagacagatgctgcccgattgcctcggaagccctgtagaccatcatggaccccgagctttagggctgtgaccatctatgacaagccggcatctttctttaaagagacacctctggacctgcagcaccggctcttcatgaagctgggcggcacgcactctccgttcagggcccgttcagaacctgaggaaccagccacagagccgtcggccttcatggagtgggatgctgggagcgggctggtgatgcttctccgcgagcagccagccctgctggtcagcagcacaggctggacagaggatgaagacttctccatcctgctggcagctttagaaaagtttgagcaactgactgttgatggacacaaccttccttctctcgtctgtgtgataacaggccaagggcctctgacggagtattacagccgccccatccaccagaagcatttccagcacatccaggtctgcaacccttggctggaggccgaggactaccccctgcttctagggtcggtggacctgggtgtctgtctgcacacatcctccagtggcctggacctgcccatgaaggtggtggacatgttcgggtgctgtttgcctgcgtgtgctgtgaacttcaagtgtttacatgagctggtgaaacatgaagaaaatggcctggtctttgaggactcagaggaactggcagctcagctgcagatgcttttctcaaactttcctgatcctgcgggcaagctaaaccagttctggaagaacctgcgggaatcgcagcagctccgatgggatgagagctgggtgcagagtgtgctccatttggttatggacacataactcctgggccagaggctaaaaccccgggacccctgctgtccttcccgcagcttcttctcggagtctcagggcaaaccctttcgagcagcgcctcccagtggccagaaggtgaaatgacggcagtggtgccgcctggtgtcatctttccgccgtgttcctaacattttgattcctgtcttgaaaaaagcacctgctgcactgtaagcccagggatgtggcagctgcagtgggcttggctttgtgaagaaccgagttgtgtccacattgggggaacatcatacttgatacacacgtttttatttgcacaaagaaaatgctatttttggagccagagatttcatgtctgattgatggcgattttcttaagaaccagaactgctggcagaaagggagcacccacatgcttagatagctgatgtcttattagagggcagtttgtggttcctgatttggaaattaacattctccaaacattccagtccaatgaaagttttatccgctttcccatataaaaactcttcccactagagtgacttgattctcacaatcccgttggagtcgtatgtgagtcctacagtgtgaggttcagcattgccatctccaagtgctcttcgtagggaaacagtttctggtcatgacgaggttccacttcccatctgatccca

SEQ ID NO: 5072 - protein, 321 aa, Homo sapiens
MAQPDVRMHLCGTLACRPPSICCMLLTSRVATQTAIQTYQENPQRLKTDAARLPRKPCRPSWTPSFRAVTIYDKPASFFKETPLDLQHRLFMKLGGTHSPFRARSEPEEPATEPSAFMEWDAGSGLVMLLREQPALLVSSTGWTEDEDFSILLAALEKFEQLTVDGHNLPSLVCVITGQGPLTEYYSRPIHQKHFQHIQVCNPWLEAEDYPLLLGSVDLGVCLHTSSSGLDLPMKVVDMFGCCLPACAVNFKCLHELVKHEENGLVFEDSEELAAQLQMLFSNFPDPAGKLNQFWKNLRESQQLRWDESWVQSVLHLVMDT

SEQ ID NO: 5073 - DNA, 1971 bp, Homo sapiens
gccccgcccacgtcatggcgcccgaggagaacgcggggaccgaactcttgctgcagagtttggagcgccgcttcctggcggcgcgtgcactgcgctccttcccctggcagagcttagaagcaaagttaagagactcatcagattctgagctgctgcgggatattttgcagaagacgtgctgtatagcccagaagccatcgtgtcgctggtcggggtcctgcggaggctggctgcctgccgggagcaccagcgggctcctcaagtctatgtggcccttaccatctgcaacccagagacgtgccagctgttcaccactgagctatgccgggctgggatcagatgggaagtggaacctcgtcatgaccagaaactgtttccctacgaagagcacttggagatggcaatgctgaacctcacactgtaggactcacatacgactccaacgggattgtgagaatcaagtcactctagtgggaagagtttttatatgggaaagcggataaaactttcattggactggaatgtttggagaatgttaatttccaaatcaggaaccacaaactgccctctaataagacatcagctatctaagcatgtgggtgctccctttctgccagcagttctggttcttaagaaaatcgccatcaatcagacatgaaatctctggctccaaaaatagcattttctttgtgcaaataaaaacgtgtgtatcaagtatgatgttcccccaatgtggacacactcggttccccacaaagccaagcccgctgcagctgccacatccctggacacattcggttcctcacaaagccaagcccgctgcagctgccacatccgtggacacactcggttcttcacaaagccaagcccactgcagctgccacatccctgggcttacagtgcagcaggtgcttttttcaagacaggaatcaaaatgttaggaacacggcggaaagatgacacctggagagcaaacgcaggatgaggagtactgcagaggtcacacggaagtcgcagaacagtaatccgctagcaggggcatggggcgtgaagaacagaagaagataggaagtgtttccgagcctccagaaaagaaatcagagccaagcacagcttcccgggtcacagaaccaattcatttaccaggcggcaccactgccgtcatttcaccttctggccactgggaggcgctgctcgaaagggtttgccctgagactccgagaagaagctgcgggaaggacagcaggggtcccggggttttagcctctggcccaggagttatgtgtccataaccaaatggagcacactctgcacccagctctcatcccatcggagctgctgcgattcccgcaggttcttccagaactggtttagcttgcccgcaggatcaggaaagtttgagaaaagcatctgcaaaaaaataaagagcagagcttaactcatttcctgtccccaccccatcccaggtcaccacctggctgaccccaggtccccgacccaacaacaaaccctcccaagttcctaactccctcacttggactcgagactcttcacgccccagcagcgctccgcctccaacttgacatcacgctttctgtcccactttcccacacttcgtgccctggagcacctcccggcctctacacgctgtatgttcccctgcgagcaccctcctcttggcctctggccaagtcccacccatctgtgggtaacaagggggtgttggtgttcttttcagccttgctaaactgtctgaatcaaggatcacaaactacagcctgcaggccaaatccagcccacagcctgtgtttgtaaataaagttttattggaacaaagccacaccccttaatcgaagatgatctgtggctactttcacaccacaacagagtaccatggttctgacagagactaggagacacagtctaaatgacttctgacctggacctttactgaaaatcctgccaatcatt

SEQ ID NO: 5074 - protein, 131 aa, Homo sapiens
MAPEENAGTELLLQSLERRFLAARALRSFPWQSLEAKLRDSSDSELLRDILQKTCCIAQKPSCRWSGSCGGWLPAGSTSGLLKSMWPLPSATQRRASCSPLSYAGLGSDGKWNLVMTRNCFPTKSTWRWQC

SEQ ID NO: 5075 - DNA, 1812 bp, Homo sapiens
acgtcatggcgcccgaggagaacgcggggaccgaactcttgctgcagagtttggagcgccgcttcctggcggcgcgtgcactgcgctccttcccctggcagagcttagaagcaaagttaagagactcatcagattctgagctgctgcgggatattttgcagaaggccgggctgggatcagatgggaagtggaacctcgtcatgaccagaaactgtttccctacgaagagcacttggagatggcaatgctgaacctcacactgtaggactcacatacgactccaacgggattgtgagaatcaagtcactctagtgggaagagtttttatatgggaaagcggataaaactttcattggactggaatgtttggagaatgttaatttccaaatcaggaaccacaaactgccctctaataagacatcagctatctaagcatgtgggtgctccctttctgccagcagttctggttcttaagaaaatcgccatcaatcagacatgaaatctctggctccaaaaatagcattttctttgtgcaaataaaaacgtgtgtatcaagtatgatgttcccccaatgtggacacactcggttccccacaaagccaagcccgctgcagctgccacatccctggacacattcggttcctcacaaagccaagcccgctgcagctgccacatccgtggacacactcggttcttcacaaagccaagcccactgcagctgccacatccctgggcttacagtgcagcaggtgcttttttcaagacaggaatcaaaatgttaggaacacggcggaaagatgacacctggagagcaaacgcaggatgaggagtactgcagaggtcacacggaagtcgcagaacagtaatccgctagcaggggcatggggcgtgaagaacagaagaagataggaagtgtttccgagcctccagaaaagaaatcagagccaagcacagcttcccgggtcacagaaccaattcatttaccaggcggcaccactgccgtcatttcaccttctggccactgggaggcgctgctcgaaagggtttgccctgagactccgagaagaagctgcgggaaggacagcaggggtcccggggttttagcctctggcccaggagttatgtgtccataaccaaatggagcacactctgcacccagctctcatcccatcggagctgctgcgattcccgcaggttcttccagaactggtttagcttgcccgcaggatcaggaaagtttgagaaaagcatctgcaaaaaaataaagagcagagcttaactcatttcctgtccccaccccatcccaggtcaccacctggctgaccccaggtccccgacccaacaacaaaccctcccaagttcctaactccctcacttggactcgagactcttcacgccccagcagcgctccgcctccaacttgacatcacgctttctgtcccactttcccacacttcgtgccctggagcacctcccggcctctacacgctgtatgttcccctgcgagcaccctcctcttggcctctggccaagtcccacccatctgtgggtaacaagggggtgttggtgttcttttcagccttgctaaactgtctgaatcaaggatcacaaactacagcctgcaggccaaatccagcccacagcctgtgtttgtaaataaagttttattggaacaaagccacaccccttaatcgaagatgatctgtggctactttcacaccacaacagagtaccatggttctgacagagactaggagacacagtctaaatgacttctgacctggacctttactgaaaatcctgccaatcatt

SEQ ID NO: 5076 - protein, 81 aa, Homo sapiens
MAPEENAGTELLLQSLERRFLAARALRSFPWQSLEAKLRDSSDSELLRDILQKAGLGSDGKWNLVMTRNCFPTKSTWRWQC

SEQ ID NO: 5077 - DNA, 1601 bp, Homo sapiens
caggggagcccccaagtggagcatagtgtatccagaactggtgggttcttggtctcactgacttcaagaatgaagccacggaccctcgcgaaatgaggcttctccccaggaccagcattccacgaaggcagcccttctctagatggagaaaacagaacctgaaggcacccgtttccctaaactgctctcgctcatgtgcttccgaggcgatcgattgggcagtgtcggtctgcagctgctaagccaagaagatctgggaaggagtcagtcagagagccttgggctggagttccaggggctctgggagtggctgccagttctacaaggcctggagctgatacgaaaaacctcccttctttcccaaatggtccccagcttccccgttcactgaagaccctgcagtcaggaacagtcaggactttgcacccagttgttgtgcgtgtttggccgacccttcctcttgtgtgattcgtggacccttagcattgcattaccagggagcttttggaattgaagactctcagggctcacccggaaggacctcctgggccagaatctgcattttaacaagatgcccaggatctgtagcccaggctggagtgcagtggtgcgatccctgctcactgcagcctctacctcctgggttcaagcgatcctcccacctcagcctcccgagtagctgagaccacaggcatggtttctcaaccagggggtgattttgccccccagagaacatgtggccatgtctggagacaattttggttgttgcagctggaggaggtggtgctactggcagctaatgggtagaggccagtgatgctgctaaacatcctacaattccgcggacaactcccactaagacaaaataatgatccagccccaaaggtcaatagtgctgaaagtgagagaccctgattccatcttagagatcatccaagcacacttggccaaattgtttttgctactgtcccatgaagaaaaggcagactcatgactgatggcaacatcgatgggaattttgtttacctcttctttgtggaccttgggatacgatgacttaccatttgtgcaagttgtgcattgcatacctccagggggcgccacccacatatttatgaaaatgccaccccagaaattgcacagtacatagtctacatggcaataagcagttgctctggttttggggttgccctgaggtgctctggaactgggaggaactttatttctggccattagaggccctgagcatgacattgagtaccctttcaagaaaggagaaatgttgaacagagaggacctcatttttataactcttgaccatcatctagttacggagcatccacttttcacccctgggccatatccatttgacggatgaaaaatcatcaaattataatatcatggcttatacttttgatagcttctgcctggaacatggcggtaacaacttctcattttcaattgattcactggggggagaaaatatacacggctgccctaagactttctattacataccatttgtttgacggaatttctttagtttctgtagcataacttattctaactggtcctcaatcactttgcaataaaacctgaga

SEQ ID NO: 5078 - protein, 82 aa, Homo sapiens
MEKTEPEGTRFPKLLSLMCFRGDRLGSVGLQLLSQEDLGRSQSESLGLEFQGLWEWLPVLQGLELIRKTSLLSQMVPSFPVH

SEQ ID NO: 5079 - DNA, 2204 bp, Homo sapiens
accccgcgcggttccacgcccctggccgcggcccgggcgctgcgctgctcgacgcggcgggcggcgggcggggaccgggggcgggggcggcggcggcggccgggagagcggaggaggcggagcagggagccgggagcgggctggcccgcgctcctcctgctggctggggattttccagcctgggcgctgacgccgcggacctccctgcgaccgtcgcggaccatgggcgacaaagggacccgagtgttcaagaaggccagtccaaatggaaagctcaccgtctacctgggaaagcgggactttgtggaccacatcgacctcgtggaccctgtggatggtgtggtcctggtggatcctgagtatctcaaagagcggagagtctatgtgacgctgacctgcgccttccgctatggccgggaggacctggatgtcctgggcctgacctttcgcaaggacctgtttgtggccaacgtacagtcgttcccaccggcccccgaggacaagaagcccctgacgcggctgcaggaacgcctcatcaagaagctgggcgagcacgcttaccctttcacctttgagatccctccaaaccttccatgttctgtgacactgcagccggggcccgaagacacggggaaggcttgcggtgtggactatgaagtcaaagccttctgcgcggagaatttggaggagaagatccacaagcggaattctgtgcgtctggtcatccggaaggttcagtatgccccagagaggcctggcccccagcccacagccgagaccaccaggcagttcctcatgtcggacaagcccttgcacctagaagcctctctggataaggagatctattaccatggagaacccatcagcgtcaacgtccacgtcaccaacaacaccaacaagacggtgaagaagatcaagatctcagtgcgccagtatgcagacatctgccttttcaacacagctcagtacaagtgccctgttgccatggaagaggctgatgacactgtggcacccagctcgacgttctgcaaggtctacacactgacccccttcctagccaataaccgagagaagcggggcctcgccttggacgggaagctcaagcacgaagacacgaacttggcctctagcaccctgttgagggaaggtgccaaccgtgagatcctggggatcattgtttcctacaaagtgaaagtgaagctggtggtgtctcggggcggcctgttgggagatcttgcatccagcgacgtggccgtggaactgcccttcaccctaatgcaccccaagcccaaagaggaacccccgcatcgggaagttccagagaacgagacgccagtagataccaatctcatagaacttgacacaaatgatgacgacattgtatttgaggactttgctcgccagagactgaaaggcatgaaggatgacaaggaggaagaggaggatggtaccggctctccacagctcaacaacagatagacgggccggccctgcctccacgtggctccggctccactctcgtgcactcggatgcttactcgtcttcttcctgttctggtttcttttcccctttgttcttccagtttctaccagggggccccgtgggcttccagatcacggtgatgaacctctggcctcaggattggccccacatcaccacgccaacaggaccacagcgcactggctccaccccatctctgccatctccactcccctccttttcatgctgtctcccagaaaagctgccagggctctggccttggaattggacttgagatggggagcagacaggggaggatggggaatgtgggacacggtgtggtgggcatgagggcttggaggggtggggatgagggctcaagacacgagagaagatgtccacggtcccaggtggttaacaaagttctggcagctaaaagatgaccgcgttgaaggccacctccttctggctgggaggggcagaactgtggacagattctcaatgcctttttgaagttctgacccaccaaagaccttctgccttcaccctcctccccacctgatgtccctctgtgtctgatagtgatgttggtgaaagttcgtagaccccaggagtagagaaaagcaactggactgactttcttaccagcagttacctagactgaggcaagctgtgtggactcacccaagtatatttcagtactgtcaggctgtgacatcttagc

SEQ ID NO: 5080 - protein, 418 aa, Homo sapiens
MGDKGTRVFKKASPNGKLTVYLGKRDFVDHIDLVDPVDGVVLVDPEYLKERRVYVTLTCAFRYGREDLDVLGLTFRKDLFVANVQSFPPAPEDKKPLTRLQERLIKKLGEHAYPFTFEIPPNLPCSVTLQPGPEDTGKACGVDYEVKAFCAENLEEKIHKRNSVRLVIRKVQYAPERPGPQPTAETTRQFLMSDKPLHLEASLDKEIYYHGEPISVNVHVTNNTNKTVKKIKISVRQYADICLFNTAQYKCPVAMEEADDTVAPSSTFCKVYTLTPFLANNREKRGLALDGKLKHEDTNLASSTLLREGANREILGIIVSYKVKVKLVVSRGGLLGDLASSDVAVELPFTLMHPKPKEEPPHREVPENETPVDTNLIELDTNDDDIVFEDFARQRLKGMKDDKEEEEDGTGSPQLNNR

SEQ ID NO: 5081 - DNA, 2180 bp, Homo sapiens
accccgcgcggttccacgcccctggccgcggcccgggcgctgcgctgctcgacgcggcgggcggcgggcggggaccgggggcgggggcggcggcggcggccgggagagcggaggaggcggagcagggagccgggagcgggctggcccgcgctcctcctgctggctggggattttccagcctgggcgctgacgccgcggacctccctgcgaccgtcgcggaccatgggcgacaaagggacccgagtgttcaagaaggccagtccaaatggaaagctcaccgtctacctgggaaagcgggactttgtggaccacatcgacctcgtggaccctgtggatggtgtggtcctggtggatcctgagtatctcaaagagcggagagtctatgtgacgctgacctgcgccttccgctatggccgggaggacctggatgtcctgggcctgacctttcgcaaggacctgtttgtggccaacgtacagtcgttcccaccggcccccgaggacaagaagcccctgacgcggctgcaggaacgcctcatcaagaagctgggcgagcacgcttaccctttcacctttgagatccctccaaaccttccatgttctgtgacactgcagccggggcccgaagacacggggaaggcttgcggtgtggactatgaagtcaaagccttctgcgcggagaatttggaggagaagatccacaagcggaattctgtgcgtctggtcatccggaaggttcagtatgccccagagaggcctggcccccagcccacagccgagaccaccaggcagttcctcatgtcggacaagcccttgcacctagaagcctctctggataaggagatctattaccatggagaacccatcagcgtcaacgtccacgtcaccaacaacaccaacaagacggtgaagaagatcaagatctcagtgcgccagtatgcagacatctgccttttcaacacagctcagtacaagtgccctgttgccatggaagaggctgatgacactgtggcacccagctcgacgttctgcaaggtctacacactgacccccttcctagccaataaccgagagaagcggggcctcgccttggacgggaagctcaagcacgaagacacgaacttggcctctagcaccctgttgagggaaggtgccaaccgtgagatcctggggatcattgtttcctacaaagtgaaagtgaagctggtggtgtctcggggcggcgacgtggccgtggaactgcccttcaccctaatgcaccccaagcccaaagaggaacccccgcatcgggaagttccagagaacgagacgccagtagataccaatctcatagaacttgacacaaatgatgacgacattgtatttgaggactttgctcgccagagactgaaaggcatgaaggatgacaaggaggaagaggaggatggtaccggctctccacagctcaacaacagatagacgggccggccctgcctccacgtggctccggctccactctcgtgcactcggatgcttactcgtcttcttcctgttctggtttcttttcccctttgttcttccagtttctaccagggggccccgtgggcttccagatcacggtgatgaacctctggcctcaggattggccccacatcaccacgccaacaggaccacagcgcactggctccaccccatctctgccatctccactcccctccttttcatgctgtctcccagaaaagctgccagggctctggccttggaattggacttgagatggggagcagacaggggaggatggggaatgtgggacacggtgtggtgggcatgagggcttggaggggtggggatgagggctcaagacacgagagaagatgtccacggtcccaggtggttaacaaagttctggcagctaaaagatgaccgcgttgaaggccacctccttctggctgggaggggcagaactgtggacagattctcaatgcctttttgaagttctgacccaccaaagaccttctgccttcaccctcctccccacctgatgtccctctgtgtctgatagtgatgttggtgaaagttcgtagaccccaggagtagagaaaagcaactggactgactttcttaccagcagttacctagactgaggcaagctgtgtggactcacccaagtatatttcagtactgtcaggctgtgacatcttagc

SEQ ID NO: 5082 - protein, 410 aa, Homo sapiens
MGDKGTRVFKKASPNGKLTVYLGKRDFVDHIDLVDPVDGVVLVDPEYLKERRVYVTLTCAFRYGREDLDVLGLTFRKDLFVANVQSFPPAPEDKKPLTRLQERLIKKLGEHAYPFTFEIPPNLPCSVTLQPGPEDTGKACGVDYEVKAFCAENLEEKIHKRNSVRLVIRKVQYAPERPGPQPTAETTRQFLMSDKPLHLEASLDKEIYYHGEPISVNVHVTNNTNKTVKKIKISVRQYADICLFNTAQYKCPVAMEEADDTVAPSSTFCKVYTLTPFLANNREKRGLALDGKLKHEDTNLASSTLLREGANREILGIIVSYKVKVKLVVSRGGDVAVELPFTLMHPKPKEEPPHREVPENETPVDTNLIELDTNDDDIVFEDFARQRLKGMKDDKEEEEDGTGSPQLNNR

SEQ ID NO: 5083 - DNA, 8192 bp, Homo sapiens
atgactgacacagtgcctacatcattacatgcctgcaaagaaattcattttccatctcctctcatcttcacgttccctgtaaaggaagaaaaggagaatgtcaagggcttgcagagatggaagtatgatgtgatggatataattatgggacactgtgtgggcacacggcctcctgcttgttgcctcatcctcctgcttttcaagcttttggccactgtctcccaggggctgccagggactggacccctgggcttccacttcacacattccatttataatgctaccgtgtatgagaactcagcagcaaggacctacgtcaacagccagagtagaatgggcatcaccttaatagatctatcctgggatatcaaatacagaatagtgtccggagacgaggaaggctttttcaaagcagaggaagtcatcattgcagatttctgttttctcagaataagaactaaaggtggcaattctgccatattaaatagggaaatccaggataattatttattgatagtaaaaggttctgtcagaggagaggatttggaagcatggaccaaagtgaatatacaggttttagatatgaatgatctgagacctttgttttcacccacaacatactctgttaccatagcagaaagcacacctctaaggactagtgttgcccaggtgactgcaacagacgcagatattggttccaatggagaattctactactactttaaaaataaagttgatctcttttcagttcaccccacgagtggtgtcatctccttaagtggtcgattaaattatgatgaaaagaataggtatgatctggaaattttggctgtggaccggggaatgaaactgtatgggaacaatggagtgagcagtactgcaaagctttatgttcacattgagcgcataaatgaacatgccccaacaatccatgtagtcactcatgttcctttctcgttggaaaaagagccaacatatgcagtggtgacagttgatgacttagatgatggagcgaatggagagatcgaatctgtttccattgtggctggggatcctttagatcagttcttcctggctaaggaaggaaagtggttgaatgagtacaagattaaggagaggaagcagattgactgggagagctttccctatggctacaatctcactcttcaagcaaaagacaagggatctcctcaaaaatgttcagcattaaaggcagtctacattggcaaccccacaagagacactgtccccattagatttgaaaaagaagtgtacgatgtgagcataagtgaattttcccctcctggtgtcgtggttgctatagtaaaattaagtcctgaaccgatagatgtggaatacaaattatctcctggtgaggatgcagtgtactttaaaattaatcctcggtcgggtctgattgttacagcacggccactgaatactgttaagaaggaggtttataaactggaggtgacaaacaaggaaggagatttaaaagcacaggtcaccatcagcatagaagatgcaaatgaccacaccccagaatttcagcaaccactgtatgatgcttatgtgaatgaaagtgtcccagtgggaaccagcgttctaacagtttcagcttctgataaggataaaggagaaaatgggtacatcacctatagtatcgctagcctgaatttgttaccatttgtcattaatcagtttacaggtgttattagcacaactgaagaactggattttgaatcctccccagaaatttacagattcattgttagagcctctgactggggttcaccataccgccatgaaagtgaggtcaatgtgactattcgaataggaaatgtcaacgacaacagccctctctttgaaaaagtggcttgccagggagttatttcatatgactttccagttggtggtcacatcacagcagtctcagcgatcgatatcgatgaacttgaacttgtaaagtacaaaatcatttctggaaatgaacttggcttcttttatttaaacccagattctggtgttttacagcttaaaaaatcactgacaaattctggcattaaaaatggcaattttgccctcagaattacagcaactgatggagagaatcttgcagaccccatgtctattaacatttcagtcctacatgggaaagtgtcttcaaagagcttcagttgcagagaaactcgtgtggctcaaaagctggcagagaaactactcattaaggcaaaagcaaatgggaaactgaatctggaagatggatttcttgacttttattcaattaatagacagggaccatattttgacaagtcttttccttctgatgtggctgtaaaggaggatctgccagttggtgctaacattctgaagattaaagcctatgatgccgactctggcttcaatggaaaagtgctatttacaatatcagatggaaatacggatagttgctttaatattgatatggagactgggcagcttaaagtccttatgcccatggatcgagaacacacagacctctatctccttaatatcaccatctatgacttaggtaatccacagaaatcgtcatggagactgctgaccatcaatgtggaggatgctaatgacaatagcccagtttttattcaagacagttactcagttaacattcttgaaagttcaggcattggtactgaaatcattcaagtggaagccagagacaaagacttaggttctaatggtgaagtgacttactcagtcttgacagatacacagcagtttgccatcaatagctcaactggaatcgtttatgtagccgaccagttggaccgggaatccaaagccaattattctttgaaaatagaagccagggacaaggcagagagtggtcagcagctgttttcagttgtcactcttaaagtttttttagatgatgtcaatgactgctccccagctttcattcccagtagctatagtgtgaaggttcttgaagatctccctgttggcactgtcattgcttggcttgagacccatgatccagatcttggactggggggtcaagtgcgctattctttggtcaatgactataatgggagatttgaaatagataaagcaagtggtgccatccgcttgagcaaagagcttgattatgagaaacagcagttctataaccttactgtgcgggccaaagacaaagggcggcctgtctctctgtcatctgtttcctttgttgaggtggaagtggtggatgtcaatgaaaacctccacactccctatttcccagactttgctgttgttggatctgtaaaggaaaactcacgcattggaacaagcgtgctgcaggtgactgctcgagatgaagactccggaagggatggagagatccagtactccatcagggatggcagtggtcttggaaggttcagtatagacgacgagagtggggtcatcactgccgcagacattcttgatcgggagacaatggggtcatactggctaacagtgtatgccacagacaggggcgttgttccactctactccaccattgaggtctacattgaagttgaagatgtgaatgacaatgccccgctgacctcagaacctatatattatcctgttgtcatggaaaactctccaaaggacgtatctgtcattcagatccaggctgaagatcctgactccagttccaatgaaaaactgacatacaggattacaagtggaaatcctcagaatttttttgccatcaatatcaaaacaggtctgattacaacaacttcaaggaaattggatcgagaacagcaggcagaacattttctggaggtgactgtgacagatggtggtccctctccaaaacagtcaaccatttgggtggtggttcaggttctagatgaaaatgacaacaagccccagttcccagagaaggtctaccagatcaagctgccagaacgtgaccgaaagaagagaggagaaccgatttacagggcttttgcatttgatagagatgagggccccaacgcagaaatctcctacagtattgtggatgggaatgatgacggaaagttctttattgaccctaaaactgggatggtttcttctagaaagcagtttacagcaggcagttatgacatcctaacgataaaggcagtggacaatgggcgcccacagaaatcctccacggcccgcctccacattgaatggattaagaaaccacccccttcacctataccattgaccttcgatgagccgttttataacttcacagtcatggaaagtgatagagtgactgaaattgtaggggtggtgtctgtgcagccagctaacacccctctgtggtttgacatagttggggggaattttgacagcgcttttgatgcagagaagggtgttgggacaattgtcatcgcaaaacctttggatgcagagcagaggtccatctataatatgagtgtggaagtcaccgatgggacaaatgttgctgttactcaggtatttatcaaagtgctggataataatgataatggcccagaattctctcagccgaattacgatgtgacaatttccgaggatgtgcttccagacacggagatcctgcagattgaagccacagatagagatgagaagcacaagctgagctacactgttcatagcagcatcgactccatcagcatgagaaaattccggattgaccctagcactggcgtgctctatactgccgagaggctggaccatgaggcccaggacaagcacattctcaacataatggtcagagatcaggagtttccttatcgaagaaacttggcccgagtcattgtgaatgtggaggatgctaatgatcacagtccttattttaccaacccactgtatgaagcgtctgtgtttgaatctgctgctctgggatcagctgttctgcaagtgacggctctggacaaagacaaaggagaaaatgcagaactcatatataccatagaagcagggaacactgggaacatgtttaagatcgaaccggtcctaggcatcatcaccatttgcaaagaaccagacatgacgacgatgggtcagtttgtcctatccatcaaagtcacagatcagggatccccgccaatgtctgctactgcaattgtgcgcatttccgtcaccatgtctgacaattctcaccccaagttcattcacaaagactaccaagcagaagtaaatgaaaatgttgacattggaacatcagtcattctaatctctgccatcagtcaatctaccctcatttatgaagtcaaagatggagacattaatgggatctttaccataaatccatattctggagtcatcaccactcagaaggccctggattatgagcgcacatcctcttatcaactcatcattcaggccaccaatatggcaggaatggcttccaatgctacagtcaatattcagattgttgatgaaaatgataatgccccagtttttctcttttctcaatactcaggcagcctaagtgaggctgccccaattaatagcattgtcaggagcttggataacagcccactggtgattcgagccacagatgctgacagcaaccggaatgctctgcttgtgtatcagattgtggagtcaacagcaaaaaagtttttcacggtggactccagtacaggtgcaatcagaacaattgccaacctggaccatgaaaccattgcccatttccattttcatgtgcatgtgagagacagtggtagcccccaactgactgcagagagtcccgttgaagtcaacattgaggtgacagatgtgaatgataacccacctgtttttactcaggctgtgtttgagactatcttacttctacctacctatgttggagtggaggttctgaaagttagtgccacagatcctgactctgaggtaccccctgaactgacatacagcctaatggaaggcagtttggatcattttttaattgactcaaacagtggagtacttaccataaaaaacaacaacctctccaaggatcactacatgctgatagttaaggtgtctgatggaaagttctacagtacctccatggtcaccatcatggttaaagaagccatggacagcggcctccactttacacaaagcttctattccacctcaatctcagagaacaacactaacataaccaaagttgctattgtcaatgcagttggaaatcgccttaatgagcccttaaaatacagcatcttaaacccaggaaataagttcaagataaaatctacctcaggggtcattcagacgactggagtcccctttgaccgtgaagaacaagagttatatgagctggtggtagaagccagccgtgagctggaccatctgcgtgtggccagagtggtggtcagggttaacattgaagacataaatgacaattctccagtctttgtgggcctcccatactatgctgctgttcaagtggatgcggaacccgggactctgatttatcaggtgacagccattgacaaagataaaggtccaaatggagaagtgacctatgtcctgcaggatgactatggccactttgaaattaaccctaattcagggaatgttattttaaaggaagcattcaactctgacttgtccaacattgagtatggagtcaccatcctagccaaggatggcggaaaaccttctttgtctacatctgtggagcttcccatcactattgtcaacaaagcaatgcctgtgtttgataagcccttttatacagcatctgtcaatgaagacatcagaatgaacacacccatcctaagcatcaatgccaccagtccagaaggccaaggcatcatatatatcattatcgatggggacccttttaaacagtttaacattgactttgacactggggtcctgaaagttgttagccctttggattatgaagttacatctgcttacaagctgacaataagagccagcgacgcccttactggtgctagggctgaagtcactgttgacttgctagttaatgatgtaaatgacaacccccctattttcgatcagcctacatacaatacaacactatcagaagcatctcttattgggacacctgttttacaagttgtctctattgatgcagactcagaaaacaataaaatggtacattatcagattgtccaggatacctacaatagcacagattattttcacatagatagctcaagtggcttaatcctgacagcacgaatgctggaccatgagttagtacaacactgcactttgaaagtcagatcaatagatagtggcttcccatcactgagcagtgaggttctcgttcatatctacatctctgatgtaaatgacaaccctccagtttttaatcagctcatttatgagtcatatgtgagtgaattagccccccggggccattttgtaacctgtgtacaagcctctgatgcagacagctctgattttgaccggttggaatatagcattttatctgggaatgaccggacgagctttctgatggacagcaagagtggagttatcacattgtccaaccatcggaagcagcggatggagcctctgtacagtctcaatgtgtctgtctctgatgggttgttcaccagcactgcacaggtgcatattagggtacttggggctaacttgtacagccctgccttttcacaaagcacatacgtagctgaggtgagagagaacgtggctgcaggaacaaaggtaattcatgttcgagccacagatggtgatccagggacttatgggcagatcagctatgccatcatcaatgactttgccaaggatcgattcctcatagacagcaatgggcaggtcatcaccacagaaaggctagaccgggaaaaccctctagaaggggatgttagtatttttgtgagggcccttgatggtggagggagaacaactttctgcactgtgagagtgattgttgtggatgaaaatgacaatgctccccagttcatgacagtggaatatagagccagtgtcagggcagatgttggaaggggccacttggtcactcaagttcaagccatagatcccgatgatggagcaaattcaaggattacttattccctctatagcgaggcctctgtttcagtggccgacctcctggaaatcgatcctgacaatggctggatggtcacaaagggtaattttaaccagctgaaaaatacagtgctttcgttctttgtcaaagcagtagatgggggcatcccagt

SEQ ID NO: 5084 - protein, 4601 aa, Homo sapiens
MTDTVPTSLHACKEIHFPSPLIFTFPVKEEKENVKGLQRWKYDVMDIIMGHCVGTRPPACCLILLLFKLLATVSQGLPGTGPLGFHFTHSIYNATVYENSAARTYVNSQSRMGITLIDLSWDIKYRIVSGDEEGFFKAEEVIIADFCFLRIRTKGGNSAILNREIQDNYLLIVKGSVRGEDLEAWTKVNIQVLDMNDLRPLFSPTTYSVTIAESTPLRTSVAQVTATDADIGSNGEFYYYFKNKVDLFSVHPTSGVISLSGRLNYDEKNRYDLEILAVDRGMKLYGNNGVSSTAKLYVHIERINEHAPTIHVVTHVPFSLEKEPTYAVVTVDDLDDGANGEIESVSIVAGDPLDQFFLAKEGKWLNEYKIKERKQIDWESFPYGYNLTLQAKDKGSPQKCSALKAVYIGNPTRDTVPIRFEKEVYDVSISEFSPPGVVVAIVKLSPEPIDVEYKLSPGEDAVYFKINPRSGLIVTARPLNTVKKEVYKLEVTNKEGDLKAQVTISIEDANDHTPEFQQPLYDAYVNESVPVGTSVLTVSASDKDKGENGYITYSIASLNLLPFVINQFTGVISTTEELDFESSPEIYRFIVRASDWGSPYRHESEVNVTIRIGNVNDNSPLFEKVACQGVISYDFPVGGHITAVSAIDIDELELVKYKIISGNELGFFYLNPDSGVLQLKKSLTNSGIKNGNFALRITATDGENLADPMSINISVLHGKVSSKSFSCRETRVAQKLAEKLLIKAKANGKLNLEDGFLDFYSINRQGPYFDKSFPSDVAVKEDLPVGANILKIKAYDADSGFNGKVLFTISDGNTDSCFNIDMETGQLKVLMPMDREHTDLYLLNITIYDLGNPQKSSWRLLTINVEDANDNSPVFIQDSYSVNILESSGIGTEIIQVEARDKDLGSNGEVTYSVLTDTQQFAINSSTGIVYVADQLDRESKANYSLKIEARDKAESGQQLFSVVTLKVFLDDVNDCSPAFIPSSYSVKVLEDLPVGTVIAWLETHDPDLGLGGQVRYSLVNDYNGRFEIDKASGAIRLSKELDYEKQQFYNLTVRAKDKGRPVSLSSVSFVEVEVVDVNENLHTPYFPDFAVVGSVKENSRIGTSVLQVTARDEDSGRDGEIQYSIRDGSGLGRFSIDDESGVITAADILDRETMGSYWLTVYATDRGVVPLYSTIEVYIEVEDVNDNAPLTSEPIYYPVVMENSPKDVSVIQIQAEDPDSSSNEKLTYRITSGNPQNFFAINIKTGLITTTSRKLDREQQAEHFLEVTVTDGGPSPKQSTIWVVVQVLDENDNKPQFPEKVYQIKLPERDRKKRGEPIYRAFAFDRDEGPNAEISYSIVDGNDDGKFFIDPKTGMVSSRKQFTAGSYDILTIKAVDNGRPQKSSTARLHIEWIKKPPPSPIPLTFDEPFYNFTVMESDRVTEIVGVVSVQPANTPLWFDIVGGNFDSAFDAEKGVGTIVIAKPLDAEQRSIYNMSVEVTDGTNVAVTQVFIKVLDNNDNGPEFSQPNYDVTISEDVLPDTEILQIEATDRDEKHKLSYTVHSSIDSISMRKFRIDPSTGVLYTAERLDHEAQDKHILNIMVRDQEFPYRRNLARVIVNVEDANDHSPYFTNPLYEASVFESAALGSAVLQVTALDKDKGENAELIYTIEAGNTGNMFKIEPVLGIITICKEPDMTTMGQFVLSIKVTDQGSPPMSATAIVRISVTMSDNSHPKFIHKDYQAEVNENVDIGTSVILISAISQSTLIYEVKDGDINGIFTINPYSGVITTQKALDYERTSSYQLIIQATNMAGMASNATVNIQIVDENDNAPVFLFSQYSGSLSEAAPINSIVRSLDNSPLVIRATDADSNRNALLVYQIVESTAKKFFTVDSSTGAIRTIANLDHETIAHFHFHVHVRDSGSPQLTAESPVEVNIEVTDVNDNPPVFTQAVFETILLLPTYVGVEVLKVSATDPDSEVPPELTYSLMEGSLDHFLIDSNSGVLTIKNNNLSKDHYMLIVKVSDGKFYSTSMVTIMVKEAMDSGLHFTQSFYSTSISENNTNITKVAIVNAVGNRLNEPLKYSILNPGNKFKIKSTSGVIQTTGVPFDREEQELYELVVEASRELDHLRVARVVVRVNIEDINDNSPVFVGLPYYAAVQVDAEPGTLIYQVTAIDKDKGPNGEVTYVLQDDYGHFEINPNSGNVILKEAFNSDLSNIEYGVTILAKDGGKPSLSTSVELPITIVNKAMPVFDKPFYTASVNEDIRMNTPILSINATSPEGQGIIYIIIDGDPFKQFNIDFDTGVLKVVSPLDYEVTSAYKLTIRASDALTGARAEVTVDLLVNDVNDNPPIFDQPTYNTTLSEASLIGTPVLQVVSIDADSENNKMVHYQIVQDTYNSTDYFHIDSSSGLILTARMLDHELVQHCTLKVRSIDSGFPSLSSEVLVHIYISDVNDNPPVFNQLIYESYVSELAPRGHFVTCVQASDADSSDFDRLEYSILSGNDRTSFLMDSKSGVITLSNHRKQRMEPLYSLNVSVSDGLFTSTAQVHIRVLGANLYSPAFSQSTYVAEVRENVAAGTKVIHVRATDGDPGTYGQISYAIINDFAKDRFLIDSNGQVITTERLDRENPLEGDVSIFVRALDGGGRTTFCTVRVIVVDENDNAPQFMTVEYRASVRADVGRGHLVTQVQAIDPDDGANSRITYSLYSEASVSVADLLEIDPDNGWMVTKGNFNQLKNTVLSFFVKAVDGGIPVKHSLIPVYIHVLPPETFLPSFTQSQYSFTIAEDTAIGSTVDTLRILPSQNVWFSTVNGERPENNKGGIFVIEQETGTIKLDKRLDRETSPAFHFKVAATIPLDKVDIVFTVDVDIKVLDLNDNKPVFETSSYDTIIMEGMPVGTKLTQVRAIDMDWGANGQVTYSLHSDSQPEKVMEAFNIDSNTGWISTLKDLDHETDPTFTFSVVASDLGEAFSLSSTALVSVRVTDINDNAPVFAQEVYRGNVKESDPPGEVVAVLSTWDRDTSDVNRQVSYHITGGNPRGRFALGLVQSEWKVYVKRPLDREEQDIYFLNITATDGLFVTQAMVEVSVSDVNDNSPVCDQVAYTALLPEDIPSNKIILKVSAKDADIGSNGYIRYSLYGSGNSEFFLDPESGELKTLALLDRERIPVYSLMAKATDGGGRFCQSNIHLILEDVNDNPPVFSSDHYNTCVYENTATKALLTRVQAVDPDIGINRKVVYSLADSAGGVFSIDSSSGIIILEQPLDREQQSSYNISVRATDQSPGQSLSSLTTVTITVLDINDNPPVFERRDYLVTVPEDTSPGTQVLAVFATSKDIGTNAEITYLIRSGNEQGKFKINPKTGGISVSEVLDYELCKRFYLVVEAKDGGTPALSAVATVNINLTDVNDNPPKFSQDVYSAVISEDALVGDSVILLIAEDVDSQPNGQIHFSIVNGDRDNEFTVDPVLGLVKVKKKLDRERVSGYSLLVQAVDSGIPAMSSTATVNIDISDVNDNSPVFTPANYTAVIQENKPVGTSILQLVVTDRDSFHNGPPFSFSILSGNEEEEFVLDPHGILRSAVVFQHTESLEYVLCVQAKDSGKPQQVSHTYIRVRVIEESTHKPTAIPLEIFIVTMEDDFPGGVIGKIHATDQDMYDVLTFALKSEQKSLFKVNSHDGKIIALGGLDSGKYVLNVSVSDGRFQVPIDVVVHVEQLVHEMLQNTVTIRFENVSPEDFVGLHMHGFRRTLRNAVLTQKQDSLRIISIQPVAGTNQLDMLFAVEMHSSEFYKPAYLIQKLSNARRHLENIMRISAILEKNCSGLDCQEQHCEQGLSLDSHALMTYSTARISFVCPRFYRNVRCTCNGGLCPGSNDPCVEKPCPGDMQCVSYEASRRPFLCQCPPGKLGECSGHTSLSFAGNSYIKYRLSENSKEEDFKLALRLRTLQSNGIIMYTRANPCIILKIVDGKLWFQLDCGSGPGILGISGRAVNDGSWHSVFLELNRNFTSLSLDDSYVERRRAPLYFQTLSTESSIYFGALVQADNIRSLTDTRVTQVLSGFQGCLDSVILNNNELPLQNKRSSFAEVVGLTELKLGCVLYPDACKRSPCQHGGSCTGLPSGGYQCTCLSQFTGRNCESEITACFPNPCRNGGSCDPIGNTFICNCKAGLTGVTCEEDINECEREECENGGSCVNVFGSFLCNCTPGYVGQYCGLRPVVVPNIQAGHSYVGKEELIGIAVVLFVIFILVVLFIVFRKKVFRKNYSRNNITLVQDPATAALLNKSNGIPFRNLRGSGDGRNVYQEVGPPQVPVRPMAYTPCFQSDSRSNLDKIVDGLGGEHQEMTTFHPESPRILTARRGVVVCSVAPNLPAVSPCRSDCDSIRKNGWDAGTENKGVDDPGEVTCFAGSNKGSNSEVQSLSSFQSDSGDDNAYHWDTSDWMPGARLSDIEEVPNYENQDGGSAHQGSTRELESDYYLGGYDIDSEYPPPHEEEFLSQDQLPPPLPEDFPDQYEALPPSQPVSLASTLSPDCRRRPQFHPSQYLPPHPFPNETDLVGPPASCEFSTFAVSMNQGTEPTGPADSVSLSLHNSRGTSSSDVSANCGFDDSEVAMSDYESVGELSLASLHIPFVETQHQTQV

SEQ ID NO: 5085 - DNA, 240 bp, Homo sapiens
atgaccttcgtcattactgatgaaaatcttatgccagaacaagcttatgatgctgatgaagcattaccgttttggcattattgccctggaactacactgagtagaactgatgatacagttcctacagagaataaggatgccaaaggcagaataactgagctgggatgtgctaatgcagcaggcacacataagtgtaaacatactgtgataggcaacagcttgcatcttcactgtttttaa

SEQ ID NO: 5086 - protein, 79 aa, Homo sapiens
MTFVITDENLMPEQAYDADEALPFWHYCPGTTLSRTDDTVPTENKDAKGRITELGCANAAGTHKCKHTVIGNSLHLHCF

SEQ ID NO: 5087 - DNA, 240 bp, Homo sapiens; identical to SEQ ID NO: 5085

SEQ ID NO: 5088 - protein, 79 aa, Homo sapiens; identical to SEQ ID NO: 5086

SEQ ID NO: 5089 - DNA, 972 bp, Homo sapiens
agacagagccaaaatggaaggcgggacaagggcggcctggctggggcgaggggctggtctgggtccctgggaaccccttgccttgtgggcttcggtctccagggaggagctaggcagccgggctgcggggccgccggactgtggggtcctccgcgcagcgagctgggaggagcggtcggctgggctgttgagctgcgcctcctccaactgctgggaaactccgcacttcaatattggagcatctctttcccgggcaggaaaatacgctgctaacccccagtgggccgtagattggtactatcaattgagtctgtcatttggagagaccaattttgggcaggcatccaggcattgttctgcatctctgcaatgtatacgttttgtgccggtggcttgacaaccgtccttaactggtgctgccaatatggtggaaagcaggaagaagaaataaatgtcttctctgtaagacatcactgtcaagaacactgaaagaagaacccattaacgtagggaacgttgaggactggaacaggttgtagggcgtcttcctacactttgggttataacttccattgcatcaccaccatttaccagtaaaccagcacacacagcaatcagtactcgaaatggttctcttttgcagaaaaagcctgcttttctcccagctttggtgagatagatacgtaatcttcgtaaagacctataaggaattcctctgtggaacaaaattttaagcctccagtacaggatgctgaaagaagcaactctttaatcttgccagcccatgcacagtgaagctgaagtgcttcaatttacagatgttttacatttagggaaggcttttccaacaaagacctaccgcagttacatcacaggctccacctccgcctgccaggctgcttctgcaaggctgttagtaaggatactatgtattgctgtgcttgattaatgaagaaaataaatctccaaatc

SEQ ID NO: 5090 - protein, 127 aa, Homo sapiens
MEGGTRAAWLGRGAGLGPWEPLALWASVSREELGSRAAGPPDCGVLRAASWEERSAGLLSCASSNCWETPHFNIGASLSRAGKYAANPQWAVDWYYQLSLSFGETNFGQASRHCSASLQCIRFVPVA

SEQ ID NO: 5091 - DNA, 811 bp, Homo sapiens
acaaaccgtcaacagctggtctcgcatgtcctttgttcccggtctgctcttgtgtttcgttctcctcctgtgtgttagccctgtgtaccttccctctcgttcaccctccacatttcccatctctgagcccctcagctttatagggatgtcagcttggccccaatgtagtcccatttacagccagactcctggacttgcctatgagccatcttcatttccaaaaaggcgatattgggtatgtacattgcatgaaataaagtgggaatgtcccagaagcagaaggacatctgatgcagtccacgccaataaattgggcttacctttaaaaatcatctgaatatgcaggtcttagggcagagaatatagacagcttaagattttctaaactacaagtcccacccaaaatacggtattttcatgatttcccaaaggttgaccatcagcaagactggatatttttcagacttaagatgactgttcagtagctgatgttctggaaaaagatctgggccttcaccatgaaatcttaaatgtgagcagttactggatgttgaatttgaaacctattcatttctttttttaaaacaagcttggtcatttctgtgcaatgctataattcggaacgaaacaaagcacaatgttaataaggtagacactaattcattcctctgaagagagatctcttccagacattttaagccagggcaagaaatgtttaaagatgttttctgcagttgccgtagaaacactccttagcagtcatcttggctgttggtaaaaaatgtggccggtaccaaaaaaaaaaaaaaaa

SEQ ID NO: 5092 - protein, 103 aa, Homo sapiens
MSFVPGLLLCFVLLLCVSPVYLPSRSPSTFPISEPLSFIGMSAWPQCSPIYSQTPGLAYEPSSFPKRRYWVCTLHEIKWECPRSRRTSDAVHANKLGLPLKII

SEQ ID NO: 5093 - DNA, 811 bp, Homo sapiens; identical to SEQ ID NO: 5091

SEQ ID NO: 5094 - protein, 103 aa, Homo sapiens; identical to SEQ ID NO: 5092

SEQ ID NO: 5095 - DNA, 690 bp, Homo sapiens
atggcctggagtttccgtgcaaaagtccagctcggggggctacttctctccctccttggctgggtctgctcctgtgttaccaccatcctgccccagtggaagactcttaatctggaactgaacgagatggagacctggatcatggggatttgggaggtctgcgtggatcgagaggaagtcgccactgtgtgcaaggcctttgaatccttcttgtctctgccccaggagctccaggtagcccgcatcctcatggtagcctcccatgggctgggcctattggggcttttgctctgcagctttgggtctgaatgcttccagtttcacaggatcagatgggtattcaagaggcggcttggtctcctgggaaggactttggaggcatccgcttcagccactaccctccttccagtctcctgggtggcccatgccacaatccaagacttctgggatgacagcatccctgacatcatacctcggtgggagtttggaggtgccctctacttgggctgggctgctggtattttcctggctcttggtgggctactcctcatcttctcggcctgcctgggaaaagaagatgtgccttttcctttgatggctggtcccacagtccccctatcctgtgctccagtggaggagtcagatggctccttccacctcatgctaagacctaggaacctggtcatctag

SEQ ID NO: 5096 - protein, 229 aa, Homo sapiens
MAWSFRAKVQLGGLLLSLLGWVCSCVTTILPQWKTLNLELNEMETWIMGIWEVCVDREEVATVCKAFESFLSLPQELQVARILMVASHGLGLLGLLLCSFGSECFQFHRIRWVFKRRLGLLGRTLEASASATTLLPVSWVAHATIQDFWDDSIPDIIPRWEFGGALYLGWAAGIFLALGGLLLIFSACLGKEDVPFPLMAGPTVPLSCAPVEESDGSFHLMLRPRNLVI

SEQ ID NO: 5097 - DNA, 2794 bp, Homo sapiens
cccactcccccaccccaccctcacaccctccaccacccactgtccccatgtctacctgactcctcaatcgggatttggtggaacctcctcccaaaaaggcattagaaagaactgccaagcacaaaattttgttaagaaatggcaacttttggaacagagaggctttctgaataaaaagaaccagccccctagcaagacacccaagttgcactcagaacctccaaagaaagaggaaactcctagggtgcatggcacttggaagacccctcccttcccagaaaagaaggcagctgcctccagcagtgtgtcagaagagtccctggacaggaaagctgcggtgtcatggctgtcccctgccccttcaaagaatgctgattctgttgcagctaagtagatttgctggaggtgcccttctaaagattaacagccacccgacccactcccagaagaaaggcctccagaacaaatcctctcagctcagcgccccacagaactctacccaagctcactcagaataaatgctttggagcatcccagaagttgccaaggaagaatagtggcaattggctgtgagatgctggacacaggacccaaggggcatgttactttcttggttccatgtagcactgtcagctacagcggagatgtgcttcataacgagtacatccttccccctggccacactgtggactgccagaccaggtggagtggtgtccagaagcagcacatggtgaatgccatgctcttcaagattgctcatggcatatattgaagatacagggaagatggtggtggacatgccatccacaatgacttcaaagccccagtactttcatcccaagtccctcaccagtgacaactcccatatcccccttctcctccccaactggaaggctgattgcccagtgaacgtcaccatgtctttgaagcatctcatcaagaatctgctgaattgggacatctgggttgggaaaataggcattcctctgtggaagacacccaggctaccatggagctatacaaattggttgaactcaagtgggaagaacaccttgcccagaattccccgaaagactggtgacaatggggatgttggtgacgtggggaggcagaagcagcaccaggagaaatagggcagtggaccaatggacatctcaactagttccacatctttggaagctaaaattgttggcaagagaaaggttctactctagatttaatatccattgaaattccatctctggtgttatgtcctgtgtctggttaagtgtcccatggaaggagggcgcctccatgtcagaaccagccctgtgtcttttacctctttcatggtgctatccctaggtcccagggtgcgctgtgccagtgaagcgttttgaatttcaagggacagggcatactgagaaatgtagtttcccaaagtgcctgatcactagagtggctatatggctcattttgtgcctcttcttcttgagtaattaacagcaccttctttcactctcagaagtatcctggtttgataataaattatatggtcccattcctaacacaacctctgcttttggctcacagtctgcatctagcctgtttcaggacattgctcattcttcctacttgactgccagaggtgccattgcaggtgaggtttagttctcctttgggttctaaggcagtggaggtaagacagtagcttggaagtcaacttttctgatttaggaaagcagtctctttcctaaggctatagaggatttatttcatgtaggtcccagttggtaggttaaaaaagaatttgtaaagtgtttctaactcatttatgctggaggttgcaaatttttttggtgaaaaataagaccttggcaatgaccttgagcagtaggatattaaattttaactcccacaagcttagcattccaataatggaacactacgcataaatgggttaatggtttttagtctggccgggcgcggtggatcacttgaggtcaggagttccagacccgcctgaccaacatggtgaaaccccgtctctactaaaaatacagaattagccgagcgtggtggcgcatgcctgtagtcctagctactcgggaggctgaggcaggagaatcacttgaaccggggaggtggaggttgcagtgagccaagatcacgccattgcaccccagcctgggcaacaagagcaaaactctgtctcataaataaataaataattgtttttagtctttatcttggtaaaccaagcccctaaaaattctaattattcccttgatacatttttataatggaaaaaataaaatgattataaatttcagattttattttttaaggttacacatatctgcttgtatatgtgtgacacagtcctgggaaaatataaaagaaactgttaatggataccattaggtagtagaactgagatggaggtagatgacttttatggtctgttttatacttttttgtatttgaattttcgtaccaggtacatgcattacttttacagtttaagaataaaaatgttggccaggcacagtggctcacacctgtaatcccagcactttgggaggctgaggtgggtggatcagttgagatcaggagttcgagaccagcttggctgacacagcaaaaccccatctctactaaaaatataaaaattagctgggcgtggcatcgcacacctgtagtcccagctactcgggaggctgaggcaggacaattgcttgaacccaggaggcagaggttgcagtaagccgagatcgtgccgctgcactccagcctgggtgacaaaatgagactc

SEQ ID NO: 5098 - protein, 132 aa, Homo sapiens [sequence omitted]

SEQ ID NO: 5099 - DNA, 2794 bp, Homo sapiens
cccactcccccaccccaccctcacaccctccaccacccactgtccccatgtctacctgactcctcaatcgggatttggtggaacctcctcccaaaaaggcattagaaagaactgccaagcacaaaattttgttaagaaatggcaacttttggaacagagaggctttctgaataaaaagaaccagccccctagcaagacacccaagttgcactcagaacctccaaagaaagaggaaactcctagggtgcatggcacttggaagacccctcccttcccagaaaagaaggcagctgcctccagcagtgtgtcagaagagtccctggacaggaaagctgcggtgtcatggctgtcccctgccccttcaaagaatgctgattctgttgcagctaagtagatttgctggaggtgcccttctaaagattaacagccacccgacccactcccagaagaaaggcctccagaacaaatcctctcagctcagcgccccacagaactctacccaagctcactcagaataaatgctttggagcatcccagaagttgccaaggaagaatagtggcaattggctgtgagatgctggacacaggacccaaggggcatgttactttcttggttccatgtagcactgtcagctacagcggagatgtgcttcataacgagtacatccttccccccggccacactgtggactgccagaccaggtggagtggtgtccagaagcagcacatggtgaatgccatgctcttcaagattgctcatggcatatattgaagatacagggaagatggtggtggacatgccatccacaatgacttcaaagccccagtactttcatcccaagtccctcaccagtgacaactcccatatcccccttctcctccccaactggaaggctgattgcccagtgaacgtcaccatgtctttgaagcatctcatcaagaatctgctgaattgggacatctgggttgggaaaataggcattcctctgtggaagacacccaggctaccatggagctatacaaattggttgaactcaagtgggaagaacaccttgcccagaattccccgaaagactggtgacaatggggatgttggtgacgtggggaggcagaagcagcaccaggagaaatagggcagtggaccaatggacatctcaactagttccacatctttggaagctaaaattgttggcaagagaaaggttctactctagatttaatatccattgaaattccatctctggtgttatgtcctgtgtctggttaagtgtcccatggaaggagggcgcctccatgtcagaaccagccctgtgtcttttacctctttcatggtgctatccctaggtcccagggtgcgctgtgccagtgaagcgttttgaatttcaagggacagggcatactgagaaatgtagtttcccaaagtgcctgatcactagagtggctatatggctcattttgtgcctcttcttcttgagtaattaacagcaccttctttcactctcagaagtatcctggtttgataataaattatatggtcccattcctaacacaacctctgcttttggctcacagtctgcatctagcctgtttcaggacattgctcattcttcctacttgactgccagaggtgccattgcaggtgaggtttagttctcctttgggttctaaggcagtggaggtaagacagtagcttggaagtcaacttttctgatttaggaaagcagtctctttcctaaggctatagaggatttatttcatgtaggtcccagttggtaggttaaaaaagaatttgtaaagtgtttctaactcatttatgctggaggttgcaaatttttttggtgaaaaataagaccttggcaatgaccttgagcagtaggatattaaattttaactcccacaagcttagcattccaataatggaacactacgcataaatgggttaatggtttttagtctggccgggcgcggtggatcacttgaggtcaggagttccagacccgcctgaccaacatggtgaaaccccgtctctactaaaaatacagaattagccgagcgtggtggcgcatgcctgtagtcctagctactcgggaggctgaggcaggagaatcacttgaaccggggaggtggaggttgcagtgagccaagatcacgccattgcaccccagcctgggcaacaagagcaaaactctgtctcataaataaataaataattgtttttagtctttatcttggtaaaccaagcccctaaaaattctaattattcccttgatacatttttataatggaaaaaataaaatgattataaatttcagattttattttttaaggttacacatatctgcttgtatatgtgtgacacagtcctgggaaaatataaaagaaactgttaatggataccattaggtagtagaactgagatggaggtagatgacttttatggtctgttttatacttttttgtatttgaattttcgtaccaggtacatgcattacttttacagtttaagaataaaaatgttggccaggcacagtggctcacacctgtaatcccagcactttgggaggctgaggtgggtggatcagttgagatcaggagttcgagaccagcttggctgacacagcaaaaccccatctctactaaaaatataaaaattagctgggcgtggcatcgcacacctgtagtcccagctactcgggaggctgaggcaggacaattgcttgaacccaggaggcagaggttgcagtaagccgagatcgtgccgctgcactccagcctgggtgacaaaatgagactc

SEQ ID NO: 5100 - protein, 132 aa, Homo sapiens [sequence omitted]

SEQ ID NO: 5101 - DNA, 483 bp, Homo sapiens
atgaggaggttgcagagagggctagaaaaaggagtgaccgccgtcctcctgaatcttgttgctttctgggtcaatccttcctgttccttgtctactgctgacatctactgcaggggaataggggactgggtgtccccacccttccagcacctctgcctaggacaggcttgtttgattctaaaatcctttagaatagccagcaagagtggtgacagaggtcaagcaaaagttactcccatttaccttgtccttcaggccattgggcatccctatttgcctccatactggtctctgggatttcagctgtgtcgatggggttacaatagcctagatatgctgaaaaccacagatgttcagtattgtgatatcgactgcatggaacgtcagatggacttcatatatgatgaggacaaatttgatggtctgcctgagtacattaaggaactgaaaatgatggaatgcaatatatcattgttttggtaa

SEQ ID NO: 5102 - protein, 160 aa, Homo sapiens
MRRLQRGLEKGVTAVLLNLVAFWVNPSCSLSTADIYCRGIGDWVSPPFQHLCLGQACLILKSFRIASKSGDRGQAKVTPIYLVLQAIGHPYLPPYWSLGFQLCRWGYNSLDMLKTTDVQYCDIDCMERQMDFIYDEDKFDGLPEYIKELKMMECNISLFW

SEQ ID NO: 5103 - DNA, 387 bp, Homo sapiens
atgcaaacctatgcagccagagctgatatcaaggaaactcccctagaaaatccagactggactctcttcacagatgagagctctctcgtaaatcaggcagttcataaggcaaaatatgcagtagtcactctaaataacatcattgaaagtgtgtgtctctctccaggcacaagtgctcaattagctgaactgatagctcttacaagagcacttgaattaagtaaggaaatggtagctaacatttacactgactccaagtatgctttcttagttctccatgctcatgctgccatttggaagaaaagacatcttcttaccattaatggatcccctataaaataccatcaggaaattaacaggttattgtcatcagatttccctccatga

SEQ ID NO: 5104 - protein, 128 aa, Homo sapiens [sequence omitted]

SEQ ID NO: 5105 - DNA, 1224 bp, Homo sapiens
atgctacggtacattgctacgcttagacgcaccaggaaagctctggacgaggaagatgtaggttgttgccagcacctatgcacggacagacagaaagtcctctgcttccttcaggcccttgcttccacttccccggggcttccagctgagcctgcatttttctttgacttccccctcttgcctggcgttttcagcaaacacacacagaggattacggggagaaaactatcatattaccaagtggacatggctcctaaggtgccaactgaacacagcaacagcgacgaggcccgaggtgcagctgtctcgcctcgcctgtcttttgcaggcaccggcatgcacagaagatggctctccgggaggaagattcctttccattttgttctctctctgcctccgcaaggctcgcagccacctctcgggagtgcagggccagatcctgtgccagcggccttacacggccacagtcggattcgctgccgcagcagccgccacccccaggagccgccgggaccctcgcgtcgtcgccgccgcggcccagatccccacaccatgccgtcggagaagaccttcaagcagcggcgcaccttcgaacaaagagtagaagatgtccgacttattcgagagcagcatccaaccaaaatcccggtgataatagaacgatacaagggtgagaagcagcttcctgttctggataaaacaaagttccttgtacctgaccatgtcaacatgagtgagctcatcaagataattagaaggcgcttacagctcaatgctaatcaggccttcttcctgttggtgaacggacacagcatggtcagcgtctccacaccaatctcagaggtgtatgagagtgagaaagatgaagatggattcctgtacatggtctgtgcctcccaggagacgttcgggatgaaattgtcagtgtaaaaccagaaaaaatgcatctcttctagaattttttaaacccttaccaaggaaaaaaaaagggatgttaccaactgagatcgatcagttcatctaatcacagatcatcaaacagtagtgttcccacctaggagtgttaggaagttgtgtttgtgtttcaagcagaaaaactgagctccaagtgagcacattcagctttggaaactatattatttaatgtaggctagcttgttttcaaattttaaaagtttaaaaataaaatactttgcattctaaaaaaaaaaaaaaattgcctta

SEQ ID NO: 5106 - protein, 309 aa, Homo sapiens
MLRYIATLRRTRKALDEEDVGCCQHLCTDRQKVLCFLQALASTSPGLPAEPAFFFDFPLLPGVFSKHTQRITGRKLSYYQVDMAPKVPTEHSNSDEARGAAVSPRLSFAGTGMHRRWLSGRKIPFHFVLSLPPQGSQPPLGSAGPDPVPAALHGHSRIRCRSSRHPQEPPGPSRRRRRGPDPHTMPSEKTFKQRRTFEQRVEDVRLIREQHPTKIPVIIERYKGEKQLPVLDKTKFLVPDHVNMSELIKIIRRRLQLNANQAFFLLVNGHSMVSVSTPISEVYESEKDEDGFLYMVCASQETFGMKLSV

SEQ ID NO: 5107 - DNA, 1224 bp, Homo sapiens; identical to SEQ ID NO: 5105

SEQ ID NO: 5108 - protein, 309 aa, Homo sapiens; identical to SEQ ID NO: 5106

SEQ ID NO: 5109 - DNA, 324 bp, Homo sapiens
atgtgcgccgcctcccccaaccccaagcaagatgctagagccgcctgtttgaccatcttcaccaacgaggtggaaagatggagcaagctggtgaagtacttcagccggcagctgtcctgcaaaaagaaggtagccttgcaggagcgcaacgcggagctggacggcttcccccagctacggcactggttccgaatcgtcgatgtgcgcaaggaggtcctggagagtcaccttggccaaatcacttcacttcttagtccagcgctgtccagtggaactttctgctacgatggaaatattttctatctgtgctgccggctgtggtag

SEQ ID NO: 5110 - protein, 107 aa, Homo sapiens
MCAASPNPKQDARAACLTIFTNEVERWSKLVKYFSRQLSCKKKVALQERNAELDGFPQLRHWFRIVDVRKEVLESHLGQITSLLSPALSSGTFCYDGNIFYLCCRLW

SEQ ID NO: 5111 - DNA, 231 bp, Homo sapiens
atggatgaggaaaacatgacgaaaagcgaggagcagcagcctctgagtttgcaaaaagccttacagcagtgcgaactggtccaaaacatgatagacttgagcatctccaacctggaagggcttaggaccaaatgtgctacctccaacgacctcacacaaaaagaaatccggaccctggaggtggtcaaaaggtggtttttgctcacagaatggggccgcctgtcagtgtag

SEQ ID NO: 5112 - protein, 76 aa, Homo sapiens
MDEENMTKSEEQQPLSLQKALQQCELVQNMIDLSISNLEGLRTKCATSNDLTQKEIRTLEVVKRWFLLTEWGRLSV

SEQ ID NO: 5113 - DNA, 372 bp, Homo sapiens
atgggcggcggcggctccgagccgcgcgggcccgcacactcagccggtgcggcccgggcctcgagctcttcctgtggcctggccgcggccccgcactatggggctccagactgcagcggccgcccccggttctgccaccgcggccgccgctccagctgccgccacagcagtccgcgaggtcccgcccccaagccactgccggttgtcgccgcacgacgtggcggcagggccaaccagcgcgaacccggcgggtacgaccactgcagctggcgctccgccggactggacgcagagctaaatcccgcgcggctccccggctttcctggaggagtctcgccgagtgtgcacgccgcgaagctcacccgttcctag

SEQ ID NO: 5114 - protein, 123 aa, Homo sapiens
MGGGGSEPRGPAHSAGAARASSSSCGLAAAPHYGAPDCSGRPRFCHRGRRSSCRHSSPRGPAPKPLPVVAARRGGRANQREPGGYDHCSWRSAGLDAELNPARLPGFPGGVSPSVHAAKLTRS

SEQ ID NO: 5115 - DNA, 372 bp, Homo sapiens; identical to SEQ ID NO: 5113

SEQ ID NO: 5116 - protein, 123 aa, Homo sapiens; identical to SEQ ID NO: 5114

SEQ ID NO: 5117 - DNA, 3423 bp, Homo sapiens
aaatcagcacaggacgagtacaaccgtgggagtcacacctggagaagtctctaattcctctgggcatgaatcagacctgccgcccatgcctggggaggcagtagaatatcacagtattcaattaatacgggatgaatttttaatgaacgtgcagaaatttgcaagtaatattcaaagaaccatgcagcaacttgaaggtgagatcaagttagaaatgccaatcatcagtgtggagggagaggtgtccgacctggcagctgacccggaaaccgttgacatcttggagcagtgtgtgataaactggctgaatcagatatccacagcggttgaggcccaactgaagaagacacctcagggtaaaggccctctggctgaaattgaattctggagggaaagaaatgcaaccttaagtgcgctgcatgaacaaacaaagcttccaatagtcagaaaagtcttggatgtgatcaaggaatccgactccatgcttgtggctaatctgcagccagtgttcaccgagttattcaagttccacacggaggcctcagacaatgtgcgctttctctccaccgtggagcgttatttcaagaacataacgcacgggtctggcttccacgtggtcctggacaccatccccgccatgatgagtgccctgcggatggtgtggatcatctcccgacactacaacaaagacgagaggatgattccgctcatggagcgcatcgcctgggaaatcgctgagagagtctgccgagtggtcaacctgcggactttgttcaaagaaaatcgagcgagtgcccaaagcaaaaccttggaagccaggaacaccctcaggctgtggaaaaaggcctattttgacacccgggccaagatagaggcttcggggagggaagatcggtgggagtttgaccggaagcggctgttcgagaggacggattatatggccaccatctgccaggacctctccgacgttctgcaggttttggaggaattttataacatatttggtccagaactaaaggcagtgacgggggaccccaagcgcattgatgatgtcctatgcagagtggacggcctagtcacccccatggaaaacctgacctttgaccccttcagcatcaagtcctcccagttctggaaatatgtgatggatgaattcaagattgaagttctgattgacatcattaataaaatctttgtccagaaccttgaaaatccaccactgtataagaatcaccctccagtagcaggtgcaatatactgggaacgatctctgttctttcggattaagcataccatcctccgatttcaagaggtacaagagatactggacagtgatcgaggacaggaggtcaaacaaaaatatttggaagtaggtaggacaatgaaggagtatgaagacagaaagtatgagcagtggatggaggtgacggagcaggtgctgccagctctcatgaagaagagccttttgaccaagtcttccatcgccacagaggagccttcgactttagaaaggggagctgtttttgcaatcaacttttcaccggctctcagagagattattaatgaaacaaagtacttagagcagctggggttcactgtccctgaattagcaagaaatgttgctctccaggaagacaaattccttaggtacacagctgggatacagcgcatgttggatcattatcacatgctcataggaacgttaaacgatgcggagtctgtgcttctcaaagatcattcccaggaactgctccgagtgtttaggtcgggatataagaggttgaactggaactcactaggtatcggtgactatataactggttgcaaacaggccattgggaaatttgagtctctcgtccaccagattcataagaatgcagatgacatttcttccaggctgacattaatagaggccataaatctctttaaatatccagccgctaaaagtgaggaagaactcccaggcgtgaaggaattttttgaacacattgagcgagaaagggccagcgacgtggaccacatggtccggtggtatcttgccattggaccactgctgaccaaagttgagggcctggtcgtccacaccaacacaggcaaggcccccaagctggcctcctactacaaatactgggaaaagaaaatttatgaggtcctgacaaagctcatcctgaagaacttgcagtcttttaattctttgatccttggaaatgtccctctgttccacactgaaaccattctgacggcacctgagatcatccttcatcccaacacaaatgagatcgacaagatgtgcttccattgtgtccggaattgcgtggagatcaccaagcattttgttcgttggatgaatggcagctgcatagaatgcccacctcagaagggggaggaagaggaagttgttataataaacttttacaatgatatctctctgaaccctcagataattgaacaagctgttatgatcccccaaaatgtccacaggattctgatcaatcttatgaagtatctacaaaaatggaagcggtatcgacctctctggaaattggacaaagctattgtgatggagaaatttgctgccaagaaacctccttgtgtagcatatgatgaaaagttgcagttctattccaagatagcttatgaggttatgcgccaccctctaattaaggatgagcattgcatcagacttcagctcaggcatctggcaaacacagtgcaggaaaatgccaagtcctgggtgatttcgcttggaaaacttctcaatgagtcagcaaaagaggagctctataatctccatgaagagatggaggtactcaatcgctgtgtgtaattgaaactacttttcgtgtaagttgggtcttcatttgcgccattactgttttttctgtgtttgcttagtgttctttgtactttctgttatagcacctggccaaaaaccttaggaagatccccaatacccttgaagatctcaagtttgtccttgcaacaattgcagaaattagaagtaaatctctagtcatggaactcagatatagggacgtccaggagcgataccgtaccatggcaatgtataacctctttgtaagtcaacttgtattttcttattcatttaacaattggattgaccactaacgacccttttcagaaatgcttctcaagtatactgccattgatttgttttcaaataagtgactttaagtaatacattgtaaatgtaaagcaatgccactgttatttagaataatgaaaatatagagtatttttcaatctgtatggctcaaatggattgatctgtaactataccatttccattctcccttttcttttcttcttttttttgtgttaatttcctttaatagataaagagctcttgcaaaaatgataagaagagagtgaaagatttaagataataaaagaaactggtag

SEQ ID NO: 5118 - protein, 913 aa, Homo sapiens
MPGEAVEYHSIQLIRDEFLMNVQKFASNIQRTMQQLEGEIKLEMPIISVEGEVSDLAADPETVDILEQCVINWLNQISTAVEAQLKKTPQGKGPLAEIEFWRERNATLSALHEQTKLPIVRKVLDVIKESDSMLVANLQPVFTELFKFHTEASDNVRFLSTVERYFKNITHGSGFHVVLDTIPAMMSALRMVWIISRHYNKDERMIPLMERIAWEIAERVCRVVNLRTLFKENRASAQSKTLEARNTLRLWKKAYFDTRAKIEASGREDRWEFDRKRLFERTDYMATICQDLSDVLQVLEEFYNIFGPELKAVTGDPKRIDDVLCRVDGLVTPMENLTFDPFSIKSSQFWKYVMDEFKIEVLIDIINKIFVQNLENPPLYKNHPPVAGAIYWERSLFFRIKHTILRFQEVQEILDSDRGQEVKQKYLEVGRTMKEYEDRKYEQWMEVTEQVLPALMKKSLLTKSSIATEEPSTLERGAVFAINFSPALREIINETKYLEQLGFTVPELARNVALQEDKFLRYTAGIQRMLDHYHMLIGTLNDAESVLLKDHSQELLRVFRSGYKRLNWNSLGIGDYITGCKQAIGKFESLVHQIHKNADDISSRLTLIEAINLFKYPAAKSEEELPGVKEFFEHIERERASDVDHMVRWYLAIGPLLTKVEGLVVHTNTGKAPKLASYYKYWEKKIYEVLTKLILKNLQSFNSLILGNVPLFHTETILTAPEIILHPNTNEIDKMCFHCVRNCVEITKHFVRWMNGSCIECPPQKGEEEEVVIINFYNDISLNPQIIEQAVMIPQNVHRILINLMKYLQKWKRYRPLWKLDKAIVMEKFAAKKPPCVAYDEKLQFYSKIAYEVMRHPLIKDEHCIRLQLRHLANTVQENAKSWVISLGKLLNESAKEELYNLHEEMEVLNRCV

SEQ ID NO: 5119 - DNA, 123 bp, Homo sapiens
atgggtgcctcgctggatcagaaacgcagcggacaccctgccggatccggaggggtggaagttagtggcgggtctgcgacggcggcaatcagcagtggtggatggcttgttctctgtcgctga

SEQ ID NO: 5120 - protein, 40 aa, Homo sapiens [sequence omitted]

SEQ ID NO: 5121 - DNA, 1698 bp, Homo sapiens
catgaagcaataaacataggaggacctcactctgttgtgcatgctggagtacagtggcgcagtctctgctccctgaaacctcgacttccagggctcaagagatccttccatcttaccaagtagctgggactacagatgtatagttattttccaaacccaccattgtaaaattacattctattaaagagaaaaagaagaaaaagaaacttaatttgttttttgggggatagttgagatgtgtttaacacagcccctgctggtaaccaaggtcctcctccaatgacgggtatgaatatgaacaacagagcaactatacctggcccaccagtgggtcctggtcctgccatgggaccagaaggagccgcaaatatgggaactccaatgatgccagataatggagcagtggaagaaccggaactatgatttgtgccttccttattgcctccgaaatatttttaactgcagaggaaagcctgtattattttggagaaaggcgaacagataaaacgcacagcagtaaatttcagggactagaaactccttctcagtagagacaaggtttcaccctgttggcgaggctggtctcaaactcctgacgcccagtgatctgcccacctcggcctcccaaagtgctgggattacaggcgggagccaccatgatggccaacttttgaattctgaaccagttgattgagtaccagagctcttcaataccttgaagaaagattcaggggagagccgttgtgaacagcttgccccagggaaaggacaaggctgagagaattccagggcttccttgagaaaacagaattgaggaaatgcaaagtgaagaattctagcatcaggaacaagagaagaatgatggaaaacctgctactgagatatgttggatattttgcacaagtgaaacatctctacaactggaatctccctccaagacggatactctttataataagattcattatttattcgattcgtggtgttggaacaggcgatgtatgtgatctaaaattccaaatagtaatggagaaaaaggttgtcttttccagtacttcattaggaaattgttcaatactgcatgacattgaaacagctggtgtattaactaatgtatatgacagtccatctctgtacgatgatgtgaaagtgcagtttttctcttcgaatcttcctaaatactatgacaattgttcatttttcttctggttcaacacatcttttattcaaaataacagagagaaatttagatattttattaaacttggaagtcattaatgccatataaagcaatgctaagagagtcagcatgtgttactgatgtgttgctgaagattaaagtatttttaagtctcaccaaaaaggtggaaggagccaactgagacacaaaaaaggggctgaggttctattcacggctttatctaccaagaaatgaattggataatccacatcaacaaaaagcatggaaaatttatccaccagaatttgccgtggagatactttttggcgagaaatgacttccaatgacgtagctggatccgattaagtatagtttccccttccccttctgggaaagaattaatgttctttccaacccctgccatgtgcatgttcatatgtcctaagtcttccttgatgatgtatctatatttatatatgtttatatatgttcttcataaatctattaaatatatatag

SEQ ID NO: 5122 - DNA, 699 bp, Homo sapiens
ttctgtgaaatagttttgtctttagcagtcgtttgtttcagttataacggttataaatggcacttcatttgatttctttaaacattttacttggcctgctgtttaatcagacatggaagccaggacctcgggacgggggcggggctccgacagaggcggcgattgtggcggcccatttgtaaatgctgcggagattgaggtgtcggttcgtgctgctgagctgcccaggcttcacggagcgagctggggaagccggcctctctggggtgtctgtctctctgacctggctgtggcggaacttgagttcctgtgggcagcgcggcagccgcagtccgctggagcagggtggtgaagtagcgttgctggctgtcctaagggccggtcttgccccagctttgtcaagggcttctctcttgaagcttcgtgtggattcatggctttcaagaacgtgttgtattttaggggactgctaaatcacttcccagaccaactagttacttctcacggtctaagagtggctttgaatttgctgtttgtatccactctcctccctcaccgtgcagagaatttatctttttttcaatactgctttaaagaatgtttacatagcactttctggagatttcaaggctgtcagtttgttacattttttaaaagttttattgaggtataattgctatacaataaaaatggcacatg

SEQ ID NO: 5123 - protein, 79 aa, Homo sapiens
MEARTSGRGRGSDRGGDCGGPFVNAAEIEVSVRAAELPRLHGASWGSRPLWGVCLSDLAVAELEFLWAARQPQSAGAGW

SEQ ID NO: 5124 - DNA, 561 bp, Homo sapiens
atgccggcagcgtttccctgtgtctttcccccacaaagtctccaagtctttcctcaaatgatcgtcaaggtttgggagaaacaatctcttcctctgcccgggttgcgtggatctccagtggaaaggaagaaccggaactatggtttgtgcctgccttattgcctccaaaatatttttaactgcagaggctttatctaccaagaaatgaattggataatccacataaacaaaaagcttggaaaatttatccaccagaatttgccgtggagatactttttggaacctggcttaccagtatatcaccccagcgttgacacactgggaacgggtcacgcatgtggatgatcaaaggtcagctcctggtcaatatgagaagactggtttcagaaaagttgagtgctgaagactacaaagctgtttgtaagttatcaagctaggatttgatcccaggtctgcctgataaatcctggactcttaaccatgacataggagtgccctcttgactcctatgatggcataaagaattgtatcagaacgggtaatctggcattaaaacccctg

SEQ ID NO: 5125 - protein, 114 aa, Homo sapiens
MPAAFPCVFPPQSLQVFPQMIVKVWEKQSLPLPGLRGSPVERKNRNYGLCLPYCLQNIFNCRGFIYQEMNWIIHINKKLGKFIHQNLPWRYFLEPGLPVYHPSVDTLGTGHACG

SEQ ID NO: 5126 - DNA, 396 bp, Homo sapiens
atggcggaagcagtcacctacctcataagttgtgatgaggactggttgctgagaggactcacaacacctaacccacagtggaaacaacaaaattccccattaaacacctacttctctcttccaacatgttccttgcctgtcaaccgcacaccttctccttatctccccacaagacagaatctaaatatcttgcttgatgctctgagcagtccagtccacaccttcagcttcaaaccccatactgaaaaacacagggctggggtcagcaaatgcctgcctggcctgacagctggtgtggttctgaagctccacaactttggcctaatcatctctctcaggggttctcctctcccctgtccttggggaaggaaacaagacaagtcaaccccagtgtga

SEQ ID NO: 5127 - protein, 131 aa, Homo sapiens
MAEAVTYLISCDEDWLLRGLTTPNPQWKQQNSPLNTYFSLPTCSLPVNRTPSPYLPTRQNLNILLDALSSPVHTFSFKPHTEKHRAGVSKCLPGLTAGVVLKLHNFGLIISLRGSPLPCPWGRKQDKSTPV

SEQ ID NO: 5128 - DNA, 396 bp, Homo sapiens; identical to SEQ ID NO: 5126

SEQ ID NO: 5129 - protein, 131 aa, Homo sapiens; identical to SEQ ID NO: 5127

SEQ ID NO: 5130 - DNA, 798 bp, Homo sapiens
atgggtgctttagaagaaggcttcattgtgcccttctcctctgactctgatgcacattttgatgctgcggttggatatttagaggacattatcatggatgaagatttccagttattacagagaaatttcatcaacaactactaccaggagtttgaggacaccaaagagaataaactcacctacacacctatttttaatgaatatatttctttggcaggaaagtatatagaagaacagtatatagaagaaaaacagttgctggagcaaattcttggctttaccatggcaactttcacaacgttacagcaccacaaagatgaagtggttggtgacatactccaaatgctgctcaaatttacagattttctggcttttaaagaaatgtttctggactgcagagcagaaaaagaaggccagagactggacttaagccgtggtttagtggagacttcattgtgcaaatcatcttctatgacagcttctcagaacaatctgcagcacaaccagttaccatcagttggcgctagcacaccaccgactgcaggctttactgatgaggaaactgaggctcggagaggctgtcacgaacttgctgtagtcacacaggaactggccgaaggggccgcggccgcacatgcgcagtcagtcccgttggttgtgcgctcagccccgcccccagaggcgccgcgctccctgacagcccgcgggcgtacacacgctgacgcgcaggctgcggtcgcgcaggcgcagtcggggcgccttcccggtataggcgccttttaccccagcgtgtcctga

SEQ ID NO: 5131 - protein, 265 aa, Homo sapiens [sequence omitted]

SEQ ID NO: 5132 - DNA, 798 bp, Homo sapiens; identical to SEQ ID NO: 5130

SEQ ID NO: 5133 - protein, 265 aa, Homo sapiens [sequence omitted]

SEQ ID NO: 5134 - DNA, 700 bp, Homo sapiens
atgaggtgtaaaaacctgggcgttggagaaaggcagcctggaggggatagtctgtgtgtccctcaggttcctcaacccgccatcggggccaactggaggtatgactttcctgcacacaggagcaagctgaaaactgccctgtggctttattccacgttcacccctgcagcaaatgccttttctgtgaggaactacgggctgatggggaatcagaggtggttcttcctaagtggcgtttctgagtgggttccaggagtccacaaggcgggaaccgagccgcaggccgctgcgaggagtactaccccgccacccccgcgccgcgagtttccgcgcacgtggccgtggggccggtctcgctcccgccccccgccgggcccgcgcagccccctcctctgcggctcccggagcggccagagcgcgcggcggcgggcgggggcgggccgcaagcagggctccctggccgctttccaggtcggcgcactaatacgggcgatgaggcttcgcggctccagtctgactgacgccggctggggccgccgccgccgccgccgccgccgccgctgctgcagccgctgtctcggtccccgccgccgccgccgggccctgcaggcgctgggcgcgcgcagccaggcaagttggccaccctgttcaagggcttaggagaaagtcaacacacttcgcaacttgaattggtcccagc

SEQ ID NO: 5135 - protein, 219 aa, Homo sapiens [sequence omitted]

SEQ ID NO: 5136 - DNA, 3493 bp, Homo sapiens
agaccggaaacggaggagagcgcgggggatgtgtttggcatggggacgcactgttacagttgcgctcctggttggctttgtgtttccgcggtgttggtagagtctcggtgtttctacctcttagcaccctttcctgccaccctttgtcctgtggaagcccggagacatcagcggctgcaattttgctactcgctgctcggcatggaacggtcaggtaccgcagttcagcgctcttggccccgcaggtcctcgggcatccccgtgccccgtgctgtacattcagttatcctccgacttcccggggtcgaaggtattacctgctgggttttagaatctattgctttacatctgagaaaagaaaaatcccagaaagataagatgacttgcccaagatcatagcgtgcctggaagacagtgctccgattacaagctggtcgctgtgcctcattcgtcttgtcatcaactcctgtcagtttatccaagctccaaaagcgaagttgttttagcttttgcttcccaagatttatttgatagtctcatttctgtttccttcgtttattctttcgttcattattggaaaactttacagcgtgccagtactggtcataaaccccagtgtgtcttaggccttagtgagctgtgaggtgcatgaccttaggtaagttacttctctgattttcagtttccttatctgcaaaatggagaccttagggagttaatgtgggtatgagaaatgtacataaaacatattgcacaaggtgaggcatgtagtgtatgctaataaatggtaagttgctgctgctatggttgttaacaataattataaaaagcaaatggaaaaggcttgaattgaaaaaaatttagacacatagtttttttccttattagcctgcactgtatttttcattttttttaatgcatctttccaggacaaaaaataatatccaaagatattttggcactaacagcgctatctgtagcaagaaagttgagcagtgtgaactgttgagacttccaagaagacttcagagaaccaagacagtgtaaaggaaaacaggaaaaaagacttgttagacattattaagggcacgaaagttgaattgagcacagtaaatgtacaaacaacaaagccacccaacagaagtccacttaaaagctacaactggcccgcctcaaagagctacagagcatgctccaaagaagagaaatgagcccgtgagtcctgagttggtggcagctgcatctgctgctctgttttgacaagcaaacaagccagaactgctcaggcagctccgtagcatgaggaggagtcaggggcacagagagatggagagagacctagttagagagcgaaccatgtgctggatttagccagtcctgcatttttctatacttcaaatcaaaacgggccatgcttcacatctacccatgatgaataggggtactttgattaagaataaatagagctgactgaattctgaacaagaaaaacatattcaaggggaagagatgtaatagttttgacgtgacgacagttactaaagaagcacctgaacagacacatcaccttcactttgggatgtggaatttgctaaataagccacagaaaatgaacatcccttcagaatgggtttgaagagctgatccagtggattaaagaggggaaactgggagtttccagttaacaatgaagcaggagctgactaaggctttggaacagaaaccagatgatgcacaatattattgtcaaagagcttattgtcacattcttcttgggagttactatggatctgtaaataactgacgaaaaacccatctgtttctacgtagttgctgttgccgacacaaagaagtcttatgaactcaatccaaataattccactgctatgctgagaaaagggggctggcggcatggagtcttgctctgtcacccatcctcgagtgcaatggcaccatcttagttcactgcagccttgaattccagggctcgagccatccttctgcctctgcctcctgagtaggtgggactacaggcatgtgccaccatactgagctaatttgttaaacactttttttgtagagacgaggtcttgctacgtttcccagactggtctctgaactcccggcctcaagtgatcctactgccttggcctcccaaagtactggcataatagacatgagccactgcacctggctcctaagttcttttcttgaataatatctttctttttttttattttttgaggtggagtctcaccctgttgcccaggctggagtgcaatggcgtgatctcggctcactgcaacttctacctcccgggttcaagtgattctcctgcctcagcctcctgaatagctaggattacaggcgtgcgctaccacgcctggctaattttttgtgtctttagtagagatgcggtttcaccatgttggccaggcttgtctcgaactcttgacctcgtgatccacccgccttggcctcccaaagtgttgggattacaggcgtgagccaccacgcctggccaagtaatatcttaatatcatgccattgacatttatcctctaattatttcagaggtggccttcagaagaaggcctctttggtaaaattgctattgaggatatttcactgaaaaacaaatttatctttaaatttaaatccaggaaaaatttaaactttcaggcttctatttttatcagacagggtaaaaaatttataactcagaatattaccctttcccctctttgtgtgatggattgcttggttttagttactgattatttaaaataataagttattcaaatctaggattttgatacaatagttcttctctagaatatagtgtgtgtgtgagagtatatttaaaatttttattaaggcccatggggcagcctttgaggaaaccagaccttggggatcgccaggcaggattagtggcaggaattgagagaacagagccccacagagctcctcggggaccgtcccccagtcacaagagtatctcaaggaagtagtcttctcccacatcccccaaagataactaccagagggtcagttctctgagcccttctcagtgtagaaaagacaagtgtcaaagcttccccactcaccctgagtttgccttctatgacaatacgtcgtttggcctcactgaggctgagcagaggatgctggacctcccaggatattttgggtcaaatgaagaggatgaaaccacaagtacacttagcgtggagaagctggtgatctagactgagaatcagcctgagcttaacacagctggggtctgctactcgcgttttgtagacttttgtgtaactatttgtaccgtaggacagaatgtgaggaggaagtaacacacacagaggaggatgtgtgtgtgtgcatgtgtttgaattcacaaggaagaaattatttatcttgagctttttcctttgttattcagtttttattggtttattactaataatgataataaaatgtaaacaagagc

SEQ ID NO: 5137 - DNA, 2601 bp, Homo sapiens
agctctgctcaggcttcaacatggcgggccgtttcggttgacttcgcctgtggaaaccgaattccccctccatggtttccccaggatatgagttgggggcctcacctcgcctataagggtcaggcgagctttctggatgctcgagggacctttcggcctgcgcagccggagcagcttgtcccaatgccctgccatttctgtgagggcccacgaggcctggaggagcctcggagcccccgcaggccctcgcgtcactgcctcaagagggtgctcggagccctgctcgggagctggtccccaacgaggtgtggaaccccttcttgctggaactccacggagagactgtcctgctaggacctgcttccagaagagttgatcccagccgtgaaagtgcatgatgccttcagcgaagcaggcaggaaaggctcaagtgatcctcctgtatcaccctgggtatcaaggccattcagtggaaaagaacagtctcttcagcaagtggatgaagttagatctcttcctcacatcatacagaaaaatcagcctcaaatggaagaaatatctaaatgaagccgaacacttgataaaaagttcatcagcgtaaataagaagaatcccctccattacatacaaaagaaaaaataactggagagatcgtctctgctctaagcgtgtttttaagtctctgcagtcttggaccaagctcgttttattccctactctaggagaatctcagagcaccaggattctgtttggggttgccatggacacagagttcttaatccagtactggcttattctcaatacgagagaaggttgtactgaagacacgagacctgagacttgtgtcattttagcggctgaaccgaccccaacttcttctgagcggcagtggcgccagaagcagtctggctttcagtccccatcctgttgacctggtggaagtcatcattgatagagacacccatgacattccccacacaagtgaactgacaggaggaaccaaggaggcacgtatctacgaaaatgtgtcagaacgactttccaggtttgaagattatgaaaatgctgaatatgtcgcttcatatgacagcaggattaagaaaattgttcattcaattgtgtcatcctttgcagttggaatatttggagttttcctgatcttgttggatgtggctctgatctttgctgacctaattttcactgatagcaaagtttatattcctttggagtatcattctatttctctagctattgctttattttttctcatggatgttcttcttcgagtatttgtagaagggagacagcattatttttctgatttacttaacattttagatactgctgttactgtgattattctgctggttgatgtcgtttacattttttttgacgttaagtttcttaaggatattcccagatggacacgtttatttcgacttctacgacttatcattctgataagagtttttcatctggctcatctaaaaagacaacttggaaagctgataagaaggctggtttcaggaaacaaaaggtgatacgaaagtgatggatttgacctagacctcacttatattacagaacatattgtcgctatgtcgtttccatcttcgggaggccagtctttctatcggaatccaattaaggtgaaagagcttatgatcctaagcacttccataatagggtcagtagaatcatgatcgatgatcataatgtccccactctacgggagatggtagcattctccaaggaagtgttggagtggatggctcaagattctgaaaacatcgtagtgattcactgtaaaggaggcaaaggaagaaccggaactatggtttgtgcctgcctgattgccagtgaaatatttttaactgcagaggaaagattgtactattttggagaacggcgaacagataaaaccaatggcactaaatatcagggagtagaaactccttctcagaatagatatgttggatattttgcacaagtgaaacatagctacaactggaatctccctccaagaaaaacactgtttataaaaagattcgttatttattcgattcatggtgttggaacaggcgatggatatgatctaaaagtccaaatagtaatgaagaaaaagattgtcttttcctgtacttccttaaagaattgtcgggtatttcatgacactgaaacagacagggtaataactgatgtgttcaactgtccacctctgtatgatgatgtgaaagtgcaagcttcctcttcagattttcctaaatactatcacaactacccttttttcttctggtttaacacatctttaatacaaaataacgggctttatctacaaagaaatgaattggataatcttcataaacaaaaaacatggaaaatttatcaaccagaatatgcagtagagatatattttaatgagaaatgacttaagttatgttgtaactggtagctgattaagtatagttccctgcaccccttctgggaaagaattatgttctttctaaccctgccacatagttatatgttctaaatcttccttgctggtacatctatattgatatatgtatacacatgttctttataaatctattaaatata

SEQ ID NO: 5138 - protein, 242 aa, Homo sapiens
MIDDHNVPTLREMVAFSKEVLEWMAQDSENIVVIHCKGGKGRTGTMVCACLIASEIFLTAEERLYYFGERRTDKTNGTKYQGVETPSQNRYVGYFAQVKHSYNWNLPPRKTLFIKRFVIYSIHGVGTGDGYDLKVQIVMKKKIVFSCTSLKNCRVFHDTETDRVITDVFNCPPLYDDVKVQASSSDFPKYYHNYPFFFWFNTSLIQNNGLYLQRNELDNLHKQKTWKIYQPEYAVEIYFNEK

SEQ ID NO: 5139 - DNA, 511 bp, Homo sapiens
ttccttgtgtcttttcctcacaaagtctccaagtctctcgttaaattagctccaggacttgggagaaacagtgcccttcctcggtccgggttgcttggatccccagtggaaaggaagaaccggaactatggtttgtgcctgcctgattgccagtgaaatatttttaactgcagaggtgttggaacaggcgatggatatgatctaaaagtccaaatagtaatgaagaaaaagattgtcttttcctgtacttccttaaagaattgtcgggtatttcatgacactgaaacagacagggtaataactgatgtgttcaactgtccacctctgtatgatgatgtgaaagtgcaagcttcctcttcagctttatctacaaagaaatgaattggataatcttcataaacaaaaaacatggaaaatttatcaaccagaatatgcagtagagatatattttaatgagaaatgacttaagttatgttgtaactggtagctgattaagtatagttccctgcac

SEQ ID NO: 5140 - protein, 53 aa, Homo sapiens
MKKKIVFSCTSLKNCRVFHDTETDRVITDVFNCPPLYDDVKVQASSSALSTKK

SEQ ID NO: 5141 - DNA, 234 bp, Homo sapiens
atgcctgagcccccgccccgcggtgggctcccgcgcactgcccgagcatcccctacaggtgccaccccctgctctgcagagcccggtcctatcaaccacccaagggctgaggagtgcggtggcacagcgcgggactggcgggtagctccacccgcggacctggtgctggatccactaggtgaacccagctgggctcctcagtctggtggagacttggagaacttttatatctag

SEQ ID NO: 5142 - protein, 77 aa, Homo sapiens [sequence omitted]

SEQ ID NO: 5143 - DNA, 861 bp, Homo sapiens
atgactatagatgttaagatcactttaaaatatcaaaatgactgcatcagccaaaagctccacatcttatttgtacgttgtaaatttaggggccgattttccattcggctgcggggagcctggggcgacggctgtccggtacggggtccctccggttccgcggcggcggagcctctaggcctcacggccggacccgaacctcagcgttccggtggcggcggcggcctcacgatcctcccccgcgggcccgtcccatcaaatcggcaccgaccccgttgcggctccgccggtggctcctcgctcacattcctggcgggcggcgcctcagctcgttgccccggacccggcggcggcggcgacgaccctttgggcggcggtcgtcttggaccggaggattccaagggctcgggtcgtctaagggtcggggagccccggagacttgatcccgccctgcagctagtgtggcccctcagggtttggggagtcccactctggacgggaccctgtgatgcgatcgctcttgcaaagaaggatggcaagaagaagagcctttctgccatcagcattcacaagcgcatccatggtgtgggcttcaagaagtgtgcccctcgggcactcgaagagatccaaaaatgtgccatgaaggagatgggcactccagatgtgcacattgatactaggctcaacaaagctgtttgggccaaaggaataaggattgtcccataccgtatccctgtgtggttgtccagaaaacgtaacgaggatgaaaattcaacaaacaagctctatactttggttacccatgtacgtgttaccgttttcaaaaatctacagtcaatgtggatgagaactaaccactga

SEQ ID NO: 5144 - protein, 286 aa, Homo sapiens
MTIDVKITLKYQNDCISQKLHILFVRCKFRGRFSIRLRGAWGDGCPVRGPSGSAAAEPLGLTAGPEPQRSGGGGGLTILPRGPVPSNRHRPRCGSAGGSSLTFLAGGASARCPGPGGGGDDPLGGGRLGPEDSKGSGRLRVGEPRRLDPALQLVWPLRVWGVPLWTGPCDAIALAKKDGKKKSLSAISIHKRIHGVGFKKCAPRALEEIQKCAMKEMGTPDVHIDTRLNKAVWAKGIRIVPYRIPVWLSRKRNEDENSTNKLYTLVTHVRVTVFKNLQSMWMRTNH

SEQ ID NO: 5145 - DNA, 485 bp, Homo sapiens
aaaatgatattcattgtcctaatgtgtaaatttcgacaatttgcaaatttgtagattctttagaatagaactaactcaagcccttcattctgcagctgaggctcactgcccccagtgggcagtgggtccagggggtttctgaggacagggcatgacccagccctgctgcccccaagatggcacctggcttggaggggtgaggggccctgttagtctgactttgaagaagaccagccttccagactcgcttggtgccctgacaggagccctgggctcccccagtgttgcctgggtctgactttgcctcagtgaaaactgcctcgaattctttcttgcaccgatgggcagatgggcagtgtcggaggatcgtgtcatctgtcccgtggcgctggttggcttggtcaagtcagtgttcaaactatctcctgctctttcaaggggatctggggctctagaagattagaggacttggagaggttagtgac

SEQ ID NO: 5146 - protein, 40 aa, Homo sapiens
MGRWAVSEDRVICPVALVGLVKSVFKLSPALSRGSGALED

SEQ ID NO: 5147 - DNA, 1611 bp, Homo sapiens
atcatgattaatccagttctgcacaaaacactgaggtccattagaagacaataggtcttggctgtttcattccttttaagagctgtttaatattccacggagccctgggctcccccagtgttgcctgggtctgactttgcctcagtgaaaactgcctcgaattctttcttgcaccgatgggcagatgggcagtgtcggaggatcgtgtcatctgtcccgtggcgctggttggcttggtcaagtcagtgttcaaactatctcctgctctttcaaggggatctggggctctagaagattagaggacttggagaggttagtgacttgctcgaggtcggctaggaagcaagacccaggattccaactcaggtctgtgtgattcctctgcaaaatggagaggtggaaggatggatgtcaggtctgatggatggatggatgcctacatcaagatacatgcatagatggagagatggctggctacctcatgaatgctggactgttgtgagaatcaaacgagataatgtatgctgaggcatgctgtgaacactacgtgctgggtacaggagaatggaggctccagagtgaaattaatgacactttgtcgatgaagatcttgattgtgacctctgtggaaaatgagccatgaaccaaccaatatgaaaaataaaagaaatctacatggatcccactttggacaaagtgcgtgtcaacagttgcatgaaatggtatttcacttcttgattattgtttgtttttattctttttttagaaaaaatgaataaatgatcaaattattttgggggtaattaaataaaagaaagaacacaagtgagtcagtaaatgcttaaattaaggtagatcttggatcattgcttcatggcacactctcagaaatgctcaaatatggtgccttaaaaaaattaatgaggtttgggtgttgatgtggttagggagtatacagatagatagttgttagtggttacatttattactcttgcattgggtggatttaagggttcattatattaagaattaaacagtaagtaaattcatacataaaaggtatggttattcttgagtcaataatgagaatgtgttaggaaccaaggtttatgattaatctaaaataatttctaaaagaagttaagtctttgctgtttcgttctttctaaaatgtgtattttccttcacacaatgaacatgccacagctaattattcgataacaataaagacattggtgttttgcctctgtggttaaggagctcagagtctgttgtagataatagttaaagttcatgtcctgggtttaggtggcttgttcatcactaaattatgttagaagaataaaccgctaaatatatacatatataaaaagcataccatacaagaaccaataatggaagtgaaccaaggtttatgattagtttaattcagcccaacttaggtccattacaaatgatggagggcttttattaatttcagaggtttttaatattgtattttattttgtgccgtggttgatttacacacatttctttaaagttaaagatcaaggctattcactcctctagggagaagcagataggaaaaggaagatagtgtcagtgtcctca

SEQ ID NO: 5148 - protein, 40 aa, Homo sapiens; identical to SEQ ID NO: 5146

SEQ ID NO: 5149 - DNA, 1498 bp, Homo sapiens
atcatgattaatccagttctgcacaaaacactgaggtccattagaagacaataggtcttggctgtttcattccttttaagagctgtttaatattccacggagccctgggctcccccagtgttgcctgggtctgactttgcctcagtgaaaactgcctcgaattctttcttgcaccgatgggcagatgggcagtgtcggaggatcgtgtcatctgtcccgtggcgctggttggcttggtcaagtcagtgttcaaactatctcctgctctttcaaggggatctggggctctagaagattagaggacttggagaggttagtgacttgctcgaggtcggctaggaagcaagacccaggattccaactcaggtctgtgtgattcctctgcaaaatggagaggtggaaggatggatgtcaggtctgatggatggatggatgcctacatcaagatacatgcatagatggagagatggctggctacctcatgaatgctggactgttgtgagaatcaaacgagataatgtatgctgaggcatgctgtgaacactacgtgctgggtacaggagaatggaggctccagagtgaaattaatgacactttgtcgatgaagatcttgattgtgacctctgtggaaaatgagccatgaaccaaccaataagcaggcttagtcacccttgacacagtttgcagttatccacctcctccaagttcttaatatgttagatccagataactgccttgtacagccacctccaggatactgcctccctaaaaaacagctagatacactgaccccacagcctatgtggaccacacagatatagtggcttgctctaaatgcaccagtgagaactctctgcaggaaacctgcttgggaaatgccatagcctgcaatacaggctttccccttcccgctggccctgtgaggcatgcaggatctgtaagtaataaactgcttctgttgtttcatttcatgtgttttgttgagttgcttcctctgtgtctcacctgaccaacacacttgaattgaacttctttcctggtcagggatctcctagagaatggctatcttggcaggaatagactagatgtaggtcagacaagaaccacaggggtactgccagtgtaaatgagtttcctatgagagggacacctggtaatggataggatgcttaggcattagactgtctgctgggataaagacgtatcccataaaagatacgctgtaaacacccatgaccacctctcctgcatccccatcaggcagagctagaatttatattcactctcttgagacagacctcaagaccatgttagaagaaagtacaacactcatcatcctagaattatgattattccaattcagttcatccaaggtccctttaaaaatgcattggttaaagagtcagttaatattcttttttttggcatggtggcatgttggatgttgattttagtactaaaaataaataaataattacctaagtgtgtaaaataaaca

SEQ ID NO: 5150 - protein, 40 aa, Homo sapiens; identical to SEQ ID NO: 5146

SEQ ID NO: 5151 - DNA, 547 bp, Homo sapiens
tcatggaggactgttttatctgtttgtgatctgccgtcctctgtgagcctcaggatggatgtttgccagccgattccatggttacaagctctatagctgcatctatgtgttaggagcatgaagaccaataatggatgcactgagctgattatgaatttagccctgatgaagacttgtgttgctgtcatgatatgaaagattccagtaatgaacgcacttgagttgattcaagcacgcttccatggtcatgagctctgtggttgcatctgtgtgttaggagcatgcagaccaatagtgataatctcgaggtgatttatgcattcttccatggccaccagccttatgattgcatctgtgcgtcacagcttagagatcaataatggatgcaacaagctctttgaatcattctgttgggatcaagattgttgtgttccctctgtttggaaagagaccaagaatggatacgctcaggtgatttaagcagtcttccatggccacgagctctgtggttgcctctgtatattaagagcacagagattaaaaatgg

SEQ ID NO: 5152 - protein, 50 aa, Homo sapiens
MATSLMIASVRHSLEINNGCNKLFESFCWDQDCCVPSVWKETKNGYAQVI

SEQ ID NO: 5153 - DNA, 648 bp, Homo sapiens
tttctcagtgccttgcagagagaggagtagcttgctggctttgaacgcgtggcgtggcagatatttcagaaagcttcaagaacaagctggagaagggaagagttattcctccatattcacctgcttcaactactattcttattgggaatggacaatggaatgttctctggttttatcatgatcaaaaacctccttctcttttgtatttccatgaacttatccagtcactttggcttttcacagatgccaaccagttcagtgaaagatgagaccaatgacaacatcacgatatttaccaggatcttggatgggctcttggatggctacgacaacagacttcggcccgggctgggagagcgcatcactcaggtgaggaccgacatctacgtcaccagcttcggcccggtgtccgacacggaaatggagtacaccatagacgtgtttttccgacaaagctggaaagatgaaaggcttcggtttaaggggcccatgcagcgcctccctctcaacaacctccttgccagcaagatctggaccccagacacgttcttccacaacgggaagaagtccatcgctcacaacatgaccacgcccaacaagctgctgcggctggaggacgacggcaccctgctctacaccatgcggtga

SEQ ID NO: 5154 - protein, 166 aa, Homo sapiens
MDNGMFSGFIMIKNLLLFCISMNLSSHFGFSQMPTSSVKDETNDNITIFTRILDGLLDGYDNRLRPGLGERITQVRTDIYVTSFGPVSDTEMEYTIDVFFRQSWKDERLRFKGPMQRLPLNNLLASKIWTPDTFFHNGKKSIAHNMTTPNKLLRLEDDGTLLYTMR

SEQ ID NO: 5155 - DNA, 1071 bp, Homo sapiens
atgtgctgggcagaggaggatgagaatgccagaaagagtcctggaaaggcggggagctggcacagcgcacacagccccggcctgggcacccgcgcccgctcgcggctccaggcggggtgggcggcgccgcgccagggggtccccggcgcccattgctcccgccgcccggttgcgcggaccggcgctagtgcgcgggtgggggcggcgcgccgcggtggcccggcgtcccgtgtgcgtccagtgtgcgccccgcgggggcgcggccagcgccagagtagatacctgtcccgcccgccgcggccagcagcctcggaggaagccagggcaaagagggccggcggagaccaggtccgcgccggaggaagccgcgcccggccgaggccccggaccctgcgccccgagctccacggcaccatggccccgaagctgctgctcctcctctgcctgttctcgggcttgcacgcgcggtccagaaaggtggaagaggatgaatatgaagattcatcatcaaaccaaaagtgggtcttggctccaaaatcccaagacaccgacgtgactcttattctcaacaagttgctaagagaatatgataaaaagctgaggccagatattggaataaaaccgaccgtaattgacgttgacatttatgttaacagcattggtcctgtgtcatcaataaacatggaataccaaattgacatattttttgctcagacctggacagatagtcgccttcgattcaacagcacaatgaaaattcttactctgaacagcaacatggtggggttaatctggatcccagacaccatcttccgcaattctaaaaccgcagaggctcactggatcaccacacccaatcagctcctccggatttggaatgacgggaaaatcctttacactttgaggctcaccatcaatgctgagtgccagctgcagctgcacaacttccccatggacgaacactcctgcccgctgattttctccagctgtgagtaccagtccaagcccggggtgtgcatgctgtgtgagggatgcctagcctggtactgcttctgtcaaacagtcatgtga

SEQ ID NO: 5156 - protein, 356 aa, Homo sapiens
MCWAEEDENARKSPGKAGSWHSAHSPGLGTRARSRLQAGWAAPRQGVPGAHCSRRPVARTGASARVGAARRGGPASRVRPVCAPRGRGQRQSRYLSRPPRPAASEEARAKRAGGDQVRAGGSRARPRPRTLRPELHGTMAPKLLLLLCLFSGLHARSRKVEEDEYEDSSSNQKWVLAPKSQDTDVTLILNKLLREYDKKLRPDIGIKPTVIDVDIYVNSIGPVSSINMEYQIDIFFAQTWTDSRLRFNSTMKILTLNSNMVGLIWIPDTIFRNSKTAEAHWITTPNQLLRIWNDGKILYTLRLTINAECQLQLHNFPMDEHSCPLIFSSCEYQSKPGVCMLCEGCLAWYCFCQTVM

SEQ ID NO: 5157 - DNA, 273 bp, Homo sapiens
atgcccaagagaaaggctgaaggggatgctaaagaagataaggccaagataaaggacaaactacagggaagatccacaaagttgtctggaaagcctgctctgccaaagccacagctgaagcctaaaaaggcccctacaaaaaagggagagaaagtatccaaaggggaaaaaggaagagccaactctgacaaagaggtgaataaacctgcagaaaatggagatgccagaacggagaaggcacagaaagctgaaggtgctggagatgccaagtga

SEQ ID NO: 5158 - protein, 90 aa, Homo sapiens
MPKRKAEGDAKEDKAKIKDKLQGRSTKLSGKPALPKPQLKPKKAPTKKGEKVSKGEKGRANSDKEVNKPAENGDARTEKAQKAEGAGDAK

SEQ ID NO: 5159 - DNA, 273 bp, Homo sapiens; identical to SEQ ID NO: 5157

SEQ ID NO: 5160 - protein, 90 aa, Homo sapiens; identical to SEQ ID NO: 5158

SEQ ID NO: 5161 - DNA, 243 bp, Homo sapiens
atggcagaggaacaacaacagccgccaccacagcagcctgatgcccatcagcagcttccccccagcgcccccaactcgggggtggccctgccagcccttgtgcccgggctgccagggacagaggccagcgcgctgcaacacaagatcaagaactccatctggcaagacctcataagcctcttcttaaaacggtcatataagatctatcgttttgcccactttatggaaagagataaacaatga

SEQ ID NO: 5162 - protein, 80 aa, Homo sapiens
MAEEQQQPPPQQPDAHQQLPPSAPNSGVALPALVPGLPGTEASALQHKIKNSIWQDLISLFLKRSYKIYRFAHFMERDKQ

SEQ ID NO: 5163 - DNA, 138 bp, Homo sapiens
atggaggggaacagggatgaagctgagaaatgtgtcgacatcgtccaggaggctctgaatgctggcaaccgcgagaaggcccagcgtttcctgcagaaggccgagaagctctacccactgcccttggcctgcgcataa

SEQ ID NO: 5164 - protein, 45 aa, Homo sapiens [sequence omitted]

SEQ ID NO: 5165 - DNA, 723 bp, Homo sapiens
atggtggtaaccaggaacagttcccttcccccaccacacacccccccaaaaagactagaaaaaaaactggtcaacttggacgctggccgcgctcacgcagaacccgtgcccgcgggccggggaaggctgaacagaccctgggaggaaaagtgggcctgcaggcaccccgggctccccccgccgcctgtctcagataccgagcaggtgggattccgggaagccacctccgacttacgagccccccacgcgtccgacgcagaggcgcgggtgctactctcagcaccgccgcgccatcccggggcggaccgagccgcggagcacctcccggatctcaggagctctcgggcggagatctcggccatccgtgcctcctccccgaacccacccgccccgctcccgcgcccccggctgtcacctctccgggccgtgacagctccacctgccaccgctgcccgggtcgccgcccccgcactcaccacccagctggctcccgtgcgagcagcggatcgagctcggagagcggcgccggaatcccgcacgcgcggtagcggaacacgaggggctgaatgccgcggcgctctgagcccgcttagctcatccccagcccggcgctccgcccttcgcggcacccccgcccgcccgcccaggcctgccgtctcagtcagacgggactccccctcccctcgcggccgccactgcctccgcctctttctccgactctag

SEQ ID NO: 5166 - protein, 240 aa, Homo sapiens
MVVTRNSSLPPPHTPPKRLEKKLVNLDAGRAHAEPVPAGRGRLNRPWEEKWACRHPGLPPPPVSDTEQVGFREATSDLRAPHASDAEARVLLSAPPRHPGADRAAEHLPDLRSSRAEISAIRASSPNPPAPLPRPRLSPLRAVTAPPATAARVAAPALTTQLAPVRAADRARRAAPESRTRGSGTRGAECRGALSPLSSSPARRSALRGTPARPPRPAVSVRRDSPSPRGRHCLRLFLRL

SEQ ID NO: 5167 - DNA, 3281 bp, Homo sapiens
cagcgttcacctctcagccaagtccaatagcactcacttaggtgtgcatctgtggctttctctctgtctggtcagtgctcctttatatgtccataccccctgccagagggcagcattgagggtgtacagagcccagtgtgactctcctgcagctggggacatagaagagctctgtgacgatggcagatgtggttctccagcctcttgcctggctgccagtgggagtagcctgtctgttctggcacagggggctgttccatatggagggtcagaaactggccttcacagccacccaggcgttccttccacttctgcacgtcttcctttccccatgaagatttgggtgtaccctggttgtggtctctgaagactgggcaggcctgtactttgtgaagctttcagctgtctctggtaggcctgatgaagcctatctgcagaggttggcctgaagccataatgagcagttctgttctttttagcccttgtctagtttatggctctgttgcagacatgcctttctgtgtcttggttaaaagtactggtgtgtctttgcatttaggtgtggtctgtgagtctgggaaagcttctagaggagagccctccagggttgctctttggggtgggagtagtgggagcggaaatggaacgctgactgccctcttaaagccagaagggtacttcattcagggcaggcagttggcatgtgtaggcactcaggagtcttccttcagtttcagcggccggtgttcatcatcaggagtggcagggttggatatgggagtgagaatgtgcctctgagattgaccagtggccatagactccagcaagatgtgcatcttggtctgagaggcacccactgtaccagaaaccagacttgtatcgaccaatggcttatcagccccaggaggcttattactgccacaaatgtccctgatggtgagcagcacttggccactactgtctgatgttaaccagagttatgggggtggtttctgcaaatacacaatactgtggaggggttatgtggcttacccagaggtgcccagatagcaaatgaaggtgtaagattggaatccctgtctttctggttgacccttggcttggctaatcattcattcattcattccacacacattgatgaatgccgactctgtactgggttctgttctaggaactagacagacacatcacctatgctgctcttgtggggcttctgttccgctgggggagacagtcagtagtaagccttcaagcaaaggcatggctgctggtgtgatgagtgccatgaagacccataaggctgcgttaaaggagatgggtggtccaggaaggcctctctgaggaggtggcatttgagcactcaagtgccttacactggacttctgaccccatgagctggaacttaggatatctgatctagaagtacctctagaagtcctcttcccaataaacaagctaaggcccagtgagcttaaggtgtgaattcatggggtgattcatgggaaagatgaaattaaacccaagaaggacaagtataatagccggccactgctctgctcacaccagccttgggctccagccctctgccttttcatcccagaatgtgttttattatcttcaagactcagccctttgaaagatttagactgccaaattgcatttattaacaataataaatctattttctcatggctgggtgtggggagggggtagaaattttaaacacatttgtgacggttgatcagccctccaggtaaggcaacggctgactgcctggagctggtgtttttcctgcctaggcggagacaccgcccaattttgtaccaccagctgctgtcactgtcagagtggaatttccattggtgtttctgaaatagcagtgtttcctggaggacccccatttgtactttctggattccatctggacctggtttagggggttagatgcttttgaatgggggctggagagaccctactgatgcctctgaccagagatggtgaggcaggactcacagggcccccagggtttattttagggagagagaagcccacagttaaatcagaggtcacaaatacagcagcagaccccacctctcccaaggaccagactgagctataattggccaataatttcatctaaaagcaggaatcctacatcaatttgaaaggagcttctggctgaagtaagactttattaattagcctgttaggaaaatagtttcccagtattatgagggctggataatttcatgcccactgtttttcttgaagcttctcaaaggcagacacagccgcgtgcagcggctcacgcctacaatctcagcacgttgggaggtcgaggcaggtggatcacgaggccaggagatcgagaccatcctggccaacatggtgaaaccccatctctacaaaaatacaaaaattaattgggcgtggtggtgggcgcctgtaatcccagctactcaggaggctgaggcaggagaatcagaggttgcagtgaaccgagattgtgccactacactccagcctggccacagagcgagactcagaaaacaagggaagacactagattttcatttttgtactaaatagaaaaagtaatatctttttaaaaatgtgttttgtttgtttttaactgtttgttcatgccaatgtgccaggcaccatatttattctttaatctatacagaaatgctgctggatgaatggaattatgctcactctgccaatgagggaaccaaggctcagaaaggttaagtaaccaacctaaggtcaggtagtactgaggagctgtgcttggatacaaaaccaggtcatccaacctggaatcttagctttgacccccaaccttctcccggcaactttgatgataatatggaaataccttagactcttgacttgactttactttctcttctctgttataaaatctgctacattccttttcctgggaaagcgaaatagattatgccaaaagttctgatttttaaaaatgttttattgtgggccgggcgcagtggctcatgcctgtaatcccaggactttgggaggccgaggtgggtggatcatgaagtcaggagatcaagaccatcctggccaacacagtgaaaccccatgtctactaaaaatacaaaaattaactgggcttggtggtgcacgcctgtaatcccagctactcaggaggctgaggcgggagaatcccttgaacctgggaggcggaggttgtagtgagccgagattgtgccactgcactccagcctggcaacagagcaaggctccgtctc

SEQ ID NO: 5168 - protein, 125 aa, Homo sapiens
MKPICRGWPEAIMSSSVLFSPCLVYGSVADMPFCVLVKSTGVSLHLGVVCESGKASRGEPSRVALWGGSSGSGNGTLTALLKPEGYFIQGRQLACVGTQESSFSFSGRCSSSGVAGLDMGVRMCL

SEQ ID NO: 5169 - DNA, 930 bp, Homo sapiens
atgaggggaaaatatagatccggggacgcgcggccggctcgcgcgcgggctcgcggacttgccggggagggccccgggggtcccgccttggccgtccaccgggcggtgcgcgctttgaggtccactccctgcttgctcgtctgccccgccgtaaccccgagcgcgggagggcgaggccatcggtttgcgggcaagctggccccggagtcgagtggcctgtgcgaccaagcggggggtccggggggcccggggccggggcgagcgagcgggggagcgtccgcgtccctcggagtgtccaggctagcgaccgagacacctacaggcttccgccaacgccgtggcactgccgggagcaggctgagcaaaccagtccctatttggaactgctctcgcggcagttcagacctcgtgctcgtccccttcgcctgtctgtgtgtggtatcccgctctcctgcctgtgcgctccgacgcggcagcggcggtggcgctgagcgctcctcggtggggacgcggtgctcaagctgggagcagcgagaaccctttgcggaggcttcccggcttgcagcggcggcggcggcggcggcagcggcagtagcagacggaacagcaggctctcctctccgagggggggcgtcgaagcgcccgcgccgggctcccgccctcaccctccggcgctcctgcggccccaagccaccacctcgtagcccgcctccttcctcttctcgccgcgagccccaggcccggacgcctctaggatcggacccgcgcgccccggatgcttggggctgccccggcgcgcccccctacaggcgcgacccgctgagtgacccggagggggcccgagctcgccccaggaggggcccccggcctcgggaccccgcgccggacctgctggggagccgacgatgtccgcgcagtcccaggcattga

SEQ ID NO: 5170 - protein, 309 aa, Homo sapiens
MRGKYRSGDARPARARARGLAGEGPGGPALAVHRAVRALRSTPCLLVCPAVTPSAGGRGHRFAGKLAPESSGLCDQAGGPGGPGPGRASGGASASLGVSRLATETPTGFRQRRGTAGSRLSKPVPIWNCSRGSSDLVLVPFACLCVVSRSPACALRRGSGGGAERSSVGTRCSSWEQREPFAEASRLAAAAAAAAAAVADGTAGSPLRGGASKRPRRAPALTLRRSCGPKPPPRSPPPSSSRREPQARTPLGSDPRAPDAWGCPGAPPYRRDPLSDPEGARARPRRGPRPRDPAPDLLGSRRCPRSPRH

SEQ ID NO: 5171 - DNA, 930 bp, Homo sapiens; identical to SEQ ID NO: 5169

SEQ ID NO: 5172 - protein, 309 aa, Homo sapiens; identical to SEQ ID NO: 5170

SEQ ID NO: 5173 - DNA, 441 bp, Homo sapiens
atgcgggtgggggaaaactggggttgccaaagccgcctctccgccttcagtccgcccctccagtccgccgctcccggcgcccctgccgccgcgcccgcccagcgaccccatgacacagatcggcttaaagctccccgcctgtccgcctgccctcgagagagggtcccgacccccagacaggtctccgaaggctgggcttcgcctcacgccgacctccggccccaccccacccgcgtaactataaactccagctacttgccgcgctgcttttgcacagactcatgccctgccccagaagggacagtggccgtgctgtggcgggaacagcgggcgggctggtccagagcagggcctgcctgggtgaggaggatttggagggccaggccctgtcgtcacagggttatgaggccgaagggaccattccatttacaactgcgctga

SEQ ID NO: 5174 - protein, 146 aa, Homo sapiens
MRVGENWGCQSRLSAFSPPLQSAAPGAPAAAPAQRPHDTDRLKAPRLSACPRERVPTPRQVSEGWASPHADLRPHPTRVTINSSYLPRCFCTDSCPAPEGTVAVLWREQRAGWSRAGPAWVRRIWRARPCRHRVMRPKGPFHLQLR

SEQ ID NO: 5175 - DNA, 441 bp, Homo sapiens; identical to SEQ ID NO: 5173

SEQ ID NO: 5176 - protein, 146 aa, Homo sapiens; identical to SEQ ID NO: 5174

SEQ ID NO: 5177 - DNA, 2221 bp, Homo sapiens
attcgccatggccgcctcgccgggctcgggcagcgccaacccgcggaagttcagtgagaagatcgcgctgcacacgcagagacaggccgaggagacgcgggccttcgagcagctcatgaccgacctcaccctgtcgcgggttcaatttcagaagcttcagcaactgcgccttacacagtaccatggaggatccttaccaaatgtgagccagctgcggagcaatgcgtcagagtttcagccgtcatttcaccaagctgataatgttcggggaacccgccatcacgggctggtggagaggccatccaggaaccgcttccaccccctccaccgaaggtctggggacaagccagggcgacaatttgatggtagtgcttttggagccaattattcctcacagcctctggatgagagttggccaaggcagcagcctccttggaaagacgaaaagcatcctgggttcaggctgacatctgcacttaacaggaccaattctgattctgctcttcacacgagtgctctgagtaccaagccccaggacccctatggaggagggggccagtcggcctggcctgccccatacatggggttttgtgatggtgagaataatggacatggggaagtagcatctttccctggcccattgaaagaagagaatctgttaaatgttcctaagccactgccaaaacaactgtgggagaccaaggagattcagtccctgtcaggacgccctcgatcctgtgatgttggaggtggcaatgcttttccacataatggtcaaaacctaggcctctcacccttcttggggactttgaacactggagggtcattgccagatctaaccaacctccactactcgacacccctgccagcctccctggacaccaccgaccaccactttggcagtatgagtgtggggaatagtgtgaacaacatcccagctgctatgacccacctgggtataagaagctcctctggtctccagagttctcggagtaacccctccatccaagccacgctcaataagactgtgctttcctcttccttaaataaccacccacagacatctgttcccaacgcatctgctcttcacccttcgctccgtctgttttcccttagcaacccatctctttccaccacaaacctgagcggcccgtctcgccgtcggcagcctcccgtcagccctctcacgctttctcctggccctgaagcacatcaaggtttcagcagacagctgtcttcaaccagcccactggccccatatcctacctcccagatggtgtcctcagaccgaagccaactttcctttctgcccacagaagctcaagcccaggtgtcgccgccacccccttaccctgcaccccaggagctcacccagcccctcctgcagcagccccgcgcccctgaggcccctgcccagcagccccaggcagcctcctcactgccacagtcagactttcagcttctcccggcccagggctcatctttgaccaacttcttcccagatgtgggttttgaccagcagtccatgaggccaggccctgcctttcctcaacaggtgcctctggtgcaacaaggttcccgagaactgcaggactcttttcatttgagaccaagcccgtattccaactgcgggagtctcccgaacaccatcctgccagaagactccagcaccagcctgttcaaagacctcaacagtgcgctggcaggcctgcctgaggtcagcctgaacgtggacactccatttccactggaagaggagctgcagattgaacccctgagcctggatggactcaacatgttaagtgactccagcatgggcctgctggacccctctgttgaagagacgtttcgagctgacagactgtgaacagaaggcagtggaacagaagaatgtttttctgcaacagccaaaatagaatggaatagaatgaagccagctgataccacgggctttcgttatcttgacatagaaggaagcagtgccacggctccagggtttcagatgagatcccatctcagacactgtggcttcctccagatcacacagctttgtactgcctctcccgcctgtggccaaagtcgtgttgcagcaggcaggctgcttggagcttcccatgaactggaaagctcacctccactgcatctttttactggccatccagtcagccgatgtgtaagagtaggaaatactgtgtcactggaggccctccgtagcattggg

SEQ ID NO: 5178 - protein, 619 aa, Homo sapiens
MAASPGSGSANPRKFSEKIALHTQRQAEETRAFEQLMTDLTLSRVQFQKLQQLRLTQYHGGSLPNVSQLRSNASEFQPSFHQADNVRGTRHHGLVERPSRNRFHPLHRRSGDKPGRQFDGSAFGANYSSQPLDESWPRQQPPWKDEKHPGFRLTSALNRTNSDSALHTSALSTKPQDPYGGGGQSAWPAPYMGFCDGENNGHGEVASFPGPLKEENLLNVPKPLPKQLWETKEIQSLSGRPRSCDVGGGNAFPHNGQNLGLSPFLGTLNTGGSLPDLTNLHYSTPLPASLDTTDHHFGSMSVGNSVNNIPAAMTHLGIRSSSGLQSSRSNPSIQATLNKTVLSSSLNNHPQTSVPNASALHPSLRLFSLSNPSLSTTNLSGPSRRRQPPVSPLTLSPGPEAHQGFSRQLSSTSPLAPYPTSQMVSSDRSQLSFLPTEAQAQVSPPPPYPAPQELTQPLLQQPRAPEAPAQQPQAASSLPQSDFQLLPAQGSSLTNFFPDVGFDQQSMRPGPAFPQQVPLVQQGSRELQDSFHLRPSPYSNCGSLPNTILPEDSSTSLFKDLNSALAGLPEVSLNVDTPFPLEEELQIEPLSLDGLNMLSDSSMGLLDPSVEETFRADRL

SEQ ID NO: 5179 - DNA, 901 bp, Homo sapiens
cagaggcccgggaatctgcaaatgagcgcattccccaggcagttcccatgcaggtgatccacggaccacatgttgagaaactgcagtcacccttagggccacaccgtccctctcctcgctgtcccctctctgtagtgactggccctgaccttcaggagtgcactttccactctaccaggaagccctatgacatcctcaggctccccagacctgcagcttgcatggggcccctcccttcttccacacccaccctccgtatggtcccctgctctgccctcgtgctttgctggcccctgcccgctactcccactctcagacacccaggggtggtgggccctaactggctggcccctcccagcgctgccctctgccgtccagatgctgcagtgtggccagatttaccttccagtaacatacttctagtcacccctcctcctgcgaagtgatctgcagtggctgtttgaccagaccacaaagttcacatctcctgagcttagtgtccgtggctgtccacctcccagccatacttgactgtccccaaactctccctgcagccacatgtttcccatgacctgtgggctctgcagatggacctctctccgctagagatgcccttctcccaaatggcttccctcctggaaggcccagcctgagtcctcgtctcctttccagtgcttctgccagaagcatccccatgatgttgtgaccgcacagcactttgtgtctcgctttgagcacttgccactctggctggtgctgctgccactgattgtgtactgtcttgctgccctttctagactgtgagctcctcgtgggcagggaccgcctgtgttctctgtatttcccacggcgcctagcacagtgccttgcacttgataggtgcttaataaatgtctgctca

SEQ ID NO: 5180 - protein, 132 aa, Homo sapiens
MQVIHGPHVEKLQSPLGPHRPSPRCPLSVVTGPDLQECTFHSTRKPYDILRLPRPAACMGPLPSSTPTLRMVPCSALVLCWPLPATPTLRHPGVVGPNWLAPPSAALCRPDAAVWPDLPSSNILLVTPPPAK

SEQ ID NO: 5181 - DNA, 901 bp, Homo sapiens; identical to SEQ ID NO: 5179

SEQ ID NO: 5182 - protein, 132 aa, Homo sapiens; identical to SEQ ID NO: 5180

SEQ ID NO: 5183 - DNA, 948 bp, Homo sapiens
atgggatatggagaccttggaaaggagcagcctgcctgccagctggacacaggccctgctacacgtggctgtgtgagccagggcaaggctgtgtgcgtctctgaaactcctttcctcaactggcaaatgaagagggacaacccctccccagacccccacaacctactccctggaaacttggaggtgcctgtgagagcctctggaaccacacaccccaccccaaagcggaggcccgatcggggttccggtgccccagggctcccgaggcgcacatctggctggcgggcccgcagcccacccaagggcggcaccagctgtgggctcgacgccgccgtccccagcgctgggcctgggaccaggagtcctgagggcgccagactccgaggggcgggcggccggggggcggcccgcggcgcagaacaagccaggccccacccgggccgcgtgagcgagctgcgcagcctgcgccttcccagccggccccccgccgcggccgctttgtgcccgaacctggccctgagtgactgcgccgcagccatggagccctcccgcgcggggggcggcccagcgcgttcccaatgccgccgcctcaaaggggtcccggggccgcccccgcgggccgggcagacaagggcccgggaggggctgcgttcccaagcgtcggccgggctcccctcggcggaggagcgggacatgacactgaggtccccagggcaagactgggaccctgaagcggcttctgcccagaaacagccccaaggaactgactcgcggccccaggaaagcctccagagagaacagagccgggccccacccagcctgctggctgaagctgcagcctgcaccttcccagccggctcgccgccctcccagggaatccagccaaagaaacactcaaacaagaacacaaaggttataaatgaggatactccctgcatcatcatttaa

SEQ ID NO: 5184 - protein, 315 aa, Homo sapiens [sequence omitted]

SEQ ID NO: 5185 - DNA, 552 bp, Homo sapiens
atgggccagaaggactcctatgtgggcgacgaggcccagagcaagtacggcatcctgaccctgaaatatcccatcgagcagggcatggtcacgaaccgggatgacatggagaagatctggcaccacaccttctacaacaaactgcgtcttcaccccacggccgagtgggagatcgtgcgtgacatcaaggagaagctgtgctacgttaccccggacatcaagcgggagctggccaccgccgtgttctcgtccctggagaagagctatgagccacccgacggccaggtcatcaccatctgcagccagtgggccaagatgatgctgtcctgcggcaccaccgtgtacctggacatcacgggcaggatgcaggagatcaccactctggcgcccagcaccatgaagatcacaatcatcgagtcccctgagcacaagtacatggtgtggattggcggctccatcctggcctccctgtctaccttccagcagatgtggattagcaagcaggagtacgaggagtcagccccctccatcatccaccgcaaatgcttctaa

SEQ ID NO: 5186 - protein, 183 aa, Homo sapiens
MGQKDSYVGDEAQSKYGILTLKYPIEQGMVTNRDDMEKIWHHTFYNKLRLHPTAEWEIVRDIKEKLCYVTPDIKRELATAVFSSLEKSYEPPDGQVITICSQWAKMMLSCGTTVYLDITGRMQEITTLAPSTMKITIIESPEHKYMVWIGGSILASLSTFQQMWISKQEYEESAPSIIHRKCF

SEQ ID NO: 5187 - DNA, 552 bp, Homo sapiens
atgggccagaaggactcctatgtgggcgacgaggcccagagcaagtacggcatcctgaccctgaaatatcccatcgagcagggcatggtcacgaaccgggatgacatggagaagatctggcaccacaccttctacaacaaactgcgtcttcaccccacggccgagtgggagatcgtgcgtgacatcaaggagaagctgtgctacgttaccccggacatcaagcgggagctggccaccgccgtgttctcgtccctggagaagagctatgagccacccgacggccaggtcatcaccatctgcagcgagtgggccaagatgatgttgtcctgcggcaccaccgtgtacctggacatcacgggcaggatgcaggagatcaccactctggcgcccagcaccatgaagatcacaatcatcgagtcccctgagcacaagtacatggtgtggattggcggctccatcctggcctccctgtctaccttccagcagatgtggattagcaagcaggagtacgaggagtcagccccctccatcatccaccgcaaatgcttctaa

SEQ ID NO: 5188 - protein, 183 aa, Homo sapiens [sequence omitted]

SEQ ID NO: 5189 - DNA, 1270 bp, Homo sapiens
atgccggctcctccccttcaaaactctttgattactcattgcctttctgtggacttcgtagttgttaaaatcctattctaccagggacaaaccacaatctctgcaggcccttctccagtgtactggactgggtccaggactgcaactagtgtggactttgccgctcccaagcccagagctgctctgcgcaagcgcgaccgaccgagcagctccgaggagtccgcccggaaacaaacattccccagggcaatgtcacgacttggtcttcccgaggagccagtcagaaacagtttgctagatgatgctaaggcccgcttaagaaagtatgatattggaggcaaatattctcacttgccatataacaaatactccgtccttttgccattggtggctaaagaaggaaaactccatttgttgttcaccgtccggtcagagaagctaagaagggcccctggagaagtttgcttccctggaggtaagcgtgaccctacagacatggatgatgcagccacagctctccgggaagcccaggaggaagtgggtctccgtcctcaccaagtggaagttgtctgctgcctggtgccatgtcttattgatacagatacattgataactccatttgtgggtttaatagaccacaacttccaggcccagccgaatcctgctgaagttaaggatgtattcctggtgcctctggcctatttcctgcatccacaggtccatgaccagcattacgtcacacgtcttggtcaccgttttattaatcatatctttgagtacacaaaccctgaagacggtgtcacttaccagatcaagggaatgacggcaaaccttgcagtgttggtggcctttatcattttggaaaaaaaacccacctttgaggttcaatttaatcttaatgatgtattagcatcctctgaagagttattcctgaaggttcataaaaaagctacaagcaggttatgatttactagagcaagagacaaagaactattcacgaggattctgtgtgtgcttattcgtagaacaacaacaatgccagctgttggaatttgacaggtgtgaatattttttctgcagtatgtagttagaatccttgcctcttttccagttgccttctattgtctgaaaaagtaaaagccattcaaaaatgaaaactatgttcatagtgttgcatattttcacccacaatatgttaataatatttttcttacacatataataaagaatatctggcacatactaggcccttaataaagattttttgaat

SEQ ID NO: 5190 - protein, 321 aa, Homo sapiens
MPAPPLQNSLITHCLSVDFVVVKILFYQGQTTISAGPSPVYWTGSRTATSVDFAAPKPRAALRKRDRPSSSEESARKQTFPRAMSRLGLPEEPVRNSLLDDAKARLRKYDIGGKYSHLPYNKYSVLLPLVAKEGKLHLLFTVRSEKLRRAPGEVCFPGGKRDPTDMDDAATALREAQEEVGLRPHQVEVVCCLVPCLIDTDTLITPFVGLIDHNFQAQPNPAEVKDVFLVPLAYFLHPQVHDQHYVTRLGHRFINHIFEYTNPEDGVTYQIKGMTANLAVLVAFIILEKKPTFEVQFNLNDVLASSEELFLKVHKKATSRL

SEQ ID NO: 5191 - DNA, 1270 bp, Homo sapiens; identical to SEQ ID NO: 5189

SEQ ID NO: 5192 - protein, 321 aa, Homo sapiens; identical to SEQ ID NO: 5190

SEQ ID NO: 5193 - DNA, 729 bp, Homo sapiens
atggtgaggagtggagggccgcccatcccctccaacaaggaacccgctgaaggggaggggaaggtgctctgcagaggcaggtgccctccccgtcttcctctcccctcgccccaccggagcttccctagtgagggggacggccagaaactgaaagagaaacttgacggcgggaggcccacaggccccctggagagggctgcaaggatcccccagcccacctcgggcccggtttctgggaaggggagatattccaacccgaagttaggccagcgccacgacggctcccactcgacggctagggcttttcggtgcctccccgggtccagcccgacaggtgctccctctccgaggcgtgccaggacggcgccctccctggcctctgcctttcatccccgacccctgtccccacgtccccccgtccctcgtctgcgctgggccaactccctcgcagtgccggggactgatccccgcgctgcgcccggccgtcgagctccgggtgccggaggtgccggggcggcagtagagtgtcccctctcggcgcgccgccgaggacgcgccaccgggtcacccacctggtggggccgcaccgtccggcagccgggccggctctgcgccccgcggctctcgctcccggccggggttcctggcggcggcggcagcggcggctgttactacaggaaggagcggagagcagcgatttcctcctcaaaggtcagctgcctgcgatag

SEQ ID NO: 5194 - protein, 242 aa, Homo sapiens
MVRSGGPPIPSNKEPAEGEGKVLCRGRCPPRLPLPSPHRSFPSEGDGQKLKEKLDGGRPTGPLERAARIPQPTSGPVSGKGRYSNPKLGQRHDGSHSTARAFRCLPGSSPTGAPSPRRARTAPSLASAFHPRPLSPRPPVPRLRWANSLAVPGTDPRAAPGRRAPGAGGAGAAVECPLSARRRGRATGSPTWWGRTVRQPGRLCAPRLSLPAGVPGGGGSGGCYYRKERRAAISSSKVSCLR

SEQ ID NO: 5195 - DNA, 729 bp, Homo sapiens; identical to SEQ ID NO: 5193

SEQ ID NO: 5196 - protein, 242 aa, Homo sapiens; identical to SEQ ID NO: 5194

SEQ ID NO: 5197 - DNA, 447 bp, Homo sapiens
atgaggtggtacgagcggtctgaatctgtagacttagacaggcttcaggtatctggggaaccatctgctctcctcattggtcagtgggcggggcttcggctgtaccgcacacgcactgggacctctgggtggccgaacgagctggcctttcatgaattatgcatgacggcgtgcctcggccaggctggggctgggcgaggattggctgaaggggctgtaattcagcggtttccggagctgcggcggcgcagactgggagggggagccgggggttccgacgtcgcagccgagggaacaagccccaaccggatcctggacaggcaccccggcttggcgctgtctctccccctcggctcggagaggcccttcggcctgagggagcctcgccgcccgtccccggcacacgcgcagccccggcctctcggcctctgccggagaaacaggtga

SEQ ID NO: 5198 - protein, 148 aa, Homo sapiens [sequence omitted]

SEQ ID NO: 5199 - DNA, 447 bp, Homo sapiens; identical to SEQ ID NO: 5197

SEQ ID NO: 5200 - protein, 148 aa, Homo sapiens [sequence omitted]

SEQ ID NO: 5201 - DNA, 278 bp, Homo sapiens
ccaatgggtcatgtttggttagaaggtgataatctacagaattctatggattccaggtactatggacctattccgtatggactaataagaggacgaatcttctttaagatttggcctctgagtgattttggatttttacgtgccagccctaatggccacagattttctgacgattagtaagtatttattcttttgacttaattattgtctccttttcatgtgaatttattactcccgttgaaatcatgtacttaccaataaactatttgctattcaaa

SEQ ID NO: 5202 - protein, 57 aa, Homo sapiens
MGHVWLEGDNLQNSMDSRYYGPIPYGLIRGRIFFKIWPLSDFGFLRASPNGHRFSDD

SEQ ID NO: 5203 - DNA, 786 bp, Homo sapiens
atgacacctgcaaagaccctgcttctaaagaagttcatgttcacagggcctctgatgagctatattgggcccacctgcctgggttccagcagcttccgcagccccagcaggagacggaagatgcaagaggtcattgcggggctagagcggttcacctttgccttcgagaaggatgtcgagatgcagaagggcactgggctcctgcctttccagggcatggacaagtcggcctcagctgtgtgcaacttcttcactaaagggctctgtgagaaagggaaactctgccccttccgacatgaccgaggggagaagatggtggtatgcaagcactggctccgggggctctgcaagaagggtgatcactgcaagttcctgcaccagtatgacctcaccaggatgcctgagtgctacttctactccaagtttggtgactgcagcaacaaggagtgttccttcctccatgtgaagccagctttcaagtcccaggactgtccttggtatgaccaaggtttctgcaaggacggtcctctgtgtaaataccgccatgtccccagaataatgtgtctcaactatttagttggcttctgccccgagggacccaagtgccaatttgctcatcccaagatgaatcttttactcaacccgagttacatgaaggctttgaaagaaggtgggaggcgatctgtgggactgcggggaatttacaagcccatttacaatgaaagcctaactttgatggaaaggaagattcgggaattcaagctgctgcctggaagcaagatctaa

SEQ ID NO: 5204 - protein, 261 aa, Homo sapiens
MTPAKTLLLKKFMFTGPLMSYIGPTCLGSSSFRSPSRRRKMQEVIAGLERFTFAFEKDVEMQKGTGLLPFQGMDKSASAVCNFFTKGLCEKGKLCPFRHDRGEKMVVCKHWLRGLCKKGDHCKFLHQYDLTRMPECYFYSKFGDCSNKECSFLHVKPAFKSQDCPWYDQGFCKDGPLCKYRHVPRIMCLNYLVGFCPEGPKCQFAHPKMNLLLNPSYMKALKEGGRRSVGLRGIYKPIYNESLTLMERKIREFKLLPGSKI

SEQ ID NO: 5205 - DNA, 804 bp, Homo sapiens
atgacacctgcaaagaccctgcttctaaagaagttcatgttcacagggcctctgatgagctatattgggcccacctgcctgggttccagcagcttccgcagccccagcaggagacggaagatgcaagaggtcattgcggggctagagcggttcacctttgccttcgagaaggatgtcgagatgcagaagggcactgggctcctgcctttccagggcatggacaagtcggcctcagctgtgtgcaacttcttcactaaagggctctgtgagaaagggaaactctgccccttccgacatgaccgaggggagaagatggtggtatgcaagcactggctccgggggctctgcaagaagggtgatcactgcaagttcctgcaccagtatgacctcaccaggatgcctgagtgctacttctactccaagtttggtgactgcagcaacaaggagtgttccttcctccatgtgaagccagctttcaagtcccaggactgtccttggtatgaccaaggtttctgcaaggacggtcctctgtgtaaataccgccatgtccccagaataatgtgtctcaactatttagttggcttctgccccgagggacccaagtgccaatttgctcatcccaagatgaatcttttactcaacccgagttacatgaaggaagattcgggaattcaagctgctgcctggaagcaagatctaagcattgcttcttacctagcggggcactccaatgccacagacagggcagaacacgacttttaccccctccttctgcagcatgattttaagagacaaaacttataa

SEQ ID NO: 5206 - protein, 267 aa, Homo sapiens
MTPAKTLLLKKFMFTGPLMSYIGPTCLGSSSFRSPSRRRKMQEVIAGLERFTFAFEKDVEMQKGTGLLPFQGMDKSASAVCNFFTKGLCEKGKLCPFRHDRGEKMVVCKHWLRGLCKKGDHCKFLHQYDLTRMPECYFYSKFGDCSNKECSFLHVKPAFKSQDCPWYDQGFCKDGPLCKYRHVPRIMCLNYLVGFCPEGPKCQFAHPKMNLLLNPSYMKEDSGIQAAAWKQDLSIASYLAGHSNATDRAEHDFYPLLLQHDFKRQNL

SEQ ID NO: 5207 - DNA, 234 bp, Homo sapiens
atgagttctgtgaatgtgggaaaaccttcagctgcaaatatggacttgttcctcaccagtgaattcacactggagaaagaccttattagtgcagggaacatgggaaattctttagccaaagttccagttttactgaacaacaaagaattcacgctggagaaaggtcttattaatgcagcaaaaatggaaaattctctgtccatgtacacagaaatatcttcagggatggattaa

SEQ ID NO: 5208 - protein, 77 aa, Homo sapiens [sequence omitted]

SEQ ID NO: 5209 - DNA, 234 bp, Homo sapiens; identical to SEQ ID NO: 5207

SEQ ID NO: 5210 - protein, 77 aa, Homo sapiens [sequence omitted]

SEQ ID NO: 5211 - DNA, 1254 bp, Homo sapiens
atgaggaggagtggggtctacaactccctcctctgccaatggtttttggtacttgtatttgctgatgacacaagaggtgtgcagaaagctgagaatagtacctggataatgcaagaactaaaggaaaaactgaagaagggaggagccagcactggcccagggaaacttggagcaacagactacagatccaaaacccagaggatgtatcagaccttggtgtcatttgtgcctactccctcctatcacccattaatcgctgtgtctgtgctcaacaataagaagcagtcaatctcagccatccagaacaacatgcaggttttagatacctccccgcaaactgctgccctcctaatgcctctagcagacaaccacatttgcccctgtgctaatccactatcctggcgagtccgtagagctgtgaagaacctgtgggaagaggtagaccttgagaagcaggcaactatgggaggactccatgggcttaggcctctcttgaacatctgcccagtggtggaaacagacctgacccagccctctgtagtttctgaacaggtaaaacagctgcaaggcagccaaaatgaccgccacaaagtgagacaggaagtcctgaccatcttcacccctaaacctggaatctcccatctttctgtgctttcattggataagcactgctgccactcagcagagaattctgggccggaggtgcacacaaaggcgcagatcctggagctgctggtgctggagcagttcctggccatcctcccagaaaagctgcagccctgggtgcagaggcatcatccagaaaatggagaggaagctctgactatgctggaggatgtgcagagagcgcttgatggaccaaagcagatcttcttttttggacgaaggagggacacggttgcagagaagctagcaccttcagaaatcactgagcaattgccaactagccagcgcacgcccgtgaagaagcagctccagcgagaatcatgggagctgcagtccttaagaccacatgatgaagacatcaaaactataaatgtgaaatccgcttcaaggcaaaagacttcttcaggcatagaactgcattgcgatgtttcgaacatcctcggtataaatgcctcccagagttccacatatagaggaatgtatgaacaagatgattcaaaatatgaacataggattgcagagtcccaaaagaatatgtacttcaagactaggctgaagtgtcccaggtcactgtcaggaggcagataa

SEQ ID NO: 5212 - protein, 417 aa, Homo sapiens
MRRSGVYNSLLCQWFLVLVFADDTRGVQKAENSTWIMQELKEKLKKGGASTGPGKLGATDYRSKTQRMYQTLVSFVPTPSYHPLIAVSVLNNKKQSISAIQNNMQVLDTSPQTAALLMPLADNHICPCANPLSWRVRRAVKNLWEEVDLEKQATMGGLHGLRPLLNICPVVETDLTQPSVVSEQVKQLQGSQNDRHKVRQEVLTIFTPKPGISHLSVLSLDKHCCHSAENSGPEVHTKAQILELLVLEQFLAILPEKLQPWVQRHHPENGEEALTMLEDVQRALDGPKQIFFFGRRRDTVAEKLAPSEITEQLPTSQRTPVKKQLQRESWELQSLRPHDEDIKTINVKSASRQKTSSGIELHCDVSNILGINASQSSTYRGMYEQDDSKYEHRIAESQKNMYFKTRLKCPRSLSGGR

SEQ ID NO: 5213 - DNA, 1254 bp, Homo sapiens; identical to SEQ ID NO: 5211

SEQ ID NO: 5214 - protein, 417 aa, Homo sapiens; identical to SEQ ID NO: 5212

SEQ ID NO: 5215 - DNA, 638 bp, Homo sapiens
atgctgctgctgccgccctcctgcgaggccgtggcgccacgtggctggaggaggagctgcagctgccccgagtgctgccgcgtgtgcagctctccagtgcggctgcagcgccaccgcgcgttgctttcgacgccggagtccttcgcatgcgcagccagcgcccgggcctcaagtgccccaggacctggcgcagcccgcgagcccgcatcaggcttccagtgggccccgtgggcagtgccagcctttcccacctccgcatctggcaaagcctggccttcgctgcgcttcggtgtcgccacatgccttctggaaatatcacacctccccacctgcgcatgcagccgtctggccctctgtgggcctcggttcccgcatgtgccccgtggaaagaacataccttccccaactatctggcagcgtctggccttctccgggcctcggcctccccatttgctgggtggagaatcacggcccggccacatcggagccaatggctggtctctggacctcggtctccacatttgctcagccggcaggaacatcccttctcccgccctctacctcggtgggtggccacggccgagcaggcagcgacggcccagtggaaagaggacaaacccttgtgggccttagggcga

SEQ ID NO: 5216 - protein, 210 aa, Homo sapiens [sequence omitted]

SEQ ID NO: 5217 - DNA, 638 bp, Homo sapiens; identical to SEQ ID NO: 5215

SEQ ID NO: 5218 - protein, 210 aa, Homo sapiens [sequence omitted]

SEQ ID NO: 5219 - DNA, 1863 bp, Homo sapiens
atggagaatacagccctcgctgactgggatgttgaaggacaggtttattcaaacacagaaaaccctcaaaatctgagctgtccgcagaagcagctggaggccaggggagaaactccagaaggagagacatttgccatggctgagcacttcaaacagatcattagatgtcctgtctgtctaaaagatcttgaagaagccgtgcaactgaaatgtggatatgcctgctgcctccagtgcctcaattcactccagaaggagcccgatggggaaggtttactgtgccgtttctgctctgtggtctctcagaaggatgacatcaagcccaagtacaagctgagggcgctggtttccatcatcaaggaactagagcccaagctgaaatctgttctaacaatgaacccaaggatgaggaagtttcaagtggatatgaccttcgatgtggacacagccaacaactatctcatcatttctgaagacctgaggagtttccgaagtggggatttgagccagaataggaaggagcaagctgagaggttcgacactgccctgtgcgtcctgggcacccctcgcttcacttccggccgccattactgggaggtggacgtgggcaccagccaagtgtgggatgtgggcgtgtgcaaggaatctgtcaaccgacaggggaagattgagctttcttcagaacacggcttcttgactgtgggttgcagagaaggaaaggtctttgctgccagcactgtgcctatgactcctctctgggtgagtccccagttgcacagagtggggattttcctggatgtaggtatgaggtccattgccttttacaatgttagtgatgggtgccatatcaacacattcatcgagattcctgtttgcgagccctggcgtccattttttgctcataaacgtggaagtcaagatgatcagagcatcctgagtatctgttctgtgatcaatccatccactgccagtgccccagtttcttctgagggaaataccagtgctttacaaagagtaggcgatgatgtcttcatgcagacagtggccatggctgaacactttaaacaagcaagcagttgtcctatctgcctggattatcttgaaaaccccacgcacctgaaatgtggatacatctgttgcctccgatgcatgaactcactgcgaaaggggcccgatgggaagggggtgctgtgccctttctgccctgtggtctctcagaaaaatgacatcaggcccgctgcccagctgggggcgctggtgtccaagatcaaggaactagagcccaaggtgagagctgttctgcagatgaatccaaggatgagaaagttccaagtggatatgaccttggatgtggacacagccaacaacgatctcatcgtttctgaagacctgaggcgtgtccgatgtgggaatttcagacagaataggaaggagcaagctgagaggttcgacactgccctgtgcgtcctgggcacccctcgcttcacttccggccgccattactgggaggtgggcgtgggcaccagccaagtgtgggatgtgggcgtgtgcaaggaatctgtgaaccgacaggggaacgttgtactctcttcagaactcggcttctggactgtgggtttgagacaaggacagatctactttgccagcactaagcctgtgacgggtctctgggtgagctcaggtctacaccgagtggggatttacctggatataaaaacgagggccatttccttctataatgtcagtgataggtcacatatcttcacattcacgaaaatttctgctactgagccactgcgcccatgttttgctcatgcagatacaagtcgtgatgatcacggatacttgagtgtgtgtgtgtaa

SEQ ID NO: 5220 - protein, 620 aa, Homo sapiens
MENTALADWDVEGQVYSNTENPQNLSCPQKQLEARGETPEGETFAMAEHFKQIIRCPVCLKDLEEAVQLKCGYACCLQCLNSLQKEPDGEGLLCRFCSVVSQKDDIKPKYKLRALVSIIKELEPKLKSVLTMNPRMRKFQVDMTFDVDTANNYLIISEDLRSFRSGDLSQNRKEQAERFDTALCVLGTPRFTSGRHYWEVDVGTSQVWDVGVCKESVNRQGKIELSSEHGFLTVGCREGKVFAASTVPMTPLWVSPQLHRVGIFLDVGMRSIAFYNVSDGCHINTFIEIPVCEPWRPFFAHKRGSQDDQSILSICSVINPSTASAPVSSEGNTSALQRVGDDVFMQTVAMAEHFKQASSCPICLDYLENPTHLKCGYICCLRCMNSLRKGPDGKGVLCPFCPVVSQKNDIRPAAQLGALVSKIKELEPKVRAVLQMNPRMRKFQVDMTLDVDTANNDLIVSEDLRRVRCGNFRQNRKEQAERFDTALCVLGTPRFTSGRHYWEVGVGTSQVWDVGVCKESVNRQGNVVLSSELGFWTVGLRQGQIYFASTKPVTGLWVSSGLHRVGIYLDIKTRAISFYNVSDRSHIFTFTKISATEPLRPCFAHADTSRDDHGYLSVCV

SEQ ID NO: 5221 - DNA, 1932 bp, Homo sapiens
atggcaatgaaggcggaaacctcggacattacaccgcagcctcggacattacaccgcagcctcggacattacaccgcagcctcggacattacaccgcagcctcggacattacaccgcagccacggacattacaccgcagcctcggacattacaccgcagcctcggacattacaccgcagccacggacattacaccgcagcctcggtaaattacaccgcagccacggacattacaccgcagccacggacattacaccgcagcctcggacattacaccgcagccacggacattacaccgcagcctcgtaaattacaccgcagcctcgtaaattacaccgcagcctcggacattacaccgcagcctcggacattacaccgcagccacggacattacaccgcagccacggacattacaccgcagcctcggacattacaccgcagccacggacattacaccgcagcctcccacggacattacaccgcagcctcggacattacaccgcagccacggacattacaccgcagcctcgtaaattacaccgcagcctcggacattacaccgcagccacggacattacaccgcagccacggacattacaccgcagcctcggacattacaccgcagcctcggacattacaccgcagcctcggacattacaccgcagccacggacattacaccgcagcctcgtaaattacaccgcagccacggacattacaccgcagcctcggacattacaccgcagccacggacattacaccgcagcctcggacattacaccgcagccacggacattacaccgcagcctcgtaaattacaccgcagcctcgtaaattacaccgcagcctcggacattacaccgcagcctcggaaattacaccgcagcctcgggaattacaccgcagcctcggaaattacaccgcagcctcgggaagtacaccgcagcctcggaaagtacaccgcagcctcgggaagtacaccgcagccacggacattacaccgcagccacggacattacaccgcagcctcggacattacaccgcagcctcggacattacaccgcagcctcgtaaattacaccgcagccacggaaattacaccgcagccacggacattacaccgcagccacggacattacaccgcagccacggacattacaccgcagccacggacattacaccgcagcctcggaaattacaccgcagcctcggaaattacaccgcagccacggaaattacaccgcagccacggacattacaccgcagccacggacattacaccgcagccacggacattacaccgcagcctcggaaattacaccgcagcctcggaaattacaccgcagcctcggaaattacaccgcagccacggacattacaccgcagccacggacattacaccgcagcctcggaaattacaccgcagcctcggaaattacaccgcagccacggaaattacaccgcagccacggaaattacaccgcagccacggaaattacaccgcagccacggaaattacaccgcagcctcggaaattacaccgcagccacggaaattacaccgcagctacggtaattacaccgcagccacggaaattacaccgcagtctcggaaattccaccgcagctacggaaatcacaccgcagtctcggaaatcacaccgcagtctcggaaatcacaccgcagtctcggaaattacaccgcagctacggaaattacaccgcagtctcggaaattacaccgcggctacggaaattacaccgcggctacggaaattacaccgccggccacggaaattacaccgcggccacggaaattacaccgcagtctcggaaattacaccgcagcttcggaaattacaccgcagctttggaaattacaccgcagctttggaaattacaccgcagctacagaaattacatttttacttttaa

SEQ ID NO: 5222 - protein, 643 aa, Homo sapiens
MAMKAETSDITPQPRTLHRSLGHYTAASDITPQPRTLHRSHGHYTAASDITPQPRTLHRSHGHYTAASVNYTAATDITPQPRTLHRSLGHYTAATDITPQPRKLHRSLVNYTAASDITPQPRTLHRSHGHYTAATDITPQPRTLHRSHGHYTAASHGHYTAASDITPQPRTLHRSLVNYTAASDITPQPRTLHRSHGHYTAASDITPQPRTLHRSLGHYTAATDITPQPRKLHRSHGHYTAASDITPQPRTLHRSLGHYTAATDITPQPRKLHRSLVNYTAASDITPQPRKLHRSLGNYTAASEITPQPREVHRSLGKYTAASGSTPQPRTLHRSHGHYTAASDITPQPRTLHRSLVNYTAATEITPQPRTLHRSHGHYTAATDITPQPRTLHRSLGNYTAASEITPQPRKLHRSHGHYTAATDITPQPRTLHRSLGNYTAASEITPQPRKLHRSHGHYTAATDITPQPRKLHRSLGNYTAATEITPQPRKLHRSHGNYTAATEITPQPRKLHRSHGNYTAATVITPQPRKLHRSLGNSTAATEITPQSRKSHRSLGNHTAVSEITPQLRKLHRSLGNYTAATEITPRLRKLHRRPRKLHRGHGNYTAVSEITPQLRKLHRSFGNYTAALEITPQLQKLHFYF

SEQ ID NO: 5223 - DNA, 282 bp, Homo sapiens
atgaagctgtttctggttctcattattctgctgtttgaggtactcacagacggggcaagactcaaaaaatgcttcaataaagtaacaggctattgcaggaagaaatgcaaggtaggagaaagatatgaaataggatgtctaagtgggaaattatgttgtgctaatgatgaagaagagaaaaaacatgtgtcatttaagaagccacatcaacattctggtgagaagctgagtgtgctgcaggattacatcatcttacccaccatcaccattttcacagtctaa

SEQ ID NO: 5224 - protein, 93 aa, Homo sapiens
MKLFLVLIILLFEVLTDGARLKKCFNKVTGYCRKKCKVGERYEIGCLSGKLCCANDEEEKKHVSFKKPHQHSGEKLSVLQDYIILPTITIFTV

SEQ ID NO: 5225 - DNA, 630 bp, Homo sapiens
atgcatgaattgggcaactccaaaccagaagtggttcggggtcttcacttaagaagtgggccagtgctgcgactgtgcacttgtgcaactcttaacccagccacatttcttccagacaataaagaaaagatagaacataactgtcagcaagtaattgttcaaacctacgctgctcaaggggatcctttagaggttcccttgactgatcctgacctcaccttatgtactgatggaagttcctttgtagaaaaaggacttcgaaaagtggggtatgcagtggtcagtgataatggaatacttgaaagttacatgaacttacaagcacgaagcacaaagttcatcgtagaagccctgtcagtgagagttaccttctctcttgctaggaagaaggcatattacggggcaagactcaaaaaatgcttcaataaagtaacaggctattgcaggaagaaatgcaaggtaggagaaagatatgaaataggatgtctaagtgggaaattatgttgtgctaatgatgaagaagagaaaaaacatgtgtcatttaagaagccacatcaacattctggtgagaagctgagtgtgctgcaggattacatcatcttacccaccatcaccattttcacagtctaa

SEQ ID NO: 5226 - protein, 209 aa, Homo sapiens [sequence omitted]

SEQ ID NO: 5227 - DNA, 1802 bp, Homo sapiens
atgttaaacgggcccaccctgggagctgtagtggtcactgtggagctgagcactgggctgcactcctcgctgccccagagtgaccagaaagagttggccgttcactaccctggagtgtggacctctgggcgaggaacctgtatccgtagcgctgccttgcacgtccaggctcacagaggcaacctcccgtcactcaacaggtggctgagggacccccgcaccagggcagcacctgctggacttgggttcaccagcgaacgagcaggtctgatgctcctctcagggtctaaggcctgcttctctctcggcggcagggcggagatgcacggtacctactttgaggctgaggattcaatctctgaccacacaacgcacagtccagtccgcatcatgcctgacacacagcaagcactccataaacacgactaccgttattcatttacaattaaggaagaaagaggtgaaggggcacatgccaaggacaagcccgcctcagccctggacatcgttcatcgcgcgaggatctcaggtgccaggtgggcaaatgctactgtcgctcaacgagaggaatcccagagaaggagaagcccctgtcaaccttttattgggagtggaacacatgaggttcagctcgtgccgggcactgtacattcactgaagcagctcaaggggctcagccccgacactgacgccacactgagcaggatgcacggcccggggctcacactgtccatggaggaggtggggtcagcccgaggtgggcggatggtggcccgagacaccgagagcttggttctgggactgtggctcagctgacccgtggcacagctgcacctaagacatggccctggctaggcgggaacagctcacagtagcgatacattcacaggacacagttggtgtccagaaaagggggctcagaacacagtttctacacaagcacttggcacccacacgacagagacgtcactcaagcagcacagccacaaatagtttacagcagctcatgcccggcatccgcccatgctgggagactccctgaaaggtgggcacctgccgtctatgaggaggtgtctccctccatcattaaccccaaaccacacaatgtgtgaggagagcaggcctctgggtgaactcacacattcatacccaaggaagaggcaaacacactcaagtccagagttcccagtggtgccgcccagacctactgtcccgggggtgttatggctgtccctcggcttccccagagcagccaggacagcctgcaccgcctcccagactcttgcaggaaggggagctctgccctggggaggaaactgacaggctgggagacaagactcccatcgcagggacatgcacagcagcagccacagccccgcggacggggcatggggatgggacaggcagggagccacactgccccctcagtgtgtgcctgtggttctgtcctggtcctgcccacttggagcccaggcagacaggtggcattgagcagggcccaggtccagacagccctctggccagatgtgactggaagaggctgatgccagggcagcaccaggccttctgcaagtcccagagccagtgtgcagaaagtgccagcacggcctgtgctgtggctcctcaggatgaagtcacgtccaggacaggagggtttatgcagacacacagacactgctgacggggacagggatggctcggccactatgaggctggactcttctgtctgttcagggagtcgatgtaatgaaaaatggcccccagagcccagctggtctcaacattgtcaattttccgagtga

SEQ ID NO: 5228 - protein, 271 aa, Homo sapiens [sequence omitted]

SEQ ID NO: 5229 - DNA, 1802 bp, Homo sapiens
atgttaaacgggcccaccctgggagctgtagtggtcactgtggagctgagcactgggctgcactcctcgctgccccagagtgaccagaaagagttggccgttcactaccctggagtgtggacctctgggcgaggaacctgtatccgtagcgctgccttgcacgtccaggctcacagaggcaacctcccgtcactcaacaggtggctgagggacccccgcaccagggcagcacctgctggacttgggttcaccagcgaacgagcaggtctgatgctcctctcagggtctaaggcctgcttctctctcggcggcagggcggagatgcacggtacctactttgaggctgaggattcaatctctgaccacacaacgcacagtccagtccgcatcatgcctgacacacagcaagcactccataaacacgactaccgttattcatttacaattaaggaagaaagaggtgaaggggcacatgccaaggacaagcccgcctcagccctggacatcgttcatcgcgcgaggatctcaggtgccaggtgggcaaatgctactgtcgctcaacgagaggaatcccagagaaggagaagcccctgtcaaccttttattgggagtggaacacatgaggttcagctcgtgccgggcactgtacattcactgaagcagctcaaggggctcagccccgacactgacgccacactgagcaggatgcacggcccggggctcacactgtccatggaggaggtggggtcagcccgaggtgggcggatggtggcccgagacaccgagagcttggttctgggactgtggctcagctgacccgtggcacagctgcacctaagacatggccctggctaggcgggaacagctcacagtagcgatacattcacaggacacagttggtgtccagaaaagggggctcagaacacagtttctacacaagcacttggcacccacacgacagagacgtcactcaagcagcacagccacaaatagtttacagcagctcatgcccggcatccgcccatgctgggagactccctgaaaggtgggcacctgccgtctatgaggaggtgtctccctccatcattaaccccaaaccacacaatgtgtgaggagagcaggcctctgggtgaactcacacattcatacccaaggaagaggcaaacacactcaagtccagagttcccagtggtgccgcccagacctactgtcccgggggtgttatggctgtccctcggcttccccagagcagccaggacagcctgcaccgcctcccagactctcgcaggaaggggagctctgccctggggaggaaactgacaggctgggagacaagactcccatcgcagggacatgcacagcagcagccacagccccgcggacggggcatggggatgggacaggcagggagccacactgccccctcagtgtgtgcctgtggttctgtcctggtcctgcccacttggagcccaggcagacaggtggcattgagcagggcccaggtccagacagccctctggccagatgtgactggaagaggctgatgccagggcagcaccaggccttctgcaagtcccagagccagtgtgcagaaagtgccagcacggcctgtgctgtggctcctcaggatgaagtcacgtccaggacaggagggtttatgcagacacacagacactgctgacggggacagggatggctcggccactatgaggctggactcttctgtctgttcagggagtcgatgtaatgaaaaatggcccccagagcccagctggtctcaacattgtcaattttccgagtga

SEQ ID NO: 5230 - protein, 271 aa, Homo sapiens [sequence omitted]

SEQ ID NO: 5231 - DNA, 1242 bp, Homo sapiens
atggttgctgttactcccactccaataaccgaggaagccctaccaacctgtggaccctggctgtggccgagtccccctccacctccggccaaaagacccccgtggcagctcgctaggccgctggcccgtccccacccgaggagcggcgaccctggcacaagaggacctgggttgctcggcgcccctgtgaaatccgggctgttcaccgcccgagccgccactacacgcaaccgggaacggagactgagtggcggcccagacccggggcgctcggcaagccgcagccccaccgcccacttcaaggcgcggcctgggtctccgcccctccccagaacgcggagacgccgggcctggaggagcgcgcgctacggccccagcagcgccctcacgtcccaggccttcccggcccttcttcctgcgccggaagggcgcgctgcagagagggacccgcaggagcgcagctcaccggggcggctgagggcgaaccgaggcggtgaggtcaccgatggtggaccacgcatctcacggctcgctgacgcccagggatctggaacgctctgcgccgcccgggactacactacccagaatcctcagcgcggccgggactacgctacccagcatcctcggcgcggcccggaggctatgcgaccctgcgcgtcgcatcccctcggtggactacactccccagagtcctcgggagtcgtccaggattacgctgctctcaagtgcatacatgatgatctttttgtccaagcatcagaggtgatcccagcatcttcacagtaccagcctttccccaagatcctcgccagagaaaagggttacccagatcatcctgccactgtaggggacctccaagttggtcaccctggagaggaacccagcaaatctggggcagcagcaggcctttctcatgtgactttattacagcggctggggcgtccctgtgagaggcctgacccaggtgtggggggcgcagccagaccggggtgctcctggggtgcagaggattcgtggcagcacggagagtccgagggaaaggttccagcatttggaggcaaacatgaagctccatcctctccaattctggggcaaccgtgtggagatgatcaaaatgcttcaccttcaaaactttcaaaggaagagttaatacagagtatggatcgtgtagatcgagaaattgcaaaagtagaacagcagatccttaaactgaaaaagaaacaagtaaaagtctttgcctaa

SEQ ID NO: 5232 - protein, 413 aa, Homo sapiens [sequence omitted]

SEQ ID NO: 5233 - DNA, 994 bp, Homo sapiens
ggagccctccttggcagtgcttgggtgtcggggctctgaggctccggcctgacctcttcacggggtcgacgggatcgtctccggatgccaggagtcccaaagggccgaccaggatgaggaaaccccaggcggagtccgggggaagcagcacggcatcccagcctcaggcctgcccggacggtgatggttggggtaagattggggaagatgccaggtgatagaatccaccctgcctctgacagcatccaatctggagcaaaggcttctttcaaccttcccccaagctcccaatacaagcccaaattctggaacaagtcctttccaacacctccttcagagaagctccctggctccaggcagtgcttgctcccctcactgcagcaggaagcctaacttgcgaactgcaggtgtgctccaggtggtcactggatgcaagaaatggtgcgagaactttggatgtggaacgtggaggaggaggaacacgaagtggggatctgcacttggggtggtcagcactgcggatgcccagcaaagtcactgcctggtccacatcccggaggggtctctgcgcctcagtcggcatcgcagctgatggtgaaacttttggtgtggcagaagagtgtccacaaacttcggaagaacagaaacgcctacagttgcggccccctgtagtgcaatttgtgtcagtctagggagagtggatttggagcccaaccaccattgaggaaaatccatctgacggacatgagcctcactcaggttctcatctacttccttggggtctgccccgcctccctcagaagtttggaaccacatactgttctggaggggacctctcactgctgcagaacctgtcctccaggataccgacaagtgttcatctcggtcgtggctaattaacttaccatatggtagtgaactcccttctggggccccaatattttgtttatttttaaaaaataaaattagtaccattgtttattttctgaatgta

SEQ ID NO: 5234 - protein, 80 aa, Homo sapiens
MQEMVRELWMWNVEEEEHEVGICTWGGQHCGCPAKSLPGPHPGGVSAPQSASQLMVKLLVWQKSVHKLRKNRNAYSCGPL

SEQ ID NO: 5235 - DNA, 901 bp, Homo sapiens
caaagcgggagccttccgcggcagagcttgggtgtccgggctctgaggctccggtctgacctctccacggggtcgacgggaatgtctccggatgccaggagttgcaaagggcagacctagatgaggaaaccccaggcagagtcctggggaagcagcacggcatccgagcctcaggcttgcctggacggtgttggttggggtaagattggggaagatgccaggtgatagaatccaccctgcctctgacagcatccaatctggagcaaaggcttatttcaaccctcccccaagctcccaatacaagcccaaattctggaacaggtcctttccaacacctccttcagagaagctccctggctccaggcagtgcttgctcccctcactgcagcaggaagcctaacttgcgaactgcaggtgtgctccaggtggtcactggatgcaaggcattgacagatggatcccatcgatacccccactgcaaaaccatagtgcagtgaatagaagacacttctctgcaccccaaaagctccatgctgattgtgagaaggaaatgctggatggaggggttcctggaactactgtgagggtttcttttgatttctcctgcttagaaatggtgcgagaactttggatgtggaacgtggaggaggaggaacacgaagtggggatctgcacttggggtggtcagcactgcggatgcccagcaaagtcactgcctggtccacatcccggaggggtctctgcgcctcagtcggcatcgcagctgatggtgaaacttttggtgtggcagaagagtgtccacaaacttcggaagatcgctgctcagagtgatgaatggagttgtgttttgaataaaatatctatgcatccttttgtgagcaaggagcatgatggtacttag

SEQ ID NO: 5236 - protein, 154 aa, Homo sapiens
MQGIDRWIPSIPPLQNHSAVNRRHFSAPQKLHADCEKEMLDGGVPGTTVRVSFDFSCLEMVRELWMWNVEEEEHEVGICTWGGQHCGCPAKSLPGPHPGGVSAPQSASQLMVKLLVWQKSVHKLRKIAAQSDEWSCVLNKISMHPFVSKEHDGT

SEQ ID NO: 5237 - DNA, 341 bp, Homo sapiens
atggtgcgagaactttggatgtggaacgtggaggaggaggaacacgaagtggggatctgcacttggggtggtcagcactgcggatgcccagcaaagtcactgcctggtccacatcccggaggggtctctgcgcctcagtcggcatcgcagctgatggtgaaacttttggtgtggcagaagagtgtccacaaacttcggaagttgctagagaaaactgaaaactactagttttgaaagcctcacttctgccaatggaagcacattccagcatgtcgccaacgcaatccactttccaccactttcacaaaaaacgttactgcacaattatactatcctaccct

SEQ ID NO: 5238 - protein, 75 aa, Homo sapiens
MVRELWMWNVEEEEHEVGICTWGGQHCGCPAKSLPGPHPGGVSAPQSASQLMVKLLVWQKSVHKLRKLLEKTENY

SEQ ID NO: 5239 - DNA, 639 bp, Homo sapiens
atggtgcgagaactttggatgtggaacgtggaggaggaggaacacgaagtggggatctgcacttggggtggtcagcactgcggatgcccagcaaagtcactgcctggtccacatcccggaggggtctctgcgcctcagtcggcatcgcagctgatggtgaaacttttggtgtggcagaagagtgtccacaaacttcggaagggccgcggcggcaaggtccttgctcccatggcgtgactccagggtgcaggagcctgggctgagcaggtggagtagggtgagctccgccaagaacccagcgagagtggcgccccagggcggcacaggaggccgcatttaacatgtcaatcatctgaaagattttatggcatcttttttttgacatcttataatatctataatgtttattatatcttgtgatataattattaacaccacttcagtgtgattattatgattatttttataccaacacatcttcaattattaatattcccagttgctagagaaaactgaaaactactagttttgaaagcctcacttctgccaatggaagcacattccagcatgtcgccaacgcaatccactttccaccactttcacaaaaaacgttactgcacaattatactatcctaccct

SEQ ID NO: 5240 - protein, 78 aa, Homo sapiens
MVRELWMWNVEEEEHEVGICTWGGQHCGCPAKSLPGPHPGGVSAPQSASQLMVKLLVWQKSVHKLRKGRGGKVLAPMA

SEQ ID NO: 5241 - DNA, 622 bp, Homo sapiens
atgatggcacaggttccagcctccagcatgtggcagtgcctcttccttctagttctccagcccagcagaagctcctgctgcccgccgccctcctactgctctatcgccaccaccaaccgtagcgagttgctggctgcccgatgtagaggactaggaatcaggagtcagtggccgtatgctggaggctggagccgagggagcgtggctcccctcgctgtggttgttggcagcaacggagagatagcagcgcggctggaacgcattcatcaacaacttttgaaacatatacgaaaattatctaaaaatcctcaaaataccaattcagaaggaacatctacaggaacacctgacgaggctgcacccttggcaggaagaacacctgacacggctgaaagcttggtggaaaaaacacctgatgaggctgcacccttagtggagggaacatctgacaaaattcaatgtctggggaaagcaacatctggaaagtttgaacagtcagcagaagaatatgttaggccatgtgtctctataacagctattgaactctgcattgtacagtgaaagcagtcatagataatgtgtgagcaaataggcatgattgcactccaataaaactttgtat

SEQ ID NO: 5242 - protein, 186 aa, Homo sapiens
MMAQVPASSMWQCLFLLVLQPSRSSCCPPPSYCSIATTNRSELLAARCRGLGIRSQWPYAGGWSRGSVAPLAVVVGSNGEIAARLERIHQQLLKHIRKLSKNPQNTNSEGTSTGTPDEAAPLAGRTPDTAESLVEKTPDEAAPLVEGTSDKIQCLGKATSGKFEQSAEEYVRPCVSITAIELCIVQ

SEQ ID NO: 5243 - DNA, 847 bp, Homo sapiens
ttcctgtgctcctacttccctctcttctgtcaccttgtgaagaaggtgcctgcttcctcttcaccttccgccatgattgtcagcttcctgaggccaccccagacatgcagagctgtctgaagtctcagtgggctcaaccagctcccctgttcaacatccggcaaggtccaaacgaaggtgacaatcaacagggatcttattgggaagctctggtaaaaatggtgtcagaagtgggatctgaagtagagccttaacaatctccaggactgctgagtgaacaagcaaggtacctgcaaggacctacttttgtcccttgatctctcaaagtggctggggatcatggatggatacatgtgaccaagcattgcaagttaaagatatttctgaatcttggacctcttatttacagtgaagccccctcatgcatagtaaagcagagaggaatgtaaaaggttgctgcatcgataatcaatttctggtgagcaataattataggtaatgtaaaatgggacaattattgcttttcatcatatcttgaaagaactcttacagtccatgattttgaaaaaaaaaatctaagttcactctttttttttctattaaaaaaagacattatcctgtagaagttcaagagtaaaatctgaaggcagcttatctgacctggccacatggtcttgccacttgttaaatataactttctacacactaacttctccagacctcagatcttcaactctctaaaatggaaacctagtagtatttgtctctagacctgcagctgaactgagcattttagggaaggaacaaacatacacacgatatatatatagtcagattatgaacccag

SEQ ID NO: 5244 - protein, 49 aa, Homo sapiens
MQSCLKSQWAQPAPLFNIRQGPNEGDNQQGSYWEALVKMVSEVGSEVEP

SEQ ID NO: 5245 - DNA, 1071 bp, Homo sapiens
agggccctagtcctccagagcagtttatggctgtcaaattatctgattccagaatcgccctgaaatctggctatggaaaatatcttggtataaattcagatgaacttgttgggcattcagatgcaattggaccaagagaacaatgggaaccagtctttcaaaatgggaaaatggctttgttggcctcaaatagctgctttattagatgcaatgaagcaggggacatagaagcaaaaagtaaaacagcaggagaagaagaaatgatcaagattagatcctgtgctgaaaaagaaaccaagaaaaaagatgacattccagaagaagacaaaggaaatgtaaaacaatgtgaaatcaattatgtaaagaaatttcagagcttccaagaccacaaacttaaaataagtaaagaagagagtaaaattcttaaaaaggctcagaaagatggatttttgcatgagacgcttctggacagagaaccaaattgaaagccgacagatactgcaaatgactggaatttttgtttctgccttatctttttgtgttttttttttctgaataaaatattcagaggaaatgcttttacagagttcttgagttgttgtgaaattattgtttagctagtagctagtttaaccaggattaaacaagtttaatcaggattcttcatggatgtacttccttggctaactacagtttttcacatggaaatgaaacttacagtacacacttaacgtatcacagaatttttttctggatttcctgtcctgaagcatgaagtgtactagaaaccaattcttcctgcgctacttgtggaatctttcttactggatcataatcttactttactttatacaatagatgcttaatcagtgcctttaataggaagttggaaactccaaatccaatcaacaaggctttgattctgcctcctaagtactacccagatcacagacaatccaaatatcagaactaggggtctgggcagagaggacaaatcatctattagggagtgggacagaaagtggaaacattacaaaggagcaagtaggctcagaacagaggggagagtag

SEQ ID NO: 5246 - protein, 152 aa, Homo sapiens
MAVKLSDSRIALKSGYGKYLGINSDELVGHSDAIGPREQWEPVFQNGKMALLASNSCFIRCNEAGDIEAKSKTAGEEEMIKIRSCAEKETKKKDDIPEEDKGNVKQCEINYVKKFQSFQDHKLKISKEESKILKKAQKDGFLHETLLDREPN

SEQ ID NO: 5247 - DNA, 6528 bp, Homo sapiens
cggccgcccgcctccccggacgagccgtcggtggccgcgtcgtcggtgggcagcagccgcttgccgctcagcgcctcgcttgccttctccgacctcaccgaggagatgctggactgcgggcccagcggcttggtgcgggagctggaggagctgcgctcggagaacgactatctcaaggacgagattgaggagctgcgggccgagatgctggagatgcgggacgtctatatggaggaggacgtgtatcagctgcaggagctgcgacagcagctggaccaggccagcaagacctgccgcatcctgcagtaccggctgcgcaaagccgagcgccgcagtctccgtgccgcccagaccggccaggtggacggcgagcttatccgtggtctggagcaggatgtcaaggtctctaaggacatctccatgcggctgcataaggagctcgaggtggtggagaagaaacgggcgcggctggaggaggagaacgaagagcttcgtcagcggctcatcgagactgagctggctaagcaggtgctgcagacggagctggagcgaccgagagagcattccttgaagaaaagaggaacccgctccctggggaaggccgataagaagactttggtgcaggaggacagtgcagacctgaagtgccagttgcactttgcaaaggaggagtcagccctcatgtgcaagaagctcactaagcttgccaaggagaatgacagcatgaaggaggagctgctgaagtaccgctcgctctatggggacctggacagcgcgctgtcagccgaggagctggccgatgccccccactcgcgggagaccgagctgaaggtgcacctgaagctggtggaggaggaagccaacctgctgagccgccgcatcgtggagctggaggtggagaaccgaggcctgcgggctgagatggacgacatgaaggatcatggaggtggctgtgggggtcctgaggcacgcctggccttctccgcgctgggtggcggagagtgcggggagagcttggcagagctgcggcgacacctgcagtttgtcgaagaggaggccgagctgctgcggcgctcctctgccgagctcgaggaccagaacaagctgctgctgaacgagctggccaagttccgctcggagcacgagctggacgtggcgctgtcggaggacagttgttctgtgctcagcgaaccttcacaggaggagctggcggccgccaagctgcagatcggcgagctcagcggcaaggtcaagaagctgcagtacgagaaccgcgtgctcctctccaacctccagcgctgtgacctcgcctcctgccagagtacgcggcccatgctggagacggacgccgaggccggggactctgcccagtgtgtgcctgctcccctgggcgagacacacgagtcccatgcggtccgactctgcagagccagggaggccgaggtgctgcctgggctgagagagcaggccgccctggtcagtaaggccatcgatgtcctggtggctgatgccaatggcttcacggctggcctccggctgtgtctggacaacgagtgtgctgacttccggctgcatgaggcccccgacaacagcgagggccccagggacaccaagctcatccatgccatcctggtgcgcctgagcgtgctgcagcaggagctgaatgccttcacgcggaaggcagatgcagtcctcgggtgctctgtcaaggaacagcaggagtccttctcatcactgccccccttgggctcccaggggctctctaaggagattcttctggcaaaagaccttggctcagactttcagccacctgacttcagggacctgccggaatgggagcccaggatccgagaggctttccgcactggtgacttggactctaagcccgaccccagccggagcttcaggccttaccgagctgaagacaatgattcctatgcctctgagatcaaggagctgcagctggtgctggctgaggcccacgacagcctccggggcttgcaagagcagctctcccaggagcggcagctacgaaaggaggaggccgacaatttcaaccagaaaatggtccagctgaaggaggaccagcagagggcgctcctgaggcgggagtttgagctgcagagtctgagcctccagcggaggctggagcagaaattctggagccaggagaagaacatgctggtgcaggagtcccagcaattcaagcacaacttcctgctgctcttcatgaagctcaggtggttcctcaagcgctggcggcagggcaaggttttgcccagcgaaggggatgacttcctcgaggtgaacagcatgaaggagctgtacttgctgatggaggaagaggagataaacgctcagcattctgataacaaggcctgcacgggggacagctggacccagaacacgcccaatgagtacatcaagacactggccgacatgaaggtgacgctgaaggagctgtgctggctgctccgggatgaacgccgtggtctgacggagcttcagcaacagtttgccaaggccaaggctacctgggagacagagcgggcagagctcaagggccatacctcccagatggagctgaagacagggaagggggccggggagcgggcagggcccgactggaaggcagccctacagcgggagcgtgaggagcagcagcacctcctagctgagtcctacagcgctgtcatggagctgactcggcagctgcagatcagtgagcgcaactggagccaggaaaagctgcagctggtggagcggctgcagggtgagaagcagcaggtggagcagcaggtgaaggagctgcagaaccgcctaagccagctgcagaaggctgccgacccctgggtcctgaagcactcggagctggagaagcaggacaacagctggaaggagacacgcagtgagaagatccacgacaaggaggctgtttccgaagttgagcttggaggaaatggtttaaagagaaccaaatctgtttcttccatgtctgagtttgaaagtttgctcgactgttccccttaccttgctggcggagatgcccggggcaagaagctgcctaacaaccctgcctttggctttgtgagctccgagccaggggatccagagaaagacaccaaggagaagcctgggctctcgtcgagggactgcaaccacctgggtgccctggcctgccaggaccccccagggaggcagatgcagcgcagctacacggctcctgacaagacgggcatccgagtctactatagtcccccggtggcccggcgcctcggagtccctgtggttcatgacaaagagggcaagatcattatcgagcccggcttcctcttcaccacagccaagcccaaagagtcggccgaggctgatgggctggctgagagctcctatggtcggtggctctgcaacttctcacggcagcgcctggacggaggctcagcgggcagcccctcggcggccgggcctggcttcccagcggccctgcatgactttgagatgtcaggcaacatgagtgatgacatgaaggagatcaccaactgtgtgcgccaggccatgcgctccggctcactggagaggaaagtgaagagcacatccagccagacggtgggcctggccagtgtgggcacacagaccatccgcacggtcagcgtgggcctgcagaccgacccaccccgcagcagcctccatggcaaggcctggtcaccccgcagctcttcgctcgtgtctgtgcgcagcaagcagatctcctcctccctggacaaggtccattcgcgcatcgagcggccctgctgctcccccaagtatggctcaccaaagctccagaggcggtctgtgtccaagctggacagcagcaaggaccgcagcctgtggaacctgcaccagggcaagcagaacggctcggcctgggcccgctccaccaccacgcgggacagccctgtattgagaaacatcaacgatggactctccagcctcttcagtgtggtggagcactcagggagcacggagtctgtctggaaactaggcatgtctgagacgcgggccaagcccgagcctcccaagtacggcattgtgcaggaattcttccgtaatgtgtgtggccgggcaccgagccccacctcatcagcaggagaggagggcaccaagaagccagagcccctctccccagccagctaccatcagccagagggtgtggccaggatcctgaacaagaaggcagccaagttgggcagcagtgaggaggtcagactcaccatgctcccccaggtggggaaggatggtgtcctccgggacggagatggagccgtggtccttcccaatgaggacgctgtttgtgactgtagtacccagtctctcacctcctgcttcgcccgatcgtcccgctctgccatccgccactctccttccaagtgcaggctgcacccttcagagtccagctggggtggggaggagagggcactcccccccagcgagtgacagagcagccaagctccccgcctcaaccagcccagcccctggatagcagaagggaaccagcagagacgagacgaggctgaacaccagggtcatgccagtcccgccagccgcctcctccatgccccagtgactggtgtgggcagagcaggcagccagtggagctgtgggccagttccgctcttggatgctgctgctctcacccatgaggtcaggggggccctccaaggttatctccaggtgaggggattcacatcaggccacaagccaccagaggccttctgccacctcccagagcgacagccagggaggctgcgtactcagcctcggggagaaatccccgtgggacctgagccccaagacctacggaccactcagccttaccatcgtaccgtccaggattgtccttgccatctttgttgtctcagccagaccttggttttcagtaaagccccagtttctacttcctgcatgccactgtgcaaggccactcatcactgttcctgcagaagcctctggacgtggggctggatggggttgaaaatgttacatgtaaatattggtttggttcggtttttagcattttacttggtaactggttgttttcttttttggggtggggggattggtttgtaaaaattctctactcttttggaatgtgatttctaagtttgttggtttcttcaaatgccttttaagtcttggtaacattcccaaagcagaaaactgcctgacccacagtggggattccctggagaattggggtcccaagaaggaatgctgcccttctcgaacccgttctcccccttcctcctgcctctctgccttttactgctattcccttcttctcctcctttatccttctttctgttttccccatctccactctctcttcaaccaaagtcccaaggaaccctcggggctcaatcccccatagaccacttggcttgggtccatggggttggcatcagttggttggcggaaatgggggaccagttggcatgatggccctaaactgggaaacctcatgtttcttatgtctcacctctttccagagccaaatcagccccttttggaatgatgacttcattggaatgcaaatcaagtcattttggtgcatcagtggctcttaggcctgcacacacgagacatcagaatccaatcctctgaccctgtgccagccctttcccccagtttatttcccaccaaaggctgacctctaagaggtcttgctttctatgaactcaagatgggtcccacctctaggtgtccccaggtgcactcttctaccggttggcttccgatgtgacaaggccaagggcccaaagacttgaccctcttacacccttgctgacatggttccatcatgtccacccgcatgcacttttatggtttcatcacccagcctcttctcctctggcccacccagcgtccaggctctttctccctctcccctcctatctagaatgtcccctgcttctagcctcaccagaccccccaagctcccactacttcttccataataatagtaataacaatggttatcatcatcccctgcacatcccgcctaaagcactttactatatagaaaacgtttcccctggccgggcatggtggctcacgcctgaaatcccagctctttgggaggctgaggcgagcggatcagttgaggtcaggagttcaacgccagcctggccaacgtggtgaatccctgtctgtactaaaagtacaaaaaattagctgagcatggtggtgcgtgcctgtaatcccagctactcgggaggctgaggtgggagaatcgcttgagcccaggaggcggaggttgcaggagcagagattgcgccactgcactccagcctggatgacagagtgagacccaatctcaaaaaagaaatcgtttcccaccccacatctccttcagacctctcagggacaactctgggaggcagccttggcaggacatgggttagtgcgcccattttgctgtgaggaaactgaggtacaggtctcatcccagagcatgagaagtcactgagtttagatgagaacttgggt

SEQ ID NO: 5248 - protein, 1456 aa, Homo sapiens
MLDCGPSGLVRELEELRSENDYLKDEIEELRAEMLEMRDVYMEEDVYQLQELRQQLDQASKTCRILQYRLRKAERRSLRAAQTGQVDGELIRGLEQDVKVSKDISMRLHKELEVVEKKRARLEEENEELRQRLIETELAKQVLQTELERPREHSLKKRGTRSLGKADKKTLVQEDSADLKCQLHFAKEESALMCKKLTKLAKENDSMKEELLKYRSLYGDLDSALSAEELADAPHSRETELKVHLKLVEEEANLLSRRIVELEVENRGLRAEMDDMKDHGGGCGGPEARLAFSALGGGECGESLAELRRHLQFVEEEAELLRRSSAELEDQNKLLLNELAKFRSEHELDVALSEDSCSVLSEPSQEELAAAKLQIGELSGKVKKLQYENRVLLSNLQRCDLASCQSTRPMLETDAEAGDSAQCVPAPLGETHESHAVRLCRAREAEVLPGLREQAALVSKAIDVLVADANGFTAGLRLCLDNECADFRLHEAPDNSEGPRDTKLIHAILVRLSVLQQELNAFTRKADAVLGCSVKEQQESFSSLPPLGSQGLSKEILLAKDLGSDFQPPDFRDLPEWEPRIREAFRTGDLDSKPDPSRSFRPYRAEDNDSYASEIKELQLVLAEAHDSLRGLQEQLSQERQLRKEEADNFNQKMVQLKEDQQRALLRREFELQSLSLQRRLEQKFWSQEKNMLVQESQQFKHNFLLLFMKLRWFLKRWRQGKVLPSEGDDFLEVNSMKELYLLMEEEEINAQHSDNKACTGDSWTQNTPNEYIKTLADMKVTLKELCWLLRDERRGLTELQQQFAKAKATWETERAELKGHTSQMELKTGKGAGERAGPDWKAALQREREEQQHLLAESYSAVMELTRQLQISERNWSQEKLQLVERLQGEKQQVEQQVKELQNRLSQLQKAADPWVLKHSELEKQDNSWKETRSEKIHDKEAVSEVELGGNGLKRTKSVSSMSEFESLLDCSPYLAGGDARGKKLPNNPAFGFVSSEPGDPEKDTKEKPGLSSRDCNHLGALACQDPPGRQMQRSYTAPDKTGIRVYYSPPVARRLGVPVVHDKEGKIIIEPGFLFTTAKPKESAEADGLAESSYGRWLCNFSRQRLDGGSAGSPSAAGPGFPAALHDFEMSGNMSDDMKEITNCVRQAMRSGSLERKVKSTSSQTVGLASVGTQTIRTVSVGLQTDPPRSSLHGKAWSPRSSSLVSVRSKQISSSLDKVHSRIERPCCSPKYGSPKLQRRSVSKLDSSKDRSLWNLHQGKQNGSAWARSTTTRDSPVLRNINDGLSSLFSVVEHSGSTESVWKLGMSETRAKPEPPKYGIVQEFFRNVCGRAPSPTSSAGEEGTKKPEPLSPASYHQPEGVARILNKKAAKLGSSEEVRLTMLPQVGKDGVLRDGDGAVVLPNEDAVCDCSTQSLTSCFARSSRSAIRHSPSKCRLHPSESSWGGEERALPPSE

SEQ ID NO: 5249 - DNA, 3728 bp, Homo sapiens
gatgtgttttctgcctttctggactactttgcctctaagatgcagaaactgagtacaagggaaaggactccaaatccccagtatgtcccctgcaggagcagagttgaaggaggtcccaccaggtctggtgggtggccctgctcaggcttacctcccccttgtaggggtcactgggaactgtcaactgcgaaggactgtgatctccagtctggtatggtctgctctggggtccaagtgaggaaagcataaatcgggcaactctctcccagtgagaagatagaaggagcttctacagagaaggacgagattgaggagctgcgggccgagatgctggagatgcgggacgtctatatggaggaggacgtgtatcagctgcaggagctgcgacagcagctggaccaggccagcaagacctgccgcatcctgcagtaccggctgcgcaaagccgagcgccgcagtctccgtgccgcccagaccggccaggtggacggcgagcttatccgtggtctggagcaggatgtcaaggtctctaaggacatctccatgcggctgcataaggagctcgaggtggtggagaagaaacgggcgcggctggaggaggagaacgaagagcttcgtcagcggctcatcgagactgagctggctaagcaggtgctgcagacggagctggagcgaccgagagagcattccttgaagaaaagaggaacccgctccctggggaaggccgataagaagactttggtgcaggaggacagtgcagacctgaagtgccagttgcactttgcaaaggaggagtcagccctcatgtgcaagaagctcactaagcttgccaaggagaatgacagcatgaaggaggagctgctgaagtaccgctcgctctatggggacctggacagcgcgctgtcagccgaggagctggccgatgccccccactcgcgggagaccgagctgaaggtgcacctgaagctggtggaggaggaagccaacctgctgagccgccgcatcgtggagctggaggtggagaaccgaggcctgcgggctgagatggacgacatgaaggatcatggaggtggctgtgggggtcctgaggcacgcctggccttctccgcgctgggtggcggagagtgcggggagagcttggcagagctgcggcgacacctgcagtttgtcgaagaggaggccgagctgctgcggcgctcctctgccgagctcgaggaccagaacaagctgctgctgaacgagctggccaagttccgctcggagcacgagctggacgtggcgctgtcggaggacagttgttctgtgctcagcgaaccttcacaggaggagctggcggccgccaagctgcagatcggcgagctcagcggcaaggtcaagaagctgcagtacgagaaccgcgtgctcctctccaacctccagcgctgtgacctcgcctcctgccagagtacgcggcccatgctggagacggacgccgaggccggggactctgcccagtgtgtgcctgctcccctgggcgagacacacgagtcccatgcggtccgactctgcagagccagggaggccgaggtgctgcctgggctgagagagcaggccgccctggtcagtaaggccatcgatgtcctggtggctgatgccaatggcttcacggctggcctccggctgtgtctggacaacgagtgtgctgacttccggctgcatgaggcccccgacaacagcgagggccccagggacaccaagctcatccatgccatcctggtgcgcctgagcgtgctgcagcaggagctgaatgccttcacgcggaaggcagatgcagtcctcgggtgctctgtcaaggaacagcaggagtccttctcatcactgccccccttgggctcccaggggctctctaaggagattcttctggcaaaagaccttggctcagactttcagccacctgacttcagggacctgccggaatgggagcccaggatccgagaggctttccgcactggtgacttggactctaagcccgaccccagccggagcttcaggccttaccgagctgaagacaatgattcctatgcctctgagatcaaggagctgcagctggtgctggctgaggcccacgacagcctccggggcttgcaagagcagctctcccaggagcggcagctacgaaaggaggaggccgacaatttcaaccagaaaatggtccagctgaaggaggaccagcagagggcgctcctgaggcgggagtttgagctgcagagtctgagcctccagcggaggctggagcagaaattctggagccaggagaagaacatgctggtgcaggagtcccagcaattcaagcacaacttcctgctgctcttcatgaagctcaggtggttcctcaagcgctggcggcagggcaaggttttgcccagcgaaggggatgacttcctcgaggtgaacagcatgaaggagctgtacttgctgatggaggaagaggagataaacgctcagcattctgataacaaggcctgcacgggggacagctggacccagaacacgcccaatgagtacatcaagacactggccgacatgaaggtgacgctgaaggagctgtgctggctgctccgggatgaacgccgtggtctgacggagcttcagcaacagtttgccaaggccaaggctacctgggagacagagcgggcagagctcaagggccatacctcccagatggagctgaagacagggaagggggccggggagcgggcagggcccgactggaaggcagccctacagcgggagcgtgaggagcagcagcacctcctagctgagtcctacagcgctgtcatggagctgactcggcagctgcagatcagtgagcgcaactggagccaggaaaagctgcagctggtggagcggctgcagggtgagaagcagcaggtggagcagcaggtgaaggagctgcagaaccgcctaagccagctgcagaaggctgccgacccctgggtcctgaagcactcggagctggagaagcaggacaacagctggaaggagacacgcagtgagaagatccacgacaaggaggctgtttccgaagttgagcttggaggaaatggtttaaagagaaccaaatctgtttcttccatgtctgagtttgaaagtttgctcgactgttccccttaccttgctggcggagatgcccggggcaagaagctgcctaacaaccctgcctttggctttgtgagctccgagccaggggatccagagaaagacaccaaggagaagcctgggctctcgtcgagggactgcaaccacctgggtgccctggcctgccaggaccccccagggagccagaagctgcccttcctcctcatcctggcccctccccagcccccgccaatactgtgaacccccttcccactcagcctggtttcctggtgagggtcctgcagtcatgggccctgggggacccccagggcaaggcccatgggagggaagggaccaagggcatccttgggccaactgtccacctctcttgtccactattctctcctttccacttctgtcttcaaaaggctccttcctaggatggatcgggtgctaggacaactgcagtccaatccaccagctctccctgcccctgtgtcttatttcagacatgagaataactgtacagtgtaaacttataaagcgtttttaatggttgtagattggaaataaagtatgtcatatgaacagctaaaaaaaaaaaaaaaaaa

SEQ ID NO: 5250 - protein, 1016 aa, Homo sapiens
MLEMRDVYMEEDVYQLQELRQQLDQASKTCRILQYRLRKAERRSLRAAQTGQVDGELIRGLEQDVKVSKDISMRLHKELEVVEKKRARLEEENEELRQRLIETELAKQVLQTELERPREHSLKKRGTRSLGKADKKTLVQEDSADLKCQLHFAKEESALMCKKLTKLAKENDSMKEELLKYRSLYGDLDSALSAEELADAPHSRETELKVHLKLVEEEANLLSRRIVELEVENRGLRAEMDDMKDHGGGCGGPEARLAFSALGGGECGESLAELRRHLQFVEEEAELLRRSSAELEDQNKLLLNELAKFRSEHELDVALSEDSCSVLSEPSQEELAAAKLQIGELSGKVKKLQYENRVLLSNLQRCDLASCQSTRPMLETDAEAGDSAQCVPAPLGETHESHAVRLCRAREAEVLPGLREQAALVSKAIDVLVADANGFTAGLRLCLDNECADFRLHEAPDNSEGPRDTKLIHAILVRLSVLQQELNAFTRKADAVLGCSVKEQQESFSSLPPLGSQGLSKEILLAKDLGSDFQPPDFRDLPEWEPRIREAFRTGDLDSKPDPSRSFRPYRAEDNDSYASEIKELQLVLAEAHDSLRGLQEQLSQERQLRKEEADNFNQKMVQLKEDQQRALLRREFELQSLSLQRRLEQKFWSQEKNMLVQESQQFKHNFLLLFMKLRWFLKRWRQGKVLPSEGDDFLEVNSMKELYLLMEEEEINAQHSDNKACTGDSWTQNTPNEYIKTLADMKVTLKELCWLLRDERRGLTELQQQFAKAKATWETERAELKGHTSQMELKTGKGAGERAGPDWKAALQREREEQQHLLAESYSAVMELTRQLQISERNWSQEKLQLVERLQGEKQQVEQQVKELQNRLSQLQKAADPWVLKHSELEKQDNSWKETRSEKIHDKEAVSEVELGGNGLKRTKSVSSMSEFESLLDCSPYLAGGDARGKKLPNNPAFGFVSSEPGDPEKDTKEKPGLSSRDCNHLGALACQDPPGSQKLPFLLILAPPQPPPIL

SEQ ID NO: 5251 - DNA, 2041 bp, Homo sapiens
acaggagaatgagaggcctccgctggcgttacactcggctgcccagccaggtggaggacaccctgtctggggaggagggtaacgaagaggaagaggaggaggaggcagctccagacccagctgctgctcctgaggatcccacggtgccccagctgacagaagccagccaggttttgagtgcctcagagattcggcagctcagctttcacttcccaccaagagtcaccggccatccctggagtctggtcttctgcacgtcaagggacggtttcagcctgcagagcctgtaccggcggatggagggctgcagcgggccagtgctgctggtgctcagggaccaggacgggcagatatttggagccttctcctcctcggctatccgactcagcaaaggcttctatggtactggcgagacattcctcttctccttctccccacagctgaaggtctttaagtggactggaagcaactctttctttgtgaagggagacttggattcactgatgatgggcagtggcagtggccggtttgggctgtggttggatggagacttgttccgcgggggaagctccccttgcccgaccttcaacaacgaggtgctggcccggcaggagcagttctgcatccaggagctggaggcttggcttctcagctgacagccctgcggcaacagaattctatgattgaagcctctaaatgaattgtgcaggagagggagtttgtaaacaactgactacagacattcacattgggtcatctttaaaaagctggactctgcttttggatgcttctcggaggcgagttggattttggactgaagtactgtcgttccattcctttttttgaggtgttatgagtggggctataacatcgccatcctattaagaagagagagaaaaacaggcaatagagaaaagccagtttccatcatcttatttctgagtgaaagtctcaagtgcgcacatcctcatcttgcatatagattgcttctagctgtcctcaatccagggaaactccaaattacatatgccctgtgcttggggcaaattagaaacactacagtcttacgcaggaagagccttcatgaaaacagccactggcctctgcagagatgactgggagcagcataccactgcccacctctatggcctccttcacacaccttcacggagcacaaactctgtcctgttttcccaggagaaagacgggatgcactgaacccctagcttctctctcgcctggtcccctctgcaataaaaggcccaggtctacaagatggcaaagaaggggaggaagaacagtatgtacctgcagaatttaaatttttctctgcatcaaagctctaacgttggtcccatcagcataggctccagccaaagaagctcctccacccaaaataagggagagatccaaagggaggcgatacaatgacgtgaaaccatagaggtaagaagcaaggcctcctaatacttgactctatgctaaactgttctgaacttgtgggtagatcttctttggttacaagatgatgcacgatcttggagagcctctgttgtaccaggaatacaatgctggtgggaggattcgtgctcctcatctgcttatttgctctcagatccattcttcactcttcctctccctactctgtctcacaggagctactccggtaaattacatttctcagctcccatgcctgttggtttccagttagatttggtcagtgggaggctctggtgggagactggaggtgagaagagggcagagaagtcaggttttttctctccctacctcctctggcacgagcggcagtggcagtgactattctgtggttctagcttttgcaggtggccccagctcctggactcccacctgctcccttggtctctcctatcctagaggtggtagcagcttcctgctgttgaatcactgtcctctatgctcatttagctctgccaaaacttttgtatctcacccccatgttaaattttttctgttgaactacactggatctgacttgatagaactattaaaaatagttttt

SEQ ID NO: 5252 - protein, 215 aa, Homo sapiens
MRGLRWRYTRLPSQVEDTLSGEEGNEEEEEEEAAPDPAAAPEDPTVPQLTEASQVLSASEIRQLSFHFPPRVTGHPWSLVFCTSRDGFSLQSLYRRMEGCSGPVLLVLRDQDGQIFGAFSSSAIRLSKGFYGTGETFLFSFSPQLKVFKWTGSNSFFVKGDLDSLMMGSGSGRFGLWLDGDLFRGGSSPCPTFNNEVLARQEQFCIQELEAWLLS

SEQ ID NO: 5253 - DNA, 4464 bp, Homo sapiens
cgaagacactcacctgtggagcctgtgcacgtaggtagaggcggcggctctgagtccaggagctccagtgggcagctccccagcaccagccatgaactacgtggggcagctggcggagacggtgtttgggacggtgaaggagctgtaccggggcctgaacccagccacactgagcggcggcattgacgtgctggtggtgaagcaggtggacggctcgttccggtgctcacccttccacgtgcgttttggcaagctgggcgtcctgcggtcgcgggagaaggtggtagacattgagctcaatggggagcctgtggacttgcacatgaagcttggggacagcggggaggccttctttgttcaggagctggagagcgatgatgaacatgtgcctcccggcctgtgcacctcacccatcccttgggggggtctgtctggcttcccctcggactcccagctgggcactgccagtgagcctgagggcctcgtcatggcaggcacggcctccactgggcggaggaagaggcgtcgcaggaggaaacccaagcagaaagaggatgcagtggcaactgattctagtccagaggaactggaggcaggcgctgagagtgagctatccctgccggaaaagctgaggccagagcccccaggtgtccagttggaagagaagtcttcactgcagcccaaagacatctacccctactcggatggcgagtggcccccccaggccagcctctcagcaggtgagctaacatcccctaagagcgactcggagctggaggtgcggaccccggagcccagtcccctaagagccgagtcccacatgcagtgggcctgggggaggctgcctaaggtggccagagctgagcggcccgagtcctcagtggtccttgaaggcagagctggggcaacctctcctcctcggggaggacccagcactccctctacctctgtggctggcggcgtggaccctttgggactcccaatccagcaaacagaggctggtgccgaccttcagcctgacacagaggatcccactctagtgggtccccctctccacaccccagagacagaggaaagcaagactcagagctctggggacatgggcctccctcctgcctccaagtcatggagctgggccactctggaggttccagttcccaccgggcagccagagagggtctccagggggaaaggctccccaaagagaagccagcacctgggccccagtgacatctacctggatgacttgccctccctggactctgagaatgcagcgctttacttcccccaaagtgactctgggctgggggccagaagatggagtgaacccagcagtcagaagtccctgagggaccccaaccctgaacatgaacctgaacccactctggacacagtggatacaatagcactgtccctctgtggtggactggctgacagccgggacatctccctagagaaattcaaccagcacagcgtctcttaccaggacctcaccaaaaaccccggacttttggatgacccaaacctagtggtgaaaatcaatggaaagcattataactgggctgtggctgcccccatgatcctctccctgcaagccttccagaaaaacttgcccaagagcaccatggacaagctggagagggagaagatgccccggaagggtgggcgatggtggttttcctggcgacgcagggacttcctggccgaggagcgcagtgcccagaaggagaagactgcagccaaggagcagcagggggagaagacagaagtcctgagcagtgatgacgatgccccagacagccctgtgatcctggagatcccctccttgccaccctccactccaccctccactcctacctacaagaagtccctccgcctctcctccgatcagatccggcgcctgaacctgcaagaaggtgccaatgatgtggtcttcagcgtgaccactcagtaccagggcacctgccgctgcaaggccaccatctacctgtggaaatgggacgacaaggtggtcatctctgacatcgacggcaccatcaccaagtcagatgctctgggccatatcctgccccagctggggaaagactggacacaccagggcatcaccagtctctatcacaaaatccaactaaatgggtacaagttcctgtactgctcggcgcgggccattggcatggcggacctcaccaaggggtacctgcagtgggtgagcgaggggggctgtagcctccccaagggccccatccttctgtctcccagcagcctcttctctgccctccacagagaggtgatcgagaagaaaccagaggtgttcaaggtcgcctgcctgagtgacatccagcagctgtttctgccccacggacagcccttctatgctgcctttgggaataggcccaatgatgtctttgcctaccggcaggtgggcctgcctgagtcacgcatcttcacagtcaacccccggggagagctcatccaggagctcataaagaaccacaaatccacgtatgagcggcttggtgaagtggtcgagctcctcttcccacctgtggcccgtggccccagcacagacctggccaaccctgaatacagtaacttctgctactggcgggagccactgcctgctgtggaccttgataccctggactgaacctgccctggctggctcctcctccctggcccggcccaggactggctaggtgtcctggggtataggagggtgggaattggagtgtcatggggcaaacccactgaaggggaaggaggaggctgcaggttggttggcagctagagagactcccccatcttccccgtcatatttttgccagctaagctgcagctgctccaggcgtcagtgtggcactgtcctggggcaattagcttgtcatctgggcccttgcagggttctttttttttttttttttttttttttcctgagacagggtcttgttctgttgcccaggctggagtgcagtggcatgatctctcggctcactgcaacctccgcctcccgggttcaagcgattcacctgcctcagcctcccaagtagctgggattacaggcgtgtaccaccacgcctggctaattttcgtgtttttagtagagatgggttttcaccacattggccaggctggtctcgaactcctgacctcaagtgatttgcccacctcggcctcccaaagtgctgggattacaggcatgagctaccatgccaggcctccttgcagggttttctatgcccttgatatctgtctccctgtcaacctgggaccttgctgtaagtcttgataggacagggagaagagggaggccctaccgaggctcgaggcttcagtgaagggtgacagcagtgggagtgtggtacagcctctggaaggacacagtgttctccccgccccttgtctgggagccaggactgtaccctccgaagccagacatcactgccaacatatcccccttgctggtgccctggcatctcagcacatgacacacacccacacctgcaggctgtggttccggcttggcctgctccccgtccggctgctgccgctgcctctctccagacctcgcttaaggacagtcccaaactcagctggggcaggtgttggcctgaaagtcctcccccagcctctgctggccagcttggtgctcacagctgctgggtaagctcttgcctaaggagctgtgggaagcagggctgatgccccagcaacctctcctcccactgtctttgaagaaagtagctttagaccggctaaaagctttaatccagagcctgccctactctgatagtaccagagtggagggcagaataccaaatgtccaggaaccaaaggcagggctgtggggacctgaagagcggcacagtggggcccgtgctgctgtgggggaaactgaggctgggagcctcagcagagaccggtgtcaagagtctctgggaactgcataggcctgaggaacatgcattttcaagttgtccattgatggtttcgtacctgaatttctcaccttttgtgaacatcttgggagggtgggggttttgcaggggtgttaaaagcaaggcttggagcccctttcctccagctggtggctccttctcagggcctggcctcattcaggccactttgtagagaaatgccctgacctcgcaggaaggatttccccacccccaagtggaaggaagaggacagtgtgggcaccagagggccctggaaacatcttaggggaaggaaaggaaaaggataaatttggagtggggggtctctaaacagattgcctggattccgttctttcctggggttctacagctgcctaagccctcaccttgggggaggatcaaagggaataaagagaactcttggctgaaaaaaaaaaaaaaaaaaaaaaaaaaaaaaaaaaaaaaaaaaaaaaaaaaaaaaaaaaaaaaaaaaaaaaaaaaaaaaaaaaaaaaaaaaaaaaaaaaaaaa

SEQ ID NO: 5254 - protein, 851 aa, Homo sapiens
MNYVGQLAETVFGTVKELYRGLNPATLSGGIDVLVVKQVDGSFRCSPFHVRFGKLGVLRSREKVVDIELNGEPVDLHMKLGDSGEAFFVQELESDDEHVPPGLCTSPIPWGGLSGFPSDSQLGTASEPEGLVMAGTASTGRRKRRRRRKPKQKEDAVATDSSPEELEAGAESELSLPEKLRPEPPGVQLEEKSSLQPKDIYPYSDGEWPPQASLSAGELTSPKSDSELEVRTPEPSPLRAESHMQWAWGRLPKVARAERPESSVVLEGRAGATSPPRGGPSTPSTSVAGGVDPLGLPIQQTEAGADLQPDTEDPTLVGPPLHTPETEESKTQSSGDMGLPPASKSWSWATLEVPVPTGQPERVSRGKGSPKRSQHLGPSDIYLDDLPSLDSENAALYFPQSDSGLGARRWSEPSSQKSLRDPNPEHEPEPTLDTVDTIALSLCGGLADSRDISLEKFNQHSVSYQDLTKNPGLLDDPNLVVKINGKHYNWAVAAPMILSLQAFQKNLPKSTMDKLEREKMPRKGGRWWFSWRRRDFLAEERSAQKEKTAAKEQQGEKTEVLSSDDDAPDSPVILEIPSLPPSTPPSTPTYKKSLRLSSDQIRRLNLQEGANDVVFSVTTQYQGTCRCKATIYLWKWDDKVVISDIDGTITKSDALGHILPQLGKDWTHQGITSLYHKIQLNGYKFLYCSARAIGMADLTKGYLQWVSEGGCSLPKGPILLSPSSLFSALHREVIEKKPEVFKVACLSDIQQLFLPHGQPFYAAFGNRPNDVFAYRQVGLPESRIFTVNPRGELIQELIKNHKSTYERLGEVVELLFPPVARGPSTDLANPEYSNFCYWREPLPAVDLDTLD

SEQ ID NO: 5255 - DNA, 669 bp, Homo sapiens
atggcctgccggcatctgttggtgtgctcctccgccagcgtgcttccccgccagcatggtccccgacaggtgctcctccgccagcgtggtcctcggctaggtgctcctctgccagcgtgctcccccgccagatgctcctctgccagcggggtcctcagtcaggtgctcctctgccagcgtgctcccccgccaggtgctcctctgccagcatgctcccccgccagcatgctcctctgccaggtgctcccccaccaggtgctcctccttcagatgctcctccagcaggtgctcccccgccagcgtgctcctccaccagcgtgctccttcgccagcgtgctcctccgccaggtgctcctcctccaggtgctcccccaccagcgtgctcccccaccagcgtgctcctccgccaggtgctcctccaccagcgtgctcctccactgctcctccgccagcatgctcatccgccaggtgctcctttgccagcgtgctcctccactgctcctctgccagcgtgctcctccgccaggtgctcctccgctaggtgctcctctgctaggtgctcccctgctaggtgctcccctcgacgtcttgtccccgtccagctgcttgtgtcttcttccgctgatgtgctcctctccacacccggccgcctgtgtgtctgcccgctag

SEQ ID NO: 5256 - protein, 222 aa, Homo sapiens
MACRHLLVCSSASVLPRQHGPRQVLLRQRGPRLGAPLPACSPARCSSASGVLSQVLLCQRAPPPGAPLPACSPASMLLCQVLPHQVLLLQMLLQQVLPRQRAPPPACSFASVLLRQVLLLQVLPHQRAPPPACSSARCSSTSVLLHCSSASMLIRQVLLCQRAPPLLLCQRAPPPGAPPLGAPLLGAPLLGAPLDVLSPSSCLCLLPLMCSSPHPAACVSAR

SEQ ID NO: 5257 - DNA, 1202 bp, Homo sapiens
tggcggggcttccggtcgggagggtccgcccgctctcgcgtcctttgctgggtccagacaccggttccgttgcaaacatttttaaagggctggttattcttcctgaaatgagtttggtgattagaaatctgcagcgagtcatccccatcaggagagcgccacttcgcagtaagatcgagattgtaaggaggattttaggagtgcagaaatttgacctggggatcatctgtgttgacaacaagaatattcagcacattaatagaatctacagagatagaaatgtcccaaccgatgtgctttcttttccatttcatgagcatctgaaagcaggtgaatttccccagcctgattttccagatgactacaatttgggagacattttcctaggagtggagtatatcttccatcagtgtaaagaaaatgaagattacaatgacgtcctgactgtaagcggggatgctgaaatcatataacctggctcatggaacatgggccttgcaaaggggtcaagatcacaaccctgcatccatgtgtgtccgtgggtaccgtaagggctactgggggaagaacctgtaagcagggtgtgaggagcacccaggctgggtagggactgcatgccccatgccacagttgaaggagggagagaacacgctgtgaaaacacagaagctcccagagaagccttctcagcttttatctctggagtagagcagactatgttgagctaacacagacctgctgaatcagcttctttctgagctgccagaagtacagaagttggagcctccaccaccttccagatctgtttctcctcagtgtaatccacctatgggttcttcctgcccactgcacagacaaaaccaattcactgcaattgtggtattgcagtagagaaagagtttaacacagagctagccaagcagaaaggctggagttattattcaactcaatctcccagagaactcagaggctacagtttctacaggcaatttggcaggcaggggctagggaatgcctgctgctgatcggctgcagacggaccatggggtgtcaacgatttttgtcccctgagtccgcctctgcgtggagccacgggatcagctgagtcatgagtctcaggtccaggtggagtctgtaggttgccagaactcaaaagtctgaaaaacatcccaaaagaccattaaaaaaaaaaaaaaaaaaaaa

SEQ ID NO: 5258 - protein, 121 aa, Homo sapiens
MSLVIRNLQRVIPIRRAPLRSKIEIVRRILGVQKFDLGIICVDNKNIQHINRIYRDRNVPTDVLSFPFHEHLKAGEFPQPDFPDDYNLGDIFLGVEYIFHQCKENEDYNDVLTVSGDAEII

SEQ ID NO: 5259 - DNA, 1058 bp, Homo sapiens
tggcggggcttccggtcgggagggtccgcccgctctcgcgtcctttgctgggtccagacaccggtacgtccgggcgggtttttagtctcccaagcgagagcgtcgcattcacccgcgtgggtctgcgggcgccccagaccccagaggacccggcccccaacgcttacctgtcccctctcctgtccctcccccattccagccccttctctccccagccgttgcccctccccgcaccccgccgcgtccgcgcgcctctctccgcgcgcacccccaacccgcccccttttctctgggaaccgctccttccgctccgcccgcctggagtccttctggccggattccgcggcatccttccatagaccctcgttgttgcttcctccttgtggttccgttgcaaacatttttaaagggctggttattcttcctgaaatgagtttggtgattagaaatctgcagcgagtcatccccatcaggagagcgccacttcgcagtaagatcgagattgtaaggaggattttaggagtgcagaaatttgacctggggatcatctgtgttgacaacaagaatattcagcacattaatagaatctacagagatagaaatgtcccaaccgatgtgctttcttttccatttcatgagcatctgaaagcaggtgaatttccccagcctgattttccagatgactacaatttgggagacattttcctaggagtggagtatatcttccatcagtgtaaagaaaatgaagattacaatgacgtcctgactgtgacggccacccacggactctgtcacttgctgggattcacacacggcacggaggcagagtggcagcagatgttccagaaggagaaggcggtgctggacgagctgggccgacgcacggggacccggctgcagcccctgacccggggcctcttcggagggagctgagggccgcgttccttctgaaagcgggacgcgggaggggtggaggctgcggggagccggggtcgcacacgaataaataacgaatgaacgtacgaggggaacctcctcttatttccttcaaaaaaaaa

SEQ ID NO: 5260 - protein, 167 aa, Homo sapiens
MSLVIRNLQRVIPIRRAPLRSKIEIVRRILGVQKFDLGIICVDNKNIQHINRIYRDRNVPTDVLSFPFHEHLKAGEFPQPDFPDDYNLGDIFLGVEYIFHQCKENEDYNDVLTVTATHGLCHLLGFTHGTEAEWQQMFQKEKAVLDELGRRTGTRLQPLTRGLFGGS

SEQ ID NO: 5261 - DNA, 1827 bp, Homo sapiens
cgagcacgagcgggaggtgctgcacaaggcgctggaggagaataacaacttcagccgccaggcggaggagaagctcaactacaaatggagctcagcaaggagatccgcgaggcgcacctggccgcactgcgcgagcggctgcgcgaggagctgcacgcggccgaggtgcgcaggaacaaggagcagcgagaggagatgtcgggctaagggcccgggacgggcggcgcccatcctgcgagagaacacgttcgggttttggttttgtttcgttcacctctgtctagatgcaacttttgttcctcctcccccacccccgcccccagcttcatgcttctcttccgcactcagccgccctgccctgtcctcgtggtgagtcgctgaccacggcttcccctgcaggagccgccgggcgtgagacgcggtccctcggtgcagacaccaggccgggcgcggctgggtcccccgggggccctgtgagagaggtggcggtgaccgtggtaaacccagggcggtggcgtgggatcgcgggtccttacgctgggctgtctggtcagcacgtgcaggtcagggcaggtcctctgagccggcgcccctggccagcaggcgaggctacagtacctgctgtctttccaggaggaaggggctccccatgagggaggggcaacgggggaggcgggtgatggtgtctgggagcctgcgtgtgcagccggagcttgttgaactggcagggggtgggtgggggctgcagctttccttaatgtggttgcacaggggtcctctgagaccacccggcctgaggtggacaccctgggccttcctggaagcctgcagttggggacctgccctgagtctgctggggagtgggcattctctgccagggacccatgagcaggctgcatggtctagaggttgtgggcagcatggacagtcccccactcagaagtgcaagagttccaaagagcctctggcccaggcgcctccggctttgcagatgtccttgaaagacccaccctagagccctttggagtgctggcccctcctgtgtcctctgccctggtggaagtggcagccacaagtcctcctcagggagccccaagggggattttgtgggaccgctgcccacagatccaggtgttggaagggcagtgggtaaggttcccaagccagcccccacacccttcccacttggcacccagagggggctgtgggtcgaggcctgactctaggcctctcctgcccacaccctctgggctgagttccttctttcccttgaatgcccagtgctggccttggaggatggtcagctggaggacggcggtgggggaggctgtctttgtaccactgcagcatcccccacttctccacagaagccccatcccaaagctgctgcccgaccccttgctgtaaaatgtgaagggggtggctgagttctcttaggacccagagccagggccctcagcttccatcctgcgggaggccttggccgggcactgccagcgtcttccagagccacaccagggaccacgggaggatcctgacccctgcagggctcaggggtcagcacggacccactgccccatctccctctccccaccaagacagccccagaaggagcagccagctgggatgggaacccaaggctgcccacatgtggcttttgtgggactcagaaagggaagcagaaccgagggctgggatattactcatggtggcagctctcatagtgcaagcctactgtaatatgcacccatctcatccatgtagtaaagtgaacttaaaaattaaatgaacaattaaataaacacctgtgtgtttaagacatgaaaa

SEQ ID NO: 5262 - protein, 40 aa, Homo sapiens [sequence omitted]

SEQ ID NO: 5263 - DNA, 1858 bp, Homo sapiens
cgagcacgagcgggaggtgctgcacaaggcgctggaggagaataacaacttcagccgccaggcggaggagaagctcaactacaaatggagctcagcaaggagatccgcgaggcgcacctggccgcactgcgcgagcggctgcgcgaggagctgcacgcggccgaggtgcgcaggaacaaggagcagcgagaggagatgtcgggctaagggcccgggacgggcggcgcccatcctgcgagagaacacgttcgggttttggttttgtttcgttcacctctgtctagatgcaacttttgttcctcctcccccacccccgcccccagcttcatgcttctcttccgcactcagccgccctgccctgtcctcgtggtgagtcgctgaccacggcttcccctgcaggagccgccgggcgtgagacgcggtccctcggtgcagacaccaggccgggcgcggctgggtcccccgggggccctgtgagagaggtggcggtgaccgtggtaaacccagggcggtggcgtgggatcgcgggtccttacgctgggctgtctggtcagcacgtgcaggtcagggcaggtcctctgagccggcgcccctggccagcaggcgaggctacagtacctgctgtctttccaggaggaaggggctccccatgagggaggggcaacgggggaggcgggtgatggtgtctgggagcctgcgtgtgcagccggagcttgttgaactggcagggggtgggtgggggctgcagctttccttaatgtggttgcacaggggtcctctgagaccacccggcctgaggtggacaccctgggccttcctggaagcctgcagttggggacctgccctgagtctgctggggagtgggcattctctgccagggacccatgagcaggctgcatggtctagaggttgtgggcagcatggacagtcccccactcagaagtgcaagagttccaaagagcctctggcccaggcgcctccgtgggacagccccgccgcccctccccaccagggctttgcagatgtccttgaaagacccaccctagagccctttggagtgctggcccctcctgtgtcctctgccctggtggaagtggcagccacaagtcctcctcagggagccccaagggggattttgtgggaccgctgcccacagatccaggtgttggaagggcagtgggtaaggttcccaagccagcccccacacccttcccacttggcacccagagggggctgtgggtcgaggcctgactctaggcctctcctgcccacaccctctgggctgagttccttctttcccttgaatgcccagtgctggccttggaggatggtcagctggaggacggcggtgggggaggctgtctttgtaccactgcagcatcccccacttctccacagaagccccatcccaaagctgctgcccgaccccttgctgtaaaatgtgaagggggtggctgagttctcttaggacccagagccagggccctcagcttccatcctgcgggaggccttggccgggcactgccagcgtcttccagagccacaccagggaccacgggaggatcctgacccctgcagggctcaggggtcagcacggacccactgccccatctccctctccccaccaagacagccccagaaggagcagccagctgggatgggaacccaaggctgcccacatgtggcttttgtgggactcagaaagggaagcagaaccgagggctgggatattactcatggtggcagctctcatagtgcaagcctactgtaatatgcacccatctcatccatgtagtaaagtgaacttaaaaattaaatgaacaattaaataaacacctgtgtgtttaagacatgaaaa

SEQ ID NO: 5264 - protein, 40 aa, Homo sapiens [sequence omitted]

SEQ ID NO: 5265 - DNA, 467 bp, Homo sapiens
taggcccagtacatgggcttatgtctggggccccagaggagtgagggcagcaaagaacagacaatgggctccacgcagacctctgcaacacactggagcctgagcccactgctgcaggacccatcaacaacaagaaggagggagaaggtgtatgacccccctccctgcaactctcccatgatctccatggacacccaaagatatacactgcagcacccagcaaagacgtggtacttggtgttggagtgtggatatgagtcatggaactctggggctatattgctgccaggccctcaatggattggatggtgtccacctgcataattgaaggtggatcttctttactcagtcgactgattcaaatgctgatctcttccagcaacatcctcacagacacaccagaaataatgttttaccagctatctgtgtatcccttagcccagtaaaactgacacatacaattaact

SEQ ID NO: 5266 - protein, 103 aa, Homo sapiens
MGLCLGPQRSEGSKEQTMGSTQTSATHWSLSPLLQDPSTTRRREKVYDPPPCNSPMISMDTQRYTLQHPAKTWYLVLECGYESWNSGAILLPGPQWIGWCPPA

SEQ ID NO: 5267 - DNA, 467 bp, Homo sapiens
taggcccagtccatgggcttatgtctggggccccagaggagtgagggcagcaaagaacagacaatgggctccacgcagacctctgcaacacactggagcctgagcccaatgctgcaggacccatcaacaacaagaaggagggagaaggtgtatgacccccctccctgcaactctcccatgatctccatggacacccaaagatatacactgcagcacccagcaaagacgtggtacttggtgttggaatatggatatgagtcatggaactctggggctatgttgctgccaggccctcaatggattggatggtgtccacctgcataattgaaggtggatcttctttactcagtcgactgattcaaatgctgatctcttccagcaacatcctcacagacacaccagaaataatgttttaccagctatctgtgtatcccttagcccagtaaaactgacacatacaattaact

SEQ ID NO: 5268 - protein, 103 aa, Homo sapiens
MGLCLGPQRSEGSKEQTMGSTQTSATHWSLSPMLQDPSTTRRREKVYDPPPCNSPMISMDTQRYTLQHPAKTWYLVLEYGYESWNSGAMLLPGPQWIGWCPPA

SEQ ID NO: 5269 - DNA, 612 bp, Homo sapiens
atgggcattgtgaggcactgggggggctgtggggctggacatgtcagctccgactgtggctggcccagggggaaggcagcatccagttatgaatctgatatttatgaggccgtggctgctgcaacatcagaatccactaccgtagagcctggcaagctggatgtgggagccacggagggccaagacctgcagcacatcagcaaccaaaagatgcccacagcttctgttctggacctggaagatattgcgcttgatattgcggaggaggtgttatctgaaatgaactcagaggacattgttgttagcctggtgcccatcaatctcactggagacctcctgcatcgctacgttagtccccctgaggaccgcctgagtttaaaacttctaccaccaagtgaggaagacaatgatgacaccaagattttaccatcacctatccaggcttctcttgaggacaacctgactttagtatgcctaccaccaagtgaagatgattgtgatgatgacaatgatgatgatgatgcccagggatgcagaaaagaggcctcagagcagagtaaggccgagtcagggctacagagcccgatggccacccctcccctgaacggctag

SEQ ID NO: 5270 - protein, 203 aa, Homo sapiens
MGIVRHWGGCGAGHVSSDCGWPRGKAASSYESDIYEAVAAATSESTTVEPGKLDVGATEGQDLQHISNQKMPTASVLDLEDIALDIAEEVLSEMNSEDIVVSLVPINLTGDLLHRYVSPPEDRLSLKLLPPSEEDNDDTKILPSPIQASLEDNLTLVCLPPSEDDCDDDNDDDDAQGCRKEASEQSKAESGLQSPMATPPLNG

SEQ ID NO: 5271 - DNA, 612 bp, Homo sapiens; identical to SEQ ID NO: 5269

SEQ ID NO: 5272 - protein, 203 aa, Homo sapiens; identical to SEQ ID NO: 5270

SEQ ID NO: 5273 - DNA, 147 bp, Homo sapiens
atggtggacctggaggccgtggtggccgatgtcagttacctgatggccatggagaagagcaaggcgaccccggccgaccacgcctgcaagaggaccgtcctgcccgaacccacgatgtgctactctttgatagacaatgccaagtag

SEQ ID NO: 5274 - protein, 48 aa, Homo sapiens
MVDLEAVVADVSYLMAMEKSKATPADHACKRTVLPEPTMCYSLIDNAK

SEQ ID NO: 5275 - DNA, 315 bp, Homo sapiens
atgggcactgacctgtcccccaagcccaaaagcttcaattacccattgctctcgtccccaggtgatcagtttgaaattcagctaacccagcagctatggtccctcatccccaatgaggatgtgagaaggttcatgtctcatgttatctggaccttgaaaatggaatgttcagaaacacatgtgcaagggacctgtgccaagctcatgtcacgaacaggcctcctgatgaagcttctcagcgagcagcaggaagcaaaggcatccaaggcagaatggtctgtagaccaatggaaaactgatgagactccatcttaa
